United States Patent Application Publication US 2018/0305689 A1 - sequence listing, part 73

SEQ ID NO: 1026229 - RNA, 19 nt, Artificial Sequence
  Description of Artificial Sequence: Synthetic oligonucleotide
  Antisense strand to SEQ ID NO: 1026228
ugguuuccaggcaaugaga

SEQ ID NO: 1026230 - RNA, 19 nt, Artificial Sequence
  Description of Artificial Sequence: Synthetic oligonucleotide
  Sense strand starting at position 2755 of SEQ ID NO: 914729
cuacacugccucugggaaa

SEQ ID NO: 1026231 - RNA, 19 nt, Artificial Sequence
  Description of Artificial Sequence: Synthetic oligonucleotide
  Antisense strand to SEQ ID NO: 1026230
uuucccagaggcaguguag

SEQ ID NO: 1026232 - RNA, 19 nt, Artificial Sequence
  Description of Artificial Sequence: Synthetic oligonucleotide
  Sense strand starting at position 2794 of SEQ ID NO: 914729
uucgcaugauuuguagaau

SEQ ID NO: 1026233 - RNA, 19 nt, Artificial Sequence
  Description of Artificial Sequence: Synthetic oligonucleotide
  Antisense strand to SEQ ID NO: 1026232
auucuacaaaucaugcgaa

SEQ ID NO: 1026234 - RNA, 19 nt, Artificial Sequence
  Description of Artificial Sequence: Synthetic oligonucleotide
  Sense strand starting at position 2927 of SEQ ID NO: 914729
cuaugagaccucuguuugu

SEQ ID NO: 1026235 - RNA, 19 nt, Artificial Sequence
  Description of Artificial Sequence: Synthetic oligonucleotide
  Antisense strand to SEQ ID NO: 1026234
acaaacagaggucucauag

SEQ ID NO: 1026236 - RNA, 19 nt, Artificial Sequence
  Description of Artificial Sequence: Synthetic oligonucleotide
  Sense strand starting at position 2930 of SEQ ID NO: 914729
ugagaccucuguuuguaaa

SEQ ID NO: 1026237 - RNA, 19 nt, Artificial Sequence
  Description of Artificial Sequence: Synthetic oligonucleotide
  Antisense strand to SEQ ID NO: 1026236
uuuacaaacagaggucuca

SEQ ID NO: 1026238 - RNA, 19 nt, Artificial Sequence
  Description of Artificial Sequence: Synthetic oligonucleotide
  Sense strand starting at position 2931 of SEQ ID NO: 914729
gagaccucuguuuguaaau

SEQ ID NO: 1026239 - RNA, 19 nt, Artificial Sequence
  Description of Artificial Sequence: Synthetic oligonucleotide
  Antisense strand to SEQ ID NO: 1026238
auuuacaaacagaggucuc

SEQ ID NO: 1026240 - RNA, 19 nt, Artificial Sequence
  Description of Artificial Sequence: Synthetic oligonucleotide
  Sense strand starting at position 2932 of SEQ ID NO: 914729
agaccucuguuuguaaaua

SEQ ID NO: 1026241 - RNA, 19 nt, Artificial Sequence
  Description of Artificial Sequence: Synthetic oligonucleotide
  Antisense strand to SEQ ID NO: 1026240
uauuuacaaacagaggucu

SEQ ID NO: 1026242 - RNA, 19 nt, Artificial Sequence
  Description of Artificial Sequence: Synthetic oligonucleotide
  Sense strand starting at position 2948 of SEQ ID NO: 914729
auauaaugguaucccagau

SEQ ID NO: 1026243 - RNA, 19 nt, Artificial Sequence
  Description of Artificial Sequence: Synthetic oligonucleotide
  Antisense strand to SEQ ID NO: 1026242
aucugggauaccauuauau

SEQ ID NO: 1026244 - RNA, 19 nt, Artificial Sequence
  Description of Artificial Sequence: Synthetic oligonucleotide
  Sense strand starting at position 2952 of SEQ ID NO: 914729
aaugguaucccagauguac

SEQ ID NO: 1026245 - RNA, 19 nt, Artificial Sequence
  Description of Artificial Sequence: Synthetic oligonucleotide
  Antisense strand to SEQ ID NO: 1026244
guacaucugggauaccauu

SEQ ID NO: 1026246 - RNA, 19 nt, Artificial Sequence
  Description of Artificial Sequence: Synthetic oligonucleotide
  Sense strand starting at position 3090 of SEQ ID NO: 914729
cuucucugauaaguggaua

SEQ ID NO: 1026247 - RNA, 19 nt, Artificial Sequence
  Description of Artificial Sequence: Synthetic oligonucleotide
  Antisense strand to SEQ ID NO: 1026246
uauccacuuaucagagaag

SEQ ID NO: 1026248 - RNA, 19 nt, Artificial Sequence
  Description of Artificial Sequence: Synthetic oligonucleotide
  Sense strand starting at position 3242 of SEQ ID NO: 914729
caagcaguuggacaucauu

SEQ ID NO: 1026249 - RNA, 19 nt, Artificial Sequence
  Description of Artificial Sequence: Synthetic oligonucleotide
  Antisense strand to SEQ ID NO: 1026248
aaugauguccaacugcuug

SEQ ID NO: 1026250 - RNA, 19 nt, Artificial Sequence
  Description of Artificial Sequence: Synthetic oligonucleotide
  Sense strand starting at position 3345 of SEQ ID NO: 914729
ucuagauacccugggaguu

SEQ ID NO: 1026251 - RNA, 19 nt, Artificial Sequence
  Description of Artificial Sequence: Synthetic oligonucleotide
  Antisense strand to SEQ ID NO: 1026250
aacucccaggguaucuaga

SEQ ID NO: 1026252 - RNA, 19 nt, Artificial Sequence
  Description of Artificial Sequence: Synthetic oligonucleotide
  Sense strand starting at position 3346 of SEQ ID NO: 914729
cuagauacccugggaguuu

SEQ ID NO: 1026253 - RNA, 19 nt, Artificial Sequence
  Description of Artificial Sequence: Synthetic oligonucleotide
  Antisense strand to SEQ ID NO: 1026252
aaacucccaggguaucuag

SEQ ID NO: 1026254 - RNA, 19 nt, Artificial Sequence
  Description of Artificial Sequence: Synthetic oligonucleotide
  Sense strand starting at position 3489 of SEQ ID NO: 914729
ggauccuuaagucacguau

SEQ ID NO: 1026255 - RNA, 19 nt, Artificial Sequence
  Description of Artificial Sequence: Synthetic oligonucleotide
  Antisense strand to SEQ ID NO: 1026254
auacgugacuuaaggaucc

SEQ ID NO: 1026256 - RNA, 19 nt, Artificial Sequence
  Description of Artificial Sequence: Synthetic oligonucleotide
  Sense strand starting at position 3493 of SEQ ID NO: 914729
ccuuaagucacguaugaag

SEQ ID NO: 1026257 - RNA, 19 nt, Artificial Sequence
  Description of Artificial Sequence: Synthetic oligonucleotide
  Antisense strand to SEQ ID NO: 1026256
cuucauacgugacuuaagg

SEQ ID NO: 1026258 - RNA, 19 nt, Artificial Sequence
  Description of Artificial Sequence: Synthetic oligonucleotide
  Sense strand starting at position 3546 of SEQ ID NO: 914729
ggcuuuaaguaccuuaaau

SEQ ID NO: 1026259 - RNA, 19 nt, Artificial Sequence
  Description of Artificial Sequence: Synthetic oligonucleotide
  Antisense strand to SEQ ID NO: 1026258
auuuaagguacuuaaagcc

SEQ ID NO: 1026260 - RNA, 19 nt, Artificial Sequence
  Description of Artificial Sequence: Synthetic oligonucleotide
  Sense strand starting at position 3581 of SEQ ID NO: 914729
acacuuaacgucugccaaa

SEQ ID NO: 1026261 - RNA, 19 nt, Artificial Sequence
  Description of Artificial Sequence: Synthetic oligonucleotide
  Antisense strand to SEQ ID NO: 1026260
uuuggcagacguuaagugu

SEQ ID NO: 1026262 - RNA, 19 nt, Artificial Sequence
  Description of Artificial Sequence: Synthetic oligonucleotide
  Sense strand starting at position 3682 of SEQ ID NO: 914729
gauugcagagucggagaaa

SEQ ID NO: 1026263 - RNA, 19 nt, Artificial Sequence
  Description of Artificial Sequence: Synthetic oligonucleotide
  Antisense strand to SEQ ID NO: 1026262
uuucuccgacucugcaauc

SEQ ID NO: 1026264 - RNA, 19 nt, Artificial Sequence
  Description of Artificial Sequence: Synthetic oligonucleotide
  Sense strand starting at position 3685 of SEQ ID NO: 914729
ugcagagucggagaaaucu

SEQ ID NO: 1026265 - RNA, 19 nt, Artificial Sequence
  Description of Artificial Sequence: Synthetic oligonucleotide
  Antisense strand to SEQ ID NO: 1026264
agauuucuccgacucugca

SEQ ID NO: 1026266 - RNA, 19 nt, Artificial Sequence
  Description of Artificial Sequence: Synthetic oligonucleotide
  Sense strand starting at position 3693 of SEQ ID NO: 914729
cggagaaaucugcaugguu

SEQ ID NO: 1026267 - RNA, 19 nt, Artificial Sequence
  Description of Artificial Sequence: Synthetic oligonucleotide
  Antisense strand to SEQ ID NO: 1026266
aaccaugcagauuucuccg

SEQ ID NO: 1026268 - RNA, 19 nt, Artificial Sequence
  Description of Artificial Sequence: Synthetic oligonucleotide
  Sense strand starting at position 3695 of SEQ ID NO: 914729
gagaaaucugcaugguuug

SEQ ID NO: 1026269 - RNA, 19 nt, Artificial Sequence
  Description of Artificial Sequence: Synthetic oligonucleotide
  Antisense strand to SEQ ID NO: 1026268
caaaccaugcagauuucuc

SEQ ID NO: 1026270 - RNA, 19 nt, Artificial Sequence
  Description of Artificial Sequence: Synthetic oligonucleotide
  Sense strand starting at position 3724 of SEQ ID NO: 914729
agguuugugaugcaaguca

SEQ ID NO: 1026271 - RNA, 19 nt, Artificial Sequence
  Description of Artificial Sequence: Synthetic oligonucleotide
  Antisense strand to SEQ ID NO: 1026270
ugacuugcaucacaaaccu

SEQ ID NO: 1026272 - RNA, 19 nt, Artificial Sequence
  Description of Artificial Sequence: Synthetic oligonucleotide
  Sense strand starting at position 3779 of SEQ ID NO: 914729
ucuuacguauccuuugaua

SEQ ID NO: 1026273 - RNA, 19 nt, Artificial Sequence
  Description of Artificial Sequence: Synthetic oligonucleotide
  Antisense strand to SEQ ID NO: 1026272
uaucaaaggauacguaaga

SEQ ID NO: 1026274 - RNA, 19 nt, Artificial Sequence
  Description of Artificial Sequence: Synthetic oligonucleotide
  Sense strand starting at position 3820 of SEQ ID NO: 914729
cuggaagacuguuuagcaa

SEQ ID NO: 1026275 - RNA, 19 nt, Artificial Sequence
  Description of Artificial Sequence: Synthetic oligonucleotide
  Antisense strand to SEQ ID NO: 1026274
uugcuaaacagucuuccag

SEQ ID NO: 1026276 - RNA, 19 nt, Artificial Sequence
  Description of Artificial Sequence: Synthetic oligonucleotide
  Sense strand starting at position 3827 of SEQ ID NO: 914729
acuguuuagcaagaguuag

SEQ ID NO: 1026277 - RNA, 19 nt, Artificial Sequence
  Description of Artificial Sequence: Synthetic oligonucleotide
  Antisense strand to SEQ ID NO: 1026276
cuaacucuugcuaaacagu

SEQ ID NO: 1026278 - RNA, 19 nt, Artificial Sequence
  Description of Artificial Sequence: Synthetic oligonucleotide
  Sense strand starting at position 3854 of SEQ ID NO: 914729
aggucauauucugccagaa

SEQ ID NO: 1026279 - RNA, 19 nt, Artificial Sequence
  Description of Artificial Sequence: Synthetic oligonucleotide
  Antisense strand to SEQ ID NO: 1026278
uucuggcagaauaugaccu

SEQ ID NO: 1026280 - RNA, 19 nt, Artificial Sequence
  Description of Artificial Sequence: Synthetic oligonucleotide
  Sense strand starting at position 3910 of SEQ ID NO: 914729
ugguguuauuuacaauuuc

SEQ ID NO: 1026281 - RNA, 19 nt, Artificial Sequence
  Description of Artificial Sequence: Synthetic oligonucleotide
  Antisense strand to SEQ ID NO: 1026280
gaaauuguaaauaacacca

SEQ ID NO: 1026282 - RNA, 19 nt, Artificial Sequence
  Description of Artificial Sequence: Synthetic oligonucleotide
  Sense strand starting at position 82 of SEQ ID NO: 914730
acauccuuccucuggcaga

SEQ ID NO: 1026283 - RNA, 19 nt, Artificial Sequence
  Description of Artificial Sequence: Synthetic oligonucleotide
  Antisense strand to SEQ ID NO: 1026282
ucugccagaggaaggaugu

SEQ ID NO: 1026284 - RNA, 19 nt, Artificial Sequence
  Description of Artificial Sequence: Synthetic oligonucleotide
  Sense strand starting at position 457 of SEQ ID NO: 914730
uggcaauucccguguggag

SEQ ID NO: 1026285 - RNA, 19 nt, Artificial Sequence
  Description of Artificial Sequence: Synthetic oligonucleotide
  Antisense strand to SEQ ID NO: 1026284
cuccacacgggaauugcca

SEQ ID NO: 1026286 - RNA, 19 nt, Artificial Sequence
  Description of Artificial Sequence: Synthetic oligonucleotide
  Sense strand starting at position 687 of SEQ ID NO: 914730
aggagaagcuucuggaaag

SEQ ID NO: 1026287 - RNA, 19 nt, Artificial Sequence
  Description of Artificial Sequence: Synthetic oligonucleotide
  Antisense strand to SEQ ID NO: 1026286
cuuuccagaagcuucuccu

SEQ ID NO: 1026288 - RNA, 19 nt, Artificial Sequence
  Description of Artificial Sequence: Synthetic oligonucleotide
  Sense strand starting at position 688 of SEQ ID NO: 914730
ggagaagcuucuggaaaga

SEQ ID NO: 1026289 - RNA, 19 nt, Artificial Sequence
  Description of Artificial Sequence: Synthetic oligonucleotide
  Antisense strand to SEQ ID NO: 1026288
ucuuuccagaagcuucucc

SEQ ID NO: 1026290 - RNA, 19 nt, Artificial Sequence
  Description of Artificial Sequence: Synthetic oligonucleotide
  Sense strand starting at position 1012 of SEQ ID NO: 914730
gacuuagaacaaugcaugu

SEQ ID NO: 1026291 - RNA, 19 nt, Artificial Sequence
  Description of Artificial Sequence: Synthetic oligonucleotide
  Antisense strand to SEQ ID NO: 1026290
acaugcauuguucuaaguc

SEQ ID NO: 1026292 - RNA, 19 nt, Artificial Sequence
  Description of Artificial Sequence: Synthetic oligonucleotide
  Sense strand starting at position 1035 of SEQ ID NO: 914730
uuggauagcucgcgaaauu

SEQ ID NO: 1026293 - RNA, 19 nt, Artificial Sequence
  Description of Artificial Sequence: Synthetic oligonucleotide
  Antisense strand to SEQ ID NO: 1026292
aauuucgcgagcuauccaa

SEQ ID NO: 1026294 - RNA, 19 nt, Artificial Sequence
  Description of Artificial Sequence: Synthetic oligonucleotide
  Sense strand starting at position 1036 of SEQ ID NO: 914730
uggauagcucgcgaaauuc

SEQ ID NO: 1026295 - RNA, 19 nt, Artificial Sequence
  Description of Artificial Sequence: Synthetic oligonucleotide
  Antisense strand to SEQ ID NO: 1026294
gaauuucgcgagcuaucca

SEQ ID NO: 1026296 - RNA, 19 nt, Artificial Sequence
  Description of Artificial Sequence: Synthetic oligonucleotide
  Sense strand starting at position 1045 of SEQ ID NO: 914730
cgcgaaauuccagguuuac

SEQ ID NO: 1026297 - RNA, 19 nt, Artificial Sequence
  Description of Artificial Sequence: Synthetic oligonucleotide
  Antisense strand to SEQ ID NO: 1026296
guaaaccuggaauuucgcg

SEQ ID NO: 1026298 - RNA, 19 nt, Artificial Sequence
  Description of Artificial Sequence: Synthetic oligonucleotide
  Sense strand starting at position 1071 of SEQ ID NO: 914730
ucggcuauauuugacauga

SEQ ID NO: 1026299 - RNA, 19 nt, Artificial Sequence
  Description of Artificial Sequence: Synthetic oligonucleotide
  Antisense strand to SEQ ID NO: 1026298
ucaugucaaauauagccga

SEQ ID NO: 1026300 - RNA, 19 nt, Artificial Sequence
  Description of Artificial Sequence: Synthetic oligonucleotide
  Sense strand starting at position 1073 of SEQ ID NO: 914730
ggcuauauuugacaugaaa

SEQ ID NO: 1026301 - RNA, 19 nt, Artificial Sequence
  Description of Artificial Sequence: Synthetic oligonucleotide
  Antisense strand to SEQ ID NO: 1026300
uuucaugucaaauauagcc

SEQ ID NO: 1026302 - RNA, 19 nt, Artificial Sequence
  Description of Artificial Sequence: Synthetic oligonucleotide
  Sense strand starting at position 1305 of SEQ ID NO: 914730
uguugauacacucggagaa

SEQ ID NO: 1026303 - RNA, 19 nt, Artificial Sequence
  Description of Artificial Sequence: Synthetic oligonucleotide
  Antisense strand to SEQ ID NO: 1026302
uucuccgaguguaucaaca

SEQ ID NO: 1026304 - RNA, 19 nt, Artificial Sequence
  Description of Artificial Sequence: Synthetic oligonucleotide
  Sense strand starting at position 1306 of SEQ ID NO: 914730
guugauacacucggagaag

SEQ ID NO: 1026305 - RNA, 19 nt, Artificial Sequence
  Description of Artificial Sequence: Synthetic oligonucleotide
  Antisense strand to SEQ ID NO: 1026304
cuucuccgaguguaucaac

SEQ ID NO: 1026306 - RNA, 19 nt, Artificial Sequence
  Description of Artificial Sequence: Synthetic oligonucleotide
  Sense strand starting at position 2104 of SEQ ID NO: 914730
gguccucugggccaucaua

SEQ ID NO: 1026307 - RNA, 19 nt, Artificial Sequence
  Description of Artificial Sequence: Synthetic oligonucleotide
  Antisense strand to SEQ ID NO: 1026306
uaugauggcccagaggacc

SEQ ID NO: 1026308 - RNA, 19 nt, Artificial Sequence
  Description of Artificial Sequence: Synthetic oligonucleotide
  Sense strand starting at position 2206 of SEQ ID NO: 914730
agacccuaaucccgaaaga

SEQ ID NO: 1026309 - RNA, 19 nt, Artificial Sequence
  Description of Artificial Sequence: Synthetic oligonucleotide
  Antisense strand to SEQ ID NO: 1026308
ucuuucgggauuagggucu

SEQ ID NO: 1026310 - RNA, 19 nt, Artificial Sequence
  Description of Artificial Sequence: Synthetic oligonucleotide
  Sense strand starting at position 2812 of SEQ ID NO: 914730
cugguuagguccagaggga

SEQ ID NO: 1026311 - RNA, 19 nt, Artificial Sequence
  Description of Artificial Sequence: Synthetic oligonucleotide
  Antisense strand to SEQ ID NO: 1026310
ucccucuggaccuaaccag

SEQ ID NO: 1026312 - RNA, 19 nt, Artificial Sequence
  Description of Artificial Sequence: Synthetic oligonucleotide
  Sense strand starting at position 2971 of SEQ ID NO: 914730
gggccaagucccgaaacaa

SEQ ID NO: 1026313 - RNA, 19 nt, Artificial Sequence
  Description of Artificial Sequence: Synthetic oligonucleotide
  Antisense strand to SEQ ID NO: 1026312
uuguuucgggacuuggccc

SEQ ID NO: 1026314 - RNA, 19 nt, Artificial Sequence
  Description of Artificial Sequence: Synthetic oligonucleotide
  Sense strand starting at position 3209 of SEQ ID NO: 914730
ggcucaauaucagaugggu

SEQ ID NO: 1026315 - RNA, 19 nt, Artificial Sequence
  Description of Artificial Sequence: Synthetic oligonucleotide
  Antisense strand to SEQ ID NO: 1026314
acccaucugauauugagcc

SEQ ID NO: 1026316 - RNA, 19 nt, Artificial Sequence
  Description of Artificial Sequence: Synthetic oligonucleotide
  Sense strand starting at position 3212 of SEQ ID NO: 914730
ucaauaucagauggguuga

SEQ ID NO: 1026317 - RNA, 19 nt, Artificial Sequence
  Description of Artificial Sequence: Synthetic oligonucleotide
  Antisense strand to SEQ ID NO: 1026316
ucaacccaucugauauuga

SEQ ID NO: 1026318 - RNA, 19 nt, Artificial Sequence
  Description of Artificial Sequence: Synthetic oligonucleotide
  Sense strand starting at position 3217 of SEQ ID NO: 914730
aucagauggguugauguca

SEQ ID NO: 1026319 - RNA, 19 nt, Artificial Sequence
  Description of Artificial Sequence: Synthetic oligonucleotide
  Antisense strand to SEQ ID NO: 1026318
ugacaucaacccaucugau

SEQ ID NO: 1026320 - RNA, 19 nt, Artificial Sequence
  Description of Artificial Sequence: Synthetic oligonucleotide
  Sense strand starting at position 3232 of SEQ ID NO: 914730
gucacaucuguggguugau

SEQ ID NO: 1026321 - RNA, 19 nt, Artificial Sequence
  Description of Artificial Sequence: Synthetic oligonucleotide
  Antisense strand to SEQ ID NO: 1026320
aucaacccacagaugugac

SEQ ID NO: 1026322 - RNA, 19 nt, Artificial Sequence
  Description of Artificial Sequence: Synthetic oligonucleotide
  Sense strand starting at position 3244 of SEQ ID NO: 914730
gguugauguccacagggca

SEQ ID NO: 1026323 - RNA, 19 nt, Artificial Sequence
  Description of Artificial Sequence: Synthetic oligonucleotide
  Antisense strand to SEQ ID NO: 1026322
ugcccuguggacaucaacc

SEQ ID NO: 1026324 - RNA, 19 nt, Artificial Sequence
  Description of Artificial Sequence: Synthetic oligonucleotide
  Sense strand starting at position 3275 of SEQ ID NO: 914730
ugaucaugacagugucauc

SEQ ID NO: 1026325 - RNA, 19 nt, Artificial Sequence
  Description of Artificial Sequence: Synthetic oligonucleotide
  Antisense strand to SEQ ID NO: 1026324
gaugacacugucaugauca

SEQ ID NO: 1026326 - RNA, 19 nt, Artificial Sequence
  Description of Artificial Sequence: Synthetic oligonucleotide
  Sense strand starting at position 3307 of SEQ ID NO: 914730
acacuuuagucuugggaac

SEQ ID NO: 1026327 - RNA, 19 nt, Artificial Sequence
  Description of Artificial Sequence: Synthetic oligonucleotide
  Antisense strand to SEQ ID NO: 1026326
guucccaagacuaaagugu

SEQ ID NO: 1026328 - RNA, 19 nt, Artificial Sequence
  Description of Artificial Sequence: Synthetic oligonucleotide
  Sense strand starting at position 3309 of SEQ ID NO: 914730
acuuuagucuugggaaccu

SEQ ID NO: 1026329 - RNA, 19 nt, Artificial Sequence
  Description of Artificial Sequence: Synthetic oligonucleotide
  Antisense strand to SEQ ID NO: 1026328
agguucccaagacuaaagu

SEQ ID NO: 1026330 - RNA, 19 nt, Artificial Sequence
  Description of Artificial Sequence: Synthetic oligonucleotide
  Sense strand starting at position 3318 of SEQ ID NO: 914730
uugggaaccuuugcacaga

SEQ ID NO: 1026331 - RNA, 19 nt, Artificial Sequence
  Description of Artificial Sequence: Synthetic oligonucleotide
  Antisense strand to SEQ ID NO: 1026330
ucugugcaaagguucccaa

SEQ ID NO: 1026332 - RNA, 19 nt, Artificial Sequence
  Description of Artificial Sequence: Synthetic oligonucleotide
  Sense strand starting at position 3466 of SEQ ID NO: 914730
gagugucugcugugguuua

SEQ ID NO: 1026333 - RNA, 19 nt, Artificial Sequence
  Description of Artificial Sequence: Synthetic oligonucleotide
  Antisense strand to SEQ ID NO: 1026332
uaaaccacagcagacacuc

SEQ ID NO: 1026334 - RNA, 19 nt, Artificial Sequence
  Description of Artificial Sequence: Synthetic oligonucleotide
  Sense strand starting at position 3561 of SEQ ID NO: 914730
ggguguucccaagggcaca

SEQ ID NO: 1026335 - RNA, 19 nt, Artificial Sequence
  Description of Artificial Sequence: Synthetic oligonucleotide
  Antisense strand to SEQ ID NO: 1026334
ugugcccuugggaacaccc

SEQ ID NO: 1026336 - RNA, 19 nt, Artificial Sequence
  Description of Artificial Sequence: Synthetic oligonucleotide
  Sense strand starting at position 3578 of SEQ ID NO: 914730
caguuugacuucuggucau

SEQ ID NO: 1026337 - RNA, 19 nt, Artificial Sequence
  Description of Artificial Sequence: Synthetic oligonucleotide
  Antisense strand to SEQ ID NO: 1026336
augaccagaagucaaacug

SEQ ID NO: 1026338 - RNA, 19 nt, Artificial Sequence
  Description of Artificial Sequence: Synthetic oligonucleotide
  Sense strand starting at position 3692 of SEQ ID NO: 914730
gugguuuccugccgggagu

SEQ ID NO: 1026339 - RNA, 19 nt, Artificial Sequence
  Description of Artificial Sequence: Synthetic oligonucleotide
  Antisense strand to SEQ ID NO: 1026338
acucccggcaggaaaccac

SEQ ID NO: 1026340 - RNA, 19 nt, Artificial Sequence
  Description of Artificial Sequence: Synthetic oligonucleotide
  Sense strand starting at position 3800 of SEQ ID NO: 914730
uccugugacucugcagaga

SEQ ID NO: 1026341 - RNA, 19 nt, Artificial Sequence
  Description of Artificial Sequence: Synthetic oligonucleotide
  Antisense strand to SEQ ID NO: 1026340
ucucugcagagucacagga

SEQ ID NO: 1026342 - RNA, 19 nt, Artificial Sequence
  Description of Artificial Sequence: Synthetic oligonucleotide
  Sense strand starting at position 3803 of SEQ ID NO: 914730
ugugacucugcagagaagu

SEQ ID NO: 1026343 - RNA, 19 nt, Artificial Sequence
  Description of Artificial Sequence: Synthetic oligonucleotide
  Antisense strand to SEQ ID NO: 1026342
acuucucugcagagucaca

SEQ ID NO: 1026344 - RNA, 19 nt, Artificial Sequence
  Description of Artificial Sequence: Synthetic oligonucleotide
  Sense strand starting at position 3809 of SEQ ID NO: 914730
ucugcagagaagugacaau

SEQ ID NO: 1026345 - RNA, 19 nt, Artificial Sequence
  Description of Artificial Sequence: Synthetic oligonucleotide
  Antisense strand to SEQ ID NO: 1026344
auugucacuucucugcaga

SEQ ID NO: 1026346 - RNA, 19 nt, Artificial Sequence
  Description of Artificial Sequence: Synthetic oligonucleotide
  Sense strand starting at position 3821 of SEQ ID NO: 914730
ugacaaugauguccucuca

SEQ ID NO: 1026347 - RNA, 19 nt, Artificial Sequence
  Description of Artificial Sequence: Synthetic oligonucleotide
  Antisense strand to SEQ ID NO: 1026346
ugagaggacaucauuguca

SEQ ID NO: 1026348 - RNA, 19 nt, Artificial Sequence
  Description of Artificial Sequence: Synthetic oligonucleotide
  Sense strand starting at position 3844 of SEQ ID NO: 914730
ccauguccuugugucuaga

SEQ ID NO: 1026349 - RNA, 19 nt, Artificial Sequence
  Description of Artificial Sequence: Synthetic oligonucleotide
  Antisense strand to SEQ ID NO: 1026348
ucuagacacaaggacaugg

SEQ ID NO: 1026350 - RNA, 19 nt, Artificial Sequence
  Description of Artificial Sequence: Synthetic oligonucleotide
  Sense strand starting at position 3847 of SEQ ID NO: 914730
uguccuugugucuagauga

SEQ ID NO: 1026351 - RNA, 19 nt, Artificial Sequence
  Description of Artificial Sequence: Synthetic oligonucleotide
  Antisense strand to SEQ ID NO: 1026350
ucaucuagacacaaggaca

SEQ ID NO: 1026352 - RNA, 19 nt, Artificial Sequence
  Description of Artificial Sequence: Synthetic oligonucleotide
  Sense strand starting at position 3901 of SEQ ID NO: 914730
ccucuuggcuaccugagaa

SEQ ID NO: 1026353 - RNA, 19 nt, Artificial Sequence
  Description of Artificial Sequence: Synthetic oligonucleotide
  Antisense strand to SEQ ID NO: 1026352
uucucagguagccaagagg

SEQ ID NO: 1026354 - RNA, 19 nt, Artificial Sequence
  Description of Artificial Sequence: Synthetic oligonucleotide
  Sense strand starting at position 3905 of SEQ ID NO: 914730
uuggcuaccugagaaauac

SEQ ID NO: 1026355 - RNA, 19 nt, Artificial Sequence
  Description of Artificial Sequence: Synthetic oligonucleotide
  Antisense strand to SEQ ID NO: 1026354
guauuucucagguagccaa

SEQ ID NO: 1026356 - RNA, 19 nt, Artificial Sequence
  Description of Artificial Sequence: Synthetic oligonucleotide
  Sense strand starting at position 3980 of SEQ ID NO: 914730
cuugcuuucugcugagaac

SEQ ID NO: 1026357 - RNA, 19 nt, Artificial Sequence
  Description of Artificial Sequence: Synthetic oligonucleotide
  Antisense strand to SEQ ID NO: 1026356
guucucagcagaaagcaag

SEQ ID NO: 1026358 - RNA, 19 nt, Artificial Sequence
  Description of Artificial Sequence: Synthetic oligonucleotide
  Sense strand starting at position 3981 of SEQ ID NO: 914730
uugcuuucugcugagaaca

SEQ ID NO: 1026359 - RNA, 19 nt, Artificial Sequence
  Description of Artificial Sequence: Synthetic oligonucleotide
  Antisense strand to SEQ ID NO: 1026358
uguucucagcagaaagcaa

SEQ ID NO: 1026360 - RNA, 19 nt, Artificial Sequence
  Description of Artificial Sequence: Synthetic oligonucleotide
  Sense strand starting at position 3983 of SEQ ID NO: 914730
gcuuucugcugagaacaaa

SEQ ID NO: 1026361 - RNA, 19 nt, Artificial Sequence
  Description of Artificial Sequence: Synthetic oligonucleotide
  Antisense strand to SEQ ID NO: 1026360
uuuguucucagcagaaagc

SEQ ID NO: 1026362 - RNA, 19 nt, Artificial Sequence
  Description of Artificial Sequence: Synthetic oligonucleotide
  Sense strand starting at position 71 of SEQ ID NO: 914731
cacuccugcugcuuagaga

SEQ ID NO: 1026363 - RNA, 19 nt, Artificial Sequence
  Description of Artificial Sequence: Synthetic oligonucleotide
  Antisense strand to SEQ ID NO: 1026362
ucucuaagcagcaggagug

SEQ ID NO: 1026364 - RNA, 19 nt, Artificial Sequence
  Description of Artificial Sequence: Synthetic oligonucleotide
  Sense strand starting at position 72 of SEQ ID NO: 914731
acuccugcugcuuagagaa

SEQ ID NO: 1026365 - RNA, 19 nt, Artificial Sequence
  Description of Artificial Sequence: Synthetic oligonucleotide
  Antisense strand to SEQ ID NO: 1026364
uucucuaagcagcaggagu

SEQ ID NO: 1026366 - RNA, 19 nt, Artificial Sequence
  Description of Artificial Sequence: Synthetic oligonucleotide
  Sense strand starting at position 82 of SEQ ID NO: 914731
cuuagagaacuuggugauu

SEQ ID NO: 1026367 - RNA, 19 nt, Artificial Sequence
  Description of Artificial Sequence: Synthetic oligonucleotide
  Antisense strand to SEQ ID NO: 1026366
aaucaccaaguucucuaag

SEQ ID NO: 1026368 - RNA, 19 nt, Artificial Sequence
  Description of Artificial Sequence: Synthetic oligonucleotide
  Sense strand starting at position 84 of SEQ ID NO: 914731
uagagaacuuggugauuag

SEQ ID NO: 1026369 - RNA, 19 nt, Artificial Sequence
  Description of Artificial Sequence: Synthetic oligonucleotide
  Antisense strand to SEQ ID NO: 1026368
cuaaucaccaaguucucua

SEQ ID NO: 1026370 - RNA, 19 nt, Artificial Sequence
  Description of Artificial Sequence: Synthetic oligonucleotide
  Sense strand starting at position 94 of SEQ ID NO: 914731
ggugauuagacagaagugu

SEQ ID NO: 1026371 - RNA, 19 nt, Artificial Sequence
  Description of Artificial Sequence: Synthetic oligonucleotide
  Antisense strand to SEQ ID NO: 1026370
acacuucugucuaaucacc

SEQ ID NO: 1026372 - RNA, 19 nt, Artificial Sequence
  Description of Artificial Sequence: Synthetic oligonucleotide
  Sense strand starting at position 103 of SEQ ID NO: 914731
acagaagugucccaagaug

SEQ ID NO: 1026373 - RNA, 19 nt, Artificial Sequence
  Description of Artificial Sequence: Synthetic oligonucleotide
  Antisense strand to SEQ ID NO: 1026372
caucuugggacacuucugu

SEQ ID NO: 1026374 - RNA, 19 nt, Artificial Sequence
  Description of Artificial Sequence: Synthetic oligonucleotide
  Sense strand starting at position 168 of SEQ ID NO: 914731
cccuauuucucagaggauu

SEQ ID NO: 1026375 - RNA, 19 nt, Artificial Sequence
  Description of Artificial Sequence: Synthetic oligonucleotide
  Antisense strand to SEQ ID NO: 1026374
aauccucugagaaauaggg

SEQ ID NO: 1026376 - RNA, 19 nt, Artificial Sequence
  Description of Artificial Sequence: Synthetic oligonucleotide
  Sense strand starting at position 200 of SEQ ID NO: 914731
ggaagucaagccuagcuau

SEQ ID NO: 1026377 - RNA, 19 nt, Artificial Sequence
  Description of Artificial Sequence: Synthetic oligonucleotide
  Antisense strand to SEQ ID NO: 1026376
auagcuaggcuugacuucc

SEQ ID NO: 1026378 - RNA, 19 nt, Artificial Sequence
  Description of Artificial Sequence: Synthetic oligonucleotide
  Sense strand starting at position 223 of SEQ ID NO: 914731
gaccuuucccgagggcaga

SEQ ID NO: 1026379 - RNA, 19 nt, Artificial Sequence
  Description of Artificial Sequence: Synthetic oligonucleotide
  Antisense strand to SEQ ID NO: 1026378
ucugcccucgggaaagguc

SEQ ID NO: 1026380 - RNA, 19 nt, Artificial Sequence
  Description of Artificial Sequence: Synthetic oligonucleotide
  Sense strand starting at position 400 of SEQ ID NO: 914731
gcaggaauucccuggacac

SEQ ID NO: 1026381 - RNA, 19 nt, Artificial Sequence
  Description of Artificial Sequence: Synthetic oligonucleotide
  Antisense strand to SEQ ID NO: 1026380
guguccagggaauuccugc

SEQ ID NO: 1026382 - RNA, 19 nt, Artificial Sequence
  Description of Artificial Sequence: Synthetic oligonucleotide
  Sense strand starting at position 445 of SEQ ID NO: 914731
cuguauggccacugucaau

SEQ ID NO: 1026383 - RNA, 19 nt, Artificial Sequence
  Description of Artificial Sequence: Synthetic oligonucleotide
  Antisense strand to SEQ ID NO: 1026382
auugacaguggccauacag

SEQ ID NO: 1026384 - RNA, 19 nt, Artificial Sequence
  Description of Artificial Sequence: Synthetic oligonucleotide
  Sense strand starting at position 494 of SEQ ID NO: 914731
cugguccauuucugagcaa

SEQ ID NO: 1026385 - RNA, 19 nt, Artificial Sequence
  Description of Artificial Sequence: Synthetic oligonucleotide
  Antisense strand to SEQ ID NO: 1026384
uugcucagaaauggaccag

SEQ ID NO: 1026386 - RNA, 19 nt, Artificial Sequence
  Description of Artificial Sequence: Synthetic oligonucleotide
  Sense strand starting at position 497 of SEQ ID NO: 914731
guccauuucugagcaacuu

SEQ ID NO: 1026387 - RNA, 19 nt, Artificial Sequence
  Description of Artificial Sequence: Synthetic oligonucleotide
  Antisense strand to SEQ ID NO: 1026386
aaguugcucagaaauggac

SEQ ID NO: 1026388 - RNA, 19 nt, Artificial Sequence
  Description of Artificial Sequence: Synthetic oligonucleotide
  Sense strand starting at position 545 of SEQ ID NO: 914731
ccaggauuacccugccagu

SEQ ID NO: 1026389 - RNA, 19 nt, Artificial Sequence
  Description of Artificial Sequence: Synthetic oligonucleotide
  Antisense strand to SEQ ID NO: 1026388
acuggcaggguaauccugg

SEQ ID NO: 1026390 - RNA, 19 nt, Artificial Sequence
  Description of Artificial Sequence: Synthetic oligonucleotide
  Sense strand starting at position 854 of SEQ ID NO: 914731
cuggguuuccaucggauuu

SEQ ID NO: 1026391 - RNA, 19 nt, Artificial Sequence
  Description of Artificial Sequence: Synthetic oligonucleotide
  Antisense strand to SEQ ID NO: 1026390
aaauccgauggaaacccag

SEQ ID NO: 1026392 - RNA, 19 nt, Artificial Sequence
  Description of Artificial Sequence: Synthetic oligonucleotide
  Sense strand starting at position 906 of SEQ ID NO: 914731
ggagcugugcuuuagagca

SEQ ID NO: 1026393 - RNA, 19 nt, Artificial Sequence
  Description of Artificial Sequence: Synthetic oligonucleotide
  Antisense strand to SEQ ID NO: 1026392
ugcucuaaagcacagcucc

SEQ ID NO: 1026394 - RNA, 19 nt, Artificial Sequence
  Description of Artificial Sequence: Synthetic oligonucleotide
  Sense strand starting at position 975 of SEQ ID NO: 914731
uggugucuucuccauagag

SEQ ID NO: 1026395 - RNA, 19 nt, Artificial Sequence
  Description of Artificial Sequence: Synthetic oligonucleotide
  Antisense strand to SEQ ID NO: 1026394
cucuauggagaagacacca

SEQ ID NO: 1026396 - RNA, 19 nt, Artificial Sequence
  Description of Artificial Sequence: Synthetic oligonucleotide
  Sense strand starting at position 977 of SEQ ID NO: 914731
gugucuucuccauagagag

SEQ ID NO: 1026397 - RNA, 19 nt, Artificial Sequence
  Description of Artificial Sequence: Synthetic oligonucleotide
  Antisense strand to SEQ ID NO: 1026396
cucucuauggagaagacac

SEQ ID NO: 1026398 - RNA, 19 nt, Artificial Sequence
  Description of Artificial Sequence: Synthetic oligonucleotide
  Sense strand starting at position 1027 of SEQ ID NO: 914731
cgcccaggcucaucagaau

SEQ ID NO: 1026399 - RNA, 19 nt, Artificial Sequence
  Description of Artificial Sequence: Synthetic oligonucleotide
  Antisense strand to SEQ ID NO: 1026398
auucugaugagccugggcg

SEQ ID NO: 1026400 - RNA, 19 nt, Artificial Sequence
  Description of Artificial Sequence: Synthetic oligonucleotide
  Sense strand starting at position 1033 of SEQ ID NO: 914731
ggcucaucagaaugucagu

SEQ ID NO: 1026401 - RNA, 19 nt, Artificial Sequence
  Description of Artificial Sequence: Synthetic oligonucleotide
  Antisense strand to SEQ ID NO: 1026400
acugacauucugaugagcc

SEQ ID NO: 1026402 - RNA, 19 nt, Artificial Sequence
  Description of Artificial Sequence: Synthetic oligonucleotide
  Sense strand starting at position 1038 of SEQ ID NO: 914731
aucagaaugucagugcuaa

SEQ ID NO: 1026403 - RNA, 19 nt, Artificial Sequence
  Description of Artificial Sequence: Synthetic oligonucleotide
  Antisense strand to SEQ ID NO: 1026402
uuagcacugacauucugau

SEQ ID NO: 1026404 - RNA, 19 nt, Artificial Sequence
  Description of Artificial Sequence: Synthetic oligonucleotide
  Sense strand starting at position 1039 of SEQ ID NO: 914731
ucagaaugucagugcuaau

SEQ ID NO: 1026405 - RNA, 19 nt, Artificial Sequence
  Description of Artificial Sequence: Synthetic oligonucleotide
  Antisense strand to SEQ ID NO: 1026404
auuagcacugacauucuga

SEQ ID NO: 1026406 - RNA, 19 nt, Artificial Sequence
  Description of Artificial Sequence: Synthetic oligonucleotide
  Sense strand starting at position 1397 of SEQ ID NO: 914731
aaaguacuggccugggaga

SEQ ID NO: 1026407 - RNA, 19 nt, Artificial Sequence
  Description of Artificial Sequence: Synthetic oligonucleotide
  Antisense strand to SEQ ID NO: 1026406
ucucccaggccaguacuuu

SEQ ID NO: 1026408 - RNA, 19 nt, Artificial Sequence
  Description of Artificial Sequence: Synthetic oligonucleotide
  Sense strand starting at position 2223 of SEQ ID NO: 914731
ugcagaguuggacacuaau

SEQ ID NO: 1026409 - RNA, 19 nt, Artificial Sequence
  Description of Artificial Sequence: Synthetic oligonucleotide
  Antisense strand to SEQ ID NO: 1026408
auuaguguccaacucugca

SEQ ID NO: 1026410 - RNA, 19 nt, Artificial Sequence
  Description of Artificial Sequence: Synthetic oligonucleotide
  Sense strand starting at position 2283 of SEQ ID NO: 914731
ccgggaaggugucuggaua

SEQ ID NO: 1026411 - RNA, 19 nt, Artificial Sequence
  Description of Artificial Sequence: Synthetic oligonucleotide
  Antisense strand to SEQ ID NO: 1026410
uauccagacaccuucccgg

SEQ ID NO: 1026412 - RNA, 19 nt, Artificial Sequence
  Description of Artificial Sequence: Synthetic oligonucleotide
  Sense strand starting at position 2700 of SEQ ID NO: 914731
gcuguucugagguagcaga

SEQ ID NO: 1026413 - RNA, 19 nt, Artificial Sequence
  Description of Artificial Sequence: Synthetic oligonucleotide
  Antisense strand to SEQ ID NO: 1026412
ucugcuaccucagaacagc

SEQ ID NO: 1026414 - RNA, 19 nt, Artificial Sequence
  Description of Artificial Sequence: Synthetic oligonucleotide
  Sense strand starting at position 2742 of SEQ ID NO: 914731
gugaacuucuuaguccuca

SEQ ID NO: 1026415 - RNA, 19 nt, Artificial Sequence
  Description of Artificial Sequence: Synthetic oligonucleotide
  Antisense strand to SEQ ID NO: 1026414
ugaggacuaagaaguucac

SEQ ID NO: 1026416 - RNA, 19 nt, Artificial Sequence
  Description of Artificial Sequence: Synthetic oligonucleotide
  Sense strand starting at position 2866 of SEQ ID NO: 914731
uugcucugggccugguaaa

SEQ ID NO: 1026417 - RNA, 19 nt, Artificial Sequence
  Description of Artificial Sequence: Synthetic oligonucleotide
  Antisense strand to SEQ ID NO: 1026416
uuuaccaggcccagagcaa

SEQ ID NO: 1026418 - RNA, 19 nt, Artificial Sequence
  Description of Artificial Sequence: Synthetic oligonucleotide
  Sense strand starting at position 2968 of SEQ ID NO: 914731
gugugaggguccuuguuau

SEQ ID NO: 1026419 - RNA, 19 nt, Artificial Sequence
  Description of Artificial Sequence: Synthetic oligonucleotide
  Antisense strand to SEQ ID NO: 1026418
auaacaaggacccucacac

SEQ ID NO: 1026420 - RNA, 19 nt, Artificial Sequence
  Description of Artificial Sequence: Synthetic oligonucleotide
  Sense strand starting at position 2978 of SEQ ID NO: 914731
ccuuguuaugguugaggag

SEQ ID NO: 1026421 - RNA, 19 nt, Artificial Sequence
  Description of Artificial Sequence: Synthetic oligonucleotide
  Antisense strand to SEQ ID NO: 1026420
cuccucaaccauaacaagg

SEQ ID NO: 1026422 - RNA, 19 nt, Artificial Sequence
  Description of Artificial Sequence: Synthetic oligonucleotide
  Sense strand starting at position 2980 of SEQ ID NO: 914731
uuguuaugguugaggagga

SEQ ID NO: 1026423 - RNA, 19 nt, Artificial Sequence
  Description of Artificial Sequence: Synthetic oligonucleotide
  Antisense strand to SEQ ID NO: 1026422
uccuccucaaccauaacaa

SEQ ID NO: 1026424 - RNA, 19 nt, Artificial Sequence
  Description of Artificial Sequence: Synthetic oligonucleotide
  Sense strand starting at position 3080 of SEQ ID NO: 914731
aaucuuccgcuguguacaa

SEQ ID NO: 1026425 - RNA, 19 nt, Artificial Sequence
  Description of Artificial Sequence: Synthetic oligonucleotide
  Antisense strand to SEQ ID NO: 1026424
uuguacacagcggaagauu

SEQ ID NO: 1026426 - RNA, 19 nt, Artificial Sequence
  Description of Artificial Sequence: Synthetic oligonucleotide
  Sense strand starting at position 3499 of SEQ ID NO: 914731
uccaucagccuuuaguuua

SEQ ID NO: 1026427 - RNA, 19 nt, Artificial Sequence
  Description of Artificial Sequence: Synthetic oligonucleotide
  Antisense strand to SEQ ID NO: 1026426
uaaacuaaaggcugaugga

SEQ ID NO: 1026428 - RNA, 19 nt, Artificial Sequence
  Description of Artificial Sequence: Synthetic oligonucleotide
  Sense strand starting at position 3512 of SEQ ID NO: 914731
aguuuauccugccucagag

SEQ ID NO: 1026429 - RNA, 19 nt, Artificial Sequence
  Description of Artificial Sequence: Synthetic oligonucleotide
  Antisense strand to SEQ ID NO: 1026428
cucugaggcaggauaaacu

SEQ ID NO: 1026430 - RNA, 19 nt, Artificial Sequence
  Description of Artificial Sequence: Synthetic oligonucleotide
  Sense strand starting at position 3623 of SEQ ID NO: 914731
gccuuccuuugggcuagaa

SEQ ID NO: 1026431 - RNA, 19 nt, Artificial Sequence
  Description of Artificial Sequence: Synthetic oligonucleotide
  Antisense strand to SEQ ID NO: 1026430
uucuagcccaaaggaaggc

SEQ ID NO: 1026432 - RNA, 19 nt, Artificial Sequence
  Description of Artificial Sequence: Synthetic oligonucleotide
  Sense strand starting at position 3625 of SEQ ID NO: 914731
cuuccuuugggcuagaaag

SEQ ID NO: 1026433 - RNA, 19 nt, Artificial Sequence
  Description of Artificial Sequence: Synthetic oligonucleotide
  Antisense strand to SEQ ID NO: 1026432
cuuucuagcccaaaggaag

SEQ ID NO: 1026434 - RNA, 19 nt, Artificial Sequence
  Description of Artificial Sequence: Synthetic oligonucleotide
  Sense strand starting at position 3719 of SEQ ID NO: 914731
uggcuucuccucugggagu

SEQ ID NO: 1026435 - RNA, 19 nt, Artificial Sequence
  Description of Artificial Sequence: Synthetic oligonucleotide
  Antisense strand to SEQ ID NO: 1026434
acucccagaggagaagcca

SEQ ID NO: 1026436 - RNA, 19 nt, Artificial Sequence
  Description of Artificial Sequence: Synthetic oligonucleotide
  Sense strand starting at position 3746 of SEQ ID NO: 914731
aggagccucccauagugau

SEQ ID NO: 1026437 - RNA, 19 nt, Artificial Sequence
  Description of Artificial Sequence: Synthetic oligonucleotide
  Antisense strand to SEQ ID NO: 1026436
aucacuaugggaggcuccu

SEQ ID NO: 1026438 - RNA, 19 nt, Artificial Sequence
  Description of Artificial Sequence: Synthetic oligonucleotide
  Sense strand starting at position 3752 of SEQ ID NO: 914731
cucccauagugauauugau

SEQ ID NO: 1026439 - RNA, 19 nt, Artificial Sequence
  Description of Artificial Sequence: Synthetic oligonucleotide
  Antisense strand to SEQ ID NO: 1026438
aucaauaucacuaugggag

SEQ ID NO: 1026440 - RNA, 19 nt, Artificial Sequence
  Description of Artificial Sequence: Synthetic oligonucleotide
  Sense strand starting at position 3758 of SEQ ID NO: 914731
uagugauauugauggaaag

SEQ ID NO: 1026441 - RNA, 19 nt, Artificial Sequence
  Description of Artificial Sequence: Synthetic oligonucleotide
  Antisense strand to SEQ ID NO: 1026440
cuuuccaucaauaucacua

SEQ ID NO: 1026442 - RNA, 19 nt, Artificial Sequence
  Description of Artificial Sequence: Synthetic oligonucleotide
  Sense strand starting at position 65 of SEQ ID NO: 914732
aggugcaaggauuggaauu

SEQ ID NO: 1026443 - RNA, 19 nt, Artificial Sequence
  Description of Artificial Sequence: Synthetic oligonucleotide
  Antisense strand to SEQ ID NO: 1026442
aauuccaauccuugcaccu

SEQ ID NO: 1026444 - RNA, 19 nt, Artificial Sequence
  Description of Artificial Sequence: Synthetic oligonucleotide
  Sense strand starting at position 86 of SEQ ID NO: 914732
gacauccacguguaaacaa

SEQ ID NO: 1026445 - RNA, 19 nt, Artificial Sequence
  Description of Artificial Sequence: Synthetic oligonucleotide
  Antisense strand to SEQ ID NO: 1026444
uuguuuacacguggauguc

SEQ ID NO: 1026446 - RNA, 19 nt, Artificial Sequence
  Description of Artificial Sequence: Synthetic oligonucleotide
  Sense strand starting at position 608 of SEQ ID NO: 914732
gggcguguucuuccagucu

SEQ ID NO: 1026447 - RNA, 19 nt, Artificial Sequence
  Description of Artificial Sequence: Synthetic oligonucleotide
  Antisense strand to SEQ ID NO: 1026446
agacuggaagaacacgccc

SEQ ID NO: 1026448 - RNA, 19 nt, Artificial Sequence
  Description of Artificial Sequence: Synthetic oligonucleotide
  Sense strand starting at position 621 of SEQ ID NO: 914732
cagucuugggcggagucau

SEQ ID NO: 1026449 - RNA, 19 nt, Artificial Sequence
  Description of Artificial Sequence: Synthetic oligonucleotide
  Antisense strand to SEQ ID NO: 1026448
augacuccgcccaagacug

SEQ ID NO: 1026450 - RNA, 19 nt, Artificial Sequence
  Description of Artificial Sequence: Synthetic oligonucleotide
  Sense strand starting at position 953 of SEQ ID NO: 914732
gcgcguucccucuuguaca

SEQ ID NO: 1026451 - RNA, 19 nt, Artificial Sequence
  Description of Artificial Sequence: Synthetic oligonucleotide
  Antisense strand to SEQ ID NO: 1026450
uguacaagagggaacgcgc

SEQ ID NO: 1026452 - RNA, 19 nt, Artificial Sequence
  Description of Artificial Sequence: Synthetic oligonucleotide
  Sense strand starting at position 1348 of SEQ ID NO: 914732
gaaugugcugcuugaugac

SEQ ID NO: 1026453 - RNA, 19 nt, Artificial Sequence
  Description of Artificial Sequence: Synthetic oligonucleotide
  Antisense strand to SEQ ID NO: 1026452
gucaucaagcagcacauuc

SEQ ID NO: 1026454 - RNA, 19 nt, Artificial Sequence
  Description of Artificial Sequence: Synthetic oligonucleotide
  Sense strand starting at position 1378 of SEQ ID NO: 914732
gguccagccgcucaauaau

SEQ ID NO: 1026455 - RNA, 19 nt, Artificial Sequence
  Description of Artificial Sequence: Synthetic oligonucleotide
  Antisense strand to SEQ ID NO: 1026454
auuauugagcggcuggacc

SEQ ID NO: 1026456 - RNA, 19 nt, Artificial Sequence
  Description of Artificial Sequence: Synthetic oligonucleotide
  Sense strand starting at position 1778 of SEQ ID NO: 914732
gagagaccuugacaaagga

SEQ ID NO: 1026457 - RNA, 19 nt, Artificial Sequence
  Description of Artificial Sequence: Synthetic oligonucleotide
  Antisense strand to SEQ ID NO: 1026456
uccuuugucaaggucucuc

SEQ ID NO: 1026458 - RNA, 19 nt, Artificial Sequence
  Description of Artificial Sequence: Synthetic oligonucleotide
  Sense strand starting at position 1880 of SEQ ID NO: 914732
uguguacgucugggaaacu

SEQ ID NO: 1026459 - RNA, 19 nt, Artificial Sequence
  Description of Artificial Sequence: Synthetic oligonucleotide
  Antisense strand to SEQ ID NO: 1026458
aguuucccagacguacaca

SEQ ID NO: 1026460 - RNA, 19 nt, Artificial Sequence
  Description of Artificial Sequence: Synthetic oligonucleotide
  Sense strand starting at position 2414 of SEQ ID NO: 914732
agucgacuccuggaaucuu

SEQ ID NO: 1026461 - RNA, 19 nt, Artificial Sequence
  Description of Artificial Sequence: Synthetic oligonucleotide
  Antisense strand to SEQ ID NO: 1026460
aagauuccaggagucgacu

SEQ ID NO: 1026462 - RNA, 19 nt, Artificial Sequence
  Description of Artificial Sequence: Synthetic oligonucleotide
  Sense strand starting at position 2752 of SEQ ID NO: 914732
auggauguguccuuuaagc

SEQ ID NO: 1026463 - RNA, 19 nt, Artificial Sequence
  Description of Artificial Sequence: Synthetic oligonucleotide
  Antisense strand to SEQ ID NO: 1026462
gcuuaaaggacacauccau

SEQ ID NO: 1026464 - RNA, 19 nt, Artificial Sequence
  Description of Artificial Sequence: Synthetic oligonucleotide
  Sense strand starting at position 2794 of SEQ ID NO: 914732
agggucauccagugcauaa

SEQ ID NO: 1026465 - RNA, 19 nt, Artificial Sequence
  Description of Artificial Sequence: Synthetic oligonucleotide
  Antisense strand to SEQ ID NO: 1026464
uuaugcacuggaugacccu

SEQ ID NO: 1026466 - RNA, 19 nt, Artificial Sequence
  Description of Artificial Sequence: Synthetic oligonucleotide
  Sense strand starting at position 2798 of SEQ ID NO: 914732
ucauccagugcauaaagaa

SEQ ID NO: 1026467 - RNA, 19 nt, Artificial Sequence
  Description of Artificial Sequence: Synthetic oligonucleotide
  Antisense strand to SEQ ID NO: 1026466
uucuuuaugcacuggauga

SEQ ID NO: 1026468 - RNA, 19 nt, Artificial Sequence
  Description of Artificial Sequence: Synthetic oligonucleotide
  Sense strand starting at position 2842 of SEQ ID NO: 914732
ggaacugaggucugugaac

SEQ ID NO: 1026469 - RNA, 19 nt, Artificial Sequence
  Description of Artificial Sequence: Synthetic oligonucleotide
  Antisense strand to SEQ ID NO: 1026468
guucacagaccucaguucc

SEQ ID NO: 1026470 - RNA, 19 nt, Artificial Sequence
  Description of Artificial Sequence: Synthetic oligonucleotide
  Sense strand starting at position 2844 of SEQ ID NO: 914732
aacugaggucugugaacug

SEQ ID NO: 1026471 - RNA, 19 nt, Artificial Sequence
  Description of Artificial Sequence: Synthetic oligonucleotide
  Antisense strand to SEQ ID NO: 1026470
caguucacagaccucaguu

SEQ ID NO: 1026472 - RNA, 19 nt, Artificial Sequence
  Description of Artificial Sequence: Synthetic oligonucleotide
  Sense strand starting at position 2849 of SEQ ID NO: 914732
aggucugugaacuguaaag

SEQ ID NO: 1026473 - RNA, 19 nt, Artificial Sequence
  Description of Artificial Sequence: Synthetic oligonucleotide
  Antisense strand to SEQ ID NO: 1026472
cuuuacaguucacagaccu

SEQ ID NO: 1026474 - RNA, 19 nt, Artificial Sequence
  Description of Artificial Sequence: Synthetic oligonucleotide
  Sense strand starting at position 2871 of SEQ ID NO: 914732
uucuacauguuguuuauga

SEQ ID NO: 1026475 - RNA, 19 nt, Artificial Sequence
  Description of Artificial Sequence: Synthetic oligonucleotide
  Antisense strand to SEQ ID NO: 1026474
ucauaaacaacauguagaa

SEQ ID NO: 1026476 - RNA, 19 nt, Artificial Sequence
  Description of Artificial Sequence: Synthetic oligonucleotide
  Sense strand starting at position 2872 of SEQ ID NO: 914732
ucuacauguuguuuaugau

SEQ ID NO: 1026477 - RNA, 19 nt, Artificial Sequence
  Description of Artificial Sequence: Synthetic oligonucleotide
  Antisense strand to SEQ ID NO: 1026476
aucauaaacaacauguaga

SEQ ID NO: 1026478 - RNA, 19 nt, Artificial Sequence
  Description of Artificial Sequence: Synthetic oligonucleotide
  Sense strand starting at position 2881 of SEQ ID NO: 914732
uguuuaugauugcuaucau

SEQ ID NO: 1026479 - RNA, 19 nt, Artificial Sequence
  Description of Artificial Sequence: Synthetic oligonucleotide
  Antisense strand to SEQ ID NO: 1026478
augauagcaaucauaaaca

SEQ ID NO: 1026480 - RNA, 19 nt, Artificial Sequence
  Description of Artificial Sequence: Synthetic oligonucleotide
  Sense strand starting at position 2908 of SEQ ID NO: 914732
gugggagagaccugugacu

SEQ ID NO: 1026481 - RNA, 19 nt, Artificial Sequence
  Description of Artificial Sequence: Synthetic oligonucleotide
  Antisense strand to SEQ ID NO: 1026480
agucacaggucucucccac

SEQ ID NO: 1026482 - RNA, 19 nt, Artificial Sequence
  Description of Artificial Sequence: Synthetic oligonucleotide
  Sense strand starting at position 3092 of SEQ ID NO: 914732
aucucugaguugcuuuauu

SEQ ID NO: 1026483 - RNA, 19 nt, Artificial Sequence
  Description of Artificial Sequence: Synthetic oligonucleotide
  Antisense strand to SEQ ID NO: 1026482
aauaaagcaacucagagau

SEQ ID NO: 1026484 - RNA, 19 nt, Artificial Sequence
  Description of Artificial Sequence: Synthetic oligonucleotide
  Sense strand starting at position 3197 of SEQ ID NO: 914732
cagcuccauccugggauau

SEQ ID NO: 1026485 - RNA, 19 nt, Artificial Sequence
  Description of Artificial Sequence: Synthetic oligonucleotide
  Antisense strand to SEQ ID NO: 1026484
auaucccaggauggagcug

SEQ ID NO: 1026486 - RNA, 19 nt, Artificial Sequence
  Description of Artificial Sequence: Synthetic oligonucleotide
  Sense strand starting at position 3385 of SEQ ID NO: 914732
uugauccauagcuggaaga

SEQ ID NO: 1026487 - RNA, 19 nt, Artificial Sequence
  Description of Artificial Sequence: Synthetic oligonucleotide
  Antisense strand to SEQ ID NO: 1026486
ucuuccagcuauggaucaa

SEQ ID NO: 1026488 - RNA, 19 nt, Artificial Sequence
  Description of Artificial Sequence: Synthetic oligonucleotide
  Sense strand starting at position 3450 of SEQ ID NO: 914732
agaagaaucguguguaugg

SEQ ID NO: 1026489 - RNA, 19 nt, Artificial Sequence
  Description of Artificial Sequence: Synthetic oligonucleotide
  Antisense strand to SEQ ID NO: 1026488
ccauacacacgauucuucu

SEQ ID NO: 1026490 - RNA, 19 nt, Artificial Sequence
  Description of Artificial Sequence: Synthetic oligonucleotide
  Sense strand starting at position 3451 of SEQ ID NO: 914732
gaagaaucguguguauggu

SEQ ID NO: 1026491 - RNA, 19 nt, Artificial Sequence
  Description of Artificial Sequence: Synthetic oligonucleotide
  Antisense strand to SEQ ID NO: 1026490
accauacacacgauucuuc

SEQ ID NO: 1026492 - RNA, 19 nt, Artificial Sequence
  Description of Artificial Sequence: Synthetic oligonucleotide
  Sense strand starting at position 3452 of SEQ ID NO: 914732
aagaaucguguguauggua

SEQ ID NO: 1026493 - RNA, 19 nt, Artificial Sequence
  Description of Artificial Sequence: Synthetic oligonucleotide
  Antisense strand to SEQ ID NO: 1026492
uaccauacacacgauucuu

SEQ ID NO: 1026494 - RNA, 19 nt, Artificial Sequence
  Description of Artificial Sequence: Synthetic oligonucleotide
  Sense strand starting at position 3453 of SEQ ID NO: 914732
agaaucguguguaugguau

SEQ ID NO: 1026495 - RNA, 19 nt, Artificial Sequence
  Description of Artificial Sequence: Synthetic oligonucleotide
  Antisense strand to SEQ ID NO: 1026494
auaccauacacacgauucu

SEQ ID NO: 1026496 - RNA, 19 nt, Artificial Sequence
  Description of Artificial Sequence: Synthetic oligonucleotide
  Sense strand starting at position 3459 of SEQ ID NO: 914732
guguguaugguauguagga

SEQ ID NO: 1026497 - RNA, 19 nt, Artificial Sequence
  Description of Artificial Sequence: Synthetic oligonucleotide
  Antisense strand to SEQ ID NO: 1026496
uccuacauaccauacacac

SEQ ID NO: 1026498 - RNA, 19 nt, Artificial Sequence
  Description of Artificial Sequence: Synthetic oligonucleotide
  Sense strand starting at position 3461 of SEQ ID NO: 914732
guguaugguauguaggaga

SEQ ID NO: 1026499 - RNA, 19 nt, Artificial Sequence
  Description of Artificial Sequence: Synthetic oligonucleotide
  Antisense strand to SEQ ID NO: 1026498
ucuccuacauaccauacac

SEQ ID NO: 1026500 - RNA, 19 nt, Artificial Sequence
  Description of Artificial Sequence: Synthetic oligonucleotide
  Sense strand starting at position 3619 of SEQ ID NO: 914732
acuuucuucugguuggaca

SEQ ID NO: 1026501 - RNA, 19 nt, Artificial Sequence
  Description of Artificial Sequence: Synthetic oligonucleotide
  Antisense strand to SEQ ID NO: 1026500
uguccaaccagaagaaagu

SEQ ID NO: 1026502 - RNA, 19 nt, Artificial Sequence
  Description of Artificial Sequence: Synthetic oligonucleotide
  Sense strand starting at position 3645 of SEQ ID NO: 914732
aagcaaugcccuugaguac

SEQ ID NO: 1026503 - RNA, 19 nt, Artificial Sequence
  Description of Artificial Sequence: Synthetic oligonucleotide
  Antisense strand to SEQ ID NO: 1026502
guacucaagggcauugcuu

SEQ ID NO: 1026504 - RNA, 19 nt, Artificial Sequence
  Description of Artificial Sequence: Synthetic oligonucleotide
  Sense strand starting at position 3646 of SEQ ID NO: 914732
agcaaugcccuugaguaca

SEQ ID NO: 1026505 - RNA, 19 nt, Artificial Sequence
  Description of Artificial Sequence: Synthetic oligonucleotide
  Antisense strand to SEQ ID NO: 1026504
uguacucaagggcauugcu

SEQ ID NO: 1026506 - RNA, 19 nt, Artificial Sequence
  Description of Artificial Sequence: Synthetic oligonucleotide
  Sense strand starting at position 3663 of SEQ ID NO: 914732
caggcuaagguguaaucuu

SEQ ID NO: 1026507 - RNA, 19 nt, Artificial Sequence
  Description of Artificial Sequence: Synthetic oligonucleotide
  Antisense strand to SEQ ID NO: 1026506
aagauuacaccuuagccug

SEQ ID NO: 1026508 - RNA, 19 nt, Artificial Sequence
  Description of Artificial Sequence: Synthetic oligonucleotide
  Sense strand starting at position 3671 of SEQ ID NO: 914732
gguguaaucuuuccuucug

SEQ ID NO: 1026509 - RNA, 19 nt, Artificial Sequence
  Description of Artificial Sequence: Synthetic oligonucleotide
  Antisense strand to SEQ ID NO: 1026508
cagaaggaaagauuacacc

SEQ ID NO: 1026510 - RNA, 19 nt, Artificial Sequence
  Description of Artificial Sequence: Synthetic oligonucleotide
  Sense strand starting at position 3673 of SEQ ID NO: 914732
uguaaucuuuccuucuguu

SEQ ID NO: 1026511 - RNA, 19 nt, Artificial Sequence
  Description of Artificial Sequence: Synthetic oligonucleotide
  Antisense strand to SEQ ID NO: 1026510
aacagaaggaaagauuaca

SEQ ID NO: 1026512 - RNA, 19 nt, Artificial Sequence
  Description of Artificial Sequence: Synthetic oligonucleotide
  Sense strand starting at position 3854 of SEQ ID NO: 914732
aagugaauugugugaucuu

SEQ ID NO: 1026513 - RNA, 19 nt, Artificial Sequence
  Description of Artificial Sequence: Synthetic oligonucleotide
  Antisense strand to SEQ ID NO: 1026512
aagaucacacaauucacuu

SEQ ID NO: 1026514 - RNA, 19 nt, Artificial Sequence
  Description of Artificial Sequence: Synthetic oligonucleotide
  Sense strand starting at position 3857 of SEQ ID NO: 914732
ugaauugugugaucuuaaa

SEQ ID NO: 1026515 - RNA, 19 nt, Artificial Sequence
  Description of Artificial Sequence: Synthetic oligonucleotide
  Antisense strand to SEQ ID NO: 1026514
uuuaagaucacacaauuca

SEQ ID NO: 1026516 - RNA, 19 nt, Artificial Sequence
  Description of Artificial Sequence: Synthetic oligonucleotide
  Sense strand starting at position 3886 of SEQ ID NO: 914732
cugauccucuaagauaaug

SEQ ID NO: 1026517 - RNA, 19 nt, Artificial Sequence
  Description of Artificial Sequence: Synthetic oligonucleotide
  Antisense strand to SEQ ID NO: 1026516
cauuaucuuagaggaucag

SEQ ID NO: 1026518 - RNA, 19 nt, Artificial Sequence
  Description of Artificial Sequence: Synthetic oligonucleotide
  Sense strand starting at position 3895 of SEQ ID NO: 914732
uaagauaauguguaacugu

SEQ ID NO: 1026519 - RNA, 19 nt, Artificial Sequence
  Description of Artificial Sequence: Synthetic oligonucleotide
  Antisense strand to SEQ ID NO: 1026518
acaguuacacauuaucuua

SEQ ID NO: 1026520 - RNA, 19 nt, Artificial Sequence
  Description of Artificial Sequence: Synthetic oligonucleotide
  Sense strand starting at position 3898 of SEQ ID NO: 914732
gauaauguguaacuguaga

SEQ ID NO: 1026521 - RNA, 19 nt, Artificial Sequence
  Description of Artificial Sequence: Synthetic oligonucleotide
  Antisense strand to SEQ ID NO: 1026520
ucuacaguuacacauuauc

SEQ ID NO: 1026522 - RNA, 19 nt, Artificial Sequence
  Description of Artificial Sequence: Synthetic oligonucleotide
  Sense strand starting at position 181 of SEQ ID NO: 914733
uguaucuaguuaucuagca

SEQ ID NO: 1026523 - RNA, 19 nt, Artificial Sequence
  Description of Artificial Sequence: Synthetic oligonucleotide
  Antisense strand to SEQ ID NO: 1026522
ugcuagauaacuagauaca

SEQ ID NO: 1026524 - RNA, 19 nt, Artificial Sequence
  Description of Artificial Sequence: Synthetic oligonucleotide
  Sense strand starting at position 182 of SEQ ID NO: 914733
guaucuaguuaucuagcau

SEQ ID NO: 1026525 - RNA, 19 nt, Artificial Sequence
  Description of Artificial Sequence: Synthetic oligonucleotide
  Antisense strand to SEQ ID NO: 1026524
augcuagauaacuagauac

SEQ ID NO: 1026526 - RNA, 19 nt, Artificial Sequence
  Description of Artificial Sequence: Synthetic oligonucleotide
  Sense strand starting at position 246 of SEQ ID NO: 914733
gagaucacagaguguacua

SEQ ID NO: 1026527 - RNA, 19 nt, Artificial Sequence
  Description of Artificial Sequence: Synthetic oligonucleotide
  Antisense strand to SEQ ID NO: 1026526
uaguacacucugugaucuc

SEQ ID NO: 1026528 - RNA, 19 nt, Artificial Sequence
  Description of Artificial Sequence: Synthetic oligonucleotide
  Sense strand starting at position 285 of SEQ ID NO: 914733
ccuccagcuccagaggaau

SEQ ID NO: 1026529 - RNA, 19 nt, Artificial Sequence
  Description of Artificial Sequence: Synthetic oligonucleotide
  Antisense strand to SEQ ID NO: 1026528
auuccucuggagcuggagg

SEQ ID NO: 1026530 - RNA, 19 nt, Artificial Sequence
  Description of Artificial Sequence: Synthetic oligonucleotide
  Sense strand starting at position 296 of SEQ ID NO: 914733
agaggaauguacgaaacaa

SEQ ID NO: 1026531 - RNA, 19 nt, Artificial Sequence
  Description of Artificial Sequence: Synthetic oligonucleotide
  Antisense strand to SEQ ID NO: 1026530
uuguuucguacauuccucu

SEQ ID NO: 1026532 - RNA, 19 nt, Artificial Sequence
  Description of Artificial Sequence: Synthetic oligonucleotide
  Sense strand starting at position 355 of SEQ ID NO: 914733
uaggcacugugguuuaaua

SEQ ID NO: 1026533 - RNA, 19 nt, Artificial Sequence
  Description of Artificial Sequence: Synthetic oligonucleotide
  Antisense strand to SEQ ID NO: 1026532
uauuaaaccacagugccua

SEQ ID NO: 1026534 - RNA, 19 nt, Artificial Sequence
  Description of Artificial Sequence: Synthetic oligonucleotide
  Sense strand starting at position 434 of SEQ ID NO: 914733
cagugagugaccugaguga

SEQ ID NO: 1026535 - RNA, 19 nt, Artificial Sequence
  Description of Artificial Sequence: Synthetic oligonucleotide
  Antisense strand to SEQ ID NO: 1026534
ucacucaggucacucacug

SEQ ID NO: 1026536 - RNA, 19 nt, Artificial Sequence
  Description of Artificial Sequence: Synthetic oligonucleotide
  Sense strand starting at position 825 of SEQ ID NO: 914733
aaagacguacagugaguua

SEQ ID NO: 1026537 - RNA, 19 nt, Artificial Sequence
  Description of Artificial Sequence: Synthetic oligonucleotide
  Antisense strand to SEQ ID NO: 1026536
uaacucacuguacgucuuu

SEQ ID NO: 1026538 - RNA, 19 nt, Artificial Sequence
  Description of Artificial Sequence: Synthetic oligonucleotide
  Sense strand starting at position 828 of SEQ ID NO: 914733
gacguacagugaguuaaau

SEQ ID NO: 1026539 - RNA, 19 nt, Artificial Sequence
  Description of Artificial Sequence: Synthetic oligonucleotide
  Antisense strand to SEQ ID NO: 1026538
auuuaacucacuguacguc

SEQ ID NO: 1026540 - RNA, 19 nt, Artificial Sequence
  Description of Artificial Sequence: Synthetic oligonucleotide
  Sense strand starting at position 830 of SEQ ID NO: 914733
cguacagugaguuaaauac

SEQ ID NO: 1026541 - RNA, 19 nt, Artificial Sequence
  Description of Artificial Sequence: Synthetic oligonucleotide
  Antisense strand to SEQ ID NO: 1026540
guauuuaacucacuguacg

SEQ ID NO: 1026542 - RNA, 19 nt, Artificial Sequence
  Description of Artificial Sequence: Synthetic oligonucleotide
  Sense strand starting at position 903 of SEQ ID NO: 914733
gagauaggauuccuaaagc

SEQ ID NO: 1026543 - RNA, 19 nt, Artificial Sequence
  Description of Artificial Sequence: Synthetic oligonucleotide
  Antisense strand to SEQ ID NO: 1026542
gcuuuaggaauccuaucuc

SEQ ID NO: 1026544 - RNA, 19 nt, Artificial Sequence
  Description of Artificial Sequence: Synthetic oligonucleotide
  Sense strand starting at position 927 of SEQ ID NO: 914733
ucagauaugaccuguugga

SEQ ID NO: 1026545 - RNA, 19 nt, Artificial Sequence
  Description of Artificial Sequence: Synthetic oligonucleotide
  Antisense strand to SEQ ID NO: 1026544
uccaacaggucauaucuga

SEQ ID NO: 1026546 - RNA, 19 nt, Artificial Sequence
  Description of Artificial Sequence: Synthetic oligonucleotide
  Sense strand starting at position 1022 of SEQ ID NO: 914733
gggcaaguugcacgcauuu

SEQ ID NO: 1026547 - RNA, 19 nt, Artificial Sequence
  Description of Artificial Sequence: Synthetic oligonucleotide
  Antisense strand to SEQ ID NO: 1026546
aaaugcgugcaacuugccc

SEQ ID NO: 1026548 - RNA, 19 nt, Artificial Sequence
  Description of Artificial Sequence: Synthetic oligonucleotide
  Sense strand starting at position 1024 of SEQ ID NO: 914733
gcaaguugcacgcauuuau

SEQ ID NO: 1026549 - RNA, 19 nt, Artificial Sequence
  Description of Artificial Sequence: Synthetic oligonucleotide
  Antisense strand to SEQ ID NO: 1026548
auaaaugcgugcaacuugc

SEQ ID NO: 1026550 - RNA, 19 nt, Artificial Sequence
  Description of Artificial Sequence: Synthetic oligonucleotide
  Sense strand starting at position 1095 of SEQ ID NO: 914733
caucgcuuuggagaguaca

SEQ ID NO: 1026551 - RNA, 19 nt, Artificial Sequence
  Description of Artificial Sequence: Synthetic oligonucleotide
  Antisense strand to SEQ ID NO: 1026550
uguacucuccaaagcgaug

SEQ ID NO: 1026552 - RNA, 19 nt, Artificial Sequence
  Description of Artificial Sequence: Synthetic oligonucleotide
  Sense strand starting at position 1126 of SEQ ID NO: 914733
cccaguauauccguuaggu

SEQ ID NO: 1026553 - RNA, 19 nt, Artificial Sequence
  Description of Artificial Sequence: Synthetic oligonucleotide
  Antisense strand to SEQ ID NO: 1026552
accuaacggauauacuggg

SEQ ID NO: 1026554 - RNA, 19 nt, Artificial Sequence
  Description of Artificial Sequence: Synthetic oligonucleotide
  Sense strand starting at position 1155 of SEQ ID NO: 914733
auuuguggcacuggugaua

SEQ ID NO: 1026555 - RNA, 19 nt, Artificial Sequence
  Description of Artificial Sequence: Synthetic oligonucleotide
  Antisense strand to SEQ ID NO: 1026554
uaucaccagugccacaaau

SEQ ID NO: 1026556 - RNA, 19 nt, Artificial Sequence
  Description of Artificial Sequence: Synthetic oligonucleotide
  Sense strand starting at position 1225 of SEQ ID NO: 914733
aagccauucgauuacaugu

SEQ ID NO: 1026557 - RNA, 19 nt, Artificial Sequence
  Description of Artificial Sequence: Synthetic oligonucleotide
  Antisense strand to SEQ ID NO: 1026556
acauguaaucgaauggcuu

SEQ ID NO: 1026558 - RNA, 19 nt, Artificial Sequence
  Description of Artificial Sequence: Synthetic oligonucleotide
  Sense strand starting at position 1238 of SEQ ID NO: 914733
acauguuguguuugagcaa

SEQ ID NO: 1026559 - RNA, 19 nt, Artificial Sequence
  Description of Artificial Sequence: Synthetic oligonucleotide
  Antisense strand to SEQ ID NO: 1026558
uugcucaaacacaacaugu

SEQ ID NO: 1026560 - RNA, 19 nt, Artificial Sequence
  Description of Artificial Sequence: Synthetic oligonucleotide
  Sense strand starting at position 1330 of SEQ ID NO: 914733
uggugcucacgugaagaca

SEQ ID NO: 1026561 - RNA, 19 nt, Artificial Sequence
  Description of Artificial Sequence: Synthetic oligonucleotide
  Antisense strand to SEQ ID NO: 1026560
ugucuucacgugagcacca

SEQ ID NO: 1026562 - RNA, 19 nt, Artificial Sequence
  Description of Artificial Sequence: Synthetic oligonucleotide
  Sense strand starting at position 1878 of SEQ ID NO: 914733
ugcagaguuugcuccuuga

SEQ ID NO: 1026563 - RNA, 19 nt, Artificial Sequence
  Description of Artificial Sequence: Synthetic oligonucleotide
  Antisense strand to SEQ ID NO: 1026562
ucaaggagcaaacucugca

SEQ ID NO: 1026564 - RNA, 19 nt, Artificial Sequence
  Description of Artificial Sequence: Synthetic oligonucleotide
  Sense strand starting at position 1957 of SEQ ID NO: 914733
ggccuuaugauugguucga

SEQ ID NO: 1026565 - RNA, 19 nt, Artificial Sequence
  Description of Artificial Sequence: Synthetic oligonucleotide
  Antisense strand to SEQ ID NO: 1026564
ucgaaccaaucauaaggcc

SEQ ID NO: 1026566 - RNA, 19 nt, Artificial Sequence
  Description of Artificial Sequence: Synthetic oligonucleotide
  Sense strand starting at position 1961 of SEQ ID NO: 914733
uuaugauugguucgaccug

SEQ ID NO: 1026567 - RNA, 19 nt, Artificial Sequence
  Description of Artificial Sequence: Synthetic oligonucleotide
  Antisense strand to SEQ ID NO: 1026566
caggucgaaccaaucauaa

SEQ ID NO: 1026568 - RNA, 19 nt, Artificial Sequence
  Description of Artificial Sequence: Synthetic oligonucleotide
  Sense strand starting at position 1993 of SEQ ID NO: 914733
agcugucucauugguagag

SEQ ID NO: 1026569 - RNA, 19 nt, Artificial Sequence
  Description of Artificial Sequence: Synthetic oligonucleotide
  Antisense strand to SEQ ID NO: 1026568
cucuaccaaugagacagcu

SEQ ID NO: 1026570 - RNA, 19 nt, Artificial Sequence
  Description of Artificial Sequence: Synthetic oligonucleotide
  Sense strand starting at position 2009 of SEQ ID NO: 914733
gagugcgcacuccaaauua

SEQ ID NO: 1026571 - RNA, 19 nt, Artificial Sequence
  Description of Artificial Sequence: Synthetic oligonucleotide
  Antisense strand to SEQ ID NO: 1026570
uaauuuggagugcgcacuc

SEQ ID NO: 1026572 - RNA, 19 nt, Artificial Sequence
  Description of Artificial Sequence: Synthetic oligonucleotide
  Sense strand starting at position 2091 of SEQ ID NO: 914733
gcacgcucucagcaugaca

SEQ ID NO: 1026573 - RNA, 19 nt, Artificial Sequence
  Description of Artificial Sequence: Synthetic oligonucleotide
  Antisense strand to SEQ ID NO: 1026572
ugucaugcugagagcgugc

SEQ ID NO: 1026574 - RNA, 19 nt, Artificial Sequence
  Description of Artificial Sequence: Synthetic oligonucleotide
  Sense strand starting at position 2127 of SEQ ID NO: 914733
uucucaaguuggcaaauuu

SEQ ID NO: 1026575 - RNA, 19 nt, Artificial Sequence
  Description of Artificial Sequence: Synthetic oligonucleotide
  Antisense strand to SEQ ID NO: 1026574
aaauuugccaacuugagaa

SEQ ID NO: 1026576 - RNA, 19 nt, Artificial Sequence
  Description of Artificial Sequence: Synthetic oligonucleotide
  Sense strand starting at position 2188 of SEQ ID NO: 914733
ucuuuagaccaaggacuua

SEQ ID NO: 1026577 - RNA, 19 nt, Artificial Sequence
  Description of Artificial Sequence: Synthetic oligonucleotide
  Antisense strand to SEQ ID NO: 1026576
uaaguccuuggucuaaaga

SEQ ID NO: 1026578 - RNA, 19 nt, Artificial Sequence
  Description of Artificial Sequence: Synthetic oligonucleotide
  Sense strand starting at position 2455 of SEQ ID NO: 914733
cccgcucugauuggaagau

SEQ ID NO: 1026579 - RNA, 19 nt, Artificial Sequence
  Description of Artificial Sequence: Synthetic oligonucleotide
  Antisense strand to SEQ ID NO: 1026578
aucuuccaaucagagcggg

SEQ ID NO: 1026580 - RNA, 19 nt, Artificial Sequence
  Description of Artificial Sequence: Synthetic oligonucleotide
  Sense strand starting at position 2491 of SEQ ID NO: 914733
gcccaugcucccggagaaa

SEQ ID NO: 1026581 - RNA, 19 nt, Artificial Sequence
  Description of Artificial Sequence: Synthetic oligonucleotide
  Antisense strand to SEQ ID NO: 1026580
uuucuccgggagcaugggc

SEQ ID NO: 1026582 - RNA, 19 nt, Artificial Sequence
  Description of Artificial Sequence: Synthetic oligonucleotide
  Sense strand starting at position 2547 of SEQ ID NO: 914733
ggugccaguuggcuaaaua

SEQ ID NO: 1026583 - RNA, 19 nt, Artificial Sequence
  Description of Artificial Sequence: Synthetic oligonucleotide
  Antisense strand to SEQ ID NO: 1026582
uauuuagccaacuggcacc

SEQ ID NO: 1026584 - RNA, 19 nt, Artificial Sequence
  Description of Artificial Sequence: Synthetic oligonucleotide
  Sense strand starting at position 2548 of SEQ ID NO: 914733
gugccaguuggcuaaauac

SEQ ID NO: 1026585 - RNA, 19 nt, Artificial Sequence
  Description of Artificial Sequence: Synthetic oligonucleotide
  Antisense strand to SEQ ID NO: 1026584
guauuuagccaacuggcac

SEQ ID NO: 1026586 - RNA, 19 nt, Artificial Sequence
  Description of Artificial Sequence: Synthetic oligonucleotide
  Sense strand starting at position 2596 of SEQ ID NO: 914733
ggaggcuucccucagccau

SEQ ID NO: 1026587 - RNA, 19 nt, Artificial Sequence
  Description of Artificial Sequence: Synthetic oligonucleotide
  Antisense strand to SEQ ID NO: 1026586
auggcugagggaagccucc

SEQ ID NO: 1026588 - RNA, 19 nt, Artificial Sequence
  Description of Artificial Sequence: Synthetic oligonucleotide
  Sense strand starting at position 2767 of SEQ ID NO: 914733
gcuuuaacagcucaaagag

SEQ ID NO: 1026589 - RNA, 19 nt, Artificial Sequence
  Description of Artificial Sequence: Synthetic oligonucleotide
  Antisense strand to SEQ ID NO: 1026588
cucuuugagcuguuaaagc

SEQ ID NO: 1026590 - RNA, 19 nt, Artificial Sequence
  Description of Artificial Sequence: Synthetic oligonucleotide
  Sense strand starting at position 3016 of SEQ ID NO: 914733
ggaggcucuggguguuaua

SEQ ID NO: 1026591 - RNA, 19 nt, Artificial Sequence
  Description of Artificial Sequence: Synthetic oligonucleotide
  Antisense strand to SEQ ID NO: 1026590
uauaacacccagagccucc

SEQ ID NO: 1026592 - RNA, 19 nt, Artificial Sequence
  Description of Artificial Sequence: Synthetic oligonucleotide
  Sense strand starting at position 3023 of SEQ ID NO: 914733
cuggguguuauagaucacu

SEQ ID NO: 1026593 - RNA, 19 nt, Artificial Sequence
  Description of Artificial Sequence: Synthetic oligonucleotide
  Antisense strand to SEQ ID NO: 1026592
agugaucuauaacacccag

SEQ ID NO: 1026594 - RNA, 19 nt, Artificial Sequence
  Description of Artificial Sequence: Synthetic oligonucleotide
  Sense strand starting at position 3091 of SEQ ID NO: 914733
cgaugacuccagcauggaa

SEQ ID NO: 1026595 - RNA, 19 nt, Artificial Sequence
  Description of Artificial Sequence: Synthetic oligonucleotide
  Antisense strand to SEQ ID NO: 1026594
uuccaugcuggagucaucg

SEQ ID NO: 1026596 - RNA, 19 nt, Artificial Sequence
  Description of Artificial Sequence: Synthetic oligonucleotide
  Sense strand starting at position 3143 of SEQ ID NO: 914733
ugcagugugccuccgguua

SEQ ID NO: 1026597 - RNA, 19 nt, Artificial Sequence
  Description of Artificial Sequence: Synthetic oligonucleotide
  Antisense strand to SEQ ID NO: 1026596
uaaccggaggcacacugca

SEQ ID NO: 1026598 - RNA, 19 nt, Artificial Sequence
  Description of Artificial Sequence: Synthetic oligonucleotide
  Sense strand starting at position 3245 of SEQ ID NO: 914733
uucuguguugccucgaugu

SEQ ID NO: 1026599 - RNA, 19 nt, Artificial Sequence
  Description of Artificial Sequence: Synthetic oligonucleotide
  Antisense strand to SEQ ID NO: 1026598
acaucgaggcaacacagaa

SEQ ID NO: 1026600 - RNA, 19 nt, Artificial Sequence
  Description of Artificial Sequence: Synthetic oligonucleotide
  Sense strand starting at position 3489 of SEQ ID NO: 914733
gcuacuuccuccucaggau

SEQ ID NO: 1026601 - RNA, 19 nt, Artificial Sequence
  Description of Artificial Sequence: Synthetic oligonucleotide
  Antisense strand to SEQ ID NO: 1026600
auccugaggaggaaguagc

SEQ ID NO: 1026602 - RNA, 19 nt, Artificial Sequence
  Description of Artificial Sequence: Synthetic oligonucleotide
  Sense strand starting at position 22 of SEQ ID NO: 914734
gggcaaucacaugaccuuu

SEQ ID NO: 1026603 - RNA, 19 nt, Artificial Sequence
  Description of Artificial Sequence: Synthetic oligonucleotide
  Antisense strand to SEQ ID NO: 1026602
aaaggucaugugauugccc

SEQ ID NO: 1026604 - RNA, 19 nt, Artificial Sequence
  Description of Artificial Sequence: Synthetic oligonucleotide
  Sense strand starting at position 39 of SEQ ID NO: 914734
uuugcaccuggugaaauau

SEQ ID NO: 1026605 - RNA, 19 nt, Artificial Sequence
  Description of Artificial Sequence: Synthetic oligonucleotide
  Antisense strand to SEQ ID NO: 1026604
auauuucaccaggugcaaa

SEQ ID NO: 1026606 - RNA, 19 nt, Artificial Sequence
  Description of Artificial Sequence: Synthetic oligonucleotide
  Sense strand starting at position 114 of SEQ ID NO: 914734
aguguuuagcaauaaagua

SEQ ID NO: 1026607 - RNA, 19 nt, Artificial Sequence
  Description of Artificial Sequence: Synthetic oligonucleotide
  Antisense strand to SEQ ID NO: 1026606
uacuuuauugcuaaacacu

SEQ ID NO: 1026608 - RNA, 19 nt, Artificial Sequence
  Description of Artificial Sequence: Synthetic oligonucleotide
  Sense strand starting at position 635 of SEQ ID NO: 914734
ggcauaagaucucucauac

SEQ ID NO: 1026609 - RNA, 19 nt, Artificial Sequence
  Description of Artificial Sequence: Synthetic oligonucleotide
  Antisense strand to SEQ ID NO: 1026608
guaugagagaucuuaugcc

SEQ ID NO: 1026610 - RNA, 19 nt, Artificial Sequence
  Description of Artificial Sequence: Synthetic oligonucleotide
  Sense strand starting at position 658 of SEQ ID NO: 914734
cugaucuaaccuuguugga

SEQ ID NO: 1026611 - RNA, 19 nt, Artificial Sequence
  Description of Artificial Sequence: Synthetic oligonucleotide
  Antisense strand to SEQ ID NO: 1026610
uccaacaagguuagaucag

SEQ ID NO: 1026612 - RNA, 19 nt, Artificial Sequence
  Description of Artificial Sequence: Synthetic oligonucleotide
  Sense strand starting at position 660 of SEQ ID NO: 914734
gaucuaaccuuguuggaga

SEQ ID NO: 1026613 - RNA, 19 nt, Artificial Sequence
  Description of Artificial Sequence: Synthetic oligonucleotide
  Antisense strand to SEQ ID NO: 1026612
ucuccaacaagguuagauc

SEQ ID NO: 1026614 - RNA, 19 nt, Artificial Sequence
  Description of Artificial Sequence: Synthetic oligonucleotide
  Sense strand starting at position 774 of SEQ ID NO: 914734
gaggguaaagacugugauu

SEQ ID NO: 1026615 - RNA, 19 nt, Artificial Sequence
  Description of Artificial Sequence: Synthetic oligonucleotide
  Antisense strand to SEQ ID NO: 1026614
aaucacagucuuuacccuc

SEQ ID NO: 1026616 - RNA, 19 nt, Artificial Sequence
  Description of Artificial Sequence: Synthetic oligonucleotide
  Sense strand starting at position 906 of SEQ ID NO: 914734
aauggaaacuucuucggau

SEQ ID NO: 1026617 - RNA, 19 nt, Artificial Sequence
  Description of Artificial Sequence: Synthetic oligonucleotide
  Antisense strand to SEQ ID NO: 1026616
auccgaagaaguuuccauu

SEQ ID NO: 1026618 - RNA, 19 nt, Artificial Sequence
  Description of Artificial Sequence: Synthetic oligonucleotide
  Sense strand starting at position 907 of SEQ ID NO: 914734
auggaaacuucuucggaua

SEQ ID NO: 1026619 - RNA, 19 nt, Artificial Sequence
  Description of Artificial Sequence: Synthetic oligonucleotide
  Antisense strand to SEQ ID NO: 1026618
uauccgaagaaguuuccau

SEQ ID NO: 1026620 - RNA, 19 nt, Artificial Sequence
  Description of Artificial Sequence: Synthetic oligonucleotide
  Sense strand starting at position 908 of SEQ ID NO: 914734
uggaaacuucuucggauac

SEQ ID NO: 1026621 - RNA, 19 nt, Artificial Sequence
  Description of Artificial Sequence: Synthetic oligonucleotide
  Antisense strand to SEQ ID NO: 1026620
guauccgaagaaguuucca

SEQ ID NO: 1026622 - RNA, 19 nt, Artificial Sequence
  Description of Artificial Sequence: Synthetic oligonucleotide
  Sense strand starting at position 921 of SEQ ID NO: 914734
ggauaccugggcuaaguua

SEQ ID NO: 1026623 - RNA, 19 nt, Artificial Sequence
  Description of Artificial Sequence: Synthetic oligonucleotide
  Antisense strand to SEQ ID NO: 1026622
uaacuuagcccagguaucc

SEQ ID NO: 1026624 - RNA, 19 nt, Artificial Sequence
  Description of Artificial Sequence: Synthetic oligonucleotide
  Sense strand starting at position 948 of SEQ ID NO: 914734
uuaccauacugaguugaca

SEQ ID NO: 1026625 - RNA, 19 nt, Artificial Sequence
  Description of Artificial Sequence: Synthetic oligonucleotide
  Antisense strand to SEQ ID NO: 1026624
ugucaacucaguaugguaa

SEQ ID NO: 1026626 - RNA, 19 nt, Artificial Sequence
  Description of Artificial Sequence: Synthetic oligonucleotide
  Sense strand starting at position 1112 of SEQ ID NO: 914734
aucggcuagcguuuguuua

SEQ ID NO: 1026627 - RNA, 19 nt, Artificial Sequence
  Description of Artificial Sequence: Synthetic oligonucleotide
  Antisense strand to SEQ ID NO: 1026626
uaaacaaacgcuagccgau

SEQ ID NO: 1026628 - RNA, 19 nt, Artificial Sequence
  Description of Artificial Sequence: Synthetic oligonucleotide
  Sense strand starting at position 1302 of SEQ ID NO: 914734
cugagcaugcauuacagau

SEQ ID NO: 1026629 - RNA, 19 nt, Artificial Sequence
  Description of Artificial Sequence: Synthetic oligonucleotide
  Antisense strand to SEQ ID NO: 1026628
aucuguaaugcaugcucag

SEQ ID NO: 1026630 - RNA, 19 nt, Artificial Sequence
  Description of Artificial Sequence: Synthetic oligonucleotide
  Sense strand starting at position 1318 of SEQ ID NO: 914734
gauacucuugugcacgaau

SEQ ID NO: 1026631 - RNA, 19 nt, Artificial Sequence
  Description of Artificial Sequence: Synthetic oligonucleotide
  Antisense strand to SEQ ID NO: 1026630
auucgugcacaagaguauc

SEQ ID NO: 1026632 - RNA, 19 nt, Artificial Sequence
  Description of Artificial Sequence: Synthetic oligonucleotide
  Sense strand starting at position 1334 of SEQ ID NO: 914734
aaugcauaugugugcauuu

SEQ ID NO: 1026633 - RNA, 19 nt, Artificial Sequence
  Description of Artificial Sequence: Synthetic oligonucleotide
  Antisense strand to SEQ ID NO: 1026632
aaaugcacacauaugcauu

SEQ ID NO: 1026634 - RNA, 19 nt, Artificial Sequence
  Description of Artificial Sequence: Synthetic oligonucleotide
  Sense strand starting at position 1335 of SEQ ID NO: 914734
augcauaugugugcauuua

SEQ ID NO: 1026635 - RNA, 19 nt, Artificial Sequence
  Description of Artificial Sequence: Synthetic oligonucleotide
  Antisense strand to SEQ ID NO: 1026634
uaaaugcacacauaugcau

SEQ ID NO: 1026636 - RNA, 19 nt, Artificial Sequence
  Description of Artificial Sequence: Synthetic oligonucleotide
  Sense strand starting at position 1336 of SEQ ID NO: 914734
ugcauaugugugcauuuau

SEQ ID NO: 1026637 - RNA, 19 nt, Artificial Sequence
  Description of Artificial Sequence: Synthetic oligonucleotide
  Antisense strand to SEQ ID NO: 1026636
auaaaugcacacauaugca

SEQ ID NO: 1026638 - RNA, 19 nt, Artificial Sequence
  Description of Artificial Sequence: Synthetic oligonucleotide
  Sense strand starting at position 1345 of SEQ ID NO: 914734
gugcauuuauaaucgaugu

SEQ ID NO: 1026639 - RNA, 19 nt, Artificial Sequence
  Description of Artificial Sequence: Synthetic oligonucleotide
  Antisense strand to SEQ ID NO: 1026638
acaucgauuauaaaugcac

SEQ ID NO: 1026640 - RNA, 19 nt, Artificial Sequence
  Description of Artificial Sequence: Synthetic oligonucleotide
  Sense strand starting at position 1349 of SEQ ID NO: 914734
auuuauaaucgauguguuc

SEQ ID NO: 1026641 - RNA, 19 nt, Artificial Sequence
  Description of Artificial Sequence: Synthetic oligonucleotide
  Antisense strand to SEQ ID NO: 1026640
gaacacaucgauuauaaau

SEQ ID NO: 1026642 - RNA, 19 nt, Artificial Sequence
  Description of Artificial Sequence: Synthetic oligonucleotide
  Sense strand starting at position 1462 of SEQ ID NO: 914734
acacaugguuguuuccaga

SEQ ID NO: 1026643 - RNA, 19 nt, Artificial Sequence
  Description of Artificial Sequence: Synthetic oligonucleotide
  Antisense strand to SEQ ID NO: 1026642
ucuggaaacaaccaugugu

SEQ ID NO: 1026644 - RNA, 19 nt, Artificial Sequence
  Description of Artificial Sequence: Synthetic oligonucleotide
  Sense strand starting at position 1469 of SEQ ID NO: 914734
guuguuuccagagaaucag

SEQ ID NO: 1026645 - RNA, 19 nt, Artificial Sequence
  Description of Artificial Sequence: Synthetic oligonucleotide
  Antisense strand to SEQ ID NO: 1026644
cugauucucuggaaacaac

SEQ ID NO: 1026646 - RNA, 19 nt, Artificial Sequence
  Description of Artificial Sequence: Synthetic oligonucleotide
  Sense strand starting at position 1520 of SEQ ID NO: 914734
agagaaagagccuguccaa

SEQ ID NO: 1026647 - RNA, 19 nt, Artificial Sequence
  Description of Artificial Sequence: Synthetic oligonucleotide
  Antisense strand to SEQ ID NO: 1026646
uuggacaggcucuuucucu

SEQ ID NO: 1026648 - RNA, 19 nt, Artificial Sequence
  Description of Artificial Sequence: Synthetic oligonucleotide
  Sense strand starting at position 2134 of SEQ ID NO: 914734
acacuaaccuaagagagaa

SEQ ID NO: 1026649 - RNA, 19 nt, Artificial Sequence
  Description of Artificial Sequence: Synthetic oligonucleotide
  Antisense strand to SEQ ID NO: 1026648
uucucucuuagguuagugu

SEQ ID NO: 1026650 - RNA, 19 nt, Artificial Sequence
  Description of Artificial Sequence: Synthetic oligonucleotide
  Sense strand starting at position 2202 of SEQ ID NO: 914734
agucaauagcuuuagcaca

SEQ ID NO: 1026651 - RNA, 19 nt, Artificial Sequence
  Description of Artificial Sequence: Synthetic oligonucleotide
  Antisense strand to SEQ ID NO: 1026650
ugugcuaaagcuauugacu

SEQ ID NO: 1026652 - RNA, 19 nt, Artificial Sequence
  Description of Artificial Sequence: Synthetic oligonucleotide
  Sense strand starting at position 2450 of SEQ ID NO: 914734
cauuauguugaaugucaga

SEQ ID NO: 1026653 - RNA, 19 nt, Artificial Sequence
  Description of Artificial Sequence: Synthetic oligonucleotide
  Antisense strand to SEQ ID NO: 1026652
ucugacauucaacauaaug

SEQ ID NO: 1026654 - RNA, 19 nt, Artificial Sequence
  Description of Artificial Sequence: Synthetic oligonucleotide
  Sense strand starting at position 2468 of SEQ ID NO: 914734
agacaauugucuccaacug

SEQ ID NO: 1026655 - RNA, 19 nt, Artificial Sequence
  Description of Artificial Sequence: Synthetic oligonucleotide
  Antisense strand to SEQ ID NO: 1026654
caguuggagacaauugucu

SEQ ID NO: 1026656 - RNA, 19 nt, Artificial Sequence
  Description of Artificial Sequence: Synthetic oligonucleotide
  Sense strand starting at position 2502 of SEQ ID NO: 914734
uguauucugagaugaaacg

SEQ ID NO: 1026657 - RNA, 19 nt, Artificial Sequence
  Description of Artificial Sequence: Synthetic oligonucleotide
  Antisense strand to SEQ ID NO: 1026656
cguuucaucucagaauaca

SEQ ID NO: 1026658 - RNA, 19 nt, Artificial Sequence
  Description of Artificial Sequence: Synthetic oligonucleotide
  Sense strand starting at position 2503 of SEQ ID NO: 914734
guauucugagaugaaacgu

SEQ ID NO: 1026659 - RNA, 19 nt, Artificial Sequence
  Description of Artificial Sequence: Synthetic oligonucleotide
  Antisense strand to SEQ ID NO: 1026658
acguuucaucucagaauac

SEQ ID NO: 1026660 - RNA, 19 nt, Artificial Sequence
  Description of Artificial Sequence: Synthetic oligonucleotide
  Sense strand starting at position 2512 of SEQ ID NO: 914734
gaugaaacgucuuccauga

SEQ ID NO: 1026661 - RNA, 19 nt, Artificial Sequence
  Description of Artificial Sequence: Synthetic oligonucleotide
  Antisense strand to SEQ ID NO: 1026660
ucauggaagacguuucauc

SEQ ID NO: 1026662 - RNA, 19 nt, Artificial Sequence
  Description of Artificial Sequence: Synthetic oligonucleotide
  Sense strand starting at position 2533 of SEQ ID NO: 914734
uggacagauguucaagugu

SEQ ID NO: 1026663 - RNA, 19 nt, Artificial Sequence
  Description of Artificial Sequence: Synthetic oligonucleotide
  Antisense strand to SEQ ID NO: 1026662
acacuugaacaucugucca

SEQ ID NO: 1026664 - RNA, 19 nt, Artificial Sequence
  Description of Artificial Sequence: Synthetic oligonucleotide
  Sense strand starting at position 2809 of SEQ ID NO: 914734
agcuaaaugauguggauga

SEQ ID NO: 1026665 - RNA, 19 nt, Artificial Sequence
  Description of Artificial Sequence: Synthetic oligonucleotide
  Antisense strand to SEQ ID NO: 1026664
ucauccacaucauuuagcu

SEQ ID NO: 1026666 - RNA, 19 nt, Artificial Sequence
  Description of Artificial Sequence: Synthetic oligonucleotide
  Sense strand starting at position 2896 of SEQ ID NO: 914734
ucaguuauuugcuucuagu

SEQ ID NO: 1026667 - RNA, 19 nt, Artificial Sequence
  Description of Artificial Sequence: Synthetic oligonucleotide
  Antisense strand to SEQ ID NO: 1026666
acuagaagcaaauaacuga

SEQ ID NO: 1026668 - RNA, 19 nt, Artificial Sequence
  Description of Artificial Sequence: Synthetic oligonucleotide
  Sense strand starting at position 3167 of SEQ ID NO: 914734
aguaaacgaaucugaauga

SEQ ID NO: 1026669 - RNA, 19 nt, Artificial Sequence
  Description of Artificial Sequence: Synthetic oligonucleotide
  Antisense strand to SEQ ID NO: 1026668
ucauucagauucguuuacu

SEQ ID NO: 1026670 - RNA, 19 nt, Artificial Sequence
  Description of Artificial Sequence: Synthetic oligonucleotide
  Sense strand starting at position 3201 of SEQ ID NO: 914734
ugugaucagaucugaguau

SEQ ID NO: 1026671 - RNA, 19 nt, Artificial Sequence
  Description of Artificial Sequence: Synthetic oligonucleotide
  Antisense strand to SEQ ID NO: 1026670
auacucagaucugaucaca

SEQ ID NO: 1026672 - RNA, 19 nt, Artificial Sequence
  Description of Artificial Sequence: Synthetic oligonucleotide
  Sense strand starting at position 3205 of SEQ ID NO: 914734
aucagaucugaguauuccu

SEQ ID NO: 1026673 - RNA, 19 nt, Artificial Sequence
  Description of Artificial Sequence: Synthetic oligonucleotide
  Antisense strand to SEQ ID NO: 1026672
aggaauacucagaucugau

SEQ ID NO: 1026674 - RNA, 19 nt, Artificial Sequence
  Description of Artificial Sequence: Synthetic oligonucleotide
  Sense strand starting at position 3208 of SEQ ID NO: 914734
agaucugaguauuccuaga

SEQ ID NO: 1026675 - RNA, 19 nt, Artificial Sequence
  Description of Artificial Sequence: Synthetic oligonucleotide
  Antisense strand to SEQ ID NO: 1026674
ucuaggaauacucagaucu

SEQ ID NO: 1026676 - RNA, 19 nt, Artificial Sequence
  Description of Artificial Sequence: Synthetic oligonucleotide
  Sense strand starting at position 3462 of SEQ ID NO: 914734
cuaagaguaaggcaauguu

SEQ ID NO: 1026677 - RNA, 19 nt, Artificial Sequence
  Description of Artificial Sequence: Synthetic oligonucleotide
  Antisense strand to SEQ ID NO: 1026676
aacauugccuuacucuuag

SEQ ID NO: 1026678 - RNA, 19 nt, Artificial Sequence
  Description of Artificial Sequence: Synthetic oligonucleotide
  Sense strand starting at position 3527 of SEQ ID NO: 914734
gaggcuuacagaggaauug

SEQ ID NO: 1026679 - RNA, 19 nt, Artificial Sequence
  Description of Artificial Sequence: Synthetic oligonucleotide
  Antisense strand to SEQ ID NO: 1026678
caauuccucuguaagccuc

SEQ ID NO: 1026680 - RNA, 19 nt, Artificial Sequence
  Description of Artificial Sequence: Synthetic oligonucleotide
  Sense strand starting at position 3932 of SEQ ID NO: 914734
uaguuuaguguggacucaa

SEQ ID NO: 1026681 - RNA, 19 nt, Artificial Sequence
  Description of Artificial Sequence: Synthetic oligonucleotide
  Antisense strand to SEQ ID NO: 1026680
uugaguccacacuaaacua

SEQ ID NO: 1026682 - RNA, 19 nt, Artificial Sequence
  Description of Artificial Sequence: Synthetic oligonucleotide
  Sense strand starting at position 112 of SEQ ID NO: 914735
acaauauaguguuuacuag

SEQ ID NO: 1026683 - RNA, 19 nt, Artificial Sequence
  Description of Artificial Sequence: Synthetic oligonucleotide
  Antisense strand to SEQ ID NO: 1026682
cuaguaaacacuauauugu

SEQ ID NO: 1026684 - RNA, 19 nt, Artificial Sequence
  Description of Artificial Sequence: Synthetic oligonucleotide
  Sense strand starting at position 324 of SEQ ID NO: 914735
gcgccugugcucuuaacuu

SEQ ID NO: 1026685 - RNA, 19 nt, Artificial Sequence
  Description of Artificial Sequence: Synthetic oligonucleotide
  Antisense strand to SEQ ID NO: 1026684
aaguuaagagcacaggcgc

SEQ ID NO: 1026686 - RNA, 19 nt, Artificial Sequence
  Description of Artificial Sequence: Synthetic oligonucleotide
  Sense strand starting at position 350 of SEQ ID NO: 914735
ccacuaccauacuugugau

SEQ ID NO: 1026687 - RNA, 19 nt, Artificial Sequence
  Description of Artificial Sequence: Synthetic oligonucleotide
  Antisense strand to SEQ ID NO: 1026686
aucacaaguaugguagugg

SEQ ID NO: 1026688 - RNA, 19 nt, Artificial Sequence
  Description of Artificial Sequence: Synthetic oligonucleotide
  Sense strand starting at position 363 of SEQ ID NO: 914735
ugugauugccuauaucuga

SEQ ID NO: 1026689 - RNA, 19 nt, Artificial Sequence
  Description of Artificial Sequence: Synthetic oligonucleotide
  Antisense strand to SEQ ID NO: 1026688
ucagauauaggcaaucaca

SEQ ID NO: 1026690 - RNA, 19 nt, Artificial Sequence
  Description of Artificial Sequence: Synthetic oligonucleotide
  Sense strand starting at position 468 of SEQ ID NO: 914735
ucuguuuaggcuuaaauaa

SEQ ID NO: 1026691 - RNA, 19 nt, Artificial Sequence
  Description of Artificial Sequence: Synthetic oligonucleotide
  Antisense strand to SEQ ID NO: 1026690
uuauuuaagccuaaacaga

SEQ ID NO: 1026692 - RNA, 19 nt, Artificial Sequence
  Description of Artificial Sequence: Synthetic oligonucleotide
  Sense strand starting at position 486 of SEQ ID NO: 914735
acucccuuuccuugaugga

SEQ ID NO: 1026693 - RNA, 19 nt, Artificial Sequence
  Description of Artificial Sequence: Synthetic oligonucleotide
  Antisense strand to SEQ ID NO: 1026692
uccaucaaggaaagggagu

SEQ ID NO: 1026694 - RNA, 19 nt, Artificial Sequence
  Description of Artificial Sequence: Synthetic oligonucleotide
  Sense strand starting at position 490 of SEQ ID NO: 914735
ccuuuccuugauggagaua

SEQ ID NO: 1026695 - RNA, 19 nt, Artificial Sequence
  Description of Artificial Sequence: Synthetic oligonucleotide
  Antisense strand to SEQ ID NO: 1026694
uaucuccaucaaggaaagg

SEQ ID NO: 1026696 - RNA, 19 nt, Artificial Sequence
  Description of Artificial Sequence: Synthetic oligonucleotide
  Sense strand starting at position 511 of SEQ ID NO: 914735
aggcacucugaaugaauca

SEQ ID NO: 1026697 - RNA, 19 nt, Artificial Sequence
  Description of Artificial Sequence: Synthetic oligonucleotide
  Antisense strand to SEQ ID NO: 1026696
ugauucauucagagugccu

SEQ ID NO: 1026698 - RNA, 19 nt, Artificial Sequence
  Description of Artificial Sequence: Synthetic oligonucleotide
  Sense strand starting at position 620 of SEQ ID NO: 914735
gaccuaucuguuggugaag

SEQ ID NO: 1026699 - RNA, 19 nt, Artificial Sequence
  Description of Artificial Sequence: Synthetic oligonucleotide
  Antisense strand to SEQ ID NO: 1026698
cuucaccaacagauagguc

SEQ ID NO: 1026700 - RNA, 19 nt, Artificial Sequence
  Description of Artificial Sequence: Synthetic oligonucleotide
  Sense strand starting at position 629 of SEQ ID NO: 914735
guuggugaaggguacaauu

SEQ ID NO: 1026701 - RNA, 19 nt, Artificial Sequence
  Description of Artificial Sequence: Synthetic oligonucleotide
  Antisense strand to SEQ ID NO: 1026700
aauuguacccuucaccaac

SEQ ID NO: 1026702 - RNA, 19 nt, Artificial Sequence
  Description of Artificial Sequence: Synthetic oligonucleotide
  Sense strand starting at position 663 of SEQ ID NO: 914735
aguagccuugguuagacua

SEQ ID NO: 1026703 - RNA, 19 nt, Artificial Sequence
  Description of Artificial Sequence: Synthetic oligonucleotide
  Antisense strand to SEQ ID NO: 1026702
uagucuaaccaaggcuacu

SEQ ID NO: 1026704 - RNA, 19 nt, Artificial Sequence
  Description of Artificial Sequence: Synthetic oligonucleotide
  Sense strand starting at position 670 of SEQ ID NO: 914735
uugguuagacuacagaguu

SEQ ID NO: 1026705 - RNA, 19 nt, Artificial Sequence
  Description of Artificial Sequence: Synthetic oligonucleotide
  Antisense strand to SEQ ID NO: 1026704
aacucuguagucuaaccaa

SEQ ID NO: 1026706 - RNA, 19 nt, Artificial Sequence
  Description of Artificial Sequence: Synthetic oligonucleotide
  Sense strand starting at position 698 of SEQ ID NO: 914735
gugugcacaccaugaagaa

SEQ ID NO: 1026707 - RNA, 19 nt, Artificial Sequence
  Description of Artificial Sequence: Synthetic oligonucleotide
  Antisense strand to SEQ ID NO: 1026706
uucuucauggugugcacac

SEQ ID NO: 1026708 - RNA, 19 nt, Artificial Sequence
  Description of Artificial Sequence: Synthetic oligonucleotide
  Sense strand starting at position 977 of SEQ ID NO: 914735
ugcaaaugauaugcucaaa

SEQ ID NO: 1026709 - RNA, 19 nt, Artificial Sequence
  Description of Artificial Sequence: Synthetic oligonucleotide
  Antisense strand to SEQ ID NO: 1026708
uuugagcauaucauuugca

SEQ ID NO: 1026710 - RNA, 19 nt, Artificial Sequence
  Description of Artificial Sequence: Synthetic oligonucleotide
  Sense strand starting at position 1008 of SEQ ID NO: 914735
uaaagucuacagggaucuu

SEQ ID NO: 1026711 - RNA, 19 nt, Artificial Sequence
  Description of Artificial Sequence: Synthetic oligonucleotide
  Antisense strand to SEQ ID NO: 1026710
aagaucccuguagacuuua

SEQ ID NO: 1026712 - RNA, 19 nt, Artificial Sequence
  Description of Artificial Sequence: Synthetic oligonucleotide
  Sense strand starting at position 1084 of SEQ ID NO: 914735
gcuauauaugaugauccuu

SEQ ID NO: 1026713 - RNA, 19 nt, Artificial Sequence
  Description of Artificial Sequence: Synthetic oligonucleotide
  Antisense strand to SEQ ID NO: 1026712
aaggaucaucauauauagc

SEQ ID NO: 1026714 - RNA, 19 nt, Artificial Sequence
  Description of Artificial Sequence: Synthetic oligonucleotide
  Sense strand starting at position 1181 of SEQ ID NO: 914735
gaaucuuuaccaggaggua

SEQ ID NO: 1026715 - RNA, 19 nt, Artificial Sequence
  Description of Artificial Sequence: Synthetic oligonucleotide
  Antisense strand to SEQ ID NO: 1026714
uaccuccugguaaagauuc

SEQ ID NO: 1026716 - RNA, 19 nt, Artificial Sequence
  Description of Artificial Sequence: Synthetic oligonucleotide
  Sense strand starting at position 1197 of SEQ ID NO: 914735
guagcaugaggucagcaaa

SEQ ID NO: 1026717 - RNA, 19 nt, Artificial Sequence
  Description of Artificial Sequence: Synthetic oligonucleotide
  Antisense strand to SEQ ID NO: 1026716
uuugcugaccucaugcuac

SEQ ID NO: 1026718 - RNA, 19 nt, Artificial Sequence
  Description of Artificial Sequence: Synthetic oligonucleotide
  Sense strand starting at position 1277 of SEQ ID NO: 914735
gugggaugacucuagucag

SEQ ID NO: 1026719 - RNA, 19 nt, Artificial Sequence
  Description of Artificial Sequence: Synthetic oligonucleotide
  Antisense strand to SEQ ID NO: 1026718
cugacuagagucaucccac

SEQ ID NO: 1026720 - RNA, 19 nt, Artificial Sequence
  Description of Artificial Sequence: Synthetic oligonucleotide
  Sense strand starting at position 1451 of SEQ ID NO: 914735
auuggucagcugcaugaaa

SEQ ID NO: 1026721 - RNA, 19 nt, Artificial Sequence
  Description of Artificial Sequence: Synthetic oligonucleotide
  Antisense strand to SEQ ID NO: 1026720
uuucaugcagcugaccaau

SEQ ID NO: 1026722 - RNA, 19 nt, Artificial Sequence
  Description of Artificial Sequence: Synthetic oligonucleotide
  Sense strand starting at position 1552 of SEQ ID NO: 914735
uggaauuacuaagcacagu

SEQ ID NO: 1026723 - RNA, 19 nt, Artificial Sequence
  Description of Artificial Sequence: Synthetic oligonucleotide
  Antisense strand to SEQ ID NO: 1026722
acugugcuuaguaauucca

SEQ ID NO: 1026724 - RNA, 19 nt, Artificial Sequence
  Description of Artificial Sequence: Synthetic oligonucleotide
  Sense strand starting at position 1616 of SEQ ID NO: 914735
ucagguuucccagaugcaa

SEQ ID NO: 1026725 - RNA, 19 nt, Artificial Sequence
  Description of Artificial Sequence: Synthetic oligonucleotide
  Antisense strand to SEQ ID NO: 1026724
uugcaucugggaaaccuga

SEQ ID NO: 1026726 - RNA, 19 nt, Artificial Sequence
  Description of Artificial Sequence: Synthetic oligonucleotide
  Sense strand starting at position 2199 of SEQ ID NO: 914735
gcuucuaagcaagaaauuc

SEQ ID NO: 1026727 - RNA, 19 nt, Artificial Sequence
  Description of Artificial Sequence: Synthetic oligonucleotide
  Antisense strand to SEQ ID NO: 1026726
gaauuucuugcuuagaagc

SEQ ID NO: 1026728 - RNA, 19 nt, Artificial Sequence
  Description of Artificial Sequence: Synthetic oligonucleotide
  Sense strand starting at position 2271 of SEQ ID NO: 914735
cccauuguuugggcuauuu

SEQ ID NO: 1026729 - RNA, 19 nt, Artificial Sequence
  Description of Artificial Sequence: Synthetic oligonucleotide
  Antisense strand to SEQ ID NO: 1026728
aaauagcccaaacaauggg

SEQ ID NO: 1026730 - RNA, 19 nt, Artificial Sequence
  Description of Artificial Sequence: Synthetic oligonucleotide
  Sense strand starting at position 2760 of SEQ ID NO: 914735
uuuguuuguccucugcuau

SEQ ID NO: 1026731 - RNA, 19 nt, Artificial Sequence
  Description of Artificial Sequence: Synthetic oligonucleotide
  Antisense strand to SEQ ID NO: 1026730
auagcagaggacaaacaaa

SEQ ID NO: 1026732 - RNA, 19 nt, Artificial Sequence
  Description of Artificial Sequence: Synthetic oligonucleotide
  Sense strand starting at position 2849 of SEQ ID NO: 914735
guuugaaaguaucuuuaga

SEQ ID NO: 1026733 - RNA, 19 nt, Artificial Sequence
  Description of Artificial Sequence: Synthetic oligonucleotide
  Antisense strand to SEQ ID NO: 1026732
ucuaaagauacuuucaaac

SEQ ID NO: 1026734 - RNA, 19 nt, Artificial Sequence
  Description of Artificial Sequence: Synthetic oligonucleotide
  Sense strand starting at position 2851 of SEQ ID NO: 914735
uugaaaguaucuuuagagu

SEQ ID NO: 1026735 - RNA, 19 nt, Artificial Sequence
  Description of Artificial Sequence: Synthetic oligonucleotide
  Antisense strand to SEQ ID NO: 1026734
acucuaaagauacuuucaa

SEQ ID NO: 1026736 - RNA, 19 nt, Artificial Sequence
  Description of Artificial Sequence: Synthetic oligonucleotide
  Sense strand starting at position 2857 of SEQ ID NO: 914735
guaucuuuagaguagaagu

SEQ ID NO: 1026737 - RNA, 19 nt, Artificial Sequence
  Description of Artificial Sequence: Synthetic oligonucleotide
  Antisense strand to SEQ ID NO: 1026736
acuucuacucuaaagauac

SEQ ID NO: 1026738 - RNA, 19 nt, Artificial Sequence
  Description of Artificial Sequence: Synthetic oligonucleotide
  Sense strand starting at position 2947 of SEQ ID NO: 914735
cccuacuuggguuguagaa

SEQ ID NO: 1026739 - RNA, 19 nt, Artificial Sequence
  Description of Artificial Sequence: Synthetic oligonucleotide
  Antisense strand to SEQ ID NO: 1026738
uucuacaacccaaguaggg

SEQ ID NO: 1026740 - RNA, 19 nt, Artificial Sequence
  Description of Artificial Sequence: Synthetic oligonucleotide
  Sense strand starting at position 3248 of SEQ ID NO: 914735
gauucuacgcuguauauaa

SEQ ID NO: 1026741 - RNA, 19 nt, Artificial Sequence
  Description of Artificial Sequence: Synthetic oligonucleotide
  Antisense strand to SEQ ID NO: 1026740
uuauauacagcguagaauc

SEQ ID NO: 1026742 - RNA, 19 nt, Artificial Sequence
  Description of Artificial Sequence: Synthetic oligonucleotide
  Sense strand starting at position 3250 of SEQ ID NO: 914735
uucuacgcuguauauaaau

SEQ ID NO: 1026743 - RNA, 19 nt, Artificial Sequence
  Description of Artificial Sequence: Synthetic oligonucleotide
  Antisense strand to SEQ ID NO: 1026742
auuuauauacagcguagaa

SEQ ID NO: 1026744 - RNA, 19 nt, Artificial Sequence
  Description of Artificial Sequence: Synthetic oligonucleotide
  Sense strand starting at position 3287 of SEQ ID NO: 914735
gaugcauuaugacuguaug

SEQ ID NO: 1026745 - RNA, 19 nt, Artificial Sequence
  Description of Artificial Sequence: Synthetic oligonucleotide
  Antisense strand to SEQ ID NO: 1026744
cauacagucauaaugcauc

SEQ ID NO: 1026746 - RNA, 19 nt, Artificial Sequence
  Description of Artificial Sequence: Synthetic oligonucleotide
  Sense strand starting at position 3288 of SEQ ID NO: 914735
augcauuaugacuguauga

SEQ ID NO: 1026747 - RNA, 19 nt, Artificial Sequence
  Description of Artificial Sequence: Synthetic oligonucleotide
  Antisense strand to SEQ ID NO: 1026746
ucauacagucauaaugcau

SEQ ID NO: 1026748 - RNA, 19 nt, Artificial Sequence
  Description of Artificial Sequence: Synthetic oligonucleotide
  Sense strand starting at position 3290 of SEQ ID NO: 914735
gcauuaugacuguaugaca

SEQ ID NO: 1026749 - RNA, 19 nt, Artificial Sequence
  Description of Artificial Sequence: Synthetic oligonucleotide
  Antisense strand to SEQ ID NO: 1026748
ugucauacagucauaaugc

SEQ ID NO: 1026750 - RNA, 19 nt, Artificial Sequence
  Description of Artificial Sequence: Synthetic oligonucleotide
  Sense strand starting at position 3540 of SEQ ID NO: 914735
agacacugguguuuagaaa

SEQ ID NO: 1026751 - RNA, 19 nt, Artificial Sequence
  Description of Artificial Sequence: Synthetic oligonucleotide
  Antisense strand to SEQ ID NO: 1026750
uuucuaaacaccagugucu

SEQ ID NO: 1026752 - RNA, 19 nt, Artificial Sequence
  Description of Artificial Sequence: Synthetic oligonucleotide
  Sense strand starting at position 3567 of SEQ ID NO: 914735
gugggagcaucucucaaau

SEQ ID NO: 1026753 - RNA, 19 nt, Artificial Sequence
  Description of Artificial Sequence: Synthetic oligonucleotide
  Antisense strand to SEQ ID NO: 1026752
auuugagagaugcucccac

SEQ ID NO: 1026754 - RNA, 19 nt, Artificial Sequence
  Description of Artificial Sequence: Synthetic oligonucleotide
  Sense strand starting at position 3608 of SEQ ID NO: 914735
gacuguugggaguaugagu

SEQ ID NO: 1026755 - RNA, 19 nt, Artificial Sequence
  Description of Artificial Sequence: Synthetic oligonucleotide
  Antisense strand to SEQ ID NO: 1026754
acucauacucccaacaguc

SEQ ID NO: 1026756 - RNA, 19 nt, Artificial Sequence
  Description of Artificial Sequence: Synthetic oligonucleotide
  Sense strand starting at position 3613 of SEQ ID NO: 914735
uugggaguaugaguaagua

SEQ ID NO: 1026757 - RNA, 19 nt, Artificial Sequence
  Description of Artificial Sequence: Synthetic oligonucleotide
  Antisense strand to SEQ ID NO: 1026756
uacuuacucauacucccaa

SEQ ID NO: 1026758 - RNA, 19 nt, Artificial Sequence
  Description of Artificial Sequence: Synthetic oligonucleotide
  Sense strand starting at position 3617 of SEQ ID NO: 914735
gaguaugaguaaguaccua

SEQ ID NO: 1026759 - RNA, 19 nt, Artificial Sequence
  Description of Artificial Sequence: Synthetic oligonucleotide
  Antisense strand to SEQ ID NO: 1026758
uagguacuuacucauacuc

SEQ ID NO: 1026760 - RNA, 19 nt, Artificial Sequence
  Description of Artificial Sequence: Synthetic oligonucleotide
  Sense strand starting at position 3683 of SEQ ID NO: 914735
uaaauuacugucgaguaau

SEQ ID NO: 1026761 - RNA, 19 nt, Artificial Sequence
  Description of Artificial Sequence: Synthetic oligonucleotide
  Antisense strand to SEQ ID NO: 1026760
auuacucgacaguaauuua

SEQ ID NO: 1026762 - RNA, 19 nt, Artificial Sequence
  Description of Artificial Sequence: Synthetic oligonucleotide
  Sense strand starting at position 348 of SEQ ID NO: 914736
acuuaaugguaguuuaucu

SEQ ID NO: 1026763 - RNA, 19 nt, Artificial Sequence
  Description of Artificial Sequence: Synthetic oligonucleotide
  Antisense strand to SEQ ID NO: 1026762
agauaaacuaccauuaagu

SEQ ID NO: 1026764 - RNA, 19 nt, Artificial Sequence
  Description of Artificial Sequence: Synthetic oligonucleotide
  Sense strand starting at position 585 of SEQ ID NO: 914736
gucccaucuugauuugucu

SEQ ID NO: 1026765 - RNA, 19 nt, Artificial Sequence
  Description of Artificial Sequence: Synthetic oligonucleotide
  Antisense strand to SEQ ID NO: 1026764
agacaaaucaagaugggac

SEQ ID NO: 1026766 - RNA, 19 nt, Artificial Sequence
  Description of Artificial Sequence: Synthetic oligonucleotide
  Sense strand starting at position 597 of SEQ ID NO: 914736
uuugucuugggugaaauga

SEQ ID NO: 1026767 - RNA, 19 nt, Artificial Sequence
  Description of Artificial Sequence: Synthetic oligonucleotide
  Antisense strand to SEQ ID NO: 1026766
ucauuucacccaagacaaa

SEQ ID NO: 1026768 - RNA, 19 nt, Artificial Sequence
  Description of Artificial Sequence: Synthetic oligonucleotide
  Sense strand starting at position 780 of SEQ ID NO: 914736
accagauuagcuuggaaca

SEQ ID NO: 1026769 - RNA, 19 nt, Artificial Sequence
  Description of Artificial Sequence: Synthetic oligonucleotide
  Antisense strand to SEQ ID NO: 1026768
uguuccaagcuaaucuggu

SEQ ID NO: 1026770 - RNA, 19 nt, Artificial Sequence
  Description of Artificial Sequence: Synthetic oligonucleotide
  Sense strand starting at position 781 of SEQ ID NO: 914736
ccagauuagcuuggaacau

SEQ ID NO: 1026771 - RNA, 19 nt, Artificial Sequence
  Description of Artificial Sequence: Synthetic oligonucleotide
  Antisense strand to SEQ ID NO: 1026770
auguuccaagcuaaucugg

SEQ ID NO: 1026772 - RNA, 19 nt, Artificial Sequence
  Description of Artificial Sequence: Synthetic oligonucleotide
  Sense strand starting at position 984 of SEQ ID NO: 914736
guucuacauucuguggaaa

SEQ ID NO: 1026773 - RNA, 19 nt, Artificial Sequence
  Description of Artificial Sequence: Synthetic oligonucleotide
  Antisense strand to SEQ ID NO: 1026772
uuuccacagaauguagaac

SEQ ID NO: 1026774 - RNA, 19 nt, Artificial Sequence
  Description of Artificial Sequence: Synthetic oligonucleotide
  Sense strand starting at position 985 of SEQ ID NO: 914736
uucuacauucuguggaaau

SEQ ID NO: 1026775 - RNA, 19 nt, Artificial Sequence
  Description of Artificial Sequence: Synthetic oligonucleotide
  Antisense strand to SEQ ID NO: 1026774
auuuccacagaauguagaa

SEQ ID NO: 1026776 - RNA, 19 nt, Artificial Sequence
  Description of Artificial Sequence: Synthetic oligonucleotide
  Sense strand starting at position 1177 of SEQ ID NO: 914736
guggaaaccuuccuaguug

SEQ ID NO: 1026777 - RNA, 19 nt, Artificial Sequence
  Description of Artificial Sequence: Synthetic oligonucleotide
  Antisense strand to SEQ ID NO: 1026776
caacuaggaagguuuccac

SEQ ID NO: 1026778 - RNA, 19 nt, Artificial Sequence
  Description of Artificial Sequence: Synthetic oligonucleotide
  Sense strand starting at position 1192 of SEQ ID NO: 914736
guugcucagguuuaaagaa

SEQ ID NO: 1026779 - RNA, 19 nt, Artificial Sequence
  Description of Artificial Sequence: Synthetic oligonucleotide
  Antisense strand to SEQ ID NO: 1026778
uucuuuaaaccugagcaac

SEQ ID NO: 1026780 - RNA, 19 nt, Artificial Sequence
  Description of Artificial Sequence: Synthetic oligonucleotide
  Sense strand starting at position 1222 of SEQ ID NO: 914736
cuguuuggaccuuaauauc

SEQ ID NO: 1026781 - RNA, 19 nt, Artificial Sequence
  Description of Artificial Sequence: Synthetic oligonucleotide
  Antisense strand to SEQ ID NO: 1026780
gauauuaagguccaaacag

SEQ ID NO: 1026782 - RNA, 19 nt, Artificial Sequence
  Description of Artificial Sequence: Synthetic oligonucleotide
  Sense strand starting at position 1384 of SEQ ID NO: 914736
acuuccagucuugaaguaa

SEQ ID NO: 1026783 - RNA, 19 nt, Artificial Sequence
  Description of Artificial Sequence: Synthetic oligonucleotide
  Antisense strand to SEQ ID NO: 1026782
uuacuucaagacuggaagu

SEQ ID NO: 1026784 - RNA, 19 nt, Artificial Sequence
  Description of Artificial Sequence: Synthetic oligonucleotide
  Sense strand starting at position 1472 of SEQ ID NO: 914736
ugagguuuaacugaaguuu

SEQ ID NO: 1026785 - RNA, 19 nt, Artificial Sequence
  Description of Artificial Sequence: Synthetic oligonucleotide
  Antisense strand to SEQ ID NO: 1026784
aaacuucaguuaaaccuca

SEQ ID NO: 1026786 - RNA, 19 nt, Artificial Sequence
  Description of Artificial Sequence: Synthetic oligonucleotide
  Sense strand starting at position 1483 of SEQ ID NO: 914736
ugaaguuucuaaccaagau

SEQ ID NO: 1026787 - RNA, 19 nt, Artificial Sequence
  Description of Artificial Sequence: Synthetic oligonucleotide
  Antisense strand to SEQ ID NO: 1026786
aucuugguuagaaacuuca

SEQ ID NO: 1026788 - RNA, 19 nt, Artificial Sequence
  Description of Artificial Sequence: Synthetic oligonucleotide
  Sense strand starting at position 1487 of SEQ ID NO: 914736
guuucuaaccaagaugcua

SEQ ID NO: 1026789 - RNA, 19 nt, Artificial Sequence
  Description of Artificial Sequence: Synthetic oligonucleotide
  Antisense strand to SEQ ID NO: 1026788
uagcaucuugguuagaaac

SEQ ID NO: 1026790 - RNA, 19 nt, Artificial Sequence
  Description of Artificial Sequence: Synthetic oligonucleotide
  Sense strand starting at position 1516 of SEQ ID NO: 914736
gggcaaucacaugaccuuu

SEQ ID NO: 1026791 - RNA, 19 nt, Artificial Sequence
  Description of Artificial Sequence: Synthetic oligonucleotide
  Antisense strand to SEQ ID NO: 1026790
aaaggucaugugauugccc

SEQ ID NO: 1026792 - RNA, 19 nt, Artificial Sequence
  Description of Artificial Sequence: Synthetic oligonucleotide
  Sense strand starting at position 1533 of SEQ ID NO: 914736
uuugcaccuggugaaauau

SEQ ID NO: 1026793 - RNA, 19 nt, Artificial Sequence
  Description of Artificial Sequence: Synthetic oligonucleotide
  Antisense strand to SEQ ID NO: 1026792
auauuucaccaggugcaaa

SEQ ID NO: 1026794 - RNA, 19 nt, Artificial Sequence
  Description of Artificial Sequence: Synthetic oligonucleotide
  Sense strand starting at position 1608 of SEQ ID NO: 914736
aguguuuagcaauaaagua

SEQ ID NO: 1026795 - RNA, 19 nt, Artificial Sequence
  Description of Artificial Sequence: Synthetic oligonucleotide
  Antisense strand to SEQ ID NO: 1026794
uacuuuauugcuaaacacu

SEQ ID NO: 1026796 - RNA, 19 nt, Artificial Sequence
  Description of Artificial Sequence: Synthetic oligonucleotide
  Sense strand starting at position 2129 of SEQ ID NO: 914736
ggcauaagaucucucauac

SEQ ID NO: 1026797 - RNA, 19 nt, Artificial Sequence
  Description of Artificial Sequence: Synthetic oligonucleotide
  Antisense strand to SEQ ID NO: 1026796
guaugagagaucuuaugcc

SEQ ID NO: 1026798 - RNA, 19 nt, Artificial Sequence
  Description of Artificial Sequence: Synthetic oligonucleotide
  Sense strand starting at position 2152 of SEQ ID NO: 914736
cugaucuaaccuuguugga

SEQ ID NO: 1026799 - RNA, 19 nt, Artificial Sequence
  Description of Artificial Sequence: Synthetic oligonucleotide
  Antisense strand to SEQ ID NO: 1026798
uccaacaagguuagaucag

SEQ ID NO: 1026800 - RNA, 19 nt, Artificial Sequence
  Description of Artificial Sequence: Synthetic oligonucleotide
  Sense strand starting at position 2154 of SEQ ID NO: 914736
gaucuaaccuuguuggaga

SEQ ID NO: 1026801 - RNA, 19 nt, Artificial Sequence
  Description of Artificial Sequence: Synthetic oligonucleotide
  Antisense strand to SEQ ID NO: 1026800
ucuccaacaagguuagauc

SEQ ID NO: 1026802 - RNA, 19 nt, Artificial Sequence
  Description of Artificial Sequence: Synthetic oligonucleotide
  Sense strand starting at position 2268 of SEQ ID NO: 914736
gaggguaaagacugugauu

SEQ ID NO: 1026803 - RNA, 19 nt, Artificial Sequence
  Description of Artificial Sequence: Synthetic oligonucleotide
  Antisense strand to SEQ ID NO: 1026802
aaucacagucuuuacccuc

SEQ ID NO: 1026804 - RNA, 19 nt, Artificial Sequence
  Description of Artificial Sequence: Synthetic oligonucleotide
  Sense strand starting at position 2400 of SEQ ID NO: 914736
aauggaaacuucuucggau

SEQ ID NO: 1026805 - RNA, 19 nt, Artificial Sequence
  Description of Artificial Sequence: Synthetic oligonucleotide
  Antisense strand to SEQ ID NO: 1026804
auccgaagaaguuuccauu

SEQ ID NO: 1026806 - RNA, 19 nt, Artificial Sequence
  Description of Artificial Sequence: Synthetic oligonucleotide
  Sense strand starting at position 2401 of SEQ ID NO: 914736
auggaaacuucuucggaua

SEQ ID NO: 1026807 - RNA, 19 nt, Artificial Sequence
  Description of Artificial Sequence: Synthetic oligonucleotide
  Antisense strand to SEQ ID NO: 1026806
uauccgaagaaguuuccau

SEQ ID NO: 1026808 - RNA, 19 nt, Artificial Sequence
  Description of Artificial Sequence: Synthetic oligonucleotide
  Sense strand starting at position 2402 of SEQ ID NO: 914736
uggaaacuucuucggauac

SEQ ID NO: 1026809 - RNA, 19 nt, Artificial Sequence
  Description of Artificial Sequence: Synthetic oligonucleotide
  Antisense strand to SEQ ID NO: 1026808
guauccgaagaaguuucca

SEQ ID NO: 1026810 - RNA, 19 nt, Artificial Sequence
  Description of Artificial Sequence: Synthetic oligonucleotide
  Sense strand starting at position 2415 of SEQ ID NO: 914736
ggauaccugggcuaaguua

SEQ ID NO: 1026811 - RNA, 19 nt, Artificial Sequence
  Description of Artificial Sequence: Synthetic oligonucleotide
  Antisense strand to SEQ ID NO: 1026810
uaacuuagcccagguaucc

SEQ ID NO: 1026812 - RNA, 19 nt, Artificial Sequence
  Description of Artificial Sequence: Synthetic oligonucleotide
  Sense strand starting at position 2442 of SEQ ID NO: 914736
uuaccauacugaguugaca

SEQ ID NO: 1026813 - RNA, 19 nt, Artificial Sequence
  Description of Artificial Sequence: Synthetic oligonucleotide
  Antisense strand to SEQ ID NO: 1026812
ugucaacucaguaugguaa

SEQ ID NO: 1026814 - RNA, 19 nt, Artificial Sequence
  Description of Artificial Sequence: Synthetic oligonucleotide
  Sense strand starting at position 2606 of SEQ ID NO: 914736
aucggcuagcguuuguuua

SEQ ID NO: 1026815 - RNA, 19 nt, Artificial Sequence
  Description of Artificial Sequence: Synthetic oligonucleotide
  Antisense strand to SEQ ID NO: 1026814
uaaacaaacgcuagccgau

SEQ ID NO: 1026816 - RNA, 19 nt, Artificial Sequence
  Description of Artificial Sequence: Synthetic oligonucleotide
  Sense strand starting at position 2796 of SEQ ID NO: 914736
cugagcaugcauuacagau

SEQ ID NO: 1026817 - RNA, 19 nt, Artificial Sequence
  Description of Artificial Sequence: Synthetic oligonucleotide
  Antisense strand to SEQ ID NO: 1026816
aucuguaaugcaugcucag

SEQ ID NO: 1026818 - RNA, 19 nt, Artificial Sequence
  Description of Artificial Sequence: Synthetic oligonucleotide
  Sense strand starting at position 2812 of SEQ ID NO: 914736
gauacucuugugcacgaau

SEQ ID NO: 1026819 - RNA, 19 nt, Artificial Sequence
  Description of Artificial Sequence: Synthetic oligonucleotide
  Antisense strand to SEQ ID NO: 1026818
auucgugcacaagaguauc

SEQ ID NO: 1026820 - RNA, 19 nt, Artificial Sequence
  Description of Artificial Sequence: Synthetic oligonucleotide
  Sense strand starting at position 2828 of SEQ ID NO: 914736
aaugcauaugugugcauuu

SEQ ID NO: 1026821 - RNA, 19 nt, Artificial Sequence
  Description of Artificial Sequence: Synthetic oligonucleotide
  Antisense strand to SEQ ID NO: 1026820
aaaugcacacauaugcauu

SEQ ID NO: 1026822 - RNA, 19 nt, Artificial Sequence
  Description of Artificial Sequence: Synthetic oligonucleotide
  Sense strand starting at position 2829 of SEQ ID NO: 914736
augcauaugugugcauuua

SEQ ID NO: 1026823 - RNA, 19 nt, Artificial Sequence
  Description of Artificial Sequence: Synthetic oligonucleotide
  Antisense strand to SEQ ID NO: 1026822
uaaaugcacacauaugcau

SEQ ID NO: 1026824 - RNA, 19 nt, Artificial Sequence
  Description of Artificial Sequence: Synthetic oligonucleotide
  Sense strand starting at position 2830 of SEQ ID NO: 914736
ugcauaugugugcauuuau

SEQ ID NO: 1026825 - RNA, 19 nt, Artificial Sequence
  Description of Artificial Sequence: Synthetic oligonucleotide
  Antisense strand to SEQ ID NO: 1026824
auaaaugcacacauaugca

SEQ ID NO: 1026826 - RNA, 19 nt, Artificial Sequence
  Description of Artificial Sequence: Synthetic oligonucleotide
  Sense strand starting at position 2839 of SEQ ID NO: 914736
gugcauuuauaaucgaugu

SEQ ID NO: 1026827 - RNA, 19 nt, Artificial Sequence
  Description of Artificial Sequence: Synthetic oligonucleotide
  Antisense strand to SEQ ID NO: 1026826
acaucgauuauaaaugcac

SEQ ID NO: 1026828 - RNA, 19 nt, Artificial Sequence
  Description of Artificial Sequence: Synthetic oligonucleotide
  Sense strand starting at position 2843 of SEQ ID NO: 914736
auuuauaaucgauguguuc

SEQ ID NO: 1026829 - RNA, 19 nt, Artificial Sequence
  Description of Artificial Sequence: Synthetic oligonucleotide
  Antisense strand to SEQ ID NO: 1026828
gaacacaucgauuauaaau

SEQ ID NO: 1026830 - RNA, 19 nt, Artificial Sequence
  Description of Artificial Sequence: Synthetic oligonucleotide
  Sense strand starting at position 2956 of SEQ ID NO: 914736
acacaugguuguuuccaga

SEQ ID NO: 1026831 - RNA, 19 nt, Artificial Sequence
  Description of Artificial Sequence: Synthetic oligonucleotide
  Antisense strand to SEQ ID NO: 1026830
ucuggaaacaaccaugugu

SEQ ID NO: 1026832 - RNA, 19 nt, Artificial Sequence
  Description of Artificial Sequence: Synthetic oligonucleotide
  Sense strand starting at position 2963 of SEQ ID NO: 914736
guuguuuccagagaaucag

SEQ ID NO: 1026833 - RNA, 19 nt, Artificial Sequence
  Description of Artificial Sequence: Synthetic oligonucleotide
  Antisense strand to SEQ ID NO: 1026832
cugauucucuggaaacaac

SEQ ID NO: 1026834 - RNA, 19 nt, Artificial Sequence
  Description of Artificial Sequence: Synthetic oligonucleotide
  Sense strand starting at position 3014 of SEQ ID NO: 914736
agagaaagagccuguccaa

SEQ ID NO: 1026835 - RNA, 19 nt, Artificial Sequence
  Description of Artificial Sequence: Synthetic oligonucleotide
  Antisense strand to SEQ ID NO: 1026834
uuggacaggcucuuucucu

SEQ ID NO: 1026836 - RNA, 19 nt, Artificial Sequence
  Description of Artificial Sequence: Synthetic oligonucleotide
  Sense strand starting at position 3696 of SEQ ID NO: 914736
agucaauagcuuuagcaca

SEQ ID NO: 1026837 - RNA, 19 nt, Artificial Sequence
  Description of Artificial Sequence: Synthetic oligonucleotide
  Antisense strand to SEQ ID NO: 1026836
ugugcuaaagcuauugacu

SEQ ID NO: 1026838 - RNA, 19 nt, Artificial Sequence
  Description of Artificial Sequence: Synthetic oligonucleotide
  Sense strand starting at position 3944 of SEQ ID NO: 914736
cauuauguugaaugucaga

SEQ ID NO: 1026839 - RNA, 19 nt, Artificial Sequence
  Description of Artificial Sequence: Synthetic oligonucleotide
  Antisense strand to SEQ ID NO: 1026838
ucugacauucaacauaaug

SEQ ID NO: 1026840 - RNA, 19 nt, Artificial Sequence
  Description of Artificial Sequence: Synthetic oligonucleotide
  Sense strand starting at position 3962 of SEQ ID NO: 914736
agacaauugucuccaacug

SEQ ID NO: 1026841 - RNA, 19 nt, Artificial Sequence
  Description of Artificial Sequence: Synthetic oligonucleotide
  Antisense strand to SEQ ID NO: 1026840
caguuggagacaauugucu

SEQ ID NO: 1026842 - RNA, 19 nt, Artificial Sequence
  Description of Artificial Sequence: Synthetic oligonucleotide
  Sense strand starting at position 17 of SEQ ID NO: 914737
aaaggaacgucucuguauu

SEQ ID NO: 1026843 - RNA, 19 nt, Artificial Sequence
  Description of Artificial Sequence: Synthetic oligonucleotide
  Antisense strand to SEQ ID NO: 1026842
aauacagagacguuccuuu

SEQ ID NO: 1026844 - RNA, 19 nt, Artificial Sequence
  Description of Artificial Sequence: Synthetic oligonucleotide
  Sense strand starting at position 18 of SEQ ID NO: 914737
aaggaacgucucuguauua

SEQ ID NO: 1026845 - RNA, 19 nt, Artificial Sequence
  Description of Artificial Sequence: Synthetic oligonucleotide
  Antisense strand to SEQ ID NO: 1026844
uaauacagagacguuccuu

SEQ ID NO: 1026846 - RNA, 19 nt, Artificial Sequence
  Description of Artificial Sequence: Synthetic oligonucleotide
  Sense strand starting at position 44 of SEQ ID NO: 914737
auagcauuguuucuugaau

SEQ ID NO: 1026847 - RNA, 19 nt, Artificial Sequence
  Description of Artificial Sequence: Synthetic oligonucleotide
  Antisense strand to SEQ ID NO: 1026846
auucaagaaacaaugcuau

SEQ ID NO: 1026848 - RNA, 19 nt, Artificial Sequence
  Description of Artificial Sequence: Synthetic oligonucleotide
  Sense strand starting at position 45 of SEQ ID NO: 914737
uagcauuguuucuugaaug

SEQ ID NO: 1026849 - RNA, 19 nt, Artificial Sequence
  Description of Artificial Sequence: Synthetic oligonucleotide
  Antisense strand to SEQ ID NO: 1026848
cauucaagaaacaaugcua

SEQ ID NO: 1026850 - RNA, 19 nt, Artificial Sequence
  Description of Artificial Sequence: Synthetic oligonucleotide
  Sense strand starting at position 66 of SEQ ID NO: 914737
gcuggcucucaacaaucau

SEQ ID NO: 1026851 - RNA, 19 nt, Artificial Sequence
  Description of Artificial Sequence: Synthetic oligonucleotide
  Antisense strand to SEQ ID NO: 1026850
augauuguugagagccagc

SEQ ID NO: 1026852 - RNA, 19 nt, Artificial Sequence
  Description of Artificial Sequence: Synthetic oligonucleotide
  Sense strand starting at position 299 of SEQ ID NO: 914737
ucauuagagccauaugagu

SEQ ID NO: 1026853 - RNA, 19 nt, Artificial Sequence
  Description of Artificial Sequence: Synthetic oligonucleotide
  Antisense strand to SEQ ID NO: 1026852
acucauauggcucuaauga

SEQ ID NO: 1026854 - RNA, 19 nt, Artificial Sequence
  Description of Artificial Sequence: Synthetic oligonucleotide
  Sense strand starting at position 310 of SEQ ID NO: 914737
auaugaguugggcaucaac

SEQ ID NO: 1026855 - RNA, 19 nt, Artificial Sequence
  Description of Artificial Sequence: Synthetic oligonucleotide
  Antisense strand to SEQ ID NO: 1026854
guugaugcccaacucauau

SEQ ID NO: 1026856 - RNA, 19 nt, Artificial Sequence
  Description of Artificial Sequence: Synthetic oligonucleotide
  Sense strand starting at position 414 of SEQ ID NO: 914737
cccagaucuguguaagcuc

SEQ ID NO: 1026857 - RNA, 19 nt, Artificial Sequence
  Description of Artificial Sequence: Synthetic oligonucleotide
  Antisense strand to SEQ ID NO: 1026856
gagcuuacacagaucuggg

SEQ ID NO: 1026858 - RNA, 19 nt, Artificial Sequence
  Description of Artificial Sequence: Synthetic oligonucleotide
  Sense strand starting at position 417 of SEQ ID NO: 914737
agaucuguguaagcucaaa

SEQ ID NO: 1026859 - RNA, 19 nt, Artificial Sequence
  Description of Artificial Sequence: Synthetic oligonucleotide
  Antisense strand to SEQ ID NO: 1026858
uuugagcuuacacagaucu

SEQ ID NO: 1026860 - RNA, 19 nt, Artificial Sequence
  Description of Artificial Sequence: Synthetic oligonucleotide
  Sense strand starting at position 464 of SEQ ID NO: 914737
agguacugcuuucucugaa

SEQ ID NO: 1026861 - RNA, 19 nt, Artificial Sequence
  Description of Artificial Sequence: Synthetic oligonucleotide
  Antisense strand to SEQ ID NO: 1026860
uucagagaaagcaguaccu

SEQ ID NO: 1026862 - RNA, 19 nt, Artificial Sequence
  Description of Artificial Sequence: Synthetic oligonucleotide
  Sense strand starting at position 486 of SEQ ID NO: 914737
aaagaagucucccuguguu

SEQ ID NO: 1026863 - RNA, 19 nt, Artificial Sequence
  Description of Artificial Sequence: Synthetic oligonucleotide
  Antisense strand to SEQ ID NO: 1026862
aacacagggagacuucuuu

SEQ ID NO: 1026864 - RNA, 19 nt, Artificial Sequence
  Description of Artificial Sequence: Synthetic oligonucleotide
  Sense strand starting at position 593 of SEQ ID NO: 914737
gggauucuuuauucccaac

SEQ ID NO: 1026865 - RNA, 19 nt, Artificial Sequence
  Description of Artificial Sequence: Synthetic oligonucleotide
  Antisense strand to SEQ ID NO: 1026864
guugggaauaaagaauccc

SEQ ID NO: 1026866 - RNA, 19 nt, Artificial Sequence
  Description of Artificial Sequence: Synthetic oligonucleotide
  Sense strand starting at position 724 of SEQ ID NO: 914737
uuguaucagucuccaaacu

SEQ ID NO: 1026867 - RNA, 19 nt, Artificial Sequence
  Description of Artificial Sequence: Synthetic oligonucleotide
  Antisense strand to SEQ ID NO: 1026866
aguuuggagacugauacaa

SEQ ID NO: 1026868 - RNA, 19 nt, Artificial Sequence
  Description of Artificial Sequence: Synthetic oligonucleotide
  Sense strand starting at position 939 of SEQ ID NO: 914737
gacugaauuccuugagagc

SEQ ID NO: 1026869 - RNA, 19 nt, Artificial Sequence
  Description of Artificial Sequence: Synthetic oligonucleotide
  Antisense strand to SEQ ID NO: 1026868
gcucucaaggaauucaguc

SEQ ID NO: 1026870 - RNA, 19 nt, Artificial Sequence
  Description of Artificial Sequence: Synthetic oligonucleotide
  Sense strand starting at position 1007 of SEQ ID NO: 914737
gccgaauaucugggcagga

SEQ ID NO: 1026871 - RNA, 19 nt, Artificial Sequence
  Description of Artificial Sequence: Synthetic oligonucleotide
  Antisense strand to SEQ ID NO: 1026870
uccugcccagauauucggc

SEQ ID NO: 1026872 - RNA, 19 nt, Artificial Sequence
  Description of Artificial Sequence: Synthetic oligonucleotide
  Sense strand starting at position 1008 of SEQ ID NO: 914737
ccgaauaucugggcaggaa

SEQ ID NO: 1026873 - RNA, 19 nt, Artificial Sequence
  Description of Artificial Sequence: Synthetic oligonucleotide
  Antisense strand to SEQ ID NO: 1026872
uuccugcccagauauucgg

SEQ ID NO: 1026874 - RNA, 19 nt, Artificial Sequence
  Description of Artificial Sequence: Synthetic oligonucleotide
  Sense strand starting at position 1127 of SEQ ID NO: 914737
ugacccaacuggucugauu

SEQ ID NO: 1026875 - RNA, 19 nt, Artificial Sequence
  Description of Artificial Sequence: Synthetic oligonucleotide
  Antisense strand to SEQ ID NO: 1026874
aaucagaccaguuggguca

SEQ ID NO: 1026876 - RNA, 19 nt, Artificial Sequence
  Description of Artificial Sequence: Synthetic oligonucleotide
  Sense strand starting at position 1217 of SEQ ID NO: 914737
gugugcugaucauuuaauc

SEQ ID NO: 1026877 - RNA, 19 nt, Artificial Sequence
  Description of Artificial Sequence: Synthetic oligonucleotide
  Antisense strand to SEQ ID NO: 1026876
gauuaaaugaucagcacac

SEQ ID NO: 1026878 - RNA, 19 nt, Artificial Sequence
  Description of Artificial Sequence: Synthetic oligonucleotide
  Sense strand starting at position 1327 of SEQ ID NO: 914737
uuacuagaguucuuccuca

SEQ ID NO: 1026879 - RNA, 19 nt, Artificial Sequence
  Description of Artificial Sequence: Synthetic oligonucleotide
  Antisense strand to SEQ ID NO: 1026878
ugaggaagaacucuaguaa

SEQ ID NO: 1026880 - RNA, 19 nt, Artificial Sequence
  Description of Artificial Sequence: Synthetic oligonucleotide
  Sense strand starting at position 1331 of SEQ ID NO: 914737
uagaguucuuccucaggga

SEQ ID NO: 1026881 - RNA, 19 nt, Artificial Sequence
  Description of Artificial Sequence: Synthetic oligonucleotide
  Antisense strand to SEQ ID NO: 1026880
ucccugaggaagaacucua

SEQ ID NO: 1026882 - RNA, 19 nt, Artificial Sequence
  Description of Artificial Sequence: Synthetic oligonucleotide
  Sense strand starting at position 1409 of SEQ ID NO: 914737
uucuccugcgaagagaaau

SEQ ID NO: 1026883 - RNA, 19 nt, Artificial Sequence
  Description of Artificial Sequence: Synthetic oligonucleotide
  Antisense strand to SEQ ID NO: 1026882
auuucucuucgcaggagaa

SEQ ID NO: 1026884 - RNA, 19 nt, Artificial Sequence
  Description of Artificial Sequence: Synthetic oligonucleotide
  Sense strand starting at position 1460 of SEQ ID NO: 914737
cccuguaauccguaaccaa

SEQ ID NO: 1026885 - RNA, 19 nt, Artificial Sequence
  Description of Artificial Sequence: Synthetic oligonucleotide
  Antisense strand to SEQ ID NO: 1026884
uugguuacggauuacaggg

SEQ ID NO: 1026886 - RNA, 19 nt, Artificial Sequence
  Description of Artificial Sequence: Synthetic oligonucleotide
  Sense strand starting at position 1650 of SEQ ID NO: 914737
aguuuaacauuggugcaau

SEQ ID NO: 1026887 - RNA, 19 nt, Artificial Sequence
  Description of Artificial Sequence: Synthetic oligonucleotide
  Antisense strand to SEQ ID NO: 1026886
auugcaccaauguuaaacu

SEQ ID NO: 1026888 - RNA, 19 nt, Artificial Sequence
  Description of Artificial Sequence: Synthetic oligonucleotide
  Sense strand starting at position 1653 of SEQ ID NO: 914737
uuaacauuggugcaauacu

SEQ ID NO: 1026889 - RNA, 19 nt, Artificial Sequence
  Description of Artificial Sequence: Synthetic oligonucleotide
  Antisense strand to SEQ ID NO: 1026888
aguauugcaccaauguuaa

SEQ ID NO: 1026890 - RNA, 19 nt, Artificial Sequence
  Description of Artificial Sequence: Synthetic oligonucleotide
  Sense strand starting at position 1785 of SEQ ID NO: 914737
cuuaucagucuguacccaa

SEQ ID NO: 1026891 - RNA, 19 nt, Artificial Sequence
  Description of Artificial Sequence: Synthetic oligonucleotide
  Antisense strand to SEQ ID NO: 1026890
uuggguacagacugauaag

SEQ ID NO: 1026892 - RNA, 19 nt, Artificial Sequence
  Description of Artificial Sequence: Synthetic oligonucleotide
  Sense strand starting at position 1901 of SEQ ID NO: 914737
ugaagaugcguggaaucca

SEQ ID NO: 1026893 - RNA, 19 nt, Artificial Sequence
  Description of Artificial Sequence: Synthetic oligonucleotide
  Antisense strand to SEQ ID NO: 1026892
uggauuccacgcaucuuca

SEQ ID NO: 1026894 - RNA, 19 nt, Artificial Sequence
  Description of Artificial Sequence: Synthetic oligonucleotide
  Sense strand starting at position 1909 of SEQ ID NO: 914737
cguggaauccauggauuaa

SEQ ID NO: 1026895 - RNA, 19 nt, Artificial Sequence
  Description of Artificial Sequence: Synthetic oligonucleotide
  Antisense strand to SEQ ID NO: 1026894
uuaauccauggauuccacg

SEQ ID NO: 1026896 - RNA, 19 nt, Artificial Sequence
  Description of Artificial Sequence: Synthetic oligonucleotide
  Sense strand starting at position 1945 of SEQ ID NO: 914737
gucuuauuccucuugugcu

SEQ ID NO: 1026897 - RNA, 19 nt, Artificial Sequence
  Description of Artificial Sequence: Synthetic oligonucleotide
  Antisense strand to SEQ ID NO: 1026896
agcacaagaggaauaagac

SEQ ID NO: 1026898 - RNA, 19 nt, Artificial Sequence
  Description of Artificial Sequence: Synthetic oligonucleotide
  Sense strand starting at position 2150 of SEQ ID NO: 914737
agaauagaguuucuuccua

SEQ ID NO: 1026899 - RNA, 19 nt, Artificial Sequence
  Description of Artificial Sequence: Synthetic oligonucleotide
  Antisense strand to SEQ ID NO: 1026898
uaggaagaaacucuauucu

SEQ ID NO: 1026900 - RNA, 19 nt, Artificial Sequence
  Description of Artificial Sequence: Synthetic oligonucleotide
  Sense strand starting at position 2201 of SEQ ID NO: 914737
cugugaucacugcaucacu

SEQ ID NO: 1026901 - RNA, 19 nt, Artificial Sequence
  Description of Artificial Sequence: Synthetic oligonucleotide
  Antisense strand to SEQ ID NO: 1026900
agugaugcagugaucacag

SEQ ID NO: 1026902 - RNA, 19 nt, Artificial Sequence
  Description of Artificial Sequence: Synthetic oligonucleotide
  Sense strand starting at position 2249 of SEQ ID NO: 914737
ggacaauauucccuguccu

SEQ ID NO: 1026903 - RNA, 19 nt, Artificial Sequence
  Description of Artificial Sequence: Synthetic oligonucleotide
  Antisense strand to SEQ ID NO: 1026902
aggacagggaauauugucc

SEQ ID NO: 1026904 - RNA, 19 nt, Artificial Sequence
  Description of Artificial Sequence: Synthetic oligonucleotide
  Sense strand starting at position 2456 of SEQ ID NO: 914737
uauggaaucaguuaggguu

SEQ ID NO: 1026905 - RNA, 19 nt, Artificial Sequence
  Description of Artificial Sequence: Synthetic oligonucleotide
  Antisense strand to SEQ ID NO: 1026904
aacccuaacugauuccaua

SEQ ID NO: 1026906 - RNA, 19 nt, Artificial Sequence
  Description of Artificial Sequence: Synthetic oligonucleotide
  Sense strand starting at position 2637 of SEQ ID NO: 914737
cuguguacaucaucaagga

SEQ ID NO: 1026907 - RNA, 19 nt, Artificial Sequence
  Description of Artificial Sequence: Synthetic oligonucleotide
  Antisense strand to SEQ ID NO: 1026906
uccuugaugauguacacag

SEQ ID NO: 1026908 - RNA, 19 nt, Artificial Sequence
  Description of Artificial Sequence: Synthetic oligonucleotide
  Sense strand starting at position 3023 of SEQ ID NO: 914737
ugaggauuggccugccuga

SEQ ID NO: 1026909 - RNA, 19 nt, Artificial Sequence
  Description of Artificial Sequence: Synthetic oligonucleotide
  Antisense strand to SEQ ID NO: 1026908
ucaggcaggccaauccuca

SEQ ID NO: 1026910 - RNA, 19 nt, Artificial Sequence
  Description of Artificial Sequence: Synthetic oligonucleotide
  Sense strand starting at position 3289 of SEQ ID NO: 914737
agcagaugugcagauauca

SEQ ID NO: 1026911 - RNA, 19 nt, Artificial Sequence
  Description of Artificial Sequence: Synthetic oligonucleotide
  Antisense strand to SEQ ID NO: 1026910
ugauaucugcacaucugcu

SEQ ID NO: 1026912 - RNA, 19 nt, Artificial Sequence
  Description of Artificial Sequence: Synthetic oligonucleotide
  Sense strand starting at position 3343 of SEQ ID NO: 914737
acaugacaacuucgaagua

SEQ ID NO: 1026913 - RNA, 19 nt, Artificial Sequence
  Description of Artificial Sequence: Synthetic oligonucleotide
  Antisense strand to SEQ ID NO: 1026912
uacuucgaaguugucaugu

SEQ ID NO: 1026914 - RNA, 19 nt, Artificial Sequence
  Description of Artificial Sequence: Synthetic oligonucleotide
  Sense strand starting at position 3353 of SEQ ID NO: 914737
uucgaaguaaugugauaau

SEQ ID NO: 1026915 - RNA, 19 nt, Artificial Sequence
  Description of Artificial Sequence: Synthetic oligonucleotide
  Antisense strand to SEQ ID NO: 1026914
auuaucacauuacuucgaa

SEQ ID NO: 1026916 - RNA, 19 nt, Artificial Sequence
  Description of Artificial Sequence: Synthetic oligonucleotide
  Sense strand starting at position 3362 of SEQ ID NO: 914737
augugauaauuauccagca

SEQ ID NO: 1026917 - RNA, 19 nt, Artificial Sequence
  Description of Artificial Sequence: Synthetic oligonucleotide
  Antisense strand to SEQ ID NO: 1026916
ugcuggauaauuaucacau

SEQ ID NO: 1026918 - RNA, 19 nt, Artificial Sequence
  Description of Artificial Sequence: Synthetic oligonucleotide
  Sense strand starting at position 3363 of SEQ ID NO: 914737
ugugauaauuauccagcaa

SEQ ID NO: 1026919 - RNA, 19 nt, Artificial Sequence
  Description of Artificial Sequence: Synthetic oligonucleotide
  Antisense strand to SEQ ID NO: 1026918
uugcuggauaauuaucaca

SEQ ID NO: 1026920 - RNA, 19 nt, Artificial Sequence
  Description of Artificial Sequence: Synthetic oligonucleotide
  Sense strand starting at position 3404 of SEQ ID NO: 914737
gugugaaaugccuacaaau

SEQ ID NO: 1026921 - RNA, 19 nt, Artificial Sequence
  Description of Artificial Sequence: Synthetic oligonucleotide
  Antisense strand to SEQ ID NO: 1026920
auuuguaggcauuucacac

SEQ ID NO: 1026922 - RNA, 19 nt, Artificial Sequence
  Description of Artificial Sequence: Synthetic oligonucleotide
  Sense strand starting at position 44 of SEQ ID NO: 914738
gcaucaagaggucacaagu

SEQ ID NO: 1026923 - RNA, 19 nt, Artificial Sequence
  Description of Artificial Sequence: Synthetic oligonucleotide
  Antisense strand to SEQ ID NO: 1026922
acuugugaccucuugaugc

SEQ ID NO: 1026924 - RNA, 19 nt, Artificial Sequence
  Description of Artificial Sequence: Synthetic oligonucleotide
  Sense strand starting at position 102 of SEQ ID NO: 914738
cucucuccacgucaugaaa

SEQ ID NO: 1026925 - RNA, 19 nt, Artificial Sequence
  Description of Artificial Sequence: Synthetic oligonucleotide
  Antisense strand to SEQ ID NO: 1026924
uuucaugacguggagagag

SEQ ID NO: 1026926 - RNA, 19 nt, Artificial Sequence
  Description of Artificial Sequence: Synthetic oligonucleotide
  Sense strand starting at position 121 of SEQ ID NO: 914738
ggagaucacaggugugaaa

SEQ ID NO: 1026927 - RNA, 19 nt, Artificial Sequence
  Description of Artificial Sequence: Synthetic oligonucleotide
  Antisense strand to SEQ ID NO: 1026926
uuucacaccugugaucucc

SEQ ID NO: 1026928 - RNA, 19 nt, Artificial Sequence
  Description of Artificial Sequence: Synthetic oligonucleotide
  Sense strand starting at position 124 of SEQ ID NO: 914738
gaucacaggugugaaauua

SEQ ID NO: 1026929 - RNA, 19 nt, Artificial Sequence
  Description of Artificial Sequence: Synthetic oligonucleotide
  Antisense strand to SEQ ID NO: 1026928
uaauuucacaccugugauc

SEQ ID NO: 1026930 - RNA, 19 nt, Artificial Sequence
  Description of Artificial Sequence: Synthetic oligonucleotide
  Sense strand starting at position 147 of SEQ ID NO: 914738
aucaaagagcuuuguuuag

SEQ ID NO: 1026931 - RNA, 19 nt, Artificial Sequence
  Description of Artificial Sequence: Synthetic oligonucleotide
  Antisense strand to SEQ ID NO: 1026930
cuaaacaaagcucuuugau

SEQ ID NO: 1026932 - RNA, 19 nt, Artificial Sequence
  Description of Artificial Sequence: Synthetic oligonucleotide
  Sense strand starting at position 151 of SEQ ID NO: 914738
aagagcuuuguuuagacau

SEQ ID NO: 1026933 - RNA, 19 nt, Artificial Sequence
  Description of Artificial Sequence: Synthetic oligonucleotide
  Antisense strand to SEQ ID NO: 1026932
augucuaaacaaagcucuu

SEQ ID NO: 1026934 - RNA, 19 nt, Artificial Sequence
  Description of Artificial Sequence: Synthetic oligonucleotide
  Sense strand starting at position 153 of SEQ ID NO: 914738
gagcuuuguuuagacauag

SEQ ID NO: 1026935 - RNA, 19 nt, Artificial Sequence
  Description of Artificial Sequence: Synthetic oligonucleotide
  Antisense strand to SEQ ID NO: 1026934
cuaugucuaaacaaagcuc

SEQ ID NO: 1026936 - RNA, 19 nt, Artificial Sequence
  Description of Artificial Sequence: Synthetic oligonucleotide
  Sense strand starting at position 169 of SEQ ID NO: 914738
uagagauuauugcgaggau

SEQ ID NO: 1026937 - RNA, 19 nt, Artificial Sequence
  Description of Artificial Sequence: Synthetic oligonucleotide
  Antisense strand to SEQ ID NO: 1026936
auccucgcaauaaucucua

SEQ ID NO: 1026938 - RNA, 19 nt, Artificial Sequence
  Description of Artificial Sequence: Synthetic oligonucleotide
  Sense strand starting at position 170 of SEQ ID NO: 914738
agagauuauugcgaggauu

SEQ ID NO: 1026939 - RNA, 19 nt, Artificial Sequence
  Description of Artificial Sequence: Synthetic oligonucleotide
  Antisense strand to SEQ ID NO: 1026938
aauccucgcaauaaucucu

SEQ ID NO: 1026940 - RNA, 19 nt, Artificial Sequence
  Description of Artificial Sequence: Synthetic oligonucleotide
  Sense strand starting at position 370 of SEQ ID NO: 914738
ugggcaucucuaggguuaa

SEQ ID NO: 1026941 - RNA, 19 nt, Artificial Sequence
  Description of Artificial Sequence: Synthetic oligonucleotide
  Antisense strand to SEQ ID NO: 1026940
uuaacccuagagaugccca

SEQ ID NO: 1026942 - RNA, 19 nt, Artificial Sequence
  Description of Artificial Sequence: Synthetic oligonucleotide
  Sense strand starting at position 754 of SEQ ID NO: 914738
cauacauggucgcccagau

SEQ ID NO: 1026943 - RNA, 19 nt, Artificial Sequence
  Description of Artificial Sequence: Synthetic oligonucleotide
  Antisense strand to SEQ ID NO: 1026942
aucugggcgaccauguaug

SEQ ID NO: 1026944 - RNA, 19 nt, Artificial Sequence
  Description of Artificial Sequence: Synthetic oligonucleotide
  Sense strand starting at position 833 of SEQ ID NO: 914738
gugugcauaccuugaagga

SEQ ID NO: 1026945 - RNA, 19 nt, Artificial Sequence
  Description of Artificial Sequence: Synthetic oligonucleotide
  Antisense strand to SEQ ID NO: 1026944
uccuucaagguaugcacac

SEQ ID NO: 1026946 - RNA, 19 nt, Artificial Sequence
  Description of Artificial Sequence: Synthetic oligonucleotide
  Sense strand starting at position 834 of SEQ ID NO: 914738
ugugcauaccuugaaggau

SEQ ID NO: 1026947 - RNA, 19 nt, Artificial Sequence
  Description of Artificial Sequence: Synthetic oligonucleotide
  Antisense strand to SEQ ID NO: 1026946
auccuucaagguaugcaca

SEQ ID NO: 1026948 - RNA, 19 nt, Artificial Sequence
  Description of Artificial Sequence: Synthetic oligonucleotide
  Sense strand starting at position 846 of SEQ ID NO: 914738
gaaggaugcucaggaaggu

SEQ ID NO: 1026949 - RNA, 19 nt, Artificial Sequence
  Description of Artificial Sequence: Synthetic oligonucleotide
  Antisense strand to SEQ ID NO: 1026948
accuuccugagcauccuuc

SEQ ID NO: 1026950 - RNA, 19 nt, Artificial Sequence
  Description of Artificial Sequence: Synthetic oligonucleotide
  Sense strand starting at position 898 of SEQ ID NO: 914738
uggcuuuaggaucggacaa

SEQ ID NO: 1026951 - RNA, 19 nt, Artificial Sequence
  Description of Artificial Sequence: Synthetic oligonucleotide
  Antisense strand to SEQ ID NO: 1026950
uuguccgauccuaaagcca

SEQ ID NO: 1026952 - RNA, 19 nt, Artificial Sequence
  Description of Artificial Sequence: Synthetic oligonucleotide
  Sense strand starting at position 900 of SEQ ID NO: 914738
gcuuuaggaucggacaacu

SEQ ID NO: 1026953 - RNA, 19 nt, Artificial Sequence
  Description of Artificial Sequence: Synthetic oligonucleotide
  Antisense strand to SEQ ID NO: 1026952
aguuguccgauccuaaagc

SEQ ID NO: 1026954 - RNA, 19 nt, Artificial Sequence
  Description of Artificial Sequence: Synthetic oligonucleotide
  Sense strand starting at position 949 of SEQ ID NO: 914738
ccauuaguaaugugaggga

SEQ ID NO: 1026955 - RNA, 19 nt, Artificial Sequence
  Description of Artificial Sequence: Synthetic oligonucleotide
  Antisense strand to SEQ ID NO: 1026954
ucccucacauuacuaaugg

SEQ ID NO: 1026956 - RNA, 19 nt, Artificial Sequence
  Description of Artificial Sequence: Synthetic oligonucleotide
  Sense strand starting at position 1042 of SEQ ID NO: 914738
ggaucucugcagugaauuc

SEQ ID NO: 1026957 - RNA, 19 nt, Artificial Sequence
  Description of Artificial Sequence: Synthetic oligonucleotide
  Antisense strand to SEQ ID NO: 1026956
gaauucacugcagagaucc

SEQ ID NO: 1026958 - RNA, 19 nt, Artificial Sequence
  Description of Artificial Sequence: Synthetic oligonucleotide
  Sense strand starting at position 1083 of SEQ ID NO: 914738
ggaccuccagagugucuua

SEQ ID NO: 1026959 - RNA, 19 nt, Artificial Sequence
  Description of Artificial Sequence: Synthetic oligonucleotide
  Antisense strand to SEQ ID NO: 1026958
uaagacacucuggaggucc

SEQ ID NO: 1026960 - RNA, 19 nt, Artificial Sequence
  Description of Artificial Sequence: Synthetic oligonucleotide
  Sense strand starting at position 1107 of SEQ ID NO: 914738
ccuggagucugacacacaa

SEQ ID NO: 1026961 - RNA, 19 nt, Artificial Sequence
  Description of Artificial Sequence: Synthetic oligonucleotide
  Antisense strand to SEQ ID NO: 1026960
uugugugucagacuccagg

SEQ ID NO: 1026962 - RNA, 19 nt, Artificial Sequence
  Description of Artificial Sequence: Synthetic oligonucleotide
  Sense strand starting at position 1165 of SEQ ID NO: 914738
gagagaagcuuuggaacug

SEQ ID NO: 1026963 - RNA, 19 nt, Artificial Sequence
  Description of Artificial Sequence: Synthetic oligonucleotide
  Antisense strand to SEQ ID NO: 1026962
caguuccaaagcuucucuc

SEQ ID NO: 1026964 - RNA, 19 nt, Artificial Sequence
  Description of Artificial Sequence: Synthetic oligonucleotide
  Sense strand starting at position 1395 of SEQ ID NO: 914738
ucugcaagcgccgauaaua

SEQ ID NO: 1026965 - RNA, 19 nt, Artificial Sequence
  Description of Artificial Sequence: Synthetic oligonucleotide
  Antisense strand to SEQ ID NO: 1026964
uauuaucggcgcuugcaga

SEQ ID NO: 1026966 - RNA, 19 nt, Artificial Sequence
  Description of Artificial Sequence: Synthetic oligonucleotide
  Sense strand starting at position 1864 of SEQ ID NO: 914738
guuccaagcuguuccaacu

SEQ ID NO: 1026967 - RNA, 19 nt, Artificial Sequence
  Description of Artificial Sequence: Synthetic oligonucleotide
  Antisense strand to SEQ ID NO: 1026966
aguuggaacagcuuggaac

SEQ ID NO: 1026968 - RNA, 19 nt, Artificial Sequence
  Description of Artificial Sequence: Synthetic oligonucleotide
  Sense strand starting at position 2941 of SEQ ID NO: 914738
gagaguugggcugggaagu

SEQ ID NO: 1026969 - RNA, 19 nt, Artificial Sequence
  Description of Artificial Sequence: Synthetic oligonucleotide
  Antisense strand to SEQ ID NO: 1026968
acuucccagcccaacucuc

SEQ ID NO: 1026970 - RNA, 19 nt, Artificial Sequence
  Description of Artificial Sequence: Synthetic oligonucleotide
  Sense strand starting at position 3002 of SEQ ID NO: 914738
gagcgaauuugucuuccac

SEQ ID NO: 1026971 - RNA, 19 nt, Artificial Sequence
  Description of Artificial Sequence: Synthetic oligonucleotide
  Antisense strand to SEQ ID NO: 1026970
guggaagacaaauucgcuc

SEQ ID NO: 1026972 - RNA, 19 nt, Artificial Sequence
  Description of Artificial Sequence: Synthetic oligonucleotide
  Sense strand starting at position 3004 of SEQ ID NO: 914738
gcgaauuugucuuccacaa

SEQ ID NO: 1026973 - RNA, 19 nt, Artificial Sequence
  Description of Artificial Sequence: Synthetic oligonucleotide
  Antisense strand to SEQ ID NO: 1026972
uuguggaagacaaauucgc

SEQ ID NO: 1026974 - RNA, 19 nt, Artificial Sequence
  Description of Artificial Sequence: Synthetic oligonucleotide
  Sense strand starting at position 3052 of SEQ ID NO: 914738
aggagcgucguggucaauu

SEQ ID NO: 1026975 - RNA, 19 nt, Artificial Sequence
  Description of Artificial Sequence: Synthetic oligonucleotide
  Antisense strand to SEQ ID NO: 1026974
aauugaccacgacgcuccu

SEQ ID NO: 1026976 - RNA, 19 nt, Artificial Sequence
  Description of Artificial Sequence: Synthetic oligonucleotide
  Sense strand starting at position 3053 of SEQ ID NO: 914738
ggagcgucguggucaauuu

SEQ ID NO: 1026977 - RNA, 19 nt, Artificial Sequence
  Description of Artificial Sequence: Synthetic oligonucleotide
  Antisense strand to SEQ ID NO: 1026976
aaauugaccacgacgcucc

SEQ ID NO: 1026978 - RNA, 19 nt, Artificial Sequence
  Description of Artificial Sequence: Synthetic oligonucleotide
  Sense strand starting at position 3090 of SEQ ID NO: 914738
agcagaguugugugaggac

SEQ ID NO: 1026979 - RNA, 19 nt, Artificial Sequence
  Description of Artificial Sequence: Synthetic oligonucleotide
  Antisense strand to SEQ ID NO: 1026978
guccucacacaacucugcu

SEQ ID NO: 1026980 - RNA, 19 nt, Artificial Sequence
  Description of Artificial Sequence: Synthetic oligonucleotide
  Sense strand starting at position 3537 of SEQ ID NO: 914738
guuggagggaacugaugua

SEQ ID NO: 1026981 - RNA, 19 nt, Artificial Sequence
  Description of Artificial Sequence: Synthetic oligonucleotide
  Antisense strand to SEQ ID NO: 1026980
uacaucaguucccuccaac

SEQ ID NO: 1026982 - RNA, 19 nt, Artificial Sequence
  Description of Artificial Sequence: Synthetic oligonucleotide
  Sense strand starting at position 3555 of SEQ ID NO: 914738
augaaugaaaguugaaugu

SEQ ID NO: 1026983 - RNA, 19 nt, Artificial Sequence
  Description of Artificial Sequence: Synthetic oligonucleotide
  Antisense strand to SEQ ID NO: 1026982
acauucaacuuucauucau

SEQ ID NO: 1026984 - RNA, 19 nt, Artificial Sequence
  Description of Artificial Sequence: Synthetic oligonucleotide
  Sense strand starting at position 3648 of SEQ ID NO: 914738
acaguacagucucuuugua

SEQ ID NO: 1026985 - RNA, 19 nt, Artificial Sequence
  Description of Artificial Sequence: Synthetic oligonucleotide
  Antisense strand to SEQ ID NO: 1026984
uacaaagagacuguacugu

SEQ ID NO: 1026986 - RNA, 19 nt, Artificial Sequence
  Description of Artificial Sequence: Synthetic oligonucleotide
  Sense strand starting at position 3650 of SEQ ID NO: 914738
aguacagucucuuuguaaa

SEQ ID NO: 1026987 - RNA, 19 nt, Artificial Sequence
  Description of Artificial Sequence: Synthetic oligonucleotide
  Antisense strand to SEQ ID NO: 1026986
uuuacaaagagacuguacu

SEQ ID NO: 1026988 - RNA, 19 nt, Artificial Sequence
  Description of Artificial Sequence: Synthetic oligonucleotide
  Sense strand starting at position 3653 of SEQ ID NO: 914738
acagucucuuuguaaaccu

SEQ ID NO: 1026989 - RNA, 19 nt, Artificial Sequence
  Description of Artificial Sequence: Synthetic oligonucleotide
  Antisense strand to SEQ ID NO: 1026988
agguuuacaaagagacugu

SEQ ID NO: 1026990 - RNA, 19 nt, Artificial Sequence
  Description of Artificial Sequence: Synthetic oligonucleotide
  Sense strand starting at position 3739 of SEQ ID NO: 914738
ugacguucccgagaccaca

SEQ ID NO: 1026991 - RNA, 19 nt, Artificial Sequence
  Description of Artificial Sequence: Synthetic oligonucleotide
  Antisense strand to SEQ ID NO: 1026990
uguggucucgggaacguca

SEQ ID NO: 1026992 - RNA, 19 nt, Artificial Sequence
  Description of Artificial Sequence: Synthetic oligonucleotide
  Sense strand starting at position 3787 of SEQ ID NO: 914738
auuaucaaauucuagggua

SEQ ID NO: 1026993 - RNA, 19 nt, Artificial Sequence
  Description of Artificial Sequence: Synthetic oligonucleotide
  Antisense strand to SEQ ID NO: 1026992
uacccuagaauuugauaau

SEQ ID NO: 1026994 - RNA, 19 nt, Artificial Sequence
  Description of Artificial Sequence: Synthetic oligonucleotide
  Sense strand starting at position 3790 of SEQ ID NO: 914738
aucaaauucuaggguaaag

SEQ ID NO: 1026995 - RNA, 19 nt, Artificial Sequence
  Description of Artificial Sequence: Synthetic oligonucleotide
  Antisense strand to SEQ ID NO: 1026994
cuuuacccuagaauuugau

SEQ ID NO: 1026996 - RNA, 19 nt, Artificial Sequence
  Description of Artificial Sequence: Synthetic oligonucleotide
  Sense strand starting at position 3801 of SEQ ID NO: 914738
ggguaaagcuguguggcuu

SEQ ID NO: 1026997 - RNA, 19 nt, Artificial Sequence
  Description of Artificial Sequence: Synthetic oligonucleotide
  Antisense strand to SEQ ID NO: 1026996
aagccacacagcuuuaccc

SEQ ID NO: 1026998 - RNA, 19 nt, Artificial Sequence
  Description of Artificial Sequence: Synthetic oligonucleotide
  Sense strand starting at position 3802 of SEQ ID NO: 914738
gguaaagcuguguggcuuu

SEQ ID NO: 1026999 - RNA, 19 nt, Artificial Sequence
  Description of Artificial Sequence: Synthetic oligonucleotide
  Antisense strand to SEQ ID NO: 1026998
aaagccacacagcuuuacc

SEQ ID NO: 1027000 - RNA, 19 nt, Artificial Sequence
  Description of Artificial Sequence: Synthetic oligonucleotide
  Sense strand starting at position 3969 of SEQ ID NO: 914738
ucagacuauggcugagaga

SEQ ID NO: 1027001 - RNA, 19 nt, Artificial Sequence
  Description of Artificial Sequence: Synthetic oligonucleotide
  Antisense strand to SEQ ID NO: 1027000
ucucucagccauagucuga

SEQ ID NO: 1027002 - RNA, 19 nt, Artificial Sequence
  Description of Artificial Sequence: Synthetic oligonucleotide
  Sense strand starting at position 40 of SEQ ID NO: 914739
ggguuauuguuacuacaau

SEQ ID NO: 1027003 - RNA, 19 nt, Artificial Sequence
  Description of Artificial Sequence: Synthetic oligonucleotide
  Antisense strand to SEQ ID NO: 1027002
auuguaguaacaauaaccc

SEQ ID NO: 1027004 - RNA, 19 nt, Artificial Sequence
  Description of Artificial Sequence: Synthetic oligonucleotide
  Sense strand starting at position 52 of SEQ ID NO: 914739
cuacaaucaucugcaaggu

SEQ ID NO: 1027005 - RNA, 19 nt, Artificial Sequence
  Description of Artificial Sequence: Synthetic oligonucleotide
  Antisense strand to SEQ ID NO: 1027004
accuugcagaugauuguag

SEQ ID NO: 1027006 - RNA, 19 nt, Artificial Sequence
  Description of Artificial Sequence: Synthetic oligonucleotide
  Sense strand starting at position 190 of SEQ ID NO: 914739
cuccaugaaugcucugacu

SEQ ID NO: 1027007 - RNA, 19 nt, Artificial Sequence
  Description of Artificial Sequence: Synthetic oligonucleotide
  Antisense strand to SEQ ID NO: 1027006
agucagagcauucauggag

SEQ ID NO: 1027008 - RNA, 19 nt, Artificial Sequence
  Description of Artificial Sequence: Synthetic oligonucleotide
  Sense strand starting at position 192 of SEQ ID NO: 914739
ccaugaaugcucugacuuc

SEQ ID NO: 1027009 - RNA, 19 nt, Artificial Sequence
  Description of Artificial Sequence: Synthetic oligonucleotide
  Antisense strand to SEQ ID NO: 1027008
gaagucagagcauucaugg

SEQ ID NO: 1027010 - RNA, 19 nt, Artificial Sequence
  Description of Artificial Sequence: Synthetic oligonucleotide
  Sense strand starting at position 229 of SEQ ID NO: 914739
guaccuuccagguauguaa

SEQ ID NO: 1027011 - RNA, 19 nt, Artificial Sequence
  Description of Artificial Sequence: Synthetic oligonucleotide
  Antisense strand to SEQ ID NO: 1027010
uuacauaccuggaagguac

SEQ ID NO: 1027012 - RNA, 19 nt, Artificial Sequence
  Description of Artificial Sequence: Synthetic oligonucleotide
  Sense strand starting at position 246 of SEQ ID NO: 914739
aaggaaagguguuugggua

SEQ ID NO: 1027013 - RNA, 19 nt, Artificial Sequence
  Description of Artificial Sequence: Synthetic oligonucleotide
  Antisense strand to SEQ ID NO: 1027012
uacccaaacaccuuuccuu

SEQ ID NO: 1027014 - RNA, 19 nt, Artificial Sequence
  Description of Artificial Sequence: Synthetic oligonucleotide
  Sense strand starting at position 252 of SEQ ID NO: 914739
agguguuuggguaguuuau

SEQ ID NO: 1027015 - RNA, 19 nt, Artificial Sequence
  Description of Artificial Sequence: Synthetic oligonucleotide
  Antisense strand to SEQ ID NO: 1027014
auaaacuacccaaacaccu

SEQ ID NO: 1027016 - RNA, 19 nt, Artificial Sequence
  Description of Artificial Sequence: Synthetic oligonucleotide
  Sense strand starting at position 254 of SEQ ID NO: 914739
guguuuggguaguuuauuu

SEQ ID NO: 1027017 - RNA, 19 nt, Artificial Sequence
  Description of Artificial Sequence: Synthetic oligonucleotide
  Antisense strand to SEQ ID NO: 1027016
aaauaaacuacccaaacac

SEQ ID NO: 1027018 - RNA, 19 nt, Artificial Sequence
  Description of Artificial Sequence: Synthetic oligonucleotide
  Sense strand starting at position 390 of SEQ ID NO: 914739
uggacaugagcugguaagu

SEQ ID NO: 1027019 - RNA, 19 nt, Artificial Sequence
  Description of Artificial Sequence: Synthetic oligonucleotide
  Antisense strand to SEQ ID NO: 1027018
acuuaccagcucaugucca

SEQ ID NO: 1027020 - RNA, 19 nt, Artificial Sequence
  Description of Artificial Sequence: Synthetic oligonucleotide
  Sense strand starting at position 485 of SEQ ID NO: 914739
gaugaagucaccgaguucu

SEQ ID NO: 1027021 - RNA, 19 nt, Artificial Sequence
  Description of Artificial Sequence: Synthetic oligonucleotide
  Antisense strand to SEQ ID NO: 1027020
agaacucggugacuucauc

SEQ ID NO: 1027022 - RNA, 19 nt, Artificial Sequence
  Description of Artificial Sequence: Synthetic oligonucleotide
  Sense strand starting at position 493 of SEQ ID NO: 914739
caccgaguucuccaugagu

SEQ ID NO: 1027023 - RNA, 19 nt, Artificial Sequence
  Description of Artificial Sequence: Synthetic oligonucleotide
  Antisense strand to SEQ ID NO: 1027022
acucauggagaacucggug

SEQ ID NO: 1027024 - RNA, 19 nt, Artificial Sequence
  Description of Artificial Sequence: Synthetic oligonucleotide
  Sense strand starting at position 496 of SEQ ID NO: 914739
cgaguucuccaugaguacu

SEQ ID NO: 1027025 - RNA, 19 nt, Artificial Sequence
  Description of Artificial Sequence: Synthetic oligonucleotide
  Antisense strand to SEQ ID NO: 1027024
aguacucauggagaacucg

SEQ ID NO: 1027026 - RNA, 19 nt, Artificial Sequence
  Description of Artificial Sequence: Synthetic oligonucleotide
  Sense strand starting at position 977 of SEQ ID NO: 914739
uguccuaagucacuaaaga

SEQ ID NO: 1027027 - RNA, 19 nt, Artificial Sequence
  Description of Artificial Sequence: Synthetic oligonucleotide
  Antisense strand to SEQ ID NO: 1027026
ucuuuagugacuuaggaca

SEQ ID NO: 1027028 - RNA, 19 nt, Artificial Sequence
  Description of Artificial Sequence: Synthetic oligonucleotide
  Sense strand starting at position 1026 of SEQ ID NO: 914739
ugaggacaauuaguuucua

SEQ ID NO: 1027029 - RNA, 19 nt, Artificial Sequence
  Description of Artificial Sequence: Synthetic oligonucleotide
  Antisense strand to SEQ ID NO: 1027028
uagaaacuaauuguccuca

SEQ ID NO: 1027030 - RNA, 19 nt, Artificial Sequence
  Description of Artificial Sequence: Synthetic oligonucleotide
  Sense strand starting at position 1102 of SEQ ID NO: 914739
agcaauauggcucaugaca

SEQ ID NO: 1027031 - RNA, 19 nt, Artificial Sequence
  Description of Artificial Sequence: Synthetic oligonucleotide
  Antisense strand to SEQ ID NO: 1027030
ugucaugagccauauugcu

SEQ ID NO: 1027032 - RNA, 19 nt, Artificial Sequence
  Description of Artificial Sequence: Synthetic oligonucleotide
  Sense strand starting at position 1224 of SEQ ID NO: 914739
auccucagugaguaccaaa

SEQ ID NO: 1027033 - RNA, 19 nt, Artificial Sequence
  Description of Artificial Sequence: Synthetic oligonucleotide
  Antisense strand to SEQ ID NO: 1027032
uuugguacucacugaggau

SEQ ID NO: 1027034 - RNA, 19 nt, Artificial Sequence
  Description of Artificial Sequence: Synthetic oligonucleotide
  Sense strand starting at position 1372 of SEQ ID NO: 914739
ggugcugcugugucaucua

SEQ ID NO: 1027035 - RNA, 19 nt, Artificial Sequence
  Description of Artificial Sequence: Synthetic oligonucleotide
  Antisense strand to SEQ ID NO: 1027034
uagaugacacagcagcacc

SEQ ID NO: 1027036 - RNA, 19 nt, Artificial Sequence
  Description of Artificial Sequence: Synthetic oligonucleotide
  Sense strand starting at position 1685 of SEQ ID NO: 914739
auagacuugucucucaaag

SEQ ID NO: 1027037 - RNA, 19 nt, Artificial Sequence
  Description of Artificial Sequence: Synthetic oligonucleotide
  Antisense strand to SEQ ID NO: 1027036
cuuugagagacaagucuau

SEQ ID NO: 1027038 - RNA, 19 nt, Artificial Sequence
  Description of Artificial Sequence: Synthetic oligonucleotide
  Sense strand starting at position 1903 of SEQ ID NO: 914739
ccagcuguagcccagagaa

SEQ ID NO: 1027039 - RNA, 19 nt, Artificial Sequence
  Description of Artificial Sequence: Synthetic oligonucleotide
  Antisense strand to SEQ ID NO: 1027038
uucucugggcuacagcugg

SEQ ID NO: 1027040 - RNA, 19 nt, Artificial Sequence
  Description of Artificial Sequence: Synthetic oligonucleotide
  Sense strand starting at position 1990 of SEQ ID NO: 914739
gcgauuugcaaguggaaua

SEQ ID NO: 1027041 - RNA, 19 nt, Artificial Sequence
  Description of Artificial Sequence: Synthetic oligonucleotide
  Antisense strand to SEQ ID NO: 1027040
uauuccacuugcaaaucgc

SEQ ID NO: 1027042 - RNA, 19 nt, Artificial Sequence
  Description of Artificial Sequence: Synthetic oligonucleotide
  Sense strand starting at position 2456 of SEQ ID NO: 914739
agggaucugccaggugaca

SEQ ID NO: 1027043 - RNA, 19 nt, Artificial Sequence
  Description of Artificial Sequence: Synthetic oligonucleotide
  Antisense strand to SEQ ID NO: 1027042
ugucaccuggcagaucccu

SEQ ID NO: 1027044 - RNA, 19 nt, Artificial Sequence
  Description of Artificial Sequence: Synthetic oligonucleotide
  Sense strand starting at position 2458 of SEQ ID NO: 914739
ggaucugccaggugacauc

SEQ ID NO: 1027045 - RNA, 19 nt, Artificial Sequence
  Description of Artificial Sequence: Synthetic oligonucleotide
  Antisense strand to SEQ ID NO: 1027044
gaugucaccuggcagaucc

SEQ ID NO: 1027046 - RNA, 19 nt, Artificial Sequence
  Description of Artificial Sequence: Synthetic oligonucleotide
  Sense strand starting at position 2471 of SEQ ID NO: 914739
gacaucuggcuuugugaaa

SEQ ID NO: 1027047 - RNA, 19 nt, Artificial Sequence
  Description of Artificial Sequence: Synthetic oligonucleotide
  Antisense strand to SEQ ID NO: 1027046
uuucacaaagccagauguc

SEQ ID NO: 1027048 - RNA, 19 nt, Artificial Sequence
  Description of Artificial Sequence: Synthetic oligonucleotide
  Sense strand starting at position 2519 of SEQ ID NO: 914739
agccuagacucuuugaagu

SEQ ID NO: 1027049 - RNA, 19 nt, Artificial Sequence
  Description of Artificial Sequence: Synthetic oligonucleotide
  Antisense strand to SEQ ID NO: 1027048
acuucaaagagucuaggcu

SEQ ID NO: 1027050 - RNA, 19 nt, Artificial Sequence
  Description of Artificial Sequence: Synthetic oligonucleotide
  Sense strand starting at position 2536 of SEQ ID NO: 914739
guuguuugacuuuaggcaa

SEQ ID NO: 1027051 - RNA, 19 nt, Artificial Sequence
  Description of Artificial Sequence: Synthetic oligonucleotide
  Antisense strand to SEQ ID NO: 1027050
uugccuaaagucaaacaac

SEQ ID NO: 1027052 - RNA, 19 nt, Artificial Sequence
  Description of Artificial Sequence: Synthetic oligonucleotide
  Sense strand starting at position 2539 of SEQ ID NO: 914739
guuugacuuuaggcaagaa

SEQ ID NO: 1027053 - RNA, 19 nt, Artificial Sequence
  Description of Artificial Sequence: Synthetic oligonucleotide
  Antisense strand to SEQ ID NO: 1027052
uucuugccuaaagucaaac

SEQ ID NO: 1027054 - RNA, 19 nt, Artificial Sequence
  Description of Artificial Sequence: Synthetic oligonucleotide
  Sense strand starting at position 2561 of SEQ ID NO: 914739
gaccucgguuucccagaaa

SEQ ID NO: 1027055 - RNA, 19 nt, Artificial Sequence
  Description of Artificial Sequence: Synthetic oligonucleotide
  Antisense strand to SEQ ID NO: 1027054
uuucugggaaaccgagguc

SEQ ID NO: 1027056 - RNA, 19 nt, Artificial Sequence
  Description of Artificial Sequence: Synthetic oligonucleotide
  Sense strand starting at position 2564 of SEQ ID NO: 914739
cucgguuucccagaaaugg

SEQ ID NO: 1027057 - RNA, 19 nt, Artificial Sequence
  Description of Artificial Sequence: Synthetic oligonucleotide
  Antisense strand to SEQ ID NO: 1027056
ccauuucugggaaaccgag

SEQ ID NO: 1027058 - RNA, 19 nt, Artificial Sequence
  Description of Artificial Sequence: Synthetic oligonucleotide
  Sense strand starting at position 3242 of SEQ ID NO: 914739
uguuuaucucccuacuaga

SEQ ID NO: 1027059 - RNA, 19 nt, Artificial Sequence
  Description of Artificial Sequence: Synthetic oligonucleotide
  Antisense strand to SEQ ID NO: 1027058
ucuaguagggagauaaaca

SEQ ID NO: 1027060 - RNA, 19 nt, Artificial Sequence
  Description of Artificial Sequence: Synthetic oligonucleotide
  Sense strand starting at position 3331 of SEQ ID NO: 914739
ccuagcucacaguagaaau

SEQ ID NO: 1027061 - RNA, 19 nt, Artificial Sequence
  Description of Artificial Sequence: Synthetic oligonucleotide
  Antisense strand to SEQ ID NO: 1027060
auuucuacugugagcuagg

SEQ ID NO: 1027062 - RNA, 19 nt, Artificial Sequence
  Description of Artificial Sequence: Synthetic oligonucleotide
  Sense strand starting at position 3368 of SEQ ID NO: 914739
gugaauuaaugagcaaaug

SEQ ID NO: 1027063 - RNA, 19 nt, Artificial Sequence
  Description of Artificial Sequence: Synthetic oligonucleotide
  Antisense strand to SEQ ID NO: 1027062
cauuugcucauuaauucac

SEQ ID NO: 1027064 - RNA, 19 nt, Artificial Sequence
  Description of Artificial Sequence: Synthetic oligonucleotide
  Sense strand starting at position 3383 of SEQ ID NO: 914739
aauguaagacauggguaau

SEQ ID NO: 1027065 - RNA, 19 nt, Artificial Sequence
  Description of Artificial Sequence: Synthetic oligonucleotide
  Antisense strand to SEQ ID NO: 1027064
auuacccaugucuuacauu

SEQ ID NO: 1027066 - RNA, 19 nt, Artificial Sequence
  Description of Artificial Sequence: Synthetic oligonucleotide
  Sense strand starting at position 3384 of SEQ ID NO: 914739
auguaagacauggguaaua

SEQ ID NO: 1027067 - RNA, 19 nt, Artificial Sequence
  Description of Artificial Sequence: Synthetic oligonucleotide
  Antisense strand to SEQ ID NO: 1027066
uauuacccaugucuuacau

SEQ ID NO: 1027068 - RNA, 19 nt, Artificial Sequence
  Description of Artificial Sequence: Synthetic oligonucleotide
  Sense strand starting at position 3419 of SEQ ID NO: 914739
uugggaaacaugggugagu

SEQ ID NO: 1027069 - RNA, 19 nt, Artificial Sequence
  Description of Artificial Sequence: Synthetic oligonucleotide
  Antisense strand to SEQ ID NO: 1027068
acucacccauguuucccaa

SEQ ID NO: 1027070 - RNA, 19 nt, Artificial Sequence
  Description of Artificial Sequence: Synthetic oligonucleotide
  Sense strand starting at position 3420 of SEQ ID NO: 914739
ugggaaacaugggugaguu

SEQ ID NO: 1027071 - RNA, 19 nt, Artificial Sequence
  Description of Artificial Sequence: Synthetic oligonucleotide
  Antisense strand to SEQ ID NO: 1027070
aacucacccauguuuccca

SEQ ID NO: 1027072 - RNA, 19 nt, Artificial Sequence
  Description of Artificial Sequence: Synthetic oligonucleotide
  Sense strand starting at position 3421 of SEQ ID NO: 914739
gggaaacaugggugaguuu

SEQ ID NO: 1027073 - RNA, 19 nt, Artificial Sequence
  Description of Artificial Sequence: Synthetic oligonucleotide
  Antisense strand to SEQ ID NO: 1027072
aaacucacccauguuuccc

SEQ ID NO: 1027074 - RNA, 19 nt, Artificial Sequence
  Description of Artificial Sequence: Synthetic oligonucleotide
  Sense strand starting at position 3743 of SEQ ID NO: 914739
gccgauauucagggagaaa

SEQ ID NO: 1027075 - RNA, 19 nt, Artificial Sequence
  Description of Artificial Sequence: Synthetic oligonucleotide
  Antisense strand to SEQ ID NO: 1027074
uuucucccugaauaucggc

SEQ ID NO: 1027076 - RNA, 19 nt, Artificial Sequence
  Description of Artificial Sequence: Synthetic oligonucleotide
  Sense strand starting at position 3772 of SEQ ID NO: 914739
cccagugagcuuugagaug

SEQ ID NO: 1027077 - RNA, 19 nt, Artificial Sequence
  Description of Artificial Sequence: Synthetic oligonucleotide
  Antisense strand to SEQ ID NO: 1027076
caucucaaagcucacuggg

SEQ ID NO: 1027078 - RNA, 19 nt, Artificial Sequence
  Description of Artificial Sequence: Synthetic oligonucleotide
  Sense strand starting at position 3778 of SEQ ID NO: 914739
gagcuuugagaugaaggca

SEQ ID NO: 1027079 - RNA, 19 nt, Artificial Sequence
  Description of Artificial Sequence: Synthetic oligonucleotide
  Antisense strand to SEQ ID NO: 1027078
ugccuucaucucaaagcuc

SEQ ID NO: 1027080 - RNA, 19 nt, Artificial Sequence
  Description of Artificial Sequence: Synthetic oligonucleotide
  Sense strand starting at position 3898 of SEQ ID NO: 914739
uaauaaauguugucuuagg

SEQ ID NO: 1027081 - RNA, 19 nt, Artificial Sequence
  Description of Artificial Sequence: Synthetic oligonucleotide
  Antisense strand to SEQ ID NO: 1027080
ccuaagacaacauuuauua

SEQ ID NO: 1027082 - RNA, 19 nt, Artificial Sequence
  Description of Artificial Sequence: Synthetic oligonucleotide
  Sense strand starting at position 592 of SEQ ID NO: 914740
ggagaaguuaaaugccuga

SEQ ID NO: 1027083 - RNA, 19 nt, Artificial Sequence
  Description of Artificial Sequence: Synthetic oligonucleotide
  Antisense strand to SEQ ID NO: 1027082
ucaggcauuuaacuucucc

SEQ ID NO: 1027084 - RNA, 19 nt, Artificial Sequence
  Description of Artificial Sequence: Synthetic oligonucleotide
  Sense strand starting at position 595 of SEQ ID NO: 914740
gaaguuaaaugccugaagu

SEQ ID NO: 1027085 - RNA, 19 nt, Artificial Sequence
  Description of Artificial Sequence: Synthetic oligonucleotide
  Antisense strand to SEQ ID NO: 1027084
acuucaggcauuuaacuuc

SEQ ID NO: 1027086 - RNA, 19 nt, Artificial Sequence
  Description of Artificial Sequence: Synthetic oligonucleotide
  Sense strand starting at position 596 of SEQ ID NO: 914740
aaguuaaaugccugaaguu

SEQ ID NO: 1027087 - RNA, 19 nt, Artificial Sequence
  Description of Artificial Sequence: Synthetic oligonucleotide
  Antisense strand to SEQ ID NO: 1027086
aacuucaggcauuuaacuu

SEQ ID NO: 1027088 - RNA, 19 nt, Artificial Sequence
  Description of Artificial Sequence: Synthetic oligonucleotide
  Sense strand starting at position 697 of SEQ ID NO: 914740
cagucuugacaagguguaa

SEQ ID NO: 1027089 - RNA, 19 nt, Artificial Sequence
  Description of Artificial Sequence: Synthetic oligonucleotide
  Antisense strand to SEQ ID NO: 1027088
uuacaccuugucaagacug

SEQ ID NO: 1027090 - RNA, 19 nt, Artificial Sequence
  Description of Artificial Sequence: Synthetic oligonucleotide
  Sense strand starting at position 709 of SEQ ID NO: 914740
gguguaaacauagaguuug

SEQ ID NO: 1027091 - RNA, 19 nt, Artificial Sequence
  Description of Artificial Sequence: Synthetic oligonucleotide
  Antisense strand to SEQ ID NO: 1027090
caaacucuauguuuacacc

SEQ ID NO: 1027092 - RNA, 19 nt, Artificial Sequence
  Description of Artificial Sequence: Synthetic oligonucleotide
  Sense strand starting at position 714 of SEQ ID NO: 914740
aaacauagaguuugucagu

SEQ ID NO: 1027093 - RNA, 19 nt, Artificial Sequence
  Description of Artificial Sequence: Synthetic oligonucleotide
  Antisense strand to SEQ ID NO: 1027092
acugacaaacucuauguuu

SEQ ID NO: 1027094 - RNA, 19 nt, Artificial Sequence
  Description of Artificial Sequence: Synthetic oligonucleotide
  Sense strand starting at position 721 of SEQ ID NO: 914740
gaguuugucaguguguucu

SEQ ID NO: 1027095 - RNA, 19 nt, Artificial Sequence
  Description of Artificial Sequence: Synthetic oligonucleotide
  Antisense strand to SEQ ID NO: 1027094
agaacacacugacaaacuc

SEQ ID NO: 1027096 - RNA, 19 nt, Artificial Sequence
  Description of Artificial Sequence: Synthetic oligonucleotide
  Sense strand starting at position 1054 of SEQ ID NO: 914740
gguaaaucacaguaucacu

SEQ ID NO: 1027097 - RNA, 19 nt, Artificial Sequence
  Description of Artificial Sequence: Synthetic oligonucleotide
  Antisense strand to SEQ ID NO: 1027096
agugauacugugauuuacc

SEQ ID NO: 1027098 - RNA, 19 nt, Artificial Sequence
  Description of Artificial Sequence: Synthetic oligonucleotide
  Sense strand starting at position 1137 of SEQ ID NO: 914740
aggugaauggugggaaagu

SEQ ID NO: 1027099 - RNA, 19 nt, Artificial Sequence
  Description of Artificial Sequence: Synthetic oligonucleotide
  Antisense strand to SEQ ID NO: 1027098
acuuucccaccauucaccu

SEQ ID NO: 1027100 - RNA, 19 nt, Artificial Sequence
  Description of Artificial Sequence: Synthetic oligonucleotide
  Sense strand starting at position 1174 of SEQ ID NO: 914740
aguccuacugugcaaauaa

SEQ ID NO: 1027101 - RNA, 19 nt, Artificial Sequence
  Description of Artificial Sequence: Synthetic oligonucleotide
  Antisense strand to SEQ ID NO: 1027100
uuauuugcacaguaggacu

SEQ ID NO: 1027102 - RNA, 19 nt, Artificial Sequence
  Description of Artificial Sequence: Synthetic oligonucleotide
  Sense strand starting at position 2060 of SEQ ID NO: 914740
ggacgaggucucgguagga

SEQ ID NO: 1027103 - RNA, 19 nt, Artificial Sequence
  Description of Artificial Sequence: Synthetic oligonucleotide
  Antisense strand to SEQ ID NO: 1027102
uccuaccgagaccucgucc

SEQ ID NO: 1027104 - RNA, 19 nt, Artificial Sequence
  Description of Artificial Sequence: Synthetic oligonucleotide
  Sense strand starting at position 2448 of SEQ ID NO: 914740
ugugguucaugucugagga

SEQ ID NO: 1027105 - RNA, 19 nt, Artificial Sequence
  Description of Artificial Sequence: Synthetic oligonucleotide
  Antisense strand to SEQ ID NO: 1027104
uccucagacaugaaccaca

SEQ ID NO: 1027106 - RNA, 19 nt, Artificial Sequence
  Description of Artificial Sequence: Synthetic oligonucleotide
  Sense strand starting at position 2449 of SEQ ID NO: 914740
gugguucaugucugaggag

SEQ ID NO: 1027107 - RNA, 19 nt, Artificial Sequence
  Description of Artificial Sequence: Synthetic oligonucleotide
  Antisense strand to SEQ ID NO: 1027106
cuccucagacaugaaccac

SEQ ID NO: 1027108 - RNA, 19 nt, Artificial Sequence
  Description of Artificial Sequence: Synthetic oligonucleotide
  Sense strand starting at position 2613 of SEQ ID NO: 914740
cagaauguaugucccaaag

SEQ ID NO: 1027109 - RNA, 19 nt, Artificial Sequence
  Description of Artificial Sequence: Synthetic oligonucleotide
  Antisense strand to SEQ ID NO: 1027108
cuuugggacauacauucug

SEQ ID NO: 1027110 - RNA, 19 nt, Artificial Sequence
  Description of Artificial Sequence: Synthetic oligonucleotide
  Sense strand starting at position 2639 of SEQ ID NO: 914740
uguaguauuucggugcaac

SEQ ID NO: 1027111 - RNA, 19 nt, Artificial Sequence
  Description of Artificial Sequence: Synthetic oligonucleotide
  Antisense strand to SEQ ID NO: 1027110
guugcaccgaaauacuaca

SEQ ID NO: 1027112 - RNA, 19 nt, Artificial Sequence
  Description of Artificial Sequence: Synthetic oligonucleotide
  Sense strand starting at position 2640 of SEQ ID NO: 914740
guaguauuucggugcaacu

SEQ ID NO: 1027113 - RNA, 19 nt, Artificial Sequence
  Description of Artificial Sequence: Synthetic oligonucleotide
  Antisense strand to SEQ ID NO: 1027112
aguugcaccgaaauacuac

SEQ ID NO: 1027114 - RNA, 19 nt, Artificial Sequence
  Description of Artificial Sequence: Synthetic oligonucleotide
  Sense strand starting at position 2851 of SEQ ID NO: 914740
auugcagaucuuggaacaa

SEQ ID NO: 1027115 - RNA, 19 nt, Artificial Sequence
  Description of Artificial Sequence: Synthetic oligonucleotide
  Antisense strand to SEQ ID NO: 1027114
uuguuccaagaucugcaau

SEQ ID NO: 1027116 - RNA, 19 nt, Artificial Sequence
  Description of Artificial Sequence: Synthetic oligonucleotide
  Sense strand starting at position 2893 of SEQ ID NO: 914740
guccuuugucuagcguuaa

SEQ ID NO: 1027117 - RNA, 19 nt, Artificial Sequence
  Description of Artificial Sequence: Synthetic oligonucleotide
  Antisense strand to SEQ ID NO: 1027116
uuaacgcuagacaaaggac

SEQ ID NO: 1027118 - RNA, 19 nt, Artificial Sequence
  Description of Artificial Sequence: Synthetic oligonucleotide
  Sense strand starting at position 2896 of SEQ ID NO: 914740
cuuugucuagcguuaagca

SEQ ID NO: 1027119 - RNA, 19 nt, Artificial Sequence
  Description of Artificial Sequence: Synthetic oligonucleotide
  Antisense strand to SEQ ID NO: 1027118
ugcuuaacgcuagacaaag

SEQ ID NO: 1027120 - RNA, 19 nt, Artificial Sequence
  Description of Artificial Sequence: Synthetic oligonucleotide
  Sense strand starting at position 2903 of SEQ ID NO: 914740
uagcguuaagcacauauuu

SEQ ID NO: 1027121 - RNA, 19 nt, Artificial Sequence
  Description of Artificial Sequence: Synthetic oligonucleotide
  Antisense strand to SEQ ID NO: 1027120
aaauaugugcuuaacgcua

SEQ ID NO: 1027122 - RNA, 19 nt, Artificial Sequence
  Description of Artificial Sequence: Synthetic oligonucleotide
  Sense strand starting at position 3018 of SEQ ID NO: 914740
uggagcaauccgggucuga

SEQ ID NO: 1027123 - RNA, 19 nt, Artificial Sequence
  Description of Artificial Sequence: Synthetic oligonucleotide
  Antisense strand to SEQ ID NO: 1027122
ucagacccggauugcucca

SEQ ID NO: 1027124 - RNA, 19 nt, Artificial Sequence
  Description of Artificial Sequence: Synthetic oligonucleotide
  Sense strand starting at position 3022 of SEQ ID NO: 914740
gcaauccgggucugacuua

SEQ ID NO: 1027125 - RNA, 19 nt, Artificial Sequence
  Description of Artificial Sequence: Synthetic oligonucleotide
  Antisense strand to SEQ ID NO: 1027124
uaagucagacccggauugc

SEQ ID NO: 1027126 - RNA, 19 nt, Artificial Sequence
  Description of Artificial Sequence: Synthetic oligonucleotide
  Sense strand starting at position 3127 of SEQ ID NO: 914740
aggcuaugauugcuugaug

SEQ ID NO: 1027127 - RNA, 19 nt, Artificial Sequence
  Description of Artificial Sequence: Synthetic oligonucleotide
  Antisense strand to SEQ ID NO: 1027126
caucaagcaaucauagccu

SEQ ID NO: 1027128 - RNA, 19 nt, Artificial Sequence
  Description of Artificial Sequence: Synthetic oligonucleotide
  Sense strand starting at position 3130 of SEQ ID NO: 914740
cuaugauugcuugauggcu

SEQ ID NO: 1027129 - RNA, 19 nt, Artificial Sequence
  Description of Artificial Sequence: Synthetic oligonucleotide
  Antisense strand to SEQ ID NO: 1027128
agccaucaagcaaucauag

SEQ ID NO: 1027130 - RNA, 19 nt, Artificial Sequence
  Description of Artificial Sequence: Synthetic oligonucleotide
  Sense strand starting at position 3135 of SEQ ID NO: 914740
auugcuugauggcuaugaa

SEQ ID NO: 1027131 - RNA, 19 nt, Artificial Sequence
  Description of Artificial Sequence: Synthetic oligonucleotide
  Antisense strand to SEQ ID NO: 1027130
uucauagccaucaagcaau

SEQ ID NO: 1027132 - RNA, 19 nt, Artificial Sequence
  Description of Artificial Sequence: Synthetic oligonucleotide
  Sense strand starting at position 3136 of SEQ ID NO: 914740
uugcuugauggcuaugaag

SEQ ID NO: 1027133 - RNA, 19 nt, Artificial Sequence
  Description of Artificial Sequence: Synthetic oligonucleotide
  Antisense strand to SEQ ID NO: 1027132
cuucauagccaucaagcaa

SEQ ID NO: 1027134 - RNA, 19 nt, Artificial Sequence
  Description of Artificial Sequence: Synthetic oligonucleotide
  Sense strand starting at position 3145 of SEQ ID NO: 914740
ggcuaugaagucugugaug

SEQ ID NO: 1027135 - RNA, 19 nt, Artificial Sequence
  Description of Artificial Sequence: Synthetic oligonucleotide
  Antisense strand to SEQ ID NO: 1027134
caucacagacuucauagcc

SEQ ID NO: 1027136 - RNA, 19 nt, Artificial Sequence
  Description of Artificial Sequence: Synthetic oligonucleotide
  Sense strand starting at position 3147 of SEQ ID NO: 914740
cuaugaagucugugaugga

SEQ ID NO: 1027137 - RNA, 19 nt, Artificial Sequence
  Description of Artificial Sequence: Synthetic oligonucleotide
  Antisense strand to SEQ ID NO: 1027136
uccaucacagacuucauag

SEQ ID NO: 1027138 - RNA, 19 nt, Artificial Sequence
  Description of Artificial Sequence: Synthetic oligonucleotide
  Sense strand starting at position 3151 of SEQ ID NO: 914740
gaagucugugauggaaaca

SEQ ID NO: 1027139 - RNA, 19 nt, Artificial Sequence
  Description of Artificial Sequence: Synthetic oligonucleotide
  Antisense strand to SEQ ID NO: 1027138
uguuuccaucacagacuuc

SEQ ID NO: 1027140 - RNA, 19 nt, Artificial Sequence
  Description of Artificial Sequence: Synthetic oligonucleotide
  Sense strand starting at position 3162 of SEQ ID NO: 914740
uggaaacauguugguuuaa

SEQ ID NO: 1027141 - RNA, 19 nt, Artificial Sequence
  Description of Artificial Sequence: Synthetic oligonucleotide
  Antisense strand to SEQ ID NO: 1027140
uuaaaccaacauguuucca

SEQ ID NO: 1027142 - RNA, 19 nt, Artificial Sequence
  Description of Artificial Sequence: Synthetic oligonucleotide
  Sense strand starting at position 3163 of SEQ ID NO: 914740
ggaaacauguugguuuaau

SEQ ID NO: 1027143 - RNA, 19 nt, Artificial Sequence
  Description of Artificial Sequence: Synthetic oligonucleotide
  Antisense strand to SEQ ID NO: 1027142
auuaaaccaacauguuucc

SEQ ID NO: 1027144 - RNA, 19 nt, Artificial Sequence
  Description of Artificial Sequence: Synthetic oligonucleotide
  Sense strand starting at position 3164 of SEQ ID NO: 914740
gaaacauguugguuuaauu

SEQ ID NO: 1027145 - RNA, 19 nt, Artificial Sequence
  Description of Artificial Sequence: Synthetic oligonucleotide
  Antisense strand to SEQ ID NO: 1027144
aauuaaaccaacauguuuc

SEQ ID NO: 1027146 - RNA, 19 nt, Artificial Sequence
  Description of Artificial Sequence: Synthetic oligonucleotide
  Sense strand starting at position 3171 of SEQ ID NO: 914740
guugguuuaauuggaauau

SEQ ID NO: 1027147 - RNA, 19 nt, Artificial Sequence
  Description of Artificial Sequence: Synthetic oligonucleotide
  Antisense strand to SEQ ID NO: 1027146
auauuccaauuaaaccaac

SEQ ID NO: 1027148 - RNA, 19 nt, Artificial Sequence
  Description of Artificial Sequence: Synthetic oligonucleotide
  Sense strand starting at position 3337 of SEQ ID NO: 914740
ucucaaaugguuuaagcaa

SEQ ID NO: 1027149 - RNA, 19 nt, Artificial Sequence
  Description of Artificial Sequence: Synthetic oligonucleotide
  Antisense strand to SEQ ID NO: 1027148
uugcuuaaaccauuugaga

SEQ ID NO: 1027150 - RNA, 19 nt, Artificial Sequence
  Description of Artificial Sequence: Synthetic oligonucleotide
  Sense strand starting at position 3392 of SEQ ID NO: 914740
aacuuaacauggguuguga

SEQ ID NO: 1027151 - RNA, 19 nt, Artificial Sequence
  Description of Artificial Sequence: Synthetic oligonucleotide
  Antisense strand to SEQ ID NO: 1027150
ucacaacccauguuaaguu

SEQ ID NO: 1027152 - RNA, 19 nt, Artificial Sequence
  Description of Artificial Sequence: Synthetic oligonucleotide
  Sense strand starting at position 3394 of SEQ ID NO: 914740
cuuaacauggguugugaaa

SEQ ID NO: 1027153 - RNA, 19 nt, Artificial Sequence
  Description of Artificial Sequence: Synthetic oligonucleotide
  Antisense strand to SEQ ID NO: 1027152
uuucacaacccauguuaag

SEQ ID NO: 1027154 - RNA, 19 nt, Artificial Sequence
  Description of Artificial Sequence: Synthetic oligonucleotide
  Sense strand starting at position 3563 of SEQ ID NO: 914740
uuacuuuaucugggcuuaa

SEQ ID NO: 1027155 - RNA, 19 nt, Artificial Sequence
  Description of Artificial Sequence: Synthetic oligonucleotide
  Antisense strand to SEQ ID NO: 1027154
uuaagcccagauaaaguaa

SEQ ID NO: 1027156 - RNA, 19 nt, Artificial Sequence
  Description of Artificial Sequence: Synthetic oligonucleotide
  Sense strand starting at position 3567 of SEQ ID NO: 914740
uuuaucugggcuuaaugau

SEQ ID NO: 1027157 - RNA, 19 nt, Artificial Sequence
  Description of Artificial Sequence: Synthetic oligonucleotide
  Antisense strand to SEQ ID NO: 1027156
aucauuaagcccagauaaa

SEQ ID NO: 1027158 - RNA, 19 nt, Artificial Sequence
  Description of Artificial Sequence: Synthetic oligonucleotide
  Sense strand starting at position 3616 of SEQ ID NO: 914740
ccgagaugcgucuugcuca

SEQ ID NO: 1027159 - RNA, 19 nt, Artificial Sequence
  Description of Artificial Sequence: Synthetic oligonucleotide
  Antisense strand to SEQ ID NO: 1027158
ugagcaagacgcaucucgg

SEQ ID NO: 1027160 - RNA, 19 nt, Artificial Sequence
  Description of Artificial Sequence: Synthetic oligonucleotide
  Sense strand starting at position 3629 of SEQ ID NO: 914740
ugcucauaggcugagacuu

SEQ ID NO: 1027161 - RNA, 19 nt, Artificial Sequence
  Description of Artificial Sequence: Synthetic oligonucleotide
  Antisense strand to SEQ ID NO: 1027160
aagucucagccuaugagca

SEQ ID NO: 1027162 - RNA, 19 nt, Artificial Sequence
  Description of Artificial Sequence: Synthetic oligonucleotide
  Sense strand starting at position 121 of SEQ ID NO: 914741
auguaucuguaaguacaua

SEQ ID NO: 1027163 - RNA, 19 nt, Artificial Sequence
  Description of Artificial Sequence: Synthetic oligonucleotide
  Antisense strand to SEQ ID NO: 1027162
uauguacuuacagauacau

SEQ ID NO: 1027164 - RNA, 19 nt, Artificial Sequence
  Description of Artificial Sequence: Synthetic oligonucleotide
  Sense strand starting at position 161 of SEQ ID NO: 914741
agcuuaugucauuaaacug

SEQ ID NO: 1027165 - RNA, 19 nt, Artificial Sequence
  Description of Artificial Sequence: Synthetic oligonucleotide
  Antisense strand to SEQ ID NO: 1027164
caguuuaaugacauaagcu

SEQ ID NO: 1027166 - RNA, 19 nt, Artificial Sequence
  Description of Artificial Sequence: Synthetic oligonucleotide
  Sense strand starting at position 273 of SEQ ID NO: 914741
ccaagucuuugaucacaga

SEQ ID NO: 1027167 - RNA, 19 nt, Artificial Sequence
  Description of Artificial Sequence: Synthetic oligonucleotide
  Antisense strand to SEQ ID NO: 1027166
ucugugaucaaagacuugg

SEQ ID NO: 1027168 - RNA, 19 nt, Artificial Sequence
  Description of Artificial Sequence: Synthetic oligonucleotide
  Sense strand starting at position 292 of SEQ ID NO: 914741
gcaaacucagcaugagacu

SEQ ID NO: 1027169 - RNA, 19 nt, Artificial Sequence
  Description of Artificial Sequence: Synthetic oligonucleotide
  Antisense strand to SEQ ID NO: 1027168
agucucaugcugaguuugc

SEQ ID NO: 1027170 - RNA, 19 nt, Artificial Sequence
  Description of Artificial Sequence: Synthetic oligonucleotide
  Sense strand starting at position 324 of SEQ ID NO: 914741
acgcuuaagcauuaaaugu

SEQ ID NO: 1027171 - RNA, 19 nt, Artificial Sequence
  Description of Artificial Sequence: Synthetic oligonucleotide
  Antisense strand to SEQ ID NO: 1027170
acauuuaaugcuuaagcgu

SEQ ID NO: 1027172 - RNA, 19 nt, Artificial Sequence
  Description of Artificial Sequence: Synthetic oligonucleotide
  Sense strand starting at position 335 of SEQ ID NO: 914741
uuaaauguaugugcuggaa

SEQ ID NO: 1027173 - RNA, 19 nt, Artificial Sequence
  Description of Artificial Sequence: Synthetic oligonucleotide
  Antisense strand to SEQ ID NO: 1027172
uuccagcacauacauuuaa

SEQ ID NO: 1027174 - RNA, 19 nt, Artificial Sequence
  Description of Artificial Sequence: Synthetic oligonucleotide
  Sense strand starting at position 2177 of SEQ ID NO: 914741
uggcaaacgagcgagaauu

SEQ ID NO: 1027175 - RNA, 19 nt, Artificial Sequence
  Description of Artificial Sequence: Synthetic oligonucleotide
  Antisense strand to SEQ ID NO: 1027174
aauucucgcucguuugcca

SEQ ID NO: 1027176 - RNA, 19 nt, Artificial Sequence
  Description of Artificial Sequence: Synthetic oligonucleotide
  Sense strand starting at position 2384 of SEQ ID NO: 914741
aacgguuuccagcagaaac

SEQ ID NO: 1027177 - RNA, 19 nt, Artificial Sequence
  Description of Artificial Sequence: Synthetic oligonucleotide
  Antisense strand to SEQ ID NO: 1027176
guuucugcuggaaaccguu

SEQ ID NO: 1027178 - RNA, 19 nt, Artificial Sequence
  Description of Artificial Sequence: Synthetic oligonucleotide
  Sense strand starting at position 2386 of SEQ ID NO: 914741
cgguuuccagcagaaacua

SEQ ID NO: 1027179 - RNA, 19 nt, Artificial Sequence
  Description of Artificial Sequence: Synthetic oligonucleotide
  Antisense strand to SEQ ID NO: 1027178
uaguuucugcuggaaaccg

SEQ ID NO: 1027180 - RNA, 19 nt, Artificial Sequence
  Description of Artificial Sequence: Synthetic oligonucleotide
  Sense strand starting at position 2641 of SEQ ID NO: 914741
uuuauugagaugcgaaaca

SEQ ID NO: 1027181 - RNA, 19 nt, Artificial Sequence
  Description of Artificial Sequence: Synthetic oligonucleotide
  Antisense strand to SEQ ID NO: 1027180
uguuucgcaucucaauaaa

SEQ ID NO: 1027182 - RNA, 19 nt, Artificial Sequence
  Description of Artificial Sequence: Synthetic oligonucleotide
  Sense strand starting at position 2707 of SEQ ID NO: 914741
uuuggaaacgcugauguga

SEQ ID NO: 1027183 - RNA, 19 nt, Artificial Sequence
  Description of Artificial Sequence: Synthetic oligonucleotide
  Antisense strand to SEQ ID NO: 1027182
ucacaucagcguuuccaaa

SEQ ID NO: 1027184 - RNA, 19 nt, Artificial Sequence
  Description of Artificial Sequence: Synthetic oligonucleotide
  Sense strand starting at position 2720 of SEQ ID NO: 914741
augugaagucccuacgaug

SEQ ID NO: 1027185 - RNA, 19 nt, Artificial Sequence
  Description of Artificial Sequence: Synthetic oligonucleotide
  Antisense strand to SEQ ID NO: 1027184
caucguagggacuucacau

SEQ ID NO: 1027186 - RNA, 19 nt, Artificial Sequence
  Description of Artificial Sequence: Synthetic oligonucleotide
  Sense strand starting at position 2775 of SEQ ID NO: 914741
uugcuucuuccguugcaaa

SEQ ID NO: 1027187 - RNA, 19 nt, Artificial Sequence
  Description of Artificial Sequence: Synthetic oligonucleotide
  Antisense strand to SEQ ID NO: 1027186
uuugcaacggaagaagcaa

SEQ ID NO: 1027188 - RNA, 19 nt, Artificial Sequence
  Description of Artificial Sequence: Synthetic oligonucleotide
  Sense strand starting at position 2859 of SEQ ID NO: 914741
gagggaguuuaucuugucu

SEQ ID NO: 1027189 - RNA, 19 nt, Artificial Sequence
  Description of Artificial Sequence: Synthetic oligonucleotide
  Antisense strand to SEQ ID NO: 1027188
agacaagauaaacucccuc

SEQ ID NO: 1027190 - RNA, 19 nt, Artificial Sequence
  Description of Artificial Sequence: Synthetic oligonucleotide
  Sense strand starting at position 2909 of SEQ ID NO: 914741
accuuagcucccugaaagu

SEQ ID NO: 1027191 - RNA, 19 nt, Artificial Sequence
  Description of Artificial Sequence: Synthetic oligonucleotide
  Antisense strand to SEQ ID NO: 1027190
acuuucagggagcuaaggu

SEQ ID NO: 1027192 - RNA, 19 nt, Artificial Sequence
  Description of Artificial Sequence: Synthetic oligonucleotide
  Sense strand starting at position 2918 of SEQ ID NO: 914741
cccugaaaguuuccuagau

SEQ ID NO: 1027193 - RNA, 19 nt, Artificial Sequence
  Description of Artificial Sequence: Synthetic oligonucleotide
  Antisense strand to SEQ ID NO: 1027192
aucuaggaaacuuucaggg

SEQ ID NO: 1027194 - RNA, 19 nt, Artificial Sequence
  Description of Artificial Sequence: Synthetic oligonucleotide
  Sense strand starting at position 2919 of SEQ ID NO: 914741
ccugaaaguuuccuagauc

SEQ ID NO: 1027195 - RNA, 19 nt, Artificial Sequence
  Description of Artificial Sequence: Synthetic oligonucleotide
  Antisense strand to SEQ ID NO: 1027194
gaucuaggaaacuuucagg

SEQ ID NO: 1027196 - RNA, 19 nt, Artificial Sequence
  Description of Artificial Sequence: Synthetic oligonucleotide
  Sense strand starting at position 2922 of SEQ ID NO: 914741
gaaaguuuccuagaucguc

SEQ ID NO: 1027197 - RNA, 19 nt, Artificial Sequence
  Description of Artificial Sequence: Synthetic oligonucleotide
  Antisense strand to SEQ ID NO: 1027196
gacgaucuaggaaacuuuc

SEQ ID NO: 1027198 - RNA, 19 nt, Artificial Sequence
  Description of Artificial Sequence: Synthetic oligonucleotide
  Sense strand starting at position 3024 of SEQ ID NO: 914741
cuuugucaaguuuaaagua

SEQ ID NO: 1027199 - RNA, 19 nt, Artificial Sequence
  Description of Artificial Sequence: Synthetic oligonucleotide
  Antisense strand to SEQ ID NO: 1027198
uacuuuaaacuugacaaag

SEQ ID NO: 1027200 - RNA, 19 nt, Artificial Sequence
  Description of Artificial Sequence: Synthetic oligonucleotide
  Sense strand starting at position 3075 of SEQ ID NO: 914741
agaauaaacuugucuguuu

SEQ ID NO: 1027201 - RNA, 19 nt, Artificial Sequence
  Description of Artificial Sequence: Synthetic oligonucleotide
  Antisense strand to SEQ ID NO: 1027200
aaacagacaaguuuauucu

SEQ ID NO: 1027202 - RNA, 19 nt, Artificial Sequence
  Description of Artificial Sequence: Synthetic oligonucleotide
  Sense strand starting at position 3078 of SEQ ID NO: 914741
auaaacuugucuguuucua

SEQ ID NO: 1027203 - RNA, 19 nt, Artificial Sequence
  Description of Artificial Sequence: Synthetic oligonucleotide
  Antisense strand to SEQ ID NO: 1027202
uagaaacagacaaguuuau

SEQ ID NO: 1027204 - RNA, 19 nt, Artificial Sequence
  Description of Artificial Sequence: Synthetic oligonucleotide
  Sense strand starting at position 3082 of SEQ ID NO: 914741
acuugucuguuucuacaaa

SEQ ID NO: 1027205 - RNA, 19 nt, Artificial Sequence
  Description of Artificial Sequence: Synthetic oligonucleotide
  Antisense strand to SEQ ID NO: 1027204
uuuguagaaacagacaagu

SEQ ID NO: 1027206 - RNA, 19 nt, Artificial Sequence
  Description of Artificial Sequence: Synthetic oligonucleotide
  Sense strand starting at position 3108 of SEQ ID NO: 914741
guugguauuucgagaggaa

SEQ ID NO: 1027207 - RNA, 19 nt, Artificial Sequence
  Description of Artificial Sequence: Synthetic oligonucleotide
  Antisense strand to SEQ ID NO: 1027206
uuccucucgaaauaccaac

SEQ ID NO: 1027208 - RNA, 19 nt, Artificial Sequence
  Description of Artificial Sequence: Synthetic oligonucleotide
  Sense strand starting at position 3129 of SEQ ID NO: 914741
gcaaucaaccuauggauca

SEQ ID NO: 1027209 - RNA, 19 nt, Artificial Sequence
  Description of Artificial Sequence: Synthetic oligonucleotide
  Antisense strand to SEQ ID NO: 1027208
ugauccauagguugauugc

SEQ ID NO: 1027210 - RNA, 19 nt, Artificial Sequence
  Description of Artificial Sequence: Synthetic oligonucleotide
  Sense strand starting at position 3151 of SEQ ID NO: 914741
ugagaauuguauccuuauu

SEQ ID NO: 1027211 - RNA, 19 nt, Artificial Sequence
  Description of Artificial Sequence: Synthetic oligonucleotide
  Antisense strand to SEQ ID NO: 1027210
aauaaggauacaauucuca

SEQ ID NO: 1027212 - RNA, 19 nt, Artificial Sequence
  Description of Artificial Sequence: Synthetic oligonucleotide
  Sense strand starting at position 3196 of SEQ ID NO: 914741
ugguaugucugucuauuua

SEQ ID NO: 1027213 - RNA, 19 nt, Artificial Sequence
  Description of Artificial Sequence: Synthetic oligonucleotide
  Antisense strand to SEQ ID NO: 1027212
uaaauagacagacauacca

SEQ ID NO: 1027214 - RNA, 19 nt, Artificial Sequence
  Description of Artificial Sequence: Synthetic oligonucleotide
  Sense strand starting at position 3378 of SEQ ID NO: 914741
acagaaaugugauuguguu

SEQ ID NO: 1027215 - RNA, 19 nt, Artificial Sequence
  Description of Artificial Sequence: Synthetic oligonucleotide
  Antisense strand to SEQ ID NO: 1027214
aacacaaucacauuucugu

SEQ ID NO: 1027216 - RNA, 19 nt, Artificial Sequence
  Description of Artificial Sequence: Synthetic oligonucleotide
  Sense strand starting at position 3396 of SEQ ID NO: 914741
uucucauguugaucucaua

SEQ ID NO: 1027217 - RNA, 19 nt, Artificial Sequence
  Description of Artificial Sequence: Synthetic oligonucleotide
  Antisense strand to SEQ ID NO: 1027216
uaugagaucaacaugagaa

SEQ ID NO: 1027218 - RNA, 19 nt, Artificial Sequence
  Description of Artificial Sequence: Synthetic oligonucleotide
  Sense strand starting at position 3460 of SEQ ID NO: 914741
uguguauuacuuggcauuu

SEQ ID NO: 1027219 - RNA, 19 nt, Artificial Sequence
  Description of Artificial Sequence: Synthetic oligonucleotide
  Antisense strand to SEQ ID NO: 1027218
aaaugccaaguaauacaca

SEQ ID NO: 1027220 - RNA, 19 nt, Artificial Sequence
  Description of Artificial Sequence: Synthetic oligonucleotide
  Sense strand starting at position 3679 of SEQ ID NO: 914741
ugaugacagcuauagguuu

SEQ ID NO: 1027221 - RNA, 19 nt, Artificial Sequence
  Description of Artificial Sequence: Synthetic oligonucleotide
  Antisense strand to SEQ ID NO: 1027220
aaaccuauagcugucauca

SEQ ID NO: 1027222 - RNA, 19 nt, Artificial Sequence
  Description of Artificial Sequence: Synthetic oligonucleotide
  Sense strand starting at position 3699 of SEQ ID NO: 914741
guguacauauucucuauca

SEQ ID NO: 1027223 - RNA, 19 nt, Artificial Sequence
  Description of Artificial Sequence: Synthetic oligonucleotide
  Antisense strand to SEQ ID NO: 1027222
ugauagagaauauguacac

SEQ ID NO: 1027224 - RNA, 19 nt, Artificial Sequence
  Description of Artificial Sequence: Synthetic oligonucleotide
  Sense strand starting at position 3741 of SEQ ID NO: 914741
gccugcagucacuagaaau

SEQ ID NO: 1027225 - RNA, 19 nt, Artificial Sequence
  Description of Artificial Sequence: Synthetic oligonucleotide
  Antisense strand to SEQ ID NO: 1027224
auuucuagugacugcaggc

SEQ ID NO: 1027226 - RNA, 19 nt, Artificial Sequence
  Description of Artificial Sequence: Synthetic oligonucleotide
  Sense strand starting at position 3764 of SEQ ID NO: 914741
uggugcuuuauuggaacaa

SEQ ID NO: 1027227 - RNA, 19 nt, Artificial Sequence
  Description of Artificial Sequence: Synthetic oligonucleotide
  Antisense strand to SEQ ID NO: 1027226
uuguuccaauaaagcacca

SEQ ID NO: 1027228 - RNA, 19 nt, Artificial Sequence
  Description of Artificial Sequence: Synthetic oligonucleotide
  Sense strand starting at position 3768 of SEQ ID NO: 914741
gcuuuauuggaacaagcua

SEQ ID NO: 1027229 - RNA, 19 nt, Artificial Sequence
  Description of Artificial Sequence: Synthetic oligonucleotide
  Antisense strand to SEQ ID NO: 1027228
uagcuuguuccaauaaagc

SEQ ID NO: 1027230 - RNA, 19 nt, Artificial Sequence
  Description of Artificial Sequence: Synthetic oligonucleotide
  Sense strand starting at position 3775 of SEQ ID NO: 914741
uggaacaagcuauguauca

SEQ ID NO: 1027231 - RNA, 19 nt, Artificial Sequence
  Description of Artificial Sequence: Synthetic oligonucleotide
  Antisense strand to SEQ ID NO: 1027230
ugauacauagcuuguucca

SEQ ID NO: 1027232 - RNA, 19 nt, Artificial Sequence
  Description of Artificial Sequence: Synthetic oligonucleotide
  Sense strand starting at position 3776 of SEQ ID NO: 914741
ggaacaagcuauguaucaa

SEQ ID NO: 1027233 - RNA, 19 nt, Artificial Sequence
  Description of Artificial Sequence: Synthetic oligonucleotide
  Antisense strand to SEQ ID NO: 1027232
uugauacauagcuuguucc

SEQ ID NO: 1027234 - RNA, 19 nt, Artificial Sequence
  Description of Artificial Sequence: Synthetic oligonucleotide
  Sense strand starting at position 3813 of SEQ ID NO: 914741
ggcguugcuggaggaauuu

SEQ ID NO: 1027235 - RNA, 19 nt, Artificial Sequence
  Description of Artificial Sequence: Synthetic oligonucleotide
  Antisense strand to SEQ ID NO: 1027234
aaauuccuccagcaacgcc

SEQ ID NO: 1027236 - RNA, 19 nt, Artificial Sequence
  Description of Artificial Sequence: Synthetic oligonucleotide
  Sense strand starting at position 3927 of SEQ ID NO: 914741
uggaguauuugagaaccuc

SEQ ID NO: 1027237 - RNA, 19 nt, Artificial Sequence
  Description of Artificial Sequence: Synthetic oligonucleotide
  Antisense strand to SEQ ID NO: 1027236
gagguucucaaauacucca

SEQ ID NO: 1027238 - RNA, 19 nt, Artificial Sequence
  Description of Artificial Sequence: Synthetic oligonucleotide
  Sense strand starting at position 3976 of SEQ ID NO: 914741
cccagauuucugugcucau

SEQ ID NO: 1027239 - RNA, 19 nt, Artificial Sequence
  Description of Artificial Sequence: Synthetic oligonucleotide
  Antisense strand to SEQ ID NO: 1027238
augagcacagaaaucuggg

SEQ ID NO: 1027240 - RNA, 19 nt, Artificial Sequence
  Description of Artificial Sequence: Synthetic oligonucleotide
  Sense strand starting at position 3977 of SEQ ID NO: 914741
ccagauuucugugcucauu

SEQ ID NO: 1027241 - RNA, 19 nt, Artificial Sequence
  Description of Artificial Sequence: Synthetic oligonucleotide
  Antisense strand to SEQ ID NO: 1027240
aaugagcacagaaaucugg

SEQ ID NO: 1027242 - RNA, 19 nt, Artificial Sequence
  Description of Artificial Sequence: Synthetic oligonucleotide
  Sense strand starting at position 54 of SEQ ID NO: 914742
cacugagguucuuccaaga

SEQ ID NO: 1027243 - RNA, 19 nt, Artificial Sequence
  Description of Artificial Sequence: Synthetic oligonucleotide
  Antisense strand to SEQ ID NO: 1027242
ucuuggaagaaccucagug

SEQ ID NO: 1027244 - RNA, 19 nt, Artificial Sequence
  Description of Artificial Sequence: Synthetic oligonucleotide
  Sense strand starting at position 551 of SEQ ID NO: 914742
gaggaagauuaugccuaca

SEQ ID NO: 1027245 - RNA, 19 nt, Artificial Sequence
  Description of Artificial Sequence: Synthetic oligonucleotide
  Antisense strand to SEQ ID NO: 1027244
uguaggcauaaucuuccuc

SEQ ID NO: 1027246 - RNA, 19 nt, Artificial Sequence
  Description of Artificial Sequence: Synthetic oligonucleotide
  Sense strand starting at position 553 of SEQ ID NO: 914742
ggaagauuaugccuacaua

SEQ ID NO: 1027247 - RNA, 19 nt, Artificial Sequence
  Description of Artificial Sequence: Synthetic oligonucleotide
  Antisense strand to SEQ ID NO: 1027246
uauguaggcauaaucuucc

SEQ ID NO: 1027248 - RNA, 19 nt, Artificial Sequence
  Description of Artificial Sequence: Synthetic oligonucleotide
  Sense strand starting at position 679 of SEQ ID NO: 914742
ucaguuccaguggaaucua

SEQ ID NO: 1027249 - RNA, 19 nt, Artificial Sequence
  Description of Artificial Sequence: Synthetic oligonucleotide
  Antisense strand to SEQ ID NO: 1027248
uagauuccacuggaacuga

SEQ ID NO: 1027250 - RNA, 19 nt, Artificial Sequence
  Description of Artificial Sequence: Synthetic oligonucleotide
  Sense strand starting at position 733 of SEQ ID NO: 914742
guuacaaugaguuauguuc

SEQ ID NO: 1027251 - RNA, 19 nt, Artificial Sequence
  Description of Artificial Sequence: Synthetic oligonucleotide
  Antisense strand to SEQ ID NO: 1027250
gaacauaacucauuguaac

SEQ ID NO: 1027252 - RNA, 19 nt, Artificial Sequence
  Description of Artificial Sequence: Synthetic oligonucleotide
  Sense strand starting at position 1216 of SEQ ID NO: 914742
gcaacaaacuucuuaguag

SEQ ID NO: 1027253 - RNA, 19 nt, Artificial Sequence
  Description of Artificial Sequence: Synthetic oligonucleotide
  Antisense strand to SEQ ID NO: 1027252
cuacuaagaaguuuguugc

SEQ ID NO: 1027254 - RNA, 19 nt, Artificial Sequence
  Description of Artificial Sequence: Synthetic oligonucleotide
  Sense strand starting at position 1228 of SEQ ID NO: 914742
uuaguaguaguguaaggaa

SEQ ID NO: 1027255 - RNA, 19 nt, Artificial Sequence
  Description of Artificial Sequence: Synthetic oligonucleotide
  Antisense strand to SEQ ID NO: 1027254
uuccuuacacuacuacuaa

SEQ ID NO: 1027256 - RNA, 19 nt, Artificial Sequence
  Description of Artificial Sequence: Synthetic oligonucleotide
  Sense strand starting at position 1259 of SEQ ID NO: 914742
cuuauaaugugaccaggau

SEQ ID NO: 1027257 - RNA, 19 nt, Artificial Sequence
  Description of Artificial Sequence: Synthetic oligonucleotide
  Antisense strand to SEQ ID NO: 1027256
auccuggucacauuauaag

SEQ ID NO: 1027258 - RNA, 19 nt, Artificial Sequence
  Description of Artificial Sequence: Synthetic oligonucleotide
  Sense strand starting at position 1365 of SEQ ID NO: 914742
ucauuuauuagucgagagc

SEQ ID NO: 1027259 - RNA, 19 nt, Artificial Sequence
  Description of Artificial Sequence: Synthetic oligonucleotide
  Antisense strand to SEQ ID NO: 1027258
gcucucgacuaauaaauga

SEQ ID NO: 1027260 - RNA, 19 nt, Artificial Sequence
  Description of Artificial Sequence: Synthetic oligonucleotide
  Sense strand starting at position 1368 of SEQ ID NO: 914742
uuuauuagucgagagcaca

SEQ ID NO: 1027261 - RNA, 19 nt, Artificial Sequence
  Description of Artificial Sequence: Synthetic oligonucleotide
  Antisense strand to SEQ ID NO: 1027260
ugugcucucgacuaauaaa

SEQ ID NO: 1027262 - RNA, 19 nt, Artificial Sequence
  Description of Artificial Sequence: Synthetic oligonucleotide
  Sense strand starting at position 1450 of SEQ ID NO: 914742
guuucuuaaguggaaguua

SEQ ID NO: 1027263 - RNA, 19 nt, Artificial Sequence
  Description of Artificial Sequence: Synthetic oligonucleotide
  Antisense strand to SEQ ID NO: 1027262
uaacuuccacuuaagaaac

SEQ ID NO: 1027264 - RNA, 19 nt, Artificial Sequence
  Description of Artificial Sequence: Synthetic oligonucleotide
  Sense strand starting at position 1495 of SEQ ID NO: 914742
gcauauucugagcauaaca

SEQ ID NO: 1027265 - RNA, 19 nt, Artificial Sequence
  Description of Artificial Sequence: Synthetic oligonucleotide
  Antisense strand to SEQ ID NO: 1027264
uguuaugcucagaauaugc

SEQ ID NO: 1027266 - RNA, 19 nt, Artificial Sequence
  Description of Artificial Sequence: Synthetic oligonucleotide
  Sense strand starting at position 1834 of SEQ ID NO: 914742
aucugauacuuuguaauga

SEQ ID NO: 1027267 - RNA, 19 nt, Artificial Sequence
  Description of Artificial Sequence: Synthetic oligonucleotide
  Antisense strand to SEQ ID NO: 1027266
ucauuacaaaguaucagau

SEQ ID NO: 1027268 - RNA, 19 nt, Artificial Sequence
  Description of Artificial Sequence: Synthetic oligonucleotide
  Sense strand starting at position 1954 of SEQ ID NO: 914742
cagagucucgcagaguaaa

SEQ ID NO: 1027269 - RNA, 19 nt, Artificial Sequence
  Description of Artificial Sequence: Synthetic oligonucleotide
  Antisense strand to SEQ ID NO: 1027268
uuuacucugcgagacucug

SEQ ID NO: 1027270 - RNA, 19 nt, Artificial Sequence
  Description of Artificial Sequence: Synthetic oligonucleotide
  Sense strand starting at position 2180 of SEQ ID NO: 914742
cucacaggucauggaaaua

SEQ ID NO: 1027271 - RNA, 19 nt, Artificial Sequence
  Description of Artificial Sequence: Synthetic oligonucleotide
  Antisense strand to SEQ ID NO: 1027270
uauuuccaugaccugugag

SEQ ID NO: 1027272 - RNA, 19 nt, Artificial Sequence
  Description of Artificial Sequence: Synthetic oligonucleotide
  Sense strand starting at position 2205 of SEQ ID NO: 914742
aaaccaaagcugugugaaa

SEQ ID NO: 1027273 - RNA, 19 nt, Artificial Sequence
  Description of Artificial Sequence: Synthetic oligonucleotide
  Antisense strand to SEQ ID NO: 1027272
uuucacacagcuuugguuu

SEQ ID NO: 1027274 - RNA, 19 nt, Artificial Sequence
  Description of Artificial Sequence: Synthetic oligonucleotide
  Sense strand starting at position 2366 of SEQ ID NO: 914742
auuacuugcauggagugau

SEQ ID NO: 1027275 - RNA, 19 nt, Artificial Sequence
  Description of Artificial Sequence: Synthetic oligonucleotide
  Antisense strand to SEQ ID NO: 1027274
aucacuccaugcaaguaau

SEQ ID NO: 1027276 - RNA, 19 nt, Artificial Sequence
  Description of Artificial Sequence: Synthetic oligonucleotide
  Sense strand starting at position 2369 of SEQ ID NO: 914742
acuugcauggagugaugaa

SEQ ID NO: 1027277 - RNA, 19 nt, Artificial Sequence
  Description of Artificial Sequence: Synthetic oligonucleotide
  Antisense strand to SEQ ID NO: 1027276
uucaucacuccaugcaagu

SEQ ID NO: 1027278 - RNA, 19 nt, Artificial Sequence
  Description of Artificial Sequence: Synthetic oligonucleotide
  Sense strand starting at position 2443 of SEQ ID NO: 914742
ugaagcugcagugaaacau

SEQ ID NO: 1027279 - RNA, 19 nt, Artificial Sequence
  Description of Artificial Sequence: Synthetic oligonucleotide
  Antisense strand to SEQ ID NO: 1027278
auguuucacugcagcuuca

SEQ ID NO: 1027280 - RNA, 19 nt, Artificial Sequence
  Description of Artificial Sequence: Synthetic oligonucleotide
  Sense strand starting at position 2518 of SEQ ID NO: 914742
uugagaucucagcaugguu

SEQ ID NO: 1027281 - RNA, 19 nt, Artificial Sequence
  Description of Artificial Sequence: Synthetic oligonucleotide
  Antisense strand to SEQ ID NO: 1027280
aaccaugcugagaucucaa

SEQ ID NO: 1027282 - RNA, 19 nt, Artificial Sequence
  Description of Artificial Sequence: Synthetic oligonucleotide
  Sense strand starting at position 2521 of SEQ ID NO: 914742
agaucucagcaugguugaa

SEQ ID NO: 1027283 - RNA, 19 nt, Artificial Sequence
  Description of Artificial Sequence: Synthetic oligonucleotide
  Antisense strand to SEQ ID NO: 1027282
uucaaccaugcugagaucu

SEQ ID NO: 1027284 - RNA, 19 nt, Artificial Sequence
  Description of Artificial Sequence: Synthetic oligonucleotide
  Sense strand starting at position 2530 of SEQ ID NO: 914742
caugguugaacugguuaga

SEQ ID NO: 1027285 - RNA, 19 nt, Artificial Sequence
  Description of Artificial Sequence: Synthetic oligonucleotide
  Antisense strand to SEQ ID NO: 1027284
ucuaaccaguucaaccaug

SEQ ID NO: 1027286 - RNA, 19 nt, Artificial Sequence
  Description of Artificial Sequence: Synthetic oligonucleotide
  Sense strand starting at position 2533 of SEQ ID NO: 914742
gguugaacugguuagaugu

SEQ ID NO: 1027287 - RNA, 19 nt, Artificial Sequence
  Description of Artificial Sequence: Synthetic oligonucleotide
  Antisense strand to SEQ ID NO: 1027286
acaucuaaccaguucaacc

SEQ ID NO: 1027288 - RNA, 19 nt, Artificial Sequence
  Description of Artificial Sequence: Synthetic oligonucleotide
  Sense strand starting at position 2715 of SEQ ID NO: 914742
ucauucccagguuaguaaa

SEQ ID NO: 1027289 - RNA, 19 nt, Artificial Sequence
  Description of Artificial Sequence: Synthetic oligonucleotide
  Antisense strand to SEQ ID NO: 1027288
uuuacuaaccugggaauga

SEQ ID NO: 1027290 - RNA, 19 nt, Artificial Sequence
  Description of Artificial Sequence: Synthetic oligonucleotide
  Sense strand starting at position 2717 of SEQ ID NO: 914742
auucccagguuaguaaaua

SEQ ID NO: 1027291 - RNA, 19 nt, Artificial Sequence
  Description of Artificial Sequence: Synthetic oligonucleotide
  Antisense strand to SEQ ID NO: 1027290
uauuuacuaaccugggaau

SEQ ID NO: 1027292 - RNA, 19 nt, Artificial Sequence
  Description of Artificial Sequence: Synthetic oligonucleotide
  Sense strand starting at position 2737 of SEQ ID NO: 914742
cuuuauuguagaggaagca

SEQ ID NO: 1027293 - RNA, 19 nt, Artificial Sequence
  Description of Artificial Sequence: Synthetic oligonucleotide
  Antisense strand to SEQ ID NO: 1027292
ugcuuccucuacaauaaag

SEQ ID NO: 1027294 - RNA, 19 nt, Artificial Sequence
  Description of Artificial Sequence: Synthetic oligonucleotide
  Sense strand starting at position 2837 of SEQ ID NO: 914742
cuuaauggaucagcacaga

SEQ ID NO: 1027295 - RNA, 19 nt, Artificial Sequence
  Description of Artificial Sequence: Synthetic oligonucleotide
  Antisense strand to SEQ ID NO: 1027294
ucugugcugauccauuaag

SEQ ID NO: 1027296 - RNA, 19 nt, Artificial Sequence
  Description of Artificial Sequence: Synthetic oligonucleotide
  Sense strand starting at position 2979 of SEQ ID NO: 914742
gacugagauuguucuauca

SEQ ID NO: 1027297 - RNA, 19 nt, Artificial Sequence
  Description of Artificial Sequence: Synthetic oligonucleotide
  Antisense strand to SEQ ID NO: 1027296
ugauagaacaaucucaguc

SEQ ID NO: 1027298 - RNA, 19 nt, Artificial Sequence
  Description of Artificial Sequence: Synthetic oligonucleotide
  Sense strand starting at position 3009 of SEQ ID NO: 914742
gguggaucucuugacucca

SEQ ID NO: 1027299 - RNA, 19 nt, Artificial Sequence
  Description of Artificial Sequence: Synthetic oligonucleotide
  Antisense strand to SEQ ID NO: 1027298
uggagucaagagauccacc

SEQ ID NO: 1027300 - RNA, 19 nt, Artificial Sequence
  Description of Artificial Sequence: Synthetic oligonucleotide
  Sense strand starting at position 3011 of SEQ ID NO: 914742
uggaucucuugacuccaau

SEQ ID NO: 1027301 - RNA, 19 nt, Artificial Sequence
  Description of Artificial Sequence: Synthetic oligonucleotide
  Antisense strand to SEQ ID NO: 1027300
auuggagucaagagaucca

SEQ ID NO: 1027302 - RNA, 19 nt, Artificial Sequence
  Description of Artificial Sequence: Synthetic oligonucleotide
  Sense strand starting at position 3017 of SEQ ID NO: 914742
ucuugacuccaauaggguu

SEQ ID NO: 1027303 - RNA, 19 nt, Artificial Sequence
  Description of Artificial Sequence: Synthetic oligonucleotide
  Antisense strand to SEQ ID NO: 1027302
aacccuauuggagucaaga

SEQ ID NO: 1027304 - RNA, 19 nt, Artificial Sequence
  Description of Artificial Sequence: Synthetic oligonucleotide
  Sense strand starting at position 3049 of SEQ ID NO: 914742
ggauauaucuaacugcaac

SEQ ID NO: 1027305 - RNA, 19 nt, Artificial Sequence
  Description of Artificial Sequence: Synthetic oligonucleotide
  Antisense strand to SEQ ID NO: 1027304
guugcaguuagauauaucc

SEQ ID NO: 1027306 - RNA, 19 nt, Artificial Sequence
  Description of Artificial Sequence: Synthetic oligonucleotide
  Sense strand starting at position 3188 of SEQ ID NO: 914742
ucaaaucuuugacuagagu

SEQ ID NO: 1027307 - RNA, 19 nt, Artificial Sequence
  Description of Artificial Sequence: Synthetic oligonucleotide
  Antisense strand to SEQ ID NO: 1027306
acucuagucaaagauuuga

SEQ ID NO: 1027308 - RNA, 19 nt, Artificial Sequence
  Description of Artificial Sequence: Synthetic oligonucleotide
  Sense strand starting at position 3223 of SEQ ID NO: 914742
gcuguugcccuagcuguaa

SEQ ID NO: 1027309 - RNA, 19 nt, Artificial Sequence
  Description of Artificial Sequence: Synthetic oligonucleotide
  Antisense strand to SEQ ID NO: 1027308
uuacagcuagggcaacagc

SEQ ID NO: 1027310 - RNA, 19 nt, Artificial Sequence
  Description of Artificial Sequence: Synthetic oligonucleotide
  Sense strand starting at position 3435 of SEQ ID NO: 914742
agugcuagcaaugaugaca

SEQ ID NO: 1027311 - RNA, 19 nt, Artificial Sequence
  Description of Artificial Sequence: Synthetic oligonucleotide
  Antisense strand to SEQ ID NO: 1027310
ugucaucauugcuagcacu

SEQ ID NO: 1027312 - RNA, 19 nt, Artificial Sequence
  Description of Artificial Sequence: Synthetic oligonucleotide
  Sense strand starting at position 3701 of SEQ ID NO: 914742
aggauacuugauugcccau

SEQ ID NO: 1027313 - RNA, 19 nt, Artificial Sequence
  Description of Artificial Sequence: Synthetic oligonucleotide
  Antisense strand to SEQ ID NO: 1027312
augggcaaucaaguauccu

SEQ ID NO: 1027314 - RNA, 19 nt, Artificial Sequence
  Description of Artificial Sequence: Synthetic oligonucleotide
  Sense strand starting at position 3874 of SEQ ID NO: 914742
agucauaauugcuuagaca

SEQ ID NO: 1027315 - RNA, 19 nt, Artificial Sequence
  Description of Artificial Sequence: Synthetic oligonucleotide
  Antisense strand to SEQ ID NO: 1027314
ugucuaagcaauuaugacu

SEQ ID NO: 1027316 - RNA, 19 nt, Artificial Sequence
  Description of Artificial Sequence: Synthetic oligonucleotide
  Sense strand starting at position 3875 of SEQ ID NO: 914742
gucauaauugcuuagacaa

SEQ ID NO: 1027317 - RNA, 19 nt, Artificial Sequence
  Description of Artificial Sequence: Synthetic oligonucleotide
  Antisense strand to SEQ ID NO: 1027316
uugucuaagcaauuaugac

SEQ ID NO: 1027318 - RNA, 19 nt, Artificial Sequence
  Description of Artificial Sequence: Synthetic oligonucleotide
  Sense strand starting at position 3886 of SEQ ID NO: 914742
uuagacaacuucccgauau

SEQ ID NO: 1027319 - RNA, 19 nt, Artificial Sequence
  Description of Artificial Sequence: Synthetic oligonucleotide
  Antisense strand to SEQ ID NO: 1027318
auaucgggaaguugucuaa

SEQ ID NO: 1027320 - RNA, 19 nt, Artificial Sequence
  Description of Artificial Sequence: Synthetic oligonucleotide
  Sense strand starting at position 3900 of SEQ ID NO: 914742
gauauaugguaagcacaua

SEQ ID NO: 1027321 - RNA, 19 nt, Artificial Sequence
  Description of Artificial Sequence: Synthetic oligonucleotide
  Antisense strand to SEQ ID NO: 1027320
uaugugcuuaccauauauc

SEQ ID NO: 1027322 - RNA, 19 nt, Artificial Sequence
  Description of Artificial Sequence: Synthetic oligonucleotide
  Sense strand starting at position 65 of SEQ ID NO: 914743
agaaguuuggcucagcaau

SEQ ID NO: 1027323 - RNA, 19 nt, Artificial Sequence
  Description of Artificial Sequence: Synthetic oligonucleotide
  Antisense strand to SEQ ID NO: 1027322
auugcugagccaaacuucu

SEQ ID NO: 1027324 - RNA, 19 nt, Artificial Sequence
  Description of Artificial Sequence: Synthetic oligonucleotide
  Sense strand starting at position 99 of SEQ ID NO: 914743
cuauaauauacgggugaaa

SEQ ID NO: 1027325 - RNA, 19 nt, Artificial Sequence
  Description of Artificial Sequence: Synthetic oligonucleotide
  Antisense strand to SEQ ID NO: 1027324
uuucacccguauauuauag

SEQ ID NO: 1027326 - RNA, 19 nt, Artificial Sequence
  Description of Artificial Sequence: Synthetic oligonucleotide
  Sense strand starting at position 101 of SEQ ID NO: 914743
auaauauacgggugaaaca

SEQ ID NO: 1027327 - RNA, 19 nt, Artificial Sequence
  Description of Artificial Sequence: Synthetic oligonucleotide
  Antisense strand to SEQ ID NO: 1027326
uguuucacccguauauuau

SEQ ID NO: 1027328 - RNA, 19 nt, Artificial Sequence
  Description of Artificial Sequence: Synthetic oligonucleotide
  Sense strand starting at position 296 of SEQ ID NO: 914743
uuugguaaagcugauaucu

SEQ ID NO: 1027329 - RNA, 19 nt, Artificial Sequence
  Description of Artificial Sequence: Synthetic oligonucleotide
  Antisense strand to SEQ ID NO: 1027328
agauaucagcuuuaccaaa

SEQ ID NO: 1027330 - RNA, 19 nt, Artificial Sequence
  Description of Artificial Sequence: Synthetic oligonucleotide
  Sense strand starting at position 593 of SEQ ID NO: 914743
gguuauaaagcuuguaaua

SEQ ID NO: 1027331 - RNA, 19 nt, Artificial Sequence
  Description of Artificial Sequence: Synthetic oligonucleotide
  Antisense strand to SEQ ID NO: 1027330
uauuacaagcuuuauaacc

SEQ ID NO: 1027332 - RNA, 19 nt, Artificial Sequence
  Description of Artificial Sequence: Synthetic oligonucleotide
  Sense strand starting at position 695 of SEQ ID NO: 914743
guuagaucuguuuacccua

SEQ ID NO: 1027333 - RNA, 19 nt, Artificial Sequence
  Description of Artificial Sequence: Synthetic oligonucleotide
  Antisense strand to SEQ ID NO: 1027332
uaggguaaacagaucuaac

SEQ ID NO: 1027334 - RNA, 19 nt, Artificial Sequence
  Description of Artificial Sequence: Synthetic oligonucleotide
  Sense strand starting at position 720 of SEQ ID NO: 914743
uuaaguaaccuuugagaca

SEQ ID NO: 1027335 - RNA, 19 nt, Artificial Sequence
  Description of Artificial Sequence: Synthetic oligonucleotide
  Antisense strand to SEQ ID NO: 1027334
ugucucaaagguuacuuaa

SEQ ID NO: 1027336 - RNA, 19 nt, Artificial Sequence
  Description of Artificial Sequence: Synthetic oligonucleotide
  Sense strand starting at position 756 of SEQ ID NO: 914743
uaguuugaccaaggauauu

SEQ ID NO: 1027337 - RNA, 19 nt, Artificial Sequence
  Description of Artificial Sequence: Synthetic oligonucleotide
  Antisense strand to SEQ ID NO: 1027336
aauauccuuggucaaacua

SEQ ID NO: 1027338 - RNA, 19 nt, Artificial Sequence
  Description of Artificial Sequence: Synthetic oligonucleotide
  Sense strand starting at position 907 of SEQ ID NO: 914743
acuccuagagucugagcua

SEQ ID NO: 1027339 - RNA, 19 nt, Artificial Sequence
  Description of Artificial Sequence: Synthetic oligonucleotide
  Antisense strand to SEQ ID NO: 1027338
uagcucagacucuaggagu

SEQ ID NO: 1027340 - RNA, 19 nt, Artificial Sequence
  Description of Artificial Sequence: Synthetic oligonucleotide
  Sense strand starting at position 1293 of SEQ ID NO: 914743
ggucaagucagugaguaac

SEQ ID NO: 1027341 - RNA, 19 nt, Artificial Sequence
  Description of Artificial Sequence: Synthetic oligonucleotide
  Antisense strand to SEQ ID NO: 1027340
guuacucacugacuugacc

SEQ ID NO: 1027342 - RNA, 19 nt, Artificial Sequence
  Description of Artificial Sequence: Synthetic oligonucleotide
  Sense strand starting at position 1295 of SEQ ID NO: 914743
ucaagucagugaguaacua

SEQ ID NO: 1027343 - RNA, 19 nt, Artificial Sequence
  Description of Artificial Sequence: Synthetic oligonucleotide
  Antisense strand to SEQ ID NO: 1027342
uaguuacucacugacuuga

SEQ ID NO: 1027344 - RNA, 19 nt, Artificial Sequence
  Description of Artificial Sequence: Synthetic oligonucleotide
  Sense strand starting at position 1299 of SEQ ID NO: 914743
gucagugaguaacuaguaa

SEQ ID NO: 1027345 - RNA, 19 nt, Artificial Sequence
  Description of Artificial Sequence: Synthetic oligonucleotide
  Antisense strand to SEQ ID NO: 1027344
uuacuaguuacucacugac

SEQ ID NO: 1027346 - RNA, 19 nt, Artificial Sequence
  Description of Artificial Sequence: Synthetic oligonucleotide
  Sense strand starting at position 1483 of SEQ ID NO: 914743
ccuaaucaugcaugcuaga

SEQ ID NO: 1027347 - RNA, 19 nt, Artificial Sequence
  Description of Artificial Sequence: Synthetic oligonucleotide
  Antisense strand to SEQ ID NO: 1027346
ucuagcaugcaugauuagg

SEQ ID NO: 1027348 - RNA, 19 nt, Artificial Sequence
  Description of Artificial Sequence: Synthetic oligonucleotide
  Sense strand starting at position 1488 of SEQ ID NO: 914743
ucaugcaugcuagacaaau

SEQ ID NO: 1027349 - RNA, 19 nt, Artificial Sequence
  Description of Artificial Sequence: Synthetic oligonucleotide
  Antisense strand to SEQ ID NO: 1027348
auuugucuagcaugcauga

SEQ ID NO: 1027350 - RNA, 19 nt, Artificial Sequence
  Description of Artificial Sequence: Synthetic oligonucleotide
  Sense strand starting at position 1497 of SEQ ID NO: 914743
cuagacaaauugcuguaau

SEQ ID NO: 1027351 - RNA, 19 nt, Artificial Sequence
  Description of Artificial Sequence: Synthetic oligonucleotide
  Antisense strand to SEQ ID NO: 1027350
auuacagcaauuugucuag

SEQ ID NO: 1027352 - RNA, 19 nt, Artificial Sequence
  Description of Artificial Sequence: Synthetic oligonucleotide
  Sense strand starting at position 1500 of SEQ ID NO: 914743
gacaaauugcuguaaugca

SEQ ID NO: 1027353 - RNA, 19 nt, Artificial Sequence
  Description of Artificial Sequence: Synthetic oligonucleotide
  Antisense strand to SEQ ID NO: 1027352
ugcauuacagcaauuuguc

SEQ ID NO: 1027354 - RNA, 19 nt, Artificial Sequence
  Description of Artificial Sequence: Synthetic oligonucleotide
  Sense strand starting at position 1565 of SEQ ID NO: 914743
gacauagagcuccgggaaa

SEQ ID NO: 1027355 - RNA, 19 nt, Artificial Sequence
  Description of Artificial Sequence: Synthetic oligonucleotide
  Antisense strand to SEQ ID NO: 1027354
uuucccggagcucuauguc

SEQ ID NO: 1027356 - RNA, 19 nt, Artificial Sequence
  Description of Artificial Sequence: Synthetic oligonucleotide
  Sense strand starting at position 1567 of SEQ ID NO: 914743
cauagagcuccgggaaaca

SEQ ID NO: 1027357 - RNA, 19 nt, Artificial Sequence
  Description of Artificial Sequence: Synthetic oligonucleotide
  Antisense strand to SEQ ID NO: 1027356
uguuucccggagcucuaug

SEQ ID NO: 1027358 - RNA, 19 nt, Artificial Sequence
  Description of Artificial Sequence: Synthetic oligonucleotide
  Sense strand starting at position 1790 of SEQ ID NO: 914743
ggaggucuuaccugagcuu

SEQ ID NO: 1027359 - RNA, 19 nt, Artificial Sequence
  Description of Artificial Sequence: Synthetic oligonucleotide
  Antisense strand to SEQ ID NO: 1027358
aagcucagguaagaccucc

SEQ ID NO: 1027360 - RNA, 19 nt, Artificial Sequence
  Description of Artificial Sequence: Synthetic oligonucleotide
  Sense strand starting at position 2591 of SEQ ID NO: 914743
agaagaguuauauguaagu

SEQ ID NO: 1027361 - RNA, 19 nt, Artificial Sequence
  Description of Artificial Sequence: Synthetic oligonucleotide
  Antisense strand to SEQ ID NO: 1027360
acuuacauauaacucuucu

SEQ ID NO: 1027362 - RNA, 19 nt, Artificial Sequence
  Description of Artificial Sequence: Synthetic oligonucleotide
  Sense strand starting at position 2648 of SEQ ID NO: 914743
gauuacagauagucuuuga

SEQ ID NO: 1027363 - RNA, 19 nt, Artificial Sequence
  Description of Artificial Sequence: Synthetic oligonucleotide
  Antisense strand to SEQ ID NO: 1027362
ucaaagacuaucuguaauc

SEQ ID NO: 1027364 - RNA, 19 nt, Artificial Sequence
  Description of Artificial Sequence: Synthetic oligonucleotide
  Sense strand starting at position 2755 of SEQ ID NO: 914743
cuuggucagccugagaacu

SEQ ID NO: 1027365 - RNA, 19 nt, Artificial Sequence
  Description of Artificial Sequence: Synthetic oligonucleotide
  Antisense strand to SEQ ID NO: 1027364
aguucucaggcugaccaag

SEQ ID NO: 1027366 - RNA, 19 nt, Artificial Sequence
  Description of Artificial Sequence: Synthetic oligonucleotide
  Sense strand starting at position 2763 of SEQ ID NO: 914743
gccugagaacuccauugca

SEQ ID NO: 1027367 - RNA, 19 nt, Artificial Sequence
  Description of Artificial Sequence: Synthetic oligonucleotide
  Antisense strand to SEQ ID NO: 1027366
ugcaauggaguucucaggc

SEQ ID NO: 1027368 - RNA, 19 nt, Artificial Sequence
  Description of Artificial Sequence: Synthetic oligonucleotide
  Sense strand starting at position 2922 of SEQ ID NO: 914743
gucaauugcuaaguuauga

SEQ ID NO: 1027369 - RNA, 19 nt, Artificial Sequence
  Description of Artificial Sequence: Synthetic oligonucleotide
  Antisense strand to SEQ ID NO: 1027368
ucauaacuuagcaauugac

SEQ ID NO: 1027370 - RNA, 19 nt, Artificial Sequence
  Description of Artificial Sequence: Synthetic oligonucleotide
  Sense strand starting at position 2932 of SEQ ID NO: 914743
aaguuaugacucgauauca

SEQ ID NO: 1027371 - RNA, 19 nt, Artificial Sequence
  Description of Artificial Sequence: Synthetic oligonucleotide
  Antisense strand to SEQ ID NO: 1027370
ugauaucgagucauaacuu

SEQ ID NO: 1027372 - RNA, 19 nt, Artificial Sequence
  Description of Artificial Sequence: Synthetic oligonucleotide
  Sense strand starting at position 3044 of SEQ ID NO: 914743
auggaagagcaguagucua

SEQ ID NO: 1027373 - RNA, 19 nt, Artificial Sequence
  Description of Artificial Sequence: Synthetic oligonucleotide
  Antisense strand to SEQ ID NO: 1027372
uagacuacugcucuuccau

SEQ ID NO: 1027374 - RNA, 19 nt, Artificial Sequence
  Description of Artificial Sequence: Synthetic oligonucleotide
  Sense strand starting at position 3049 of SEQ ID NO: 914743
agagcaguagucuaauaga

SEQ ID NO: 1027375 - RNA, 19 nt, Artificial Sequence
  Description of Artificial Sequence: Synthetic oligonucleotide
  Antisense strand to SEQ ID NO: 1027374
ucuauuagacuacugcucu

SEQ ID NO: 1027376 - RNA, 19 nt, Artificial Sequence
  Description of Artificial Sequence: Synthetic oligonucleotide
  Sense strand starting at position 3106 of SEQ ID NO: 914743
acucaaagagcucagguua

SEQ ID NO: 1027377 - RNA, 19 nt, Artificial Sequence
  Description of Artificial Sequence: Synthetic oligonucleotide
  Antisense strand to SEQ ID NO: 1027376
uaaccugagcucuuugagu

SEQ ID NO: 1027378 - RNA, 19 nt, Artificial Sequence
  Description of Artificial Sequence: Synthetic oligonucleotide
  Sense strand starting at position 3118 of SEQ ID NO: 914743
cagguuacucuguguauuu

SEQ ID NO: 1027379 - RNA, 19 nt, Artificial Sequence
  Description of Artificial Sequence: Synthetic oligonucleotide
  Antisense strand to SEQ ID NO: 1027378
aaauacacagaguaaccug

SEQ ID NO: 1027380 - RNA, 19 nt, Artificial Sequence
  Description of Artificial Sequence: Synthetic oligonucleotide
  Sense strand starting at position 3120 of SEQ ID NO: 914743
gguuacucuguguauuugu

SEQ ID NO: 1027381 - RNA, 19 nt, Artificial Sequence
  Description of Artificial Sequence: Synthetic oligonucleotide
  Antisense strand to SEQ ID NO: 1027380
acaaauacacagaguaacc

SEQ ID NO: 1027382 - RNA, 19 nt, Artificial Sequence
  Description of Artificial Sequence: Synthetic oligonucleotide
  Sense strand starting at position 3125 of SEQ ID NO: 914743
cucuguguauuuguuaaag

SEQ ID NO: 1027383 - RNA, 19 nt, Artificial Sequence
  Description of Artificial Sequence: Synthetic oligonucleotide
  Antisense strand to SEQ ID NO: 1027382
cuuuaacaaauacacagag

SEQ ID NO: 1027384 - RNA, 19 nt, Artificial Sequence
  Description of Artificial Sequence: Synthetic oligonucleotide
  Sense strand starting at position 3283 of SEQ ID NO: 914743
ggcuuaugucaaugaacga

SEQ ID NO: 1027385 - RNA, 19 nt, Artificial Sequence
  Description of Artificial Sequence: Synthetic oligonucleotide
  Antisense strand to SEQ ID NO: 1027384
ucguucauugacauaagcc

SEQ ID NO: 1027386 - RNA, 19 nt, Artificial Sequence
  Description of Artificial Sequence: Synthetic oligonucleotide
  Sense strand starting at position 3284 of SEQ ID NO: 914743
gcuuaugucaaugaacgag

SEQ ID NO: 1027387 - RNA, 19 nt, Artificial Sequence
  Description of Artificial Sequence: Synthetic oligonucleotide
  Antisense strand to SEQ ID NO: 1027386
cucguucauugacauaagc

SEQ ID NO: 1027388 - RNA, 19 nt, Artificial Sequence
  Description of Artificial Sequence: Synthetic oligonucleotide
  Sense strand starting at position 3608 of SEQ ID NO: 914743
gccuguagagucuacucaa

SEQ ID NO: 1027389 - RNA, 19 nt, Artificial Sequence
  Description of Artificial Sequence: Synthetic oligonucleotide
  Antisense strand to SEQ ID NO: 1027388
uugaguagacucuacaggc

SEQ ID NO: 1027390 - RNA, 19 nt, Artificial Sequence
  Description of Artificial Sequence: Synthetic oligonucleotide
  Sense strand starting at position 3611 of SEQ ID NO: 914743
uguagagucuacucaagau

SEQ ID NO: 1027391 - RNA, 19 nt, Artificial Sequence
  Description of Artificial Sequence: Synthetic oligonucleotide
  Antisense strand to SEQ ID NO: 1027390
aucuugaguagacucuaca

SEQ ID NO: 1027392 - RNA, 19 nt, Artificial Sequence
  Description of Artificial Sequence: Synthetic oligonucleotide
  Sense strand starting at position 3615 of SEQ ID NO: 914743
gagucuacucaagauguca

SEQ ID NO: 1027393 - RNA, 19 nt, Artificial Sequence
  Description of Artificial Sequence: Synthetic oligonucleotide
  Antisense strand to SEQ ID NO: 1027392
ugacaucuugaguagacuc

SEQ ID NO: 1027394 - RNA, 19 nt, Artificial Sequence
  Description of Artificial Sequence: Synthetic oligonucleotide
  Sense strand starting at position 3727 of SEQ ID NO: 914743
uuuaucacacguggaauau

SEQ ID NO: 1027395 - RNA, 19 nt, Artificial Sequence
  Description of Artificial Sequence: Synthetic oligonucleotide
  Antisense strand to SEQ ID NO: 1027394
auauuccacgugugauaaa

SEQ ID NO: 1027396 - RNA, 19 nt, Artificial Sequence
  Description of Artificial Sequence: Synthetic oligonucleotide
  Sense strand starting at position 3728 of SEQ ID NO: 914743
uuaucacacguggaauauu

SEQ ID NO: 1027397 - RNA, 19 nt, Artificial Sequence
  Description of Artificial Sequence: Synthetic oligonucleotide
  Antisense strand to SEQ ID NO: 1027396
aauauuccacgugugauaa

SEQ ID NO: 1027398 - RNA, 19 nt, Artificial Sequence
  Description of Artificial Sequence: Synthetic oligonucleotide
  Sense strand starting at position 3968 of SEQ ID NO: 914743
uaauaaaugguguggucca

SEQ ID NO: 1027399 - RNA, 19 nt, Artificial Sequence
  Description of Artificial Sequence: Synthetic oligonucleotide
  Antisense strand to SEQ ID NO: 1027398
uggaccacaccauuuauua

SEQ ID NO: 1027400 - RNA, 19 nt, Artificial Sequence
  Description of Artificial Sequence: Synthetic oligonucleotide
  Sense strand starting at position 3973 of SEQ ID NO: 914743
aauggugugguccaaauaa

SEQ ID NO: 1027401 - RNA, 19 nt, Artificial Sequence
  Description of Artificial Sequence: Synthetic oligonucleotide
  Antisense strand to SEQ ID NO: 1027400
uuauuuggaccacaccauu

SEQ ID NO: 1027402 - RNA, 19 nt, Artificial Sequence
  Description of Artificial Sequence: Synthetic oligonucleotide
  Sense strand starting at position 7 of SEQ ID NO: 914744
cguuguaaaggacacauaa

SEQ ID NO: 1027403 - RNA, 19 nt, Artificial Sequence
  Description of Artificial Sequence: Synthetic oligonucleotide
  Antisense strand to SEQ ID NO: 1027402
uuauguguccuuuacaacg

SEQ ID NO: 1027404 - RNA, 19 nt, Artificial Sequence
  Description of Artificial Sequence: Synthetic oligonucleotide
  Sense strand starting at position 297 of SEQ ID NO: 914744
cauggaauccgaugauauu

SEQ ID NO: 1027405 - RNA, 19 nt, Artificial Sequence
  Description of Artificial Sequence: Synthetic oligonucleotide
  Antisense strand to SEQ ID NO: 1027404
aauaucaucggauuccaug

SEQ ID NO: 1027406 - RNA, 19 nt, Artificial Sequence
  Description of Artificial Sequence: Synthetic oligonucleotide
  Sense strand starting at position 371 of SEQ ID NO: 914744
uguuguauuauguaucaga

SEQ ID NO: 1027407 - RNA, 19 nt, Artificial Sequence
  Description of Artificial Sequence: Synthetic oligonucleotide
  Antisense strand to SEQ ID NO: 1027406
ucugauacauaauacaaca

SEQ ID NO: 1027408 - RNA, 19 nt, Artificial Sequence
  Description of Artificial Sequence: Synthetic oligonucleotide
  Sense strand starting at position 472 of SEQ ID NO: 914744
gaaugacagucuguaaaua

SEQ ID NO: 1027409 - RNA, 19 nt, Artificial Sequence
  Description of Artificial Sequence: Synthetic oligonucleotide
  Antisense strand to SEQ ID NO: 1027408
uauuuacagacugucauuc

SEQ ID NO: 1027410 - RNA, 19 nt, Artificial Sequence
  Description of Artificial Sequence: Synthetic oligonucleotide
  Sense strand starting at position 477 of SEQ ID NO: 914744
acagucuguaaauaugagu

SEQ ID NO: 1027411 - RNA, 19 nt, Artificial Sequence
  Description of Artificial Sequence: Synthetic oligonucleotide
  Antisense strand to SEQ ID NO: 1027410
acucauauuuacagacugu

SEQ ID NO: 1027412 - RNA, 19 nt, Artificial Sequence
  Description of Artificial Sequence: Synthetic oligonucleotide
  Sense strand starting at position 483 of SEQ ID NO: 914744
uguaaauaugaguagcaca

SEQ ID NO: 1027413 - RNA, 19 nt, Artificial Sequence
  Description of Artificial Sequence: Synthetic oligonucleotide
  Antisense strand to SEQ ID NO: 1027412
ugugcuacucauauuuaca

SEQ ID NO: 1027414 - RNA, 19 nt, Artificial Sequence
  Description of Artificial Sequence: Synthetic oligonucleotide
  Sense strand starting at position 659 of SEQ ID NO: 914744
gugaaaguaugugugauuu

SEQ ID NO: 1027415 - RNA, 19 nt, Artificial Sequence
  Description of Artificial Sequence: Synthetic oligonucleotide
  Antisense strand to SEQ ID NO: 1027414
aaaucacacauacuuucac

SEQ ID NO: 1027416 - RNA, 19 nt, Artificial Sequence
  Description of Artificial Sequence: Synthetic oligonucleotide
  Sense strand starting at position 699 of SEQ ID NO: 914744
guuuguaccauugagaugu

SEQ ID NO: 1027417 - RNA, 19 nt, Artificial Sequence
  Description of Artificial Sequence: Synthetic oligonucleotide
  Antisense strand to SEQ ID NO: 1027416
acaucucaaugguacaaac

SEQ ID NO: 1027418 - RNA, 19 nt, Artificial Sequence
  Description of Artificial Sequence: Synthetic oligonucleotide
  Sense strand starting at position 1031 of SEQ ID NO: 914744
uuauaaauguacuuggcau

SEQ ID NO: 1027419 - RNA, 19 nt, Artificial Sequence
  Description of Artificial Sequence: Synthetic oligonucleotide
  Antisense strand to SEQ ID NO: 1027418
augccaaguacauuuauaa

SEQ ID NO: 1027420 - RNA, 19 nt, Artificial Sequence
  Description of Artificial Sequence: Synthetic oligonucleotide
  Sense strand starting at position 1095 of SEQ ID NO: 914744
cucuaaguaucuuuaguaa

SEQ ID NO: 1027421 - RNA, 19 nt, Artificial Sequence
  Description of Artificial Sequence: Synthetic oligonucleotide
  Antisense strand to SEQ ID NO: 1027420
uuacuaaagauacuuagag

SEQ ID NO: 1027422 - RNA, 19 nt, Artificial Sequence
  Description of Artificial Sequence: Synthetic oligonucleotide
  Sense strand starting at position 1126 of SEQ ID NO: 914744
ucuguaagacuugguauac

SEQ ID NO: 1027423 - RNA, 19 nt, Artificial Sequence
  Description of Artificial Sequence: Synthetic oligonucleotide
  Antisense strand to SEQ ID NO: 1027422
guauaccaagucuuacaga

SEQ ID NO: 1027424 - RNA, 19 nt, Artificial Sequence
  Description of Artificial Sequence: Synthetic oligonucleotide
  Sense strand starting at position 1127 of SEQ ID NO: 914744
cuguaagacuugguauaca

SEQ ID NO: 1027425 - RNA, 19 nt, Artificial Sequence
  Description of Artificial Sequence: Synthetic oligonucleotide
  Antisense strand to SEQ ID NO: 1027424
uguauaccaagucuuacag

SEQ ID NO: 1027426 - RNA, 19 nt, Artificial Sequence
  Description of Artificial Sequence: Synthetic oligonucleotide
  Sense strand starting at position 1226 of SEQ ID NO: 914744
uuagguucucuugaugaac

SEQ ID NO: 1027427 - RNA, 19 nt, Artificial Sequence
  Description of Artificial Sequence: Synthetic oligonucleotide
  Antisense strand to SEQ ID NO: 1027426
guucaucaagagaaccuaa

SEQ ID NO: 1027428 - RNA, 19 nt, Artificial Sequence
  Description of Artificial Sequence: Synthetic oligonucleotide
  Sense strand starting at position 1229 of SEQ ID NO: 914744
gguucucuugaugaacuua

SEQ ID NO: 1027429 - RNA, 19 nt, Artificial Sequence
  Description of Artificial Sequence: Synthetic oligonucleotide
  Antisense strand to SEQ ID NO: 1027428
uaaguucaucaagagaacc

SEQ ID NO: 1027430 - RNA, 19 nt, Artificial Sequence
  Description of Artificial Sequence: Synthetic oligonucleotide
  Sense strand starting at position 1237 of SEQ ID NO: 914744
ugaugaacuuagccaguga

SEQ ID NO: 1027431 - RNA, 19 nt, Artificial Sequence
  Description of Artificial Sequence: Synthetic oligonucleotide
  Antisense strand to SEQ ID NO: 1027430
ucacuggcuaaguucauca

SEQ ID NO: 1027432 - RNA, 19 nt, Artificial Sequence
  Description of Artificial Sequence: Synthetic oligonucleotide
  Sense strand starting at position 1395 of SEQ ID NO: 914744
gacccagugagauguaaga

SEQ ID NO: 1027433 - RNA, 19 nt, Artificial Sequence
  Description of Artificial Sequence: Synthetic oligonucleotide
  Antisense strand to SEQ ID NO: 1027432
ucuuacaucucacuggguc

SEQ ID NO: 1027434 - RNA, 19 nt, Artificial Sequence
  Description of Artificial Sequence: Synthetic oligonucleotide
  Sense strand starting at position 1572 of SEQ ID NO: 914744
gagggagcuuaccuauuau

SEQ ID NO: 1027435 - RNA, 19 nt, Artificial Sequence
  Description of Artificial Sequence: Synthetic oligonucleotide
  Antisense strand to SEQ ID NO: 1027434
auaauagguaagcucccuc

SEQ ID NO: 1027436 - RNA, 19 nt, Artificial Sequence
  Description of Artificial Sequence: Synthetic oligonucleotide
  Sense strand starting at position 1918 of SEQ ID NO: 914744
gggcgcuugccuuauuuga

SEQ ID NO: 1027437 - RNA, 19 nt, Artificial Sequence
  Description of Artificial Sequence: Synthetic oligonucleotide
  Antisense strand to SEQ ID NO: 1027436
ucaaauaaggcaagcgccc

SEQ ID NO: 1027438 - RNA, 19 nt, Artificial Sequence
  Description of Artificial Sequence: Synthetic oligonucleotide
  Sense strand starting at position 2046 of SEQ ID NO: 914744
uugucugaugauuaagcua

SEQ ID NO: 1027439 - RNA, 19 nt, Artificial Sequence
  Description of Artificial Sequence: Synthetic oligonucleotide
  Antisense strand to SEQ ID NO: 1027438
uagcuuaaucaucagacaa

SEQ ID NO: 1027440 - RNA, 19 nt, Artificial Sequence
  Description of Artificial Sequence: Synthetic oligonucleotide
  Sense strand starting at position 2051 of SEQ ID NO: 914744
ugaugauuaagcuacguua

SEQ ID NO: 1027441 - RNA, 19 nt, Artificial Sequence
  Description of Artificial Sequence: Synthetic oligonucleotide
  Antisense strand to SEQ ID NO: 1027440
uaacguagcuuaaucauca

SEQ ID NO: 1027442 - RNA, 19 nt, Artificial Sequence
  Description of Artificial Sequence: Synthetic oligonucleotide
  Sense strand starting at position 2156 of SEQ ID NO: 914744
uauugaaaggauugucuau

SEQ ID NO: 1027443 - RNA, 19 nt, Artificial Sequence
  Description of Artificial Sequence: Synthetic oligonucleotide
  Antisense strand to SEQ ID NO: 1027442
auagacaauccuuucaaua

SEQ ID NO: 1027444 - RNA, 19 nt, Artificial Sequence
  Description of Artificial Sequence: Synthetic oligonucleotide
  Sense strand starting at position 2158 of SEQ ID NO: 914744
uugaaaggauugucuauac

SEQ ID NO: 1027445 - RNA, 19 nt, Artificial Sequence
  Description of Artificial Sequence: Synthetic oligonucleotide
  Antisense strand to SEQ ID NO: 1027444
guauagacaauccuuucaa

SEQ ID NO: 1027446 - RNA, 19 nt, Artificial Sequence
  Description of Artificial Sequence: Synthetic oligonucleotide
  Sense strand starting at position 2260 of SEQ ID NO: 914744
agggaucucuguguuauua

SEQ ID NO: 1027447 - RNA, 19 nt, Artificial Sequence
  Description of Artificial Sequence: Synthetic oligonucleotide
  Antisense strand to SEQ ID NO: 1027446
uaauaacacagagaucccu

SEQ ID NO: 1027448 - RNA, 19 nt, Artificial Sequence
  Description of Artificial Sequence: Synthetic oligonucleotide
  Sense strand starting at position 2792 of SEQ ID NO: 914744
cuaauucuggcugggagaa

SEQ ID NO: 1027449 - RNA, 19 nt, Artificial Sequence
  Description of Artificial Sequence: Synthetic oligonucleotide
  Antisense strand to SEQ ID NO: 1027448
uucucccagccagaauuag

SEQ ID NO: 1027450 - RNA, 19 nt, Artificial Sequence
  Description of Artificial Sequence: Synthetic oligonucleotide
  Sense strand starting at position 2793 of SEQ ID NO: 914744
uaauucuggcugggagaaa

SEQ ID NO: 1027451 - RNA, 19 nt, Artificial Sequence
  Description of Artificial Sequence: Synthetic oligonucleotide
  Antisense strand to SEQ ID NO: 1027450
uuucucccagccagaauua

SEQ ID NO: 1027452 - RNA, 19 nt, Artificial Sequence
  Description of Artificial Sequence: Synthetic oligonucleotide
  Sense strand starting at position 2838 of SEQ ID NO: 914744
uaugucuuaugagcagaga

SEQ ID NO: 1027453 - RNA, 19 nt, Artificial Sequence
  Description of Artificial Sequence: Synthetic oligonucleotide
  Antisense strand to SEQ ID NO: 1027452
ucucugcucauaagacaua

SEQ ID NO: 1027454 - RNA, 19 nt, Artificial Sequence
  Description of Artificial Sequence: Synthetic oligonucleotide
  Sense strand starting at position 2841 of SEQ ID NO: 914744
gucuuaugagcagagacau

SEQ ID NO: 1027455 - RNA, 19 nt, Artificial Sequence
  Description of Artificial Sequence: Synthetic oligonucleotide
  Antisense strand to SEQ ID NO: 1027454
augucucugcucauaagac

SEQ ID NO: 1027456 - RNA, 19 nt, Artificial Sequence
  Description of Artificial Sequence: Synthetic oligonucleotide
  Sense strand starting at position 2957 of SEQ ID NO: 914744
cugcuuacugaucaguaua

SEQ ID NO: 1027457 - RNA, 19 nt, Artificial Sequence
  Description of Artificial Sequence: Synthetic oligonucleotide
  Antisense strand to SEQ ID NO: 1027456
uauacugaucaguaagcag

SEQ ID NO: 1027458 - RNA, 19 nt, Artificial Sequence
  Description of Artificial Sequence: Synthetic oligonucleotide
  Sense strand starting at position 2959 of SEQ ID NO: 914744
gcuuacugaucaguauaag

SEQ ID NO: 1027459 - RNA, 19 nt, Artificial Sequence
  Description of Artificial Sequence: Synthetic oligonucleotide
  Antisense strand to SEQ ID NO: 1027458
cuuauacugaucaguaagc

SEQ ID NO: 1027460 - RNA, 19 nt, Artificial Sequence
  Description of Artificial Sequence: Synthetic oligonucleotide
  Sense strand starting at position 3177 of SEQ ID NO: 914744
ccuguugaaugagucauaa

SEQ ID NO: 1027461 - RNA, 19 nt, Artificial Sequence
  Description of Artificial Sequence: Synthetic oligonucleotide
  Antisense strand to SEQ ID NO: 1027460
uuaugacucauucaacagg

SEQ ID NO: 1027462 - RNA, 19 nt, Artificial Sequence
  Description of Artificial Sequence: Synthetic oligonucleotide
  Sense strand starting at position 3198 of SEQ ID NO: 914744
cucugucuuugacccagaa

SEQ ID NO: 1027463 - RNA, 19 nt, Artificial Sequence
  Description of Artificial Sequence: Synthetic oligonucleotide
  Antisense strand to SEQ ID NO: 1027462
uucugggucaaagacagag

SEQ ID NO: 1027464 - RNA, 19 nt, Artificial Sequence
  Description of Artificial Sequence: Synthetic oligonucleotide
  Sense strand starting at position 3202 of SEQ ID NO: 914744
gucuuugacccagaaagcu

SEQ ID NO: 1027465 - RNA, 19 nt, Artificial Sequence
  Description of Artificial Sequence: Synthetic oligonucleotide
  Antisense strand to SEQ ID NO: 1027464
agcuuucugggucaaagac

SEQ ID NO: 1027466 - RNA, 19 nt, Artificial Sequence
  Description of Artificial Sequence: Synthetic oligonucleotide
  Sense strand starting at position 3305 of SEQ ID NO: 914744
gauggagaaugccuuuagu

SEQ ID NO: 1027467 - RNA, 19 nt, Artificial Sequence
  Description of Artificial Sequence: Synthetic oligonucleotide
  Antisense strand to SEQ ID NO: 1027466
acuaaaggcauucuccauc

SEQ ID NO: 1027468 - RNA, 19 nt, Artificial Sequence
  Description of Artificial Sequence: Synthetic oligonucleotide
  Sense strand starting at position 3308 of SEQ ID NO: 914744
ggagaaugccuuuagucuu

SEQ ID NO: 1027469 - RNA, 19 nt, Artificial Sequence
  Description of Artificial Sequence: Synthetic oligonucleotide
  Antisense strand to SEQ ID NO: 1027468
aagacuaaaggcauucucc

SEQ ID NO: 1027470 - RNA, 19 nt, Artificial Sequence
  Description of Artificial Sequence: Synthetic oligonucleotide
  Sense strand starting at position 3322 of SEQ ID NO: 914744
gucuuccgucaauaacaaa

SEQ ID NO: 1027471 - RNA, 19 nt, Artificial Sequence
  Description of Artificial Sequence: Synthetic oligonucleotide
  Antisense strand to SEQ ID NO: 1027470
uuuguuauugacggaagac

SEQ ID NO: 1027472 - RNA, 19 nt, Artificial Sequence
  Description of Artificial Sequence: Synthetic oligonucleotide
  Sense strand starting at position 3429 of SEQ ID NO: 914744
gguacaaauuguuuauaac

SEQ ID NO: 1027473 - RNA, 19 nt, Artificial Sequence
  Description of Artificial Sequence: Synthetic oligonucleotide
  Antisense strand to SEQ ID NO: 1027472
guuauaaacaauuuguacc

SEQ ID NO: 1027474 - RNA, 19 nt, Artificial Sequence
  Description of Artificial Sequence: Synthetic oligonucleotide
  Sense strand starting at position 3441 of SEQ ID NO: 914744
uuauaacaguucucuaagu

SEQ ID NO: 1027475 - RNA, 19 nt, Artificial Sequence
  Description of Artificial Sequence: Synthetic oligonucleotide
  Antisense strand to SEQ ID NO: 1027474
acuuagagaacuguuauaa

SEQ ID NO: 1027476 - RNA, 19 nt, Artificial Sequence
  Description of Artificial Sequence: Synthetic oligonucleotide
  Sense strand starting at position 3443 of SEQ ID NO: 914744
auaacaguucucuaaguua

SEQ ID NO: 1027477 - RNA, 19 nt, Artificial Sequence
  Description of Artificial Sequence: Synthetic oligonucleotide
  Antisense strand to SEQ ID NO: 1027476
uaacuuagagaacuguuau

SEQ ID NO: 1027478 - RNA, 19 nt, Artificial Sequence
  Description of Artificial Sequence: Synthetic oligonucleotide
  Sense strand starting at position 3446 of SEQ ID NO: 914744
acaguucucuaaguuagac

SEQ ID NO: 1027479 - RNA, 19 nt, Artificial Sequence
  Description of Artificial Sequence: Synthetic oligonucleotide
  Antisense strand to SEQ ID NO: 1027478
gucuaacuuagagaacugu

SEQ ID NO: 1027480 - RNA, 19 nt, Artificial Sequence
  Description of Artificial Sequence: Synthetic oligonucleotide
  Sense strand starting at position 3697 of SEQ ID NO: 914744
caguaaugggauggcuaua

SEQ ID NO: 1027481 - RNA, 19 nt, Artificial Sequence
  Description of Artificial Sequence: Synthetic oligonucleotide
  Antisense strand to SEQ ID NO: 1027480
uauagccaucccauuacug

SEQ ID NO: 1027482 - RNA, 19 nt, Artificial Sequence
  Description of Artificial Sequence: Synthetic oligonucleotide
  Sense strand starting at position 161 of SEQ ID NO: 914745
ucaugaagucuaugauaau

SEQ ID NO: 1027483 - RNA, 19 nt, Artificial Sequence
  Description of Artificial Sequence: Synthetic oligonucleotide
  Antisense strand to SEQ ID NO: 1027482
auuaucauagacuucauga

SEQ ID NO: 1027484 - RNA, 19 nt, Artificial Sequence
  Description of Artificial Sequence: Synthetic oligonucleotide
  Sense strand starting at position 269 of SEQ ID NO: 914745
agaggugcuccuuacaacu

SEQ ID NO: 1027485 - RNA, 19 nt, Artificial Sequence
  Description of Artificial Sequence: Synthetic oligonucleotide
  Antisense strand to SEQ ID NO: 1027484
aguuguaaggagcaccucu

SEQ ID NO: 1027486 - RNA, 19 nt, Artificial Sequence
  Description of Artificial Sequence: Synthetic oligonucleotide
  Sense strand starting at position 628 of SEQ ID NO: 914745
gggaguacacaggguuaga

SEQ ID NO: 1027487 - RNA, 19 nt, Artificial Sequence
  Description of Artificial Sequence: Synthetic oligonucleotide
  Antisense strand to SEQ ID NO: 1027486
ucuaacccuguguacuccc

SEQ ID NO: 1027488 - RNA, 19 nt, Artificial Sequence
  Description of Artificial Sequence: Synthetic oligonucleotide
  Sense strand starting at position 683 of SEQ ID NO: 914745
gucuguuuccuggaagagg

SEQ ID NO: 1027489 - RNA, 19 nt, Artificial Sequence
  Description of Artificial Sequence: Synthetic oligonucleotide
  Antisense strand to SEQ ID NO: 1027488
ccucuuccaggaaacagac

SEQ ID NO: 1027490 - RNA, 19 nt, Artificial Sequence
  Description of Artificial Sequence: Synthetic oligonucleotide
  Sense strand starting at position 872 of SEQ ID NO: 914745
gcaugcuuaggauaaugua

SEQ ID NO: 1027491 - RNA, 19 nt, Artificial Sequence
  Description of Artificial Sequence: Synthetic oligonucleotide
  Antisense strand to SEQ ID NO: 1027490
uacauuauccuaagcaugc

SEQ ID NO: 1027492 - RNA, 19 nt, Artificial Sequence
  Description of Artificial Sequence: Synthetic oligonucleotide
  Sense strand starting at position 908 of SEQ ID NO: 914745
uuggaaguguuacucaaca

SEQ ID NO: 1027493 - RNA, 19 nt, Artificial Sequence
  Description of Artificial Sequence: Synthetic oligonucleotide
  Antisense strand to SEQ ID NO: 1027492
uguugaguaacacuuccaa

SEQ ID NO: 1027494 - RNA, 19 nt, Artificial Sequence
  Description of Artificial Sequence: Synthetic oligonucleotide
  Sense strand starting at position 1217 of SEQ ID NO: 914745
auaggagauugggaucaga

SEQ ID NO: 1027495 - RNA, 19 nt, Artificial Sequence
  Description of Artificial Sequence: Synthetic oligonucleotide
  Antisense strand to SEQ ID NO: 1027494
ucugaucccaaucuccuau

SEQ ID NO: 1027496 - RNA, 19 nt, Artificial Sequence
  Description of Artificial Sequence: Synthetic oligonucleotide
  Sense strand starting at position 1264 of SEQ ID NO: 914745
gaggcacucagagguagau

SEQ ID NO: 1027497 - RNA, 19 nt, Artificial Sequence
  Description of Artificial Sequence: Synthetic oligonucleotide
  Antisense strand to SEQ ID NO: 1027496
aucuaccucugagugccuc

SEQ ID NO: 1027498 - RNA, 19 nt, Artificial Sequence
  Description of Artificial Sequence: Synthetic oligonucleotide
  Sense strand starting at position 1276 of SEQ ID NO: 914745
gguagaucaguuugggaug

SEQ ID NO: 1027499 - RNA, 19 nt, Artificial Sequence
  Description of Artificial Sequence: Synthetic oligonucleotide
  Antisense strand to SEQ ID NO: 1027498
caucccaaacugaucuacc

SEQ ID NO: 1027500 - RNA, 19 nt, Artificial Sequence
  Description of Artificial Sequence: Synthetic oligonucleotide
  Sense strand starting at position 1375 of SEQ ID NO: 914745
uaggauguagcagaaguuu

SEQ ID NO: 1027501 - RNA, 19 nt, Artificial Sequence
  Description of Artificial Sequence: Synthetic oligonucleotide
  Antisense strand to SEQ ID NO: 1027500
aaacuucugcuacauccua

SEQ ID NO: 1027502 - RNA, 19 nt, Artificial Sequence
  Description of Artificial Sequence: Synthetic oligonucleotide
  Sense strand starting at position 1383 of SEQ ID NO: 914745
agcagaaguuuguuggaga

SEQ ID NO: 1027503 - RNA, 19 nt, Artificial Sequence
  Description of Artificial Sequence: Synthetic oligonucleotide
  Antisense strand to SEQ ID NO: 1027502
ucuccaacaaacuucugcu

SEQ ID NO: 1027504 - RNA, 19 nt, Artificial Sequence
  Description of Artificial Sequence: Synthetic oligonucleotide
  Sense strand starting at position 1596 of SEQ ID NO: 914745
acaguauuacuauggagau

SEQ ID NO: 1027505 - RNA, 19 nt, Artificial Sequence
  Description of Artificial Sequence: Synthetic oligonucleotide
  Antisense strand to SEQ ID NO: 1027504
aucuccauaguaauacugu

SEQ ID NO: 1027506 - RNA, 19 nt, Artificial Sequence
  Description of Artificial Sequence: Synthetic oligonucleotide
  Sense strand starting at position 1611 of SEQ ID NO: 914745
agaucuagagggugucaga

SEQ ID NO: 1027507 - RNA, 19 nt, Artificial Sequence
  Description of Artificial Sequence: Synthetic oligonucleotide
  Antisense strand to SEQ ID NO: 1027506
ucugacacccucuagaucu

SEQ ID NO: 1027508 - RNA, 19 nt, Artificial Sequence
  Description of Artificial Sequence: Synthetic oligonucleotide
  Sense strand starting at position 1622 of SEQ ID NO: 914745
gugucagagaaagguacaa

SEQ ID NO: 1027509 - RNA, 19 nt, Artificial Sequence
  Description of Artificial Sequence: Synthetic oligonucleotide
  Antisense strand to SEQ ID NO: 1027508
uuguaccuuucucugacac

SEQ ID NO: 1027510 - RNA, 19 nt, Artificial Sequence
  Description of Artificial Sequence: Synthetic oligonucleotide
  Sense strand starting at position 1908 of SEQ ID NO: 914745
accugaaguuucuuuguag

SEQ ID NO: 1027511 - RNA, 19 nt, Artificial Sequence
  Description of Artificial Sequence: Synthetic oligonucleotide
  Antisense strand to SEQ ID NO: 1027510
cuacaaagaaacuucaggu

SEQ ID NO: 1027512 - RNA, 19 nt, Artificial Sequence
  Description of Artificial Sequence: Synthetic oligonucleotide
  Sense strand starting at position 1909 of SEQ ID NO: 914745
ccugaaguuucuuuguaga

SEQ ID NO: 1027513 - RNA, 19 nt, Artificial Sequence
  Description of Artificial Sequence: Synthetic oligonucleotide
  Antisense strand to SEQ ID NO: 1027512
ucuacaaagaaacuucagg

SEQ ID NO: 1027514 - RNA, 19 nt, Artificial Sequence
  Description of Artificial Sequence: Synthetic oligonucleotide
  Sense strand starting at position 1957 of SEQ ID NO: 914745
ucaguauggcaauggaaag

SEQ ID NO: 1027515 - RNA, 19 nt, Artificial Sequence
  Description of Artificial Sequence: Synthetic oligonucleotide
  Antisense strand to SEQ ID NO: 1027514
cuuuccauugccauacuga

SEQ ID NO: 1027516 - RNA, 19 nt, Artificial Sequence
  Description of Artificial Sequence: Synthetic oligonucleotide
  Sense strand starting at position 2033 of SEQ ID NO: 914745
ugucacuguuaagcauaaa

SEQ ID NO: 1027517 - RNA, 19 nt, Artificial Sequence
  Description of Artificial Sequence: Synthetic oligonucleotide
  Antisense strand to SEQ ID NO: 1027516
uuuaugcuuaacagugaca

SEQ ID NO: 1027518 - RNA, 19 nt, Artificial Sequence
  Description of Artificial Sequence: Synthetic oligonucleotide
  Sense strand starting at position 2087 of SEQ ID NO: 914745
agacguucuguccauagac

SEQ ID NO: 1027519 - RNA, 19 nt, Artificial Sequence
  Description of Artificial Sequence: Synthetic oligonucleotide
  Antisense strand to SEQ ID NO: 1027518
gucuauggacagaacgucu

SEQ ID NO: 1027520 - RNA, 19 nt, Artificial Sequence
  Description of Artificial Sequence: Synthetic oligonucleotide
  Sense strand starting at position 2089 of SEQ ID NO: 914745
acguucuguccauagacaa

SEQ ID NO: 1027521 - RNA, 19 nt, Artificial Sequence
  Description of Artificial Sequence: Synthetic oligonucleotide
  Antisense strand to SEQ ID NO: 1027520
uugucuauggacagaacgu

SEQ ID NO: 1027522 - RNA, 19 nt, Artificial Sequence
  Description of Artificial Sequence: Synthetic oligonucleotide
  Sense strand starting at position 2137 of SEQ ID NO: 914745
gacugagaauauguuccau

SEQ ID NO: 1027523 - RNA, 19 nt, Artificial Sequence
  Description of Artificial Sequence: Synthetic oligonucleotide
  Antisense strand to SEQ ID NO: 1027522
auggaacauauucucaguc

SEQ ID NO: 1027524 - RNA, 19 nt, Artificial Sequence
  Description of Artificial Sequence: Synthetic oligonucleotide
  Sense strand starting at position 2139 of SEQ ID NO: 914745
cugagaauauguuccauau

SEQ ID NO: 1027525 - RNA, 19 nt, Artificial Sequence
  Description of Artificial Sequence: Synthetic oligonucleotide
  Antisense strand to SEQ ID NO: 1027524
auauggaacauauucucag

SEQ ID NO: 1027526 - RNA, 19 nt, Artificial Sequence
  Description of Artificial Sequence: Synthetic oligonucleotide
  Sense strand starting at position 2226 of SEQ ID NO: 914745
cugaaaggcuauucuagaa

SEQ ID NO: 1027527 - RNA, 19 nt, Artificial Sequence
  Description of Artificial Sequence: Synthetic oligonucleotide
  Antisense strand to SEQ ID NO: 1027526
uucuagaauagccuuucag

SEQ ID NO: 1027528 - RNA, 19 nt, Artificial Sequence
  Description of Artificial Sequence: Synthetic oligonucleotide
  Sense strand starting at position 2286 of SEQ ID NO: 914745
gcugcagccuuauuuaaau

SEQ ID NO: 1027529 - RNA, 19 nt, Artificial Sequence
  Description of Artificial Sequence: Synthetic oligonucleotide
  Antisense strand to SEQ ID NO: 1027528
auuuaaauaaggcugcagc

SEQ ID NO: 1027530 - RNA, 19 nt, Artificial Sequence
  Description of Artificial Sequence: Synthetic oligonucleotide
  Sense strand starting at position 2301 of SEQ ID NO: 914745
aaaugaugucaguagagca

SEQ ID NO: 1027531 - RNA, 19 nt, Artificial Sequence
  Description of Artificial Sequence: Synthetic oligonucleotide
  Antisense strand to SEQ ID NO: 1027530
ugcucuacugacaucauuu

SEQ ID NO: 1027532 - RNA, 19 nt, Artificial Sequence
  Description of Artificial Sequence: Synthetic oligonucleotide
  Sense strand starting at position 2549 of SEQ ID NO: 914745
uagcuuuguaguggaauag

SEQ ID NO: 1027533 - RNA, 19 nt, Artificial Sequence
  Description of Artificial Sequence: Synthetic oligonucleotide
  Antisense strand to SEQ ID NO: 1027532
cuauuccacuacaaagcua

SEQ ID NO: 1027534 - RNA, 19 nt, Artificial Sequence
  Description of Artificial Sequence: Synthetic oligonucleotide
  Sense strand starting at position 2550 of SEQ ID NO: 914745
agcuuuguaguggaauaga

SEQ ID NO: 1027535 - RNA, 19 nt, Artificial Sequence
  Description of Artificial Sequence: Synthetic oligonucleotide
  Antisense strand to SEQ ID NO: 1027534
ucuauuccacuacaaagcu

SEQ ID NO: 1027536 - RNA, 19 nt, Artificial Sequence
  Description of Artificial Sequence: Synthetic oligonucleotide
  Sense strand starting at position 2687 of SEQ ID NO: 914745
ccuggcaaucuguauguua

SEQ ID NO: 1027537 - RNA, 19 nt, Artificial Sequence
  Description of Artificial Sequence: Synthetic oligonucleotide
  Antisense strand to SEQ ID NO: 1027536
uaacauacagauugccagg

SEQ ID NO: 1027538 - RNA, 19 nt, Artificial Sequence
  Description of Artificial Sequence: Synthetic oligonucleotide
  Sense strand starting at position 2745 of SEQ ID NO: 914745
ugaagacauugagauuaaa

SEQ ID NO: 1027539 - RNA, 19 nt, Artificial Sequence
  Description of Artificial Sequence: Synthetic oligonucleotide
  Antisense strand to SEQ ID NO: 1027538
uuuaaucucaaugucuuca

SEQ ID NO: 1027540 - RNA, 19 nt, Artificial Sequence
  Description of Artificial Sequence: Synthetic oligonucleotide
  Sense strand starting at position 2986 of SEQ ID NO: 914745
gaaagauuacgugagccca

SEQ ID NO: 1027541 - RNA, 19 nt, Artificial Sequence
  Description of Artificial Sequence: Synthetic oligonucleotide
  Antisense strand to SEQ ID NO: 1027540
ugggcucacguaaucuuuc

SEQ ID NO: 1027542 - RNA, 19 nt, Artificial Sequence
  Description of Artificial Sequence: Synthetic oligonucleotide
  Sense strand starting at position 2988 of SEQ ID NO: 914745
aagauuacgugagcccaga

SEQ ID NO: 1027543 - RNA, 19 nt, Artificial Sequence
  Description of Artificial Sequence: Synthetic oligonucleotide
  Antisense strand to SEQ ID NO: 1027542
ucugggcucacguaaucuu

SEQ ID NO: 1027544 - RNA, 19 nt, Artificial Sequence
  Description of Artificial Sequence: Synthetic oligonucleotide
  Sense strand starting at position 3005 of SEQ ID NO: 914745
gaaacuugagaucgcagua

SEQ ID NO: 1027545 - RNA, 19 nt, Artificial Sequence
  Description of Artificial Sequence: Synthetic oligonucleotide
  Antisense strand to SEQ ID NO: 1027544
uacugcgaucucaaguuuc

SEQ ID NO: 1027546 - RNA, 19 nt, Artificial Sequence
  Description of Artificial Sequence: Synthetic oligonucleotide
  Sense strand starting at position 3010 of SEQ ID NO: 914745
uugagaucgcaguaagcua

SEQ ID NO: 1027547 - RNA, 19 nt, Artificial Sequence
  Description of Artificial Sequence: Synthetic oligonucleotide
  Antisense strand to SEQ ID NO: 1027546
uagcuuacugcgaucucaa

SEQ ID NO: 1027548 - RNA, 19 nt, Artificial Sequence
  Description of Artificial Sequence: Synthetic oligonucleotide
  Sense strand starting at position 3061 of SEQ ID NO: 914745
gugagauacuaucucuaau

SEQ ID NO: 1027549 - RNA, 19 nt, Artificial Sequence
  Description of Artificial Sequence: Synthetic oligonucleotide
  Antisense strand to SEQ ID NO: 1027548
auuagagauaguaucucac

SEQ ID NO: 1027550 - RNA, 19 nt, Artificial Sequence
  Description of Artificial Sequence: Synthetic oligonucleotide
  Sense strand starting at position 3233 of SEQ ID NO: 914745
aguggcaaugucuggaaca

SEQ ID NO: 1027551 - RNA, 19 nt, Artificial Sequence
  Description of Artificial Sequence: Synthetic oligonucleotide
  Antisense strand to SEQ ID NO: 1027550
uguuccagacauugccacu

SEQ ID NO: 1027552 - RNA, 19 nt, Artificial Sequence
  Description of Artificial Sequence: Synthetic oligonucleotide
  Sense strand starting at position 3235 of SEQ ID NO: 914745
uggcaaugucuggaacaug

SEQ ID NO: 1027553 - RNA, 19 nt, Artificial Sequence
  Description of Artificial Sequence: Synthetic oligonucleotide
  Antisense strand to SEQ ID NO: 1027552
cauguuccagacauugcca

SEQ ID NO: 1027554 - RNA, 19 nt, Artificial Sequence
  Description of Artificial Sequence: Synthetic oligonucleotide
  Sense strand starting at position 3292 of SEQ ID NO: 914745
cauagagagugauucucua

SEQ ID NO: 1027555 - RNA, 19 nt, Artificial Sequence
  Description of Artificial Sequence: Synthetic oligonucleotide
  Antisense strand to SEQ ID NO: 1027554
uagagaaucacucucuaug

SEQ ID NO: 1027556 - RNA, 19 nt, Artificial Sequence
  Description of Artificial Sequence: Synthetic oligonucleotide
  Sense strand starting at position 3296 of SEQ ID NO: 914745
gagagugauucucuacccu

SEQ ID NO: 1027557 - RNA, 19 nt, Artificial Sequence
  Description of Artificial Sequence: Synthetic oligonucleotide
  Antisense strand to SEQ ID NO: 1027556
aggguagagaaucacucuc

SEQ ID NO: 1027558 - RNA, 19 nt, Artificial Sequence
  Description of Artificial Sequence: Synthetic oligonucleotide
  Sense strand starting at position 3628 of SEQ ID NO: 914745
cagcaaacuguggauaguu

SEQ ID NO: 1027559 - RNA, 19 nt, Artificial Sequence
  Description of Artificial Sequence: Synthetic oligonucleotide
  Antisense strand to SEQ ID NO: 1027558
aacuauccacaguuugcug

SEQ ID NO: 1027560 - RNA, 19 nt, Artificial Sequence
  Description of Artificial Sequence: Synthetic oligonucleotide
  Sense strand starting at position 3630 of SEQ ID NO: 914745
gcaaacuguggauaguuga

SEQ ID NO: 1027561 - RNA, 19 nt, Artificial Sequence
  Description of Artificial Sequence: Synthetic oligonucleotide
  Antisense strand to SEQ ID NO: 1027560
ucaacuauccacaguuugc

SEQ ID NO: 1027562 - RNA, 19 nt, Artificial Sequence
  Description of Artificial Sequence: Synthetic oligonucleotide
  Sense strand starting at position 12 of SEQ ID NO: 914746
ggcgcagccaucuuaggua

SEQ ID NO: 1027563 - RNA, 19 nt, Artificial Sequence
  Description of Artificial Sequence: Synthetic oligonucleotide
  Antisense strand to SEQ ID NO: 1027562
uaccuaagauggcugcgcc

SEQ ID NO: 1027564 - RNA, 19 nt, Artificial Sequence
  Description of Artificial Sequence: Synthetic oligonucleotide
  Sense strand starting at position 84 of SEQ ID NO: 914746
aagaguuccucugcuguac

SEQ ID NO: 1027565 - RNA, 19 nt, Artificial Sequence
  Description of Artificial Sequence: Synthetic oligonucleotide
  Antisense strand to SEQ ID NO: 1027564
guacagcagaggaacucuu

SEQ ID NO: 1027566 - RNA, 19 nt, Artificial Sequence
  Description of Artificial Sequence: Synthetic oligonucleotide
  Sense strand starting at position 280 of SEQ ID NO: 914746
aucuccgauccuugacgau

SEQ ID NO: 1027567 - RNA, 19 nt, Artificial Sequence
  Description of Artificial Sequence: Synthetic oligonucleotide
  Antisense strand to SEQ ID NO: 1027566
aucgucaaggaucggagau

SEQ ID NO: 1027568 - RNA, 19 nt, Artificial Sequence
  Description of Artificial Sequence: Synthetic oligonucleotide
  Sense strand starting at position 297 of SEQ ID NO: 914746
augucuagccugcauugau

SEQ ID NO: 1027569 - RNA, 19 nt, Artificial Sequence
  Description of Artificial Sequence: Synthetic oligonucleotide
  Antisense strand to SEQ ID NO: 1027568
aucaaugcaggcuagacau

SEQ ID NO: 1027570 - RNA, 19 nt, Artificial Sequence
  Description of Artificial Sequence: Synthetic oligonucleotide
  Sense strand starting at position 328 of SEQ ID NO: 914746
cuggguauggcagaucuau

SEQ ID NO: 1027571 - RNA, 19 nt, Artificial Sequence
  Description of Artificial Sequence: Synthetic oligonucleotide
  Antisense strand to SEQ ID NO: 1027570
auagaucugccauacccag

SEQ ID NO: 1027572 - RNA, 19 nt, Artificial Sequence
  Description of Artificial Sequence: Synthetic oligonucleotide
  Sense strand starting at position 337 of SEQ ID NO: 914746
gcagaucuauugcuugaug

SEQ ID NO: 1027573 - RNA, 19 nt, Artificial Sequence
  Description of Artificial Sequence: Synthetic oligonucleotide
  Antisense strand to SEQ ID NO: 1027572
caucaagcaauagaucugc

SEQ ID NO: 1027574 - RNA, 19 nt, Artificial Sequence
  Description of Artificial Sequence: Synthetic oligonucleotide
  Sense strand starting at position 338 of SEQ ID NO: 914746
cagaucuauugcuugauga

SEQ ID NO: 1027575 - RNA, 19 nt, Artificial Sequence
  Description of Artificial Sequence: Synthetic oligonucleotide
  Antisense strand to SEQ ID NO: 1027574
ucaucaagcaauagaucug

SEQ ID NO: 1027576 - RNA, 19 nt, Artificial Sequence
  Description of Artificial Sequence: Synthetic oligonucleotide
  Sense strand starting at position 339 of SEQ ID NO: 914746
agaucuauugcuugaugau

SEQ ID NO: 1027577 - RNA, 19 nt, Artificial Sequence
  Description of Artificial Sequence: Synthetic oligonucleotide
  Antisense strand to SEQ ID NO: 1027576
aucaucaagcaauagaucu

SEQ ID NO: 1027578 - RNA, 19 nt, Artificial Sequence
  Description of Artificial Sequence: Synthetic oligonucleotide
  Sense strand starting at position 340 of SEQ ID NO: 914746
gaucuauugcuugaugauc

SEQ ID NO: 1027579 - RNA, 19 nt, Artificial Sequence
  Description of Artificial Sequence: Synthetic oligonucleotide
  Antisense strand to SEQ ID NO: 1027578
gaucaucaagcaauagauc

SEQ ID NO: 1027580 - RNA, 19 nt, Artificial Sequence
  Description of Artificial Sequence: Synthetic oligonucleotide
  Sense strand starting at position 935 of SEQ ID NO: 914746
aggguauuguuagccagga

SEQ ID NO: 1027581 - RNA, 19 nt, Artificial Sequence
  Description of Artificial Sequence: Synthetic oligonucleotide
  Antisense strand to SEQ ID NO: 1027580
uccuggcuaacaauacccu

SEQ ID NO: 1027582 - RNA, 19 nt, Artificial Sequence
  Description of Artificial Sequence: Synthetic oligonucleotide
  Sense strand starting at position 1020 of SEQ ID NO: 914746
cgacuugucuucucccuca

SEQ ID NO: 1027583 - RNA, 19 nt, Artificial Sequence
  Description of Artificial Sequence: Synthetic oligonucleotide
  Antisense strand to SEQ ID NO: 1027582
ugagggagaagacaagucg

SEQ ID NO: 1027584 - RNA, 19 nt, Artificial Sequence
  Description of Artificial Sequence: Synthetic oligonucleotide
  Sense strand starting at position 1127 of SEQ ID NO: 914746
uaucuugagcuuugggaac

SEQ ID NO: 1027585 - RNA, 19 nt, Artificial Sequence
  Description of Artificial Sequence: Synthetic oligonucleotide
  Antisense strand to SEQ ID NO: 1027584
guucccaaagcucaagaua

SEQ ID NO: 1027586 - RNA, 19 nt, Artificial Sequence
  Description of Artificial Sequence: Synthetic oligonucleotide
  Sense strand starting at position 1442 of SEQ ID NO: 914746
cugucucaucccuguauuc

SEQ ID NO: 1027587 - RNA, 19 nt, Artificial Sequence
  Description of Artificial Sequence: Synthetic oligonucleotide
  Antisense strand to SEQ ID NO: 1027586
gaauacagggaugagacag

SEQ ID NO: 1027588 - RNA, 19 nt, Artificial Sequence
  Description of Artificial Sequence: Synthetic oligonucleotide
  Sense strand starting at position 1444 of SEQ ID NO: 914746
gucucaucccuguauuccu

SEQ ID NO: 1027589 - RNA, 19 nt, Artificial Sequence
  Description of Artificial Sequence: Synthetic oligonucleotide
  Antisense strand to SEQ ID NO: 1027588
aggaauacagggaugagac

SEQ ID NO: 1027590 - RNA, 19 nt, Artificial Sequence
  Description of Artificial Sequence: Synthetic oligonucleotide
  Sense strand starting at position 1451 of SEQ ID NO: 914746
cccuguauuccucauggaa

SEQ ID NO: 1027591 - RNA, 19 nt, Artificial Sequence
  Description of Artificial Sequence: Synthetic oligonucleotide
  Antisense strand to SEQ ID NO: 1027590
uuccaugaggaauacaggg

SEQ ID NO: 1027592 - RNA, 19 nt, Artificial Sequence
  Description of Artificial Sequence: Synthetic oligonucleotide
  Sense strand starting at position 1667 of SEQ ID NO: 914746
ggccauuacuuaccugaag

SEQ ID NO: 1027593 - RNA, 19 nt, Artificial Sequence
  Description of Artificial Sequence: Synthetic oligonucleotide
  Antisense strand to SEQ ID NO: 1027592
cuucagguaaguaauggcc

SEQ ID NO: 1027594 - RNA, 19 nt, Artificial Sequence
  Description of Artificial Sequence: Synthetic oligonucleotide
  Sense strand starting at position 2107 of SEQ ID NO: 914746
gcguggucugggccuauga

SEQ ID NO: 1027595 - RNA, 19 nt, Artificial Sequence
  Description of Artificial Sequence: Synthetic oligonucleotide
  Antisense strand to SEQ ID NO: 1027594
ucauaggcccagaccacgc

SEQ ID NO: 1027596 - RNA, 19 nt, Artificial Sequence
  Description of Artificial Sequence: Synthetic oligonucleotide
  Sense strand starting at position 2247 of SEQ ID NO: 914746
ccugaaucuucguuucucu

SEQ ID NO: 1027597 - RNA, 19 nt, Artificial Sequence
  Description of Artificial Sequence: Synthetic oligonucleotide
  Antisense strand to SEQ ID NO: 1027596
agagaaacgaagauucagg

SEQ ID NO: 1027598 - RNA, 19 nt, Artificial Sequence
  Description of Artificial Sequence: Synthetic oligonucleotide
  Sense strand starting at position 2612 of SEQ ID NO: 914746
cgcagcagugugcaaagau

SEQ ID NO: 1027599 - RNA, 19 nt, Artificial Sequence
  Description of Artificial Sequence: Synthetic oligonucleotide
  Antisense strand to SEQ ID NO: 1027598
aucuuugcacacugcugcg

SEQ ID NO: 1027600 - RNA, 19 nt, Artificial Sequence
  Description of Artificial Sequence: Synthetic oligonucleotide
  Sense strand starting at position 2642 of SEQ ID NO: 914746
uggccuugccucugaagga

SEQ ID NO: 1027601 - RNA, 19 nt, Artificial Sequence
  Description of Artificial Sequence: Synthetic oligonucleotide
  Antisense strand to SEQ ID NO: 1027600
uccuucagaggcaaggcca

SEQ ID NO: 1027602 - RNA, 19 nt, Artificial Sequence
  Description of Artificial Sequence: Synthetic oligonucleotide
  Sense strand starting at position 2741 of SEQ ID NO: 914746
gggagaguguauccaguua

SEQ ID NO: 1027603 - RNA, 19 nt, Artificial Sequence
  Description of Artificial Sequence: Synthetic oligonucleotide
  Antisense strand to SEQ ID NO: 1027602
uaacuggauacacucuccc

SEQ ID NO: 1027604 - RNA, 19 nt, Artificial Sequence
  Description of Artificial Sequence: Synthetic oligonucleotide
  Sense strand starting at position 2852 of SEQ ID NO: 914746
caacaugcucuaggcgaau

SEQ ID NO: 1027605 - RNA, 19 nt, Artificial Sequence
  Description of Artificial Sequence: Synthetic oligonucleotide
  Antisense strand to SEQ ID NO: 1027604
auucgccuagagcauguug

SEQ ID NO: 1027606 - RNA, 19 nt, Artificial Sequence
  Description of Artificial Sequence: Synthetic oligonucleotide
  Sense strand starting at position 2877 of SEQ ID NO: 914746
gccuuagaugccuacaggu

SEQ ID NO: 1027607 - RNA, 19 nt, Artificial Sequence
  Description of Artificial Sequence: Synthetic oligonucleotide
  Antisense strand to SEQ ID NO: 1027606
accuguaggcaucuaaggc

SEQ ID NO: 1027608 - RNA, 19 nt, Artificial Sequence
  Description of Artificial Sequence: Synthetic oligonucleotide
  Sense strand starting at position 2899 of SEQ ID NO: 914746
aggagcugugggcgauaaa

SEQ ID NO: 1027609 - RNA, 19 nt, Artificial Sequence
  Description of Artificial Sequence: Synthetic oligonucleotide
  Antisense strand to SEQ ID NO: 1027608
uuuaucgcccacagcuccu

SEQ ID NO: 1027610 - RNA, 19 nt, Artificial Sequence
  Description of Artificial Sequence: Synthetic oligonucleotide
  Sense strand starting at position 2950 of SEQ ID NO: 914746
gccgcuucgcgggugaaau

SEQ ID NO: 1027611 - RNA, 19 nt, Artificial Sequence
  Description of Artificial Sequence: Synthetic oligonucleotide
  Antisense strand to SEQ ID NO: 1027610
auuucacccgcgaagcggc

SEQ ID NO: 1027612 - RNA, 19 nt, Artificial Sequence
  Description of Artificial Sequence: Synthetic oligonucleotide
  Sense strand starting at position 2961 of SEQ ID NO: 914746
ggugaaauggccuguggug

SEQ ID NO: 1027613 - RNA, 19 nt, Artificial Sequence
  Description of Artificial Sequence: Synthetic oligonucleotide
  Antisense strand to SEQ ID NO: 1027612
caccacaggccauuucacc

SEQ ID NO: 1027614 - RNA, 19 nt, Artificial Sequence
  Description of Artificial Sequence: Synthetic oligonucleotide
  Sense strand starting at position 2963 of SEQ ID NO: 914746
ugaaauggccuguggugaa

SEQ ID NO: 1027615 - RNA, 19 nt, Artificial Sequence
  Description of Artificial Sequence: Synthetic oligonucleotide
  Antisense strand to SEQ ID NO: 1027614
uucaccacaggccauuuca

SEQ ID NO: 1027616 - RNA, 19 nt, Artificial Sequence
  Description of Artificial Sequence: Synthetic oligonucleotide
  Sense strand starting at position 3538 of SEQ ID NO: 914746
agcaauuguggcuacucua

SEQ ID NO: 1027617 - RNA, 19 nt, Artificial Sequence
  Description of Artificial Sequence: Synthetic oligonucleotide
  Antisense strand to SEQ ID NO: 1027616
uagaguagccacaauugcu

SEQ ID NO: 1027618 - RNA, 19 nt, Artificial Sequence
  Description of Artificial Sequence: Synthetic oligonucleotide
  Sense strand starting at position 3652 of SEQ ID NO: 914746
guguaaagcucuuucuaag

SEQ ID NO: 1027619 - RNA, 19 nt, Artificial Sequence
  Description of Artificial Sequence: Synthetic oligonucleotide
  Antisense strand to SEQ ID NO: 1027618
cuuagaaagagcuuuacac

SEQ ID NO: 1027620 - RNA, 19 nt, Artificial Sequence
  Description of Artificial Sequence: Synthetic oligonucleotide
  Sense strand starting at position 3669 of SEQ ID NO: 914746
agaaucguaaggugcuuau

SEQ ID NO: 1027621 - RNA, 19 nt, Artificial Sequence
  Description of Artificial Sequence: Synthetic oligonucleotide
  Antisense strand to SEQ ID NO: 1027620
auaagcaccuuacgauucu

SEQ ID NO: 1027622 - RNA, 19 nt, Artificial Sequence
  Description of Artificial Sequence: Synthetic oligonucleotide
  Sense strand starting at position 3673 of SEQ ID NO: 914746
ucguaaggugcuuauucuu

SEQ ID NO: 1027623 - RNA, 19 nt, Artificial Sequence
  Description of Artificial Sequence: Synthetic oligonucleotide
  Antisense strand to SEQ ID NO: 1027622
aagaauaagcaccuuacga

SEQ ID NO: 1027624 - RNA, 19 nt, Artificial Sequence
  Description of Artificial Sequence: Synthetic oligonucleotide
  Sense strand starting at position 3678 of SEQ ID NO: 914746
aggugcuuauucuuuguua

SEQ ID NO: 1027625 - RNA, 19 nt, Artificial Sequence
  Description of Artificial Sequence: Synthetic oligonucleotide
  Antisense strand to SEQ ID NO: 1027624
uaacaaagaauaagcaccu

SEQ ID NO: 1027626 - RNA, 19 nt, Artificial Sequence
  Description of Artificial Sequence: Synthetic oligonucleotide
  Sense strand starting at position 3680 of SEQ ID NO: 914746
gugcuuauucuuuguuaua

SEQ ID NO: 1027627 - RNA, 19 nt, Artificial Sequence
  Description of Artificial Sequence: Synthetic oligonucleotide
  Antisense strand to SEQ ID NO: 1027626
uauaacaaagaauaagcac

SEQ ID NO: 1027628 - RNA, 19 nt, Artificial Sequence
  Description of Artificial Sequence: Synthetic oligonucleotide
  Sense strand starting at position 3690 of SEQ ID NO: 914746
uuuguuauauagcugugaa

SEQ ID NO: 1027629 - RNA, 19 nt, Artificial Sequence
  Description of Artificial Sequence: Synthetic oligonucleotide
  Antisense strand to SEQ ID NO: 1027628
uucacagcuauauaacaaa

SEQ ID NO: 1027630 - RNA, 19 nt, Artificial Sequence
  Description of Artificial Sequence: Synthetic oligonucleotide
  Sense strand starting at position 3693 of SEQ ID NO: 914746
guuauauagcugugaauga

SEQ ID NO: 1027631 - RNA, 19 nt, Artificial Sequence
  Description of Artificial Sequence: Synthetic oligonucleotide
  Antisense strand to SEQ ID NO: 1027630
ucauucacagcuauauaac

SEQ ID NO: 1027632 - RNA, 19 nt, Artificial Sequence
  Description of Artificial Sequence: Synthetic oligonucleotide
  Sense strand starting at position 3697 of SEQ ID NO: 914746
uauagcugugaaugagaau

SEQ ID NO: 1027633 - RNA, 19 nt, Artificial Sequence
  Description of Artificial Sequence: Synthetic oligonucleotide
  Antisense strand to SEQ ID NO: 1027632
auucucauucacagcuaua

SEQ ID NO: 1027634 - RNA, 19 nt, Artificial Sequence
  Description of Artificial Sequence: Synthetic oligonucleotide
  Sense strand starting at position 3709 of SEQ ID NO: 914746
ugagaaucaaggugguuug

SEQ ID NO: 1027635 - RNA, 19 nt, Artificial Sequence
  Description of Artificial Sequence: Synthetic oligonucleotide
  Antisense strand to SEQ ID NO: 1027634
caaaccaccuugauucuca

SEQ ID NO: 1027636 - RNA, 19 nt, Artificial Sequence
  Description of Artificial Sequence: Synthetic oligonucleotide
  Sense strand starting at position 3820 of SEQ ID NO: 914746
ggcagaguggcacaaucau

SEQ ID NO: 1027637 - RNA, 19 nt, Artificial Sequence
  Description of Artificial Sequence: Synthetic oligonucleotide
  Antisense strand to SEQ ID NO: 1027636
augauugugccacucugcc

SEQ ID NO: 1027638 - RNA, 19 nt, Artificial Sequence
  Description of Artificial Sequence: Synthetic oligonucleotide
  Sense strand starting at position 3829 of SEQ ID NO: 914746
gcacaaucauuuggagaaa

SEQ ID NO: 1027639 - RNA, 19 nt, Artificial Sequence
  Description of Artificial Sequence: Synthetic oligonucleotide
  Antisense strand to SEQ ID NO: 1027638
uuucuccaaaugauugugc

SEQ ID NO: 1027640 - RNA, 19 nt, Artificial Sequence
  Description of Artificial Sequence: Synthetic oligonucleotide
  Sense strand starting at position 3867 of SEQ ID NO: 914746
ugacuuugcuauccugcua

SEQ ID NO: 1027641 - RNA, 19 nt, Artificial Sequence
  Description of Artificial Sequence: Synthetic oligonucleotide
  Antisense strand to SEQ ID NO: 1027640
uagcaggauagcaaaguca

SEQ ID NO: 1027642 - RNA, 19 nt, Artificial Sequence
  Description of Artificial Sequence: Synthetic oligonucleotide
  Sense strand starting at position 584 of SEQ ID NO: 914747
ucaagaacugcuugcuuua

SEQ ID NO: 1027643 - RNA, 19 nt, Artificial Sequence
  Description of Artificial Sequence: Synthetic oligonucleotide
  Antisense strand to SEQ ID NO: 1027642
uaaagcaagcaguucuuga

SEQ ID NO: 1027644 - RNA, 19 nt, Artificial Sequence
  Description of Artificial Sequence: Synthetic oligonucleotide
  Sense strand starting at position 587 of SEQ ID NO: 914747
agaacugcuugcuuuauuu

SEQ ID NO: 1027645 - RNA, 19 nt, Artificial Sequence
  Description of Artificial Sequence: Synthetic oligonucleotide
  Antisense strand to SEQ ID NO: 1027644
aaauaaagcaagcaguucu

SEQ ID NO: 1027646 - RNA, 19 nt, Artificial Sequence
  Description of Artificial Sequence: Synthetic oligonucleotide
  Sense strand starting at position 1458 of SEQ ID NO: 914747
agagguacucacggugcaa

SEQ ID NO: 1027647 - RNA, 19 nt, Artificial Sequence
  Description of Artificial Sequence: Synthetic oligonucleotide
  Antisense strand to SEQ ID NO: 1027646
uugcaccgugaguaccucu

SEQ ID NO: 1027648 - RNA, 19 nt, Artificial Sequence
  Description of Artificial Sequence: Synthetic oligonucleotide
  Sense strand starting at position 1617 of SEQ ID NO: 914747
gauggcgaguucuuuaaau

SEQ ID NO: 1027649 - RNA, 19 nt, Artificial Sequence
  Description of Artificial Sequence: Synthetic oligonucleotide
  Antisense strand to SEQ ID NO: 1027648
auuuaaagaacucgccauc

SEQ ID NO: 1027650 - RNA, 19 nt, Artificial Sequence
  Description of Artificial Sequence: Synthetic oligonucleotide
  Sense strand starting at position 1619 of SEQ ID NO: 914747
uggcgaguucuuuaaauac

SEQ ID NO: 1027651 - RNA, 19 nt, Artificial Sequence
  Description of Artificial Sequence: Synthetic oligonucleotide
  Antisense strand to SEQ ID NO: 1027650
guauuuaaagaacucgcca

SEQ ID NO: 1027652 - RNA, 19 nt, Artificial Sequence
  Description of Artificial Sequence: Synthetic oligonucleotide
  Sense strand starting at position 1635 of SEQ ID NO: 914747
uacugcauuccaggugagu

SEQ ID NO: 1027653 - RNA, 19 nt, Artificial Sequence
  Description of Artificial Sequence: Synthetic oligonucleotide
  Antisense strand to SEQ ID NO: 1027652
acucaccuggaaugcagua

SEQ ID NO: 1027654 - RNA, 19 nt, Artificial Sequence
  Description of Artificial Sequence: Synthetic oligonucleotide
  Sense strand starting at position 1637 of SEQ ID NO: 914747
cugcauuccaggugaguga

SEQ ID NO: 1027655 - RNA, 19 nt, Artificial Sequence
  Description of Artificial Sequence: Synthetic oligonucleotide
  Antisense strand to SEQ ID NO: 1027654
ucacucaccuggaaugcag

SEQ ID NO: 1027656 - RNA, 19 nt, Artificial Sequence
  Description of Artificial Sequence: Synthetic oligonucleotide
  Sense strand starting at position 1678 of SEQ ID NO: 914747
ggugaggugugccugaaug

SEQ ID NO: 1027657 - RNA, 19 nt, Artificial Sequence
  Description of Artificial Sequence: Synthetic oligonucleotide
  Antisense strand to SEQ ID NO: 1027656
cauucaggcacaccucacc

SEQ ID NO: 1027658 - RNA, 19 nt, Artificial Sequence
  Description of Artificial Sequence: Synthetic oligonucleotide
  Sense strand starting at position 1680 of SEQ ID NO: 914747
ugaggugugccugaauggu

SEQ ID NO: 1027659 - RNA, 19 nt, Artificial Sequence
  Description of Artificial Sequence: Synthetic oligonucleotide
  Antisense strand to SEQ ID NO: 1027658
accauucaggcacaccuca

SEQ ID NO: 1027660 - RNA, 19 nt, Artificial Sequence
  Description of Artificial Sequence: Synthetic oligonucleotide
  Sense strand starting at position 2123 of SEQ ID NO: 914747
ggaucuugcucuuugaggu

SEQ ID NO: 1027661 - RNA, 19 nt, Artificial Sequence
  Description of Artificial Sequence: Synthetic oligonucleotide
  Antisense strand to SEQ ID NO: 1027660
accucaaagagcaagaucc

SEQ ID NO: 1027662 - RNA, 19 nt, Artificial Sequence
  Description of Artificial Sequence: Synthetic oligonucleotide
  Sense strand starting at position 2203 of SEQ ID NO: 914747
agcccaggccucgauaagu

SEQ ID NO: 1027663 - RNA, 19 nt, Artificial Sequence
  Description of Artificial Sequence: Synthetic oligonucleotide
  Antisense strand to SEQ ID NO: 1027662
acuuaucgaggccugggcu

SEQ ID NO: 1027664 - RNA, 19 nt, Artificial Sequence
  Description of Artificial Sequence: Synthetic oligonucleotide
  Sense strand starting at position 2214 of SEQ ID NO: 914747
cgauaagucagauguggag

SEQ ID NO: 1027665 - RNA, 19 nt, Artificial Sequence
  Description of Artificial Sequence: Synthetic oligonucleotide
  Antisense strand to SEQ ID NO: 1027664
cuccacaucugacuuaucg

SEQ ID NO: 1027666 - RNA, 19 nt, Artificial Sequence
  Description of Artificial Sequence: Synthetic oligonucleotide
  Sense strand starting at position 2288 of SEQ ID NO: 914747
ucaagacucuuggcugagu

SEQ ID NO: 1027667 - RNA, 19 nt, Artificial Sequence
  Description of Artificial Sequence: Synthetic oligonucleotide
  Antisense strand to SEQ ID NO: 1027666
acucagccaagagucuuga

SEQ ID NO: 1027668 - RNA, 19 nt, Artificial Sequence
  Description of Artificial Sequence: Synthetic oligonucleotide
  Sense strand starting at position 2289 of SEQ ID NO: 914747
caagacucuuggcugaguu

SEQ ID NO: 1027669 - RNA, 19 nt, Artificial Sequence
  Description of Artificial Sequence: Synthetic oligonucleotide
  Antisense strand to SEQ ID NO: 1027668
aacucagccaagagucuug

SEQ ID NO: 1027670 - RNA, 19 nt, Artificial Sequence
  Description of Artificial Sequence: Synthetic oligonucleotide
  Sense strand starting at position 2768 of SEQ ID NO: 914747
gaaggagauucuuagggac

SEQ ID NO: 1027671 - RNA, 19 nt, Artificial Sequence
  Description of Artificial Sequence: Synthetic oligonucleotide
  Antisense strand to SEQ ID NO: 1027670
gucccuaagaaucuccuuc

SEQ ID NO: 1027672 - RNA, 19 nt, Artificial Sequence
  Description of Artificial Sequence: Synthetic oligonucleotide
  Sense strand starting at position 2789 of SEQ ID NO: 914747
gggaaauuauaccagugga

SEQ ID NO: 1027673 - RNA, 19 nt, Artificial Sequence
  Description of Artificial Sequence: Synthetic oligonucleotide
  Antisense strand to SEQ ID NO: 1027672
uccacugguauaauuuccc

SEQ ID NO: 1027674 - RNA, 19 nt, Artificial Sequence
  Description of Artificial Sequence: Synthetic oligonucleotide
  Sense strand starting at position 2792 of SEQ ID NO: 914747
aaauuauaccaguggaggu

SEQ ID NO: 1027675 - RNA, 19 nt, Artificial Sequence
  Description of Artificial Sequence: Synthetic oligonucleotide
  Antisense strand to SEQ ID NO: 1027674
accuccacugguauaauuu

SEQ ID NO: 1027676 - RNA, 19 nt, Artificial Sequence
  Description of Artificial Sequence: Synthetic oligonucleotide
  Sense strand starting at position 2808 of SEQ ID NO: 914747
ggucuccugagaugugcuu

SEQ ID NO: 1027677 - RNA, 19 nt, Artificial Sequence
  Description of Artificial Sequence: Synthetic oligonucleotide
  Antisense strand to SEQ ID NO: 1027676
aagcacaucucaggagacc

SEQ ID NO: 1027678 - RNA, 19 nt, Artificial Sequence
  Description of Artificial Sequence: Synthetic oligonucleotide
  Sense strand starting at position 2879 of SEQ ID NO: 914747
cacgguaucaguggaugau

SEQ ID NO: 1027679 - RNA, 19 nt, Artificial Sequence
  Description of Artificial Sequence: Synthetic oligonucleotide
  Antisense strand to SEQ ID NO: 1027678
aucauccacugauaccgug

SEQ ID NO: 1027680 - RNA, 19 nt, Artificial Sequence
  Description of Artificial Sequence: Synthetic oligonucleotide
  Sense strand starting at position 2880 of SEQ ID NO: 914747
acgguaucaguggaugauu

SEQ ID NO: 1027681 - RNA, 19 nt, Artificial Sequence
  Description of Artificial Sequence: Synthetic oligonucleotide
  Antisense strand to SEQ ID NO: 1027680
aaucauccacugauaccgu

SEQ ID NO: 1027682 - RNA, 19 nt, Artificial Sequence
  Description of Artificial Sequence: Synthetic oligonucleotide
  Sense strand starting at position 2971 of SEQ ID NO: 914747
ccugaaagggccugaaguu

SEQ ID NO: 1027683 - RNA, 19 nt, Artificial Sequence
  Description of Artificial Sequence: Synthetic oligonucleotide
  Antisense strand to SEQ ID NO: 1027682
aacuucaggcccuuucagg

SEQ ID NO: 1027684 - RNA, 19 nt, Artificial Sequence
  Description of Artificial Sequence: Synthetic oligonucleotide
  Sense strand starting at position 3226 of SEQ ID NO: 914747
aaaggaagccuguggugau

SEQ ID NO: 1027685 - RNA, 19 nt, Artificial Sequence
  Description of Artificial Sequence: Synthetic oligonucleotide
  Antisense strand to SEQ ID NO: 1027684
aucaccacaggcuuccuuu

SEQ ID NO: 1027686 - RNA, 19 nt, Artificial Sequence
  Description of Artificial Sequence: Synthetic oligonucleotide
  Sense strand starting at position 3264 of SEQ ID NO: 914747
gggucauugccucacugau

SEQ ID NO: 1027687 - RNA, 19 nt, Artificial Sequence
  Description of Artificial Sequence: Synthetic oligonucleotide
  Antisense strand to SEQ ID NO: 1027686
aucagugaggcaaugaccc

SEQ ID NO: 1027688 - RNA, 19 nt, Artificial Sequence
  Description of Artificial Sequence: Synthetic oligonucleotide
  Sense strand starting at position 3266 of SEQ ID NO: 914747
gucauugccucacugaucu

SEQ ID NO: 1027689 - RNA, 19 nt, Artificial Sequence
  Description of Artificial Sequence: Synthetic oligonucleotide
  Antisense strand to SEQ ID NO: 1027688
agaucagugaggcaaugac

SEQ ID NO: 1027690 - RNA, 19 nt, Artificial Sequence
  Description of Artificial Sequence: Synthetic oligonucleotide
  Sense strand starting at position 3273 of SEQ ID NO: 914747
ccucacugaucugcucaga

SEQ ID NO: 1027691 - RNA, 19 nt, Artificial Sequence
  Description of Artificial Sequence: Synthetic oligonucleotide
  Antisense strand to SEQ ID NO: 1027690
ucugagcagaucagugagg

SEQ ID NO: 1027692 - RNA, 19 nt, Artificial Sequence
  Description of Artificial Sequence: Synthetic oligonucleotide
  Sense strand starting at position 3414 of SEQ ID NO: 914747
acuguaagcuagucagagu

SEQ ID NO: 1027693 - RNA, 19 nt, Artificial Sequence
  Description of Artificial Sequence: Synthetic oligonucleotide
  Antisense strand to SEQ ID NO: 1027692
acucugacuagcuuacagu

SEQ ID NO: 1027694 - RNA, 19 nt, Artificial Sequence
  Description of Artificial Sequence: Synthetic oligonucleotide
  Sense strand starting at position 3469 of SEQ ID NO: 914747
gcuucuuagcagcuuugua

SEQ ID NO: 1027695 - RNA, 19 nt, Artificial Sequence
  Description of Artificial Sequence: Synthetic oligonucleotide
  Antisense strand to SEQ ID NO: 1027694
uacaaagcugcuaagaagc

SEQ ID NO: 1027696 - RNA, 19 nt, Artificial Sequence
  Description of Artificial Sequence: Synthetic oligonucleotide
  Sense strand starting at position 3495 of SEQ ID NO: 914747
ccauguuugggacagucga

SEQ ID NO: 1027697 - RNA, 19 nt, Artificial Sequence
  Description of Artificial Sequence: Synthetic oligonucleotide
  Antisense strand to SEQ ID NO: 1027696
ucgacugucccaaacaugg

SEQ ID NO: 1027698 - RNA, 19 nt, Artificial Sequence
  Description of Artificial Sequence: Synthetic oligonucleotide
  Sense strand starting at position 3501 of SEQ ID NO: 914747
uugggacagucgaguaaag

SEQ ID NO: 1027699 - RNA, 19 nt, Artificial Sequence
  Description of Artificial Sequence: Synthetic oligonucleotide
  Antisense strand to SEQ ID NO: 1027698
cuuuacucgacugucccaa

SEQ ID NO: 1027700 - RNA, 19 nt, Artificial Sequence
  Description of Artificial Sequence: Synthetic oligonucleotide
  Sense strand starting at position 3510 of SEQ ID NO: 914747
ucgaguaaaggcuguaaac

SEQ ID NO: 1027701 - RNA, 19 nt, Artificial Sequence
  Description of Artificial Sequence: Synthetic oligonucleotide
  Antisense strand to SEQ ID NO: 1027700
guuuacagccuuuacucga

SEQ ID NO: 1027702 - RNA, 19 nt, Artificial Sequence
  Description of Artificial Sequence: Synthetic oligonucleotide
  Sense strand starting at position 3708 of SEQ ID NO: 914747
gcgggaacucagcaguuca

SEQ ID NO: 1027703 - RNA, 19 nt, Artificial Sequence
  Description of Artificial Sequence: Synthetic oligonucleotide
  Antisense strand to SEQ ID NO: 1027702
ugaacugcugaguucccgc

SEQ ID NO: 1027704 - RNA, 19 nt, Artificial Sequence
  Description of Artificial Sequence: Synthetic oligonucleotide
  Sense strand starting at position 3760 of SEQ ID NO: 914747
uggcaugugacagaugaug

SEQ ID NO: 1027705 - RNA, 19 nt, Artificial Sequence
  Description of Artificial Sequence: Synthetic oligonucleotide
  Antisense strand to SEQ ID NO: 1027704
caucaucugucacaugcca

SEQ ID NO: 1027706 - RNA, 19 nt, Artificial Sequence
  Description of Artificial Sequence: Synthetic oligonucleotide
  Sense strand starting at position 3768 of SEQ ID NO: 914747
gacagaugauggcuucugu

SEQ ID NO: 1027707 - RNA, 19 nt, Artificial Sequence
  Description of Artificial Sequence: Synthetic oligonucleotide
  Antisense strand to SEQ ID NO: 1027706
acagaagccaucaucuguc

SEQ ID NO: 1027708 - RNA, 19 nt, Artificial Sequence
  Description of Artificial Sequence: Synthetic oligonucleotide
  Sense strand starting at position 3776 of SEQ ID NO: 914747
auggcuucuguuuaaagca

SEQ ID NO: 1027709 - RNA, 19 nt, Artificial Sequence
  Description of Artificial Sequence: Synthetic oligonucleotide
  Antisense strand to SEQ ID NO: 1027708
ugcuuuaaacagaagccau

SEQ ID NO: 1027710 - RNA, 19 nt, Artificial Sequence
  Description of Artificial Sequence: Synthetic oligonucleotide
  Sense strand starting at position 3801 of SEQ ID NO: 914747
ugacaaggcucauuaccuu

SEQ ID NO: 1027711 - RNA, 19 nt, Artificial Sequence
  Description of Artificial Sequence: Synthetic oligonucleotide
  Antisense strand to SEQ ID NO: 1027710
aagguaaugagccuuguca

SEQ ID NO: 1027712 - RNA, 19 nt, Artificial Sequence
  Description of Artificial Sequence: Synthetic oligonucleotide
  Sense strand starting at position 3940 of SEQ ID NO: 914747
aggcuaaagugucuauuac

SEQ ID NO: 1027713 - RNA, 19 nt, Artificial Sequence
  Description of Artificial Sequence: Synthetic oligonucleotide
  Antisense strand to SEQ ID NO: 1027712
guaauagacacuuuagccu

SEQ ID NO: 1027714 - RNA, 19 nt, Artificial Sequence
  Description of Artificial Sequence: Synthetic oligonucleotide
  Sense strand starting at position 3941 of SEQ ID NO: 914747
ggcuaaagugucuauuaca

SEQ ID NO: 1027715 - RNA, 19 nt, Artificial Sequence
  Description of Artificial Sequence: Synthetic oligonucleotide
  Antisense strand to SEQ ID NO: 1027714
uguaauagacacuuuagcc

SEQ ID NO: 1027716 - RNA, 19 nt, Artificial Sequence
  Description of Artificial Sequence: Synthetic oligonucleotide
  Sense strand starting at position 3948 of SEQ ID NO: 914747
gugucuauuacagaucagu

SEQ ID NO: 1027717 - RNA, 19 nt, Artificial Sequence
  Description of Artificial Sequence: Synthetic oligonucleotide
  Antisense strand to SEQ ID NO: 1027716
acugaucuguaauagacac

SEQ ID NO: 1027718 - RNA, 19 nt, Artificial Sequence
  Description of Artificial Sequence: Synthetic oligonucleotide
  Sense strand starting at position 3957 of SEQ ID NO: 914747
acagaucaguccuuuaguu

SEQ ID NO: 1027719 - RNA, 19 nt, Artificial Sequence
  Description of Artificial Sequence: Synthetic oligonucleotide
  Antisense strand to SEQ ID NO: 1027718
aacuaaaggacugaucugu

SEQ ID NO: 1027720 - RNA, 19 nt, Artificial Sequence
  Description of Artificial Sequence: Synthetic oligonucleotide
  Sense strand starting at position 3959 of SEQ ID NO: 914747
agaucaguccuuuaguuga

SEQ ID NO: 1027721 - RNA, 19 nt, Artificial Sequence
  Description of Artificial Sequence: Synthetic oligonucleotide
  Antisense strand to SEQ ID NO: 1027720
ucaacuaaaggacugaucu

SEQ ID NO: 1027722 - RNA, 19 nt, Artificial Sequence
  Description of Artificial Sequence: Synthetic oligonucleotide
  Sense strand starting at position 317 of SEQ ID NO: 914748
ugccuccuguccucguaau

SEQ ID NO: 1027723 - RNA, 19 nt, Artificial Sequence
  Description of Artificial Sequence: Synthetic oligonucleotide
  Antisense strand to SEQ ID NO: 1027722
auuacgaggacaggaggca

SEQ ID NO: 1027724 - RNA, 19 nt, Artificial Sequence
  Description of Artificial Sequence: Synthetic oligonucleotide
  Sense strand starting at position 318 of SEQ ID NO: 914748
gccuccuguccucguaauu

SEQ ID NO: 1027725 - RNA, 19 nt, Artificial Sequence
  Description of Artificial Sequence: Synthetic oligonucleotide
  Antisense strand to SEQ ID NO: 1027724
aauuacgaggacaggaggc

SEQ ID NO: 1027726 - RNA, 19 nt, Artificial Sequence
  Description of Artificial Sequence: Synthetic oligonucleotide
  Sense strand starting at position 327 of SEQ ID NO: 914748
ccucguaauucucgaaagc

SEQ ID NO: 1027727 - RNA, 19 nt, Artificial Sequence
  Description of Artificial Sequence: Synthetic oligonucleotide
  Antisense strand to SEQ ID NO: 1027726
gcuuucgagaauuacgagg

SEQ ID NO: 1027728 - RNA, 19 nt, Artificial Sequence
  Description of Artificial Sequence: Synthetic oligonucleotide
  Sense strand starting at position 328 of SEQ ID NO: 914748
cucguaauucucgaaagcu

SEQ ID NO: 1027729 - RNA, 19 nt, Artificial Sequence
  Description of Artificial Sequence: Synthetic oligonucleotide
  Antisense strand to SEQ ID NO: 1027728
agcuuucgagaauuacgag

SEQ ID NO: 1027730 - RNA, 19 nt, Artificial Sequence
  Description of Artificial Sequence: Synthetic oligonucleotide
  Sense strand starting at position 522 of SEQ ID NO: 914748
cgccguucgcuacgcaaau

SEQ ID NO: 1027731 - RNA, 19 nt, Artificial Sequence
  Description of Artificial Sequence: Synthetic oligonucleotide
  Antisense strand to SEQ ID NO: 1027730
auuugcguagcgaacggcg

SEQ ID NO: 1027732 - RNA, 19 nt, Artificial Sequence
  Description of Artificial Sequence: Synthetic oligonucleotide
  Sense strand starting at position 523 of SEQ ID NO: 914748
gccguucgcuacgcaaauu

SEQ ID NO: 1027733 - RNA, 19 nt, Artificial Sequence
  Description of Artificial Sequence: Synthetic oligonucleotide
  Antisense strand to SEQ ID NO: 1027732
aauuugcguagcgaacggc

SEQ ID NO: 1027734 - RNA, 19 nt, Artificial Sequence
  Description of Artificial Sequence: Synthetic oligonucleotide
  Sense strand starting at position 583 of SEQ ID NO: 914748
ggcgugaaaccguacgaga

SEQ ID NO: 1027735 - RNA, 19 nt, Artificial Sequence
  Description of Artificial Sequence: Synthetic oligonucleotide
  Antisense strand to SEQ ID NO: 1027734
ucucguacgguuucacgcc

SEQ ID NO: 1027736 - RNA, 19 nt, Artificial Sequence
  Description of Artificial Sequence: Synthetic oligonucleotide
  Sense strand starting at position 585 of SEQ ID NO: 914748
cgugaaaccguacgagaau

SEQ ID NO: 1027737 - RNA, 19 nt, Artificial Sequence
  Description of Artificial Sequence: Synthetic oligonucleotide
  Antisense strand to SEQ ID NO: 1027736
auucucguacgguuucacg

SEQ ID NO: 1027738 - RNA, 19 nt, Artificial Sequence
  Description of Artificial Sequence: Synthetic oligonucleotide
  Sense strand starting at position 586 of SEQ ID NO: 914748
gugaaaccguacgagaauu

SEQ ID NO: 1027739 - RNA, 19 nt, Artificial Sequence
  Description of Artificial Sequence: Synthetic oligonucleotide
  Antisense strand to SEQ ID NO: 1027738
aauucucguacgguuucac

SEQ ID NO: 1027740 - RNA, 19 nt, Artificial Sequence
  Description of Artificial Sequence: Synthetic oligonucleotide
  Sense strand starting at position 823 of SEQ ID NO: 914748
ucccucggucucugaagaa

SEQ ID NO: 1027741 - RNA, 19 nt, Artificial Sequence
  Description of Artificial Sequence: Synthetic oligonucleotide
  Antisense strand to SEQ ID NO: 1027740
uucuucagagaccgaggga

SEQ ID NO: 1027742 - RNA, 19 nt, Artificial Sequence
  Description of Artificial Sequence: Synthetic oligonucleotide
  Sense strand starting at position 1985 of SEQ ID NO: 914748
cagaguuugagccgaguga

SEQ ID NO: 1027743 - RNA, 19 nt, Artificial Sequence
  Description of Artificial Sequence: Synthetic oligonucleotide
  Antisense strand to SEQ ID NO: 1027742
ucacucggcucaaacucug

SEQ ID NO: 1027744 - RNA, 19 nt, Artificial Sequence
  Description of Artificial Sequence: Synthetic oligonucleotide
  Sense strand starting at position 2144 of SEQ ID NO: 914748
gcagccaucauggagguaa

SEQ ID NO: 1027745 - RNA, 19 nt, Artificial Sequence
  Description of Artificial Sequence: Synthetic oligonucleotide
  Antisense strand to SEQ ID NO: 1027744
uuaccuccaugauggcugc

SEQ ID NO: 1027746 - RNA, 19 nt, Artificial Sequence
  Description of Artificial Sequence: Synthetic oligonucleotide
  Sense strand starting at position 2279 of SEQ ID NO: 914748
ccaguuuccucuuucguaa

SEQ ID NO: 1027747 - RNA, 19 nt, Artificial Sequence
  Description of Artificial Sequence: Synthetic oligonucleotide
  Antisense strand to SEQ ID NO: 1027746
uuacgaaagaggaaacugg

SEQ ID NO: 1027748 - RNA, 19 nt, Artificial Sequence
  Description of Artificial Sequence: Synthetic oligonucleotide
  Sense strand starting at position 2322 of SEQ ID NO: 914748
uaggacuguugaguuaauu

SEQ ID NO: 1027749 - RNA, 19 nt, Artificial Sequence
  Description of Artificial Sequence: Synthetic oligonucleotide
  Antisense strand to SEQ ID NO: 1027748
aauuaacucaacaguccua

SEQ ID NO: 1027750 - RNA, 19 nt, Artificial Sequence
  Description of Artificial Sequence: Synthetic oligonucleotide
  Sense strand starting at position 2330 of SEQ ID NO: 914748
uugaguuaauuagcaggaa

SEQ ID NO: 1027751 - RNA, 19 nt, Artificial Sequence
  Description of Artificial Sequence: Synthetic oligonucleotide
  Antisense strand to SEQ ID NO: 1027750
uuccugcuaauuaacucaa

SEQ ID NO: 1027752 - RNA, 19 nt, Artificial Sequence
  Description of Artificial Sequence: Synthetic oligonucleotide
  Sense strand starting at position 2333 of SEQ ID NO: 914748
aguuaauuagcaggaacau

SEQ ID NO: 1027753 - RNA, 19 nt, Artificial Sequence
  Description of Artificial Sequence: Synthetic oligonucleotide
  Antisense strand to SEQ ID NO: 1027752
auguuccugcuaauuaacu

SEQ ID NO: 1027754 - RNA, 19 nt, Artificial Sequence
  Description of Artificial Sequence: Synthetic oligonucleotide
  Sense strand starting at position 2355 of SEQ ID NO: 914748
ggaugcacuugauuacaga

SEQ ID NO: 1027755 - RNA, 19 nt, Artificial Sequence
  Description of Artificial Sequence: Synthetic oligonucleotide
  Antisense strand to SEQ ID NO: 1027754
ucuguaaucaagugcaucc

SEQ ID NO: 1027756 - RNA, 19 nt, Artificial Sequence
  Description of Artificial Sequence: Synthetic oligonucleotide
  Sense strand starting at position 2371 of SEQ ID NO: 914748
agagcuggugcacauuaaa

SEQ ID NO: 1027757 - RNA, 19 nt, Artificial Sequence
  Description of Artificial Sequence: Synthetic oligonucleotide
  Antisense strand to SEQ ID NO: 1027756
uuuaaugugcaccagcucu

SEQ ID NO: 1027758 - RNA, 19 nt, Artificial Sequence
  Description of Artificial Sequence: Synthetic oligonucleotide
  Sense strand starting at position 2635 of SEQ ID NO: 914748
ccugguguuucuuuccuua

SEQ ID NO: 1027759 - RNA, 19 nt, Artificial Sequence
  Description of Artificial Sequence: Synthetic oligonucleotide
  Antisense strand to SEQ ID NO: 1027758
uaaggaaagaaacaccagg

SEQ ID NO: 1027760 - RNA, 19 nt, Artificial Sequence
  Description of Artificial Sequence: Synthetic oligonucleotide
  Sense strand starting at position 2637 of SEQ ID NO: 914748
ugguguuucuuuccuuaga

SEQ ID NO: 1027761 - RNA, 19 nt, Artificial Sequence
  Description of Artificial Sequence: Synthetic oligonucleotide
  Antisense strand to SEQ ID NO: 1027760
ucuaaggaaagaaacacca

SEQ ID NO: 1027762 - RNA, 19 nt, Artificial Sequence
  Description of Artificial Sequence: Synthetic oligonucleotide
  Sense strand starting at position 2638 of SEQ ID NO: 914748
gguguuucuuuccuuagaa

SEQ ID NO: 1027763 - RNA, 19 nt, Artificial Sequence
  Description of Artificial Sequence: Synthetic oligonucleotide
  Antisense strand to SEQ ID NO: 1027762
uucuaaggaaagaaacacc

SEQ ID NO: 1027764 - RNA, 19 nt, Artificial Sequence
  Description of Artificial Sequence: Synthetic oligonucleotide
  Sense strand starting at position 2639 of SEQ ID NO: 914748
guguuucuuuccuuagaau

SEQ ID NO: 1027765 - RNA, 19 nt, Artificial Sequence
  Description of Artificial Sequence: Synthetic oligonucleotide
  Antisense strand to SEQ ID NO: 1027764
auucuaaggaaagaaacac

SEQ ID NO: 1027766 - RNA, 19 nt, Artificial Sequence
  Description of Artificial Sequence: Synthetic oligonucleotide
  Sense strand starting at position 2640 of SEQ ID NO: 914748
uguuucuuuccuuagaaug

SEQ ID NO: 1027767 - RNA, 19 nt, Artificial Sequence
  Description of Artificial Sequence: Synthetic oligonucleotide
  Antisense strand to SEQ ID NO: 1027766
cauucuaaggaaagaaaca

SEQ ID NO: 1027768 - RNA, 19 nt, Artificial Sequence
  Description of Artificial Sequence: Synthetic oligonucleotide
  Sense strand starting at position 2697 of SEQ ID NO: 914748
acaugcuuucccugggauu

SEQ ID NO: 1027769 - RNA, 19 nt, Artificial Sequence
  Description of Artificial Sequence: Synthetic oligonucleotide
  Antisense strand to SEQ ID NO: 1027768
aaucccagggaaagcaugu

SEQ ID NO: 1027770 - RNA, 19 nt, Artificial Sequence
  Description of Artificial Sequence: Synthetic oligonucleotide
  Sense strand starting at position 2698 of SEQ ID NO: 914748
caugcuuucccugggauua

SEQ ID NO: 1027771 - RNA, 19 nt, Artificial Sequence
  Description of Artificial Sequence: Synthetic oligonucleotide
  Antisense strand to SEQ ID NO: 1027770
uaaucccagggaaagcaug

SEQ ID NO: 1027772 - RNA, 19 nt, Artificial Sequence
  Description of Artificial Sequence: Synthetic oligonucleotide
  Sense strand starting at position 2699 of SEQ ID NO: 914748
augcuuucccugggauuag

SEQ ID NO: 1027773 - RNA, 19 nt, Artificial Sequence
  Description of Artificial Sequence: Synthetic oligonucleotide
  Antisense strand to SEQ ID NO: 1027772
cuaaucccagggaaagcau

SEQ ID NO: 1027774 - RNA, 19 nt, Artificial Sequence
  Description of Artificial Sequence: Synthetic oligonucleotide
  Sense strand starting at position 2769 of SEQ ID NO: 914748
gcaggacuguccuggcaca

SEQ ID NO: 1027775 - RNA, 19 nt, Artificial Sequence
  Description of Artificial Sequence: Synthetic oligonucleotide
  Antisense strand to SEQ ID NO: 1027774
ugugccaggacaguccugc

SEQ ID NO: 1027776 - RNA, 19 nt, Artificial Sequence
  Description of Artificial Sequence: Synthetic oligonucleotide
  Sense strand starting at position 2898 of SEQ ID NO: 914748
guccauuucucaguaggcu

SEQ ID NO: 1027777 - RNA, 19 nt, Artificial Sequence
  Description of Artificial Sequence: Synthetic oligonucleotide
  Antisense strand to SEQ ID NO: 1027776
agccuacugagaaauggac

SEQ ID NO: 1027778 - RNA, 19 nt, Artificial Sequence
  Description of Artificial Sequence: Synthetic oligonucleotide
  Sense strand starting at position 3194 of SEQ ID NO: 914748
cucgcucucuuacggauaa

SEQ ID NO: 1027779 - RNA, 19 nt, Artificial Sequence
  Description of Artificial Sequence: Synthetic oligonucleotide
  Antisense strand to SEQ ID NO: 1027778
uuauccguaagagagcgag

SEQ ID NO: 1027780 - RNA, 19 nt, Artificial Sequence
  Description of Artificial Sequence: Synthetic oligonucleotide
  Sense strand starting at position 3195 of SEQ ID NO: 914748
ucgcucucuuacggauaaa

SEQ ID NO: 1027781 - RNA, 19 nt, Artificial Sequence
  Description of Artificial Sequence: Synthetic oligonucleotide
  Antisense strand to SEQ ID NO: 1027780
uuuauccguaagagagcga

SEQ ID NO: 1027782 - RNA, 19 nt, Artificial Sequence
  Description of Artificial Sequence: Synthetic oligonucleotide
  Sense strand starting at position 3196 of SEQ ID NO: 914748
cgcucucuuacggauaaac

SEQ ID NO: 1027783 - RNA, 19 nt, Artificial Sequence
  Description of Artificial Sequence: Synthetic oligonucleotide
  Antisense strand to SEQ ID NO: 1027782
guuuauccguaagagagcg

SEQ ID NO: 1027784 - RNA, 19 nt, Artificial Sequence
  Description of Artificial Sequence: Synthetic oligonucleotide
  Sense strand starting at position 3219 of SEQ ID NO: 914748
acacucgauucucucagau

SEQ ID NO: 1027785 - RNA, 19 nt, Artificial Sequence
  Description of Artificial Sequence: Synthetic oligonucleotide
  Antisense strand to SEQ ID NO: 1027784
aucugagagaaucgagugu

SEQ ID NO: 1027786 - RNA, 19 nt, Artificial Sequence
  Description of Artificial Sequence: Synthetic oligonucleotide
  Sense strand starting at position 3221 of SEQ ID NO: 914748
acucgauucucucagauug

SEQ ID NO: 1027787 - RNA, 19 nt, Artificial Sequence
  Description of Artificial Sequence: Synthetic oligonucleotide
  Antisense strand to SEQ ID NO: 1027786
caaucugagagaaucgagu

SEQ ID NO: 1027788 - RNA, 19 nt, Artificial Sequence
  Description of Artificial Sequence: Synthetic oligonucleotide
  Sense strand starting at position 3223 of SEQ ID NO: 914748
ucgauucucucagauugga

SEQ ID NO: 1027789 - RNA, 19 nt, Artificial Sequence
  Description of Artificial Sequence: Synthetic oligonucleotide
  Antisense strand to SEQ ID NO: 1027788
uccaaucugagagaaucga

SEQ ID NO: 1027790 - RNA, 19 nt, Artificial Sequence
  Description of Artificial Sequence: Synthetic oligonucleotide
  Sense strand starting at position 3350 of SEQ ID NO: 914748
cccggaacuucugggcuua

SEQ ID NO: 1027791 - RNA, 19 nt, Artificial Sequence
  Description of Artificial Sequence: Synthetic oligonucleotide
  Antisense strand to SEQ ID NO: 1027790
uaagcccagaaguuccggg

SEQ ID NO: 1027792 - RNA, 19 nt, Artificial Sequence
  Description of Artificial Sequence: Synthetic oligonucleotide
  Sense strand starting at position 3351 of SEQ ID NO: 914748
ccggaacuucugggcuuaa

SEQ ID NO: 1027793 - RNA, 19 nt, Artificial Sequence
  Description of Artificial Sequence: Synthetic oligonucleotide
  Antisense strand to SEQ ID NO: 1027792
uuaagcccagaaguuccgg

SEQ ID NO: 1027794 - RNA, 19 nt, Artificial Sequence
  Description of Artificial Sequence: Synthetic oligonucleotide
  Sense strand starting at position 3928 of SEQ ID NO: 914748
ccagucuugucucgaauuc

SEQ ID NO: 1027795 - RNA, 19 nt, Artificial Sequence
  Description of Artificial Sequence: Synthetic oligonucleotide
  Antisense strand to SEQ ID NO: 1027794
gaauucgagacaagacugg

SEQ ID NO: 1027796 - RNA, 19 nt, Artificial Sequence
  Description of Artificial Sequence: Synthetic oligonucleotide
  Sense strand starting at position 3979 of SEQ ID NO: 914748
ccagacuguugagauuacu

SEQ ID NO: 1027797 - RNA, 19 nt, Artificial Sequence
  Description of Artificial Sequence: Synthetic oligonucleotide
  Antisense strand to SEQ ID NO: 1027796
aguaaucucaacagucugg

SEQ ID NO: 1027798 - RNA, 19 nt, Artificial Sequence
  Description of Artificial Sequence: Synthetic oligonucleotide
  Sense strand starting at position 560 of SEQ ID NO: 914749
gacugacagccaugguacu

SEQ ID NO: 1027799 - RNA, 19 nt, Artificial Sequence
  Description of Artificial Sequence: Synthetic oligonucleotide
  Antisense strand to SEQ ID NO: 1027798
aguaccauggcugucaguc

SEQ ID NO: 1027800 - RNA, 19 nt, Artificial Sequence
  Description of Artificial Sequence: Synthetic oligonucleotide
  Sense strand starting at position 600 of SEQ ID NO: 914749
gucagaagucucugucuga

SEQ ID NO: 1027801 - RNA, 19 nt, Artificial Sequence
  Description of Artificial Sequence: Synthetic oligonucleotide
  Antisense strand to SEQ ID NO: 1027800
ucagacagagacuucugac

SEQ ID NO: 1027802 - RNA, 19 nt, Artificial Sequence
  Description of Artificial Sequence: Synthetic oligonucleotide
  Sense strand starting at position 601 of SEQ ID NO: 914749
ucagaagucucugucugag

SEQ ID NO: 1027803 - RNA, 19 nt, Artificial Sequence
  Description of Artificial Sequence: Synthetic oligonucleotide
  Antisense strand to SEQ ID NO: 1027802
cucagacagagacuucuga

SEQ ID NO: 1027804 - RNA, 19 nt, Artificial Sequence
  Description of Artificial Sequence: Synthetic oligonucleotide
  Sense strand starting at position 634 of SEQ ID NO: 914749
ccuugauccugcugucuua

SEQ ID NO: 1027805 - RNA, 19 nt, Artificial Sequence
  Description of Artificial Sequence: Synthetic oligonucleotide
  Antisense strand to SEQ ID NO: 1027804
uaagacagcaggaucaagg

SEQ ID NO: 1027806 - RNA, 19 nt, Artificial Sequence
  Description of Artificial Sequence: Synthetic oligonucleotide
  Sense strand starting at position 691 of SEQ ID NO: 914749
auaguagccucucagggaa

SEQ ID NO: 1027807 - RNA, 19 nt, Artificial Sequence
  Description of Artificial Sequence: Synthetic oligonucleotide
  Antisense strand to SEQ ID NO: 1027806
uucccugagaggcuacuau

SEQ ID NO: 1027808 - RNA, 19 nt, Artificial Sequence
  Description of Artificial Sequence: Synthetic oligonucleotide
  Sense strand starting at position 693 of SEQ ID NO: 914749
aguagccucucagggaaau

SEQ ID NO: 1027809 - RNA, 19 nt, Artificial Sequence
  Description of Artificial Sequence: Synthetic oligonucleotide
  Antisense strand to SEQ ID NO: 1027808
auuucccugagaggcuacu

SEQ ID NO: 1027810 - RNA, 19 nt, Artificial Sequence
  Description of Artificial Sequence: Synthetic oligonucleotide
  Sense strand starting at position 694 of SEQ ID NO: 914749
guagccucucagggaaauu

SEQ ID NO: 1027811 - RNA, 19 nt, Artificial Sequence
  Description of Artificial Sequence: Synthetic oligonucleotide
  Antisense strand to SEQ ID NO: 1027810
aauuucccugagaggcuac

SEQ ID NO: 1027812 - RNA, 19 nt, Artificial Sequence
  Description of Artificial Sequence: Synthetic oligonucleotide
  Sense strand starting at position 749 of SEQ ID NO: 914749
accguaagacacuguacaa

SEQ ID NO: 1027813 - RNA, 19 nt, Artificial Sequence
  Description of Artificial Sequence: Synthetic oligonucleotide
  Antisense strand to SEQ ID NO: 1027812
uuguacagugucuuacggu

SEQ ID NO: 1027814 - RNA, 19 nt, Artificial Sequence
  Description of Artificial Sequence: Synthetic oligonucleotide
  Sense strand starting at position 904 of SEQ ID NO: 914749
auuccugugccuugcagau

SEQ ID NO: 1027815 - RNA, 19 nt, Artificial Sequence
  Description of Artificial Sequence: Synthetic oligonucleotide
  Antisense strand to SEQ ID NO: 1027814
aucugcaaggcacaggaau

SEQ ID NO: 1027816 - RNA, 19 nt, Artificial Sequence
  Description of Artificial Sequence: Synthetic oligonucleotide
  Sense strand starting at position 948 of SEQ ID NO: 914749
gcgccaggugcuuuaacuu

SEQ ID NO: 1027817 - RNA, 19 nt, Artificial Sequence
  Description of Artificial Sequence: Synthetic oligonucleotide
  Antisense strand to SEQ ID NO: 1027816
aaguuaaagcaccuggcgc

SEQ ID NO: 1027818 - RNA, 19 nt, Artificial Sequence
  Description of Artificial Sequence: Synthetic oligonucleotide
  Sense strand starting at position 1221 of SEQ ID NO: 914749
guugguuaccugggcaaag

SEQ ID NO: 1027819 - RNA, 19 nt, Artificial Sequence
  Description of Artificial Sequence: Synthetic oligonucleotide
  Antisense strand to SEQ ID NO: 1027818
cuuugcccagguaaccaac

SEQ ID NO: 1027820 - RNA, 19 nt, Artificial Sequence
  Description of Artificial Sequence: Synthetic oligonucleotide
  Sense strand starting at position 1222 of SEQ ID NO: 914749
uugguuaccugggcaaagu

SEQ ID NO: 1027821 - RNA, 19 nt, Artificial Sequence
  Description of Artificial Sequence: Synthetic oligonucleotide
  Antisense strand to SEQ ID NO: 1027820
acuuugcccagguaaccaa

SEQ ID NO: 1027822 - RNA, 19 nt, Artificial Sequence
  Description of Artificial Sequence: Synthetic oligonucleotide
  Sense strand starting at position 1223 of SEQ ID NO: 914749
ugguuaccugggcaaagua

SEQ ID NO: 1027823 - RNA, 19 nt, Artificial Sequence
  Description of Artificial Sequence: Synthetic oligonucleotide
  Antisense strand to SEQ ID NO: 1027822
uacuuugcccagguaacca

SEQ ID NO: 1027824 - RNA, 19 nt, Artificial Sequence
  Description of Artificial Sequence: Synthetic oligonucleotide
  Sense strand starting at position 2088 of SEQ ID NO: 914749
ugccuccuguccucguaau

SEQ ID NO: 1027825 - RNA, 19 nt, Artificial Sequence
  Description of Artificial Sequence: Synthetic oligonucleotide
  Antisense strand to SEQ ID NO: 1027824
auuacgaggacaggaggca

SEQ ID NO: 1027826 - RNA, 19 nt, Artificial Sequence
  Description of Artificial Sequence: Synthetic oligonucleotide
  Sense strand starting at position 2089 of SEQ ID NO: 914749
gccuccuguccucguaauu

SEQ ID NO: 1027827 - RNA, 19 nt, Artificial Sequence
  Description of Artificial Sequence: Synthetic oligonucleotide
  Antisense strand to SEQ ID NO: 1027826
aauuacgaggacaggaggc

SEQ ID NO: 1027828 - RNA, 19 nt, Artificial Sequence
  Description of Artificial Sequence: Synthetic oligonucleotide
  Sense strand starting at position 2098 of SEQ ID NO: 914749
ccucguaauucucgaaagc

SEQ ID NO: 1027829 - RNA, 19 nt, Artificial Sequence
  Description of Artificial Sequence: Synthetic oligonucleotide
  Antisense strand to SEQ ID NO: 1027828
gcuuucgagaauuacgagg

SEQ ID NO: 1027830 - RNA, 19 nt, Artificial Sequence
  Description of Artificial Sequence: Synthetic oligonucleotide
  Sense strand starting at position 2099 of SEQ ID NO: 914749
cucguaauucucgaaagcu

SEQ ID NO: 1027831 - RNA, 19 nt, Artificial Sequence
  Description of Artificial Sequence: Synthetic oligonucleotide
  Antisense strand to SEQ ID NO: 1027830
agcuuucgagaauuacgag

SEQ ID NO: 1027832 - RNA, 19 nt, Artificial Sequence
  Description of Artificial Sequence: Synthetic oligonucleotide
  Sense strand starting at position 2293 of SEQ ID NO: 914749
cgccguucgcuacgcaaau

SEQ ID NO: 1027833 - RNA, 19 nt, Artificial Sequence
  Description of Artificial Sequence: Synthetic oligonucleotide
  Antisense strand to SEQ ID NO: 1027832
auuugcguagcgaacggcg

SEQ ID NO: 1027834 - RNA, 19 nt, Artificial Sequence
  Description of Artificial Sequence: Synthetic oligonucleotide
  Sense strand starting at position 2294 of SEQ ID NO: 914749
gccguucgcuacgcaaauu

SEQ ID NO: 1027835 - RNA, 19 nt, Artificial Sequence
  Description of Artificial Sequence: Synthetic oligonucleotide
  Antisense strand to SEQ ID NO: 1027834
aauuugcguagcgaacggc

SEQ ID NO: 1027836 - RNA, 19 nt, Artificial Sequence
  Description of Artificial Sequence: Synthetic oligonucleotide
  Sense strand starting at position 2354 of SEQ ID NO: 914749
ggcgugaaaccguacgaga

SEQ ID NO: 1027837 - RNA, 19 nt, Artificial Sequence
  Description of Artificial Sequence: Synthetic oligonucleotide
  Antisense strand to SEQ ID NO: 1027836
ucucguacgguuucacgcc

SEQ ID NO: 1027838 - RNA, 19 nt, Artificial Sequence
  Description of Artificial Sequence: Synthetic oligonucleotide
  Sense strand starting at position 2356 of SEQ ID NO: 914749
cgugaaaccguacgagaau

SEQ ID NO: 1027839 - RNA, 19 nt, Artificial Sequence
  Description of Artificial Sequence: Synthetic oligonucleotide
  Antisense strand to SEQ ID NO: 1027838
auucucguacgguuucacg

SEQ ID NO: 1027840 - RNA, 19 nt, Artificial Sequence
  Description of Artificial Sequence: Synthetic oligonucleotide
  Sense strand starting at position 2357 of SEQ ID NO: 914749
gugaaaccguacgagaauu

SEQ ID NO: 1027841 - RNA, 19 nt, Artificial Sequence
  Description of Artificial Sequence: Synthetic oligonucleotide
  Antisense strand to SEQ ID NO: 1027840
aauucucguacgguuucac

SEQ ID NO: 1027842 - RNA, 19 nt, Artificial Sequence
  Description of Artificial Sequence: Synthetic oligonucleotide
  Sense strand starting at position 2594 of SEQ ID NO: 914749
ucccucggucucugaagaa

SEQ ID NO: 1027843 - RNA, 19 nt, Artificial Sequence
  Description of Artificial Sequence: Synthetic oligonucleotide
  Antisense strand to SEQ ID NO: 1027842
uucuucagagaccgaggga

SEQ ID NO: 1027844 - RNA, 19 nt, Artificial Sequence
  Description of Artificial Sequence: Synthetic oligonucleotide
  Sense strand starting at position 3756 of SEQ ID NO: 914749
cagaguuugagccgaguga

SEQ ID NO: 1027845 - RNA, 19 nt, Artificial Sequence
  Description of Artificial Sequence: Synthetic oligonucleotide
  Antisense strand to SEQ ID NO: 1027844
ucacucggcucaaacucug

SEQ ID NO: 1027846 - RNA, 19 nt, Artificial Sequence
  Description of Artificial Sequence: Synthetic oligonucleotide
  Sense strand starting at position 3915 of SEQ ID NO: 914749
gcagccaucauggagguaa

SEQ ID NO: 1027847 - RNA, 19 nt, Artificial Sequence
  Description of Artificial Sequence: Synthetic oligonucleotide
  Antisense strand to SEQ ID NO: 1027846
uuaccuccaugauggcugc

SEQ ID NO: 1027848 - RNA, 19 nt, Artificial Sequence
  Description of Artificial Sequence: Synthetic oligonucleotide
  Sense strand starting at position 791 of SEQ ID NO: 914750
ugccuccuguccucguaau

SEQ ID NO: 1027849 - RNA, 19 nt, Artificial Sequence
  Description of Artificial Sequence: Synthetic oligonucleotide
  Antisense strand to SEQ ID NO: 1027848
auuacgaggacaggaggca

SEQ ID NO: 1027850 - RNA, 19 nt, Artificial Sequence
  Description of Artificial Sequence: Synthetic oligonucleotide
  Sense strand starting at position 792 of SEQ ID NO: 914750
gccuccuguccucguaauu

SEQ ID NO: 1027851 - RNA, 19 nt, Artificial Sequence
  Description of Artificial Sequence: Synthetic oligonucleotide
  Antisense strand to SEQ ID NO: 1027850
aauuacgaggacaggaggc

SEQ ID NO: 1027852 - RNA, 19 nt, Artificial Sequence
  Description of Artificial Sequence: Synthetic oligonucleotide
  Sense strand starting at position 801 of SEQ ID NO: 914750
ccucguaauucucgaaagc

SEQ ID NO: 1027853 - RNA, 19 nt, Artificial Sequence
  Description of Artificial Sequence: Synthetic oligonucleotide
  Antisense strand to SEQ ID NO: 1027852
gcuuucgagaauuacgagg

SEQ ID NO: 1027854 - RNA, 19 nt, Artificial Sequence
  Description of Artificial Sequence: Synthetic oligonucleotide
  Sense strand starting at position 802 of SEQ ID NO: 914750
cucguaauucucgaaagcu

SEQ ID NO: 1027855 - RNA, 19 nt, Artificial Sequence
  Description of Artificial Sequence: Synthetic oligonucleotide
  Antisense strand to SEQ ID NO: 1027854
agcuuucgagaauuacgag

SEQ ID NO: 1027856 - RNA, 19 nt, Artificial Sequence
  Description of Artificial Sequence: Synthetic oligonucleotide
  Sense strand starting at position 996 of SEQ ID NO: 914750
cgccguucgcuacgcaaau

SEQ ID NO: 1027857 - RNA, 19 nt, Artificial Sequence
  Description of Artificial Sequence: Synthetic oligonucleotide
  Antisense strand to SEQ ID NO: 1027856
auuugcguagcgaacggcg

SEQ ID NO: 1027858 - RNA, 19 nt, Artificial Sequence
  Description of Artificial Sequence: Synthetic oligonucleotide
  Sense strand starting at position 997 of SEQ ID NO: 914750
gccguucgcuacgcaaauu

SEQ ID NO: 1027859 - RNA, 19 nt, Artificial Sequence
  Description of Artificial Sequence: Synthetic oligonucleotide
  Antisense strand to SEQ ID NO: 1027858
aauuugcguagcgaacggc

SEQ ID NO: 1027860 - RNA, 19 nt, Artificial Sequence
  Description of Artificial Sequence: Synthetic oligonucleotide
  Sense strand starting at position 1057 of SEQ ID NO: 914750
ggcgugaaaccguacgaga

SEQ ID NO: 1027861 - RNA, 19 nt, Artificial Sequence
  Description of Artificial Sequence: Synthetic oligonucleotide
  Antisense strand to SEQ ID NO: 1027860
ucucguacgguuucacgcc

SEQ ID NO: 1027862 - RNA, 19 nt, Artificial Sequence
  Description of Artificial Sequence: Synthetic oligonucleotide
  Sense strand starting at position 1059 of SEQ ID NO: 914750
cgugaaaccguacgagaau

SEQ ID NO: 1027863 - RNA, 19 nt, Artificial Sequence
  Description of Artificial Sequence: Synthetic oligonucleotide
  Antisense strand to SEQ ID NO: 1027862
auucucguacgguuucacg

SEQ ID NO: 1027864 - RNA, 19 nt, Artificial Sequence
  Description of Artificial Sequence: Synthetic oligonucleotide
  Sense strand starting at position 1060 of SEQ ID NO: 914750
gugaaaccguacgagaauu

SEQ ID NO: 1027865 - RNA, 19 nt, Artificial Sequence
  Description of Artificial Sequence: Synthetic oligonucleotide
  Antisense strand to SEQ ID NO: 1027864
aauucucguacgguuucac

SEQ ID NO: 1027866 - RNA, 19 nt, Artificial Sequence
  Description of Artificial Sequence: Synthetic oligonucleotide
  Sense strand starting at position 1297 of SEQ ID NO: 914750
ucccucggucucugaagaa

SEQ ID NO: 1027867 - RNA, 19 nt, Artificial Sequence
  Description of Artificial Sequence: Synthetic oligonucleotide
  Antisense strand to SEQ ID NO: 1027866
uucuucagagaccgaggga

SEQ ID NO: 1027868 - RNA, 19 nt, Artificial Sequence
  Description of Artificial Sequence: Synthetic oligonucleotide
  Sense strand starting at position 2459 of SEQ ID NO: 914750
cagaguuugagccgaguga

SEQ ID NO: 1027869 - RNA, 19 nt, Artificial Sequence
  Description of Artificial Sequence: Synthetic oligonucleotide
  Antisense strand to SEQ ID NO: 1027868
ucacucggcucaaacucug

SEQ ID NO: 1027870 - RNA, 19 nt, Artificial Sequence
  Description of Artificial Sequence: Synthetic oligonucleotide
  Sense strand starting at position 2618 of SEQ ID NO: 914750
gcagccaucauggagguaa

SEQ ID NO: 1027871 - RNA, 19 nt, Artificial Sequence
  Description of Artificial Sequence: Synthetic oligonucleotide
  Antisense strand to SEQ ID NO: 1027870
uuaccuccaugauggcugc

SEQ ID NO: 1027872 - RNA, 19 nt, Artificial Sequence
  Description of Artificial Sequence: Synthetic oligonucleotide
  Sense strand starting at position 2753 of SEQ ID NO: 914750
ccaguuuccucuuucguaa

SEQ ID NO: 1027873 - RNA, 19 nt, Artificial Sequence
  Description of Artificial Sequence: Synthetic oligonucleotide
  Antisense strand to SEQ ID NO: 1027872
uuacgaaagaggaaacugg

SEQ ID NO: 1027874 - RNA, 19 nt, Artificial Sequence
  Description of Artificial Sequence: Synthetic oligonucleotide
  Sense strand starting at position 2796 of SEQ ID NO: 914750
uaggacuguugaguuaauu

SEQ ID NO: 1027875 - RNA, 19 nt, Artificial Sequence
  Description of Artificial Sequence: Synthetic oligonucleotide
  Antisense strand to SEQ ID NO: 1027874
aauuaacucaacaguccua

SEQ ID NO: 1027876 - RNA, 19 nt, Artificial Sequence
  Description of Artificial Sequence: Synthetic oligonucleotide
  Sense strand starting at position 2804 of SEQ ID NO: 914750
uugaguuaauuagcaggaa

SEQ ID NO: 1027877 - RNA, 19 nt, Artificial Sequence
  Description of Artificial Sequence: Synthetic oligonucleotide
  Antisense strand to SEQ ID NO: 1027876
uuccugcuaauuaacucaa

SEQ ID NO: 1027878 - RNA, 19 nt, Artificial Sequence
  Description of Artificial Sequence: Synthetic oligonucleotide
  Sense strand starting at position 2807 of SEQ ID NO: 914750
aguuaauuagcaggaacau

SEQ ID NO: 1027879 - RNA, 19 nt, Artificial Sequence
  Description of Artificial Sequence: Synthetic oligonucleotide
  Antisense strand to SEQ ID NO: 1027878
auguuccugcuaauuaacu

SEQ ID NO: 1027880 - RNA, 19 nt, Artificial Sequence
  Description of Artificial Sequence: Synthetic oligonucleotide
  Sense strand starting at position 2829 of SEQ ID NO: 914750
ggaugcacuugauuacaga

SEQ ID NO: 1027881 - RNA, 19 nt, Artificial Sequence
  Description of Artificial Sequence: Synthetic oligonucleotide
  Antisense strand to SEQ ID NO: 1027880
ucuguaaucaagugcaucc

SEQ ID NO: 1027882 - RNA, 19 nt, Artificial Sequence
  Description of Artificial Sequence: Synthetic oligonucleotide
  Sense strand starting at position 2845 of SEQ ID NO: 914750
agagcuggugcacauuaaa

SEQ ID NO: 1027883 - RNA, 19 nt, Artificial Sequence
  Description of Artificial Sequence: Synthetic oligonucleotide
  Antisense strand to SEQ ID NO: 1027882
uuuaaugugcaccagcucu

SEQ ID NO: 1027884 - RNA, 19 nt, Artificial Sequence
  Description of Artificial Sequence: Synthetic oligonucleotide
  Sense strand starting at position 3109 of SEQ ID NO: 914750
ccugguguuucuuuccuua

SEQ ID NO: 1027885 - RNA, 19 nt, Artificial Sequence
  Description of Artificial Sequence: Synthetic oligonucleotide
  Antisense strand to SEQ ID NO: 1027884
uaaggaaagaaacaccagg

SEQ ID NO: 1027886 - RNA, 19 nt, Artificial Sequence
  Description of Artificial Sequence: Synthetic oligonucleotide
  Sense strand starting at position 3111 of SEQ ID NO: 914750
ugguguuucuuuccuuaga

SEQ ID NO: 1027887 - RNA, 19 nt, Artificial Sequence
  Description of Artificial Sequence: Synthetic oligonucleotide
  Antisense strand to SEQ ID NO: 1027886
ucuaaggaaagaaacacca

SEQ ID NO: 1027888 - RNA, 19 nt, Artificial Sequence
  Description of Artificial Sequence: Synthetic oligonucleotide
  Sense strand starting at position 3112 of SEQ ID NO: 914750
gguguuucuuuccuuagaa

SEQ ID NO: 1027889 - RNA, 19 nt, Artificial Sequence
  Description of Artificial Sequence: Synthetic oligonucleotide
  Antisense strand to SEQ ID NO: 1027888
uucuaaggaaagaaacacc

SEQ ID NO: 1027890 - RNA, 19 nt, Artificial Sequence
  Description of Artificial Sequence: Synthetic oligonucleotide
  Sense strand starting at position 3113 of SEQ ID NO: 914750
guguuucuuuccuuagaau

SEQ ID NO: 1027891 - RNA, 19 nt, Artificial Sequence
  Description of Artificial Sequence: Synthetic oligonucleotide
  Antisense strand to SEQ ID NO: 1027890
auucuaaggaaagaaacac

SEQ ID NO: 1027892 - RNA, 19 nt, Artificial Sequence
  Description of Artificial Sequence: Synthetic oligonucleotide
  Sense strand starting at position 3114 of SEQ ID NO: 914750
uguuucuuuccuuagaaug

SEQ ID NO: 1027893 - RNA, 19 nt, Artificial Sequence
  Description of Artificial Sequence: Synthetic oligonucleotide
  Antisense strand to SEQ ID NO: 1027892
cauucuaaggaaagaaaca

SEQ ID NO: 1027894 - RNA, 19 nt, Artificial Sequence
  Description of Artificial Sequence: Synthetic oligonucleotide
  Sense strand starting at position 3171 of SEQ ID NO: 914750
acaugcuuucccugggauu

SEQ ID NO: 1027895 - RNA, 19 nt, Artificial Sequence
  Description of Artificial Sequence: Synthetic oligonucleotide
  Antisense strand to SEQ ID NO: 1027894
aaucccagggaaagcaugu

SEQ ID NO: 1027896 - RNA, 19 nt, Artificial Sequence
  Description of Artificial Sequence: Synthetic oligonucleotide
  Sense strand starting at position 3172 of SEQ ID NO: 914750
caugcuuucccugggauua

SEQ ID NO: 1027897 - RNA, 19 nt, Artificial Sequence
  Description of Artificial Sequence: Synthetic oligonucleotide
  Antisense strand to SEQ ID NO: 1027896
uaaucccagggaaagcaug

SEQ ID NO: 1027898 - RNA, 19 nt, Artificial Sequence
  Description of Artificial Sequence: Synthetic oligonucleotide
  Sense strand starting at position 3173 of SEQ ID NO: 914750
augcuuucccugggauuag

SEQ ID NO: 1027899 - RNA, 19 nt, Artificial Sequence
  Description of Artificial Sequence: Synthetic oligonucleotide
  Antisense strand to SEQ ID NO: 1027898
cuaaucccagggaaagcau

SEQ ID NO: 1027900 - RNA, 19 nt, Artificial Sequence
  Description of Artificial Sequence: Synthetic oligonucleotide
  Sense strand starting at position 3243 of SEQ ID NO: 914750
gcaggacuguccuggcaca

SEQ ID NO: 1027901 - RNA, 19 nt, Artificial Sequence
  Description of Artificial Sequence: Synthetic oligonucleotide
  Antisense strand to SEQ ID NO: 1027900
ugugccaggacaguccugc

SEQ ID NO: 1027902 - RNA, 19 nt, Artificial Sequence
  Description of Artificial Sequence: Synthetic oligonucleotide
  Sense strand starting at position 3372 of SEQ ID NO: 914750
guccauuucucaguaggcu

SEQ ID NO: 1027903 - RNA, 19 nt, Artificial Sequence
  Description of Artificial Sequence: Synthetic oligonucleotide
  Antisense strand to SEQ ID NO: 1027902
agccuacugagaaauggac

SEQ ID NO: 1027904 - RNA, 19 nt, Artificial Sequence
  Description of Artificial Sequence: Synthetic oligonucleotide
  Sense strand starting at position 3668 of SEQ ID NO: 914750
cucgcucucuuacggauaa

SEQ ID NO: 1027905 - RNA, 19 nt, Artificial Sequence
  Description of Artificial Sequence: Synthetic oligonucleotide
  Antisense strand to SEQ ID NO: 1027904
uuauccguaagagagcgag

SEQ ID NO: 1027906 - RNA, 19 nt, Artificial Sequence
  Description of Artificial Sequence: Synthetic oligonucleotide
  Sense strand starting at position 3669 of SEQ ID NO: 914750
ucgcucucuuacggauaaa

SEQ ID NO: 1027907 - RNA, 19 nt, Artificial Sequence
  Description of Artificial Sequence: Synthetic oligonucleotide
  Antisense strand to SEQ ID NO: 1027906
uuuauccguaagagagcga

SEQ ID NO: 1027908 - RNA, 19 nt, Artificial Sequence
  Description of Artificial Sequence: Synthetic oligonucleotide
  Sense strand starting at position 3670 of SEQ ID NO: 914750
cgcucucuuacggauaaac

SEQ ID NO: 1027909 - RNA, 19 nt, Artificial Sequence
  Description of Artificial Sequence: Synthetic oligonucleotide
  Antisense strand to SEQ ID NO: 1027908
guuuauccguaagagagcg

SEQ ID NO: 1027910 - RNA, 19 nt, Artificial Sequence
  Description of Artificial Sequence: Synthetic oligonucleotide
  Sense strand starting at position 3693 of SEQ ID NO: 914750
acacucgauucucucagau

SEQ ID NO: 1027911 - RNA, 19 nt, Artificial Sequence
  Description of Artificial Sequence: Synthetic oligonucleotide
  Antisense strand to SEQ ID NO: 1027910
aucugagagaaucgagugu

SEQ ID NO: 1027912 - RNA, 19 nt, Artificial Sequence
  Description of Artificial Sequence: Synthetic oligonucleotide
  Sense strand starting at position 3695 of SEQ ID NO: 914750
acucgauucucucagauug

SEQ ID NO: 1027913 - RNA, 19 nt, Artificial Sequence
  Description of Artificial Sequence: Synthetic oligonucleotide
  Antisense strand to SEQ ID NO: 1027912
caaucugagagaaucgagu

SEQ ID NO: 1027914 - RNA, 19 nt, Artificial Sequence
  Description of Artificial Sequence: Synthetic oligonucleotide
  Sense strand starting at position 3697 of SEQ ID NO: 914750
ucgauucucucagauugga

SEQ ID NO: 1027915 - RNA, 19 nt, Artificial Sequence
  Description of Artificial Sequence: Synthetic oligonucleotide
  Antisense strand to SEQ ID NO: 1027914
uccaaucugagagaaucga

SEQ ID NO: 1027916 - RNA, 19 nt, Artificial Sequence
  Description of Artificial Sequence: Synthetic oligonucleotide
  Sense strand starting at position 3824 of SEQ ID NO: 914750
cccggaacuucugggcuua

SEQ ID NO: 1027917 - RNA, 19 nt, Artificial Sequence
  Description of Artificial Sequence: Synthetic oligonucleotide
  Antisense strand to SEQ ID NO: 1027916
uaagcccagaaguuccggg

SEQ ID NO: 1027918 - RNA, 19 nt, Artificial Sequence
  Description of Artificial Sequence: Synthetic oligonucleotide
  Sense strand starting at position 3825 of SEQ ID NO: 914750
ccggaacuucugggcuuaa

SEQ ID NO: 1027919 - RNA, 19 nt, Artificial Sequence
  Description of Artificial Sequence: Synthetic oligonucleotide
  Antisense strand to SEQ ID NO: 1027918
uuaagcccagaaguuccgg

SEQ ID NO: 1027920 - RNA, 19 nt, Artificial Sequence
  Description of Artificial Sequence: Synthetic oligonucleotide
  Sense strand starting at position 789 of SEQ ID NO: 914751
ugccuccuguccucguaau

SEQ ID NO: 1027921 - RNA, 19 nt, Artificial Sequence
  Description of Artificial Sequence: Synthetic oligonucleotide
  Antisense strand to SEQ ID NO: 1027920
auuacgaggacaggaggca

SEQ ID NO: 1027922 - RNA, 19 nt, Artificial Sequence
  Description of Artificial Sequence: Synthetic oligonucleotide
  Sense strand starting at position 790 of SEQ ID NO: 914751
gccuccuguccucguaauu

SEQ ID NO: 1027923 - RNA, 19 nt, Artificial Sequence
  Description of Artificial Sequence: Synthetic oligonucleotide
  Antisense strand to SEQ ID NO: 1027922
aauuacgaggacaggaggc

SEQ ID NO: 1027924 - RNA, 19 nt, Artificial Sequence
  Description of Artificial Sequence: Synthetic oligonucleotide
  Sense strand starting at position 799 of SEQ ID NO: 914751
ccucguaauucucgaaagc

SEQ ID NO: 1027925 - RNA, 19 nt, Artificial Sequence
  Description of Artificial Sequence: Synthetic oligonucleotide
  Antisense strand to SEQ ID NO: 1027924
gcuuucgagaauuacgagg

SEQ ID NO: 1027926 - RNA, 19 nt, Artificial Sequence
  Description of Artificial Sequence: Synthetic oligonucleotide
  Sense strand starting at position 800 of SEQ ID NO: 914751
cucguaauucucgaaagcu

SEQ ID NO: 1027927 - RNA, 19 nt, Artificial Sequence
  Description of Artificial Sequence: Synthetic oligonucleotide
  Antisense strand to SEQ ID NO: 1027926
agcuuucgagaauuacgag

SEQ ID NO: 1027928 - RNA, 19 nt, Artificial Sequence
  Description of Artificial Sequence: Synthetic oligonucleotide
  Sense strand starting at position 994 of SEQ ID NO: 914751
cgccguucgcuacgcaaau

SEQ ID NO: 1027929 - RNA, 19 nt, Artificial Sequence
  Description of Artificial Sequence: Synthetic oligonucleotide
  Antisense strand to SEQ ID NO: 1027928
auuugcguagcgaacggcg

SEQ ID NO: 1027930 - RNA, 19 nt, Artificial Sequence
  Description of Artificial Sequence: Synthetic oligonucleotide
  Sense strand starting at position 995 of SEQ ID NO: 914751
gccguucgcuacgcaaauu

SEQ ID NO: 1027931 - RNA, 19 nt, Artificial Sequence
  Description of Artificial Sequence: Synthetic oligonucleotide
  Antisense strand to SEQ ID NO: 1027930
aauuugcguagcgaacggc

SEQ ID NO: 1027932 - RNA, 19 nt, Artificial Sequence
  Description of Artificial Sequence: Synthetic oligonucleotide
  Sense strand starting at position 1055 of SEQ ID NO: 914751
ggcgugaaaccguacgaga

SEQ ID NO: 1027933 - RNA, 19 nt, Artificial Sequence
  Description of Artificial Sequence: Synthetic oligonucleotide
  Antisense strand to SEQ ID NO: 1027932
ucucguacgguuucacgcc

SEQ ID NO: 1027934 - RNA, 19 nt, Artificial Sequence
  Description of Artificial Sequence: Synthetic oligonucleotide
  Sense strand starting at position 1057 of SEQ ID NO: 914751
cgugaaaccguacgagaau

SEQ ID NO: 1027935 - RNA, 19 nt, Artificial Sequence
  Description of Artificial Sequence: Synthetic oligonucleotide
  Antisense strand to SEQ ID NO: 1027934
auucucguacgguuucacg

SEQ ID NO: 1027936 - RNA, 19 nt, Artificial Sequence
  Description of Artificial Sequence: Synthetic oligonucleotide
  Sense strand starting at position 1058 of SEQ ID NO: 914751
gugaaaccguacgagaauu

SEQ ID NO: 1027937 - RNA, 19 nt, Artificial Sequence
  Description of Artificial Sequence: Synthetic oligonucleotide
  Antisense strand to SEQ ID NO: 1027936
aauucucguacgguuucac

SEQ ID NO: 1027938 - RNA, 19 nt, Artificial Sequence
  Description of Artificial Sequence: Synthetic oligonucleotide
  Sense strand starting at position 1295 of SEQ ID NO: 914751
ucccucggucucugaagaa

SEQ ID NO: 1027939 - RNA, 19 nt, Artificial Sequence
  Description of Artificial Sequence: Synthetic oligonucleotide
  Antisense strand to SEQ ID NO: 1027938
uucuucagagaccgaggga

SEQ ID NO: 1027940 - RNA, 19 nt, Artificial Sequence
  Description of Artificial Sequence: Synthetic oligonucleotide
  Sense strand starting at position 2457 of SEQ ID NO: 914751
cagaguuugagccgaguga

SEQ ID NO: 1027941 - RNA, 19 nt, Artificial Sequence
  Description of Artificial Sequence: Synthetic oligonucleotide
  Antisense strand to SEQ ID NO: 1027940
ucacucggcucaaacucug

SEQ ID NO: 1027942 - RNA, 19 nt, Artificial Sequence
  Description of Artificial Sequence: Synthetic oligonucleotide
  Sense strand starting at position 2616 of SEQ ID NO: 914751
gcagccaucauggagguaa

SEQ ID NO: 1027943 - RNA, 19 nt, Artificial Sequence
  Description of Artificial Sequence: Synthetic oligonucleotide
  Antisense strand to SEQ ID NO: 1027942
uuaccuccaugauggcugc

SEQ ID NO: 1027944 - RNA, 19 nt, Artificial Sequence
  Description of Artificial Sequence: Synthetic oligonucleotide
  Sense strand starting at position 2751 of SEQ ID NO: 914751
ccaguuuccucuuucguaa

SEQ ID NO: 1027945 - RNA, 19 nt, Artificial Sequence
  Description of Artificial Sequence: Synthetic oligonucleotide
  Antisense strand to SEQ ID NO: 1027944
uuacgaaagaggaaacugg

SEQ ID NO: 1027946 - RNA, 19 nt, Artificial Sequence
  Description of Artificial Sequence: Synthetic oligonucleotide
  Sense strand starting at position 2794 of SEQ ID NO: 914751
uaggacuguugaguuaauu

SEQ ID NO: 1027947 - RNA, 19 nt, Artificial Sequence
  Description of Artificial Sequence: Synthetic oligonucleotide
  Antisense strand to SEQ ID NO: 1027946
aauuaacucaacaguccua

SEQ ID NO: 1027948 - RNA, 19 nt, Artificial Sequence
  Description of Artificial Sequence: Synthetic oligonucleotide
  Sense strand starting at position 2802 of SEQ ID NO: 914751
uugaguuaauuagcaggaa

SEQ ID NO: 1027949 - RNA, 19 nt, Artificial Sequence
  Description of Artificial Sequence: Synthetic oligonucleotide
  Antisense strand to SEQ ID NO: 1027948
uuccugcuaauuaacucaa

SEQ ID NO: 1027950 - RNA, 19 nt, Artificial Sequence
  Description of Artificial Sequence: Synthetic oligonucleotide
  Sense strand starting at position 2805 of SEQ ID NO: 914751
aguuaauuagcaggaacau

SEQ ID NO: 1027951 - RNA, 19 nt, Artificial Sequence
  Description of Artificial Sequence: Synthetic oligonucleotide
  Antisense strand to SEQ ID NO: 1027950
auguuccugcuaauuaacu

SEQ ID NO: 1027952 - RNA, 19 nt, Artificial Sequence
  Description of Artificial Sequence: Synthetic oligonucleotide
  Sense strand starting at position 2827 of SEQ ID NO: 914751
ggaugcacuugauuacaga

SEQ ID NO: 1027953 - RNA, 19 nt, Artificial Sequence
  Description of Artificial Sequence: Synthetic oligonucleotide
  Antisense strand to SEQ ID NO: 1027952
ucuguaaucaagugcaucc

SEQ ID NO: 1027954 - RNA, 19 nt, Artificial Sequence
  Description of Artificial Sequence: Synthetic oligonucleotide
  Sense strand starting at position 2843 of SEQ ID NO: 914751
agagcuggugcacauuaaa

SEQ ID NO: 1027955 - RNA, 19 nt, Artificial Sequence
  Description of Artificial Sequence: Synthetic oligonucleotide
  Antisense strand to SEQ ID NO: 1027954
uuuaaugugcaccagcucu

SEQ ID NO: 1027956 - RNA, 19 nt, Artificial Sequence
  Description of Artificial Sequence: Synthetic oligonucleotide
  Sense strand starting at position 3107 of SEQ ID NO: 914751
ccugguguuucuuuccuua

SEQ ID NO: 1027957 - RNA, 19 nt, Artificial Sequence
  Description of Artificial Sequence: Synthetic oligonucleotide
  Antisense strand to SEQ ID NO: 1027956
uaaggaaagaaacaccagg

SEQ ID NO: 1027958 - RNA, 19 nt, Artificial Sequence
  Description of Artificial Sequence: Synthetic oligonucleotide
  Sense strand starting at position 3109 of SEQ ID NO: 914751
ugguguuucuuuccuuaga

SEQ ID NO: 1027959 - RNA, 19 nt, Artificial Sequence
  Description of Artificial Sequence: Synthetic oligonucleotide
  Antisense strand to SEQ ID NO: 1027958
ucuaaggaaagaaacacca

SEQ ID NO: 1027960 - RNA, 19 nt, Artificial Sequence
  Description of Artificial Sequence: Synthetic oligonucleotide
  Sense strand starting at position 3110 of SEQ ID NO: 914751
gguguuucuuuccuuagaa

SEQ ID NO: 1027961 - RNA, 19 nt, Artificial Sequence
  Description of Artificial Sequence: Synthetic oligonucleotide
  Antisense strand to SEQ ID NO: 1027960
uucuaaggaaagaaacacc

SEQ ID NO: 1027962 - RNA, 19 nt, Artificial Sequence
  Description of Artificial Sequence: Synthetic oligonucleotide
  Sense strand starting at position 3111 of SEQ ID NO: 914751
guguuucuuuccuuagaau

SEQ ID NO: 1027963 - RNA, 19 nt, Artificial Sequence
  Description of Artificial Sequence: Synthetic oligonucleotide
  Antisense strand to SEQ ID NO: 1027962
auucuaaggaaagaaacac

SEQ ID NO: 1027964 - RNA, 19 nt, Artificial Sequence
  Description of Artificial Sequence: Synthetic oligonucleotide
  Sense strand starting at position 3112 of SEQ ID NO: 914751
uguuucuuuccuuagaaug

SEQ ID NO: 1027965 - RNA, 19 nt, Artificial Sequence
  Description of Artificial Sequence: Synthetic oligonucleotide
  Antisense strand to SEQ ID NO: 1027964
cauucuaaggaaagaaaca

SEQ ID NO: 1027966 - RNA, 19 nt, Artificial Sequence
  Description of Artificial Sequence: Synthetic oligonucleotide
  Sense strand starting at position 3169 of SEQ ID NO: 914751
acaugcuuucccugggauu

SEQ ID NO: 1027967 - RNA, 19 nt, Artificial Sequence
  Description of Artificial Sequence: Synthetic oligonucleotide
  Antisense strand to SEQ ID NO: 1027966
aaucccagggaaagcaugu

SEQ ID NO: 1027968 - RNA, 19 nt, Artificial Sequence
  Description of Artificial Sequence: Synthetic oligonucleotide
  Sense strand starting at position 3170 of SEQ ID NO: 914751
caugcuuucccugggauua

SEQ ID NO: 1027969 - RNA, 19 nt, Artificial Sequence
  Description of Artificial Sequence: Synthetic oligonucleotide
  Antisense strand to SEQ ID NO: 1027968
uaaucccagggaaagcaug

SEQ ID NO: 1027970 - RNA, 19 nt, Artificial Sequence
  Description of Artificial Sequence: Synthetic oligonucleotide
  Sense strand starting at position 3171 of SEQ ID NO: 914751
augcuuucccugggauuag

SEQ ID NO: 1027971 - RNA, 19 nt, Artificial Sequence
  Description of Artificial Sequence: Synthetic oligonucleotide
  Antisense strand to SEQ ID NO: 1027970
cuaaucccagggaaagcau

SEQ ID NO: 1027972 - RNA, 19 nt, Artificial Sequence
  Description of Artificial Sequence: Synthetic oligonucleotide
  Sense strand starting at position 3241 of SEQ ID NO: 914751
gcaggacuguccuggcaca

SEQ ID NO: 1027973 - RNA, 19 nt, Artificial Sequence
  Description of Artificial Sequence: Synthetic oligonucleotide
  Antisense strand to SEQ ID NO: 1027972
ugugccaggacaguccugc

SEQ ID NO: 1027974 - RNA, 19 nt, Artificial Sequence
  Description of Artificial Sequence: Synthetic oligonucleotide
  Sense strand starting at position 3370 of SEQ ID NO: 914751
guccauuucucaguaggcu

SEQ ID NO: 1027975 - RNA, 19 nt, Artificial Sequence
  Description of Artificial Sequence: Synthetic oligonucleotide
  Antisense strand to SEQ ID NO: 1027974
agccuacugagaaauggac

SEQ ID NO: 1027976 - RNA, 19 nt, Artificial Sequence
  Description of Artificial Sequence: Synthetic oligonucleotide
  Sense strand starting at position 3666 of SEQ ID NO: 914751
cucgcucucuuacggauaa

SEQ ID NO: 1027977 - RNA, 19 nt, Artificial Sequence
  Description of Artificial Sequence: Synthetic oligonucleotide
  Antisense strand to SEQ ID NO: 1027976
uuauccguaagagagcgag

SEQ ID NO: 1027978 - RNA, 19 nt, Artificial Sequence
  Description of Artificial Sequence: Synthetic oligonucleotide
  Sense strand starting at position 3667 of SEQ ID NO: 914751
ucgcucucuuacggauaaa

SEQ ID NO: 1027979 - RNA, 19 nt, Artificial Sequence
  Description of Artificial Sequence: Synthetic oligonucleotide
  Antisense strand to SEQ ID NO: 1027978
uuuauccguaagagagcga

SEQ ID NO: 1027980 - RNA, 19 nt, Artificial Sequence
  Description of Artificial Sequence: Synthetic oligonucleotide
  Sense strand starting at position 3668 of SEQ ID NO: 914751
cgcucucuuacggauaaac

SEQ ID NO: 1027981 - RNA, 19 nt, Artificial Sequence
  Description of Artificial Sequence: Synthetic oligonucleotide
  Antisense strand to SEQ ID NO: 1027980
guuuauccguaagagagcg

SEQ ID NO: 1027982 - RNA, 19 nt, Artificial Sequence
  Description of Artificial Sequence: Synthetic oligonucleotide
  Sense strand starting at position 3691 of SEQ ID NO: 914751
acacucgauucucucagau

SEQ ID NO: 1027983 - RNA, 19 nt, Artificial Sequence
  Description of Artificial Sequence: Synthetic oligonucleotide
  Antisense strand to SEQ ID NO: 1027982
aucugagagaaucgagugu

SEQ ID NO: 1027984 - RNA, 19 nt, Artificial Sequence
  Description of Artificial Sequence: Synthetic oligonucleotide
  Sense strand starting at position 3693 of SEQ ID NO: 914751
acucgauucucucagauug

SEQ ID NO: 1027985 - RNA, 19 nt, Artificial Sequence
  Description of Artificial Sequence: Synthetic oligonucleotide
  Antisense strand to SEQ ID NO: 1027984
caaucugagagaaucgagu

SEQ ID NO: 1027986 - RNA, 19 nt, Artificial Sequence
  Description of Artificial Sequence: Synthetic oligonucleotide
  Sense strand starting at position 3695 of SEQ ID NO: 914751
ucgauucucucagauugga

SEQ ID NO: 1027987 - RNA, 19 nt, Artificial Sequence
  Description of Artificial Sequence: Synthetic oligonucleotide
  Antisense strand to SEQ ID NO: 1027986
uccaaucugagagaaucga

SEQ ID NO: 1027988 - RNA, 19 nt, Artificial Sequence
  Description of Artificial Sequence: Synthetic oligonucleotide
  Sense strand starting at position 3822 of SEQ ID NO: 914751
cccggaacuucugggcuua

SEQ ID NO: 1027989 - RNA, 19 nt, Artificial Sequence
  Description of Artificial Sequence: Synthetic oligonucleotide
  Antisense strand to SEQ ID NO: 1027988
uaagcccagaaguuccggg

SEQ ID NO: 1027990 - RNA, 19 nt, Artificial Sequence
  Description of Artificial Sequence: Synthetic oligonucleotide
  Sense strand starting at position 3823 of SEQ ID NO: 914751
ccggaacuucugggcuuaa

SEQ ID NO: 1027991 - RNA, 19 nt, Artificial Sequence
  Description of Artificial Sequence: Synthetic oligonucleotide
  Antisense strand to SEQ ID NO: 1027990
uuaagcccagaaguuccgg

SEQ ID NO: 1027992 - RNA, 19 nt, Artificial Sequence
  Description of Artificial Sequence: Synthetic oligonucleotide
  Sense strand starting at position 395 of SEQ ID NO: 914752
cauggaacugccugagacu

SEQ ID NO: 1027993 - RNA, 19 nt, Artificial Sequence
  Description of Artificial Sequence: Synthetic oligonucleotide
  Antisense strand to SEQ ID NO: 1027992
agucucaggcaguuccaug

SEQ ID NO: 1027994 - RNA, 19 nt, Artificial Sequence
  Description of Artificial Sequence: Synthetic oligonucleotide
  Sense strand starting at position 407 of SEQ ID NO: 914752
ugagacuucuggcuggauu

SEQ ID NO: 1027995 - RNA, 19 nt, Artificial Sequence
  Description of Artificial Sequence: Synthetic oligonucleotide
  Antisense strand to SEQ ID NO: 1027994
aauccagccagaagucuca

SEQ ID NO: 1027996 - RNA, 19 nt, Artificial Sequence
  Description of Artificial Sequence: Synthetic oligonucleotide
  Sense strand starting at position 408 of SEQ ID NO: 914752
gagacuucuggcuggauug

SEQ ID NO: 1027997 - RNA, 19 nt, Artificial Sequence
  Description of Artificial Sequence: Synthetic oligonucleotide
  Antisense strand to SEQ ID NO: 1027996
caauccagccagaagucuc

SEQ ID NO: 1027998 - RNA, 19 nt, Artificial Sequence
  Description of Artificial Sequence: Synthetic oligonucleotide
  Sense strand starting at position 977 of SEQ ID NO: 914752
guuggacccucagaaucua

SEQ ID NO: 1027999 - RNA, 19 nt, Artificial Sequence
  Description of Artificial Sequence: Synthetic oligonucleotide
  Antisense strand to SEQ ID NO: 1027998
uagauucugaggguccaac

SEQ ID NO: 1028000 - RNA, 19 nt, Artificial Sequence
  Description of Artificial Sequence: Synthetic oligonucleotide
  Sense strand starting at position 1267 of SEQ ID NO: 914752
cagaaugguccuggccaca

SEQ ID NO: 1028001 - RNA, 19 nt, Artificial Sequence
  Description of Artificial Sequence: Synthetic oligonucleotide
  Antisense strand to SEQ ID NO: 1028000
uguggccaggaccauucug

SEQ ID NO: 1028002 - RNA, 19 nt, Artificial Sequence
  Description of Artificial Sequence: Synthetic oligonucleotide
  Sense strand starting at position 1449 of SEQ ID NO: 914752
ggcagaugaccaggucgua

SEQ ID NO: 1028003 - RNA, 19 nt, Artificial Sequence
  Description of Artificial Sequence: Synthetic oligonucleotide
  Antisense strand to SEQ ID NO: 1028002
uacgaccuggucaucugcc

SEQ ID NO: 1028004 - RNA, 19 nt, Artificial Sequence
  Description of Artificial Sequence: Synthetic oligonucleotide
  Sense strand starting at position 2027 of SEQ ID NO: 914752
gugggugccuggugaauca

SEQ ID NO: 1028005 - RNA, 19 nt, Artificial Sequence
  Description of Artificial Sequence: Synthetic oligonucleotide
  Antisense strand to SEQ ID NO: 1028004
ugauucaccaggcacccac

SEQ ID NO: 1028006 - RNA, 19 nt, Artificial Sequence
  Description of Artificial Sequence: Synthetic oligonucleotide
  Sense strand starting at position 2039 of SEQ ID NO: 914752
ugaaucaaugaugguguga

SEQ ID NO: 1028007 - RNA, 19 nt, Artificial Sequence
  Description of Artificial Sequence: Synthetic oligonucleotide
  Antisense strand to SEQ ID NO: 1028006
ucacaccaucauugauuca

SEQ ID NO: 1028008 - RNA, 19 nt, Artificial Sequence
  Description of Artificial Sequence: Synthetic oligonucleotide
  Sense strand starting at position 2041 of SEQ ID NO: 914752
aaucaaugauggugugaau

SEQ ID NO: 1028009 - RNA, 19 nt, Artificial Sequence
  Description of Artificial Sequence: Synthetic oligonucleotide
  Antisense strand to SEQ ID NO: 1028008
auucacaccaucauugauu

SEQ ID NO: 1028010 - RNA, 19 nt, Artificial Sequence
  Description of Artificial Sequence: Synthetic oligonucleotide
  Sense strand starting at position 2050 of SEQ ID NO: 914752
uggugugaaugaccgagua

SEQ ID NO: 1028011 - RNA, 19 nt, Artificial Sequence
  Description of Artificial Sequence: Synthetic oligonucleotide
  Antisense strand to SEQ ID NO: 1028010
uacucggucauucacacca

SEQ ID NO: 1028012 - RNA, 19 nt, Artificial Sequence
  Description of Artificial Sequence: Synthetic oligonucleotide
  Sense strand starting at position 2052 of SEQ ID NO: 914752
gugugaaugaccgaguaug

SEQ ID NO: 1028013 - RNA, 19 nt, Artificial Sequence
  Description of Artificial Sequence: Synthetic oligonucleotide
  Antisense strand to SEQ ID NO: 1028012
cauacucggucauucacac

SEQ ID NO: 1028014 - RNA, 19 nt, Artificial Sequence
  Description of Artificial Sequence: Synthetic oligonucleotide
  Sense strand starting at position 2084 of SEQ ID NO: 914752
ugugcaucuccaggcaagu

SEQ ID NO: 1028015 - RNA, 19 nt, Artificial Sequence
  Description of Artificial Sequence: Synthetic oligonucleotide
  Antisense strand to SEQ ID NO: 1028014
acuugccuggagaugcaca

SEQ ID NO: 1028016 - RNA, 19 nt, Artificial Sequence
  Description of Artificial Sequence: Synthetic oligonucleotide
  Sense strand starting at position 2117 of SEQ ID NO: 914752
gcgccauugucaucaccuu

SEQ ID NO: 1028017 - RNA, 19 nt, Artificial Sequence
  Description of Artificial Sequence: Synthetic oligonucleotide
  Antisense strand to SEQ ID NO: 1028016
aaggugaugacaauggcgc

SEQ ID NO: 1028018 - RNA, 19 nt, Artificial Sequence
  Description of Artificial Sequence: Synthetic oligonucleotide
  Sense strand starting at position 2140 of SEQ ID NO: 914752
guaauuauccuaugccaag

SEQ ID NO: 1028019 - RNA, 19 nt, Artificial Sequence
  Description of Artificial Sequence: Synthetic oligonucleotide
  Antisense strand to SEQ ID NO: 1028018
cuuggcauaggauaauuac

SEQ ID NO: 1028020 - RNA, 19 nt, Artificial Sequence
  Description of Artificial Sequence: Synthetic oligonucleotide
  Sense strand starting at position 2319 of SEQ ID NO: 914752
ucuauugcccaggaugagu

SEQ ID NO: 1028021 - RNA, 19 nt, Artificial Sequence
  Description of Artificial Sequence: Synthetic oligonucleotide
  Antisense strand to SEQ ID NO: 1028020
acucauccugggcaauaga

SEQ ID NO: 1028022 - RNA, 19 nt, Artificial Sequence
  Description of Artificial Sequence: Synthetic oligonucleotide
  Sense strand starting at position 2593 of SEQ ID NO: 914752
cccaauggguccggauaga

SEQ ID NO: 1028023 - RNA, 19 nt, Artificial Sequence
  Description of Artificial Sequence: Synthetic oligonucleotide
  Antisense strand to SEQ ID NO: 1028022
ucuauccggacccauuggg

SEQ ID NO: 1028024 - RNA, 19 nt, Artificial Sequence
  Description of Artificial Sequence: Synthetic oligonucleotide
  Sense strand starting at position 2634 of SEQ ID NO: 914752
uuguuaaagguauggaauu

SEQ ID NO: 1028025 - RNA, 19 nt, Artificial Sequence
  Description of Artificial Sequence: Synthetic oligonucleotide
  Antisense strand to SEQ ID NO: 1028024
aauuccauaccuuuaacaa

SEQ ID NO: 1028026 - RNA, 19 nt, Artificial Sequence
  Description of Artificial Sequence: Synthetic oligonucleotide
  Sense strand starting at position 2635 of SEQ ID NO: 914752
uguuaaagguauggaauuu

SEQ ID NO: 1028027 - RNA, 19 nt, Artificial Sequence
  Description of Artificial Sequence: Synthetic oligonucleotide
  Antisense strand to SEQ ID NO: 1028026
aaauuccauaccuuuaaca

SEQ ID NO: 1028028 - RNA, 19 nt, Artificial Sequence
  Description of Artificial Sequence: Synthetic oligonucleotide
  Sense strand starting at position 2652 of SEQ ID NO: 914752
uuugucuguaaguaaagua

SEQ ID NO: 1028029 - RNA, 19 nt, Artificial Sequence
  Description of Artificial Sequence: Synthetic oligonucleotide
  Antisense strand to SEQ ID NO: 1028028
uacuuuacuuacagacaaa

SEQ ID NO: 1028030 - RNA, 19 nt, Artificial Sequence
  Description of Artificial Sequence: Synthetic oligonucleotide
  Sense strand starting at position 2949 of SEQ ID NO: 914752
aaaguauucuaguggaacu

SEQ ID NO: 1028031 - RNA, 19 nt, Artificial Sequence
  Description of Artificial Sequence: Synthetic oligonucleotide
  Antisense strand to SEQ ID NO: 1028030
aguuccacuagaauacuuu

SEQ ID NO: 1028032 - RNA, 19 nt, Artificial Sequence
  Description of Artificial Sequence: Synthetic oligonucleotide
  Sense strand starting at position 3054 of SEQ ID NO: 914752
ccguuugguccgcucauca

SEQ ID NO: 1028033 - RNA, 19 nt, Artificial Sequence
  Description of Artificial Sequence: Synthetic oligonucleotide
  Antisense strand to SEQ ID NO: 1028032
ugaugagcggaccaaacgg

SEQ ID NO: 1028034 - RNA, 19 nt, Artificial Sequence
  Description of Artificial Sequence: Synthetic oligonucleotide
  Sense strand starting at position 3100 of SEQ ID NO: 914752
ggguucgaguguuuaggau

SEQ ID NO: 1028035 - RNA, 19 nt, Artificial Sequence
  Description of Artificial Sequence: Synthetic oligonucleotide
  Antisense strand to SEQ ID NO: 1028034
auccuaaacacucgaaccc

SEQ ID NO: 1028036 - RNA, 19 nt, Artificial Sequence
  Description of Artificial Sequence: Synthetic oligonucleotide
  Sense strand starting at position 3104 of SEQ ID NO: 914752
ucgaguguuuaggauucca

SEQ ID NO: 1028037 - RNA, 19 nt, Artificial Sequence
  Description of Artificial Sequence: Synthetic oligonucleotide
  Antisense strand to SEQ ID NO: 1028036
uggaauccuaaacacucga

SEQ ID NO: 1028038 - RNA, 19 nt, Artificial Sequence
  Description of Artificial Sequence: Synthetic oligonucleotide
  Sense strand starting at position 3109 of SEQ ID NO: 914752
uguuuaggauuccaagaag

SEQ ID NO: 1028039 - RNA, 19 nt, Artificial Sequence
  Description of Artificial Sequence: Synthetic oligonucleotide
  Antisense strand to SEQ ID NO: 1028038
cuucuuggaauccuaaaca

SEQ ID NO: 1028040 - RNA, 19 nt, Artificial Sequence
  Description of Artificial Sequence: Synthetic oligonucleotide
  Sense strand starting at position 3226 of SEQ ID NO: 914752
ggaugaggucucugagccu

SEQ ID NO: 1028041 - RNA, 19 nt, Artificial Sequence
  Description of Artificial Sequence: Synthetic oligonucleotide
  Antisense strand to SEQ ID NO: 1028040
aggcucagagaccucaucc

SEQ ID NO: 1028042 - RNA, 19 nt, Artificial Sequence
  Description of Artificial Sequence: Synthetic oligonucleotide
  Sense strand starting at position 3514 of SEQ ID NO: 914752
gagggaguuucccuuugag

SEQ ID NO: 1028043 - RNA, 19 nt, Artificial Sequence
  Description of Artificial Sequence: Synthetic oligonucleotide
  Antisense strand to SEQ ID NO: 1028042
cucaaagggaaacucccuc

SEQ ID NO: 1028044 - RNA, 19 nt, Artificial Sequence
  Description of Artificial Sequence: Synthetic oligonucleotide
  Sense strand starting at position 3524 of SEQ ID NO: 914752
cccuuugagggcgaugaga

SEQ ID NO: 1028045 - RNA, 19 nt, Artificial Sequence
  Description of Artificial Sequence: Synthetic oligonucleotide
  Antisense strand to SEQ ID NO: 1028044
ucucaucgcccucaaaggg

SEQ ID NO: 1028046 - RNA, 19 nt, Artificial Sequence
  Description of Artificial Sequence: Synthetic oligonucleotide
  Sense strand starting at position 3687 of SEQ ID NO: 914752
gucuccauucccuauugga

SEQ ID NO: 1028047 - RNA, 19 nt, Artificial Sequence
  Description of Artificial Sequence: Synthetic oligonucleotide
  Antisense strand to SEQ ID NO: 1028046
uccaauagggaauggagac

SEQ ID NO: 1028048 - RNA, 19 nt, Artificial Sequence
  Description of Artificial Sequence: Synthetic oligonucleotide
  Sense strand starting at position 3740 of SEQ ID NO: 914752
accagugaggccuggcuua

SEQ ID NO: 1028049 - RNA, 19 nt, Artificial Sequence
  Description of Artificial Sequence: Synthetic oligonucleotide
  Antisense strand to SEQ ID NO: 1028048
uaagccaggccucacuggu

SEQ ID NO: 1028050 - RNA, 19 nt, Artificial Sequence
  Description of Artificial Sequence: Synthetic oligonucleotide
  Sense strand starting at position 152 of SEQ ID NO: 914753
agagaaugugaggguacuu

SEQ ID NO: 1028051 - RNA, 19 nt, Artificial Sequence
  Description of Artificial Sequence: Synthetic oligonucleotide
  Antisense strand to SEQ ID NO: 1028050
aaguacccucacauucucu

SEQ ID NO: 1028052 - RNA, 19 nt, Artificial Sequence
  Description of Artificial Sequence: Synthetic oligonucleotide
  Sense strand starting at position 175 of SEQ ID NO: 914753
aauauaagauuuggaagga

SEQ ID NO: 1028053 - RNA, 19 nt, Artificial Sequence
  Description of Artificial Sequence: Synthetic oligonucleotide
  Antisense strand to SEQ ID NO: 1028052
uccuuccaaaucuuauauu

SEQ ID NO: 1028054 - RNA, 19 nt, Artificial Sequence
  Description of Artificial Sequence: Synthetic oligonucleotide
  Sense strand starting at position 259 of SEQ ID NO: 914753
uuguguaugagagauggca

SEQ ID NO: 1028055 - RNA, 19 nt, Artificial Sequence
  Description of Artificial Sequence: Synthetic oligonucleotide
  Antisense strand to SEQ ID NO: 1028054
ugccaucucucauacacaa

SEQ ID NO: 1028056 - RNA, 19 nt, Artificial Sequence
  Description of Artificial Sequence: Synthetic oligonucleotide
  Sense strand starting at position 261 of SEQ ID NO: 914753
guguaugagagauggcaag

SEQ ID NO: 1028057 - RNA, 19 nt, Artificial Sequence
  Description of Artificial Sequence: Synthetic oligonucleotide
  Antisense strand to SEQ ID NO: 1028056
cuugccaucucucauacac

SEQ ID NO: 1028058 - RNA, 19 nt, Artificial Sequence
  Description of Artificial Sequence: Synthetic oligonucleotide
  Sense strand starting at position 382 of SEQ ID NO: 914753
guauaacugucacuauggu

SEQ ID NO: 1028059 - RNA, 19 nt, Artificial Sequence
  Description of Artificial Sequence: Synthetic oligonucleotide
  Antisense strand to SEQ ID NO: 1028058
accauagugacaguuauac

SEQ ID NO: 1028060 - RNA, 19 nt, Artificial Sequence
  Description of Artificial Sequence: Synthetic oligonucleotide
  Sense strand starting at position 425 of SEQ ID NO: 914753
ccaaaucauccaugagagc

SEQ ID NO: 1028061 - RNA, 19 nt, Artificial Sequence
  Description of Artificial Sequence: Synthetic oligonucleotide
  Antisense strand to SEQ ID NO: 1028060
gcucucauggaugauuugg

SEQ ID NO: 1028062 - RNA, 19 nt, Artificial Sequence
  Description of Artificial Sequence: Synthetic oligonucleotide
  Sense strand starting at position 638 of SEQ ID NO: 914753
uuaaauaaguggucuggga

SEQ ID NO: 1028063 - RNA, 19 nt, Artificial Sequence
  Description of Artificial Sequence: Synthetic oligonucleotide
  Antisense strand to SEQ ID NO: 1028062
ucccagaccacuuauuuaa

SEQ ID NO: 1028064 - RNA, 19 nt, Artificial Sequence
  Description of Artificial Sequence: Synthetic oligonucleotide
  Sense strand starting at position 775 of SEQ ID NO: 914753
accugaucaucucugcuga

SEQ ID NO: 1028065 - RNA, 19 nt, Artificial Sequence
  Description of Artificial Sequence: Synthetic oligonucleotide
  Antisense strand to SEQ ID NO: 1028064
ucagcagagaugaucaggu

SEQ ID NO: 1028066 - RNA, 19 nt, Artificial Sequence
  Description of Artificial Sequence: Synthetic oligonucleotide
  Sense strand starting at position 777 of SEQ ID NO: 914753
cugaucaucucugcugaca

SEQ ID NO: 1028067 - RNA, 19 nt, Artificial Sequence
  Description of Artificial Sequence: Synthetic oligonucleotide
  Antisense strand to SEQ ID NO: 1028066
ugucagcagagaugaucag

SEQ ID NO: 1028068 - RNA, 19 nt, Artificial Sequence
  Description of Artificial Sequence: Synthetic oligonucleotide
  Sense strand starting at position 803 of SEQ ID NO: 914753
ggcauugauuuacugcuca

SEQ ID NO: 1028069 - RNA, 19 nt, Artificial Sequence
  Description of Artificial Sequence: Synthetic oligonucleotide
  Antisense strand to SEQ ID NO: 1028068
ugagcaguaaaucaaugcc

SEQ ID NO: 1028070 - RNA, 19 nt, Artificial Sequence
  Description of Artificial Sequence: Synthetic oligonucleotide
  Sense strand starting at position 932 of SEQ ID NO: 914753
ggcugauaaggcgaugaga

SEQ ID NO: 1028071 - RNA, 19 nt, Artificial Sequence
  Description of Artificial Sequence: Synthetic oligonucleotide
  Antisense strand to SEQ ID NO: 1028070
ucucaucgccuuaucagcc

SEQ ID NO: 1028072 - RNA, 19 nt, Artificial Sequence
  Description of Artificial Sequence: Synthetic oligonucleotide
  Sense strand starting at position 934 of SEQ ID NO: 914753
cugauaaggcgaugagaca

SEQ ID NO: 1028073 - RNA, 19 nt, Artificial Sequence
  Description of Artificial Sequence: Synthetic oligonucleotide
  Antisense strand to SEQ ID NO: 1028072
ugucucaucgccuuaucag

SEQ ID NO: 1028074 - RNA, 19 nt, Artificial Sequence
  Description of Artificial Sequence: Synthetic oligonucleotide
  Sense strand starting at position 1531 of SEQ ID NO: 914753
gguucuugaagaugacaug

SEQ ID NO: 1028075 - RNA, 19 nt, Artificial Sequence
  Description of Artificial Sequence: Synthetic oligonucleotide
  Antisense strand to SEQ ID NO: 1028074
caugucaucuucaagaacc

SEQ ID NO: 1028076 - RNA, 19 nt, Artificial Sequence
  Description of Artificial Sequence: Synthetic oligonucleotide
  Sense strand starting at position 2192 of SEQ ID NO: 914753
gccugaaacuccuccgaca

SEQ ID NO: 1028077 - RNA, 19 nt, Artificial Sequence
  Description of Artificial Sequence: Synthetic oligonucleotide
  Antisense strand to SEQ ID NO: 1028076
ugucggaggaguuucaggc

SEQ ID NO: 1028078 - RNA, 19 nt, Artificial Sequence
  Description of Artificial Sequence: Synthetic oligonucleotide
  Sense strand starting at position 2261 of SEQ ID NO: 914753
ucggcuuagccucuuguaa

SEQ ID NO: 1028079 - RNA, 19 nt, Artificial Sequence
  Description of Artificial Sequence: Synthetic oligonucleotide
  Antisense strand to SEQ ID NO: 1028078
uuacaagaggcuaagccga

SEQ ID NO: 1028080 - RNA, 19 nt, Artificial Sequence
  Description of Artificial Sequence: Synthetic oligonucleotide
  Sense strand starting at position 2479 of SEQ ID NO: 914753
cguuaaggauucuccaagu

SEQ ID NO: 1028081 - RNA, 19 nt, Artificial Sequence
  Description of Artificial Sequence: Synthetic oligonucleotide
  Antisense strand to SEQ ID NO: 1028080
acuuggagaauccuuaacg

SEQ ID NO: 1028082 - RNA, 19 nt, Artificial Sequence
  Description of Artificial Sequence: Synthetic oligonucleotide
  Sense strand starting at position 2530 of SEQ ID NO: 914753
gggcuuauuaaaggauuac

SEQ ID NO: 1028083 - RNA, 19 nt, Artificial Sequence
  Description of Artificial Sequence: Synthetic oligonucleotide
  Antisense strand to SEQ ID NO: 1028082
guaauccuuuaauaagccc

SEQ ID NO: 1028084 - RNA, 19 nt, Artificial Sequence
  Description of Artificial Sequence: Synthetic oligonucleotide
  Sense strand starting at position 2542 of SEQ ID NO: 914753
ggauuacaguuucuuugac

SEQ ID NO: 1028085 - RNA, 19 nt, Artificial Sequence
  Description of Artificial Sequence: Synthetic oligonucleotide
  Antisense strand to SEQ ID NO: 1028084
gucaaagaaacuguaaucc

SEQ ID NO: 1028086 - RNA, 19 nt, Artificial Sequence
  Description of Artificial Sequence: Synthetic oligonucleotide
  Sense strand starting at position 2646 of SEQ ID NO: 914753
aagagaaguuuagcugugu

SEQ ID NO: 1028087 - RNA, 19 nt, Artificial Sequence
  Description of Artificial Sequence: Synthetic oligonucleotide
  Antisense strand to SEQ ID NO: 1028086
acacagcuaaacuucucuu

SEQ ID NO: 1028088 - RNA, 19 nt, Artificial Sequence
  Description of Artificial Sequence: Synthetic oligonucleotide
  Sense strand starting at position 2670 of SEQ ID NO: 914753
ccucuuggguaacuugaau

SEQ ID NO: 1028089 - RNA, 19 nt, Artificial Sequence
  Description of Artificial Sequence: Synthetic oligonucleotide
  Antisense strand to SEQ ID NO: 1028088
auucaaguuacccaagagg

SEQ ID NO: 1028090 - RNA, 19 nt, Artificial Sequence
  Description of Artificial Sequence: Synthetic oligonucleotide
  Sense strand starting at position 2697 of SEQ ID NO: 914753
cauggaaguccuugaagcu

SEQ ID NO: 1028091 - RNA, 19 nt, Artificial Sequence
  Description of Artificial Sequence: Synthetic oligonucleotide
  Antisense strand to SEQ ID NO: 1028090
agcuucaaggacuuccaug

SEQ ID NO: 1028092 - RNA, 19 nt, Artificial Sequence
  Description of Artificial Sequence: Synthetic oligonucleotide
  Sense strand starting at position 2698 of SEQ ID NO: 914753
auggaaguccuugaagcua

SEQ ID NO: 1028093 - RNA, 19 nt, Artificial Sequence
  Description of Artificial Sequence: Synthetic oligonucleotide
  Antisense strand to SEQ ID NO: 1028092
uagcuucaaggacuuccau

SEQ ID NO: 1028094 - RNA, 19 nt, Artificial Sequence
  Description of Artificial Sequence: Synthetic oligonucleotide
  Sense strand starting at position 2847 of SEQ ID NO: 914753
cccacaagccuguaguaaa

SEQ ID NO: 1028095 - RNA, 19 nt, Artificial Sequence
  Description of Artificial Sequence: Synthetic oligonucleotide
  Antisense strand to SEQ ID NO: 1028094
uuuacuacaggcuuguggg

SEQ ID NO: 1028096 - RNA, 19 nt, Artificial Sequence
  Description of Artificial Sequence: Synthetic oligonucleotide
  Sense strand starting at position 2866 of SEQ ID NO: 914753
gaccaugggcucuguaauu

SEQ ID NO: 1028097 - RNA, 19 nt, Artificial Sequence
  Description of Artificial Sequence: Synthetic oligonucleotide
  Antisense strand to SEQ ID NO: 1028096
aauuacagagcccaugguc

SEQ ID NO: 1028098 - RNA, 19 nt, Artificial Sequence
  Description of Artificial Sequence: Synthetic oligonucleotide
  Sense strand starting at position 2907 of SEQ ID NO: 914753
acuuccuagcugugaaauc

SEQ ID NO: 1028099 - RNA, 19 nt, Artificial Sequence
  Description of Artificial Sequence: Synthetic oligonucleotide
  Antisense strand to SEQ ID NO: 1028098
gauuucacagcuaggaagu

SEQ ID NO: 1028100 - RNA, 19 nt, Artificial Sequence
  Description of Artificial Sequence: Synthetic oligonucleotide
  Sense strand starting at position 3030 of SEQ ID NO: 914753
uggugcaagacaugcaaua

SEQ ID NO: 1028101 - RNA, 19 nt, Artificial Sequence
  Description of Artificial Sequence: Synthetic oligonucleotide
  Antisense strand to SEQ ID NO: 1028100
uauugcaugucuugcacca

SEQ ID NO: 1028102 - RNA, 19 nt, Artificial Sequence
  Description of Artificial Sequence: Synthetic oligonucleotide
  Sense strand starting at position 3042 of SEQ ID NO: 914753
ugcaauaucugguugacua

SEQ ID NO: 1028103 - RNA, 19 nt, Artificial Sequence
  Description of Artificial Sequence: Synthetic oligonucleotide
  Antisense strand to SEQ ID NO: 1028102
uagucaaccagauauugca

SEQ ID NO: 1028104 - RNA, 19 nt, Artificial Sequence
  Description of Artificial Sequence: Synthetic oligonucleotide
  Sense strand starting at position 3043 of SEQ ID NO: 914753
gcaauaucugguugacuac

SEQ ID NO: 1028105 - RNA, 19 nt, Artificial Sequence
  Description of Artificial Sequence: Synthetic oligonucleotide
  Antisense strand to SEQ ID NO: 1028104
guagucaaccagauauugc

SEQ ID NO: 1028106 - RNA, 19 nt, Artificial Sequence
  Description of Artificial Sequence: Synthetic oligonucleotide
  Sense strand starting at position 3094 of SEQ ID NO: 914753
ccauguagauucuuuacau

SEQ ID NO: 1028107 - RNA, 19 nt, Artificial Sequence
  Description of Artificial Sequence: Synthetic oligonucleotide
  Antisense strand to SEQ ID NO: 1028106
auguaaagaaucuacaugg

SEQ ID NO: 1028108 - RNA, 19 nt, Artificial Sequence
  Description of Artificial Sequence: Synthetic oligonucleotide
  Sense strand starting at position 3283 of SEQ ID NO: 914753
gcaggucucacaggauuaa

SEQ ID NO: 1028109 - RNA, 19 nt, Artificial Sequence
  Description of Artificial Sequence: Synthetic oligonucleotide
  Antisense strand to SEQ ID NO: 1028108
uuaauccugugagaccugc

SEQ ID NO: 1028110 - RNA, 19 nt, Artificial Sequence
  Description of Artificial Sequence: Synthetic oligonucleotide
  Sense strand starting at position 3345 of SEQ ID NO: 914753
aggugcuaggccgaugaaa

SEQ ID NO: 1028111 - RNA, 19 nt, Artificial Sequence
  Description of Artificial Sequence: Synthetic oligonucleotide
  Antisense strand to SEQ ID NO: 1028110
uuucaucggccuagcaccu

SEQ ID NO: 1028112 - RNA, 19 nt, Artificial Sequence
  Description of Artificial Sequence: Synthetic oligonucleotide
  Sense strand starting at position 3371 of SEQ ID NO: 914753
ucuuuagcuccaggaaaua

SEQ ID NO: 1028113 - RNA, 19 nt, Artificial Sequence
  Description of Artificial Sequence: Synthetic oligonucleotide
  Antisense strand to SEQ ID NO: 1028112
uauuuccuggagcuaaaga

SEQ ID NO: 1028114 - RNA, 19 nt, Artificial Sequence
  Description of Artificial Sequence: Synthetic oligonucleotide
  Sense strand starting at position 3392 of SEQ ID NO: 914753
ccaagagacugccuguaaa

SEQ ID NO: 1028115 - RNA, 19 nt, Artificial Sequence
  Description of Artificial Sequence: Synthetic oligonucleotide
  Antisense strand to SEQ ID NO: 1028114
uuuacaggcagucucuugg

SEQ ID NO: 1028116 - RNA, 19 nt, Artificial Sequence
  Description of Artificial Sequence: Synthetic oligonucleotide
  Sense strand starting at position 3776 of SEQ ID NO: 914753
ccggaauaugauggucauu

SEQ ID NO: 1028117 - RNA, 19 nt, Artificial Sequence
  Description of Artificial Sequence: Synthetic oligonucleotide
  Antisense strand to SEQ ID NO: 1028116
aaugaccaucauauuccgg

SEQ ID NO: 1028118 - RNA, 19 nt, Artificial Sequence
  Description of Artificial Sequence: Synthetic oligonucleotide
  Sense strand starting at position 3801 of SEQ ID NO: 914753
acagaauccuagucaauug

SEQ ID NO: 1028119 - RNA, 19 nt, Artificial Sequence
  Description of Artificial Sequence: Synthetic oligonucleotide
  Antisense strand to SEQ ID NO: 1028118
caauugacuaggauucugu

SEQ ID NO: 1028120 - RNA, 19 nt, Artificial Sequence
  Description of Artificial Sequence: Synthetic oligonucleotide
  Sense strand starting at position 3857 of SEQ ID NO: 914753
gaggaauagucagcgucaa

SEQ ID NO: 1028121 - RNA, 19 nt, Artificial Sequence
  Description of Artificial Sequence: Synthetic oligonucleotide
  Antisense strand to SEQ ID NO: 1028120
uugacgcugacuauuccuc

SEQ ID NO: 1028122 - RNA, 19 nt, Artificial Sequence
  Description of Artificial Sequence: Synthetic oligonucleotide
  Sense strand starting at position 3858 of SEQ ID NO: 914753
aggaauagucagcgucaag

SEQ ID NO: 1028123 - RNA, 19 nt, Artificial Sequence
  Description of Artificial Sequence: Synthetic oligonucleotide
  Antisense strand to SEQ ID NO: 1028122
cuugacgcugacuauuccu

SEQ ID NO: 1028124 - RNA, 19 nt, Artificial Sequence
  Description of Artificial Sequence: Synthetic oligonucleotide
  Sense strand starting at position 3867 of SEQ ID NO: 914753
cagcgucaagcucagagaa

SEQ ID NO: 1028125 - RNA, 19 nt, Artificial Sequence
  Description of Artificial Sequence: Synthetic oligonucleotide
  Antisense strand to SEQ ID NO: 1028124
uucucugagcuugacgcug

SEQ ID NO: 1028126 - RNA, 19 nt, Artificial Sequence
  Description of Artificial Sequence: Synthetic oligonucleotide
  Sense strand starting at position 3944 of SEQ ID NO: 914753
gcuugcuagccggcauauu

SEQ ID NO: 1028127 - RNA, 19 nt, Artificial Sequence
  Description of Artificial Sequence: Synthetic oligonucleotide
  Antisense strand to SEQ ID NO: 1028126
aauaugccggcuagcaagc

SEQ ID NO: 1028128 - RNA, 19 nt, Artificial Sequence
  Description of Artificial Sequence: Synthetic oligonucleotide
  Sense strand starting at position 3963 of SEQ ID NO: 914753
uguaaucugggccaccuaa

SEQ ID NO: 1028129 - RNA, 19 nt, Artificial Sequence
  Description of Artificial Sequence: Synthetic oligonucleotide
  Antisense strand to SEQ ID NO: 1028128
uuagguggcccagauuaca

SEQ ID NO: 1028130 - RNA, 19 nt, Artificial Sequence
  Description of Artificial Sequence: Synthetic oligonucleotide
  Sense strand starting at position 17 of SEQ ID NO: 914754
uggaacucccagugacaau

SEQ ID NO: 1028131 - RNA, 19 nt, Artificial Sequence
  Description of Artificial Sequence: Synthetic oligonucleotide
  Antisense strand to SEQ ID NO: 1028130
auugucacugggaguucca

SEQ ID NO: 1028132 - RNA, 19 nt, Artificial Sequence
  Description of Artificial Sequence: Synthetic oligonucleotide
  Sense strand starting at position 116 of SEQ ID NO: 914754
gauagcaaagcuugaggaa

SEQ ID NO: 1028133 - RNA, 19 nt, Artificial Sequence
  Description of Artificial Sequence: Synthetic oligonucleotide
  Antisense strand to SEQ ID NO: 1028132
uuccucaagcuuugcuauc

SEQ ID NO: 1028134 - RNA, 19 nt, Artificial Sequence
  Description of Artificial Sequence: Synthetic oligonucleotide
  Sense strand starting at position 199 of SEQ ID NO: 914754
guuacacuugcagaaacua

SEQ ID NO: 1028135 - RNA, 19 nt, Artificial Sequence
  Description of Artificial Sequence: Synthetic oligonucleotide
  Antisense strand to SEQ ID NO: 1028134
uaguuucugcaaguguaac

SEQ ID NO: 1028136 - RNA, 19 nt, Artificial Sequence
  Description of Artificial Sequence: Synthetic oligonucleotide
  Sense strand starting at position 301 of SEQ ID NO: 914754
acauucucucaggguuuaa

SEQ ID NO: 1028137 - RNA, 19 nt, Artificial Sequence
  Description of Artificial Sequence: Synthetic oligonucleotide
  Antisense strand to SEQ ID NO: 1028136
uuaaacccugagagaaugu

SEQ ID NO: 1028138 - RNA, 19 nt, Artificial Sequence
  Description of Artificial Sequence: Synthetic oligonucleotide
  Sense strand starting at position 305 of SEQ ID NO: 914754
ucucucaggguuuaaucua

SEQ ID NO: 1028139 - RNA, 19 nt, Artificial Sequence
  Description of Artificial Sequence: Synthetic oligonucleotide
  Antisense strand to SEQ ID NO: 1028138
uagauuaaacccugagaga

SEQ ID NO: 1028140 - RNA, 19 nt, Artificial Sequence
  Description of Artificial Sequence: Synthetic oligonucleotide
  Sense strand starting at position 310 of SEQ ID NO: 914754
caggguuuaaucuagggua

SEQ ID NO: 1028141 - RNA, 19 nt, Artificial Sequence
  Description of Artificial Sequence: Synthetic oligonucleotide
  Antisense strand to SEQ ID NO: 1028140
uacccuagauuaaacccug

SEQ ID NO: 1028142 - RNA, 19 nt, Artificial Sequence
  Description of Artificial Sequence: Synthetic oligonucleotide
  Sense strand starting at position 554 of SEQ ID NO: 914754
ggagaaagcucccuccuca

SEQ ID NO: 1028143 - RNA, 19 nt, Artificial Sequence
  Description of Artificial Sequence: Synthetic oligonucleotide
  Antisense strand to SEQ ID NO: 1028142
ugaggagggagcuuucucc

SEQ ID NO: 1028144 - RNA, 19 nt, Artificial Sequence
  Description of Artificial Sequence: Synthetic oligonucleotide
  Sense strand starting at position 582 of SEQ ID NO: 914754
gccuuucuccucugaagga

SEQ ID NO: 1028145 - RNA, 19 nt, Artificial Sequence
  Description of Artificial Sequence: Synthetic oligonucleotide
  Antisense strand to SEQ ID NO: 1028144
uccuucagaggagaaaggc

SEQ ID NO: 1028146 - RNA, 19 nt, Artificial Sequence
  Description of Artificial Sequence: Synthetic oligonucleotide
  Sense strand starting at position 640 of SEQ ID NO: 914754
ggaucacugguauggcaaa

SEQ ID NO: 1028147 - RNA, 19 nt, Artificial Sequence
  Description of Artificial Sequence: Synthetic oligonucleotide
  Antisense strand to SEQ ID NO: 1028146
uuugccauaccagugaucc

SEQ ID NO: 1028148 - RNA, 19 nt, Artificial Sequence
  Description of Artificial Sequence: Synthetic oligonucleotide
  Sense strand starting at position 836 of SEQ ID NO: 914754
gagagaugccuuuaauguc

SEQ ID NO: 1028149 - RNA, 19 nt, Artificial Sequence
  Description of Artificial Sequence: Synthetic oligonucleotide
  Antisense strand to SEQ ID NO: 1028148
gacauuaaaggcaucucuc

SEQ ID NO: 1028150 - RNA, 19 nt, Artificial Sequence
  Description of Artificial Sequence: Synthetic oligonucleotide
  Sense strand starting at position 1129 of SEQ ID NO: 914754
aagggauguuucuuuauua

SEQ ID NO: 1028151 - RNA, 19 nt, Artificial Sequence
  Description of Artificial Sequence: Synthetic oligonucleotide
  Antisense strand to SEQ ID NO: 1028150
uaauaaagaaacaucccuu

SEQ ID NO: 1028152 - RNA, 19 nt, Artificial Sequence
  Description of Artificial Sequence: Synthetic oligonucleotide
  Sense strand starting at position 1130 of SEQ ID NO: 914754
agggauguuucuuuauuau

SEQ ID NO: 1028153 - RNA, 19 nt, Artificial Sequence
  Description of Artificial Sequence: Synthetic oligonucleotide
  Antisense strand to SEQ ID NO: 1028152
auaauaaagaaacaucccu

SEQ ID NO: 1028154 - RNA, 19 nt, Artificial Sequence
  Description of Artificial Sequence: Synthetic oligonucleotide
  Sense strand starting at position 2037 of SEQ ID NO: 914754
gccacuuccgcccauuuaa

SEQ ID NO: 1028155 - RNA, 19 nt, Artificial Sequence
  Description of Artificial Sequence: Synthetic oligonucleotide
  Antisense strand to SEQ ID NO: 1028154
uuaaaugggcggaaguggc

SEQ ID NO: 1028156 - RNA, 19 nt, Artificial Sequence
  Description of Artificial Sequence: Synthetic oligonucleotide
  Sense strand starting at position 2144 of SEQ ID NO: 914754
ggcagaaauaucugaaguu

SEQ ID NO: 1028157 - RNA, 19 nt, Artificial Sequence
  Description of Artificial Sequence: Synthetic oligonucleotide
  Antisense strand to SEQ ID NO: 1028156
aacuucagauauuucugcc

SEQ ID NO: 1028158 - RNA, 19 nt, Artificial Sequence
  Description of Artificial Sequence: Synthetic oligonucleotide
  Sense strand starting at position 2416 of SEQ ID NO: 914754
gggaaauugccaugacuuc

SEQ ID NO: 1028159 - RNA, 19 nt, Artificial Sequence
  Description of Artificial Sequence: Synthetic oligonucleotide
  Antisense strand to SEQ ID NO: 1028158
gaagucauggcaauuuccc

SEQ ID NO: 1028160 - RNA, 19 nt, Artificial Sequence
  Description of Artificial Sequence: Synthetic oligonucleotide
  Sense strand starting at position 2417 of SEQ ID NO: 914754
ggaaauugccaugacuucu

SEQ ID NO: 1028161 - RNA, 19 nt, Artificial Sequence
  Description of Artificial Sequence: Synthetic oligonucleotide
  Antisense strand to SEQ ID NO: 1028160
agaagucauggcaauuucc

SEQ ID NO: 1028162 - RNA, 19 nt, Artificial Sequence
  Description of Artificial Sequence: Synthetic oligonucleotide
  Sense strand starting at position 2616 of SEQ ID NO: 914754
ucaacucuagcuggaaagu

SEQ ID NO: 1028163 - RNA, 19 nt, Artificial Sequence
  Description of Artificial Sequence: Synthetic oligonucleotide
  Antisense strand to SEQ ID NO: 1028162
acuuuccagcuagaguuga

SEQ ID NO: 1028164 - RNA, 19 nt, Artificial Sequence
  Description of Artificial Sequence: Synthetic oligonucleotide
  Sense strand starting at position 2617 of SEQ ID NO: 914754
caacucuagcuggaaagua

SEQ ID NO: 1028165 - RNA, 19 nt, Artificial Sequence
  Description of Artificial Sequence: Synthetic oligonucleotide
  Antisense strand to SEQ ID NO: 1028164
uacuuuccagcuagaguug

SEQ ID NO: 1028166 - RNA, 19 nt, Artificial Sequence
  Description of Artificial Sequence: Synthetic oligonucleotide
  Sense strand starting at position 2654 of SEQ ID NO: 914754
ggaagaggcuccuccuaaa

SEQ ID NO: 1028167 - RNA, 19 nt, Artificial Sequence
  Description of Artificial Sequence: Synthetic oligonucleotide
  Antisense strand to SEQ ID NO: 1028166
uuuaggaggagccucuucc

SEQ ID NO: 1028168 - RNA, 19 nt, Artificial Sequence
  Description of Artificial Sequence: Synthetic oligonucleotide
  Sense strand starting at position 2754 of SEQ ID NO: 914754
auuacuaucugggucagua

SEQ ID NO: 1028169 - RNA, 19 nt, Artificial Sequence
  Description of Artificial Sequence: Synthetic oligonucleotide
  Antisense strand to SEQ ID NO: 1028168
uacugacccagauaguaau

SEQ ID NO: 1028170 - RNA, 19 nt, Artificial Sequence
  Description of Artificial Sequence: Synthetic oligonucleotide
  Sense strand starting at position 2756 of SEQ ID NO: 914754
uacuaucugggucaguaau

SEQ ID NO: 1028171 - RNA, 19 nt, Artificial Sequence
  Description of Artificial Sequence: Synthetic oligonucleotide
  Antisense strand to SEQ ID NO: 1028170
auuacugacccagauagua

SEQ ID NO: 1028172 - RNA, 19 nt, Artificial Sequence
  Description of Artificial Sequence: Synthetic oligonucleotide
  Sense strand starting at position 2937 of SEQ ID NO: 914754
ucguaugaacaucaucuau

SEQ ID NO: 1028173 - RNA, 19 nt, Artificial Sequence
  Description of Artificial Sequence: Synthetic oligonucleotide
  Antisense strand to SEQ ID NO: 1028172
auagaugauguucauacga

SEQ ID NO: 1028174 - RNA, 19 nt, Artificial Sequence
  Description of Artificial Sequence: Synthetic oligonucleotide
  Sense strand starting at position 3343 of SEQ ID NO: 914754
guugguaacagucaucaua

SEQ ID NO: 1028175 - RNA, 19 nt, Artificial Sequence
  Description of Artificial Sequence: Synthetic oligonucleotide
  Antisense strand to SEQ ID NO: 1028174
uaugaugacuguuaccaac

SEQ ID NO: 1028176 - RNA, 19 nt, Artificial Sequence
  Description of Artificial Sequence: Synthetic oligonucleotide
  Sense strand starting at position 3345 of SEQ ID NO: 914754
ugguaacagucaucauacu

SEQ ID NO: 1028177 - RNA, 19 nt, Artificial Sequence
  Description of Artificial Sequence: Synthetic oligonucleotide
  Antisense strand to SEQ ID NO: 1028176
aguaugaugacuguuacca

SEQ ID NO: 1028178 - RNA, 19 nt, Artificial Sequence
  Description of Artificial Sequence: Synthetic oligonucleotide
  Sense strand starting at position 3346 of SEQ ID NO: 914754
gguaacagucaucauacuu

SEQ ID NO: 1028179 - RNA, 19 nt, Artificial Sequence
  Description of Artificial Sequence: Synthetic oligonucleotide
  Antisense strand to SEQ ID NO: 1028178
aaguaugaugacuguuacc

SEQ ID NO: 1028180 - RNA, 19 nt, Artificial Sequence
  Description of Artificial Sequence: Synthetic oligonucleotide
  Sense strand starting at position 3534 of SEQ ID NO: 914754
auguuaucucuccaauguc

SEQ ID NO: 1028181 - RNA, 19 nt, Artificial Sequence
  Description of Artificial Sequence: Synthetic oligonucleotide
  Antisense strand to SEQ ID NO: 1028180
gacauuggagagauaacau

SEQ ID NO: 1028182 - RNA, 19 nt, Artificial Sequence
  Description of Artificial Sequence: Synthetic oligonucleotide
  Sense strand starting at position 3552 of SEQ ID NO: 914754
ccacgugguccagaagaaa

SEQ ID NO: 1028183 - RNA, 19 nt, Artificial Sequence
  Description of Artificial Sequence: Synthetic oligonucleotide
  Antisense strand to SEQ ID NO: 1028182
uuucuucuggaccacgugg

SEQ ID NO: 1028184 - RNA, 19 nt, Artificial Sequence
  Description of Artificial Sequence: Synthetic oligonucleotide
  Sense strand starting at position 3656 of SEQ ID NO: 914754
ucagaaagguguucccaaa

SEQ ID NO: 1028185 - RNA, 19 nt, Artificial Sequence
  Description of Artificial Sequence: Synthetic oligonucleotide
  Antisense strand to SEQ ID NO: 1028184
uuugggaacaccuuucuga

SEQ ID NO: 1028186 - RNA, 19 nt, Artificial Sequence
  Description of Artificial Sequence: Synthetic oligonucleotide
  Sense strand starting at position 3684 of SEQ ID NO: 914754
ggcuguggaauugaucuau

SEQ ID NO: 1028187 - RNA, 19 nt, Artificial Sequence
  Description of Artificial Sequence: Synthetic oligonucleotide
  Antisense strand to SEQ ID NO: 1028186
auagaucaauuccacagcc

SEQ ID NO: 1028188 - RNA, 19 nt, Artificial Sequence
  Description of Artificial Sequence: Synthetic oligonucleotide
  Sense strand starting at position 3841 of SEQ ID NO: 914754
aguacaaagaguuguccuu

SEQ ID NO: 1028189 - RNA, 19 nt, Artificial Sequence
  Description of Artificial Sequence: Synthetic oligonucleotide
  Antisense strand to SEQ ID NO: 1028188
aaggacaacucuuuguacu

SEQ ID NO: 1028190 - RNA, 19 nt, Artificial Sequence
  Description of Artificial Sequence: Synthetic oligonucleotide
  Sense strand starting at position 3848 of SEQ ID NO: 914754
agaguuguccuuuaugacc

SEQ ID NO: 1028191 - RNA, 19 nt, Artificial Sequence
  Description of Artificial Sequence: Synthetic oligonucleotide
  Antisense strand to SEQ ID NO: 1028190
ggucauaaaggacaacucu

SEQ ID NO: 1028192 - RNA, 19 nt, Artificial Sequence
  Description of Artificial Sequence: Synthetic oligonucleotide
  Sense strand starting at position 3853 of SEQ ID NO: 914754
uguccuuuaugaccuagau

SEQ ID NO: 1028193 - RNA, 19 nt, Artificial Sequence
  Description of Artificial Sequence: Synthetic oligonucleotide
  Antisense strand to SEQ ID NO: 1028192
aucuaggucauaaaggaca

SEQ ID NO: 1028194 - RNA, 19 nt, Artificial Sequence
  Description of Artificial Sequence: Synthetic oligonucleotide
  Sense strand starting at position 3914 of SEQ ID NO: 914754
aggcaaaugucacugagag

SEQ ID NO: 1028195 - RNA, 19 nt, Artificial Sequence
  Description of Artificial Sequence: Synthetic oligonucleotide
  Antisense strand to SEQ ID NO: 1028194
cucucagugacauuugccu

SEQ ID NO: 1028196 - RNA, 19 nt, Artificial Sequence
  Description of Artificial Sequence: Synthetic oligonucleotide
  Sense strand starting at position 3915 of SEQ ID NO: 914754
ggcaaaugucacugagagu

SEQ ID NO: 1028197 - RNA, 19 nt, Artificial Sequence
  Description of Artificial Sequence: Synthetic oligonucleotide
  Antisense strand to SEQ ID NO: 1028196
acucucagugacauuugcc

SEQ ID NO: 1028198 - RNA, 19 nt, Artificial Sequence
  Description of Artificial Sequence: Synthetic oligonucleotide
  Sense strand starting at position 3916 of SEQ ID NO: 914754
gcaaaugucacugagagua

SEQ ID NO: 1028199 - RNA, 19 nt, Artificial Sequence
  Description of Artificial Sequence: Synthetic oligonucleotide
  Antisense strand to SEQ ID NO: 1028198
uacucucagugacauuugc

SEQ ID NO: 1028200 - RNA, 19 nt, Artificial Sequence
  Description of Artificial Sequence: Synthetic oligonucleotide
  Sense strand starting at position 3928 of SEQ ID NO: 914754
gagaguacuccagguacac

SEQ ID NO: 1028201 - RNA, 19 nt, Artificial Sequence
  Description of Artificial Sequence: Synthetic oligonucleotide
  Antisense strand to SEQ ID NO: 1028200
guguaccuggaguacucuc

SEQ ID NO: 1028202 - RNA, 19 nt, Artificial Sequence
  Description of Artificial Sequence: Synthetic oligonucleotide
  Sense strand starting at position 3934 of SEQ ID NO: 914754
acuccagguacacgugaau

SEQ ID NO: 1028203 - RNA, 19 nt, Artificial Sequence
  Description of Artificial Sequence: Synthetic oligonucleotide
  Antisense strand to SEQ ID NO: 1028202
auucacguguaccuggagu

SEQ ID NO: 1028204 - RNA, 19 nt, Artificial Sequence
  Description of Artificial Sequence: Synthetic oligonucleotide
  Sense strand starting at position 3937 of SEQ ID NO: 914754
ccagguacacgugaauacu

SEQ ID NO: 1028205 - RNA, 19 nt, Artificial Sequence
  Description of Artificial Sequence: Synthetic oligonucleotide
  Antisense strand to SEQ ID NO: 1028204
aguauucacguguaccugg

SEQ ID NO: 1028206 - RNA, 19 nt, Artificial Sequence
  Description of Artificial Sequence: Synthetic oligonucleotide
  Sense strand starting at position 3940 of SEQ ID NO: 914754
gguacacgugaauacugua

SEQ ID NO: 1028207 - RNA, 19 nt, Artificial Sequence
  Description of Artificial Sequence: Synthetic oligonucleotide
  Antisense strand to SEQ ID NO: 1028206
uacaguauucacguguacc

SEQ ID NO: 1028208 - RNA, 19 nt, Artificial Sequence
  Description of Artificial Sequence: Synthetic oligonucleotide
  Sense strand starting at position 3945 of SEQ ID NO: 914754
acgugaauacuguauucuc

SEQ ID NO: 1028209 - RNA, 19 nt, Artificial Sequence
  Description of Artificial Sequence: Synthetic oligonucleotide
  Antisense strand to SEQ ID NO: 1028208
gagaauacaguauucacgu

SEQ ID NO: 1028210 - RNA, 19 nt, Artificial Sequence
  Description of Artificial Sequence: Synthetic oligonucleotide
  Sense strand starting at position 34 of SEQ ID NO: 914755
gugggagguguuuagucuu

SEQ ID NO: 1028211 - RNA, 19 nt, Artificial Sequence
  Description of Artificial Sequence: Synthetic oligonucleotide
  Antisense strand to SEQ ID NO: 1028210
aagacuaaacaccucccac

SEQ ID NO: 1028212 - RNA, 19 nt, Artificial Sequence
  Description of Artificial Sequence: Synthetic oligonucleotide
  Sense strand starting at position 203 of SEQ ID NO: 914755
uuucuucuaggugaugaca

SEQ ID NO: 1028213 - RNA, 19 nt, Artificial Sequence
  Description of Artificial Sequence: Synthetic oligonucleotide
  Antisense strand to SEQ ID NO: 1028212
ugucaucaccuagaagaaa

SEQ ID NO: 1028214 - RNA, 19 nt, Artificial Sequence
  Description of Artificial Sequence: Synthetic oligonucleotide
  Sense strand starting at position 264 of SEQ ID NO: 914755
uugcuuaaaugccuacaga

SEQ ID NO: 1028215 - RNA, 19 nt, Artificial Sequence
  Description of Artificial Sequence: Synthetic oligonucleotide
  Antisense strand to SEQ ID NO: 1028214
ucuguaggcauuuaagcaa

SEQ ID NO: 1028216 - RNA, 19 nt, Artificial Sequence
  Description of Artificial Sequence: Synthetic oligonucleotide
  Sense strand starting at position 466 of SEQ ID NO: 914755
ccgagugcuauccaaggca

SEQ ID NO: 1028217 - RNA, 19 nt, Artificial Sequence
  Description of Artificial Sequence: Synthetic oligonucleotide
  Antisense strand to SEQ ID NO: 1028216
ugccuuggauagcacucgg

SEQ ID NO: 1028218 - RNA, 19 nt, Artificial Sequence
  Description of Artificial Sequence: Synthetic oligonucleotide
  Sense strand starting at position 826 of SEQ ID NO: 914755
uuauuucucugagaugaga

SEQ ID NO: 1028219 - RNA, 19 nt, Artificial Sequence
  Description of Artificial Sequence: Synthetic oligonucleotide
  Antisense strand to SEQ ID NO: 1028218
ucucaucucagagaaauaa

SEQ ID NO: 1028220 - RNA, 19 nt, Artificial Sequence
  Description of Artificial Sequence: Synthetic oligonucleotide
  Sense strand starting at position 931 of SEQ ID NO: 914755
guccauaucuuccugacca

SEQ ID NO: 1028221 - RNA, 19 nt, Artificial Sequence
  Description of Artificial Sequence: Synthetic oligonucleotide
  Antisense strand to SEQ ID NO: 1028220
uggucaggaagauauggac

SEQ ID NO: 1028222 - RNA, 19 nt, Artificial Sequence
  Description of Artificial Sequence: Synthetic oligonucleotide
  Sense strand starting at position 1051 of SEQ ID NO: 914755
ucagccaguucuccaugau

SEQ ID NO: 1028223 - RNA, 19 nt, Artificial Sequence
  Description of Artificial Sequence: Synthetic oligonucleotide
  Antisense strand to SEQ ID NO: 1028222
aucauggagaacuggcuga

SEQ ID NO: 1028224 - RNA, 19 nt, Artificial Sequence
  Description of Artificial Sequence: Synthetic oligonucleotide
  Sense strand starting at position 1052 of SEQ ID NO: 914755
cagccaguucuccaugaug

SEQ ID NO: 1028225 - RNA, 19 nt, Artificial Sequence
  Description of Artificial Sequence: Synthetic oligonucleotide
  Antisense strand to SEQ ID NO: 1028224
caucauggagaacuggcug

SEQ ID NO: 1028226 - RNA, 19 nt, Artificial Sequence
  Description of Artificial Sequence: Synthetic oligonucleotide
  Sense strand starting at position 1055 of SEQ ID NO: 914755
ccaguucuccaugaugcau

SEQ ID NO: 1028227 - RNA, 19 nt, Artificial Sequence
  Description of Artificial Sequence: Synthetic oligonucleotide
  Antisense strand to SEQ ID NO: 1028226
augcaucauggagaacugg

SEQ ID NO: 1028228 - RNA, 19 nt, Artificial Sequence
  Description of Artificial Sequence: Synthetic oligonucleotide
  Sense strand starting at position 1112 of SEQ ID NO: 914755
guuagagggcacugaauua

SEQ ID NO: 1028229 - RNA, 19 nt, Artificial Sequence
  Description of Artificial Sequence: Synthetic oligonucleotide
  Antisense strand to SEQ ID NO: 1028228
uaauucagugcccucuaac

SEQ ID NO: 1028230 - RNA, 19 nt, Artificial Sequence
  Description of Artificial Sequence: Synthetic oligonucleotide
  Sense strand starting at position 1126 of SEQ ID NO: 914755
aauuaagucuugcuggaca

SEQ ID NO: 1028231 - RNA, 19 nt, Artificial Sequence
  Description of Artificial Sequence: Synthetic oligonucleotide
  Antisense strand to SEQ ID NO: 1028230
uguccagcaagacuuaauu

SEQ ID NO: 1028232 - RNA, 19 nt, Artificial Sequence
  Description of Artificial Sequence: Synthetic oligonucleotide
  Sense strand starting at position 1128 of SEQ ID NO: 914755
uuaagucuugcuggacaag

SEQ ID NO: 1028233 - RNA, 19 nt, Artificial Sequence
  Description of Artificial Sequence: Synthetic oligonucleotide
  Antisense strand to SEQ ID NO: 1028232
cuuguccagcaagacuuaa

SEQ ID NO: 1028234 - RNA, 19 nt, Artificial Sequence
  Description of Artificial Sequence: Synthetic oligonucleotide
  Sense strand starting at position 1203 of SEQ ID NO: 914755
cuccgugauccagagcuca

SEQ ID NO: 1028235 - RNA, 19 nt, Artificial Sequence
  Description of Artificial Sequence: Synthetic oligonucleotide
  Antisense strand to SEQ ID NO: 1028234
ugagcucuggaucacggag

SEQ ID NO: 1028236 - RNA, 19 nt, Artificial Sequence
  Description of Artificial Sequence: Synthetic oligonucleotide
  Sense strand starting at position 1357 of SEQ ID NO: 914755
cggauuuacucugccuuga

SEQ ID NO: 1028237 - RNA, 19 nt, Artificial Sequence
  Description of Artificial Sequence: Synthetic oligonucleotide
  Antisense strand to SEQ ID NO: 1028236
ucaaggcagaguaaauccg

SEQ ID NO: 1028238 - RNA, 19 nt, Artificial Sequence
  Description of Artificial Sequence: Synthetic oligonucleotide
  Sense strand starting at position 1362 of SEQ ID NO: 914755
uuacucugccuugaaaggu

SEQ ID NO: 1028239 - RNA, 19 nt, Artificial Sequence
  Description of Artificial Sequence: Synthetic oligonucleotide
  Antisense strand to SEQ ID NO: 1028238
accuuucaaggcagaguaa

SEQ ID NO: 1028240 - RNA, 19 nt, Artificial Sequence
  Description of Artificial Sequence: Synthetic oligonucleotide
  Sense strand starting at position 1371 of SEQ ID NO: 914755
cuugaaagguuuguguucu

SEQ ID NO: 1028241 - RNA, 19 nt, Artificial Sequence
  Description of Artificial Sequence: Synthetic oligonucleotide
  Antisense strand to SEQ ID NO: 1028240
agaacacaaaccuuucaag

SEQ ID NO: 1028242 - RNA, 19 nt, Artificial Sequence
  Description of Artificial Sequence: Synthetic oligonucleotide
  Sense strand starting at position 1405 of SEQ ID NO: 914755
gccugcgucagaugagaaa

SEQ ID NO: 1028243 - RNA, 19 nt, Artificial Sequence
  Description of Artificial Sequence: Synthetic oligonucleotide
  Antisense strand to SEQ ID NO: 1028242
uuucucaucugacgcaggc

SEQ ID NO: 1028244 - RNA, 19 nt, Artificial Sequence
  Description of Artificial Sequence: Synthetic oligonucleotide
  Sense strand starting at position 2090 of SEQ ID NO: 914755
ucgccugccgguuuacaua

SEQ ID NO: 1028245 - RNA, 19 nt, Artificial Sequence
  Description of Artificial Sequence: Synthetic oligonucleotide
  Antisense strand to SEQ ID NO: 1028244
uauguaaaccggcaggcga

SEQ ID NO: 1028246 - RNA, 19 nt, Artificial Sequence
  Description of Artificial Sequence: Synthetic oligonucleotide
  Sense strand starting at position 2338 of SEQ ID NO: 914755
acaggugccuggcucuaaa

SEQ ID NO: 1028247 - RNA, 19 nt, Artificial Sequence
  Description of Artificial Sequence: Synthetic oligonucleotide
  Antisense strand to SEQ ID NO: 1028246
uuuagagccaggcaccugu

SEQ ID NO: 1028248 - RNA, 19 nt, Artificial Sequence
  Description of Artificial Sequence: Synthetic oligonucleotide
  Sense strand starting at position 2351 of SEQ ID NO: 914755
ucuaaagagagucgugcau

SEQ ID NO: 1028249 - RNA, 19 nt, Artificial Sequence
  Description of Artificial Sequence: Synthetic oligonucleotide
  Antisense strand to SEQ ID NO: 1028248
augcacgacucucuuuaga

SEQ ID NO: 1028250 - RNA, 19 nt, Artificial Sequence
  Description of Artificial Sequence: Synthetic oligonucleotide
  Sense strand starting at position 2355 of SEQ ID NO: 914755
aagagagucgugcauccuu

SEQ ID NO: 1028251 - RNA, 19 nt, Artificial Sequence
  Description of Artificial Sequence: Synthetic oligonucleotide
  Antisense strand to SEQ ID NO: 1028250
aaggaugcacgacucucuu

SEQ ID NO: 1028252 - RNA, 19 nt, Artificial Sequence
  Description of Artificial Sequence: Synthetic oligonucleotide
  Sense strand starting at position 2439 of SEQ ID NO: 914755
agaccauaauccgcaagaa

SEQ ID NO: 1028253 - RNA, 19 nt, Artificial Sequence
  Description of Artificial Sequence: Synthetic oligonucleotide
  Antisense strand to SEQ ID NO: 1028252
uucuugcggauuauggucu

SEQ ID NO: 1028254 - RNA, 19 nt, Artificial Sequence
  Description of Artificial Sequence: Synthetic oligonucleotide
  Sense strand starting at position 2654 of SEQ ID NO: 914755
accgaaaugcaguauuagu

SEQ ID NO: 1028255 - RNA, 19 nt, Artificial Sequence
  Description of Artificial Sequence: Synthetic oligonucleotide
  Antisense strand to SEQ ID NO: 1028254
acuaauacugcauuucggu

SEQ ID NO: 1028256 - RNA, 19 nt, Artificial Sequence
  Description of Artificial Sequence: Synthetic oligonucleotide
  Sense strand starting at position 2698 of SEQ ID NO: 914755
ucuggcagugcgagguauu

SEQ ID NO: 1028257 - RNA, 19 nt, Artificial Sequence
  Description of Artificial Sequence: Synthetic oligonucleotide
  Antisense strand to SEQ ID NO: 1028256
aauaccucgcacugccaga

SEQ ID NO: 1028258 - RNA, 19 nt, Artificial Sequence
  Description of Artificial Sequence: Synthetic oligonucleotide
  Sense strand starting at position 2916 of SEQ ID NO: 914755
acccauggcgauuaacuaa

SEQ ID NO: 1028259 - RNA, 19 nt, Artificial Sequence
  Description of Artificial Sequence: Synthetic oligonucleotide
  Antisense strand to SEQ ID NO: 1028258
uuaguuaaucgccaugggu

SEQ ID NO: 1028260 - RNA, 19 nt, Artificial Sequence
  Description of Artificial Sequence: Synthetic oligonucleotide
  Sense strand starting at position 2968 of SEQ ID NO: 914755
ucaucucuugagggaugua

SEQ ID NO: 1028261 - RNA, 19 nt, Artificial Sequence
  Description of Artificial Sequence: Synthetic oligonucleotide
  Antisense strand to SEQ ID NO: 1028260
uacaucccucaagagauga

SEQ ID NO: 1028262 - RNA, 19 nt, Artificial Sequence
  Description of Artificial Sequence: Synthetic oligonucleotide
  Sense strand starting at position 2971 of SEQ ID NO: 914755
ucucuugagggauguagca

SEQ ID NO: 1028263 - RNA, 19 nt, Artificial Sequence
  Description of Artificial Sequence: Synthetic oligonucleotide
  Antisense strand to SEQ ID NO: 1028262
ugcuacaucccucaagaga

SEQ ID NO: 1028264 - RNA, 19 nt, Artificial Sequence
  Description of Artificial Sequence: Synthetic oligonucleotide
  Sense strand starting at position 3011 of SEQ ID NO: 914755
ugaugaugguuagcucaau

SEQ ID NO: 1028265 - RNA, 19 nt, Artificial Sequence
  Description of Artificial Sequence: Synthetic oligonucleotide
  Antisense strand to SEQ ID NO: 1028264
auugagcuaaccaucauca

SEQ ID NO: 1028266 - RNA, 19 nt, Artificial Sequence
  Description of Artificial Sequence: Synthetic oligonucleotide
  Sense strand starting at position 3021 of SEQ ID NO: 914755
uagcucaaugccugggaaa

SEQ ID NO: 1028267 - RNA, 19 nt, Artificial Sequence
  Description of Artificial Sequence: Synthetic oligonucleotide
  Antisense strand to SEQ ID NO: 1028266
uuucccaggcauugagcua

SEQ ID NO: 1028268 - RNA, 19 nt, Artificial Sequence
  Description of Artificial Sequence: Synthetic oligonucleotide
  Sense strand starting at position 3023 of SEQ ID NO: 914755
gcucaaugccugggaaacu

SEQ ID NO: 1028269 - RNA, 19 nt, Artificial Sequence
  Description of Artificial Sequence: Synthetic oligonucleotide
  Antisense strand to SEQ ID NO: 1028268
aguuucccaggcauugagc

SEQ ID NO: 1028270 - RNA, 19 nt, Artificial Sequence
  Description of Artificial Sequence: Synthetic oligonucleotide
  Sense strand starting at position 3167 of SEQ ID NO: 914755
acagcaaauguuuggcuua

SEQ ID NO: 1028271 - RNA, 19 nt, Artificial Sequence
  Description of Artificial Sequence: Synthetic oligonucleotide
  Antisense strand to SEQ ID NO: 1028270
uaagccaaacauuugcugu

SEQ ID NO: 1028272 - RNA, 19 nt, Artificial Sequence
  Description of Artificial Sequence: Synthetic oligonucleotide
  Sense strand starting at position 3169 of SEQ ID NO: 914755
agcaaauguuuggcuuaug

SEQ ID NO: 1028273 - RNA, 19 nt, Artificial Sequence
  Description of Artificial Sequence: Synthetic oligonucleotide
  Antisense strand to SEQ ID NO: 1028272
cauaagccaaacauuugcu

SEQ ID NO: 1028274 - RNA, 19 nt, Artificial Sequence
  Description of Artificial Sequence: Synthetic oligonucleotide
  Sense strand starting at position 3172 of SEQ ID NO: 914755
aaauguuuggcuuaugcau

SEQ ID NO: 1028275 - RNA, 19 nt, Artificial Sequence
  Description of Artificial Sequence: Synthetic oligonucleotide
  Antisense strand to SEQ ID NO: 1028274
augcauaagccaaacauuu

SEQ ID NO: 1028276 - RNA, 19 nt, Artificial Sequence
  Description of Artificial Sequence: Synthetic oligonucleotide
  Sense strand starting at position 3187 of SEQ ID NO: 914755
gcauucucaugcuuugaau

SEQ ID NO: 1028277 - RNA, 19 nt, Artificial Sequence
  Description of Artificial Sequence: Synthetic oligonucleotide
  Antisense strand to SEQ ID NO: 1028276
auucaaagcaugagaaugc

SEQ ID NO: 1028278 - RNA, 19 nt, Artificial Sequence
  Description of Artificial Sequence: Synthetic oligonucleotide
  Sense strand starting at position 3252 of SEQ ID NO: 914755
acaugcugaaggugaauaa

SEQ ID NO: 1028279 - RNA, 19 nt, Artificial Sequence
  Description of Artificial Sequence: Synthetic oligonucleotide
  Antisense strand to SEQ ID NO: 1028278
uuauucaccuucagcaugu

SEQ ID NO: 1028280 - RNA, 19 nt, Artificial Sequence
  Description of Artificial Sequence: Synthetic oligonucleotide
  Sense strand starting at position 3492 of SEQ ID NO: 914755
cuccguuaccuagaggaau

SEQ ID NO: 1028281 - RNA, 19 nt, Artificial Sequence
  Description of Artificial Sequence: Synthetic oligonucleotide
  Antisense strand to SEQ ID NO: 1028280
auuccucuagguaacggag

SEQ ID NO: 1028282 - RNA, 19 nt, Artificial Sequence
  Description of Artificial Sequence: Synthetic oligonucleotide
  Sense strand starting at position 3574 of SEQ ID NO: 914755
aaguccgacuucuucugaa

SEQ ID NO: 1028283 - RNA, 19 nt, Artificial Sequence
  Description of Artificial Sequence: Synthetic oligonucleotide
  Antisense strand to SEQ ID NO: 1028282
uucagaagaagucggacuu

SEQ ID NO: 1028284 - RNA, 19 nt, Artificial Sequence
  Description of Artificial Sequence: Synthetic oligonucleotide
  Sense strand starting at position 3611 of SEQ ID NO: 914755
ucuguuaauccacggaaag

SEQ ID NO: 1028285 - RNA, 19 nt, Artificial Sequence
  Description of Artificial Sequence: Synthetic oligonucleotide
  Antisense strand to SEQ ID NO: 1028284
cuuuccguggauuaacaga

SEQ ID NO: 1028286 - RNA, 19 nt, Artificial Sequence
  Description of Artificial Sequence: Synthetic oligonucleotide
  Sense strand starting at position 3612 of SEQ ID NO: 914755
cuguuaauccacggaaaga

SEQ ID NO: 1028287 - RNA, 19 nt, Artificial Sequence
  Description of Artificial Sequence: Synthetic oligonucleotide
  Antisense strand to SEQ ID NO: 1028286
ucuuuccguggauuaacag

SEQ ID NO: 1028288 - RNA, 19 nt, Artificial Sequence
  Description of Artificial Sequence: Synthetic oligonucleotide
  Sense strand starting at position 3965 of SEQ ID NO: 914755
caguaaauaucuuugggcu

SEQ ID NO: 1028289 - RNA, 19 nt, Artificial Sequence
  Description of Artificial Sequence: Synthetic oligonucleotide
  Antisense strand to SEQ ID NO: 1028288
agcccaaagauauuuacug

SEQ ID NO: 1028290 - RNA, 19 nt, Artificial Sequence
  Description of Artificial Sequence: Synthetic oligonucleotide
  Sense strand starting at position 115 of SEQ ID NO: 914756
cucuaagaugcaugcagau

SEQ ID NO: 1028291 - RNA, 19 nt, Artificial Sequence
  Description of Artificial Sequence: Synthetic oligonucleotide
  Antisense strand to SEQ ID NO: 1028290
aucugcaugcaucuuagag

SEQ ID NO: 1028292 - RNA, 19 nt, Artificial Sequence
  Description of Artificial Sequence: Synthetic oligonucleotide
  Sense strand starting at position 117 of SEQ ID NO: 914756
cuaagaugcaugcagauga

SEQ ID NO: 1028293 - RNA, 19 nt, Artificial Sequence
  Description of Artificial Sequence: Synthetic oligonucleotide
  Antisense strand to SEQ ID NO: 1028292
ucaucugcaugcaucuuag

SEQ ID NO: 1028294 - RNA, 19 nt, Artificial Sequence
  Description of Artificial Sequence: Synthetic oligonucleotide
  Sense strand starting at position 240 of SEQ ID NO: 914756
guggacucagccuaauuaa

SEQ ID NO: 1028295 - RNA, 19 nt, Artificial Sequence
  Description of Artificial Sequence: Synthetic oligonucleotide
  Antisense strand to SEQ ID NO: 1028294
uuaauuaggcugaguccac

SEQ ID NO: 1028296 - RNA, 19 nt, Artificial Sequence
  Description of Artificial Sequence: Synthetic oligonucleotide
  Sense strand starting at position 268 of SEQ ID NO: 914756
augcacaguccacgagaaa

SEQ ID NO: 1028297 - RNA, 19 nt, Artificial Sequence
  Description of Artificial Sequence: Synthetic oligonucleotide
  Antisense strand to SEQ ID NO: 1028296
uuucucguggacugugcau

SEQ ID NO: 1028298 - RNA, 19 nt, Artificial Sequence
  Description of Artificial Sequence: Synthetic oligonucleotide
  Sense strand starting at position 269 of SEQ ID NO: 914756
ugcacaguccacgagaaau

SEQ ID NO: 1028299 - RNA, 19 nt, Artificial Sequence
  Description of Artificial Sequence: Synthetic oligonucleotide
  Antisense strand to SEQ ID NO: 1028298
auuucucguggacugugca

SEQ ID NO: 1028300 - RNA, 19 nt, Artificial Sequence
  Description of Artificial Sequence: Synthetic oligonucleotide
  Sense strand starting at position 280 of SEQ ID NO: 914756
cgagaaaugaugcaguguu

SEQ ID NO: 1028301 - RNA, 19 nt, Artificial Sequence
  Description of Artificial Sequence: Synthetic oligonucleotide
  Antisense strand to SEQ ID NO: 1028300
aacacugcaucauuucucg

SEQ ID NO: 1028302 - RNA, 19 nt, Artificial Sequence
  Description of Artificial Sequence: Synthetic oligonucleotide
  Sense strand starting at position 383 of SEQ ID NO: 914756
gagggugucccuggaaaca

SEQ ID NO: 1028303 - RNA, 19 nt, Artificial Sequence
  Description of Artificial Sequence: Synthetic oligonucleotide
  Antisense strand to SEQ ID NO: 1028302
uguuuccagggacacccuc

SEQ ID NO: 1028304 - RNA, 19 nt, Artificial Sequence
  Description of Artificial Sequence: Synthetic oligonucleotide
  Sense strand starting at position 562 of SEQ ID NO: 914756
cuguaauagcaagaaagcu

SEQ ID NO: 1028305 - RNA, 19 nt, Artificial Sequence
  Description of Artificial Sequence: Synthetic oligonucleotide
  Antisense strand to SEQ ID NO: 1028304
agcuuucuugcuauuacag

SEQ ID NO: 1028306 - RNA, 19 nt, Artificial Sequence
  Description of Artificial Sequence: Synthetic oligonucleotide
  Sense strand starting at position 633 of SEQ ID NO: 914756
ucgacaucacuuuaugcuu

SEQ ID NO: 1028307 - RNA, 19 nt, Artificial Sequence
  Description of Artificial Sequence: Synthetic oligonucleotide
  Antisense strand to SEQ ID NO: 1028306
aagcauaaagugaugucga

SEQ ID NO: 1028308 - RNA, 19 nt, Artificial Sequence
  Description of Artificial Sequence: Synthetic oligonucleotide
  Sense strand starting at position 731 of SEQ ID NO: 914756
uacuuaagcgacuauaggu

SEQ ID NO: 1028309 - RNA, 19 nt, Artificial Sequence
  Description of Artificial Sequence: Synthetic oligonucleotide
  Antisense strand to SEQ ID NO: 1028308
accuauagucgcuuaagua

SEQ ID NO: 1028310 - RNA, 19 nt, Artificial Sequence
  Description of Artificial Sequence: Synthetic oligonucleotide
  Sense strand starting at position 887 of SEQ ID NO: 914756
ugcugaagguuucccugaa

SEQ ID NO: 1028311 - RNA, 19 nt, Artificial Sequence
  Description of Artificial Sequence: Synthetic oligonucleotide
  Antisense strand to SEQ ID NO: 1028310
uucagggaaaccuucagca

SEQ ID NO: 1028312 - RNA, 19 nt, Artificial Sequence
  Description of Artificial Sequence: Synthetic oligonucleotide
  Sense strand starting at position 888 of SEQ ID NO: 914756
gcugaagguuucccugaau

SEQ ID NO: 1028313 - RNA, 19 nt, Artificial Sequence
  Description of Artificial Sequence: Synthetic oligonucleotide
  Antisense strand to SEQ ID NO: 1028312
auucagggaaaccuucagc

SEQ ID NO: 1028314 - RNA, 19 nt, Artificial Sequence
  Description of Artificial Sequence: Synthetic oligonucleotide
  Sense strand starting at position 891 of SEQ ID NO: 914756
gaagguuucccugaauugc

SEQ ID NO: 1028315 - RNA, 19 nt, Artificial Sequence
  Description of Artificial Sequence: Synthetic oligonucleotide
  Antisense strand to SEQ ID NO: 1028314
gcaauucagggaaaccuuc

SEQ ID NO: 1028316 - RNA, 19 nt, Artificial Sequence
  Description of Artificial Sequence: Synthetic oligonucleotide
  Sense strand starting at position 901 of SEQ ID NO: 914756
cugaauugcuuaucagcaa

SEQ ID NO: 1028317 - RNA, 19 nt, Artificial Sequence
  Description of Artificial Sequence: Synthetic oligonucleotide
  Antisense strand to SEQ ID NO: 1028316
uugcugauaagcaauucag

SEQ ID NO: 1028318 - RNA, 19 nt, Artificial Sequence
  Description of Artificial Sequence: Synthetic oligonucleotide
  Sense strand starting at position 2280 of SEQ ID NO: 914756
cgaaguuuaggguacugaa

SEQ ID NO: 1028319 - RNA, 19 nt, Artificial Sequence
  Description of Artificial Sequence: Synthetic oligonucleotide
  Antisense strand to SEQ ID NO: 1028318
uucaguacccuaaacuucg

SEQ ID NO: 1028320 - RNA, 19 nt, Artificial Sequence
  Description of Artificial Sequence: Synthetic oligonucleotide
  Sense strand starting at position 2376 of SEQ ID NO: 914756
aggaauaagaacugcguga

SEQ ID NO: 1028321 - RNA, 19 nt, Artificial Sequence
  Description of Artificial Sequence: Synthetic oligonucleotide
  Antisense strand to SEQ ID NO: 1028320
ucacgcaguucuuauuccu

SEQ ID NO: 1028322 - RNA, 19 nt, Artificial Sequence
  Description of Artificial Sequence: Synthetic oligonucleotide
  Sense strand starting at position 2378 of SEQ ID NO: 914756
gaauaagaacugcgugaag

SEQ ID NO: 1028323 - RNA, 19 nt, Artificial Sequence
  Description of Artificial Sequence: Synthetic oligonucleotide
  Antisense strand to SEQ ID NO: 1028322
cuucacgcaguucuuauuc

SEQ ID NO: 1028324 - RNA, 19 nt, Artificial Sequence
  Description of Artificial Sequence: Synthetic oligonucleotide
  Sense strand starting at position 2558 of SEQ ID NO: 914756
aggugucugacaggaagau

SEQ ID NO: 1028325 - RNA, 19 nt, Artificial Sequence
  Description of Artificial Sequence: Synthetic oligonucleotide
  Antisense strand to SEQ ID NO: 1028324
aucuuccugucagacaccu

SEQ ID NO: 1028326 - RNA, 19 nt, Artificial Sequence
  Description of Artificial Sequence: Synthetic oligonucleotide
  Sense strand starting at position 2664 of SEQ ID NO: 914756
ugaugaugucaauaguugu

SEQ ID NO: 1028327 - RNA, 19 nt, Artificial Sequence
  Description of Artificial Sequence: Synthetic oligonucleotide
  Antisense strand to SEQ ID NO: 1028326
acaacuauugacaucauca

SEQ ID NO: 1028328 - RNA, 19 nt, Artificial Sequence
  Description of Artificial Sequence: Synthetic oligonucleotide
  Sense strand starting at position 2845 of SEQ ID NO: 914756
guuucugauuuccucugua

SEQ ID NO: 1028329 - RNA, 19 nt, Artificial Sequence
  Description of Artificial Sequence: Synthetic oligonucleotide
  Antisense strand to SEQ ID NO: 1028328
uacagaggaaaucagaaac

SEQ ID NO: 1028330 - RNA, 19 nt, Artificial Sequence
  Description of Artificial Sequence: Synthetic oligonucleotide
  Sense strand starting at position 2849 of SEQ ID NO: 914756
cugauuuccucuguauggu

SEQ ID NO: 1028331 - RNA, 19 nt, Artificial Sequence
  Description of Artificial Sequence: Synthetic oligonucleotide
  Antisense strand to SEQ ID NO: 1028330
accauacagaggaaaucag

SEQ ID NO: 1028332 - RNA, 19 nt, Artificial Sequence
  Description of Artificial Sequence: Synthetic oligonucleotide
  Sense strand starting at position 2878 of SEQ ID NO: 914756
cugaucuaguuaguaaaua

SEQ ID NO: 1028333 - RNA, 19 nt, Artificial Sequence
  Description of Artificial Sequence: Synthetic oligonucleotide
  Antisense strand to SEQ ID NO: 1028332
uauuuacuaacuagaucag

SEQ ID NO: 1028334 - RNA, 19 nt, Artificial Sequence
  Description of Artificial Sequence: Synthetic oligonucleotide
  Sense strand starting at position 2909 of SEQ ID NO: 914756
ccaauaagcugugugagag

SEQ ID NO: 1028335 - RNA, 19 nt, Artificial Sequence
  Description of Artificial Sequence: Synthetic oligonucleotide
  Antisense strand to SEQ ID NO: 1028334
cucucacacagcuuauugg

SEQ ID NO: 1028336 - RNA, 19 nt, Artificial Sequence
  Description of Artificial Sequence: Synthetic oligonucleotide
  Sense strand starting at position 2910 of SEQ ID NO: 914756
caauaagcugugugagaga

SEQ ID NO: 1028337 - RNA, 19 nt, Artificial Sequence
  Description of Artificial Sequence: Synthetic oligonucleotide
  Antisense strand to SEQ ID NO: 1028336
ucucucacacagcuuauug

SEQ ID NO: 1028338 - RNA, 19 nt, Artificial Sequence
  Description of Artificial Sequence: Synthetic oligonucleotide
  Sense strand starting at position 2915 of SEQ ID NO: 914756
agcugugugagagaaucau

SEQ ID NO: 1028339 - RNA, 19 nt, Artificial Sequence
  Description of Artificial Sequence: Synthetic oligonucleotide
  Antisense strand to SEQ ID NO: 1028338
augauucucucacacagcu

SEQ ID NO: 1028340 - RNA, 19 nt, Artificial Sequence
  Description of Artificial Sequence: Synthetic oligonucleotide
  Sense strand starting at position 2938 of SEQ ID NO: 914756
aggagagguucuccuuaaa

SEQ ID NO: 1028341 - RNA, 19 nt, Artificial Sequence
  Description of Artificial Sequence: Synthetic oligonucleotide
  Antisense strand to SEQ ID NO: 1028340
uuuaaggagaaccucuccu

SEQ ID NO: 1028342 - RNA, 19 nt, Artificial Sequence
  Description of Artificial Sequence: Synthetic oligonucleotide
  Sense strand starting at position 2941 of SEQ ID NO: 914756
agagguucuccuuaaacgu

SEQ ID NO: 1028343 - RNA, 19 nt, Artificial Sequence
  Description of Artificial Sequence: Synthetic oligonucleotide
  Antisense strand to SEQ ID NO: 1028342
acguuuaaggagaaccucu

SEQ ID NO: 1028344 - RNA, 19 nt, Artificial Sequence
  Description of Artificial Sequence: Synthetic oligonucleotide
  Sense strand starting at position 2948 of SEQ ID NO: 914756
cuccuuaaacguuagggaa

SEQ ID NO: 1028345 - RNA, 19 nt, Artificial Sequence
  Description of Artificial Sequence: Synthetic oligonucleotide
  Antisense strand to SEQ ID NO: 1028344
uucccuaacguuuaaggag

SEQ ID NO: 1028346 - RNA, 19 nt, Artificial Sequence
  Description of Artificial Sequence: Synthetic oligonucleotide
  Sense strand starting at position 3005 of SEQ ID NO: 914756
auagcaaaugccuagguuu

SEQ ID NO: 1028347 - RNA, 19 nt, Artificial Sequence
  Description of Artificial Sequence: Synthetic oligonucleotide
  Antisense strand to SEQ ID NO: 1028346
aaaccuaggcauuugcuau

SEQ ID NO: 1028348 - RNA, 19 nt, Artificial Sequence
  Description of Artificial Sequence: Synthetic oligonucleotide
  Sense strand starting at position 3016 of SEQ ID NO: 914756
cuagguuugccugauauaa

SEQ ID NO: 1028349 - RNA, 19 nt, Artificial Sequence
  Description of Artificial Sequence: Synthetic oligonucleotide
  Antisense strand to SEQ ID NO: 1028348
uuauaucaggcaaaccuag

SEQ ID NO: 1028350 - RNA, 19 nt, Artificial Sequence
  Description of Artificial Sequence: Synthetic oligonucleotide
  Sense strand starting at position 3038 of SEQ ID NO: 914756
uugagacuacaaugcuuaa

SEQ ID NO: 1028351 - RNA, 19 nt, Artificial Sequence
  Description of Artificial Sequence: Synthetic oligonucleotide
  Antisense strand to SEQ ID NO: 1028350
uuaagcauuguagucucaa

SEQ ID NO: 1028352 - RNA, 19 nt, Artificial Sequence
  Description of Artificial Sequence: Synthetic oligonucleotide
  Sense strand starting at position 3041 of SEQ ID NO: 914756
agacuacaaugcuuaaagu

SEQ ID NO: 1028353 - RNA, 19 nt, Artificial Sequence
  Description of Artificial Sequence: Synthetic oligonucleotide
  Antisense strand to SEQ ID NO: 1028352
acuuuaagcauuguagucu

SEQ ID NO: 1028354 - RNA, 19 nt, Artificial Sequence
  Description of Artificial Sequence: Synthetic oligonucleotide
  Sense strand starting at position 3061 of SEQ ID NO: 914756
gaauucuugcaagggacuu

SEQ ID NO: 1028355 - RNA, 19 nt, Artificial Sequence
  Description of Artificial Sequence: Synthetic oligonucleotide
  Antisense strand to SEQ ID NO: 1028354
aagucccuugcaagaauuc

SEQ ID NO: 1028356 - RNA, 19 nt, Artificial Sequence
  Description of Artificial Sequence: Synthetic oligonucleotide
  Sense strand starting at position 3162 of SEQ ID NO: 914756
guauuuguaguuuguagau

SEQ ID NO: 1028357 - RNA, 19 nt, Artificial Sequence
  Description of Artificial Sequence: Synthetic oligonucleotide
  Antisense strand to SEQ ID NO: 1028356
aucuacaaacuacaaauac

SEQ ID NO: 1028358 - RNA, 19 nt, Artificial Sequence
  Description of Artificial Sequence: Synthetic oligonucleotide
  Sense strand starting at position 3270 of SEQ ID NO: 914756
gucugcuuucccguuacau

SEQ ID NO: 1028359 - RNA, 19 nt, Artificial Sequence
  Description of Artificial Sequence: Synthetic oligonucleotide
  Antisense strand to SEQ ID NO: 1028358
auguaacgggaaagcagac

SEQ ID NO: 1028360 - RNA, 19 nt, Artificial Sequence
  Description of Artificial Sequence: Synthetic oligonucleotide
  Sense strand starting at position 3272 of SEQ ID NO: 914756
cugcuuucccguuacauuu

SEQ ID NO: 1028361 - RNA, 19 nt, Artificial Sequence
  Description of Artificial Sequence: Synthetic oligonucleotide
  Antisense strand to SEQ ID NO: 1028360
aaauguaacgggaaagcag

SEQ ID NO: 1028362 - RNA, 19 nt, Artificial Sequence
  Description of Artificial Sequence: Synthetic oligonucleotide
  Sense strand starting at position 3317 of SEQ ID NO: 914756
accuaauuguaacuguauu

SEQ ID NO: 1028363 - RNA, 19 nt, Artificial Sequence
  Description of Artificial Sequence: Synthetic oligonucleotide
  Antisense strand to SEQ ID NO: 1028362
aauacaguuacaauuaggu

SEQ ID NO: 1028364 - RNA, 19 nt, Artificial Sequence
  Description of Artificial Sequence: Synthetic oligonucleotide
  Sense strand starting at position 3577 of SEQ ID NO: 914756
cuuccugauccagaggcaa

SEQ ID NO: 1028365 - RNA, 19 nt, Artificial Sequence
  Description of Artificial Sequence: Synthetic oligonucleotide
  Antisense strand to SEQ ID NO: 1028364
uugccucuggaucaggaag

SEQ ID NO: 1028366 - RNA, 19 nt, Artificial Sequence
  Description of Artificial Sequence: Synthetic oligonucleotide
  Sense strand starting at position 3645 of SEQ ID NO: 914756
auguaauagcaucauugau

SEQ ID NO: 1028367 - RNA, 19 nt, Artificial Sequence
  Description of Artificial Sequence: Synthetic oligonucleotide
  Antisense strand to SEQ ID NO: 1028366
aucaaugaugcuauuacau

SEQ ID NO: 1028368 - RNA, 19 nt, Artificial Sequence
  Description of Artificial Sequence: Synthetic oligonucleotide
  Sense strand starting at position 3647 of SEQ ID NO: 914756
guaauagcaucauugauau

SEQ ID NO: 1028369 - RNA, 19 nt, Artificial Sequence
  Description of Artificial Sequence: Synthetic oligonucleotide
  Antisense strand to SEQ ID NO: 1028368
auaucaaugaugcuauuac

SEQ ID NO: 1028370 - RNA, 19 nt, Artificial Sequence
  Description of Artificial Sequence: Synthetic oligonucleotide
  Sense strand starting at position 80 of SEQ ID NO: 914757
acuaaauaucccugaaacg

SEQ ID NO: 1028371 - RNA, 19 nt, Artificial Sequence
  Description of Artificial Sequence: Synthetic oligonucleotide
  Antisense strand to SEQ ID NO: 1028370
cguuucagggauauuuagu

SEQ ID NO: 1028372 - RNA, 19 nt, Artificial Sequence
  Description of Artificial Sequence: Synthetic oligonucleotide
  Sense strand starting at position 561 of SEQ ID NO: 914757
ggugcaugcuuaguauuua

SEQ ID NO: 1028373 - RNA, 19 nt, Artificial Sequence
  Description of Artificial Sequence: Synthetic oligonucleotide
  Antisense strand to SEQ ID NO: 1028372
uaaauacuaagcaugcacc

SEQ ID NO: 1028374 - RNA, 19 nt, Artificial Sequence
  Description of Artificial Sequence: Synthetic oligonucleotide
  Sense strand starting at position 572 of SEQ ID NO: 914757
aguauuuagucuuuagagc

SEQ ID NO: 1028375 - RNA, 19 nt, Artificial Sequence
  Description of Artificial Sequence: Synthetic oligonucleotide
  Antisense strand to SEQ ID NO: 1028374
gcucuaaagacuaaauacu

SEQ ID NO: 1028376 - RNA, 19 nt, Artificial Sequence
  Description of Artificial Sequence: Synthetic oligonucleotide
  Sense strand starting at position 726 of SEQ ID NO: 914757
cucuaagaugcaugcagau

SEQ ID NO: 1028377 - RNA, 19 nt, Artificial Sequence
  Description of Artificial Sequence: Synthetic oligonucleotide
  Antisense strand to SEQ ID NO: 1028376
aucugcaugcaucuuagag

SEQ ID NO: 1028378 - RNA, 19 nt, Artificial Sequence
  Description of Artificial Sequence: Synthetic oligonucleotide
  Sense strand starting at position 728 of SEQ ID NO: 914757
cuaagaugcaugcagauga

SEQ ID NO: 1028379 - RNA, 19 nt, Artificial Sequence
  Description of Artificial Sequence: Synthetic oligonucleotide
  Antisense strand to SEQ ID NO: 1028378
ucaucugcaugcaucuuag

SEQ ID NO: 1028380 - RNA, 19 nt, Artificial Sequence
  Description of Artificial Sequence: Synthetic oligonucleotide
  Sense strand starting at position 851 of SEQ ID NO: 914757
guggacucagccuaauuaa

SEQ ID NO: 1028381 - RNA, 19 nt, Artificial Sequence
  Description of Artificial Sequence: Synthetic oligonucleotide
  Antisense strand to SEQ ID NO: 1028380
uuaauuaggcugaguccac

SEQ ID NO: 1028382 - RNA, 19 nt, Artificial Sequence
  Description of Artificial Sequence: Synthetic oligonucleotide
  Sense strand starting at position 879 of SEQ ID NO: 914757
augcacaguccacgagaaa

SEQ ID NO: 1028383 - RNA, 19 nt, Artificial Sequence
  Description of Artificial Sequence: Synthetic oligonucleotide
  Antisense strand to SEQ ID NO: 1028382
uuucucguggacugugcau

SEQ ID NO: 1028384 - RNA, 19 nt, Artificial Sequence
  Description of Artificial Sequence: Synthetic oligonucleotide
  Sense strand starting at position 880 of SEQ ID NO: 914757
ugcacaguccacgagaaau

SEQ ID NO: 1028385 - RNA, 19 nt, Artificial Sequence
  Description of Artificial Sequence: Synthetic oligonucleotide
  Antisense strand to SEQ ID NO: 1028384
auuucucguggacugugca

SEQ ID NO: 1028386 - RNA, 19 nt, Artificial Sequence
  Description of Artificial Sequence: Synthetic oligonucleotide
  Sense strand starting at position 891 of SEQ ID NO: 914757
cgagaaaugaugcaguguu

SEQ ID NO: 1028387 - RNA, 19 nt, Artificial Sequence
  Description of Artificial Sequence: Synthetic oligonucleotide
  Antisense strand to SEQ ID NO: 1028386
aacacugcaucauuucucg

SEQ ID NO: 1028388 - RNA, 19 nt, Artificial Sequence
  Description of Artificial Sequence: Synthetic oligonucleotide
  Sense strand starting at position 994 of SEQ ID NO: 914757
gagggugucccuggaaaca

SEQ ID NO: 1028389 - RNA, 19 nt, Artificial Sequence
  Description of Artificial Sequence: Synthetic oligonucleotide
  Antisense strand to SEQ ID NO: 1028388
uguuuccagggacacccuc

SEQ ID NO: 1028390 - RNA, 19 nt, Artificial Sequence
  Description of Artificial Sequence: Synthetic oligonucleotide
  Sense strand starting at position 1173 of SEQ ID NO: 914757
cuguaauagcaagaaagcu

SEQ ID NO: 1028391 - RNA, 19 nt, Artificial Sequence
  Description of Artificial Sequence: Synthetic oligonucleotide
  Antisense strand to SEQ ID NO: 1028390
agcuuucuugcuauuacag

SEQ ID NO: 1028392 - RNA, 19 nt, Artificial Sequence
  Description of Artificial Sequence: Synthetic oligonucleotide
  Sense strand starting at position 1244 of SEQ ID NO: 914757
ucgacaucacuuuaugcuu

SEQ ID NO: 1028393 - RNA, 19 nt, Artificial Sequence
  Description of Artificial Sequence: Synthetic oligonucleotide
  Antisense strand to SEQ ID NO: 1028392
aagcauaaagugaugucga

SEQ ID NO: 1028394 - RNA, 19 nt, Artificial Sequence
  Description of Artificial Sequence: Synthetic oligonucleotide
  Sense strand starting at position 1342 of SEQ ID NO: 914757
uacuuaagcgacuauaggu

SEQ ID NO: 1028395 - RNA, 19 nt, Artificial Sequence
  Description of Artificial Sequence: Synthetic oligonucleotide
  Antisense strand to SEQ ID NO: 1028394
accuauagucgcuuaagua

SEQ ID NO: 1028396 - RNA, 19 nt, Artificial Sequence
  Description of Artificial Sequence: Synthetic oligonucleotide
  Sense strand starting at position 1498 of SEQ ID NO: 914757
ugcugaagguuucccugaa

SEQ ID NO: 1028397 - RNA, 19 nt, Artificial Sequence
  Description of Artificial Sequence: Synthetic oligonucleotide
  Antisense strand to SEQ ID NO: 1028396
uucagggaaaccuucagca

SEQ ID NO: 1028398 - RNA, 19 nt, Artificial Sequence
  Description of Artificial Sequence: Synthetic oligonucleotide
  Sense strand starting at position 1499 of SEQ ID NO: 914757
gcugaagguuucccugaau

SEQ ID NO: 1028399 - RNA, 19 nt, Artificial Sequence
  Description of Artificial Sequence: Synthetic oligonucleotide
  Antisense strand to SEQ ID NO: 1028398
auucagggaaaccuucagc

SEQ ID NO: 1028400 - RNA, 19 nt, Artificial Sequence
  Description of Artificial Sequence: Synthetic oligonucleotide
  Sense strand starting at position 1502 of SEQ ID NO: 914757
gaagguuucccugaauugc

SEQ ID NO: 1028401 - RNA, 19 nt, Artificial Sequence
  Description of Artificial Sequence: Synthetic oligonucleotide
  Antisense strand to SEQ ID NO: 1028400
gcaauucagggaaaccuuc

SEQ ID NO: 1028402 - RNA, 19 nt, Artificial Sequence
  Description of Artificial Sequence: Synthetic oligonucleotide
  Sense strand starting at position 1512 of SEQ ID NO: 914757
cugaauugcuuaucagcaa

SEQ ID NO: 1028403 - RNA, 19 nt, Artificial Sequence
  Description of Artificial Sequence: Synthetic oligonucleotide
  Antisense strand to SEQ ID NO: 1028402
uugcugauaagcaauucag

SEQ ID NO: 1028404 - RNA, 19 nt, Artificial Sequence
  Description of Artificial Sequence: Synthetic oligonucleotide
  Sense strand starting at position 2891 of SEQ ID NO: 914757
cgaaguuuaggguacugaa

SEQ ID NO: 1028405 - RNA, 19 nt, Artificial Sequence
  Description of Artificial Sequence: Synthetic oligonucleotide
  Antisense strand to SEQ ID NO: 1028404
uucaguacccuaaacuucg

SEQ ID NO: 1028406 - RNA, 19 nt, Artificial Sequence
  Description of Artificial Sequence: Synthetic oligonucleotide
  Sense strand starting at position 2987 of SEQ ID NO: 914757
aggaauaagaacugcguga

SEQ ID NO: 1028407 - RNA, 19 nt, Artificial Sequence
  Description of Artificial Sequence: Synthetic oligonucleotide
  Antisense strand to SEQ ID NO: 1028406
ucacgcaguucuuauuccu

SEQ ID NO: 1028408 - RNA, 19 nt, Artificial Sequence
  Description of Artificial Sequence: Synthetic oligonucleotide
  Sense strand starting at position 2989 of SEQ ID NO: 914757
gaauaagaacugcgugaag

SEQ ID NO: 1028409 - RNA, 19 nt, Artificial Sequence
  Description of Artificial Sequence: Synthetic oligonucleotide
  Antisense strand to SEQ ID NO: 1028408
cuucacgcaguucuuauuc

SEQ ID NO: 1028410 - RNA, 19 nt, Artificial Sequence
  Description of Artificial Sequence: Synthetic oligonucleotide
  Sense strand starting at position 3169 of SEQ ID NO: 914757
aggugucugacaggaagau

SEQ ID NO: 1028411 - RNA, 19 nt, Artificial Sequence
  Description of Artificial Sequence: Synthetic oligonucleotide
  Antisense strand to SEQ ID NO: 1028410
aucuuccugucagacaccu

SEQ ID NO: 1028412 - RNA, 19 nt, Artificial Sequence
  Description of Artificial Sequence: Synthetic oligonucleotide
  Sense strand starting at position 3275 of SEQ ID NO: 914757
ugaugaugucaauaguugu

SEQ ID NO: 1028413 - RNA, 19 nt, Artificial Sequence
  Description of Artificial Sequence: Synthetic oligonucleotide
  Antisense strand to SEQ ID NO: 1028412
acaacuauugacaucauca

SEQ ID NO: 1028414 - RNA, 19 nt, Artificial Sequence
  Description of Artificial Sequence: Synthetic oligonucleotide
  Sense strand starting at position 3456 of SEQ ID NO: 914757
guuucugauuuccucugua

SEQ ID NO: 1028415 - RNA, 19 nt, Artificial Sequence
  Description of Artificial Sequence: Synthetic oligonucleotide
  Antisense strand to SEQ ID NO: 1028414
uacagaggaaaucagaaac

SEQ ID NO: 1028416 - RNA, 19 nt, Artificial Sequence
  Description of Artificial Sequence: Synthetic oligonucleotide
  Sense strand starting at position 3460 of SEQ ID NO: 914757
cugauuuccucuguauggu

SEQ ID NO: 1028417 - RNA, 19 nt, Artificial Sequence
  Description of Artificial Sequence: Synthetic oligonucleotide
  Antisense strand to SEQ ID NO: 1028416
accauacagaggaaaucag

SEQ ID NO: 1028418 - RNA, 19 nt, Artificial Sequence
  Description of Artificial Sequence: Synthetic oligonucleotide
  Sense strand starting at position 3489 of SEQ ID NO: 914757
cugaucuaguuaguaaaua

SEQ ID NO: 1028419 - RNA, 19 nt, Artificial Sequence
  Description of Artificial Sequence: Synthetic oligonucleotide
  Antisense strand to SEQ ID NO: 1028418
uauuuacuaacuagaucag

SEQ ID NO: 1028420 - RNA, 19 nt, Artificial Sequence
  Description of Artificial Sequence: Synthetic oligonucleotide
  Sense strand starting at position 3520 of SEQ ID NO: 914757
ccaauaagcugugugagag

SEQ ID NO: 1028421 - RNA, 19 nt, Artificial Sequence
  Description of Artificial Sequence: Synthetic oligonucleotide
  Antisense strand to SEQ ID NO: 1028420
cucucacacagcuuauugg

SEQ ID NO: 1028422 - RNA, 19 nt, Artificial Sequence
  Description of Artificial Sequence: Synthetic oligonucleotide
  Sense strand starting at position 3521 of SEQ ID NO: 914757
caauaagcugugugagaga

SEQ ID NO: 1028423 - RNA, 19 nt, Artificial Sequence
  Description of Artificial Sequence: Synthetic oligonucleotide
  Antisense strand to SEQ ID NO: 1028422
ucucucacacagcuuauug

SEQ ID NO: 1028424 - RNA, 19 nt, Artificial Sequence
  Description of Artificial Sequence: Synthetic oligonucleotide
  Sense strand starting at position 3526 of SEQ ID NO: 914757
agcugugugagagaaucau

SEQ ID NO: 1028425 - RNA, 19 nt, Artificial Sequence
  Description of Artificial Sequence: Synthetic oligonucleotide
  Antisense strand to SEQ ID NO: 1028424
augauucucucacacagcu

SEQ ID NO: 1028426 - RNA, 19 nt, Artificial Sequence
  Description of Artificial Sequence: Synthetic oligonucleotide
  Sense strand starting at position 3549 of SEQ ID NO: 914757
aggagagguucuccuuaaa

SEQ ID NO: 1028427 - RNA, 19 nt, Artificial Sequence
  Description of Artificial Sequence: Synthetic oligonucleotide
  Antisense strand to SEQ ID NO: 1028426
uuuaaggagaaccucuccu

SEQ ID NO: 1028428 - RNA, 19 nt, Artificial Sequence
  Description of Artificial Sequence: Synthetic oligonucleotide
  Sense strand starting at position 3552 of SEQ ID NO: 914757
agagguucuccuuaaacgu

SEQ ID NO: 1028429 - RNA, 19 nt, Artificial Sequence
  Description of Artificial Sequence: Synthetic oligonucleotide
  Antisense strand to SEQ ID NO: 1028428
acguuuaaggagaaccucu

SEQ ID NO: 1028430 - RNA, 19 nt, Artificial Sequence
  Description of Artificial Sequence: Synthetic oligonucleotide
  Sense strand starting at position 3559 of SEQ ID NO: 914757
cuccuuaaacguuagggaa

SEQ ID NO: 1028431 - RNA, 19 nt, Artificial Sequence
  Description of Artificial Sequence: Synthetic oligonucleotide
  Antisense strand to SEQ ID NO: 1028430
uucccuaacguuuaaggag

SEQ ID NO: 1028432 - RNA, 19 nt, Artificial Sequence
  Description of Artificial Sequence: Synthetic oligonucleotide
  Sense strand starting at position 3616 of SEQ ID NO: 914757
auagcaaaugccuagguuu

SEQ ID NO: 1028433 - RNA, 19 nt, Artificial Sequence
  Description of Artificial Sequence: Synthetic oligonucleotide
  Antisense strand to SEQ ID NO: 1028432
aaaccuaggcauuugcuau

SEQ ID NO: 1028434 - RNA, 19 nt, Artificial Sequence
  Description of Artificial Sequence: Synthetic oligonucleotide
  Sense strand starting at position 3627 of SEQ ID NO: 914757
cuagguuugccugauauaa

SEQ ID NO: 1028435 - RNA, 19 nt, Artificial Sequence
  Description of Artificial Sequence: Synthetic oligonucleotide
  Antisense strand to SEQ ID NO: 1028434
uuauaucaggcaaaccuag

SEQ ID NO: 1028436 - RNA, 19 nt, Artificial Sequence
  Description of Artificial Sequence: Synthetic oligonucleotide
  Sense strand starting at position 3649 of SEQ ID NO: 914757
uugagacuacaaugcuuaa

SEQ ID NO: 1028437 - RNA, 19 nt, Artificial Sequence
  Description of Artificial Sequence: Synthetic oligonucleotide
  Antisense strand to SEQ ID NO: 1028436
uuaagcauuguagucucaa

SEQ ID NO: 1028438 - RNA, 19 nt, Artificial Sequence
  Description of Artificial Sequence: Synthetic oligonucleotide
  Sense strand starting at position 3652 of SEQ ID NO: 914757
agacuacaaugcuuaaagu

SEQ ID NO: 1028439 - RNA, 19 nt, Artificial Sequence
  Description of Artificial Sequence: Synthetic oligonucleotide
  Antisense strand to SEQ ID NO: 1028438
acuuuaagcauuguagucu

SEQ ID NO: 1028440 - RNA, 19 nt, Artificial Sequence
  Description of Artificial Sequence: Synthetic oligonucleotide
  Sense strand starting at position 3672 of SEQ ID NO: 914757
gaauucuugcaagggacuu

SEQ ID NO: 1028441 - RNA, 19 nt, Artificial Sequence
  Description of Artificial Sequence: Synthetic oligonucleotide
  Antisense strand to SEQ ID NO: 1028440
aagucccuugcaagaauuc

SEQ ID NO: 1028442 - RNA, 19 nt, Artificial Sequence
  Description of Artificial Sequence: Synthetic oligonucleotide
  Sense strand starting at position 3773 of SEQ ID NO: 914757
guauuuguaguuuguagau

SEQ ID NO: 1028443 - RNA, 19 nt, Artificial Sequence
  Description of Artificial Sequence: Synthetic oligonucleotide
  Antisense strand to SEQ ID NO: 1028442
aucuacaaacuacaaauac

SEQ ID NO: 1028444 - RNA, 19 nt, Artificial Sequence
  Description of Artificial Sequence: Synthetic oligonucleotide
  Sense strand starting at position 3881 of SEQ ID NO: 914757
gucugcuuucccguuacau

SEQ ID NO: 1028445 - RNA, 19 nt, Artificial Sequence
  Description of Artificial Sequence: Synthetic oligonucleotide
  Antisense strand to SEQ ID NO: 1028444
auguaacgggaaagcagac

SEQ ID NO: 1028446 - RNA, 19 nt, Artificial Sequence
  Description of Artificial Sequence: Synthetic oligonucleotide
  Sense strand starting at position 3883 of SEQ ID NO: 914757
cugcuuucccguuacauuu

SEQ ID NO: 1028447 - RNA, 19 nt, Artificial Sequence
  Description of Artificial Sequence: Synthetic oligonucleotide
  Antisense strand to SEQ ID NO: 1028446
aaauguaacgggaaagcag

SEQ ID NO: 1028448 - RNA, 19 nt, Artificial Sequence
  Description of Artificial Sequence: Synthetic oligonucleotide
  Sense strand starting at position 3928 of SEQ ID NO: 914757
accuaauuguaacuguauu

SEQ ID NO: 1028449 - RNA, 19 nt, Artificial Sequence
  Description of Artificial Sequence: Synthetic oligonucleotide
  Antisense strand to SEQ ID NO: 1028448
aauacaguuacaauuaggu

SEQ ID NO: 1028450 - RNA, 19 nt, Artificial Sequence
  Description of Artificial Sequence: Synthetic oligonucleotide
  Sense strand starting at position 21 of SEQ ID NO: 914758
ccagcaugggcuuaucuga

SEQ ID NO: 1028451 - RNA, 19 nt, Artificial Sequence
  Description of Artificial Sequence: Synthetic oligonucleotide
  Antisense strand to SEQ ID NO: 1028450
ucagauaagcccaugcugg

SEQ ID NO: 1028452 - RNA, 19 nt, Artificial Sequence
  Description of Artificial Sequence: Synthetic oligonucleotide
  Sense strand starting at position 43 of SEQ ID NO: 914758
cugagaccuuacucaguca

SEQ ID NO: 1028453 - RNA, 19 nt, Artificial Sequence
  Description of Artificial Sequence: Synthetic oligonucleotide
  Antisense strand to SEQ ID NO: 1028452
ugacugaguaaggucucag

SEQ ID NO: 1028454 - RNA, 19 nt, Artificial Sequence
  Description of Artificial Sequence: Synthetic oligonucleotide
  Sense strand starting at position 46 of SEQ ID NO: 914758
agaccuuacucagucagaa

SEQ ID NO: 1028455 - RNA, 19 nt, Artificial Sequence
  Description of Artificial Sequence: Synthetic oligonucleotide
  Antisense strand to SEQ ID NO: 1028454
uucugacugaguaaggucu

SEQ ID NO: 1028456 - RNA, 19 nt, Artificial Sequence
  Description of Artificial Sequence: Synthetic oligonucleotide
  Sense strand starting at position 50 of SEQ ID NO: 914758
cuuacucagucagaaggaa

SEQ ID NO: 1028457 - RNA, 19 nt, Artificial Sequence
  Description of Artificial Sequence: Synthetic oligonucleotide
  Antisense strand to SEQ ID NO: 1028456
uuccuucugacugaguaag

SEQ ID NO: 1028458 - RNA, 19 nt, Artificial Sequence
  Description of Artificial Sequence: Synthetic oligonucleotide
  Sense strand starting at position 173 of SEQ ID NO: 914758
agaauaucuugccuagauc

SEQ ID NO: 1028459 - RNA, 19 nt, Artificial Sequence
  Description of Artificial Sequence: Synthetic oligonucleotide
  Antisense strand to SEQ ID NO: 1028458
gaucuaggcaagauauucu

SEQ ID NO: 1028460 - RNA, 19 nt, Artificial Sequence
  Description of Artificial Sequence: Synthetic oligonucleotide
  Sense strand starting at position 176 of SEQ ID NO: 914758
auaucuugccuagaucaga

SEQ ID NO: 1028461 - RNA, 19 nt, Artificial Sequence
  Description of Artificial Sequence: Synthetic oligonucleotide
  Antisense strand to SEQ ID NO: 1028460
ucugaucuaggcaagauau

SEQ ID NO: 1028462 - RNA, 19 nt, Artificial Sequence
  Description of Artificial Sequence: Synthetic oligonucleotide
  Sense strand starting at position 201 of SEQ ID NO: 914758
cuggaaaucccuuacagcu

SEQ ID NO: 1028463 - RNA, 19 nt, Artificial Sequence
  Description of Artificial Sequence: Synthetic oligonucleotide
  Antisense strand to SEQ ID NO: 1028462
agcuguaagggauuuccag

SEQ ID NO: 1028464 - RNA, 19 nt, Artificial Sequence
  Description of Artificial Sequence: Synthetic oligonucleotide
  Sense strand starting at position 240 of SEQ ID NO: 914758
cuaaacggccucuacaaau

SEQ ID NO: 1028465 - RNA, 19 nt, Artificial Sequence
  Description of Artificial Sequence: Synthetic oligonucleotide
  Antisense strand to SEQ ID NO: 1028464
auuuguagaggccguuuag

SEQ ID NO: 1028466 - RNA, 19 nt, Artificial Sequence
  Description of Artificial Sequence: Synthetic oligonucleotide
  Sense strand starting at position 293 of SEQ ID NO: 914758
aucugaggccuaggguaau

SEQ ID NO: 1028467 - RNA, 19 nt, Artificial Sequence
  Description of Artificial Sequence: Synthetic oligonucleotide
  Antisense strand to SEQ ID NO: 1028466
auuacccuaggccucagau

SEQ ID NO: 1028468 - RNA, 19 nt, Artificial Sequence
  Description of Artificial Sequence: Synthetic oligonucleotide
  Sense strand starting at position 508 of SEQ ID NO: 914758
ccagaauaaccacgugugu

SEQ ID NO: 1028469 - RNA, 19 nt, Artificial Sequence
  Description of Artificial Sequence: Synthetic oligonucleotide
  Antisense strand to SEQ ID NO: 1028468
acacacgugguuauucugg

SEQ ID NO: 1028470 - RNA, 19 nt, Artificial Sequence
  Description of Artificial Sequence: Synthetic oligonucleotide
  Sense strand starting at position 510 of SEQ ID NO: 914758
agaauaaccacgugugucu

SEQ ID NO: 1028471 - RNA, 19 nt, Artificial Sequence
  Description of Artificial Sequence: Synthetic oligonucleotide
  Antisense strand to SEQ ID NO: 1028470
agacacacgugguuauucu

SEQ ID NO: 1028472 - RNA, 19 nt, Artificial Sequence
  Description of Artificial Sequence: Synthetic oligonucleotide
  Sense strand starting at position 599 of SEQ ID NO: 914758
uggcaacuaacgugcuauu

SEQ ID NO: 1028473 - RNA, 19 nt, Artificial Sequence
  Description of Artificial Sequence: Synthetic oligonucleotide
  Antisense strand to SEQ ID NO: 1028472
aauagcacguuaguugcca

SEQ ID NO: 1028474 - RNA, 19 nt, Artificial Sequence
  Description of Artificial Sequence: Synthetic oligonucleotide
  Sense strand starting at position 608 of SEQ ID NO: 914758
acgugcuauuaguuaaguu

SEQ ID NO: 1028475 - RNA, 19 nt, Artificial Sequence
  Description of Artificial Sequence: Synthetic oligonucleotide
  Antisense strand to SEQ ID NO: 1028474
aacuuaacuaauagcacgu

SEQ ID NO: 1028476 - RNA, 19 nt, Artificial Sequence
  Description of Artificial Sequence: Synthetic oligonucleotide
  Sense strand starting at position 609 of SEQ ID NO: 914758
cgugcuauuaguuaaguuu

SEQ ID NO: 1028477 - RNA, 19 nt, Artificial Sequence
  Description of Artificial Sequence: Synthetic oligonucleotide
  Antisense strand to SEQ ID NO: 1028476
aaacuuaacuaauagcacg

SEQ ID NO: 1028478 - RNA, 19 nt, Artificial Sequence
  Description of Artificial Sequence: Synthetic oligonucleotide
  Sense strand starting at position 627 of SEQ ID NO: 914758
uucucauguggccagguau

SEQ ID NO: 1028479 - RNA, 19 nt, Artificial Sequence
  Description of Artificial Sequence: Synthetic oligonucleotide
  Antisense strand to SEQ ID NO: 1028478
auaccuggccacaugagaa

SEQ ID NO: 1028480 - RNA, 19 nt, Artificial Sequence
  Description of Artificial Sequence: Synthetic oligonucleotide
  Sense strand starting at position 640 of SEQ ID NO: 914758
agguauuaccucugaauua

SEQ ID NO: 1028481 - RNA, 19 nt, Artificial Sequence
  Description of Artificial Sequence: Synthetic oligonucleotide
  Antisense strand to SEQ ID NO: 1028480
uaauucagagguaauaccu

SEQ ID NO: 1028482 - RNA, 19 nt, Artificial Sequence
  Description of Artificial Sequence: Synthetic oligonucleotide
  Sense strand starting at position 641 of SEQ ID NO: 914758
gguauuaccucugaauuau

SEQ ID NO: 1028483 - RNA, 19 nt, Artificial Sequence
  Description of Artificial Sequence: Synthetic oligonucleotide
  Antisense strand to SEQ ID NO: 1028482
auaauucagagguaauacc

SEQ ID NO: 1028484 - RNA, 19 nt, Artificial Sequence
  Description of Artificial Sequence: Synthetic oligonucleotide
  Sense strand starting at position 827 of SEQ ID NO: 914758
ucuguuguaccucguacaa

SEQ ID NO: 1028485 - RNA, 19 nt, Artificial Sequence
  Description of Artificial Sequence: Synthetic oligonucleotide
  Antisense strand to SEQ ID NO: 1028484
uuguacgagguacaacaga

SEQ ID NO: 1028486 - RNA, 19 nt, Artificial Sequence
  Description of Artificial Sequence: Synthetic oligonucleotide
  Sense strand starting at position 831 of SEQ ID NO: 914758
uuguaccucguacaauauu

SEQ ID NO: 1028487 - RNA, 19 nt, Artificial Sequence
  Description of Artificial Sequence: Synthetic oligonucleotide
  Antisense strand to SEQ ID NO: 1028486
aauauuguacgagguacaa

SEQ ID NO: 1028488 - RNA, 19 nt, Artificial Sequence
  Description of Artificial Sequence: Synthetic oligonucleotide
  Sense strand starting at position 898 of SEQ ID NO: 914758
agaacaagauuggguuauu

SEQ ID NO: 1028489 - RNA, 19 nt, Artificial Sequence
  Description of Artificial Sequence: Synthetic oligonucleotide
  Antisense strand to SEQ ID NO: 1028488
aauaacccaaucuuguucu

SEQ ID NO: 1028490 - RNA, 19 nt, Artificial Sequence
  Description of Artificial Sequence: Synthetic oligonucleotide
  Sense strand starting at position 961 of SEQ ID NO: 914758
acccuuucucccgguuuaa

SEQ ID NO: 1028491 - RNA, 19 nt, Artificial Sequence
  Description of Artificial Sequence: Synthetic oligonucleotide
  Antisense strand to SEQ ID NO: 1028490
uuaaaccgggagaaagggu

SEQ ID NO: 1028492 - RNA, 19 nt, Artificial Sequence
  Description of Artificial Sequence: Synthetic oligonucleotide
  Sense strand starting at position 965 of SEQ ID NO: 914758
uuucucccgguuuaauaaa

SEQ ID NO: 1028493 - RNA, 19 nt, Artificial Sequence
  Description of Artificial Sequence: Synthetic oligonucleotide
  Antisense strand to SEQ ID NO: 1028492
uuuauuaaaccgggagaaa

SEQ ID NO: 1028494 - RNA, 19 nt, Artificial Sequence
  Description of Artificial Sequence: Synthetic oligonucleotide
  Sense strand starting at position 1116 of SEQ ID NO: 914758
gucaguaucuuugcagcca

SEQ ID NO: 1028495 - RNA, 19 nt, Artificial Sequence
  Description of Artificial Sequence: Synthetic oligonucleotide
  Antisense strand to SEQ ID NO: 1028494
uggcugcaaagauacugac

SEQ ID NO: 1028496 - RNA, 19 nt, Artificial Sequence
  Description of Artificial Sequence: Synthetic oligonucleotide
  Sense strand starting at position 1137 of SEQ ID NO: 914758
uagcucugguucuuagagu

SEQ ID NO: 1028497 - RNA, 19 nt, Artificial Sequence
  Description of Artificial Sequence: Synthetic oligonucleotide
  Antisense strand to SEQ ID NO: 1028496
acucuaagaaccagagcua

SEQ ID NO: 1028498 - RNA, 19 nt, Artificial Sequence
  Description of Artificial Sequence: Synthetic oligonucleotide
  Sense strand starting at position 2233 of SEQ ID NO: 914758
gggcgaguugccagaguaa

SEQ ID NO: 1028499 - RNA, 19 nt, Artificial Sequence
  Description of Artificial Sequence: Synthetic oligonucleotide
  Antisense strand to SEQ ID NO: 1028498
uuacucuggcaacucgccc

SEQ ID NO: 1028500 - RNA, 19 nt, Artificial Sequence
  Description of Artificial Sequence: Synthetic oligonucleotide
  Sense strand starting at position 2344 of SEQ ID NO: 914758
gccacuccuccgggacauu

SEQ ID NO: 1028501 - RNA, 19 nt, Artificial Sequence
  Description of Artificial Sequence: Synthetic oligonucleotide
  Antisense strand to SEQ ID NO: 1028500
aaugucccggaggaguggc

SEQ ID NO: 1028502 - RNA, 19 nt, Artificial Sequence
  Description of Artificial Sequence: Synthetic oligonucleotide
  Sense strand starting at position 2474 of SEQ ID NO: 914758
ccuccuccgcgaugggaaa

SEQ ID NO: 1028503 - RNA, 19 nt, Artificial Sequence
  Description of Artificial Sequence: Synthetic oligonucleotide
  Antisense strand to SEQ ID NO: 1028502
uuucccaucgcggaggagg

SEQ ID NO: 1028504 - RNA, 19 nt, Artificial Sequence
  Description of Artificial Sequence: Synthetic oligonucleotide
  Sense strand starting at position 2711 of SEQ ID NO: 914758
cccugagugccacaucuaa

SEQ ID NO: 1028505 - RNA, 19 nt, Artificial Sequence
  Description of Artificial Sequence: Synthetic oligonucleotide
  Antisense strand to SEQ ID NO: 1028504
uuagauguggcacucaggg

SEQ ID NO: 1028506 - RNA, 19 nt, Artificial Sequence
  Description of Artificial Sequence: Synthetic oligonucleotide
  Sense strand starting at position 2875 of SEQ ID NO: 914758
uggccuagguugguuuaaa

SEQ ID NO: 1028507 - RNA, 19 nt, Artificial Sequence
  Description of Artificial Sequence: Synthetic oligonucleotide
  Antisense strand to SEQ ID NO: 1028506
uuuaaaccaaccuaggcca

SEQ ID NO: 1028508 - RNA, 19 nt, Artificial Sequence
  Description of Artificial Sequence: Synthetic oligonucleotide
  Sense strand starting at position 3010 of SEQ ID NO: 914758
uagggauuguuucucucuu

SEQ ID NO: 1028509 - RNA, 19 nt, Artificial Sequence
  Description of Artificial Sequence: Synthetic oligonucleotide
  Antisense strand to SEQ ID NO: 1028508
aagagagaaacaaucccua

SEQ ID NO: 1028510 - RNA, 19 nt, Artificial Sequence
  Description of Artificial Sequence: Synthetic oligonucleotide
  Sense strand starting at position 3011 of SEQ ID NO: 914758
agggauuguuucucucuuu

SEQ ID NO: 1028511 - RNA, 19 nt, Artificial Sequence
  Description of Artificial Sequence: Synthetic oligonucleotide
  Antisense strand to SEQ ID NO: 1028510
aaagagagaaacaaucccu

SEQ ID NO: 1028512 - RNA, 19 nt, Artificial Sequence
  Description of Artificial Sequence: Synthetic oligonucleotide
  Sense strand starting at position 3169 of SEQ ID NO: 914758
gcuaguauccuaggagaug

SEQ ID NO: 1028513 - RNA, 19 nt, Artificial Sequence
  Description of Artificial Sequence: Synthetic oligonucleotide
  Antisense strand to SEQ ID NO: 1028512
caucuccuaggauacuagc

SEQ ID NO: 1028514 - RNA, 19 nt, Artificial Sequence
  Description of Artificial Sequence: Synthetic oligonucleotide
  Sense strand starting at position 3257 of SEQ ID NO: 914758
cacugcgaguaugucuaau

SEQ ID NO: 1028515 - RNA, 19 nt, Artificial Sequence
  Description of Artificial Sequence: Synthetic oligonucleotide
  Antisense strand to SEQ ID NO: 1028514
auuagacauacucgcagug

SEQ ID NO: 1028516 - RNA, 19 nt, Artificial Sequence
  Description of Artificial Sequence: Synthetic oligonucleotide
  Sense strand starting at position 3259 of SEQ ID NO: 914758
cugcgaguaugucuaauag

SEQ ID NO: 1028517 - RNA, 19 nt, Artificial Sequence
  Description of Artificial Sequence: Synthetic oligonucleotide
  Antisense strand to SEQ ID NO: 1028516
cuauuagacauacucgcag

SEQ ID NO: 1028518 - RNA, 19 nt, Artificial Sequence
  Description of Artificial Sequence: Synthetic oligonucleotide
  Sense strand starting at position 3263 of SEQ ID NO: 914758
gaguaugucuaauagagaa

SEQ ID NO: 1028519 - RNA, 19 nt, Artificial Sequence
  Description of Artificial Sequence: Synthetic oligonucleotide
  Antisense strand to SEQ ID NO: 1028518
uucucuauuagacauacuc

SEQ ID NO: 1028520 - RNA, 19 nt, Artificial Sequence
  Description of Artificial Sequence: Synthetic oligonucleotide
  Sense strand starting at position 3602 of SEQ ID NO: 914758
cuaaguccuguggguucua

SEQ ID NO: 1028521 - RNA, 19 nt, Artificial Sequence
  Description of Artificial Sequence: Synthetic oligonucleotide
  Antisense strand to SEQ ID NO: 1028520
uagaacccacaggacuuag

SEQ ID NO: 1028522 - RNA, 19 nt, Artificial Sequence
  Description of Artificial Sequence: Synthetic oligonucleotide
  Sense strand starting at position 3614 of SEQ ID NO: 914758
gguucuaccuucuagaaag

SEQ ID NO: 1028523 - RNA, 19 nt, Artificial Sequence
  Description of Artificial Sequence: Synthetic oligonucleotide
  Antisense strand to SEQ ID NO: 1028522
cuuucuagaagguagaacc

SEQ ID NO: 1028524 - RNA, 19 nt, Artificial Sequence
  Description of Artificial Sequence: Synthetic oligonucleotide
  Sense strand starting at position 3741 of SEQ ID NO: 914758
gcacccuuagccugguaua

SEQ ID NO: 1028525 - RNA, 19 nt, Artificial Sequence
  Description of Artificial Sequence: Synthetic oligonucleotide
  Antisense strand to SEQ ID NO: 1028524
uauaccaggcuaagggugc

SEQ ID NO: 1028526 - RNA, 19 nt, Artificial Sequence
  Description of Artificial Sequence: Synthetic oligonucleotide
  Sense strand starting at position 3931 of SEQ ID NO: 914758
ucugguugguuccuuuaca

SEQ ID NO: 1028527 - RNA, 19 nt, Artificial Sequence
  Description of Artificial Sequence: Synthetic oligonucleotide
  Antisense strand to SEQ ID NO: 1028526
uguaaaggaaccaaccaga

SEQ ID NO: 1028528 - RNA, 19 nt, Artificial Sequence
  Description of Artificial Sequence: Synthetic oligonucleotide
  Sense strand starting at position 3932 of SEQ ID NO: 914758
cugguugguuccuuuacau

SEQ ID NO: 1028529 - RNA, 19 nt, Artificial Sequence
  Description of Artificial Sequence: Synthetic oligonucleotide
  Antisense strand to SEQ ID NO: 1028528
auguaaaggaaccaaccag

SEQ ID NO: 1028530 - RNA, 19 nt, Artificial Sequence
  Description of Artificial Sequence: Synthetic oligonucleotide
  Sense strand starting at position 127 of SEQ ID NO: 914759
cuguaaugugugcauauua

SEQ ID NO: 1028531 - RNA, 19 nt, Artificial Sequence
  Description of Artificial Sequence: Synthetic oligonucleotide
  Antisense strand to SEQ ID NO: 1028530
uaauaugcacacauuacag

SEQ ID NO: 1028532 - RNA, 19 nt, Artificial Sequence
  Description of Artificial Sequence: Synthetic oligonucleotide
  Sense strand starting at position 161 of SEQ ID NO: 914759
gggucgugaccuugaggaa

SEQ ID NO: 1028533 - RNA, 19 nt, Artificial Sequence
  Description of Artificial Sequence: Synthetic oligonucleotide
  Antisense strand to SEQ ID NO: 1028532
uuccucaaggucacgaccc

SEQ ID NO: 1028534 - RNA, 19 nt, Artificial Sequence
  Description of Artificial Sequence: Synthetic oligonucleotide
  Sense strand starting at position 162 of SEQ ID NO: 914759
ggucgugaccuugaggaac

SEQ ID NO: 1028535 - RNA, 19 nt, Artificial Sequence
  Description of Artificial Sequence: Synthetic oligonucleotide
  Antisense strand to SEQ ID NO: 1028534
guuccucaaggucacgacc

SEQ ID NO: 1028536 - RNA, 19 nt, Artificial Sequence
  Description of Artificial Sequence: Synthetic oligonucleotide
  Sense strand starting at position 181 of SEQ ID NO: 914759
acaucuggccagugagaaa

SEQ ID NO: 1028537 - RNA, 19 nt, Artificial Sequence
  Description of Artificial Sequence: Synthetic oligonucleotide
  Antisense strand to SEQ ID NO: 1028536
uuucucacuggccagaugu

SEQ ID NO: 1028538 - RNA, 19 nt, Artificial Sequence
  Description of Artificial Sequence: Synthetic oligonucleotide
  Sense strand starting at position 260 of SEQ ID NO: 914759
gaugacgcccaguggaauu

SEQ ID NO: 1028539 - RNA, 19 nt, Artificial Sequence
  Description of Artificial Sequence: Synthetic oligonucleotide
  Antisense strand to SEQ ID NO: 1028538
aauuccacugggcgucauc

SEQ ID NO: 1028540 - RNA, 19 nt, Artificial Sequence
  Description of Artificial Sequence: Synthetic oligonucleotide
  Sense strand starting at position 462 of SEQ ID NO: 914759
cuagaagugucacuaccaa

SEQ ID NO: 1028541 - RNA, 19 nt, Artificial Sequence
  Description of Artificial Sequence: Synthetic oligonucleotide
  Antisense strand to SEQ ID NO: 1028540
uugguagugacacuucuag

SEQ ID NO: 1028542 - RNA, 19 nt, Artificial Sequence
  Description of Artificial Sequence: Synthetic oligonucleotide
  Sense strand starting at position 706 of SEQ ID NO: 914759
guggcaucaccagacaaca

SEQ ID NO: 1028543 - RNA, 19 nt, Artificial Sequence
  Description of Artificial Sequence: Synthetic oligonucleotide
  Antisense strand to SEQ ID NO: 1028542
uguugucuggugaugccac

SEQ ID NO: 1028544 - RNA, 19 nt, Artificial Sequence
  Description of Artificial Sequence: Synthetic oligonucleotide
  Sense strand starting at position 741 of SEQ ID NO: 914759
ggcagcaucaaguacagau

SEQ ID NO: 1028545 - RNA, 19 nt, Artificial Sequence
  Description of Artificial Sequence: Synthetic oligonucleotide
  Antisense strand to SEQ ID NO: 1028544
aucuguacuugaugcugcc

SEQ ID NO: 1028546 - RNA, 19 nt, Artificial Sequence
  Description of Artificial Sequence: Synthetic oligonucleotide
  Sense strand starting at position 1123 of SEQ ID NO: 914759
cauugcaggucucuagagu

SEQ ID NO: 1028547 - RNA, 19 nt, Artificial Sequence
  Description of Artificial Sequence: Synthetic oligonucleotide
  Antisense strand to SEQ ID NO: 1028546
acucuagagaccugcaaug

SEQ ID NO: 1028548 - RNA, 19 nt, Artificial Sequence
  Description of Artificial Sequence: Synthetic oligonucleotide
  Sense strand starting at position 1124 of SEQ ID NO: 914759
auugcaggucucuagaguu

SEQ ID NO: 1028549 - RNA, 19 nt, Artificial Sequence
  Description of Artificial Sequence: Synthetic oligonucleotide
  Antisense strand to SEQ ID NO: 1028548
aacucuagagaccugcaau

SEQ ID NO: 1028550 - RNA, 19 nt, Artificial Sequence
  Description of Artificial Sequence: Synthetic oligonucleotide
  Sense strand starting at position 1210 of SEQ ID NO: 914759
aggaucauuucugauagga

SEQ ID NO: 1028551 - RNA, 19 nt, Artificial Sequence
  Description of Artificial Sequence: Synthetic oligonucleotide
  Antisense strand to SEQ ID NO: 1028550
uccuaucagaaaugauccu

SEQ ID NO: 1028552 - RNA, 19 nt, Artificial Sequence
  Description of Artificial Sequence: Synthetic oligonucleotide
  Sense strand starting at position 1212 of SEQ ID NO: 914759
gaucauuucugauaggacg

SEQ ID NO: 1028553 - RNA, 19 nt, Artificial Sequence
  Description of Artificial Sequence: Synthetic oligonucleotide
  Antisense strand to SEQ ID NO: 1028552
cguccuaucagaaaugauc

SEQ ID NO: 1028554 - RNA, 19 nt, Artificial Sequence
  Description of Artificial Sequence: Synthetic oligonucleotide
  Sense strand starting at position 2506 of SEQ ID NO: 914759
ccugguggcauucgggaaa

SEQ ID NO: 1028555 - RNA, 19 nt, Artificial Sequence
  Description of Artificial Sequence: Synthetic oligonucleotide
  Antisense strand to SEQ ID NO: 1028554
uuucccgaaugccaccagg

SEQ ID NO: 1028556 - RNA, 19 nt, Artificial Sequence
  Description of Artificial Sequence: Synthetic oligonucleotide
  Sense strand starting at position 2593 of SEQ ID NO: 914759
ggagguuucaugggacgag

SEQ ID NO: 1028557 - RNA, 19 nt, Artificial Sequence
  Description of Artificial Sequence: Synthetic oligonucleotide
  Antisense strand to SEQ ID NO: 1028556
cucgucccaugaaaccucc

SEQ ID NO: 1028558 - RNA, 19 nt, Artificial Sequence
  Description of Artificial Sequence: Synthetic oligonucleotide
  Sense strand starting at position 2596 of SEQ ID NO: 914759
gguuucaugggacgagaca

SEQ ID NO: 1028559 - RNA, 19 nt, Artificial Sequence
  Description of Artificial Sequence: Synthetic oligonucleotide
  Antisense strand to SEQ ID NO: 1028558
ugucucgucccaugaaacc

SEQ ID NO: 1028560 - RNA, 19 nt, Artificial Sequence
  Description of Artificial Sequence: Synthetic oligonucleotide
  Sense strand starting at position 2656 of SEQ ID NO: 914759
ggagucauuccagagcacu

SEQ ID NO: 1028561 - RNA, 19 nt, Artificial Sequence
  Description of Artificial Sequence: Synthetic oligonucleotide
  Antisense strand to SEQ ID NO: 1028560
agugcucuggaaugacucc

SEQ ID NO: 1028562 - RNA, 19 nt, Artificial Sequence
  Description of Artificial Sequence: Synthetic oligonucleotide
  Sense strand starting at position 2662 of SEQ ID NO: 914759
auuccagagcacuguugua

SEQ ID NO: 1028563 - RNA, 19 nt, Artificial Sequence
  Description of Artificial Sequence: Synthetic oligonucleotide
  Antisense strand to SEQ ID NO: 1028562
uacaacagugcucuggaau

SEQ ID NO: 1028564 - RNA, 19 nt, Artificial Sequence
  Description of Artificial Sequence: Synthetic oligonucleotide
  Sense strand starting at position 2703 of SEQ ID NO: 914759
aucucauguuacgcaugaa

SEQ ID NO: 1028565 - RNA, 19 nt, Artificial Sequence
  Description of Artificial Sequence: Synthetic oligonucleotide
  Antisense strand to SEQ ID NO: 1028564
uucaugcguaacaugagau

SEQ ID NO: 1028566 - RNA, 19 nt, Artificial Sequence
  Description of Artificial Sequence: Synthetic oligonucleotide
  Sense strand starting at position 2704 of SEQ ID NO: 914759
ucucauguuacgcaugaag

SEQ ID NO: 1028567 - RNA, 19 nt, Artificial Sequence
  Description of Artificial Sequence: Synthetic oligonucleotide
  Antisense strand to SEQ ID NO: 1028566
cuucaugcguaacaugaga

SEQ ID NO: 1028568 - RNA, 19 nt, Artificial Sequence
  Description of Artificial Sequence: Synthetic oligonucleotide
  Sense strand starting at position 2706 of SEQ ID NO: 914759
ucauguuacgcaugaagau

SEQ ID NO: 1028569 - RNA, 19 nt, Artificial Sequence
  Description of Artificial Sequence: Synthetic oligonucleotide
  Antisense strand to SEQ ID NO: 1028568
aucuucaugcguaacauga

SEQ ID NO: 1028570 - RNA, 19 nt, Artificial Sequence
  Description of Artificial Sequence: Synthetic oligonucleotide
  Sense strand starting at position 2707 of SEQ ID NO: 914759
cauguuacgcaugaagauc

SEQ ID NO: 1028571 - RNA, 19 nt, Artificial Sequence
  Description of Artificial Sequence: Synthetic oligonucleotide
  Antisense strand to SEQ ID NO: 1028570
gaucuucaugcguaacaug

SEQ ID NO: 1028572 - RNA, 19 nt, Artificial Sequence
  Description of Artificial Sequence: Synthetic oligonucleotide
  Sense strand starting at position 3066 of SEQ ID NO: 914759
ucauuaagcucucugugaa

SEQ ID NO: 1028573 - RNA, 19 nt, Artificial Sequence
  Description of Artificial Sequence: Synthetic oligonucleotide
  Antisense strand to SEQ ID NO: 1028572
uucacagagagcuuaauga

SEQ ID NO: 1028574 - RNA, 19 nt, Artificial Sequence
  Description of Artificial Sequence: Synthetic oligonucleotide
  Sense strand starting at position 3067 of SEQ ID NO: 914759
cauuaagcucucugugaag

SEQ ID NO: 1028575 - RNA, 19 nt, Artificial Sequence
  Description of Artificial Sequence: Synthetic oligonucleotide
  Antisense strand to SEQ ID NO: 1028574
cuucacagagagcuuaaug

SEQ ID NO: 1028576 - RNA, 19 nt, Artificial Sequence
  Description of Artificial Sequence: Synthetic oligonucleotide
  Sense strand starting at position 3079 of SEQ ID NO: 914759
ugugaaggguuuguucaca

SEQ ID NO: 1028577 - RNA, 19 nt, Artificial Sequence
  Description of Artificial Sequence: Synthetic oligonucleotide
  Antisense strand to SEQ ID NO: 1028576
ugugaacaaacccuucaca

SEQ ID NO: 1028578 - RNA, 19 nt, Artificial Sequence
  Description of Artificial Sequence: Synthetic oligonucleotide
  Sense strand starting at position 3125 of SEQ ID NO: 914759
aggcauacuaucgggacua

SEQ ID NO: 1028579 - RNA, 19 nt, Artificial Sequence
  Description of Artificial Sequence: Synthetic oligonucleotide
  Antisense strand to SEQ ID NO: 1028578
uagucccgauaguaugccu

SEQ ID NO: 1028580 - RNA, 19 nt, Artificial Sequence
  Description of Artificial Sequence: Synthetic oligonucleotide
  Sense strand starting at position 3127 of SEQ ID NO: 914759
gcauacuaucgggacuaua

SEQ ID NO: 1028581 - RNA, 19 nt, Artificial Sequence
  Description of Artificial Sequence: Synthetic oligonucleotide
  Antisense strand to SEQ ID NO: 1028580
uauagucccgauaguaugc

SEQ ID NO: 1028582 - RNA, 19 nt, Artificial Sequence
  Description of Artificial Sequence: Synthetic oligonucleotide
  Sense strand starting at position 3260 of SEQ ID NO: 914759
ggaugaaugccauaugcga

SEQ ID NO: 1028583 - RNA, 19 nt, Artificial Sequence
  Description of Artificial Sequence: Synthetic oligonucleotide
  Antisense strand to SEQ ID NO: 1028582
ucgcauauggcauucaucc

SEQ ID NO: 1028584 - RNA, 19 nt, Artificial Sequence
  Description of Artificial Sequence: Synthetic oligonucleotide
  Sense strand starting at position 3319 of SEQ ID NO: 914759
acuguuugccaagacuaua

SEQ ID NO: 1028585 - RNA, 19 nt, Artificial Sequence
  Description of Artificial Sequence: Synthetic oligonucleotide
  Antisense strand to SEQ ID NO: 1028584
uauagucuuggcaaacagu

SEQ ID NO: 1028586 - RNA, 19 nt, Artificial Sequence
  Description of Artificial Sequence: Synthetic oligonucleotide
  Sense strand starting at position 3344 of SEQ ID NO: 914759
acacaagugugauucccaa

SEQ ID NO: 1028587 - RNA, 19 nt, Artificial Sequence
  Description of Artificial Sequence: Synthetic oligonucleotide
  Antisense strand to SEQ ID NO: 1028586
uugggaaucacacuugugu

SEQ ID NO: 1028588 - RNA, 19 nt, Artificial Sequence
  Description of Artificial Sequence: Synthetic oligonucleotide
  Sense strand starting at position 3381 of SEQ ID NO: 914759
agguguugaggugacacua

SEQ ID NO: 1028589 - RNA, 19 nt, Artificial Sequence
  Description of Artificial Sequence: Synthetic oligonucleotide
  Antisense strand to SEQ ID NO: 1028588
uagugucaccucaacaccu

SEQ ID NO: 1028590 - RNA, 19 nt, Artificial Sequence
  Description of Artificial Sequence: Synthetic oligonucleotide
  Sense strand starting at position 3389 of SEQ ID NO: 914759
aggugacacuagucccauu

SEQ ID NO: 1028591 - RNA, 19 nt, Artificial Sequence
  Description of Artificial Sequence: Synthetic oligonucleotide
  Antisense strand to SEQ ID NO: 1028590
aaugggacuagugucaccu

SEQ ID NO: 1028592 - RNA, 19 nt, Artificial Sequence
  Description of Artificial Sequence: Synthetic oligonucleotide
  Sense strand starting at position 3415 of SEQ ID NO: 914759
ggauguuaaaccuguuaag

SEQ ID NO: 1028593 - RNA, 19 nt, Artificial Sequence
  Description of Artificial Sequence: Synthetic oligonucleotide
  Antisense strand to SEQ ID NO: 1028592
cuuaacagguuuaacaucc

SEQ ID NO: 1028594 - RNA, 19 nt, Artificial Sequence
  Description of Artificial Sequence: Synthetic oligonucleotide
  Sense strand starting at position 3445 of SEQ ID NO: 914759
ccuguaagccagugacaca

SEQ ID NO: 1028595 - RNA, 19 nt, Artificial Sequence
  Description of Artificial Sequence: Synthetic oligonucleotide
  Antisense strand to SEQ ID NO: 1028594
ugugucacuggcuuacagg

SEQ ID NO: 1028596 - RNA, 19 nt, Artificial Sequence
  Description of Artificial Sequence: Synthetic oligonucleotide
  Sense strand starting at position 3535 of SEQ ID NO: 914759
gcagcauaagccuagcaga

SEQ ID NO: 1028597 - RNA, 19 nt, Artificial Sequence
  Description of Artificial Sequence: Synthetic oligonucleotide
  Antisense strand to SEQ ID NO: 1028596
ucugcuaggcuuaugcugc

SEQ ID NO: 1028598 - RNA, 19 nt, Artificial Sequence
  Description of Artificial Sequence: Synthetic oligonucleotide
  Sense strand starting at position 3588 of SEQ ID NO: 914759
cugugaucccagcaagcga

SEQ ID NO: 1028599 - RNA, 19 nt, Artificial Sequence
  Description of Artificial Sequence: Synthetic oligonucleotide
  Antisense strand to SEQ ID NO: 1028598
ucgcuugcugggaucacag

SEQ ID NO: 1028600 - RNA, 19 nt, Artificial Sequence
  Description of Artificial Sequence: Synthetic oligonucleotide
  Sense strand starting at position 3748 of SEQ ID NO: 914759
cagagaggcuuauuaagug

SEQ ID NO: 1028601 - RNA, 19 nt, Artificial Sequence
  Description of Artificial Sequence: Synthetic oligonucleotide
  Antisense strand to SEQ ID NO: 1028600
cacuuaauaagccucucug

SEQ ID NO: 1028602 - RNA, 19 nt, Artificial Sequence
  Description of Artificial Sequence: Synthetic oligonucleotide
  Sense strand starting at position 3756 of SEQ ID NO: 914759
cuuauuaaguguuuggaaa

SEQ ID NO: 1028603 - RNA, 19 nt, Artificial Sequence
  Description of Artificial Sequence: Synthetic oligonucleotide
  Antisense strand to SEQ ID NO: 1028602
uuuccaaacacuuaauaag

SEQ ID NO: 1028604 - RNA, 19 nt, Artificial Sequence
  Description of Artificial Sequence: Synthetic oligonucleotide
  Sense strand starting at position 3757 of SEQ ID NO: 914759
uuauuaaguguuuggaaag

SEQ ID NO: 1028605 - RNA, 19 nt, Artificial Sequence
  Description of Artificial Sequence: Synthetic oligonucleotide
  Antisense strand to SEQ ID NO: 1028604
cuuuccaaacacuuaauaa

SEQ ID NO: 1028606 - RNA, 19 nt, Artificial Sequence
  Description of Artificial Sequence: Synthetic oligonucleotide
  Sense strand starting at position 3879 of SEQ ID NO: 914759
ugcugauggcucuggagau

SEQ ID NO: 1028607 - RNA, 19 nt, Artificial Sequence
  Description of Artificial Sequence: Synthetic oligonucleotide
  Antisense strand to SEQ ID NO: 1028606
aucuccagagccaucagca

SEQ ID NO: 1028608 - RNA, 19 nt, Artificial Sequence
  Description of Artificial Sequence: Synthetic oligonucleotide
  Sense strand starting at position 3935 of SEQ ID NO: 914759
cccuucuugcaagaauggu

SEQ ID NO: 1028609 - RNA, 19 nt, Artificial Sequence
  Description of Artificial Sequence: Synthetic oligonucleotide
  Antisense strand to SEQ ID NO: 1028608
accauucuugcaagaaggg

SEQ ID NO: 1028610 - RNA, 19 nt, Artificial Sequence
  Description of Artificial Sequence: Synthetic oligonucleotide
  Sense strand starting at position 35 of SEQ ID NO: 914760
ugugucuaccuauggaaga

SEQ ID NO: 1028611 - RNA, 19 nt, Artificial Sequence
  Description of Artificial Sequence: Synthetic oligonucleotide
  Antisense strand to SEQ ID NO: 1028610
ucuuccauagguagacaca

SEQ ID NO: 1028612 - RNA, 19 nt, Artificial Sequence
  Description of Artificial Sequence: Synthetic oligonucleotide
  Sense strand starting at position 239 of SEQ ID NO: 914760
ucauguggaguguaaauga

SEQ ID NO: 1028613 - RNA, 19 nt, Artificial Sequence
  Description of Artificial Sequence: Synthetic oligonucleotide
  Antisense strand to SEQ ID NO: 1028612
ucauuuacacuccacauga

SEQ ID NO: 1028614 - RNA, 19 nt, Artificial Sequence
  Description of Artificial Sequence: Synthetic oligonucleotide
  Sense strand starting at position 329 of SEQ ID NO: 914760
cuugaaagaucuguccaga

SEQ ID NO: 1028615 - RNA, 19 nt, Artificial Sequence
  Description of Artificial Sequence: Synthetic oligonucleotide
  Antisense strand to SEQ ID NO: 1028614
ucuggacagaucuuucaag

SEQ ID NO: 1028616 - RNA, 19 nt, Artificial Sequence
  Description of Artificial Sequence: Synthetic oligonucleotide
  Sense strand starting at position 503 of SEQ ID NO: 914760
uucuuacauguguaauuac

SEQ ID NO: 1028617 - RNA, 19 nt, Artificial Sequence
  Description of Artificial Sequence: Synthetic oligonucleotide
  Antisense strand to SEQ ID NO: 1028616
guaauuacacauguaagaa

SEQ ID NO: 1028618 - RNA, 19 nt, Artificial Sequence
  Description of Artificial Sequence: Synthetic oligonucleotide
  Sense strand starting at position 512 of SEQ ID NO: 914760
guguaauuacauugaggua

SEQ ID NO: 1028619 - RNA, 19 nt, Artificial Sequence
  Description of Artificial Sequence: Synthetic oligonucleotide
  Antisense strand to SEQ ID NO: 1028618
uaccucaauguaauuacac

SEQ ID NO: 1028620 - RNA, 19 nt, Artificial Sequence
  Description of Artificial Sequence: Synthetic oligonucleotide
  Sense strand starting at position 545 of SEQ ID NO: 914760
ggaggaaacucccugcacu

SEQ ID NO: 1028621 - RNA, 19 nt, Artificial Sequence
  Description of Artificial Sequence: Synthetic oligonucleotide
  Antisense strand to SEQ ID NO: 1028620
agugcagggaguuuccucc

SEQ ID NO: 1028622 - RNA, 19 nt, Artificial Sequence
  Description of Artificial Sequence: Synthetic oligonucleotide
  Sense strand starting at position 600 of SEQ ID NO: 914760
gguagcauaccugaacacu

SEQ ID NO: 1028623 - RNA, 19 nt, Artificial Sequence
  Description of Artificial Sequence: Synthetic oligonucleotide
  Antisense strand to SEQ ID NO: 1028622
aguguucagguaugcuacc

SEQ ID NO: 1028624 - RNA, 19 nt, Artificial Sequence
  Description of Artificial Sequence: Synthetic oligonucleotide
  Sense strand starting at position 673 of SEQ ID NO: 914760
uuaugucccacuggaggaa

SEQ ID NO: 1028625 - RNA, 19 nt, Artificial Sequence
  Description of Artificial Sequence: Synthetic oligonucleotide
  Antisense strand to SEQ ID NO: 1028624
uuccuccagugggacauaa

SEQ ID NO: 1028626 - RNA, 19 nt, Artificial Sequence
  Description of Artificial Sequence: Synthetic oligonucleotide
  Sense strand starting at position 738 of SEQ ID NO: 914760
gccagugcccaggauuaga

SEQ ID NO: 1028627 - RNA, 19 nt, Artificial Sequence
  Description of Artificial Sequence: Synthetic oligonucleotide
  Antisense strand to SEQ ID NO: 1028626
ucuaauccugggcacuggc

SEQ ID NO: 1028628 - RNA, 19 nt, Artificial Sequence
  Description of Artificial Sequence: Synthetic oligonucleotide
  Sense strand starting at position 772 of SEQ ID NO: 914760
uagcuuuguccugagaaac

SEQ ID NO: 1028629 - RNA, 19 nt, Artificial Sequence
  Description of Artificial Sequence: Synthetic oligonucleotide
  Antisense strand to SEQ ID NO: 1028628
guuucucaggacaaagcua

SEQ ID NO: 1028630 - RNA, 19 nt, Artificial Sequence
  Description of Artificial Sequence: Synthetic oligonucleotide
  Sense strand starting at position 807 of SEQ ID NO: 914760
ccauguagcgaauggagaa

SEQ ID NO: 1028631 - RNA, 19 nt, Artificial Sequence
  Description of Artificial Sequence: Synthetic oligonucleotide
  Antisense strand to SEQ ID NO: 1028630
uucuccauucgcuacaugg

SEQ ID NO: 1028632 - RNA, 19 nt, Artificial Sequence
  Description of Artificial Sequence: Synthetic oligonucleotide
  Sense strand starting at position 851 of SEQ ID NO: 914760
cucacuggucuguaucaau

SEQ ID NO: 1028633 - RNA, 19 nt, Artificial Sequence
  Description of Artificial Sequence: Synthetic oligonucleotide
  Antisense strand to SEQ ID NO: 1028632
auugauacagaccagugag

SEQ ID NO: 1028634 - RNA, 19 nt, Artificial Sequence
  Description of Artificial Sequence: Synthetic oligonucleotide
  Sense strand starting at position 917 of SEQ ID NO: 914760
auguuaacaguccagcuaa

SEQ ID NO: 1028635 - RNA, 19 nt, Artificial Sequence
  Description of Artificial Sequence: Synthetic oligonucleotide
  Antisense strand to SEQ ID NO: 1028634
uuagcuggacuguuaacau

SEQ ID NO: 1028636 - RNA, 19 nt, Artificial Sequence
  Description of Artificial Sequence: Synthetic oligonucleotide
  Sense strand starting at position 943 of SEQ ID NO: 914760
ucaagauugugucuaaaua

SEQ ID NO: 1028637 - RNA, 19 nt, Artificial Sequence
  Description of Artificial Sequence: Synthetic oligonucleotide
  Antisense strand to SEQ ID NO: 1028636
uauuuagacacaaucuuga

SEQ ID NO: 1028638 - RNA, 19 nt, Artificial Sequence
  Description of Artificial Sequence: Synthetic oligonucleotide
  Sense strand starting at position 1041 of SEQ ID NO: 914760
auucgaguaccaggugaaa

SEQ ID NO: 1028639 - RNA, 19 nt, Artificial Sequence
  Description of Artificial Sequence: Synthetic oligonucleotide
  Antisense strand to SEQ ID NO: 1028638
uuucaccugguacucgaau

SEQ ID NO: 1028640 - RNA, 19 nt, Artificial Sequence
  Description of Artificial Sequence: Synthetic oligonucleotide
  Sense strand starting at position 1043 of SEQ ID NO: 914760
ucgaguaccaggugaaaga

SEQ ID NO: 1028641 - RNA, 19 nt, Artificial Sequence
  Description of Artificial Sequence: Synthetic oligonucleotide
  Antisense strand to SEQ ID NO: 1028640
ucuuucaccugguacucga

SEQ ID NO: 1028642 - RNA, 19 nt, Artificial Sequence
  Description of Artificial Sequence: Synthetic oligonucleotide
  Sense strand starting at position 1312 of SEQ ID NO: 914760
gcaauauagccugagugaa

SEQ ID NO: 1028643 - RNA, 19 nt, Artificial Sequence
  Description of Artificial Sequence: Synthetic oligonucleotide
  Antisense strand to SEQ ID NO: 1028642
uucacucaggcuauauugc

SEQ ID NO: 1028644 - RNA, 19 nt, Artificial Sequence
  Description of Artificial Sequence: Synthetic oligonucleotide
  Sense strand starting at position 1314 of SEQ ID NO: 914760
aauauagccugagugaaag

SEQ ID NO: 1028645 - RNA, 19 nt, Artificial Sequence
  Description of Artificial Sequence: Synthetic oligonucleotide
  Antisense strand to SEQ ID NO: 1028644
cuuucacucaggcuauauu

SEQ ID NO: 1028646 - RNA, 19 nt, Artificial Sequence
  Description of Artificial Sequence: Synthetic oligonucleotide
  Sense strand starting at position 1324 of SEQ ID NO: 914760
gagugaaagagaugugcuu

SEQ ID NO: 1028647 - RNA, 19 nt, Artificial Sequence
  Description of Artificial Sequence: Synthetic oligonucleotide
  Antisense strand to SEQ ID NO: 1028646
aagcacaucucuuucacuc

SEQ ID NO: 1028648 - RNA, 19 nt, Artificial Sequence
  Description of Artificial Sequence: Synthetic oligonucleotide
  Sense strand starting at position 2133 of SEQ ID NO: 914760
cauagacuccugggugaau

SEQ ID NO: 1028649 - RNA, 19 nt, Artificial Sequence
  Description of Artificial Sequence: Synthetic oligonucleotide
  Antisense strand to SEQ ID NO: 1028648
auucacccaggagucuaug

SEQ ID NO: 1028650 - RNA, 19 nt, Artificial Sequence
  Description of Artificial Sequence: Synthetic oligonucleotide
  Sense strand starting at position 2145 of SEQ ID NO: 914760
ggugaaucuggauggguag

SEQ ID NO: 1028651 - RNA, 19 nt, Artificial Sequence
  Description of Artificial Sequence: Synthetic oligonucleotide
  Antisense strand to SEQ ID NO: 1028650
cuacccauccagauucacc

SEQ ID NO: 1028652 - RNA, 19 nt, Artificial Sequence
  Description of Artificial Sequence: Synthetic oligonucleotide
  Sense strand starting at position 2146 of SEQ ID NO: 914760
gugaaucuggauggguaga

SEQ ID NO: 1028653 - RNA, 19 nt, Artificial Sequence
  Description of Artificial Sequence: Synthetic oligonucleotide
  Antisense strand to SEQ ID NO: 1028652
ucuacccauccagauucac

SEQ ID NO: 1028654 - RNA, 19 nt, Artificial Sequence
  Description of Artificial Sequence: Synthetic oligonucleotide
  Sense strand starting at position 2204 of SEQ ID NO: 914760
gaggcacucccaggacuua

SEQ ID NO: 1028655 - RNA, 19 nt, Artificial Sequence
  Description of Artificial Sequence: Synthetic oligonucleotide
  Antisense strand to SEQ ID NO: 1028654
uaaguccugggagugccuc

SEQ ID NO: 1028656 - RNA, 19 nt, Artificial Sequence
  Description of Artificial Sequence: Synthetic oligonucleotide
  Sense strand starting at position 2287 of SEQ ID NO: 914760
accuguauugagugagaaa

SEQ ID NO: 1028657 - RNA, 19 nt, Artificial Sequence
  Description of Artificial Sequence: Synthetic oligonucleotide
  Antisense strand to SEQ ID NO: 1028656
uuucucacucaauacaggu

SEQ ID NO: 1028658 - RNA, 19 nt, Artificial Sequence
  Description of Artificial Sequence: Synthetic oligonucleotide
  Sense strand starting at position 2369 of SEQ ID NO: 914760
cuccuaggaguguagacau

SEQ ID NO: 1028659 - RNA, 19 nt, Artificial Sequence
  Description of Artificial Sequence: Synthetic oligonucleotide
  Antisense strand to SEQ ID NO: 1028658
augucuacacuccuaggag

SEQ ID NO: 1028660 - RNA, 19 nt, Artificial Sequence
  Description of Artificial Sequence: Synthetic oligonucleotide
  Sense strand starting at position 2594 of SEQ ID NO: 914760
agguuuguacccuagaacu

SEQ ID NO: 1028661 - RNA, 19 nt, Artificial Sequence
  Description of Artificial Sequence: Synthetic oligonucleotide
  Antisense strand to SEQ ID NO: 1028660
aguucuaggguacaaaccu

SEQ ID NO: 1028662 - RNA, 19 nt, Artificial Sequence
  Description of Artificial Sequence: Synthetic oligonucleotide
  Sense strand starting at position 2596 of SEQ ID NO: 914760
guuuguacccuagaacuua

SEQ ID NO: 1028663 - RNA, 19 nt, Artificial Sequence
  Description of Artificial Sequence: Synthetic oligonucleotide
  Antisense strand to SEQ ID NO: 1028662
uaaguucuaggguacaaac

SEQ ID NO: 1028664 - RNA, 19 nt, Artificial Sequence
  Description of Artificial Sequence: Synthetic oligonucleotide
  Sense strand starting at position 2817 of SEQ ID NO: 914760
ccuuuaguacuuugaggaa

SEQ ID NO: 1028665 - RNA, 19 nt, Artificial Sequence
  Description of Artificial Sequence: Synthetic oligonucleotide
  Antisense strand to SEQ ID NO: 1028664
uuccucaaaguacuaaagg

SEQ ID NO: 1028666 - RNA, 19 nt, Artificial Sequence
  Description of Artificial Sequence: Synthetic oligonucleotide
  Sense strand starting at position 2948 of SEQ ID NO: 914760
ugcagaagauccucuacau

SEQ ID NO: 1028667 - RNA, 19 nt, Artificial Sequence
  Description of Artificial Sequence: Synthetic oligonucleotide
  Antisense strand to SEQ ID NO: 1028666
auguagaggaucuucugca

SEQ ID NO: 1028668 - RNA, 19 nt, Artificial Sequence
  Description of Artificial Sequence: Synthetic oligonucleotide
  Sense strand starting at position 3012 of SEQ ID NO: 914760
aaggucauguuucucuaga

SEQ ID NO: 1028669 - RNA, 19 nt, Artificial Sequence
  Description of Artificial Sequence: Synthetic oligonucleotide
  Antisense strand to SEQ ID NO: 1028668
ucuagagaaacaugaccuu

SEQ ID NO: 1028670 - RNA, 19 nt, Artificial Sequence
  Description of Artificial Sequence: Synthetic oligonucleotide
  Sense strand starting at position 3013 of SEQ ID NO: 914760
aggucauguuucucuagag

SEQ ID NO: 1028671 - RNA, 19 nt, Artificial Sequence
  Description of Artificial Sequence: Synthetic oligonucleotide
  Antisense strand to SEQ ID NO: 1028670
cucuagagaaacaugaccu

SEQ ID NO: 1028672 - RNA, 19 nt, Artificial Sequence
  Description of Artificial Sequence: Synthetic oligonucleotide
  Sense strand starting at position 3014 of SEQ ID NO: 914760
ggucauguuucucuagaga

SEQ ID NO: 1028673 - RNA, 19 nt, Artificial Sequence
  Description of Artificial Sequence: Synthetic oligonucleotide
  Antisense strand to SEQ ID NO: 1028672
ucucuagagaaacaugacc

SEQ ID NO: 1028674 - RNA, 19 nt, Artificial Sequence
  Description of Artificial Sequence: Synthetic oligonucleotide
  Sense strand starting at position 3029 of SEQ ID NO: 914760
gagaucuguccaggaacua

SEQ ID NO: 1028675 - RNA, 19 nt, Artificial Sequence
  Description of Artificial Sequence: Synthetic oligonucleotide
  Antisense strand to SEQ ID NO: 1028674
uaguuccuggacagaucuc

SEQ ID NO: 1028676 - RNA, 19 nt, Artificial Sequence
  Description of Artificial Sequence: Synthetic oligonucleotide
  Sense strand starting at position 3059 of SEQ ID NO: 914760
acugaaugaacgcagugau

SEQ ID NO: 1028677 - RNA, 19 nt, Artificial Sequence
  Description of Artificial Sequence: Synthetic oligonucleotide
  Antisense strand to SEQ ID NO: 1028676
aucacugcguucauucagu

SEQ ID NO: 1028678 - RNA, 19 nt, Artificial Sequence
  Description of Artificial Sequence: Synthetic oligonucleotide
  Sense strand starting at position 3339 of SEQ ID NO: 914760
guauaugaacuugaguuua

SEQ ID NO: 1028679 - RNA, 19 nt, Artificial Sequence
  Description of Artificial Sequence: Synthetic oligonucleotide
  Antisense strand to SEQ ID NO: 1028678
uaaacucaaguucauauac

SEQ ID NO: 1028680 - RNA, 19 nt, Artificial Sequence
  Description of Artificial Sequence: Synthetic oligonucleotide
  Sense strand starting at position 3344 of SEQ ID NO: 914760
ugaacuugaguuuauaggu

SEQ ID NO: 1028681 - RNA, 19 nt, Artificial Sequence
  Description of Artificial Sequence: Synthetic oligonucleotide
  Antisense strand to SEQ ID NO: 1028680
accuauaaacucaaguuca

SEQ ID NO: 1028682 - RNA, 19 nt, Artificial Sequence
  Description of Artificial Sequence: Synthetic oligonucleotide
  Sense strand starting at position 3349 of SEQ ID NO: 914760
uugaguuuauagguccaga

SEQ ID NO: 1028683 - RNA, 19 nt, Artificial Sequence
  Description of Artificial Sequence: Synthetic oligonucleotide
  Antisense strand to SEQ ID NO: 1028682
ucuggaccuauaaacucaa

SEQ ID NO: 1028684 - RNA, 19 nt, Artificial Sequence
  Description of Artificial Sequence: Synthetic oligonucleotide
  Sense strand starting at position 3352 of SEQ ID NO: 914760
aguuuauagguccagagcu

SEQ ID NO: 1028685 - RNA, 19 nt, Artificial Sequence
  Description of Artificial Sequence: Synthetic oligonucleotide
  Antisense strand to SEQ ID NO: 1028684
agcucuggaccuauaaacu

SEQ ID NO: 1028686 - RNA, 19 nt, Artificial Sequence
  Description of Artificial Sequence: Synthetic oligonucleotide
  Sense strand starting at position 3375 of SEQ ID NO: 914760
guguaccaucuuuacauga

SEQ ID NO: 1028687 - RNA, 19 nt, Artificial Sequence
  Description of Artificial Sequence: Synthetic oligonucleotide
  Antisense strand to SEQ ID NO: 1028686
ucauguaaagaugguacac

SEQ ID NO: 1028688 - RNA, 19 nt, Artificial Sequence
  Description of Artificial Sequence: Synthetic oligonucleotide
  Sense strand starting at position 3836 of SEQ ID NO: 914760
ccaggcuccugacuuaaau

SEQ ID NO: 1028689 - RNA, 19 nt, Artificial Sequence
  Description of Artificial Sequence: Synthetic oligonucleotide
  Antisense strand to SEQ ID NO: 1028688
auuuaagucaggagccugg

SEQ ID NO: 1028690 - RNA, 19 nt, Artificial Sequence
  Description of Artificial Sequence: Synthetic oligonucleotide
  Sense strand starting at position 85 of SEQ ID NO: 914761
gcauauguauuugugcaua

SEQ ID NO: 1028691 - RNA, 19 nt, Artificial Sequence
  Description of Artificial Sequence: Synthetic oligonucleotide
  Antisense strand to SEQ ID NO: 1028690
uaugcacaaauacauaugc

SEQ ID NO: 1028692 - RNA, 19 nt, Artificial Sequence
  Description of Artificial Sequence: Synthetic oligonucleotide
  Sense strand starting at position 768 of SEQ ID NO: 914761
uagaacaaucgcgaaauga

SEQ ID NO: 1028693 - RNA, 19 nt, Artificial Sequence
  Description of Artificial Sequence: Synthetic oligonucleotide
  Antisense strand to SEQ ID NO: 1028692
ucauuucgcgauuguucua

SEQ ID NO: 1028694 - RNA, 19 nt, Artificial Sequence
  Description of Artificial Sequence: Synthetic oligonucleotide
  Sense strand starting at position 795 of SEQ ID NO: 914761
ugagguguucaaugaagau

SEQ ID NO: 1028695 - RNA, 19 nt, Artificial Sequence
  Description of Artificial Sequence: Synthetic oligonucleotide
  Antisense strand to SEQ ID NO: 1028694
aucuucauugaacaccuca

SEQ ID NO: 1028696 - RNA, 19 nt, Artificial Sequence
  Description of Artificial Sequence: Synthetic oligonucleotide
  Sense strand starting at position 878 of SEQ ID NO: 914761
aucaguauagcagaaguaa

SEQ ID NO: 1028697 - RNA, 19 nt, Artificial Sequence
  Description of Artificial Sequence: Synthetic oligonucleotide
  Antisense strand to SEQ ID NO: 1028696
uuacuucugcuauacugau

SEQ ID NO: 1028698 - RNA, 19 nt, Artificial Sequence
  Description of Artificial Sequence: Synthetic oligonucleotide
  Sense strand starting at position 973 of SEQ ID NO: 914761
uuugucucucuagauauau

SEQ ID NO: 1028699 - RNA, 19 nt, Artificial Sequence
  Description of Artificial Sequence: Synthetic oligonucleotide
  Antisense strand to SEQ ID NO: 1028698
auauaucuagagagacaaa

SEQ ID NO: 1028700 - RNA, 19 nt, Artificial Sequence
  Description of Artificial Sequence: Synthetic oligonucleotide
  Sense strand starting at position 1015 of SEQ ID NO: 914761
acugguauaacucggacaa

SEQ ID NO: 1028701 - RNA, 19 nt, Artificial Sequence
  Description of Artificial Sequence: Synthetic oligonucleotide
  Antisense strand to SEQ ID NO: 1028700
uuguccgaguuauaccagu

SEQ ID NO: 1028702 - RNA, 19 nt, Artificial Sequence
  Description of Artificial Sequence: Synthetic oligonucleotide
  Sense strand starting at position 1053 of SEQ ID NO: 914761
uuaggaauaguuuacucuu

SEQ ID NO: 1028703 - RNA, 19 nt, Artificial Sequence
  Description of Artificial Sequence: Synthetic oligonucleotide
  Antisense strand to SEQ ID NO: 1028702
aagaguaaacuauuccuaa

SEQ ID NO: 1028704 - RNA, 19 nt, Artificial Sequence
  Description of Artificial Sequence: Synthetic oligonucleotide
  Sense strand starting at position 1079 of SEQ ID NO: 914761
cugaaauuguaacuguuga

SEQ ID NO: 1028705 - RNA, 19 nt, Artificial Sequence
  Description of Artificial Sequence: Synthetic oligonucleotide
  Antisense strand to SEQ ID NO: 1028704
ucaacaguuacaauuucag

SEQ ID NO: 1028706 - RNA, 19 nt, Artificial Sequence
  Description of Artificial Sequence: Synthetic oligonucleotide
  Sense strand starting at position 1089 of SEQ ID NO: 914761
aacuguugagugcauaaua

SEQ ID NO: 1028707 - RNA, 19 nt, Artificial Sequence
  Description of Artificial Sequence: Synthetic oligonucleotide
  Antisense strand to SEQ ID NO: 1028706
uauuaugcacucaacaguu

SEQ ID NO: 1028708 - RNA, 19 nt, Artificial Sequence
  Description of Artificial Sequence: Synthetic oligonucleotide
  Sense strand starting at position 1114 of SEQ ID NO: 914761
acucgauguaugcaaagga

SEQ ID NO: 1028709 - RNA, 19 nt, Artificial Sequence
  Description of Artificial Sequence: Synthetic oligonucleotide
  Antisense strand to SEQ ID NO: 1028708
uccuuugcauacaucgagu

SEQ ID NO: 1028710 - RNA, 19 nt, Artificial Sequence
  Description of Artificial Sequence: Synthetic oligonucleotide
  Sense strand starting at position 1157 of SEQ ID NO: 914761
gauacauagguccaguugu

SEQ ID NO: 1028711 - RNA, 19 nt, Artificial Sequence
  Description of Artificial Sequence: Synthetic oligonucleotide
  Antisense strand to SEQ ID NO: 1028710
acaacuggaccuauguauc

SEQ ID NO: 1028712 - RNA, 19 nt, Artificial Sequence
  Description of Artificial Sequence: Synthetic oligonucleotide
  Sense strand starting at position 1290 of SEQ ID NO: 914761
caaucugagguauguugaa

SEQ ID NO: 1028713 - RNA, 19 nt, Artificial Sequence
  Description of Artificial Sequence: Synthetic oligonucleotide
  Antisense strand to SEQ ID NO: 1028712
uucaacauaccucagauug

SEQ ID NO: 1028714 - RNA, 19 nt, Artificial Sequence
  Description of Artificial Sequence: Synthetic oligonucleotide
  Sense strand starting at position 1506 of SEQ ID NO: 914761
aggagucccuuaucucaca

SEQ ID NO: 1028715 - RNA, 19 nt, Artificial Sequence
  Description of Artificial Sequence: Synthetic oligonucleotide
  Antisense strand to SEQ ID NO: 1028714
ugugagauaagggacuccu

SEQ ID NO: 1028716 - RNA, 19 nt, Artificial Sequence
  Description of Artificial Sequence: Synthetic oligonucleotide
  Sense strand starting at position 1560 of SEQ ID NO: 914761
aauugauccuuuccagggu

SEQ ID NO: 1028717 - RNA, 19 nt, Artificial Sequence
  Description of Artificial Sequence: Synthetic oligonucleotide
  Antisense strand to SEQ ID NO: 1028716
acccuggaaaggaucaauu

SEQ ID NO: 1028718 - RNA, 19 nt, Artificial Sequence
  Description of Artificial Sequence: Synthetic oligonucleotide
  Sense strand starting at position 1642 of SEQ ID NO: 914761
augaacuuuguccacagua

SEQ ID NO: 1028719 - RNA, 19 nt, Artificial Sequence
  Description of Artificial Sequence: Synthetic oligonucleotide
  Antisense strand to SEQ ID NO: 1028718
uacuguggacaaaguucau

SEQ ID NO: 1028720 - RNA, 19 nt, Artificial Sequence
  Description of Artificial Sequence: Synthetic oligonucleotide
  Sense strand starting at position 1890 of SEQ ID NO: 914761
ugagucgcaaaucaagaaa

SEQ ID NO: 1028721 - RNA, 19 nt, Artificial Sequence
  Description of Artificial Sequence: Synthetic oligonucleotide
  Antisense strand to SEQ ID NO: 1028720
uuucuugauuugcgacuca

SEQ ID NO: 1028722 - RNA, 19 nt, Artificial Sequence
  Description of Artificial Sequence: Synthetic oligonucleotide
  Sense strand starting at position 1893 of SEQ ID NO: 914761
gucgcaaaucaagaaauua

SEQ ID NO: 1028723 - RNA, 19 nt, Artificial Sequence
  Description of Artificial Sequence: Synthetic oligonucleotide
  Antisense strand to SEQ ID NO: 1028722
uaauuucuugauuugcgac

SEQ ID NO: 1028724 - RNA, 19 nt, Artificial Sequence
  Description of Artificial Sequence: Synthetic oligonucleotide
  Sense strand starting at position 1901 of SEQ ID NO: 914761
ucaagaaauuagccagcaa

SEQ ID NO: 1028725 - RNA, 19 nt, Artificial Sequence
  Description of Artificial Sequence: Synthetic oligonucleotide
  Antisense strand to SEQ ID NO: 1028724
uugcuggcuaauuucuuga

SEQ ID NO: 1028726 - RNA, 19 nt, Artificial Sequence
  Description of Artificial Sequence: Synthetic oligonucleotide
  Sense strand starting at position 1974 of SEQ ID NO: 914761
gauccauguggucaugauc

SEQ ID NO: 1028727 - RNA, 19 nt, Artificial Sequence
  Description of Artificial Sequence: Synthetic oligonucleotide
  Antisense strand to SEQ ID NO: 1028726
gaucaugaccacauggauc

SEQ ID NO: 1028728 - RNA, 19 nt, Artificial Sequence
  Description of Artificial Sequence: Synthetic oligonucleotide
  Sense strand starting at position 1982 of SEQ ID NO: 914761
uggucaugaucuucuaaac

SEQ ID NO: 1028729 - RNA, 19 nt, Artificial Sequence
  Description of Artificial Sequence: Synthetic oligonucleotide
  Antisense strand to SEQ ID NO: 1028728
guuuagaagaucaugacca

SEQ ID NO: 1028730 - RNA, 19 nt, Artificial Sequence
  Description of Artificial Sequence: Synthetic oligonucleotide
  Sense strand starting at position 2066 of SEQ ID NO: 914761
uaauccauguuagcagaga

SEQ ID NO: 1028731 - RNA, 19 nt, Artificial Sequence
  Description of Artificial Sequence: Synthetic oligonucleotide
  Antisense strand to SEQ ID NO: 1028730
ucucugcuaacauggauua

SEQ ID NO: 1028732 - RNA, 19 nt, Artificial Sequence
  Description of Artificial Sequence: Synthetic oligonucleotide
  Sense strand starting at position 2199 of SEQ ID NO: 914761
ccuugcuuagauuaauagu

SEQ ID NO: 1028733 - RNA, 19 nt, Artificial Sequence
  Description of Artificial Sequence: Synthetic oligonucleotide
  Antisense strand to SEQ ID NO: 1028732
acuauuaaucuaagcaagg

SEQ ID NO: 1028734 - RNA, 19 nt, Artificial Sequence
  Description of Artificial Sequence: Synthetic oligonucleotide
  Sense strand starting at position 2264 of SEQ ID NO: 914761
caggcagaacuguauugua

SEQ ID NO: 1028735 - RNA, 19 nt, Artificial Sequence
  Description of Artificial Sequence: Synthetic oligonucleotide
  Antisense strand to SEQ ID NO: 1028734
uacaauacaguucugccug

SEQ ID NO: 1028736 - RNA, 19 nt, Artificial Sequence
  Description of Artificial Sequence: Synthetic oligonucleotide
  Sense strand starting at position 2279 of SEQ ID NO: 914761
uguaaucucaggcagagau

SEQ ID NO: 1028737 - RNA, 19 nt, Artificial Sequence
  Description of Artificial Sequence: Synthetic oligonucleotide
  Antisense strand to SEQ ID NO: 1028736
aucucugccugagauuaca

SEQ ID NO: 1028738 - RNA, 19 nt, Artificial Sequence
  Description of Artificial Sequence: Synthetic oligonucleotide
  Sense strand starting at position 2385 of SEQ ID NO: 914761
ugguaaugaaaguguggau

SEQ ID NO: 1028739 - RNA, 19 nt, Artificial Sequence
  Description of Artificial Sequence: Synthetic oligonucleotide
  Antisense strand to SEQ ID NO: 1028738
auccacacuuucauuacca

SEQ ID NO: 1028740 - RNA, 19 nt, Artificial Sequence
  Description of Artificial Sequence: Synthetic oligonucleotide
  Sense strand starting at position 2400 of SEQ ID NO: 914761
ggauaacuguuguuaaauu

SEQ ID NO: 1028741 - RNA, 19 nt, Artificial Sequence
  Description of Artificial Sequence: Synthetic oligonucleotide
  Antisense strand to SEQ ID NO: 1028740
aauuuaacaacaguuaucc

SEQ ID NO: 1028742 - RNA, 19 nt, Artificial Sequence
  Description of Artificial Sequence: Synthetic oligonucleotide
  Sense strand starting at position 2547 of SEQ ID NO: 914761
guugaauaaucuucucagg

SEQ ID NO: 1028743 - RNA, 19 nt, Artificial Sequence
  Description of Artificial Sequence: Synthetic oligonucleotide
  Antisense strand to SEQ ID NO: 1028742
ccugagaagauuauucaac

SEQ ID NO: 1028744 - RNA, 19 nt, Artificial Sequence
  Description of Artificial Sequence: Synthetic oligonucleotide
  Sense strand starting at position 2580 of SEQ ID NO: 914761
gucuaauuaauguggaaga

SEQ ID NO: 1028745 - RNA, 19 nt, Artificial Sequence
  Description of Artificial Sequence: Synthetic oligonucleotide
  Antisense strand to SEQ ID NO: 1028744
ucuuccacauuaauuagac

SEQ ID NO: 1028746 - RNA, 19 nt, Artificial Sequence
  Description of Artificial Sequence: Synthetic oligonucleotide
  Sense strand starting at position 2851 of SEQ ID NO: 914761
uaggcugucccuuauggga

SEQ ID NO: 1028747 - RNA, 19 nt, Artificial Sequence
  Description of Artificial Sequence: Synthetic oligonucleotide
  Antisense strand to SEQ ID NO: 1028746
ucccauaagggacagccua

SEQ ID NO: 1028748 - RNA, 19 nt, Artificial Sequence
  Description of Artificial Sequence: Synthetic oligonucleotide
  Sense strand starting at position 3311 of SEQ ID NO: 914761
guguaagagacuuacuuug

SEQ ID NO: 1028749 - RNA, 19 nt, Artificial Sequence
  Description of Artificial Sequence: Synthetic oligonucleotide
  Antisense strand to SEQ ID NO: 1028748
caaaguaagucucuuacac

SEQ ID NO: 1028750 - RNA, 19 nt, Artificial Sequence
  Description of Artificial Sequence: Synthetic oligonucleotide
  Sense strand starting at position 3316 of SEQ ID NO: 914761
agagacuuacuuuguuauc

SEQ ID NO: 1028751 - RNA, 19 nt, Artificial Sequence
  Description of Artificial Sequence: Synthetic oligonucleotide
  Antisense strand to SEQ ID NO: 1028750
gauaacaaaguaagucucu

SEQ ID NO: 1028752 - RNA, 19 nt, Artificial Sequence
  Description of Artificial Sequence: Synthetic oligonucleotide
  Sense strand starting at position 3417 of SEQ ID NO: 914761
ucaggaauguauguaaaua

SEQ ID NO: 1028753 - RNA, 19 nt, Artificial Sequence
  Description of Artificial Sequence: Synthetic oligonucleotide
  Antisense strand to SEQ ID NO: 1028752
uauuuacauacauuccuga

SEQ ID NO: 1028754 - RNA, 19 nt, Artificial Sequence
  Description of Artificial Sequence: Synthetic oligonucleotide
  Sense strand starting at position 3585 of SEQ ID NO: 914761
cagagaaagucuuccuaug

SEQ ID NO: 1028755 - RNA, 19 nt, Artificial Sequence
  Description of Artificial Sequence: Synthetic oligonucleotide
  Antisense strand to SEQ ID NO: 1028754
cauaggaagacuuucucug

SEQ ID NO: 1028756 - RNA, 19 nt, Artificial Sequence
  Description of Artificial Sequence: Synthetic oligonucleotide
  Sense strand starting at position 3587 of SEQ ID NO: 914761
gagaaagucuuccuaugua

SEQ ID NO: 1028757 - RNA, 19 nt, Artificial Sequence
  Description of Artificial Sequence: Synthetic oligonucleotide
  Antisense strand to SEQ ID NO: 1028756
uacauaggaagacuuucuc

SEQ ID NO: 1028758 - RNA, 19 nt, Artificial Sequence
  Description of Artificial Sequence: Synthetic oligonucleotide
  Sense strand starting at position 3597 of SEQ ID NO: 914761
uccuauguacagugacaaa

SEQ ID NO: 1028759 - RNA, 19 nt, Artificial Sequence
  Description of Artificial Sequence: Synthetic oligonucleotide
  Antisense strand to SEQ ID NO: 1028758
uuugucacuguacauagga

SEQ ID NO: 1028760 - RNA, 19 nt, Artificial Sequence
  Description of Artificial Sequence: Synthetic oligonucleotide
  Sense strand starting at position 3664 of SEQ ID NO: 914761
cuagacauuugggaauaua

SEQ ID NO: 1028761 - RNA, 19 nt, Artificial Sequence
  Description of Artificial Sequence: Synthetic oligonucleotide
  Antisense strand to SEQ ID NO: 1028760
uauauucccaaaugucuag

SEQ ID NO: 1028762 - RNA, 19 nt, Artificial Sequence
  Description of Artificial Sequence: Synthetic oligonucleotide
  Sense strand starting at position 3735 of SEQ ID NO: 914761
aaugaagacuguuagauuu

SEQ ID NO: 1028763 - RNA, 19 nt, Artificial Sequence
  Description of Artificial Sequence: Synthetic oligonucleotide
  Antisense strand to SEQ ID NO: 1028762
aaaucuaacagucuucauu

SEQ ID NO: 1028764 - RNA, 19 nt, Artificial Sequence
  Description of Artificial Sequence: Synthetic oligonucleotide
  Sense strand starting at position 3840 of SEQ ID NO: 914761
ugaauucugcugcagacaa

SEQ ID NO: 1028765 - RNA, 19 nt, Artificial Sequence
  Description of Artificial Sequence: Synthetic oligonucleotide
  Antisense strand to SEQ ID NO: 1028764
uugucugcagcagaauuca

SEQ ID NO: 1028766 - RNA, 19 nt, Artificial Sequence
  Description of Artificial Sequence: Synthetic oligonucleotide
  Sense strand starting at position 3903 of SEQ ID NO: 914761
cagaauguuagcgagugaa

SEQ ID NO: 1028767 - RNA, 19 nt, Artificial Sequence
  Description of Artificial Sequence: Synthetic oligonucleotide
  Antisense strand to SEQ ID NO: 1028766
uucacucgcuaacauucug

SEQ ID NO: 1028768 - RNA, 19 nt, Artificial Sequence
  Description of Artificial Sequence: Synthetic oligonucleotide
  Sense strand starting at position 3907 of SEQ ID NO: 914761
auguuagcgagugaacaaa

SEQ ID NO: 1028769 - RNA, 19 nt, Artificial Sequence
  Description of Artificial Sequence: Synthetic oligonucleotide
  Antisense strand to SEQ ID NO: 1028768
uuuguucacucgcuaacau

SEQ ID NO: 1028770 - RNA, 19 nt, Artificial Sequence
  Description of Artificial Sequence: Synthetic oligonucleotide
  Sense strand starting at position 106 of SEQ ID NO: 914762
gcuggaggucucuguccuu

SEQ ID NO: 1028771 - RNA, 19 nt, Artificial Sequence
  Description of Artificial Sequence: Synthetic oligonucleotide
  Antisense strand to SEQ ID NO: 1028770
aaggacagagaccuccagc

SEQ ID NO: 1028772 - RNA, 19 nt, Artificial Sequence
  Description of Artificial Sequence: Synthetic oligonucleotide
  Sense strand starting at position 156 of SEQ ID NO: 914762
guugaugucccaggcaaua

SEQ ID NO: 1028773 - RNA, 19 nt, Artificial Sequence
  Description of Artificial Sequence: Synthetic oligonucleotide
  Antisense strand to SEQ ID NO: 1028772
uauugccugggacaucaac

SEQ ID NO: 1028774 - RNA, 19 nt, Artificial Sequence
  Description of Artificial Sequence: Synthetic oligonucleotide
  Sense strand starting at position 342 of SEQ ID NO: 914762
ugcagaugcucacauaguu

SEQ ID NO: 1028775 - RNA, 19 nt, Artificial Sequence
  Description of Artificial Sequence: Synthetic oligonucleotide
  Antisense strand to SEQ ID NO: 1028774
aacuaugugagcaucugca

SEQ ID NO: 1028776 - RNA, 19 nt, Artificial Sequence
  Description of Artificial Sequence: Synthetic oligonucleotide
  Sense strand starting at position 350 of SEQ ID NO: 914762
cucacauaguugguguaga

SEQ ID NO: 1028777 - RNA, 19 nt, Artificial Sequence
  Description of Artificial Sequence: Synthetic oligonucleotide
  Antisense strand to SEQ ID NO: 1028776
ucuacaccaacuaugugag

SEQ ID NO: 1028778 - RNA, 19 nt, Artificial Sequence
  Description of Artificial Sequence: Synthetic oligonucleotide
  Sense strand starting at position 351 of SEQ ID NO: 914762
ucacauaguugguguagau

SEQ ID NO: 1028779 - RNA, 19 nt, Artificial Sequence
  Description of Artificial Sequence: Synthetic oligonucleotide
  Antisense strand to SEQ ID NO: 1028778
aucuacaccaacuauguga

SEQ ID NO: 1028780 - RNA, 19 nt, Artificial Sequence
  Description of Artificial Sequence: Synthetic oligonucleotide
  Sense strand starting at position 677 of SEQ ID NO: 914762
aggcuugaccuugggcaaa

SEQ ID NO: 1028781 - RNA, 19 nt, Artificial Sequence
  Description of Artificial Sequence: Synthetic oligonucleotide
  Antisense strand to SEQ ID NO: 1028780
uuugcccaaggucaagccu

SEQ ID NO: 1028782 - RNA, 19 nt, Artificial Sequence
  Description of Artificial Sequence: Synthetic oligonucleotide
  Sense strand starting at position 1229 of SEQ ID NO: 914762
acagguuccuccgaagauu

SEQ ID NO: 1028783 - RNA, 19 nt, Artificial Sequence
  Description of Artificial Sequence: Synthetic oligonucleotide
  Antisense strand to SEQ ID NO: 1028782
aaucuucggaggaaccugu

SEQ ID NO: 1028784 - RNA, 19 nt, Artificial Sequence
  Description of Artificial Sequence: Synthetic oligonucleotide
  Sense strand starting at position 1424 of SEQ ID NO: 914762
uaccucgaacugggaaaua

SEQ ID NO: 1028785 - RNA, 19 nt, Artificial Sequence
  Description of Artificial Sequence: Synthetic oligonucleotide
  Antisense strand to SEQ ID NO: 1028784
uauuucccaguucgaggua

SEQ ID NO: 1028786 - RNA, 19 nt, Artificial Sequence
  Description of Artificial Sequence: Synthetic oligonucleotide
  Sense strand starting at position 2691 of SEQ ID NO: 914762
cccaguaucccuuagcuau

SEQ ID NO: 1028787 - RNA, 19 nt, Artificial Sequence
  Description of Artificial Sequence: Synthetic oligonucleotide
  Antisense strand to SEQ ID NO: 1028786
auagcuaagggauacuggg

SEQ ID NO: 1028788 - RNA, 19 nt, Artificial Sequence
  Description of Artificial Sequence: Synthetic oligonucleotide
  Sense strand starting at position 2704 of SEQ ID NO: 914762
agcuauucuuccugguacu

SEQ ID NO: 1028789 - RNA, 19 nt, Artificial Sequence
  Description of Artificial Sequence: Synthetic oligonucleotide
  Antisense strand to SEQ ID NO: 1028788
aguaccaggaagaauagcu

SEQ ID NO: 1028790 - RNA, 19 nt, Artificial Sequence
  Description of Artificial Sequence: Synthetic oligonucleotide
  Sense strand starting at position 2758 of SEQ ID NO: 914762
guguguugaucgccgccau

SEQ ID NO: 1028791 - RNA, 19 nt, Artificial Sequence
  Description of Artificial Sequence: Synthetic oligonucleotide
  Antisense strand to SEQ ID NO: 1028790
auggcggcgaucaacacac

SEQ ID NO: 1028792 - RNA, 19 nt, Artificial Sequence
  Description of Artificial Sequence: Synthetic oligonucleotide
  Sense strand starting at position 2850 of SEQ ID NO: 914762
gugugaguuugcugaggcu

SEQ ID NO: 1028793 - RNA, 19 nt, Artificial Sequence
  Description of Artificial Sequence: Synthetic oligonucleotide
  Antisense strand to SEQ ID NO: 1028792
agccucagcaaacucacac

SEQ ID NO: 1028794 - RNA, 19 nt, Artificial Sequence
  Description of Artificial Sequence: Synthetic oligonucleotide
  Sense strand starting at position 2958 of SEQ ID NO: 914762
cugccuacuuucuguugau

SEQ ID NO: 1028795 - RNA, 19 nt, Artificial Sequence
  Description of Artificial Sequence: Synthetic oligonucleotide
  Antisense strand to SEQ ID NO: 1028794
aucaacagaaaguaggcag

SEQ ID NO: 1028796 - RNA, 19 nt, Artificial Sequence
  Description of Artificial Sequence: Synthetic oligonucleotide
  Sense strand starting at position 2959 of SEQ ID NO: 914762
ugccuacuuucuguugauu

SEQ ID NO: 1028797 - RNA, 19 nt, Artificial Sequence
  Description of Artificial Sequence: Synthetic oligonucleotide
  Antisense strand to SEQ ID NO: 1028796
aaucaacagaaaguaggca

SEQ ID NO: 1028798 - RNA, 19 nt, Artificial Sequence
  Description of Artificial Sequence: Synthetic oligonucleotide
  Sense strand starting at position 2995 of SEQ ID NO: 914762
ucuagauauugaucucuug

SEQ ID NO: 1028799 - RNA, 19 nt, Artificial Sequence
  Description of Artificial Sequence: Synthetic oligonucleotide
  Antisense strand to SEQ ID NO: 1028798
caagagaucaauaucuaga

SEQ ID NO: 1028800 - RNA, 19 nt, Artificial Sequence
  Description of Artificial Sequence: Synthetic oligonucleotide
  Sense strand starting at position 2998 of SEQ ID NO: 914762
agauauugaucucuuguug

SEQ ID NO: 1028801 - RNA, 19 nt, Artificial Sequence
  Description of Artificial Sequence: Synthetic oligonucleotide
  Antisense strand to SEQ ID NO: 1028800
caacaagagaucaauaucu

SEQ ID NO: 1028802 - RNA, 19 nt, Artificial Sequence
  Description of Artificial Sequence: Synthetic oligonucleotide
  Sense strand starting at position 3009 of SEQ ID NO: 914762
ucuuguuggcuuuagacau

SEQ ID NO: 1028803 - RNA, 19 nt, Artificial Sequence
  Description of Artificial Sequence: Synthetic oligonucleotide
  Antisense strand to SEQ ID NO: 1028802
augucuaaagccaacaaga

SEQ ID NO: 1028804 - RNA, 19 nt, Artificial Sequence
  Description of Artificial Sequence: Synthetic oligonucleotide
  Sense strand starting at position 3013 of SEQ ID NO: 914762
guuggcuuuagacaugaca

SEQ ID NO: 1028805 - RNA, 19 nt, Artificial Sequence
  Description of Artificial Sequence: Synthetic oligonucleotide
  Antisense strand to SEQ ID NO: 1028804
ugucaugucuaaagccaac

SEQ ID NO: 1028806 - RNA, 19 nt, Artificial Sequence
  Description of Artificial Sequence: Synthetic oligonucleotide
  Sense strand starting at position 3015 of SEQ ID NO: 914762
uggcuuuagacaugacaga

SEQ ID NO: 1028807 - RNA, 19 nt, Artificial Sequence
  Description of Artificial Sequence: Synthetic oligonucleotide
  Antisense strand to SEQ ID NO: 1028806
ucugucaugucuaaagcca

SEQ ID NO: 1028808 - RNA, 19 nt, Artificial Sequence
  Description of Artificial Sequence: Synthetic oligonucleotide
  Sense strand starting at position 3047 of SEQ ID NO: 914762
uccaucaacugucaaguuu

SEQ ID NO: 1028809 - RNA, 19 nt, Artificial Sequence
  Description of Artificial Sequence: Synthetic oligonucleotide
  Antisense strand to SEQ ID NO: 1028808
aaacuugacaguugaugga

SEQ ID NO: 1028810 - RNA, 19 nt, Artificial Sequence
  Description of Artificial Sequence: Synthetic oligonucleotide
  Sense strand starting at position 3056 of SEQ ID NO: 914762
ugucaaguuuguccaagga

SEQ ID NO: 1028811 - RNA, 19 nt, Artificial Sequence
  Description of Artificial Sequence: Synthetic oligonucleotide
  Antisense strand to SEQ ID NO: 1028810
uccuuggacaaacuugaca

SEQ ID NO: 1028812 - RNA, 19 nt, Artificial Sequence
  Description of Artificial Sequence: Synthetic oligonucleotide
  Sense strand starting at position 3060 of SEQ ID NO: 914762
aaguuuguccaaggagucu

SEQ ID NO: 1028813 - RNA, 19 nt, Artificial Sequence
  Description of Artificial Sequence: Synthetic oligonucleotide
  Antisense strand to SEQ ID NO: 1028812
agacuccuuggacaaacuu

SEQ ID NO: 1028814 - RNA, 19 nt, Artificial Sequence
  Description of Artificial Sequence: Synthetic oligonucleotide
  Sense strand starting at position 3140 of SEQ ID NO: 914762
gggaagagguugguguuua

SEQ ID NO: 1028815 - RNA, 19 nt, Artificial Sequence
  Description of Artificial Sequence: Synthetic oligonucleotide
  Antisense strand to SEQ ID NO: 1028814
uaaacaccaaccucuuccc

SEQ ID NO: 1028816 - RNA, 19 nt, Artificial Sequence
  Description of Artificial Sequence: Synthetic oligonucleotide
  Sense strand starting at position 3141 of SEQ ID NO: 914762
ggaagagguugguguuuau

SEQ ID NO: 1028817 - RNA, 19 nt, Artificial Sequence
  Description of Artificial Sequence: Synthetic oligonucleotide
  Antisense strand to SEQ ID NO: 1028816
auaaacaccaaccucuucc

SEQ ID NO: 1028818 - RNA, 19 nt, Artificial Sequence
  Description of Artificial Sequence: Synthetic oligonucleotide
  Sense strand starting at position 3144 of SEQ ID NO: 914762
agagguugguguuuauguu

SEQ ID NO: 1028819 - RNA, 19 nt, Artificial Sequence
  Description of Artificial Sequence: Synthetic oligonucleotide
  Antisense strand to SEQ ID NO: 1028818
aacauaaacaccaaccucu

SEQ ID NO: 1028820 - RNA, 19 nt, Artificial Sequence
  Description of Artificial Sequence: Synthetic oligonucleotide
  Sense strand starting at position 3148 of SEQ ID NO: 914762
guugguguuuauguuguau

SEQ ID NO: 1028821 - RNA, 19 nt, Artificial Sequence
  Description of Artificial Sequence: Synthetic oligonucleotide
  Antisense strand to SEQ ID NO: 1028820
auacaacauaaacaccaac

SEQ ID NO: 1028822 - RNA, 19 nt, Artificial Sequence
  Description of Artificial Sequence: Synthetic oligonucleotide
  Sense strand starting at position 3286 of SEQ ID NO: 914762
acuggauguucucacuugu

SEQ ID NO: 1028823 - RNA, 19 nt, Artificial Sequence
  Description of Artificial Sequence: Synthetic oligonucleotide
  Antisense strand to SEQ ID NO: 1028822
acaagugagaacauccagu

SEQ ID NO: 1028824 - RNA, 19 nt, Artificial Sequence
  Description of Artificial Sequence: Synthetic oligonucleotide
  Sense strand starting at position 3416 of SEQ ID NO: 914762
uuggguacucggcauaaua

SEQ ID NO: 1028825 - RNA, 19 nt, Artificial Sequence
  Description of Artificial Sequence: Synthetic oligonucleotide
  Antisense strand to SEQ ID NO: 1028824
uauuaugccgaguacccaa

SEQ ID NO: 1028826 - RNA, 19 nt, Artificial Sequence
  Description of Artificial Sequence: Synthetic oligonucleotide
  Sense strand starting at position 3425 of SEQ ID NO: 914762
cggcauaauaccuggguga

SEQ ID NO: 1028827 - RNA, 19 nt, Artificial Sequence
  Description of Artificial Sequence: Synthetic oligonucleotide
  Antisense strand to SEQ ID NO: 1028826
ucacccagguauuaugccg

SEQ ID NO: 1028828 - RNA, 19 nt, Artificial Sequence
  Description of Artificial Sequence: Synthetic oligonucleotide
  Sense strand starting at position 3465 of SEQ ID NO: 914762
caccgaagacacgaguuua

SEQ ID NO: 1028829 - RNA, 19 nt, Artificial Sequence
  Description of Artificial Sequence: Synthetic oligonucleotide
  Antisense strand to SEQ ID NO: 1028828
uaaacucgugucuucggug

SEQ ID NO: 1028830 - RNA, 19 nt, Artificial Sequence
  Description of Artificial Sequence: Synthetic oligonucleotide
  Sense strand starting at position 3470 of SEQ ID NO: 914762
aagacacgaguuuacuuau

SEQ ID NO: 1028831 - RNA, 19 nt, Artificial Sequence
  Description of Artificial Sequence: Synthetic oligonucleotide
  Antisense strand to SEQ ID NO: 1028830
auaaguaaacucgugucuu

SEQ ID NO: 1028832 - RNA, 19 nt, Artificial Sequence
  Description of Artificial Sequence: Synthetic oligonucleotide
  Sense strand starting at position 3856 of SEQ ID NO: 914762
gaaggucacggcgaaacua

SEQ ID NO: 1028833 - RNA, 19 nt, Artificial Sequence
  Description of Artificial Sequence: Synthetic oligonucleotide
  Antisense strand to SEQ ID NO: 1028832
uaguuucgccgugaccuuc

SEQ ID NO: 1028834 - RNA, 19 nt, Artificial Sequence
  Description of Artificial Sequence: Synthetic oligonucleotide
  Sense strand starting at position 291 of SEQ ID NO: 914763
guacaaaguucucuccaga

SEQ ID NO: 1028835 - RNA, 19 nt, Artificial Sequence
  Description of Artificial Sequence: Synthetic oligonucleotide
  Antisense strand to SEQ ID NO: 1028834
ucuggagagaacuuuguac

SEQ ID NO: 1028836 - RNA, 19 nt, Artificial Sequence
  Description of Artificial Sequence: Synthetic oligonucleotide
  Sense strand starting at position 421 of SEQ ID NO: 914763
gcaacuuuggcuuaauuac

SEQ ID NO: 1028837 - RNA, 19 nt, Artificial Sequence
  Description of Artificial Sequence: Synthetic oligonucleotide
  Antisense strand to SEQ ID NO: 1028836
guaauuaagccaaaguugc

SEQ ID NO: 1028838 - RNA, 19 nt, Artificial Sequence
  Description of Artificial Sequence: Synthetic oligonucleotide
  Sense strand starting at position 476 of SEQ ID NO: 914763
aggaguggccucuaggaua

SEQ ID NO: 1028839 - RNA, 19 nt, Artificial Sequence
  Description of Artificial Sequence: Synthetic oligonucleotide
  Antisense strand to SEQ ID NO: 1028838
uauccuagaggccacuccu

SEQ ID NO: 1028840 - RNA, 19 nt, Artificial Sequence
  Description of Artificial Sequence: Synthetic oligonucleotide
  Sense strand starting at position 481 of SEQ ID NO: 914763
uggccucuaggauagaagu

SEQ ID NO: 1028841 - RNA, 19 nt, Artificial Sequence
  Description of Artificial Sequence: Synthetic oligonucleotide
  Antisense strand to SEQ ID NO: 1028840
acuucuauccuagaggcca

SEQ ID NO: 1028842 - RNA, 19 nt, Artificial Sequence
  Description of Artificial Sequence: Synthetic oligonucleotide
  Sense strand starting at position 483 of SEQ ID NO: 914763
gccucuaggauagaaguua

SEQ ID NO: 1028843 - RNA, 19 nt, Artificial Sequence
  Description of Artificial Sequence: Synthetic oligonucleotide
  Antisense strand to SEQ ID NO: 1028842
uaacuucuauccuagaggc

SEQ ID NO: 1028844 - RNA, 19 nt, Artificial Sequence
  Description of Artificial Sequence: Synthetic oligonucleotide
  Sense strand starting at position 588 of SEQ ID NO: 914763
gggagaaauuguuccacuc

SEQ ID NO: 1028845 - RNA, 19 nt, Artificial Sequence
  Description of Artificial Sequence: Synthetic oligonucleotide
  Antisense strand to SEQ ID NO: 1028844
gaguggaacaauuucuccc

SEQ ID NO: 1028846 - RNA, 19 nt, Artificial Sequence
  Description of Artificial Sequence: Synthetic oligonucleotide
  Sense strand starting at position 635 of SEQ ID NO: 914763
ggauauugguuuguaugga

SEQ ID NO: 1028847 - RNA, 19 nt, Artificial Sequence
  Description of Artificial Sequence: Synthetic oligonucleotide
  Antisense strand to SEQ ID NO: 1028846
uccauacaaaccaauaucc

SEQ ID NO: 1028848 - RNA, 19 nt, Artificial Sequence
  Description of Artificial Sequence: Synthetic oligonucleotide
  Sense strand starting at position 640 of SEQ ID NO: 914763
uugguuuguauggagucaa

SEQ ID NO: 1028849 - RNA, 19 nt, Artificial Sequence
  Description of Artificial Sequence: Synthetic oligonucleotide
  Antisense strand to SEQ ID NO: 1028848
uugacuccauacaaaccaa

SEQ ID NO: 1028850 - RNA, 19 nt, Artificial Sequence
  Description of Artificial Sequence: Synthetic oligonucleotide
  Sense strand starting at position 654 of SEQ ID NO: 914763
gucaauacucacugcaaag

SEQ ID NO: 1028851 - RNA, 19 nt, Artificial Sequence
  Description of Artificial Sequence: Synthetic oligonucleotide
  Antisense strand to SEQ ID NO: 1028850
cuuugcagugaguauugac

SEQ ID NO: 1028852 - RNA, 19 nt, Artificial Sequence
  Description of Artificial Sequence: Synthetic oligonucleotide
  Sense strand starting at position 1135 of SEQ ID NO: 914763
guaagauugacagguggaa

SEQ ID NO: 1028853 - RNA, 19 nt, Artificial Sequence
  Description of Artificial Sequence: Synthetic oligonucleotide
  Antisense strand to SEQ ID NO: 1028852
uuccaccugucaaucuuac

SEQ ID NO: 1028854 - RNA, 19 nt, Artificial Sequence
  Description of Artificial Sequence: Synthetic oligonucleotide
  Sense strand starting at position 1321 of SEQ ID NO: 914763
gcagguuuccuuuagacaa

SEQ ID NO: 1028855 - RNA, 19 nt, Artificial Sequence
  Description of Artificial Sequence: Synthetic oligonucleotide
  Antisense strand to SEQ ID NO: 1028854
uugucuaaaggaaaccugc

SEQ ID NO: 1028856 - RNA, 19 nt, Artificial Sequence
  Description of Artificial Sequence: Synthetic oligonucleotide
  Sense strand starting at position 1520 of SEQ ID NO: 914763
cuaaacuuaccagguggaa

SEQ ID NO: 1028857 - RNA, 19 nt, Artificial Sequence
  Description of Artificial Sequence: Synthetic oligonucleotide
  Antisense strand to SEQ ID NO: 1028856
uuccaccugguaaguuuag

SEQ ID NO: 1028858 - RNA, 19 nt, Artificial Sequence
  Description of Artificial Sequence: Synthetic oligonucleotide
  Sense strand starting at position 2034 of SEQ ID NO: 914763
guuaguagcguuguuucca

SEQ ID NO: 1028859 - RNA, 19 nt, Artificial Sequence
  Description of Artificial Sequence: Synthetic oligonucleotide
  Antisense strand to SEQ ID NO: 1028858
uggaaacaacgcuacuaac

SEQ ID NO: 1028860 - RNA, 19 nt, Artificial Sequence
  Description of Artificial Sequence: Synthetic oligonucleotide
  Sense strand starting at position 2068 of SEQ ID NO: 914763
ggaugacgucagcaaggaa

SEQ ID NO: 1028861 - RNA, 19 nt, Artificial Sequence
  Description of Artificial Sequence: Synthetic oligonucleotide
  Antisense strand to SEQ ID NO: 1028860
uuccuugcugacgucaucc

SEQ ID NO: 1028862 - RNA, 19 nt, Artificial Sequence
  Description of Artificial Sequence: Synthetic oligonucleotide
  Sense strand starting at position 2422 of SEQ ID NO: 914763
aggcacucagaauguugaa

SEQ ID NO: 1028863 - RNA, 19 nt, Artificial Sequence
  Description of Artificial Sequence: Synthetic oligonucleotide
  Antisense strand to SEQ ID NO: 1028862
uucaacauucugagugccu

SEQ ID NO: 1028864 - RNA, 19 nt, Artificial Sequence
  Description of Artificial Sequence: Synthetic oligonucleotide
  Sense strand starting at position 2472 of SEQ ID NO: 914763
uugucugaggcagagaguu

SEQ ID NO: 1028865 - RNA, 19 nt, Artificial Sequence
  Description of Artificial Sequence: Synthetic oligonucleotide
  Antisense strand to SEQ ID NO: 1028864
aacucucugccucagacaa

SEQ ID NO: 1028866 - RNA, 19 nt, Artificial Sequence
  Description of Artificial Sequence: Synthetic oligonucleotide
  Sense strand starting at position 2631 of SEQ ID NO: 914763
agagaaacauguuugcauu

SEQ ID NO: 1028867 - RNA, 19 nt, Artificial Sequence
  Description of Artificial Sequence: Synthetic oligonucleotide
  Antisense strand to SEQ ID NO: 1028866
aaugcaaacauguuucucu

SEQ ID NO: 1028868 - RNA, 19 nt, Artificial Sequence
  Description of Artificial Sequence: Synthetic oligonucleotide
  Sense strand starting at position 2644 of SEQ ID NO: 914763
ugcauuugaugugugagca

SEQ ID NO: 1028869 - RNA, 19 nt, Artificial Sequence
  Description of Artificial Sequence: Synthetic oligonucleotide
  Antisense strand to SEQ ID NO: 1028868
ugcucacacaucaaaugca

SEQ ID NO: 1028870 - RNA, 19 nt, Artificial Sequence
  Description of Artificial Sequence: Synthetic oligonucleotide
  Sense strand starting at position 2645 of SEQ ID NO: 914763
gcauuugaugugugagcaa

SEQ ID NO: 1028871 - RNA, 19 nt, Artificial Sequence
  Description of Artificial Sequence: Synthetic oligonucleotide
  Antisense strand to SEQ ID NO: 1028870
uugcucacacaucaaaugc

SEQ ID NO: 1028872 - RNA, 19 nt, Artificial Sequence
  Description of Artificial Sequence: Synthetic oligonucleotide
  Sense strand starting at position 2744 of SEQ ID NO: 914763
uuaugaacucugugauccu

SEQ ID NO: 1028873 - RNA, 19 nt, Artificial Sequence
  Description of Artificial Sequence: Synthetic oligonucleotide
  Antisense strand to SEQ ID NO: 1028872
aggaucacagaguucauaa

SEQ ID NO: 1028874 - RNA, 19 nt, Artificial Sequence
  Description of Artificial Sequence: Synthetic oligonucleotide
  Sense strand starting at position 2806 of SEQ ID NO: 914763
aagcauuugucgccaacuu

SEQ ID NO: 1028875 - RNA, 19 nt, Artificial Sequence
  Description of Artificial Sequence: Synthetic oligonucleotide
  Antisense strand to SEQ ID NO: 1028874
aaguuggcgacaaaugcuu

SEQ ID NO: 1028876 - RNA, 19 nt, Artificial Sequence
  Description of Artificial Sequence: Synthetic oligonucleotide
  Sense strand starting at position 2874 of SEQ ID NO: 914763
cucagcuuugcagaaaggu

SEQ ID NO: 1028877 - RNA, 19 nt, Artificial Sequence
  Description of Artificial Sequence: Synthetic oligonucleotide
  Antisense strand to SEQ ID NO: 1028876
accuuucugcaaagcugag

SEQ ID NO: 1028878 - RNA, 19 nt, Artificial Sequence
  Description of Artificial Sequence: Synthetic oligonucleotide
  Sense strand starting at position 2980 of SEQ ID NO: 914763
aagagucgaguccaaugua

SEQ ID NO: 1028879 - RNA, 19 nt, Artificial Sequence
  Description of Artificial Sequence: Synthetic oligonucleotide
  Antisense strand to SEQ ID NO: 1028878
uacauuggacucgacucuu

SEQ ID NO: 1028880 - RNA, 19 nt, Artificial Sequence
  Description of Artificial Sequence: Synthetic oligonucleotide
  Sense strand starting at position 2988 of SEQ ID NO: 914763
aguccaauguaguuggaga

SEQ ID NO: 1028881 - RNA, 19 nt, Artificial Sequence
  Description of Artificial Sequence: Synthetic oligonucleotide
  Antisense strand to SEQ ID NO: 1028880
ucuccaacuacauuggacu

SEQ ID NO: 1028882 - RNA, 19 nt, Artificial Sequence
  Description of Artificial Sequence: Synthetic oligonucleotide
  Sense strand starting at position 2989 of SEQ ID NO: 914763
guccaauguaguuggagaa

SEQ ID NO: 1028883 - RNA, 19 nt, Artificial Sequence
  Description of Artificial Sequence: Synthetic oligonucleotide
  Antisense strand to SEQ ID NO: 1028882
uucuccaacuacauuggac

SEQ ID NO: 1028884 - RNA, 19 nt, Artificial Sequence
  Description of Artificial Sequence: Synthetic oligonucleotide
  Sense strand starting at position 2990 of SEQ ID NO: 914763
uccaauguaguuggagaau

SEQ ID NO: 1028885 - RNA, 19 nt, Artificial Sequence
  Description of Artificial Sequence: Synthetic oligonucleotide
  Antisense strand to SEQ ID NO: 1028884
auucuccaacuacauugga

SEQ ID NO: 1028886 - RNA, 19 nt, Artificial Sequence
  Description of Artificial Sequence: Synthetic oligonucleotide
  Sense strand starting at position 3189 of SEQ ID NO: 914763
acgcaacuugaacaauuau

SEQ ID NO: 1028887 - RNA, 19 nt, Artificial Sequence
  Description of Artificial Sequence: Synthetic oligonucleotide
  Antisense strand to SEQ ID NO: 1028886
auaauuguucaaguugcgu

SEQ ID NO: 1028888 - RNA, 19 nt, Artificial Sequence
  Description of Artificial Sequence: Synthetic oligonucleotide
  Sense strand starting at position 3235 of SEQ ID NO: 914763
guuuguacauuucuaggua

SEQ ID NO: 1028889 - RNA, 19 nt, Artificial Sequence
  Description of Artificial Sequence: Synthetic oligonucleotide
  Antisense strand to SEQ ID NO: 1028888
uaccuagaaauguacaaac

SEQ ID NO: 1028890 - RNA, 19 nt, Artificial Sequence
  Description of Artificial Sequence: Synthetic oligonucleotide
  Sense strand starting at position 3379 of SEQ ID NO: 914763
acuugcucuguugaaucaa

SEQ ID NO: 1028891 - RNA, 19 nt, Artificial Sequence
  Description of Artificial Sequence: Synthetic oligonucleotide
  Antisense strand to SEQ ID NO: 1028890
uugauucaacagagcaagu

SEQ ID NO: 1028892 - RNA, 19 nt, Artificial Sequence
  Description of Artificial Sequence: Synthetic oligonucleotide
  Sense strand starting at position 3389 of SEQ ID NO: 914763
uugaaucaauguguaacau

SEQ ID NO: 1028893 - RNA, 19 nt, Artificial Sequence
  Description of Artificial Sequence: Synthetic oligonucleotide
  Antisense strand to SEQ ID NO: 1028892
auguuacacauugauucaa

SEQ ID NO: 1028894 - RNA, 19 nt, Artificial Sequence
  Description of Artificial Sequence: Synthetic oligonucleotide
  Sense strand starting at position 3399 of SEQ ID NO: 914763
guguaacauggccacuuaa

SEQ ID NO: 1028895 - RNA, 19 nt, Artificial Sequence
  Description of Artificial Sequence: Synthetic oligonucleotide
  Antisense strand to SEQ ID NO: 1028894
uuaaguggccauguuacac

SEQ ID NO: 1028896 - RNA, 19 nt, Artificial Sequence
  Description of Artificial Sequence: Synthetic oligonucleotide
  Sense strand starting at position 3451 of SEQ ID NO: 914763
gaaacuuagugucuagauc

SEQ ID NO: 1028897 - RNA, 19 nt, Artificial Sequence
  Description of Artificial Sequence: Synthetic oligonucleotide
  Antisense strand to SEQ ID NO: 1028896
gaucuagacacuaaguuuc

SEQ ID NO: 1028898 - RNA, 19 nt, Artificial Sequence
  Description of Artificial Sequence: Synthetic oligonucleotide
  Sense strand starting at position 3460 of SEQ ID NO: 914763
ugucuagauccaggaaguu

SEQ ID NO: 1028899 - RNA, 19 nt, Artificial Sequence
  Description of Artificial Sequence: Synthetic oligonucleotide
  Antisense strand to SEQ ID NO: 1028898
aacuuccuggaucuagaca

SEQ ID NO: 1028900 - RNA, 19 nt, Artificial Sequence
  Description of Artificial Sequence: Synthetic oligonucleotide
  Sense strand starting at position 3491 of SEQ ID NO: 914763
cuauucugggcucaucuaa

SEQ ID NO: 1028901 - RNA, 19 nt, Artificial Sequence
  Description of Artificial Sequence: Synthetic oligonucleotide
  Antisense strand to SEQ ID NO: 1028900
uuagaugagcccagaauag

SEQ ID NO: 1028902 - RNA, 19 nt, Artificial Sequence
  Description of Artificial Sequence: Synthetic oligonucleotide
  Sense strand starting at position 3498 of SEQ ID NO: 914763
gggcucaucuaacuacuua

SEQ ID NO: 1028903 - RNA, 19 nt, Artificial Sequence
  Description of Artificial Sequence: Synthetic oligonucleotide
  Antisense strand to SEQ ID NO: 1028902
uaaguaguuagaugagccc

SEQ ID NO: 1028904 - RNA, 19 nt, Artificial Sequence
  Description of Artificial Sequence: Synthetic oligonucleotide
  Sense strand starting at position 3605 of SEQ ID NO: 914763
augucaugucaggagugau

SEQ ID NO: 1028905 - RNA, 19 nt, Artificial Sequence
  Description of Artificial Sequence: Synthetic oligonucleotide
  Antisense strand to SEQ ID NO: 1028904
aucacuccugacaugacau

SEQ ID NO: 1028906 - RNA, 19 nt, Artificial Sequence
  Description of Artificial Sequence: Synthetic oligonucleotide
  Sense strand starting at position 3608 of SEQ ID NO: 914763
ucaugucaggagugaugaa

SEQ ID NO: 1028907 - RNA, 19 nt, Artificial Sequence
  Description of Artificial Sequence: Synthetic oligonucleotide
  Antisense strand to SEQ ID NO: 1028906
uucaucacuccugacauga

SEQ ID NO: 1028908 - RNA, 19 nt, Artificial Sequence
  Description of Artificial Sequence: Synthetic oligonucleotide
  Sense strand starting at position 3746 of SEQ ID NO: 914763
augguagagcucuaaguga

SEQ ID NO: 1028909 - RNA, 19 nt, Artificial Sequence
  Description of Artificial Sequence: Synthetic oligonucleotide
  Antisense strand to SEQ ID NO: 1028908
ucacuuagagcucuaccau

SEQ ID NO: 1028910 - RNA, 19 nt, Artificial Sequence
  Description of Artificial Sequence: Synthetic oligonucleotide
  Sense strand starting at position 3801 of SEQ ID NO: 914763
uagugagcccuuuggagga

SEQ ID NO: 1028911 - RNA, 19 nt, Artificial Sequence
  Description of Artificial Sequence: Synthetic oligonucleotide
  Antisense strand to SEQ ID NO: 1028910
uccuccaaagggcucacua

SEQ ID NO: 1028912 - RNA, 19 nt, Artificial Sequence
  Description of Artificial Sequence: Synthetic oligonucleotide
  Sense strand starting at position 3898 of SEQ ID NO: 914763
uucugaauuagguggacau

SEQ ID NO: 1028913 - RNA, 19 nt, Artificial Sequence
  Description of Artificial Sequence: Synthetic oligonucleotide
  Antisense strand to SEQ ID NO: 1028912
auguccaccuaauucagaa

SEQ ID NO: 1028914 - RNA, 19 nt, Artificial Sequence
  Description of Artificial Sequence: Synthetic oligonucleotide
  Sense strand starting at position 80 of SEQ ID NO: 914764
gaguuuguuguacaccuga

SEQ ID NO: 1028915 - RNA, 19 nt, Artificial Sequence
  Description of Artificial Sequence: Synthetic oligonucleotide
  Antisense strand to SEQ ID NO: 1028914
ucagguguacaacaaacuc

SEQ ID NO: 1028916 - RNA, 19 nt, Artificial Sequence
  Description of Artificial Sequence: Synthetic oligonucleotide
  Sense strand starting at position 274 of SEQ ID NO: 914764
cgguuuaaauagcuaaugu

SEQ ID NO: 1028917 - RNA, 19 nt, Artificial Sequence
  Description of Artificial Sequence: Synthetic oligonucleotide
  Antisense strand to SEQ ID NO: 1028916
acauuagcuauuuaaaccg

SEQ ID NO: 1028918 - RNA, 19 nt, Artificial Sequence
  Description of Artificial Sequence: Synthetic oligonucleotide
  Sense strand starting at position 442 of SEQ ID NO: 914764
agaaguacagagcgguuua

SEQ ID NO: 1028919 - RNA, 19 nt, Artificial Sequence
  Description of Artificial Sequence: Synthetic oligonucleotide
  Antisense strand to SEQ ID NO: 1028918
uaaaccgcucuguacuucu

SEQ ID NO: 1028920 - RNA, 19 nt, Artificial Sequence
  Description of Artificial Sequence: Synthetic oligonucleotide
  Sense strand starting at position 443 of SEQ ID NO: 914764
gaaguacagagcgguuuaa

SEQ ID NO: 1028921 - RNA, 19 nt, Artificial Sequence
  Description of Artificial Sequence: Synthetic oligonucleotide
  Antisense strand to SEQ ID NO: 1028920
uuaaaccgcucuguacuuc

SEQ ID NO: 1028922 - RNA, 19 nt, Artificial Sequence
  Description of Artificial Sequence: Synthetic oligonucleotide
  Sense strand starting at position 447 of SEQ ID NO: 914764
uacagagcgguuuaaauag

SEQ ID NO: 1028923 - RNA, 19 nt, Artificial Sequence
  Description of Artificial Sequence: Synthetic oligonucleotide
  Antisense strand to SEQ ID NO: 1028922
cuauuuaaaccgcucugua

SEQ ID NO: 1028924 - RNA, 19 nt, Artificial Sequence
  Description of Artificial Sequence: Synthetic oligonucleotide
  Sense strand starting at position 529 of SEQ ID NO: 914764
cacguuugguaccuaugua

SEQ ID NO: 1028925 - RNA, 19 nt, Artificial Sequence
  Description of Artificial Sequence: Synthetic oligonucleotide
  Antisense strand to SEQ ID NO: 1028924
uacauagguaccaaacgug

SEQ ID NO: 1028926 - RNA, 19 nt, Artificial Sequence
  Description of Artificial Sequence: Synthetic oligonucleotide
  Sense strand starting at position 530 of SEQ ID NO: 914764
acguuugguaccuauguaa

SEQ ID NO: 1028927 - RNA, 19 nt, Artificial Sequence
  Description of Artificial Sequence: Synthetic oligonucleotide
  Antisense strand to SEQ ID NO: 1028926
uuacauagguaccaaacgu

SEQ ID NO: 1028928 - RNA, 19 nt, Artificial Sequence
  Description of Artificial Sequence: Synthetic oligonucleotide
  Sense strand starting at position 533 of SEQ ID NO: 914764
uuugguaccuauguaacaa

SEQ ID NO: 1028929 - RNA, 19 nt, Artificial Sequence
  Description of Artificial Sequence: Synthetic oligonucleotide
  Antisense strand to SEQ ID NO: 1028928
uuguuacauagguaccaaa

SEQ ID NO: 1028930 - RNA, 19 nt, Artificial Sequence
  Description of Artificial Sequence: Synthetic oligonucleotide
  Sense strand starting at position 567 of SEQ ID NO: 914764
acauguaacccgggacuuu

SEQ ID NO: 1028931 - RNA, 19 nt, Artificial Sequence
  Description of Artificial Sequence: Synthetic oligonucleotide
  Antisense strand to SEQ ID NO: 1028930
aaagucccggguuacaugu

SEQ ID NO: 1028932 - RNA, 19 nt, Artificial Sequence
  Description of Artificial Sequence: Synthetic oligonucleotide
  Sense strand starting at position 568 of SEQ ID NO: 914764
cauguaacccgggacuuua

SEQ ID NO: 1028933 - RNA, 19 nt, Artificial Sequence
  Description of Artificial Sequence: Synthetic oligonucleotide
  Antisense strand to SEQ ID NO: 1028932
uaaagucccggguuacaug

SEQ ID NO: 1028934 - RNA, 19 nt, Artificial Sequence
  Description of Artificial Sequence: Synthetic oligonucleotide
  Sense strand starting at position 753 of SEQ ID NO: 914764
aguaucugaagaugugaga

SEQ ID NO: 1028935 - RNA, 19 nt, Artificial Sequence
  Description of Artificial Sequence: Synthetic oligonucleotide
  Antisense strand to SEQ ID NO: 1028934
ucucacaucuucagauacu

SEQ ID NO: 1028936 - RNA, 19 nt, Artificial Sequence
  Description of Artificial Sequence: Synthetic oligonucleotide
  Sense strand starting at position 792 of SEQ ID NO: 914764
gcagauagccuguggaauu

SEQ ID NO: 1028937 - RNA, 19 nt, Artificial Sequence
  Description of Artificial Sequence: Synthetic oligonucleotide
  Antisense strand to SEQ ID NO: 1028936
aauuccacaggcuaucugc

SEQ ID NO: 1028938 - RNA, 19 nt, Artificial Sequence
  Description of Artificial Sequence: Synthetic oligonucleotide
  Sense strand starting at position 842 of SEQ ID NO: 914764
aagagagugugggaaauaa

SEQ ID NO: 1028939 - RNA, 19 nt, Artificial Sequence
  Description of Artificial Sequence: Synthetic oligonucleotide
  Antisense strand to SEQ ID NO: 1028938
uuauuucccacacucucuu

SEQ ID NO: 1028940 - RNA, 19 nt, Artificial Sequence
  Description of Artificial Sequence: Synthetic oligonucleotide
  Sense strand starting at position 944 of SEQ ID NO: 914764
gaacacagugccugggaaa

SEQ ID NO: 1028941 - RNA, 19 nt, Artificial Sequence
  Description of Artificial Sequence: Synthetic oligonucleotide
  Antisense strand to SEQ ID NO: 1028940
uuucccaggcacuguguuc

SEQ ID NO: 1028942 - RNA, 19 nt, Artificial Sequence
  Description of Artificial Sequence: Synthetic oligonucleotide
  Sense strand starting at position 1087 of SEQ ID NO: 914764
aguggaaucuuauuccuuc

SEQ ID NO: 1028943 - RNA, 19 nt, Artificial Sequence
  Description of Artificial Sequence: Synthetic oligonucleotide
  Antisense strand to SEQ ID NO: 1028942
gaaggaauaagauuccacu

SEQ ID NO: 1028944 - RNA, 19 nt, Artificial Sequence
  Description of Artificial Sequence: Synthetic oligonucleotide
  Sense strand starting at position 1578 of SEQ ID NO: 914764
gaaggacucggacgaaauc

SEQ ID NO: 1028945 - RNA, 19 nt, Artificial Sequence
  Description of Artificial Sequence: Synthetic oligonucleotide
  Antisense strand to SEQ ID NO: 1028944
gauuucguccgaguccuuc

SEQ ID NO: 1028946 - RNA, 19 nt, Artificial Sequence
  Description of Artificial Sequence: Synthetic oligonucleotide
  Sense strand starting at position 1588 of SEQ ID NO: 914764
gacgaaaucuuccuucgag

SEQ ID NO: 1028947 - RNA, 19 nt, Artificial Sequence
  Description of Artificial Sequence: Synthetic oligonucleotide
  Antisense strand to SEQ ID NO: 1028946
cucgaaggaagauuucguc

SEQ ID NO: 1028948 - RNA, 19 nt, Artificial Sequence
  Description of Artificial Sequence: Synthetic oligonucleotide
  Sense strand starting at position 1589 of SEQ ID NO: 914764
acgaaaucuuccuucgaga

SEQ ID NO: 1028949 - RNA, 19 nt, Artificial Sequence
  Description of Artificial Sequence: Synthetic oligonucleotide
  Antisense strand to SEQ ID NO: 1028948
ucucgaaggaagauuucgu

SEQ ID NO: 1028950 - RNA, 19 nt, Artificial Sequence
  Description of Artificial Sequence: Synthetic oligonucleotide
  Sense strand starting at position 2165 of SEQ ID NO: 914764
ccaucauacucauugggag

SEQ ID NO: 1028951 - RNA, 19 nt, Artificial Sequence
  Description of Artificial Sequence: Synthetic oligonucleotide
  Antisense strand to SEQ ID NO: 1028950
cucccaaugaguaugaugg

SEQ ID NO: 1028952 - RNA, 19 nt, Artificial Sequence
  Description of Artificial Sequence: Synthetic oligonucleotide
  Sense strand starting at position 2166 of SEQ ID NO: 914764
caucauacucauugggagu

SEQ ID NO: 1028953 - RNA, 19 nt, Artificial Sequence
  Description of Artificial Sequence: Synthetic oligonucleotide
  Antisense strand to SEQ ID NO: 1028952
acucccaaugaguaugaug

SEQ ID NO: 1028954 - RNA, 19 nt, Artificial Sequence
  Description of Artificial Sequence: Synthetic oligonucleotide
  Sense strand starting at position 2453 of SEQ ID NO: 914764
uuguccuuucuccgaguuu

SEQ ID NO: 1028955 - RNA, 19 nt, Artificial Sequence
  Description of Artificial Sequence: Synthetic oligonucleotide
  Antisense strand to SEQ ID NO: 1028954
aaacucggagaaaggacaa

SEQ ID NO: 1028956 - RNA, 19 nt, Artificial Sequence
  Description of Artificial Sequence: Synthetic oligonucleotide
  Sense strand starting at position 2465 of SEQ ID NO: 914764
cgaguuuauuuaggaaguu

SEQ ID NO: 1028957 - RNA, 19 nt, Artificial Sequence
  Description of Artificial Sequence: Synthetic oligonucleotide
  Antisense strand to SEQ ID NO: 1028956
aacuuccuaaauaaacucg

SEQ ID NO: 1028958 - RNA, 19 nt, Artificial Sequence
  Description of Artificial Sequence: Synthetic oligonucleotide
  Sense strand starting at position 2673 of SEQ ID NO: 914764
cagcgucugcucugacaag

SEQ ID NO: 1028959 - RNA, 19 nt, Artificial Sequence
  Description of Artificial Sequence: Synthetic oligonucleotide
  Antisense strand to SEQ ID NO: 1028958
cuugucagagcagacgcug

SEQ ID NO: 1028960 - RNA, 19 nt, Artificial Sequence
  Description of Artificial Sequence: Synthetic oligonucleotide
  Sense strand starting at position 2801 of SEQ ID NO: 914764
ggcguugagaacuggagaa

SEQ ID NO: 1028961 - RNA, 19 nt, Artificial Sequence
  Description of Artificial Sequence: Synthetic oligonucleotide
  Antisense strand to SEQ ID NO: 1028960
uucuccaguucucaacgcc

SEQ ID NO: 1028962 - RNA, 19 nt, Artificial Sequence
  Description of Artificial Sequence: Synthetic oligonucleotide
  Sense strand starting at position 2891 of SEQ ID NO: 914764
agggcucuuugcgccaaau

SEQ ID NO: 1028963 - RNA, 19 nt, Artificial Sequence
  Description of Artificial Sequence: Synthetic oligonucleotide
  Antisense strand to SEQ ID NO: 1028962
auuuggcgcaaagagcccu

SEQ ID NO: 1028964 - RNA, 19 nt, Artificial Sequence
  Description of Artificial Sequence: Synthetic oligonucleotide
  Sense strand starting at position 2893 of SEQ ID NO: 914764
ggcucuuugcgccaaauau

SEQ ID NO: 1028965 - RNA, 19 nt, Artificial Sequence
  Description of Artificial Sequence: Synthetic oligonucleotide
  Antisense strand to SEQ ID NO: 1028964
auauuuggcgcaaagagcc

SEQ ID NO: 1028966 - RNA, 19 nt, Artificial Sequence
  Description of Artificial Sequence: Synthetic oligonucleotide
  Sense strand starting at position 2932 of SEQ ID NO: 914764
ugcaaaugcugcucagaaa

SEQ ID NO: 1028967 - RNA, 19 nt, Artificial Sequence
  Description of Artificial Sequence: Synthetic oligonucleotide
  Antisense strand to SEQ ID NO: 1028966
uuucugagcagcauuugca

SEQ ID NO: 1028968 - RNA, 19 nt, Artificial Sequence
  Description of Artificial Sequence: Synthetic oligonucleotide
  Sense strand starting at position 2933 of SEQ ID NO: 914764
gcaaaugcugcucagaaag

SEQ ID NO: 1028969 - RNA, 19 nt, Artificial Sequence
  Description of Artificial Sequence: Synthetic oligonucleotide
  Antisense strand to SEQ ID NO: 1028968
cuuucugagcagcauuugc

SEQ ID NO: 1028970 - RNA, 19 nt, Artificial Sequence
  Description of Artificial Sequence: Synthetic oligonucleotide
  Sense strand starting at position 2963 of SEQ ID NO: 914764
agggauaaaugcuucucga

SEQ ID NO: 1028971 - RNA, 19 nt, Artificial Sequence
  Description of Artificial Sequence: Synthetic oligonucleotide
  Antisense strand to SEQ ID NO: 1028970
ucgagaagcauuuaucccu

SEQ ID NO: 1028972 - RNA, 19 nt, Artificial Sequence
  Description of Artificial Sequence: Synthetic oligonucleotide
  Sense strand starting at position 3002 of SEQ ID NO: 914764
gcaugucuugccgcgaguu

SEQ ID NO: 1028973 - RNA, 19 nt, Artificial Sequence
  Description of Artificial Sequence: Synthetic oligonucleotide
  Antisense strand to SEQ ID NO: 1028972
aacucgcggcaagacaugc

SEQ ID NO: 1028974 - RNA, 19 nt, Artificial Sequence
  Description of Artificial Sequence: Synthetic oligonucleotide
  Sense strand starting at position 3118 of SEQ ID NO: 914764
cauacugguucugaggaua

SEQ ID NO: 1028975 - RNA, 19 nt, Artificial Sequence
  Description of Artificial Sequence: Synthetic oligonucleotide
  Antisense strand to SEQ ID NO: 1028974
uauccucagaaccaguaug

SEQ ID NO: 1028976 - RNA, 19 nt, Artificial Sequence
  Description of Artificial Sequence: Synthetic oligonucleotide
  Sense strand starting at position 3161 of SEQ ID NO: 914764
aaaugacaguaucccgaaa

SEQ ID NO: 1028977 - RNA, 19 nt, Artificial Sequence
  Description of Artificial Sequence: Synthetic oligonucleotide
  Antisense strand to SEQ ID NO: 1028976
uuucgggauacugucauuu

SEQ ID NO: 1028978 - RNA, 19 nt, Artificial Sequence
  Description of Artificial Sequence: Synthetic oligonucleotide
  Sense strand starting at position 3237 of SEQ ID NO: 914764
acccgaucugcggagagaa

SEQ ID NO: 1028979 - RNA, 19 nt, Artificial Sequence
  Description of Artificial Sequence: Synthetic oligonucleotide
  Antisense strand to SEQ ID NO: 1028978
uucucuccgcagaucgggu

SEQ ID NO: 1028980 - RNA, 19 nt, Artificial Sequence
  Description of Artificial Sequence: Synthetic oligonucleotide
  Sense strand starting at position 3271 of SEQ ID NO: 914764
ggcuuuaguuucccaguga

SEQ ID NO: 1028981 - RNA, 19 nt, Artificial Sequence
  Description of Artificial Sequence: Synthetic oligonucleotide
  Antisense strand to SEQ ID NO: 1028980
ucacugggaaacuaaagcc

SEQ ID NO: 1028982 - RNA, 19 nt, Artificial Sequence
  Description of Artificial Sequence: Synthetic oligonucleotide
  Sense strand starting at position 3275 of SEQ ID NO: 914764
uuaguuucccagugaaacc

SEQ ID NO: 1028983 - RNA, 19 nt, Artificial Sequence
  Description of Artificial Sequence: Synthetic oligonucleotide
  Antisense strand to SEQ ID NO: 1028982
gguuucacugggaaacuaa

SEQ ID NO: 1028984 - RNA, 19 nt, Artificial Sequence
  Description of Artificial Sequence: Synthetic oligonucleotide
  Sense strand starting at position 3355 of SEQ ID NO: 914764
uguggacuguguuuauuua

SEQ ID NO: 1028985 - RNA, 19 nt, Artificial Sequence
  Description of Artificial Sequence: Synthetic oligonucleotide
  Antisense strand to SEQ ID NO: 1028984
uaaauaaacacaguccaca

SEQ ID NO: 1028986 - RNA, 19 nt, Artificial Sequence
  Description of Artificial Sequence: Synthetic oligonucleotide
  Sense strand starting at position 3455 of SEQ ID NO: 914764
uuuguuagggcuuaaauau

SEQ ID NO: 1028987 - RNA, 19 nt, Artificial Sequence
  Description of Artificial Sequence: Synthetic oligonucleotide
  Antisense strand to SEQ ID NO: 1028986
auauuuaagcccuaacaaa

SEQ ID NO: 1028988 - RNA, 19 nt, Artificial Sequence
  Description of Artificial Sequence: Synthetic oligonucleotide
  Sense strand starting at position 3572 of SEQ ID NO: 914764
uguguacuaucacucagac

SEQ ID NO: 1028989 - RNA, 19 nt, Artificial Sequence
  Description of Artificial Sequence: Synthetic oligonucleotide
  Antisense strand to SEQ ID NO: 1028988
gucugagugauaguacaca

SEQ ID NO: 1028990 - RNA, 19 nt, Artificial Sequence
  Description of Artificial Sequence: Synthetic oligonucleotide
  Sense strand starting at position 3720 of SEQ ID NO: 914764
ucucauccugaggaaguuu

SEQ ID NO: 1028991 - RNA, 19 nt, Artificial Sequence
  Description of Artificial Sequence: Synthetic oligonucleotide
  Antisense strand to SEQ ID NO: 1028990
aaacuuccucaggaugaga

SEQ ID NO: 1028992 - RNA, 19 nt, Artificial Sequence
  Description of Artificial Sequence: Synthetic oligonucleotide
  Sense strand starting at position 3823 of SEQ ID NO: 914764
gugcauuuguguccauuga

SEQ ID NO: 1028993 - RNA, 19 nt, Artificial Sequence
  Description of Artificial Sequence: Synthetic oligonucleotide
  Antisense strand to SEQ ID NO: 1028992
ucaauggacacaaaugcac

SEQ ID NO: 1028994 - RNA, 19 nt, Artificial Sequence
  Description of Artificial Sequence: Synthetic oligonucleotide
  Sense strand starting at position 230 of SEQ ID NO: 914765
acaugcuugcagugacaca

SEQ ID NO: 1028995 - RNA, 19 nt, Artificial Sequence
  Description of Artificial Sequence: Synthetic oligonucleotide
  Antisense strand to SEQ ID NO: 1028994
ugugucacugcaagcaugu

SEQ ID NO: 1028996 - RNA, 19 nt, Artificial Sequence
  Description of Artificial Sequence: Synthetic oligonucleotide
  Sense strand starting at position 331 of SEQ ID NO: 914765
ccaccaggucuuggagaga

SEQ ID NO: 1028997 - RNA, 19 nt, Artificial Sequence
  Description of Artificial Sequence: Synthetic oligonucleotide
  Antisense strand to SEQ ID NO: 1028996
ucucuccaagaccuggugg

SEQ ID NO: 1028998 - RNA, 19 nt, Artificial Sequence
  Description of Artificial Sequence: Synthetic oligonucleotide
  Sense strand starting at position 970 of SEQ ID NO: 914765
gcaggauguucuuacaacu

SEQ ID NO: 1028999 - RNA, 19 nt, Artificial Sequence
  Description of Artificial Sequence: Synthetic oligonucleotide
  Antisense strand to SEQ ID NO: 1028998
aguuguaagaacauccugc

SEQ ID NO: 1029000 - RNA, 19 nt, Artificial Sequence
  Description of Artificial Sequence: Synthetic oligonucleotide
  Sense strand starting at position 1020 of SEQ ID NO: 914765
ccgcgucacagaugaggaa

SEQ ID NO: 1029001 - RNA, 19 nt, Artificial Sequence
  Description of Artificial Sequence: Synthetic oligonucleotide
  Antisense strand to SEQ ID NO: 1029000
uuccucaucugugacgcgg

SEQ ID NO: 1029002 - RNA, 19 nt, Artificial Sequence
  Description of Artificial Sequence: Synthetic oligonucleotide
  Sense strand starting at position 1111 of SEQ ID NO: 914765
ccuggcuguaccuguagaa

SEQ ID NO: 1029003 - RNA, 19 nt, Artificial Sequence
  Description of Artificial Sequence: Synthetic oligonucleotide
  Antisense strand to SEQ ID NO: 1029002
uucuacagguacagccagg

SEQ ID NO: 1029004 - RNA, 19 nt, Artificial Sequence
  Description of Artificial Sequence: Synthetic oligonucleotide
  Sense strand starting at position 1425 of SEQ ID NO: 914765
uacugugauucccgcagau

SEQ ID NO: 1029005 - RNA, 19 nt, Artificial Sequence
  Description of Artificial Sequence: Synthetic oligonucleotide
  Antisense strand to SEQ ID NO: 1029004
aucugcgggaaucacagua

SEQ ID NO: 1029006 - RNA, 19 nt, Artificial Sequence
  Description of Artificial Sequence: Synthetic oligonucleotide
  Sense strand starting at position 1427 of SEQ ID NO: 914765
cugugauucccgcagaugu

SEQ ID NO: 1029007 - RNA, 19 nt, Artificial Sequence
  Description of Artificial Sequence: Synthetic oligonucleotide
  Antisense strand to SEQ ID NO: 1029006
acaucugcgggaaucacag

SEQ ID NO: 1029008 - RNA, 19 nt, Artificial Sequence
  Description of Artificial Sequence: Synthetic oligonucleotide
  Sense strand starting at position 2646 of SEQ ID NO: 914765
uguccagaucgucgugauu

SEQ ID NO: 1029009 - RNA, 19 nt, Artificial Sequence
  Description of Artificial Sequence: Synthetic oligonucleotide
  Antisense strand to SEQ ID NO: 1029008
aaucacgacgaucuggaca

SEQ ID NO: 1029010 - RNA, 19 nt, Artificial Sequence
  Description of Artificial Sequence: Synthetic oligonucleotide
  Sense strand starting at position 2648 of SEQ ID NO: 914765
uccagaucgucgugauugu

SEQ ID NO: 1029011 - RNA, 19 nt, Artificial Sequence
  Description of Artificial Sequence: Synthetic oligonucleotide
  Antisense strand to SEQ ID NO: 1029010
acaaucacgacgaucugga

SEQ ID NO: 1029012 - RNA, 19 nt, Artificial Sequence
  Description of Artificial Sequence: Synthetic oligonucleotide
  Sense strand starting at position 2806 of SEQ ID NO: 914765
cucgauuaaucccaugaug

SEQ ID NO: 1029013 - RNA, 19 nt, Artificial Sequence
  Description of Artificial Sequence: Synthetic oligonucleotide
  Antisense strand to SEQ ID NO: 1029012
caucaugggauuaaucgag

SEQ ID NO: 1029014 - RNA, 19 nt, Artificial Sequence
  Description of Artificial Sequence: Synthetic oligonucleotide
  Sense strand starting at position 2815 of SEQ ID NO: 914765
ucccaugaugcgggcuaau

SEQ ID NO: 1029015 - RNA, 19 nt, Artificial Sequence
  Description of Artificial Sequence: Synthetic oligonucleotide
  Antisense strand to SEQ ID NO: 1029014
auuagcccgcaucauggga

SEQ ID NO: 1029016 - RNA, 19 nt, Artificial Sequence
  Description of Artificial Sequence: Synthetic oligonucleotide
  Sense strand starting at position 2843 of SEQ ID NO: 914765
gagaguuuaagugaccugu

SEQ ID NO: 1029017 - RNA, 19 nt, Artificial Sequence
  Description of Artificial Sequence: Synthetic oligonucleotide
  Antisense strand to SEQ ID NO: 1029016
acaggucacuuaaacucuc

SEQ ID NO: 1029018 - RNA, 19 nt, Artificial Sequence
  Description of Artificial Sequence: Synthetic oligonucleotide
  Sense strand starting at position 2845 of SEQ ID NO: 914765
gaguuuaagugaccuguua

SEQ ID NO: 1029019 - RNA, 19 nt, Artificial Sequence
  Description of Artificial Sequence: Synthetic oligonucleotide
  Antisense strand to SEQ ID NO: 1029018
uaacaggucacuuaaacuc

SEQ ID NO: 1029020 - RNA, 19 nt, Artificial Sequence
  Description of Artificial Sequence: Synthetic oligonucleotide
  Sense strand starting at position 2847 of SEQ ID NO: 914765
guuuaagugaccuguuaga

SEQ ID NO: 1029021 - RNA, 19 nt, Artificial Sequence
  Description of Artificial Sequence: Synthetic oligonucleotide
  Antisense strand to SEQ ID NO: 1029020
ucuaacaggucacuuaaac

SEQ ID NO: 1029022 - RNA, 19 nt, Artificial Sequence
  Description of Artificial Sequence: Synthetic oligonucleotide
  Sense strand starting at position 3042 of SEQ ID NO: 914765
ugaaguuguuugcuuguuu

SEQ ID NO: 1029023 - RNA, 19 nt, Artificial Sequence
  Description of Artificial Sequence: Synthetic oligonucleotide
  Antisense strand to SEQ ID NO: 1029022
aaacaagcaaacaacuuca

SEQ ID NO: 1029024 - RNA, 19 nt, Artificial Sequence
  Description of Artificial Sequence: Synthetic oligonucleotide
  Sense strand starting at position 3068 of SEQ ID NO: 914765
gucucccucccagaaugua

SEQ ID NO: 1029025 - RNA, 19 nt, Artificial Sequence
  Description of Artificial Sequence: Synthetic oligonucleotide
  Antisense strand to SEQ ID NO: 1029024
uacauucugggagggagac

SEQ ID NO: 1029026 - RNA, 19 nt, Artificial Sequence
  Description of Artificial Sequence: Synthetic oligonucleotide
  Sense strand starting at position 3158 of SEQ ID NO: 914765
cucaauaccuguugaaagu

SEQ ID NO: 1029027 - RNA, 19 nt, Artificial Sequence
  Description of Artificial Sequence: Synthetic oligonucleotide
  Antisense strand to SEQ ID NO: 1029026
acuuucaacagguauugag

SEQ ID NO: 1029028 - RNA, 19 nt, Artificial Sequence
  Description of Artificial Sequence: Synthetic oligonucleotide
  Sense strand starting at position 3217 of SEQ ID NO: 914765
gggcucaggcugugucauu

SEQ ID NO: 1029029 - RNA, 19 nt, Artificial Sequence
  Description of Artificial Sequence: Synthetic oligonucleotide
  Antisense strand to SEQ ID NO: 1029028
aaugacacagccugagccc

SEQ ID NO: 1029030 - RNA, 19 nt, Artificial Sequence
  Description of Artificial Sequence: Synthetic oligonucleotide
  Sense strand starting at position 3218 of SEQ ID NO: 914765
ggcucaggcugugucauuu

SEQ ID NO: 1029031 - RNA, 19 nt, Artificial Sequence
  Description of Artificial Sequence: Synthetic oligonucleotide
  Antisense strand to SEQ ID NO: 1029030
aaaugacacagccugagcc

SEQ ID NO: 1029032 - RNA, 19 nt, Artificial Sequence
  Description of Artificial Sequence: Synthetic oligonucleotide
  Sense strand starting at position 3224 of SEQ ID NO: 914765
ggcugugucauuugcccaa

SEQ ID NO: 1029033 - RNA, 19 nt, Artificial Sequence
  Description of Artificial Sequence: Synthetic oligonucleotide
  Antisense strand to SEQ ID NO: 1029032
uugggcaaaugacacagcc

SEQ ID NO: 1029034 - RNA, 19 nt, Artificial Sequence
  Description of Artificial Sequence: Synthetic oligonucleotide
  Sense strand starting at position 3226 of SEQ ID NO: 914765
cugugucauuugcccaacu

SEQ ID NO: 1029035 - RNA, 19 nt, Artificial Sequence
  Description of Artificial Sequence: Synthetic oligonucleotide
  Antisense strand to SEQ ID NO: 1029034
aguugggcaaaugacacag

SEQ ID NO: 1029036 - RNA, 19 nt, Artificial Sequence
  Description of Artificial Sequence: Synthetic oligonucleotide
  Sense strand starting at position 3227 of SEQ ID NO: 914765
ugugucauuugcccaacuu

SEQ ID NO: 1029037 - RNA, 19 nt, Artificial Sequence
  Description of Artificial Sequence: Synthetic oligonucleotide
  Antisense strand to SEQ ID NO: 1029036
aaguugggcaaaugacaca

SEQ ID NO: 1029038 - RNA, 19 nt, Artificial Sequence
  Description of Artificial Sequence: Synthetic oligonucleotide
  Sense strand starting at position 3228 of SEQ ID NO: 914765
gugucauuugcccaacuuc

SEQ ID NO: 1029039 - RNA, 19 nt, Artificial Sequence
  Description of Artificial Sequence: Synthetic oligonucleotide
  Antisense strand to SEQ ID NO: 1029038
gaaguugggcaaaugacac

SEQ ID NO: 1029040 - RNA, 19 nt, Artificial Sequence
  Description of Artificial Sequence: Synthetic oligonucleotide
  Sense strand starting at position 3238 of SEQ ID NO: 914765
cccaacuucuggcugcaaa

SEQ ID NO: 1029041 - RNA, 19 nt, Artificial Sequence
  Description of Artificial Sequence: Synthetic oligonucleotide
  Antisense strand to SEQ ID NO: 1029040
uuugcagccagaaguuggg

SEQ ID NO: 1029042 - RNA, 19 nt, Artificial Sequence
  Description of Artificial Sequence: Synthetic oligonucleotide
  Sense strand starting at position 3355 of SEQ ID NO: 914765
cagggauaaugguugcuau

SEQ ID NO: 1029043 - RNA, 19 nt, Artificial Sequence
  Description of Artificial Sequence: Synthetic oligonucleotide
  Antisense strand to SEQ ID NO: 1029042
auagcaaccauuaucccug

SEQ ID NO: 1029044 - RNA, 19 nt, Artificial Sequence
  Description of Artificial Sequence: Synthetic oligonucleotide
  Sense strand starting at position 3356 of SEQ ID NO: 914765
agggauaaugguugcuaug

SEQ ID NO: 1029045 - RNA, 19 nt, Artificial Sequence
  Description of Artificial Sequence: Synthetic oligonucleotide
  Antisense strand to SEQ ID NO: 1029044
cauagcaaccauuaucccu

SEQ ID NO: 1029046 - RNA, 19 nt, Artificial Sequence
  Description of Artificial Sequence: Synthetic oligonucleotide
  Sense strand starting at position 3358 of SEQ ID NO: 914765
ggauaaugguugcuaugga

SEQ ID NO: 1029047 - RNA, 19 nt, Artificial Sequence
  Description of Artificial Sequence: Synthetic oligonucleotide
  Antisense strand to SEQ ID NO: 1029046
uccauagcaaccauuaucc

SEQ ID NO: 1029048 - RNA, 19 nt, Artificial Sequence
  Description of Artificial Sequence: Synthetic oligonucleotide
  Sense strand starting at position 3362 of SEQ ID NO: 914765
aaugguugcuauggagacu

SEQ ID NO: 1029049 - RNA, 19 nt, Artificial Sequence
  Description of Artificial Sequence: Synthetic oligonucleotide
  Antisense strand to SEQ ID NO: 1029048
agucuccauagcaaccauu

SEQ ID NO: 1029050 - RNA, 19 nt, Artificial Sequence
  Description of Artificial Sequence: Synthetic oligonucleotide
  Sense strand starting at position 3365 of SEQ ID NO: 914765
gguugcuauggagacugau

SEQ ID NO: 1029051 - RNA, 19 nt, Artificial Sequence
  Description of Artificial Sequence: Synthetic oligonucleotide
  Antisense strand to SEQ ID NO: 1029050
aucagucuccauagcaacc

SEQ ID NO: 1029052 - RNA, 19 nt, Artificial Sequence
  Description of Artificial Sequence: Synthetic oligonucleotide
  Sense strand starting at position 3545 of SEQ ID NO: 914765
ggguuaaacaugugagacc

SEQ ID NO: 1029053 - RNA, 19 nt, Artificial Sequence
  Description of Artificial Sequence: Synthetic oligonucleotide
  Antisense strand to SEQ ID NO: 1029052
ggucucacauguuuaaccc

SEQ ID NO: 1029054 - RNA, 19 nt, Artificial Sequence
  Description of Artificial Sequence: Synthetic oligonucleotide
  Sense strand starting at position 3546 of SEQ ID NO: 914765
gguuaaacaugugagacca

SEQ ID NO: 1029055 - RNA, 19 nt, Artificial Sequence
  Description of Artificial Sequence: Synthetic oligonucleotide
  Antisense strand to SEQ ID NO: 1029054
uggucucacauguuuaacc

SEQ ID NO: 1029056 - RNA, 19 nt, Artificial Sequence
  Description of Artificial Sequence: Synthetic oligonucleotide
  Sense strand starting at position 3709 of SEQ ID NO: 914765
guggcaugugccuaguacu

SEQ ID NO: 1029057 - RNA, 19 nt, Artificial Sequence
  Description of Artificial Sequence: Synthetic oligonucleotide
  Antisense strand to SEQ ID NO: 1029056
aguacuaggcacaugccac

SEQ ID NO: 1029058 - RNA, 19 nt, Artificial Sequence
  Description of Artificial Sequence: Synthetic oligonucleotide
  Sense strand starting at position 3765 of SEQ ID NO: 914765
ggucaagccugcugugagu

SEQ ID NO: 1029059 - RNA, 19 nt, Artificial Sequence
  Description of Artificial Sequence: Synthetic oligonucleotide
  Antisense strand to SEQ ID NO: 1029058
acucacagcaggcuugacc

SEQ ID NO: 1029060 - RNA, 19 nt, Artificial Sequence
  Description of Artificial Sequence: Synthetic oligonucleotide
  Sense strand starting at position 3771 of SEQ ID NO: 914765
gccugcugugaguuguaau

SEQ ID NO: 1029061 - RNA, 19 nt, Artificial Sequence
  Description of Artificial Sequence: Synthetic oligonucleotide
  Antisense strand to SEQ ID NO: 1029060
auuacaacucacagcaggc

SEQ ID NO: 1029062 - RNA, 19 nt, Artificial Sequence
  Description of Artificial Sequence: Synthetic oligonucleotide
  Sense strand starting at position 3772 of SEQ ID NO: 914765
ccugcugugaguuguaauc

SEQ ID NO: 1029063 - RNA, 19 nt, Artificial Sequence
  Description of Artificial Sequence: Synthetic oligonucleotide
  Antisense strand to SEQ ID NO: 1029062
gauuacaacucacagcagg

SEQ ID NO: 1029064 - RNA, 19 nt, Artificial Sequence
  Description of Artificial Sequence: Synthetic oligonucleotide
  Sense strand starting at position 3774 of SEQ ID NO: 914765
ugcugugaguuguaaucac

SEQ ID NO: 1029065 - RNA, 19 nt, Artificial Sequence
  Description of Artificial Sequence: Synthetic oligonucleotide
  Antisense strand to SEQ ID NO: 1029064
gugauuacaacucacagca

SEQ ID NO: 1029066 - RNA, 19 nt, Artificial Sequence
  Description of Artificial Sequence: Synthetic oligonucleotide
  Sense strand starting at position 3935 of SEQ ID NO: 914765
ugcagaucucacuguaguc

SEQ ID NO: 1029067 - RNA, 19 nt, Artificial Sequence
  Description of Artificial Sequence: Synthetic oligonucleotide
  Antisense strand to SEQ ID NO: 1029066
gacuacagugagaucugca

SEQ ID NO: 1029068 - RNA, 19 nt, Artificial Sequence
  Description of Artificial Sequence: Synthetic oligonucleotide
  Sense strand starting at position 3947 of SEQ ID NO: 914765
uguagucacucacaauguu

SEQ ID NO: 1029069 - RNA, 19 nt, Artificial Sequence
  Description of Artificial Sequence: Synthetic oligonucleotide
  Antisense strand to SEQ ID NO: 1029068
aacauugugagugacuaca

SEQ ID NO: 1029070 - RNA, 19 nt, Artificial Sequence
  Description of Artificial Sequence: Synthetic oligonucleotide
  Sense strand starting at position 56 of SEQ ID NO: 914766
ccuggcuguaccuguagaa

SEQ ID NO: 1029071 - RNA, 19 nt, Artificial Sequence
  Description of Artificial Sequence: Synthetic oligonucleotide
  Antisense strand to SEQ ID NO: 1029070
uucuacagguacagccagg

SEQ ID NO: 1029072 - RNA, 19 nt, Artificial Sequence
  Description of Artificial Sequence: Synthetic oligonucleotide
  Sense strand starting at position 372 of SEQ ID NO: 914766
cugugauucccgcagaugu

SEQ ID NO: 1029073 - RNA, 19 nt, Artificial Sequence
  Description of Artificial Sequence: Synthetic oligonucleotide
  Antisense strand to SEQ ID NO: 1029072
acaucugcgggaaucacag

SEQ ID NO: 1029074 - RNA, 19 nt, Artificial Sequence
  Description of Artificial Sequence: Synthetic oligonucleotide
  Sense strand starting at position 1591 of SEQ ID NO: 914766
uguccagaucgucgugauu

SEQ ID NO: 1029075 - RNA, 19 nt, Artificial Sequence
  Description of Artificial Sequence: Synthetic oligonucleotide
  Antisense strand to SEQ ID NO: 1029074
aaucacgacgaucuggaca

SEQ ID NO: 1029076 - RNA, 19 nt, Artificial Sequence
  Description of Artificial Sequence: Synthetic oligonucleotide
  Sense strand starting at position 1751 of SEQ ID NO: 914766
cucgauuaaucccaugaug

SEQ ID NO: 1029077 - RNA, 19 nt, Artificial Sequence
  Description of Artificial Sequence: Synthetic oligonucleotide
  Antisense strand to SEQ ID NO: 1029076
caucaugggauuaaucgag

SEQ ID NO: 1029078 - RNA, 19 nt, Artificial Sequence
  Description of Artificial Sequence: Synthetic oligonucleotide
  Sense strand starting at position 1760 of SEQ ID NO: 914766
ucccaugaugcgggcuaau

SEQ ID NO: 1029079 - RNA, 19 nt, Artificial Sequence
  Description of Artificial Sequence: Synthetic oligonucleotide
  Antisense strand to SEQ ID NO: 1029078
auuagcccgcaucauggga

SEQ ID NO: 1029080 - RNA, 19 nt, Artificial Sequence
  Description of Artificial Sequence: Synthetic oligonucleotide
  Sense strand starting at position 1788 of SEQ ID NO: 914766
gagaguuuaagugaccugu

SEQ ID NO: 1029081 - RNA, 19 nt, Artificial Sequence
  Description of Artificial Sequence: Synthetic oligonucleotide
  Antisense strand to SEQ ID NO: 1029080
acaggucacuuaaacucuc

SEQ ID NO: 1029082 - RNA, 19 nt, Artificial Sequence
  Description of Artificial Sequence: Synthetic oligonucleotide
  Sense strand starting at position 1790 of SEQ ID NO: 914766
gaguuuaagugaccuguua

SEQ ID NO: 1029083 - RNA, 19 nt, Artificial Sequence
  Description of Artificial Sequence: Synthetic oligonucleotide
  Antisense strand to SEQ ID NO: 1029082
uaacaggucacuuaaacuc

SEQ ID NO: 1029084 - RNA, 19 nt, Artificial Sequence
  Description of Artificial Sequence: Synthetic oligonucleotide
  Sense strand starting at position 1792 of SEQ ID NO: 914766
guuuaagugaccuguuaga

SEQ ID NO: 1029085 - RNA, 19 nt, Artificial Sequence
  Description of Artificial Sequence: Synthetic oligonucleotide
  Antisense strand to SEQ ID NO: 1029084
ucuaacaggucacuuaaac

SEQ ID NO: 1029086 - RNA, 19 nt, Artificial Sequence
  Description of Artificial Sequence: Synthetic oligonucleotide
  Sense strand starting at position 1987 of SEQ ID NO: 914766
ugaaguuguuugcuuguuu

SEQ ID NO: 1029087 - RNA, 19 nt, Artificial Sequence
  Description of Artificial Sequence: Synthetic oligonucleotide
  Antisense strand to SEQ ID NO: 1029086
aaacaagcaaacaacuuca

SEQ ID NO: 1029088 - RNA, 19 nt, Artificial Sequence
  Description of Artificial Sequence: Synthetic oligonucleotide
  Sense strand starting at position 2013 of SEQ ID NO: 914766
gucucccucccagaaugua

SEQ ID NO: 1029089 - RNA, 19 nt, Artificial Sequence
  Description of Artificial Sequence: Synthetic oligonucleotide
  Antisense strand to SEQ ID NO: 1029088
uacauucugggagggagac

SEQ ID NO: 1029090 - RNA, 19 nt, Artificial Sequence
  Description of Artificial Sequence: Synthetic oligonucleotide
  Sense strand starting at position 2103 of SEQ ID NO: 914766
cucaauaccuguugaaagu

SEQ ID NO: 1029091 - RNA, 19 nt, Artificial Sequence
  Description of Artificial Sequence: Synthetic oligonucleotide
  Antisense strand to SEQ ID NO: 1029090
acuuucaacagguauugag

SEQ ID NO: 1029092 - RNA, 19 nt, Artificial Sequence
  Description of Artificial Sequence: Synthetic oligonucleotide
  Sense strand starting at position 2162 of SEQ ID NO: 914766
gggcucaggcugugucauu

SEQ ID NO: 1029093 - RNA, 19 nt, Artificial Sequence
  Description of Artificial Sequence: Synthetic oligonucleotide
  Antisense strand to SEQ ID NO: 1029092
aaugacacagccugagccc

SEQ ID NO: 1029094 - RNA, 19 nt, Artificial Sequence
  Description of Artificial Sequence: Synthetic oligonucleotide
  Sense strand starting at position 2163 of SEQ ID NO: 914766
ggcucaggcugugucauuu

SEQ ID NO: 1029095 - RNA, 19 nt, Artificial Sequence
  Description of Artificial Sequence: Synthetic oligonucleotide
  Antisense strand to SEQ ID NO: 1029094
aaaugacacagccugagcc

SEQ ID NO: 1029096 - RNA, 19 nt, Artificial Sequence
  Description of Artificial Sequence: Synthetic oligonucleotide
  Sense strand starting at position 2169 of SEQ ID NO: 914766
ggcugugucauuugcccaa

SEQ ID NO: 1029097 - RNA, 19 nt, Artificial Sequence
  Description of Artificial Sequence: Synthetic oligonucleotide
  Antisense strand to SEQ ID NO: 1029096
uugggcaaaugacacagcc

SEQ ID NO: 1029098 - RNA, 19 nt, Artificial Sequence
  Description of Artificial Sequence: Synthetic oligonucleotide
  Sense strand starting at position 2171 of SEQ ID NO: 914766
cugugucauuugcccaacu

SEQ ID NO: 1029099 - RNA, 19 nt, Artificial Sequence
  Description of Artificial Sequence: Synthetic oligonucleotide
  Antisense strand to SEQ ID NO: 1029098
aguugggcaaaugacacag

SEQ ID NO: 1029100 - RNA, 19 nt, Artificial Sequence
  Description of Artificial Sequence: Synthetic oligonucleotide
  Sense strand starting at position 2172 of SEQ ID NO: 914766
ugugucauuugcccaacuu

SEQ ID NO: 1029101 - RNA, 19 nt, Artificial Sequence
  Description of Artificial Sequence: Synthetic oligonucleotide
  Antisense strand to SEQ ID NO: 1029100
aaguugggcaaaugacaca

SEQ ID NO: 1029102 - RNA, 19 nt, Artificial Sequence
  Description of Artificial Sequence: Synthetic oligonucleotide
  Sense strand starting at position 2173 of SEQ ID NO: 914766
gugucauuugcccaacuuc

SEQ ID NO: 1029103 - RNA, 19 nt, Artificial Sequence
  Description of Artificial Sequence: Synthetic oligonucleotide
  Antisense strand to SEQ ID NO: 1029102
gaaguugggcaaaugacac

SEQ ID NO: 1029104 - RNA, 19 nt, Artificial Sequence
  Description of Artificial Sequence: Synthetic oligonucleotide
  Sense strand starting at position 2183 of SEQ ID NO: 914766
cccaacuucuggcugcaaa

SEQ ID NO: 1029105 - RNA, 19 nt, Artificial Sequence
  Description of Artificial Sequence: Synthetic oligonucleotide
  Antisense strand to SEQ ID NO: 1029104
uuugcagccagaaguuggg

SEQ ID NO: 1029106 - RNA, 19 nt, Artificial Sequence
  Description of Artificial Sequence: Synthetic oligonucleotide
  Sense strand starting at position 2300 of SEQ ID NO: 914766
cagggauaaugguugcuau

SEQ ID NO: 1029107 - RNA, 19 nt, Artificial Sequence
  Description of Artificial Sequence: Synthetic oligonucleotide
  Antisense strand to SEQ ID NO: 1029106
auagcaaccauuaucccug

SEQ ID NO: 1029108 - RNA, 19 nt, Artificial Sequence
  Description of Artificial Sequence: Synthetic oligonucleotide
  Sense strand starting at position 2301 of SEQ ID NO: 914766
agggauaaugguugcuaug

SEQ ID NO: 1029109 - RNA, 19 nt, Artificial Sequence
  Description of Artificial Sequence: Synthetic oligonucleotide
  Antisense strand to SEQ ID NO: 1029108
cauagcaaccauuaucccu

SEQ ID NO: 1029110 - RNA, 19 nt, Artificial Sequence
  Description of Artificial Sequence: Synthetic oligonucleotide
  Sense strand starting at position 2303 of SEQ ID NO: 914766
ggauaaugguugcuaugga

SEQ ID NO: 1029111 - RNA, 19 nt, Artificial Sequence
  Description of Artificial Sequence: Synthetic oligonucleotide
  Antisense strand to SEQ ID NO: 1029110
uccauagcaaccauuaucc

SEQ ID NO: 1029112 - RNA, 19 nt, Artificial Sequence
  Description of Artificial Sequence: Synthetic oligonucleotide
  Sense strand starting at position 2307 of SEQ ID NO: 914766
aaugguugcuauggagacu

SEQ ID NO: 1029113 - RNA, 19 nt, Artificial Sequence
  Description of Artificial Sequence: Synthetic oligonucleotide
  Antisense strand to SEQ ID NO: 1029112
agucuccauagcaaccauu

SEQ ID NO: 1029114 - RNA, 19 nt, Artificial Sequence
  Description of Artificial Sequence: Synthetic oligonucleotide
  Sense strand starting at position 2310 of SEQ ID NO: 914766
gguugcuauggagacugau

SEQ ID NO: 1029115 - RNA, 19 nt, Artificial Sequence
  Description of Artificial Sequence: Synthetic oligonucleotide
  Antisense strand to SEQ ID NO: 1029114
aucagucuccauagcaacc

SEQ ID NO: 1029116 - RNA, 19 nt, Artificial Sequence
  Description of Artificial Sequence: Synthetic oligonucleotide
  Sense strand starting at position 2490 of SEQ ID NO: 914766
ggguuaaacaugugagacc

SEQ ID NO: 1029117 - RNA, 19 nt, Artificial Sequence
  Description of Artificial Sequence: Synthetic oligonucleotide
  Antisense strand to SEQ ID NO: 1029116
ggucucacauguuuaaccc

SEQ ID NO: 1029118 - RNA, 19 nt, Artificial Sequence
  Description of Artificial Sequence: Synthetic oligonucleotide
  Sense strand starting at position 2491 of SEQ ID NO: 914766
gguuaaacaugugagacca

SEQ ID NO: 1029119 - RNA, 19 nt, Artificial Sequence
  Description of Artificial Sequence: Synthetic oligonucleotide
  Antisense strand to SEQ ID NO: 1029118
uggucucacauguuuaacc

SEQ ID NO: 1029120 - RNA, 19 nt, Artificial Sequence
  Description of Artificial Sequence: Synthetic oligonucleotide
  Sense strand starting at position 2654 of SEQ ID NO: 914766
guggcaugugccuaguacu

SEQ ID NO: 1029121 - RNA, 19 nt, Artificial Sequence
  Description of Artificial Sequence: Synthetic oligonucleotide
  Antisense strand to SEQ ID NO: 1029120
aguacuaggcacaugccac

SEQ ID NO: 1029122 - RNA, 19 nt, Artificial Sequence
  Description of Artificial Sequence: Synthetic oligonucleotide
  Sense strand starting at position 2716 of SEQ ID NO: 914766
gccugcugugaguuguaau

SEQ ID NO: 1029123 - RNA, 19 nt, Artificial Sequence
  Description of Artificial Sequence: Synthetic oligonucleotide
  Antisense strand to SEQ ID NO: 1029122
auuacaacucacagcaggc

SEQ ID NO: 1029124 - RNA, 19 nt, Artificial Sequence
  Description of Artificial Sequence: Synthetic oligonucleotide
  Sense strand starting at position 2717 of SEQ ID NO: 914766
ccugcugugaguuguaauc

SEQ ID NO: 1029125 - RNA, 19 nt, Artificial Sequence
  Description of Artificial Sequence: Synthetic oligonucleotide
  Antisense strand to SEQ ID NO: 1029124
gauuacaacucacagcagg

SEQ ID NO: 1029126 - RNA, 19 nt, Artificial Sequence
  Description of Artificial Sequence: Synthetic oligonucleotide
  Sense strand starting at position 2719 of SEQ ID NO: 914766
ugcugugaguuguaaucac

SEQ ID NO: 1029127 - RNA, 19 nt, Artificial Sequence
  Description of Artificial Sequence: Synthetic oligonucleotide
  Antisense strand to SEQ ID NO: 1029126
gugauuacaacucacagca

SEQ ID NO: 1029128 - RNA, 19 nt, Artificial Sequence
  Description of Artificial Sequence: Synthetic oligonucleotide
  Sense strand starting at position 2880 of SEQ ID NO: 914766
ugcagaucucacuguaguc

SEQ ID NO: 1029129 - RNA, 19 nt, Artificial Sequence
  Description of Artificial Sequence: Synthetic oligonucleotide
  Antisense strand to SEQ ID NO: 1029128
gacuacagugagaucugca

SEQ ID NO: 1029130 - RNA, 19 nt, Artificial Sequence
  Description of Artificial Sequence: Synthetic oligonucleotide
  Sense strand starting at position 2892 of SEQ ID NO: 914766
uguagucacucacaauguu

SEQ ID NO: 1029131 - RNA, 19 nt, Artificial Sequence
  Description of Artificial Sequence: Synthetic oligonucleotide
  Antisense strand to SEQ ID NO: 1029130
aacauugugagugacuaca

SEQ ID NO: 1029132 - RNA, 19 nt, Artificial Sequence
  Description of Artificial Sequence: Synthetic oligonucleotide
  Sense strand starting at position 3013 of SEQ ID NO: 914766
ggacacguaugggcauaua

SEQ ID NO: 1029133 - RNA, 19 nt, Artificial Sequence
  Description of Artificial Sequence: Synthetic oligonucleotide
  Antisense strand to SEQ ID NO: 1029132
uauaugcccauacgugucc

SEQ ID NO: 1029134 - RNA, 19 nt, Artificial Sequence
  Description of Artificial Sequence: Synthetic oligonucleotide
  Sense strand starting at position 3016 of SEQ ID NO: 914766
cacguaugggcauauaaac

SEQ ID NO: 1029135 - RNA, 19 nt, Artificial Sequence
  Description of Artificial Sequence: Synthetic oligonucleotide
  Antisense strand to SEQ ID NO: 1029134
guuuauaugcccauacgug

SEQ ID NO: 1029136 - RNA, 19 nt, Artificial Sequence
  Description of Artificial Sequence: Synthetic oligonucleotide
  Sense strand starting at position 3041 of SEQ ID NO: 914766
uguuccucuuggccuaaga

SEQ ID NO: 1029137 - RNA, 19 nt, Artificial Sequence
  Description of Artificial Sequence: Synthetic oligonucleotide
  Antisense strand to SEQ ID NO: 1029136
ucuuaggccaagaggaaca

SEQ ID NO: 1029138 - RNA, 19 nt, Artificial Sequence
  Description of Artificial Sequence: Synthetic oligonucleotide
  Sense strand starting at position 3081 of SEQ ID NO: 914766
ccaggacuuugcuguguga

SEQ ID NO: 1029139 - RNA, 19 nt, Artificial Sequence
  Description of Artificial Sequence: Synthetic oligonucleotide
  Antisense strand to SEQ ID NO: 1029138
ucacacagcaaaguccugg

SEQ ID NO: 1029140 - RNA, 19 nt, Artificial Sequence
  Description of Artificial Sequence: Synthetic oligonucleotide
  Sense strand starting at position 3094 of SEQ ID NO: 914766
gugugacccuauuagacga

SEQ ID NO: 1029141 - RNA, 19 nt, Artificial Sequence
  Description of Artificial Sequence: Synthetic oligonucleotide
  Antisense strand to SEQ ID NO: 1029140
ucgucuaauagggucacac

SEQ ID NO: 1029142 - RNA, 19 nt, Artificial Sequence
  Description of Artificial Sequence: Synthetic oligonucleotide
  Sense strand starting at position 3135 of SEQ ID NO: 914766
cugguacucucguagguaa

SEQ ID NO: 1029143 - RNA, 19 nt, Artificial Sequence
  Description of Artificial Sequence: Synthetic oligonucleotide
  Antisense strand to SEQ ID NO: 1029142
uuaccuacgagaguaccag

SEQ ID NO: 1029144 - RNA, 19 nt, Artificial Sequence
  Description of Artificial Sequence: Synthetic oligonucleotide
  Sense strand starting at position 3137 of SEQ ID NO: 914766
gguacucucguagguaaau

SEQ ID NO: 1029145 - RNA, 19 nt, Artificial Sequence
  Description of Artificial Sequence: Synthetic oligonucleotide
  Antisense strand to SEQ ID NO: 1029144
auuuaccuacgagaguacc

SEQ ID NO: 1029146 - RNA, 19 nt, Artificial Sequence
  Description of Artificial Sequence: Synthetic oligonucleotide
  Sense strand starting at position 3138 of SEQ ID NO: 914766
guacucucguagguaaaug

SEQ ID NO: 1029147 - RNA, 19 nt, Artificial Sequence
  Description of Artificial Sequence: Synthetic oligonucleotide
  Antisense strand to SEQ ID NO: 1029146
cauuuaccuacgagaguac

SEQ ID NO: 1029148 - RNA, 19 nt, Artificial Sequence
  Description of Artificial Sequence: Synthetic oligonucleotide
  Sense strand starting at position 3217 of SEQ ID NO: 914766
gcucaaucugcccaaaggu

SEQ ID NO: 1029149 - RNA, 19 nt, Artificial Sequence
  Description of Artificial Sequence: Synthetic oligonucleotide
  Antisense strand to SEQ ID NO: 1029148
accuuugggcagauugagc

SEQ ID NO: 1029150 - RNA, 19 nt, Artificial Sequence
  Description of Artificial Sequence: Synthetic oligonucleotide
  Sense strand starting at position 96 of SEQ ID NO: 914767
guggaguuggcgggaagau

SEQ ID NO: 1029151 - RNA, 19 nt, Artificial Sequence
  Description of Artificial Sequence: Synthetic oligonucleotide
  Antisense strand to SEQ ID NO: 1029150
aucuucccgccaacuccac

SEQ ID NO: 1029152 - RNA, 19 nt, Artificial Sequence
  Description of Artificial Sequence: Synthetic oligonucleotide
  Sense strand starting at position 97 of SEQ ID NO: 914767
uggaguuggcgggaagaua

SEQ ID NO: 1029153 - RNA, 19 nt, Artificial Sequence
  Description of Artificial Sequence: Synthetic oligonucleotide
  Antisense strand to SEQ ID NO: 1029152
uaucuucccgccaacucca

SEQ ID NO: 1029154 - RNA, 19 nt, Artificial Sequence
  Description of Artificial Sequence: Synthetic oligonucleotide
  Sense strand starting at position 268 of SEQ ID NO: 914767
cuuaaauuccuaugguuug

SEQ ID NO: 1029155 - RNA, 19 nt, Artificial Sequence
  Description of Artificial Sequence: Synthetic oligonucleotide
  Antisense strand to SEQ ID NO: 1029154
caaaccauaggaauuuaag

SEQ ID NO: 1029156 - RNA, 19 nt, Artificial Sequence
  Description of Artificial Sequence: Synthetic oligonucleotide
  Sense strand starting at position 298 of SEQ ID NO: 914767
aacaguagagccuguuuau

SEQ ID NO: 1029157 - RNA, 19 nt, Artificial Sequence
  Description of Artificial Sequence: Synthetic oligonucleotide
  Antisense strand to SEQ ID NO: 1029156
auaaacaggcucuacuguu

SEQ ID NO: 1029158 - RNA, 19 nt, Artificial Sequence
  Description of Artificial Sequence: Synthetic oligonucleotide
  Sense strand starting at position 467 of SEQ ID NO: 914767
guucuagucguggaagggu

SEQ ID NO: 1029159 - RNA, 19 nt, Artificial Sequence
  Description of Artificial Sequence: Synthetic oligonucleotide
  Antisense strand to SEQ ID NO: 1029158
acccuuccacgacuagaac

SEQ ID NO: 1029160 - RNA, 19 nt, Artificial Sequence
  Description of Artificial Sequence: Synthetic oligonucleotide
  Sense strand starting at position 480 of SEQ ID NO: 914767
aaggguuagcugcagaauu

SEQ ID NO: 1029161 - RNA, 19 nt, Artificial Sequence
  Description of Artificial Sequence: Synthetic oligonucleotide
  Antisense strand to SEQ ID NO: 1029160
aauucugcagcuaacccuu

SEQ ID NO: 1029162 - RNA, 19 nt, Artificial Sequence
  Description of Artificial Sequence: Synthetic oligonucleotide
  Sense strand starting at position 580 of SEQ ID NO: 914767
uugaguuugcuggaaggga

SEQ ID NO: 1029163 - RNA, 19 nt, Artificial Sequence
  Description of Artificial Sequence: Synthetic oligonucleotide
  Antisense strand to SEQ ID NO: 1029162
ucccuuccagcaaacucaa

SEQ ID NO: 1029164 - RNA, 19 nt, Artificial Sequence
  Description of Artificial Sequence: Synthetic oligonucleotide
  Sense strand starting at position 786 of SEQ ID NO: 914767
agcgcagaccuaugaauga

SEQ ID NO: 1029165 - RNA, 19 nt, Artificial Sequence
  Description of Artificial Sequence: Synthetic oligonucleotide
  Antisense strand to SEQ ID NO: 1029164
ucauucauaggucugcgcu

SEQ ID NO: 1029166 - RNA, 19 nt, Artificial Sequence
  Description of Artificial Sequence: Synthetic oligonucleotide
  Sense strand starting at position 917 of SEQ ID NO: 914767
cugaaaguccugggcuaag

SEQ ID NO: 1029167 - RNA, 19 nt, Artificial Sequence
  Description of Artificial Sequence: Synthetic oligonucleotide
  Antisense strand to SEQ ID NO: 1029166
cuuagcccaggacuuucag

SEQ ID NO: 1029168 - RNA, 19 nt, Artificial Sequence
  Description of Artificial Sequence: Synthetic oligonucleotide
  Sense strand starting at position 1055 of SEQ ID NO: 914767
ccaagucuuccagaaggug

SEQ ID NO: 1029169 - RNA, 19 nt, Artificial Sequence
  Description of Artificial Sequence: Synthetic oligonucleotide
  Antisense strand to SEQ ID NO: 1029168
caccuucuggaagacuugg

SEQ ID NO: 1029170 - RNA, 19 nt, Artificial Sequence
  Description of Artificial Sequence: Synthetic oligonucleotide
  Sense strand starting at position 2011 of SEQ ID NO: 914767
ccgcgaggccgccuuuaua

SEQ ID NO: 1029171 - RNA, 19 nt, Artificial Sequence
  Description of Artificial Sequence: Synthetic oligonucleotide
  Antisense strand to SEQ ID NO: 1029170
uauaaaggcggccucgcgg

SEQ ID NO: 1029172 - RNA, 19 nt, Artificial Sequence
  Description of Artificial Sequence: Synthetic oligonucleotide
  Sense strand starting at position 2142 of SEQ ID NO: 914767
cgcugauuggucgaauuug

SEQ ID NO: 1029173 - RNA, 19 nt, Artificial Sequence
  Description of Artificial Sequence: Synthetic oligonucleotide
  Antisense strand to SEQ ID NO: 1029172
caaauucgaccaaucagcg

SEQ ID NO: 1029174 - RNA, 19 nt, Artificial Sequence
  Description of Artificial Sequence: Synthetic oligonucleotide
  Sense strand starting at position 2215 of SEQ ID NO: 914767
caacuauccgcugauguag

SEQ ID NO: 1029175 - RNA, 19 nt, Artificial Sequence
  Description of Artificial Sequence: Synthetic oligonucleotide
  Antisense strand to SEQ ID NO: 1029174
cuacaucagcggauaguug

SEQ ID NO: 1029176 - RNA, 19 nt, Artificial Sequence
  Description of Artificial Sequence: Synthetic oligonucleotide
  Sense strand starting at position 2229 of SEQ ID NO: 914767
uguagccaauccuuguaaa

SEQ ID NO: 1029177 - RNA, 19 nt, Artificial Sequence
  Description of Artificial Sequence: Synthetic oligonucleotide
  Antisense strand to SEQ ID NO: 1029176
uuuacaaggauuggcuaca

SEQ ID NO: 1029178 - RNA, 19 nt, Artificial Sequence
  Description of Artificial Sequence: Synthetic oligonucleotide
  Sense strand starting at position 2230 of SEQ ID NO: 914767
guagccaauccuuguaaag

SEQ ID NO: 1029179 - RNA, 19 nt, Artificial Sequence
  Description of Artificial Sequence: Synthetic oligonucleotide
  Antisense strand to SEQ ID NO: 1029178
cuuuacaaggauuggcuac

SEQ ID NO: 1029180 - RNA, 19 nt, Artificial Sequence
  Description of Artificial Sequence: Synthetic oligonucleotide
  Sense strand starting at position 2240 of SEQ ID NO: 914767
cuuguaaagcgcgcgagau

SEQ ID NO: 1029181 - RNA, 19 nt, Artificial Sequence
  Description of Artificial Sequence: Synthetic oligonucleotide
  Antisense strand to SEQ ID NO: 1029180
aucucgcgcgcuuuacaag

SEQ ID NO: 1029182 - RNA, 19 nt, Artificial Sequence
  Description of Artificial Sequence: Synthetic oligonucleotide
  Sense strand starting at position 2242 of SEQ ID NO: 914767
uguaaagcgcgcgagauuu

SEQ ID NO: 1029183 - RNA, 19 nt, Artificial Sequence
  Description of Artificial Sequence: Synthetic oligonucleotide
  Antisense strand to SEQ ID NO: 1029182
aaaucucgcgcgcuuuaca

SEQ ID NO: 1029184 - RNA, 19 nt, Artificial Sequence
  Description of Artificial Sequence: Synthetic oligonucleotide
  Sense strand starting at position 2244 of SEQ ID NO: 914767
uaaagcgcgcgagauuuaa

SEQ ID NO: 1029185 - RNA, 19 nt, Artificial Sequence
  Description of Artificial Sequence: Synthetic oligonucleotide
  Antisense strand to SEQ ID NO: 1029184
uuaaaucucgcgcgcuuua

SEQ ID NO: 1029186 - RNA, 19 nt, Artificial Sequence
  Description of Artificial Sequence: Synthetic oligonucleotide
  Sense strand starting at position 2508 of SEQ ID NO: 914767
uuuaauagaccggguguca

SEQ ID NO: 1029187 - RNA, 19 nt, Artificial Sequence
  Description of Artificial Sequence: Synthetic oligonucleotide
  Antisense strand to SEQ ID NO: 1029186
ugacacccggucuauuaaa

SEQ ID NO: 1029188 - RNA, 19 nt, Artificial Sequence
  Description of Artificial Sequence: Synthetic oligonucleotide
  Sense strand starting at position 2599 of SEQ ID NO: 914767
aggaauccucccugcuaaa

SEQ ID NO: 1029189 - RNA, 19 nt, Artificial Sequence
  Description of Artificial Sequence: Synthetic oligonucleotide
  Antisense strand to SEQ ID NO: 1029188
uuuagcagggaggauuccu

SEQ ID NO: 1029190 - RNA, 19 nt, Artificial Sequence
  Description of Artificial Sequence: Synthetic oligonucleotide
  Sense strand starting at position 2788 of SEQ ID NO: 914767
cccggugacucuuugaaag

SEQ ID NO: 1029191 - RNA, 19 nt, Artificial Sequence
  Description of Artificial Sequence: Synthetic oligonucleotide
  Antisense strand to SEQ ID NO: 1029190
cuuucaaagagucaccggg

SEQ ID NO: 1029192 - RNA, 19 nt, Artificial Sequence
  Description of Artificial Sequence: Synthetic oligonucleotide
  Sense strand starting at position 2798 of SEQ ID NO: 914767
cuuugaaaguuuguuccca

SEQ ID NO: 1029193 - RNA, 19 nt, Artificial Sequence
  Description of Artificial Sequence: Synthetic oligonucleotide
  Antisense strand to SEQ ID NO: 1029192
ugggaacaaacuuucaaag

SEQ ID NO: 1029194 - RNA, 19 nt, Artificial Sequence
  Description of Artificial Sequence: Synthetic oligonucleotide
  Sense strand starting at position 2799 of SEQ ID NO: 914767
uuugaaaguuuguucccau

SEQ ID NO: 1029195 - RNA, 19 nt, Artificial Sequence
  Description of Artificial Sequence: Synthetic oligonucleotide
  Antisense strand to SEQ ID NO: 1029194
augggaacaaacuuucaaa

SEQ ID NO: 1029196 - RNA, 19 nt, Artificial Sequence
  Description of Artificial Sequence: Synthetic oligonucleotide
  Sense strand starting at position 2800 of SEQ ID NO: 914767
uugaaaguuuguucccaug

SEQ ID NO: 1029197 - RNA, 19 nt, Artificial Sequence
  Description of Artificial Sequence: Synthetic oligonucleotide
  Antisense strand to SEQ ID NO: 1029196
caugggaacaaacuuucaa

SEQ ID NO: 1029198 - RNA, 19 nt, Artificial Sequence
  Description of Artificial Sequence: Synthetic oligonucleotide
  Sense strand starting at position 2961 of SEQ ID NO: 914767
cauccuguuggaggaagua

SEQ ID NO: 1029199 - RNA, 19 nt, Artificial Sequence
  Description of Artificial Sequence: Synthetic oligonucleotide
  Antisense strand to SEQ ID NO: 1029198
uacuuccuccaacaggaug

SEQ ID NO: 1029200 - RNA, 19 nt, Artificial Sequence
  Description of Artificial Sequence: Synthetic oligonucleotide
  Sense strand starting at position 3058 of SEQ ID NO: 914767
acuuuauugucuccauuga

SEQ ID NO: 1029201 - RNA, 19 nt, Artificial Sequence
  Description of Artificial Sequence: Synthetic oligonucleotide
  Antisense strand to SEQ ID NO: 1029200
ucaauggagacaauaaagu

SEQ ID NO: 1029202 - RNA, 19 nt, Artificial Sequence
  Description of Artificial Sequence: Synthetic oligonucleotide
  Sense strand starting at position 3190 of SEQ ID NO: 914767
accagugguuccuugagag

SEQ ID NO: 1029203 - RNA, 19 nt, Artificial Sequence
  Description of Artificial Sequence: Synthetic oligonucleotide
  Antisense strand to SEQ ID NO: 1029202
cucucaaggaaccacuggu

SEQ ID NO: 1029204 - RNA, 19 nt, Artificial Sequence
  Description of Artificial Sequence: Synthetic oligonucleotide
  Sense strand starting at position 3211 of SEQ ID NO: 914767
aggacucugaaaugugagu

SEQ ID NO: 1029205 - RNA, 19 nt, Artificial Sequence
  Description of Artificial Sequence: Synthetic oligonucleotide
  Antisense strand to SEQ ID NO: 1029204
acucacauuucagaguccu

SEQ ID NO: 1029206 - RNA, 19 nt, Artificial Sequence
  Description of Artificial Sequence: Synthetic oligonucleotide
  Sense strand starting at position 3217 of SEQ ID NO: 914767
cugaaaugugaguguggau

SEQ ID NO: 1029207 - RNA, 19 nt, Artificial Sequence
  Description of Artificial Sequence: Synthetic oligonucleotide
  Antisense strand to SEQ ID NO: 1029206
auccacacucacauuucag

SEQ ID NO: 1029208 - RNA, 19 nt, Artificial Sequence
  Description of Artificial Sequence: Synthetic oligonucleotide
  Sense strand starting at position 3226 of SEQ ID NO: 914767
gaguguggauaacugcaaa

SEQ ID NO: 1029209 - RNA, 19 nt, Artificial Sequence
  Description of Artificial Sequence: Synthetic oligonucleotide
  Antisense strand to SEQ ID NO: 1029208
uuugcaguuauccacacuc

SEQ ID NO: 1029210 - RNA, 19 nt, Artificial Sequence
  Description of Artificial Sequence: Synthetic oligonucleotide
  Sense strand starting at position 3310 of SEQ ID NO: 914767
ugcagaaagccauagguaa

SEQ ID NO: 1029211 - RNA, 19 nt, Artificial Sequence
  Description of Artificial Sequence: Synthetic oligonucleotide
  Antisense strand to SEQ ID NO: 1029210
uuaccuauggcuuucugca

SEQ ID NO: 1029212 - RNA, 19 nt, Artificial Sequence
  Description of Artificial Sequence: Synthetic oligonucleotide
  Sense strand starting at position 3367 of SEQ ID NO: 914767
ggaugccaaugaucacaga

SEQ ID NO: 1029213 - RNA, 19 nt, Artificial Sequence
  Description of Artificial Sequence: Synthetic oligonucleotide
  Antisense strand to SEQ ID NO: 1029212
ucugugaucauuggcaucc

SEQ ID NO: 1029214 - RNA, 19 nt, Artificial Sequence
  Description of Artificial Sequence: Synthetic oligonucleotide
  Sense strand starting at position 3413 of SEQ ID NO: 914767
ggaggaguaugaagaguga

SEQ ID NO: 1029215 - RNA, 19 nt, Artificial Sequence
  Description of Artificial Sequence: Synthetic oligonucleotide
  Antisense strand to SEQ ID NO: 1029214
ucacucuucauacuccucc

SEQ ID NO: 1029216 - RNA, 19 nt, Artificial Sequence
  Description of Artificial Sequence: Synthetic oligonucleotide
  Sense strand starting at position 3501 of SEQ ID NO: 914767
cugugagguaaaggacaau

SEQ ID NO: 1029217 - RNA, 19 nt, Artificial Sequence
  Description of Artificial Sequence: Synthetic oligonucleotide
  Antisense strand to SEQ ID NO: 1029216
auuguccuuuaccucacag

SEQ ID NO: 1029218 - RNA, 19 nt, Artificial Sequence
  Description of Artificial Sequence: Synthetic oligonucleotide
  Sense strand starting at position 3554 of SEQ ID NO: 914767
cgagcugauaucgaaugga

SEQ ID NO: 1029219 - RNA, 19 nt, Artificial Sequence
  Description of Artificial Sequence: Synthetic oligonucleotide
  Antisense strand to SEQ ID NO: 1029218
uccauucgauaucagcucg

SEQ ID NO: 1029220 - RNA, 19 nt, Artificial Sequence
  Description of Artificial Sequence: Synthetic oligonucleotide
  Sense strand starting at position 3557 of SEQ ID NO: 914767
gcugauaucgaauggagaa

SEQ ID NO: 1029221 - RNA, 19 nt, Artificial Sequence
  Description of Artificial Sequence: Synthetic oligonucleotide
  Antisense strand to SEQ ID NO: 1029220
uucuccauucgauaucagc

SEQ ID NO: 1029222 - RNA, 19 nt, Artificial Sequence
  Description of Artificial Sequence: Synthetic oligonucleotide
  Sense strand starting at position 3695 of SEQ ID NO: 914767
augugagguuucucucaug

SEQ ID NO: 1029223 - RNA, 19 nt, Artificial Sequence
  Description of Artificial Sequence: Synthetic oligonucleotide
  Antisense strand to SEQ ID NO: 1029222
caugagagaaaccucacau

SEQ ID NO: 1029224 - RNA, 19 nt, Artificial Sequence
  Description of Artificial Sequence: Synthetic oligonucleotide
  Sense strand starting at position 3748 of SEQ ID NO: 914767
agggucauguuguuacauu

SEQ ID NO: 1029225 - RNA, 19 nt, Artificial Sequence
  Description of Artificial Sequence: Synthetic oligonucleotide
  Antisense strand to SEQ ID NO: 1029224
aauguaacaacaugacccu

SEQ ID NO: 1029226 - RNA, 19 nt, Artificial Sequence
  Description of Artificial Sequence: Synthetic oligonucleotide
  Sense strand starting at position 3865 of SEQ ID NO: 914767
auaccuaugcuuuaggaau

SEQ ID NO: 1029227 - RNA, 19 nt, Artificial Sequence
  Description of Artificial Sequence: Synthetic oligonucleotide
  Antisense strand to SEQ ID NO: 1029226
auuccuaaagcauagguau

SEQ ID NO: 1029228 - RNA, 19 nt, Artificial Sequence
  Description of Artificial Sequence: Synthetic oligonucleotide
  Sense strand starting at position 3871 of SEQ ID NO: 914767
augcuuuaggaauguggau

SEQ ID NO: 1029229 - RNA, 19 nt, Artificial Sequence
  Description of Artificial Sequence: Synthetic oligonucleotide
  Antisense strand to SEQ ID NO: 1029228
auccacauuccuaaagcau

SEQ ID NO: 1029230 - RNA, 19 nt, Artificial Sequence
  Description of Artificial Sequence: Synthetic oligonucleotide
  Sense strand starting at position 518 of SEQ ID NO: 914768
aggagaggucuucagcauu

SEQ ID NO: 1029231 - RNA, 19 nt, Artificial Sequence
  Description of Artificial Sequence: Synthetic oligonucleotide
  Antisense strand to SEQ ID NO: 1029230
aaugcugaagaccucuccu

SEQ ID NO: 1029232 - RNA, 19 nt, Artificial Sequence
  Description of Artificial Sequence: Synthetic oligonucleotide
  Sense strand starting at position 542 of SEQ ID NO: 914768
ccuugauggccacauggau

SEQ ID NO: 1029233 - RNA, 19 nt, Artificial Sequence
  Description of Artificial Sequence: Synthetic oligonucleotide
  Antisense strand to SEQ ID NO: 1029232
auccauguggccaucaagg

SEQ ID NO: 1029234 - RNA, 19 nt, Artificial Sequence
  Description of Artificial Sequence: Synthetic oligonucleotide
  Sense strand starting at position 716 of SEQ ID NO: 914768
acgccugacugauuccaau

SEQ ID NO: 1029235 - RNA, 19 nt, Artificial Sequence
  Description of Artificial Sequence: Synthetic oligonucleotide
  Antisense strand to SEQ ID NO: 1029234
auuggaaucagucaggcgu

SEQ ID NO: 1029236 - RNA, 19 nt, Artificial Sequence
  Description of Artificial Sequence: Synthetic oligonucleotide
  Sense strand starting at position 963 of SEQ ID NO: 914768
gccauauagcaagagguca

SEQ ID NO: 1029237 - RNA, 19 nt, Artificial Sequence
  Description of Artificial Sequence: Synthetic oligonucleotide
  Antisense strand to SEQ ID NO: 1029236
ugaccucuugcuauauggc

SEQ ID NO: 1029238 - RNA, 19 nt, Artificial Sequence
  Description of Artificial Sequence: Synthetic oligonucleotide
  Sense strand starting at position 992 of SEQ ID NO: 914768
cuguuauugguauagccau

SEQ ID NO: 1029239 - RNA, 19 nt, Artificial Sequence
  Description of Artificial Sequence: Synthetic oligonucleotide
  Antisense strand to SEQ ID NO: 1029238
auggcuauaccaauaacag

SEQ ID NO: 1029240 - RNA, 19 nt, Artificial Sequence
  Description of Artificial Sequence: Synthetic oligonucleotide
  Sense strand starting at position 998 of SEQ ID NO: 914768
uugguauagccaugguaaa

SEQ ID NO: 1029241 - RNA, 19 nt, Artificial Sequence
  Description of Artificial Sequence: Synthetic oligonucleotide
  Antisense strand to SEQ ID NO: 1029240
uuuaccauggcuauaccaa

SEQ ID NO: 1029242 - RNA, 19 nt, Artificial Sequence
  Description of Artificial Sequence: Synthetic oligonucleotide
  Sense strand starting at position 999 of SEQ ID NO: 914768
ugguauagccaugguaaau

SEQ ID NO: 1029243 - RNA, 19 nt, Artificial Sequence
  Description of Artificial Sequence: Synthetic oligonucleotide
  Antisense strand to SEQ ID NO: 1029242
auuuaccauggcuauacca

SEQ ID NO: 1029244 - RNA, 19 nt, Artificial Sequence
  Description of Artificial Sequence: Synthetic oligonucleotide
  Sense strand starting at position 1005 of SEQ ID NO: 914768
agccaugguaaaugugaau

SEQ ID NO: 1029245 - RNA, 19 nt, Artificial Sequence
  Description of Artificial Sequence: Synthetic oligonucleotide
  Antisense strand to SEQ ID NO: 1029244
auucacauuuaccauggcu

SEQ ID NO: 1029246 - RNA, 19 nt, Artificial Sequence
  Description of Artificial Sequence: Synthetic oligonucleotide
  Sense strand starting at position 1046 of SEQ ID NO: 914768
ucugaacuguucccaauga

SEQ ID NO: 1029247 - RNA, 19 nt, Artificial Sequence
  Description of Artificial Sequence: Synthetic oligonucleotide
  Antisense strand to SEQ ID NO: 1029246
ucauugggaacaguucaga

SEQ ID NO: 1029248 - RNA, 19 nt, Artificial Sequence
  Description of Artificial Sequence: Synthetic oligonucleotide
  Sense strand starting at position 1124 of SEQ ID NO: 914768
uuaaauggcucugccauuu

SEQ ID NO: 1029249 - RNA, 19 nt, Artificial Sequence
  Description of Artificial Sequence: Synthetic oligonucleotide
  Antisense strand to SEQ ID NO: 1029248
aaauggcagagccauuuaa

SEQ ID NO: 1029250 - RNA, 19 nt, Artificial Sequence
  Description of Artificial Sequence: Synthetic oligonucleotide
  Sense strand starting at position 1146 of SEQ ID NO: 914768
aucuucucucuguaaaugu

SEQ ID NO: 1029251 - RNA, 19 nt, Artificial Sequence
  Description of Artificial Sequence: Synthetic oligonucleotide
  Antisense strand to SEQ ID NO: 1029250
acauuuacagagagaagau

SEQ ID NO: 1029252 - RNA, 19 nt, Artificial Sequence
  Description of Artificial Sequence: Synthetic oligonucleotide
  Sense strand starting at position 1351 of SEQ ID NO: 914768
cuuuguggcucauuuaaug

SEQ ID NO: 1029253 - RNA, 19 nt, Artificial Sequence
  Description of Artificial Sequence: Synthetic oligonucleotide
  Antisense strand to SEQ ID NO: 1029252
cauuaaaugagccacaaag

SEQ ID NO: 1029254 - RNA, 19 nt, Artificial Sequence
  Description of Artificial Sequence: Synthetic oligonucleotide
  Sense strand starting at position 1359 of SEQ ID NO: 914768
cucauuuaaugcuuggcau

SEQ ID NO: 1029255 - RNA, 19 nt, Artificial Sequence
  Description of Artificial Sequence: Synthetic oligonucleotide
  Antisense strand to SEQ ID NO: 1029254
augccaagcauuaaaugag

SEQ ID NO: 1029256 - RNA, 19 nt, Artificial Sequence
  Description of Artificial Sequence: Synthetic oligonucleotide
  Sense strand starting at position 1360 of SEQ ID NO: 914768
ucauuuaaugcuuggcauu

SEQ ID NO: 1029257 - RNA, 19 nt, Artificial Sequence
  Description of Artificial Sequence: Synthetic oligonucleotide
  Antisense strand to SEQ ID NO: 1029256
aaugccaagcauuaaauga

SEQ ID NO: 1029258 - RNA, 19 nt, Artificial Sequence
  Description of Artificial Sequence: Synthetic oligonucleotide
  Sense strand starting at position 1498 of SEQ ID NO: 914768
guaagaauuggucacgggu

SEQ ID NO: 1029259 - RNA, 19 nt, Artificial Sequence
  Description of Artificial Sequence: Synthetic oligonucleotide
  Antisense strand to SEQ ID NO: 1029258
acccgugaccaauucuuac

SEQ ID NO: 1029260 - RNA, 19 nt, Artificial Sequence
  Description of Artificial Sequence: Synthetic oligonucleotide
  Sense strand starting at position 1670 of SEQ ID NO: 914768
cacugugugcuguaacaaa

SEQ ID NO: 1029261 - RNA, 19 nt, Artificial Sequence
  Description of Artificial Sequence: Synthetic oligonucleotide
  Antisense strand to SEQ ID NO: 1029260
uuuguuacagcacacagug

SEQ ID NO: 1029262 - RNA, 19 nt, Artificial Sequence
  Description of Artificial Sequence: Synthetic oligonucleotide
  Sense strand starting at position 2762 of SEQ ID NO: 914768
agggauuagccacgguuca

SEQ ID NO: 1029263 - RNA, 19 nt, Artificial Sequence
  Description of Artificial Sequence: Synthetic oligonucleotide
  Antisense strand to SEQ ID NO: 1029262
ugaaccguggcuaaucccu

SEQ ID NO: 1029264 - RNA, 19 nt, Artificial Sequence
  Description of Artificial Sequence: Synthetic oligonucleotide
  Sense strand starting at position 2763 of SEQ ID NO: 914768
gggauuagccacgguucaa

SEQ ID NO: 1029265 - RNA, 19 nt, Artificial Sequence
  Description of Artificial Sequence: Synthetic oligonucleotide
  Antisense strand to SEQ ID NO: 1029264
uugaaccguggcuaauccc

SEQ ID NO: 1029266 - RNA, 19 nt, Artificial Sequence
  Description of Artificial Sequence: Synthetic oligonucleotide
  Sense strand starting at position 2842 of SEQ ID NO: 914768
gcuuguuuggcagagaauc

SEQ ID NO: 1029267 - RNA, 19 nt, Artificial Sequence
  Description of Artificial Sequence: Synthetic oligonucleotide
  Antisense strand to SEQ ID NO: 1029266
gauucucugccaaacaagc

SEQ ID NO: 1029268 - RNA, 19 nt, Artificial Sequence
  Description of Artificial Sequence: Synthetic oligonucleotide
  Sense strand starting at position 2961 of SEQ ID NO: 914768
ugccaauaugagugaggua

SEQ ID NO: 1029269 - RNA, 19 nt, Artificial Sequence
  Description of Artificial Sequence: Synthetic oligonucleotide
  Antisense strand to SEQ ID NO: 1029268
uaccucacucauauuggca

SEQ ID NO: 1029270 - RNA, 19 nt, Artificial Sequence
  Description of Artificial Sequence: Synthetic oligonucleotide
  Sense strand starting at position 2966 of SEQ ID NO: 914768
auaugagugagguagguuu

SEQ ID NO: 1029271 - RNA, 19 nt, Artificial Sequence
  Description of Artificial Sequence: Synthetic oligonucleotide
  Antisense strand to SEQ ID NO: 1029270
aaaccuaccucacucauau

SEQ ID NO: 1029272 - RNA, 19 nt, Artificial Sequence
  Description of Artificial Sequence: Synthetic oligonucleotide
  Sense strand starting at position 3038 of SEQ ID NO: 914768
ggugacuguugacuaguga

SEQ ID NO: 1029273 - RNA, 19 nt, Artificial Sequence
  Description of Artificial Sequence: Synthetic oligonucleotide
  Antisense strand to SEQ ID NO: 1029272
ucacuagucaacagucacc

SEQ ID NO: 1029274 - RNA, 19 nt, Artificial Sequence
  Description of Artificial Sequence: Synthetic oligonucleotide
  Sense strand starting at position 3039 of SEQ ID NO: 914768
gugacuguugacuagugaa

SEQ ID NO: 1029275 - RNA, 19 nt, Artificial Sequence
  Description of Artificial Sequence: Synthetic oligonucleotide
  Antisense strand to SEQ ID NO: 1029274
uucacuagucaacagucac

SEQ ID NO: 1029276 - RNA, 19 nt, Artificial Sequence
  Description of Artificial Sequence: Synthetic oligonucleotide
  Sense strand starting at position 3133 of SEQ ID NO: 914768
uuaaauaaaucucugggua

SEQ ID NO: 1029277 - RNA, 19 nt, Artificial Sequence
  Description of Artificial Sequence: Synthetic oligonucleotide
  Antisense strand to SEQ ID NO: 1029276
uacccagagauuuauuuaa

SEQ ID NO: 1029278 - RNA, 19 nt, Artificial Sequence
  Description of Artificial Sequence: Synthetic oligonucleotide
  Sense strand starting at position 3136 of SEQ ID NO: 914768
aauaaaucucuggguaagu

SEQ ID NO: 1029279 - RNA, 19 nt, Artificial Sequence
  Description of Artificial Sequence: Synthetic oligonucleotide
  Antisense strand to SEQ ID NO: 1029278
acuuacccagagauuuauu

SEQ ID NO: 1029280 - RNA, 19 nt, Artificial Sequence
  Description of Artificial Sequence: Synthetic oligonucleotide
  Sense strand starting at position 3380 of SEQ ID NO: 914768
ccuuuagugggagauguau

SEQ ID NO: 1029281 - RNA, 19 nt, Artificial Sequence
  Description of Artificial Sequence: Synthetic oligonucleotide
  Antisense strand to SEQ ID NO: 1029280
auacaucucccacuaaagg

SEQ ID NO: 1029282 - RNA, 19 nt, Artificial Sequence
  Description of Artificial Sequence: Synthetic oligonucleotide
  Sense strand starting at position 3382 of SEQ ID NO: 914768
uuuagugggagauguauua

SEQ ID NO: 1029283 - RNA, 19 nt, Artificial Sequence
  Description of Artificial Sequence: Synthetic oligonucleotide
  Antisense strand to SEQ ID NO: 1029282
uaauacaucucccacuaaa

SEQ ID NO: 1029284 - RNA, 19 nt, Artificial Sequence
  Description of Artificial Sequence: Synthetic oligonucleotide
  Sense strand starting at position 3496 of SEQ ID NO: 914768
guggcuccagcucaauuau

SEQ ID NO: 1029285 - RNA, 19 nt, Artificial Sequence
  Description of Artificial Sequence: Synthetic oligonucleotide
  Antisense strand to SEQ ID NO: 1029284
auaauugagcuggagccac

SEQ ID NO: 1029286 - RNA, 19 nt, Artificial Sequence
  Description of Artificial Sequence: Synthetic oligonucleotide
  Sense strand starting at position 3548 of SEQ ID NO: 914768
uuaucagcucaggagaagu

SEQ ID NO: 1029287 - RNA, 19 nt, Artificial Sequence
  Description of Artificial Sequence: Synthetic oligonucleotide
  Antisense strand to SEQ ID NO: 1029286
acuucuccugagcugauaa

SEQ ID NO: 1029288 - RNA, 19 nt, Artificial Sequence
  Description of Artificial Sequence: Synthetic oligonucleotide
  Sense strand starting at position 3708 of SEQ ID NO: 914768
agccuucuaaaguguugga

SEQ ID NO: 1029289 - RNA, 19 nt, Artificial Sequence
  Description of Artificial Sequence: Synthetic oligonucleotide
  Antisense strand to SEQ ID NO: 1029288
uccaacacuuuagaaggcu

SEQ ID NO: 1029290 - RNA, 19 nt, Artificial Sequence
  Description of Artificial Sequence: Synthetic oligonucleotide
  Sense strand starting at position 3712 of SEQ ID NO: 914768
uucuaaaguguuggaguua

SEQ ID NO: 1029291 - RNA, 19 nt, Artificial Sequence
  Description of Artificial Sequence: Synthetic oligonucleotide
  Antisense strand to SEQ ID NO: 1029290
uaacuccaacacuuuagaa

SEQ ID NO: 1029292 - RNA, 19 nt, Artificial Sequence
  Description of Artificial Sequence: Synthetic oligonucleotide
  Sense strand starting at position 3721 of SEQ ID NO: 914768
guuggaguuacaugcauaa

SEQ ID NO: 1029293 - RNA, 19 nt, Artificial Sequence
  Description of Artificial Sequence: Synthetic oligonucleotide
  Antisense strand to SEQ ID NO: 1029292
uuaugcauguaacuccaac

SEQ ID NO: 1029294 - RNA, 19 nt, Artificial Sequence
  Description of Artificial Sequence: Synthetic oligonucleotide
  Sense strand starting at position 3725 of SEQ ID NO: 914768
gaguuacaugcauaagcca

SEQ ID NO: 1029295 - RNA, 19 nt, Artificial Sequence
  Description of Artificial Sequence: Synthetic oligonucleotide
  Antisense strand to SEQ ID NO: 1029294
uggcuuaugcauguaacuc

SEQ ID NO: 1029296 - RNA, 19 nt, Artificial Sequence
  Description of Artificial Sequence: Synthetic oligonucleotide
  Sense strand starting at position 3755 of SEQ ID NO: 914768
ccaggagcuuaaucucgaa

SEQ ID NO: 1029297 - RNA, 19 nt, Artificial Sequence
  Description of Artificial Sequence: Synthetic oligonucleotide
  Antisense strand to SEQ ID NO: 1029296
uucgagauuaagcuccugg

SEQ ID NO: 1029298 - RNA, 19 nt, Artificial Sequence
  Description of Artificial Sequence: Synthetic oligonucleotide
  Sense strand starting at position 3762 of SEQ ID NO: 914768
cuuaaucucgaaggaaguu

SEQ ID NO: 1029299 - RNA, 19 nt, Artificial Sequence
  Description of Artificial Sequence: Synthetic oligonucleotide
  Antisense strand to SEQ ID NO: 1029298
aacuuccuucgagauuaag

SEQ ID NO: 1029300 - RNA, 19 nt, Artificial Sequence
  Description of Artificial Sequence: Synthetic oligonucleotide
  Sense strand starting at position 3763 of SEQ ID NO: 914768
uuaaucucgaaggaaguuu

SEQ ID NO: 1029301 - RNA, 19 nt, Artificial Sequence
  Description of Artificial Sequence: Synthetic oligonucleotide
  Antisense strand to SEQ ID NO: 1029300
aaacuuccuucgagauuaa

SEQ ID NO: 1029302 - RNA, 19 nt, Artificial Sequence
  Description of Artificial Sequence: Synthetic oligonucleotide
  Sense strand starting at position 3784 of SEQ ID NO: 914768
uugaacuuuagguguggaa

SEQ ID NO: 1029303 - RNA, 19 nt, Artificial Sequence
  Description of Artificial Sequence: Synthetic oligonucleotide
  Antisense strand to SEQ ID NO: 1029302
uuccacaccuaaaguucaa

SEQ ID NO: 1029304 - RNA, 19 nt, Artificial Sequence
  Description of Artificial Sequence: Synthetic oligonucleotide
  Sense strand starting at position 3786 of SEQ ID NO: 914768
gaacuuuagguguggaaua

SEQ ID NO: 1029305 - RNA, 19 nt, Artificial Sequence
  Description of Artificial Sequence: Synthetic oligonucleotide
  Antisense strand to SEQ ID NO: 1029304
uauuccacaccuaaaguuc

SEQ ID NO: 1029306 - RNA, 19 nt, Artificial Sequence
  Description of Artificial Sequence: Synthetic oligonucleotide
  Sense strand starting at position 3788 of SEQ ID NO: 914768
acuuuagguguggaauauu

SEQ ID NO: 1029307 - RNA, 19 nt, Artificial Sequence
  Description of Artificial Sequence: Synthetic oligonucleotide
  Antisense strand to SEQ ID NO: 1029306
aauauuccacaccuaaagu

SEQ ID NO: 1029308 - RNA, 19 nt, Artificial Sequence
  Description of Artificial Sequence: Synthetic oligonucleotide
  Sense strand starting at position 3804 of SEQ ID NO: 914768
auucgaaaguaacuuccaa

SEQ ID NO: 1029309 - RNA, 19 nt, Artificial Sequence
  Description of Artificial Sequence: Synthetic oligonucleotide
  Antisense strand to SEQ ID NO: 1029308
uuggaaguuacuuucgaau

SEQ ID NO: 1029310 - RNA, 19 nt, Artificial Sequence
  Description of Artificial Sequence: Synthetic oligonucleotide
  Sense strand starting at position 24 of SEQ ID NO: 914769
ugguaucucuaagcaagag

SEQ ID NO: 1029311 - RNA, 19 nt, Artificial Sequence
  Description of Artificial Sequence: Synthetic oligonucleotide
  Antisense strand to SEQ ID NO: 1029310
cucuugcuuagagauacca

SEQ ID NO: 1029312 - RNA, 19 nt, Artificial Sequence
  Description of Artificial Sequence: Synthetic oligonucleotide
  Sense strand starting at position 50 of SEQ ID NO: 914769
uggagucaaggcugagaga

SEQ ID NO: 1029313 - RNA, 19 nt, Artificial Sequence
  Description of Artificial Sequence: Synthetic oligonucleotide
  Antisense strand to SEQ ID NO: 1029312
ucucucagccuugacucca

SEQ ID NO: 1029314 - RNA, 19 nt, Artificial Sequence
  Description of Artificial Sequence: Synthetic oligonucleotide
  Sense strand starting at position 598 of SEQ ID NO: 914769
gggugaauucuuugccaaa

SEQ ID NO: 1029315 - RNA, 19 nt, Artificial Sequence
  Description of Artificial Sequence: Synthetic oligonucleotide
  Antisense strand to SEQ ID NO: 1029314
uuuggcaaagaauucaccc

SEQ ID NO: 1029316 - RNA, 19 nt, Artificial Sequence
  Description of Artificial Sequence: Synthetic oligonucleotide
  Sense strand starting at position 676 of SEQ ID NO: 914769
guaugaacaugauuagcaa

SEQ ID NO: 1029317 - RNA, 19 nt, Artificial Sequence
  Description of Artificial Sequence: Synthetic oligonucleotide
  Antisense strand to SEQ ID NO: 1029316
uugcuaaucauguucauac

SEQ ID NO: 1029318 - RNA, 19 nt, Artificial Sequence
  Description of Artificial Sequence: Synthetic oligonucleotide
  Sense strand starting at position 872 of SEQ ID NO: 914769
acuguuauucuuuagaaug

SEQ ID NO: 1029319 - RNA, 19 nt, Artificial Sequence
  Description of Artificial Sequence: Synthetic oligonucleotide
  Antisense strand to SEQ ID NO: 1029318
cauucuaaagaauaacagu

SEQ ID NO: 1029320 - RNA, 19 nt, Artificial Sequence
  Description of Artificial Sequence: Synthetic oligonucleotide
  Sense strand starting at position 890 of SEQ ID NO: 914769
ggugcaaagaggcaugaua

SEQ ID NO: 1029321 - RNA, 19 nt, Artificial Sequence
  Description of Artificial Sequence: Synthetic oligonucleotide
  Antisense strand to SEQ ID NO: 1029320
uaucaugccucuuugcacc

SEQ ID NO: 1029322 - RNA, 19 nt, Artificial Sequence
  Description of Artificial Sequence: Synthetic oligonucleotide
  Sense strand starting at position 892 of SEQ ID NO: 914769
ugcaaagaggcaugauaca

SEQ ID NO: 1029323 - RNA, 19 nt, Artificial Sequence
  Description of Artificial Sequence: Synthetic oligonucleotide
  Antisense strand to SEQ ID NO: 1029322
uguaucaugccucuuugca

SEQ ID NO: 1029324 - RNA, 19 nt, Artificial Sequence
  Description of Artificial Sequence: Synthetic oligonucleotide
  Sense strand starting at position 913 of SEQ ID NO: 914769
guaucauuauugcccugaa

SEQ ID NO: 1029325 - RNA, 19 nt, Artificial Sequence
  Description of Artificial Sequence: Synthetic oligonucleotide
  Antisense strand to SEQ ID NO: 1029324
uucagggcaauaaugauac

SEQ ID NO: 1029326 - RNA, 19 nt, Artificial Sequence
  Description of Artificial Sequence: Synthetic oligonucleotide
  Sense strand starting at position 916 of SEQ ID NO: 914769
ucauuauugcccugaaaga

SEQ ID NO: 1029327 - RNA, 19 nt, Artificial Sequence
  Description of Artificial Sequence: Synthetic oligonucleotide
  Antisense strand to SEQ ID NO: 1029326
ucuuucagggcaauaauga

SEQ ID NO: 1029328 - RNA, 19 nt, Artificial Sequence
  Description of Artificial Sequence: Synthetic oligonucleotide
  Sense strand starting at position 944 of SEQ ID NO: 914769
gggaaaguauuagaaauaa

SEQ ID NO: 1029329 - RNA, 19 nt, Artificial Sequence
  Description of Artificial Sequence: Synthetic oligonucleotide
  Antisense strand to SEQ ID NO: 1029328
uuauuucuaauacuuuccc

SEQ ID NO: 1029330 - RNA, 19 nt, Artificial Sequence
  Description of Artificial Sequence: Synthetic oligonucleotide
  Sense strand starting at position 1032 of SEQ ID NO: 914769
uggucaauauguguacaca

SEQ ID NO: 1029331 - RNA, 19 nt, Artificial Sequence
  Description of Artificial Sequence: Synthetic oligonucleotide
  Antisense strand to SEQ ID NO: 1029330
uguguacacauauugacca

SEQ ID NO: 1029332 - RNA, 19 nt, Artificial Sequence
  Description of Artificial Sequence: Synthetic oligonucleotide
  Sense strand starting at position 1033 of SEQ ID NO: 914769
ggucaauauguguacacau

SEQ ID NO: 1029333 - RNA, 19 nt, Artificial Sequence
  Description of Artificial Sequence: Synthetic oligonucleotide
  Antisense strand to SEQ ID NO: 1029332
auguguacacauauugacc

SEQ ID NO: 1029334 - RNA, 19 nt, Artificial Sequence
  Description of Artificial Sequence: Synthetic oligonucleotide
  Sense strand starting at position 1035 of SEQ ID NO: 914769
ucaauauguguacacauau

SEQ ID NO: 1029335 - RNA, 19 nt, Artificial Sequence
  Description of Artificial Sequence: Synthetic oligonucleotide
  Antisense strand to SEQ ID NO: 1029334
auauguguacacauauuga

SEQ ID NO: 1029336 - RNA, 19 nt, Artificial Sequence
  Description of Artificial Sequence: Synthetic oligonucleotide
  Sense strand starting at position 1241 of SEQ ID NO: 914769
uguuauacacaauguuaag

SEQ ID NO: 1029337 - RNA, 19 nt, Artificial Sequence
  Description of Artificial Sequence: Synthetic oligonucleotide
  Antisense strand to SEQ ID NO: 1029336
cuuaacauuguguauaaca

SEQ ID NO: 1029338 - RNA, 19 nt, Artificial Sequence
  Description of Artificial Sequence: Synthetic oligonucleotide
  Sense strand starting at position 1252 of SEQ ID NO: 914769
auguuaaggcauuaaguau

SEQ ID NO: 1029339 - RNA, 19 nt, Artificial Sequence
  Description of Artificial Sequence: Synthetic oligonucleotide
  Antisense strand to SEQ ID NO: 1029338
auacuuaaugccuuaacau

SEQ ID NO: 1029340 - RNA, 19 nt, Artificial Sequence
  Description of Artificial Sequence: Synthetic oligonucleotide
  Sense strand starting at position 1258 of SEQ ID NO: 914769
aggcauuaaguauaauagu

SEQ ID NO: 1029341 - RNA, 19 nt, Artificial Sequence
  Description of Artificial Sequence: Synthetic oligonucleotide
  Antisense strand to SEQ ID NO: 1029340
acuauuauacuuaaugccu

SEQ ID NO: 1029342 - RNA, 19 nt, Artificial Sequence
  Description of Artificial Sequence: Synthetic oligonucleotide
  Sense strand starting at position 1827 of SEQ ID NO: 914769
ccuuaaaccugucuuguaa

SEQ ID NO: 1029343 - RNA, 19 nt, Artificial Sequence
  Description of Artificial Sequence: Synthetic oligonucleotide
  Antisense strand to SEQ ID NO: 1029342
uuacaagacagguuuaagg

SEQ ID NO: 1029344 - RNA, 19 nt, Artificial Sequence
  Description of Artificial Sequence: Synthetic oligonucleotide
  Sense strand starting at position 1919 of SEQ ID NO: 914769
gcagacuucuccucaggag

SEQ ID NO: 1029345 - RNA, 19 nt, Artificial Sequence
  Description of Artificial Sequence: Synthetic oligonucleotide
  Antisense strand to SEQ ID NO: 1029344
cuccugaggagaagucugc

SEQ ID NO: 1029346 - RNA, 19 nt, Artificial Sequence
  Description of Artificial Sequence: Synthetic oligonucleotide
  Sense strand starting at position 1920 of SEQ ID NO: 914769
cagacuucuccucaggagu

SEQ ID NO: 1029347 - RNA, 19 nt, Artificial Sequence
  Description of Artificial Sequence: Synthetic oligonucleotide
  Antisense strand to SEQ ID NO: 1029346
acuccugaggagaagucug

SEQ ID NO: 1029348 - RNA, 19 nt, Artificial Sequence
  Description of Artificial Sequence: Synthetic oligonucleotide
  Sense strand starting at position 1962 of SEQ ID NO: 914769
gagguugcuagugaacaca

SEQ ID NO: 1029349 - RNA, 19 nt, Artificial Sequence
  Description of Artificial Sequence: Synthetic oligonucleotide
  Antisense strand to SEQ ID NO: 1029348
uguguucacuagcaaccuc

SEQ ID NO: 1029350 - RNA, 19 nt, Artificial Sequence
  Description of Artificial Sequence: Synthetic oligonucleotide
  Sense strand starting at position 1974 of SEQ ID NO: 914769
gaacacaguugugucagaa

SEQ ID NO: 1029351 - RNA, 19 nt, Artificial Sequence
  Description of Artificial Sequence: Synthetic oligonucleotide
  Antisense strand to SEQ ID NO: 1029350
uucugacacaacuguguuc

SEQ ID NO: 1029352 - RNA, 19 nt, Artificial Sequence
  Description of Artificial Sequence: Synthetic oligonucleotide
  Sense strand starting at position 2099 of SEQ ID NO: 914769
cagggugaggucuaaguga

SEQ ID NO: 1029353 - RNA, 19 nt, Artificial Sequence
  Description of Artificial Sequence: Synthetic oligonucleotide
  Antisense strand to SEQ ID NO: 1029352
ucacuuagaccucacccug

SEQ ID NO: 1029354 - RNA, 19 nt, Artificial Sequence
  Description of Artificial Sequence: Synthetic oligonucleotide
  Sense strand starting at position 2250 of SEQ ID NO: 914769
uugcaaguguauuuacgua

SEQ ID NO: 1029355 - RNA, 19 nt, Artificial Sequence
  Description of Artificial Sequence: Synthetic oligonucleotide
  Antisense strand to SEQ ID NO: 1029354
uacguaaauacacuugcaa

SEQ ID NO: 1029356 - RNA, 19 nt, Artificial Sequence
  Description of Artificial Sequence: Synthetic oligonucleotide
  Sense strand starting at position 2264 of SEQ ID NO: 914769
acguaauauuuggaaucac

SEQ ID NO: 1029357 - RNA, 19 nt, Artificial Sequence
  Description of Artificial Sequence: Synthetic oligonucleotide
  Antisense strand to SEQ ID NO: 1029356
gugauuccaaauauuacgu

SEQ ID NO: 1029358 - RNA, 19 nt, Artificial Sequence
  Description of Artificial Sequence: Synthetic oligonucleotide
  Sense strand starting at position 2382 of SEQ ID NO: 914769
agcuuugggauauguagau

SEQ ID NO: 1029359 - RNA, 19 nt, Artificial Sequence
  Description of Artificial Sequence: Synthetic oligonucleotide
  Antisense strand to SEQ ID NO: 1029358
aucuacauaucccaaagcu

SEQ ID NO: 1029360 - RNA, 19 nt, Artificial Sequence
  Description of Artificial Sequence: Synthetic oligonucleotide
  Sense strand starting at position 2388 of SEQ ID NO: 914769
gggauauguagauggaucu

SEQ ID NO: 1029361 - RNA, 19 nt, Artificial Sequence
  Description of Artificial Sequence: Synthetic oligonucleotide
  Antisense strand to SEQ ID NO: 1029360
agauccaucuacauauccc

SEQ ID NO: 1029362 - RNA, 19 nt, Artificial Sequence
  Description of Artificial Sequence: Synthetic oligonucleotide
  Sense strand starting at position 2659 of SEQ ID NO: 914769
gugcucugugcauuaguua

SEQ ID NO: 1029363 - RNA, 19 nt, Artificial Sequence
  Description of Artificial Sequence: Synthetic oligonucleotide
  Antisense strand to SEQ ID NO: 1029362
uaacuaaugcacagagcac

SEQ ID NO: 1029364 - RNA, 19 nt, Artificial Sequence
  Description of Artificial Sequence: Synthetic oligonucleotide
  Sense strand starting at position 2765 of SEQ ID NO: 914769
cccaaagugugacuaucaa

SEQ ID NO: 1029365 - RNA, 19 nt, Artificial Sequence
  Description of Artificial Sequence: Synthetic oligonucleotide
  Antisense strand to SEQ ID NO: 1029364
uugauagucacacuuuggg

SEQ ID NO: 1029366 - RNA, 19 nt, Artificial Sequence
  Description of Artificial Sequence: Synthetic oligonucleotide
  Sense strand starting at position 2832 of SEQ ID NO: 914769
uguuucugccuggacuaau

SEQ ID NO: 1029367 - RNA, 19 nt, Artificial Sequence
  Description of Artificial Sequence: Synthetic oligonucleotide
  Antisense strand to SEQ ID NO: 1029366
auuaguccaggcagaaaca

SEQ ID NO: 1029368 - RNA, 19 nt, Artificial Sequence
  Description of Artificial Sequence: Synthetic oligonucleotide
  Sense strand starting at position 2842 of SEQ ID NO: 914769
uggacuaaucugcaagagu

SEQ ID NO: 1029369 - RNA, 19 nt, Artificial Sequence
  Description of Artificial Sequence: Synthetic oligonucleotide
  Antisense strand to SEQ ID NO: 1029368
acucuugcagauuagucca

SEQ ID NO: 1029370 - RNA, 19 nt, Artificial Sequence
  Description of Artificial Sequence: Synthetic oligonucleotide
  Sense strand starting at position 2876 of SEQ ID NO: 914769
aagccucugugacuuagaa

SEQ ID NO: 1029371 - RNA, 19 nt, Artificial Sequence
  Description of Artificial Sequence: Synthetic oligonucleotide
  Antisense strand to SEQ ID NO: 1029370
uucuaagucacagaggcuu

SEQ ID NO: 1029372 - RNA, 19 nt, Artificial Sequence
  Description of Artificial Sequence: Synthetic oligonucleotide
  Sense strand starting at position 2878 of SEQ ID NO: 914769
gccucugugacuuagaaag

SEQ ID NO: 1029373 - RNA, 19 nt, Artificial Sequence
  Description of Artificial Sequence: Synthetic oligonucleotide
  Antisense strand to SEQ ID NO: 1029372
cuuucuaagucacagaggc

SEQ ID NO: 1029374 - RNA, 19 nt, Artificial Sequence
  Description of Artificial Sequence: Synthetic oligonucleotide
  Sense strand starting at position 2920 of SEQ ID NO: 914769
uucuacuuggcucagauua

SEQ ID NO: 1029375 - RNA, 19 nt, Artificial Sequence
  Description of Artificial Sequence: Synthetic oligonucleotide
  Antisense strand to SEQ ID NO: 1029374
uaaucugagccaaguagaa

SEQ ID NO: 1029376 - RNA, 19 nt, Artificial Sequence
  Description of Artificial Sequence: Synthetic oligonucleotide
  Sense strand starting at position 3257 of SEQ ID NO: 914769
gucagucauccugaauccu

SEQ ID NO: 1029377 - RNA, 19 nt, Artificial Sequence
  Description of Artificial Sequence: Synthetic oligonucleotide
  Antisense strand to SEQ ID NO: 1029376
aggauucaggaugacugac

SEQ ID NO: 1029378 - RNA, 19 nt, Artificial Sequence
  Description of Artificial Sequence: Synthetic oligonucleotide
  Sense strand starting at position 3689 of SEQ ID NO: 914769
gccuauguaugauuauaga

SEQ ID NO: 1029379 - RNA, 19 nt, Artificial Sequence
  Description of Artificial Sequence: Synthetic oligonucleotide
  Antisense strand to SEQ ID NO: 1029378
ucuauaaucauacauaggc

SEQ ID NO: 1029380 - RNA, 19 nt, Artificial Sequence
  Description of Artificial Sequence: Synthetic oligonucleotide
  Sense strand starting at position 3867 of SEQ ID NO: 914769
gcagauuugacuuggcugu

SEQ ID NO: 1029381 - RNA, 19 nt, Artificial Sequence
  Description of Artificial Sequence: Synthetic oligonucleotide
  Antisense strand to SEQ ID NO: 1029380
acagccaagucaaaucugc

SEQ ID NO: 1029382 - RNA, 19 nt, Artificial Sequence
  Description of Artificial Sequence: Synthetic oligonucleotide
  Sense strand starting at position 3976 of SEQ ID NO: 914769
auauaagaggcauguauau

SEQ ID NO: 1029383 - RNA, 19 nt, Artificial Sequence
  Description of Artificial Sequence: Synthetic oligonucleotide
  Antisense strand to SEQ ID NO: 1029382
auauacaugccucuuauau

SEQ ID NO: 1029384 - RNA, 19 nt, Artificial Sequence
  Description of Artificial Sequence: Synthetic oligonucleotide
  Sense strand starting at position 3978 of SEQ ID NO: 914769
auaagaggcauguauaugu

SEQ ID NO: 1029385 - RNA, 19 nt, Artificial Sequence
  Description of Artificial Sequence: Synthetic oligonucleotide
  Antisense strand to SEQ ID NO: 1029384
acauauacaugccucuuau

SEQ ID NO: 1029386 - RNA, 19 nt, Artificial Sequence
  Description of Artificial Sequence: Synthetic oligonucleotide
  Sense strand starting at position 3982 of SEQ ID NO: 914769
gaggcauguauaugugaaa

SEQ ID NO: 1029387 - RNA, 19 nt, Artificial Sequence
  Description of Artificial Sequence: Synthetic oligonucleotide
  Antisense strand to SEQ ID NO: 1029386
uuucacauauacaugccuc

SEQ ID NO: 1029388 - RNA, 19 nt, Artificial Sequence
  Description of Artificial Sequence: Synthetic oligonucleotide
  Sense strand starting at position 3983 of SEQ ID NO: 914769
aggcauguauaugugaaau

SEQ ID NO: 1029389 - RNA, 19 nt, Artificial Sequence
  Description of Artificial Sequence: Synthetic oligonucleotide
  Antisense strand to SEQ ID NO: 1029388
auuucacauauacaugccu

SEQ ID NO: 1029390 - RNA, 19 nt, Artificial Sequence
  Description of Artificial Sequence: Synthetic oligonucleotide
  Sense strand starting at position 40 of SEQ ID NO: 914770
gcucuuuggagguagaagu

SEQ ID NO: 1029391 - RNA, 19 nt, Artificial Sequence
  Description of Artificial Sequence: Synthetic oligonucleotide
  Antisense strand to SEQ ID NO: 1029390
acuucuaccuccaaagagc

SEQ ID NO: 1029392 - RNA, 19 nt, Artificial Sequence
  Description of Artificial Sequence: Synthetic oligonucleotide
  Sense strand starting at position 221 of SEQ ID NO: 914770
auucuuuauuaggcagaag

SEQ ID NO: 1029393 - RNA, 19 nt, Artificial Sequence
  Description of Artificial Sequence: Synthetic oligonucleotide
  Antisense strand to SEQ ID NO: 1029392
cuucugccuaauaaagaau

SEQ ID NO: 1029394 - RNA, 19 nt, Artificial Sequence
  Description of Artificial Sequence: Synthetic oligonucleotide
  Sense strand starting at position 293 of SEQ ID NO: 914770
gaaauagggucuucuuaug

SEQ ID NO: 1029395 - RNA, 19 nt, Artificial Sequence
  Description of Artificial Sequence: Synthetic oligonucleotide
  Antisense strand to SEQ ID NO: 1029394
cauaagaagacccuauuuc

SEQ ID NO: 1029396 - RNA, 19 nt, Artificial Sequence
  Description of Artificial Sequence: Synthetic oligonucleotide
  Sense strand starting at position 304 of SEQ ID NO: 914770
uucuuaugguuaucaggaa

SEQ ID NO: 1029397 - RNA, 19 nt, Artificial Sequence
  Description of Artificial Sequence: Synthetic oligonucleotide
  Antisense strand to SEQ ID NO: 1029396
uuccugauaaccauaagaa

SEQ ID NO: 1029398 - RNA, 19 nt, Artificial Sequence
  Description of Artificial Sequence: Synthetic oligonucleotide
  Sense strand starting at position 328 of SEQ ID NO: 914770
ccaggaucucaaugguacu

SEQ ID NO: 1029399 - RNA, 19 nt, Artificial Sequence
  Description of Artificial Sequence: Synthetic oligonucleotide
  Antisense strand to SEQ ID NO: 1029398
aguaccauugagauccugg

SEQ ID NO: 1029400 - RNA, 19 nt, Artificial Sequence
  Description of Artificial Sequence: Synthetic oligonucleotide
  Sense strand starting at position 483 of SEQ ID NO: 914770
cagauacaugcauaugguu

SEQ ID NO: 1029401 - RNA, 19 nt, Artificial Sequence
  Description of Artificial Sequence: Synthetic oligonucleotide
  Antisense strand to SEQ ID NO: 1029400
aaccauaugcauguaucug

SEQ ID NO: 1029402 - RNA, 19 nt, Artificial Sequence
  Description of Artificial Sequence: Synthetic oligonucleotide
  Sense strand starting at position 489 of SEQ ID NO: 914770
caugcauaugguuaacaga

SEQ ID NO: 1029403 - RNA, 19 nt, Artificial Sequence
  Description of Artificial Sequence: Synthetic oligonucleotide
  Antisense strand to SEQ ID NO: 1029402
ucuguuaaccauaugcaug

SEQ ID NO: 1029404 - RNA, 19 nt, Artificial Sequence
  Description of Artificial Sequence: Synthetic oligonucleotide
  Sense strand starting at position 586 of SEQ ID NO: 914770
gguuauucccaucagcaua

SEQ ID NO: 1029405 - RNA, 19 nt, Artificial Sequence
  Description of Artificial Sequence: Synthetic oligonucleotide
  Antisense strand to SEQ ID NO: 1029404
uaugcugaugggaauaacc

SEQ ID NO: 1029406 - RNA, 19 nt, Artificial Sequence
  Description of Artificial Sequence: Synthetic oligonucleotide
  Sense strand starting at position 762 of SEQ ID NO: 914770
guguauauagcauauacaa

SEQ ID NO: 1029407 - RNA, 19 nt, Artificial Sequence
  Description of Artificial Sequence: Synthetic oligonucleotide
  Antisense strand to SEQ ID NO: 1029406
uuguauaugcuauauacac

SEQ ID NO: 1029408 - RNA, 19 nt, Artificial Sequence
  Description of Artificial Sequence: Synthetic oligonucleotide
  Sense strand starting at position 817 of SEQ ID NO: 914770
auugauuaaucagugugau

SEQ ID NO: 1029409 - RNA, 19 nt, Artificial Sequence
  Description of Artificial Sequence: Synthetic oligonucleotide
  Antisense strand to SEQ ID NO: 1029408
aucacacugauuaaucaau

SEQ ID NO: 1029410 - RNA, 19 nt, Artificial Sequence
  Description of Artificial Sequence: Synthetic oligonucleotide
  Sense strand starting at position 820 of SEQ ID NO: 914770
gauuaaucagugugaugau

SEQ ID NO: 1029411 - RNA, 19 nt, Artificial Sequence
  Description of Artificial Sequence: Synthetic oligonucleotide
  Antisense strand to SEQ ID NO: 1029410
aucaucacacugauuaauc

SEQ ID NO: 1029412 - RNA, 19 nt, Artificial Sequence
  Description of Artificial Sequence: Synthetic oligonucleotide
  Sense strand starting at position 1055 of SEQ ID NO: 914770
ggauuauucuaagugcaga

SEQ ID NO: 1029413 - RNA, 19 nt, Artificial Sequence
  Description of Artificial Sequence: Synthetic oligonucleotide
  Antisense strand to SEQ ID NO: 1029412
ucugcacuuagaauaaucc

SEQ ID NO: 1029414 - RNA, 19 nt, Artificial Sequence
  Description of Artificial Sequence: Synthetic oligonucleotide
  Sense strand starting at position 1058 of SEQ ID NO: 914770
uuauucuaagugcagaauu

SEQ ID NO: 1029415 - RNA, 19 nt, Artificial Sequence
  Description of Artificial Sequence: Synthetic oligonucleotide
  Antisense strand to SEQ ID NO: 1029414
aauucugcacuuagaauaa

SEQ ID NO: 1029416 - RNA, 19 nt, Artificial Sequence
  Description of Artificial Sequence: Synthetic oligonucleotide
  Sense strand starting at position 1085 of SEQ ID NO: 914770
agagcugguaugcauaauu

SEQ ID NO: 1029417 - RNA, 19 nt, Artificial Sequence
  Description of Artificial Sequence: Synthetic oligonucleotide
  Antisense strand to SEQ ID NO: 1029416
aauuaugcauaccagcucu

SEQ ID NO: 1029418 - RNA, 19 nt, Artificial Sequence
  Description of Artificial Sequence: Synthetic oligonucleotide
  Sense strand starting at position 1095 of SEQ ID NO: 914770
ugcauaauuugaguuguug

SEQ ID NO: 1029419 - RNA, 19 nt, Artificial Sequence
  Description of Artificial Sequence: Synthetic oligonucleotide
  Antisense strand to SEQ ID NO: 1029418
caacaacucaaauuaugca

SEQ ID NO: 1029420 - RNA, 19 nt, Artificial Sequence
  Description of Artificial Sequence: Synthetic oligonucleotide
  Sense strand starting at position 1107 of SEQ ID NO: 914770
guuguuguuagagaaggaa

SEQ ID NO: 1029421 - RNA, 19 nt, Artificial Sequence
  Description of Artificial Sequence: Synthetic oligonucleotide
  Antisense strand to SEQ ID NO: 1029420
uuccuucucuaacaacaac

SEQ ID NO: 1029422 - RNA, 19 nt, Artificial Sequence
  Description of Artificial Sequence: Synthetic oligonucleotide
  Sense strand starting at position 1579 of SEQ ID NO: 914770
caguaaucugaggguagga

SEQ ID NO: 1029423 - RNA, 19 nt, Artificial Sequence
  Description of Artificial Sequence: Synthetic oligonucleotide
  Antisense strand to SEQ ID NO: 1029422
uccuacccucagauuacug

SEQ ID NO: 1029424 - RNA, 19 nt, Artificial Sequence
  Description of Artificial Sequence: Synthetic oligonucleotide
  Sense strand starting at position 1817 of SEQ ID NO: 914770
gagguugcuagugaacacu

SEQ ID NO: 1029425 - RNA, 19 nt, Artificial Sequence
  Description of Artificial Sequence: Synthetic oligonucleotide
  Antisense strand to SEQ ID NO: 1029424
aguguucacuagcaaccuc

SEQ ID NO: 1029426 - RNA, 19 nt, Artificial Sequence
  Description of Artificial Sequence: Synthetic oligonucleotide
  Sense strand starting at position 1829 of SEQ ID NO: 914770
gaacacuguuaugucagaa

SEQ ID NO: 1029427 - RNA, 19 nt, Artificial Sequence
  Description of Artificial Sequence: Synthetic oligonucleotide
  Antisense strand to SEQ ID NO: 1029426
uucugacauaacaguguuc

SEQ ID NO: 1029428 - RNA, 19 nt, Artificial Sequence
  Description of Artificial Sequence: Synthetic oligonucleotide
  Sense strand starting at position 1919 of SEQ ID NO: 914770
guugguuuaagauaagcag

SEQ ID NO: 1029429 - RNA, 19 nt, Artificial Sequence
  Description of Artificial Sequence: Synthetic oligonucleotide
  Antisense strand to SEQ ID NO: 1029428
cugcuuaucuuaaaccaac

SEQ ID NO: 1029430 - RNA, 19 nt, Artificial Sequence
  Description of Artificial Sequence: Synthetic oligonucleotide
  Sense strand starting at position 1989 of SEQ ID NO: 914770
uuaacuugcccugagauug

SEQ ID NO: 1029431 - RNA, 19 nt, Artificial Sequence
  Description of Artificial Sequence: Synthetic oligonucleotide
  Antisense strand to SEQ ID NO: 1029430
caaucucagggcaaguuaa

SEQ ID NO: 1029432 - RNA, 19 nt, Artificial Sequence
  Description of Artificial Sequence: Synthetic oligonucleotide
  Sense strand starting at position 2134 of SEQ ID NO: 914770
gcuaauauaguggaaugua

SEQ ID NO: 1029433 - RNA, 19 nt, Artificial Sequence
  Description of Artificial Sequence: Synthetic oligonucleotide
  Antisense strand to SEQ ID NO: 1029432
uacauuccacuauauuagc

SEQ ID NO: 1029434 - RNA, 19 nt, Artificial Sequence
  Description of Artificial Sequence: Synthetic oligonucleotide
  Sense strand starting at position 2142 of SEQ ID NO: 914770
aguggaauguaucuuagag

SEQ ID NO: 1029435 - RNA, 19 nt, Artificial Sequence
  Description of Artificial Sequence: Synthetic oligonucleotide
  Antisense strand to SEQ ID NO: 1029434
cucuaagauacauuccacu

SEQ ID NO: 1029436 - RNA, 19 nt, Artificial Sequence
  Description of Artificial Sequence: Synthetic oligonucleotide
  Sense strand starting at position 2167 of SEQ ID NO: 914770
uuauuuguuucugucacuu

SEQ ID NO: 1029437 - RNA, 19 nt, Artificial Sequence
  Description of Artificial Sequence: Synthetic oligonucleotide
  Antisense strand to SEQ ID NO: 1029436
aagugacagaaacaaauaa

SEQ ID NO: 1029438 - RNA, 19 nt, Artificial Sequence
  Description of Artificial Sequence: Synthetic oligonucleotide
  Sense strand starting at position 2245 of SEQ ID NO: 914770
cuucuuugccucuagagau

SEQ ID NO: 1029439 - RNA, 19 nt, Artificial Sequence
  Description of Artificial Sequence: Synthetic oligonucleotide
  Antisense strand to SEQ ID NO: 1029438
aucucuagaggcaaagaag

SEQ ID NO: 1029440 - RNA, 19 nt, Artificial Sequence
  Description of Artificial Sequence: Synthetic oligonucleotide
  Sense strand starting at position 2429 of SEQ ID NO: 914770
aguguuuauuuaccaguua

SEQ ID NO: 1029441 - RNA, 19 nt, Artificial Sequence
  Description of Artificial Sequence: Synthetic oligonucleotide
  Antisense strand to SEQ ID NO: 1029440
uaacugguaaauaaacacu

SEQ ID NO: 1029442 - RNA, 19 nt, Artificial Sequence
  Description of Artificial Sequence: Synthetic oligonucleotide
  Sense strand starting at position 2609 of SEQ ID NO: 914770
aacgaaguuccugggaaua

SEQ ID NO: 1029443 - RNA, 19 nt, Artificial Sequence
  Description of Artificial Sequence: Synthetic oligonucleotide
  Antisense strand to SEQ ID NO: 1029442
uauucccaggaacuucguu

SEQ ID NO: 1029444 - RNA, 19 nt, Artificial Sequence
  Description of Artificial Sequence: Synthetic oligonucleotide
  Sense strand starting at position 2735 of SEQ ID NO: 914770
gccacaauggcagacaaau

SEQ ID NO: 1029445 - RNA, 19 nt, Artificial Sequence
  Description of Artificial Sequence: Synthetic oligonucleotide
  Antisense strand to SEQ ID NO: 1029444
auuugucugccauuguggc

SEQ ID NO: 1029446 - RNA, 19 nt, Artificial Sequence
  Description of Artificial Sequence: Synthetic oligonucleotide
  Sense strand starting at position 3167 of SEQ ID NO: 914770
gcuugauaagucuauuacc

SEQ ID NO: 1029447 - RNA, 19 nt, Artificial Sequence
  Description of Artificial Sequence: Synthetic oligonucleotide
  Antisense strand to SEQ ID NO: 1029446
gguaauagacuuaucaagc

SEQ ID NO: 1029448 - RNA, 19 nt, Artificial Sequence
  Description of Artificial Sequence: Synthetic oligonucleotide
  Sense strand starting at position 3225 of SEQ ID NO: 914770
uguguauccaaagacaugu

SEQ ID NO: 1029449 - RNA, 19 nt, Artificial Sequence
  Description of Artificial Sequence: Synthetic oligonucleotide
  Antisense strand to SEQ ID NO: 1029448
acaugucuuuggauacaca

SEQ ID NO: 1029450 - RNA, 19 nt, Artificial Sequence
  Description of Artificial Sequence: Synthetic oligonucleotide
  Sense strand starting at position 3251 of SEQ ID NO: 914770
ugcuuaugacagcaauaau

SEQ ID NO: 1029451 - RNA, 19 nt, Artificial Sequence
  Description of Artificial Sequence: Synthetic oligonucleotide
  Antisense strand to SEQ ID NO: 1029450
auuauugcugucauaagca

SEQ ID NO: 1029452 - RNA, 19 nt, Artificial Sequence
  Description of Artificial Sequence: Synthetic oligonucleotide
  Sense strand starting at position 3302 of SEQ ID NO: 914770
gcuuaccaacaguagaauu

SEQ ID NO: 1029453 - RNA, 19 nt, Artificial Sequence
  Description of Artificial Sequence: Synthetic oligonucleotide
  Antisense strand to SEQ ID NO: 1029452
aauucuacuguugguaagc

SEQ ID NO: 1029454 - RNA, 19 nt, Artificial Sequence
  Description of Artificial Sequence: Synthetic oligonucleotide
  Sense strand starting at position 3321 of SEQ ID NO: 914770
gauaaauuacgguauaguc

SEQ ID NO: 1029455 - RNA, 19 nt, Artificial Sequence
  Description of Artificial Sequence: Synthetic oligonucleotide
  Antisense strand to SEQ ID NO: 1029454
gacuauaccguaauuuauc

SEQ ID NO: 1029456 - RNA, 19 nt, Artificial Sequence
  Description of Artificial Sequence: Synthetic oligonucleotide
  Sense strand starting at position 3323 of SEQ ID NO: 914770
uaaauuacgguauagucaa

SEQ ID NO: 1029457 - RNA, 19 nt, Artificial Sequence
  Description of Artificial Sequence: Synthetic oligonucleotide
  Antisense strand to SEQ ID NO: 1029456
uugacuauaccguaauuua

SEQ ID NO: 1029458 - RNA, 19 nt, Artificial Sequence
  Description of Artificial Sequence: Synthetic oligonucleotide
  Sense strand starting at position 3430 of SEQ ID NO: 914770
aaaguaaccagaggugagu

SEQ ID NO: 1029459 - RNA, 19 nt, Artificial Sequence
  Description of Artificial Sequence: Synthetic oligonucleotide
  Antisense strand to SEQ ID NO: 1029458
acucaccucugguuacuuu

SEQ ID NO: 1029460 - RNA, 19 nt, Artificial Sequence
  Description of Artificial Sequence: Synthetic oligonucleotide
  Sense strand starting at position 3485 of SEQ ID NO: 914770
gaugaugugccugagauuc

SEQ ID NO: 1029461 - RNA, 19 nt, Artificial Sequence
  Description of Artificial Sequence: Synthetic oligonucleotide
  Antisense strand to SEQ ID NO: 1029460
gaaucucaggcacaucauc

SEQ ID NO: 1029462 - RNA, 19 nt, Artificial Sequence
  Description of Artificial Sequence: Synthetic oligonucleotide
  Sense strand starting at position 3543 of SEQ ID NO: 914770
agccaugaaugaccuuuaa

SEQ ID NO: 1029463 - RNA, 19 nt, Artificial Sequence
  Description of Artificial Sequence: Synthetic oligonucleotide
  Antisense strand to SEQ ID NO: 1029462
uuaaaggucauucauggcu

SEQ ID NO: 1029464 - RNA, 19 nt, Artificial Sequence
  Description of Artificial Sequence: Synthetic oligonucleotide
  Sense strand starting at position 3659 of SEQ ID NO: 914770
agauuauucucacuuagug

SEQ ID NO: 1029465 - RNA, 19 nt, Artificial Sequence
  Description of Artificial Sequence: Synthetic oligonucleotide
  Antisense strand to SEQ ID NO: 1029464
cacuaagugagaauaaucu

SEQ ID NO: 1029466 - RNA, 19 nt, Artificial Sequence
  Description of Artificial Sequence: Synthetic oligonucleotide
  Sense strand starting at position 3793 of SEQ ID NO: 914770
gucagucgugaacacaaga

SEQ ID NO: 1029467 - RNA, 19 nt, Artificial Sequence
  Description of Artificial Sequence: Synthetic oligonucleotide
  Antisense strand to SEQ ID NO: 1029466
ucuuguguucacgacugac

SEQ ID NO: 1029468 - RNA, 19 nt, Artificial Sequence
  Description of Artificial Sequence: Synthetic oligonucleotide
  Sense strand starting at position 3818 of SEQ ID NO: 914770
ccacauuugugaguuuagu

SEQ ID NO: 1029469 - RNA, 19 nt, Artificial Sequence
  Description of Artificial Sequence: Synthetic oligonucleotide
  Antisense strand to SEQ ID NO: 1029468
acuaaacucacaaaugugg

SEQ ID NO: 1029470 - RNA, 19 nt, Artificial Sequence
  Description of Artificial Sequence: Synthetic oligonucleotide
  Sense strand starting at position 235 of SEQ ID NO: 914771
acagaaggcuuucucucaa

SEQ ID NO: 1029471 - RNA, 19 nt, Artificial Sequence
  Description of Artificial Sequence: Synthetic oligonucleotide
  Antisense strand to SEQ ID NO: 1029470
uugagagaaagccuucugu

SEQ ID NO: 1029472 - RNA, 19 nt, Artificial Sequence
  Description of Artificial Sequence: Synthetic oligonucleotide
  Sense strand starting at position 318 of SEQ ID NO: 914771
aagagaacucagugguacu

SEQ ID NO: 1029473 - RNA, 19 nt, Artificial Sequence
  Description of Artificial Sequence: Synthetic oligonucleotide
  Antisense strand to SEQ ID NO: 1029472
aguaccacugaguucucuu

SEQ ID NO: 1029474 - RNA, 19 nt, Artificial Sequence
  Description of Artificial Sequence: Synthetic oligonucleotide
  Sense strand starting at position 319 of SEQ ID NO: 914771
agagaacucagugguacuu

SEQ ID NO: 1029475 - RNA, 19 nt, Artificial Sequence
  Description of Artificial Sequence: Synthetic oligonucleotide
  Antisense strand to SEQ ID NO: 1029474
aaguaccacugaguucucu

SEQ ID NO: 1029476 - RNA, 19 nt, Artificial Sequence
  Description of Artificial Sequence: Synthetic oligonucleotide
  Sense strand starting at position 397 of SEQ ID NO: 914771
gggugaacuccuugccaaa

SEQ ID NO: 1029477 - RNA, 19 nt, Artificial Sequence
  Description of Artificial Sequence: Synthetic oligonucleotide
  Antisense strand to SEQ ID NO: 1029476
uuuggcaaggaguucaccc

SEQ ID NO: 1029478 - RNA, 19 nt, Artificial Sequence
  Description of Artificial Sequence: Synthetic oligonucleotide
  Sense strand starting at position 412 of SEQ ID NO: 914771
caaagugaguagccagaau

SEQ ID NO: 1029479 - RNA, 19 nt, Artificial Sequence
  Description of Artificial Sequence: Synthetic oligonucleotide
  Antisense strand to SEQ ID NO: 1029478
auucuggcuacucacuuug

SEQ ID NO: 1029480 - RNA, 19 nt, Artificial Sequence
  Description of Artificial Sequence: Synthetic oligonucleotide
  Sense strand starting at position 482 of SEQ ID NO: 914771
caggcauguugaguagaag

SEQ ID NO: 1029481 - RNA, 19 nt, Artificial Sequence
  Description of Artificial Sequence: Synthetic oligonucleotide
  Antisense strand to SEQ ID NO: 1029480
cuucuacucaacaugccug

SEQ ID NO: 1029482 - RNA, 19 nt, Artificial Sequence
  Description of Artificial Sequence: Synthetic oligonucleotide
  Sense strand starting at position 483 of SEQ ID NO: 914771
aggcauguugaguagaagu

SEQ ID NO: 1029483 - RNA, 19 nt, Artificial Sequence
  Description of Artificial Sequence: Synthetic oligonucleotide
  Antisense strand to SEQ ID NO: 1029482
acuucuacucaacaugccu

SEQ ID NO: 1029484 - RNA, 19 nt, Artificial Sequence
  Description of Artificial Sequence: Synthetic oligonucleotide
  Sense strand starting at position 485 of SEQ ID NO: 914771
gcauguugaguagaaguuu

SEQ ID NO: 1029485 - RNA, 19 nt, Artificial Sequence
  Description of Artificial Sequence: Synthetic oligonucleotide
  Antisense strand to SEQ ID NO: 1029484
aaacuucuacucaacaugc

SEQ ID NO: 1029486 - RNA, 19 nt, Artificial Sequence
  Description of Artificial Sequence: Synthetic oligonucleotide
  Sense strand starting at position 592 of SEQ ID NO: 914771
aagguuugugcccacccaa

SEQ ID NO: 1029487 - RNA, 19 nt, Artificial Sequence
  Description of Artificial Sequence: Synthetic oligonucleotide
  Antisense strand to SEQ ID NO: 1029486
uugggugggcacaaaccuu

SEQ ID NO: 1029488 - RNA, 19 nt, Artificial Sequence
  Description of Artificial Sequence: Synthetic oligonucleotide
  Sense strand starting at position 759 of SEQ ID NO: 914771
guaaauguagaaugugagu

SEQ ID NO: 1029489 - RNA, 19 nt, Artificial Sequence
  Description of Artificial Sequence: Synthetic oligonucleotide
  Antisense strand to SEQ ID NO: 1029488
acucacauucuacauuuac

SEQ ID NO: 1029490 - RNA, 19 nt, Artificial Sequence
  Description of Artificial Sequence: Synthetic oligonucleotide
  Sense strand starting at position 1160 of SEQ ID NO: 914771
uuugguuaugcucacuaga

SEQ ID NO: 1029491 - RNA, 19 nt, Artificial Sequence
  Description of Artificial Sequence: Synthetic oligonucleotide
  Antisense strand to SEQ ID NO: 1029490
ucuagugagcauaaccaaa

SEQ ID NO: 1029492 - RNA, 19 nt, Artificial Sequence
  Description of Artificial Sequence: Synthetic oligonucleotide
  Sense strand starting at position 1162 of SEQ ID NO: 914771
ugguuaugcucacuagaag

SEQ ID NO: 1029493 - RNA, 19 nt, Artificial Sequence
  Description of Artificial Sequence: Synthetic oligonucleotide
  Antisense strand to SEQ ID NO: 1029492
cuucuagugagcauaacca

SEQ ID NO: 1029494 - RNA, 19 nt, Artificial Sequence
  Description of Artificial Sequence: Synthetic oligonucleotide
  Sense strand starting at position 1163 of SEQ ID NO: 914771
gguuaugcucacuagaagu

SEQ ID NO: 1029495 - RNA, 19 nt, Artificial Sequence
  Description of Artificial Sequence: Synthetic oligonucleotide
  Antisense strand to SEQ ID NO: 1029494
acuucuagugagcauaacc

SEQ ID NO: 1029496 - RNA, 19 nt, Artificial Sequence
  Description of Artificial Sequence: Synthetic oligonucleotide
  Sense strand starting at position 1229 of SEQ ID NO: 914771
uggucuuuccaauaagauu

SEQ ID NO: 1029497 - RNA, 19 nt, Artificial Sequence
  Description of Artificial Sequence: Synthetic oligonucleotide
  Antisense strand to SEQ ID NO: 1029496
aaucuuauuggaaagacca

SEQ ID NO: 1029498 - RNA, 19 nt, Artificial Sequence
  Description of Artificial Sequence: Synthetic oligonucleotide
  Sense strand starting at position 1301 of SEQ ID NO: 914771
cugaacucaccuugaaguu

SEQ ID NO: 1029499 - RNA, 19 nt, Artificial Sequence
  Description of Artificial Sequence: Synthetic oligonucleotide
  Antisense strand to SEQ ID NO: 1029498
aacuucaaggugaguucag

SEQ ID NO: 1029500 - RNA, 19 nt, Artificial Sequence
  Description of Artificial Sequence: Synthetic oligonucleotide
  Sense strand starting at position 1597 of SEQ ID NO: 914771
aucaacuugcuaggguaau

SEQ ID NO: 1029501 - RNA, 19 nt, Artificial Sequence
  Description of Artificial Sequence: Synthetic oligonucleotide
  Antisense strand to SEQ ID NO: 1029500
auuacccuagcaaguugau

SEQ ID NO: 1029502 - RNA, 19 nt, Artificial Sequence
  Description of Artificial Sequence: Synthetic oligonucleotide
  Sense strand starting at position 1780 of SEQ ID NO: 914771
agcugugucggaagcagau

SEQ ID NO: 1029503 - RNA, 19 nt, Artificial Sequence
  Description of Artificial Sequence: Synthetic oligonucleotide
  Antisense strand to SEQ ID NO: 1029502
aucugcuuccgacacagcu

SEQ ID NO: 1029504 - RNA, 19 nt, Artificial Sequence
  Description of Artificial Sequence: Synthetic oligonucleotide
  Sense strand starting at position 1782 of SEQ ID NO: 914771
cugugucggaagcagauau

SEQ ID NO: 1029505 - RNA, 19 nt, Artificial Sequence
  Description of Artificial Sequence: Synthetic oligonucleotide
  Antisense strand to SEQ ID NO: 1029504
auaucugcuuccgacacag

SEQ ID NO: 1029506 - RNA, 19 nt, Artificial Sequence
  Description of Artificial Sequence: Synthetic oligonucleotide
  Sense strand starting at position 1949 of SEQ ID NO: 914771
ggacacuaaguuugugaua

SEQ ID NO: 1029507 - RNA, 19 nt, Artificial Sequence
  Description of Artificial Sequence: Synthetic oligonucleotide
  Antisense strand to SEQ ID NO: 1029506
uaucacaaacuuagugucc

SEQ ID NO: 1029508 - RNA, 19 nt, Artificial Sequence
  Description of Artificial Sequence: Synthetic oligonucleotide
  Sense strand starting at position 1950 of SEQ ID NO: 914771
gacacuaaguuugugauaa

SEQ ID NO: 1029509 - RNA, 19 nt, Artificial Sequence
  Description of Artificial Sequence: Synthetic oligonucleotide
  Antisense strand to SEQ ID NO: 1029508
uuaucacaaacuuaguguc

SEQ ID NO: 1029510 - RNA, 19 nt, Artificial Sequence
  Description of Artificial Sequence: Synthetic oligonucleotide
  Sense strand starting at position 2261 of SEQ ID NO: 914771
uaaggagugcauuguaaac

SEQ ID NO: 1029511 - RNA, 19 nt, Artificial Sequence
  Description of Artificial Sequence: Synthetic oligonucleotide
  Antisense strand to SEQ ID NO: 1029510
guuuacaaugcacuccuua

SEQ ID NO: 1029512 - RNA, 19 nt, Artificial Sequence
  Description of Artificial Sequence: Synthetic oligonucleotide
  Sense strand starting at position 2291 of SEQ ID NO: 914771
accuuaguuucucuaggga

SEQ ID NO: 1029513 - RNA, 19 nt, Artificial Sequence
  Description of Artificial Sequence: Synthetic oligonucleotide
  Antisense strand to SEQ ID NO: 1029512
ucccuagagaaacuaaggu

SEQ ID NO: 1029514 - RNA, 19 nt, Artificial Sequence
  Description of Artificial Sequence: Synthetic oligonucleotide
  Sense strand starting at position 2294 of SEQ ID NO: 914771
uuaguuucucuagggagac

SEQ ID NO: 1029515 - RNA, 19 nt, Artificial Sequence
  Description of Artificial Sequence: Synthetic oligonucleotide
  Antisense strand to SEQ ID NO: 1029514
gucucccuagagaaacuaa

SEQ ID NO: 1029516 - RNA, 19 nt, Artificial Sequence
  Description of Artificial Sequence: Synthetic oligonucleotide
  Sense strand starting at position 2320 of SEQ ID NO: 914771
guacauaguuccuucuaga

SEQ ID NO: 1029517 - RNA, 19 nt, Artificial Sequence
  Description of Artificial Sequence: Synthetic oligonucleotide
  Antisense strand to SEQ ID NO: 1029516
ucuagaaggaacuauguac

SEQ ID NO: 1029518 - RNA, 19 nt, Artificial Sequence
  Description of Artificial Sequence: Synthetic oligonucleotide
  Sense strand starting at position 2495 of SEQ ID NO: 914771
gacauuggcuacuuuguga

SEQ ID NO: 1029519 - RNA, 19 nt, Artificial Sequence
  Description of Artificial Sequence: Synthetic oligonucleotide
  Antisense strand to SEQ ID NO: 1029518
ucacaaaguagccaauguc

SEQ ID NO: 1029520 - RNA, 19 nt, Artificial Sequence
  Description of Artificial Sequence: Synthetic oligonucleotide
  Sense strand starting at position 2556 of SEQ ID NO: 914771
uuauacuucucacugggaa

SEQ ID NO: 1029521 - RNA, 19 nt, Artificial Sequence
  Description of Artificial Sequence: Synthetic oligonucleotide
  Antisense strand to SEQ ID NO: 1029520
uucccagugagaaguauaa

SEQ ID NO: 1029522 - RNA, 19 nt, Artificial Sequence
  Description of Artificial Sequence: Synthetic oligonucleotide
  Sense strand starting at position 2647 of SEQ ID NO: 914771
ucgauauauuaaucaggcu

SEQ ID NO: 1029523 - RNA, 19 nt, Artificial Sequence
  Description of Artificial Sequence: Synthetic oligonucleotide
  Antisense strand to SEQ ID NO: 1029522
agccugauuaauauaucga

SEQ ID NO: 1029524 - RNA, 19 nt, Artificial Sequence
  Description of Artificial Sequence: Synthetic oligonucleotide
  Sense strand starting at position 2653 of SEQ ID NO: 914771
uauuaaucaggcuaggagu

SEQ ID NO: 1029525 - RNA, 19 nt, Artificial Sequence
  Description of Artificial Sequence: Synthetic oligonucleotide
  Antisense strand to SEQ ID NO: 1029524
acuccuagccugauuaaua

SEQ ID NO: 1029526 - RNA, 19 nt, Artificial Sequence
  Description of Artificial Sequence: Synthetic oligonucleotide
  Sense strand starting at position 2667 of SEQ ID NO: 914771
ggagucaggguauauuauu

SEQ ID NO: 1029527 - RNA, 19 nt, Artificial Sequence
  Description of Artificial Sequence: Synthetic oligonucleotide
  Antisense strand to SEQ ID NO: 1029526
aauaauauacccugacucc

SEQ ID NO: 1029528 - RNA, 19 nt, Artificial Sequence
  Description of Artificial Sequence: Synthetic oligonucleotide
  Sense strand starting at position 2673 of SEQ ID NO: 914771
aggguauauuauuccucua

SEQ ID NO: 1029529 - RNA, 19 nt, Artificial Sequence
  Description of Artificial Sequence: Synthetic oligonucleotide
  Antisense strand to SEQ ID NO: 1029528
uagaggaauaauauacccu

SEQ ID NO: 1029530 - RNA, 19 nt, Artificial Sequence
  Description of Artificial Sequence: Synthetic oligonucleotide
  Sense strand starting at position 2678 of SEQ ID NO: 914771
auauuauuccucuaguguc

SEQ ID NO: 1029531 - RNA, 19 nt, Artificial Sequence
  Description of Artificial Sequence: Synthetic oligonucleotide
  Antisense strand to SEQ ID NO: 1029530
gacacuagaggaauaauau

SEQ ID NO: 1029532 - RNA, 19 nt, Artificial Sequence
  Description of Artificial Sequence: Synthetic oligonucleotide
  Sense strand starting at position 2793 of SEQ ID NO: 914771
gauccaugugccugaagaa

SEQ ID NO: 1029533 - RNA, 19 nt, Artificial Sequence
  Description of Artificial Sequence: Synthetic oligonucleotide
  Antisense strand to SEQ ID NO: 1029532
uucuucaggcacauggauc

SEQ ID NO: 1029534 - RNA, 19 nt, Artificial Sequence
  Description of Artificial Sequence: Synthetic oligonucleotide
  Sense strand starting at position 2794 of SEQ ID NO: 914771
auccaugugccugaagaau

SEQ ID NO: 1029535 - RNA, 19 nt, Artificial Sequence
  Description of Artificial Sequence: Synthetic oligonucleotide
  Antisense strand to SEQ ID NO: 1029534
auucuucaggcacauggau

SEQ ID NO: 1029536 - RNA, 19 nt, Artificial Sequence
  Description of Artificial Sequence: Synthetic oligonucleotide
  Sense strand starting at position 2949 of SEQ ID NO: 914771
agcagaguuccacaaauuc

SEQ ID NO: 1029537 - RNA, 19 nt, Artificial Sequence
  Description of Artificial Sequence: Synthetic oligonucleotide
  Antisense strand to SEQ ID NO: 1029536
gaauuuguggaacucugcu

SEQ ID NO: 1029538 - RNA, 19 nt, Artificial Sequence
  Description of Artificial Sequence: Synthetic oligonucleotide
  Sense strand starting at position 3038 of SEQ ID NO: 914771
uggcuuguucuacauccau

SEQ ID NO: 1029539 - RNA, 19 nt, Artificial Sequence
  Description of Artificial Sequence: Synthetic oligonucleotide
  Antisense strand to SEQ ID NO: 1029538
auggauguagaacaagcca

SEQ ID NO: 1029540 - RNA, 19 nt, Artificial Sequence
  Description of Artificial Sequence: Synthetic oligonucleotide
  Sense strand starting at position 3508 of SEQ ID NO: 914771
gggauuccauauuccaagu

SEQ ID NO: 1029541 - RNA, 19 nt, Artificial Sequence
  Description of Artificial Sequence: Synthetic oligonucleotide
  Antisense strand to SEQ ID NO: 1029540
acuuggaauauggaauccc

SEQ ID NO: 1029542 - RNA, 19 nt, Artificial Sequence
  Description of Artificial Sequence: Synthetic oligonucleotide
  Sense strand starting at position 3617 of SEQ ID NO: 914771
acuuguggcaaguaagaau

SEQ ID NO: 1029543 - RNA, 19 nt, Artificial Sequence
  Description of Artificial Sequence: Synthetic oligonucleotide
  Antisense strand to SEQ ID NO: 1029542
auucuuacuugccacaagu

SEQ ID NO: 1029544 - RNA, 19 nt, Artificial Sequence
  Description of Artificial Sequence: Synthetic oligonucleotide
  Sense strand starting at position 3677 of SEQ ID NO: 914771
ugacuuaaugacugcccaa

SEQ ID NO: 1029545 - RNA, 19 nt, Artificial Sequence
  Description of Artificial Sequence: Synthetic oligonucleotide
  Antisense strand to SEQ ID NO: 1029544
uugggcagucauuaaguca

SEQ ID NO: 1029546 - RNA, 19 nt, Artificial Sequence
  Description of Artificial Sequence: Synthetic oligonucleotide
  Sense strand starting at position 3742 of SEQ ID NO: 914771
gcuauuaaccaaugguauc

SEQ ID NO: 1029547 - RNA, 19 nt, Artificial Sequence
  Description of Artificial Sequence: Synthetic oligonucleotide
  Antisense strand to SEQ ID NO: 1029546
gauaccauugguuaauagc

SEQ ID NO: 1029548 - RNA, 19 nt, Artificial Sequence
  Description of Artificial Sequence: Synthetic oligonucleotide
  Sense strand starting at position 3756 of SEQ ID NO: 914771
guaucuuucugagcauaua

SEQ ID NO: 1029549 - RNA, 19 nt, Artificial Sequence
  Description of Artificial Sequence: Synthetic oligonucleotide
  Antisense strand to SEQ ID NO: 1029548
uauaugcucagaaagauac

SEQ ID NO: 1029550 - RNA, 19 nt, Artificial Sequence
  Description of Artificial Sequence: Synthetic oligonucleotide
  Sense strand starting at position 24 of SEQ ID NO: 914772
auuccuaaagcuuggaaca

SEQ ID NO: 1029551 - RNA, 19 nt, Artificial Sequence
  Description of Artificial Sequence: Synthetic oligonucleotide
  Antisense strand to SEQ ID NO: 1029550
uguuccaagcuuuaggaau

SEQ ID NO: 1029552 - RNA, 19 nt, Artificial Sequence
  Description of Artificial Sequence: Synthetic oligonucleotide
  Sense strand starting at position 213 of SEQ ID NO: 914772
agaacucccguguacaagu

SEQ ID NO: 1029553 - RNA, 19 nt, Artificial Sequence
  Description of Artificial Sequence: Synthetic oligonucleotide
  Antisense strand to SEQ ID NO: 1029552
acuuguacacgggaguucu

SEQ ID NO: 1029554 - RNA, 19 nt, Artificial Sequence
  Description of Artificial Sequence: Synthetic oligonucleotide
  Sense strand starting at position 414 of SEQ ID NO: 914772
ugugaucucucagcagaau

SEQ ID NO: 1029555 - RNA, 19 nt, Artificial Sequence
  Description of Artificial Sequence: Synthetic oligonucleotide
  Antisense strand to SEQ ID NO: 1029554
auucugcugagagaucaca

SEQ ID NO: 1029556 - RNA, 19 nt, Artificial Sequence
  Description of Artificial Sequence: Synthetic oligonucleotide
  Sense strand starting at position 415 of SEQ ID NO: 914772
gugaucucucagcagaaua

SEQ ID NO: 1029557 - RNA, 19 nt, Artificial Sequence
  Description of Artificial Sequence: Synthetic oligonucleotide
  Antisense strand to SEQ ID NO: 1029556
uauucugcugagagaucac

SEQ ID NO: 1029558 - RNA, 19 nt, Artificial Sequence
  Description of Artificial Sequence: Synthetic oligonucleotide
  Sense strand starting at position 442 of SEQ ID NO: 914772
auuuguauugcuugcagaa

SEQ ID NO: 1029559 - RNA, 19 nt, Artificial Sequence
  Description of Artificial Sequence: Synthetic oligonucleotide
  Antisense strand to SEQ ID NO: 1029558
uucugcaagcaauacaaau

SEQ ID NO: 1029560 - RNA, 19 nt, Artificial Sequence
  Description of Artificial Sequence: Synthetic oligonucleotide
  Sense strand starting at position 471 of SEQ ID NO: 914772
ccuugaaagcucugaauca

SEQ ID NO: 1029561 - RNA, 19 nt, Artificial Sequence
  Description of Artificial Sequence: Synthetic oligonucleotide
  Antisense strand to SEQ ID NO: 1029560
ugauucagagcuuucaagg

SEQ ID NO: 1029562 - RNA, 19 nt, Artificial Sequence
  Description of Artificial Sequence: Synthetic oligonucleotide
  Sense strand starting at position 848 of SEQ ID NO: 914772
ccaugaacccuguauguug

SEQ ID NO: 1029563 - RNA, 19 nt, Artificial Sequence
  Description of Artificial Sequence: Synthetic oligonucleotide
  Antisense strand to SEQ ID NO: 1029562
caacauacaggguucaugg

SEQ ID NO: 1029564 - RNA, 19 nt, Artificial Sequence
  Description of Artificial Sequence: Synthetic oligonucleotide
  Sense strand starting at position 866 of SEQ ID NO: 914772
guaggcugaagacguuaaa

SEQ ID NO: 1029565 - RNA, 19 nt, Artificial Sequence
  Description of Artificial Sequence: Synthetic oligonucleotide
  Antisense strand to SEQ ID NO: 1029564
uuuaacgucuucagccuac

SEQ ID NO: 1029566 - RNA, 19 nt, Artificial Sequence
  Description of Artificial Sequence: Synthetic oligonucleotide
  Sense strand starting at position 1227 of SEQ ID NO: 914772
agaugaaaguucuuucuac

SEQ ID NO: 1029567 - RNA, 19 nt, Artificial Sequence
  Description of Artificial Sequence: Synthetic oligonucleotide
  Antisense strand to SEQ ID NO: 1029566
guagaaagaacuuucaucu

SEQ ID NO: 1029568 - RNA, 19 nt, Artificial Sequence
  Description of Artificial Sequence: Synthetic oligonucleotide
  Sense strand starting at position 1244 of SEQ ID NO: 914772
acuggaaucuaauaaagaa

SEQ ID NO: 1029569 - RNA, 19 nt, Artificial Sequence
  Description of Artificial Sequence: Synthetic oligonucleotide
  Antisense strand to SEQ ID NO: 1029568
uucuuuauuagauuccagu

SEQ ID NO: 1029570 - RNA, 19 nt, Artificial Sequence
  Description of Artificial Sequence: Synthetic oligonucleotide
  Sense strand starting at position 2470 of SEQ ID NO: 914772
ggacaaaucuuagucucuu

SEQ ID NO: 1029571 - RNA, 19 nt, Artificial Sequence
  Description of Artificial Sequence: Synthetic oligonucleotide
  Antisense strand to SEQ ID NO: 1029570
aagagacuaagauuugucc

SEQ ID NO: 1029572 - RNA, 19 nt, Artificial Sequence
  Description of Artificial Sequence: Synthetic oligonucleotide
  Sense strand starting at position 2533 of SEQ ID NO: 914772
ugaauauacucuuugugac

SEQ ID NO: 1029573 - RNA, 19 nt, Artificial Sequence
  Description of Artificial Sequence: Synthetic oligonucleotide
  Antisense strand to SEQ ID NO: 1029572
gucacaaagaguauauuca

SEQ ID NO: 1029574 - RNA, 19 nt, Artificial Sequence
  Description of Artificial Sequence: Synthetic oligonucleotide
  Sense strand starting at position 2572 of SEQ ID NO: 914772
uucucaauagugcagugaa

SEQ ID NO: 1029575 - RNA, 19 nt, Artificial Sequence
  Description of Artificial Sequence: Synthetic oligonucleotide
  Antisense strand to SEQ ID NO: 1029574
uucacugcacuauugagaa

SEQ ID NO: 1029576 - RNA, 19 nt, Artificial Sequence
  Description of Artificial Sequence: Synthetic oligonucleotide
  Sense strand starting at position 2620 of SEQ ID NO: 914772
gcaguaauagauuaguguu

SEQ ID NO: 1029577 - RNA, 19 nt, Artificial Sequence
  Description of Artificial Sequence: Synthetic oligonucleotide
  Antisense strand to SEQ ID NO: 1029576
aacacuaaucuauuacugc

SEQ ID NO: 1029578 - RNA, 19 nt, Artificial Sequence
  Description of Artificial Sequence: Synthetic oligonucleotide
  Sense strand starting at position 2740 of SEQ ID NO: 914772
ucagguauguauguauaca

SEQ ID NO: 1029579 - RNA, 19 nt, Artificial Sequence
  Description of Artificial Sequence: Synthetic oligonucleotide
  Antisense strand to SEQ ID NO: 1029578
uguauacauacauaccuga

SEQ ID NO: 1029580 - RNA, 19 nt, Artificial Sequence
  Description of Artificial Sequence: Synthetic oligonucleotide
  Sense strand starting at position 2828 of SEQ ID NO: 914772
cuucuaugcucaguaaaga

SEQ ID NO: 1029581 - RNA, 19 nt, Artificial Sequence
  Description of Artificial Sequence: Synthetic oligonucleotide
  Antisense strand to SEQ ID NO: 1029580
ucuuuacugagcauagaag

SEQ ID NO: 1029582 - RNA, 19 nt, Artificial Sequence
  Description of Artificial Sequence: Synthetic oligonucleotide
  Sense strand starting at position 2829 of SEQ ID NO: 914772
uucuaugcucaguaaagau

SEQ ID NO: 1029583 - RNA, 19 nt, Artificial Sequence
  Description of Artificial Sequence: Synthetic oligonucleotide
  Antisense strand to SEQ ID NO: 1029582
aucuuuacugagcauagaa

SEQ ID NO: 1029584 - RNA, 19 nt, Artificial Sequence
  Description of Artificial Sequence: Synthetic oligonucleotide
  Sense strand starting at position 2867 of SEQ ID NO: 914772
gcagguacuguggauuaga

SEQ ID NO: 1029585 - RNA, 19 nt, Artificial Sequence
  Description of Artificial Sequence: Synthetic oligonucleotide
  Antisense strand to SEQ ID NO: 1029584
ucuaauccacaguaccugc

SEQ ID NO: 1029586 - RNA, 19 nt, Artificial Sequence
  Description of Artificial Sequence: Synthetic oligonucleotide
  Sense strand starting at position 2870 of SEQ ID NO: 914772
gguacuguggauuagaauu

SEQ ID NO: 1029587 - RNA, 19 nt, Artificial Sequence
  Description of Artificial Sequence: Synthetic oligonucleotide
  Antisense strand to SEQ ID NO: 1029586
aauucuaauccacaguacc

SEQ ID NO: 1029588 - RNA, 19 nt, Artificial Sequence
  Description of Artificial Sequence: Synthetic oligonucleotide
  Sense strand starting at position 3026 of SEQ ID NO: 914772
cgaauauuaguguacuuua

SEQ ID NO: 1029589 - RNA, 19 nt, Artificial Sequence
  Description of Artificial Sequence: Synthetic oligonucleotide
  Antisense strand to SEQ ID NO: 1029588
uaaaguacacuaauauucg

SEQ ID NO: 1029590 - RNA, 19 nt, Artificial Sequence
  Description of Artificial Sequence: Synthetic oligonucleotide
  Sense strand starting at position 3029 of SEQ ID NO: 914772
auauuaguguacuuuagac

SEQ ID NO: 1029591 - RNA, 19 nt, Artificial Sequence
  Description of Artificial Sequence: Synthetic oligonucleotide
  Antisense strand to SEQ ID NO: 1029590
gucuaaaguacacuaauau

SEQ ID NO: 1029592 - RNA, 19 nt, Artificial Sequence
  Description of Artificial Sequence: Synthetic oligonucleotide
  Sense strand starting at position 3163 of SEQ ID NO: 914772
cucugaaagugauccauga

SEQ ID NO: 1029593 - RNA, 19 nt, Artificial Sequence
  Description of Artificial Sequence: Synthetic oligonucleotide
  Antisense strand to SEQ ID NO: 1029592
ucauggaucacuuucagag

SEQ ID NO: 1029594 - RNA, 19 nt, Artificial Sequence
  Description of Artificial Sequence: Synthetic oligonucleotide
  Sense strand starting at position 3167 of SEQ ID NO: 914772
gaaagugauccaugaucuc

SEQ ID NO: 1029595 - RNA, 19 nt, Artificial Sequence
  Description of Artificial Sequence: Synthetic oligonucleotide
  Antisense strand to SEQ ID NO: 1029594
gagaucauggaucacuuuc

SEQ ID NO: 1029596 - RNA, 19 nt, Artificial Sequence
  Description of Artificial Sequence: Synthetic oligonucleotide
  Sense strand starting at position 3170 of SEQ ID NO: 914772
agugauccaugaucucuaa

SEQ ID NO: 1029597 - RNA, 19 nt, Artificial Sequence
  Description of Artificial Sequence: Synthetic oligonucleotide
  Antisense strand to SEQ ID NO: 1029596
uuagagaucauggaucacu

SEQ ID NO: 1029598 - RNA, 19 nt, Artificial Sequence
  Description of Artificial Sequence: Synthetic oligonucleotide
  Sense strand starting at position 3207 of SEQ ID NO: 914772
ccagaagcucuggaauucu

SEQ ID NO: 1029599 - RNA, 19 nt, Artificial Sequence
  Description of Artificial Sequence: Synthetic oligonucleotide
  Antisense strand to SEQ ID NO: 1029598
agaauuccagagcuucugg

SEQ ID NO: 1029600 - RNA, 19 nt, Artificial Sequence
  Description of Artificial Sequence: Synthetic oligonucleotide
  Sense strand starting at position 3218 of SEQ ID NO: 914772
ggaauucuggcuuaucgga

SEQ ID NO: 1029601 - RNA, 19 nt, Artificial Sequence
  Description of Artificial Sequence: Synthetic oligonucleotide
  Antisense strand to SEQ ID NO: 1029600
uccgauaagccagaauucc

SEQ ID NO: 1029602 - RNA, 19 nt, Artificial Sequence
  Description of Artificial Sequence: Synthetic oligonucleotide
  Sense strand starting at position 3270 of SEQ ID NO: 914772
aagcuaucagguugauuga

SEQ ID NO: 1029603 - RNA, 19 nt, Artificial Sequence
  Description of Artificial Sequence: Synthetic oligonucleotide
  Antisense strand to SEQ ID NO: 1029602
ucaaucaaccugauagcuu

SEQ ID NO: 1029604 - RNA, 19 nt, Artificial Sequence
  Description of Artificial Sequence: Synthetic oligonucleotide
  Sense strand starting at position 3271 of SEQ ID NO: 914772
agcuaucagguugauugaa

SEQ ID NO: 1029605 - RNA, 19 nt, Artificial Sequence
  Description of Artificial Sequence: Synthetic oligonucleotide
  Antisense strand to SEQ ID NO: 1029604
uucaaucaaccugauagcu

SEQ ID NO: 1029606 - RNA, 19 nt, Artificial Sequence
  Description of Artificial Sequence: Synthetic oligonucleotide
  Sense strand starting at position 3273 of SEQ ID NO: 914772
cuaucagguugauugaaau

SEQ ID NO: 1029607 - RNA, 19 nt, Artificial Sequence
  Description of Artificial Sequence: Synthetic oligonucleotide
  Antisense strand to SEQ ID NO: 1029606
auuucaaucaaccugauag

SEQ ID NO: 1029608 - RNA, 19 nt, Artificial Sequence
  Description of Artificial Sequence: Synthetic oligonucleotide
  Sense strand starting at position 3324 of SEQ ID NO: 914772
caugauccuguguaaagcu

SEQ ID NO: 1029609 - RNA, 19 nt, Artificial Sequence
  Description of Artificial Sequence: Synthetic oligonucleotide
  Antisense strand to SEQ ID NO: 1029608
agcuuuacacaggaucaug

SEQ ID NO: 1029610 - RNA, 19 nt, Artificial Sequence
  Description of Artificial Sequence: Synthetic oligonucleotide
  Sense strand starting at position 3331 of SEQ ID NO: 914772
cuguguaaagcuuauaucu

SEQ ID NO: 1029611 - RNA, 19 nt, Artificial Sequence
  Description of Artificial Sequence: Synthetic oligonucleotide
  Antisense strand to SEQ ID NO: 1029610
agauauaagcuuuacacag

SEQ ID NO: 1029612 - RNA, 19 nt, Artificial Sequence
  Description of Artificial Sequence: Synthetic oligonucleotide
  Sense strand starting at position 3354 of SEQ ID NO: 914772
auugauacagauggcuaaa

SEQ ID NO: 1029613 - RNA, 19 nt, Artificial Sequence
  Description of Artificial Sequence: Synthetic oligonucleotide
  Antisense strand to SEQ ID NO: 1029612
uuuagccaucuguaucaau

SEQ ID NO: 1029614 - RNA, 19 nt, Artificial Sequence
  Description of Artificial Sequence: Synthetic oligonucleotide
  Sense strand starting at position 3538 of SEQ ID NO: 914772
ccuuguuuagcauacuauu

SEQ ID NO: 1029615 - RNA, 19 nt, Artificial Sequence
  Description of Artificial Sequence: Synthetic oligonucleotide
  Antisense strand to SEQ ID NO: 1029614
aauaguaugcuaaacaagg

SEQ ID NO: 1029616 - RNA, 19 nt, Artificial Sequence
  Description of Artificial Sequence: Synthetic oligonucleotide
  Sense strand starting at position 3594 of SEQ ID NO: 914772
gcgucuacucugccuauga

SEQ ID NO: 1029617 - RNA, 19 nt, Artificial Sequence
  Description of Artificial Sequence: Synthetic oligonucleotide
  Antisense strand to SEQ ID NO: 1029616
ucauaggcagaguagacgc

SEQ ID NO: 1029618 - RNA, 19 nt, Artificial Sequence
  Description of Artificial Sequence: Synthetic oligonucleotide
  Sense strand starting at position 3696 of SEQ ID NO: 914772
ugaaaugguagugagugau

SEQ ID NO: 1029619 - RNA, 19 nt, Artificial Sequence
  Description of Artificial Sequence: Synthetic oligonucleotide
  Antisense strand to SEQ ID NO: 1029618
aucacucacuaccauuuca

SEQ ID NO: 1029620 - RNA, 19 nt, Artificial Sequence
  Description of Artificial Sequence: Synthetic oligonucleotide
  Sense strand starting at position 3721 of SEQ ID NO: 914772
ugaaguggguccuuuauga

SEQ ID NO: 1029621 - RNA, 19 nt, Artificial Sequence
  Description of Artificial Sequence: Synthetic oligonucleotide
  Antisense strand to SEQ ID NO: 1029620
ucauaaaggacccacuuca

SEQ ID NO: 1029622 - RNA, 19 nt, Artificial Sequence
  Description of Artificial Sequence: Synthetic oligonucleotide
  Sense strand starting at position 3754 of SEQ ID NO: 914772
gcagaagacguuuggagaa

SEQ ID NO: 1029623 - RNA, 19 nt, Artificial Sequence
  Description of Artificial Sequence: Synthetic oligonucleotide
  Antisense strand to SEQ ID NO: 1029622
uucuccaaacgucuucugc

SEQ ID NO: 1029624 - RNA, 19 nt, Artificial Sequence
  Description of Artificial Sequence: Synthetic oligonucleotide
  Sense strand starting at position 3889 of SEQ ID NO: 914772
ccuaaaguacguugaagaa

SEQ ID NO: 1029625 - RNA, 19 nt, Artificial Sequence
  Description of Artificial Sequence: Synthetic oligonucleotide
  Antisense strand to SEQ ID NO: 1029624
uucuucaacguacuuuagg

SEQ ID NO: 1029626 - RNA, 19 nt, Artificial Sequence
  Description of Artificial Sequence: Synthetic oligonucleotide
  Sense strand starting at position 3933 of SEQ ID NO: 914772
agggcucaggcuuacuauu

SEQ ID NO: 1029627 - RNA, 19 nt, Artificial Sequence
  Description of Artificial Sequence: Synthetic oligonucleotide
  Antisense strand to SEQ ID NO: 1029626
aauaguaagccugagcccu

SEQ ID NO: 1029628 - RNA, 19 nt, Artificial Sequence
  Description of Artificial Sequence: Synthetic oligonucleotide
  Sense strand starting at position 3969 of SEQ ID NO: 914772
aguaguagaguugguauuu

SEQ ID NO: 1029629 - RNA, 19 nt, Artificial Sequence
  Description of Artificial Sequence: Synthetic oligonucleotide
  Antisense strand to SEQ ID NO: 1029628
aaauaccaacucuacuacu

SEQ ID NO: 1029630 - RNA, 19 nt, Artificial Sequence
  Description of Artificial Sequence: Synthetic oligonucleotide
  Sense strand starting at position 5 of SEQ ID NO: 914773
cuuccuaaagcuuggaaca

SEQ ID NO: 1029631 - RNA, 19 nt, Artificial Sequence
  Description of Artificial Sequence: Synthetic oligonucleotide
  Antisense strand to SEQ ID NO: 1029630
uguuccaagcuuuaggaag

SEQ ID NO: 1029632 - RNA, 19 nt, Artificial Sequence
  Description of Artificial Sequence: Synthetic oligonucleotide
  Sense strand starting at position 117 of SEQ ID NO: 914773
aaacaucuguuucugagga

SEQ ID NO: 1029633 - RNA, 19 nt, Artificial Sequence
  Description of Artificial Sequence: Synthetic oligonucleotide
  Antisense strand to SEQ ID NO: 1029632
uccucagaaacagauguuu

SEQ ID NO: 1029634 - RNA, 19 nt, Artificial Sequence
  Description of Artificial Sequence: Synthetic oligonucleotide
  Sense strand starting at position 197 of SEQ ID NO: 914773
gcagaacucccauguacaa

SEQ ID NO: 1029635 - RNA, 19 nt, Artificial Sequence
  Description of Artificial Sequence: Synthetic oligonucleotide
  Antisense strand to SEQ ID NO: 1029634
uuguacaugggaguucugc

SEQ ID NO: 1029636 - RNA, 19 nt, Artificial Sequence
  Description of Artificial Sequence: Synthetic oligonucleotide
  Sense strand starting at position 395 of SEQ ID NO: 914773
ugaagacaaccauguguga

SEQ ID NO: 1029637 - RNA, 19 nt, Artificial Sequence
  Description of Artificial Sequence: Synthetic oligonucleotide
  Antisense strand to SEQ ID NO: 1029636
ucacacaugguugucuuca

SEQ ID NO: 1029638 - RNA, 19 nt, Artificial Sequence
  Description of Artificial Sequence: Synthetic oligonucleotide
  Sense strand starting at position 409 of SEQ ID NO: 914773
ugugaucucuuagcagaau

SEQ ID NO: 1029639 - RNA, 19 nt, Artificial Sequence
  Description of Artificial Sequence: Synthetic oligonucleotide
  Antisense strand to SEQ ID NO: 1029638
auucugcuaagagaucaca

SEQ ID NO: 1029640 - RNA, 19 nt, Artificial Sequence
  Description of Artificial Sequence: Synthetic oligonucleotide
  Sense strand starting at position 467 of SEQ ID NO: 914773
uugaaagcucugcaucaug

SEQ ID NO: 1029641 - RNA, 19 nt, Artificial Sequence
  Description of Artificial Sequence: Synthetic oligonucleotide
  Antisense strand to SEQ ID NO: 1029640
caugaugcagagcuuucaa

SEQ ID NO: 1029642 - RNA, 19 nt, Artificial Sequence
  Description of Artificial Sequence: Synthetic oligonucleotide
  Sense strand starting at position 1227 of SEQ ID NO: 914773
aggugaaaguucuuucuac

SEQ ID NO: 1029643 - RNA, 19 nt, Artificial Sequence
  Description of Artificial Sequence: Synthetic oligonucleotide
  Antisense strand to SEQ ID NO: 1029642
guagaaagaacuuucaccu

SEQ ID NO: 1029644 - RNA, 19 nt, Artificial Sequence
  Description of Artificial Sequence: Synthetic oligonucleotide
  Sense strand starting at position 1228 of SEQ ID NO: 914773
ggugaaaguucuuucuacc

SEQ ID NO: 1029645 - RNA, 19 nt, Artificial Sequence
  Description of Artificial Sequence: Synthetic oligonucleotide
  Antisense strand to SEQ ID NO: 1029644
gguagaaagaacuuucacc

SEQ ID NO: 1029646 - RNA, 19 nt, Artificial Sequence
  Description of Artificial Sequence: Synthetic oligonucleotide
  Sense strand starting at position 1300 of SEQ ID NO: 914773
gucaaaguuguccaucuag

SEQ ID NO: 1029647 - RNA, 19 nt, Artificial Sequence
  Description of Artificial Sequence: Synthetic oligonucleotide
  Antisense strand to SEQ ID NO: 1029646
cuagauggacaacuuugac

SEQ ID NO: 1029648 - RNA, 19 nt, Artificial Sequence
  Description of Artificial Sequence: Synthetic oligonucleotide
  Sense strand starting at position 1447 of SEQ ID NO: 914773
uacucaguugucuaaguug

SEQ ID NO: 1029649 - RNA, 19 nt, Artificial Sequence
  Description of Artificial Sequence: Synthetic oligonucleotide
  Antisense strand to SEQ ID NO: 1029648
caacuuagacaacugagua

SEQ ID NO: 1029650 - RNA, 19 nt, Artificial Sequence
  Description of Artificial Sequence: Synthetic oligonucleotide
  Sense strand starting at position 1479 of SEQ ID NO: 914773
ggcaacagugcugaaacau

SEQ ID NO: 1029651 - RNA, 19 nt, Artificial Sequence
  Description of Artificial Sequence: Synthetic oligonucleotide
  Antisense strand to SEQ ID NO: 1029650
auguuucagcacuguugcc

SEQ ID NO: 1029652 - RNA, 19 nt, Artificial Sequence
  Description of Artificial Sequence: Synthetic oligonucleotide
  Sense strand starting at position 2213 of SEQ ID NO: 914773
ggauacugcugcuuaauuu

SEQ ID NO: 1029653 - RNA, 19 nt, Artificial Sequence
  Description of Artificial Sequence: Synthetic oligonucleotide
  Antisense strand to SEQ ID NO: 1029652
aaauuaagcagcaguaucc

SEQ ID NO: 1029654 - RNA, 19 nt, Artificial Sequence
  Description of Artificial Sequence: Synthetic oligonucleotide
  Sense strand starting at position 2467 of SEQ ID NO: 914773
uuugaugggacacgucuua

SEQ ID NO: 1029655 - RNA, 19 nt, Artificial Sequence
  Description of Artificial Sequence: Synthetic oligonucleotide
  Antisense strand to SEQ ID NO: 1029654
uaagacgugucccaucaaa

SEQ ID NO: 1029656 - RNA, 19 nt, Artificial Sequence
  Description of Artificial Sequence: Synthetic oligonucleotide
  Sense strand starting at position 2480 of SEQ ID NO: 914773
gucuuagucucauuuagua

SEQ ID NO: 1029657 - RNA, 19 nt, Artificial Sequence
  Description of Artificial Sequence: Synthetic oligonucleotide
  Antisense strand to SEQ ID NO: 1029656
uacuaaaugagacuaagac

SEQ ID NO: 1029658 - RNA, 19 nt, Artificial Sequence
  Description of Artificial Sequence: Synthetic oligonucleotide
  Sense strand starting at position 2572 of SEQ ID NO: 914773
uuaaguucucauuagugua

SEQ ID NO: 1029659 - RNA, 19 nt, Artificial Sequence
  Description of Artificial Sequence: Synthetic oligonucleotide
  Antisense strand to SEQ ID NO: 1029658
uacacuaaugagaacuuaa

SEQ ID NO: 1029660 - RNA, 19 nt, Artificial Sequence
  Description of Artificial Sequence: Synthetic oligonucleotide
  Sense strand starting at position 2577 of SEQ ID NO: 914773
uucucauuaguguagugaa

SEQ ID NO: 1029661 - RNA, 19 nt, Artificial Sequence
  Description of Artificial Sequence: Synthetic oligonucleotide
  Antisense strand to SEQ ID NO: 1029660
uucacuacacuaaugagaa

SEQ ID NO: 1029662 - RNA, 19 nt, Artificial Sequence
  Description of Artificial Sequence: Synthetic oligonucleotide
  Sense strand starting at position 2614 of SEQ ID NO: 914773
guuucagugcaggaauaga

SEQ ID NO: 1029663 - RNA, 19 nt, Artificial Sequence
  Description of Artificial Sequence: Synthetic oligonucleotide
  Antisense strand to SEQ ID NO: 1029662
ucuauuccugcacugaaac

SEQ ID NO: 1029664 - RNA, 19 nt, Artificial Sequence
  Description of Artificial Sequence: Synthetic oligonucleotide
  Sense strand starting at position 2836 of SEQ ID NO: 914773
uucuaugcucgguaaagau

SEQ ID NO: 1029665 - RNA, 19 nt, Artificial Sequence
  Description of Artificial Sequence: Synthetic oligonucleotide
  Antisense strand to SEQ ID NO: 1029664
aucuuuaccgagcauagaa

SEQ ID NO: 1029666 - RNA, 19 nt, Artificial Sequence
  Description of Artificial Sequence: Synthetic oligonucleotide
  Sense strand starting at position 2856 of SEQ ID NO: 914773
augguagaaugcucuuuac

SEQ ID NO: 1029667 - RNA, 19 nt, Artificial Sequence
  Description of Artificial Sequence: Synthetic oligonucleotide
  Antisense strand to SEQ ID NO: 1029666
guaaagagcauucuaccau

SEQ ID NO: 1029668 - RNA, 19 nt, Artificial Sequence
  Description of Artificial Sequence: Synthetic oligonucleotide
  Sense strand starting at position 2859 of SEQ ID NO: 914773
guagaaugcucuuuaccag

SEQ ID NO: 1029669 - RNA, 19 nt, Artificial Sequence
  Description of Artificial Sequence: Synthetic oligonucleotide
  Antisense strand to SEQ ID NO: 1029668
cugguaaagagcauucuac

SEQ ID NO: 1029670 - RNA, 19 nt, Artificial Sequence
  Description of Artificial Sequence: Synthetic oligonucleotide
  Sense strand starting at position 3037 of SEQ ID NO: 914773
gucacuguaguuuagacau

SEQ ID NO: 1029671 - RNA, 19 nt, Artificial Sequence
  Description of Artificial Sequence: Synthetic oligonucleotide
  Antisense strand to SEQ ID NO: 1029670
augucuaaacuacagugac

SEQ ID NO: 1029672 - RNA, 19 nt, Artificial Sequence
  Description of Artificial Sequence: Synthetic oligonucleotide
  Sense strand starting at position 3047 of SEQ ID NO: 914773
uuuagacaucuuuaucugu

SEQ ID NO: 1029673 - RNA, 19 nt, Artificial Sequence
  Description of Artificial Sequence: Synthetic oligonucleotide
  Antisense strand to SEQ ID NO: 1029672
acagauaaagaugucuaaa

SEQ ID NO: 1029674 - RNA, 19 nt, Artificial Sequence
  Description of Artificial Sequence: Synthetic oligonucleotide
  Sense strand starting at position 3081 of SEQ ID NO: 914773
cugacauauuggccacuua

SEQ ID NO: 1029675 - RNA, 19 nt, Artificial Sequence
  Description of Artificial Sequence: Synthetic oligonucleotide
  Antisense strand to SEQ ID NO: 1029674
uaaguggccaauaugucag

SEQ ID NO: 1029676 - RNA, 19 nt, Artificial Sequence
  Description of Artificial Sequence: Synthetic oligonucleotide
  Sense strand starting at position 3082 of SEQ ID NO: 914773
ugacauauuggccacuuaa

SEQ ID NO: 1029677 - RNA, 19 nt, Artificial Sequence
  Description of Artificial Sequence: Synthetic oligonucleotide
  Antisense strand to SEQ ID NO: 1029676
uuaaguggccaauauguca

SEQ ID NO: 1029678 - RNA, 19 nt, Artificial Sequence
  Description of Artificial Sequence: Synthetic oligonucleotide
  Sense strand starting at position 3200 of SEQ ID NO: 914773
gauccaugaccuugguaga

SEQ ID NO: 1029679 - RNA, 19 nt, Artificial Sequence
  Description of Artificial Sequence: Synthetic oligonucleotide
  Antisense strand to SEQ ID NO: 1029678
ucuaccaaggucauggauc

SEQ ID NO: 1029680 - RNA, 19 nt, Artificial Sequence
  Description of Artificial Sequence: Synthetic oligonucleotide
  Sense strand starting at position 3201 of SEQ ID NO: 914773
auccaugaccuugguagau

SEQ ID NO: 1029681 - RNA, 19 nt, Artificial Sequence
  Description of Artificial Sequence: Synthetic oligonucleotide
  Antisense strand to SEQ ID NO: 1029680
aucuaccaaggucauggau

SEQ ID NO: 1029682 - RNA, 19 nt, Artificial Sequence
  Description of Artificial Sequence: Synthetic oligonucleotide
  Sense strand starting at position 3236 of SEQ ID NO: 914773
cuggaaaucuggcuuauug

SEQ ID NO: 1029683 - RNA, 19 nt, Artificial Sequence
  Description of Artificial Sequence: Synthetic oligonucleotide
  Antisense strand to SEQ ID NO: 1029682
caauaagccagauuuccag

SEQ ID NO: 1029684 - RNA, 19 nt, Artificial Sequence
  Description of Artificial Sequence: Synthetic oligonucleotide
  Sense strand starting at position 3246 of SEQ ID NO: 914773
ggcuuauuggaggagagcu

SEQ ID NO: 1029685 - RNA, 19 nt, Artificial Sequence
  Description of Artificial Sequence: Synthetic oligonucleotide
  Antisense strand to SEQ ID NO: 1029684
agcucuccuccaauaagcc

SEQ ID NO: 1029686 - RNA, 19 nt, Artificial Sequence
  Description of Artificial Sequence: Synthetic oligonucleotide
  Sense strand starting at position 3338 of SEQ ID NO: 914773
cuguguaaggcuuauaucu

SEQ ID NO: 1029687 - RNA, 19 nt, Artificial Sequence
  Description of Artificial Sequence: Synthetic oligonucleotide
  Antisense strand to SEQ ID NO: 1029686
agauauaagccuuacacag

SEQ ID NO: 1029688 - RNA, 19 nt, Artificial Sequence
  Description of Artificial Sequence: Synthetic oligonucleotide
  Sense strand starting at position 3345 of SEQ ID NO: 914773
aggcuuauaucugcucaaa

SEQ ID NO: 1029689 - RNA, 19 nt, Artificial Sequence
  Description of Artificial Sequence: Synthetic oligonucleotide
  Antisense strand to SEQ ID NO: 1029688
uuugagcagauauaagccu

SEQ ID NO: 1029690 - RNA, 19 nt, Artificial Sequence
  Description of Artificial Sequence: Synthetic oligonucleotide
  Sense strand starting at position 3348 of SEQ ID NO: 914773
cuuauaucugcucaaagug

SEQ ID NO: 1029691 - RNA, 19 nt, Artificial Sequence
  Description of Artificial Sequence: Synthetic oligonucleotide
  Antisense strand to SEQ ID NO: 1029690
cacuuugagcagauauaag

SEQ ID NO: 1029692 - RNA, 19 nt, Artificial Sequence
  Description of Artificial Sequence: Synthetic oligonucleotide
  Sense strand starting at position 3482 of SEQ ID NO: 914773
uuugucaacuuaucaguau

SEQ ID NO: 1029693 - RNA, 19 nt, Artificial Sequence
  Description of Artificial Sequence: Synthetic oligonucleotide
  Antisense strand to SEQ ID NO: 1029692
auacugauaaguugacaaa

SEQ ID NO: 1029694 - RNA, 19 nt, Artificial Sequence
  Description of Artificial Sequence: Synthetic oligonucleotide
  Sense strand starting at position 3485 of SEQ ID NO: 914773
gucaacuuaucaguaucuu

SEQ ID NO: 1029695 - RNA, 19 nt, Artificial Sequence
  Description of Artificial Sequence: Synthetic oligonucleotide
  Antisense strand to SEQ ID NO: 1029694
aagauacugauaaguugac

SEQ ID NO: 1029696 - RNA, 19 nt, Artificial Sequence
  Description of Artificial Sequence: Synthetic oligonucleotide
  Sense strand starting at position 3543 of SEQ ID NO: 914773
aaggaugggugagaaagau

SEQ ID NO: 1029697 - RNA, 19 nt, Artificial Sequence
  Description of Artificial Sequence: Synthetic oligonucleotide
  Antisense strand to SEQ ID NO: 1029696
aucuuucucacccauccuu

SEQ ID NO: 1029698 - RNA, 19 nt, Artificial Sequence
  Description of Artificial Sequence: Synthetic oligonucleotide
  Sense strand starting at position 3607 of SEQ ID NO: 914773
aaauuagggucucuuuaag

SEQ ID NO: 1029699 - RNA, 19 nt, Artificial Sequence
  Description of Artificial Sequence: Synthetic oligonucleotide
  Antisense strand to SEQ ID NO: 1029698
cuuaaagagacccuaauuu

SEQ ID NO: 1029700 - RNA, 19 nt, Artificial Sequence
  Description of Artificial Sequence: Synthetic oligonucleotide
  Sense strand starting at position 3638 of SEQ ID NO: 914773
ugagauggguguguauaga

SEQ ID NO: 1029701 - RNA, 19 nt, Artificial Sequence
  Description of Artificial Sequence: Synthetic oligonucleotide
  Antisense strand to SEQ ID NO: 1029700
ucuauacacacccaucuca

SEQ ID NO: 1029702 - RNA, 19 nt, Artificial Sequence
  Description of Artificial Sequence: Synthetic oligonucleotide
  Sense strand starting at position 3655 of SEQ ID NO: 914773
gaucuuuggccauaucuga

SEQ ID NO: 1029703 - RNA, 19 nt, Artificial Sequence
  Description of Artificial Sequence: Synthetic oligonucleotide
  Antisense strand to SEQ ID NO: 1029702
ucagauauggccaaagauc

SEQ ID NO: 1029704 - RNA, 19 nt, Artificial Sequence
  Description of Artificial Sequence: Synthetic oligonucleotide
  Sense strand starting at position 3694 of SEQ ID NO: 914773
uguagagccugaccuuuaa

SEQ ID NO: 1029705 - RNA, 19 nt, Artificial Sequence
  Description of Artificial Sequence: Synthetic oligonucleotide
  Antisense strand to SEQ ID NO: 1029704
uuaaaggucaggcucuaca

SEQ ID NO: 1029706 - RNA, 19 nt, Artificial Sequence
  Description of Artificial Sequence: Synthetic oligonucleotide
  Sense strand starting at position 3704 of SEQ ID NO: 914773
gaccuuuaagaauguguca

SEQ ID NO: 1029707 - RNA, 19 nt, Artificial Sequence
  Description of Artificial Sequence: Synthetic oligonucleotide
  Antisense strand to SEQ ID NO: 1029706
ugacacauucuuaaagguc

SEQ ID NO: 1029708 - RNA, 19 nt, Artificial Sequence
  Description of Artificial Sequence: Synthetic oligonucleotide
  Sense strand starting at position 3713 of SEQ ID NO: 914773
gaaugugucagagacuggu

SEQ ID NO: 1029709 - RNA, 19 nt, Artificial Sequence
  Description of Artificial Sequence: Synthetic oligonucleotide
  Antisense strand to SEQ ID NO: 1029708
accagucucugacacauuc

SEQ ID NO: 1029710 - RNA, 19 nt, Artificial Sequence
  Description of Artificial Sequence: Synthetic oligonucleotide
  Sense strand starting at position 256 of SEQ ID NO: 914774
cuuccacgacuuugagaua

SEQ ID NO: 1029711 - RNA, 19 nt, Artificial Sequence
  Description of Artificial Sequence: Synthetic oligonucleotide
  Antisense strand to SEQ ID NO: 1029710
uaucucaaagucguggaag

SEQ ID NO: 1029712 - RNA, 19 nt, Artificial Sequence
  Description of Artificial Sequence: Synthetic oligonucleotide
  Sense strand starting at position 261 of SEQ ID NO: 914774
acgacuuugagauaaugca

SEQ ID NO: 1029713 - RNA, 19 nt, Artificial Sequence
  Description of Artificial Sequence: Synthetic oligonucleotide
  Antisense strand to SEQ ID NO: 1029712
ugcauuaucucaaagucgu

SEQ ID NO: 1029714 - RNA, 19 nt, Artificial Sequence
  Description of Artificial Sequence: Synthetic oligonucleotide
  Sense strand starting at position 401 of SEQ ID NO: 914774
ugaguaagcuaucugaaag

SEQ ID NO: 1029715 - RNA, 19 nt, Artificial Sequence
  Description of Artificial Sequence: Synthetic oligonucleotide
  Antisense strand to SEQ ID NO: 1029714
cuuucagauagcuuacuca

SEQ ID NO: 1029716 - RNA, 19 nt, Artificial Sequence
  Description of Artificial Sequence: Synthetic oligonucleotide
  Sense strand starting at position 487 of SEQ ID NO: 914774
acgagucugguuuacaaag

SEQ ID NO: 1029717 - RNA, 19 nt, Artificial Sequence
  Description of Artificial Sequence: Synthetic oligonucleotide
  Antisense strand to SEQ ID NO: 1029716
cuuuguaaaccagacucgu

SEQ ID NO: 1029718 - RNA, 19 nt, Artificial Sequence
  Description of Artificial Sequence: Synthetic oligonucleotide
  Sense strand starting at position 769 of SEQ ID NO: 914774
aggugaccuuucucugauu

SEQ ID NO: 1029719 - RNA, 19 nt, Artificial Sequence
  Description of Artificial Sequence: Synthetic oligonucleotide
  Antisense strand to SEQ ID NO: 1029718
aaucagagaaaggucaccu

SEQ ID NO: 1029720 - RNA, 19 nt, Artificial Sequence
  Description of Artificial Sequence: Synthetic oligonucleotide
  Sense strand starting at position 793 of SEQ ID NO: 914774
gcauucucugcauaauuga

SEQ ID NO: 1029721 - RNA, 19 nt, Artificial Sequence
  Description of Artificial Sequence: Synthetic oligonucleotide
  Antisense strand to SEQ ID NO: 1029720
ucaauuaugcagagaaugc

SEQ ID NO: 1029722 - RNA, 19 nt, Artificial Sequence
  Description of Artificial Sequence: Synthetic oligonucleotide
  Sense strand starting at position 800 of SEQ ID NO: 914774
cugcauaauugacuuauga

SEQ ID NO: 1029723 - RNA, 19 nt, Artificial Sequence
  Description of Artificial Sequence: Synthetic oligonucleotide
  Antisense strand to SEQ ID NO: 1029722
ucauaagucaauuaugcag

SEQ ID NO: 1029724 - RNA, 19 nt, Artificial Sequence
  Description of Artificial Sequence: Synthetic oligonucleotide
  Sense strand starting at position 851 of SEQ ID NO: 914774
aucuguuugccucacuaag

SEQ ID NO: 1029725 - RNA, 19 nt, Artificial Sequence
  Description of Artificial Sequence: Synthetic oligonucleotide
  Antisense strand to SEQ ID NO: 1029724
cuuagugaggcaaacagau

SEQ ID NO: 1029726 - RNA, 19 nt, Artificial Sequence
  Description of Artificial Sequence: Synthetic oligonucleotide
  Sense strand starting at position 919 of SEQ ID NO: 914774
auguguauguacucauaaa

SEQ ID NO: 1029727 - RNA, 19 nt, Artificial Sequence
  Description of Artificial Sequence: Synthetic oligonucleotide
  Antisense strand to SEQ ID NO: 1029726
uuuaugaguacauacacau

SEQ ID NO: 1029728 - RNA, 19 nt, Artificial Sequence
  Description of Artificial Sequence: Synthetic oligonucleotide
  Sense strand starting at position 1031 of SEQ ID NO: 914774
ggguaugacuaucccacau

SEQ ID NO: 1029729 - RNA, 19 nt, Artificial Sequence
  Description of Artificial Sequence: Synthetic oligonucleotide
  Antisense strand to SEQ ID NO: 1029728
augugggauagucauaccc

SEQ ID NO: 1029730 - RNA, 19 nt, Artificial Sequence
  Description of Artificial Sequence: Synthetic oligonucleotide
  Sense strand starting at position 1052 of SEQ ID NO: 914774
ggaggcucauuaucuccaa

SEQ ID NO: 1029731 - RNA, 19 nt, Artificial Sequence
  Description of Artificial Sequence: Synthetic oligonucleotide
  Antisense strand to SEQ ID NO: 1029730
uuggagauaaugagccucc

SEQ ID NO: 1029732 - RNA, 19 nt, Artificial Sequence
  Description of Artificial Sequence: Synthetic oligonucleotide
  Sense strand starting at position 1362 of SEQ ID NO: 914774
gccugaauucccugacaug

SEQ ID NO: 1029733 - RNA, 19 nt, Artificial Sequence
  Description of Artificial Sequence: Synthetic oligonucleotide
  Antisense strand to SEQ ID NO: 1029732
caugucagggaauucaggc

SEQ ID NO: 1029734 - RNA, 19 nt, Artificial Sequence
  Description of Artificial Sequence: Synthetic oligonucleotide
  Sense strand starting at position 1363 of SEQ ID NO: 914774
ccugaauucccugacaugu

SEQ ID NO: 1029735 - RNA, 19 nt, Artificial Sequence
  Description of Artificial Sequence: Synthetic oligonucleotide
  Antisense strand to SEQ ID NO: 1029734
acaugucagggaauucagg

SEQ ID NO: 1029736 - RNA, 19 nt, Artificial Sequence
  Description of Artificial Sequence: Synthetic oligonucleotide
  Sense strand starting at position 1505 of SEQ ID NO: 914774
ccuaccugucuggaucaga

SEQ ID NO: 1029737 - RNA, 19 nt, Artificial Sequence
  Description of Artificial Sequence: Synthetic oligonucleotide
  Antisense strand to SEQ ID NO: 1029736
ucugauccagacagguagg

SEQ ID NO: 1029738 - RNA, 19 nt, Artificial Sequence
  Description of Artificial Sequence: Synthetic oligonucleotide
  Sense strand starting at position 1612 of SEQ ID NO: 914774
agcucuagugcagacaauu

SEQ ID NO: 1029739 - RNA, 19 nt, Artificial Sequence
  Description of Artificial Sequence: Synthetic oligonucleotide
  Antisense strand to SEQ ID NO: 1029738
aauugucugcacuagagcu

SEQ ID NO: 1029740 - RNA, 19 nt, Artificial Sequence
  Description of Artificial Sequence: Synthetic oligonucleotide
  Sense strand starting at position 1812 of SEQ ID NO: 914774
cagguaucugcuuaggaga

SEQ ID NO: 1029741 - RNA, 19 nt, Artificial Sequence
  Description of Artificial Sequence: Synthetic oligonucleotide
  Antisense strand to SEQ ID NO: 1029740
ucuccuaagcagauaccug

SEQ ID NO: 1029742 - RNA, 19 nt, Artificial Sequence
  Description of Artificial Sequence: Synthetic oligonucleotide
  Sense strand starting at position 2299 of SEQ ID NO: 914774
cuagaacaugucugagcaa

SEQ ID NO: 1029743 - RNA, 19 nt, Artificial Sequence
  Description of Artificial Sequence: Synthetic oligonucleotide
  Antisense strand to SEQ ID NO: 1029742
uugcucagacauguucuag

SEQ ID NO: 1029744 - RNA, 19 nt, Artificial Sequence
  Description of Artificial Sequence: Synthetic oligonucleotide
  Sense strand starting at position 2476 of SEQ ID NO: 914774
gggaauggaugccuaguaa

SEQ ID NO: 1029745 - RNA, 19 nt, Artificial Sequence
  Description of Artificial Sequence: Synthetic oligonucleotide
  Antisense strand to SEQ ID NO: 1029744
uuacuaggcauccauuccc

SEQ ID NO: 1029746 - RNA, 19 nt, Artificial Sequence
  Description of Artificial Sequence: Synthetic oligonucleotide
  Sense strand starting at position 2588 of SEQ ID NO: 914774
gggagcguugauggagauu

SEQ ID NO: 1029747 - RNA, 19 nt, Artificial Sequence
  Description of Artificial Sequence: Synthetic oligonucleotide
  Antisense strand to SEQ ID NO: 1029746
aaucuccaucaacgcuccc

SEQ ID NO: 1029748 - RNA, 19 nt, Artificial Sequence
  Description of Artificial Sequence: Synthetic oligonucleotide
  Sense strand starting at position 2626 of SEQ ID NO: 914774
gcaaauccuuuguuacaga

SEQ ID NO: 1029749 - RNA, 19 nt, Artificial Sequence
  Description of Artificial Sequence: Synthetic oligonucleotide
  Antisense strand to SEQ ID NO: 1029748
ucuguaacaaaggauuugc

SEQ ID NO: 1029750 - RNA, 19 nt, Artificial Sequence
  Description of Artificial Sequence: Synthetic oligonucleotide
  Sense strand starting at position 2635 of SEQ ID NO: 914774
uuguuacagagaugauguu

SEQ ID NO: 1029751 - RNA, 19 nt, Artificial Sequence
  Description of Artificial Sequence: Synthetic oligonucleotide
  Antisense strand to SEQ ID NO: 1029750
aacaucaucucuguaacaa

SEQ ID NO: 1029752 - RNA, 19 nt, Artificial Sequence
  Description of Artificial Sequence: Synthetic oligonucleotide
  Sense strand starting at position 2823 of SEQ ID NO: 914774
gccugaguaggucaacuuu

SEQ ID NO: 1029753 - RNA, 19 nt, Artificial Sequence
  Description of Artificial Sequence: Synthetic oligonucleotide
  Antisense strand to SEQ ID NO: 1029752
aaaguugaccuacucaggc

SEQ ID NO: 1029754 - RNA, 19 nt, Artificial Sequence
  Description of Artificial Sequence: Synthetic oligonucleotide
  Sense strand starting at position 2968 of SEQ ID NO: 914774
uuugcauuucuguguuuau

SEQ ID NO: 1029755 - RNA, 19 nt, Artificial Sequence
  Description of Artificial Sequence: Synthetic oligonucleotide
  Antisense strand to SEQ ID NO: 1029754
auaaacacagaaaugcaaa

SEQ ID NO: 1029756 - RNA, 19 nt, Artificial Sequence
  Description of Artificial Sequence: Synthetic oligonucleotide
  Sense strand starting at position 2969 of SEQ ID NO: 914774
uugcauuucuguguuuaug

SEQ ID NO: 1029757 - RNA, 19 nt, Artificial Sequence
  Description of Artificial Sequence: Synthetic oligonucleotide
  Antisense strand to SEQ ID NO: 1029756
cauaaacacagaaaugcaa

SEQ ID NO: 1029758 - RNA, 19 nt, Artificial Sequence
  Description of Artificial Sequence: Synthetic oligonucleotide
  Sense strand starting at position 2971 of SEQ ID NO: 914774
gcauuucuguguuuaugac

SEQ ID NO: 1029759 - RNA, 19 nt, Artificial Sequence
  Description of Artificial Sequence: Synthetic oligonucleotide
  Antisense strand to SEQ ID NO: 1029758
gucauaaacacagaaaugc

SEQ ID NO: 1029760 - RNA, 19 nt, Artificial Sequence
  Description of Artificial Sequence: Synthetic oligonucleotide
  Sense strand starting at position 3013 of SEQ ID NO: 914774
ccuuucuuccacuggaaga

SEQ ID NO: 1029761 - RNA, 19 nt, Artificial Sequence
  Description of Artificial Sequence: Synthetic oligonucleotide
  Antisense strand to SEQ ID NO: 1029760
ucuuccaguggaagaaagg

SEQ ID NO: 1029762 - RNA, 19 nt, Artificial Sequence
  Description of Artificial Sequence: Synthetic oligonucleotide
  Sense strand starting at position 3131 of SEQ ID NO: 914774
agucuuuguaagggacaaa

SEQ ID NO: 1029763 - RNA, 19 nt, Artificial Sequence
  Description of Artificial Sequence: Synthetic oligonucleotide
  Antisense strand to SEQ ID NO: 1029762
uuugucccuuacaaagacu

SEQ ID NO: 1029764 - RNA, 19 nt, Artificial Sequence
  Description of Artificial Sequence: Synthetic oligonucleotide
  Sense strand starting at position 3215 of SEQ ID NO: 914774
agaguccuucuggagugua

SEQ ID NO: 1029765 - RNA, 19 nt, Artificial Sequence
  Description of Artificial Sequence: Synthetic oligonucleotide
  Antisense strand to SEQ ID NO: 1029764
uacacuccagaaggacucu

SEQ ID NO: 1029766 - RNA, 19 nt, Artificial Sequence
  Description of Artificial Sequence: Synthetic oligonucleotide
  Sense strand starting at position 3220 of SEQ ID NO: 914774
ccuucuggaguguagauaa

SEQ ID NO: 1029767 - RNA, 19 nt, Artificial Sequence
  Description of Artificial Sequence: Synthetic oligonucleotide
  Antisense strand to SEQ ID NO: 1029766
uuaucuacacuccagaagg

SEQ ID NO: 1029768 - RNA, 19 nt, Artificial Sequence
  Description of Artificial Sequence: Synthetic oligonucleotide
  Sense strand starting at position 3231 of SEQ ID NO: 914774
guagauaaauggccucuuu

SEQ ID NO: 1029769 - RNA, 19 nt, Artificial Sequence
  Description of Artificial Sequence: Synthetic oligonucleotide
  Antisense strand to SEQ ID NO: 1029768
aaagaggccauuuaucuac

SEQ ID NO: 1029770 - RNA, 19 nt, Artificial Sequence
  Description of Artificial Sequence: Synthetic oligonucleotide
  Sense strand starting at position 3264 of SEQ ID NO: 914774
ggccuugaggcuuauggau

SEQ ID NO: 1029771 - RNA, 19 nt, Artificial Sequence
  Description of Artificial Sequence: Synthetic oligonucleotide
  Antisense strand to SEQ ID NO: 1029770
auccauaagccucaaggcc

SEQ ID NO: 1029772 - RNA, 19 nt, Artificial Sequence
  Description of Artificial Sequence: Synthetic oligonucleotide
  Sense strand starting at position 3270 of SEQ ID NO: 914774
gaggcuuauggaugggagu

SEQ ID NO: 1029773 - RNA, 19 nt, Artificial Sequence
  Description of Artificial Sequence: Synthetic oligonucleotide
  Antisense strand to SEQ ID NO: 1029772
acucccauccauaagccuc

SEQ ID NO: 1029774 - RNA, 19 nt, Artificial Sequence
  Description of Artificial Sequence: Synthetic oligonucleotide
  Sense strand starting at position 3271 of SEQ ID NO: 914774
aggcuuauggaugggagua

SEQ ID NO: 1029775 - RNA, 19 nt, Artificial Sequence
  Description of Artificial Sequence: Synthetic oligonucleotide
  Antisense strand to SEQ ID NO: 1029774
uacucccauccauaagccu

SEQ ID NO: 1029776 - RNA, 19 nt, Artificial Sequence
  Description of Artificial Sequence: Synthetic oligonucleotide
  Sense strand starting at position 3272 of SEQ ID NO: 914774
ggcuuauggaugggaguaa

SEQ ID NO: 1029777 - RNA, 19 nt, Artificial Sequence
  Description of Artificial Sequence: Synthetic oligonucleotide
  Antisense strand to SEQ ID NO: 1029776
uuacucccauccauaagcc

SEQ ID NO: 1029778 - RNA, 19 nt, Artificial Sequence
  Description of Artificial Sequence: Synthetic oligonucleotide
  Sense strand starting at position 3296 of SEQ ID NO: 914774
ggaugcaguguuugggaaa

SEQ ID NO: 1029779 - RNA, 19 nt, Artificial Sequence
  Description of Artificial Sequence: Synthetic oligonucleotide
  Antisense strand to SEQ ID NO: 1029778
uuucccaaacacugcaucc

SEQ ID NO: 1029780 - RNA, 19 nt, Artificial Sequence
  Description of Artificial Sequence: Synthetic oligonucleotide
  Sense strand starting at position 3334 of SEQ ID NO: 914774
ccuuguuauccugaagcac

SEQ ID NO: 1029781 - RNA, 19 nt, Artificial Sequence
  Description of Artificial Sequence: Synthetic oligonucleotide
  Antisense strand to SEQ ID NO: 1029780
gugcuucaggauaacaagg

SEQ ID NO: 1029782 - RNA, 19 nt, Artificial Sequence
  Description of Artificial Sequence: Synthetic oligonucleotide
  Sense strand starting at position 3388 of SEQ ID NO: 914774
ggaucuaaguucucaauau

SEQ ID NO: 1029783 - RNA, 19 nt, Artificial Sequence
  Description of Artificial Sequence: Synthetic oligonucleotide
  Antisense strand to SEQ ID NO: 1029782
auauugagaacuuagaucc

SEQ ID NO: 1029784 - RNA, 19 nt, Artificial Sequence
  Description of Artificial Sequence: Synthetic oligonucleotide
  Sense strand starting at position 3641 of SEQ ID NO: 914774
aaauguagacccugaguag

SEQ ID NO: 1029785 - RNA, 19 nt, Artificial Sequence
  Description of Artificial Sequence: Synthetic oligonucleotide
  Antisense strand to SEQ ID NO: 1029784
cuacucagggucuacauuu

SEQ ID NO: 1029786 - RNA, 19 nt, Artificial Sequence
  Description of Artificial Sequence: Synthetic oligonucleotide
  Sense strand starting at position 3848 of SEQ ID NO: 914774
accuaaagacagugugaaa

SEQ ID NO: 1029787 - RNA, 19 nt, Artificial Sequence
  Description of Artificial Sequence: Synthetic oligonucleotide
  Antisense strand to SEQ ID NO: 1029786
uuucacacugucuuuaggu

SEQ ID NO: 1029788 - RNA, 19 nt, Artificial Sequence
  Description of Artificial Sequence: Synthetic oligonucleotide
  Sense strand starting at position 3873 of SEQ ID NO: 914774
ggaucagacugggcuuacu

SEQ ID NO: 1029789 - RNA, 19 nt, Artificial Sequence
  Description of Artificial Sequence: Synthetic oligonucleotide
  Antisense strand to SEQ ID NO: 1029788
aguaagcccagucugaucc

SEQ ID NO: 1029790 - RNA, 19 nt, Artificial Sequence
  Description of Artificial Sequence: Synthetic oligonucleotide
  Sense strand starting at position 14 of SEQ ID NO: 914775
agaaauaugggcuguggaa

SEQ ID NO: 1029791 - RNA, 19 nt, Artificial Sequence
  Description of Artificial Sequence: Synthetic oligonucleotide
  Antisense strand to SEQ ID NO: 1029790
uuccacagcccauauuucu

SEQ ID NO: 1029792 - RNA, 19 nt, Artificial Sequence
  Description of Artificial Sequence: Synthetic oligonucleotide
  Sense strand starting at position 65 of SEQ ID NO: 914775
uauaaacuccggcaaguau

SEQ ID NO: 1029793 - RNA, 19 nt, Artificial Sequence
  Description of Artificial Sequence: Synthetic oligonucleotide
  Antisense strand to SEQ ID NO: 1029792
auacuugccggaguuuaua

SEQ ID NO: 1029794 - RNA, 19 nt, Artificial Sequence
  Description of Artificial Sequence: Synthetic oligonucleotide
  Sense strand starting at position 231 of SEQ ID NO: 914775
aauuucuguggguguuaau

SEQ ID NO: 1029795 - RNA, 19 nt, Artificial Sequence
  Description of Artificial Sequence: Synthetic oligonucleotide
  Antisense strand to SEQ ID NO: 1029794
auuaacacccacagaaauu

SEQ ID NO: 1029796 - RNA, 19 nt, Artificial Sequence
  Description of Artificial Sequence: Synthetic oligonucleotide
  Sense strand starting at position 296 of SEQ ID NO: 914775
ucauuacacucaguguaca

SEQ ID NO: 1029797 - RNA, 19 nt, Artificial Sequence
  Description of Artificial Sequence: Synthetic oligonucleotide
  Antisense strand to SEQ ID NO: 1029796
uguacacugaguguaauga

SEQ ID NO: 1029798 - RNA, 19 nt, Artificial Sequence
  Description of Artificial Sequence: Synthetic oligonucleotide
  Sense strand starting at position 365 of SEQ ID NO: 914775
cugagcccucucugagaau

SEQ ID NO: 1029799 - RNA, 19 nt, Artificial Sequence
  Description of Artificial Sequence: Synthetic oligonucleotide
  Antisense strand to SEQ ID NO: 1029798
auucucagagagggcucag

SEQ ID NO: 1029800 - RNA, 19 nt, Artificial Sequence
  Description of Artificial Sequence: Synthetic oligonucleotide
  Sense strand starting at position 503 of SEQ ID NO: 914775
ucaagaguuuccuuuggaa

SEQ ID NO: 1029801 - RNA, 19 nt, Artificial Sequence
  Description of Artificial Sequence: Synthetic oligonucleotide
  Antisense strand to SEQ ID NO: 1029800
uuccaaaggaaacucuuga

SEQ ID NO: 1029802 - RNA, 19 nt, Artificial Sequence
  Description of Artificial Sequence: Synthetic oligonucleotide
  Sense strand starting at position 505 of SEQ ID NO: 914775
aagaguuuccuuuggaaau

SEQ ID NO: 1029803 - RNA, 19 nt, Artificial Sequence
  Description of Artificial Sequence: Synthetic oligonucleotide
  Antisense strand to SEQ ID NO: 1029802
auuuccaaaggaaacucuu

SEQ ID NO: 1029804 - RNA, 19 nt, Artificial Sequence
  Description of Artificial Sequence: Synthetic oligonucleotide
  Sense strand starting at position 682 of SEQ ID NO: 914775
uuuggucuuuccucaaaga

SEQ ID NO: 1029805 - RNA, 19 nt, Artificial Sequence
  Description of Artificial Sequence: Synthetic oligonucleotide
  Antisense strand to SEQ ID NO: 1029804
ucuuugaggaaagaccaaa

SEQ ID NO: 1029806 - RNA, 19 nt, Artificial Sequence
  Description of Artificial Sequence: Synthetic oligonucleotide
  Sense strand starting at position 683 of SEQ ID NO: 914775
uuggucuuuccucaaagac

SEQ ID NO: 1029807 - RNA, 19 nt, Artificial Sequence
  Description of Artificial Sequence: Synthetic oligonucleotide
  Antisense strand to SEQ ID NO: 1029806
gucuuugaggaaagaccaa

SEQ ID NO: 1029808 - RNA, 19 nt, Artificial Sequence
  Description of Artificial Sequence: Synthetic oligonucleotide
  Sense strand starting at position 1051 of SEQ ID NO: 914775
gcgccaucucaccuagcua

SEQ ID NO: 1029809 - RNA, 19 nt, Artificial Sequence
  Description of Artificial Sequence: Synthetic oligonucleotide
  Antisense strand to SEQ ID NO: 1029808
uagcuaggugagauggcgc

SEQ ID NO: 1029810 - RNA, 19 nt, Artificial Sequence
  Description of Artificial Sequence: Synthetic oligonucleotide
  Sense strand starting at position 1089 of SEQ ID NO: 914775
agauauugcccucagcaag

SEQ ID NO: 1029811 - RNA, 19 nt, Artificial Sequence
  Description of Artificial Sequence: Synthetic oligonucleotide
  Antisense strand to SEQ ID NO: 1029810
cuugcugagggcaauaucu

SEQ ID NO: 1029812 - RNA, 19 nt, Artificial Sequence
  Description of Artificial Sequence: Synthetic oligonucleotide
  Sense strand starting at position 1103 of SEQ ID NO: 914775
gcaagaaugacuuggagcu

SEQ ID NO: 1029813 - RNA, 19 nt, Artificial Sequence
  Description of Artificial Sequence: Synthetic oligonucleotide
  Antisense strand to SEQ ID NO: 1029812
agcuccaagucauucuugc

SEQ ID NO: 1029814 - RNA, 19 nt, Artificial Sequence
  Description of Artificial Sequence: Synthetic oligonucleotide
  Sense strand starting at position 1109 of SEQ ID NO: 914775
augacuuggagcuggaaua

SEQ ID NO: 1029815 - RNA, 19 nt, Artificial Sequence
  Description of Artificial Sequence: Synthetic oligonucleotide
  Antisense strand to SEQ ID NO: 1029814
uauuccagcuccaagucau

SEQ ID NO: 1029816 - RNA, 19 nt, Artificial Sequence
  Description of Artificial Sequence: Synthetic oligonucleotide
  Sense strand starting at position 1110 of SEQ ID NO: 914775
ugacuuggagcuggaauaa

SEQ ID NO: 1029817 - RNA, 19 nt, Artificial Sequence
  Description of Artificial Sequence: Synthetic oligonucleotide
  Antisense strand to SEQ ID NO: 1029816
uuauuccagcuccaaguca

SEQ ID NO: 1029818 - RNA, 19 nt, Artificial Sequence
  Description of Artificial Sequence: Synthetic oligonucleotide
  Sense strand starting at position 1340 of SEQ ID NO: 914775
ucccaaguguugucauuua

SEQ ID NO: 1029819 - RNA, 19 nt, Artificial Sequence
  Description of Artificial Sequence: Synthetic oligonucleotide
  Antisense strand to SEQ ID NO: 1029818
uaaaugacaacacuuggga

SEQ ID NO: 1029820 - RNA, 19 nt, Artificial Sequence
  Description of Artificial Sequence: Synthetic oligonucleotide
  Sense strand starting at position 1403 of SEQ ID NO: 914775
ccugguggaaauugucaaa

SEQ ID NO: 1029821 - RNA, 19 nt, Artificial Sequence
  Description of Artificial Sequence: Synthetic oligonucleotide
  Antisense strand to SEQ ID NO: 1029820
uuugacaauuuccaccagg

SEQ ID NO: 1029822 - RNA, 19 nt, Artificial Sequence
  Description of Artificial Sequence: Synthetic oligonucleotide
  Sense strand starting at position 1457 of SEQ ID NO: 914775
cuauuaauagguggcucaa

SEQ ID NO: 1029823 - RNA, 19 nt, Artificial Sequence
  Description of Artificial Sequence: Synthetic oligonucleotide
  Antisense strand to SEQ ID NO: 1029822
uugagccaccuauuaauag

SEQ ID NO: 1029824 - RNA, 19 nt, Artificial Sequence
  Description of Artificial Sequence: Synthetic oligonucleotide
  Sense strand starting at position 1556 of SEQ ID NO: 914775
cuucucuuggucuagauca

SEQ ID NO: 1029825 - RNA, 19 nt, Artificial Sequence
  Description of Artificial Sequence: Synthetic oligonucleotide
  Antisense strand to SEQ ID NO: 1029824
ugaucuagaccaagagaag

SEQ ID NO: 1029826 - RNA, 19 nt, Artificial Sequence
  Description of Artificial Sequence: Synthetic oligonucleotide
  Sense strand starting at position 1558 of SEQ ID NO: 914775
ucucuuggucuagaucaac

SEQ ID NO: 1029827 - RNA, 19 nt, Artificial Sequence
  Description of Artificial Sequence: Synthetic oligonucleotide
  Antisense strand to SEQ ID NO: 1029826
guugaucuagaccaagaga

SEQ ID NO: 1029828 - RNA, 19 nt, Artificial Sequence
  Description of Artificial Sequence: Synthetic oligonucleotide
  Sense strand starting at position 2022 of SEQ ID NO: 914775
ccagccauccgagaaaugu

SEQ ID NO: 1029829 - RNA, 19 nt, Artificial Sequence
  Description of Artificial Sequence: Synthetic oligonucleotide
  Antisense strand to SEQ ID NO: 1029828
acauuucucggauggcugg

SEQ ID NO: 1029830 - RNA, 19 nt, Artificial Sequence
  Description of Artificial Sequence: Synthetic oligonucleotide
  Sense strand starting at position 2028 of SEQ ID NO: 914775
auccgagaaaugugugacu

SEQ ID NO: 1029831 - RNA, 19 nt, Artificial Sequence
  Description of Artificial Sequence: Synthetic oligonucleotide
  Antisense strand to SEQ ID NO: 1029830
agucacacauuucucggau

SEQ ID NO: 1029832 - RNA, 19 nt, Artificial Sequence
  Description of Artificial Sequence: Synthetic oligonucleotide
  Sense strand starting at position 2037 of SEQ ID NO: 914775
augugugacuggcucauuu

SEQ ID NO: 1029833 - RNA, 19 nt, Artificial Sequence
  Description of Artificial Sequence: Synthetic oligonucleotide
  Antisense strand to SEQ ID NO: 1029832
aaaugagccagucacacau

SEQ ID NO: 1029834 - RNA, 19 nt, Artificial Sequence
  Description of Artificial Sequence: Synthetic oligonucleotide
  Sense strand starting at position 2041 of SEQ ID NO: 914775
gugacuggcucauuuaugu

SEQ ID NO: 1029835 - RNA, 19 nt, Artificial Sequence
  Description of Artificial Sequence: Synthetic oligonucleotide
  Antisense strand to SEQ ID NO: 1029834
acauaaaugagccagucac

SEQ ID NO: 1029836 - RNA, 19 nt, Artificial Sequence
  Description of Artificial Sequence: Synthetic oligonucleotide
  Sense strand starting at position 2081 of SEQ ID NO: 914775
guuucuauacguuucggua

SEQ ID NO: 1029837 - RNA, 19 nt, Artificial Sequence
  Description of Artificial Sequence: Synthetic oligonucleotide
  Antisense strand to SEQ ID NO: 1029836
uaccgaaacguauagaaac

SEQ ID NO: 1029838 - RNA, 19 nt, Artificial Sequence
  Description of Artificial Sequence: Synthetic oligonucleotide
  Sense strand starting at position 2112 of SEQ ID NO: 914775
aucagucauuugucagcca

SEQ ID NO: 1029839 - RNA, 19 nt, Artificial Sequence
  Description of Artificial Sequence: Synthetic oligonucleotide
  Antisense strand to SEQ ID NO: 1029838
uggcugacaaaugacugau

SEQ ID NO: 1029840 - RNA, 19 nt, Artificial Sequence
  Description of Artificial Sequence: Synthetic oligonucleotide
  Sense strand starting at position 2128 of SEQ ID NO: 914775
ccaggaugacagugugacu

SEQ ID NO: 1029841 - RNA, 19 nt, Artificial Sequence
  Description of Artificial Sequence: Synthetic oligonucleotide
  Antisense strand to SEQ ID NO: 1029840
agucacacugucauccugg

SEQ ID NO: 1029842 - RNA, 19 nt, Artificial Sequence
  Description of Artificial Sequence: Synthetic oligonucleotide
  Sense strand starting at position 2516 of SEQ ID NO: 914775
ccuuucuuaggaugaauga

SEQ ID NO: 1029843 - RNA, 19 nt, Artificial Sequence
  Description of Artificial Sequence: Synthetic oligonucleotide
  Antisense strand to SEQ ID NO: 1029842
ucauucauccuaagaaagg

SEQ ID NO: 1029844 - RNA, 19 nt, Artificial Sequence
  Description of Artificial Sequence: Synthetic oligonucleotide
  Sense strand starting at position 2585 of SEQ ID NO: 914775
acaggucuuuggguggaaa

SEQ ID NO: 1029845 - RNA, 19 nt, Artificial Sequence
  Description of Artificial Sequence: Synthetic oligonucleotide
  Antisense strand to SEQ ID NO: 1029844
uuuccacccaaagaccugu

SEQ ID NO: 1029846 - RNA, 19 nt, Artificial Sequence
  Description of Artificial Sequence: Synthetic oligonucleotide
  Sense strand starting at position 2640 of SEQ ID NO: 914775
cccagaaucucgguauuga

SEQ ID NO: 1029847 - RNA, 19 nt, Artificial Sequence
  Description of Artificial Sequence: Synthetic oligonucleotide
  Antisense strand to SEQ ID NO: 1029846
ucaauaccgagauucuggg

SEQ ID NO: 1029848 - RNA, 19 nt, Artificial Sequence
  Description of Artificial Sequence: Synthetic oligonucleotide
  Sense strand starting at position 2641 of SEQ ID NO: 914775
ccagaaucucgguauugaa

SEQ ID NO: 1029849 - RNA, 19 nt, Artificial Sequence
  Description of Artificial Sequence: Synthetic oligonucleotide
  Antisense strand to SEQ ID NO: 1029848
uucaauaccgagauucugg

SEQ ID NO: 1029850 - RNA, 19 nt, Artificial Sequence
  Description of Artificial Sequence: Synthetic oligonucleotide
  Sense strand starting at position 2766 of SEQ ID NO: 914775
uggucagaccuggguuuga

SEQ ID NO: 1029851 - RNA, 19 nt, Artificial Sequence
  Description of Artificial Sequence: Synthetic oligonucleotide
  Antisense strand to SEQ ID NO: 1029850
ucaaacccaggucugacca

SEQ ID NO: 1029852 - RNA, 19 nt, Artificial Sequence
  Description of Artificial Sequence: Synthetic oligonucleotide
  Sense strand starting at position 2809 of SEQ ID NO: 914775
uuuaguggcauggaggaau

SEQ ID NO: 1029853 - RNA, 19 nt, Artificial Sequence
  Description of Artificial Sequence: Synthetic oligonucleotide
  Antisense strand to SEQ ID NO: 1029852
auuccuccaugccacuaaa

SEQ ID NO: 1029854 - RNA, 19 nt, Artificial Sequence
  Description of Artificial Sequence: Synthetic oligonucleotide
  Sense strand starting at position 2834 of SEQ ID NO: 914775
acaucauugagcuggagac

SEQ ID NO: 1029855 - RNA, 19 nt, Artificial Sequence
  Description of Artificial Sequence: Synthetic oligonucleotide
  Antisense strand to SEQ ID NO: 1029854
gucuccagcucaaugaugu

SEQ ID NO: 1029856 - RNA, 19 nt, Artificial Sequence
  Description of Artificial Sequence: Synthetic oligonucleotide
  Sense strand starting at position 2835 of SEQ ID NO: 914775
caucauugagcuggagacu

SEQ ID NO: 1029857 - RNA, 19 nt, Artificial Sequence
  Description of Artificial Sequence: Synthetic oligonucleotide
  Antisense strand to SEQ ID NO: 1029856
agucuccagcucaaugaug

SEQ ID NO: 1029858 - RNA, 19 nt, Artificial Sequence
  Description of Artificial Sequence: Synthetic oligonucleotide
  Sense strand starting at position 2894 of SEQ ID NO: 914775
agaugaugucugcaaagug

SEQ ID NO: 1029859 - RNA, 19 nt, Artificial Sequence
  Description of Artificial Sequence: Synthetic oligonucleotide
  Antisense strand to SEQ ID NO: 1029858
cacuuugcagacaucaucu

SEQ ID NO: 1029860 - RNA, 19 nt, Artificial Sequence
  Description of Artificial Sequence: Synthetic oligonucleotide
  Sense strand starting at position 3004 of SEQ ID NO: 914775
uguguauccacagacuugu

SEQ ID NO: 1029861 - RNA, 19 nt, Artificial Sequence
  Description of Artificial Sequence: Synthetic oligonucleotide
  Antisense strand to SEQ ID NO: 1029860
acaagucuguggauacaca

SEQ ID NO: 1029862 - RNA, 19 nt, Artificial Sequence
  Description of Artificial Sequence: Synthetic oligonucleotide
  Sense strand starting at position 3126 of SEQ ID NO: 914775
guagcuacccuauaaaugu

SEQ ID NO: 1029863 - RNA, 19 nt, Artificial Sequence
  Description of Artificial Sequence: Synthetic oligonucleotide
  Antisense strand to SEQ ID NO: 1029862
acauuuauaggguagcuac

SEQ ID NO: 1029864 - RNA, 19 nt, Artificial Sequence
  Description of Artificial Sequence: Synthetic oligonucleotide
  Sense strand starting at position 3557 of SEQ ID NO: 914775
acugauuuguuuguuguau

SEQ ID NO: 1029865 - RNA, 19 nt, Artificial Sequence
  Description of Artificial Sequence: Synthetic oligonucleotide
  Antisense strand to SEQ ID NO: 1029864
auacaacaaacaaaucagu

SEQ ID NO: 1029866 - RNA, 19 nt, Artificial Sequence
  Description of Artificial Sequence: Synthetic oligonucleotide
  Sense strand starting at position 3558 of SEQ ID NO: 914775
cugauuuguuuguuguauc

SEQ ID NO: 1029867 - RNA, 19 nt, Artificial Sequence
  Description of Artificial Sequence: Synthetic oligonucleotide
  Antisense strand to SEQ ID NO: 1029866
gauacaacaaacaaaucag

SEQ ID NO: 1029868 - RNA, 19 nt, Artificial Sequence
  Description of Artificial Sequence: Synthetic oligonucleotide
  Sense strand starting at position 3710 of SEQ ID NO: 914775
ugagguuggccucagaaga

SEQ ID NO: 1029869 - RNA, 19 nt, Artificial Sequence
  Description of Artificial Sequence: Synthetic oligonucleotide
  Antisense strand to SEQ ID NO: 1029868
ucuucugaggccaaccuca

SEQ ID NO: 1029870 - RNA, 19 nt, Artificial Sequence
  Description of Artificial Sequence: Synthetic oligonucleotide
  Sense strand starting at position 233 of SEQ ID NO: 914776
uggugucucgggugugaac

SEQ ID NO: 1029871 - RNA, 19 nt, Artificial Sequence
  Description of Artificial Sequence: Synthetic oligonucleotide
  Antisense strand to SEQ ID NO: 1029870
guucacacccgagacacca

SEQ ID NO: 1029872 - RNA, 19 nt, Artificial Sequence
  Description of Artificial Sequence: Synthetic oligonucleotide
  Sense strand starting at position 343 of SEQ ID NO: 914776
uguguccucacuugguaua

SEQ ID NO: 1029873 - RNA, 19 nt, Artificial Sequence
  Description of Artificial Sequence: Synthetic oligonucleotide
  Antisense strand to SEQ ID NO: 1029872
uauaccaagugaggacaca

SEQ ID NO: 1029874 - RNA, 19 nt, Artificial Sequence
  Description of Artificial Sequence: Synthetic oligonucleotide
  Sense strand starting at position 455 of SEQ ID NO: 914776
gugacuauccugugcucuu

SEQ ID NO: 1029875 - RNA, 19 nt, Artificial Sequence
  Description of Artificial Sequence: Synthetic oligonucleotide
  Antisense strand to SEQ ID NO: 1029874
aagagcacaggauagucac

SEQ ID NO: 1029876 - RNA, 19 nt, Artificial Sequence
  Description of Artificial Sequence: Synthetic oligonucleotide
  Sense strand starting at position 516 of SEQ ID NO: 914776
gaacaaaugccugagugcu

SEQ ID NO: 1029877 - RNA, 19 nt, Artificial Sequence
  Description of Artificial Sequence: Synthetic oligonucleotide
  Antisense strand to SEQ ID NO: 1029876
agcacucaggcauuuguuc

SEQ ID NO: 1029878 - RNA, 19 nt, Artificial Sequence
  Description of Artificial Sequence: Synthetic oligonucleotide
  Sense strand starting at position 2111 of SEQ ID NO: 914776
cccaaauuguccguuccaa

SEQ ID NO: 1029879 - RNA, 19 nt, Artificial Sequence
  Description of Artificial Sequence: Synthetic oligonucleotide
  Antisense strand to SEQ ID NO: 1029878
uuggaacggacaauuuggg

SEQ ID NO: 1029880 - RNA, 19 nt, Artificial Sequence
  Description of Artificial Sequence: Synthetic oligonucleotide
  Sense strand starting at position 2230 of SEQ ID NO: 914776
gcugauacagcauaacuau

SEQ ID NO: 1029881 - RNA, 19 nt, Artificial Sequence
  Description of Artificial Sequence: Synthetic oligonucleotide
  Antisense strand to SEQ ID NO: 1029880
auaguuaugcuguaucagc

SEQ ID NO: 1029882 - RNA, 19 nt, Artificial Sequence
  Description of Artificial Sequence: Synthetic oligonucleotide
  Sense strand starting at position 2237 of SEQ ID NO: 914776
cagcauaacuaugucagga

SEQ ID NO: 1029883 - RNA, 19 nt, Artificial Sequence
  Description of Artificial Sequence: Synthetic oligonucleotide
  Antisense strand to SEQ ID NO: 1029882
uccugacauaguuaugcug

SEQ ID NO: 1029884 - RNA, 19 nt, Artificial Sequence
  Description of Artificial Sequence: Synthetic oligonucleotide
  Sense strand starting at position 2328 of SEQ ID NO: 914776
gagcauguagauuagaugu

SEQ ID NO: 1029885 - RNA, 19 nt, Artificial Sequence
  Description of Artificial Sequence: Synthetic oligonucleotide
  Antisense strand to SEQ ID NO: 1029884
acaucuaaucuacaugcuc

SEQ ID NO: 1029886 - RNA, 19 nt, Artificial Sequence
  Description of Artificial Sequence: Synthetic oligonucleotide
  Sense strand starting at position 2351 of SEQ ID NO: 914776
aaaggcaucuuggaggaga

SEQ ID NO: 1029887 - RNA, 19 nt, Artificial Sequence
  Description of Artificial Sequence: Synthetic oligonucleotide
  Antisense strand to SEQ ID NO: 1029886
ucuccuccaagaugccuuu

SEQ ID NO: 1029888 - RNA, 19 nt, Artificial Sequence
  Description of Artificial Sequence: Synthetic oligonucleotide
  Sense strand starting at position 2377 of SEQ ID NO: 914776
ugaguugagucuuucuuag

SEQ ID NO: 1029889 - RNA, 19 nt, Artificial Sequence
  Description of Artificial Sequence: Synthetic oligonucleotide
  Antisense strand to SEQ ID NO: 1029888
cuaagaaagacucaacuca

SEQ ID NO: 1029890 - RNA, 19 nt, Artificial Sequence
  Description of Artificial Sequence: Synthetic oligonucleotide
  Sense strand starting at position 2379 of SEQ ID NO: 914776
aguugagucuuucuuagaa

SEQ ID NO: 1029891 - RNA, 19 nt, Artificial Sequence
  Description of Artificial Sequence: Synthetic oligonucleotide
  Antisense strand to SEQ ID NO: 1029890
uucuaagaaagacucaacu

SEQ ID NO: 1029892 - RNA, 19 nt, Artificial Sequence
  Description of Artificial Sequence: Synthetic oligonucleotide
  Sense strand starting at position 2383 of SEQ ID NO: 914776
gagucuuucuuagaaagac

SEQ ID NO: 1029893 - RNA, 19 nt, Artificial Sequence
  Description of Artificial Sequence: Synthetic oligonucleotide
  Antisense strand to SEQ ID NO: 1029892
gucuuucuaagaaagacuc

SEQ ID NO: 1029894 - RNA, 19 nt, Artificial Sequence
  Description of Artificial Sequence: Synthetic oligonucleotide
  Sense strand starting at position 2393 of SEQ ID NO: 914776
uagaaagacuuguuaguua

SEQ ID NO: 1029895 - RNA, 19 nt, Artificial Sequence
  Description of Artificial Sequence: Synthetic oligonucleotide
  Antisense strand to SEQ ID NO: 1029894
uaacuaacaagucuuucua

SEQ ID NO: 1029896 - RNA, 19 nt, Artificial Sequence
  Description of Artificial Sequence: Synthetic oligonucleotide
  Sense strand starting at position 2401 of SEQ ID NO: 914776
cuuguuaguuaaucugguu

SEQ ID NO: 1029897 - RNA, 19 nt, Artificial Sequence
  Description of Artificial Sequence: Synthetic oligonucleotide
  Antisense strand to SEQ ID NO: 1029896
aaccagauuaacuaacaag

SEQ ID NO: 1029898 - RNA, 19 nt, Artificial Sequence
  Description of Artificial Sequence: Synthetic oligonucleotide
  Sense strand starting at position 2518 of SEQ ID NO: 914776
cuagcaguugaugaaauua

SEQ ID NO: 1029899 - RNA, 19 nt, Artificial Sequence
  Description of Artificial Sequence: Synthetic oligonucleotide
  Antisense strand to SEQ ID NO: 1029898
uaauuucaucaacugcuag

SEQ ID NO: 1029900 - RNA, 19 nt, Artificial Sequence
  Description of Artificial Sequence: Synthetic oligonucleotide
  Sense strand starting at position 2562 of SEQ ID NO: 914776
ggugaagaaagcugcagau

SEQ ID NO: 1029901 - RNA, 19 nt, Artificial Sequence
  Description of Artificial Sequence: Synthetic oligonucleotide
  Antisense strand to SEQ ID NO: 1029900
aucugcagcuuucuucacc

SEQ ID NO: 1029902 - RNA, 19 nt, Artificial Sequence
  Description of Artificial Sequence: Synthetic oligonucleotide
  Sense strand starting at position 2576 of SEQ ID NO: 914776
cagauagauuucugaggca

SEQ ID NO: 1029903 - RNA, 19 nt, Artificial Sequence
  Description of Artificial Sequence: Synthetic oligonucleotide
  Antisense strand to SEQ ID NO: 1029902
ugccucagaaaucuaucug

SEQ ID NO: 1029904 - RNA, 19 nt, Artificial Sequence
  Description of Artificial Sequence: Synthetic oligonucleotide
  Sense strand starting at position 2579 of SEQ ID NO: 914776
auagauuucugaggcauca

SEQ ID NO: 1029905 - RNA, 19 nt, Artificial Sequence
  Description of Artificial Sequence: Synthetic oligonucleotide
  Antisense strand to SEQ ID NO: 1029904
ugaugccucagaaaucuau

SEQ ID NO: 1029906 - RNA, 19 nt, Artificial Sequence
  Description of Artificial Sequence: Synthetic oligonucleotide
  Sense strand starting at position 2589 of SEQ ID NO: 914776
gaggcaucaguauguguag

SEQ ID NO: 1029907 - RNA, 19 nt, Artificial Sequence
  Description of Artificial Sequence: Synthetic oligonucleotide
  Antisense strand to SEQ ID NO: 1029906
cuacacauacugaugccuc

SEQ ID NO: 1029908 - RNA, 19 nt, Artificial Sequence
  Description of Artificial Sequence: Synthetic oligonucleotide
  Sense strand starting at position 2590 of SEQ ID NO: 914776
aggcaucaguauguguaga

SEQ ID NO: 1029909 - RNA, 19 nt, Artificial Sequence
  Description of Artificial Sequence: Synthetic oligonucleotide
  Antisense strand to SEQ ID NO: 1029908
ucuacacauacugaugccu

SEQ ID NO: 1029910 - RNA, 19 nt, Artificial Sequence
  Description of Artificial Sequence: Synthetic oligonucleotide
  Sense strand starting at position 2591 of SEQ ID NO: 914776
ggcaucaguauguguagaa

SEQ ID NO: 1029911 - RNA, 19 nt, Artificial Sequence
  Description of Artificial Sequence: Synthetic oligonucleotide
  Antisense strand to SEQ ID NO: 1029910
uucuacacauacugaugcc

SEQ ID NO: 1029912 - RNA, 19 nt, Artificial Sequence
  Description of Artificial Sequence: Synthetic oligonucleotide
  Sense strand starting at position 2592 of SEQ ID NO: 914776
gcaucaguauguguagaaa

SEQ ID NO: 1029913 - RNA, 19 nt, Artificial Sequence
  Description of Artificial Sequence: Synthetic oligonucleotide
  Antisense strand to SEQ ID NO: 1029912
uuucuacacauacugaugc

SEQ ID NO: 1029914 - RNA, 19 nt, Artificial Sequence
  Description of Artificial Sequence: Synthetic oligonucleotide
  Sense strand starting at position 2662 of SEQ ID NO: 914776
gagaauauauaggagauaa

SEQ ID NO: 1029915 - RNA, 19 nt, Artificial Sequence
  Description of Artificial Sequence: Synthetic oligonucleotide
  Antisense strand to SEQ ID NO: 1029914
uuaucuccuauauauucuc

SEQ ID NO: 1029916 - RNA, 19 nt, Artificial Sequence
  Description of Artificial Sequence: Synthetic oligonucleotide
  Sense strand starting at position 2723 of SEQ ID NO: 914776
gggagcauucgggacuaca

SEQ ID NO: 1029917 - RNA, 19 nt, Artificial Sequence
  Description of Artificial Sequence: Synthetic oligonucleotide
  Antisense strand to SEQ ID NO: 1029916
uguagucccgaaugcuccc

SEQ ID NO: 1029918 - RNA, 19 nt, Artificial Sequence
  Description of Artificial Sequence: Synthetic oligonucleotide
  Sense strand starting at position 2750 of SEQ ID NO: 914776
gggcucacauaugaaauga

SEQ ID NO: 1029919 - RNA, 19 nt, Artificial Sequence
  Description of Artificial Sequence: Synthetic oligonucleotide
  Antisense strand to SEQ ID NO: 1029918
ucauuucauaugugagccc

SEQ ID NO: 1029920 - RNA, 19 nt, Artificial Sequence
  Description of Artificial Sequence: Synthetic oligonucleotide
  Sense strand starting at position 2782 of SEQ ID NO: 914776
uguuaaauuuggcaacaau

SEQ ID NO: 1029921 - RNA, 19 nt, Artificial Sequence
  Description of Artificial Sequence: Synthetic oligonucleotide
  Antisense strand to SEQ ID NO: 1029920
auuguugccaaauuuaaca

SEQ ID NO: 1029922 - RNA, 19 nt, Artificial Sequence
  Description of Artificial Sequence: Synthetic oligonucleotide
  Sense strand starting at position 2808 of SEQ ID NO: 914776
uugagugacuuggcauaag

SEQ ID NO: 1029923 - RNA, 19 nt, Artificial Sequence
  Description of Artificial Sequence: Synthetic oligonucleotide
  Antisense strand to SEQ ID NO: 1029922
cuuaugccaagucacucaa

SEQ ID NO: 1029924 - RNA, 19 nt, Artificial Sequence
  Description of Artificial Sequence: Synthetic oligonucleotide
  Sense strand starting at position 2847 of SEQ ID NO: 914776
ggguuaaagccagauugca

SEQ ID NO: 1029925 - RNA, 19 nt, Artificial Sequence
  Description of Artificial Sequence: Synthetic oligonucleotide
  Antisense strand to SEQ ID NO: 1029924
ugcaaucuggcuuuaaccc

SEQ ID NO: 1029926 - RNA, 19 nt, Artificial Sequence
  Description of Artificial Sequence: Synthetic oligonucleotide
  Sense strand starting at position 2855 of SEQ ID NO: 914776
gccagauugcaacagguaa

SEQ ID NO: 1029927 - RNA, 19 nt, Artificial Sequence
  Description of Artificial Sequence: Synthetic oligonucleotide
  Antisense strand to SEQ ID NO: 1029926
uuaccuguugcaaucuggc

SEQ ID NO: 1029928 - RNA, 19 nt, Artificial Sequence
  Description of Artificial Sequence: Synthetic oligonucleotide
  Sense strand starting at position 2883 of SEQ ID NO: 914776
uguggaacuucucugcuaa

SEQ ID NO: 1029929 - RNA, 19 nt, Artificial Sequence
  Description of Artificial Sequence: Synthetic oligonucleotide
  Antisense strand to SEQ ID NO: 1029928
uuagcagagaaguuccaca

SEQ ID NO: 1029930 - RNA, 19 nt, Artificial Sequence
  Description of Artificial Sequence: Synthetic oligonucleotide
  Sense strand starting at position 2884 of SEQ ID NO: 914776
guggaacuucucugcuaaa

SEQ ID NO: 1029931 - RNA, 19 nt, Artificial Sequence
  Description of Artificial Sequence: Synthetic oligonucleotide
  Antisense strand to SEQ ID NO: 1029930
uuuagcagagaaguuccac

SEQ ID NO: 1029932 - RNA, 19 nt, Artificial Sequence
  Description of Artificial Sequence: Synthetic oligonucleotide
  Sense strand starting at position 2885 of SEQ ID NO: 914776
uggaacuucucugcuaaau

SEQ ID NO: 1029933 - RNA, 19 nt, Artificial Sequence
  Description of Artificial Sequence: Synthetic oligonucleotide
  Antisense strand to SEQ ID NO: 1029932
auuuagcagagaaguucca

SEQ ID NO: 1029934 - RNA, 19 nt, Artificial Sequence
  Description of Artificial Sequence: Synthetic oligonucleotide
  Sense strand starting at position 2898 of SEQ ID NO: 914776
cuaaauacuugagacuaga

SEQ ID NO: 1029935 - RNA, 19 nt, Artificial Sequence
  Description of Artificial Sequence: Synthetic oligonucleotide
  Antisense strand to SEQ ID NO: 1029934
ucuagucucaaguauuuag

SEQ ID NO: 1029936 - RNA, 19 nt, Artificial Sequence
  Description of Artificial Sequence: Synthetic oligonucleotide
  Sense strand starting at position 2914 of SEQ ID NO: 914776
agauguuugagaggucuuc

SEQ ID NO: 1029937 - RNA, 19 nt, Artificial Sequence
  Description of Artificial Sequence: Synthetic oligonucleotide
  Antisense strand to SEQ ID NO: 1029936
gaagaccucucaaacaucu

SEQ ID NO: 1029938 - RNA, 19 nt, Artificial Sequence
  Description of Artificial Sequence: Synthetic oligonucleotide
  Sense strand starting at position 2947 of SEQ ID NO: 914776
cuaggucuugcuuaaauga

SEQ ID NO: 1029939 - RNA, 19 nt, Artificial Sequence
  Description of Artificial Sequence: Synthetic oligonucleotide
  Antisense strand to SEQ ID NO: 1029938
ucauuuaagcaagaccuag

SEQ ID NO: 1029940 - RNA, 19 nt, Artificial Sequence
  Description of Artificial Sequence: Synthetic oligonucleotide
  Sense strand starting at position 3381 of SEQ ID NO: 914776
auaugagauuaccaaggga

SEQ ID NO: 1029941 - RNA, 19 nt, Artificial Sequence
  Description of Artificial Sequence: Synthetic oligonucleotide
  Antisense strand to SEQ ID NO: 1029940
ucccuugguaaucucauau

SEQ ID NO: 1029942 - RNA, 19 nt, Artificial Sequence
  Description of Artificial Sequence: Synthetic oligonucleotide
  Sense strand starting at position 3432 of SEQ ID NO: 914776
cugauugucuuccugcaaa

SEQ ID NO: 1029943 - RNA, 19 nt, Artificial Sequence
  Description of Artificial Sequence: Synthetic oligonucleotide
  Antisense strand to SEQ ID NO: 1029942
uuugcaggaagacaaucag

SEQ ID NO: 1029944 - RNA, 19 nt, Artificial Sequence
  Description of Artificial Sequence: Synthetic oligonucleotide
  Sense strand starting at position 3507 of SEQ ID NO: 914776
uccaaugagugaucacaau

SEQ ID NO: 1029945 - RNA, 19 nt, Artificial Sequence
  Description of Artificial Sequence: Synthetic oligonucleotide
  Antisense strand to SEQ ID NO: 1029944
auugugaucacucauugga

SEQ ID NO: 1029946 - RNA, 19 nt, Artificial Sequence
  Description of Artificial Sequence: Synthetic oligonucleotide
  Sense strand starting at position 3708 of SEQ ID NO: 914776
ugcccugucacagggagaa

SEQ ID NO: 1029947 - RNA, 19 nt, Artificial Sequence
  Description of Artificial Sequence: Synthetic oligonucleotide
  Antisense strand to SEQ ID NO: 1029946
uucucccugugacagggca

SEQ ID NO: 1029948 - RNA, 19 nt, Artificial Sequence
  Description of Artificial Sequence: Synthetic oligonucleotide
  Sense strand starting at position 3948 of SEQ ID NO: 914776
gccaguggacuugagcaua

SEQ ID NO: 1029949 - RNA, 19 nt, Artificial Sequence
  Description of Artificial Sequence: Synthetic oligonucleotide
  Antisense strand to SEQ ID NO: 1029948
uaugcucaaguccacuggc

SEQ ID NO: 1029950 - RNA, 19 nt, Artificial Sequence
  Description of Artificial Sequence: Synthetic oligonucleotide
  Sense strand starting at position 88 of SEQ ID NO: 914777
augcaaggcucuucucaaa

SEQ ID NO: 1029951 - RNA, 19 nt, Artificial Sequence
  Description of Artificial Sequence: Synthetic oligonucleotide
  Antisense strand to SEQ ID NO: 1029950
uuugagaagagccuugcau

SEQ ID NO: 1029952 - RNA, 19 nt, Artificial Sequence
  Description of Artificial Sequence: Synthetic oligonucleotide
  Sense strand starting at position 99 of SEQ ID NO: 914777
uucucaaaguggucucaau

SEQ ID NO: 1029953 - RNA, 19 nt, Artificial Sequence
  Description of Artificial Sequence: Synthetic oligonucleotide
  Antisense strand to SEQ ID NO: 1029952
auugagaccacuuugagaa

SEQ ID NO: 1029954 - RNA, 19 nt, Artificial Sequence
  Description of Artificial Sequence: Synthetic oligonucleotide
  Sense strand starting at position 126 of SEQ ID NO: 914777
uccaguucuagguagggaa

SEQ ID NO: 1029955 - RNA, 19 nt, Artificial Sequence
  Description of Artificial Sequence: Synthetic oligonucleotide
  Antisense strand to SEQ ID NO: 1029954
uucccuaccuagaacugga

SEQ ID NO: 1029956 - RNA, 19 nt, Artificial Sequence
  Description of Artificial Sequence: Synthetic oligonucleotide
  Sense strand starting at position 185 of SEQ ID NO: 914777
gugaguccucucuacacuu

SEQ ID NO: 1029957 - RNA, 19 nt, Artificial Sequence
  Description of Artificial Sequence: Synthetic oligonucleotide
  Antisense strand to SEQ ID NO: 1029956
aaguguagagaggacucac

SEQ ID NO: 1029958 - RNA, 19 nt, Artificial Sequence
  Description of Artificial Sequence: Synthetic oligonucleotide
  Sense strand starting at position 503 of SEQ ID NO: 914777
gaaguauuauagcugggac

SEQ ID NO: 1029959 - RNA, 19 nt, Artificial Sequence
  Description of Artificial Sequence: Synthetic oligonucleotide
  Antisense strand to SEQ ID NO: 1029958
gucccagcuauaauacuuc

SEQ ID NO: 1029960 - RNA, 19 nt, Artificial Sequence
  Description of Artificial Sequence: Synthetic oligonucleotide
  Sense strand starting at position 506 of SEQ ID NO: 914777
guauuauagcugggacuau

SEQ ID NO: 1029961 - RNA, 19 nt, Artificial Sequence
  Description of Artificial Sequence: Synthetic oligonucleotide
  Antisense strand to SEQ ID NO: 1029960
auagucccagcuauaauac

SEQ ID NO: 1029962 - RNA, 19 nt, Artificial Sequence
  Description of Artificial Sequence: Synthetic oligonucleotide
  Sense strand starting at position 556 of SEQ ID NO: 914777
guaguauuaguagagacga

SEQ ID NO: 1029963 - RNA, 19 nt, Artificial Sequence
  Description of Artificial Sequence: Synthetic oligonucleotide
  Antisense strand to SEQ ID NO: 1029962
ucgucucuacuaauacuac

SEQ ID NO: 1029964 - RNA, 19 nt, Artificial Sequence
  Description of Artificial Sequence: Synthetic oligonucleotide
  Sense strand starting at position 844 of SEQ ID NO: 914777
ggaguuucucaggacagug

SEQ ID NO: 1029965 - RNA, 19 nt, Artificial Sequence
  Description of Artificial Sequence: Synthetic oligonucleotide
  Antisense strand to SEQ ID NO: 1029964
cacuguccugagaaacucc

SEQ ID NO: 1029966 - RNA, 19 nt, Artificial Sequence
  Description of Artificial Sequence: Synthetic oligonucleotide
  Sense strand starting at position 856 of SEQ ID NO: 914777
gacaguggccaucacuuau

SEQ ID NO: 1029967 - RNA, 19 nt, Artificial Sequence
  Description of Artificial Sequence: Synthetic oligonucleotide
  Antisense strand to SEQ ID NO: 1029966
auaagugauggccacuguc

SEQ ID NO: 1029968 - RNA, 19 nt, Artificial Sequence
  Description of Artificial Sequence: Synthetic oligonucleotide
  Sense strand starting at position 923 of SEQ ID NO: 914777
cucaauaaauaucaggaga

SEQ ID NO: 1029969 - RNA, 19 nt, Artificial Sequence
  Description of Artificial Sequence: Synthetic oligonucleotide
  Antisense strand to SEQ ID NO: 1029968
ucuccugauauuuauugag

SEQ ID NO: 1029970 - RNA, 19 nt, Artificial Sequence
  Description of Artificial Sequence: Synthetic oligonucleotide
  Sense strand starting at position 953 of SEQ ID NO: 914777
cgggaagccuuccuaaacu

SEQ ID NO: 1029971 - RNA, 19 nt, Artificial Sequence
  Description of Artificial Sequence: Synthetic oligonucleotide
  Antisense strand to SEQ ID NO: 1029970
aguuuaggaaggcuucccg

SEQ ID NO: 1029972 - RNA, 19 nt, Artificial Sequence
  Description of Artificial Sequence: Synthetic oligonucleotide
  Sense strand starting at position 1071 of SEQ ID NO: 914777
uguguucuagucucguuua

SEQ ID NO: 1029973 - RNA, 19 nt, Artificial Sequence
  Description of Artificial Sequence: Synthetic oligonucleotide
  Antisense strand to SEQ ID NO: 1029972
uaaacgagacuagaacaca

SEQ ID NO: 1029974 - RNA, 19 nt, Artificial Sequence
  Description of Artificial Sequence: Synthetic oligonucleotide
  Sense strand starting at position 1076 of SEQ ID NO: 914777
ucuagucucguuuacccaa

SEQ ID NO: 1029975 - RNA, 19 nt, Artificial Sequence
  Description of Artificial Sequence: Synthetic oligonucleotide
  Antisense strand to SEQ ID NO: 1029974
uuggguaaacgagacuaga

SEQ ID NO: 1029976 - RNA, 19 nt, Artificial Sequence
  Description of Artificial Sequence: Synthetic oligonucleotide
  Sense strand starting at position 1105 of SEQ ID NO: 914777
agaagcuucugagcagaaa

SEQ ID NO: 1029977 - RNA, 19 nt, Artificial Sequence
  Description of Artificial Sequence: Synthetic oligonucleotide
  Antisense strand to SEQ ID NO: 1029976
uuucugcucagaagcuucu

SEQ ID NO: 1029978 - RNA, 19 nt, Artificial Sequence
  Description of Artificial Sequence: Synthetic oligonucleotide
  Sense strand starting at position 1106 of SEQ ID NO: 914777
gaagcuucugagcagaaac

SEQ ID NO: 1029979 - RNA, 19 nt, Artificial Sequence
  Description of Artificial Sequence: Synthetic oligonucleotide
  Antisense strand to SEQ ID NO: 1029978
guuucugcucagaagcuuc

SEQ ID NO: 1029980 - RNA, 19 nt, Artificial Sequence
  Description of Artificial Sequence: Synthetic oligonucleotide
  Sense strand starting at position 1189 of SEQ ID NO: 914777
guuagacugguggguaagu

SEQ ID NO: 1029981 - RNA, 19 nt, Artificial Sequence
  Description of Artificial Sequence: Synthetic oligonucleotide
  Antisense strand to SEQ ID NO: 1029980
acuuacccaccagucuaac

SEQ ID NO: 1029982 - RNA, 19 nt, Artificial Sequence
  Description of Artificial Sequence: Synthetic oligonucleotide
  Sense strand starting at position 1377 of SEQ ID NO: 914777
gggcauauacuguaacgca

SEQ ID NO: 1029983 - RNA, 19 nt, Artificial Sequence
  Description of Artificial Sequence: Synthetic oligonucleotide
  Antisense strand to SEQ ID NO: 1029982
ugcguuacaguauaugccc

SEQ ID NO: 1029984 - RNA, 19 nt, Artificial Sequence
  Description of Artificial Sequence: Synthetic oligonucleotide
  Sense strand starting at position 1401 of SEQ ID NO: 914777
augaaugaacugugguauu

SEQ ID NO: 1029985 - RNA, 19 nt, Artificial Sequence
  Description of Artificial Sequence: Synthetic oligonucleotide
  Antisense strand to SEQ ID NO: 1029984
aauaccacaguucauucau

SEQ ID NO: 1029986 - RNA, 19 nt, Artificial Sequence
  Description of Artificial Sequence: Synthetic oligonucleotide
  Sense strand starting at position 1471 of SEQ ID NO: 914777
auaagacugauacgugaag

SEQ ID NO: 1029987 - RNA, 19 nt, Artificial Sequence
  Description of Artificial Sequence: Synthetic oligonucleotide
  Antisense strand to SEQ ID NO: 1029986
cuucacguaucagucuuau

SEQ ID NO: 1029988 - RNA, 19 nt, Artificial Sequence
  Description of Artificial Sequence: Synthetic oligonucleotide
  Sense strand starting at position 1472 of SEQ ID NO: 914777
uaagacugauacgugaaga

SEQ ID NO: 1029989 - RNA, 19 nt, Artificial Sequence
  Description of Artificial Sequence: Synthetic oligonucleotide
  Antisense strand to SEQ ID NO: 1029988
ucuucacguaucagucuua

SEQ ID NO: 1029990 - RNA, 19 nt, Artificial Sequence
  Description of Artificial Sequence: Synthetic oligonucleotide
  Sense strand starting at position 1605 of SEQ ID NO: 914777
cagguagaauuuggacaga

SEQ ID NO: 1029991 - RNA, 19 nt, Artificial Sequence
  Description of Artificial Sequence: Synthetic oligonucleotide
  Antisense strand to SEQ ID NO: 1029990
ucuguccaaauucuaccug

SEQ ID NO: 1029992 - RNA, 19 nt, Artificial Sequence
  Description of Artificial Sequence: Synthetic oligonucleotide
  Sense strand starting at position 2262 of SEQ ID NO: 914777
gugguucuucgcuuuaguu

SEQ ID NO: 1029993 - RNA, 19 nt, Artificial Sequence
  Description of Artificial Sequence: Synthetic oligonucleotide
  Antisense strand to SEQ ID NO: 1029992
aacuaaagcgaagaaccac

SEQ ID NO: 1029994 - RNA, 19 nt, Artificial Sequence
  Description of Artificial Sequence: Synthetic oligonucleotide
  Sense strand starting at position 2409 of SEQ ID NO: 914777
gguauuauauguuucucuu

SEQ ID NO: 1029995 - RNA, 19 nt, Artificial Sequence
  Description of Artificial Sequence: Synthetic oligonucleotide
  Antisense strand to SEQ ID NO: 1029994
aagagaaacauauaauacc

SEQ ID NO: 1029996 - RNA, 19 nt, Artificial Sequence
  Description of Artificial Sequence: Synthetic oligonucleotide
  Sense strand starting at position 2475 of SEQ ID NO: 914777
gcuggcagucaucacugau

SEQ ID NO: 1029997 - RNA, 19 nt, Artificial Sequence
  Description of Artificial Sequence: Synthetic oligonucleotide
  Antisense strand to SEQ ID NO: 1029996
aucagugaugacugccagc

SEQ ID NO: 1029998 - RNA, 19 nt, Artificial Sequence
  Description of Artificial Sequence: Synthetic oligonucleotide
  Sense strand starting at position 2523 of SEQ ID NO: 914777
ccaaguucuguggauucua

SEQ ID NO: 1029999 - RNA, 19 nt, Artificial Sequence
  Description of Artificial Sequence: Synthetic oligonucleotide
  Antisense strand to SEQ ID NO: 1029998
uagaauccacagaacuugg

SEQ ID NO: 1030000 - RNA, 19 nt, Artificial Sequence
  Description of Artificial Sequence: Synthetic oligonucleotide
  Sense strand starting at position 2531 of SEQ ID NO: 914777
uguggauucuaccuccuuu

SEQ ID NO: 1030001 - RNA, 19 nt, Artificial Sequence
  Description of Artificial Sequence: Synthetic oligonucleotide
  Antisense strand to SEQ ID NO: 1030000
aaaggagguagaauccaca

SEQ ID NO: 1030002 - RNA, 19 nt, Artificial Sequence
  Description of Artificial Sequence: Synthetic oligonucleotide
  Sense strand starting at position 2711 of SEQ ID NO: 914777
agcagaccugaucaaguua

SEQ ID NO: 1030003 - RNA, 19 nt, Artificial Sequence
  Description of Artificial Sequence: Synthetic oligonucleotide
  Antisense strand to SEQ ID NO: 1030002
uaacuugaucaggucugcu

SEQ ID NO: 1030004 - RNA, 19 nt, Artificial Sequence
  Description of Artificial Sequence: Synthetic oligonucleotide
  Sense strand starting at position 2843 of SEQ ID NO: 914777
uuaguccuucucgaccaua

SEQ ID NO: 1030005 - RNA, 19 nt, Artificial Sequence
  Description of Artificial Sequence: Synthetic oligonucleotide
  Antisense strand to SEQ ID NO: 1030004
uauggucgagaaggacuaa

SEQ ID NO: 1030006 - RNA, 19 nt, Artificial Sequence
  Description of Artificial Sequence: Synthetic oligonucleotide
  Sense strand starting at position 3048 of SEQ ID NO: 914777
uccugauaguccuuucuug

SEQ ID NO: 1030007 - RNA, 19 nt, Artificial Sequence
  Description of Artificial Sequence: Synthetic oligonucleotide
  Antisense strand to SEQ ID NO: 1030006
caagaaaggacuaucagga

SEQ ID NO: 1030008 - RNA, 19 nt, Artificial Sequence
  Description of Artificial Sequence: Synthetic oligonucleotide
  Sense strand starting at position 3091 of SEQ ID NO: 914777
auuguauuugucuguuuac

SEQ ID NO: 1030009 - RNA, 19 nt, Artificial Sequence
  Description of Artificial Sequence: Synthetic oligonucleotide
  Antisense strand to SEQ ID NO: 1030008
guaaacagacaaauacaau

SEQ ID NO: 1030010 - RNA, 19 nt, Artificial Sequence
  Description of Artificial Sequence: Synthetic oligonucleotide
  Sense strand starting at position 3092 of SEQ ID NO: 914777
uuguauuugucuguuuacu

SEQ ID NO: 1030011 - RNA, 19 nt, Artificial Sequence
  Description of Artificial Sequence: Synthetic oligonucleotide
  Antisense strand to SEQ ID NO: 1030010
aguaaacagacaaauacaa

SEQ ID NO: 1030012 - RNA, 19 nt, Artificial Sequence
  Description of Artificial Sequence: Synthetic oligonucleotide
  Sense strand starting at position 3094 of SEQ ID NO: 914777
guauuugucuguuuacucu

SEQ ID NO: 1030013 - RNA, 19 nt, Artificial Sequence
  Description of Artificial Sequence: Synthetic oligonucleotide
  Antisense strand to SEQ ID NO: 1030012
agaguaaacagacaaauac

SEQ ID NO: 1030014 - RNA, 19 nt, Artificial Sequence
  Description of Artificial Sequence: Synthetic oligonucleotide
  Sense strand starting at position 3503 of SEQ ID NO: 914777
gcugaaacucaguaagggu

SEQ ID NO: 1030015 - RNA, 19 nt, Artificial Sequence
  Description of Artificial Sequence: Synthetic oligonucleotide
  Antisense strand to SEQ ID NO: 1030014
acccuuacugaguuucagc

SEQ ID NO: 1030016 - RNA, 19 nt, Artificial Sequence
  Description of Artificial Sequence: Synthetic oligonucleotide
  Sense strand starting at position 3551 of SEQ ID NO: 914777
uaauaaaguugguuaagac

SEQ ID NO: 1030017 - RNA, 19 nt, Artificial Sequence
  Description of Artificial Sequence: Synthetic oligonucleotide
  Antisense strand to SEQ ID NO: 1030016
gucuuaaccaacuuuauua

SEQ ID NO: 1030018 - RNA, 19 nt, Artificial Sequence
  Description of Artificial Sequence: Synthetic oligonucleotide
  Sense strand starting at position 3558 of SEQ ID NO: 914777
guugguuaagacugauauu

SEQ ID NO: 1030019 - RNA, 19 nt, Artificial Sequence
  Description of Artificial Sequence: Synthetic oligonucleotide
  Antisense strand to SEQ ID NO: 1030018
aauaucagucuuaaccaac

SEQ ID NO: 1030020 - RNA, 19 nt, Artificial Sequence
  Description of Artificial Sequence: Synthetic oligonucleotide
  Sense strand starting at position 3702 of SEQ ID NO: 914777
agucauacuugugcauaaa

SEQ ID NO: 1030021 - RNA, 19 nt, Artificial Sequence
  Description of Artificial Sequence: Synthetic oligonucleotide
  Antisense strand to SEQ ID NO: 1030020
uuuaugcacaaguaugacu

SEQ ID NO: 1030022 - RNA, 19 nt, Artificial Sequence
  Description of Artificial Sequence: Synthetic oligonucleotide
  Sense strand starting at position 3703 of SEQ ID NO: 914777
gucauacuugugcauaaau

SEQ ID NO: 1030023 - RNA, 19 nt, Artificial Sequence
  Description of Artificial Sequence: Synthetic oligonucleotide
  Antisense strand to SEQ ID NO: 1030022
auuuaugcacaaguaugac

SEQ ID NO: 1030024 - RNA, 19 nt, Artificial Sequence
  Description of Artificial Sequence: Synthetic oligonucleotide
  Sense strand starting at position 3740 of SEQ ID NO: 914777
gaguuauaacuuggucccu

SEQ ID NO: 1030025 - RNA, 19 nt, Artificial Sequence
  Description of Artificial Sequence: Synthetic oligonucleotide
  Antisense strand to SEQ ID NO: 1030024
agggaccaaguuauaacuc

SEQ ID NO: 1030026 - RNA, 19 nt, Artificial Sequence
  Description of Artificial Sequence: Synthetic oligonucleotide
  Sense strand starting at position 3741 of SEQ ID NO: 914777
aguuauaacuuggucccua

SEQ ID NO: 1030027 - RNA, 19 nt, Artificial Sequence
  Description of Artificial Sequence: Synthetic oligonucleotide
  Antisense strand to SEQ ID NO: 1030026
uagggaccaaguuauaacu

SEQ ID NO: 1030028 - RNA, 19 nt, Artificial Sequence
  Description of Artificial Sequence: Synthetic oligonucleotide
  Sense strand starting at position 3742 of SEQ ID NO: 914777
guuauaacuuggucccuau

SEQ ID NO: 1030029 - RNA, 19 nt, Artificial Sequence
  Description of Artificial Sequence: Synthetic oligonucleotide
  Antisense strand to SEQ ID NO: 1030028
auagggaccaaguuauaac

SEQ ID NO: 1030030 - RNA, 19 nt, Artificial Sequence
  Description of Artificial Sequence: Synthetic oligonucleotide
  Sense strand starting at position 36 of SEQ ID NO: 914778
ugucuuaguuggguaagca

SEQ ID NO: 1030031 - RNA, 19 nt, Artificial Sequence
  Description of Artificial Sequence: Synthetic oligonucleotide
  Antisense strand to SEQ ID NO: 1030030
ugcuuacccaacuaagaca

SEQ ID NO: 1030032 - RNA, 19 nt, Artificial Sequence
  Description of Artificial Sequence: Synthetic oligonucleotide
  Sense strand starting at position 61 of SEQ ID NO: 914778
accguuacggcucaagacu

SEQ ID NO: 1030033 - RNA, 19 nt, Artificial Sequence
  Description of Artificial Sequence: Synthetic oligonucleotide
  Antisense strand to SEQ ID NO: 1030032
agucuugagccguaacggu

SEQ ID NO: 1030034 - RNA, 19 nt, Artificial Sequence
  Description of Artificial Sequence: Synthetic oligonucleotide
  Sense strand starting at position 149 of SEQ ID NO: 914778
gaaauuaacugagaugguu

SEQ ID NO: 1030035 - RNA, 19 nt, Artificial Sequence
  Description of Artificial Sequence: Synthetic oligonucleotide
  Antisense strand to SEQ ID NO: 1030034
aaccaucucaguuaauuuc

SEQ ID NO: 1030036 - RNA, 19 nt, Artificial Sequence
  Description of Artificial Sequence: Synthetic oligonucleotide
  Sense strand starting at position 157 of SEQ ID NO: 914778
cugagaugguuugaaugaa

SEQ ID NO: 1030037 - RNA, 19 nt, Artificial Sequence
  Description of Artificial Sequence: Synthetic oligonucleotide
  Antisense strand to SEQ ID NO: 1030036
uucauucaaaccaucucag

SEQ ID NO: 1030038 - RNA, 19 nt, Artificial Sequence
  Description of Artificial Sequence: Synthetic oligonucleotide
  Sense strand starting at position 366 of SEQ ID NO: 914778
gcgcuuucccucuaaacug

SEQ ID NO: 1030039 - RNA, 19 nt, Artificial Sequence
  Description of Artificial Sequence: Synthetic oligonucleotide
  Antisense strand to SEQ ID NO: 1030038
caguuuagagggaaagcgc

SEQ ID NO: 1030040 - RNA, 19 nt, Artificial Sequence
  Description of Artificial Sequence: Synthetic oligonucleotide
  Sense strand starting at position 482 of SEQ ID NO: 914778
gcaguaagagguugugaaa

SEQ ID NO: 1030041 - RNA, 19 nt, Artificial Sequence
  Description of Artificial Sequence: Synthetic oligonucleotide
  Antisense strand to SEQ ID NO: 1030040
uuucacaaccucuuacugc

SEQ ID NO: 1030042 - RNA, 19 nt, Artificial Sequence
  Description of Artificial Sequence: Synthetic oligonucleotide
  Sense strand starting at position 522 of SEQ ID NO: 914778
uguuacgacuacucuguaa

SEQ ID NO: 1030043 - RNA, 19 nt, Artificial Sequence
  Description of Artificial Sequence: Synthetic oligonucleotide
  Antisense strand to SEQ ID NO: 1030042
uuacagaguagucguaaca

SEQ ID NO: 1030044 - RNA, 19 nt, Artificial Sequence
  Description of Artificial Sequence: Synthetic oligonucleotide
  Sense strand starting at position 524 of SEQ ID NO: 914778
uuacgacuacucuguaaca

SEQ ID NO: 1030045 - RNA, 19 nt, Artificial Sequence
  Description of Artificial Sequence: Synthetic oligonucleotide
  Antisense strand to SEQ ID NO: 1030044
uguuacagaguagucguaa

SEQ ID NO: 1030046 - RNA, 19 nt, Artificial Sequence
  Description of Artificial Sequence: Synthetic oligonucleotide
  Sense strand starting at position 526 of SEQ ID NO: 914778
acgacuacucuguaacaag

SEQ ID NO: 1030047 - RNA, 19 nt, Artificial Sequence
  Description of Artificial Sequence: Synthetic oligonucleotide
  Antisense strand to SEQ ID NO: 1030046
cuuguuacagaguagucgu

SEQ ID NO: 1030048 - RNA, 19 nt, Artificial Sequence
  Description of Artificial Sequence: Synthetic oligonucleotide
  Sense strand starting at position 997 of SEQ ID NO: 914778
aagggaucuccguaguuac

SEQ ID NO: 1030049 - RNA, 19 nt, Artificial Sequence
  Description of Artificial Sequence: Synthetic oligonucleotide
  Antisense strand to SEQ ID NO: 1030048
guaacuacggagaucccuu

SEQ ID NO: 1030050 - RNA, 19 nt, Artificial Sequence
  Description of Artificial Sequence: Synthetic oligonucleotide
  Sense strand starting at position 1008 of SEQ ID NO: 914778
guaguuacggccuaggacu

SEQ ID NO: 1030051 - RNA, 19 nt, Artificial Sequence
  Description of Artificial Sequence: Synthetic oligonucleotide
  Antisense strand to SEQ ID NO: 1030050
aguccuaggccguaacuac

SEQ ID NO: 1030052 - RNA, 19 nt, Artificial Sequence
  Description of Artificial Sequence: Synthetic oligonucleotide
  Sense strand starting at position 2362 of SEQ ID NO: 914778
cucggcauuuggucguuaa

SEQ ID NO: 1030053 - RNA, 19 nt, Artificial Sequence
  Description of Artificial Sequence: Synthetic oligonucleotide
  Antisense strand to SEQ ID NO: 1030052
uuaacgaccaaaugccgag

SEQ ID NO: 1030054 - RNA, 19 nt, Artificial Sequence
  Description of Artificial Sequence: Synthetic oligonucleotide
  Sense strand starting at position 2363 of SEQ ID NO: 914778
ucggcauuuggucguuaaa

SEQ ID NO: 1030055 - RNA, 19 nt, Artificial Sequence
  Description of Artificial Sequence: Synthetic oligonucleotide
  Antisense strand to SEQ ID NO: 1030054
uuuaacgaccaaaugccga

SEQ ID NO: 1030056 - RNA, 19 nt, Artificial Sequence
  Description of Artificial Sequence: Synthetic oligonucleotide
  Sense strand starting at position 2365 of SEQ ID NO: 914778
ggcauuuggucguuaaagg

SEQ ID NO: 1030057 - RNA, 19 nt, Artificial Sequence
  Description of Artificial Sequence: Synthetic oligonucleotide
  Antisense strand to SEQ ID NO: 1030056
ccuuuaacgaccaaaugcc

SEQ ID NO: 1030058 - RNA, 19 nt, Artificial Sequence
  Description of Artificial Sequence: Synthetic oligonucleotide
  Sense strand starting at position 2366 of SEQ ID NO: 914778
gcauuuggucguuaaaggu

SEQ ID NO: 1030059 - RNA, 19 nt, Artificial Sequence
  Description of Artificial Sequence: Synthetic oligonucleotide
  Antisense strand to SEQ ID NO: 1030058
accuuuaacgaccaaaugc

SEQ ID NO: 1030060 - RNA, 19 nt, Artificial Sequence
  Description of Artificial Sequence: Synthetic oligonucleotide
  Sense strand starting at position 2502 of SEQ ID NO: 914778
aaggguccucuuggaaauu

SEQ ID NO: 1030061 - RNA, 19 nt, Artificial Sequence
  Description of Artificial Sequence: Synthetic oligonucleotide
  Antisense strand to SEQ ID NO: 1030060
aauuuccaagaggacccuu

SEQ ID NO: 1030062 - RNA, 19 nt, Artificial Sequence
  Description of Artificial Sequence: Synthetic oligonucleotide
  Sense strand starting at position 2503 of SEQ ID NO: 914778
aggguccucuuggaaauuu

SEQ ID NO: 1030063 - RNA, 19 nt, Artificial Sequence
  Description of Artificial Sequence: Synthetic oligonucleotide
  Antisense strand to SEQ ID NO: 1030062
aaauuuccaagaggacccu

SEQ ID NO: 1030064 - RNA, 19 nt, Artificial Sequence
  Description of Artificial Sequence: Synthetic oligonucleotide
  Sense strand starting at position 2634 of SEQ ID NO: 914778
ccuggagauuaggaaauca

SEQ ID NO: 1030065 - RNA, 19 nt, Artificial Sequence
  Description of Artificial Sequence: Synthetic oligonucleotide
  Antisense strand to SEQ ID NO: 1030064
ugauuuccuaaucuccagg

SEQ ID NO: 1030066 - RNA, 19 nt, Artificial Sequence
  Description of Artificial Sequence: Synthetic oligonucleotide
  Sense strand starting at position 2670 of SEQ ID NO: 914778
agcuuacauaaucguggaa

SEQ ID NO: 1030067 - RNA, 19 nt, Artificial Sequence
  Description of Artificial Sequence: Synthetic oligonucleotide
  Antisense strand to SEQ ID NO: 1030066
uuccacgauuauguaagcu

SEQ ID NO: 1030068 - RNA, 19 nt, Artificial Sequence
  Description of Artificial Sequence: Synthetic oligonucleotide
  Sense strand starting at position 2673 of SEQ ID NO: 914778
uuacauaaucguggaacca

SEQ ID NO: 1030069 - RNA, 19 nt, Artificial Sequence
  Description of Artificial Sequence: Synthetic oligonucleotide
  Antisense strand to SEQ ID NO: 1030068
ugguuccacgauuauguaa

SEQ ID NO: 1030070 - RNA, 19 nt, Artificial Sequence
  Description of Artificial Sequence: Synthetic oligonucleotide
  Sense strand starting at position 2674 of SEQ ID NO: 914778
uacauaaucguggaaccau

SEQ ID NO: 1030071 - RNA, 19 nt, Artificial Sequence
  Description of Artificial Sequence: Synthetic oligonucleotide
  Antisense strand to SEQ ID NO: 1030070
augguuccacgauuaugua

SEQ ID NO: 1030072 - RNA, 19 nt, Artificial Sequence
  Description of Artificial Sequence: Synthetic oligonucleotide
  Sense strand starting at position 2717 of SEQ ID NO: 914778
uugcgauccuuggucccaa

SEQ ID NO: 1030073 - RNA, 19 nt, Artificial Sequence
  Description of Artificial Sequence: Synthetic oligonucleotide
  Antisense strand to SEQ ID NO: 1030072
uugggaccaaggaucgcaa

SEQ ID NO: 1030074 - RNA, 19 nt, Artificial Sequence
  Description of Artificial Sequence: Synthetic oligonucleotide
  Sense strand starting at position 2754 of SEQ ID NO: 914778
ccaagaaguuuaggugaca

SEQ ID NO: 1030075 - RNA, 19 nt, Artificial Sequence
  Description of Artificial Sequence: Synthetic oligonucleotide
  Antisense strand to SEQ ID NO: 1030074
ugucaccuaaacuucuugg

SEQ ID NO: 1030076 - RNA, 19 nt, Artificial Sequence
  Description of Artificial Sequence: Synthetic oligonucleotide
  Sense strand starting at position 2755 of SEQ ID NO: 914778
caagaaguuuaggugacau

SEQ ID NO: 1030077 - RNA, 19 nt, Artificial Sequence
  Description of Artificial Sequence: Synthetic oligonucleotide
  Antisense strand to SEQ ID NO: 1030076
augucaccuaaacuucuug

SEQ ID NO: 1030078 - RNA, 19 nt, Artificial Sequence
  Description of Artificial Sequence: Synthetic oligonucleotide
  Sense strand starting at position 2768 of SEQ ID NO: 914778
ugacaugaccaagguuaua

SEQ ID NO: 1030079 - RNA, 19 nt, Artificial Sequence
  Description of Artificial Sequence: Synthetic oligonucleotide
  Antisense strand to SEQ ID NO: 1030078
uauaaccuuggucauguca

SEQ ID NO: 1030080 - RNA, 19 nt, Artificial Sequence
  Description of Artificial Sequence: Synthetic oligonucleotide
  Sense strand starting at position 2773 of SEQ ID NO: 914778
ugaccaagguuauacagua

SEQ ID NO: 1030081 - RNA, 19 nt, Artificial Sequence
  Description of Artificial Sequence: Synthetic oligonucleotide
  Antisense strand to SEQ ID NO: 1030080
uacuguauaaccuugguca

SEQ ID NO: 1030082 - RNA, 19 nt, Artificial Sequence
  Description of Artificial Sequence: Synthetic oligonucleotide
  Sense strand starting at position 2832 of SEQ ID NO: 914778
ggaaacaaauggcuuucua

SEQ ID NO: 1030083 - RNA, 19 nt, Artificial Sequence
  Description of Artificial Sequence: Synthetic oligonucleotide
  Antisense strand to SEQ ID NO: 1030082
uagaaagccauuuguuucc

SEQ ID NO: 1030084 - RNA, 19 nt, Artificial Sequence
  Description of Artificial Sequence: Synthetic oligonucleotide
  Sense strand starting at position 2896 of SEQ ID NO: 914778
gguucccuuuguucugaau

SEQ ID NO: 1030085 - RNA, 19 nt, Artificial Sequence
  Description of Artificial Sequence: Synthetic oligonucleotide
  Antisense strand to SEQ ID NO: 1030084
auucagaacaaagggaacc

SEQ ID NO: 1030086 - RNA, 19 nt, Artificial Sequence
  Description of Artificial Sequence: Synthetic oligonucleotide
  Sense strand starting at position 2953 of SEQ ID NO: 914778
auggaaguguccuuucuuu

SEQ ID NO: 1030087 - RNA, 19 nt, Artificial Sequence
  Description of Artificial Sequence: Synthetic oligonucleotide
  Antisense strand to SEQ ID NO: 1030086
aaagaaaggacacuuccau

SEQ ID NO: 1030088 - RNA, 19 nt, Artificial Sequence
  Description of Artificial Sequence: Synthetic oligonucleotide
  Sense strand starting at position 3071 of SEQ ID NO: 914778
ggcaaauugcugcauacau

SEQ ID NO: 1030089 - RNA, 19 nt, Artificial Sequence
  Description of Artificial Sequence: Synthetic oligonucleotide
  Antisense strand to SEQ ID NO: 1030088
auguaugcagcaauuugcc

SEQ ID NO: 1030090 - RNA, 19 nt, Artificial Sequence
  Description of Artificial Sequence: Synthetic oligonucleotide
  Sense strand starting at position 3136 of SEQ ID NO: 914778
uuuggauaaugccuuuaag

SEQ ID NO: 1030091 - RNA, 19 nt, Artificial Sequence
  Description of Artificial Sequence: Synthetic oligonucleotide
  Antisense strand to SEQ ID NO: 1030090
cuuaaaggcauuauccaaa

SEQ ID NO: 1030092 - RNA, 19 nt, Artificial Sequence
  Description of Artificial Sequence: Synthetic oligonucleotide
  Sense strand starting at position 3361 of SEQ ID NO: 914778
gcuugaaucgcuugagcca

SEQ ID NO: 1030093 - RNA, 19 nt, Artificial Sequence
  Description of Artificial Sequence: Synthetic oligonucleotide
  Antisense strand to SEQ ID NO: 1030092
uggcucaagcgauucaagc

SEQ ID NO: 1030094 - RNA, 19 nt, Artificial Sequence
  Description of Artificial Sequence: Synthetic oligonucleotide
  Sense strand starting at position 3451 of SEQ ID NO: 914778
cccugaggccacuggaaau

SEQ ID NO: 1030095 - RNA, 19 nt, Artificial Sequence
  Description of Artificial Sequence: Synthetic oligonucleotide
  Antisense strand to SEQ ID NO: 1030094
auuuccaguggccucaggg

SEQ ID NO: 1030096 - RNA, 19 nt, Artificial Sequence
  Description of Artificial Sequence: Synthetic oligonucleotide
  Sense strand starting at position 3470 of SEQ ID NO: 914778
aacacuuucgaaugacagu

SEQ ID NO: 1030097 - RNA, 19 nt, Artificial Sequence
  Description of Artificial Sequence: Synthetic oligonucleotide
  Antisense strand to SEQ ID NO: 1030096
acugucauucgaaaguguu

SEQ ID NO: 1030098 - RNA, 19 nt, Artificial Sequence
  Description of Artificial Sequence: Synthetic oligonucleotide
  Sense strand starting at position 3564 of SEQ ID NO: 914778
agagauagccuaugaacca

SEQ ID NO: 1030099 - RNA, 19 nt, Artificial Sequence
  Description of Artificial Sequence: Synthetic oligonucleotide
  Antisense strand to SEQ ID NO: 1030098
ugguucauaggcuaucucu

SEQ ID NO: 1030100 - RNA, 19 nt, Artificial Sequence
  Description of Artificial Sequence: Synthetic oligonucleotide
  Sense strand starting at position 3593 of SEQ ID NO: 914778
cuuaguauuucguuacuuu

SEQ ID NO: 1030101 - RNA, 19 nt, Artificial Sequence
  Description of Artificial Sequence: Synthetic oligonucleotide
  Antisense strand to SEQ ID NO: 1030100
aaaguaacgaaauacuaag

SEQ ID NO: 1030102 - RNA, 19 nt, Artificial Sequence
  Description of Artificial Sequence: Synthetic oligonucleotide
  Sense strand starting at position 3670 of SEQ ID NO: 914778
cggagaaagcuacaauagu

SEQ ID NO: 1030103 - RNA, 19 nt, Artificial Sequence
  Description of Artificial Sequence: Synthetic oligonucleotide
  Antisense strand to SEQ ID NO: 1030102
acuauuguagcuuucuccg

SEQ ID NO: 1030104 - RNA, 19 nt, Artificial Sequence
  Description of Artificial Sequence: Synthetic oligonucleotide
  Sense strand starting at position 3785 of SEQ ID NO: 914778
gcuuccauucccuguauuu

SEQ ID NO: 1030105 - RNA, 19 nt, Artificial Sequence
  Description of Artificial Sequence: Synthetic oligonucleotide
  Antisense strand to SEQ ID NO: 1030104
aaauacagggaauggaagc

SEQ ID NO: 1030106 - RNA, 19 nt, Artificial Sequence
  Description of Artificial Sequence: Synthetic oligonucleotide
  Sense strand starting at position 3802 of SEQ ID NO: 914778
uugcuacauccaugaagag

SEQ ID NO: 1030107 - RNA, 19 nt, Artificial Sequence
  Description of Artificial Sequence: Synthetic oligonucleotide
  Antisense strand to SEQ ID NO: 1030106
cucuucauggauguagcaa

SEQ ID NO: 1030108 - RNA, 19 nt, Artificial Sequence
  Description of Artificial Sequence: Synthetic oligonucleotide
  Sense strand starting at position 3867 of SEQ ID NO: 914778
guugcuacucacuacacua

SEQ ID NO: 1030109 - RNA, 19 nt, Artificial Sequence
  Description of Artificial Sequence: Synthetic oligonucleotide
  Antisense strand to SEQ ID NO: 1030108
uaguguagugaguagcaac

SEQ ID NO: 1030110 - RNA, 19 nt, Artificial Sequence
  Description of Artificial Sequence: Synthetic oligonucleotide
  Sense strand starting at position 117 of SEQ ID NO: 914779
gucuguaauuuacacccua

SEQ ID NO: 1030111 - RNA, 19 nt, Artificial Sequence
  Description of Artificial Sequence: Synthetic oligonucleotide
  Antisense strand to SEQ ID NO: 1030110
uaggguguaaauuacagac

SEQ ID NO: 1030112 - RNA, 19 nt, Artificial Sequence
  Description of Artificial Sequence: Synthetic oligonucleotide
  Sense strand starting at position 152 of SEQ ID NO: 914779
aaguuaagaguaugaucua

SEQ ID NO: 1030113 - RNA, 19 nt, Artificial Sequence
  Description of Artificial Sequence: Synthetic oligonucleotide
  Antisense strand to SEQ ID NO: 1030112
uagaucauacucuuaacuu

SEQ ID NO: 1030114 - RNA, 19 nt, Artificial Sequence
  Description of Artificial Sequence: Synthetic oligonucleotide
  Sense strand starting at position 155 of SEQ ID NO: 914779
uuaagaguaugaucuacag

SEQ ID NO: 1030115 - RNA, 19 nt, Artificial Sequence
  Description of Artificial Sequence: Synthetic oligonucleotide
  Antisense strand to SEQ ID NO: 1030114
cuguagaucauacucuuaa

SEQ ID NO: 1030116 - RNA, 19 nt, Artificial Sequence
  Description of Artificial Sequence: Synthetic oligonucleotide
  Sense strand starting at position 159 of SEQ ID NO: 914779
gaguaugaucuacagcuuc

SEQ ID NO: 1030117 - RNA, 19 nt, Artificial Sequence
  Description of Artificial Sequence: Synthetic oligonucleotide
  Antisense strand to SEQ ID NO: 1030116
gaagcuguagaucauacuc

SEQ ID NO: 1030118 - RNA, 19 nt, Artificial Sequence
  Description of Artificial Sequence: Synthetic oligonucleotide
  Sense strand starting at position 268 of SEQ ID NO: 914779
guuuauaagcaagguaaug

SEQ ID NO: 1030119 - RNA, 19 nt, Artificial Sequence
  Description of Artificial Sequence: Synthetic oligonucleotide
  Antisense strand to SEQ ID NO: 1030118
cauuaccuugcuuauaaac

SEQ ID NO: 1030120 - RNA, 19 nt, Artificial Sequence
  Description of Artificial Sequence: Synthetic oligonucleotide
  Sense strand starting at position 321 of SEQ ID NO: 914779
cuaaguaaggcugacuuau

SEQ ID NO: 1030121 - RNA, 19 nt, Artificial Sequence
  Description of Artificial Sequence: Synthetic oligonucleotide
  Antisense strand to SEQ ID NO: 1030120
auaagucagccuuacuuag

SEQ ID NO: 1030122 - RNA, 19 nt, Artificial Sequence
  Description of Artificial Sequence: Synthetic oligonucleotide
  Sense strand starting at position 323 of SEQ ID NO: 914779
aaguaaggcugacuuauca

SEQ ID NO: 1030123 - RNA, 19 nt, Artificial Sequence
  Description of Artificial Sequence: Synthetic oligonucleotide
  Antisense strand to SEQ ID NO: 1030122
ugauaagucagccuuacuu

SEQ ID NO: 1030124 - RNA, 19 nt, Artificial Sequence
  Description of Artificial Sequence: Synthetic oligonucleotide
  Sense strand starting at position 327 of SEQ ID NO: 914779
aaggcugacuuaucauguu

SEQ ID NO: 1030125 - RNA, 19 nt, Artificial Sequence
  Description of Artificial Sequence: Synthetic oligonucleotide
  Antisense strand to SEQ ID NO: 1030124
aacaugauaagucagccuu

SEQ ID NO: 1030126 - RNA, 19 nt, Artificial Sequence
  Description of Artificial Sequence: Synthetic oligonucleotide
  Sense strand starting at position 344 of SEQ ID NO: 914779
uuaugaucugcuugccuaa

SEQ ID NO: 1030127 - RNA, 19 nt, Artificial Sequence
  Description of Artificial Sequence: Synthetic oligonucleotide
  Antisense strand to SEQ ID NO: 1030126
uuaggcaagcagaucauaa

SEQ ID NO: 1030128 - RNA, 19 nt, Artificial Sequence
  Description of Artificial Sequence: Synthetic oligonucleotide
  Sense strand starting at position 346 of SEQ ID NO: 914779
augaucugcuugccuaaua

SEQ ID NO: 1030129 - RNA, 19 nt, Artificial Sequence
  Description of Artificial Sequence: Synthetic oligonucleotide
  Antisense strand to SEQ ID NO: 1030128
uauuaggcaagcagaucau

SEQ ID NO: 1030130 - RNA, 19 nt, Artificial Sequence
  Description of Artificial Sequence: Synthetic oligonucleotide
  Sense strand starting at position 347 of SEQ ID NO: 914779
ugaucugcuugccuaauau

SEQ ID NO: 1030131 - RNA, 19 nt, Artificial Sequence
  Description of Artificial Sequence: Synthetic oligonucleotide
  Antisense strand to SEQ ID NO: 1030130
auauuaggcaagcagauca

SEQ ID NO: 1030132 - RNA, 19 nt, Artificial Sequence
  Description of Artificial Sequence: Synthetic oligonucleotide
  Sense strand starting at position 357 of SEQ ID NO: 914779
gccuaauauguauguuuag

SEQ ID NO: 1030133 - RNA, 19 nt, Artificial Sequence
  Description of Artificial Sequence: Synthetic oligonucleotide
  Antisense strand to SEQ ID NO: 1030132
cuaaacauacauauuaggc

SEQ ID NO: 1030134 - RNA, 19 nt, Artificial Sequence
  Description of Artificial Sequence: Synthetic oligonucleotide
  Sense strand starting at position 384 of SEQ ID NO: 914779
gucagcaaugcccaaauau

SEQ ID NO: 1030135 - RNA, 19 nt, Artificial Sequence
  Description of Artificial Sequence: Synthetic oligonucleotide
  Antisense strand to SEQ ID NO: 1030134
auauuugggcauugcugac

SEQ ID NO: 1030136 - RNA, 19 nt, Artificial Sequence
  Description of Artificial Sequence: Synthetic oligonucleotide
  Sense strand starting at position 679 of SEQ ID NO: 914779
cagguuaagcauuauaguu

SEQ ID NO: 1030137 - RNA, 19 nt, Artificial Sequence
  Description of Artificial Sequence: Synthetic oligonucleotide
  Antisense strand to SEQ ID NO: 1030136
aacuauaaugcuuaaccug

SEQ ID NO: 1030138 - RNA, 19 nt, Artificial Sequence
  Description of Artificial Sequence: Synthetic oligonucleotide
  Sense strand starting at position 776 of SEQ ID NO: 914779
aacuguaucuggcugguaa

SEQ ID NO: 1030139 - RNA, 19 nt, Artificial Sequence
  Description of Artificial Sequence: Synthetic oligonucleotide
  Antisense strand to SEQ ID NO: 1030138
uuaccagccagauacaguu

SEQ ID NO: 1030140 - RNA, 19 nt, Artificial Sequence
  Description of Artificial Sequence: Synthetic oligonucleotide
  Sense strand starting at position 777 of SEQ ID NO: 914779
acuguaucuggcugguaaa

SEQ ID NO: 1030141 - RNA, 19 nt, Artificial Sequence
  Description of Artificial Sequence: Synthetic oligonucleotide
  Antisense strand to SEQ ID NO: 1030140
uuuaccagccagauacagu

SEQ ID NO: 1030142 - RNA, 19 nt, Artificial Sequence
  Description of Artificial Sequence: Synthetic oligonucleotide
  Sense strand starting at position 923 of SEQ ID NO: 914779
cuuaucauugcucauugua

SEQ ID NO: 1030143 - RNA, 19 nt, Artificial Sequence
  Description of Artificial Sequence: Synthetic oligonucleotide
  Antisense strand to SEQ ID NO: 1030142
uacaaugagcaaugauaag

SEQ ID NO: 1030144 - RNA, 19 nt, Artificial Sequence
  Description of Artificial Sequence: Synthetic oligonucleotide
  Sense strand starting at position 1070 of SEQ ID NO: 914779
accguuacggcucaagacu

SEQ ID NO: 1030145 - RNA, 19 nt, Artificial Sequence
  Description of Artificial Sequence: Synthetic oligonucleotide
  Antisense strand to SEQ ID NO: 1030144
agucuugagccguaacggu

SEQ ID NO: 1030146 - RNA, 19 nt, Artificial Sequence
  Description of Artificial Sequence: Synthetic oligonucleotide
  Sense strand starting at position 1375 of SEQ ID NO: 914779
gcgcuuucccucuaaacug

SEQ ID NO: 1030147 - RNA, 19 nt, Artificial Sequence
  Description of Artificial Sequence: Synthetic oligonucleotide
  Antisense strand to SEQ ID NO: 1030146
caguuuagagggaaagcgc

SEQ ID NO: 1030148 - RNA, 19 nt, Artificial Sequence
  Description of Artificial Sequence: Synthetic oligonucleotide
  Sense strand starting at position 1491 of SEQ ID NO: 914779
gcaguaagagguugugaaa

SEQ ID NO: 1030149 - RNA, 19 nt, Artificial Sequence
  Description of Artificial Sequence: Synthetic oligonucleotide
  Antisense strand to SEQ ID NO: 1030148
uuucacaaccucuuacugc

SEQ ID NO: 1030150 - RNA, 19 nt, Artificial Sequence
  Description of Artificial Sequence: Synthetic oligonucleotide
  Sense strand starting at position 1531 of SEQ ID NO: 914779
uguuacgacuacucuguaa

SEQ ID NO: 1030151 - RNA, 19 nt, Artificial Sequence
  Description of Artificial Sequence: Synthetic oligonucleotide
  Antisense strand to SEQ ID NO: 1030150
uuacagaguagucguaaca

SEQ ID NO: 1030152 - RNA, 19 nt, Artificial Sequence
  Description of Artificial Sequence: Synthetic oligonucleotide
  Sense strand starting at position 1533 of SEQ ID NO: 914779
uuacgacuacucuguaaca

SEQ ID NO: 1030153 - RNA, 19 nt, Artificial Sequence
  Description of Artificial Sequence: Synthetic oligonucleotide
  Antisense strand to SEQ ID NO: 1030152
uguuacagaguagucguaa

SEQ ID NO: 1030154 - RNA, 19 nt, Artificial Sequence
  Description of Artificial Sequence: Synthetic oligonucleotide
  Sense strand starting at position 1535 of SEQ ID NO: 914779
acgacuacucuguaacaag

SEQ ID NO: 1030155 - RNA, 19 nt, Artificial Sequence
  Description of Artificial Sequence: Synthetic oligonucleotide
  Antisense strand to SEQ ID NO: 1030154
cuuguuacagaguagucgu

SEQ ID NO: 1030156 - RNA, 19 nt, Artificial Sequence
  Description of Artificial Sequence: Synthetic oligonucleotide
  Sense strand starting at position 2006 of SEQ ID NO: 914779
aagggaucuccguaguuac

SEQ ID NO: 1030157 - RNA, 19 nt, Artificial Sequence
  Description of Artificial Sequence: Synthetic oligonucleotide
  Antisense strand to SEQ ID NO: 1030156
guaacuacggagaucccuu

SEQ ID NO: 1030158 - RNA, 19 nt, Artificial Sequence
  Description of Artificial Sequence: Synthetic oligonucleotide
  Sense strand starting at position 2017 of SEQ ID NO: 914779
guaguuacggccuaggacu

SEQ ID NO: 1030159 - RNA, 19 nt, Artificial Sequence
  Description of Artificial Sequence: Synthetic oligonucleotide
  Antisense strand to SEQ ID NO: 1030158
aguccuaggccguaacuac

SEQ ID NO: 1030160 - RNA, 19 nt, Artificial Sequence
  Description of Artificial Sequence: Synthetic oligonucleotide
  Sense strand starting at position 3371 of SEQ ID NO: 914779
cucggcauuuggucguuaa

SEQ ID NO: 1030161 - RNA, 19 nt, Artificial Sequence
  Description of Artificial Sequence: Synthetic oligonucleotide
  Antisense strand to SEQ ID NO: 1030160
uuaacgaccaaaugccgag

SEQ ID NO: 1030162 - RNA, 19 nt, Artificial Sequence
  Description of Artificial Sequence: Synthetic oligonucleotide
  Sense strand starting at position 3372 of SEQ ID NO: 914779
ucggcauuuggucguuaaa

SEQ ID NO: 1030163 - RNA, 19 nt, Artificial Sequence
  Description of Artificial Sequence: Synthetic oligonucleotide
  Antisense strand to SEQ ID NO: 1030162
uuuaacgaccaaaugccga

SEQ ID NO: 1030164 - RNA, 19 nt, Artificial Sequence
  Description of Artificial Sequence: Synthetic oligonucleotide
  Sense strand starting at position 3374 of SEQ ID NO: 914779
ggcauuuggucguuaaagg

SEQ ID NO: 1030165 - RNA, 19 nt, Artificial Sequence
  Description of Artificial Sequence: Synthetic oligonucleotide
  Antisense strand to SEQ ID NO: 1030164
ccuuuaacgaccaaaugcc

SEQ ID NO: 1030166 - RNA, 19 nt, Artificial Sequence
  Description of Artificial Sequence: Synthetic oligonucleotide
  Sense strand starting at position 3375 of SEQ ID NO: 914779
gcauuuggucguuaaaggu

SEQ ID NO: 1030167 - RNA, 19 nt, Artificial Sequence
  Description of Artificial Sequence: Synthetic oligonucleotide
  Antisense strand to SEQ ID NO: 1030166
accuuuaacgaccaaaugc

SEQ ID NO: 1030168 - RNA, 19 nt, Artificial Sequence
  Description of Artificial Sequence: Synthetic oligonucleotide
  Sense strand starting at position 3511 of SEQ ID NO: 914779
aaggguccucuuggaaauu

SEQ ID NO: 1030169 - RNA, 19 nt, Artificial Sequence
  Description of Artificial Sequence: Synthetic oligonucleotide
  Antisense strand to SEQ ID NO: 1030168
aauuuccaagaggacccuu

SEQ ID NO: 1030170 - RNA, 19 nt, Artificial Sequence
  Description of Artificial Sequence: Synthetic oligonucleotide
  Sense strand starting at position 3512 of SEQ ID NO: 914779
aggguccucuuggaaauuu

SEQ ID NO: 1030171 - RNA, 19 nt, Artificial Sequence
  Description of Artificial Sequence: Synthetic oligonucleotide
  Antisense strand to SEQ ID NO: 1030170
aaauuuccaagaggacccu

SEQ ID NO: 1030172 - RNA, 19 nt, Artificial Sequence
  Description of Artificial Sequence: Synthetic oligonucleotide
  Sense strand starting at position 3643 of SEQ ID NO: 914779
ccuggagauuaggaaauca

SEQ ID NO: 1030173 - RNA, 19 nt, Artificial Sequence
  Description of Artificial Sequence: Synthetic oligonucleotide
  Antisense strand to SEQ ID NO: 1030172
ugauuuccuaaucuccagg

SEQ ID NO: 1030174 - RNA, 19 nt, Artificial Sequence
  Description of Artificial Sequence: Synthetic oligonucleotide
  Sense strand starting at position 3679 of SEQ ID NO: 914779
agcuuacauaaucguggaa

SEQ ID NO: 1030175 - RNA, 19 nt, Artificial Sequence
  Description of Artificial Sequence: Synthetic oligonucleotide
  Antisense strand to SEQ ID NO: 1030174
uuccacgauuauguaagcu

SEQ ID NO: 1030176 - RNA, 19 nt, Artificial Sequence
  Description of Artificial Sequence: Synthetic oligonucleotide
  Sense strand starting at position 3682 of SEQ ID NO: 914779
uuacauaaucguggaacca

SEQ ID NO: 1030177 - RNA, 19 nt, Artificial Sequence
  Description of Artificial Sequence: Synthetic oligonucleotide
  Antisense strand to SEQ ID NO: 1030176
ugguuccacgauuauguaa

SEQ ID NO: 1030178 - RNA, 19 nt, Artificial Sequence
  Description of Artificial Sequence: Synthetic oligonucleotide
  Sense strand starting at position 3683 of SEQ ID NO: 914779
uacauaaucguggaaccau

SEQ ID NO: 1030179 - RNA, 19 nt, Artificial Sequence
  Description of Artificial Sequence: Synthetic oligonucleotide
  Antisense strand to SEQ ID NO: 1030178
augguuccacgauuaugua

SEQ ID NO: 1030180 - RNA, 19 nt, Artificial Sequence
  Description of Artificial Sequence: Synthetic oligonucleotide
  Sense strand starting at position 3764 of SEQ ID NO: 914779
caagaaguuuaggugacau

SEQ ID NO: 1030181 - RNA, 19 nt, Artificial Sequence
  Description of Artificial Sequence: Synthetic oligonucleotide
  Antisense strand to SEQ ID NO: 1030180
augucaccuaaacuucuug

SEQ ID NO: 1030182 - RNA, 19 nt, Artificial Sequence
  Description of Artificial Sequence: Synthetic oligonucleotide
  Sense strand starting at position 3777 of SEQ ID NO: 914779
ugacaugaccaagguuaua

SEQ ID NO: 1030183 - RNA, 19 nt, Artificial Sequence
  Description of Artificial Sequence: Synthetic oligonucleotide
  Antisense strand to SEQ ID NO: 1030182
uauaaccuuggucauguca

SEQ ID NO: 1030184 - RNA, 19 nt, Artificial Sequence
  Description of Artificial Sequence: Synthetic oligonucleotide
  Sense strand starting at position 3841 of SEQ ID NO: 914779
ggaaacaaauggcuuucua

SEQ ID NO: 1030185 - RNA, 19 nt, Artificial Sequence
  Description of Artificial Sequence: Synthetic oligonucleotide
  Antisense strand to SEQ ID NO: 1030184
uagaaagccauuuguuucc

SEQ ID NO: 1030186 - RNA, 19 nt, Artificial Sequence
  Description of Artificial Sequence: Synthetic oligonucleotide
  Sense strand starting at position 3905 of SEQ ID NO: 914779
gguucccuuuguucugaau

SEQ ID NO: 1030187 - RNA, 19 nt, Artificial Sequence
  Description of Artificial Sequence: Synthetic oligonucleotide
  Antisense strand to SEQ ID NO: 1030186
auucagaacaaagggaacc

SEQ ID NO: 1030188 - RNA, 19 nt, Artificial Sequence
  Description of Artificial Sequence: Synthetic oligonucleotide
  Sense strand starting at position 3962 of SEQ ID NO: 914779
auggaaguguccuuucuuu

SEQ ID NO: 1030189 - RNA, 19 nt, Artificial Sequence
  Description of Artificial Sequence: Synthetic oligonucleotide
  Antisense strand to SEQ ID NO: 1030188
aaagaaaggacacuuccau

SEQ ID NO: 1030190 - RNA, 19 nt, Artificial Sequence
  Description of Artificial Sequence: Synthetic oligonucleotide
  Sense strand starting at position 347 of SEQ ID NO: 914780
aagggaucuccguaguuac

SEQ ID NO: 1030191 - RNA, 19 nt, Artificial Sequence
  Description of Artificial Sequence: Synthetic oligonucleotide
  Antisense strand to SEQ ID NO: 1030190
guaacuacggagaucccuu

SEQ ID NO: 1030192 - RNA, 19 nt, Artificial Sequence
  Description of Artificial Sequence: Synthetic oligonucleotide
  Sense strand starting at position 358 of SEQ ID NO: 914780
guaguuacggccuaggacu

SEQ ID NO: 1030193 - RNA, 19 nt, Artificial Sequence
  Description of Artificial Sequence: Synthetic oligonucleotide
  Antisense strand to SEQ ID NO: 1030192
aguccuaggccguaacuac

SEQ ID NO: 1030194 - RNA, 19 nt, Artificial Sequence
  Description of Artificial Sequence: Synthetic oligonucleotide
  Sense strand starting at position 1702 of SEQ ID NO: 914780
ggaucuguuucucggcauu

SEQ ID NO: 1030195 - RNA, 19 nt, Artificial Sequence
  Description of Artificial Sequence: Synthetic oligonucleotide
  Antisense strand to SEQ ID NO: 1030194
aaugccgagaaacagaucc

SEQ ID NO: 1030196 - RNA, 19 nt, Artificial Sequence
  Description of Artificial Sequence: Synthetic oligonucleotide
  Sense strand starting at position 1712 of SEQ ID NO: 914780
cucggcauuuggucguuaa

SEQ ID NO: 1030197 - RNA, 19 nt, Artificial Sequence
  Description of Artificial Sequence: Synthetic oligonucleotide
  Antisense strand to SEQ ID NO: 1030196
uuaacgaccaaaugccgag

SEQ ID NO: 1030198 - RNA, 19 nt, Artificial Sequence
  Description of Artificial Sequence: Synthetic oligonucleotide
  Sense strand starting at position 1713 of SEQ ID NO: 914780
ucggcauuuggucguuaaa

SEQ ID NO: 1030199 - RNA, 19 nt, Artificial Sequence
  Description of Artificial Sequence: Synthetic oligonucleotide
  Antisense strand to SEQ ID NO: 1030198
uuuaacgaccaaaugccga

SEQ ID NO: 1030200 - RNA, 19 nt, Artificial Sequence
  Description of Artificial Sequence: Synthetic oligonucleotide
  Sense strand starting at position 1715 of SEQ ID NO: 914780
ggcauuuggucguuaaagg

SEQ ID NO: 1030201 - RNA, 19 nt, Artificial Sequence
  Description of Artificial Sequence: Synthetic oligonucleotide
  Antisense strand to SEQ ID NO: 1030200
ccuuuaacgaccaaaugcc

SEQ ID NO: 1030202 - RNA, 19 nt, Artificial Sequence
  Description of Artificial Sequence: Synthetic oligonucleotide
  Sense strand starting at position 1716 of SEQ ID NO: 914780
gcauuuggucguuaaaggu

SEQ ID NO: 1030203 - RNA, 19 nt, Artificial Sequence
  Description of Artificial Sequence: Synthetic oligonucleotide
  Antisense strand to SEQ ID NO: 1030202
accuuuaacgaccaaaugc

SEQ ID NO: 1030204 - RNA, 19 nt, Artificial Sequence
  Description of Artificial Sequence: Synthetic oligonucleotide
  Sense strand starting at position 1852 of SEQ ID NO: 914780
aaggguccucuuggaaauu

SEQ ID NO: 1030205 - RNA, 19 nt, Artificial Sequence
  Description of Artificial Sequence: Synthetic oligonucleotide
  Antisense strand to SEQ ID NO: 1030204
aauuuccaagaggacccuu

SEQ ID NO: 1030206 - RNA, 19 nt, Artificial Sequence
  Description of Artificial Sequence: Synthetic oligonucleotide
  Sense strand starting at position 1853 of SEQ ID NO: 914780
aggguccucuuggaaauuu

SEQ ID NO: 1030207 - RNA, 19 nt, Artificial Sequence
  Description of Artificial Sequence: Synthetic oligonucleotide
  Antisense strand to SEQ ID NO: 1030206
aaauuuccaagaggacccu

SEQ ID NO: 1030208 - RNA, 19 nt, Artificial Sequence
  Description of Artificial Sequence: Synthetic oligonucleotide
  Sense strand starting at position 1984 of SEQ ID NO: 914780
ccuggagauuaggaaauca

SEQ ID NO: 1030209 - RNA, 19 nt, Artificial Sequence
  Description of Artificial Sequence: Synthetic oligonucleotide
  Antisense strand to SEQ ID NO: 1030208
ugauuuccuaaucuccagg

SEQ ID NO: 1030210 - RNA, 19 nt, Artificial Sequence
  Description of Artificial Sequence: Synthetic oligonucleotide
  Sense strand starting at position 2020 of SEQ ID NO: 914780
agcuuacauaaucguggaa

SEQ ID NO: 1030211 - RNA, 19 nt, Artificial Sequence
  Description of Artificial Sequence: Synthetic oligonucleotide
  Antisense strand to SEQ ID NO: 1030210
uuccacgauuauguaagcu

SEQ ID NO: 1030212 - RNA, 19 nt, Artificial Sequence
  Description of Artificial Sequence: Synthetic oligonucleotide
  Sense strand starting at position 2023 of SEQ ID NO: 914780
uuacauaaucguggaacca

SEQ ID NO: 1030213 - RNA, 19 nt, Artificial Sequence
  Description of Artificial Sequence: Synthetic oligonucleotide
  Antisense strand to SEQ ID NO: 1030212
ugguuccacgauuauguaa

SEQ ID NO: 1030214 - RNA, 19 nt, Artificial Sequence
  Description of Artificial Sequence: Synthetic oligonucleotide
  Sense strand starting at position 2024 of SEQ ID NO: 914780
uacauaaucguggaaccau

SEQ ID NO: 1030215 - RNA, 19 nt, Artificial Sequence
  Description of Artificial Sequence: Synthetic oligonucleotide
  Antisense strand to SEQ ID NO: 1030214
augguuccacgauuaugua

SEQ ID NO: 1030216 - RNA, 19 nt, Artificial Sequence
  Description of Artificial Sequence: Synthetic oligonucleotide
  Sense strand starting at position 2067 of SEQ ID NO: 914780
uugcgauccuuggucccaa

SEQ ID NO: 1030217 - RNA, 19 nt, Artificial Sequence
  Description of Artificial Sequence: Synthetic oligonucleotide
  Antisense strand to SEQ ID NO: 1030216
uugggaccaaggaucgcaa

SEQ ID NO: 1030218 - RNA, 19 nt, Artificial Sequence
  Description of Artificial Sequence: Synthetic oligonucleotide
  Sense strand starting at position 2104 of SEQ ID NO: 914780
ccaagaaguuuaggugaca

SEQ ID NO: 1030219 - RNA, 19 nt, Artificial Sequence
  Description of Artificial Sequence: Synthetic oligonucleotide
  Antisense strand to SEQ ID NO: 1030218
ugucaccuaaacuucuugg

SEQ ID NO: 1030220 - RNA, 19 nt, Artificial Sequence
  Description of Artificial Sequence: Synthetic oligonucleotide
  Sense strand starting at position 2105 of SEQ ID NO: 914780
caagaaguuuaggugacau

SEQ ID NO: 1030221 - RNA, 19 nt, Artificial Sequence
  Description of Artificial Sequence: Synthetic oligonucleotide
  Antisense strand to SEQ ID NO: 1030220
augucaccuaaacuucuug

SEQ ID NO: 1030222 - RNA, 19 nt, Artificial Sequence
  Description of Artificial Sequence: Synthetic oligonucleotide
  Sense strand starting at position 2118 of SEQ ID NO: 914780
ugacaugaccaagguuaua

SEQ ID NO: 1030223 - RNA, 19 nt, Artificial Sequence
  Description of Artificial Sequence: Synthetic oligonucleotide
  Antisense strand to SEQ ID NO: 1030222
uauaaccuuggucauguca

SEQ ID NO: 1030224 - RNA, 19 nt, Artificial Sequence
  Description of Artificial Sequence: Synthetic oligonucleotide
  Sense strand starting at position 2123 of SEQ ID NO: 914780
ugaccaagguuauacagua

SEQ ID NO: 1030225 - RNA, 19 nt, Artificial Sequence
  Description of Artificial Sequence: Synthetic oligonucleotide
  Antisense strand to SEQ ID NO: 1030224
uacuguauaaccuugguca

SEQ ID NO: 1030226 - RNA, 19 nt, Artificial Sequence
  Description of Artificial Sequence: Synthetic oligonucleotide
  Sense strand starting at position 2182 of SEQ ID NO: 914780
ggaaacaaauggcuuucua

SEQ ID NO: 1030227 - RNA, 19 nt, Artificial Sequence
  Description of Artificial Sequence: Synthetic oligonucleotide
  Antisense strand to SEQ ID NO: 1030226
uagaaagccauuuguuucc

SEQ ID NO: 1030228 - RNA, 19 nt, Artificial Sequence
  Description of Artificial Sequence: Synthetic oligonucleotide
  Sense strand starting at position 2246 of SEQ ID NO: 914780
gguucccuuuguucugaau

SEQ ID NO: 1030229 - RNA, 19 nt, Artificial Sequence
  Description of Artificial Sequence: Synthetic oligonucleotide
  Antisense strand to SEQ ID NO: 1030228
auucagaacaaagggaacc

SEQ ID NO: 1030230 - RNA, 19 nt, Artificial Sequence
  Description of Artificial Sequence: Synthetic oligonucleotide
  Sense strand starting at position 2303 of SEQ ID NO: 914780
auggaaguguccuuucuuu

SEQ ID NO: 1030231 - RNA, 19 nt, Artificial Sequence
  Description of Artificial Sequence: Synthetic oligonucleotide
  Antisense strand to SEQ ID NO: 1030230
aaagaaaggacacuuccau

SEQ ID NO: 1030232 - RNA, 19 nt, Artificial Sequence
  Description of Artificial Sequence: Synthetic oligonucleotide
  Sense strand starting at position 2421 of SEQ ID NO: 914780
ggcaaauugcugcauacau

SEQ ID NO: 1030233 - RNA, 19 nt, Artificial Sequence
  Description of Artificial Sequence: Synthetic oligonucleotide
  Antisense strand to SEQ ID NO: 1030232
auguaugcagcaauuugcc

SEQ ID NO: 1030234 - RNA, 19 nt, Artificial Sequence
  Description of Artificial Sequence: Synthetic oligonucleotide
  Sense strand starting at position 2486 of SEQ ID NO: 914780
uuuggauaaugccuuuaag

SEQ ID NO: 1030235 - RNA, 19 nt, Artificial Sequence
  Description of Artificial Sequence: Synthetic oligonucleotide
  Antisense strand to SEQ ID NO: 1030234
cuuaaaggcauuauccaaa

SEQ ID NO: 1030236 - RNA, 19 nt, Artificial Sequence
  Description of Artificial Sequence: Synthetic oligonucleotide
  Sense strand starting at position 2711 of SEQ ID NO: 914780
gcuugaaucgcuugagcca

SEQ ID NO: 1030237 - RNA, 19 nt, Artificial Sequence
  Description of Artificial Sequence: Synthetic oligonucleotide
  Antisense strand to SEQ ID NO: 1030236
uggcucaagcgauucaagc

SEQ ID NO: 1030238 - RNA, 19 nt, Artificial Sequence
  Description of Artificial Sequence: Synthetic oligonucleotide
  Sense strand starting at position 2801 of SEQ ID NO: 914780
cccugaggccacuggaaau

SEQ ID NO: 1030239 - RNA, 19 nt, Artificial Sequence
  Description of Artificial Sequence: Synthetic oligonucleotide
  Antisense strand to SEQ ID NO: 1030238
auuuccaguggccucaggg

SEQ ID NO: 1030240 - RNA, 19 nt, Artificial Sequence
  Description of Artificial Sequence: Synthetic oligonucleotide
  Sense strand starting at position 2820 of SEQ ID NO: 914780
aacacuuucgaaugacagu

SEQ ID NO: 1030241 - RNA, 19 nt, Artificial Sequence
  Description of Artificial Sequence: Synthetic oligonucleotide
  Antisense strand to SEQ ID NO: 1030240
acugucauucgaaaguguu

SEQ ID NO: 1030242 - RNA, 19 nt, Artificial Sequence
  Description of Artificial Sequence: Synthetic oligonucleotide
  Sense strand starting at position 2914 of SEQ ID NO: 914780
agagauagccuaugaacca

SEQ ID NO: 1030243 - RNA, 19 nt, Artificial Sequence
  Description of Artificial Sequence: Synthetic oligonucleotide
  Antisense strand to SEQ ID NO: 1030242
ugguucauaggcuaucucu

SEQ ID NO: 1030244 - RNA, 19 nt, Artificial Sequence
  Description of Artificial Sequence: Synthetic oligonucleotide
  Sense strand starting at position 2943 of SEQ ID NO: 914780
cuuaguauuucguuacuuu

SEQ ID NO: 1030245 - RNA, 19 nt, Artificial Sequence
  Description of Artificial Sequence: Synthetic oligonucleotide
  Antisense strand to SEQ ID NO: 1030244
aaaguaacgaaauacuaag

SEQ ID NO: 1030246 - RNA, 19 nt, Artificial Sequence
  Description of Artificial Sequence: Synthetic oligonucleotide
  Sense strand starting at position 3020 of SEQ ID NO: 914780
cggagaaagcuacaauagu

SEQ ID NO: 1030247 - RNA, 19 nt, Artificial Sequence
  Description of Artificial Sequence: Synthetic oligonucleotide
  Antisense strand to SEQ ID NO: 1030246
acuauuguagcuuucuccg

SEQ ID NO: 1030248 - RNA, 19 nt, Artificial Sequence
  Description of Artificial Sequence: Synthetic oligonucleotide
  Sense strand starting at position 3135 of SEQ ID NO: 914780
gcuuccauucccuguauuu

SEQ ID NO: 1030249 - RNA, 19 nt, Artificial Sequence
  Description of Artificial Sequence: Synthetic oligonucleotide
  Antisense strand to SEQ ID NO: 1030248
aaauacagggaauggaagc

SEQ ID NO: 1030250 - RNA, 19 nt, Artificial Sequence
  Description of Artificial Sequence: Synthetic oligonucleotide
  Sense strand starting at position 3152 of SEQ ID NO: 914780
uugcuacauccaugaagag

SEQ ID NO: 1030251 - RNA, 19 nt, Artificial Sequence
  Description of Artificial Sequence: Synthetic oligonucleotide
  Antisense strand to SEQ ID NO: 1030250
cucuucauggauguagcaa

SEQ ID NO: 1030252 - RNA, 19 nt, Artificial Sequence
  Description of Artificial Sequence: Synthetic oligonucleotide
  Sense strand starting at position 3217 of SEQ ID NO: 914780
guugcuacucacuacacua

SEQ ID NO: 1030253 - RNA, 19 nt, Artificial Sequence
  Description of Artificial Sequence: Synthetic oligonucleotide
  Antisense strand to SEQ ID NO: 1030252
uaguguagugaguagcaac

SEQ ID NO: 1030254 - RNA, 19 nt, Artificial Sequence
  Description of Artificial Sequence: Synthetic oligonucleotide
  Sense strand starting at position 3528 of SEQ ID NO: 914780
auugcaagugccuaauaca

SEQ ID NO: 1030255 - RNA, 19 nt, Artificial Sequence
  Description of Artificial Sequence: Synthetic oligonucleotide
  Antisense strand to SEQ ID NO: 1030254
uguauuaggcacuugcaau

SEQ ID NO: 1030256 - RNA, 19 nt, Artificial Sequence
  Description of Artificial Sequence: Synthetic oligonucleotide
  Sense strand starting at position 3545 of SEQ ID NO: 914780
cagugccugacuuguggua

SEQ ID NO: 1030257 - RNA, 19 nt, Artificial Sequence
  Description of Artificial Sequence: Synthetic oligonucleotide
  Antisense strand to SEQ ID NO: 1030256
uaccacaagucaggcacug

SEQ ID NO: 1030258 - RNA, 19 nt, Artificial Sequence
  Description of Artificial Sequence: Synthetic oligonucleotide
  Sense strand starting at position 3547 of SEQ ID NO: 914780
gugccugacuugugguaag

SEQ ID NO: 1030259 - RNA, 19 nt, Artificial Sequence
  Description of Artificial Sequence: Synthetic oligonucleotide
  Antisense strand to SEQ ID NO: 1030258
cuuaccacaagucaggcac

SEQ ID NO: 1030260 - RNA, 19 nt, Artificial Sequence
  Description of Artificial Sequence: Synthetic oligonucleotide
  Sense strand starting at position 3558 of SEQ ID NO: 914780
gugguaagaccuuaguaaa

SEQ ID NO: 1030261 - RNA, 19 nt, Artificial Sequence
  Description of Artificial Sequence: Synthetic oligonucleotide
  Antisense strand to SEQ ID NO: 1030260
uuuacuaaggucuuaccac

SEQ ID NO: 1030262 - RNA, 19 nt, Artificial Sequence
  Description of Artificial Sequence: Synthetic oligonucleotide
  Sense strand starting at position 3561 of SEQ ID NO: 914780
guaagaccuuaguaaaugu

SEQ ID NO: 1030263 - RNA, 19 nt, Artificial Sequence
  Description of Artificial Sequence: Synthetic oligonucleotide
  Antisense strand to SEQ ID NO: 1030262
acauuuacuaaggucuuac

SEQ ID NO: 1030264 - RNA, 19 nt, Artificial Sequence
  Description of Artificial Sequence: Synthetic oligonucleotide
  Sense strand starting at position 3906 of SEQ ID NO: 914780
uugaucuccugaccugaca

SEQ ID NO: 1030265 - RNA, 19 nt, Artificial Sequence
  Description of Artificial Sequence: Synthetic oligonucleotide
  Antisense strand to SEQ ID NO: 1030264
ugucaggucaggagaucaa

SEQ ID NO: 1030266 - RNA, 19 nt, Artificial Sequence
  Description of Artificial Sequence: Synthetic oligonucleotide
  Sense strand starting at position 52 of SEQ ID NO: 914781
aguggcauguucucagcua

SEQ ID NO: 1030267 - RNA, 19 nt, Artificial Sequence
  Description of Artificial Sequence: Synthetic oligonucleotide
  Antisense strand to SEQ ID NO: 1030266
uagcugagaacaugccacu

SEQ ID NO: 1030268 - RNA, 19 nt, Artificial Sequence
  Description of Artificial Sequence: Synthetic oligonucleotide
  Sense strand starting at position 53 of SEQ ID NO: 914781
guggcauguucucagcuaa

SEQ ID NO: 1030269 - RNA, 19 nt, Artificial Sequence
  Description of Artificial Sequence: Synthetic oligonucleotide
  Antisense strand to SEQ ID NO: 1030268
uuagcugagaacaugccac

SEQ ID NO: 1030270 - RNA, 19 nt, Artificial Sequence
  Description of Artificial Sequence: Synthetic oligonucleotide
  Sense strand starting at position 608 of SEQ ID NO: 914781
acagcuuucugcccucaga

SEQ ID NO: 1030271 - RNA, 19 nt, Artificial Sequence
  Description of Artificial Sequence: Synthetic oligonucleotide
  Antisense strand to SEQ ID NO: 1030270
ucugagggcagaaagcugu

SEQ ID NO: 1030272 - RNA, 19 nt, Artificial Sequence
  Description of Artificial Sequence: Synthetic oligonucleotide
  Sense strand starting at position 630 of SEQ ID NO: 914781
uggucuacuccaugugauc

SEQ ID NO: 1030273 - RNA, 19 nt, Artificial Sequence
  Description of Artificial Sequence: Synthetic oligonucleotide
  Antisense strand to SEQ ID NO: 1030272
gaucacauggaguagacca

SEQ ID NO: 1030274 - RNA, 19 nt, Artificial Sequence
  Description of Artificial Sequence: Synthetic oligonucleotide
  Sense strand starting at position 668 of SEQ ID NO: 914781
gggagacccuuugcaaauu

SEQ ID NO: 1030275 - RNA, 19 nt, Artificial Sequence
  Description of Artificial Sequence: Synthetic oligonucleotide
  Antisense strand to SEQ ID NO: 1030274
aauuugcaaagggucuccc

SEQ ID NO: 1030276 - RNA, 19 nt, Artificial Sequence
  Description of Artificial Sequence: Synthetic oligonucleotide
  Sense strand starting at position 669 of SEQ ID NO: 914781
ggagacccuuugcaaauua

SEQ ID NO: 1030277 - RNA, 19 nt, Artificial Sequence
  Description of Artificial Sequence: Synthetic oligonucleotide
  Antisense strand to SEQ ID NO: 1030276
uaauuugcaaagggucucc

SEQ ID NO: 1030278 - RNA, 19 nt, Artificial Sequence
  Description of Artificial Sequence: Synthetic oligonucleotide
  Sense strand starting at position 682 of SEQ ID NO: 914781
aaauuaggcuaggcuugau

SEQ ID NO: 1030279 - RNA, 19 nt, Artificial Sequence
  Description of Artificial Sequence: Synthetic oligonucleotide
  Antisense strand to SEQ ID NO: 1030278
aucaagccuagccuaauuu

SEQ ID NO: 1030280 - RNA, 19 nt, Artificial Sequence
  Description of Artificial Sequence: Synthetic oligonucleotide
  Sense strand starting at position 685 of SEQ ID NO: 914781
uuaggcuaggcuugauauu

SEQ ID NO: 1030281 - RNA, 19 nt, Artificial Sequence
  Description of Artificial Sequence: Synthetic oligonucleotide
  Antisense strand to SEQ ID NO: 1030280
aauaucaagccuagccuaa

SEQ ID NO: 1030282 - RNA, 19 nt, Artificial Sequence
  Description of Artificial Sequence: Synthetic oligonucleotide
  Sense strand starting at position 686 of SEQ ID NO: 914781
uaggcuaggcuugauauua

SEQ ID NO: 1030283 - RNA, 19 nt, Artificial Sequence
  Description of Artificial Sequence: Synthetic oligonucleotide
  Antisense strand to SEQ ID NO: 1030282
uaauaucaagccuagccua

SEQ ID NO: 1030284 - RNA, 19 nt, Artificial Sequence
  Description of Artificial Sequence: Synthetic oligonucleotide
  Sense strand starting at position 750 of SEQ ID NO: 914781
acucuaaggucccagaacu

SEQ ID NO: 1030285 - RNA, 19 nt, Artificial Sequence
  Description of Artificial Sequence: Synthetic oligonucleotide
  Antisense strand to SEQ ID NO: 1030284
aguucugggaccuuagagu

SEQ ID NO: 1030286 - RNA, 19 nt, Artificial Sequence
  Description of Artificial Sequence: Synthetic oligonucleotide
  Sense strand starting at position 796 of SEQ ID NO: 914781
auugaaugugcacagcaua

SEQ ID NO: 1030287 - RNA, 19 nt, Artificial Sequence
  Description of Artificial Sequence: Synthetic oligonucleotide
  Antisense strand to SEQ ID NO: 1030286
uaugcugugcacauucaau

SEQ ID NO: 1030288 - RNA, 19 nt, Artificial Sequence
  Description of Artificial Sequence: Synthetic oligonucleotide
  Sense strand starting at position 850 of SEQ ID NO: 914781
ugagcacuucuauguugaa

SEQ ID NO: 1030289 - RNA, 19 nt, Artificial Sequence
  Description of Artificial Sequence: Synthetic oligonucleotide
  Antisense strand to SEQ ID NO: 1030288
uucaacauagaagugcuca

SEQ ID NO: 1030290 - RNA, 19 nt, Artificial Sequence
  Description of Artificial Sequence: Synthetic oligonucleotide
  Sense strand starting at position 851 of SEQ ID NO: 914781
gagcacuucuauguugaag

SEQ ID NO: 1030291 - RNA, 19 nt, Artificial Sequence
  Description of Artificial Sequence: Synthetic oligonucleotide
  Antisense strand to SEQ ID NO: 1030290
cuucaacauagaagugcuc

SEQ ID NO: 1030292 - RNA, 19 nt, Artificial Sequence
  Description of Artificial Sequence: Synthetic oligonucleotide
  Sense strand starting at position 1173 of SEQ ID NO: 914781
ugcaguuugucugugcaca

SEQ ID NO: 1030293 - RNA, 19 nt, Artificial Sequence
  Description of Artificial Sequence: Synthetic oligonucleotide
  Antisense strand to SEQ ID NO: 1030292
ugugcacagacaaacugca

SEQ ID NO: 1030294 - RNA, 19 nt, Artificial Sequence
  Description of Artificial Sequence: Synthetic oligonucleotide
  Sense strand starting at position 1174 of SEQ ID NO: 914781
gcaguuugucugugcacaa

SEQ ID NO: 1030295 - RNA, 19 nt, Artificial Sequence
  Description of Artificial Sequence: Synthetic oligonucleotide
  Antisense strand to SEQ ID NO: 1030294
uugugcacagacaaacugc

SEQ ID NO: 1030296 - RNA, 19 nt, Artificial Sequence
  Description of Artificial Sequence: Synthetic oligonucleotide
  Sense strand starting at position 1251 of SEQ ID NO: 914781
gguaguaauucaguaggug

SEQ ID NO: 1030297 - RNA, 19 nt, Artificial Sequence
  Description of Artificial Sequence: Synthetic oligonucleotide
  Antisense strand to SEQ ID NO: 1030296
caccuacugaauuacuacc

SEQ ID NO: 1030298 - RNA, 19 nt, Artificial Sequence
  Description of Artificial Sequence: Synthetic oligonucleotide
  Sense strand starting at position 1252 of SEQ ID NO: 914781
guaguaauucaguaggugu

SEQ ID NO: 1030299 - RNA, 19 nt, Artificial Sequence
  Description of Artificial Sequence: Synthetic oligonucleotide
  Antisense strand to SEQ ID NO: 1030298
acaccuacugaauuacuac

SEQ ID NO: 1030300 - RNA, 19 nt, Artificial Sequence
  Description of Artificial Sequence: Synthetic oligonucleotide
  Sense strand starting at position 1333 of SEQ ID NO: 914781
gcgcacuucuaagacguuu

SEQ ID NO: 1030301 - RNA, 19 nt, Artificial Sequence
  Description of Artificial Sequence: Synthetic oligonucleotide
  Antisense strand to SEQ ID NO: 1030300
aaacgucuuagaagugcgc

SEQ ID NO: 1030302 - RNA, 19 nt, Artificial Sequence
  Description of Artificial Sequence: Synthetic oligonucleotide
  Sense strand starting at position 1360 of SEQ ID NO: 914781
uucggaggcuuggcugaua

SEQ ID NO: 1030303 - RNA, 19 nt, Artificial Sequence
  Description of Artificial Sequence: Synthetic oligonucleotide
  Antisense strand to SEQ ID NO: 1030302
uaucagccaagccuccgaa

SEQ ID NO: 1030304 - RNA, 19 nt, Artificial Sequence
  Description of Artificial Sequence: Synthetic oligonucleotide
  Sense strand starting at position 1400 of SEQ ID NO: 914781
uggaacgugucuucccaaa

SEQ ID NO: 1030305 - RNA, 19 nt, Artificial Sequence
  Description of Artificial Sequence: Synthetic oligonucleotide
  Antisense strand to SEQ ID NO: 1030304
uuugggaagacacguucca

SEQ ID NO: 1030306 - RNA, 19 nt, Artificial Sequence
  Description of Artificial Sequence: Synthetic oligonucleotide
  Sense strand starting at position 1487 of SEQ ID NO: 914781
cuuggucugggucacuaaa

SEQ ID NO: 1030307 - RNA, 19 nt, Artificial Sequence
  Description of Artificial Sequence: Synthetic oligonucleotide
  Antisense strand to SEQ ID NO: 1030306
uuuagugacccagaccaag

SEQ ID NO: 1030308 - RNA, 19 nt, Artificial Sequence
  Description of Artificial Sequence: Synthetic oligonucleotide
  Sense strand starting at position 1563 of SEQ ID NO: 914781
ggaguuccguuccaaacaa

SEQ ID NO: 1030309 - RNA, 19 nt, Artificial Sequence
  Description of Artificial Sequence: Synthetic oligonucleotide
  Antisense strand to SEQ ID NO: 1030308
uuguuuggaacggaacucc

SEQ ID NO: 1030310 - RNA, 19 nt, Artificial Sequence
  Description of Artificial Sequence: Synthetic oligonucleotide
  Sense strand starting at position 1706 of SEQ ID NO: 914781
gauagccguucugaccaau

SEQ ID NO: 1030311 - RNA, 19 nt, Artificial Sequence
  Description of Artificial Sequence: Synthetic oligonucleotide
  Antisense strand to SEQ ID NO: 1030310
auuggucagaacggcuauc

SEQ ID NO: 1030312 - RNA, 19 nt, Artificial Sequence
  Description of Artificial Sequence: Synthetic oligonucleotide
  Sense strand starting at position 1709 of SEQ ID NO: 914781
agccguucugaccaauaga

SEQ ID NO: 1030313 - RNA, 19 nt, Artificial Sequence
  Description of Artificial Sequence: Synthetic oligonucleotide
  Antisense strand to SEQ ID NO: 1030312
ucuauuggucagaacggcu

SEQ ID NO: 1030314 - RNA, 19 nt, Artificial Sequence
  Description of Artificial Sequence: Synthetic oligonucleotide
  Sense strand starting at position 1712 of SEQ ID NO: 914781
cguucugaccaauagacga

SEQ ID NO: 1030315 - RNA, 19 nt, Artificial Sequence
  Description of Artificial Sequence: Synthetic oligonucleotide
  Antisense strand to SEQ ID NO: 1030314
ucgucuauuggucagaacg

SEQ ID NO: 1030316 - RNA, 19 nt, Artificial Sequence
  Description of Artificial Sequence: Synthetic oligonucleotide
  Sense strand starting at position 2045 of SEQ ID NO: 914781
ggaacauugcgacagugga

SEQ ID NO: 1030317 - RNA, 19 nt, Artificial Sequence
  Description of Artificial Sequence: Synthetic oligonucleotide
  Antisense strand to SEQ ID NO: 1030316
uccacugucgcaauguucc

SEQ ID NO: 1030318 - RNA, 19 nt, Artificial Sequence
  Description of Artificial Sequence: Synthetic oligonucleotide
  Sense strand starting at position 2104 of SEQ ID NO: 914781
gcaaguagugcagcuucua

SEQ ID NO: 1030319 - RNA, 19 nt, Artificial Sequence
  Description of Artificial Sequence: Synthetic oligonucleotide
  Antisense strand to SEQ ID NO: 1030318
uagaagcugcacuacuugc

SEQ ID NO: 1030320 - RNA, 19 nt, Artificial Sequence
  Description of Artificial Sequence: Synthetic oligonucleotide
  Sense strand starting at position 2520 of SEQ ID NO: 914781
gauuaaaggucaugccuaa

SEQ ID NO: 1030321 - RNA, 19 nt, Artificial Sequence
  Description of Artificial Sequence: Synthetic oligonucleotide
  Antisense strand to SEQ ID NO: 1030320
uuaggcaugaccuuuaauc

SEQ ID NO: 1030322 - RNA, 19 nt, Artificial Sequence
  Description of Artificial Sequence: Synthetic oligonucleotide
  Sense strand starting at position 2567 of SEQ ID NO: 914781
cgcuacauguagugagaaa

SEQ ID NO: 1030323 - RNA, 19 nt, Artificial Sequence
  Description of Artificial Sequence: Synthetic oligonucleotide
  Antisense strand to SEQ ID NO: 1030322
uuucucacuacauguagcg

SEQ ID NO: 1030324 - RNA, 19 nt, Artificial Sequence
  Description of Artificial Sequence: Synthetic oligonucleotide
  Sense strand starting at position 2602 of SEQ ID NO: 914781
agugcuuucccaugaacau

SEQ ID NO: 1030325 - RNA, 19 nt, Artificial Sequence
  Description of Artificial Sequence: Synthetic oligonucleotide
  Antisense strand to SEQ ID NO: 1030324
auguucaugggaaagcacu

SEQ ID NO: 1030326 - RNA, 19 nt, Artificial Sequence
  Description of Artificial Sequence: Synthetic oligonucleotide
  Sense strand starting at position 2603 of SEQ ID NO: 914781
gugcuuucccaugaacaua

SEQ ID NO: 1030327 - RNA, 19 nt, Artificial Sequence
  Description of Artificial Sequence: Synthetic oligonucleotide
  Antisense strand to SEQ ID NO: 1030326
uauguucaugggaaagcac

SEQ ID NO: 1030328 - RNA, 19 nt, Artificial Sequence
  Description of Artificial Sequence: Synthetic oligonucleotide
  Sense strand starting at position 2913 of SEQ ID NO: 914781
gccuguaaucaugaacaua

SEQ ID NO: 1030329 - RNA, 19 nt, Artificial Sequence
  Description of Artificial Sequence: Synthetic oligonucleotide
  Antisense strand to SEQ ID NO: 1030328
uauguucaugauuacaggc

SEQ ID NO: 1030330 - RNA, 19 nt, Artificial Sequence
  Description of Artificial Sequence: Synthetic oligonucleotide
  Sense strand starting at position 3577 of SEQ ID NO: 914781
ccaugugcucagcacugua

SEQ ID NO: 1030331 - RNA, 19 nt, Artificial Sequence
  Description of Artificial Sequence: Synthetic oligonucleotide
  Antisense strand to SEQ ID NO: 1030330
uacagugcugagcacaugg

SEQ ID NO: 1030332 - RNA, 19 nt, Artificial Sequence
  Description of Artificial Sequence: Synthetic oligonucleotide
  Sense strand starting at position 3580 of SEQ ID NO: 914781
ugugcucagcacuguacaa

SEQ ID NO: 1030333 - RNA, 19 nt, Artificial Sequence
  Description of Artificial Sequence: Synthetic oligonucleotide
  Antisense strand to SEQ ID NO: 1030332
uuguacagugcugagcaca

SEQ ID NO: 1030334 - RNA, 19 nt, Artificial Sequence
  Description of Artificial Sequence: Synthetic oligonucleotide
  Sense strand starting at position 3644 of SEQ ID NO: 914781
cagcauagguguuauaauc

SEQ ID NO: 1030335 - RNA, 19 nt, Artificial Sequence
  Description of Artificial Sequence: Synthetic oligonucleotide
  Antisense strand to SEQ ID NO: 1030334
gauuauaacaccuaugcug

SEQ ID NO: 1030336 - RNA, 19 nt, Artificial Sequence
  Description of Artificial Sequence: Synthetic oligonucleotide
  Sense strand starting at position 3652 of SEQ ID NO: 914781
guguuauaaucccuaacgu

SEQ ID NO: 1030337 - RNA, 19 nt, Artificial Sequence
  Description of Artificial Sequence: Synthetic oligonucleotide
  Antisense strand to SEQ ID NO: 1030336
acguuagggauuauaacac

SEQ ID NO: 1030338 - RNA, 19 nt, Artificial Sequence
  Description of Artificial Sequence: Synthetic oligonucleotide
  Sense strand starting at position 3653 of SEQ ID NO: 914781
uguuauaaucccuaacgua

SEQ ID NO: 1030339 - RNA, 19 nt, Artificial Sequence
  Description of Artificial Sequence: Synthetic oligonucleotide
  Antisense strand to SEQ ID NO: 1030338
uacguuagggauuauaaca

SEQ ID NO: 1030340 - RNA, 19 nt, Artificial Sequence
  Description of Artificial Sequence: Synthetic oligonucleotide
  Sense strand starting at position 3765 of SEQ ID NO: 914781
ggcaccaaaucucagaaau

SEQ ID NO: 1030341 - RNA, 19 nt, Artificial Sequence
  Description of Artificial Sequence: Synthetic oligonucleotide
  Antisense strand to SEQ ID NO: 1030340
auuucugagauuuggugcc

SEQ ID NO: 1030342 - RNA, 19 nt, Artificial Sequence
  Description of Artificial Sequence: Synthetic oligonucleotide
  Sense strand starting at position 3882 of SEQ ID NO: 914781
aagguaagaugugccuuaa

SEQ ID NO: 1030343 - RNA, 19 nt, Artificial Sequence
  Description of Artificial Sequence: Synthetic oligonucleotide
  Antisense strand to SEQ ID NO: 1030342
uuaaggcacaucuuaccuu

SEQ ID NO: 1030344 - RNA, 19 nt, Artificial Sequence
  Description of Artificial Sequence: Synthetic oligonucleotide
  Sense strand starting at position 3886 of SEQ ID NO: 914781
uaagaugugccuuaaguca

SEQ ID NO: 1030345 - RNA, 19 nt, Artificial Sequence
  Description of Artificial Sequence: Synthetic oligonucleotide
  Antisense strand to SEQ ID NO: 1030344
ugacuuaaggcacaucuua

SEQ ID NO: 1030346 - RNA, 19 nt, Artificial Sequence
  Description of Artificial Sequence: Synthetic oligonucleotide
  Sense strand starting at position 215 of SEQ ID NO: 914782
gcaagacucuuacuugcag

SEQ ID NO: 1030347 - RNA, 19 nt, Artificial Sequence
  Description of Artificial Sequence: Synthetic oligonucleotide
  Antisense strand to SEQ ID NO: 1030346
cugcaaguaagagucuugc

SEQ ID NO: 1030348 - RNA, 19 nt, Artificial Sequence
  Description of Artificial Sequence: Synthetic oligonucleotide
  Sense strand starting at position 594 of SEQ ID NO: 914782
agccucucugaggguuuaa

SEQ ID NO: 1030349 - RNA, 19 nt, Artificial Sequence
  Description of Artificial Sequence: Synthetic oligonucleotide
  Antisense strand to SEQ ID NO: 1030348
uuaaacccucagagaggcu

SEQ ID NO: 1030350 - RNA, 19 nt, Artificial Sequence
  Description of Artificial Sequence: Synthetic oligonucleotide
  Sense strand starting at position 765 of SEQ ID NO: 914782
cuccaaucugccggacaga

SEQ ID NO: 1030351 - RNA, 19 nt, Artificial Sequence
  Description of Artificial Sequence: Synthetic oligonucleotide
  Antisense strand to SEQ ID NO: 1030350
ucuguccggcagauuggag

SEQ ID NO: 1030352 - RNA, 19 nt, Artificial Sequence
  Description of Artificial Sequence: Synthetic oligonucleotide
  Sense strand starting at position 766 of SEQ ID NO: 914782
uccaaucugccggacagaa

SEQ ID NO: 1030353 - RNA, 19 nt, Artificial Sequence
  Description of Artificial Sequence: Synthetic oligonucleotide
  Antisense strand to SEQ ID NO: 1030352
uucuguccggcagauugga

SEQ ID NO: 1030354 - RNA, 19 nt, Artificial Sequence
  Description of Artificial Sequence: Synthetic oligonucleotide
  Sense strand starting at position 782 of SEQ ID NO: 914782
gaaagagccugagugaauc

SEQ ID NO: 1030355 - RNA, 19 nt, Artificial Sequence
  Description of Artificial Sequence: Synthetic oligonucleotide
  Antisense strand to SEQ ID NO: 1030354
gauucacucaggcucuuuc

SEQ ID NO: 1030356 - RNA, 19 nt, Artificial Sequence
  Description of Artificial Sequence: Synthetic oligonucleotide
  Sense strand starting at position 923 of SEQ ID NO: 914782
ucaaucaggugcucauuau

SEQ ID NO: 1030357 - RNA, 19 nt, Artificial Sequence
  Description of Artificial Sequence: Synthetic oligonucleotide
  Antisense strand to SEQ ID NO: 1030356
auaaugagcaccugauuga

SEQ ID NO: 1030358 - RNA, 19 nt, Artificial Sequence
  Description of Artificial Sequence: Synthetic oligonucleotide
  Sense strand starting at position 927 of SEQ ID NO: 914782
ucaggugcucauuauugau

SEQ ID NO: 1030359 - RNA, 19 nt, Artificial Sequence
  Description of Artificial Sequence: Synthetic oligonucleotide
  Antisense strand to SEQ ID NO: 1030358
aucaauaaugagcaccuga

SEQ ID NO: 1030360 - RNA, 19 nt, Artificial Sequence
  Description of Artificial Sequence: Synthetic oligonucleotide
  Sense strand starting at position 929 of SEQ ID NO: 914782
aggugcucauuauugauca

SEQ ID NO: 1030361 - RNA, 19 nt, Artificial Sequence
  Description of Artificial Sequence: Synthetic oligonucleotide
  Antisense strand to SEQ ID NO: 1030360
ugaucaauaaugagcaccu

SEQ ID NO: 1030362 - RNA, 19 nt, Artificial Sequence
  Description of Artificial Sequence: Synthetic oligonucleotide
  Sense strand starting at position 1016 of SEQ ID NO: 914782
gcccucugaguauauacaa

SEQ ID NO: 1030363 - RNA, 19 nt, Artificial Sequence
  Description of Artificial Sequence: Synthetic oligonucleotide
  Antisense strand to SEQ ID NO: 1030362
uuguauauacucagagggc

SEQ ID NO: 1030364 - RNA, 19 nt, Artificial Sequence
  Description of Artificial Sequence: Synthetic oligonucleotide
  Sense strand starting at position 1069 of SEQ ID NO: 914782
cccaaagcucaagauguua

SEQ ID NO: 1030365 - RNA, 19 nt, Artificial Sequence
  Description of Artificial Sequence: Synthetic oligonucleotide
  Antisense strand to SEQ ID NO: 1030364
uaacaucuugagcuuuggg

SEQ ID NO: 1030366 - RNA, 19 nt, Artificial Sequence
  Description of Artificial Sequence: Synthetic oligonucleotide
  Sense strand starting at position 1095 of SEQ ID NO: 914782
ggcuaauccagguagucag

SEQ ID NO: 1030367 - RNA, 19 nt, Artificial Sequence
  Description of Artificial Sequence: Synthetic oligonucleotide
  Antisense strand to SEQ ID NO: 1030366
cugacuaccuggauuagcc

SEQ ID NO: 1030368 - RNA, 19 nt, Artificial Sequence
  Description of Artificial Sequence: Synthetic oligonucleotide
  Sense strand starting at position 1106 of SEQ ID NO: 914782
guagucagagcuggaggua

SEQ ID NO: 1030369 - RNA, 19 nt, Artificial Sequence
  Description of Artificial Sequence: Synthetic oligonucleotide
  Antisense strand to SEQ ID NO: 1030368
uaccuccagcucugacuac

SEQ ID NO: 1030370 - RNA, 19 nt, Artificial Sequence
  Description of Artificial Sequence: Synthetic oligonucleotide
  Sense strand starting at position 1107 of SEQ ID NO: 914782
uagucagagcuggagguau

SEQ ID NO: 1030371 - RNA, 19 nt, Artificial Sequence
  Description of Artificial Sequence: Synthetic oligonucleotide
  Antisense strand to SEQ ID NO: 1030370
auaccuccagcucugacua

SEQ ID NO: 1030372 - RNA, 19 nt, Artificial Sequence
  Description of Artificial Sequence: Synthetic oligonucleotide
  Sense strand starting at position 1186 of SEQ ID NO: 914782
gggcuuuagcuauaggcaa

SEQ ID NO: 1030373 - RNA, 19 nt, Artificial Sequence
  Description of Artificial Sequence: Synthetic oligonucleotide
  Antisense strand to SEQ ID NO: 1030372
uugccuauagcuaaagccc

SEQ ID NO: 1030374 - RNA, 19 nt, Artificial Sequence
  Description of Artificial Sequence: Synthetic oligonucleotide
  Sense strand starting at position 1357 of SEQ ID NO: 914782
cggguagagacuuggauua

SEQ ID NO: 1030375 - RNA, 19 nt, Artificial Sequence
  Description of Artificial Sequence: Synthetic oligonucleotide
  Antisense strand to SEQ ID NO: 1030374
uaauccaagucucuacccg

SEQ ID NO: 1030376 - RNA, 19 nt, Artificial Sequence
  Description of Artificial Sequence: Synthetic oligonucleotide
  Sense strand starting at position 1396 of SEQ ID NO: 914782
ggcucagacucuuuagacu

SEQ ID NO: 1030377 - RNA, 19 nt, Artificial Sequence
  Description of Artificial Sequence: Synthetic oligonucleotide
  Antisense strand to SEQ ID NO: 1030376
agucuaaagagucugagcc

SEQ ID NO: 1030378 - RNA, 19 nt, Artificial Sequence
  Description of Artificial Sequence: Synthetic oligonucleotide
  Sense strand starting at position 1449 of SEQ ID NO: 914782
uuuccaucugggcaugaga

SEQ ID NO: 1030379 - RNA, 19 nt, Artificial Sequence
  Description of Artificial Sequence: Synthetic oligonucleotide
  Antisense strand to SEQ ID NO: 1030378
ucucaugcccagauggaaa

SEQ ID NO: 1030380 - RNA, 19 nt, Artificial Sequence
  Description of Artificial Sequence: Synthetic oligonucleotide
  Sense strand starting at position 1619 of SEQ ID NO: 914782
ugaugcugugagcaucaua

SEQ ID NO: 1030381 - RNA, 19 nt, Artificial Sequence
  Description of Artificial Sequence: Synthetic oligonucleotide
  Antisense strand to SEQ ID NO: 1030380
uaugaugcucacagcauca

SEQ ID NO: 1030382 - RNA, 19 nt, Artificial Sequence
  Description of Artificial Sequence: Synthetic oligonucleotide
  Sense strand starting at position 1622 of SEQ ID NO: 914782
ugcugugagcaucauaacu

SEQ ID NO: 1030383 - RNA, 19 nt, Artificial Sequence
  Description of Artificial Sequence: Synthetic oligonucleotide
  Antisense strand to SEQ ID NO: 1030382
aguuaugaugcucacagca

SEQ ID NO: 1030384 - RNA, 19 nt, Artificial Sequence
  Description of Artificial Sequence: Synthetic oligonucleotide
  Sense strand starting at position 1804 of SEQ ID NO: 914782
gaaucacuggcuuggaaga

SEQ ID NO: 1030385 - RNA, 19 nt, Artificial Sequence
  Description of Artificial Sequence: Synthetic oligonucleotide
  Antisense strand to SEQ ID NO: 1030384
ucuuccaagccagugauuc

SEQ ID NO: 1030386 - RNA, 19 nt, Artificial Sequence
  Description of Artificial Sequence: Synthetic oligonucleotide
  Sense strand starting at position 1805 of SEQ ID NO: 914782
aaucacuggcuuggaagaa

SEQ ID NO: 1030387 - RNA, 19 nt, Artificial Sequence
  Description of Artificial Sequence: Synthetic oligonucleotide
  Antisense strand to SEQ ID NO: 1030386
uucuuccaagccagugauu

SEQ ID NO: 1030388 - RNA, 19 nt, Artificial Sequence
  Description of Artificial Sequence: Synthetic oligonucleotide
  Sense strand starting at position 2157 of SEQ ID NO: 914782
ugcugagucacuggaggau

SEQ ID NO: 1030389 - RNA, 19 nt, Artificial Sequence
  Description of Artificial Sequence: Synthetic oligonucleotide
  Antisense strand to SEQ ID NO: 1030388
auccuccagugacucagca

SEQ ID NO: 1030390 - RNA, 19 nt, Artificial Sequence
  Description of Artificial Sequence: Synthetic oligonucleotide
  Sense strand starting at position 2226 of SEQ ID NO: 914782
ccagaugccacauggagua

SEQ ID NO: 1030391 - RNA, 19 nt, Artificial Sequence
  Description of Artificial Sequence: Synthetic oligonucleotide
  Antisense strand to SEQ ID NO: 1030390
uacuccauguggcaucugg

SEQ ID NO: 1030392 - RNA, 19 nt, Artificial Sequence
  Description of Artificial Sequence: Synthetic oligonucleotide
  Sense strand starting at position 2292 of SEQ ID NO: 914782
ccagaugucuggcuacaaa

SEQ ID NO: 1030393 - RNA, 19 nt, Artificial Sequence
  Description of Artificial Sequence: Synthetic oligonucleotide
  Antisense strand to SEQ ID NO: 1030392
uuuguagccagacaucugg

SEQ ID NO: 1030394 - RNA, 19 nt, Artificial Sequence
  Description of Artificial Sequence: Synthetic oligonucleotide
  Sense strand starting at position 2365 of SEQ ID NO: 914782
cccuuaaucuggcuggacu

SEQ ID NO: 1030395 - RNA, 19 nt, Artificial Sequence
  Description of Artificial Sequence: Synthetic oligonucleotide
  Antisense strand to SEQ ID NO: 1030394
aguccagccagauuaaggg

SEQ ID NO: 1030396 - RNA, 19 nt, Artificial Sequence
  Description of Artificial Sequence: Synthetic oligonucleotide
  Sense strand starting at position 2387 of SEQ ID NO: 914782
ugcauuaaggacugaggua

SEQ ID NO: 1030397 - RNA, 19 nt, Artificial Sequence
  Description of Artificial Sequence: Synthetic oligonucleotide
  Antisense strand to SEQ ID NO: 1030396
uaccucaguccuuaaugca

SEQ ID NO: 1030398 - RNA, 19 nt, Artificial Sequence
  Description of Artificial Sequence: Synthetic oligonucleotide
  Sense strand starting at position 2402 of SEQ ID NO: 914782
gguaaacggaucugacgua

SEQ ID NO: 1030399 - RNA, 19 nt, Artificial Sequence
  Description of Artificial Sequence: Synthetic oligonucleotide
  Antisense strand to SEQ ID NO: 1030398
uacgucagauccguuuacc

SEQ ID NO: 1030400 - RNA, 19 nt, Artificial Sequence
  Description of Artificial Sequence: Synthetic oligonucleotide
  Sense strand starting at position 2522 of SEQ ID NO: 914782
ugccucagauguuccauaa

SEQ ID NO: 1030401 - RNA, 19 nt, Artificial Sequence
  Description of Artificial Sequence: Synthetic oligonucleotide
  Antisense strand to SEQ ID NO: 1030400
uuauggaacaucugaggca

SEQ ID NO: 1030402 - RNA, 19 nt, Artificial Sequence
  Description of Artificial Sequence: Synthetic oligonucleotide
  Sense strand starting at position 2665 of SEQ ID NO: 914782
gccagaguaccuuggacaa

SEQ ID NO: 1030403 - RNA, 19 nt, Artificial Sequence
  Description of Artificial Sequence: Synthetic oligonucleotide
  Antisense strand to SEQ ID NO: 1030402
uuguccaagguacucuggc

SEQ ID NO: 1030404 - RNA, 19 nt, Artificial Sequence
  Description of Artificial Sequence: Synthetic oligonucleotide
  Sense strand starting at position 2700 of SEQ ID NO: 914782
gcacguagaacugaauucu

SEQ ID NO: 1030405 - RNA, 19 nt, Artificial Sequence
  Description of Artificial Sequence: Synthetic oligonucleotide
  Antisense strand to SEQ ID NO: 1030404
agaauucaguucuacgugc

SEQ ID NO: 1030406 - RNA, 19 nt, Artificial Sequence
  Description of Artificial Sequence: Synthetic oligonucleotide
  Sense strand starting at position 3032 of SEQ ID NO: 914782
gacaguagccacuguagau

SEQ ID NO: 1030407 - RNA, 19 nt, Artificial Sequence
  Description of Artificial Sequence: Synthetic oligonucleotide
  Antisense strand to SEQ ID NO: 1030406
aucuacaguggcuacuguc

SEQ ID NO: 1030408 - RNA, 19 nt, Artificial Sequence
  Description of Artificial Sequence: Synthetic oligonucleotide
  Sense strand starting at position 3053 of SEQ ID NO: 914782
ugauacugucgacagucaa

SEQ ID NO: 1030409 - RNA, 19 nt, Artificial Sequence
  Description of Artificial Sequence: Synthetic oligonucleotide
  Antisense strand to SEQ ID NO: 1030408
uugacugucgacaguauca

SEQ ID NO: 1030410 - RNA, 19 nt, Artificial Sequence
  Description of Artificial Sequence: Synthetic oligonucleotide
  Sense strand starting at position 3074 of SEQ ID NO: 914782
uucccugaucugggauguu

SEQ ID NO: 1030411 - RNA, 19 nt, Artificial Sequence
  Description of Artificial Sequence: Synthetic oligonucleotide
  Antisense strand to SEQ ID NO: 1030410
aacaucccagaucagggaa

SEQ ID NO: 1030412 - RNA, 19 nt, Artificial Sequence
  Description of Artificial Sequence: Synthetic oligonucleotide
  Sense strand starting at position 3778 of SEQ ID NO: 914782
gggagacccuuugcaaauu

SEQ ID NO: 1030413 - RNA, 19 nt, Artificial Sequence
  Description of Artificial Sequence: Synthetic oligonucleotide
  Antisense strand to SEQ ID NO: 1030412
aauuugcaaagggucuccc

SEQ ID NO: 1030414 - RNA, 19 nt, Artificial Sequence
  Description of Artificial Sequence: Synthetic oligonucleotide
  Sense strand starting at position 3792 of SEQ ID NO: 914782
aaauuaggcuaggcuugau

SEQ ID NO: 1030415 - RNA, 19 nt, Artificial Sequence
  Description of Artificial Sequence: Synthetic oligonucleotide
  Antisense strand to SEQ ID NO: 1030414
aucaagccuagccuaauuu

SEQ ID NO: 1030416 - RNA, 19 nt, Artificial Sequence
  Description of Artificial Sequence: Synthetic oligonucleotide
  Sense strand starting at position 3795 of SEQ ID NO: 914782
uuaggcuaggcuugauauu

SEQ ID NO: 1030417 - RNA, 19 nt, Artificial Sequence
  Description of Artificial Sequence: Synthetic oligonucleotide
  Antisense strand to SEQ ID NO: 1030416
aauaucaagccuagccuaa

SEQ ID NO: 1030418 - RNA, 19 nt, Artificial Sequence
  Description of Artificial Sequence: Synthetic oligonucleotide
  Sense strand starting at position 3796 of SEQ ID NO: 914782
uaggcuaggcuugauauua

SEQ ID NO: 1030419 - RNA, 19 nt, Artificial Sequence
  Description of Artificial Sequence: Synthetic oligonucleotide
  Antisense strand to SEQ ID NO: 1030418
uaauaucaagccuagccua

SEQ ID NO: 1030420 - RNA, 19 nt, Artificial Sequence
  Description of Artificial Sequence: Synthetic oligonucleotide
  Sense strand starting at position 3906 of SEQ ID NO: 914782
auugaaugugcacagcaua

SEQ ID NO: 1030421 - RNA, 19 nt, Artificial Sequence
  Description of Artificial Sequence: Synthetic oligonucleotide
  Antisense strand to SEQ ID NO: 1030420
uaugcugugcacauucaau

SEQ ID NO: 1030422 - RNA, 19 nt, Artificial Sequence
  Description of Artificial Sequence: Synthetic oligonucleotide
  Sense strand starting at position 3960 of SEQ ID NO: 914782
ugagcacuucuauguugaa

SEQ ID NO: 1030423 - RNA, 19 nt, Artificial Sequence
  Description of Artificial Sequence: Synthetic oligonucleotide
  Antisense strand to SEQ ID NO: 1030422
uucaacauagaagugcuca

SEQ ID NO: 1030424 - RNA, 19 nt, Artificial Sequence
  Description of Artificial Sequence: Synthetic oligonucleotide
  Sense strand starting at position 3961 of SEQ ID NO: 914782
gagcacuucuauguugaag

SEQ ID NO: 1030425 - RNA, 19 nt, Artificial Sequence
  Description of Artificial Sequence: Synthetic oligonucleotide
  Antisense strand to SEQ ID NO: 1030424
cuucaacauagaagugcuc

SEQ ID NO: 1030426 - RNA, 19 nt, Artificial Sequence
  Description of Artificial Sequence: Synthetic oligonucleotide
  Sense strand starting at position 131 of SEQ ID NO: 914783
uuuaucugcucuuugggau

SEQ ID NO: 1030427 - RNA, 19 nt, Artificial Sequence
  Description of Artificial Sequence: Synthetic oligonucleotide
  Antisense strand to SEQ ID NO: 1030426
aucccaaagagcagauaaa

SEQ ID NO: 1030428 - RNA, 19 nt, Artificial Sequence
  Description of Artificial Sequence: Synthetic oligonucleotide
  Sense strand starting at position 132 of SEQ ID NO: 914783
uuaucugcucuuugggaua

SEQ ID NO: 1030429 - RNA, 19 nt, Artificial Sequence
  Description of Artificial Sequence: Synthetic oligonucleotide
  Antisense strand to SEQ ID NO: 1030428
uaucccaaagagcagauaa

SEQ ID NO: 1030430 - RNA, 19 nt, Artificial Sequence
  Description of Artificial Sequence: Synthetic oligonucleotide
  Sense strand starting at position 137 of SEQ ID NO: 914783
ugcucuuugggauauacau

SEQ ID NO: 1030431 - RNA, 19 nt, Artificial Sequence
  Description of Artificial Sequence: Synthetic oligonucleotide
  Antisense strand to SEQ ID NO: 1030430
auguauaucccaaagagca

SEQ ID NO: 1030432 - RNA, 19 nt, Artificial Sequence
  Description of Artificial Sequence: Synthetic oligonucleotide
  Sense strand starting at position 155 of SEQ ID NO: 914783
uaagucaaagguuauguaa

SEQ ID NO: 1030433 - RNA, 19 nt, Artificial Sequence
  Description of Artificial Sequence: Synthetic oligonucleotide
  Antisense strand to SEQ ID NO: 1030432
uuacauaaccuuugacuua

SEQ ID NO: 1030434 - RNA, 19 nt, Artificial Sequence
  Description of Artificial Sequence: Synthetic oligonucleotide
  Sense strand starting at position 208 of SEQ ID NO: 914783
cugcaaguugcaugugauu

SEQ ID NO: 1030435 - RNA, 19 nt, Artificial Sequence
  Description of Artificial Sequence: Synthetic oligonucleotide
  Antisense strand to SEQ ID NO: 1030434
aaucacaugcaacuugcag

SEQ ID NO: 1030436 - RNA, 19 nt, Artificial Sequence
  Description of Artificial Sequence: Synthetic oligonucleotide
  Sense strand starting at position 210 of SEQ ID NO: 914783
gcaaguugcaugugauugu

SEQ ID NO: 1030437 - RNA, 19 nt, Artificial Sequence
  Description of Artificial Sequence: Synthetic oligonucleotide
  Antisense strand to SEQ ID NO: 1030436
acaaucacaugcaacuugc

SEQ ID NO: 1030438 - RNA, 19 nt, Artificial Sequence
  Description of Artificial Sequence: Synthetic oligonucleotide
  Sense strand starting at position 214 of SEQ ID NO: 914783
guugcaugugauuguugua

SEQ ID NO: 1030439 - RNA, 19 nt, Artificial Sequence
  Description of Artificial Sequence: Synthetic oligonucleotide
  Antisense strand to SEQ ID NO: 1030438
uacaacaaucacaugcaac

SEQ ID NO: 1030440 - RNA, 19 nt, Artificial Sequence
  Description of Artificial Sequence: Synthetic oligonucleotide
  Sense strand starting at position 235 of SEQ ID NO: 914783
auggguuccgauuauacca

SEQ ID NO: 1030441 - RNA, 19 nt, Artificial Sequence
  Description of Artificial Sequence: Synthetic oligonucleotide
  Antisense strand to SEQ ID NO: 1030440
ugguauaaucggaacccau

SEQ ID NO: 1030442 - RNA, 19 nt, Artificial Sequence
  Description of Artificial Sequence: Synthetic oligonucleotide
  Sense strand starting at position 242 of SEQ ID NO: 914783
ccgauuauaccaugacucu

SEQ ID NO: 1030443 - RNA, 19 nt, Artificial Sequence
  Description of Artificial Sequence: Synthetic oligonucleotide
  Antisense strand to SEQ ID NO: 1030442
agagucaugguauaaucgg

SEQ ID NO: 1030444 - RNA, 19 nt, Artificial Sequence
  Description of Artificial Sequence: Synthetic oligonucleotide
  Sense strand starting at position 347 of SEQ ID NO: 914783
uguuauggaucaguucuaa

SEQ ID NO: 1030445 - RNA, 19 nt, Artificial Sequence
  Description of Artificial Sequence: Synthetic oligonucleotide
  Antisense strand to SEQ ID NO: 1030444
uuagaacugauccauaaca

SEQ ID NO: 1030446 - RNA, 19 nt, Artificial Sequence
  Description of Artificial Sequence: Synthetic oligonucleotide
  Sense strand starting at position 351 of SEQ ID NO: 914783
auggaucaguucuaaccau

SEQ ID NO: 1030447 - RNA, 19 nt, Artificial Sequence
  Description of Artificial Sequence: Synthetic oligonucleotide
  Antisense strand to SEQ ID NO: 1030446
augguuagaacugauccau

SEQ ID NO: 1030448 - RNA, 19 nt, Artificial Sequence
  Description of Artificial Sequence: Synthetic oligonucleotide
  Sense strand starting at position 463 of SEQ ID NO: 914783
gcaccucagucauuaccau

SEQ ID NO: 1030449 - RNA, 19 nt, Artificial Sequence
  Description of Artificial Sequence: Synthetic oligonucleotide
  Antisense strand to SEQ ID NO: 1030448
augguaaugacugaggugc

SEQ ID NO: 1030450 - RNA, 19 nt, Artificial Sequence
  Description of Artificial Sequence: Synthetic oligonucleotide
  Sense strand starting at position 555 of SEQ ID NO: 914783
cggacucagugggacaauu

SEQ ID NO: 1030451 - RNA, 19 nt, Artificial Sequence
  Description of Artificial Sequence: Synthetic oligonucleotide
  Antisense strand to SEQ ID NO: 1030450
aauugucccacugaguccg

SEQ ID NO: 1030452 - RNA, 19 nt, Artificial Sequence
  Description of Artificial Sequence: Synthetic oligonucleotide
  Sense strand starting at position 740 of SEQ ID NO: 914783
ucagauucucuguggcuca

SEQ ID NO: 1030453 - RNA, 19 nt, Artificial Sequence
  Description of Artificial Sequence: Synthetic oligonucleotide
  Antisense strand to SEQ ID NO: 1030452
ugagccacagagaaucuga

SEQ ID NO: 1030454 - RNA, 19 nt, Artificial Sequence
  Description of Artificial Sequence: Synthetic oligonucleotide
  Sense strand starting at position 877 of SEQ ID NO: 914783
ccuaguucuccguguaauc

SEQ ID NO: 1030455 - RNA, 19 nt, Artificial Sequence
  Description of Artificial Sequence: Synthetic oligonucleotide
  Antisense strand to SEQ ID NO: 1030454
gauuacacggagaacuagg

SEQ ID NO: 1030456 - RNA, 19 nt, Artificial Sequence
  Description of Artificial Sequence: Synthetic oligonucleotide
  Sense strand starting at position 907 of SEQ ID NO: 914783
agcacuuucucagcuaaga

SEQ ID NO: 1030457 - RNA, 19 nt, Artificial Sequence
  Description of Artificial Sequence: Synthetic oligonucleotide
  Antisense strand to SEQ ID NO: 1030456
ucuuagcugagaaagugcu

SEQ ID NO: 1030458 - RNA, 19 nt, Artificial Sequence
  Description of Artificial Sequence: Synthetic oligonucleotide
  Sense strand starting at position 947 of SEQ ID NO: 914783
gagacuguuccacagguag

SEQ ID NO: 1030459 - RNA, 19 nt, Artificial Sequence
  Description of Artificial Sequence: Synthetic oligonucleotide
  Antisense strand to SEQ ID NO: 1030458
cuaccuguggaacagucuc

SEQ ID NO: 1030460 - RNA, 19 nt, Artificial Sequence
  Description of Artificial Sequence: Synthetic oligonucleotide
  Sense strand starting at position 2393 of SEQ ID NO: 914783
auuagagaauguguugcaa

SEQ ID NO: 1030461 - RNA, 19 nt, Artificial Sequence
  Description of Artificial Sequence: Synthetic oligonucleotide
  Antisense strand to SEQ ID NO: 1030460
uugcaacacauucucuaau

SEQ ID NO: 1030462 - RNA, 19 nt, Artificial Sequence
  Description of Artificial Sequence: Synthetic oligonucleotide
  Sense strand starting at position 2590 of SEQ ID NO: 914783
uccgauuggucauccguga

SEQ ID NO: 1030463 - RNA, 19 nt, Artificial Sequence
  Description of Artificial Sequence: Synthetic oligonucleotide
  Antisense strand to SEQ ID NO: 1030462
ucacggaugaccaaucgga

SEQ ID NO: 1030464 - RNA, 19 nt, Artificial Sequence
  Description of Artificial Sequence: Synthetic oligonucleotide
  Sense strand starting at position 2594 of SEQ ID NO: 914783
auuggucauccgugaucgu

SEQ ID NO: 1030465 - RNA, 19 nt, Artificial Sequence
  Description of Artificial Sequence: Synthetic oligonucleotide
  Antisense strand to SEQ ID NO: 1030464
acgaucacggaugaccaau

SEQ ID NO: 1030466 - RNA, 19 nt, Artificial Sequence
  Description of Artificial Sequence: Synthetic oligonucleotide
  Sense strand starting at position 2694 of SEQ ID NO: 914783
ucguuucugcgggauuauu

SEQ ID NO: 1030467 - RNA, 19 nt, Artificial Sequence
  Description of Artificial Sequence: Synthetic oligonucleotide
  Antisense strand to SEQ ID NO: 1030466
aauaaucccgcagaaacga

SEQ ID NO: 1030468 - RNA, 19 nt, Artificial Sequence
  Description of Artificial Sequence: Synthetic oligonucleotide
  Sense strand starting at position 2715 of SEQ ID NO: 914783
uccggagccucuucugauu

SEQ ID NO: 1030469 - RNA, 19 nt, Artificial Sequence
  Description of Artificial Sequence: Synthetic oligonucleotide
  Antisense strand to SEQ ID NO: 1030468
aaucagaagaggcuccgga

SEQ ID NO: 1030470 - RNA, 19 nt, Artificial Sequence
  Description of Artificial Sequence: Synthetic oligonucleotide
  Sense strand starting at position 2751 of SEQ ID NO: 914783
gcgcgcgacccucaagaua

SEQ ID NO: 1030471 - RNA, 19 nt, Artificial Sequence
  Description of Artificial Sequence: Synthetic oligonucleotide
  Antisense strand to SEQ ID NO: 1030470
uaucuugagggucgcgcgc

SEQ ID NO: 1030472 - RNA, 19 nt, Artificial Sequence
  Description of Artificial Sequence: Synthetic oligonucleotide
  Sense strand starting at position 2828 of SEQ ID NO: 914783
ccaggagacuuccagguuu

SEQ ID NO: 1030473 - RNA, 19 nt, Artificial Sequence
  Description of Artificial Sequence: Synthetic oligonucleotide
  Antisense strand to SEQ ID NO: 1030472
aaaccuggaagucuccugg

SEQ ID NO: 1030474 - RNA, 19 nt, Artificial Sequence
  Description of Artificial Sequence: Synthetic oligonucleotide
  Sense strand starting at position 2954 of SEQ ID NO: 914783
uuuauuuauugacgucaac

SEQ ID NO: 1030475 - RNA, 19 nt, Artificial Sequence
  Description of Artificial Sequence: Synthetic oligonucleotide
  Antisense strand to SEQ ID NO: 1030474
guugacgucaauaaauaaa

SEQ ID NO: 1030476 - RNA, 19 nt, Artificial Sequence
  Description of Artificial Sequence: Synthetic oligonucleotide
  Sense strand starting at position 2978 of SEQ ID NO: 914783
aauguugaauaaggaagaa

SEQ ID NO: 1030477 - RNA, 19 nt, Artificial Sequence
  Description of Artificial Sequence: Synthetic oligonucleotide
  Antisense strand to SEQ ID NO: 1030476
uucuuccuuauucaacauu

SEQ ID NO: 1030478 - RNA, 19 nt, Artificial Sequence
  Description of Artificial Sequence: Synthetic oligonucleotide
  Sense strand starting at position 2997 of SEQ ID NO: 914783
gaguuagaauugcuugaag

SEQ ID NO: 1030479 - RNA, 19 nt, Artificial Sequence
  Description of Artificial Sequence: Synthetic oligonucleotide
  Antisense strand to SEQ ID NO: 1030478
cuucaagcaauucuaacuc

SEQ ID NO: 1030480 - RNA, 19 nt, Artificial Sequence
  Description of Artificial Sequence: Synthetic oligonucleotide
  Sense strand starting at position 3009 of SEQ ID NO: 914783
cuugaagcccucuggaguu

SEQ ID NO: 1030481 - RNA, 19 nt, Artificial Sequence
  Description of Artificial Sequence: Synthetic oligonucleotide
  Antisense strand to SEQ ID NO: 1030480
aacuccagagggcuucaag

SEQ ID NO: 1030482 - RNA, 19 nt, Artificial Sequence
  Description of Artificial Sequence: Synthetic oligonucleotide
  Sense strand starting at position 3687 of SEQ ID NO: 914783
auaacaaucuagcugguaa

SEQ ID NO: 1030483 - RNA, 19 nt, Artificial Sequence
  Description of Artificial Sequence: Synthetic oligonucleotide
  Antisense strand to SEQ ID NO: 1030482
uuaccagcuagauuguuau

SEQ ID NO: 1030484 - RNA, 19 nt, Artificial Sequence
  Description of Artificial Sequence: Synthetic oligonucleotide
  Sense strand starting at position 3748 of SEQ ID NO: 914783
augaacaucugugaacauu

SEQ ID NO: 1030485 - RNA, 19 nt, Artificial Sequence
  Description of Artificial Sequence: Synthetic oligonucleotide
  Antisense strand to SEQ ID NO: 1030484
aauguucacagauguucau

SEQ ID NO: 1030486 - RNA, 19 nt, Artificial Sequence
  Description of Artificial Sequence: Synthetic oligonucleotide
  Sense strand starting at position 3810 of SEQ ID NO: 914783
uuuauucugccaugaauug

SEQ ID NO: 1030487 - RNA, 19 nt, Artificial Sequence
  Description of Artificial Sequence: Synthetic oligonucleotide
  Antisense strand to SEQ ID NO: 1030486
caauucauggcagaauaaa

SEQ ID NO: 1030488 - RNA, 19 nt, Artificial Sequence
  Description of Artificial Sequence: Synthetic oligonucleotide
  Sense strand starting at position 3828 of SEQ ID NO: 914783
ggaauaaccugucaaucug

SEQ ID NO: 1030489 - RNA, 19 nt, Artificial Sequence
  Description of Artificial Sequence: Synthetic oligonucleotide
  Antisense strand to SEQ ID NO: 1030488
cagauugacagguuauucc

SEQ ID NO: 1030490 - RNA, 19 nt, Artificial Sequence
  Description of Artificial Sequence: Synthetic oligonucleotide
  Sense strand starting at position 3839 of SEQ ID NO: 914783
ucaaucugugcggcuguaa

SEQ ID NO: 1030491 - RNA, 19 nt, Artificial Sequence
  Description of Artificial Sequence: Synthetic oligonucleotide
  Antisense strand to SEQ ID NO: 1030490
uuacagccgcacagauuga

SEQ ID NO: 1030492 - RNA, 19 nt, Artificial Sequence
  Description of Artificial Sequence: Synthetic oligonucleotide
  Sense strand starting at position 3840 of SEQ ID NO: 914783
caaucugugcggcuguaau

SEQ ID NO: 1030493 - RNA, 19 nt, Artificial Sequence
  Description of Artificial Sequence: Synthetic oligonucleotide
  Antisense strand to SEQ ID NO: 1030492
auuacagccgcacagauug

SEQ ID NO: 1030494 - RNA, 19 nt, Artificial Sequence
  Description of Artificial Sequence: Synthetic oligonucleotide
  Sense strand starting at position 3842 of SEQ ID NO: 914783
aucugugcggcuguaauua

SEQ ID NO: 1030495 - RNA, 19 nt, Artificial Sequence
  Description of Artificial Sequence: Synthetic oligonucleotide
  Antisense strand to SEQ ID NO: 1030494
uaauuacagccgcacagau

SEQ ID NO: 1030496 - RNA, 19 nt, Artificial Sequence
  Description of Artificial Sequence: Synthetic oligonucleotide
  Sense strand starting at position 3850 of SEQ ID NO: 914783
ggcuguaauuaaguugcca

SEQ ID NO: 1030497 - RNA, 19 nt, Artificial Sequence
  Description of Artificial Sequence: Synthetic oligonucleotide
  Antisense strand to SEQ ID NO: 1030496
uggcaacuuaauuacagcc

SEQ ID NO: 1030498 - RNA, 19 nt, Artificial Sequence
  Description of Artificial Sequence: Synthetic oligonucleotide
  Sense strand starting at position 3854 of SEQ ID NO: 914783
guaauuaaguugccauaga

SEQ ID NO: 1030499 - RNA, 19 nt, Artificial Sequence
  Description of Artificial Sequence: Synthetic oligonucleotide
  Antisense strand to SEQ ID NO: 1030498
ucuauggcaacuuaauuac

SEQ ID NO: 1030500 - RNA, 19 nt, Artificial Sequence
  Description of Artificial Sequence: Synthetic oligonucleotide
  Sense strand starting at position 3855 of SEQ ID NO: 914783
uaauuaaguugccauagag

SEQ ID NO: 1030501 - RNA, 19 nt, Artificial Sequence
  Description of Artificial Sequence: Synthetic oligonucleotide
  Antisense strand to SEQ ID NO: 1030500
cucuauggcaacuuaauua

SEQ ID NO: 1030502 - RNA, 19 nt, Artificial Sequence
  Description of Artificial Sequence: Synthetic oligonucleotide
  Sense strand starting at position 3935 of SEQ ID NO: 914783
cagagauucggaugggucu

SEQ ID NO: 1030503 - RNA, 19 nt, Artificial Sequence
  Description of Artificial Sequence: Synthetic oligonucleotide
  Antisense strand to SEQ ID NO: 1030502
agacccauccgaaucucug

SEQ ID NO: 1030504 - RNA, 19 nt, Artificial Sequence
  Description of Artificial Sequence: Synthetic oligonucleotide
  Sense strand starting at position 3961 of SEQ ID NO: 914783
ggccuaucaguuugcauuu

SEQ ID NO: 1030505 - RNA, 19 nt, Artificial Sequence
  Description of Artificial Sequence: Synthetic oligonucleotide
  Antisense strand to SEQ ID NO: 1030504
aaaugcaaacugauaggcc

SEQ ID NO: 1030506 - RNA, 19 nt, Artificial Sequence
  Description of Artificial Sequence: Synthetic oligonucleotide
  Sense strand starting at position 159 of SEQ ID NO: 914784
acggcuuucucaggccuau

SEQ ID NO: 1030507 - RNA, 19 nt, Artificial Sequence
  Description of Artificial Sequence: Synthetic oligonucleotide
  Antisense strand to SEQ ID NO: 1030506
auaggccugagaaagccgu

SEQ ID NO: 1030508 - RNA, 19 nt, Artificial Sequence
  Description of Artificial Sequence: Synthetic oligonucleotide
  Sense strand starting at position 838 of SEQ ID NO: 914784
augacaugguccgguguga

SEQ ID NO: 1030509 - RNA, 19 nt, Artificial Sequence
  Description of Artificial Sequence: Synthetic oligonucleotide
  Antisense strand to SEQ ID NO: 1030508
ucacaccggaccaugucau

SEQ ID NO: 1030510 - RNA, 19 nt, Artificial Sequence
  Description of Artificial Sequence: Synthetic oligonucleotide
  Sense strand starting at position 1019 of SEQ ID NO: 914784
gcgggucuguuucuuuacu

SEQ ID NO: 1030511 - RNA, 19 nt, Artificial Sequence
  Description of Artificial Sequence: Synthetic oligonucleotide
  Antisense strand to SEQ ID NO: 1030510
aguaaagaaacagacccgc

SEQ ID NO: 1030512 - RNA, 19 nt, Artificial Sequence
  Description of Artificial Sequence: Synthetic oligonucleotide
  Sense strand starting at position 1207 of SEQ ID NO: 914784
gccuuugaauccggacaca

SEQ ID NO: 1030513 - RNA, 19 nt, Artificial Sequence
  Description of Artificial Sequence: Synthetic oligonucleotide
  Antisense strand to SEQ ID NO: 1030512
uguguccggauucaaaggc

SEQ ID NO: 1030514 - RNA, 19 nt, Artificial Sequence
  Description of Artificial Sequence: Synthetic oligonucleotide
  Sense strand starting at position 1229 of SEQ ID NO: 914784
cccucuagcuuggaaauga

SEQ ID NO: 1030515 - RNA, 19 nt, Artificial Sequence
  Description of Artificial Sequence: Synthetic oligonucleotide
  Antisense strand to SEQ ID NO: 1030514
ucauuuccaagcuagaggg

SEQ ID NO: 1030516 - RNA, 19 nt, Artificial Sequence
  Description of Artificial Sequence: Synthetic oligonucleotide
  Sense strand starting at position 1369 of SEQ ID NO: 914784
ugucgcuaucucuagguga

SEQ ID NO: 1030517 - RNA, 19 nt, Artificial Sequence
  Description of Artificial Sequence: Synthetic oligonucleotide
  Antisense strand to SEQ ID NO: 1030516
ucaccuagagauagcgaca

SEQ ID NO: 1030518 - RNA, 19 nt, Artificial Sequence
  Description of Artificial Sequence: Synthetic oligonucleotide
  Sense strand starting at position 1371 of SEQ ID NO: 914784
ucgcuaucucuaggugaag

SEQ ID NO: 1030519 - RNA, 19 nt, Artificial Sequence
  Description of Artificial Sequence: Synthetic oligonucleotide
  Antisense strand to SEQ ID NO: 1030518
cuucaccuagagauagcga

SEQ ID NO: 1030520 - RNA, 19 nt, Artificial Sequence
  Description of Artificial Sequence: Synthetic oligonucleotide
  Sense strand starting at position 1373 of SEQ ID NO: 914784
gcuaucucuaggugaagcu

SEQ ID NO: 1030521 - RNA, 19 nt, Artificial Sequence
  Description of Artificial Sequence: Synthetic oligonucleotide
  Antisense strand to SEQ ID NO: 1030520
agcuucaccuagagauagc

SEQ ID NO: 1030522 - RNA, 19 nt, Artificial Sequence
  Description of Artificial Sequence: Synthetic oligonucleotide
  Sense strand starting at position 1998 of SEQ ID NO: 914784
agcaauuugucucgaggac

SEQ ID NO: 1030523 - RNA, 19 nt, Artificial Sequence
  Description of Artificial Sequence: Synthetic oligonucleotide
  Antisense strand to SEQ ID NO: 1030522
guccucgagacaaauugcu

SEQ ID NO: 1030524 - RNA, 19 nt, Artificial Sequence
  Description of Artificial Sequence: Synthetic oligonucleotide
  Sense strand starting at position 3249 of SEQ ID NO: 914784
gggacacacuugugugcua

SEQ ID NO: 1030525 - RNA, 19 nt, Artificial Sequence
  Description of Artificial Sequence: Synthetic oligonucleotide
  Antisense strand to SEQ ID NO: 1030524
uagcacacaaguguguccc

SEQ ID NO: 1030526 - RNA, 19 nt, Artificial Sequence
  Description of Artificial Sequence: Synthetic oligonucleotide
  Sense strand starting at position 3250 of SEQ ID NO: 914784
ggacacacuugugugcuaa

SEQ ID NO: 1030527 - RNA, 19 nt, Artificial Sequence
  Description of Artificial Sequence: Synthetic oligonucleotide
  Antisense strand to SEQ ID NO: 1030526
uuagcacacaagugugucc

SEQ ID NO: 1030528 - RNA, 19 nt, Artificial Sequence
  Description of Artificial Sequence: Synthetic oligonucleotide
  Sense strand starting at position 3251 of SEQ ID NO: 914784
gacacacuugugugcuaaa

SEQ ID NO: 1030529 - RNA, 19 nt, Artificial Sequence
  Description of Artificial Sequence: Synthetic oligonucleotide
  Antisense strand to SEQ ID NO: 1030528
uuuagcacacaaguguguc

SEQ ID NO: 1030530 - RNA, 19 nt, Artificial Sequence
  Description of Artificial Sequence: Synthetic oligonucleotide
  Sense strand starting at position 3291 of SEQ ID NO: 914784
ccaggaugcauguagacau

SEQ ID NO: 1030531 - RNA, 19 nt, Artificial Sequence
  Description of Artificial Sequence: Synthetic oligonucleotide
  Antisense strand to SEQ ID NO: 1030530
augucuacaugcauccugg

SEQ ID NO: 1030532 - RNA, 19 nt, Artificial Sequence
  Description of Artificial Sequence: Synthetic oligonucleotide
  Sense strand starting at position 3302 of SEQ ID NO: 914784
guagacauccggugaggga

SEQ ID NO: 1030533 - RNA, 19 nt, Artificial Sequence
  Description of Artificial Sequence: Synthetic oligonucleotide
  Antisense strand to SEQ ID NO: 1030532
ucccucaccggaugucuac

SEQ ID NO: 1030534 - RNA, 19 nt, Artificial Sequence
  Description of Artificial Sequence: Synthetic oligonucleotide
  Sense strand starting at position 3315 of SEQ ID NO: 914784
gagggagucucuugaaguc

SEQ ID NO: 1030535 - RNA, 19 nt, Artificial Sequence
  Description of Artificial Sequence: Synthetic oligonucleotide
  Antisense strand to SEQ ID NO: 1030534
gacuucaagagacucccuc

SEQ ID NO: 1030536 - RNA, 19 nt, Artificial Sequence
  Description of Artificial Sequence: Synthetic oligonucleotide
  Sense strand starting at position 3324 of SEQ ID NO: 914784
ucuugaagucucugggaug

SEQ ID NO: 1030537 - RNA, 19 nt, Artificial Sequence
  Description of Artificial Sequence: Synthetic oligonucleotide
  Antisense strand to SEQ ID NO: 1030536
caucccagagacuucaaga

SEQ ID NO: 1030538 - RNA, 19 nt, Artificial Sequence
  Description of Artificial Sequence: Synthetic oligonucleotide
  Sense strand starting at position 3488 of SEQ ID NO: 914784
uccauuacaugucaagagu

SEQ ID NO: 1030539 - RNA, 19 nt, Artificial Sequence
  Description of Artificial Sequence: Synthetic oligonucleotide
  Antisense strand to SEQ ID NO: 1030538
acucuugacauguaaugga

SEQ ID NO: 1030540 - RNA, 19 nt, Artificial Sequence
  Description of Artificial Sequence: Synthetic oligonucleotide
  Sense strand starting at position 3497 of SEQ ID NO: 914784
ugucaagaguuaggucuau

SEQ ID NO: 1030541 - RNA, 19 nt, Artificial Sequence
  Description of Artificial Sequence: Synthetic oligonucleotide
  Antisense strand to SEQ ID NO: 1030540
auagaccuaacucuugaca

SEQ ID NO: 1030542 - RNA, 19 nt, Artificial Sequence
  Description of Artificial Sequence: Synthetic oligonucleotide
  Sense strand starting at position 3514 of SEQ ID NO: 914784
auaaacggccuuuauuaua

SEQ ID NO: 1030543 - RNA, 19 nt, Artificial Sequence
  Description of Artificial Sequence: Synthetic oligonucleotide
  Antisense strand to SEQ ID NO: 1030542
uauaauaaaggccguuuau

SEQ ID NO: 1030544 - RNA, 19 nt, Artificial Sequence
  Description of Artificial Sequence: Synthetic oligonucleotide
  Sense strand starting at position 3519 of SEQ ID NO: 914784
cggccuuuauuauaaacau

SEQ ID NO: 1030545 - RNA, 19 nt, Artificial Sequence
  Description of Artificial Sequence: Synthetic oligonucleotide
  Antisense strand to SEQ ID NO: 1030544
auguuuauaauaaaggccg

SEQ ID NO: 1030546 - RNA, 19 nt, Artificial Sequence
  Description of Artificial Sequence: Synthetic oligonucleotide
  Sense strand starting at position 3799 of SEQ ID NO: 914784
ugugucagcuccuagggau

SEQ ID NO: 1030547 - RNA, 19 nt, Artificial Sequence
  Description of Artificial Sequence: Synthetic oligonucleotide
  Antisense strand to SEQ ID NO: 1030546
aucccuaggagcugacaca

SEQ ID NO: 1030548 - RNA, 19 nt, Artificial Sequence
  Description of Artificial Sequence: Synthetic oligonucleotide
  Sense strand starting at position 3826 of SEQ ID NO: 914784
ccuggucacuuggagagaa

SEQ ID NO: 1030549 - RNA, 19 nt, Artificial Sequence
  Description of Artificial Sequence: Synthetic oligonucleotide
  Antisense strand to SEQ ID NO: 1030548
uucucuccaagugaccagg

SEQ ID NO: 1030550 - RNA, 19 nt, Artificial Sequence
  Description of Artificial Sequence: Synthetic oligonucleotide
  Sense strand starting at position 3893 of SEQ ID NO: 914784
acacgcuugcucuggaguu

SEQ ID NO: 1030551 - RNA, 19 nt, Artificial Sequence
  Description of Artificial Sequence: Synthetic oligonucleotide
  Antisense strand to SEQ ID NO: 1030550
aacuccagagcaagcgugu

SEQ ID NO: 1030552 - RNA, 19 nt, Artificial Sequence
  Description of Artificial Sequence: Synthetic oligonucleotide
  Sense strand starting at position 3894 of SEQ ID NO: 914784
cacgcuugcucuggaguuu

SEQ ID NO: 1030553 - RNA, 19 nt, Artificial Sequence
  Description of Artificial Sequence: Synthetic oligonucleotide
  Antisense strand to SEQ ID NO: 1030552
aaacuccagagcaagcgug

SEQ ID NO: 1030554 - RNA, 19 nt, Artificial Sequence
  Description of Artificial Sequence: Synthetic oligonucleotide
  Sense strand starting at position 4 of SEQ ID NO: 914785
gcugaaugacaguguuaaa

SEQ ID NO: 1030555 - RNA, 19 nt, Artificial Sequence
  Description of Artificial Sequence: Synthetic oligonucleotide
  Antisense strand to SEQ ID NO: 1030554
uuuaacacugucauucagc

SEQ ID NO: 1030556 - RNA, 19 nt, Artificial Sequence
  Description of Artificial Sequence: Synthetic oligonucleotide
  Sense strand starting at position 46 of SEQ ID NO: 914785
guuuacucucccugaaaug

SEQ ID NO: 1030557 - RNA, 19 nt, Artificial Sequence
  Description of Artificial Sequence: Synthetic oligonucleotide
  Antisense strand to SEQ ID NO: 1030556
cauuucagggagaguaaac

SEQ ID NO: 1030558 - RNA, 19 nt, Artificial Sequence
  Description of Artificial Sequence: Synthetic oligonucleotide
  Sense strand starting at position 58 of SEQ ID NO: 914785
ugaaaugacugcuucccuu

SEQ ID NO: 1030559 - RNA, 19 nt, Artificial Sequence
  Description of Artificial Sequence: Synthetic oligonucleotide
  Antisense strand to SEQ ID NO: 1030558
aagggaagcagucauuuca

SEQ ID NO: 1030560 - RNA, 19 nt, Artificial Sequence
  Description of Artificial Sequence: Synthetic oligonucleotide
  Sense strand starting at position 173 of SEQ ID NO: 914785
agugaacauguccaccuaa

SEQ ID NO: 1030561 - RNA, 19 nt, Artificial Sequence
  Description of Artificial Sequence: Synthetic oligonucleotide
  Antisense strand to SEQ ID NO: 1030560
uuagguggacauguucacu

SEQ ID NO: 1030562 - RNA, 19 nt, Artificial Sequence
  Description of Artificial Sequence: Synthetic oligonucleotide
  Sense strand starting at position 207 of SEQ ID NO: 914785
ugcccuagaucccugaaca

SEQ ID NO: 1030563 - RNA, 19 nt, Artificial Sequence
  Description of Artificial Sequence: Synthetic oligonucleotide
  Antisense strand to SEQ ID NO: 1030562
uguucagggaucuagggca

SEQ ID NO: 1030564 - RNA, 19 nt, Artificial Sequence
  Description of Artificial Sequence: Synthetic oligonucleotide
  Sense strand starting at position 208 of SEQ ID NO: 914785
gcccuagaucccugaacau

SEQ ID NO: 1030565 - RNA, 19 nt, Artificial Sequence
  Description of Artificial Sequence: Synthetic oligonucleotide
  Antisense strand to SEQ ID NO: 1030564
auguucagggaucuagggc

SEQ ID NO: 1030566 - RNA, 19 nt, Artificial Sequence
  Description of Artificial Sequence: Synthetic oligonucleotide
  Sense strand starting at position 279 of SEQ ID NO: 914785
cuccaaagggcucacuauu

SEQ ID NO: 1030567 - RNA, 19 nt, Artificial Sequence
  Description of Artificial Sequence: Synthetic oligonucleotide
  Antisense strand to SEQ ID NO: 1030566
aauagugagcccuuuggag

SEQ ID NO: 1030568 - RNA, 19 nt, Artificial Sequence
  Description of Artificial Sequence: Synthetic oligonucleotide
  Sense strand starting at position 320 of SEQ ID NO: 914785
gcugaagccugaucacuua

SEQ ID NO: 1030569 - RNA, 19 nt, Artificial Sequence
  Description of Artificial Sequence: Synthetic oligonucleotide
  Antisense strand to SEQ ID NO: 1030568
uaagugaucaggcuucagc

SEQ ID NO: 1030570 - RNA, 19 nt, Artificial Sequence
  Description of Artificial Sequence: Synthetic oligonucleotide
  Sense strand starting at position 553 of SEQ ID NO: 914785
gugccuagaacugagcaua

SEQ ID NO: 1030571 - RNA, 19 nt, Artificial Sequence
  Description of Artificial Sequence: Synthetic oligonucleotide
  Antisense strand to SEQ ID NO: 1030570
uaugcucaguucuaggcac

SEQ ID NO: 1030572 - RNA, 19 nt, Artificial Sequence
  Description of Artificial Sequence: Synthetic oligonucleotide
  Sense strand starting at position 575 of SEQ ID NO: 914785
cuccuuaaguaguuagaug

SEQ ID NO: 1030573 - RNA, 19 nt, Artificial Sequence
  Description of Artificial Sequence: Synthetic oligonucleotide
  Antisense strand to SEQ ID NO: 1030572
caucuaacuacuuaaggag

SEQ ID NO: 1030574 - RNA, 19 nt, Artificial Sequence
  Description of Artificial Sequence: Synthetic oligonucleotide
  Sense strand starting at position 665 of SEQ ID NO: 914785
aguauuaguuguguuuaag

SEQ ID NO: 1030575 - RNA, 19 nt, Artificial Sequence
  Description of Artificial Sequence: Synthetic oligonucleotide
  Antisense strand to SEQ ID NO: 1030574
cuuaaacacaacuaauacu

SEQ ID NO: 1030576 - RNA, 19 nt, Artificial Sequence
  Description of Artificial Sequence: Synthetic oligonucleotide
  Sense strand starting at position 676 of SEQ ID NO: 914785
uguuuaaguggccauguua

SEQ ID NO: 1030577 - RNA, 19 nt, Artificial Sequence
  Description of Artificial Sequence: Synthetic oligonucleotide
  Antisense strand to SEQ ID NO: 1030576
uaacauggccacuuaaaca

SEQ ID NO: 1030578 - RNA, 19 nt, Artificial Sequence
  Description of Artificial Sequence: Synthetic oligonucleotide
  Sense strand starting at position 708 of SEQ ID NO: 914785
cagagcaaguggucaacua

SEQ ID NO: 1030579 - RNA, 19 nt, Artificial Sequence
  Description of Artificial Sequence: Synthetic oligonucleotide
  Antisense strand to SEQ ID NO: 1030578
uaguugaccacuugcucug

SEQ ID NO: 1030580 - RNA, 19 nt, Artificial Sequence
  Description of Artificial Sequence: Synthetic oligonucleotide
  Sense strand starting at position 709 of SEQ ID NO: 914785
agagcaaguggucaacuaa

SEQ ID NO: 1030581 - RNA, 19 nt, Artificial Sequence
  Description of Artificial Sequence: Synthetic oligonucleotide
  Antisense strand to SEQ ID NO: 1030580
uuaguugaccacuugcucu

SEQ ID NO: 1030582 - RNA, 19 nt, Artificial Sequence
  Description of Artificial Sequence: Synthetic oligonucleotide
  Sense strand starting at position 895 of SEQ ID NO: 914785
guucaaguugcguuaagug

SEQ ID NO: 1030583 - RNA, 19 nt, Artificial Sequence
  Description of Artificial Sequence: Synthetic oligonucleotide
  Antisense strand to SEQ ID NO: 1030582
cacuuaacgcaacuugaac

SEQ ID NO: 1030584 - RNA, 19 nt, Artificial Sequence
  Description of Artificial Sequence: Synthetic oligonucleotide
  Sense strand starting at position 910 of SEQ ID NO: 914785
aguguacaugaggguucaa

SEQ ID NO: 1030585 - RNA, 19 nt, Artificial Sequence
  Description of Artificial Sequence: Synthetic oligonucleotide
  Antisense strand to SEQ ID NO: 1030584
uugaacccucauguacacu

SEQ ID NO: 1030586 - RNA, 19 nt, Artificial Sequence
  Description of Artificial Sequence: Synthetic oligonucleotide
  Sense strand starting at position 1147 of SEQ ID NO: 914785
gccuccaugguuuaauaua

SEQ ID NO: 1030587 - RNA, 19 nt, Artificial Sequence
  Description of Artificial Sequence: Synthetic oligonucleotide
  Antisense strand to SEQ ID NO: 1030586
uauauuaaaccauggaggc

SEQ ID NO: 1030588 - RNA, 19 nt, Artificial Sequence
  Description of Artificial Sequence: Synthetic oligonucleotide
  Sense strand starting at position 1210 of SEQ ID NO: 914785
cugcaaagcugaguuuaaa

SEQ ID NO: 1030589 - RNA, 19 nt, Artificial Sequence
  Description of Artificial Sequence: Synthetic oligonucleotide
  Antisense strand to SEQ ID NO: 1030588
uuuaaacucagcuuugcag

SEQ ID NO: 1030590 - RNA, 19 nt, Artificial Sequence
  Description of Artificial Sequence: Synthetic oligonucleotide
  Sense strand starting at position 1213 of SEQ ID NO: 914785
caaagcugaguuuaaaugu

SEQ ID NO: 1030591 - RNA, 19 nt, Artificial Sequence
  Description of Artificial Sequence: Synthetic oligonucleotide
  Antisense strand to SEQ ID NO: 1030590
acauuuaaacucagcuuug

SEQ ID NO: 1030592 - RNA, 19 nt, Artificial Sequence
  Description of Artificial Sequence: Synthetic oligonucleotide
  Sense strand starting at position 1268 of SEQ ID NO: 914785
auagaaguuggcgacaaau

SEQ ID NO: 1030593 - RNA, 19 nt, Artificial Sequence
  Description of Artificial Sequence: Synthetic oligonucleotide
  Antisense strand to SEQ ID NO: 1030592
auuugucgccaacuucuau

SEQ ID NO: 1030594 - RNA, 19 nt, Artificial Sequence
  Description of Artificial Sequence: Synthetic oligonucleotide
  Sense strand starting at position 1278 of SEQ ID NO: 914785
gcgacaaaugcuuaaccaa

SEQ ID NO: 1030595 - RNA, 19 nt, Artificial Sequence
  Description of Artificial Sequence: Synthetic oligonucleotide
  Antisense strand to SEQ ID NO: 1030594
uugguuaagcauuugucgc

SEQ ID NO: 1030596 - RNA, 19 nt, Artificial Sequence
  Description of Artificial Sequence: Synthetic oligonucleotide
  Sense strand starting at position 1397 of SEQ ID NO: 914785
ucaucuuuccauuaucgua

SEQ ID NO: 1030597 - RNA, 19 nt, Artificial Sequence
  Description of Artificial Sequence: Synthetic oligonucleotide
  Antisense strand to SEQ ID NO: 1030596
uacgauaauggaaagauga

SEQ ID NO: 1030598 - RNA, 19 nt, Artificial Sequence
  Description of Artificial Sequence: Synthetic oligonucleotide
  Sense strand starting at position 1657 of SEQ ID NO: 914785
ucaacauucugagugccua

SEQ ID NO: 1030599 - RNA, 19 nt, Artificial Sequence
  Description of Artificial Sequence: Synthetic oligonucleotide
  Antisense strand to SEQ ID NO: 1030598
uaggcacucagaauguuga

SEQ ID NO: 1030600 - RNA, 19 nt, Artificial Sequence
  Description of Artificial Sequence: Synthetic oligonucleotide
  Sense strand starting at position 2553 of SEQ ID NO: 914785
guagcuuccaccugguaag

SEQ ID NO: 1030601 - RNA, 19 nt, Artificial Sequence
  Description of Artificial Sequence: Synthetic oligonucleotide
  Antisense strand to SEQ ID NO: 1030600
cuuaccagguggaagcuac

SEQ ID NO: 1030602 - RNA, 19 nt, Artificial Sequence
  Description of Artificial Sequence: Synthetic oligonucleotide
  Sense strand starting at position 2567 of SEQ ID NO: 914785
guaaguuuagaccgaagaa

SEQ ID NO: 1030603 - RNA, 19 nt, Artificial Sequence
  Description of Artificial Sequence: Synthetic oligonucleotide
  Antisense strand to SEQ ID NO: 1030602
uucuucggucuaaacuuac

SEQ ID NO: 1030604 - RNA, 19 nt, Artificial Sequence
  Description of Artificial Sequence: Synthetic oligonucleotide
  Sense strand starting at position 2807 of SEQ ID NO: 914785
aggaucagauuuggcuuau

SEQ ID NO: 1030605 - RNA, 19 nt, Artificial Sequence
  Description of Artificial Sequence: Synthetic oligonucleotide
  Antisense strand to SEQ ID NO: 1030604
auaagccaaaucugauccu

SEQ ID NO: 1030606 - RNA, 19 nt, Artificial Sequence
  Description of Artificial Sequence: Synthetic oligonucleotide
  Sense strand starting at position 2813 of SEQ ID NO: 914785
agauuuggcuuaugagaau

SEQ ID NO: 1030607 - RNA, 19 nt, Artificial Sequence
  Description of Artificial Sequence: Synthetic oligonucleotide
  Antisense strand to SEQ ID NO: 1030606
auucucauaagccaaaucu

SEQ ID NO: 1030608 - RNA, 19 nt, Artificial Sequence
  Description of Artificial Sequence: Synthetic oligonucleotide
  Sense strand starting at position 2859 of SEQ ID NO: 914785
agcccuucccgucaggaaa

SEQ ID NO: 1030609 - RNA, 19 nt, Artificial Sequence
  Description of Artificial Sequence: Synthetic oligonucleotide
  Antisense strand to SEQ ID NO: 1030608
uuuccugacgggaagggcu

SEQ ID NO: 1030610 - RNA, 19 nt, Artificial Sequence
  Description of Artificial Sequence: Synthetic oligonucleotide
  Sense strand starting at position 3010 of SEQ ID NO: 914785
gucauuugauugucgugua

SEQ ID NO: 1030611 - RNA, 19 nt, Artificial Sequence
  Description of Artificial Sequence: Synthetic oligonucleotide
  Antisense strand to SEQ ID NO: 1030610
uacacgacaaucaaaugac

SEQ ID NO: 1030612 - RNA, 19 nt, Artificial Sequence
  Description of Artificial Sequence: Synthetic oligonucleotide
  Sense strand starting at position 3015 of SEQ ID NO: 914785
uugauugucguguaaugau

SEQ ID NO: 1030613 - RNA, 19 nt, Artificial Sequence
  Description of Artificial Sequence: Synthetic oligonucleotide
  Antisense strand to SEQ ID NO: 1030612
aucauuacacgacaaucaa

SEQ ID NO: 1030614 - RNA, 19 nt, Artificial Sequence
  Description of Artificial Sequence: Synthetic oligonucleotide
  Sense strand starting at position 3042 of SEQ ID NO: 914785
gaccaugaguaccuggaua

SEQ ID NO: 1030615 - RNA, 19 nt, Artificial Sequence
  Description of Artificial Sequence: Synthetic oligonucleotide
  Antisense strand to SEQ ID NO: 1030614
uauccagguacucaugguc

SEQ ID NO: 1030616 - RNA, 19 nt, Artificial Sequence
  Description of Artificial Sequence: Synthetic oligonucleotide
  Sense strand starting at position 3044 of SEQ ID NO: 914785
ccaugaguaccuggauaua

SEQ ID NO: 1030617 - RNA, 19 nt, Artificial Sequence
  Description of Artificial Sequence: Synthetic oligonucleotide
  Antisense strand to SEQ ID NO: 1030616
uauauccagguacucaugg

SEQ ID NO: 1030618 - RNA, 19 nt, Artificial Sequence
  Description of Artificial Sequence: Synthetic oligonucleotide
  Sense strand starting at position 3047 of SEQ ID NO: 914785
ugaguaccuggauauaugu

SEQ ID NO: 1030619 - RNA, 19 nt, Artificial Sequence
  Description of Artificial Sequence: Synthetic oligonucleotide
  Antisense strand to SEQ ID NO: 1030618
acauauauccagguacuca

SEQ ID NO: 1030620 - RNA, 19 nt, Artificial Sequence
  Description of Artificial Sequence: Synthetic oligonucleotide
  Sense strand starting at position 3399 of SEQ ID NO: 914785
aacugagugguuugaauga

SEQ ID NO: 1030621 - RNA, 19 nt, Artificial Sequence
  Description of Artificial Sequence: Synthetic oligonucleotide
  Antisense strand to SEQ ID NO: 1030620
ucauucaaaccacucaguu

SEQ ID NO: 1030622 - RNA, 19 nt, Artificial Sequence
  Description of Artificial Sequence: Synthetic oligonucleotide
  Sense strand starting at position 3404 of SEQ ID NO: 914785
agugguuugaaugaaaugu

SEQ ID NO: 1030623 - RNA, 19 nt, Artificial Sequence
  Description of Artificial Sequence: Synthetic oligonucleotide
  Antisense strand to SEQ ID NO: 1030622
acauuucauucaaaccacu

SEQ ID NO: 1030624 - RNA, 19 nt, Artificial Sequence
  Description of Artificial Sequence: Synthetic oligonucleotide
  Sense strand starting at position 3408 of SEQ ID NO: 914785
guuugaaugaaaugugcuu

SEQ ID NO: 1030625 - RNA, 19 nt, Artificial Sequence
  Description of Artificial Sequence: Synthetic oligonucleotide
  Antisense strand to SEQ ID NO: 1030624
aagcacauuucauucaaac

SEQ ID NO: 1030626 - RNA, 19 nt, Artificial Sequence
  Description of Artificial Sequence: Synthetic oligonucleotide
  Sense strand starting at position 3413 of SEQ ID NO: 914785
aaugaaaugugcuuugcag

SEQ ID NO: 1030627 - RNA, 19 nt, Artificial Sequence
  Description of Artificial Sequence: Synthetic oligonucleotide
  Antisense strand to SEQ ID NO: 1030626
cugcaaagcacauuucauu

SEQ ID NO: 1030628 - RNA, 19 nt, Artificial Sequence
  Description of Artificial Sequence: Synthetic oligonucleotide
  Sense strand starting at position 3609 of SEQ ID NO: 914785
gaggccacuccuuggaaca

SEQ ID NO: 1030629 - RNA, 19 nt, Artificial Sequence
  Description of Artificial Sequence: Synthetic oligonucleotide
  Antisense strand to SEQ ID NO: 1030628
uguuccaaggaguggccuc

SEQ ID NO: 1030630 - RNA, 19 nt, Artificial Sequence
  Description of Artificial Sequence: Synthetic oligonucleotide
  Sense strand starting at position 3670 of SEQ ID NO: 914785
aguugccaaccuuaagauu

SEQ ID NO: 1030631 - RNA, 19 nt, Artificial Sequence
  Description of Artificial Sequence: Synthetic oligonucleotide
  Antisense strand to SEQ ID NO: 1030630
aaucuuaagguuggcaacu

SEQ ID NO: 1030632 - RNA, 19 nt, Artificial Sequence
  Description of Artificial Sequence: Synthetic oligonucleotide
  Sense strand starting at position 3789 of SEQ ID NO: 914785
uggagagaacuuuguaccu

SEQ ID NO: 1030633 - RNA, 19 nt, Artificial Sequence
  Description of Artificial Sequence: Synthetic oligonucleotide
  Antisense strand to SEQ ID NO: 1030632
agguacaaaguucucucca

SEQ ID NO: 1030634 - RNA, 19 nt, Artificial Sequence
  Description of Artificial Sequence: Synthetic oligonucleotide
  Sense strand starting at position 30 of SEQ ID NO: 914786
uaagucugccuagagaagu

SEQ ID NO: 1030635 - RNA, 19 nt, Artificial Sequence
  Description of Artificial Sequence: Synthetic oligonucleotide
  Antisense strand to SEQ ID NO: 1030634
acuucucuaggcagacuua

SEQ ID NO: 1030636 - RNA, 19 nt, Artificial Sequence
  Description of Artificial Sequence: Synthetic oligonucleotide
  Sense strand starting at position 115 of SEQ ID NO: 914786
cagguugacaagugaggaa

SEQ ID NO: 1030637 - RNA, 19 nt, Artificial Sequence
  Description of Artificial Sequence: Synthetic oligonucleotide
  Antisense strand to SEQ ID NO: 1030636
uuccucacuugucaaccug

SEQ ID NO: 1030638 - RNA, 19 nt, Artificial Sequence
  Description of Artificial Sequence: Synthetic oligonucleotide
  Sense strand starting at position 246 of SEQ ID NO: 914786
agauaaaccugagaagaua

SEQ ID NO: 1030639 - RNA, 19 nt, Artificial Sequence
  Description of Artificial Sequence: Synthetic oligonucleotide
  Antisense strand to SEQ ID NO: 1030638
uaucuucucagguuuaucu

SEQ ID NO: 1030640 - RNA, 19 nt, Artificial Sequence
  Description of Artificial Sequence: Synthetic oligonucleotide
  Sense strand starting at position 353 of SEQ ID NO: 914786
ggaggaaagguugguuugu

SEQ ID NO: 1030641 - RNA, 19 nt, Artificial Sequence
  Description of Artificial Sequence: Synthetic oligonucleotide
  Antisense strand to SEQ ID NO: 1030640
acaaaccaaccuuuccucc

SEQ ID NO: 1030642 - RNA, 19 nt, Artificial Sequence
  Description of Artificial Sequence: Synthetic oligonucleotide
  Sense strand starting at position 358 of SEQ ID NO: 914786
aaagguugguuuguaaaga

SEQ ID NO: 1030643 - RNA, 19 nt, Artificial Sequence
  Description of Artificial Sequence: Synthetic oligonucleotide
  Antisense strand to SEQ ID NO: 1030642
ucuuuacaaaccaaccuuu

SEQ ID NO: 1030644 - RNA, 19 nt, Artificial Sequence
  Description of Artificial Sequence: Synthetic oligonucleotide
  Sense strand starting at position 474 of SEQ ID NO: 914786
caguguccacagcauagau

SEQ ID NO: 1030645 - RNA, 19 nt, Artificial Sequence
  Description of Artificial Sequence: Synthetic oligonucleotide
  Antisense strand to SEQ ID NO: 1030644
aucuaugcuguggacacug

SEQ ID NO: 1030646 - RNA, 19 nt, Artificial Sequence
  Description of Artificial Sequence: Synthetic oligonucleotide
  Sense strand starting at position 476 of SEQ ID NO: 914786
guguccacagcauagauau

SEQ ID NO: 1030647 - RNA, 19 nt, Artificial Sequence
  Description of Artificial Sequence: Synthetic oligonucleotide
  Antisense strand to SEQ ID NO: 1030646
auaucuaugcuguggacac

SEQ ID NO: 1030648 - RNA, 19 nt, Artificial Sequence
  Description of Artificial Sequence: Synthetic oligonucleotide
  Sense strand starting at position 574 of SEQ ID NO: 914786
gggaacugguugagauaga

SEQ ID NO: 1030649 - RNA, 19 nt, Artificial Sequence
  Description of Artificial Sequence: Synthetic oligonucleotide
  Antisense strand to SEQ ID NO: 1030648
ucuaucucaaccaguuccc

SEQ ID NO: 1030650 - RNA, 19 nt, Artificial Sequence
  Description of Artificial Sequence: Synthetic oligonucleotide
  Sense strand starting at position 829 of SEQ ID NO: 914786
ggacuugauacagggucau

SEQ ID NO: 1030651 - RNA, 19 nt, Artificial Sequence
  Description of Artificial Sequence: Synthetic oligonucleotide
  Antisense strand to SEQ ID NO: 1030650
augacccuguaucaagucc

SEQ ID NO: 1030652 - RNA, 19 nt, Artificial Sequence
  Description of Artificial Sequence: Synthetic oligonucleotide
  Sense strand starting at position 1134 of SEQ ID NO: 914786
gcaguaccuugaucagaaa

SEQ ID NO: 1030653 - RNA, 19 nt, Artificial Sequence
  Description of Artificial Sequence: Synthetic oligonucleotide
  Antisense strand to SEQ ID NO: 1030652
uuucugaucaagguacugc

SEQ ID NO: 1030654 - RNA, 19 nt, Artificial Sequence
  Description of Artificial Sequence: Synthetic oligonucleotide
  Sense strand starting at position 1158 of SEQ ID NO: 914786
uguugugaccuugacggaa

SEQ ID NO: 1030655 - RNA, 19 nt, Artificial Sequence
  Description of Artificial Sequence: Synthetic oligonucleotide
  Antisense strand to SEQ ID NO: 1030654
uuccgucaaggucacaaca

SEQ ID NO: 1030656 - RNA, 19 nt, Artificial Sequence
  Description of Artificial Sequence: Synthetic oligonucleotide
  Sense strand starting at position 1294 of SEQ ID NO: 914786
gugagaaaccuuugaccua

SEQ ID NO: 1030657 - RNA, 19 nt, Artificial Sequence
  Description of Artificial Sequence: Synthetic oligonucleotide
  Antisense strand to SEQ ID NO: 1030656
uaggucaaagguuucucac

SEQ ID NO: 1030658 - RNA, 19 nt, Artificial Sequence
  Description of Artificial Sequence: Synthetic oligonucleotide
  Sense strand starting at position 1383 of SEQ ID NO: 914786
acccuuugugaaggagagu

SEQ ID NO: 1030659 - RNA, 19 nt, Artificial Sequence
  Description of Artificial Sequence: Synthetic oligonucleotide
  Antisense strand to SEQ ID NO: 1030658
acucuccuucacaaagggu

SEQ ID NO: 1030660 - RNA, 19 nt, Artificial Sequence
  Description of Artificial Sequence: Synthetic oligonucleotide
  Sense strand starting at position 1384 of SEQ ID NO: 914786
cccuuugugaaggagagua

SEQ ID NO: 1030661 - RNA, 19 nt, Artificial Sequence
  Description of Artificial Sequence: Synthetic oligonucleotide
  Antisense strand to SEQ ID NO: 1030660
uacucuccuucacaaaggg

SEQ ID NO: 1030662 - RNA, 19 nt, Artificial Sequence
  Description of Artificial Sequence: Synthetic oligonucleotide
  Sense strand starting at position 1465 of SEQ ID NO: 914786
auugucauccaggguggua

SEQ ID NO: 1030663 - RNA, 19 nt, Artificial Sequence
  Description of Artificial Sequence: Synthetic oligonucleotide
  Antisense strand to SEQ ID NO: 1030662
uaccacccuggaugacaau

SEQ ID NO: 1030664 - RNA, 19 nt, Artificial Sequence
  Description of Artificial Sequence: Synthetic oligonucleotide
  Sense strand starting at position 1698 of SEQ ID NO: 914786
gcacuaguccuagggagaa

SEQ ID NO: 1030665 - RNA, 19 nt, Artificial Sequence
  Description of Artificial Sequence: Synthetic oligonucleotide
  Antisense strand to SEQ ID NO: 1030664
uucucccuaggacuagugc

SEQ ID NO: 1030666 - RNA, 19 nt, Artificial Sequence
  Description of Artificial Sequence: Synthetic oligonucleotide
  Sense strand starting at position 1845 of SEQ ID NO: 914786
agcuuuacucacggaggaa

SEQ ID NO: 1030667 - RNA, 19 nt, Artificial Sequence
  Description of Artificial Sequence: Synthetic oligonucleotide
  Antisense strand to SEQ ID NO: 1030666
uuccuccgugaguaaagcu

SEQ ID NO: 1030668 - RNA, 19 nt, Artificial Sequence
  Description of Artificial Sequence: Synthetic oligonucleotide
  Sense strand starting at position 1846 of SEQ ID NO: 914786
gcuuuacucacggaggaag

SEQ ID NO: 1030669 - RNA, 19 nt, Artificial Sequence
  Description of Artificial Sequence: Synthetic oligonucleotide
  Antisense strand to SEQ ID NO: 1030668
cuuccuccgugaguaaagc

SEQ ID NO: 1030670 - RNA, 19 nt, Artificial Sequence
  Description of Artificial Sequence: Synthetic oligonucleotide
  Sense strand starting at position 2041 of SEQ ID NO: 914786
ugcugucucccaggacuaa

SEQ ID NO: 1030671 - RNA, 19 nt, Artificial Sequence
  Description of Artificial Sequence: Synthetic oligonucleotide
  Antisense strand to SEQ ID NO: 1030670
uuaguccugggagacagca

SEQ ID NO: 1030672 - RNA, 19 nt, Artificial Sequence
  Description of Artificial Sequence: Synthetic oligonucleotide
  Sense strand starting at position 2059 of SEQ ID NO: 914786
agccaauauuggcugauua

SEQ ID NO: 1030673 - RNA, 19 nt, Artificial Sequence
  Description of Artificial Sequence: Synthetic oligonucleotide
  Antisense strand to SEQ ID NO: 1030672
uaaucagccaauauuggcu

SEQ ID NO: 1030674 - RNA, 19 nt, Artificial Sequence
  Description of Artificial Sequence: Synthetic oligonucleotide
  Sense strand starting at position 2060 of SEQ ID NO: 914786
gccaauauuggcugauuac

SEQ ID NO: 1030675 - RNA, 19 nt, Artificial Sequence
  Description of Artificial Sequence: Synthetic oligonucleotide
  Antisense strand to SEQ ID NO: 1030674
guaaucagccaauauuggc

SEQ ID NO: 1030676 - RNA, 19 nt, Artificial Sequence
  Description of Artificial Sequence: Synthetic oligonucleotide
  Sense strand starting at position 2061 of SEQ ID NO: 914786
ccaauauuggcugauuaca

SEQ ID NO: 1030677 - RNA, 19 nt, Artificial Sequence
  Description of Artificial Sequence: Synthetic oligonucleotide
  Antisense strand to SEQ ID NO: 1030676
uguaaucagccaauauugg

SEQ ID NO: 1030678 - RNA, 19 nt, Artificial Sequence
  Description of Artificial Sequence: Synthetic oligonucleotide
  Sense strand starting at position 2069 of SEQ ID NO: 914786
ggcugauuacaucacugca

SEQ ID NO: 1030679 - RNA, 19 nt, Artificial Sequence
  Description of Artificial Sequence: Synthetic oligonucleotide
  Antisense strand to SEQ ID NO: 1030678
ugcagugauguaaucagcc

SEQ ID NO: 1030680 - RNA, 19 nt, Artificial Sequence
  Description of Artificial Sequence: Synthetic oligonucleotide
  Sense strand starting at position 2228 of SEQ ID NO: 914786
gguccaggcauccauaagu

SEQ ID NO: 1030681 - RNA, 19 nt, Artificial Sequence
  Description of Artificial Sequence: Synthetic oligonucleotide
  Antisense strand to SEQ ID NO: 1030680
acuuauggaugccuggacc

SEQ ID NO: 1030682 - RNA, 19 nt, Artificial Sequence
  Description of Artificial Sequence: Synthetic oligonucleotide
  Sense strand starting at position 2238 of SEQ ID NO: 914786
uccauaagucagggaagug

SEQ ID NO: 1030683 - RNA, 19 nt, Artificial Sequence
  Description of Artificial Sequence: Synthetic oligonucleotide
  Antisense strand to SEQ ID NO: 1030682
cacuucccugacuuaugga

SEQ ID NO: 1030684 - RNA, 19 nt, Artificial Sequence
  Description of Artificial Sequence: Synthetic oligonucleotide
  Sense strand starting at position 2252 of SEQ ID NO: 914786
aagugaguagacugaggau

SEQ ID NO: 1030685 - RNA, 19 nt, Artificial Sequence
  Description of Artificial Sequence: Synthetic oligonucleotide
  Antisense strand to SEQ ID NO: 1030684
auccucagucuacucacuu

SEQ ID NO: 1030686 - RNA, 19 nt, Artificial Sequence
  Description of Artificial Sequence: Synthetic oligonucleotide
  Sense strand starting at position 2284 of SEQ ID NO: 914786
ugaguuuaucuccacaaug

SEQ ID NO: 1030687 - RNA, 19 nt, Artificial Sequence
  Description of Artificial Sequence: Synthetic oligonucleotide
  Antisense strand to SEQ ID NO: 1030686
cauuguggagauaaacuca

SEQ ID NO: 1030688 - RNA, 19 nt, Artificial Sequence
  Description of Artificial Sequence: Synthetic oligonucleotide
  Sense strand starting at position 2323 of SEQ ID NO: 914786
gaacuaauauugcugugua

SEQ ID NO: 1030689 - RNA, 19 nt, Artificial Sequence
  Description of Artificial Sequence: Synthetic oligonucleotide
  Antisense strand to SEQ ID NO: 1030688
uacacagcaauauuaguuc

SEQ ID NO: 1030690 - RNA, 19 nt, Artificial Sequence
  Description of Artificial Sequence: Synthetic oligonucleotide
  Sense strand starting at position 2655 of SEQ ID NO: 914786
gucucucuuccagagagca

SEQ ID NO: 1030691 - RNA, 19 nt, Artificial Sequence
  Description of Artificial Sequence: Synthetic oligonucleotide
  Antisense strand to SEQ ID NO: 1030690
ugcucucuggaagagagac

SEQ ID NO: 1030692 - RNA, 19 nt, Artificial Sequence
  Description of Artificial Sequence: Synthetic oligonucleotide
  Sense strand starting at position 2682 of SEQ ID NO: 914786
acuaguaauuagucuuucu

SEQ ID NO: 1030693 - RNA, 19 nt, Artificial Sequence
  Description of Artificial Sequence: Synthetic oligonucleotide
  Antisense strand to SEQ ID NO: 1030692
agaaagacuaauuacuagu

SEQ ID NO: 1030694 - RNA, 19 nt, Artificial Sequence
  Description of Artificial Sequence: Synthetic oligonucleotide
  Sense strand starting at position 2906 of SEQ ID NO: 914786
uacuuaucuggugaugguu

SEQ ID NO: 1030695 - RNA, 19 nt, Artificial Sequence
  Description of Artificial Sequence: Synthetic oligonucleotide
  Antisense strand to SEQ ID NO: 1030694
aaccaucaccagauaagua

SEQ ID NO: 1030696 - RNA, 19 nt, Artificial Sequence
  Description of Artificial Sequence: Synthetic oligonucleotide
  Sense strand starting at position 2988 of SEQ ID NO: 914786
gugccuggcauauaagagu

SEQ ID NO: 1030697 - RNA, 19 nt, Artificial Sequence
  Description of Artificial Sequence: Synthetic oligonucleotide
  Antisense strand to SEQ ID NO: 1030696
acucuuauaugccaggcac

SEQ ID NO: 1030698 - RNA, 19 nt, Artificial Sequence
  Description of Artificial Sequence: Synthetic oligonucleotide
  Sense strand starting at position 2997 of SEQ ID NO: 914786
auauaagaguuguuccaga

SEQ ID NO: 1030699 - RNA, 19 nt, Artificial Sequence
  Description of Artificial Sequence: Synthetic oligonucleotide
  Antisense strand to SEQ ID NO: 1030698
ucuggaacaacucuuauau

SEQ ID NO: 1030700 - RNA, 19 nt, Artificial Sequence
  Description of Artificial Sequence: Synthetic oligonucleotide
  Sense strand starting at position 3052 of SEQ ID NO: 914786
ucaaguacugaguaguguu

SEQ ID NO: 1030701 - RNA, 19 nt, Artificial Sequence
  Description of Artificial Sequence: Synthetic oligonucleotide
  Antisense strand to SEQ ID NO: 1030700
aacacuacucaguacuuga

SEQ ID NO: 1030702 - RNA, 19 nt, Artificial Sequence
  Description of Artificial Sequence: Synthetic oligonucleotide
  Sense strand starting at position 3071 of SEQ ID NO: 914786
gcuaguguugcagccaaau

SEQ ID NO: 1030703 - RNA, 19 nt, Artificial Sequence
  Description of Artificial Sequence: Synthetic oligonucleotide
  Antisense strand to SEQ ID NO: 1030702
auuuggcugcaacacuagc

SEQ ID NO: 1030704 - RNA, 19 nt, Artificial Sequence
  Description of Artificial Sequence: Synthetic oligonucleotide
  Sense strand starting at position 3297 of SEQ ID NO: 914786
ccauuucugugugagauuu

SEQ ID NO: 1030705 - RNA, 19 nt, Artificial Sequence
  Description of Artificial Sequence: Synthetic oligonucleotide
  Antisense strand to SEQ ID NO: 1030704
aaaucucacacagaaaugg

SEQ ID NO: 1030706 - RNA, 19 nt, Artificial Sequence
  Description of Artificial Sequence: Synthetic oligonucleotide
  Sense strand starting at position 3305 of SEQ ID NO: 914786
gugugagauuugccuagug

SEQ ID NO: 1030707 - RNA, 19 nt, Artificial Sequence
  Description of Artificial Sequence: Synthetic oligonucleotide
  Antisense strand to SEQ ID NO: 1030706
cacuaggcaaaucucacac

SEQ ID NO: 1030708 - RNA, 19 nt, Artificial Sequence
  Description of Artificial Sequence: Synthetic oligonucleotide
  Sense strand starting at position 3599 of SEQ ID NO: 914786
augugcugugaacaucauu

SEQ ID NO: 1030709 - RNA, 19 nt, Artificial Sequence
  Description of Artificial Sequence: Synthetic oligonucleotide
  Antisense strand to SEQ ID NO: 1030708
aaugauguucacagcacau

SEQ ID NO: 1030710 - RNA, 19 nt, Artificial Sequence
  Description of Artificial Sequence: Synthetic oligonucleotide
  Sense strand starting at position 3758 of SEQ ID NO: 914786
gggagccacuauucuaaga

SEQ ID NO: 1030711 - RNA, 19 nt, Artificial Sequence
  Description of Artificial Sequence: Synthetic oligonucleotide
  Antisense strand to SEQ ID NO: 1030710
ucuuagaauaguggcuccc

SEQ ID NO: 1030712 - RNA, 19 nt, Artificial Sequence
  Description of Artificial Sequence: Synthetic oligonucleotide
  Sense strand starting at position 3883 of SEQ ID NO: 914786
cugucagaacccugucuga

SEQ ID NO: 1030713 - RNA, 19 nt, Artificial Sequence
  Description of Artificial Sequence: Synthetic oligonucleotide
  Antisense strand to SEQ ID NO: 1030712
ucagacaggguucugacag

SEQ ID NO: 1030714 - RNA, 19 nt, Artificial Sequence
  Description of Artificial Sequence: Synthetic oligonucleotide
  Sense strand starting at position 220 of SEQ ID NO: 914787
acugguggauguccucaaa

SEQ ID NO: 1030715 - RNA, 19 nt, Artificial Sequence
  Description of Artificial Sequence: Synthetic oligonucleotide
  Antisense strand to SEQ ID NO: 1030714
uuugaggacauccaccagu

SEQ ID NO: 1030716 - RNA, 19 nt, Artificial Sequence
  Description of Artificial Sequence: Synthetic oligonucleotide
  Sense strand starting at position 238 of SEQ ID NO: 914787
aagacuugguguuguugau

SEQ ID NO: 1030717 - RNA, 19 nt, Artificial Sequence
  Description of Artificial Sequence: Synthetic oligonucleotide
  Antisense strand to SEQ ID NO: 1030716
aucaacaacaccaagucuu

SEQ ID NO: 1030718 - RNA, 19 nt, Artificial Sequence
  Description of Artificial Sequence: Synthetic oligonucleotide
  Sense strand starting at position 375 of SEQ ID NO: 914787
accugcuuccgguaggaau

SEQ ID NO: 1030719 - RNA, 19 nt, Artificial Sequence
  Description of Artificial Sequence: Synthetic oligonucleotide
  Antisense strand to SEQ ID NO: 1030718
auuccuaccggaagcaggu

SEQ ID NO: 1030720 - RNA, 19 nt, Artificial Sequence
  Description of Artificial Sequence: Synthetic oligonucleotide
  Sense strand starting at position 758 of SEQ ID NO: 914787
cuuauauuccgucaucgcu

SEQ ID NO: 1030721 - RNA, 19 nt, Artificial Sequence
  Description of Artificial Sequence: Synthetic oligonucleotide
  Antisense strand to SEQ ID NO: 1030720
agcgaugacggaauauaag

SEQ ID NO: 1030722 - RNA, 19 nt, Artificial Sequence
  Description of Artificial Sequence: Synthetic oligonucleotide
  Sense strand starting at position 1155 of SEQ ID NO: 914787
agguuaccguccuccagaa

SEQ ID NO: 1030723 - RNA, 19 nt, Artificial Sequence
  Description of Artificial Sequence: Synthetic oligonucleotide
  Antisense strand to SEQ ID NO: 1030722
uucuggaggacgguaaccu

SEQ ID NO: 1030724 - RNA, 19 nt, Artificial Sequence
  Description of Artificial Sequence: Synthetic oligonucleotide
  Sense strand starting at position 1245 of SEQ ID NO: 914787
gcuggugccuccgacaagu

SEQ ID NO: 1030725 - RNA, 19 nt, Artificial Sequence
  Description of Artificial Sequence: Synthetic oligonucleotide
  Antisense strand to SEQ ID NO: 1030724
acuugucggaggcaccagc

SEQ ID NO: 1030726 - RNA, 19 nt, Artificial Sequence
  Description of Artificial Sequence: Synthetic oligonucleotide
  Sense strand starting at position 1247 of SEQ ID NO: 914787
uggugccuccgacaaguau

SEQ ID NO: 1030727 - RNA, 19 nt, Artificial Sequence
  Description of Artificial Sequence: Synthetic oligonucleotide
  Antisense strand to SEQ ID NO: 1030726
auacuugucggaggcacca

SEQ ID NO: 1030728 - RNA, 19 nt, Artificial Sequence
  Description of Artificial Sequence: Synthetic oligonucleotide
  Sense strand starting at position 3197 of SEQ ID NO: 914787
gagcgcuacuucgucucaa

SEQ ID NO: 1030729 - RNA, 19 nt, Artificial Sequence
  Description of Artificial Sequence: Synthetic oligonucleotide
  Antisense strand to SEQ ID NO: 1030728
uugagacgaaguagcgcuc

SEQ ID NO: 1030730 - RNA, 19 nt, Artificial Sequence
  Description of Artificial Sequence: Synthetic oligonucleotide
  Sense strand starting at position 3198 of SEQ ID NO: 914787
agcgcuacuucgucucaaa

SEQ ID NO: 1030731 - RNA, 19 nt, Artificial Sequence
  Description of Artificial Sequence: Synthetic oligonucleotide
  Antisense strand to SEQ ID NO: 1030730
uuugagacgaaguagcgcu

SEQ ID NO: 1030732 - RNA, 19 nt, Artificial Sequence
  Description of Artificial Sequence: Synthetic oligonucleotide
  Sense strand starting at position 3880 of SEQ ID NO: 914787
cccggcgacuuauaaauau

SEQ ID NO: 1030733 - RNA, 19 nt, Artificial Sequence
  Description of Artificial Sequence: Synthetic oligonucleotide
  Antisense strand to SEQ ID NO: 1030732
auauuuauaagucgccggg

SEQ ID NO: 1030734 - RNA, 19 nt, Artificial Sequence
  Description of Artificial Sequence: Synthetic oligonucleotide
  Sense strand starting at position 419 of SEQ ID NO: 914788
aaguaaagccuuugacuag

SEQ ID NO: 1030735 - RNA, 19 nt, Artificial Sequence
  Description of Artificial Sequence: Synthetic oligonucleotide
  Antisense strand to SEQ ID NO: 1030734
cuagucaaaggcuuuacuu

SEQ ID NO: 1030736 - RNA, 19 nt, Artificial Sequence
  Description of Artificial Sequence: Synthetic oligonucleotide
  Sense strand starting at position 577 of SEQ ID NO: 914788
ggcaucuuuggaggaugga

SEQ ID NO: 1030737 - RNA, 19 nt, Artificial Sequence
  Description of Artificial Sequence: Synthetic oligonucleotide
  Antisense strand to SEQ ID NO: 1030736
uccauccuccaaagaugcc

SEQ ID NO: 1030738 - RNA, 19 nt, Artificial Sequence
  Description of Artificial Sequence: Synthetic oligonucleotide
  Sense strand starting at position 657 of SEQ ID NO: 914788
acugaauuguccucacgga

SEQ ID NO: 1030739 - RNA, 19 nt, Artificial Sequence
  Description of Artificial Sequence: Synthetic oligonucleotide
  Antisense strand to SEQ ID NO: 1030738
uccgugaggacaauucagu

SEQ ID NO: 1030740 - RNA, 19 nt, Artificial Sequence
  Description of Artificial Sequence: Synthetic oligonucleotide
  Sense strand starting at position 658 of SEQ ID NO: 914788
cugaauuguccucacggaa

SEQ ID NO: 1030741 - RNA, 19 nt, Artificial Sequence
  Description of Artificial Sequence: Synthetic oligonucleotide
  Antisense strand to SEQ ID NO: 1030740
uuccgugaggacaauucag

SEQ ID NO: 1030742 - RNA, 19 nt, Artificial Sequence
  Description of Artificial Sequence: Synthetic oligonucleotide
  Sense strand starting at position 720 of SEQ ID NO: 914788
cuuguaagguagccauaua

SEQ ID NO: 1030743 - RNA, 19 nt, Artificial Sequence
  Description of Artificial Sequence: Synthetic oligonucleotide
  Antisense strand to SEQ ID NO: 1030742
uauauggcuaccuuacaag

SEQ ID NO: 1030744 - RNA, 19 nt, Artificial Sequence
  Description of Artificial Sequence: Synthetic oligonucleotide
  Sense strand starting at position 1188 of SEQ ID NO: 914788
cgaauucccucucugacuu

SEQ ID NO: 1030745 - RNA, 19 nt, Artificial Sequence
  Description of Artificial Sequence: Synthetic oligonucleotide
  Antisense strand to SEQ ID NO: 1030744
aagucagagagggaauucg

SEQ ID NO: 1030746 - RNA, 19 nt, Artificial Sequence
  Description of Artificial Sequence: Synthetic oligonucleotide
  Sense strand starting at position 1256 of SEQ ID NO: 914788
ugaaguuggcaguaauuau

SEQ ID NO: 1030747 - RNA, 19 nt, Artificial Sequence
  Description of Artificial Sequence: Synthetic oligonucleotide
  Antisense strand to SEQ ID NO: 1030746
auaauuacugccaacuuca

SEQ ID NO: 1030748 - RNA, 19 nt, Artificial Sequence
  Description of Artificial Sequence: Synthetic oligonucleotide
  Sense strand starting at position 1301 of SEQ ID NO: 914788
cuaccugguguggauuaaa

SEQ ID NO: 1030749 - RNA, 19 nt, Artificial Sequence
  Description of Artificial Sequence: Synthetic oligonucleotide
  Antisense strand to SEQ ID NO: 1030748
uuuaauccacaccagguag

SEQ ID NO: 1030750 - RNA, 19 nt, Artificial Sequence
  Description of Artificial Sequence: Synthetic oligonucleotide
  Sense strand starting at position 1350 of SEQ ID NO: 914788
cccugagcacuugggaaau

SEQ ID NO: 1030751 - RNA, 19 nt, Artificial Sequence
  Description of Artificial Sequence: Synthetic oligonucleotide
  Antisense strand to SEQ ID NO: 1030750
auuucccaagugcucaggg

SEQ ID NO: 1030752 - RNA, 19 nt, Artificial Sequence
  Description of Artificial Sequence: Synthetic oligonucleotide
  Sense strand starting at position 1361 of SEQ ID NO: 914788
ugggaaauguggcugcuau

SEQ ID NO: 1030753 - RNA, 19 nt, Artificial Sequence
  Description of Artificial Sequence: Synthetic oligonucleotide
  Antisense strand to SEQ ID NO: 1030752
auagcagccacauuuccca

SEQ ID NO: 1030754 - RNA, 19 nt, Artificial Sequence
  Description of Artificial Sequence: Synthetic oligonucleotide
  Sense strand starting at position 1374 of SEQ ID NO: 914788
ugcuauugggucuaaagga

SEQ ID NO: 1030755 - RNA, 19 nt, Artificial Sequence
  Description of Artificial Sequence: Synthetic oligonucleotide
  Antisense strand to SEQ ID NO: 1030754
uccuuuagacccaauagca

SEQ ID NO: 1030756 - RNA, 19 nt, Artificial Sequence
  Description of Artificial Sequence: Synthetic oligonucleotide
  Sense strand starting at position 1690 of SEQ ID NO: 914788
gcaaacuuuggccacagua

SEQ ID NO: 1030757 - RNA, 19 nt, Artificial Sequence
  Description of Artificial Sequence: Synthetic oligonucleotide
  Antisense strand to SEQ ID NO: 1030756
uacuguggccaaaguuugc

SEQ ID NO: 1030758 - RNA, 19 nt, Artificial Sequence
  Description of Artificial Sequence: Synthetic oligonucleotide
  Sense strand starting at position 1692 of SEQ ID NO: 914788
aaacuuuggccacaguaga

SEQ ID NO: 1030759 - RNA, 19 nt, Artificial Sequence
  Description of Artificial Sequence: Synthetic oligonucleotide
  Antisense strand to SEQ ID NO: 1030758
ucuacuguggccaaaguuu

SEQ ID NO: 1030760 - RNA, 19 nt, Artificial Sequence
  Description of Artificial Sequence: Synthetic oligonucleotide
  Sense strand starting at position 1739 of SEQ ID NO: 914788
gggagccuccagggucaua

SEQ ID NO: 1030761 - RNA, 19 nt, Artificial Sequence
  Description of Artificial Sequence: Synthetic oligonucleotide
  Antisense strand to SEQ ID NO: 1030760
uaugacccuggaggcuccc

SEQ ID NO: 1030762 - RNA, 19 nt, Artificial Sequence
  Description of Artificial Sequence: Synthetic oligonucleotide
  Sense strand starting at position 1885 of SEQ ID NO: 914788
gugguuguuccucaaauca

SEQ ID NO: 1030763 - RNA, 19 nt, Artificial Sequence
  Description of Artificial Sequence: Synthetic oligonucleotide
  Antisense strand to SEQ ID NO: 1030762
ugauuugaggaacaaccac

SEQ ID NO: 1030764 - RNA, 19 nt, Artificial Sequence
  Description of Artificial Sequence: Synthetic oligonucleotide
  Sense strand starting at position 1979 of SEQ ID NO: 914788
uguguccagccuuaaauua

SEQ ID NO: 1030765 - RNA, 19 nt, Artificial Sequence
  Description of Artificial Sequence: Synthetic oligonucleotide
  Antisense strand to SEQ ID NO: 1030764
uaauuuaaggcuggacaca

SEQ ID NO: 1030766 - RNA, 19 nt, Artificial Sequence
  Description of Artificial Sequence: Synthetic oligonucleotide
  Sense strand starting at position 1990 of SEQ ID NO: 914788
uuaaauuagcucugaguuu

SEQ ID NO: 1030767 - RNA, 19 nt, Artificial Sequence
  Description of Artificial Sequence: Synthetic oligonucleotide
  Antisense strand to SEQ ID NO: 1030766
aaacucagagcuaauuuaa

SEQ ID NO: 1030768 - RNA, 19 nt, Artificial Sequence
  Description of Artificial Sequence: Synthetic oligonucleotide
  Sense strand starting at position 2008 of SEQ ID NO: 914788
ucacuuucccugugaccca

SEQ ID NO: 1030769 - RNA, 19 nt, Artificial Sequence
  Description of Artificial Sequence: Synthetic oligonucleotide
  Antisense strand to SEQ ID NO: 1030768
ugggucacagggaaaguga

SEQ ID NO: 1030770 - RNA, 19 nt, Artificial Sequence
  Description of Artificial Sequence: Synthetic oligonucleotide
  Sense strand starting at position 2518 of SEQ ID NO: 914788
gcugacaaucaccaaguuu

SEQ ID NO: 1030771 - RNA, 19 nt, Artificial Sequence
  Description of Artificial Sequence: Synthetic oligonucleotide
  Antisense strand to SEQ ID NO: 1030770
aaacuuggugauugucagc

SEQ ID NO: 1030772 - RNA, 19 nt, Artificial Sequence
  Description of Artificial Sequence: Synthetic oligonucleotide
  Sense strand starting at position 2729 of SEQ ID NO: 914788
cguauuauuggaggcacau

SEQ ID NO: 1030773 - RNA, 19 nt, Artificial Sequence
  Description of Artificial Sequence: Synthetic oligonucleotide
  Antisense strand to SEQ ID NO: 1030772
augugccuccaauaauacg

SEQ ID NO: 1030774 - RNA, 19 nt, Artificial Sequence
  Description of Artificial Sequence: Synthetic oligonucleotide
  Sense strand starting at position 2766 of SEQ ID NO: 914788
gagugagccugcuuggaca

SEQ ID NO: 1030775 - RNA, 19 nt, Artificial Sequence
  Description of Artificial Sequence: Synthetic oligonucleotide
  Antisense strand to SEQ ID NO: 1030774
uguccaagcaggcucacuc

SEQ ID NO: 1030776 - RNA, 19 nt, Artificial Sequence
  Description of Artificial Sequence: Synthetic oligonucleotide
  Sense strand starting at position 2774 of SEQ ID NO: 914788
cugcuuggacagcaguaua

SEQ ID NO: 1030777 - RNA, 19 nt, Artificial Sequence
  Description of Artificial Sequence: Synthetic oligonucleotide
  Antisense strand to SEQ ID NO: 1030776
uauacugcuguccaagcag

SEQ ID NO: 1030778 - RNA, 19 nt, Artificial Sequence
  Description of Artificial Sequence: Synthetic oligonucleotide
  Sense strand starting at position 2931 of SEQ ID NO: 914788
auaaguaucucuucuguca

SEQ ID NO: 1030779 - RNA, 19 nt, Artificial Sequence
  Description of Artificial Sequence: Synthetic oligonucleotide
  Antisense strand to SEQ ID NO: 1030778
ugacagaagagauacuuau

SEQ ID NO: 1030780 - RNA, 19 nt, Artificial Sequence
  Description of Artificial Sequence: Synthetic oligonucleotide
  Sense strand starting at position 2942 of SEQ ID NO: 914788
uucugucaucuacauauag

SEQ ID NO: 1030781 - RNA, 19 nt, Artificial Sequence
  Description of Artificial Sequence: Synthetic oligonucleotide
  Antisense strand to SEQ ID NO: 1030780
cuauauguagaugacagaa

SEQ ID NO: 1030782 - RNA, 19 nt, Artificial Sequence
  Description of Artificial Sequence: Synthetic oligonucleotide
  Sense strand starting at position 3241 of SEQ ID NO: 914788
acuccauucuccucugagu

SEQ ID NO: 1030783 - RNA, 19 nt, Artificial Sequence
  Description of Artificial Sequence: Synthetic oligonucleotide
  Antisense strand to SEQ ID NO: 1030782
acucagaggagaauggagu

SEQ ID NO: 1030784 - RNA, 19 nt, Artificial Sequence
  Description of Artificial Sequence: Synthetic oligonucleotide
  Sense strand starting at position 3254 of SEQ ID NO: 914788
cugaguugcagugggacaa

SEQ ID NO: 1030785 - RNA, 19 nt, Artificial Sequence
  Description of Artificial Sequence: Synthetic oligonucleotide
  Antisense strand to SEQ ID NO: 1030784
uugucccacugcaacucag

SEQ ID NO: 1030786 - RNA, 19 nt, Artificial Sequence
  Description of Artificial Sequence: Synthetic oligonucleotide
  Sense strand starting at position 3255 of SEQ ID NO: 914788
ugaguugcagugggacaau

SEQ ID NO: 1030787 - RNA, 19 nt, Artificial Sequence
  Description of Artificial Sequence: Synthetic oligonucleotide
  Antisense strand to SEQ ID NO: 1030786
auugucccacugcaacuca

SEQ ID NO: 1030788 - RNA, 19 nt, Artificial Sequence
  Description of Artificial Sequence: Synthetic oligonucleotide
  Sense strand starting at position 3559 of SEQ ID NO: 914788
ggaggaacaucacuguacu

SEQ ID NO: 1030789 - RNA, 19 nt, Artificial Sequence
  Description of Artificial Sequence: Synthetic oligonucleotide
  Antisense strand to SEQ ID NO: 1030788
aguacagugauguuccucc

SEQ ID NO: 1030790 - RNA, 19 nt, Artificial Sequence
  Description of Artificial Sequence: Synthetic oligonucleotide
  Sense strand starting at position 3630 of SEQ ID NO: 914788
aaauuauguccaggagcua

SEQ ID NO: 1030791 - RNA, 19 nt, Artificial Sequence
  Description of Artificial Sequence: Synthetic oligonucleotide
  Antisense strand to SEQ ID NO: 1030790
uagcuccuggacauaauuu

SEQ ID NO: 1030792 - RNA, 19 nt, Artificial Sequence
  Description of Artificial Sequence: Synthetic oligonucleotide
  Sense strand starting at position 3631 of SEQ ID NO: 914788
aauuauguccaggagcuau

SEQ ID NO: 1030793 - RNA, 19 nt, Artificial Sequence
  Description of Artificial Sequence: Synthetic oligonucleotide
  Antisense strand to SEQ ID NO: 1030792
auagcuccuggacauaauu

SEQ ID NO: 1030794 - RNA, 19 nt, Artificial Sequence
  Description of Artificial Sequence: Synthetic oligonucleotide
  Sense strand starting at position 3653 of SEQ ID NO: 914788
aaaggagagucugcaaauc

SEQ ID NO: 1030795 - RNA, 19 nt, Artificial Sequence
  Description of Artificial Sequence: Synthetic oligonucleotide
  Antisense strand to SEQ ID NO: 1030794
gauuugcagacucuccuuu

SEQ ID NO: 1030796 - RNA, 19 nt, Artificial Sequence
  Description of Artificial Sequence: Synthetic oligonucleotide
  Sense strand starting at position 3674 of SEQ ID NO: 914788
gggccaguggaaugagaau

SEQ ID NO: 1030797 - RNA, 19 nt, Artificial Sequence
  Description of Artificial Sequence: Synthetic oligonucleotide
  Antisense strand to SEQ ID NO: 1030796
auucucauuccacuggccc

SEQ ID NO: 1030798 - RNA, 19 nt, Artificial Sequence
  Description of Artificial Sequence: Synthetic oligonucleotide
  Sense strand starting at position 3710 of SEQ ID NO: 914788
guucaugcugagcaggaaa

SEQ ID NO: 1030799 - RNA, 19 nt, Artificial Sequence
  Description of Artificial Sequence: Synthetic oligonucleotide
  Antisense strand to SEQ ID NO: 1030798
uuuccugcucagcaugaac

SEQ ID NO: 1030800 - RNA, 19 nt, Artificial Sequence
  Description of Artificial Sequence: Synthetic oligonucleotide
  Sense strand starting at position 3795 of SEQ ID NO: 914788
aggccuacagccuggaaua

SEQ ID NO: 1030801 - RNA, 19 nt, Artificial Sequence
  Description of Artificial Sequence: Synthetic oligonucleotide
  Antisense strand to SEQ ID NO: 1030800
uauuccaggcuguaggccu

SEQ ID NO: 1030802 - RNA, 19 nt, Artificial Sequence
  Description of Artificial Sequence: Synthetic oligonucleotide
  Sense strand starting at position 3943 of SEQ ID NO: 914788
gaggcaauguuaucuuucu

SEQ ID NO: 1030803 - RNA, 19 nt, Artificial Sequence
  Description of Artificial Sequence: Synthetic oligonucleotide
  Antisense strand to SEQ ID NO: 1030802
agaaagauaacauugccuc

SEQ ID NO: 1030804 - RNA, 19 nt, Artificial Sequence
  Description of Artificial Sequence: Synthetic oligonucleotide
  Sense strand starting at position 3944 of SEQ ID NO: 914788
aggcaauguuaucuuucua

SEQ ID NO: 1030805 - RNA, 19 nt, Artificial Sequence
  Description of Artificial Sequence: Synthetic oligonucleotide
  Antisense strand to SEQ ID NO: 1030804
uagaaagauaacauugccu

SEQ ID NO: 1030806 - RNA, 19 nt, Artificial Sequence
  Description of Artificial Sequence: Synthetic oligonucleotide
  Sense strand starting at position 3951 of SEQ ID NO: 914788
guuaucuuucuauguacau

SEQ ID NO: 1030807 - RNA, 19 nt, Artificial Sequence
  Description of Artificial Sequence: Synthetic oligonucleotide
  Antisense strand to SEQ ID NO: 1030806
auguacauagaaagauaac

SEQ ID NO: 1030808 - RNA, 19 nt, Artificial Sequence
  Description of Artificial Sequence: Synthetic oligonucleotide
  Sense strand starting at position 3962 of SEQ ID NO: 914788
auguacaugccaggaauau

SEQ ID NO: 1030809 - RNA, 19 nt, Artificial Sequence
  Description of Artificial Sequence: Synthetic oligonucleotide
  Antisense strand to SEQ ID NO: 1030808
auauuccuggcauguacau

SEQ ID NO: 1030810 - RNA, 19 nt, Artificial Sequence
  Description of Artificial Sequence: Synthetic oligonucleotide
  Sense strand starting at position 3963 of SEQ ID NO: 914788
uguacaugccaggaauauc

SEQ ID NO: 1030811 - RNA, 19 nt, Artificial Sequence
  Description of Artificial Sequence: Synthetic oligonucleotide
  Antisense strand to SEQ ID NO: 1030810
gauauuccuggcauguaca

SEQ ID NO: 1030812 - RNA, 19 nt, Artificial Sequence
  Description of Artificial Sequence: Synthetic oligonucleotide
  Sense strand starting at position 3974 of SEQ ID NO: 914788
ggaauaucuugggcuacau

SEQ ID NO: 1030813 - RNA, 19 nt, Artificial Sequence
  Description of Artificial Sequence: Synthetic oligonucleotide
  Antisense strand to SEQ ID NO: 1030812
auguagcccaagauauucc

SEQ ID NO: 1030814 - RNA, 19 nt, Artificial Sequence
  Description of Artificial Sequence: Synthetic oligonucleotide
  Sense strand starting at position 47 of SEQ ID NO: 914789
gugauacuugcacaugguu

SEQ ID NO: 1030815 - RNA, 19 nt, Artificial Sequence
  Description of Artificial Sequence: Synthetic oligonucleotide
  Antisense strand to SEQ ID NO: 1030814
aaccaugugcaaguaucac

SEQ ID NO: 1030816 - RNA, 19 nt, Artificial Sequence
  Description of Artificial Sequence: Synthetic oligonucleotide
  Sense strand starting at position 61 of SEQ ID NO: 914789
ugguuuccaguacauaaga

SEQ ID NO: 1030817 - RNA, 19 nt, Artificial Sequence
  Description of Artificial Sequence: Synthetic oligonucleotide
  Antisense strand to SEQ ID NO: 1030816
ucuuauguacuggaaacca

SEQ ID NO: 1030818 - RNA, 19 nt, Artificial Sequence
  Description of Artificial Sequence: Synthetic oligonucleotide
  Sense strand starting at position 180 of SEQ ID NO: 914789
ccagauuucuaagaaagcu

SEQ ID NO: 1030819 - RNA, 19 nt, Artificial Sequence
  Description of Artificial Sequence: Synthetic oligonucleotide
  Antisense strand to SEQ ID NO: 1030818
agcuuucuuagaaaucugg

SEQ ID NO: 1030820 - RNA, 19 nt, Artificial Sequence
  Description of Artificial Sequence: Synthetic oligonucleotide
  Sense strand starting at position 188 of SEQ ID NO: 914789
cuaagaaagcuugauaagc

SEQ ID NO: 1030821 - RNA, 19 nt, Artificial Sequence
  Description of Artificial Sequence: Synthetic oligonucleotide
  Antisense strand to SEQ ID NO: 1030820
gcuuaucaagcuuucuuag

SEQ ID NO: 1030822 - RNA, 19 nt, Artificial Sequence
  Description of Artificial Sequence: Synthetic oligonucleotide
  Sense strand starting at position 327 of SEQ ID NO: 914789
gguaguauaguagaguaaa

SEQ ID NO: 1030823 - RNA, 19 nt, Artificial Sequence
  Description of Artificial Sequence: Synthetic oligonucleotide
  Antisense strand to SEQ ID NO: 1030822
uuuacucuacuauacuacc

SEQ ID NO: 1030824 - RNA, 19 nt, Artificial Sequence
  Description of Artificial Sequence: Synthetic oligonucleotide
  Sense strand starting at position 426 of SEQ ID NO: 914789
ugacucucagcuugauuau

SEQ ID NO: 1030825 - RNA, 19 nt, Artificial Sequence
  Description of Artificial Sequence: Synthetic oligonucleotide
  Antisense strand to SEQ ID NO: 1030824
auaaucaagcugagaguca

SEQ ID NO: 1030826 - RNA, 19 nt, Artificial Sequence
  Description of Artificial Sequence: Synthetic oligonucleotide
  Sense strand starting at position 469 of SEQ ID NO: 914789
gucucacaguggucaagaa

SEQ ID NO: 1030827 - RNA, 19 nt, Artificial Sequence
  Description of Artificial Sequence: Synthetic oligonucleotide
  Antisense strand to SEQ ID NO: 1030826
uucuugaccacugugagac

SEQ ID NO: 1030828 - RNA, 19 nt, Artificial Sequence
  Description of Artificial Sequence: Synthetic oligonucleotide
  Sense strand starting at position 676 of SEQ ID NO: 914789
aucaucauguuguuaauga

SEQ ID NO: 1030829 - RNA, 19 nt, Artificial Sequence
  Description of Artificial Sequence: Synthetic oligonucleotide
  Antisense strand to SEQ ID NO: 1030828
ucauuaacaacaugaugau

SEQ ID NO: 1030830 - RNA, 19 nt, Artificial Sequence
  Description of Artificial Sequence: Synthetic oligonucleotide
  Sense strand starting at position 809 of SEQ ID NO: 914789
uggccuuguggcuagaaac

SEQ ID NO: 1030831 - RNA, 19 nt, Artificial Sequence
  Description of Artificial Sequence: Synthetic oligonucleotide
  Antisense strand to SEQ ID NO: 1030830
guuucuagccacaaggcca

SEQ ID NO: 1030832 - RNA, 19 nt, Artificial Sequence
  Description of Artificial Sequence: Synthetic oligonucleotide
  Sense strand starting at position 865 of SEQ ID NO: 914789
ccaguaccaucuguuauca

SEQ ID NO: 1030833 - RNA, 19 nt, Artificial Sequence
  Description of Artificial Sequence: Synthetic oligonucleotide
  Antisense strand to SEQ ID NO: 1030832
ugauaacagaugguacugg

SEQ ID NO: 1030834 - RNA, 19 nt, Artificial Sequence
  Description of Artificial Sequence: Synthetic oligonucleotide
  Sense strand starting at position 1107 of SEQ ID NO: 914789
gcgaaucccacggauucuu

SEQ ID NO: 1030835 - RNA, 19 nt, Artificial Sequence
  Description of Artificial Sequence: Synthetic oligonucleotide
  Antisense strand to SEQ ID NO: 1030834
aagaauccgugggauucgc

SEQ ID NO: 1030836 - RNA, 19 nt, Artificial Sequence
  Description of Artificial Sequence: Synthetic oligonucleotide
  Sense strand starting at position 1112 of SEQ ID NO: 914789
ucccacggauucuucuaau

SEQ ID NO: 1030837 - RNA, 19 nt, Artificial Sequence
  Description of Artificial Sequence: Synthetic oligonucleotide
  Antisense strand to SEQ ID NO: 1030836
auuagaagaauccguggga

SEQ ID NO: 1030838 - RNA, 19 nt, Artificial Sequence
  Description of Artificial Sequence: Synthetic oligonucleotide
  Sense strand starting at position 1203 of SEQ ID NO: 914789
ggcucagagcucuagucua

SEQ ID NO: 1030839 - RNA, 19 nt, Artificial Sequence
  Description of Artificial Sequence: Synthetic oligonucleotide
  Antisense strand to SEQ ID NO: 1030838
uagacuagagcucugagcc

SEQ ID NO: 1030840 - RNA, 19 nt, Artificial Sequence
  Description of Artificial Sequence: Synthetic oligonucleotide
  Sense strand starting at position 1459 of SEQ ID NO: 914789
gccucacuuccauaugaga

SEQ ID NO: 1030841 - RNA, 19 nt, Artificial Sequence
  Description of Artificial Sequence: Synthetic oligonucleotide
  Antisense strand to SEQ ID NO: 1030840
ucucauauggaagugaggc

SEQ ID NO: 1030842 - RNA, 19 nt, Artificial Sequence
  Description of Artificial Sequence: Synthetic oligonucleotide
  Sense strand starting at position 1473 of SEQ ID NO: 914789
ugagauauagcgggaagga

SEQ ID NO: 1030843 - RNA, 19 nt, Artificial Sequence
  Description of Artificial Sequence: Synthetic oligonucleotide
  Antisense strand to SEQ ID NO: 1030842
uccuucccgcuauaucuca

SEQ ID NO: 1030844 - RNA, 19 nt, Artificial Sequence
  Description of Artificial Sequence: Synthetic oligonucleotide
  Sense strand starting at position 1542 of SEQ ID NO: 914789
cugaaauacucgcucauga

SEQ ID NO: 1030845 - RNA, 19 nt, Artificial Sequence
  Description of Artificial Sequence: Synthetic oligonucleotide
  Antisense strand to SEQ ID NO: 1030844
ucaugagcgaguauuucag

SEQ ID NO: 1030846 - RNA, 19 nt, Artificial Sequence
  Description of Artificial Sequence: Synthetic oligonucleotide
  Sense strand starting at position 1544 of SEQ ID NO: 914789
gaaauacucgcucaugaug

SEQ ID NO: 1030847 - RNA, 19 nt, Artificial Sequence
  Description of Artificial Sequence: Synthetic oligonucleotide
  Antisense strand to SEQ ID NO: 1030846
caucaugagcgaguauuuc

SEQ ID NO: 1030848 - RNA, 19 nt, Artificial Sequence
  Description of Artificial Sequence: Synthetic oligonucleotide
  Sense strand starting at position 1553 of SEQ ID NO: 914789
gcucaugauggcuaacaga

SEQ ID NO: 1030849 - RNA, 19 nt, Artificial Sequence
  Description of Artificial Sequence: Synthetic oligonucleotide
  Antisense strand to SEQ ID NO: 1030848
ucuguuagccaucaugagc

SEQ ID NO: 1030850 - RNA, 19 nt, Artificial Sequence
  Description of Artificial Sequence: Synthetic oligonucleotide
  Sense strand starting at position 1579 of SEQ ID NO: 914789
aucgccaaaugucuuaaga

SEQ ID NO: 1030851 - RNA, 19 nt, Artificial Sequence
  Description of Artificial Sequence: Synthetic oligonucleotide
  Antisense strand to SEQ ID NO: 1030850
ucuuaagacauuuggcgau

SEQ ID NO: 1030852 - RNA, 19 nt, Artificial Sequence
  Description of Artificial Sequence: Synthetic oligonucleotide
  Sense strand starting at position 2167 of SEQ ID NO: 914789
gccuaaaguggcuggagaa

SEQ ID NO: 1030853 - RNA, 19 nt, Artificial Sequence
  Description of Artificial Sequence: Synthetic oligonucleotide
  Antisense strand to SEQ ID NO: 1030852
uucuccagccacuuuaggc

SEQ ID NO: 1030854 - RNA, 19 nt, Artificial Sequence
  Description of Artificial Sequence: Synthetic oligonucleotide
  Sense strand starting at position 2335 of SEQ ID NO: 914789
cguaauagauaacuuauga

SEQ ID NO: 1030855 - RNA, 19 nt, Artificial Sequence
  Description of Artificial Sequence: Synthetic oligonucleotide
  Antisense strand to SEQ ID NO: 1030854
ucauaaguuaucuauuacg

SEQ ID NO: 1030856 - RNA, 19 nt, Artificial Sequence
  Description of Artificial Sequence: Synthetic oligonucleotide
  Sense strand starting at position 2386 of SEQ ID NO: 914789
gccaauguaccuuaaugua

SEQ ID NO: 1030857 - RNA, 19 nt, Artificial Sequence
  Description of Artificial Sequence: Synthetic oligonucleotide
  Antisense strand to SEQ ID NO: 1030856
uacauuaagguacauuggc

SEQ ID NO: 1030858 - RNA, 19 nt, Artificial Sequence
  Description of Artificial Sequence: Synthetic oligonucleotide
  Sense strand starting at position 2411 of SEQ ID NO: 914789
ucuccuugucuggacugau

SEQ ID NO: 1030859 - RNA, 19 nt, Artificial Sequence
  Description of Artificial Sequence: Synthetic oligonucleotide
  Antisense strand to SEQ ID NO: 1030858
aucaguccagacaaggaga

SEQ ID NO: 1030860 - RNA, 19 nt, Artificial Sequence
  Description of Artificial Sequence: Synthetic oligonucleotide
  Sense strand starting at position 2421 of SEQ ID NO: 914789
uggacugauacccgggauu

SEQ ID NO: 1030861 - RNA, 19 nt, Artificial Sequence
  Description of Artificial Sequence: Synthetic oligonucleotide
  Antisense strand to SEQ ID NO: 1030860
aaucccggguaucagucca

SEQ ID NO: 1030862 - RNA, 19 nt, Artificial Sequence
  Description of Artificial Sequence: Synthetic oligonucleotide
  Sense strand starting at position 2423 of SEQ ID NO: 914789
gacugauacccgggauucu

SEQ ID NO: 1030863 - RNA, 19 nt, Artificial Sequence
  Description of Artificial Sequence: Synthetic oligonucleotide
  Antisense strand to SEQ ID NO: 1030862
agaaucccggguaucaguc

SEQ ID NO: 1030864 - RNA, 19 nt, Artificial Sequence
  Description of Artificial Sequence: Synthetic oligonucleotide
  Sense strand starting at position 2424 of SEQ ID NO: 914789
acugauacccgggauucuu

SEQ ID NO: 1030865 - RNA, 19 nt, Artificial Sequence
  Description of Artificial Sequence: Synthetic oligonucleotide
  Antisense strand to SEQ ID NO: 1030864
aagaaucccggguaucagu

SEQ ID NO: 1030866 - RNA, 19 nt, Artificial Sequence
  Description of Artificial Sequence: Synthetic oligonucleotide
  Sense strand starting at position 2434 of SEQ ID NO: 914789
gggauucuuuguccuacuc

SEQ ID NO: 1030867 - RNA, 19 nt, Artificial Sequence
  Description of Artificial Sequence: Synthetic oligonucleotide
  Antisense strand to SEQ ID NO: 1030866
gaguaggacaaagaauccc

SEQ ID NO: 1030868 - RNA, 19 nt, Artificial Sequence
  Description of Artificial Sequence: Synthetic oligonucleotide
  Sense strand starting at position 2527 of SEQ ID NO: 914789
cagugagcugaguaugcaa

SEQ ID NO: 1030869 - RNA, 19 nt, Artificial Sequence
  Description of Artificial Sequence: Synthetic oligonucleotide
  Antisense strand to SEQ ID NO: 1030868
uugcauacucagcucacug

SEQ ID NO: 1030870 - RNA, 19 nt, Artificial Sequence
  Description of Artificial Sequence: Synthetic oligonucleotide
  Sense strand starting at position 2535 of SEQ ID NO: 914789
ugaguaugcaaguggauug

SEQ ID NO: 1030871 - RNA, 19 nt, Artificial Sequence
  Description of Artificial Sequence: Synthetic oligonucleotide
  Antisense strand to SEQ ID NO: 1030870
caauccacuugcauacuca

SEQ ID NO: 1030872 - RNA, 19 nt, Artificial Sequence
  Description of Artificial Sequence: Synthetic oligonucleotide
  Sense strand starting at position 2738 of SEQ ID NO: 914789
cugugaaaguucccaccau

SEQ ID NO: 1030873 - RNA, 19 nt, Artificial Sequence
  Description of Artificial Sequence: Synthetic oligonucleotide
  Antisense strand to SEQ ID NO: 1030872
auggugggaacuuucacag

SEQ ID NO: 1030874 - RNA, 19 nt, Artificial Sequence
  Description of Artificial Sequence: Synthetic oligonucleotide
  Sense strand starting at position 2787 of SEQ ID NO: 914789
cugggagcucccuaauuau

SEQ ID NO: 1030875 - RNA, 19 nt, Artificial Sequence
  Description of Artificial Sequence: Synthetic oligonucleotide
  Antisense strand to SEQ ID NO: 1030874
auaauuagggagcucccag

SEQ ID NO: 1030876 - RNA, 19 nt, Artificial Sequence
  Description of Artificial Sequence: Synthetic oligonucleotide
  Sense strand starting at position 2790 of SEQ ID NO: 914789
ggagcucccuaauuauaca

SEQ ID NO: 1030877 - RNA, 19 nt, Artificial Sequence
  Description of Artificial Sequence: Synthetic oligonucleotide
  Antisense strand to SEQ ID NO: 1030876
uguauaauuagggagcucc

SEQ ID NO: 1030878 - RNA, 19 nt, Artificial Sequence
  Description of Artificial Sequence: Synthetic oligonucleotide
  Sense strand starting at position 3022 of SEQ ID NO: 914789
cuacguaagaaauggaaca

SEQ ID NO: 1030879 - RNA, 19 nt, Artificial Sequence
  Description of Artificial Sequence: Synthetic oligonucleotide
  Antisense strand to SEQ ID NO: 1030878
uguuccauuucuuacguag

SEQ ID NO: 1030880 - RNA, 19 nt, Artificial Sequence
  Description of Artificial Sequence: Synthetic oligonucleotide
  Sense strand starting at position 3310 of SEQ ID NO: 914789
uuuggucaugagugggauu

SEQ ID NO: 1030881 - RNA, 19 nt, Artificial Sequence
  Description of Artificial Sequence: Synthetic oligonucleotide
  Antisense strand to SEQ ID NO: 1030880
aaucccacucaugaccaaa

SEQ ID NO: 1030882 - RNA, 19 nt, Artificial Sequence
  Description of Artificial Sequence: Synthetic oligonucleotide
  Sense strand starting at position 3312 of SEQ ID NO: 914789
uggucaugagugggauuca

SEQ ID NO: 1030883 - RNA, 19 nt, Artificial Sequence
  Description of Artificial Sequence: Synthetic oligonucleotide
  Antisense strand to SEQ ID NO: 1030882
ugaaucccacucaugacca

SEQ ID NO: 1030884 - RNA, 19 nt, Artificial Sequence
  Description of Artificial Sequence: Synthetic oligonucleotide
  Sense strand starting at position 3712 of SEQ ID NO: 914789
uggugauuuguugguucuu

SEQ ID NO: 1030885 - RNA, 19 nt, Artificial Sequence
  Description of Artificial Sequence: Synthetic oligonucleotide
  Antisense strand to SEQ ID NO: 1030884
aagaaccaacaaaucacca

SEQ ID NO: 1030886 - RNA, 19 nt, Artificial Sequence
  Description of Artificial Sequence: Synthetic oligonucleotide
  Sense strand starting at position 3713 of SEQ ID NO: 914789
ggugauuuguugguucuuu

SEQ ID NO: 1030887 - RNA, 19 nt, Artificial Sequence
  Description of Artificial Sequence: Synthetic oligonucleotide
  Antisense strand to SEQ ID NO: 1030886
aaagaaccaacaaaucacc

SEQ ID NO: 1030888 - RNA, 19 nt, Artificial Sequence
  Description of Artificial Sequence: Synthetic oligonucleotide
  Sense strand starting at position 3823 of SEQ ID NO: 914789
auguaauaccuaggaguau

SEQ ID NO: 1030889 - RNA, 19 nt, Artificial Sequence
  Description of Artificial Sequence: Synthetic oligonucleotide
  Antisense strand to SEQ ID NO: 1030888
auacuccuagguauuacau

SEQ ID NO: 1030890 - RNA, 19 nt, Artificial Sequence
  Description of Artificial Sequence: Synthetic oligonucleotide
  Sense strand starting at position 3884 of SEQ ID NO: 914789
cccaauugguggucccaau

SEQ ID NO: 1030891 - RNA, 19 nt, Artificial Sequence
  Description of Artificial Sequence: Synthetic oligonucleotide
  Antisense strand to SEQ ID NO: 1030890
auugggaccaccaauuggg

SEQ ID NO: 1030892 - RNA, 19 nt, Artificial Sequence
  Description of Artificial Sequence: Synthetic oligonucleotide
  Sense strand starting at position 3915 of SEQ ID NO: 914789
agcaauggguaagauuuau

SEQ ID NO: 1030893 - RNA, 19 nt, Artificial Sequence
  Description of Artificial Sequence: Synthetic oligonucleotide
  Antisense strand to SEQ ID NO: 1030892
auaaaucuuacccauugcu

SEQ ID NO: 1030894 - RNA, 19 nt, Artificial Sequence
  Description of Artificial Sequence: Synthetic oligonucleotide
  Sense strand starting at position 383 of SEQ ID NO: 914790
cuccacaucguccaaagau

SEQ ID NO: 1030895 - RNA, 19 nt, Artificial Sequence
  Description of Artificial Sequence: Synthetic oligonucleotide
  Antisense strand to SEQ ID NO: 1030894
aucuuuggacgauguggag

SEQ ID NO: 1030896 - RNA, 19 nt, Artificial Sequence
  Description of Artificial Sequence: Synthetic oligonucleotide
  Sense strand starting at position 474 of SEQ ID NO: 914790
uuccuacuagguuguuuaa

SEQ ID NO: 1030897 - RNA, 19 nt, Artificial Sequence
  Description of Artificial Sequence: Synthetic oligonucleotide
  Antisense strand to SEQ ID NO: 1030896
uuaaacaaccuaguaggaa

SEQ ID NO: 1030898 - RNA, 19 nt, Artificial Sequence
  Description of Artificial Sequence: Synthetic oligonucleotide
  Sense strand starting at position 476 of SEQ ID NO: 914790
ccuacuagguuguuuaaau

SEQ ID NO: 1030899 - RNA, 19 nt, Artificial Sequence
  Description of Artificial Sequence: Synthetic oligonucleotide
  Antisense strand to SEQ ID NO: 1030898
auuuaaacaaccuaguagg

SEQ ID NO: 1030900 - RNA, 19 nt, Artificial Sequence
  Description of Artificial Sequence: Synthetic oligonucleotide
  Sense strand starting at position 477 of SEQ ID NO: 914790
cuacuagguuguuuaaaug

SEQ ID NO: 1030901 - RNA, 19 nt, Artificial Sequence
  Description of Artificial Sequence: Synthetic oligonucleotide
  Antisense strand to SEQ ID NO: 1030900
cauuuaaacaaccuaguag

SEQ ID NO: 1030902 - RNA, 19 nt, Artificial Sequence
  Description of Artificial Sequence: Synthetic oligonucleotide
  Sense strand starting at position 518 of SEQ ID NO: 914790
ggaguaacauuauuagugu

SEQ ID NO: 1030903 - RNA, 19 nt, Artificial Sequence
  Description of Artificial Sequence: Synthetic oligonucleotide
  Antisense strand to SEQ ID NO: 1030902
acacuaauaauguuacucc

SEQ ID NO: 1030904 - RNA, 19 nt, Artificial Sequence
  Description of Artificial Sequence: Synthetic oligonucleotide
  Sense strand starting at position 521 of SEQ ID NO: 914790
guaacauuauuaguguauc

SEQ ID NO: 1030905 - RNA, 19 nt, Artificial Sequence
  Description of Artificial Sequence: Synthetic oligonucleotide
  Antisense strand to SEQ ID NO: 1030904
gauacacuaauaauguuac

SEQ ID NO: 1030906 - RNA, 19 nt, Artificial Sequence
  Description of Artificial Sequence: Synthetic oligonucleotide
  Sense strand starting at position 635 of SEQ ID NO: 914790
uaaucaucucaggguagga

SEQ ID NO: 1030907 - RNA, 19 nt, Artificial Sequence
  Description of Artificial Sequence: Synthetic oligonucleotide
  Antisense strand to SEQ ID NO: 1030906
uccuacccugagaugauua

SEQ ID NO: 1030908 - RNA, 19 nt, Artificial Sequence
  Description of Artificial Sequence: Synthetic oligonucleotide
  Sense strand starting at position 669 of SEQ ID NO: 914790
aaguaaucacucgguuuaa

SEQ ID NO: 1030909 - RNA, 19 nt, Artificial Sequence
  Description of Artificial Sequence: Synthetic oligonucleotide
  Antisense strand to SEQ ID NO: 1030908
uuaaaccgagugauuacuu

SEQ ID NO: 1030910 - RNA, 19 nt, Artificial Sequence
  Description of Artificial Sequence: Synthetic oligonucleotide
  Sense strand starting at position 670 of SEQ ID NO: 914790
aguaaucacucgguuuaaa

SEQ ID NO: 1030911 - RNA, 19 nt, Artificial Sequence
  Description of Artificial Sequence: Synthetic oligonucleotide
  Antisense strand to SEQ ID NO: 1030910
uuuaaaccgagugauuacu

SEQ ID NO: 1030912 - RNA, 19 nt, Artificial Sequence
  Description of Artificial Sequence: Synthetic oligonucleotide
  Sense strand starting at position 869 of SEQ ID NO: 914790
acucuuuacggguauacuu

SEQ ID NO: 1030913 - RNA, 19 nt, Artificial Sequence
  Description of Artificial Sequence: Synthetic oligonucleotide
  Antisense strand to SEQ ID NO: 1030912
aaguauacccguaaagagu

SEQ ID NO: 1030914 - RNA, 19 nt, Artificial Sequence
  Description of Artificial Sequence: Synthetic oligonucleotide
  Sense strand starting at position 892 of SEQ ID NO: 914790
cuacaaacguccuugugaa

SEQ ID NO: 1030915 - RNA, 19 nt, Artificial Sequence
  Description of Artificial Sequence: Synthetic oligonucleotide
  Antisense strand to SEQ ID NO: 1030914
uucacaaggacguuuguag

SEQ ID NO: 1030916 - RNA, 19 nt, Artificial Sequence
  Description of Artificial Sequence: Synthetic oligonucleotide
  Sense strand starting at position 893 of SEQ ID NO: 914790
uacaaacguccuugugaaa

SEQ ID NO: 1030917 - RNA, 19 nt, Artificial Sequence
  Description of Artificial Sequence: Synthetic oligonucleotide
  Antisense strand to SEQ ID NO: 1030916
uuucacaaggacguuugua

SEQ ID NO: 1030918 - RNA, 19 nt, Artificial Sequence
  Description of Artificial Sequence: Synthetic oligonucleotide
  Sense strand starting at position 931 of SEQ ID NO: 914790
uuaacaugaugaguuauca

SEQ ID NO: 1030919 - RNA, 19 nt, Artificial Sequence
  Description of Artificial Sequence: Synthetic oligonucleotide
  Antisense strand to SEQ ID NO: 1030918
ugauaacucaucauguuaa

SEQ ID NO: 1030920 - RNA, 19 nt, Artificial Sequence
  Description of Artificial Sequence: Synthetic oligonucleotide
  Sense strand starting at position 969 of SEQ ID NO: 914790
cuugcuacucguuaggacu

SEQ ID NO: 1030921 - RNA, 19 nt, Artificial Sequence
  Description of Artificial Sequence: Synthetic oligonucleotide
  Antisense strand to SEQ ID NO: 1030920
aguccuaacgaguagcaag

SEQ ID NO: 1030922 - RNA, 19 nt, Artificial Sequence
  Description of Artificial Sequence: Synthetic oligonucleotide
  Sense strand starting at position 977 of SEQ ID NO: 914790
ucguuaggacuccagaaca

SEQ ID NO: 1030923 - RNA, 19 nt, Artificial Sequence
  Description of Artificial Sequence: Synthetic oligonucleotide
  Antisense strand to SEQ ID NO: 1030922
uguucuggaguccuaacga

SEQ ID NO: 1030924 - RNA, 19 nt, Artificial Sequence
  Description of Artificial Sequence: Synthetic oligonucleotide
  Sense strand starting at position 1112 of SEQ ID NO: 914790
uucugaaauugugucccua

SEQ ID NO: 1030925 - RNA, 19 nt, Artificial Sequence
  Description of Artificial Sequence: Synthetic oligonucleotide
  Antisense strand to SEQ ID NO: 1030924
uagggacacaauuucagaa

SEQ ID NO: 1030926 - RNA, 19 nt, Artificial Sequence
  Description of Artificial Sequence: Synthetic oligonucleotide
  Sense strand starting at position 1114 of SEQ ID NO: 914790
cugaaauugugucccuaca

SEQ ID NO: 1030927 - RNA, 19 nt, Artificial Sequence
  Description of Artificial Sequence: Synthetic oligonucleotide
  Antisense strand to SEQ ID NO: 1030926
uguagggacacaauuucag

SEQ ID NO: 1030928 - RNA, 19 nt, Artificial Sequence
  Description of Artificial Sequence: Synthetic oligonucleotide
  Sense strand starting at position 1160 of SEQ ID NO: 914790
uuaacagaaugcucugcau

SEQ ID NO: 1030929 - RNA, 19 nt, Artificial Sequence
  Description of Artificial Sequence: Synthetic oligonucleotide
  Antisense strand to SEQ ID NO: 1030928
augcagagcauucuguuaa

SEQ ID NO: 1030930 - RNA, 19 nt, Artificial Sequence
  Description of Artificial Sequence: Synthetic oligonucleotide
  Sense strand starting at position 1163 of SEQ ID NO: 914790
acagaaugcucugcauccu

SEQ ID NO: 1030931 - RNA, 19 nt, Artificial Sequence
  Description of Artificial Sequence: Synthetic oligonucleotide
  Antisense strand to SEQ ID NO: 1030930
aggaugcagagcauucugu

SEQ ID NO: 1030932 - RNA, 19 nt, Artificial Sequence
  Description of Artificial Sequence: Synthetic oligonucleotide
  Sense strand starting at position 1369 of SEQ ID NO: 914790
gagcuuagauucccaggau

SEQ ID NO: 1030933 - RNA, 19 nt, Artificial Sequence
  Description of Artificial Sequence: Synthetic oligonucleotide
  Antisense strand to SEQ ID NO: 1030932
auccugggaaucuaagcuc

SEQ ID NO: 1030934 - RNA, 19 nt, Artificial Sequence
  Description of Artificial Sequence: Synthetic oligonucleotide
  Sense strand starting at position 1372 of SEQ ID NO: 914790
cuuagauucccaggauuga

SEQ ID NO: 1030935 - RNA, 19 nt, Artificial Sequence
  Description of Artificial Sequence: Synthetic oligonucleotide
  Antisense strand to SEQ ID NO: 1030934
ucaauccugggaaucuaag

SEQ ID NO: 1030936 - RNA, 19 nt, Artificial Sequence
  Description of Artificial Sequence: Synthetic oligonucleotide
  Sense strand starting at position 1381 of SEQ ID NO: 914790
ccaggauugagcgagcagu

SEQ ID NO: 1030937 - RNA, 19 nt, Artificial Sequence
  Description of Artificial Sequence: Synthetic oligonucleotide
  Antisense strand to SEQ ID NO: 1030936
acugcucgcucaauccugg

SEQ ID NO: 1030938 - RNA, 19 nt, Artificial Sequence
  Description of Artificial Sequence: Synthetic oligonucleotide
  Sense strand starting at position 1384 of SEQ ID NO: 914790
ggauugagcgagcagugua

SEQ ID NO: 1030939 - RNA, 19 nt, Artificial Sequence
  Description of Artificial Sequence: Synthetic oligonucleotide
  Antisense strand to SEQ ID NO: 1030938
uacacugcucgcucaaucc

SEQ ID NO: 1030940 - RNA, 19 nt, Artificial Sequence
  Description of Artificial Sequence: Synthetic oligonucleotide
  Sense strand starting at position 1387 of SEQ ID NO: 914790
uugagcgagcaguguauuu

SEQ ID NO: 1030941 - RNA, 19 nt, Artificial Sequence
  Description of Artificial Sequence: Synthetic oligonucleotide
  Antisense strand to SEQ ID NO: 1030940
aaauacacugcucgcucaa

SEQ ID NO: 1030942 - RNA, 19 nt, Artificial Sequence
  Description of Artificial Sequence: Synthetic oligonucleotide
  Sense strand starting at position 1420 of SEQ ID NO: 914790
cugcaaguagucuaagcaa

SEQ ID NO: 1030943 - RNA, 19 nt, Artificial Sequence
  Description of Artificial Sequence: Synthetic oligonucleotide
  Antisense strand to SEQ ID NO: 1030942
uugcuuagacuacuugcag

SEQ ID NO: 1030944 - RNA, 19 nt, Artificial Sequence
  Description of Artificial Sequence: Synthetic oligonucleotide
  Sense strand starting at position 2175 of SEQ ID NO: 914790
cagagaagccgcuagugaa

SEQ ID NO: 1030945 - RNA, 19 nt, Artificial Sequence
  Description of Artificial Sequence: Synthetic oligonucleotide
  Antisense strand to SEQ ID NO: 1030944
uucacuagcggcuucucug

SEQ ID NO: 1030946 - RNA, 19 nt, Artificial Sequence
  Description of Artificial Sequence: Synthetic oligonucleotide
  Sense strand starting at position 2193 of SEQ ID NO: 914790
auggaaagauuauaguaag

SEQ ID NO: 1030947 - RNA, 19 nt, Artificial Sequence
  Description of Artificial Sequence: Synthetic oligonucleotide
  Antisense strand to SEQ ID NO: 1030946
cuuacuauaaucuuuccau

SEQ ID NO: 1030948 - RNA, 19 nt, Artificial Sequence
  Description of Artificial Sequence: Synthetic oligonucleotide
  Sense strand starting at position 2196 of SEQ ID NO: 914790
gaaagauuauaguaagaag

SEQ ID NO: 1030949 - RNA, 19 nt, Artificial Sequence
  Description of Artificial Sequence: Synthetic oligonucleotide
  Antisense strand to SEQ ID NO: 1030948
cuucuuacuauaaucuuuc

SEQ ID NO: 1030950 - RNA, 19 nt, Artificial Sequence
  Description of Artificial Sequence: Synthetic oligonucleotide
  Sense strand starting at position 2620 of SEQ ID NO: 914790
auuguuaagcgugcuguca

SEQ ID NO: 1030951 - RNA, 19 nt, Artificial Sequence
  Description of Artificial Sequence: Synthetic oligonucleotide
  Antisense strand to SEQ ID NO: 1030950
ugacagcacgcuuaacaau

SEQ ID NO: 1030952 - RNA, 19 nt, Artificial Sequence
  Description of Artificial Sequence: Synthetic oligonucleotide
  Sense strand starting at position 2621 of SEQ ID NO: 914790
uuguuaagcgugcugucau

SEQ ID NO: 1030953 - RNA, 19 nt, Artificial Sequence
  Description of Artificial Sequence: Synthetic oligonucleotide
  Antisense strand to SEQ ID NO: 1030952
augacagcacgcuuaacaa

SEQ ID NO: 1030954 - RNA, 19 nt, Artificial Sequence
  Description of Artificial Sequence: Synthetic oligonucleotide
  Sense strand starting at position 2633 of SEQ ID NO: 914790
cugucauuguugccauaaa

SEQ ID NO: 1030955 - RNA, 19 nt, Artificial Sequence
  Description of Artificial Sequence: Synthetic oligonucleotide
  Antisense strand to SEQ ID NO: 1030954
uuuauggcaacaaugacag

SEQ ID NO: 1030956 - RNA, 19 nt, Artificial Sequence
  Description of Artificial Sequence: Synthetic oligonucleotide
  Sense strand starting at position 2715 of SEQ ID NO: 914790
ggguuacacucacucauag

SEQ ID NO: 1030957 - RNA, 19 nt, Artificial Sequence
  Description of Artificial Sequence: Synthetic oligonucleotide
  Antisense strand to SEQ ID NO: 1030956
cuaugagugaguguaaccc

SEQ ID NO: 1030958 - RNA, 19 nt, Artificial Sequence
  Description of Artificial Sequence: Synthetic oligonucleotide
  Sense strand starting at position 2761 of SEQ ID NO: 914790
ccagcugagcacuaaacau

SEQ ID NO: 1030959 - RNA, 19 nt, Artificial Sequence
  Description of Artificial Sequence: Synthetic oligonucleotide
  Antisense strand to SEQ ID NO: 1030958
auguuuagugcucagcugg

SEQ ID NO: 1030960 - RNA, 19 nt, Artificial Sequence
  Description of Artificial Sequence: Synthetic oligonucleotide
  Sense strand starting at position 2851 of SEQ ID NO: 914790
aucagagcuguauggugaa

SEQ ID NO: 1030961 - RNA, 19 nt, Artificial Sequence
  Description of Artificial Sequence: Synthetic oligonucleotide
  Antisense strand to SEQ ID NO: 1030960
uucaccauacagcucugau

SEQ ID NO: 1030962 - RNA, 19 nt, Artificial Sequence
  Description of Artificial Sequence: Synthetic oligonucleotide
  Sense strand starting at position 3029 of SEQ ID NO: 914790
gugugaaguccagauagag

SEQ ID NO: 1030963 - RNA, 19 nt, Artificial Sequence
  Description of Artificial Sequence: Synthetic oligonucleotide
  Antisense strand to SEQ ID NO: 1030962
cucuaucuggacuucacac

SEQ ID NO: 1030964 - RNA, 19 nt, Artificial Sequence
  Description of Artificial Sequence: Synthetic oligonucleotide
  Sense strand starting at position 3051 of SEQ ID NO: 914790
ugggaacuacguuagcaaa

SEQ ID NO: 1030965 - RNA, 19 nt, Artificial Sequence
  Description of Artificial Sequence: Synthetic oligonucleotide
  Antisense strand to SEQ ID NO: 1030964
uuugcuaacguaguuccca

SEQ ID NO: 1030966 - RNA, 19 nt, Artificial Sequence
  Description of Artificial Sequence: Synthetic oligonucleotide
  Sense strand starting at position 3053 of SEQ ID NO: 914790
ggaacuacguuagcaaagu

SEQ ID NO: 1030967 - RNA, 19 nt, Artificial Sequence
  Description of Artificial Sequence: Synthetic oligonucleotide
  Antisense strand to SEQ ID NO: 1030966
acuuugcuaacguaguucc

SEQ ID NO: 1030968 - RNA, 19 nt, Artificial Sequence
  Description of Artificial Sequence: Synthetic oligonucleotide
  Sense strand starting at position 3078 of SEQ ID NO: 914790
ggagaaagaucacaaggua

SEQ ID NO: 1030969 - RNA, 19 nt, Artificial Sequence
  Description of Artificial Sequence: Synthetic oligonucleotide
  Antisense strand to SEQ ID NO: 1030968
uaccuugugaucuuucucc

SEQ ID NO: 1030970 - RNA, 19 nt, Artificial Sequence
  Description of Artificial Sequence: Synthetic oligonucleotide
  Sense strand starting at position 3086 of SEQ ID NO: 914790
aucacaagguaaguuuaaa

SEQ ID NO: 1030971 - RNA, 19 nt, Artificial Sequence
  Description of Artificial Sequence: Synthetic oligonucleotide
  Antisense strand to SEQ ID NO: 1030970
uuuaaacuuaccuugugau

SEQ ID NO: 1030972 - RNA, 19 nt, Artificial Sequence
  Description of Artificial Sequence: Synthetic oligonucleotide
  Sense strand starting at position 3305 of SEQ ID NO: 914790
cuuguaacucaaugugcaa

SEQ ID NO: 1030973 - RNA, 19 nt, Artificial Sequence
  Description of Artificial Sequence: Synthetic oligonucleotide
  Antisense strand to SEQ ID NO: 1030972
uugcacauugaguuacaag

SEQ ID NO: 1030974 - RNA, 19 nt, Artificial Sequence
  Description of Artificial Sequence: Synthetic oligonucleotide
  Sense strand starting at position 49 of SEQ ID NO: 914791
guaaauuacuguguaauug

SEQ ID NO: 1030975 - RNA, 19 nt, Artificial Sequence
  Description of Artificial Sequence: Synthetic oligonucleotide
  Antisense strand to SEQ ID NO: 1030974
caauuacacaguaauuuac

SEQ ID NO: 1030976 - RNA, 19 nt, Artificial Sequence
  Description of Artificial Sequence: Synthetic oligonucleotide
  Sense strand starting at position 53 of SEQ ID NO: 914791
auuacuguguaauugucaa

SEQ ID NO: 1030977 - RNA, 19 nt, Artificial Sequence
  Description of Artificial Sequence: Synthetic oligonucleotide
  Antisense strand to SEQ ID NO: 1030976
uugacaauuacacaguaau

SEQ ID NO: 1030978 - RNA, 19 nt, Artificial Sequence
  Description of Artificial Sequence: Synthetic oligonucleotide
  Sense strand starting at position 138 of SEQ ID NO: 914791
ggucuuaacccugagcuga

SEQ ID NO: 1030979 - RNA, 19 nt, Artificial Sequence
  Description of Artificial Sequence: Synthetic oligonucleotide
  Antisense strand to SEQ ID NO: 1030978
ucagcucaggguuaagacc

SEQ ID NO: 1030980 - RNA, 19 nt, Artificial Sequence
  Description of Artificial Sequence: Synthetic oligonucleotide
  Sense strand starting at position 214 of SEQ ID NO: 914791
uuaacuacuccggaaugca

SEQ ID NO: 1030981 - RNA, 19 nt, Artificial Sequence
  Description of Artificial Sequence: Synthetic oligonucleotide
  Antisense strand to SEQ ID NO: 1030980
ugcauuccggaguaguuaa

SEQ ID NO: 1030982 - RNA, 19 nt, Artificial Sequence
  Description of Artificial Sequence: Synthetic oligonucleotide
  Sense strand starting at position 446 of SEQ ID NO: 914791
caaucagacguuuggcauc

SEQ ID NO: 1030983 - RNA, 19 nt, Artificial Sequence
  Description of Artificial Sequence: Synthetic oligonucleotide
  Antisense strand to SEQ ID NO: 1030982
gaugccaaacgucugauug

SEQ ID NO: 1030984 - RNA, 19 nt, Artificial Sequence
  Description of Artificial Sequence: Synthetic oligonucleotide
  Sense strand starting at position 548 of SEQ ID NO: 914791
aguucauagguaggugaau

SEQ ID NO: 1030985 - RNA, 19 nt, Artificial Sequence
  Description of Artificial Sequence: Synthetic oligonucleotide
  Antisense strand to SEQ ID NO: 1030984
auucaccuaccuaugaacu

SEQ ID NO: 1030986 - RNA, 19 nt, Artificial Sequence
  Description of Artificial Sequence: Synthetic oligonucleotide
  Sense strand starting at position 549 of SEQ ID NO: 914791
guucauagguaggugaauu

SEQ ID NO: 1030987 - RNA, 19 nt, Artificial Sequence
  Description of Artificial Sequence: Synthetic oligonucleotide
  Antisense strand to SEQ ID NO: 1030986
aauucaccuaccuaugaac

SEQ ID NO: 1030988 - RNA, 19 nt, Artificial Sequence
  Description of Artificial Sequence: Synthetic oligonucleotide
  Sense strand starting at position 604 of SEQ ID NO: 914791
ccuccuacguuauccagau

SEQ ID NO: 1030989 - RNA, 19 nt, Artificial Sequence
  Description of Artificial Sequence: Synthetic oligonucleotide
  Antisense strand to SEQ ID NO: 1030988
aucuggauaacguaggagg

SEQ ID NO: 1030990 - RNA, 19 nt, Artificial Sequence
  Description of Artificial Sequence: Synthetic oligonucleotide
  Sense strand starting at position 605 of SEQ ID NO: 914791
cuccuacguuauccagauu

SEQ ID NO: 1030991 - RNA, 19 nt, Artificial Sequence
  Description of Artificial Sequence: Synthetic oligonucleotide
  Antisense strand to SEQ ID NO: 1030990
aaucuggauaacguaggag

SEQ ID NO: 1030992 - RNA, 19 nt, Artificial Sequence
  Description of Artificial Sequence: Synthetic oligonucleotide
  Sense strand starting at position 628 of SEQ ID NO: 914791
ccugaaagguuucuacaac

SEQ ID NO: 1030993 - RNA, 19 nt, Artificial Sequence
  Description of Artificial Sequence: Synthetic oligonucleotide
  Antisense strand to SEQ ID NO: 1030992
guuguagaaaccuuucagg

SEQ ID NO: 1030994 - RNA, 19 nt, Artificial Sequence
  Description of Artificial Sequence: Synthetic oligonucleotide
  Sense strand starting at position 747 of SEQ ID NO: 914791
uguuauauuuguucuguca

SEQ ID NO: 1030995 - RNA, 19 nt, Artificial Sequence
  Description of Artificial Sequence: Synthetic oligonucleotide
  Antisense strand to SEQ ID NO: 1030994
ugacagaacaaauauaaca

SEQ ID NO: 1030996 - RNA, 19 nt, Artificial Sequence
  Description of Artificial Sequence: Synthetic oligonucleotide
  Sense strand starting at position 870 of SEQ ID NO: 914791
gcuuggagugguucgguuu

SEQ ID NO: 1030997 - RNA, 19 nt, Artificial Sequence
  Description of Artificial Sequence: Synthetic oligonucleotide
  Antisense strand to SEQ ID NO: 1030996
aaaccgaaccacuccaagc

SEQ ID NO: 1030998 - RNA, 19 nt, Artificial Sequence
  Description of Artificial Sequence: Synthetic oligonucleotide
  Sense strand starting at position 881 of SEQ ID NO: 914791
uucgguuucccugaucauu

SEQ ID NO: 1030999 - RNA, 19 nt, Artificial Sequence
  Description of Artificial Sequence: Synthetic oligonucleotide
  Antisense strand to SEQ ID NO: 1030998
aaugaucagggaaaccgaa

SEQ ID NO: 1031000 - RNA, 19 nt, Artificial Sequence
  Description of Artificial Sequence: Synthetic oligonucleotide
  Sense strand starting at position 1320 of SEQ ID NO: 914791
uuaacuacuccggaaugua

SEQ ID NO: 1031001 - RNA, 19 nt, Artificial Sequence
  Description of Artificial Sequence: Synthetic oligonucleotide
  Antisense strand to SEQ ID NO: 1031000
uacauuccggaguaguuaa

SEQ ID NO: 1031002 - RNA, 19 nt, Artificial Sequence
  Description of Artificial Sequence: Synthetic oligonucleotide
  Sense strand starting at position 2445 of SEQ ID NO: 914791
ccggguuucgcgaaucugu

SEQ ID NO: 1031003 - RNA, 19 nt, Artificial Sequence
  Description of Artificial Sequence: Synthetic oligonucleotide
  Antisense strand to SEQ ID NO: 1031002
acagauucgcgaaacccgg

SEQ ID NO: 1031004 - RNA, 19 nt, Artificial Sequence
  Description of Artificial Sequence: Synthetic oligonucleotide
  Sense strand starting at position 2448 of SEQ ID NO: 914791
gguuucgcgaaucuguauu

SEQ ID NO: 1031005 - RNA, 19 nt, Artificial Sequence
  Description of Artificial Sequence: Synthetic oligonucleotide
  Antisense strand to SEQ ID NO: 1031004
aauacagauucgcgaaacc

SEQ ID NO: 1031006 - RNA, 19 nt, Artificial Sequence
  Description of Artificial Sequence: Synthetic oligonucleotide
  Sense strand starting at position 2804 of SEQ ID NO: 914791
agaacagauucggcuucuu

SEQ ID NO: 1031007 - RNA, 19 nt, Artificial Sequence
  Description of Artificial Sequence: Synthetic oligonucleotide
  Antisense strand to SEQ ID NO: 1031006
aagaagccgaaucuguucu

SEQ ID NO: 1031008 - RNA, 19 nt, Artificial Sequence
  Description of Artificial Sequence: Synthetic oligonucleotide
  Sense strand starting at position 2896 of SEQ ID NO: 914791
ggcgaguguguucuugguu

SEQ ID NO: 1031009 - RNA, 19 nt, Artificial Sequence
  Description of Artificial Sequence: Synthetic oligonucleotide
  Antisense strand to SEQ ID NO: 1031008
aaccaagaacacacucgcc

SEQ ID NO: 1031010 - RNA, 19 nt, Artificial Sequence
  Description of Artificial Sequence: Synthetic oligonucleotide
  Sense strand starting at position 2902 of SEQ ID NO: 914791
uguguucuugguuagguga

SEQ ID NO: 1031011 - RNA, 19 nt, Artificial Sequence
  Description of Artificial Sequence: Synthetic oligonucleotide
  Antisense strand to SEQ ID NO: 1031010
ucaccuaaccaagaacaca

SEQ ID NO: 1031012 - RNA, 19 nt, Artificial Sequence
  Description of Artificial Sequence: Synthetic oligonucleotide
  Sense strand starting at position 2903 of SEQ ID NO: 914791
guguucuugguuaggugaa

SEQ ID NO: 1031013 - RNA, 19 nt, Artificial Sequence
  Description of Artificial Sequence: Synthetic oligonucleotide
  Antisense strand to SEQ ID NO: 1031012
uucaccuaaccaagaacac

SEQ ID NO: 1031014 - RNA, 19 nt, Artificial Sequence
  Description of Artificial Sequence: Synthetic oligonucleotide
  Sense strand starting at position 2913 of SEQ ID NO: 914791
uuaggugaaccaggcauua

SEQ ID NO: 1031015 - RNA, 19 nt, Artificial Sequence
  Description of Artificial Sequence: Synthetic oligonucleotide
  Antisense strand to SEQ ID NO: 1031014
uaaugccugguucaccuaa

SEQ ID NO: 1031016 - RNA, 19 nt, Artificial Sequence
  Description of Artificial Sequence: Synthetic oligonucleotide
  Sense strand starting at position 2954 of SEQ ID NO: 914791
gugcguccuugauuuagac

SEQ ID NO: 1031017 - RNA, 19 nt, Artificial Sequence
  Description of Artificial Sequence: Synthetic oligonucleotide
  Antisense strand to SEQ ID NO: 1031016
gucuaaaucaaggacgcac

SEQ ID NO: 1031018 - RNA, 19 nt, Artificial Sequence
  Description of Artificial Sequence: Synthetic oligonucleotide
  Sense strand starting at position 3005 of SEQ ID NO: 914791
gugauaucuuuccugguuu

SEQ ID NO: 1031019 - RNA, 19 nt, Artificial Sequence
  Description of Artificial Sequence: Synthetic oligonucleotide
  Antisense strand to SEQ ID NO: 1031018
aaaccaggaaagauaucac

SEQ ID NO: 1031020 - RNA, 19 nt, Artificial Sequence
  Description of Artificial Sequence: Synthetic oligonucleotide
  Sense strand starting at position 3007 of SEQ ID NO: 914791
gauaucuuuccugguuuga

SEQ ID NO: 1031021 - RNA, 19 nt, Artificial Sequence
  Description of Artificial Sequence: Synthetic oligonucleotide
  Antisense strand to SEQ ID NO: 1031020
ucaaaccaggaaagauauc

SEQ ID NO: 1031022 - RNA, 19 nt, Artificial Sequence
  Description of Artificial Sequence: Synthetic oligonucleotide
  Sense strand starting at position 3313 of SEQ ID NO: 914791
auuagaaggucucuagacu

SEQ ID NO: 1031023 - RNA, 19 nt, Artificial Sequence
  Description of Artificial Sequence: Synthetic oligonucleotide
  Antisense strand to SEQ ID NO: 1031022
agucuagagaccuucuaau

SEQ ID NO: 1031024 - RNA, 19 nt, Artificial Sequence
  Description of Artificial Sequence: Synthetic oligonucleotide
  Sense strand starting at position 3319 of SEQ ID NO: 914791
aggucucuagacugcgaaa

SEQ ID NO: 1031025 - RNA, 19 nt, Artificial Sequence
  Description of Artificial Sequence: Synthetic oligonucleotide
  Antisense strand to SEQ ID NO: 1031024
uuucgcagucuagagaccu

SEQ ID NO: 1031026 - RNA, 19 nt, Artificial Sequence
  Description of Artificial Sequence: Synthetic oligonucleotide
  Sense strand starting at position 3359 of SEQ ID NO: 914791
acaucuuguccuugucaaa

SEQ ID NO: 1031027 - RNA, 19 nt, Artificial Sequence
  Description of Artificial Sequence: Synthetic oligonucleotide
  Antisense strand to SEQ ID NO: 1031026
uuugacaaggacaagaugu

SEQ ID NO: 1031028 - RNA, 19 nt, Artificial Sequence
  Description of Artificial Sequence: Synthetic oligonucleotide
  Sense strand starting at position 3442 of SEQ ID NO: 914791
ggaggaauguuggcuuaga

SEQ ID NO: 1031029 - RNA, 19 nt, Artificial Sequence
  Description of Artificial Sequence: Synthetic oligonucleotide
  Antisense strand to SEQ ID NO: 1031028
ucuaagccaacauuccucc

SEQ ID NO: 1031030 - RNA, 19 nt, Artificial Sequence
  Description of Artificial Sequence: Synthetic oligonucleotide
  Sense strand starting at position 3443 of SEQ ID NO: 914791
gaggaauguuggcuuagag

SEQ ID NO: 1031031 - RNA, 19 nt, Artificial Sequence
  Description of Artificial Sequence: Synthetic oligonucleotide
  Antisense strand to SEQ ID NO: 1031030
cucuaagccaacauuccuc

SEQ ID NO: 1031032 - RNA, 19 nt, Artificial Sequence
  Description of Artificial Sequence: Synthetic oligonucleotide
  Sense strand starting at position 3467 of SEQ ID NO: 914791
ggagauauauucuuagccu

SEQ ID NO: 1031033 - RNA, 19 nt, Artificial Sequence
  Description of Artificial Sequence: Synthetic oligonucleotide
  Antisense strand to SEQ ID NO: 1031032
aggcuaagaauauaucucc

SEQ ID NO: 1031034 - RNA, 19 nt, Artificial Sequence
  Description of Artificial Sequence: Synthetic oligonucleotide
  Sense strand starting at position 3570 of SEQ ID NO: 914791
uucucuaagguguguauua

SEQ ID NO: 1031035 - RNA, 19 nt, Artificial Sequence
  Description of Artificial Sequence: Synthetic oligonucleotide
  Antisense strand to SEQ ID NO: 1031034
uaauacacaccuuagagaa

SEQ ID NO: 1031036 - RNA, 19 nt, Artificial Sequence
  Description of Artificial Sequence: Synthetic oligonucleotide
  Sense strand starting at position 3624 of SEQ ID NO: 914791
gauaaucauuugugggaag

SEQ ID NO: 1031037 - RNA, 19 nt, Artificial Sequence
  Description of Artificial Sequence: Synthetic oligonucleotide
  Antisense strand to SEQ ID NO: 1031036
cuucccacaaaugauuauc

SEQ ID NO: 1031038 - RNA, 19 nt, Artificial Sequence
  Description of Artificial Sequence: Synthetic oligonucleotide
  Sense strand starting at position 3627 of SEQ ID NO: 914791
aaucauuugugggaagaua

SEQ ID NO: 1031039 - RNA, 19 nt, Artificial Sequence
  Description of Artificial Sequence: Synthetic oligonucleotide
  Antisense strand to SEQ ID NO: 1031038
uaucuucccacaaaugauu

SEQ ID NO: 1031040 - RNA, 19 nt, Artificial Sequence
  Description of Artificial Sequence: Synthetic oligonucleotide
  Sense strand starting at position 3709 of SEQ ID NO: 914791
uuguuaguuacgcuacagu

SEQ ID NO: 1031041 - RNA, 19 nt, Artificial Sequence
  Description of Artificial Sequence: Synthetic oligonucleotide
  Antisense strand to SEQ ID NO: 1031040
acuguagcguaacuaacaa

SEQ ID NO: 1031042 - RNA, 19 nt, Artificial Sequence
  Description of Artificial Sequence: Synthetic oligonucleotide
  Sense strand starting at position 3769 of SEQ ID NO: 914791
agaguuaagauauguacug

SEQ ID NO: 1031043 - RNA, 19 nt, Artificial Sequence
  Description of Artificial Sequence: Synthetic oligonucleotide
  Antisense strand to SEQ ID NO: 1031042
caguacauaucuuaacucu

SEQ ID NO: 1031044 - RNA, 19 nt, Artificial Sequence
  Description of Artificial Sequence: Synthetic oligonucleotide
  Sense strand starting at position 3770 of SEQ ID NO: 914791
gaguuaagauauguacugu

SEQ ID NO: 1031045 - RNA, 19 nt, Artificial Sequence
  Description of Artificial Sequence: Synthetic oligonucleotide
  Antisense strand to SEQ ID NO: 1031044
acaguacauaucuuaacuc

SEQ ID NO: 1031046 - RNA, 19 nt, Artificial Sequence
  Description of Artificial Sequence: Synthetic oligonucleotide
  Sense strand starting at position 3776 of SEQ ID NO: 914791
agauauguacugugagcca

SEQ ID NO: 1031047 - RNA, 19 nt, Artificial Sequence
  Description of Artificial Sequence: Synthetic oligonucleotide
  Antisense strand to SEQ ID NO: 1031046
uggcucacaguacauaucu

SEQ ID NO: 1031048 - RNA, 19 nt, Artificial Sequence
  Description of Artificial Sequence: Synthetic oligonucleotide
  Sense strand starting at position 3838 of SEQ ID NO: 914791
cgcuaacugcuaguaaugu

SEQ ID NO: 1031049 - RNA, 19 nt, Artificial Sequence
  Description of Artificial Sequence: Synthetic oligonucleotide
  Antisense strand to SEQ ID NO: 1031048
acauuacuagcaguuagcg

SEQ ID NO: 1031050 - RNA, 19 nt, Artificial Sequence
  Description of Artificial Sequence: Synthetic oligonucleotide
  Sense strand starting at position 3847 of SEQ ID NO: 914791
cuaguaauguuaucuggaa

SEQ ID NO: 1031051 - RNA, 19 nt, Artificial Sequence
  Description of Artificial Sequence: Synthetic oligonucleotide
  Antisense strand to SEQ ID NO: 1031050
uuccagauaacauuacuag

SEQ ID NO: 1031052 - RNA, 19 nt, Artificial Sequence
  Description of Artificial Sequence: Synthetic oligonucleotide
  Sense strand starting at position 3885 of SEQ ID NO: 914791
gugccuagaguuuaacaag

SEQ ID NO: 1031053 - RNA, 19 nt, Artificial Sequence
  Description of Artificial Sequence: Synthetic oligonucleotide
  Antisense strand to SEQ ID NO: 1031052
cuuguuaaacucuaggcac

SEQ ID NO: 1031054 - RNA, 19 nt, Artificial Sequence
  Description of Artificial Sequence: Synthetic oligonucleotide
  Sense strand starting at position 50 of SEQ ID NO: 914792
gcuggauguucucuugauu

SEQ ID NO: 1031055 - RNA, 19 nt, Artificial Sequence
  Description of Artificial Sequence: Synthetic oligonucleotide
  Antisense strand to SEQ ID NO: 1031054
aaucaagagaacauccagc

SEQ ID NO: 1031056 - RNA, 19 nt, Artificial Sequence
  Description of Artificial Sequence: Synthetic oligonucleotide
  Sense strand starting at position 53 of SEQ ID NO: 914792
ggauguucucuugauugca

SEQ ID NO: 1031057 - RNA, 19 nt, Artificial Sequence
  Description of Artificial Sequence: Synthetic oligonucleotide
  Antisense strand to SEQ ID NO: 1031056
ugcaaucaagagaacaucc

SEQ ID NO: 1031058 - RNA, 19 nt, Artificial Sequence
  Description of Artificial Sequence: Synthetic oligonucleotide
  Sense strand starting at position 55 of SEQ ID NO: 914792
auguucucuugauugcaga

SEQ ID NO: 1031059 - RNA, 19 nt, Artificial Sequence
  Description of Artificial Sequence: Synthetic oligonucleotide
  Antisense strand to SEQ ID NO: 1031058
ucugcaaucaagagaacau

SEQ ID NO: 1031060 - RNA, 19 nt, Artificial Sequence
  Description of Artificial Sequence: Synthetic oligonucleotide
  Sense strand starting at position 92 of SEQ ID NO: 914792
accucaggcuuuccugaau

SEQ ID NO: 1031061 - RNA, 19 nt, Artificial Sequence
  Description of Artificial Sequence: Synthetic oligonucleotide
  Antisense strand to SEQ ID NO: 1031060
auucaggaaagccugaggu

SEQ ID NO: 1031062 - RNA, 19 nt, Artificial Sequence
  Description of Artificial Sequence: Synthetic oligonucleotide
  Sense strand starting at position 95 of SEQ ID NO: 914792
ucaggcuuuccugaauaca

SEQ ID NO: 1031063 - RNA, 19 nt, Artificial Sequence
  Description of Artificial Sequence: Synthetic oligonucleotide
  Antisense strand to SEQ ID NO: 1031062
uguauucaggaaagccuga

SEQ ID NO: 1031064 - RNA, 19 nt, Artificial Sequence
  Description of Artificial Sequence: Synthetic oligonucleotide
  Sense strand starting at position 149 of SEQ ID NO: 914792
cgugauaauuggagaggcu

SEQ ID NO: 1031065 - RNA, 19 nt, Artificial Sequence
  Description of Artificial Sequence: Synthetic oligonucleotide
  Antisense strand to SEQ ID NO: 1031064
agccucuccaauuaucacg

SEQ ID NO: 1031066 - RNA, 19 nt, Artificial Sequence
  Description of Artificial Sequence: Synthetic oligonucleotide
  Sense strand starting at position 150 of SEQ ID NO: 914792
gugauaauuggagaggcuu

SEQ ID NO: 1031067 - RNA, 19 nt, Artificial Sequence
  Description of Artificial Sequence: Synthetic oligonucleotide
  Antisense strand to SEQ ID NO: 1031066
aagccucuccaauuaucac

SEQ ID NO: 1031068 - RNA, 19 nt, Artificial Sequence
  Description of Artificial Sequence: Synthetic oligonucleotide
  Sense strand starting at position 227 of SEQ ID NO: 914792
gacagaccuuaguacauga

SEQ ID NO: 1031069 - RNA, 19 nt, Artificial Sequence
  Description of Artificial Sequence: Synthetic oligonucleotide
  Antisense strand to SEQ ID NO: 1031068
ucauguacuaaggucuguc

SEQ ID NO: 1031070 - RNA, 19 nt, Artificial Sequence
  Description of Artificial Sequence: Synthetic oligonucleotide
  Sense strand starting at position 386 of SEQ ID NO: 914792
ggcuguuuggauggcauau

SEQ ID NO: 1031071 - RNA, 19 nt, Artificial Sequence
  Description of Artificial Sequence: Synthetic oligonucleotide
  Antisense strand to SEQ ID NO: 1031070
auaugccauccaaacagcc

SEQ ID NO: 1031072 - RNA, 19 nt, Artificial Sequence
  Description of Artificial Sequence: Synthetic oligonucleotide
  Sense strand starting at position 463 of SEQ ID NO: 914792
ggaauuugaucuggagcca

SEQ ID NO: 1031073 - RNA, 19 nt, Artificial Sequence
  Description of Artificial Sequence: Synthetic oligonucleotide
  Antisense strand to SEQ ID NO: 1031072
uggcuccagaucaaauucc

SEQ ID NO: 1031074 - RNA, 19 nt, Artificial Sequence
  Description of Artificial Sequence: Synthetic oligonucleotide
  Sense strand starting at position 484 of SEQ ID NO: 914792
gucagcuuccgggugugau

SEQ ID NO: 1031075 - RNA, 19 nt, Artificial Sequence
  Description of Artificial Sequence: Synthetic oligonucleotide
  Antisense strand to SEQ ID NO: 1031074
aucacacccggaagcugac

SEQ ID NO: 1031076 - RNA, 19 nt, Artificial Sequence
  Description of Artificial Sequence: Synthetic oligonucleotide
  Sense strand starting at position 496 of SEQ ID NO: 914792
gugugaucucagcauccaa

SEQ ID NO: 1031077 - RNA, 19 nt, Artificial Sequence
  Description of Artificial Sequence: Synthetic oligonucleotide
  Antisense strand to SEQ ID NO: 1031076
uuggaugcugagaucacac

SEQ ID NO: 1031078 - RNA, 19 nt, Artificial Sequence
  Description of Artificial Sequence: Synthetic oligonucleotide
  Sense strand starting at position 534 of SEQ ID NO: 914792
ugacguugggcacaucaaa

SEQ ID NO: 1031079 - RNA, 19 nt, Artificial Sequence
  Description of Artificial Sequence: Synthetic oligonucleotide
  Antisense strand to SEQ ID NO: 1031078
uuugaugugcccaacguca

SEQ ID NO: 1031080 - RNA, 19 nt, Artificial Sequence
  Description of Artificial Sequence: Synthetic oligonucleotide
  Sense strand starting at position 1626 of SEQ ID NO: 914792
ucuugaggucagcaggaau

SEQ ID NO: 1031081 - RNA, 19 nt, Artificial Sequence
  Description of Artificial Sequence: Synthetic oligonucleotide
  Antisense strand to SEQ ID NO: 1031080
auuccugcugaccucaaga

SEQ ID NO: 1031082 - RNA, 19 nt, Artificial Sequence
  Description of Artificial Sequence: Synthetic oligonucleotide
  Sense strand starting at position 2405 of SEQ ID NO: 914792
gggucuuucugcccagaug

SEQ ID NO: 1031083 - RNA, 19 nt, Artificial Sequence
  Description of Artificial Sequence: Synthetic oligonucleotide
  Antisense strand to SEQ ID NO: 1031082
caucugggcagaaagaccc

SEQ ID NO: 1031084 - RNA, 19 nt, Artificial Sequence
  Description of Artificial Sequence: Synthetic oligonucleotide
  Sense strand starting at position 2406 of SEQ ID NO: 914792
ggucuuucugcccagaugu

SEQ ID NO: 1031085 - RNA, 19 nt, Artificial Sequence
  Description of Artificial Sequence: Synthetic oligonucleotide
  Antisense strand to SEQ ID NO: 1031084
acaucugggcagaaagacc

SEQ ID NO: 1031086 - RNA, 19 nt, Artificial Sequence
  Description of Artificial Sequence: Synthetic oligonucleotide
  Sense strand starting at position 2423 of SEQ ID NO: 914792
gugggauccucuccuaaac

SEQ ID NO: 1031087 - RNA, 19 nt, Artificial Sequence
  Description of Artificial Sequence: Synthetic oligonucleotide
  Antisense strand to SEQ ID NO: 1031086
guuuaggagaggaucccac

SEQ ID NO: 1031088 - RNA, 19 nt, Artificial Sequence
  Description of Artificial Sequence: Synthetic oligonucleotide
  Sense strand starting at position 2479 of SEQ ID NO: 914792
ugacauguugaccaucacu

SEQ ID NO: 1031089 - RNA, 19 nt, Artificial Sequence
  Description of Artificial Sequence: Synthetic oligonucleotide
  Antisense strand to SEQ ID NO: 1031088
agugauggucaacauguca

SEQ ID NO: 1031090 - RNA, 19 nt, Artificial Sequence
  Description of Artificial Sequence: Synthetic oligonucleotide
  Sense strand starting at position 2498 of SEQ ID NO: 914792
gcucucuuccaaggacuca

SEQ ID NO: 1031091 - RNA, 19 nt, Artificial Sequence
  Description of Artificial Sequence: Synthetic oligonucleotide
  Antisense strand to SEQ ID NO: 1031090
ugaguccuuggaagagagc

SEQ ID NO: 1031092 - RNA, 19 nt, Artificial Sequence
  Description of Artificial Sequence: Synthetic oligonucleotide
  Sense strand starting at position 2536 of SEQ ID NO: 914792
gggcucagccuaggaagau

SEQ ID NO: 1031093 - RNA, 19 nt, Artificial Sequence
  Description of Artificial Sequence: Synthetic oligonucleotide
  Antisense strand to SEQ ID NO: 1031092
aucuuccuaggcugagccc

SEQ ID NO: 1031094 - RNA, 19 nt, Artificial Sequence
  Description of Artificial Sequence: Synthetic oligonucleotide
  Sense strand starting at position 2577 of SEQ ID NO: 914792
gauaguugcuggccugauu

SEQ ID NO: 1031095 - RNA, 19 nt, Artificial Sequence
  Description of Artificial Sequence: Synthetic oligonucleotide
  Antisense strand to SEQ ID NO: 1031094
aaucaggccagcaacuauc

SEQ ID NO: 1031096 - RNA, 19 nt, Artificial Sequence
  Description of Artificial Sequence: Synthetic oligonucleotide
  Sense strand starting at position 2677 of SEQ ID NO: 914792
ugggauuccugacucugua

SEQ ID NO: 1031097 - RNA, 19 nt, Artificial Sequence
  Description of Artificial Sequence: Synthetic oligonucleotide
  Antisense strand to SEQ ID NO: 1031096
uacagagucaggaauccca

SEQ ID NO: 1031098 - RNA, 19 nt, Artificial Sequence
  Description of Artificial Sequence: Synthetic oligonucleotide
  Sense strand starting at position 2782 of SEQ ID NO: 914792
ggcucagacguguuugugu

SEQ ID NO: 1031099 - RNA, 19 nt, Artificial Sequence
  Description of Artificial Sequence: Synthetic oligonucleotide
  Antisense strand to SEQ ID NO: 1031098
acacaaacacgucugagcc

SEQ ID NO: 1031100 - RNA, 19 nt, Artificial Sequence
  Description of Artificial Sequence: Synthetic oligonucleotide
  Sense strand starting at position 2807 of SEQ ID NO: 914792
uuucuuagcucagugagua

SEQ ID NO: 1031101 - RNA, 19 nt, Artificial Sequence
  Description of Artificial Sequence: Synthetic oligonucleotide
  Antisense strand to SEQ ID NO: 1031100
uacucacugagcuaagaaa

SEQ ID NO: 1031102 - RNA, 19 nt, Artificial Sequence
  Description of Artificial Sequence: Synthetic oligonucleotide
  Sense strand starting at position 2808 of SEQ ID NO: 914792
uucuuagcucagugaguac

SEQ ID NO: 1031103 - RNA, 19 nt, Artificial Sequence
  Description of Artificial Sequence: Synthetic oligonucleotide
  Antisense strand to SEQ ID NO: 1031102
guacucacugagcuaagaa

SEQ ID NO: 1031104 - RNA, 19 nt, Artificial Sequence
  Description of Artificial Sequence: Synthetic oligonucleotide
  Sense strand starting at position 2817 of SEQ ID NO: 914792
cagugaguacuggguaugu

SEQ ID NO: 1031105 - RNA, 19 nt, Artificial Sequence
  Description of Artificial Sequence: Synthetic oligonucleotide
  Antisense strand to SEQ ID NO: 1031104
acauacccaguacucacug

SEQ ID NO: 1031106 - RNA, 19 nt, Artificial Sequence
  Description of Artificial Sequence: Synthetic oligonucleotide
  Sense strand starting at position 2819 of SEQ ID NO: 914792
gugaguacuggguaugugu

SEQ ID NO: 1031107 - RNA, 19 nt, Artificial Sequence
  Description of Artificial Sequence: Synthetic oligonucleotide
  Antisense strand to SEQ ID NO: 1031106
acacauacccaguacucac

SEQ ID NO: 1031108 - RNA, 19 nt, Artificial Sequence
  Description of Artificial Sequence: Synthetic oligonucleotide
  Sense strand starting at position 2821 of SEQ ID NO: 914792
gaguacuggguauguguca

SEQ ID NO: 1031109 - RNA, 19 nt, Artificial Sequence
  Description of Artificial Sequence: Synthetic oligonucleotide
  Antisense strand to SEQ ID NO: 1031108
ugacacauacccaguacuc

SEQ ID NO: 1031110 - RNA, 19 nt, Artificial Sequence
  Description of Artificial Sequence: Synthetic oligonucleotide
  Sense strand starting at position 2843 of SEQ ID NO: 914792
ugccaaaucccggaucaca

SEQ ID NO: 1031111 - RNA, 19 nt, Artificial Sequence
  Description of Artificial Sequence: Synthetic oligonucleotide
  Antisense strand to SEQ ID NO: 1031110
ugugauccgggauuuggca

SEQ ID NO: 1031112 - RNA, 19 nt, Artificial Sequence
  Description of Artificial Sequence: Synthetic oligonucleotide
  Sense strand starting at position 2876 of SEQ ID NO: 914792
gcuggugagcuaggauaau

SEQ ID NO: 1031113 - RNA, 19 nt, Artificial Sequence
  Description of Artificial Sequence: Synthetic oligonucleotide
  Antisense strand to SEQ ID NO: 1031112
auuauccuagcucaccagc

SEQ ID NO: 1031114 - RNA, 19 nt, Artificial Sequence
  Description of Artificial Sequence: Synthetic oligonucleotide
  Sense strand starting at position 3083 of SEQ ID NO: 914792
uugaccaguucuucggaga

SEQ ID NO: 1031115 - RNA, 19 nt, Artificial Sequence
  Description of Artificial Sequence: Synthetic oligonucleotide
  Antisense strand to SEQ ID NO: 1031114
ucuccgaagaacuggucaa

SEQ ID NO: 1031116 - RNA, 19 nt, Artificial Sequence
  Description of Artificial Sequence: Synthetic oligonucleotide
  Sense strand starting at position 3105 of SEQ ID NO: 914792
ccuguuggagucugaucuu

SEQ ID NO: 1031117 - RNA, 19 nt, Artificial Sequence
  Description of Artificial Sequence: Synthetic oligonucleotide
  Antisense strand to SEQ ID NO: 1031116
aagaucagacuccaacagg

SEQ ID NO: 1031118 - RNA, 19 nt, Artificial Sequence
  Description of Artificial Sequence: Synthetic oligonucleotide
  Sense strand starting at position 3201 of SEQ ID NO: 914792
uggacucucagaggugagu

SEQ ID NO: 1031119 - RNA, 19 nt, Artificial Sequence
  Description of Artificial Sequence: Synthetic oligonucleotide
  Antisense strand to SEQ ID NO: 1031118
acucaccucugagagucca

SEQ ID NO: 1031120 - RNA, 19 nt, Artificial Sequence
  Description of Artificial Sequence: Synthetic oligonucleotide
  Sense strand starting at position 3310 of SEQ ID NO: 914792
aggcacauguguguccaaa

SEQ ID NO: 1031121 - RNA, 19 nt, Artificial Sequence
  Description of Artificial Sequence: Synthetic oligonucleotide
  Antisense strand to SEQ ID NO: 1031120
uuuggacacacaugugccu

SEQ ID NO: 1031122 - RNA, 19 nt, Artificial Sequence
  Description of Artificial Sequence: Synthetic oligonucleotide
  Sense strand starting at position 3312 of SEQ ID NO: 914792
gcacauguguguccaaaug

SEQ ID NO: 1031123 - RNA, 19 nt, Artificial Sequence
  Description of Artificial Sequence: Synthetic oligonucleotide
  Antisense strand to SEQ ID NO: 1031122
cauuuggacacacaugugc

SEQ ID NO: 1031124 - RNA, 19 nt, Artificial Sequence
  Description of Artificial Sequence: Synthetic oligonucleotide
  Sense strand starting at position 3319 of SEQ ID NO: 914792
uguguccaaaugugaagaa

SEQ ID NO: 1031125 - RNA, 19 nt, Artificial Sequence
  Description of Artificial Sequence: Synthetic oligonucleotide
  Antisense strand to SEQ ID NO: 1031124
uucuucacauuuggacaca

SEQ ID NO: 1031126 - RNA, 19 nt, Artificial Sequence
  Description of Artificial Sequence: Synthetic oligonucleotide
  Sense strand starting at position 3738 of SEQ ID NO: 914792
acgcccauuuguccuaaga

SEQ ID NO: 1031127 - RNA, 19 nt, Artificial Sequence
  Description of Artificial Sequence: Synthetic oligonucleotide
  Antisense strand to SEQ ID NO: 1031126
ucuuaggacaaaugggcgu

SEQ ID NO: 1031128 - RNA, 19 nt, Artificial Sequence
  Description of Artificial Sequence: Synthetic oligonucleotide
  Sense strand starting at position 3740 of SEQ ID NO: 914792
gcccauuuguccuaagagg

SEQ ID NO: 1031129 - RNA, 19 nt, Artificial Sequence
  Description of Artificial Sequence: Synthetic oligonucleotide
  Antisense strand to SEQ ID NO: 1031128
ccucuuaggacaaaugggc

SEQ ID NO: 1031130 - RNA, 19 nt, Artificial Sequence
  Description of Artificial Sequence: Synthetic oligonucleotide
  Sense strand starting at position 3784 of SEQ ID NO: 914792
gguugacagagcugucaca

SEQ ID NO: 1031131 - RNA, 19 nt, Artificial Sequence
  Description of Artificial Sequence: Synthetic oligonucleotide
  Antisense strand to SEQ ID NO: 1031130
ugugacagcucugucaacc

SEQ ID NO: 1031132 - RNA, 19 nt, Artificial Sequence
  Description of Artificial Sequence: Synthetic oligonucleotide
  Sense strand starting at position 3940 of SEQ ID NO: 914792
agaagaggccuuugucuca

SEQ ID NO: 1031133 - RNA, 19 nt, Artificial Sequence
  Description of Artificial Sequence: Synthetic oligonucleotide
  Antisense strand to SEQ ID NO: 1031132
ugagacaaaggccucuucu

SEQ ID NO: 1031134 - RNA, 19 nt, Artificial Sequence
  Description of Artificial Sequence: Synthetic oligonucleotide
  Sense strand starting at position 96 of SEQ ID NO: 914793
ccaugaaaccggugagaac

SEQ ID NO: 1031135 - RNA, 19 nt, Artificial Sequence
  Description of Artificial Sequence: Synthetic oligonucleotide
  Antisense strand to SEQ ID NO: 1031134
guucucaccgguuucaugg

SEQ ID NO: 1031136 - RNA, 19 nt, Artificial Sequence
  Description of Artificial Sequence: Synthetic oligonucleotide
  Sense strand starting at position 119 of SEQ ID NO: 914793
cugccucagccugaggaaa

SEQ ID NO: 1031137 - RNA, 19 nt, Artificial Sequence
  Description of Artificial Sequence: Synthetic oligonucleotide
  Antisense strand to SEQ ID NO: 1031136
uuuccucaggcugaggcag

SEQ ID NO: 1031138 - RNA, 19 nt, Artificial Sequence
  Description of Artificial Sequence: Synthetic oligonucleotide
  Sense strand starting at position 196 of SEQ ID NO: 914793
aacacagaccugcgagaau

SEQ ID NO: 1031139 - RNA, 19 nt, Artificial Sequence
  Description of Artificial Sequence: Synthetic oligonucleotide
  Antisense strand to SEQ ID NO: 1031138
auucucgcaggucuguguu

SEQ ID NO: 1031140 - RNA, 19 nt, Artificial Sequence
  Description of Artificial Sequence: Synthetic oligonucleotide
  Sense strand starting at position 247 of SEQ ID NO: 914793
uugaaauguucuuucuaug

SEQ ID NO: 1031141 - RNA, 19 nt, Artificial Sequence
  Description of Artificial Sequence: Synthetic oligonucleotide
  Antisense strand to SEQ ID NO: 1031140
cauagaaagaacauuucaa

SEQ ID NO: 1031142 - RNA, 19 nt, Artificial Sequence
  Description of Artificial Sequence: Synthetic oligonucleotide
  Sense strand starting at position 296 of SEQ ID NO: 914793
gugucuugagaucacacua

SEQ ID NO: 1031143 - RNA, 19 nt, Artificial Sequence
  Description of Artificial Sequence: Synthetic oligonucleotide
  Antisense strand to SEQ ID NO: 1031142
uagugugaucucaagacac

SEQ ID NO: 1031144 - RNA, 19 nt, Artificial Sequence
  Description of Artificial Sequence: Synthetic oligonucleotide
  Sense strand starting at position 407 of SEQ ID NO: 914793
aagacagaagucugguaua

SEQ ID NO: 1031145 - RNA, 19 nt, Artificial Sequence
  Description of Artificial Sequence: Synthetic oligonucleotide
  Antisense strand to SEQ ID NO: 1031144
uauaccagacuucugucuu

SEQ ID NO: 1031146 - RNA, 19 nt, Artificial Sequence
  Description of Artificial Sequence: Synthetic oligonucleotide
  Sense strand starting at position 412 of SEQ ID NO: 914793
agaagucugguauaucauu

SEQ ID NO: 1031147 - RNA, 19 nt, Artificial Sequence
  Description of Artificial Sequence: Synthetic oligonucleotide
  Antisense strand to SEQ ID NO: 1031146
aaugauauaccagacuucu

SEQ ID NO: 1031148 - RNA, 19 nt, Artificial Sequence
  Description of Artificial Sequence: Synthetic oligonucleotide
  Sense strand starting at position 417 of SEQ ID NO: 914793
ucugguauaucauuccuau

SEQ ID NO: 1031149 - RNA, 19 nt, Artificial Sequence
  Description of Artificial Sequence: Synthetic oligonucleotide
  Antisense strand to SEQ ID NO: 1031148
auaggaaugauauaccaga

SEQ ID NO: 1031150 - RNA, 19 nt, Artificial Sequence
  Description of Artificial Sequence: Synthetic oligonucleotide
  Sense strand starting at position 778 of SEQ ID NO: 914793
aagggaauauccgauuuac

SEQ ID NO: 1031151 - RNA, 19 nt, Artificial Sequence
  Description of Artificial Sequence: Synthetic oligonucleotide
  Antisense strand to SEQ ID NO: 1031150
guaaaucggauauucccuu

SEQ ID NO: 1031152 - RNA, 19 nt, Artificial Sequence
  Description of Artificial Sequence: Synthetic oligonucleotide
  Sense strand starting at position 901 of SEQ ID NO: 914793
cugacaauauuagugugaa

SEQ ID NO: 1031153 - RNA, 19 nt, Artificial Sequence
  Description of Artificial Sequence: Synthetic oligonucleotide
  Antisense strand to SEQ ID NO: 1031152
uucacacuaauauugucag

SEQ ID NO: 1031154 - RNA, 19 nt, Artificial Sequence
  Description of Artificial Sequence: Synthetic oligonucleotide
  Sense strand starting at position 904 of SEQ ID NO: 914793
acaauauuagugugaagug

SEQ ID NO: 1031155 - RNA, 19 nt, Artificial Sequence
  Description of Artificial Sequence: Synthetic oligonucleotide
  Antisense strand to SEQ ID NO: 1031154
cacuucacacuaauauugu

SEQ ID NO: 1031156 - RNA, 19 nt, Artificial Sequence
  Description of Artificial Sequence: Synthetic oligonucleotide
  Sense strand starting at position 939 of SEQ ID NO: 914793
cagcaaaguggcugagaaa

SEQ ID NO: 1031157 - RNA, 19 nt, Artificial Sequence
  Description of Artificial Sequence: Synthetic oligonucleotide
  Antisense strand to SEQ ID NO: 1031156
uuucucagccacuuugcug

SEQ ID NO: 1031158 - RNA, 19 nt, Artificial Sequence
  Description of Artificial Sequence: Synthetic oligonucleotide
  Sense strand starting at position 972 of SEQ ID NO: 914793
cagggcugccucuagaaua

SEQ ID NO: 1031159 - RNA, 19 nt, Artificial Sequence
  Description of Artificial Sequence: Synthetic oligonucleotide
  Antisense strand to SEQ ID NO: 1031158
uauucuagaggcagcccug

SEQ ID NO: 1031160 - RNA, 19 nt, Artificial Sequence
  Description of Artificial Sequence: Synthetic oligonucleotide
  Sense strand starting at position 984 of SEQ ID NO: 914793
uagaauacagcuuguauga

SEQ ID NO: 1031161 - RNA, 19 nt, Artificial Sequence
  Description of Artificial Sequence: Synthetic oligonucleotide
  Antisense strand to SEQ ID NO: 1031160
ucauacaagcuguauucua

SEQ ID NO: 1031162 - RNA, 19 nt, Artificial Sequence
  Description of Artificial Sequence: Synthetic oligonucleotide
  Sense strand starting at position 1135 of SEQ ID NO: 914793
ggcuacaauccaggaguca

SEQ ID NO: 1031163 - RNA, 19 nt, Artificial Sequence
  Description of Artificial Sequence: Synthetic oligonucleotide
  Antisense strand to SEQ ID NO: 1031162
ugacuccuggauuguagcc

SEQ ID NO: 1031164 - RNA, 19 nt, Artificial Sequence
  Description of Artificial Sequence: Synthetic oligonucleotide
  Sense strand starting at position 1150 of SEQ ID NO: 914793
gucagacuucugggaggga

SEQ ID NO: 1031165 - RNA, 19 nt, Artificial Sequence
  Description of Artificial Sequence: Synthetic oligonucleotide
  Antisense strand to SEQ ID NO: 1031164
ucccucccagaagucugac

SEQ ID NO: 1031166 - RNA, 19 nt, Artificial Sequence
  Description of Artificial Sequence: Synthetic oligonucleotide
  Sense strand starting at position 1176 of SEQ ID NO: 914793
agaccaaucuuggccaagu

SEQ ID NO: 1031167 - RNA, 19 nt, Artificial Sequence
  Description of Artificial Sequence: Synthetic oligonucleotide
  Antisense strand to SEQ ID NO: 1031166
acuuggccaagauuggucu

SEQ ID NO: 1031168 - RNA, 19 nt, Artificial Sequence
  Description of Artificial Sequence: Synthetic oligonucleotide
  Sense strand starting at position 1177 of SEQ ID NO: 914793
gaccaaucuuggccaaguu

SEQ ID NO: 1031169 - RNA, 19 nt, Artificial Sequence
  Description of Artificial Sequence: Synthetic oligonucleotide
  Antisense strand to SEQ ID NO: 1031168
aacuuggccaagauugguc

SEQ ID NO: 1031170 - RNA, 19 nt, Artificial Sequence
  Description of Artificial Sequence: Synthetic oligonucleotide
  Sense strand starting at position 2210 of SEQ ID NO: 914793
cuaguagacuugccagacu

SEQ ID NO: 1031171 - RNA, 19 nt, Artificial Sequence
  Description of Artificial Sequence: Synthetic oligonucleotide
  Antisense strand to SEQ ID NO: 1031170
agucuggcaagucuacuag

SEQ ID NO: 1031172 - RNA, 19 nt, Artificial Sequence
  Description of Artificial Sequence: Synthetic oligonucleotide
  Sense strand starting at position 2213 of SEQ ID NO: 914793
guagacuugccagacuuga

SEQ ID NO: 1031173 - RNA, 19 nt, Artificial Sequence
  Description of Artificial Sequence: Synthetic oligonucleotide
  Antisense strand to SEQ ID NO: 1031172
ucaagucuggcaagucuac

SEQ ID NO: 1031174 - RNA, 19 nt, Artificial Sequence
  Description of Artificial Sequence: Synthetic oligonucleotide
  Sense strand starting at position 2263 of SEQ ID NO: 914793
uuguauauuggccaucauc

SEQ ID NO: 1031175 - RNA, 19 nt, Artificial Sequence
  Description of Artificial Sequence: Synthetic oligonucleotide
  Antisense strand to SEQ ID NO: 1031174
gaugauggccaauauacaa

SEQ ID NO: 1031176 - RNA, 19 nt, Artificial Sequence
  Description of Artificial Sequence: Synthetic oligonucleotide
  Sense strand starting at position 2369 of SEQ ID NO: 914793
ugucacugucccuacauaa

SEQ ID NO: 1031177 - RNA, 19 nt, Artificial Sequence
  Description of Artificial Sequence: Synthetic oligonucleotide
  Antisense strand to SEQ ID NO: 1031176
uuauguagggacagugaca

SEQ ID NO: 1031178 - RNA, 19 nt, Artificial Sequence
  Description of Artificial Sequence: Synthetic oligonucleotide
  Sense strand starting at position 2666 of SEQ ID NO: 914793
ccagaucagugguuuggga

SEQ ID NO: 1031179 - RNA, 19 nt, Artificial Sequence
  Description of Artificial Sequence: Synthetic oligonucleotide
  Antisense strand to SEQ ID NO: 1031178
ucccaaaccacugaucugg

SEQ ID NO: 1031180 - RNA, 19 nt, Artificial Sequence
  Description of Artificial Sequence: Synthetic oligonucleotide
  Sense strand starting at position 2668 of SEQ ID NO: 914793
agaucagugguuugggaca

SEQ ID NO: 1031181 - RNA, 19 nt, Artificial Sequence
  Description of Artificial Sequence: Synthetic oligonucleotide
  Antisense strand to SEQ ID NO: 1031180
ugucccaaaccacugaucu

SEQ ID NO: 1031182 - RNA, 19 nt, Artificial Sequence
  Description of Artificial Sequence: Synthetic oligonucleotide
  Sense strand starting at position 2849 of SEQ ID NO: 914793
cuuccaucuccaugggagu

SEQ ID NO: 1031183 - RNA, 19 nt, Artificial Sequence
  Description of Artificial Sequence: Synthetic oligonucleotide
  Antisense strand to SEQ ID NO: 1031182
acucccauggagauggaag

SEQ ID NO: 1031184 - RNA, 19 nt, Artificial Sequence
  Description of Artificial Sequence: Synthetic oligonucleotide
  Sense strand starting at position 2850 of SEQ ID NO: 914793
uuccaucuccaugggaguu

SEQ ID NO: 1031185 - RNA, 19 nt, Artificial Sequence
  Description of Artificial Sequence: Synthetic oligonucleotide
  Antisense strand to SEQ ID NO: 1031184
aacucccauggagauggaa

SEQ ID NO: 1031186 - RNA, 19 nt, Artificial Sequence
  Description of Artificial Sequence: Synthetic oligonucleotide
  Sense strand starting at position 2963 of SEQ ID NO: 914793
gagauauauguggguuggu

SEQ ID NO: 1031187 - RNA, 19 nt, Artificial Sequence
  Description of Artificial Sequence: Synthetic oligonucleotide
  Antisense strand to SEQ ID NO: 1031186
accaacccacauauaucuc

SEQ ID NO: 1031188 - RNA, 19 nt, Artificial Sequence
  Description of Artificial Sequence: Synthetic oligonucleotide
  Sense strand starting at position 2964 of SEQ ID NO: 914793
agauauauguggguugguu

SEQ ID NO: 1031189 - RNA, 19 nt, Artificial Sequence
  Description of Artificial Sequence: Synthetic oligonucleotide
  Antisense strand to SEQ ID NO: 1031188
aaccaacccacauauaucu

SEQ ID NO: 1031190 - RNA, 19 nt, Artificial Sequence
  Description of Artificial Sequence: Synthetic oligonucleotide
  Sense strand starting at position 2984 of SEQ ID NO: 914793
gggcaaggguauaggauua

SEQ ID NO: 1031191 - RNA, 19 nt, Artificial Sequence
  Description of Artificial Sequence: Synthetic oligonucleotide
  Antisense strand to SEQ ID NO: 1031190
uaauccuauacccuugccc

SEQ ID NO: 1031192 - RNA, 19 nt, Artificial Sequence
  Description of Artificial Sequence: Synthetic oligonucleotide
  Sense strand starting at position 3070 of SEQ ID NO: 914793
gacuguugugaauacagua

SEQ ID NO: 1031193 - RNA, 19 nt, Artificial Sequence
  Description of Artificial Sequence: Synthetic oligonucleotide
  Antisense strand to SEQ ID NO: 1031192
uacuguauucacaacaguc

SEQ ID NO: 1031194 - RNA, 19 nt, Artificial Sequence
  Description of Artificial Sequence: Synthetic oligonucleotide
  Sense strand starting at position 3119 of SEQ ID NO: 914793
gcuguauaagcuuaccaga

SEQ ID NO: 1031195 - RNA, 19 nt, Artificial Sequence
  Description of Artificial Sequence: Synthetic oligonucleotide
  Antisense strand to SEQ ID NO: 1031194
ucugguaagcuuauacagc

SEQ ID NO: 1031196 - RNA, 19 nt, Artificial Sequence
  Description of Artificial Sequence: Synthetic oligonucleotide
  Sense strand starting at position 3121 of SEQ ID NO: 914793
uguauaagcuuaccagaua

SEQ ID NO: 1031197 - RNA, 19 nt, Artificial Sequence
  Description of Artificial Sequence: Synthetic oligonucleotide
  Antisense strand to SEQ ID NO: 1031196
uaucugguaagcuuauaca

SEQ ID NO: 1031198 - RNA, 19 nt, Artificial Sequence
  Description of Artificial Sequence: Synthetic oligonucleotide
  Sense strand starting at position 3252 of SEQ ID NO: 914793
acaagaaugcaauguuaaa

SEQ ID NO: 1031199 - RNA, 19 nt, Artificial Sequence
  Description of Artificial Sequence: Synthetic oligonucleotide
  Antisense strand to SEQ ID NO: 1031198
uuuaacauugcauucuugu

SEQ ID NO: 1031200 - RNA, 19 nt, Artificial Sequence
  Description of Artificial Sequence: Synthetic oligonucleotide
  Sense strand starting at position 3278 of SEQ ID NO: 914793
agcaaacacuguccuagua

SEQ ID NO: 1031201 - RNA, 19 nt, Artificial Sequence
  Description of Artificial Sequence: Synthetic oligonucleotide
  Antisense strand to SEQ ID NO: 1031200
uacuaggacaguguuugcu

SEQ ID NO: 1031202 - RNA, 19 nt, Artificial Sequence
  Description of Artificial Sequence: Synthetic oligonucleotide
  Sense strand starting at position 3537 of SEQ ID NO: 914793
gguaaucacuuucugguca

SEQ ID NO: 1031203 - RNA, 19 nt, Artificial Sequence
  Description of Artificial Sequence: Synthetic oligonucleotide
  Antisense strand to SEQ ID NO: 1031202
ugaccagaaagugauuacc

SEQ ID NO: 1031204 - RNA, 19 nt, Artificial Sequence
  Description of Artificial Sequence: Synthetic oligonucleotide
  Sense strand starting at position 3541 of SEQ ID NO: 914793
aucacuuucuggucacuau

SEQ ID NO: 1031205 - RNA, 19 nt, Artificial Sequence
  Description of Artificial Sequence: Synthetic oligonucleotide
  Antisense strand to SEQ ID NO: 1031204
auagugaccagaaagugau

SEQ ID NO: 1031206 - RNA, 19 nt, Artificial Sequence
  Description of Artificial Sequence: Synthetic oligonucleotide
  Sense strand starting at position 3762 of SEQ ID NO: 914793
augacuauguugcuauaaa

SEQ ID NO: 1031207 - RNA, 19 nt, Artificial Sequence
  Description of Artificial Sequence: Synthetic oligonucleotide
  Antisense strand to SEQ ID NO: 1031206
uuuauagcaacauagucau

SEQ ID NO: 1031208 - RNA, 19 nt, Artificial Sequence
  Description of Artificial Sequence: Synthetic oligonucleotide
  Sense strand starting at position 3780 of SEQ ID NO: 914793
agaugaauaugacaaacua

SEQ ID NO: 1031209 - RNA, 19 nt, Artificial Sequence
  Description of Artificial Sequence: Synthetic oligonucleotide
  Antisense strand to SEQ ID NO: 1031208
uaguuugucauauucaucu

SEQ ID NO: 1031210 - RNA, 19 nt, Artificial Sequence
  Description of Artificial Sequence: Synthetic oligonucleotide
  Sense strand starting at position 3842 of SEQ ID NO: 914793
agaugaauaugacaauuuc

SEQ ID NO: 1031211 - RNA, 19 nt, Artificial Sequence
  Description of Artificial Sequence: Synthetic oligonucleotide
  Antisense strand to SEQ ID NO: 1031210
gaaauugucauauucaucu

SEQ ID NO: 1031212 - RNA, 19 nt, Artificial Sequence
  Description of Artificial Sequence: Synthetic oligonucleotide
  Sense strand starting at position 3926 of SEQ ID NO: 914793
gugccaaaugaguaaauca

SEQ ID NO: 1031213 - RNA, 19 nt, Artificial Sequence
  Description of Artificial Sequence: Synthetic oligonucleotide
  Antisense strand to SEQ ID NO: 1031212
ugauuuacucauuuggcac

SEQ ID NO: 1031214 - RNA, 19 nt, Artificial Sequence
  Description of Artificial Sequence: Synthetic oligonucleotide
  Sense strand starting at position 54 of SEQ ID NO: 914794
ccaugaaaccggugagaac

SEQ ID NO: 1031215 - RNA, 19 nt, Artificial Sequence
  Description of Artificial Sequence: Synthetic oligonucleotide
  Antisense strand to SEQ ID NO: 1031214
guucucaccgguuucaugg

SEQ ID NO: 1031216 - RNA, 19 nt, Artificial Sequence
  Description of Artificial Sequence: Synthetic oligonucleotide
  Sense strand starting at position 77 of SEQ ID NO: 914794
cugccucagccugaggaaa

SEQ ID NO: 1031217 - RNA, 19 nt, Artificial Sequence
  Description of Artificial Sequence: Synthetic oligonucleotide
  Antisense strand to SEQ ID NO: 1031216
uuuccucaggcugaggcag

SEQ ID NO: 1031218 - RNA, 19 nt, Artificial Sequence
  Description of Artificial Sequence: Synthetic oligonucleotide
  Sense strand starting at position 154 of SEQ ID NO: 914794
aacacagaccugcgagaau

SEQ ID NO: 1031219 - RNA, 19 nt, Artificial Sequence
  Description of Artificial Sequence: Synthetic oligonucleotide
  Antisense strand to SEQ ID NO: 1031218
auucucgcaggucuguguu

SEQ ID NO: 1031220 - RNA, 19 nt, Artificial Sequence
  Description of Artificial Sequence: Synthetic oligonucleotide
  Sense strand starting at position 205 of SEQ ID NO: 914794
uugaaauguucuuucuaug

SEQ ID NO: 1031221 - RNA, 19 nt, Artificial Sequence
  Description of Artificial Sequence: Synthetic oligonucleotide
  Antisense strand to SEQ ID NO: 1031220
cauagaaagaacauuucaa

SEQ ID NO: 1031222 - RNA, 19 nt, Artificial Sequence
  Description of Artificial Sequence: Synthetic oligonucleotide
  Sense strand starting at position 254 of SEQ ID NO: 914794
gugucuugagaucacacua

SEQ ID NO: 1031223 - RNA, 19 nt, Artificial Sequence
  Description of Artificial Sequence: Synthetic oligonucleotide
  Antisense strand to SEQ ID NO: 1031222
uagugugaucucaagacac

SEQ ID NO: 1031224 - RNA, 19 nt, Artificial Sequence
  Description of Artificial Sequence: Synthetic oligonucleotide
  Sense strand starting at position 365 of SEQ ID NO: 914794
aagacagaagucugguaua

SEQ ID NO: 1031225 - RNA, 19 nt, Artificial Sequence
  Description of Artificial Sequence: Synthetic oligonucleotide
  Antisense strand to SEQ ID NO: 1031224
uauaccagacuucugucuu

SEQ ID NO: 1031226 - RNA, 19 nt, Artificial Sequence
  Description of Artificial Sequence: Synthetic oligonucleotide
  Sense strand starting at position 370 of SEQ ID NO: 914794
agaagucugguauaucauu

SEQ ID NO: 1031227 - RNA, 19 nt, Artificial Sequence
  Description of Artificial Sequence: Synthetic oligonucleotide
  Antisense strand to SEQ ID NO: 1031226
aaugauauaccagacuucu

SEQ ID NO: 1031228 - RNA, 19 nt, Artificial Sequence
  Description of Artificial Sequence: Synthetic oligonucleotide
  Sense strand starting at position 375 of SEQ ID NO: 914794
ucugguauaucauuccuau

SEQ ID NO: 1031229 - RNA, 19 nt, Artificial Sequence
  Description of Artificial Sequence: Synthetic oligonucleotide
  Antisense strand to SEQ ID NO: 1031228
auaggaaugauauaccaga

SEQ ID NO: 1031230 - RNA, 19 nt, Artificial Sequence
  Description of Artificial Sequence: Synthetic oligonucleotide
  Sense strand starting at position 736 of SEQ ID NO: 914794
aagggaauauccgauuuac

SEQ ID NO: 1031231 - RNA, 19 nt, Artificial Sequence
  Description of Artificial Sequence: Synthetic oligonucleotide
  Antisense strand to SEQ ID NO: 1031230
guaaaucggauauucccuu

SEQ ID NO: 1031232 - RNA, 19 nt, Artificial Sequence
  Description of Artificial Sequence: Synthetic oligonucleotide
  Sense strand starting at position 859 of SEQ ID NO: 914794
cugacaauauuagugugaa

SEQ ID NO: 1031233 - RNA, 19 nt, Artificial Sequence
  Description of Artificial Sequence: Synthetic oligonucleotide
  Antisense strand to SEQ ID NO: 1031232
uucacacuaauauugucag

SEQ ID NO: 1031234 - RNA, 19 nt, Artificial Sequence
  Description of Artificial Sequence: Synthetic oligonucleotide
  Sense strand starting at position 862 of SEQ ID NO: 914794
acaauauuagugugaagug

SEQ ID NO: 1031235 - RNA, 19 nt, Artificial Sequence
  Description of Artificial Sequence: Synthetic oligonucleotide
  Antisense strand to SEQ ID NO: 1031234
cacuucacacuaauauugu

SEQ ID NO: 1031236 - RNA, 19 nt, Artificial Sequence
  Description of Artificial Sequence: Synthetic oligonucleotide
  Sense strand starting at position 897 of SEQ ID NO: 914794
cagcaaaguggcugagaaa

SEQ ID NO: 1031237 - RNA, 19 nt, Artificial Sequence
  Description of Artificial Sequence: Synthetic oligonucleotide
  Antisense strand to SEQ ID NO: 1031236
uuucucagccacuuugcug

SEQ ID NO: 1031238 - RNA, 19 nt, Artificial Sequence
  Description of Artificial Sequence: Synthetic oligonucleotide
  Sense strand starting at position 930 of SEQ ID NO: 914794
cagggcugccucuagaaua

SEQ ID NO: 1031239 - RNA, 19 nt, Artificial Sequence
  Description of Artificial Sequence: Synthetic oligonucleotide
  Antisense strand to SEQ ID NO: 1031238
uauucuagaggcagcccug

SEQ ID NO: 1031240 - RNA, 19 nt, Artificial Sequence
  Description of Artificial Sequence: Synthetic oligonucleotide
  Sense strand starting at position 942 of SEQ ID NO: 914794
uagaauacagcuuguauga

SEQ ID NO: 1031241 - RNA, 19 nt, Artificial Sequence
  Description of Artificial Sequence: Synthetic oligonucleotide
  Antisense strand to SEQ ID NO: 1031240
ucauacaagcuguauucua

SEQ ID NO: 1031242 - RNA, 19 nt, Artificial Sequence
  Description of Artificial Sequence: Synthetic oligonucleotide
  Sense strand starting at position 1093 of SEQ ID NO: 914794
ggcuacaauccaggaguca

SEQ ID NO: 1031243 - RNA, 19 nt, Artificial Sequence
  Description of Artificial Sequence: Synthetic oligonucleotide
  Antisense strand to SEQ ID NO: 1031242
ugacuccuggauuguagcc

SEQ ID NO: 1031244 - RNA, 19 nt, Artificial Sequence
  Description of Artificial Sequence: Synthetic oligonucleotide
  Sense strand starting at position 1108 of SEQ ID NO: 914794
gucagacuucugggaggga

SEQ ID NO: 1031245 - RNA, 19 nt, Artificial Sequence
  Description of Artificial Sequence: Synthetic oligonucleotide
  Antisense strand to SEQ ID NO: 1031244
ucccucccagaagucugac

SEQ ID NO: 1031246 - RNA, 19 nt, Artificial Sequence
  Description of Artificial Sequence: Synthetic oligonucleotide
  Sense strand starting at position 1134 of SEQ ID NO: 914794
agaccaaucuuggccaagu

SEQ ID NO: 1031247 - RNA, 19 nt, Artificial Sequence
  Description of Artificial Sequence: Synthetic oligonucleotide
  Antisense strand to SEQ ID NO: 1031246
acuuggccaagauuggucu

SEQ ID NO: 1031248 - RNA, 19 nt, Artificial Sequence
  Description of Artificial Sequence: Synthetic oligonucleotide
  Sense strand starting at position 1135 of SEQ ID NO: 914794
gaccaaucuuggccaaguu

SEQ ID NO: 1031249 - RNA, 19 nt, Artificial Sequence
  Description of Artificial Sequence: Synthetic oligonucleotide
  Antisense strand to SEQ ID NO: 1031248
aacuuggccaagauugguc

SEQ ID NO: 1031250 - RNA, 19 nt, Artificial Sequence
  Description of Artificial Sequence: Synthetic oligonucleotide
  Sense strand starting at position 2168 of SEQ ID NO: 914794
cuaguagacuugccagacu

SEQ ID NO: 1031251 - RNA, 19 nt, Artificial Sequence
  Description of Artificial Sequence: Synthetic oligonucleotide
  Antisense strand to SEQ ID NO: 1031250
agucuggcaagucuacuag

SEQ ID NO: 1031252 - RNA, 19 nt, Artificial Sequence
  Description of Artificial Sequence: Synthetic oligonucleotide
  Sense strand starting at position 2171 of SEQ ID NO: 914794
guagacuugccagacuuga

SEQ ID NO: 1031253 - RNA, 19 nt, Artificial Sequence
  Description of Artificial Sequence: Synthetic oligonucleotide
  Antisense strand to SEQ ID NO: 1031252
ucaagucuggcaagucuac

SEQ ID NO: 1031254 - RNA, 19 nt, Artificial Sequence
  Description of Artificial Sequence: Synthetic oligonucleotide
  Sense strand starting at position 2221 of SEQ ID NO: 914794
uuguauauuggccaucauc

SEQ ID NO: 1031255 - RNA, 19 nt, Artificial Sequence
  Description of Artificial Sequence: Synthetic oligonucleotide
  Antisense strand to SEQ ID NO: 1031254
gaugauggccaauauacaa

SEQ ID NO: 1031256 - RNA, 19 nt, Artificial Sequence
  Description of Artificial Sequence: Synthetic oligonucleotide
  Sense strand starting at position 2327 of SEQ ID NO: 914794
ugucacugucccuacauaa

SEQ ID NO: 1031257 - RNA, 19 nt, Artificial Sequence
  Description of Artificial Sequence: Synthetic oligonucleotide
  Antisense strand to SEQ ID NO: 1031256
uuauguagggacagugaca

SEQ ID NO: 1031258 - RNA, 19 nt, Artificial Sequence
  Description of Artificial Sequence: Synthetic oligonucleotide
  Sense strand starting at position 2624 of SEQ ID NO: 914794
ccagaucagugguuuggga

SEQ ID NO: 1031259 - RNA, 19 nt, Artificial Sequence
  Description of Artificial Sequence: Synthetic oligonucleotide
  Antisense strand to SEQ ID NO: 1031258
ucccaaaccacugaucugg

SEQ ID NO: 1031260 - RNA, 19 nt, Artificial Sequence
  Description of Artificial Sequence: Synthetic oligonucleotide
  Sense strand starting at position 2626 of SEQ ID NO: 914794
agaucagugguuugggaca

SEQ ID NO: 1031261 - RNA, 19 nt, Artificial Sequence
  Description of Artificial Sequence: Synthetic oligonucleotide
  Antisense strand to SEQ ID NO: 1031260
ugucccaaaccacugaucu

SEQ ID NO: 1031262 - RNA, 19 nt, Artificial Sequence
  Description of Artificial Sequence: Synthetic oligonucleotide
  Sense strand starting at position 2807 of SEQ ID NO: 914794
cuuccaucuccaugggagu

SEQ ID NO: 1031263 - RNA, 19 nt, Artificial Sequence
  Description of Artificial Sequence: Synthetic oligonucleotide
  Antisense strand to SEQ ID NO: 1031262
acucccauggagauggaag

SEQ ID NO: 1031264 - RNA, 19 nt, Artificial Sequence
  Description of Artificial Sequence: Synthetic oligonucleotide
  Sense strand starting at position 2808 of SEQ ID NO: 914794
uuccaucuccaugggaguu

SEQ ID NO: 1031265 - RNA, 19 nt, Artificial Sequence
  Description of Artificial Sequence: Synthetic oligonucleotide
  Antisense strand to SEQ ID NO: 1031264
aacucccauggagauggaa

SEQ ID NO: 1031266 - RNA, 19 nt, Artificial Sequence
  Description of Artificial Sequence: Synthetic oligonucleotide
  Sense strand starting at position 2921 of SEQ ID NO: 914794
gagauauauguggguuggu

SEQ ID NO: 1031267 - RNA, 19 nt, Artificial Sequence
  Description of Artificial Sequence: Synthetic oligonucleotide
  Antisense strand to SEQ ID NO: 1031266
accaacccacauauaucuc

SEQ ID NO: 1031268 - RNA, 19 nt, Artificial Sequence
  Description of Artificial Sequence: Synthetic oligonucleotide
  Sense strand starting at position 2922 of SEQ ID NO: 914794
agauauauguggguugguu

SEQ ID NO: 1031269 - RNA, 19 nt, Artificial Sequence
  Description of Artificial Sequence: Synthetic oligonucleotide
  Antisense strand to SEQ ID NO: 1031268
aaccaacccacauauaucu

SEQ ID NO: 1031270 - RNA, 19 nt, Artificial Sequence
  Description of Artificial Sequence: Synthetic oligonucleotide
  Sense strand starting at position 2942 of SEQ ID NO: 914794
gggcaaggguauaggauua

SEQ ID NO: 1031271 - RNA, 19 nt, Artificial Sequence
  Description of Artificial Sequence: Synthetic oligonucleotide
  Antisense strand to SEQ ID NO: 1031270
uaauccuauacccuugccc

SEQ ID NO: 1031272 - RNA, 19 nt, Artificial Sequence
  Description of Artificial Sequence: Synthetic oligonucleotide
  Sense strand starting at position 3028 of SEQ ID NO: 914794
gacuguugugaauacagua

SEQ ID NO: 1031273 - RNA, 19 nt, Artificial Sequence
  Description of Artificial Sequence: Synthetic oligonucleotide
  Antisense strand to SEQ ID NO: 1031272
uacuguauucacaacaguc

SEQ ID NO: 1031274 - RNA, 19 nt, Artificial Sequence
  Description of Artificial Sequence: Synthetic oligonucleotide
  Sense strand starting at position 3077 of SEQ ID NO: 914794
gcuguauaagcuuaccaga

SEQ ID NO: 1031275 - RNA, 19 nt, Artificial Sequence
  Description of Artificial Sequence: Synthetic oligonucleotide
  Antisense strand to SEQ ID NO: 1031274
ucugguaagcuuauacagc

SEQ ID NO: 1031276 - RNA, 19 nt, Artificial Sequence
  Description of Artificial Sequence: Synthetic oligonucleotide
  Sense strand starting at position 3079 of SEQ ID NO: 914794
uguauaagcuuaccagaua

SEQ ID NO: 1031277 - RNA, 19 nt, Artificial Sequence
  Description of Artificial Sequence: Synthetic oligonucleotide
  Antisense strand to SEQ ID NO: 1031276
uaucugguaagcuuauaca

SEQ ID NO: 1031278 - RNA, 19 nt, Artificial Sequence
  Description of Artificial Sequence: Synthetic oligonucleotide
  Sense strand starting at position 3210 of SEQ ID NO: 914794
acaagaaugcaauguuaaa

SEQ ID NO: 1031279 - RNA, 19 nt, Artificial Sequence
  Description of Artificial Sequence: Synthetic oligonucleotide
  Antisense strand to SEQ ID NO: 1031278
uuuaacauugcauucuugu

SEQ ID NO: 1031280 - RNA, 19 nt, Artificial Sequence
  Description of Artificial Sequence: Synthetic oligonucleotide
  Sense strand starting at position 3499 of SEQ ID NO: 914794
aucacuuucuggucacuau

SEQ ID NO: 1031281 - RNA, 19 nt, Artificial Sequence
  Description of Artificial Sequence: Synthetic oligonucleotide
  Antisense strand to SEQ ID NO: 1031280
auagugaccagaaagugau

SEQ ID NO: 1031282 - RNA, 19 nt, Artificial Sequence
  Description of Artificial Sequence: Synthetic oligonucleotide
  Sense strand starting at position 3720 of SEQ ID NO: 914794
augacuauguugcuauaaa

SEQ ID NO: 1031283 - RNA, 19 nt, Artificial Sequence
  Description of Artificial Sequence: Synthetic oligonucleotide
  Antisense strand to SEQ ID NO: 1031282
uuuauagcaacauagucau

SEQ ID NO: 1031284 - RNA, 19 nt, Artificial Sequence
  Description of Artificial Sequence: Synthetic oligonucleotide
  Sense strand starting at position 3738 of SEQ ID NO: 914794
agaugaauaugacaaacua

SEQ ID NO: 1031285 - RNA, 19 nt, Artificial Sequence
  Description of Artificial Sequence: Synthetic oligonucleotide
  Antisense strand to SEQ ID NO: 1031284
uaguuugucauauucaucu

SEQ ID NO: 1031286 - RNA, 19 nt, Artificial Sequence
  Description of Artificial Sequence: Synthetic oligonucleotide
  Sense strand starting at position 3800 of SEQ ID NO: 914794
agaugaauaugacaauuuc

SEQ ID NO: 1031287 - RNA, 19 nt, Artificial Sequence
  Description of Artificial Sequence: Synthetic oligonucleotide
  Antisense strand to SEQ ID NO: 1031286
gaaauugucauauucaucu

SEQ ID NO: 1031288 - RNA, 19 nt, Artificial Sequence
  Description of Artificial Sequence: Synthetic oligonucleotide
  Sense strand starting at position 3884 of SEQ ID NO: 914794
gugccaaaugaguaaauca

SEQ ID NO: 1031289 - RNA, 19 nt, Artificial Sequence
  Description of Artificial Sequence: Synthetic oligonucleotide
  Antisense strand to SEQ ID NO: 1031288
ugauuuacucauuuggcac

SEQ ID NO: 1031290 - RNA, 19 nt, Artificial Sequence
  Description of Artificial Sequence: Synthetic oligonucleotide
  Sense strand starting at position 3958 of SEQ ID NO: 914794
ccaguauuccaguaugaau

SEQ ID NO: 1031291 - RNA, 19 nt, Artificial Sequence
  Description of Artificial Sequence: Synthetic oligonucleotide
  Antisense strand to SEQ ID NO: 1031290
auucauacuggaauacugg

SEQ ID NO: 1031292 - RNA, 19 nt, Artificial Sequence
  Description of Artificial Sequence: Synthetic oligonucleotide
  Sense strand starting at position 3960 of SEQ ID NO: 914794
aguauuccaguaugaauau

SEQ ID NO: 1031293 - RNA, 19 nt, Artificial Sequence
  Description of Artificial Sequence: Synthetic oligonucleotide
  Antisense strand to SEQ ID NO: 1031292
auauucauacuggaauacu

SEQ ID NO: 1031294 - RNA, 19 nt, Artificial Sequence
  Description of Artificial Sequence: Synthetic oligonucleotide
  Sense strand starting at position 210 of SEQ ID NO: 914795
ccaugaaaccggugagaac

SEQ ID NO: 1031295 - RNA, 19 nt, Artificial Sequence
  Description of Artificial Sequence: Synthetic oligonucleotide
  Antisense strand to SEQ ID NO: 1031294
guucucaccgguuucaugg

SEQ ID NO: 1031296 - RNA, 19 nt, Artificial Sequence
  Description of Artificial Sequence: Synthetic oligonucleotide
  Sense strand starting at position 233 of SEQ ID NO: 914795
cugccucagccugaggaaa

SEQ ID NO: 1031297 - RNA, 19 nt, Artificial Sequence
  Description of Artificial Sequence: Synthetic oligonucleotide
  Antisense strand to SEQ ID NO: 1031296
uuuccucaggcugaggcag

SEQ ID NO: 1031298 - RNA, 19 nt, Artificial Sequence
  Description of Artificial Sequence: Synthetic oligonucleotide
  Sense strand starting at position 310 of SEQ ID NO: 914795
aacacagaccugcgagaau

SEQ ID NO: 1031299 - RNA, 19 nt, Artificial Sequence
  Description of Artificial Sequence: Synthetic oligonucleotide
  Antisense strand to SEQ ID NO: 1031298
auucucgcaggucuguguu

SEQ ID NO: 1031300 - RNA, 19 nt, Artificial Sequence
  Description of Artificial Sequence: Synthetic oligonucleotide
  Sense strand starting at position 361 of SEQ ID NO: 914795
uugaaauguucuuucuaug

SEQ ID NO: 1031301 - RNA, 19 nt, Artificial Sequence
  Description of Artificial Sequence: Synthetic oligonucleotide
  Antisense strand to SEQ ID NO: 1031300
cauagaaagaacauuucaa

SEQ ID NO: 1031302 - RNA, 19 nt, Artificial Sequence
  Description of Artificial Sequence: Synthetic oligonucleotide
  Sense strand starting at position 410 of SEQ ID NO: 914795
gugucuugagaucacacua

SEQ ID NO: 1031303 - RNA, 19 nt, Artificial Sequence
  Description of Artificial Sequence: Synthetic oligonucleotide
  Antisense strand to SEQ ID NO: 1031302
uagugugaucucaagacac

SEQ ID NO: 1031304 - RNA, 19 nt, Artificial Sequence
  Description of Artificial Sequence: Synthetic oligonucleotide
  Sense strand starting at position 521 of SEQ ID NO: 914795
aagacagaagucugguaua

SEQ ID NO: 1031305 - RNA, 19 nt, Artificial Sequence
  Description of Artificial Sequence: Synthetic oligonucleotide
  Antisense strand to SEQ ID NO: 1031304
uauaccagacuucugucuu

SEQ ID NO: 1031306 - RNA, 19 nt, Artificial Sequence
  Description of Artificial Sequence: Synthetic oligonucleotide
  Sense strand starting at position 526 of SEQ ID NO: 914795
agaagucugguauaucauu

SEQ ID NO: 1031307 - RNA, 19 nt, Artificial Sequence
  Description of Artificial Sequence: Synthetic oligonucleotide
  Antisense strand to SEQ ID NO: 1031306
aaugauauaccagacuucu

SEQ ID NO: 1031308 - RNA, 19 nt, Artificial Sequence
  Description of Artificial Sequence: Synthetic oligonucleotide
  Sense strand starting at position 531 of SEQ ID NO: 914795
ucugguauaucauuccuau

SEQ ID NO: 1031309 - RNA, 19 nt, Artificial Sequence
  Description of Artificial Sequence: Synthetic oligonucleotide
  Antisense strand to SEQ ID NO: 1031308
auaggaaugauauaccaga

SEQ ID NO: 1031310 - RNA, 19 nt, Artificial Sequence
  Description of Artificial Sequence: Synthetic oligonucleotide
  Sense strand starting at position 892 of SEQ ID NO: 914795
aagggaauauccgauuuac

SEQ ID NO: 1031311 - RNA, 19 nt, Artificial Sequence
  Description of Artificial Sequence: Synthetic oligonucleotide
  Antisense strand to SEQ ID NO: 1031310
guaaaucggauauucccuu

SEQ ID NO: 1031312 - RNA, 19 nt, Artificial Sequence
  Description of Artificial Sequence: Synthetic oligonucleotide
  Sense strand starting at position 1015 of SEQ ID NO: 914795
cugacaauauuagugugaa

SEQ ID NO: 1031313 - RNA, 19 nt, Artificial Sequence
  Description of Artificial Sequence: Synthetic oligonucleotide
  Antisense strand to SEQ ID NO: 1031312
uucacacuaauauugucag

SEQ ID NO: 1031314 - RNA, 19 nt, Artificial Sequence
  Description of Artificial Sequence: Synthetic oligonucleotide
  Sense strand starting at position 1018 of SEQ ID NO: 914795
acaauauuagugugaagug

SEQ ID NO: 1031315 - RNA, 19 nt, Artificial Sequence
  Description of Artificial Sequence: Synthetic oligonucleotide
  Antisense strand to SEQ ID NO: 1031314
cacuucacacuaauauugu

SEQ ID NO: 1031316 - RNA, 19 nt, Artificial Sequence
  Description of Artificial Sequence: Synthetic oligonucleotide
  Sense strand starting at position 1053 of SEQ ID NO: 914795
cagcaaaguggcugagaaa

SEQ ID NO: 1031317 - RNA, 19 nt, Artificial Sequence
  Description of Artificial Sequence: Synthetic oligonucleotide
  Antisense strand to SEQ ID NO: 1031316
uuucucagccacuuugcug

SEQ ID NO: 1031318 - RNA, 19 nt, Artificial Sequence
  Description of Artificial Sequence: Synthetic oligonucleotide
  Sense strand starting at position 1086 of SEQ ID NO: 914795
cagggcugccucuagaaua

SEQ ID NO: 1031319 - RNA, 19 nt, Artificial Sequence
  Description of Artificial Sequence: Synthetic oligonucleotide
  Antisense strand to SEQ ID NO: 1031318
uauucuagaggcagcccug

SEQ ID NO: 1031320 - RNA, 19 nt, Artificial Sequence
  Description of Artificial Sequence: Synthetic oligonucleotide
  Sense strand starting at position 1098 of SEQ ID NO: 914795
uagaauacagcuuguauga

SEQ ID NO: 1031321 - RNA, 19 nt, Artificial Sequence
  Description of Artificial Sequence: Synthetic oligonucleotide
  Antisense strand to SEQ ID NO: 1031320
ucauacaagcuguauucua

SEQ ID NO: 1031322 - RNA, 19 nt, Artificial Sequence
  Description of Artificial Sequence: Synthetic oligonucleotide
  Sense strand starting at position 1249 of SEQ ID NO: 914795
ggcuacaauccaggaguca

SEQ ID NO: 1031323 - RNA, 19 nt, Artificial Sequence
  Description of Artificial Sequence: Synthetic oligonucleotide
  Antisense strand to SEQ ID NO: 1031322
ugacuccuggauuguagcc

SEQ ID NO: 1031324 - RNA, 19 nt, Artificial Sequence
  Description of Artificial Sequence: Synthetic oligonucleotide
  Sense strand starting at position 1264 of SEQ ID NO: 914795
gucagacuucugggaggga

SEQ ID NO: 1031325 - RNA, 19 nt, Artificial Sequence
  Description of Artificial Sequence: Synthetic oligonucleotide
  Antisense strand to SEQ ID NO: 1031324
ucccucccagaagucugac

SEQ ID NO: 1031326 - RNA, 19 nt, Artificial Sequence
  Description of Artificial Sequence: Synthetic oligonucleotide
  Sense strand starting at position 1290 of SEQ ID NO: 914795
agaccaaucuuggccaagu

SEQ ID NO: 1031327 - RNA, 19 nt, Artificial Sequence
  Description of Artificial Sequence: Synthetic oligonucleotide
  Antisense strand to SEQ ID NO: 1031326
acuuggccaagauuggucu

SEQ ID NO: 1031328 - RNA, 19 nt, Artificial Sequence
  Description of Artificial Sequence: Synthetic oligonucleotide
  Sense strand starting at position 1291 of SEQ ID NO: 914795
gaccaaucuuggccaaguu

SEQ ID NO: 1031329 - RNA, 19 nt, Artificial Sequence
  Description of Artificial Sequence: Synthetic oligonucleotide
  Antisense strand to SEQ ID NO: 1031328
aacuuggccaagauugguc

SEQ ID NO: 1031330 - RNA, 19 nt, Artificial Sequence
  Description of Artificial Sequence: Synthetic oligonucleotide
  Sense strand starting at position 2324 of SEQ ID NO: 914795
cuaguagacuugccagacu

SEQ ID NO: 1031331 - RNA, 19 nt, Artificial Sequence
  Description of Artificial Sequence: Synthetic oligonucleotide
  Antisense strand to SEQ ID NO: 1031330
agucuggcaagucuacuag

SEQ ID NO: 1031332 - RNA, 19 nt, Artificial Sequence
  Description of Artificial Sequence: Synthetic oligonucleotide
  Sense strand starting at position 2327 of SEQ ID NO: 914795
guagacuugccagacuuga

SEQ ID NO: 1031333 - RNA, 19 nt, Artificial Sequence
  Description of Artificial Sequence: Synthetic oligonucleotide
  Antisense strand to SEQ ID NO: 1031332
ucaagucuggcaagucuac

SEQ ID NO: 1031334 - RNA, 19 nt, Artificial Sequence
  Description of Artificial Sequence: Synthetic oligonucleotide
  Sense strand starting at position 2377 of SEQ ID NO: 914795
uuguauauuggccaucauc

SEQ ID NO: 1031335 - RNA, 19 nt, Artificial Sequence
  Description of Artificial Sequence: Synthetic oligonucleotide
  Antisense strand to SEQ ID NO: 1031334
gaugauggccaauauacaa

SEQ ID NO: 1031336 - RNA, 19 nt, Artificial Sequence
  Description of Artificial Sequence: Synthetic oligonucleotide
  Sense strand starting at position 2483 of SEQ ID NO: 914795
ugucacugucccuacauaa

SEQ ID NO: 1031337 - RNA, 19 nt, Artificial Sequence
  Description of Artificial Sequence: Synthetic oligonucleotide
  Antisense strand to SEQ ID NO: 1031336
uuauguagggacagugaca

SEQ ID NO: 1031338 - RNA, 19 nt, Artificial Sequence
  Description of Artificial Sequence: Synthetic oligonucleotide
  Sense strand starting at position 2780 of SEQ ID NO: 914795
ccagaucagugguuuggga

SEQ ID NO: 1031339 - RNA, 19 nt, Artificial Sequence
  Description of Artificial Sequence: Synthetic oligonucleotide
  Antisense strand to SEQ ID NO: 1031338
ucccaaaccacugaucugg

SEQ ID NO: 1031340 - RNA, 19 nt, Artificial Sequence
  Description of Artificial Sequence: Synthetic oligonucleotide
  Sense strand starting at position 2782 of SEQ ID NO: 914795
agaucagugguuugggaca

SEQ ID NO: 1031341 - RNA, 19 nt, Artificial Sequence
  Description of Artificial Sequence: Synthetic oligonucleotide
  Antisense strand to SEQ ID NO: 1031340
ugucccaaaccacugaucu

SEQ ID NO: 1031342 - RNA, 19 nt, Artificial Sequence
  Description of Artificial Sequence: Synthetic oligonucleotide
  Sense strand starting at position 2963 of SEQ ID NO: 914795
cuuccaucuccaugggagu

SEQ ID NO: 1031343 - RNA, 19 nt, Artificial Sequence
  Description of Artificial Sequence: Synthetic oligonucleotide
  Antisense strand to SEQ ID NO: 1031342
acucccauggagauggaag

SEQ ID NO: 1031344 - RNA, 19 nt, Artificial Sequence
  Description of Artificial Sequence: Synthetic oligonucleotide
  Sense strand starting at position 2964 of SEQ ID NO: 914795
uuccaucuccaugggaguu

SEQ ID NO: 1031345 - RNA, 19 nt, Artificial Sequence
  Description of Artificial Sequence: Synthetic oligonucleotide
  Antisense strand to SEQ ID NO: 1031344
aacucccauggagauggaa

SEQ ID NO: 1031346 - RNA, 19 nt, Artificial Sequence
  Description of Artificial Sequence: Synthetic oligonucleotide
  Sense strand starting at position 3077 of SEQ ID NO: 914795
gagauauauguggguuggu

SEQ ID NO: 1031347 - RNA, 19 nt, Artificial Sequence
  Description of Artificial Sequence: Synthetic oligonucleotide
  Antisense strand to SEQ ID NO: 1031346
accaacccacauauaucuc

SEQ ID NO: 1031348 - RNA, 19 nt, Artificial Sequence
  Description of Artificial Sequence: Synthetic oligonucleotide
  Sense strand starting at position 3078 of SEQ ID NO: 914795
agauauauguggguugguu

SEQ ID NO: 1031349 - RNA, 19 nt, Artificial Sequence
  Description of Artificial Sequence: Synthetic oligonucleotide
  Antisense strand to SEQ ID NO: 1031348
aaccaacccacauauaucu

SEQ ID NO: 1031350 - RNA, 19 nt, Artificial Sequence
  Description of Artificial Sequence: Synthetic oligonucleotide
  Sense strand starting at position 3098 of SEQ ID NO: 914795
gggcaaggguauaggauua

SEQ ID NO: 1031351 - RNA, 19 nt, Artificial Sequence
  Description of Artificial Sequence: Synthetic oligonucleotide
  Antisense strand to SEQ ID NO: 1031350
uaauccuauacccuugccc

SEQ ID NO: 1031352 - RNA, 19 nt, Artificial Sequence
  Description of Artificial Sequence: Synthetic oligonucleotide
  Sense strand starting at position 3184 of SEQ ID NO: 914795
gacuguugugaauacagua

SEQ ID NO: 1031353 - RNA, 19 nt, Artificial Sequence
  Description of Artificial Sequence: Synthetic oligonucleotide
  Antisense strand to SEQ ID NO: 1031352
uacuguauucacaacaguc

SEQ ID NO: 1031354 - RNA, 19 nt, Artificial Sequence
  Description of Artificial Sequence: Synthetic oligonucleotide
  Sense strand starting at position 3233 of SEQ ID NO: 914795
gcuguauaagcuuaccaga

SEQ ID NO: 1031355 - RNA, 19 nt, Artificial Sequence
  Description of Artificial Sequence: Synthetic oligonucleotide
  Antisense strand to SEQ ID NO: 1031354
ucugguaagcuuauacagc

SEQ ID NO: 1031356 - RNA, 19 nt, Artificial Sequence
  Description of Artificial Sequence: Synthetic oligonucleotide
  Sense strand starting at position 3235 of SEQ ID NO: 914795
uguauaagcuuaccagaua

SEQ ID NO: 1031357 - RNA, 19 nt, Artificial Sequence
  Description of Artificial Sequence: Synthetic oligonucleotide
  Antisense strand to SEQ ID NO: 1031356
uaucugguaagcuuauaca

SEQ ID NO: 1031358 - RNA, 19 nt, Artificial Sequence
  Description of Artificial Sequence: Synthetic oligonucleotide
  Sense strand starting at position 3366 of SEQ ID NO: 914795
acaagaaugcaauguuaaa

SEQ ID NO: 1031359 - RNA, 19 nt, Artificial Sequence
  Description of Artificial Sequence: Synthetic oligonucleotide
  Antisense strand to SEQ ID NO: 1031358
uuuaacauugcauucuugu

SEQ ID NO: 1031360 - RNA, 19 nt, Artificial Sequence
  Description of Artificial Sequence: Synthetic oligonucleotide
  Sense strand starting at position 3392 of SEQ ID NO: 914795
agcaaacacuguccuagua

SEQ ID NO: 1031361 - RNA, 19 nt, Artificial Sequence
  Description of Artificial Sequence: Synthetic oligonucleotide
  Antisense strand to SEQ ID NO: 1031360
uacuaggacaguguuugcu

SEQ ID NO: 1031362 - RNA, 19 nt, Artificial Sequence
  Description of Artificial Sequence: Synthetic oligonucleotide
  Sense strand starting at position 3651 of SEQ ID NO: 914795
gguaaucacuuucugguca

SEQ ID NO: 1031363 - RNA, 19 nt, Artificial Sequence
  Description of Artificial Sequence: Synthetic oligonucleotide
  Antisense strand to SEQ ID NO: 1031362
ugaccagaaagugauuacc

SEQ ID NO: 1031364 - RNA, 19 nt, Artificial Sequence
  Description of Artificial Sequence: Synthetic oligonucleotide
  Sense strand starting at position 3655 of SEQ ID NO: 914795
aucacuuucuggucacuau

SEQ ID NO: 1031365 - RNA, 19 nt, Artificial Sequence
  Description of Artificial Sequence: Synthetic oligonucleotide
  Antisense strand to SEQ ID NO: 1031364
auagugaccagaaagugau

SEQ ID NO: 1031366 - RNA, 19 nt, Artificial Sequence
  Description of Artificial Sequence: Synthetic oligonucleotide
  Sense strand starting at position 3784 of SEQ ID NO: 914795
guaggccugcauuaugauu

SEQ ID NO: 1031367 - RNA, 19 nt, Artificial Sequence
  Description of Artificial Sequence: Synthetic oligonucleotide
  Antisense strand to SEQ ID NO: 1031366
aaucauaaugcaggccuac

SEQ ID NO: 1031368 - RNA, 19 nt, Artificial Sequence
  Description of Artificial Sequence: Synthetic oligonucleotide
  Sense strand starting at position 3876 of SEQ ID NO: 914795
augacuauguugcuauaaa

SEQ ID NO: 1031369 - RNA, 19 nt, Artificial Sequence
  Description of Artificial Sequence: Synthetic oligonucleotide
  Antisense strand to SEQ ID NO: 1031368
uuuauagcaacauagucau

SEQ ID NO: 1031370 - RNA, 19 nt, Artificial Sequence
  Description of Artificial Sequence: Synthetic oligonucleotide
  Sense strand starting at position 3894 of SEQ ID NO: 914795
agaugaauaugacaaacua

SEQ ID NO: 1031371 - RNA, 19 nt, Artificial Sequence
  Description of Artificial Sequence: Synthetic oligonucleotide
  Antisense strand to SEQ ID NO: 1031370
uaguuugucauauucaucu

SEQ ID NO: 1031372 - RNA, 19 nt, Artificial Sequence
  Description of Artificial Sequence: Synthetic oligonucleotide
  Sense strand starting at position 3956 of SEQ ID NO: 914795
agaugaauaugacaauuuc

SEQ ID NO: 1031373 - RNA, 19 nt, Artificial Sequence
  Description of Artificial Sequence: Synthetic oligonucleotide
  Antisense strand to SEQ ID NO: 1031372
gaaauugucauauucaucu

SEQ ID NO: 1031374 - RNA, 19 nt, Artificial Sequence
  Description of Artificial Sequence: Synthetic oligonucleotide
  Sense strand starting at position 494 of SEQ ID NO: 914796
ccaugaaaccggugagaac

SEQ ID NO: 1031375 - RNA, 19 nt, Artificial Sequence
  Description of Artificial Sequence: Synthetic oligonucleotide
  Antisense strand to SEQ ID NO: 1031374
guucucaccgguuucaugg

SEQ ID NO: 1031376 - RNA, 19 nt, Artificial Sequence
  Description of Artificial Sequence: Synthetic oligonucleotide
  Sense strand starting at position 517 of SEQ ID NO: 914796
cugccucagccugaggaaa

SEQ ID NO: 1031377 - RNA, 19 nt, Artificial Sequence
  Description of Artificial Sequence: Synthetic oligonucleotide
  Antisense strand to SEQ ID NO: 1031376
uuuccucaggcugaggcag

SEQ ID NO: 1031378 - RNA, 19 nt, Artificial Sequence
  Description of Artificial Sequence: Synthetic oligonucleotide
  Sense strand starting at position 594 of SEQ ID NO: 914796
aacacagaccugcgagaau

SEQ ID NO: 1031379 - RNA, 19 nt, Artificial Sequence
  Description of Artificial Sequence: Synthetic oligonucleotide
  Antisense strand to SEQ ID NO: 1031378
auucucgcaggucuguguu

SEQ ID NO: 1031380 - RNA, 19 nt, Artificial Sequence
  Description of Artificial Sequence: Synthetic oligonucleotide
  Sense strand starting at position 645 of SEQ ID NO: 914796
uugaaauguucuuucuaug

SEQ ID NO: 1031381 - RNA, 19 nt, Artificial Sequence
  Description of Artificial Sequence: Synthetic oligonucleotide
  Antisense strand to SEQ ID NO: 1031380
cauagaaagaacauuucaa

SEQ ID NO: 1031382 - RNA, 19 nt, Artificial Sequence
  Description of Artificial Sequence: Synthetic oligonucleotide
  Sense strand starting at position 694 of SEQ ID NO: 914796
gugucuugagaucacacua

SEQ ID NO: 1031383 - RNA, 19 nt, Artificial Sequence
  Description of Artificial Sequence: Synthetic oligonucleotide
  Antisense strand to SEQ ID NO: 1031382
uagugugaucucaagacac

SEQ ID NO: 1031384 - RNA, 19 nt, Artificial Sequence
  Description of Artificial Sequence: Synthetic oligonucleotide
  Sense strand starting at position 805 of SEQ ID NO: 914796
aagacagaagucugguaua

SEQ ID NO: 1031385 - RNA, 19 nt, Artificial Sequence
  Description of Artificial Sequence: Synthetic oligonucleotide
  Antisense strand to SEQ ID NO: 1031384
uauaccagacuucugucuu

SEQ ID NO: 1031386 - RNA, 19 nt, Artificial Sequence
  Description of Artificial Sequence: Synthetic oligonucleotide
  Sense strand starting at position 810 of SEQ ID NO: 914796
agaagucugguauaucauu

SEQ ID NO: 1031387 - RNA, 19 nt, Artificial Sequence
  Description of Artificial Sequence: Synthetic oligonucleotide
  Antisense strand to SEQ ID NO: 1031386
aaugauauaccagacuucu

SEQ ID NO: 1031388 - RNA, 19 nt, Artificial Sequence
  Description of Artificial Sequence: Synthetic oligonucleotide
  Sense strand starting at position 815 of SEQ ID NO: 914796
ucugguauaucauuccuau

SEQ ID NO: 1031389 - RNA, 19 nt, Artificial Sequence
  Description of Artificial Sequence: Synthetic oligonucleotide
  Antisense strand to SEQ ID NO: 1031388
auaggaaugauauaccaga

SEQ ID NO: 1031390 - RNA, 19 nt, Artificial Sequence
  Description of Artificial Sequence: Synthetic oligonucleotide
  Sense strand starting at position 963 of SEQ ID NO: 914796
uugucucgucucuacuaaa

SEQ ID NO: 1031391 - RNA, 19 nt, Artificial Sequence
  Description of Artificial Sequence: Synthetic oligonucleotide
  Antisense strand to SEQ ID NO: 1031390
uuuaguagagacgagacaa

SEQ ID NO: 1031392 - RNA, 19 nt, Artificial Sequence
  Description of Artificial Sequence: Synthetic oligonucleotide
  Sense strand starting at position 1176 of SEQ ID NO: 914796
aagggaauauccgauuuac

SEQ ID NO: 1031393 - RNA, 19 nt, Artificial Sequence
  Description of Artificial Sequence: Synthetic oligonucleotide
  Antisense strand to SEQ ID NO: 1031392
guaaaucggauauucccuu

SEQ ID NO: 1031394 - RNA, 19 nt, Artificial Sequence
  Description of Artificial Sequence: Synthetic oligonucleotide
  Sense strand starting at position 1299 of SEQ ID NO: 914796
cugacaauauuagugugaa

SEQ ID NO: 1031395 - RNA, 19 nt, Artificial Sequence
  Description of Artificial Sequence: Synthetic oligonucleotide
  Antisense strand to SEQ ID NO: 1031394
uucacacuaauauugucag

SEQ ID NO: 1031396 - RNA, 19 nt, Artificial Sequence
  Description of Artificial Sequence: Synthetic oligonucleotide
  Sense strand starting at position 1302 of SEQ ID NO: 914796
acaauauuagugugaagug

SEQ ID NO: 1031397 - RNA, 19 nt, Artificial Sequence
  Description of Artificial Sequence: Synthetic oligonucleotide
  Antisense strand to SEQ ID NO: 1031396
cacuucacacuaauauugu

SEQ ID NO: 1031398 - RNA, 19 nt, Artificial Sequence
  Description of Artificial Sequence: Synthetic oligonucleotide
  Sense strand starting at position 1337 of SEQ ID NO: 914796
cagcaaaguggcugagaaa

SEQ ID NO: 1031399 - RNA, 19 nt, Artificial Sequence
  Description of Artificial Sequence: Synthetic oligonucleotide
  Antisense strand to SEQ ID NO: 1031398
uuucucagccacuuugcug

SEQ ID NO: 1031400 - RNA, 19 nt, Artificial Sequence
  Description of Artificial Sequence: Synthetic oligonucleotide
  Sense strand starting at position 1370 of SEQ ID NO: 914796
cagggcugccucuagaaua

SEQ ID NO: 1031401 - RNA, 19 nt, Artificial Sequence
  Description of Artificial Sequence: Synthetic oligonucleotide
  Antisense strand to SEQ ID NO: 1031400
uauucuagaggcagcccug

SEQ ID NO: 1031402 - RNA, 19 nt, Artificial Sequence
  Description of Artificial Sequence: Synthetic oligonucleotide
  Sense strand starting at position 1382 of SEQ ID NO: 914796
uagaauacagcuuguauga

SEQ ID NO: 1031403 - RNA, 19 nt, Artificial Sequence
  Description of Artificial Sequence: Synthetic oligonucleotide
  Antisense strand to SEQ ID NO: 1031402
ucauacaagcuguauucua

SEQ ID NO: 1031404 - RNA, 19 nt, Artificial Sequence
  Description of Artificial Sequence: Synthetic oligonucleotide
  Sense strand starting at position 1533 of SEQ ID NO: 914796
ggcuacaauccaggaguca

SEQ ID NO: 1031405 - RNA, 19 nt, Artificial Sequence
  Description of Artificial Sequence: Synthetic oligonucleotide
  Antisense strand to SEQ ID NO: 1031404
ugacuccuggauuguagcc

SEQ ID NO: 1031406 - RNA, 19 nt, Artificial Sequence
  Description of Artificial Sequence: Synthetic oligonucleotide
  Sense strand starting at position 1548 of SEQ ID NO: 914796
gucagacuucugggaggga

SEQ ID NO: 1031407 - RNA, 19 nt, Artificial Sequence
  Description of Artificial Sequence: Synthetic oligonucleotide
  Antisense strand to SEQ ID NO: 1031406
ucccucccagaagucugac

SEQ ID NO: 1031408 - RNA, 19 nt, Artificial Sequence
  Description of Artificial Sequence: Synthetic oligonucleotide
  Sense strand starting at position 1574 of SEQ ID NO: 914796
agaccaaucuuggccaagu

SEQ ID NO: 1031409 - RNA, 19 nt, Artificial Sequence
  Description of Artificial Sequence: Synthetic oligonucleotide
  Antisense strand to SEQ ID NO: 1031408
acuuggccaagauuggucu

SEQ ID NO: 1031410 - RNA, 19 nt, Artificial Sequence
  Description of Artificial Sequence: Synthetic oligonucleotide
  Sense strand starting at position 1575 of SEQ ID NO: 914796
gaccaaucuuggccaaguu

SEQ ID NO: 1031411 - RNA, 19 nt, Artificial Sequence
  Description of Artificial Sequence: Synthetic oligonucleotide
  Antisense strand to SEQ ID NO: 1031410
aacuuggccaagauugguc

SEQ ID NO: 1031412 - RNA, 19 nt, Artificial Sequence
  Description of Artificial Sequence: Synthetic oligonucleotide
  Sense strand starting at position 2608 of SEQ ID NO: 914796
cuaguagacuugccagacu

SEQ ID NO: 1031413 - RNA, 19 nt, Artificial Sequence
  Description of Artificial Sequence: Synthetic oligonucleotide
  Antisense strand to SEQ ID NO: 1031412
agucuggcaagucuacuag

SEQ ID NO: 1031414 - RNA, 19 nt, Artificial Sequence
  Description of Artificial Sequence: Synthetic oligonucleotide
  Sense strand starting at position 2611 of SEQ ID NO: 914796
guagacuugccagacuuga

SEQ ID NO: 1031415 - RNA, 19 nt, Artificial Sequence
  Description of Artificial Sequence: Synthetic oligonucleotide
  Antisense strand to SEQ ID NO: 1031414
ucaagucuggcaagucuac

SEQ ID NO: 1031416 - RNA, 19 nt, Artificial Sequence
  Description of Artificial Sequence: Synthetic oligonucleotide
  Sense strand starting at position 2660 of SEQ ID NO: 914796
auuguauauuggccaucau

SEQ ID NO: 1031417 - RNA, 19 nt, Artificial Sequence
  Description of Artificial Sequence: Synthetic oligonucleotide
  Antisense strand to SEQ ID NO: 1031416
augauggccaauauacaau

SEQ ID NO: 1031418 - RNA, 19 nt, Artificial Sequence
  Description of Artificial Sequence: Synthetic oligonucleotide
  Sense strand starting at position 2661 of SEQ ID NO: 914796
uuguauauuggccaucauc

SEQ ID NO: 1031419 - RNA, 19 nt, Artificial Sequence
  Description of Artificial Sequence: Synthetic oligonucleotide
  Antisense strand to SEQ ID NO: 1031418
gaugauggccaauauacaa

SEQ ID NO: 1031420 - RNA, 19 nt, Artificial Sequence
  Description of Artificial Sequence: Synthetic oligonucleotide
  Sense strand starting at position 2767 of SEQ ID NO: 914796
ugucacugucccuacauaa

SEQ ID NO: 1031421 - RNA, 19 nt, Artificial Sequence
  Description of Artificial Sequence: Synthetic oligonucleotide
  Antisense strand to SEQ ID NO: 1031420
uuauguagggacagugaca

SEQ ID NO: 1031422 - RNA, 19 nt, Artificial Sequence
  Description of Artificial Sequence: Synthetic oligonucleotide
  Sense strand starting at position 3064 of SEQ ID NO: 914796
ccagaucagugguuuggga

SEQ ID NO: 1031423 - RNA, 19 nt, Artificial Sequence
  Description of Artificial Sequence: Synthetic oligonucleotide
  Antisense strand to SEQ ID NO: 1031422
ucccaaaccacugaucugg

SEQ ID NO: 1031424 - RNA, 19 nt, Artificial Sequence
  Description of Artificial Sequence: Synthetic oligonucleotide
  Sense strand starting at position 3066 of SEQ ID NO: 914796
agaucagugguuugggaca

SEQ ID NO: 1031425 - RNA, 19 nt, Artificial Sequence
  Description of Artificial Sequence: Synthetic oligonucleotide
  Antisense strand to SEQ ID NO: 1031424
ugucccaaaccacugaucu

SEQ ID NO: 1031426 - RNA, 19 nt, Artificial Sequence
  Description of Artificial Sequence: Synthetic oligonucleotide
  Sense strand starting at position 3247 of SEQ ID NO: 914796
cuuccaucuccaugggagu

SEQ ID NO: 1031427 - RNA, 19 nt, Artificial Sequence
  Description of Artificial Sequence: Synthetic oligonucleotide
  Antisense strand to SEQ ID NO: 1031426
acucccauggagauggaag

SEQ ID NO: 1031428 - RNA, 19 nt, Artificial Sequence
  Description of Artificial Sequence: Synthetic oligonucleotide
  Sense strand starting at position 3248 of SEQ ID NO: 914796
uuccaucuccaugggaguu

SEQ ID NO: 1031429 - RNA, 19 nt, Artificial Sequence
  Description of Artificial Sequence: Synthetic oligonucleotide
  Antisense strand to SEQ ID NO: 1031428
aacucccauggagauggaa

SEQ ID NO: 1031430 - RNA, 19 nt, Artificial Sequence
  Description of Artificial Sequence: Synthetic oligonucleotide
  Sense strand starting at position 3361 of SEQ ID NO: 914796
gagauauauguggguuggu

SEQ ID NO: 1031431 - RNA, 19 nt, Artificial Sequence
  Description of Artificial Sequence: Synthetic oligonucleotide
  Antisense strand to SEQ ID NO: 1031430
accaacccacauauaucuc

SEQ ID NO: 1031432 - RNA, 19 nt, Artificial Sequence
  Description of Artificial Sequence: Synthetic oligonucleotide
  Sense strand starting at position 3362 of SEQ ID NO: 914796
agauauauguggguugguu

SEQ ID NO: 1031433 - RNA, 19 nt, Artificial Sequence
  Description of Artificial Sequence: Synthetic oligonucleotide
  Antisense strand to SEQ ID NO: 1031432
aaccaacccacauauaucu

SEQ ID NO: 1031434 - RNA, 19 nt, Artificial Sequence
  Description of Artificial Sequence: Synthetic oligonucleotide
  Sense strand starting at position 3382 of SEQ ID NO: 914796
gggcaaggguauaggauua

SEQ ID NO: 1031435 - RNA, 19 nt, Artificial Sequence
  Description of Artificial Sequence: Synthetic oligonucleotide
  Antisense strand to SEQ ID NO: 1031434
uaauccuauacccuugccc

SEQ ID NO: 1031436 - RNA, 19 nt, Artificial Sequence
  Description of Artificial Sequence: Synthetic oligonucleotide
  Sense strand starting at position 3432 of SEQ ID NO: 914796
gucugaucuugucuuaaau

SEQ ID NO: 1031437 - RNA, 19 nt, Artificial Sequence
  Description of Artificial Sequence: Synthetic oligonucleotide
  Antisense strand to SEQ ID NO: 1031436
auuuaagacaagaucagac

SEQ ID NO: 1031438 - RNA, 19 nt, Artificial Sequence
  Description of Artificial Sequence: Synthetic oligonucleotide
  Sense strand starting at position 3468 of SEQ ID NO: 914796
gacuguugugaauacagua

SEQ ID NO: 1031439 - RNA, 19 nt, Artificial Sequence
  Description of Artificial Sequence: Synthetic oligonucleotide
  Antisense strand to SEQ ID NO: 1031438
uacuguauucacaacaguc

SEQ ID NO: 1031440 - RNA, 19 nt, Artificial Sequence
  Description of Artificial Sequence: Synthetic oligonucleotide
  Sense strand starting at position 3517 of SEQ ID NO: 914796
gcuguauaagcuuaccaga

SEQ ID NO: 1031441 - RNA, 19 nt, Artificial Sequence
  Description of Artificial Sequence: Synthetic oligonucleotide
  Antisense strand to SEQ ID NO: 1031440
ucugguaagcuuauacagc

SEQ ID NO: 1031442 - RNA, 19 nt, Artificial Sequence
  Description of Artificial Sequence: Synthetic oligonucleotide
  Sense strand starting at position 3519 of SEQ ID NO: 914796
uguauaagcuuaccagaua

SEQ ID NO: 1031443 - RNA, 19 nt, Artificial Sequence
  Description of Artificial Sequence: Synthetic oligonucleotide
  Antisense strand to SEQ ID NO: 1031442
uaucugguaagcuuauaca

SEQ ID NO: 1031444 - RNA, 19 nt, Artificial Sequence
  Description of Artificial Sequence: Synthetic oligonucleotide
  Sense strand starting at position 3650 of SEQ ID NO: 914796
acaagaaugcaauguuaaa

SEQ ID NO: 1031445 - RNA, 19 nt, Artificial Sequence
  Description of Artificial Sequence: Synthetic oligonucleotide
  Antisense strand to SEQ ID NO: 1031444
uuuaacauugcauucuugu

SEQ ID NO: 1031446 - RNA, 19 nt, Artificial Sequence
  Description of Artificial Sequence: Synthetic oligonucleotide
  Sense strand starting at position 3676 of SEQ ID NO: 914796
agcaaacacuguccuagua

SEQ ID NO: 1031447 - RNA, 19 nt, Artificial Sequence
  Description of Artificial Sequence: Synthetic oligonucleotide
  Antisense strand to SEQ ID NO: 1031446
uacuaggacaguguuugcu

SEQ ID NO: 1031448 - RNA, 19 nt, Artificial Sequence
  Description of Artificial Sequence: Synthetic oligonucleotide
  Sense strand starting at position 3799 of SEQ ID NO: 914796
ccuaaagguucuguuccau

SEQ ID NO: 1031449 - RNA, 19 nt, Artificial Sequence
  Description of Artificial Sequence: Synthetic oligonucleotide
  Antisense strand to SEQ ID NO: 1031448
auggaacagaaccuuuagg

SEQ ID NO: 1031450 - RNA, 19 nt, Artificial Sequence
  Description of Artificial Sequence: Synthetic oligonucleotide
  Sense strand starting at position 3935 of SEQ ID NO: 914796
gguaaucacuuucugguca

SEQ ID NO: 1031451 - RNA, 19 nt, Artificial Sequence
  Description of Artificial Sequence: Synthetic oligonucleotide
  Antisense strand to SEQ ID NO: 1031450
ugaccagaaagugauuacc

SEQ ID NO: 1031452 - RNA, 19 nt, Artificial Sequence
  Description of Artificial Sequence: Synthetic oligonucleotide
  Sense strand starting at position 3939 of SEQ ID NO: 914796
aucacuuucuggucacuau

SEQ ID NO: 1031453 - RNA, 19 nt, Artificial Sequence
  Description of Artificial Sequence: Synthetic oligonucleotide
  Antisense strand to SEQ ID NO: 1031452
auagugaccagaaagugau

SEQ ID NO: 1031454 - RNA, 19 nt, Artificial Sequence
  Description of Artificial Sequence: Synthetic oligonucleotide
  Sense strand starting at position 38 of SEQ ID NO: 914797
ccaugaaaccggugagaac

SEQ ID NO: 1031455 - RNA, 19 nt, Artificial Sequence
  Description of Artificial Sequence: Synthetic oligonucleotide
  Antisense strand to SEQ ID NO: 1031454
guucucaccgguuucaugg

SEQ ID NO: 1031456 - RNA, 19 nt, Artificial Sequence
  Description of Artificial Sequence: Synthetic oligonucleotide
  Sense strand starting at position 61 of SEQ ID NO: 914797
cugccucagccugaggaaa

SEQ ID NO: 1031457 - RNA, 19 nt, Artificial Sequence
  Description of Artificial Sequence: Synthetic oligonucleotide
  Antisense strand to SEQ ID NO: 1031456
uuuccucaggcugaggcag

SEQ ID NO: 1031458 - RNA, 19 nt, Artificial Sequence
  Description of Artificial Sequence: Synthetic oligonucleotide
  Sense strand starting at position 138 of SEQ ID NO: 914797
aacacagaccugcgagaau

SEQ ID NO: 1031459 - RNA, 19 nt, Artificial Sequence
  Description of Artificial Sequence: Synthetic oligonucleotide
  Antisense strand to SEQ ID NO: 1031458
auucucgcaggucuguguu

SEQ ID NO: 1031460 - RNA, 19 nt, Artificial Sequence
  Description of Artificial Sequence: Synthetic oligonucleotide
  Sense strand starting at position 189 of SEQ ID NO: 914797
uugaaauguucuuucuaug

SEQ ID NO: 1031461 - RNA, 19 nt, Artificial Sequence
  Description of Artificial Sequence: Synthetic oligonucleotide
  Antisense strand to SEQ ID NO: 1031460
cauagaaagaacauuucaa

SEQ ID NO: 1031462 - RNA, 19 nt, Artificial Sequence
  Description of Artificial Sequence: Synthetic oligonucleotide
  Sense strand starting at position 238 of SEQ ID NO: 914797
gugucuugagaucacacua

SEQ ID NO: 1031463 - RNA, 19 nt, Artificial Sequence
  Description of Artificial Sequence: Synthetic oligonucleotide
  Antisense strand to SEQ ID NO: 1031462
uagugugaucucaagacac

SEQ ID NO: 1031464 - RNA, 19 nt, Artificial Sequence
  Description of Artificial Sequence: Synthetic oligonucleotide
  Sense strand starting at position 349 of SEQ ID NO: 914797
aagacagaagucugguaua

SEQ ID NO: 1031465 - RNA, 19 nt, Artificial Sequence
  Description of Artificial Sequence: Synthetic oligonucleotide
  Antisense strand to SEQ ID NO: 1031464
uauaccagacuucugucuu

SEQ ID NO: 1031466 - RNA, 19 nt, Artificial Sequence
  Description of Artificial Sequence: Synthetic oligonucleotide
  Sense strand starting at position 354 of SEQ ID NO: 914797
agaagucugguauaucauu

SEQ ID NO: 1031467 - RNA, 19 nt, Artificial Sequence
  Description of Artificial Sequence: Synthetic oligonucleotide
  Antisense strand to SEQ ID NO: 1031466
aaugauauaccagacuucu

SEQ ID NO: 1031468 - RNA, 19 nt, Artificial Sequence
  Description of Artificial Sequence: Synthetic oligonucleotide
  Sense strand starting at position 359 of SEQ ID NO: 914797
ucugguauaucauuccuau

SEQ ID NO: 1031469 - RNA, 19 nt, Artificial Sequence
  Description of Artificial Sequence: Synthetic oligonucleotide
  Antisense strand to SEQ ID NO: 1031468
auaggaaugauauaccaga

SEQ ID NO: 1031470 - RNA, 19 nt, Artificial Sequence
  Description of Artificial Sequence: Synthetic oligonucleotide
  Sense strand starting at position 720 of SEQ ID NO: 914797
aagggaauauccgauuuac

SEQ ID NO: 1031471 - RNA, 19 nt, Artificial Sequence
  Description of Artificial Sequence: Synthetic oligonucleotide
  Antisense strand to SEQ ID NO: 1031470
guaaaucggauauucccuu

SEQ ID NO: 1031472 - RNA, 19 nt, Artificial Sequence
  Description of Artificial Sequence: Synthetic oligonucleotide
  Sense strand starting at position 843 of SEQ ID NO: 914797
cugacaauauuagugugaa

SEQ ID NO: 1031473 - RNA, 19 nt, Artificial Sequence
  Description of Artificial Sequence: Synthetic oligonucleotide
  Antisense strand to SEQ ID NO: 1031472
uucacacuaauauugucag

SEQ ID NO: 1031474 - RNA, 19 nt, Artificial Sequence
  Description of Artificial Sequence: Synthetic oligonucleotide
  Sense strand starting at position 846 of SEQ ID NO: 914797
acaauauuagugugaagug

SEQ ID NO: 1031475 - RNA, 19 nt, Artificial Sequence
  Description of Artificial Sequence: Synthetic oligonucleotide
  Antisense strand to SEQ ID NO: 1031474
cacuucacacuaauauugu

SEQ ID NO: 1031476 - RNA, 19 nt, Artificial Sequence
  Description of Artificial Sequence: Synthetic oligonucleotide
  Sense strand starting at position 881 of SEQ ID NO: 914797
cagcaaaguggcugagaaa

SEQ ID NO: 1031477 - RNA, 19 nt, Artificial Sequence
  Description of Artificial Sequence: Synthetic oligonucleotide
  Antisense strand to SEQ ID NO: 1031476
uuucucagccacuuugcug

SEQ ID NO: 1031478 - RNA, 19 nt, Artificial Sequence
  Description of Artificial Sequence: Synthetic oligonucleotide
  Sense strand starting at position 914 of SEQ ID NO: 914797
cagggcugccucuagaaua

SEQ ID NO: 1031479 - RNA, 19 nt, Artificial Sequence
  Description of Artificial Sequence: Synthetic oligonucleotide
  Antisense strand to SEQ ID NO: 1031478
uauucuagaggcagcccug

SEQ ID NO: 1031480 - RNA, 19 nt, Artificial Sequence
  Description of Artificial Sequence: Synthetic oligonucleotide
  Sense strand starting at position 926 of SEQ ID NO: 914797
uagaauacagcuuguauga

SEQ ID NO: 1031481 - RNA, 19 nt, Artificial Sequence
  Description of Artificial Sequence: Synthetic oligonucleotide
  Antisense strand to SEQ ID NO: 1031480
ucauacaagcuguauucua

SEQ ID NO: 1031482 - RNA, 19 nt, Artificial Sequence
  Description of Artificial Sequence: Synthetic oligonucleotide
  Sense strand starting at position 1077 of SEQ ID NO: 914797
ggcuacaauccaggaguca

SEQ ID NO: 1031483 - RNA, 19 nt, Artificial Sequence
  Description of Artificial Sequence: Synthetic oligonucleotide
  Antisense strand to SEQ ID NO: 1031482
ugacuccuggauuguagcc

SEQ ID NO: 1031484 - RNA, 19 nt, Artificial Sequence
  Description of Artificial Sequence: Synthetic oligonucleotide
  Sense strand starting at position 1092 of SEQ ID NO: 914797
gucagacuucugggaggga

SEQ ID NO: 1031485 - RNA, 19 nt, Artificial Sequence
  Description of Artificial Sequence: Synthetic oligonucleotide
  Antisense strand to SEQ ID NO: 1031484
ucccucccagaagucugac

SEQ ID NO: 1031486 - RNA, 19 nt, Artificial Sequence
  Description of Artificial Sequence: Synthetic oligonucleotide
  Sense strand starting at position 1118 of SEQ ID NO: 914797
agaccaaucuuggccaagu

SEQ ID NO: 1031487 - RNA, 19 nt, Artificial Sequence
  Description of Artificial Sequence: Synthetic oligonucleotide
  Antisense strand to SEQ ID NO: 1031486
acuuggccaagauuggucu

SEQ ID NO: 1031488 - RNA, 19 nt, Artificial Sequence
  Description of Artificial Sequence: Synthetic oligonucleotide
  Sense strand starting at position 1119 of SEQ ID NO: 914797
gaccaaucuuggccaaguu

SEQ ID NO: 1031489 - RNA, 19 nt, Artificial Sequence
  Description of Artificial Sequence: Synthetic oligonucleotide
  Antisense strand to SEQ ID NO: 1031488
aacuuggccaagauugguc

SEQ ID NO: 1031490 - RNA, 19 nt, Artificial Sequence
  Description of Artificial Sequence: Synthetic oligonucleotide
  Sense strand starting at position 2152 of SEQ ID NO: 914797
cuaguagacuugccagacu

SEQ ID NO: 1031491 - RNA, 19 nt, Artificial Sequence
  Description of Artificial Sequence: Synthetic oligonucleotide
  Antisense strand to SEQ ID NO: 1031490
agucuggcaagucuacuag

SEQ ID NO: 1031492 - RNA, 19 nt, Artificial Sequence
  Description of Artificial Sequence: Synthetic oligonucleotide
  Sense strand starting at position 2155 of SEQ ID NO: 914797
guagacuugccagacuuga

SEQ ID NO: 1031493 - RNA, 19 nt, Artificial Sequence
  Description of Artificial Sequence: Synthetic oligonucleotide
  Antisense strand to SEQ ID NO: 1031492
ucaagucuggcaagucuac

SEQ ID NO: 1031494 - RNA, 19 nt, Artificial Sequence
  Description of Artificial Sequence: Synthetic oligonucleotide
  Sense strand starting at position 2205 of SEQ ID NO: 914797
uuguauauuggccaucauc

SEQ ID NO: 1031495 - RNA, 19 nt, Artificial Sequence
  Description of Artificial Sequence: Synthetic oligonucleotide
  Antisense strand to SEQ ID NO: 1031494
gaugauggccaauauacaa

SEQ ID NO: 1031496 - RNA, 19 nt, Artificial Sequence
  Description of Artificial Sequence: Synthetic oligonucleotide
  Sense strand starting at position 2311 of SEQ ID NO: 914797
ugucacugucccuacauaa

SEQ ID NO: 1031497 - RNA, 19 nt, Artificial Sequence
  Description of Artificial Sequence: Synthetic oligonucleotide
  Antisense strand to SEQ ID NO: 1031496
uuauguagggacagugaca

SEQ ID NO: 1031498 - RNA, 19 nt, Artificial Sequence
  Description of Artificial Sequence: Synthetic oligonucleotide
  Sense strand starting at position 2608 of SEQ ID NO: 914797
ccagaucagugguuuggga

SEQ ID NO: 1031499 - RNA, 19 nt, Artificial Sequence
  Description of Artificial Sequence: Synthetic oligonucleotide
  Antisense strand to SEQ ID NO: 1031498
ucccaaaccacugaucugg

SEQ ID NO: 1031500 - RNA, 19 nt, Artificial Sequence
  Description of Artificial Sequence: Synthetic oligonucleotide
  Sense strand starting at position 2610 of SEQ ID NO: 914797
agaucagugguuugggaca

SEQ ID NO: 1031501 - RNA, 19 nt, Artificial Sequence
  Description of Artificial Sequence: Synthetic oligonucleotide
  Antisense strand to SEQ ID NO: 1031500
ugucccaaaccacugaucu

SEQ ID NO: 1031502 - RNA, 19 nt, Artificial Sequence
  Description of Artificial Sequence: Synthetic oligonucleotide
  Sense strand starting at position 2791 of SEQ ID NO: 914797
cuuccaucuccaugggagu

SEQ ID NO: 1031503 - RNA, 19 nt, Artificial Sequence
  Description of Artificial Sequence: Synthetic oligonucleotide
  Antisense strand to SEQ ID NO: 1031502
acucccauggagauggaag

SEQ ID NO: 1031504 - RNA, 19 nt, Artificial Sequence
  Description of Artificial Sequence: Synthetic oligonucleotide
  Sense strand starting at position 2792 of SEQ ID NO: 914797
uuccaucuccaugggaguu

SEQ ID NO: 1031505 - RNA, 19 nt, Artificial Sequence
  Description of Artificial Sequence: Synthetic oligonucleotide
  Antisense strand to SEQ ID NO: 1031504
aacucccauggagauggaa

SEQ ID NO: 1031506 - RNA, 19 nt, Artificial Sequence
  Description of Artificial Sequence: Synthetic oligonucleotide
  Sense strand starting at position 2905 of SEQ ID NO: 914797
gagauauauguggguuggu

SEQ ID NO: 1031507 - RNA, 19 nt, Artificial Sequence
  Description of Artificial Sequence: Synthetic oligonucleotide
  Antisense strand to SEQ ID NO: 1031506
accaacccacauauaucuc

SEQ ID NO: 1031508 - RNA, 19 nt, Artificial Sequence
  Description of Artificial Sequence: Synthetic oligonucleotide
  Sense strand starting at position 2906 of SEQ ID NO: 914797
agauauauguggguugguu

SEQ ID NO: 1031509 - RNA, 19 nt, Artificial Sequence
  Description of Artificial Sequence: Synthetic oligonucleotide
  Antisense strand to SEQ ID NO: 1031508
aaccaacccacauauaucu

SEQ ID NO: 1031510 - RNA, 19 nt, Artificial Sequence
  Description of Artificial Sequence: Synthetic oligonucleotide
  Sense strand starting at position 2926 of SEQ ID NO: 914797
gggcaaggguauaggauua

SEQ ID NO: 1031511 - RNA, 19 nt, Artificial Sequence
  Description of Artificial Sequence: Synthetic oligonucleotide
  Antisense strand to SEQ ID NO: 1031510
uaauccuauacccuugccc

SEQ ID NO: 1031512 - RNA, 19 nt, Artificial Sequence
  Description of Artificial Sequence: Synthetic oligonucleotide
  Sense strand starting at position 3012 of SEQ ID NO: 914797
gacuguugugaauacagua

SEQ ID NO: 1031513 - RNA, 19 nt, Artificial Sequence
  Description of Artificial Sequence: Synthetic oligonucleotide
  Antisense strand to SEQ ID NO: 1031512
uacuguauucacaacaguc

SEQ ID NO: 1031514 - RNA, 19 nt, Artificial Sequence
  Description of Artificial Sequence: Synthetic oligonucleotide
  Sense strand starting at position 3061 of SEQ ID NO: 914797
gcuguauaagcuuaccaga

SEQ ID NO: 1031515 - RNA, 19 nt, Artificial Sequence
  Description of Artificial Sequence: Synthetic oligonucleotide
  Antisense strand to SEQ ID NO: 1031514
ucugguaagcuuauacagc

SEQ ID NO: 1031516 - RNA, 19 nt, Artificial Sequence
  Description of Artificial Sequence: Synthetic oligonucleotide
  Sense strand starting at position 3063 of SEQ ID NO: 914797
uguauaagcuuaccagaua

SEQ ID NO: 1031517 - RNA, 19 nt, Artificial Sequence
  Description of Artificial Sequence: Synthetic oligonucleotide
  Antisense strand to SEQ ID NO: 1031516
uaucugguaagcuuauaca

SEQ ID NO: 1031518 - RNA, 19 nt, Artificial Sequence
  Description of Artificial Sequence: Synthetic oligonucleotide
  Sense strand starting at position 3194 of SEQ ID NO: 914797
acaagaaugcaauguuaaa

SEQ ID NO: 1031519 - RNA, 19 nt, Artificial Sequence
  Description of Artificial Sequence: Synthetic oligonucleotide
  Antisense strand to SEQ ID NO: 1031518
uuuaacauugcauucuugu

SEQ ID NO: 1031520 - RNA, 19 nt, Artificial Sequence
  Description of Artificial Sequence: Synthetic oligonucleotide
  Sense strand starting at position 3483 of SEQ ID NO: 914797
aucacuuucuggucacuau

SEQ ID NO: 1031521 - RNA, 19 nt, Artificial Sequence
  Description of Artificial Sequence: Synthetic oligonucleotide
  Antisense strand to SEQ ID NO: 1031520
auagugaccagaaagugau

SEQ ID NO: 1031522 - RNA, 19 nt, Artificial Sequence
  Description of Artificial Sequence: Synthetic oligonucleotide
  Sense strand starting at position 3704 of SEQ ID NO: 914797
augacuauguugcuauaaa

SEQ ID NO: 1031523 - RNA, 19 nt, Artificial Sequence
  Description of Artificial Sequence: Synthetic oligonucleotide
  Antisense strand to SEQ ID NO: 1031522
uuuauagcaacauagucau

SEQ ID NO: 1031524 - RNA, 19 nt, Artificial Sequence
  Description of Artificial Sequence: Synthetic oligonucleotide
  Sense strand starting at position 3722 of SEQ ID NO: 914797
agaugaauaugacaaacua

SEQ ID NO: 1031525 - RNA, 19 nt, Artificial Sequence
  Description of Artificial Sequence: Synthetic oligonucleotide
  Antisense strand to SEQ ID NO: 1031524
uaguuugucauauucaucu

SEQ ID NO: 1031526 - RNA, 19 nt, Artificial Sequence
  Description of Artificial Sequence: Synthetic oligonucleotide
  Sense strand starting at position 3784 of SEQ ID NO: 914797
agaugaauaugacaauuuc

SEQ ID NO: 1031527 - RNA, 19 nt, Artificial Sequence
  Description of Artificial Sequence: Synthetic oligonucleotide
  Antisense strand to SEQ ID NO: 1031526
gaaauugucauauucaucu

SEQ ID NO: 1031528 - RNA, 19 nt, Artificial Sequence
  Description of Artificial Sequence: Synthetic oligonucleotide
  Sense strand starting at position 3868 of SEQ ID NO: 914797
gugccaaaugaguaaauca

SEQ ID NO: 1031529 - RNA, 19 nt, Artificial Sequence
  Description of Artificial Sequence: Synthetic oligonucleotide
  Antisense strand to SEQ ID NO: 1031528
ugauuuacucauuuggcac

SEQ ID NO: 1031530 - RNA, 19 nt, Artificial Sequence
  Description of Artificial Sequence: Synthetic oligonucleotide
  Sense strand starting at position 3942 of SEQ ID NO: 914797
ccaguauuccaguaugaau

SEQ ID NO: 1031531 - RNA, 19 nt, Artificial Sequence
  Description of Artificial Sequence: Synthetic oligonucleotide
  Antisense strand to SEQ ID NO: 1031530
auucauacuggaauacugg

SEQ ID NO: 1031532 - RNA, 19 nt, Artificial Sequence
  Description of Artificial Sequence: Synthetic oligonucleotide
  Sense strand starting at position 3944 of SEQ ID NO: 914797
aguauuccaguaugaauau

SEQ ID NO: 1031533 - RNA, 19 nt, Artificial Sequence
  Description of Artificial Sequence: Synthetic oligonucleotide
  Antisense strand to SEQ ID NO: 1031532
auauucauacuggaauacu

SEQ ID NO: 1031534 - RNA, 19 nt, Artificial Sequence
  Description of Artificial Sequence: Synthetic oligonucleotide
  Sense strand starting at position 107 of SEQ ID NO: 914798
ggugcuguucuaugaagau

SEQ ID NO: 1031535 - RNA, 19 nt, Artificial Sequence
  Description of Artificial Sequence: Synthetic oligonucleotide
  Antisense strand to SEQ ID NO: 1031534
aucuucauagaacagcacc

SEQ ID NO: 1031536 - RNA, 19 nt, Artificial Sequence
  Description of Artificial Sequence: Synthetic oligonucleotide
  Sense strand starting at position 162 of SEQ ID NO: 914798
ggagcacuuccagaagggu

SEQ ID NO: 1031537 - RNA, 19 nt, Artificial Sequence
  Description of Artificial Sequence: Synthetic oligonucleotide
  Antisense strand to SEQ ID NO: 1031536
acccuucuggaagugcucc

SEQ ID NO: 1031538 - RNA, 19 nt, Artificial Sequence
  Description of Artificial Sequence: Synthetic oligonucleotide
  Sense strand starting at position 354 of SEQ ID NO: 914798
gugugcaaccuguacaaca

SEQ ID NO: 1031539 - RNA, 19 nt, Artificial Sequence
  Description of Artificial Sequence: Synthetic oligonucleotide
  Antisense strand to SEQ ID NO: 1031538
uguuguacagguugcacac

SEQ ID NO: 1031540 - RNA, 19 nt, Artificial Sequence
  Description of Artificial Sequence: Synthetic oligonucleotide
  Sense strand starting at position 514 of SEQ ID NO: 914798
uuaagugucuccuuuggaa

SEQ ID NO: 1031541 - RNA, 19 nt, Artificial Sequence
  Description of Artificial Sequence: Synthetic oligonucleotide
  Antisense strand to SEQ ID NO: 1031540
uuccaaaggagacacuuaa

SEQ ID NO: 1031542 - RNA, 19 nt, Artificial Sequence
  Description of Artificial Sequence: Synthetic oligonucleotide
  Sense strand starting at position 516 of SEQ ID NO: 914798
aagugucuccuuuggaaua

SEQ ID NO: 1031543 - RNA, 19 nt, Artificial Sequence
  Description of Artificial Sequence: Synthetic oligonucleotide
  Antisense strand to SEQ ID NO: 1031542
uauuccaaaggagacacuu

SEQ ID NO: 1031544 - RNA, 19 nt, Artificial Sequence
  Description of Artificial Sequence: Synthetic oligonucleotide
  Sense strand starting at position 703 of SEQ ID NO: 914798
gguccuauugacugggauc

SEQ ID NO: 1031545 - RNA, 19 nt, Artificial Sequence
  Description of Artificial Sequence: Synthetic oligonucleotide
  Antisense strand to SEQ ID NO: 1031544
gaucccagucaauaggacc

SEQ ID NO: 1031546 - RNA, 19 nt, Artificial Sequence
  Description of Artificial Sequence: Synthetic oligonucleotide
  Sense strand starting at position 771 of SEQ ID NO: 914798
ggaccauugcuaggaggga

SEQ ID NO: 1031547 - RNA, 19 nt, Artificial Sequence
  Description of Artificial Sequence: Synthetic oligonucleotide
  Antisense strand to SEQ ID NO: 1031546
ucccuccuagcaauggucc

SEQ ID NO: 1031548 - RNA, 19 nt, Artificial Sequence
  Description of Artificial Sequence: Synthetic oligonucleotide
  Sense strand starting at position 786 of SEQ ID NO: 914798
gggacagaguuucuucuca

SEQ ID NO: 1031549 - RNA, 19 nt, Artificial Sequence
  Description of Artificial Sequence: Synthetic oligonucleotide
  Antisense strand to SEQ ID NO: 1031548
ugagaagaaacucuguccc

SEQ ID NO: 1031550 - RNA, 19 nt, Artificial Sequence
  Description of Artificial Sequence: Synthetic oligonucleotide
  Sense strand starting at position 788 of SEQ ID NO: 914798
gacagaguuucuucucagu

SEQ ID NO: 1031551 - RNA, 19 nt, Artificial Sequence
  Description of Artificial Sequence: Synthetic oligonucleotide
  Antisense strand to SEQ ID NO: 1031550
acugagaagaaacucuguc

SEQ ID NO: 1031552 - RNA, 19 nt, Artificial Sequence
  Description of Artificial Sequence: Synthetic oligonucleotide
  Sense strand starting at position 819 of SEQ ID NO: 914798
cgaccacagucaucacuua

SEQ ID NO: 1031553 - RNA, 19 nt, Artificial Sequence
  Description of Artificial Sequence: Synthetic oligonucleotide
  Antisense strand to SEQ ID NO: 1031552
uaagugaugacuguggucg

SEQ ID NO: 1031554 - RNA, 19 nt, Artificial Sequence
  Description of Artificial Sequence: Synthetic oligonucleotide
  Sense strand starting at position 932 of SEQ ID NO: 914798
cuggauggcuuccucuaau

SEQ ID NO: 1031555 - RNA, 19 nt, Artificial Sequence
  Description of Artificial Sequence: Synthetic oligonucleotide
  Antisense strand to SEQ ID NO: 1031554
auuagaggaagccauccag

SEQ ID NO: 1031556 - RNA, 19 nt, Artificial Sequence
  Description of Artificial Sequence: Synthetic oligonucleotide
  Sense strand starting at position 935 of SEQ ID NO: 914798
gauggcuuccucuaauugu

SEQ ID NO: 1031557 - RNA, 19 nt, Artificial Sequence
  Description of Artificial Sequence: Synthetic oligonucleotide
  Antisense strand to SEQ ID NO: 1031556
acaauuagaggaagccauc

SEQ ID NO: 1031558 - RNA, 19 nt, Artificial Sequence
  Description of Artificial Sequence: Synthetic oligonucleotide
  Sense strand starting at position 1009 of SEQ ID NO: 914798
gaacauggucugcagcaaa

SEQ ID NO: 1031559 - RNA, 19 nt, Artificial Sequence
  Description of Artificial Sequence: Synthetic oligonucleotide
  Antisense strand to SEQ ID NO: 1031558
uuugcugcagaccauguuc

SEQ ID NO: 1031560 - RNA, 19 nt, Artificial Sequence
  Description of Artificial Sequence: Synthetic oligonucleotide
  Sense strand starting at position 1103 of SEQ ID NO: 914798
agagaaauugggcguuacu

SEQ ID NO: 1031561 - RNA, 19 nt, Artificial Sequence
  Description of Artificial Sequence: Synthetic oligonucleotide
  Antisense strand to SEQ ID NO: 1031560
aguaacgcccaauuucucu

SEQ ID NO: 1031562 - RNA, 19 nt, Artificial Sequence
  Description of Artificial Sequence: Synthetic oligonucleotide
  Sense strand starting at position 1106 of SEQ ID NO: 914798
gaaauugggcguuacugga

SEQ ID NO: 1031563 - RNA, 19 nt, Artificial Sequence
  Description of Artificial Sequence: Synthetic oligonucleotide
  Antisense strand to SEQ ID NO: 1031562
uccaguaacgcccaauuuc

SEQ ID NO: 1031564 - RNA, 19 nt, Artificial Sequence
  Description of Artificial Sequence: Synthetic oligonucleotide
  Sense strand starting at position 1119 of SEQ ID NO: 914798
acuggaguuuaguccugga

SEQ ID NO: 1031565 - RNA, 19 nt, Artificial Sequence
  Description of Artificial Sequence: Synthetic oligonucleotide
  Antisense strand to SEQ ID NO: 1031564
uccaggacuaaacuccagu

SEQ ID NO: 1031566 - RNA, 19 nt, Artificial Sequence
  Description of Artificial Sequence: Synthetic oligonucleotide
  Sense strand starting at position 1123 of SEQ ID NO: 914798
gaguuuaguccuggaaagg

SEQ ID NO: 1031567 - RNA, 19 nt, Artificial Sequence
  Description of Artificial Sequence: Synthetic oligonucleotide
  Antisense strand to SEQ ID NO: 1031566
ccuuuccaggacuaaacuc

SEQ ID NO: 1031568 - RNA, 19 nt, Artificial Sequence
  Description of Artificial Sequence: Synthetic oligonucleotide
  Sense strand starting at position 1243 of SEQ ID NO: 914798
caagcugugugaccuugaa

SEQ ID NO: 1031569 - RNA, 19 nt, Artificial Sequence
  Description of Artificial Sequence: Synthetic oligonucleotide
  Antisense strand to SEQ ID NO: 1031568
uucaaggucacacagcuug

SEQ ID NO: 1031570 - RNA, 19 nt, Artificial Sequence
  Description of Artificial Sequence: Synthetic oligonucleotide
  Sense strand starting at position 1247 of SEQ ID NO: 914798
cugugugaccuugaaugaa

SEQ ID NO: 1031571 - RNA, 19 nt, Artificial Sequence
  Description of Artificial Sequence: Synthetic oligonucleotide
  Antisense strand to SEQ ID NO: 1031570
uucauucaaggucacacag

SEQ ID NO: 1031572 - RNA, 19 nt, Artificial Sequence
  Description of Artificial Sequence: Synthetic oligonucleotide
  Sense strand starting at position 1548 of SEQ ID NO: 914798
ugguaagauagcugaccuu

SEQ ID NO: 1031573 - RNA, 19 nt, Artificial Sequence
  Description of Artificial Sequence: Synthetic oligonucleotide
  Antisense strand to SEQ ID NO: 1031572
aaggucagcuaucuuacca

SEQ ID NO: 1031574 - RNA, 19 nt, Artificial Sequence
  Description of Artificial Sequence: Synthetic oligonucleotide
  Sense strand starting at position 2108 of SEQ ID NO: 914798
ugcagaagcccaugagaca

SEQ ID NO: 1031575 - RNA, 19 nt, Artificial Sequence
  Description of Artificial Sequence: Synthetic oligonucleotide
  Antisense strand to SEQ ID NO: 1031574
ugucucaugggcuucugca

SEQ ID NO: 1031576 - RNA, 19 nt, Artificial Sequence
  Description of Artificial Sequence: Synthetic oligonucleotide
  Sense strand starting at position 2172 of SEQ ID NO: 914798
auugaugucccuuggcaag

SEQ ID NO: 1031577 - RNA, 19 nt, Artificial Sequence
  Description of Artificial Sequence: Synthetic oligonucleotide
  Antisense strand to SEQ ID NO: 1031576
cuugccaagggacaucaau

SEQ ID NO: 1031578 - RNA, 19 nt, Artificial Sequence
  Description of Artificial Sequence: Synthetic oligonucleotide
  Sense strand starting at position 2349 of SEQ ID NO: 914798
guccucaucuaauuaguua

SEQ ID NO: 1031579 - RNA, 19 nt, Artificial Sequence
  Description of Artificial Sequence: Synthetic oligonucleotide
  Antisense strand to SEQ ID NO: 1031578
uaacuaauuagaugaggac

SEQ ID NO: 1031580 - RNA, 19 nt, Artificial Sequence
  Description of Artificial Sequence: Synthetic oligonucleotide
  Sense strand starting at position 2493 of SEQ ID NO: 914798
auacaugcacuuuguagaa

SEQ ID NO: 1031581 - RNA, 19 nt, Artificial Sequence
  Description of Artificial Sequence: Synthetic oligonucleotide
  Antisense strand to SEQ ID NO: 1031580
uucuacaaagugcauguau

SEQ ID NO: 1031582 - RNA, 19 nt, Artificial Sequence
  Description of Artificial Sequence: Synthetic oligonucleotide
  Sense strand starting at position 2604 of SEQ ID NO: 914798
caguaauguguauacaaug

SEQ ID NO: 1031583 - RNA, 19 nt, Artificial Sequence
  Description of Artificial Sequence: Synthetic oligonucleotide
  Antisense strand to SEQ ID NO: 1031582
cauuguauacacauuacug

SEQ ID NO: 1031584 - RNA, 19 nt, Artificial Sequence
  Description of Artificial Sequence: Synthetic oligonucleotide
  Sense strand starting at position 2609 of SEQ ID NO: 914798
auguguauacaaugaagua

SEQ ID NO: 1031585 - RNA, 19 nt, Artificial Sequence
  Description of Artificial Sequence: Synthetic oligonucleotide
  Antisense strand to SEQ ID NO: 1031584
uacuucauuguauacacau

SEQ ID NO: 1031586 - RNA, 19 nt, Artificial Sequence
  Description of Artificial Sequence: Synthetic oligonucleotide
  Sense strand starting at position 2964 of SEQ ID NO: 914798
ggaagcgucuuucuugaaa

SEQ ID NO: 1031587 - RNA, 19 nt, Artificial Sequence
  Description of Artificial Sequence: Synthetic oligonucleotide
  Antisense strand to SEQ ID NO: 1031586
uuucaagaaagacgcuucc

SEQ ID NO: 1031588 - RNA, 19 nt, Artificial Sequence
  Description of Artificial Sequence: Synthetic oligonucleotide
  Sense strand starting at position 2967 of SEQ ID NO: 914798
agcgucuuucuugaaagaa

SEQ ID NO: 1031589 - RNA, 19 nt, Artificial Sequence
  Description of Artificial Sequence: Synthetic oligonucleotide
  Antisense strand to SEQ ID NO: 1031588
uucuuucaagaaagacgcu

SEQ ID NO: 1031590 - RNA, 19 nt, Artificial Sequence
  Description of Artificial Sequence: Synthetic oligonucleotide
  Sense strand starting at position 3053 of SEQ ID NO: 914798
uaaaguugccugcaagaag

SEQ ID NO: 1031591 - RNA, 19 nt, Artificial Sequence
  Description of Artificial Sequence: Synthetic oligonucleotide
  Antisense strand to SEQ ID NO: 1031590
cuucuugcaggcaacuuua

SEQ ID NO: 1031592 - RNA, 19 nt, Artificial Sequence
  Description of Artificial Sequence: Synthetic oligonucleotide
  Sense strand starting at position 3056 of SEQ ID NO: 914798
aguugccugcaagaagaau

SEQ ID NO: 1031593 - RNA, 19 nt, Artificial Sequence
  Description of Artificial Sequence: Synthetic oligonucleotide
  Antisense strand to SEQ ID NO: 1031592
auucuucuugcaggcaacu

SEQ ID NO: 1031594 - RNA, 19 nt, Artificial Sequence
  Description of Artificial Sequence: Synthetic oligonucleotide
  Sense strand starting at position 3195 of SEQ ID NO: 914798
cuugacucuaaguguggaa

SEQ ID NO: 1031595 - RNA, 19 nt, Artificial Sequence
  Description of Artificial Sequence: Synthetic oligonucleotide
  Antisense strand to SEQ ID NO: 1031594
uuccacacuuagagucaag

SEQ ID NO: 1031596 - RNA, 19 nt, Artificial Sequence
  Description of Artificial Sequence: Synthetic oligonucleotide
  Sense strand starting at position 3197 of SEQ ID NO: 914798
ugacucuaaguguggaaua

SEQ ID NO: 1031597 - RNA, 19 nt, Artificial Sequence
  Description of Artificial Sequence: Synthetic oligonucleotide
  Antisense strand to SEQ ID NO: 1031596
uauuccacacuuagaguca

SEQ ID NO: 1031598 - RNA, 19 nt, Artificial Sequence
  Description of Artificial Sequence: Synthetic oligonucleotide
  Sense strand starting at position 3245 of SEQ ID NO: 914798
uucugaauuguagguaagu

SEQ ID NO: 1031599 - RNA, 19 nt, Artificial Sequence
  Description of Artificial Sequence: Synthetic oligonucleotide
  Antisense strand to SEQ ID NO: 1031598
acuuaccuacaauucagaa

SEQ ID NO: 1031600 - RNA, 19 nt, Artificial Sequence
  Description of Artificial Sequence: Synthetic oligonucleotide
  Sense strand starting at position 3246 of SEQ ID NO: 914798
ucugaauuguagguaaguu

SEQ ID NO: 1031601 - RNA, 19 nt, Artificial Sequence
  Description of Artificial Sequence: Synthetic oligonucleotide
  Antisense strand to SEQ ID NO: 1031600
aacuuaccuacaauucaga

SEQ ID NO: 1031602 - RNA, 19 nt, Artificial Sequence
  Description of Artificial Sequence: Synthetic oligonucleotide
  Sense strand starting at position 3247 of SEQ ID NO: 914798
cugaauuguagguaaguua

SEQ ID NO: 1031603 - RNA, 19 nt, Artificial Sequence
  Description of Artificial Sequence: Synthetic oligonucleotide
  Antisense strand to SEQ ID NO: 1031602
uaacuuaccuacaauucag

SEQ ID NO: 1031604 - RNA, 19 nt, Artificial Sequence
  Description of Artificial Sequence: Synthetic oligonucleotide
  Sense strand starting at position 3324 of SEQ ID NO: 914798
auuccugugcauuaugaaa

SEQ ID NO: 1031605 - RNA, 19 nt, Artificial Sequence
  Description of Artificial Sequence: Synthetic oligonucleotide
  Antisense strand to SEQ ID NO: 1031604
uuucauaaugcacaggaau

SEQ ID NO: 1031606 - RNA, 19 nt, Artificial Sequence
  Description of Artificial Sequence: Synthetic oligonucleotide
  Sense strand starting at position 3437 of SEQ ID NO: 914798
cugggcuacucuucucuua

SEQ ID NO: 1031607 - RNA, 19 nt, Artificial Sequence
  Description of Artificial Sequence: Synthetic oligonucleotide
  Antisense strand to SEQ ID NO: 1031606
uaagagaagaguagcccag

SEQ ID NO: 1031608 - RNA, 19 nt, Artificial Sequence
  Description of Artificial Sequence: Synthetic oligonucleotide
  Sense strand starting at position 3439 of SEQ ID NO: 914798
gggcuacucuucucuuaag

SEQ ID NO: 1031609 - RNA, 19 nt, Artificial Sequence
  Description of Artificial Sequence: Synthetic oligonucleotide
  Antisense strand to SEQ ID NO: 1031608
cuuaagagaagaguagccc

SEQ ID NO: 1031610 - RNA, 19 nt, Artificial Sequence
  Description of Artificial Sequence: Synthetic oligonucleotide
  Sense strand starting at position 3604 of SEQ ID NO: 914798
cagaaugaauguccucaga

SEQ ID NO: 1031611 - RNA, 19 nt, Artificial Sequence
  Description of Artificial Sequence: Synthetic oligonucleotide
  Antisense strand to SEQ ID NO: 1031610
ucugaggacauucauucug

SEQ ID NO: 1031612 - RNA, 19 nt, Artificial Sequence
  Description of Artificial Sequence: Synthetic oligonucleotide
  Sense strand starting at position 3606 of SEQ ID NO: 914798
gaaugaauguccucagacc

SEQ ID NO: 1031613 - RNA, 19 nt, Artificial Sequence
  Description of Artificial Sequence: Synthetic oligonucleotide
  Antisense strand to SEQ ID NO: 1031612
ggucugaggacauucauuc

SEQ ID NO: 1031614 - RNA, 19 nt, Artificial Sequence
  Description of Artificial Sequence: Synthetic oligonucleotide
  Sense strand starting at position 21 of SEQ ID NO: 914799
gaggguuucuccuccacua

SEQ ID NO: 1031615 - RNA, 19 nt, Artificial Sequence
  Description of Artificial Sequence: Synthetic oligonucleotide
  Antisense strand to SEQ ID NO: 1031614
uaguggaggagaaacccuc

SEQ ID NO: 1031616 - RNA, 19 nt, Artificial Sequence
  Description of Artificial Sequence: Synthetic oligonucleotide
  Sense strand starting at position 170 of SEQ ID NO: 914799
gacuccuucccaggaggau

SEQ ID NO: 1031617 - RNA, 19 nt, Artificial Sequence
  Description of Artificial Sequence: Synthetic oligonucleotide
  Antisense strand to SEQ ID NO: 1031616
auccuccugggaaggaguc

SEQ ID NO: 1031618 - RNA, 19 nt, Artificial Sequence
  Description of Artificial Sequence: Synthetic oligonucleotide
  Sense strand starting at position 259 of SEQ ID NO: 914799
ucuucucauccugggaaag

SEQ ID NO: 1031619 - RNA, 19 nt, Artificial Sequence
  Description of Artificial Sequence: Synthetic oligonucleotide
  Antisense strand to SEQ ID NO: 1031618
cuuucccaggaugagaaga

SEQ ID NO: 1031620 - RNA, 19 nt, Artificial Sequence
  Description of Artificial Sequence: Synthetic oligonucleotide
  Sense strand starting at position 360 of SEQ ID NO: 914799
ucccuauugcuuugggaag

SEQ ID NO: 1031621 - RNA, 19 nt, Artificial Sequence
  Description of Artificial Sequence: Synthetic oligonucleotide
  Antisense strand to SEQ ID NO: 1031620
cuucccaaagcaauaggga

SEQ ID NO: 1031622 - RNA, 19 nt, Artificial Sequence
  Description of Artificial Sequence: Synthetic oligonucleotide
  Sense strand starting at position 367 of SEQ ID NO: 914799
ugcuuugggaagugaaagu

SEQ ID NO: 1031623 - RNA, 19 nt, Artificial Sequence
  Description of Artificial Sequence: Synthetic oligonucleotide
  Antisense strand to SEQ ID NO: 1031622
acuuucacuucccaaagca

SEQ ID NO: 1031624 - RNA, 19 nt, Artificial Sequence
  Description of Artificial Sequence: Synthetic oligonucleotide
  Sense strand starting at position 789 of SEQ ID NO: 914799
ugccaacagugauuuaugu

SEQ ID NO: 1031625 - RNA, 19 nt, Artificial Sequence
  Description of Artificial Sequence: Synthetic oligonucleotide
  Antisense strand to SEQ ID NO: 1031624
acauaaaucacuguuggca

SEQ ID NO: 1031626 - RNA, 19 nt, Artificial Sequence
  Description of Artificial Sequence: Synthetic oligonucleotide
  Sense strand starting at position 825 of SEQ ID NO: 914799
auauaaugccgggagcagu

SEQ ID NO: 1031627 - RNA, 19 nt, Artificial Sequence
  Description of Artificial Sequence: Synthetic oligonucleotide
  Antisense strand to SEQ ID NO: 1031626
acugcucccggcauuauau

SEQ ID NO: 1031628 - RNA, 19 nt, Artificial Sequence
  Description of Artificial Sequence: Synthetic oligonucleotide
  Sense strand starting at position 1091 of SEQ ID NO: 914799
uguuuaucucugcacaaug

SEQ ID NO: 1031629 - RNA, 19 nt, Artificial Sequence
  Description of Artificial Sequence: Synthetic oligonucleotide
  Antisense strand to SEQ ID NO: 1031628
cauugugcagagauaaaca

SEQ ID NO: 1031630 - RNA, 19 nt, Artificial Sequence
  Description of Artificial Sequence: Synthetic oligonucleotide
  Sense strand starting at position 1117 of SEQ ID NO: 914799
accucuucugaguagugca

SEQ ID NO: 1031631 - RNA, 19 nt, Artificial Sequence
  Description of Artificial Sequence: Synthetic oligonucleotide
  Antisense strand to SEQ ID NO: 1031630
ugcacuacucagaagaggu

SEQ ID NO: 1031632 - RNA, 19 nt, Artificial Sequence
  Description of Artificial Sequence: Synthetic oligonucleotide
  Sense strand starting at position 1144 of SEQ ID NO: 914799
uacugugguaguugaugaa

SEQ ID NO: 1031633 - RNA, 19 nt, Artificial Sequence
  Description of Artificial Sequence: Synthetic oligonucleotide
  Antisense strand to SEQ ID NO: 1031632
uucaucaacuaccacagua

SEQ ID NO: 1031634 - RNA, 19 nt, Artificial Sequence
  Description of Artificial Sequence: Synthetic oligonucleotide
  Sense strand starting at position 1170 of SEQ ID NO: 914799
aggaauaauugaucuguug

SEQ ID NO: 1031635 - RNA, 19 nt, Artificial Sequence
  Description of Artificial Sequence: Synthetic oligonucleotide
  Antisense strand to SEQ ID NO: 1031634
caacagaucaauuauuccu

SEQ ID NO: 1031636 - RNA, 19 nt, Artificial Sequence
  Description of Artificial Sequence: Synthetic oligonucleotide
  Sense strand starting at position 1230 of SEQ ID NO: 914799
cagggauguguguaaggca

SEQ ID NO: 1031637 - RNA, 19 nt, Artificial Sequence
  Description of Artificial Sequence: Synthetic oligonucleotide
  Antisense strand to SEQ ID NO: 1031636
ugccuuacacacaucccug

SEQ ID NO: 1031638 - RNA, 19 nt, Artificial Sequence
  Description of Artificial Sequence: Synthetic oligonucleotide
  Sense strand starting at position 1274 of SEQ ID NO: 914799
cgucuuaauccucauacag

SEQ ID NO: 1031639 - RNA, 19 nt, Artificial Sequence
  Description of Artificial Sequence: Synthetic oligonucleotide
  Antisense strand to SEQ ID NO: 1031638
cuguaugaggauuaagacg

SEQ ID NO: 1031640 - RNA, 19 nt, Artificial Sequence
  Description of Artificial Sequence: Synthetic oligonucleotide
  Sense strand starting at position 1301 of SEQ ID NO: 914799
gagagaugguuaucauuau

SEQ ID NO: 1031641 - RNA, 19 nt, Artificial Sequence
  Description of Artificial Sequence: Synthetic oligonucleotide
  Antisense strand to SEQ ID NO: 1031640
auaaugauaaccaucucuc

SEQ ID NO: 1031642 - RNA, 19 nt, Artificial Sequence
  Description of Artificial Sequence: Synthetic oligonucleotide
  Sense strand starting at position 1305 of SEQ ID NO: 914799
gaugguuaucauuaugcag

SEQ ID NO: 1031643 - RNA, 19 nt, Artificial Sequence
  Description of Artificial Sequence: Synthetic oligonucleotide
  Antisense strand to SEQ ID NO: 1031642
cugcauaaugauaaccauc

SEQ ID NO: 1031644 - RNA, 19 nt, Artificial Sequence
  Description of Artificial Sequence: Synthetic oligonucleotide
  Sense strand starting at position 1316 of SEQ ID NO: 914799
uuaugcaguguaugaagaa

SEQ ID NO: 1031645 - RNA, 19 nt, Artificial Sequence
  Description of Artificial Sequence: Synthetic oligonucleotide
  Antisense strand to SEQ ID NO: 1031644
uucuucauacacugcauaa

SEQ ID NO: 1031646 - RNA, 19 nt, Artificial Sequence
  Description of Artificial Sequence: Synthetic oligonucleotide
  Sense strand starting at position 1468 of SEQ ID NO: 914799
uccuauggguucucaaaug

SEQ ID NO: 1031647 - RNA, 19 nt, Artificial Sequence
  Description of Artificial Sequence: Synthetic oligonucleotide
  Antisense strand to SEQ ID NO: 1031646
cauuugagaacccauagga

SEQ ID NO: 1031648 - RNA, 19 nt, Artificial Sequence
  Description of Artificial Sequence: Synthetic oligonucleotide
  Sense strand starting at position 1891 of SEQ ID NO: 914799
ugcagagauuucuaccaua

SEQ ID NO: 1031649 - RNA, 19 nt, Artificial Sequence
  Description of Artificial Sequence: Synthetic oligonucleotide
  Antisense strand to SEQ ID NO: 1031648
uaugguagaaaucucugca

SEQ ID NO: 1031650 - RNA, 19 nt, Artificial Sequence
  Description of Artificial Sequence: Synthetic oligonucleotide
  Sense strand starting at position 1912 of SEQ ID NO: 914799
ucaaauguauuaccuugua

SEQ ID NO: 1031651 - RNA, 19 nt, Artificial Sequence
  Description of Artificial Sequence: Synthetic oligonucleotide
  Antisense strand to SEQ ID NO: 1031650
uacaagguaauacauuuga

SEQ ID NO: 1031652 - RNA, 19 nt, Artificial Sequence
  Description of Artificial Sequence: Synthetic oligonucleotide
  Sense strand starting at position 1989 of SEQ ID NO: 914799
gcacaagacagcugagauu

SEQ ID NO: 1031653 - RNA, 19 nt, Artificial Sequence
  Description of Artificial Sequence: Synthetic oligonucleotide
  Antisense strand to SEQ ID NO: 1031652
aaucucagcugucuugugc

SEQ ID NO: 1031654 - RNA, 19 nt, Artificial Sequence
  Description of Artificial Sequence: Synthetic oligonucleotide
  Sense strand starting at position 2090 of SEQ ID NO: 914799
uggcucucaggguaugaua

SEQ ID NO: 1031655 - RNA, 19 nt, Artificial Sequence
  Description of Artificial Sequence: Synthetic oligonucleotide
  Antisense strand to SEQ ID NO: 1031654
uaucauacccugagagcca

SEQ ID NO: 1031656 - RNA, 19 nt, Artificial Sequence
  Description of Artificial Sequence: Synthetic oligonucleotide
  Sense strand starting at position 2404 of SEQ ID NO: 914799
caaacaugaugggcuuaga

SEQ ID NO: 1031657 - RNA, 19 nt, Artificial Sequence
  Description of Artificial Sequence: Synthetic oligonucleotide
  Antisense strand to SEQ ID NO: 1031656
ucuaagcccaucauguuug

SEQ ID NO: 1031658 - RNA, 19 nt, Artificial Sequence
  Description of Artificial Sequence: Synthetic oligonucleotide
  Sense strand starting at position 2587 of SEQ ID NO: 914799
ggagcacuuccagaagggu

SEQ ID NO: 1031659 - RNA, 19 nt, Artificial Sequence
  Description of Artificial Sequence: Synthetic oligonucleotide
  Antisense strand to SEQ ID NO: 1031658
acccuucuggaagugcucc

SEQ ID NO: 1031660 - RNA, 19 nt, Artificial Sequence
  Description of Artificial Sequence: Synthetic oligonucleotide
  Sense strand starting at position 2779 of SEQ ID NO: 914799
gugugcaaccuguacaaca

SEQ ID NO: 1031661 - RNA, 19 nt, Artificial Sequence
  Description of Artificial Sequence: Synthetic oligonucleotide
  Antisense strand to SEQ ID NO: 1031660
uguuguacagguugcacac

SEQ ID NO: 1031662 - RNA, 19 nt, Artificial Sequence
  Description of Artificial Sequence: Synthetic oligonucleotide
  Sense strand starting at position 2939 of SEQ ID NO: 914799
uuaagugucuccuuuggaa

SEQ ID NO: 1031663 - RNA, 19 nt, Artificial Sequence
  Description of Artificial Sequence: Synthetic oligonucleotide
  Antisense strand to SEQ ID NO: 1031662
uuccaaaggagacacuuaa

SEQ ID NO: 1031664 - RNA, 19 nt, Artificial Sequence
  Description of Artificial Sequence: Synthetic oligonucleotide
  Sense strand starting at position 2941 of SEQ ID NO: 914799
aagugucuccuuuggaaua

SEQ ID NO: 1031665 - RNA, 19 nt, Artificial Sequence
  Description of Artificial Sequence: Synthetic oligonucleotide
  Antisense strand to SEQ ID NO: 1031664
uauuccaaaggagacacuu

SEQ ID NO: 1031666 - RNA, 19 nt, Artificial Sequence
  Description of Artificial Sequence: Synthetic oligonucleotide
  Sense strand starting at position 3128 of SEQ ID NO: 914799
gguccuauugacugggauc

SEQ ID NO: 1031667 - RNA, 19 nt, Artificial Sequence
  Description of Artificial Sequence: Synthetic oligonucleotide
  Antisense strand to SEQ ID NO: 1031666
gaucccagucaauaggacc

SEQ ID NO: 1031668 - RNA, 19 nt, Artificial Sequence
  Description of Artificial Sequence: Synthetic oligonucleotide
  Sense strand starting at position 3196 of SEQ ID NO: 914799
ggaccauugcuaggaggga

SEQ ID NO: 1031669 - RNA, 19 nt, Artificial Sequence
  Description of Artificial Sequence: Synthetic oligonucleotide
  Antisense strand to SEQ ID NO: 1031668
ucccuccuagcaauggucc

SEQ ID NO: 1031670 - RNA, 19 nt, Artificial Sequence
  Description of Artificial Sequence: Synthetic oligonucleotide
  Sense strand starting at position 3211 of SEQ ID NO: 914799
gggacagaguuucuucuca

SEQ ID NO: 1031671 - RNA, 19 nt, Artificial Sequence
  Description of Artificial Sequence: Synthetic oligonucleotide
  Antisense strand to SEQ ID NO: 1031670
ugagaagaaacucuguccc

SEQ ID NO: 1031672 - RNA, 19 nt, Artificial Sequence
  Description of Artificial Sequence: Synthetic oligonucleotide
  Sense strand starting at position 3213 of SEQ ID NO: 914799
gacagaguuucuucucagu

SEQ ID NO: 1031673 - RNA, 19 nt, Artificial Sequence
  Description of Artificial Sequence: Synthetic oligonucleotide
  Antisense strand to SEQ ID NO: 1031672
acugagaagaaacucuguc

SEQ ID NO: 1031674 - RNA, 19 nt, Artificial Sequence
  Description of Artificial Sequence: Synthetic oligonucleotide
  Sense strand starting at position 3244 of SEQ ID NO: 914799
cgaccacagucaucacuua

SEQ ID NO: 1031675 - RNA, 19 nt, Artificial Sequence
  Description of Artificial Sequence: Synthetic oligonucleotide
  Antisense strand to SEQ ID NO: 1031674
uaagugaugacuguggucg

SEQ ID NO: 1031676 - RNA, 19 nt, Artificial Sequence
  Description of Artificial Sequence: Synthetic oligonucleotide
  Sense strand starting at position 3357 of SEQ ID NO: 914799
cuggauggcuuccucuaau

SEQ ID NO: 1031677 - RNA, 19 nt, Artificial Sequence
  Description of Artificial Sequence: Synthetic oligonucleotide
  Antisense strand to SEQ ID NO: 1031676
auuagaggaagccauccag

SEQ ID NO: 1031678 - RNA, 19 nt, Artificial Sequence
  Description of Artificial Sequence: Synthetic oligonucleotide
  Sense strand starting at position 3360 of SEQ ID NO: 914799
gauggcuuccucuaauugu

SEQ ID NO: 1031679 - RNA, 19 nt, Artificial Sequence
  Description of Artificial Sequence: Synthetic oligonucleotide
  Antisense strand to SEQ ID NO: 1031678
acaauuagaggaagccauc

SEQ ID NO: 1031680 - RNA, 19 nt, Artificial Sequence
  Description of Artificial Sequence: Synthetic oligonucleotide
  Sense strand starting at position 3434 of SEQ ID NO: 914799
gaacauggucugcagcaaa

SEQ ID NO: 1031681 - RNA, 19 nt, Artificial Sequence
  Description of Artificial Sequence: Synthetic oligonucleotide
  Antisense strand to SEQ ID NO: 1031680
uuugcugcagaccauguuc

SEQ ID NO: 1031682 - RNA, 19 nt, Artificial Sequence
  Description of Artificial Sequence: Synthetic oligonucleotide
  Sense strand starting at position 3528 of SEQ ID NO: 914799
agagaaauugggcguuacu

SEQ ID NO: 1031683 - RNA, 19 nt, Artificial Sequence
  Description of Artificial Sequence: Synthetic oligonucleotide
  Antisense strand to SEQ ID NO: 1031682
aguaacgcccaauuucucu

SEQ ID NO: 1031684 - RNA, 19 nt, Artificial Sequence
  Description of Artificial Sequence: Synthetic oligonucleotide
  Sense strand starting at position 3531 of SEQ ID NO: 914799
gaaauugggcguuacugga

SEQ ID NO: 1031685 - RNA, 19 nt, Artificial Sequence
  Description of Artificial Sequence: Synthetic oligonucleotide
  Antisense strand to SEQ ID NO: 1031684
uccaguaacgcccaauuuc

SEQ ID NO: 1031686 - RNA, 19 nt, Artificial Sequence
  Description of Artificial Sequence: Synthetic oligonucleotide
  Sense strand starting at position 3544 of SEQ ID NO: 914799
acuggaguuuaguccugga

SEQ ID NO: 1031687 - RNA, 19 nt, Artificial Sequence
  Description of Artificial Sequence: Synthetic oligonucleotide
  Antisense strand to SEQ ID NO: 1031686
uccaggacuaaacuccagu

SEQ ID NO: 1031688 - RNA, 19 nt, Artificial Sequence
  Description of Artificial Sequence: Synthetic oligonucleotide
  Sense strand starting at position 3548 of SEQ ID NO: 914799
gaguuuaguccuggaaagg

SEQ ID NO: 1031689 - RNA, 19 nt, Artificial Sequence
  Description of Artificial Sequence: Synthetic oligonucleotide
  Antisense strand to SEQ ID NO: 1031688
ccuuuccaggacuaaacuc

SEQ ID NO: 1031690 - RNA, 19 nt, Artificial Sequence
  Description of Artificial Sequence: Synthetic oligonucleotide
  Sense strand starting at position 3672 of SEQ ID NO: 914799
cugugugaccuugaaugaa

SEQ ID NO: 1031691 - RNA, 19 nt, Artificial Sequence
  Description of Artificial Sequence: Synthetic oligonucleotide
  Antisense strand to SEQ ID NO: 1031690
uucauucaaggucacacag

SEQ ID NO: 1031692 - RNA, 19 nt, Artificial Sequence
  Description of Artificial Sequence: Synthetic oligonucleotide
  Sense strand starting at position 3973 of SEQ ID NO: 914799
ugguaagauagcugaccuu

SEQ ID NO: 1031693 - RNA, 19 nt, Artificial Sequence
  Description of Artificial Sequence: Synthetic oligonucleotide
  Antisense strand to SEQ ID NO: 1031692
aaggucagcuaucuuacca

SEQ ID NO: 1031694 - RNA, 19 nt, Artificial Sequence
  Description of Artificial Sequence: Synthetic oligonucleotide
  Sense strand starting at position 1 of SEQ ID NO: 914800
gcacuauuccugcagauga

SEQ ID NO: 1031695 - RNA, 19 nt, Artificial Sequence
  Description of Artificial Sequence: Synthetic oligonucleotide
  Antisense strand to SEQ ID NO: 1031694
ucaucugcaggaauagugc

SEQ ID NO: 1031696 - RNA, 19 nt, Artificial Sequence
  Description of Artificial Sequence: Synthetic oligonucleotide
  Sense strand starting at position 18 of SEQ ID NO: 914800
gagggacuauuggcauagu

SEQ ID NO: 1031697 - RNA, 19 nt, Artificial Sequence
  Description of Artificial Sequence: Synthetic oligonucleotide
  Antisense strand to SEQ ID NO: 1031696
acuaugccaauagucccuc

SEQ ID NO: 1031698 - RNA, 19 nt, Artificial Sequence
  Description of Artificial Sequence: Synthetic oligonucleotide
  Sense strand starting at position 21 of SEQ ID NO: 914800
ggacuauuggcauagugag

SEQ ID NO: 1031699 - RNA, 19 nt, Artificial Sequence
  Description of Artificial Sequence: Synthetic oligonucleotide
  Antisense strand to SEQ ID NO: 1031698
cucacuaugccaauagucc

SEQ ID NO: 1031700 - RNA, 19 nt, Artificial Sequence
  Description of Artificial Sequence: Synthetic oligonucleotide
  Sense strand starting at position 49 of SEQ ID NO: 914800
gcccaaggucaugaagcuu

SEQ ID NO: 1031701 - RNA, 19 nt, Artificial Sequence
  Description of Artificial Sequence: Synthetic oligonucleotide
  Antisense strand to SEQ ID NO: 1031700
aagcuucaugaccuugggc

SEQ ID NO: 1031702 - RNA, 19 nt, Artificial Sequence
  Description of Artificial Sequence: Synthetic oligonucleotide
  Sense strand starting at position 70 of SEQ ID NO: 914800
aagugaagggagugauauu

SEQ ID NO: 1031703 - RNA, 19 nt, Artificial Sequence
  Description of Artificial Sequence: Synthetic oligonucleotide
  Antisense strand to SEQ ID NO: 1031702
aauaucacucccuucacuu

SEQ ID NO: 1031704 - RNA, 19 nt, Artificial Sequence
  Description of Artificial Sequence: Synthetic oligonucleotide
  Sense strand starting at position 79 of SEQ ID NO: 914800
gagugauauuuacacacag

SEQ ID NO: 1031705 - RNA, 19 nt, Artificial Sequence
  Description of Artificial Sequence: Synthetic oligonucleotide
  Antisense strand to SEQ ID NO: 1031704
cuguguguaaauaucacuc

SEQ ID NO: 1031706 - RNA, 19 nt, Artificial Sequence
  Description of Artificial Sequence: Synthetic oligonucleotide
  Sense strand starting at position 202 of SEQ ID NO: 914800
agaagacugacauguugua

SEQ ID NO: 1031707 - RNA, 19 nt, Artificial Sequence
  Description of Artificial Sequence: Synthetic oligonucleotide
  Antisense strand to SEQ ID NO: 1031706
uacaacaugucagucuucu

SEQ ID NO: 1031708 - RNA, 19 nt, Artificial Sequence
  Description of Artificial Sequence: Synthetic oligonucleotide
  Sense strand starting at position 209 of SEQ ID NO: 914800
ugacauguuguauggagua

SEQ ID NO: 1031709 - RNA, 19 nt, Artificial Sequence
  Description of Artificial Sequence: Synthetic oligonucleotide
  Antisense strand to SEQ ID NO: 1031708
uacuccauacaacauguca

SEQ ID NO: 1031710 - RNA, 19 nt, Artificial Sequence
  Description of Artificial Sequence: Synthetic oligonucleotide
  Sense strand starting at position 211 of SEQ ID NO: 914800
acauguuguauggaguaua

SEQ ID NO: 1031711 - RNA, 19 nt, Artificial Sequence
  Description of Artificial Sequence: Synthetic oligonucleotide
  Antisense strand to SEQ ID NO: 1031710
uauacuccauacaacaugu

SEQ ID NO: 1031712 - RNA, 19 nt, Artificial Sequence
  Description of Artificial Sequence: Synthetic oligonucleotide
  Sense strand starting at position 214 of SEQ ID NO: 914800
uguuguauggaguauauua

SEQ ID NO: 1031713 - RNA, 19 nt, Artificial Sequence
  Description of Artificial Sequence: Synthetic oligonucleotide
  Antisense strand to SEQ ID NO: 1031712
uaauauacuccauacaaca

SEQ ID NO: 1031714 - RNA, 19 nt, Artificial Sequence
  Description of Artificial Sequence: Synthetic oligonucleotide
  Sense strand starting at position 239 of SEQ ID NO: 914800
agaaauagccagugguauu

SEQ ID NO: 1031715 - RNA, 19 nt, Artificial Sequence
  Description of Artificial Sequence: Synthetic oligonucleotide
  Antisense strand to SEQ ID NO: 1031714
aauaccacuggcuauuucu

SEQ ID NO: 1031716 - RNA, 19 nt, Artificial Sequence
  Description of Artificial Sequence: Synthetic oligonucleotide
  Sense strand starting at position 326 of SEQ ID NO: 914800
cuuaucugauugucaugaa

SEQ ID NO: 1031717 - RNA, 19 nt, Artificial Sequence
  Description of Artificial Sequence: Synthetic oligonucleotide
  Antisense strand to SEQ ID NO: 1031716
uucaugacaaucagauaag

SEQ ID NO: 1031718 - RNA, 19 nt, Artificial Sequence
  Description of Artificial Sequence: Synthetic oligonucleotide
  Sense strand starting at position 330 of SEQ ID NO: 914800
ucugauugucaugaauauc

SEQ ID NO: 1031719 - RNA, 19 nt, Artificial Sequence
  Description of Artificial Sequence: Synthetic oligonucleotide
  Antisense strand to SEQ ID NO: 1031718
gauauucaugacaaucaga

SEQ ID NO: 1031720 - RNA, 19 nt, Artificial Sequence
  Description of Artificial Sequence: Synthetic oligonucleotide
  Sense strand starting at position 423 of SEQ ID NO: 914800
aguggugaagcaggaauua

SEQ ID NO: 1031721 - RNA, 19 nt, Artificial Sequence
  Description of Artificial Sequence: Synthetic oligonucleotide
  Antisense strand to SEQ ID NO: 1031720
uaauuccugcuucaccacu

SEQ ID NO: 1031722 - RNA, 19 nt, Artificial Sequence
  Description of Artificial Sequence: Synthetic oligonucleotide
  Sense strand starting at position 604 of SEQ ID NO: 914800
gcaacaaguauccacggaa

SEQ ID NO: 1031723 - RNA, 19 nt, Artificial Sequence
  Description of Artificial Sequence: Synthetic oligonucleotide
  Antisense strand to SEQ ID NO: 1031722
uuccguggauacuuguugc

SEQ ID NO: 1031724 - RNA, 19 nt, Artificial Sequence
  Description of Artificial Sequence: Synthetic oligonucleotide
  Sense strand starting at position 607 of SEQ ID NO: 914800
acaaguauccacggaauga

SEQ ID NO: 1031725 - RNA, 19 nt, Artificial Sequence
  Description of Artificial Sequence: Synthetic oligonucleotide
  Antisense strand to SEQ ID NO: 1031724
ucauuccguggauacuugu

SEQ ID NO: 1031726 - RNA, 19 nt, Artificial Sequence
  Description of Artificial Sequence: Synthetic oligonucleotide
  Sense strand starting at position 621 of SEQ ID NO: 914800
aaugauuuaugguaaagca

SEQ ID NO: 1031727 - RNA, 19 nt, Artificial Sequence
  Description of Artificial Sequence: Synthetic oligonucleotide
  Antisense strand to SEQ ID NO: 1031726
ugcuuuaccauaaaucauu

SEQ ID NO: 1031728 - RNA, 19 nt, Artificial Sequence
  Description of Artificial Sequence: Synthetic oligonucleotide
  Sense strand starting at position 633 of SEQ ID NO: 914800
uaaagcacugguuaucaga

SEQ ID NO: 1031729 - RNA, 19 nt, Artificial Sequence
  Description of Artificial Sequence: Synthetic oligonucleotide
  Antisense strand to SEQ ID NO: 1031728
ucugauaaccagugcuuua

SEQ ID NO: 1031730 - RNA, 19 nt, Artificial Sequence
  Description of Artificial Sequence: Synthetic oligonucleotide
  Sense strand starting at position 635 of SEQ ID NO: 914800
aagcacugguuaucagaca

SEQ ID NO: 1031731 - RNA, 19 nt, Artificial Sequence
  Description of Artificial Sequence: Synthetic oligonucleotide
  Antisense strand to SEQ ID NO: 1031730
ugucugauaaccagugcuu

SEQ ID NO: 1031732 - RNA, 19 nt, Artificial Sequence
  Description of Artificial Sequence: Synthetic oligonucleotide
  Sense strand starting at position 726 of SEQ ID NO: 914800
uuaagaacuuagucuguuu

SEQ ID NO: 1031733 - RNA, 19 nt, Artificial Sequence
  Description of Artificial Sequence: Synthetic oligonucleotide
  Antisense strand to SEQ ID NO: 1031732
aaacagacuaaguucuuaa

SEQ ID NO: 1031734 - RNA, 19 nt, Artificial Sequence
  Description of Artificial Sequence: Synthetic oligonucleotide
  Sense strand starting at position 1072 of SEQ ID NO: 914800
uguugagaacaccagcaua

SEQ ID NO: 1031735 - RNA, 19 nt, Artificial Sequence
  Description of Artificial Sequence: Synthetic oligonucleotide
  Antisense strand to SEQ ID NO: 1031734
uaugcugguguucucaaca

SEQ ID NO: 1031736 - RNA, 19 nt, Artificial Sequence
  Description of Artificial Sequence: Synthetic oligonucleotide
  Sense strand starting at position 1102 of SEQ ID NO: 914800
uugauuugugcgcauguac

SEQ ID NO: 1031737 - RNA, 19 nt, Artificial Sequence
  Description of Artificial Sequence: Synthetic oligonucleotide
  Antisense strand to SEQ ID NO: 1031736
guacaugcgcacaaaucaa

SEQ ID NO: 1031738 - RNA, 19 nt, Artificial Sequence
  Description of Artificial Sequence: Synthetic oligonucleotide
  Sense strand starting at position 1171 of SEQ ID NO: 914800
acuggugccauggaaauau

SEQ ID NO: 1031739 - RNA, 19 nt, Artificial Sequence
  Description of Artificial Sequence: Synthetic oligonucleotide
  Antisense strand to SEQ ID NO: 1031738
auauuuccauggcaccagu

SEQ ID NO: 1031740 - RNA, 19 nt, Artificial Sequence
  Description of Artificial Sequence: Synthetic oligonucleotide
  Sense strand starting at position 1271 of SEQ ID NO: 914800
uaguaccugucuuuagaga

SEQ ID NO: 1031741 - RNA, 19 nt, Artificial Sequence
  Description of Artificial Sequence: Synthetic oligonucleotide
  Antisense strand to SEQ ID NO: 1031740
ucucuaaagacagguacua

SEQ ID NO: 1031742 - RNA, 19 nt, Artificial Sequence
  Description of Artificial Sequence: Synthetic oligonucleotide
  Sense strand starting at position 1272 of SEQ ID NO: 914800
aguaccugucuuuagagau

SEQ ID NO: 1031743 - RNA, 19 nt, Artificial Sequence
  Description of Artificial Sequence: Synthetic oligonucleotide
  Antisense strand to SEQ ID NO: 1031742
aucucuaaagacagguacu

SEQ ID NO: 1031744 - RNA, 19 nt, Artificial Sequence
  Description of Artificial Sequence: Synthetic oligonucleotide
  Sense strand starting at position 1312 of SEQ ID NO: 914800
uuuguaaggcgagauguua

SEQ ID NO: 1031745 - RNA, 19 nt, Artificial Sequence
  Description of Artificial Sequence: Synthetic oligonucleotide
  Antisense strand to SEQ ID NO: 1031744
uaacaucucgccuuacaaa

SEQ ID NO: 1031746 - RNA, 19 nt, Artificial Sequence
  Description of Artificial Sequence: Synthetic oligonucleotide
  Sense strand starting at position 1361 of SEQ ID NO: 914800
aucuguagccaugacaaau

SEQ ID NO: 1031747 - RNA, 19 nt, Artificial Sequence
  Description of Artificial Sequence: Synthetic oligonucleotide
  Antisense strand to SEQ ID NO: 1031746
auuugucauggcuacagau

SEQ ID NO: 1031748 - RNA, 19 nt, Artificial Sequence
  Description of Artificial Sequence: Synthetic oligonucleotide
  Sense strand starting at position 1513 of SEQ ID NO: 914800
gagcuugauuucuagagaa

SEQ ID NO: 1031749 - RNA, 19 nt, Artificial Sequence
  Description of Artificial Sequence: Synthetic oligonucleotide
  Antisense strand to SEQ ID NO: 1031748
uucucuagaaaucaagcuc

SEQ ID NO: 1031750 - RNA, 19 nt, Artificial Sequence
  Description of Artificial Sequence: Synthetic oligonucleotide
  Sense strand starting at position 1611 of SEQ ID NO: 914800
auguauacguauuugcaau

SEQ ID NO: 1031751 - RNA, 19 nt, Artificial Sequence
  Description of Artificial Sequence: Synthetic oligonucleotide
  Antisense strand to SEQ ID NO: 1031750
auugcaaauacguauacau

SEQ ID NO: 1031752 - RNA, 19 nt, Artificial Sequence
  Description of Artificial Sequence: Synthetic oligonucleotide
  Sense strand starting at position 1732 of SEQ ID NO: 914800
caguacgguguauacaaau

SEQ ID NO: 1031753 - RNA, 19 nt, Artificial Sequence
  Description of Artificial Sequence: Synthetic oligonucleotide
  Antisense strand to SEQ ID NO: 1031752
auuuguauacaccguacug

SEQ ID NO: 1031754 - RNA, 19 nt, Artificial Sequence
  Description of Artificial Sequence: Synthetic oligonucleotide
  Sense strand starting at position 2059 of SEQ ID NO: 914800
aauugaugccgucaugaaa

SEQ ID NO: 1031755 - RNA, 19 nt, Artificial Sequence
  Description of Artificial Sequence: Synthetic oligonucleotide
  Antisense strand to SEQ ID NO: 1031754
uuucaugacggcaucaauu

SEQ ID NO: 1031756 - RNA, 19 nt, Artificial Sequence
  Description of Artificial Sequence: Synthetic oligonucleotide
  Sense strand starting at position 2146 of SEQ ID NO: 914800
ggagauagcuaagugaaua

SEQ ID NO: 1031757 - RNA, 19 nt, Artificial Sequence
  Description of Artificial Sequence: Synthetic oligonucleotide
  Antisense strand to SEQ ID NO: 1031756
uauucacuuagcuaucucc

SEQ ID NO: 1031758 - RNA, 19 nt, Artificial Sequence
  Description of Artificial Sequence: Synthetic oligonucleotide
  Sense strand starting at position 2309 of SEQ ID NO: 914800
agacuuaugcaguaacauc

SEQ ID NO: 1031759 - RNA, 19 nt, Artificial Sequence
  Description of Artificial Sequence: Synthetic oligonucleotide
  Antisense strand to SEQ ID NO: 1031758
gauguuacugcauaagucu

SEQ ID NO: 1031760 - RNA, 19 nt, Artificial Sequence
  Description of Artificial Sequence: Synthetic oligonucleotide
  Sense strand starting at position 2332 of SEQ ID NO: 914800
gcauuugacagugguucuu

SEQ ID NO: 1031761 - RNA, 19 nt, Artificial Sequence
  Description of Artificial Sequence: Synthetic oligonucleotide
  Antisense strand to SEQ ID NO: 1031760
aagaaccacugucaaaugc

SEQ ID NO: 1031762 - RNA, 19 nt, Artificial Sequence
  Description of Artificial Sequence: Synthetic oligonucleotide
  Sense strand starting at position 2358 of SEQ ID NO: 914800
ugaauuacacaaggcuaau

SEQ ID NO: 1031763 - RNA, 19 nt, Artificial Sequence
  Description of Artificial Sequence: Synthetic oligonucleotide
  Antisense strand to SEQ ID NO: 1031762
auuagccuuguguaauuca

SEQ ID NO: 1031764 - RNA, 19 nt, Artificial Sequence
  Description of Artificial Sequence: Synthetic oligonucleotide
  Sense strand starting at position 2382 of SEQ ID NO: 914800
ccugguauugucuaaugaa

SEQ ID NO: 1031765 - RNA, 19 nt, Artificial Sequence
  Description of Artificial Sequence: Synthetic oligonucleotide
  Antisense strand to SEQ ID NO: 1031764
uucauuagacaauaccagg

SEQ ID NO: 1031766 - RNA, 19 nt, Artificial Sequence
  Description of Artificial Sequence: Synthetic oligonucleotide
  Sense strand starting at position 2545 of SEQ ID NO: 914800
ugcuucuaggcuuauugaa

SEQ ID NO: 1031767 - RNA, 19 nt, Artificial Sequence
  Description of Artificial Sequence: Synthetic oligonucleotide
  Antisense strand to SEQ ID NO: 1031766
uucaauaagccuagaagca

SEQ ID NO: 1031768 - RNA, 19 nt, Artificial Sequence
  Description of Artificial Sequence: Synthetic oligonucleotide
  Sense strand starting at position 2547 of SEQ ID NO: 914800
cuucuaggcuuauugaaga

SEQ ID NO: 1031769 - RNA, 19 nt, Artificial Sequence
  Description of Artificial Sequence: Synthetic oligonucleotide
  Antisense strand to SEQ ID NO: 1031768
ucuucaauaagccuagaag

SEQ ID NO: 1031770 - RNA, 19 nt, Artificial Sequence
  Description of Artificial Sequence: Synthetic oligonucleotide
  Sense strand starting at position 2938 of SEQ ID NO: 914800
uggugaagggagugguaua

SEQ ID NO: 1031771 - RNA, 19 nt, Artificial Sequence
  Description of Artificial Sequence: Synthetic oligonucleotide
  Antisense strand to SEQ ID NO: 1031770
uauaccacucccuucacca

SEQ ID NO: 1031772 - RNA, 19 nt, Artificial Sequence
  Description of Artificial Sequence: Synthetic oligonucleotide
  Sense strand starting at position 3574 of SEQ ID NO: 914800
uggcauacugugggacaaa

SEQ ID NO: 1031773 - RNA, 19 nt, Artificial Sequence
  Description of Artificial Sequence: Synthetic oligonucleotide
  Antisense strand to SEQ ID NO: 1031772
uuugucccacaguaugcca

SEQ ID NO: 1031774 - RNA, 19 nt, Artificial Sequence
  Description of Artificial Sequence: Synthetic oligonucleotide
  Sense strand starting at position 52 of SEQ ID NO: 914801
ccuaaaugugaacaguguu

SEQ ID NO: 1031775 - RNA, 19 nt, Artificial Sequence
  Description of Artificial Sequence: Synthetic oligonucleotide
  Antisense strand to SEQ ID NO: 1031774
aacacuguucacauuuagg

SEQ ID NO: 1031776 - RNA, 19 nt, Artificial Sequence
  Description of Artificial Sequence: Synthetic oligonucleotide
  Sense strand starting at position 55 of SEQ ID NO: 914801
aaaugugaacaguguuuga

SEQ ID NO: 1031777 - RNA, 19 nt, Artificial Sequence
  Description of Artificial Sequence: Synthetic oligonucleotide
  Antisense strand to SEQ ID NO: 1031776
ucaaacacuguucacauuu

SEQ ID NO: 1031778 - RNA, 19 nt, Artificial Sequence
  Description of Artificial Sequence: Synthetic oligonucleotide
  Sense strand starting at position 59 of SEQ ID NO: 914801
gugaacaguguuugauggu

SEQ ID NO: 1031779 - RNA, 19 nt, Artificial Sequence
  Description of Artificial Sequence: Synthetic oligonucleotide
  Antisense strand to SEQ ID NO: 1031778
accaucaaacacuguucac

SEQ ID NO: 1031780 - RNA, 19 nt, Artificial Sequence
  Description of Artificial Sequence: Synthetic oligonucleotide
  Sense strand starting at position 66 of SEQ ID NO: 914801
guguuugaugguuaucugu

SEQ ID NO: 1031781 - RNA, 19 nt, Artificial Sequence
  Description of Artificial Sequence: Synthetic oligonucleotide
  Antisense strand to SEQ ID NO: 1031780
acagauaaccaucaaacac

SEQ ID NO: 1031782 - RNA, 19 nt, Artificial Sequence
  Description of Artificial Sequence: Synthetic oligonucleotide
  Sense strand starting at position 68 of SEQ ID NO: 914801
guuugaugguuaucuguga

SEQ ID NO: 1031783 - RNA, 19 nt, Artificial Sequence
  Description of Artificial Sequence: Synthetic oligonucleotide
  Antisense strand to SEQ ID NO: 1031782
ucacagauaaccaucaaac

SEQ ID NO: 1031784 - RNA, 19 nt, Artificial Sequence
  Description of Artificial Sequence: Synthetic oligonucleotide
  Sense strand starting at position 72 of SEQ ID NO: 914801
gaugguuaucugugacuga

SEQ ID NO: 1031785 - RNA, 19 nt, Artificial Sequence
  Description of Artificial Sequence: Synthetic oligonucleotide
  Antisense strand to SEQ ID NO: 1031784
ucagucacagauaaccauc

SEQ ID NO: 1031786 - RNA, 19 nt, Artificial Sequence
  Description of Artificial Sequence: Synthetic oligonucleotide
  Sense strand starting at position 73 of SEQ ID NO: 914801
augguuaucugugacugau

SEQ ID NO: 1031787 - RNA, 19 nt, Artificial Sequence
  Description of Artificial Sequence: Synthetic oligonucleotide
  Antisense strand to SEQ ID NO: 1031786
aucagucacagauaaccau

SEQ ID NO: 1031788 - RNA, 19 nt, Artificial Sequence
  Description of Artificial Sequence: Synthetic oligonucleotide
  Sense strand starting at position 75 of SEQ ID NO: 914801
gguuaucugugacugauga

SEQ ID NO: 1031789 - RNA, 19 nt, Artificial Sequence
  Description of Artificial Sequence: Synthetic oligonucleotide
  Antisense strand to SEQ ID NO: 1031788
ucaucagucacagauaacc

SEQ ID NO: 1031790 - RNA, 19 nt, Artificial Sequence
  Description of Artificial Sequence: Synthetic oligonucleotide
  Sense strand starting at position 76 of SEQ ID NO: 914801
guuaucugugacugaugaa

SEQ ID NO: 1031791 - RNA, 19 nt, Artificial Sequence
  Description of Artificial Sequence: Synthetic oligonucleotide
  Antisense strand to SEQ ID NO: 1031790
uucaucagucacagauaac

SEQ ID NO: 1031792 - RNA, 19 nt, Artificial Sequence
  Description of Artificial Sequence: Synthetic oligonucleotide
  Sense strand starting at position 79 of SEQ ID NO: 914801
aucugugacugaugaaauu

SEQ ID NO: 1031793 - RNA, 19 nt, Artificial Sequence
  Description of Artificial Sequence: Synthetic oligonucleotide
  Antisense strand to SEQ ID NO: 1031792
aauuucaucagucacagau

SEQ ID NO: 1031794 - RNA, 19 nt, Artificial Sequence
  Description of Artificial Sequence: Synthetic oligonucleotide
  Sense strand starting at position 88 of SEQ ID NO: 914801
ugaugaaauuucgaguauu

SEQ ID NO: 1031795 - RNA, 19 nt, Artificial Sequence
  Description of Artificial Sequence: Synthetic oligonucleotide
  Antisense strand to SEQ ID NO: 1031794
aauacucgaaauuucauca

SEQ ID NO: 1031796 - RNA, 19 nt, Artificial Sequence
  Description of Artificial Sequence: Synthetic oligonucleotide
  Sense strand starting at position 125 of SEQ ID NO: 914801
uacuaaauguugcucggau

SEQ ID NO: 1031797 - RNA, 19 nt, Artificial Sequence
  Description of Artificial Sequence: Synthetic oligonucleotide
  Antisense strand to SEQ ID NO: 1031796
auccgagcaacauuuagua

SEQ ID NO: 1031798 - RNA, 19 nt, Artificial Sequence
  Description of Artificial Sequence: Synthetic oligonucleotide
  Sense strand starting at position 126 of SEQ ID NO: 914801
acuaaauguugcucggauu

SEQ ID NO: 1031799 - RNA, 19 nt, Artificial Sequence
  Description of Artificial Sequence: Synthetic oligonucleotide
  Antisense strand to SEQ ID NO: 1031798
aauccgagcaacauuuagu

SEQ ID NO: 1031800 - RNA, 19 nt, Artificial Sequence
  Description of Artificial Sequence: Synthetic oligonucleotide
  Sense strand starting at position 132 of SEQ ID NO: 914801
uguugcucggauugcuaaa

SEQ ID NO: 1031801 - RNA, 19 nt, Artificial Sequence
  Description of Artificial Sequence: Synthetic oligonucleotide
  Antisense strand to SEQ ID NO: 1031800
uuuagcaauccgagcaaca

SEQ ID NO: 1031802 - RNA, 19 nt, Artificial Sequence
  Description of Artificial Sequence: Synthetic oligonucleotide
  Sense strand starting at position 167 of SEQ ID NO: 914801
guuugcauucuuguccgau

SEQ ID NO: 1031803 - RNA, 19 nt, Artificial Sequence
  Description of Artificial Sequence: Synthetic oligonucleotide
  Antisense strand to SEQ ID NO: 1031802
aucggacaagaaugcaaac

SEQ ID NO: 1031804 - RNA, 19 nt, Artificial Sequence
  Description of Artificial Sequence: Synthetic oligonucleotide
  Sense strand starting at position 168 of SEQ ID NO: 914801
uuugcauucuuguccgauu

SEQ ID NO: 1031805 - RNA, 19 nt, Artificial Sequence
  Description of Artificial Sequence: Synthetic oligonucleotide
  Antisense strand to SEQ ID NO: 1031804
aaucggacaagaaugcaaa

SEQ ID NO: 1031806 - RNA, 19 nt, Artificial Sequence
  Description of Artificial Sequence: Synthetic oligonucleotide
  Sense strand starting at position 169 of SEQ ID NO: 914801
uugcauucuuguccgauuu

SEQ ID NO: 1031807 - RNA, 19 nt, Artificial Sequence
  Description of Artificial Sequence: Synthetic oligonucleotide
  Antisense strand to SEQ ID NO: 1031806
aaaucggacaagaaugcaa

SEQ ID NO: 1031808 - RNA, 19 nt, Artificial Sequence
  Description of Artificial Sequence: Synthetic oligonucleotide
  Sense strand starting at position 170 of SEQ ID NO: 914801
ugcauucuuguccgauuua

SEQ ID NO: 1031809 - RNA, 19 nt, Artificial Sequence
  Description of Artificial Sequence: Synthetic oligonucleotide
  Antisense strand to SEQ ID NO: 1031808
uaaaucggacaagaaugca

SEQ ID NO: 1031810 - RNA, 19 nt, Artificial Sequence
  Description of Artificial Sequence: Synthetic oligonucleotide
  Sense strand starting at position 171 of SEQ ID NO: 914801
gcauucuuguccgauuuau

SEQ ID NO: 1031811 - RNA, 19 nt, Artificial Sequence
  Description of Artificial Sequence: Synthetic oligonucleotide
  Antisense strand to SEQ ID NO: 1031810
auaaaucggacaagaaugc

SEQ ID NO: 1031812 - RNA, 19 nt, Artificial Sequence
  Description of Artificial Sequence: Synthetic oligonucleotide
  Sense strand starting at position 196 of SEQ ID NO: 914801
ggaauaaacuccuggaauu

SEQ ID NO: 1031813 - RNA, 19 nt, Artificial Sequence
  Description of Artificial Sequence: Synthetic oligonucleotide
  Antisense strand to SEQ ID NO: 1031812
aauuccaggaguuuauucc

SEQ ID NO: 1031814 - RNA, 19 nt, Artificial Sequence
  Description of Artificial Sequence: Synthetic oligonucleotide
  Sense strand starting at position 209 of SEQ ID NO: 914801
ggaauuggauuaugacuua

SEQ ID NO: 1031815 - RNA, 19 nt, Artificial Sequence
  Description of Artificial Sequence: Synthetic oligonucleotide
  Antisense strand to SEQ ID NO: 1031814
uaagucauaauccaauucc

SEQ ID NO: 1031816 - RNA, 19 nt, Artificial Sequence
  Description of Artificial Sequence: Synthetic oligonucleotide
  Sense strand starting at position 216 of SEQ ID NO: 914801
gauuaugacuuagaaguua

SEQ ID NO: 1031817 - RNA, 19 nt, Artificial Sequence
  Description of Artificial Sequence: Synthetic oligonucleotide
  Antisense strand to SEQ ID NO: 1031816
uaacuucuaagucauaauc

SEQ ID NO: 1031818 - RNA, 19 nt, Artificial Sequence
  Description of Artificial Sequence: Synthetic oligonucleotide
  Sense strand starting at position 229 of SEQ ID NO: 914801
aaguuaugguacuacuuga

SEQ ID NO: 1031819 - RNA, 19 nt, Artificial Sequence
  Description of Artificial Sequence: Synthetic oligonucleotide
  Antisense strand to SEQ ID NO: 1031818
ucaaguaguaccauaacuu

SEQ ID NO: 1031820 - RNA, 19 nt, Artificial Sequence
  Description of Artificial Sequence: Synthetic oligonucleotide
  Sense strand starting at position 570 of SEQ ID NO: 914801
cggccugaauucugauuua

SEQ ID NO: 1031821 - RNA, 19 nt, Artificial Sequence
  Description of Artificial Sequence: Synthetic oligonucleotide
  Antisense strand to SEQ ID NO: 1031820
uaaaucagaauucaggccg

SEQ ID NO: 1031822 - RNA, 19 nt, Artificial Sequence
  Description of Artificial Sequence: Synthetic oligonucleotide
  Sense strand starting at position 727 of SEQ ID NO: 914801
uucuuugccugcuuaguga

SEQ ID NO: 1031823 - RNA, 19 nt, Artificial Sequence
  Description of Artificial Sequence: Synthetic oligonucleotide
  Antisense strand to SEQ ID NO: 1031822
ucacuaagcaggcaaagaa

SEQ ID NO: 1031824 - RNA, 19 nt, Artificial Sequence
  Description of Artificial Sequence: Synthetic oligonucleotide
  Sense strand starting at position 2332 of SEQ ID NO: 914801
auguuagucaggugauucu

SEQ ID NO: 1031825 - RNA, 19 nt, Artificial Sequence
  Description of Artificial Sequence: Synthetic oligonucleotide
  Antisense strand to SEQ ID NO: 1031824
agaaucaccugacuaacau

SEQ ID NO: 1031826 - RNA, 19 nt, Artificial Sequence
  Description of Artificial Sequence: Synthetic oligonucleotide
  Sense strand starting at position 2444 of SEQ ID NO: 914801
uugcaucuguaccuguaaa

SEQ ID NO: 1031827 - RNA, 19 nt, Artificial Sequence
  Description of Artificial Sequence: Synthetic oligonucleotide
  Antisense strand to SEQ ID NO: 1031826
uuuacagguacagaugcaa

SEQ ID NO: 1031828 - RNA, 19 nt, Artificial Sequence
  Description of Artificial Sequence: Synthetic oligonucleotide
  Sense strand starting at position 2597 of SEQ ID NO: 914801
aguccugagcauugcauuu

SEQ ID NO: 1031829 - RNA, 19 nt, Artificial Sequence
  Description of Artificial Sequence: Synthetic oligonucleotide
  Antisense strand to SEQ ID NO: 1031828
aaaugcaaugcucaggacu

SEQ ID NO: 1031830 - RNA, 19 nt, Artificial Sequence
  Description of Artificial Sequence: Synthetic oligonucleotide
  Sense strand starting at position 2632 of SEQ ID NO: 914801
aggugcuaguugucaaguu

SEQ ID NO: 1031831 - RNA, 19 nt, Artificial Sequence
  Description of Artificial Sequence: Synthetic oligonucleotide
  Antisense strand to SEQ ID NO: 1031830
aacuugacaacuagcaccu

SEQ ID NO: 1031832 - RNA, 19 nt, Artificial Sequence
  Description of Artificial Sequence: Synthetic oligonucleotide
  Sense strand starting at position 2723 of SEQ ID NO: 914801
uucguauuaucucuuacuc

SEQ ID NO: 1031833 - RNA, 19 nt, Artificial Sequence
  Description of Artificial Sequence: Synthetic oligonucleotide
  Antisense strand to SEQ ID NO: 1031832
gaguaagagauaauacgaa

SEQ ID NO: 1031834 - RNA, 19 nt, Artificial Sequence
  Description of Artificial Sequence: Synthetic oligonucleotide
  Sense strand starting at position 2763 of SEQ ID NO: 914801
uugugcuaccucuaaggca

SEQ ID NO: 1031835 - RNA, 19 nt, Artificial Sequence
  Description of Artificial Sequence: Synthetic oligonucleotide
  Antisense strand to SEQ ID NO: 1031834
ugccuuagagguagcacaa

SEQ ID NO: 1031836 - RNA, 19 nt, Artificial Sequence
  Description of Artificial Sequence: Synthetic oligonucleotide
  Sense strand starting at position 2782 of SEQ ID NO: 914801
cuuugaauuugugggagga

SEQ ID NO: 1031837 - RNA, 19 nt, Artificial Sequence
  Description of Artificial Sequence: Synthetic oligonucleotide
  Antisense strand to SEQ ID NO: 1031836
uccucccacaaauucaaag

SEQ ID NO: 1031838 - RNA, 19 nt, Artificial Sequence
  Description of Artificial Sequence: Synthetic oligonucleotide
  Sense strand starting at position 2784 of SEQ ID NO: 914801
uugaauuugugggaggaag

SEQ ID NO: 1031839 - RNA, 19 nt, Artificial Sequence
  Description of Artificial Sequence: Synthetic oligonucleotide
  Antisense strand to SEQ ID NO: 1031838
cuuccucccacaaauucaa

SEQ ID NO: 1031840 - RNA, 19 nt, Artificial Sequence
  Description of Artificial Sequence: Synthetic oligonucleotide
  Sense strand starting at position 3295 of SEQ ID NO: 914801
gggaguggcuguagaaaca

SEQ ID NO: 1031841 - RNA, 19 nt, Artificial Sequence
  Description of Artificial Sequence: Synthetic oligonucleotide
  Antisense strand to SEQ ID NO: 1031840
uguuucuacagccacuccc

SEQ ID NO: 1031842 - RNA, 19 nt, Artificial Sequence
  Description of Artificial Sequence: Synthetic oligonucleotide
  Sense strand starting at position 3453 of SEQ ID NO: 914801
aucuuaugccagcaugacu

SEQ ID NO: 1031843 - RNA, 19 nt, Artificial Sequence
  Description of Artificial Sequence: Synthetic oligonucleotide
  Antisense strand to SEQ ID NO: 1031842
agucaugcuggcauaagau

SEQ ID NO: 1031844 - RNA, 19 nt, Artificial Sequence
  Description of Artificial Sequence: Synthetic oligonucleotide
  Sense strand starting at position 3480 of SEQ ID NO: 914801
ggcuuugaaucuccaaucu

SEQ ID NO: 1031845 - RNA, 19 nt, Artificial Sequence
  Description of Artificial Sequence: Synthetic oligonucleotide
  Antisense strand to SEQ ID NO: 1031844
agauuggagauucaaagcc

SEQ ID NO: 1031846 - RNA, 19 nt, Artificial Sequence
  Description of Artificial Sequence: Synthetic oligonucleotide
  Sense strand starting at position 3550 of SEQ ID NO: 914801
ucagcauucuccuuaugga

SEQ ID NO: 1031847 - RNA, 19 nt, Artificial Sequence
  Description of Artificial Sequence: Synthetic oligonucleotide
  Antisense strand to SEQ ID NO: 1031846
uccauaaggagaaugcuga

SEQ ID NO: 1031848 - RNA, 19 nt, Artificial Sequence
  Description of Artificial Sequence: Synthetic oligonucleotide
  Sense strand starting at position 3861 of SEQ ID NO: 914801
ggauuuccagcgugagcca

SEQ ID NO: 1031849 - RNA, 19 nt, Artificial Sequence
  Description of Artificial Sequence: Synthetic oligonucleotide
  Antisense strand to SEQ ID NO: 1031848
uggcucacgcuggaaaucc

SEQ ID NO: 1031850 - RNA, 19 nt, Artificial Sequence
  Description of Artificial Sequence: Synthetic oligonucleotide
  Sense strand starting at position 3891 of SEQ ID NO: 914801
cccaauuaguuucuguuau

SEQ ID NO: 1031851 - RNA, 19 nt, Artificial Sequence
  Description of Artificial Sequence: Synthetic oligonucleotide
  Antisense strand to SEQ ID NO: 1031850
auaacagaaacuaauuggg

SEQ ID NO: 1031852 - RNA, 19 nt, Artificial Sequence
  Description of Artificial Sequence: Synthetic oligonucleotide
  Sense strand starting at position 3961 of SEQ ID NO: 914801
aggaucuacuccugaauau

SEQ ID NO: 1031853 - RNA, 19 nt, Artificial Sequence
  Description of Artificial Sequence: Synthetic oligonucleotide
  Antisense strand to SEQ ID NO: 1031852
auauucaggaguagauccu

SEQ ID NO: 1031854 - RNA, 19 nt, Artificial Sequence
  Description of Artificial Sequence: Synthetic oligonucleotide
  Sense strand starting at position 7 of SEQ ID NO: 914802
aucuuaugccagcaugacu

SEQ ID NO: 1031855 - RNA, 19 nt, Artificial Sequence
  Description of Artificial Sequence: Synthetic oligonucleotide
  Antisense strand to SEQ ID NO: 1031854
agucaugcuggcauaagau

SEQ ID NO: 1031856 - RNA, 19 nt, Artificial Sequence
  Description of Artificial Sequence: Synthetic oligonucleotide
  Sense strand starting at position 34 of SEQ ID NO: 914802
ggcuuugaaucuccaaucu

SEQ ID NO: 1031857 - RNA, 19 nt, Artificial Sequence
  Description of Artificial Sequence: Synthetic oligonucleotide
  Antisense strand to SEQ ID NO: 1031856
agauuggagauucaaagcc

SEQ ID NO: 1031858 - RNA, 19 nt, Artificial Sequence
  Description of Artificial Sequence: Synthetic oligonucleotide
  Sense strand starting at position 104 of SEQ ID NO: 914802
ucagcauucuccuuaugga

SEQ ID NO: 1031859 - RNA, 19 nt, Artificial Sequence
  Description of Artificial Sequence: Synthetic oligonucleotide
  Antisense strand to SEQ ID NO: 1031858
uccauaaggagaaugcuga

SEQ ID NO: 1031860 - RNA, 19 nt, Artificial Sequence
  Description of Artificial Sequence: Synthetic oligonucleotide
  Sense strand starting at position 415 of SEQ ID NO: 914802
ggauuuccagcgugagcca

SEQ ID NO: 1031861 - RNA, 19 nt, Artificial Sequence
  Description of Artificial Sequence: Synthetic oligonucleotide
  Antisense strand to SEQ ID NO: 1031860
uggcucacgcuggaaaucc

SEQ ID NO: 1031862 - RNA, 19 nt, Artificial Sequence
  Description of Artificial Sequence: Synthetic oligonucleotide
  Sense strand starting at position 828 of SEQ ID NO: 914802
agcaaugauuaacuuauga

SEQ ID NO: 1031863 - RNA, 19 nt, Artificial Sequence
  Description of Artificial Sequence: Synthetic oligonucleotide
  Antisense strand to SEQ ID NO: 1031862
ucauaaguuaaucauugcu

SEQ ID NO: 1031864 - RNA, 19 nt, Artificial Sequence
  Description of Artificial Sequence: Synthetic oligonucleotide
  Sense strand starting at position 899 of SEQ ID NO: 914802
gcaaauacugaguaucuga

SEQ ID NO: 1031865 - RNA, 19 nt, Artificial Sequence
  Description of Artificial Sequence: Synthetic oligonucleotide
  Antisense strand to SEQ ID NO: 1031864
ucagauacucaguauuugc

SEQ ID NO: 1031866 - RNA, 19 nt, Artificial Sequence
  Description of Artificial Sequence: Synthetic oligonucleotide
  Sense strand starting at position 1427 of SEQ ID NO: 914802
augucaaauccauauguuc

SEQ ID NO: 1031867 - RNA, 19 nt, Artificial Sequence
  Description of Artificial Sequence: Synthetic oligonucleotide
  Antisense strand to SEQ ID NO: 1031866
gaacauauggauuugacau

SEQ ID NO: 1031868 - RNA, 19 nt, Artificial Sequence
  Description of Artificial Sequence: Synthetic oligonucleotide
  Sense strand starting at position 1434 of SEQ ID NO: 914802
auccauauguucuuuaagu

SEQ ID NO: 1031869 - RNA, 19 nt, Artificial Sequence
  Description of Artificial Sequence: Synthetic oligonucleotide
  Antisense strand to SEQ ID NO: 1031868
acuuaaagaacauauggau

SEQ ID NO: 1031870 - RNA, 19 nt, Artificial Sequence
  Description of Artificial Sequence: Synthetic oligonucleotide
  Sense strand starting at position 1436 of SEQ ID NO: 914802
ccauauguucuuuaaguuu

SEQ ID NO: 1031871 - RNA, 19 nt, Artificial Sequence
  Description of Artificial Sequence: Synthetic oligonucleotide
  Antisense strand to SEQ ID NO: 1031870
aaacuuaaagaacauaugg

SEQ ID NO: 1031872 - RNA, 19 nt, Artificial Sequence
  Description of Artificial Sequence: Synthetic oligonucleotide
  Sense strand starting at position 2127 of SEQ ID NO: 914802
acauccugucgcuaauauu

SEQ ID NO: 1031873 - RNA, 19 nt, Artificial Sequence
  Description of Artificial Sequence: Synthetic oligonucleotide
  Antisense strand to SEQ ID NO: 1031872
aauauuagcgacaggaugu

SEQ ID NO: 1031874 - RNA, 19 nt, Artificial Sequence
  Description of Artificial Sequence: Synthetic oligonucleotide
  Sense strand starting at position 2164 of SEQ ID NO: 914802
aagucuucucaguauugga

SEQ ID NO: 1031875 - RNA, 19 nt, Artificial Sequence
  Description of Artificial Sequence: Synthetic oligonucleotide
  Antisense strand to SEQ ID NO: 1031874
uccaauacugagaagacuu

SEQ ID NO: 1031876 - RNA, 19 nt, Artificial Sequence
  Description of Artificial Sequence: Synthetic oligonucleotide
  Sense strand starting at position 2171 of SEQ ID NO: 914802
cucaguauuggaggcagaa

SEQ ID NO: 1031877 - RNA, 19 nt, Artificial Sequence
  Description of Artificial Sequence: Synthetic oligonucleotide
  Antisense strand to SEQ ID NO: 1031876
uucugccuccaauacugag

SEQ ID NO: 1031878 - RNA, 19 nt, Artificial Sequence
  Description of Artificial Sequence: Synthetic oligonucleotide
  Sense strand starting at position 2315 of SEQ ID NO: 914802
cccugcauucuggauucua

SEQ ID NO: 1031879 - RNA, 19 nt, Artificial Sequence
  Description of Artificial Sequence: Synthetic oligonucleotide
  Antisense strand to SEQ ID NO: 1031878
uagaauccagaaugcaggg

SEQ ID NO: 1031880 - RNA, 19 nt, Artificial Sequence
  Description of Artificial Sequence: Synthetic oligonucleotide
  Sense strand starting at position 2326 of SEQ ID NO: 914802
ggauucuacccucaucagu

SEQ ID NO: 1031881 - RNA, 19 nt, Artificial Sequence
  Description of Artificial Sequence: Synthetic oligonucleotide
  Antisense strand to SEQ ID NO: 1031880
acugaugaggguagaaucc

SEQ ID NO: 1031882 - RNA, 19 nt, Artificial Sequence
  Description of Artificial Sequence: Synthetic oligonucleotide
  Sense strand starting at position 2364 of SEQ ID NO: 914802
aaaggucaccagugaucuu

SEQ ID NO: 1031883 - RNA, 19 nt, Artificial Sequence
  Description of Artificial Sequence: Synthetic oligonucleotide
  Antisense strand to SEQ ID NO: 1031882
aagaucacuggugaccuuu

SEQ ID NO: 1031884 - RNA, 19 nt, Artificial Sequence
  Description of Artificial Sequence: Synthetic oligonucleotide
  Sense strand starting at position 2391 of SEQ ID NO: 914802
gcuccaaucgucuugcuca

SEQ ID NO: 1031885 - RNA, 19 nt, Artificial Sequence
  Description of Artificial Sequence: Synthetic oligonucleotide
  Antisense strand to SEQ ID NO: 1031884
ugagcaagacgauuggagc

SEQ ID NO: 1031886 - RNA, 19 nt, Artificial Sequence
  Description of Artificial Sequence: Synthetic oligonucleotide
  Sense strand starting at position 2821 of SEQ ID NO: 914802
guuguaagugcugugcuau

SEQ ID NO: 1031887 - RNA, 19 nt, Artificial Sequence
  Description of Artificial Sequence: Synthetic oligonucleotide
  Antisense strand to SEQ ID NO: 1031886
auagcacagcacuuacaac

SEQ ID NO: 1031888 - RNA, 19 nt, Artificial Sequence
  Description of Artificial Sequence: Synthetic oligonucleotide
  Sense strand starting at position 2831 of SEQ ID NO: 914802
cugugcuaugucuucguga

SEQ ID NO: 1031889 - RNA, 19 nt, Artificial Sequence
  Description of Artificial Sequence: Synthetic oligonucleotide
  Antisense strand to SEQ ID NO: 1031888
ucacgaagacauagcacag

SEQ ID NO: 1031890 - RNA, 19 nt, Artificial Sequence
  Description of Artificial Sequence: Synthetic oligonucleotide
  Sense strand starting at position 2834 of SEQ ID NO: 914802
ugcuaugucuucgugauuu

SEQ ID NO: 1031891 - RNA, 19 nt, Artificial Sequence
  Description of Artificial Sequence: Synthetic oligonucleotide
  Antisense strand to SEQ ID NO: 1031890
aaaucacgaagacauagca

SEQ ID NO: 1031892 - RNA, 19 nt, Artificial Sequence
  Description of Artificial Sequence: Synthetic oligonucleotide
  Sense strand starting at position 2838 of SEQ ID NO: 914802
augucuucgugauuugaua

SEQ ID NO: 1031893 - RNA, 19 nt, Artificial Sequence
  Description of Artificial Sequence: Synthetic oligonucleotide
  Antisense strand to SEQ ID NO: 1031892
uaucaaaucacgaagacau

SEQ ID NO: 1031894 - RNA, 19 nt, Artificial Sequence
  Description of Artificial Sequence: Synthetic oligonucleotide
  Sense strand starting at position 2840 of SEQ ID NO: 914802
gucuucgugauuugauagu

SEQ ID NO: 1031895 - RNA, 19 nt, Artificial Sequence
  Description of Artificial Sequence: Synthetic oligonucleotide
  Antisense strand to SEQ ID NO: 1031894
acuaucaaaucacgaagac

SEQ ID NO: 1031896 - RNA, 19 nt, Artificial Sequence
  Description of Artificial Sequence: Synthetic oligonucleotide
  Sense strand starting at position 2905 of SEQ ID NO: 914802
aggagaaauugacauugau

SEQ ID NO: 1031897 - RNA, 19 nt, Artificial Sequence
  Description of Artificial Sequence: Synthetic oligonucleotide
  Antisense strand to SEQ ID NO: 1031896
aucaaugucaauuucuccu

SEQ ID NO: 1031898 - RNA, 19 nt, Artificial Sequence
  Description of Artificial Sequence: Synthetic oligonucleotide
  Sense strand starting at position 2943 of SEQ ID NO: 914802
guugucccucaguauaauc

SEQ ID NO: 1031899 - RNA, 19 nt, Artificial Sequence
  Description of Artificial Sequence: Synthetic oligonucleotide
  Antisense strand to SEQ ID NO: 1031898
gauuauacugagggacaac

SEQ ID NO: 1031900 - RNA, 19 nt, Artificial Sequence
  Description of Artificial Sequence: Synthetic oligonucleotide
  Sense strand starting at position 2952 of SEQ ID NO: 914802
caguauaaucuggguauug

SEQ ID NO: 1031901 - RNA, 19 nt, Artificial Sequence
  Description of Artificial Sequence: Synthetic oligonucleotide
  Antisense strand to SEQ ID NO: 1031900
caauacccagauuauacug

SEQ ID NO: 1031902 - RNA, 19 nt, Artificial Sequence
  Description of Artificial Sequence: Synthetic oligonucleotide
  Sense strand starting at position 2954 of SEQ ID NO: 914802
guauaaucuggguauuggu

SEQ ID NO: 1031903 - RNA, 19 nt, Artificial Sequence
  Description of Artificial Sequence: Synthetic oligonucleotide
  Antisense strand to SEQ ID NO: 1031902
accaauacccagauuauac

SEQ ID NO: 1031904 - RNA, 19 nt, Artificial Sequence
  Description of Artificial Sequence: Synthetic oligonucleotide
  Sense strand starting at position 3159 of SEQ ID NO: 914802
uguguuguucaagaggcaa

SEQ ID NO: 1031905 - RNA, 19 nt, Artificial Sequence
  Description of Artificial Sequence: Synthetic oligonucleotide
  Antisense strand to SEQ ID NO: 1031904
uugccucuugaacaacaca

SEQ ID NO: 1031906 - RNA, 19 nt, Artificial Sequence
  Description of Artificial Sequence: Synthetic oligonucleotide
  Sense strand starting at position 3484 of SEQ ID NO: 914802
gagauuugauaagagcuau

SEQ ID NO: 1031907 - RNA, 19 nt, Artificial Sequence
  Description of Artificial Sequence: Synthetic oligonucleotide
  Antisense strand to SEQ ID NO: 1031906
auagcucuuaucaaaucuc

SEQ ID NO: 1031908 - RNA, 19 nt, Artificial Sequence
  Description of Artificial Sequence: Synthetic oligonucleotide
  Sense strand starting at position 3535 of SEQ ID NO: 914802
auggcuaauuagucagaua

SEQ ID NO: 1031909 - RNA, 19 nt, Artificial Sequence
  Description of Artificial Sequence: Synthetic oligonucleotide
  Antisense strand to SEQ ID NO: 1031908
uaucugacuaauuagccau

SEQ ID NO: 1031910 - RNA, 19 nt, Artificial Sequence
  Description of Artificial Sequence: Synthetic oligonucleotide
  Sense strand starting at position 3578 of SEQ ID NO: 914802
uugaaauuaucuguuggca

SEQ ID NO: 1031911 - RNA, 19 nt, Artificial Sequence
  Description of Artificial Sequence: Synthetic oligonucleotide
  Antisense strand to SEQ ID NO: 1031910
ugccaacagauaauuucaa

SEQ ID NO: 1031912 - RNA, 19 nt, Artificial Sequence
  Description of Artificial Sequence: Synthetic oligonucleotide
  Sense strand starting at position 3624 of SEQ ID NO: 914802
agaagauuguaugugaagu

SEQ ID NO: 1031913 - RNA, 19 nt, Artificial Sequence
  Description of Artificial Sequence: Synthetic oligonucleotide
  Antisense strand to SEQ ID NO: 1031912
acuucacauacaaucuucu

SEQ ID NO: 1031914 - RNA, 19 nt, Artificial Sequence
  Description of Artificial Sequence: Synthetic oligonucleotide
  Sense strand starting at position 3625 of SEQ ID NO: 914802
gaagauuguaugugaaguc

SEQ ID NO: 1031915 - RNA, 19 nt, Artificial Sequence
  Description of Artificial Sequence: Synthetic oligonucleotide
  Antisense strand to SEQ ID NO: 1031914
gacuucacauacaaucuuc

SEQ ID NO: 1031916 - RNA, 19 nt, Artificial Sequence
  Description of Artificial Sequence: Synthetic oligonucleotide
  Sense strand starting at position 3641 of SEQ ID NO: 914802
guccaagugggagauaguu

SEQ ID NO: 1031917 - RNA, 19 nt, Artificial Sequence
  Description of Artificial Sequence: Synthetic oligonucleotide
  Antisense strand to SEQ ID NO: 1031916
aacuaucucccacuuggac

SEQ ID NO: 1031918 - RNA, 19 nt, Artificial Sequence
  Description of Artificial Sequence: Synthetic oligonucleotide
  Sense strand starting at position 3647 of SEQ ID NO: 914802
gugggagauaguuggauua

SEQ ID NO: 1031919 - RNA, 19 nt, Artificial Sequence
  Description of Artificial Sequence: Synthetic oligonucleotide
  Antisense strand to SEQ ID NO: 1031918
uaauccaacuaucucccac

SEQ ID NO: 1031920 - RNA, 19 nt, Artificial Sequence
  Description of Artificial Sequence: Synthetic oligonucleotide
  Sense strand starting at position 3659 of SEQ ID NO: 914802
uggauuauuccagguggaa

SEQ ID NO: 1031921 - RNA, 19 nt, Artificial Sequence
  Description of Artificial Sequence: Synthetic oligonucleotide
  Antisense strand to SEQ ID NO: 1031920
uuccaccuggaauaaucca

SEQ ID NO: 1031922 - RNA, 19 nt, Artificial Sequence
  Description of Artificial Sequence: Synthetic oligonucleotide
  Sense strand starting at position 3731 of SEQ ID NO: 914802
uagagauaguuaguugcua

SEQ ID NO: 1031923 - RNA, 19 nt, Artificial Sequence
  Description of Artificial Sequence: Synthetic oligonucleotide
  Antisense strand to SEQ ID NO: 1031922
uagcaacuaacuaucucua

SEQ ID NO: 1031924 - RNA, 19 nt, Artificial Sequence
  Description of Artificial Sequence: Synthetic oligonucleotide
  Sense strand starting at position 3733 of SEQ ID NO: 914802
gagauaguuaguugcuaga

SEQ ID NO: 1031925 - RNA, 19 nt, Artificial Sequence
  Description of Artificial Sequence: Synthetic oligonucleotide
  Antisense strand to SEQ ID NO: 1031924
ucuagcaacuaacuaucuc

SEQ ID NO: 1031926 - RNA, 19 nt, Artificial Sequence
  Description of Artificial Sequence: Synthetic oligonucleotide
  Sense strand starting at position 3735 of SEQ ID NO: 914802
gauaguuaguugcuagaac

SEQ ID NO: 1031927 - RNA, 19 nt, Artificial Sequence
  Description of Artificial Sequence: Synthetic oligonucleotide
  Antisense strand to SEQ ID NO: 1031926
guucuagcaacuaacuauc

SEQ ID NO: 1031928 - RNA, 19 nt, Artificial Sequence
  Description of Artificial Sequence: Synthetic oligonucleotide
  Sense strand starting at position 3743 of SEQ ID NO: 914802
guugcuagaacucaugaug

SEQ ID NO: 1031929 - RNA, 19 nt, Artificial Sequence
  Description of Artificial Sequence: Synthetic oligonucleotide
  Antisense strand to SEQ ID NO: 1031928
caucaugaguucuagcaac

SEQ ID NO: 1031930 - RNA, 19 nt, Artificial Sequence
  Description of Artificial Sequence: Synthetic oligonucleotide
  Sense strand starting at position 3799 of SEQ ID NO: 914802
gaggcaggucauggauuau

SEQ ID NO: 1031931 - RNA, 19 nt, Artificial Sequence
  Description of Artificial Sequence: Synthetic oligonucleotide
  Antisense strand to SEQ ID NO: 1031930
auaauccaugaccugccuc

SEQ ID NO: 1031932 - RNA, 19 nt, Artificial Sequence
  Description of Artificial Sequence: Synthetic oligonucleotide
  Sense strand starting at position 3960 of SEQ ID NO: 914802
gguagaauauaagcucaua

SEQ ID NO: 1031933 - RNA, 19 nt, Artificial Sequence
  Description of Artificial Sequence: Synthetic oligonucleotide
  Antisense strand to SEQ ID NO: 1031932
uaugagcuuauauucuacc

SEQ ID NO: 1031934 - RNA, 19 nt, Artificial Sequence
  Description of Artificial Sequence: Synthetic oligonucleotide
  Sense strand starting at position 79 of SEQ ID NO: 914803
uggauucuuaaucgccuga

SEQ ID NO: 1031935 - RNA, 19 nt, Artificial Sequence
  Description of Artificial Sequence: Synthetic oligonucleotide
  Antisense strand to SEQ ID NO: 1031934
ucaggcgauuaagaaucca

SEQ ID NO: 1031936 - RNA, 19 nt, Artificial Sequence
  Description of Artificial Sequence: Synthetic oligonucleotide
  Sense strand starting at position 254 of SEQ ID NO: 914803
gcugcacugucuccaaaga

SEQ ID NO: 1031937 - RNA, 19 nt, Artificial Sequence
  Description of Artificial Sequence: Synthetic oligonucleotide
  Antisense strand to SEQ ID NO: 1031936
ucuuuggagacagugcagc

SEQ ID NO: 1031938 - RNA, 19 nt, Artificial Sequence
  Description of Artificial Sequence: Synthetic oligonucleotide
  Sense strand starting at position 255 of SEQ ID NO: 914803
cugcacugucuccaaagaa

SEQ ID NO: 1031939 - RNA, 19 nt, Artificial Sequence
  Description of Artificial Sequence: Synthetic oligonucleotide
  Antisense strand to SEQ ID NO: 1031938
uucuuuggagacagugcag

SEQ ID NO: 1031940 - RNA, 19 nt, Artificial Sequence
  Description of Artificial Sequence: Synthetic oligonucleotide
  Sense strand starting at position 314 of SEQ ID NO: 914803
cuccgagauucccugagga

SEQ ID NO: 1031941 - RNA, 19 nt, Artificial Sequence
  Description of Artificial Sequence: Synthetic oligonucleotide
  Antisense strand to SEQ ID NO: 1031940
uccucagggaaucucggag

SEQ ID NO: 1031942 - RNA, 19 nt, Artificial Sequence
  Description of Artificial Sequence: Synthetic oligonucleotide
  Sense strand starting at position 526 of SEQ ID NO: 914803
gcacuccagguuugacaau

SEQ ID NO: 1031943 - RNA, 19 nt, Artificial Sequence
  Description of Artificial Sequence: Synthetic oligonucleotide
  Antisense strand to SEQ ID NO: 1031942
auugucaaaccuggagugc

SEQ ID NO: 1031944 - RNA, 19 nt, Artificial Sequence
  Description of Artificial Sequence: Synthetic oligonucleotide
  Sense strand starting at position 578 of SEQ ID NO: 914803
agacaucacugccagugua

SEQ ID NO: 1031945 - RNA, 19 nt, Artificial Sequence
  Description of Artificial Sequence: Synthetic oligonucleotide
  Antisense strand to SEQ ID NO: 1031944
uacacuggcagugaugucu

SEQ ID NO: 1031946 - RNA, 19 nt, Artificial Sequence
  Description of Artificial Sequence: Synthetic oligonucleotide
  Sense strand starting at position 588 of SEQ ID NO: 914803
gccaguguaucugaaggga

SEQ ID NO: 1031947 - RNA, 19 nt, Artificial Sequence
  Description of Artificial Sequence: Synthetic oligonucleotide
  Antisense strand to SEQ ID NO: 1031946
ucccuucagauacacuggc

SEQ ID NO: 1031948 - RNA, 19 nt, Artificial Sequence
  Description of Artificial Sequence: Synthetic oligonucleotide
  Sense strand starting at position 609 of SEQ ID NO: 914803
agagguuugucaguuagcu

SEQ ID NO: 1031949 - RNA, 19 nt, Artificial Sequence
  Description of Artificial Sequence: Synthetic oligonucleotide
  Antisense strand to SEQ ID NO: 1031948
agcuaacugacaaaccucu

SEQ ID NO: 1031950 - RNA, 19 nt, Artificial Sequence
  Description of Artificial Sequence: Synthetic oligonucleotide
  Sense strand starting at position 671 of SEQ ID NO: 914803
accacuuuccauggguaaa

SEQ ID NO: 1031951 - RNA, 19 nt, Artificial Sequence
  Description of Artificial Sequence: Synthetic oligonucleotide
  Antisense strand to SEQ ID NO: 1031950
uuuacccauggaaaguggu

SEQ ID NO: 1031952 - RNA, 19 nt, Artificial Sequence
  Description of Artificial Sequence: Synthetic oligonucleotide
  Sense strand starting at position 729 of SEQ ID NO: 914803
ucaagagacuucuggccaa

SEQ ID NO: 1031953 - RNA, 19 nt, Artificial Sequence
  Description of Artificial Sequence: Synthetic oligonucleotide
  Antisense strand to SEQ ID NO: 1031952
uuggccagaagucucuuga

SEQ ID NO: 1031954 - RNA, 19 nt, Artificial Sequence
  Description of Artificial Sequence: Synthetic oligonucleotide
  Sense strand starting at position 1024 of SEQ ID NO: 914803
cauucuuacccagggcaga

SEQ ID NO: 1031955 - RNA, 19 nt, Artificial Sequence
  Description of Artificial Sequence: Synthetic oligonucleotide
  Antisense strand to SEQ ID NO: 1031954
ucugcccuggguaagaaug

SEQ ID NO: 1031956 - RNA, 19 nt, Artificial Sequence
  Description of Artificial Sequence: Synthetic oligonucleotide
  Sense strand starting at position 1025 of SEQ ID NO: 914803
auucuuacccagggcagau

SEQ ID NO: 1031957 - RNA, 19 nt, Artificial Sequence
  Description of Artificial Sequence: Synthetic oligonucleotide
  Antisense strand to SEQ ID NO: 1031956
aucugcccuggguaagaau

SEQ ID NO: 1031958 - RNA, 19 nt, Artificial Sequence
  Description of Artificial Sequence: Synthetic oligonucleotide
  Sense strand starting at position 1037 of SEQ ID NO: 914803
ggcagaucagccuacuucu

SEQ ID NO: 1031959 - RNA, 19 nt, Artificial Sequence
  Description of Artificial Sequence: Synthetic oligonucleotide
  Antisense strand to SEQ ID NO: 1031958
agaaguaggcugaucugcc

SEQ ID NO: 1031960 - RNA, 19 nt, Artificial Sequence
  Description of Artificial Sequence: Synthetic oligonucleotide
  Sense strand starting at position 1244 of SEQ ID NO: 914803
cugugccuguugucagaca

SEQ ID NO: 1031961 - RNA, 19 nt, Artificial Sequence
  Description of Artificial Sequence: Synthetic oligonucleotide
  Antisense strand to SEQ ID NO: 1031960
ugucugacaacaggcacag

SEQ ID NO: 1031962 - RNA, 19 nt, Artificial Sequence
  Description of Artificial Sequence: Synthetic oligonucleotide
  Sense strand starting at position 1361 of SEQ ID NO: 914803
agagaaagguaaugacguu

SEQ ID NO: 1031963 - RNA, 19 nt, Artificial Sequence
  Description of Artificial Sequence: Synthetic oligonucleotide
  Antisense strand to SEQ ID NO: 1031962
aacgucauuaccuuucucu

SEQ ID NO: 1031964 - RNA, 19 nt, Artificial Sequence
  Description of Artificial Sequence: Synthetic oligonucleotide
  Sense strand starting at position 1876 of SEQ ID NO: 914803
cgguuugcaaacuguuaca

SEQ ID NO: 1031965 - RNA, 19 nt, Artificial Sequence
  Description of Artificial Sequence: Synthetic oligonucleotide
  Antisense strand to SEQ ID NO: 1031964
uguaacaguuugcaaaccg

SEQ ID NO: 1031966 - RNA, 19 nt, Artificial Sequence
  Description of Artificial Sequence: Synthetic oligonucleotide
  Sense strand starting at position 2018 of SEQ ID NO: 914803
gcgcguacucauuggacca

SEQ ID NO: 1031967 - RNA, 19 nt, Artificial Sequence
  Description of Artificial Sequence: Synthetic oligonucleotide
  Antisense strand to SEQ ID NO: 1031966
ugguccaaugaguacgcgc

SEQ ID NO: 1031968 - RNA, 19 nt, Artificial Sequence
  Description of Artificial Sequence: Synthetic oligonucleotide
  Sense strand starting at position 2376 of SEQ ID NO: 914803
uggccugccgguuaguauu

SEQ ID NO: 1031969 - RNA, 19 nt, Artificial Sequence
  Description of Artificial Sequence: Synthetic oligonucleotide
  Antisense strand to SEQ ID NO: 1031968
aauacuaaccggcaggcca

SEQ ID NO: 1031970 - RNA, 19 nt, Artificial Sequence
  Description of Artificial Sequence: Synthetic oligonucleotide
  Sense strand starting at position 2387 of SEQ ID NO: 914803
uuaguauugaggugcccua

SEQ ID NO: 1031971 - RNA, 19 nt, Artificial Sequence
  Description of Artificial Sequence: Synthetic oligonucleotide
  Antisense strand to SEQ ID NO: 1031970
uagggcaccucaauacuaa

SEQ ID NO: 1031972 - RNA, 19 nt, Artificial Sequence
  Description of Artificial Sequence: Synthetic oligonucleotide
  Sense strand starting at position 2400 of SEQ ID NO: 914803
gcccuaggcuuuggauaga

SEQ ID NO: 1031973 - RNA, 19 nt, Artificial Sequence
  Description of Artificial Sequence: Synthetic oligonucleotide
  Antisense strand to SEQ ID NO: 1031972
ucuauccaaagccuagggc

SEQ ID NO: 1031974 - RNA, 19 nt, Artificial Sequence
  Description of Artificial Sequence: Synthetic oligonucleotide
  Sense strand starting at position 2410 of SEQ ID NO: 914803
uuggauagacguuggagaa

SEQ ID NO: 1031975 - RNA, 19 nt, Artificial Sequence
  Description of Artificial Sequence: Synthetic oligonucleotide
  Antisense strand to SEQ ID NO: 1031974
uucuccaacgucuauccaa

SEQ ID NO: 1031976 - RNA, 19 nt, Artificial Sequence
  Description of Artificial Sequence: Synthetic oligonucleotide
  Sense strand starting at position 2411 of SEQ ID NO: 914803
uggauagacguuggagaau

SEQ ID NO: 1031977 - RNA, 19 nt, Artificial Sequence
  Description of Artificial Sequence: Synthetic oligonucleotide
  Antisense strand to SEQ ID NO: 1031976
auucuccaacgucuaucca

SEQ ID NO: 1031978 - RNA, 19 nt, Artificial Sequence
  Description of Artificial Sequence: Synthetic oligonucleotide
  Sense strand starting at position 2499 of SEQ ID NO: 914803
gauguuugcugauggguca

SEQ ID NO: 1031979 - RNA, 19 nt, Artificial Sequence
  Description of Artificial Sequence: Synthetic oligonucleotide
  Antisense strand to SEQ ID NO: 1031978
ugacccaucagcaaacauc

SEQ ID NO: 1031980 - RNA, 19 nt, Artificial Sequence
  Description of Artificial Sequence: Synthetic oligonucleotide
  Sense strand starting at position 2506 of SEQ ID NO: 914803
gcugaugggucagagauaa

SEQ ID NO: 1031981 - RNA, 19 nt, Artificial Sequence
  Description of Artificial Sequence: Synthetic oligonucleotide
  Antisense strand to SEQ ID NO: 1031980
uuaucucugacccaucagc

SEQ ID NO: 1031982 - RNA, 19 nt, Artificial Sequence
  Description of Artificial Sequence: Synthetic oligonucleotide
  Sense strand starting at position 2517 of SEQ ID NO: 914803
agagauaaccgaugcauuc

SEQ ID NO: 1031983 - RNA, 19 nt, Artificial Sequence
  Description of Artificial Sequence: Synthetic oligonucleotide
  Antisense strand to SEQ ID NO: 1031982
gaaugcaucgguuaucucu

SEQ ID NO: 1031984 - RNA, 19 nt, Artificial Sequence
  Description of Artificial Sequence: Synthetic oligonucleotide
  Sense strand starting at position 2526 of SEQ ID NO: 914803
cgaugcauucgucgcagaa

SEQ ID NO: 1031985 - RNA, 19 nt, Artificial Sequence
  Description of Artificial Sequence: Synthetic oligonucleotide
  Antisense strand to SEQ ID NO: 1031984
uucugcgacgaaugcaucg

SEQ ID NO: 1031986 - RNA, 19 nt, Artificial Sequence
  Description of Artificial Sequence: Synthetic oligonucleotide
  Sense strand starting at position 2538 of SEQ ID NO: 914803
cgcagaaucuggccaggau

SEQ ID NO: 1031987 - RNA, 19 nt, Artificial Sequence
  Description of Artificial Sequence: Synthetic oligonucleotide
  Antisense strand to SEQ ID NO: 1031986
auccuggccagauucugcg

SEQ ID NO: 1031988 - RNA, 19 nt, Artificial Sequence
  Description of Artificial Sequence: Synthetic oligonucleotide
  Sense strand starting at position 2539 of SEQ ID NO: 914803
gcagaaucuggccaggauu

SEQ ID NO: 1031989 - RNA, 19 nt, Artificial Sequence
  Description of Artificial Sequence: Synthetic oligonucleotide
  Antisense strand to SEQ ID NO: 1031988
aauccuggccagauucugc

SEQ ID NO: 1031990 - RNA, 19 nt, Artificial Sequence
  Description of Artificial Sequence: Synthetic oligonucleotide
  Sense strand starting at position 2551 of SEQ ID NO: 914803
caggauuucuuagguuaag

SEQ ID NO: 1031991 - RNA, 19 nt, Artificial Sequence
  Description of Artificial Sequence: Synthetic oligonucleotide
  Antisense strand to SEQ ID NO: 1031990
cuuaaccuaagaaauccug

SEQ ID NO: 1031992 - RNA, 19 nt, Artificial Sequence
  Description of Artificial Sequence: Synthetic oligonucleotide
  Sense strand starting at position 2642 of SEQ ID NO: 914803
gcuauaguugguugagcuu

SEQ ID NO: 1031993 - RNA, 19 nt, Artificial Sequence
  Description of Artificial Sequence: Synthetic oligonucleotide
  Antisense strand to SEQ ID NO: 1031992
aagcucaaccaacuauagc

SEQ ID NO: 1031994 - RNA, 19 nt, Artificial Sequence
  Description of Artificial Sequence: Synthetic oligonucleotide
  Sense strand starting at position 2719 of SEQ ID NO: 914803
agcuguuucugucauagaa

SEQ ID NO: 1031995 - RNA, 19 nt, Artificial Sequence
  Description of Artificial Sequence: Synthetic oligonucleotide
  Antisense strand to SEQ ID NO: 1031994
uucuaugacagaaacagcu

SEQ ID NO: 1031996 - RNA, 19 nt, Artificial Sequence
  Description of Artificial Sequence: Synthetic oligonucleotide
  Sense strand starting at position 2721 of SEQ ID NO: 914803
cuguuucugucauagaaug

SEQ ID NO: 1031997 - RNA, 19 nt, Artificial Sequence
  Description of Artificial Sequence: Synthetic oligonucleotide
  Antisense strand to SEQ ID NO: 1031996
cauucuaugacagaaacag

SEQ ID NO: 1031998 - RNA, 19 nt, Artificial Sequence
  Description of Artificial Sequence: Synthetic oligonucleotide
  Sense strand starting at position 2726 of SEQ ID NO: 914803
ucugucauagaaugacaga

SEQ ID NO: 1031999 - RNA, 19 nt, Artificial Sequence
  Description of Artificial Sequence: Synthetic oligonucleotide
  Antisense strand to SEQ ID NO: 1031998
ucugucauucuaugacaga

SEQ ID NO: 1032000 - RNA, 19 nt, Artificial Sequence
  Description of Artificial Sequence: Synthetic oligonucleotide
  Sense strand starting at position 3119 of SEQ ID NO: 914803
uccuuaaguguggauggaa

SEQ ID NO: 1032001 - RNA, 19 nt, Artificial Sequence
  Description of Artificial Sequence: Synthetic oligonucleotide
  Antisense strand to SEQ ID NO: 1032000
uuccauccacacuuaagga

SEQ ID NO: 1032002 - RNA, 19 nt, Artificial Sequence
  Description of Artificial Sequence: Synthetic oligonucleotide
  Sense strand starting at position 3122 of SEQ ID NO: 914803
uuaaguguggauggaaaua

SEQ ID NO: 1032003 - RNA, 19 nt, Artificial Sequence
  Description of Artificial Sequence: Synthetic oligonucleotide
  Antisense strand to SEQ ID NO: 1032002
uauuuccauccacacuuaa

SEQ ID NO: 1032004 - RNA, 19 nt, Artificial Sequence
  Description of Artificial Sequence: Synthetic oligonucleotide
  Sense strand starting at position 3229 of SEQ ID NO: 914803
uugugucaagccugaacuu

SEQ ID NO: 1032005 - RNA, 19 nt, Artificial Sequence
  Description of Artificial Sequence: Synthetic oligonucleotide
  Antisense strand to SEQ ID NO: 1032004
aaguucaggcuugacacaa

SEQ ID NO: 1032006 - RNA, 19 nt, Artificial Sequence
  Description of Artificial Sequence: Synthetic oligonucleotide
  Sense strand starting at position 3238 of SEQ ID NO: 914803
gccugaacuuguuuaagga

SEQ ID NO: 1032007 - RNA, 19 nt, Artificial Sequence
  Description of Artificial Sequence: Synthetic oligonucleotide
  Antisense strand to SEQ ID NO: 1032006
uccuuaaacaaguucaggc

SEQ ID NO: 1032008 - RNA, 19 nt, Artificial Sequence
  Description of Artificial Sequence: Synthetic oligonucleotide
  Sense strand starting at position 3310 of SEQ ID NO: 914803
uccggugucuaugcuuaga

SEQ ID NO: 1032009 - RNA, 19 nt, Artificial Sequence
  Description of Artificial Sequence: Synthetic oligonucleotide
  Antisense strand to SEQ ID NO: 1032008
ucuaagcauagacaccgga

SEQ ID NO: 1032010 - RNA, 19 nt, Artificial Sequence
  Description of Artificial Sequence: Synthetic oligonucleotide
  Sense strand starting at position 3312 of SEQ ID NO: 914803
cggugucuaugcuuagaag

SEQ ID NO: 1032011 - RNA, 19 nt, Artificial Sequence
  Description of Artificial Sequence: Synthetic oligonucleotide
  Antisense strand to SEQ ID NO: 1032010
cuucuaagcauagacaccg

SEQ ID NO: 1032012 - RNA, 19 nt, Artificial Sequence
  Description of Artificial Sequence: Synthetic oligonucleotide
  Sense strand starting at position 3352 of SEQ ID NO: 914803
gagagagucuauucuuccu

SEQ ID NO: 1032013 - RNA, 19 nt, Artificial Sequence
  Description of Artificial Sequence: Synthetic oligonucleotide
  Antisense strand to SEQ ID NO: 1032012
aggaagaauagacucucuc

SEQ ID NO: 1032014 - RNA, 19 nt, Artificial Sequence
  Description of Artificial Sequence: Synthetic oligonucleotide
  Sense strand starting at position 421 of SEQ ID NO: 914804
ggugcacacaucugcaaga

SEQ ID NO: 1032015 - RNA, 19 nt, Artificial Sequence
  Description of Artificial Sequence: Synthetic oligonucleotide
  Antisense strand to SEQ ID NO: 1032014
ucuugcagaugugugcacc

SEQ ID NO: 1032016 - RNA, 19 nt, Artificial Sequence
  Description of Artificial Sequence: Synthetic oligonucleotide
  Sense strand starting at position 492 of SEQ ID NO: 914804
gacaguguguccuuaccuu

SEQ ID NO: 1032017 - RNA, 19 nt, Artificial Sequence
  Description of Artificial Sequence: Synthetic oligonucleotide
  Antisense strand to SEQ ID NO: 1032016
aagguaaggacacacuguc

SEQ ID NO: 1032018 - RNA, 19 nt, Artificial Sequence
  Description of Artificial Sequence: Synthetic oligonucleotide
  Sense strand starting at position 532 of SEQ ID NO: 914804
ccacguuccugguccagau

SEQ ID NO: 1032019 - RNA, 19 nt, Artificial Sequence
  Description of Artificial Sequence: Synthetic oligonucleotide
  Antisense strand to SEQ ID NO: 1032018
aucuggaccaggaacgugg

SEQ ID NO: 1032020 - RNA, 19 nt, Artificial Sequence
  Description of Artificial Sequence: Synthetic oligonucleotide
  Sense strand starting at position 577 of SEQ ID NO: 914804
agcagauucugagcauauc

SEQ ID NO: 1032021 - RNA, 19 nt, Artificial Sequence
  Description of Artificial Sequence: Synthetic oligonucleotide
  Antisense strand to SEQ ID NO: 1032020
gauaugcucagaaucugcu

SEQ ID NO: 1032022 - RNA, 19 nt, Artificial Sequence
  Description of Artificial Sequence: Synthetic oligonucleotide
  Sense strand starting at position 1321 of SEQ ID NO: 914804
ggaaggugaggguguaauu

SEQ ID NO: 1032023 - RNA, 19 nt, Artificial Sequence
  Description of Artificial Sequence: Synthetic oligonucleotide
  Antisense strand to SEQ ID NO: 1032022
aauuacacccucaccuucc

SEQ ID NO: 1032024 - RNA, 19 nt, Artificial Sequence
  Description of Artificial Sequence: Synthetic oligonucleotide
  Sense strand starting at position 1356 of SEQ ID NO: 914804
ggagaauugcucugggcua

SEQ ID NO: 1032025 - RNA, 19 nt, Artificial Sequence
  Description of Artificial Sequence: Synthetic oligonucleotide
  Antisense strand to SEQ ID NO: 1032024
uagcccagagcaauucucc

SEQ ID NO: 1032026 - RNA, 19 nt, Artificial Sequence
  Description of Artificial Sequence: Synthetic oligonucleotide
  Sense strand starting at position 1358 of SEQ ID NO: 914804
agaauugcucugggcuaau

SEQ ID NO: 1032027 - RNA, 19 nt, Artificial Sequence
  Description of Artificial Sequence: Synthetic oligonucleotide
  Antisense strand to SEQ ID NO: 1032026
auuagcccagagcaauucu

SEQ ID NO: 1032028 - RNA, 19 nt, Artificial Sequence
  Description of Artificial Sequence: Synthetic oligonucleotide
  Sense strand starting at position 1988 of SEQ ID NO: 914804
auuuccugcuguuuguaaa

SEQ ID NO: 1032029 - RNA, 19 nt, Artificial Sequence
  Description of Artificial Sequence: Synthetic oligonucleotide
  Antisense strand to SEQ ID NO: 1032028
uuuacaaacagcaggaaau

SEQ ID NO: 1032030 - RNA, 19 nt, Artificial Sequence
  Description of Artificial Sequence: Synthetic oligonucleotide
  Sense strand starting at position 1996 of SEQ ID NO: 914804
cuguuuguaaauuggugaa

SEQ ID NO: 1032031 - RNA, 19 nt, Artificial Sequence
  Description of Artificial Sequence: Synthetic oligonucleotide
  Antisense strand to SEQ ID NO: 1032030
uucaccaauuuacaaacag

SEQ ID NO: 1032032 - RNA, 19 nt, Artificial Sequence
  Description of Artificial Sequence: Synthetic oligonucleotide
  Sense strand starting at position 1998 of SEQ ID NO: 914804
guuuguaaauuggugaauu

SEQ ID NO: 1032033 - RNA, 19 nt, Artificial Sequence
  Description of Artificial Sequence: Synthetic oligonucleotide
  Antisense strand to SEQ ID NO: 1032032
aauucaccaauuuacaaac

SEQ ID NO: 1032034 - RNA, 19 nt, Artificial Sequence
  Description of Artificial Sequence: Synthetic oligonucleotide
  Sense strand starting at position 2010 of SEQ ID NO: 914804
gugaauuagccagggacca

SEQ ID NO: 1032035 - RNA, 19 nt, Artificial Sequence
  Description of Artificial Sequence: Synthetic oligonucleotide
  Antisense strand to SEQ ID NO: 1032034
uggucccuggcuaauucac

SEQ ID NO: 1032036 - RNA, 19 nt, Artificial Sequence
  Description of Artificial Sequence: Synthetic oligonucleotide
  Sense strand starting at position 2011 of SEQ ID NO: 914804
ugaauuagccagggaccaa

SEQ ID NO: 1032037 - RNA, 19 nt, Artificial Sequence
  Description of Artificial Sequence: Synthetic oligonucleotide
  Antisense strand to SEQ ID NO: 1032036
uuggucccuggcuaauuca

SEQ ID NO: 1032038 - RNA, 19 nt, Artificial Sequence
  Description of Artificial Sequence: Synthetic oligonucleotide
  Sense strand starting at position 2023 of SEQ ID NO: 914804
ggaccaaugaggugugguu

SEQ ID NO: 1032039 - RNA, 19 nt, Artificial Sequence
  Description of Artificial Sequence: Synthetic oligonucleotide
  Antisense strand to SEQ ID NO: 1032038
aaccacaccucauuggucc

SEQ ID NO: 1032040 - RNA, 19 nt, Artificial Sequence
  Description of Artificial Sequence: Synthetic oligonucleotide
  Sense strand starting at position 2025 of SEQ ID NO: 914804
accaaugaggugugguuua

SEQ ID NO: 1032041 - RNA, 19 nt, Artificial Sequence
  Description of Artificial Sequence: Synthetic oligonucleotide
  Antisense strand to SEQ ID NO: 1032040
uaaaccacaccucauuggu

SEQ ID NO: 1032042 - RNA, 19 nt, Artificial Sequence
  Description of Artificial Sequence: Synthetic oligonucleotide
  Sense strand starting at position 2037 of SEQ ID NO: 914804
ugguuuaacuucuugagga

SEQ ID NO: 1032043 - RNA, 19 nt, Artificial Sequence
  Description of Artificial Sequence: Synthetic oligonucleotide
  Antisense strand to SEQ ID NO: 1032042
uccucaagaaguuaaacca

SEQ ID NO: 1032044 - RNA, 19 nt, Artificial Sequence
  Description of Artificial Sequence: Synthetic oligonucleotide
  Sense strand starting at position 2101 of SEQ ID NO: 914804
gagagaggcuuccucauca

SEQ ID NO: 1032045 - RNA, 19 nt, Artificial Sequence
  Description of Artificial Sequence: Synthetic oligonucleotide
  Antisense strand to SEQ ID NO: 1032044
ugaugaggaagccucucuc

SEQ ID NO: 1032046 - RNA, 19 nt, Artificial Sequence
  Description of Artificial Sequence: Synthetic oligonucleotide
  Sense strand starting at position 2106 of SEQ ID NO: 914804
aggcuuccucaucagaaac

SEQ ID NO: 1032047 - RNA, 19 nt, Artificial Sequence
  Description of Artificial Sequence: Synthetic oligonucleotide
  Antisense strand to SEQ ID NO: 1032046
guuucugaugaggaagccu

SEQ ID NO: 1032048 - RNA, 19 nt, Artificial Sequence
  Description of Artificial Sequence: Synthetic oligonucleotide
  Sense strand starting at position 2144 of SEQ ID NO: 914804
uuccuaaguguuggguuua

SEQ ID NO: 1032049 - RNA, 19 nt, Artificial Sequence
  Description of Artificial Sequence: Synthetic oligonucleotide
  Antisense strand to SEQ ID NO: 1032048
uaaacccaacacuuaggaa

SEQ ID NO: 1032050 - RNA, 19 nt, Artificial Sequence
  Description of Artificial Sequence: Synthetic oligonucleotide
  Sense strand starting at position 2311 of SEQ ID NO: 914804
gcaggccucucuccugaaa

SEQ ID NO: 1032051 - RNA, 19 nt, Artificial Sequence
  Description of Artificial Sequence: Synthetic oligonucleotide
  Antisense strand to SEQ ID NO: 1032050
uuucaggagagaggccugc

SEQ ID NO: 1032052 - RNA, 19 nt, Artificial Sequence
  Description of Artificial Sequence: Synthetic oligonucleotide
  Sense strand starting at position 2492 of SEQ ID NO: 914804
agaggguaguguguugaga

SEQ ID NO: 1032053 - RNA, 19 nt, Artificial Sequence
  Description of Artificial Sequence: Synthetic oligonucleotide
  Antisense strand to SEQ ID NO: 1032052
ucucaacacacuacccucu

SEQ ID NO: 1032054 - RNA, 19 nt, Artificial Sequence
  Description of Artificial Sequence: Synthetic oligonucleotide
  Sense strand starting at position 2516 of SEQ ID NO: 914804
ggaggauuccagggccugu

SEQ ID NO: 1032055 - RNA, 19 nt, Artificial Sequence
  Description of Artificial Sequence: Synthetic oligonucleotide
  Antisense strand to SEQ ID NO: 1032054
acaggcccuggaauccucc

SEQ ID NO: 1032056 - RNA, 19 nt, Artificial Sequence
  Description of Artificial Sequence: Synthetic oligonucleotide
  Sense strand starting at position 2616 of SEQ ID NO: 914804
gugagugcuggaugaccua

SEQ ID NO: 1032057 - RNA, 19 nt, Artificial Sequence
  Description of Artificial Sequence: Synthetic oligonucleotide
  Antisense strand to SEQ ID NO: 1032056
uaggucauccagcacucac

SEQ ID NO: 1032058 - RNA, 19 nt, Artificial Sequence
  Description of Artificial Sequence: Synthetic oligonucleotide
  Sense strand starting at position 2727 of SEQ ID NO: 914804
ggaauuguagacugaguag

SEQ ID NO: 1032059 - RNA, 19 nt, Artificial Sequence
  Description of Artificial Sequence: Synthetic oligonucleotide
  Antisense strand to SEQ ID NO: 1032058
cuacucagucuacaauucc

SEQ ID NO: 1032060 - RNA, 19 nt, Artificial Sequence
  Description of Artificial Sequence: Synthetic oligonucleotide
  Sense strand starting at position 2847 of SEQ ID NO: 914804
guucuuaaguucucuuucu

SEQ ID NO: 1032061 - RNA, 19 nt, Artificial Sequence
  Description of Artificial Sequence: Synthetic oligonucleotide
  Antisense strand to SEQ ID NO: 1032060
agaaagagaacuuaagaac

SEQ ID NO: 1032062 - RNA, 19 nt, Artificial Sequence
  Description of Artificial Sequence: Synthetic oligonucleotide
  Sense strand starting at position 2870 of SEQ ID NO: 914804
ucguuucugccugcuuuaa

SEQ ID NO: 1032063 - RNA, 19 nt, Artificial Sequence
  Description of Artificial Sequence: Synthetic oligonucleotide
  Antisense strand to SEQ ID NO: 1032062
uuaaagcaggcagaaacga

SEQ ID NO: 1032064 - RNA, 19 nt, Artificial Sequence
  Description of Artificial Sequence: Synthetic oligonucleotide
  Sense strand starting at position 3052 of SEQ ID NO: 914804
acacauauuucguuaugug

SEQ ID NO: 1032065 - RNA, 19 nt, Artificial Sequence
  Description of Artificial Sequence: Synthetic oligonucleotide
  Antisense strand to SEQ ID NO: 1032064
cacauaacgaaauaugugu

SEQ ID NO: 1032066 - RNA, 19 nt, Artificial Sequence
  Description of Artificial Sequence: Synthetic oligonucleotide
  Sense strand starting at position 3053 of SEQ ID NO: 914804
cacauauuucguuaugugu

SEQ ID NO: 1032067 - RNA, 19 nt, Artificial Sequence
  Description of Artificial Sequence: Synthetic oligonucleotide
  Antisense strand to SEQ ID NO: 1032066
acacauaacgaaauaugug

SEQ ID NO: 1032068 - RNA, 19 nt, Artificial Sequence
  Description of Artificial Sequence: Synthetic oligonucleotide
  Sense strand starting at position 3157 of SEQ ID NO: 914804
gugacuuaaguagaaucuu

SEQ ID NO: 1032069 - RNA, 19 nt, Artificial Sequence
  Description of Artificial Sequence: Synthetic oligonucleotide
  Antisense strand to SEQ ID NO: 1032068
aagauucuacuuaagucac

SEQ ID NO: 1032070 - RNA, 19 nt, Artificial Sequence
  Description of Artificial Sequence: Synthetic oligonucleotide
  Sense strand starting at position 3241 of SEQ ID NO: 914804
cccucagacaucgaguuga

SEQ ID NO: 1032071 - RNA, 19 nt, Artificial Sequence
  Description of Artificial Sequence: Synthetic oligonucleotide
  Antisense strand to SEQ ID NO: 1032070
ucaacucgaugucugaggg

SEQ ID NO: 1032072 - RNA, 19 nt, Artificial Sequence
  Description of Artificial Sequence: Synthetic oligonucleotide
  Sense strand starting at position 3245 of SEQ ID NO: 914804
cagacaucgaguugaggaa

SEQ ID NO: 1032073 - RNA, 19 nt, Artificial Sequence
  Description of Artificial Sequence: Synthetic oligonucleotide
  Antisense strand to SEQ ID NO: 1032072
uuccucaacucgaugucug

SEQ ID NO: 1032074 - RNA, 19 nt, Artificial Sequence
  Description of Artificial Sequence: Synthetic oligonucleotide
  Sense strand starting at position 3270 of SEQ ID NO: 914804
ggcuuuauuuggccuuuau

SEQ ID NO: 1032075 - RNA, 19 nt, Artificial Sequence
  Description of Artificial Sequence: Synthetic oligonucleotide
  Antisense strand to SEQ ID NO: 1032074
auaaaggccaaauaaagcc

SEQ ID NO: 1032076 - RNA, 19 nt, Artificial Sequence
  Description of Artificial Sequence: Synthetic oligonucleotide
  Sense strand starting at position 3280 of SEQ ID NO: 914804
ggccuuuauucggccagga

SEQ ID NO: 1032077 - RNA, 19 nt, Artificial Sequence
  Description of Artificial Sequence: Synthetic oligonucleotide
  Antisense strand to SEQ ID NO: 1032076
uccuggccgaauaaaggcc

SEQ ID NO: 1032078 - RNA, 19 nt, Artificial Sequence
  Description of Artificial Sequence: Synthetic oligonucleotide
  Sense strand starting at position 3550 of SEQ ID NO: 914804
gauggagcgugcucugaga

SEQ ID NO: 1032079 - RNA, 19 nt, Artificial Sequence
  Description of Artificial Sequence: Synthetic oligonucleotide
  Antisense strand to SEQ ID NO: 1032078
ucucagagcacgcuccauc

SEQ ID NO: 1032080 - RNA, 19 nt, Artificial Sequence
  Description of Artificial Sequence: Synthetic oligonucleotide
  Sense strand starting at position 3676 of SEQ ID NO: 914804
uuuggaagcuucuuuaaau

SEQ ID NO: 1032081 - RNA, 19 nt, Artificial Sequence
  Description of Artificial Sequence: Synthetic oligonucleotide
  Antisense strand to SEQ ID NO: 1032080
auuuaaagaagcuuccaaa

SEQ ID NO: 1032082 - RNA, 19 nt, Artificial Sequence
  Description of Artificial Sequence: Synthetic oligonucleotide
  Sense strand starting at position 3677 of SEQ ID NO: 914804
uuggaagcuucuuuaaauc

SEQ ID NO: 1032083 - RNA, 19 nt, Artificial Sequence
  Description of Artificial Sequence: Synthetic oligonucleotide
  Antisense strand to SEQ ID NO: 1032082
gauuuaaagaagcuuccaa

SEQ ID NO: 1032084 - RNA, 19 nt, Artificial Sequence
  Description of Artificial Sequence: Synthetic oligonucleotide
  Sense strand starting at position 3687 of SEQ ID NO: 914804
cuuuaaaucacgggcaguu

SEQ ID NO: 1032085 - RNA, 19 nt, Artificial Sequence
  Description of Artificial Sequence: Synthetic oligonucleotide
  Antisense strand to SEQ ID NO: 1032084
aacugcccgugauuuaaag

SEQ ID NO: 1032086 - RNA, 19 nt, Artificial Sequence
  Description of Artificial Sequence: Synthetic oligonucleotide
  Sense strand starting at position 3786 of SEQ ID NO: 914804
agucauaacugagaauaug

SEQ ID NO: 1032087 - RNA, 19 nt, Artificial Sequence
  Description of Artificial Sequence: Synthetic oligonucleotide
  Antisense strand to SEQ ID NO: 1032086
cauauucucaguuaugacu

SEQ ID NO: 1032088 - RNA, 19 nt, Artificial Sequence
  Description of Artificial Sequence: Synthetic oligonucleotide
  Sense strand starting at position 3877 of SEQ ID NO: 914804
cugggcuuagccuaaacua

SEQ ID NO: 1032089 - RNA, 19 nt, Artificial Sequence
  Description of Artificial Sequence: Synthetic oligonucleotide
  Antisense strand to SEQ ID NO: 1032088
uaguuuaggcuaagcccag

SEQ ID NO: 1032090 - RNA, 19 nt, Artificial Sequence
  Description of Artificial Sequence: Synthetic oligonucleotide
  Sense strand starting at position 3904 of SEQ ID NO: 914804
agaaacaguuuauagauca

SEQ ID NO: 1032091 - RNA, 19 nt, Artificial Sequence
  Description of Artificial Sequence: Synthetic oligonucleotide
  Antisense strand to SEQ ID NO: 1032090
ugaucuauaaacuguuucu

SEQ ID NO: 1032092 - RNA, 19 nt, Artificial Sequence
  Description of Artificial Sequence: Synthetic oligonucleotide
  Sense strand starting at position 3912 of SEQ ID NO: 914804
uuuauagaucaaggcugaa

SEQ ID NO: 1032093 - RNA, 19 nt, Artificial Sequence
  Description of Artificial Sequence: Synthetic oligonucleotide
  Antisense strand to SEQ ID NO: 1032092
uucagccuugaucuauaaa

SEQ ID NO: 1032094 - RNA, 19 nt, Artificial Sequence
  Description of Artificial Sequence: Synthetic oligonucleotide
  Sense strand starting at position 65 of SEQ ID NO: 914805
agagccauugacgaguaaa

SEQ ID NO: 1032095 - RNA, 19 nt, Artificial Sequence
  Description of Artificial Sequence: Synthetic oligonucleotide
  Antisense strand to SEQ ID NO: 1032094
uuuacucgucaauggcucu

SEQ ID NO: 1032096 - RNA, 19 nt, Artificial Sequence
  Description of Artificial Sequence: Synthetic oligonucleotide
  Sense strand starting at position 68 of SEQ ID NO: 914805
gccauugacgaguaaacaa

SEQ ID NO: 1032097 - RNA, 19 nt, Artificial Sequence
  Description of Artificial Sequence: Synthetic oligonucleotide
  Antisense strand to SEQ ID NO: 1032096
uuguuuacucgucaauggc

SEQ ID NO: 1032098 - RNA, 19 nt, Artificial Sequence
  Description of Artificial Sequence: Synthetic oligonucleotide
  Sense strand starting at position 245 of SEQ ID NO: 914805
acaauaacaggcugugaaa

SEQ ID NO: 1032099 - RNA, 19 nt, Artificial Sequence
  Description of Artificial Sequence: Synthetic oligonucleotide
  Antisense strand to SEQ ID NO: 1032098
uuucacagccuguuauugu

SEQ ID NO: 1032100 - RNA, 19 nt, Artificial Sequence
  Description of Artificial Sequence: Synthetic oligonucleotide
  Sense strand starting at position 1189 of SEQ ID NO: 914805
caggccuuccgguaaguuu

SEQ ID NO: 1032101 - RNA, 19 nt, Artificial Sequence
  Description of Artificial Sequence: Synthetic oligonucleotide
  Antisense strand to SEQ ID NO: 1032100
aaacuuaccggaaggccug

SEQ ID NO: 1032102 - RNA, 19 nt, Artificial Sequence
  Description of Artificial Sequence: Synthetic oligonucleotide
  Sense strand starting at position 1320 of SEQ ID NO: 914805
cccagagucugggagaaug

SEQ ID NO: 1032103 - RNA, 19 nt, Artificial Sequence
  Description of Artificial Sequence: Synthetic oligonucleotide
  Antisense strand to SEQ ID NO: 1032102
cauucucccagacucuggg

SEQ ID NO: 1032104 - RNA, 19 nt, Artificial Sequence
  Description of Artificial Sequence: Synthetic oligonucleotide
  Sense strand starting at position 1527 of SEQ ID NO: 914805
gauacuuuguucccuguga

SEQ ID NO: 1032105 - RNA, 19 nt, Artificial Sequence
  Description of Artificial Sequence: Synthetic oligonucleotide
  Antisense strand to SEQ ID NO: 1032104
ucacagggaacaaaguauc

SEQ ID NO: 1032106 - RNA, 19 nt, Artificial Sequence
  Description of Artificial Sequence: Synthetic oligonucleotide
  Sense strand starting at position 1528 of SEQ ID NO: 914805
auacuuuguucccugugaa

SEQ ID NO: 1032107 - RNA, 19 nt, Artificial Sequence
  Description of Artificial Sequence: Synthetic oligonucleotide
  Antisense strand to SEQ ID NO: 1032106
uucacagggaacaaaguau

SEQ ID NO: 1032108 - RNA, 19 nt, Artificial Sequence
  Description of Artificial Sequence: Synthetic oligonucleotide
  Sense strand starting at position 1531 of SEQ ID NO: 914805
cuuuguucccugugaauca

SEQ ID NO: 1032109 - RNA, 19 nt, Artificial Sequence
  Description of Artificial Sequence: Synthetic oligonucleotide
  Antisense strand to SEQ ID NO: 1032108
ugauucacagggaacaaag

SEQ ID NO: 1032110 - RNA, 19 nt, Artificial Sequence
  Description of Artificial Sequence: Synthetic oligonucleotide
  Sense strand starting at position 1532 of SEQ ID NO: 914805
uuuguucccugugaaucau

SEQ ID NO: 1032111 - RNA, 19 nt, Artificial Sequence
  Description of Artificial Sequence: Synthetic oligonucleotide
  Antisense strand to SEQ ID NO: 1032110
augauucacagggaacaaa

SEQ ID NO: 1032112 - RNA, 19 nt, Artificial Sequence
  Description of Artificial Sequence: Synthetic oligonucleotide
  Sense strand starting at position 2144 of SEQ ID NO: 914805
gcacaaggcugaucuuaaa

SEQ ID NO: 1032113 - RNA, 19 nt, Artificial Sequence
  Description of Artificial Sequence: Synthetic oligonucleotide
  Antisense strand to SEQ ID NO: 1032112
uuuaagaucagccuugugc

SEQ ID NO: 1032114 - RNA, 19 nt, Artificial Sequence
  Description of Artificial Sequence: Synthetic oligonucleotide
  Sense strand starting at position 2154 of SEQ ID NO: 914805
gaucuuaaaugauguugau

SEQ ID NO: 1032115 - RNA, 19 nt, Artificial Sequence
  Description of Artificial Sequence: Synthetic oligonucleotide
  Antisense strand to SEQ ID NO: 1032114
aucaacaucauuuaagauc

SEQ ID NO: 1032116 - RNA, 19 nt, Artificial Sequence
  Description of Artificial Sequence: Synthetic oligonucleotide
  Sense strand starting at position 3231 of SEQ ID NO: 914805
gguaaauguucuugcucca

SEQ ID NO: 1032117 - RNA, 19 nt, Artificial Sequence
  Description of Artificial Sequence: Synthetic oligonucleotide
  Antisense strand to SEQ ID NO: 1032116
uggagcaagaacauuuacc

SEQ ID NO: 1032118 - RNA, 19 nt, Artificial Sequence
  Description of Artificial Sequence: Synthetic oligonucleotide
  Sense strand starting at position 3335 of SEQ ID NO: 914805
gcaucaagauaauggcaaa

SEQ ID NO: 1032119 - RNA, 19 nt, Artificial Sequence
  Description of Artificial Sequence: Synthetic oligonucleotide
  Antisense strand to SEQ ID NO: 1032118
uuugccauuaucuugaugc

SEQ ID NO: 1032120 - RNA, 19 nt, Artificial Sequence
  Description of Artificial Sequence: Synthetic oligonucleotide
  Sense strand starting at position 3338 of SEQ ID NO: 914805
ucaagauaauggcaaaugu

SEQ ID NO: 1032121 - RNA, 19 nt, Artificial Sequence
  Description of Artificial Sequence: Synthetic oligonucleotide
  Antisense strand to SEQ ID NO: 1032120
acauuugccauuaucuuga

SEQ ID NO: 1032122 - RNA, 19 nt, Artificial Sequence
  Description of Artificial Sequence: Synthetic oligonucleotide
  Sense strand starting at position 3750 of SEQ ID NO: 914805
ccauuuauuucccgggaca

SEQ ID NO: 1032123 - RNA, 19 nt, Artificial Sequence
  Description of Artificial Sequence: Synthetic oligonucleotide
  Antisense strand to SEQ ID NO: 1032122
ugucccgggaaauaaaugg

SEQ ID NO: 1032124 - RNA, 19 nt, Artificial Sequence
  Description of Artificial Sequence: Synthetic oligonucleotide
  Sense strand starting at position 3820 of SEQ ID NO: 914805
agaaauagccucuguucga

SEQ ID NO: 1032125 - RNA, 19 nt, Artificial Sequence
  Description of Artificial Sequence: Synthetic oligonucleotide
  Antisense strand to SEQ ID NO: 1032124
ucgaacagaggcuauuucu

SEQ ID NO: 1032126 - RNA, 19 nt, Artificial Sequence
  Description of Artificial Sequence: Synthetic oligonucleotide
  Sense strand starting at position 3821 of SEQ ID NO: 914805
gaaauagccucuguucgag

SEQ ID NO: 1032127 - RNA, 19 nt, Artificial Sequence
  Description of Artificial Sequence: Synthetic oligonucleotide
  Antisense strand to SEQ ID NO: 1032126
cucgaacagaggcuauuuc

SEQ ID NO: 1032128 - RNA, 19 nt, Artificial Sequence
  Description of Artificial Sequence: Synthetic oligonucleotide
  Sense strand starting at position 3857 of SEQ ID NO: 914805
ugggccaccucccugaaau

SEQ ID NO: 1032129 - RNA, 19 nt, Artificial Sequence
  Description of Artificial Sequence: Synthetic oligonucleotide
  Antisense strand to SEQ ID NO: 1032128
auuucagggagguggccca

SEQ ID NO: 1032130 - RNA, 19 nt, Artificial Sequence
  Description of Artificial Sequence: Synthetic oligonucleotide
  Sense strand starting at position 3858 of SEQ ID NO: 914805
gggccaccucccugaaauc

SEQ ID NO: 1032131 - RNA, 19 nt, Artificial Sequence
  Description of Artificial Sequence: Synthetic oligonucleotide
  Antisense strand to SEQ ID NO: 1032130
gauuucagggagguggccc

SEQ ID NO: 1032132 - RNA, 19 nt, Artificial Sequence
  Description of Artificial Sequence: Synthetic oligonucleotide
  Sense strand starting at position 38 of SEQ ID NO: 914806
gaugaagaguacugaagau

SEQ ID NO: 1032133 - RNA, 19 nt, Artificial Sequence
  Description of Artificial Sequence: Synthetic oligonucleotide
  Antisense strand to SEQ ID NO: 1032132
aucuucaguacucuucauc

SEQ ID NO: 1032134 - RNA, 19 nt, Artificial Sequence
  Description of Artificial Sequence: Synthetic oligonucleotide
  Sense strand starting at position 522 of SEQ ID NO: 914806
cuguguaagcuuuguacug

SEQ ID NO: 1032135 - RNA, 19 nt, Artificial Sequence
  Description of Artificial Sequence: Synthetic oligonucleotide
  Antisense strand to SEQ ID NO: 1032134
caguacaaagcuuacacag

SEQ ID NO: 1032136 - RNA, 19 nt, Artificial Sequence
  Description of Artificial Sequence: Synthetic oligonucleotide
  Sense strand starting at position 523 of SEQ ID NO: 914806
uguguaagcuuuguacugu

SEQ ID NO: 1032137 - RNA, 19 nt, Artificial Sequence
  Description of Artificial Sequence: Synthetic oligonucleotide
  Antisense strand to SEQ ID NO: 1032136
acaguacaaagcuuacaca

SEQ ID NO: 1032138 - RNA, 19 nt, Artificial Sequence
  Description of Artificial Sequence: Synthetic oligonucleotide
  Sense strand starting at position 643 of SEQ ID NO: 914806
gcaagaacguuuggcauua

SEQ ID NO: 1032139 - RNA, 19 nt, Artificial Sequence
  Description of Artificial Sequence: Synthetic oligonucleotide
  Antisense strand to SEQ ID NO: 1032138
uaaugccaaacguucuugc

SEQ ID NO: 1032140 - RNA, 19 nt, Artificial Sequence
  Description of Artificial Sequence: Synthetic oligonucleotide
  Sense strand starting at position 645 of SEQ ID NO: 914806
aagaacguuuggcauuaca

SEQ ID NO: 1032141 - RNA, 19 nt, Artificial Sequence
  Description of Artificial Sequence: Synthetic oligonucleotide
  Antisense strand to SEQ ID NO: 1032140
uguaaugccaaacguucuu

SEQ ID NO: 1032142 - RNA, 19 nt, Artificial Sequence
  Description of Artificial Sequence: Synthetic oligonucleotide
  Sense strand starting at position 1391 of SEQ ID NO: 914806
ggagaacugcucugggcua

SEQ ID NO: 1032143 - RNA, 19 nt, Artificial Sequence
  Description of Artificial Sequence: Synthetic oligonucleotide
  Antisense strand to SEQ ID NO: 1032142
uagcccagagcaguucucc

SEQ ID NO: 1032144 - RNA, 19 nt, Artificial Sequence
  Description of Artificial Sequence: Synthetic oligonucleotide
  Sense strand starting at position 2049 of SEQ ID NO: 914806
agaacaaauuccugaggau

SEQ ID NO: 1032145 - RNA, 19 nt, Artificial Sequence
  Description of Artificial Sequence: Synthetic oligonucleotide
  Antisense strand to SEQ ID NO: 1032144
auccucaggaauuuguucu

SEQ ID NO: 1032146 - RNA, 19 nt, Artificial Sequence
  Description of Artificial Sequence: Synthetic oligonucleotide
  Sense strand starting at position 2052 of SEQ ID NO: 914806
acaaauuccugaggaucaa

SEQ ID NO: 1032147 - RNA, 19 nt, Artificial Sequence
  Description of Artificial Sequence: Synthetic oligonucleotide
  Antisense strand to SEQ ID NO: 1032146
uugauccucaggaauuugu

SEQ ID NO: 1032148 - RNA, 19 nt, Artificial Sequence
  Description of Artificial Sequence: Synthetic oligonucleotide
  Sense strand starting at position 2140 of SEQ ID NO: 914806
gcacaagucucaucuuguu

SEQ ID NO: 1032149 - RNA, 19 nt, Artificial Sequence
  Description of Artificial Sequence: Synthetic oligonucleotide
  Antisense strand to SEQ ID NO: 1032148
aacaagaugagacuugugc

SEQ ID NO: 1032150 - RNA, 19 nt, Artificial Sequence
  Description of Artificial Sequence: Synthetic oligonucleotide
  Sense strand starting at position 2146 of SEQ ID NO: 914806
gucucaucuuguuaguggu

SEQ ID NO: 1032151 - RNA, 19 nt, Artificial Sequence
  Description of Artificial Sequence: Synthetic oligonucleotide
  Antisense strand to SEQ ID NO: 1032150
accacuaacaagaugagac

SEQ ID NO: 1032152 - RNA, 19 nt, Artificial Sequence
  Description of Artificial Sequence: Synthetic oligonucleotide
  Sense strand starting at position 2617 of SEQ ID NO: 914806
gcccucaucucacuuguca

SEQ ID NO: 1032153 - RNA, 19 nt, Artificial Sequence
  Description of Artificial Sequence: Synthetic oligonucleotide
  Antisense strand to SEQ ID NO: 1032152
ugacaagugagaugagggc

SEQ ID NO: 1032154 - RNA, 19 nt, Artificial Sequence
  Description of Artificial Sequence: Synthetic oligonucleotide
  Sense strand starting at position 2648 of SEQ ID NO: 914806
gcugacaucccuuguccuu

SEQ ID NO: 1032155 - RNA, 19 nt, Artificial Sequence
  Description of Artificial Sequence: Synthetic oligonucleotide
  Antisense strand to SEQ ID NO: 1032154
aaggacaagggaugucagc

SEQ ID NO: 1032156 - RNA, 19 nt, Artificial Sequence
  Description of Artificial Sequence: Synthetic oligonucleotide
  Sense strand starting at position 2825 of SEQ ID NO: 914806
gugggaugccaauagcaga

SEQ ID NO: 1032157 - RNA, 19 nt, Artificial Sequence
  Description of Artificial Sequence: Synthetic oligonucleotide
  Antisense strand to SEQ ID NO: 1032156
ucugcuauuggcaucccac

SEQ ID NO: 1032158 - RNA, 19 nt, Artificial Sequence
  Description of Artificial Sequence: Synthetic oligonucleotide
  Sense strand starting at position 3090 of SEQ ID NO: 914806
ugagcagcuccugagguua

SEQ ID NO: 1032159 - RNA, 19 nt, Artificial Sequence
  Description of Artificial Sequence: Synthetic oligonucleotide
  Antisense strand to SEQ ID NO: 1032158
uaaccucaggagcugcuca

SEQ ID NO: 1032160 - RNA, 19 nt, Artificial Sequence
  Description of Artificial Sequence: Synthetic oligonucleotide
  Sense strand starting at position 3201 of SEQ ID NO: 914806
ugcacuugagcuugucaga

SEQ ID NO: 1032161 - RNA, 19 nt, Artificial Sequence
  Description of Artificial Sequence: Synthetic oligonucleotide
  Antisense strand to SEQ ID NO: 1032160
ucugacaagcucaagugca

SEQ ID NO: 1032162 - RNA, 19 nt, Artificial Sequence
  Description of Artificial Sequence: Synthetic oligonucleotide
  Sense strand starting at position 3275 of SEQ ID NO: 914806
cgaccugcgcccuguuuaa

SEQ ID NO: 1032163 - RNA, 19 nt, Artificial Sequence
  Description of Artificial Sequence: Synthetic oligonucleotide
  Antisense strand to SEQ ID NO: 1032162
uuaaacagggcgcaggucg

SEQ ID NO: 1032164 - RNA, 19 nt, Artificial Sequence
  Description of Artificial Sequence: Synthetic oligonucleotide
  Sense strand starting at position 3277 of SEQ ID NO: 914806
accugcgcccuguuuaauu

SEQ ID NO: 1032165 - RNA, 19 nt, Artificial Sequence
  Description of Artificial Sequence: Synthetic oligonucleotide
  Antisense strand to SEQ ID NO: 1032164
aauuaaacagggcgcaggu

SEQ ID NO: 1032166 - RNA, 19 nt, Artificial Sequence
  Description of Artificial Sequence: Synthetic oligonucleotide
  Sense strand starting at position 3286 of SEQ ID NO: 914806
cuguuuaauuccugaugug

SEQ ID NO: 1032167 - RNA, 19 nt, Artificial Sequence
  Description of Artificial Sequence: Synthetic oligonucleotide
  Antisense strand to SEQ ID NO: 1032166
cacaucaggaauuaaacag

SEQ ID NO: 1032168 - RNA, 19 nt, Artificial Sequence
  Description of Artificial Sequence: Synthetic oligonucleotide
  Sense strand starting at position 3289 of SEQ ID NO: 914806
uuuaauuccugaugugcua

SEQ ID NO: 1032169 - RNA, 19 nt, Artificial Sequence
  Description of Artificial Sequence: Synthetic oligonucleotide
  Antisense strand to SEQ ID NO: 1032168
uagcacaucaggaauuaaa

SEQ ID NO: 1032170 - RNA, 19 nt, Artificial Sequence
  Description of Artificial Sequence: Synthetic oligonucleotide
  Sense strand starting at position 3442 of SEQ ID NO: 914806
acgucaguauuccagaguu

SEQ ID NO: 1032171 - RNA, 19 nt, Artificial Sequence
  Description of Artificial Sequence: Synthetic oligonucleotide
  Antisense strand to SEQ ID NO: 1032170
aacucuggaauacugacgu

SEQ ID NO: 1032172 - RNA, 19 nt, Artificial Sequence
  Description of Artificial Sequence: Synthetic oligonucleotide
  Sense strand starting at position 3444 of SEQ ID NO: 914806
gucaguauuccagaguuua

SEQ ID NO: 1032173 - RNA, 19 nt, Artificial Sequence
  Description of Artificial Sequence: Synthetic oligonucleotide
  Antisense strand to SEQ ID NO: 1032172
uaaacucuggaauacugac

SEQ ID NO: 1032174 - RNA, 19 nt, Artificial Sequence
  Description of Artificial Sequence: Synthetic oligonucleotide
  Sense strand starting at position 3454 of SEQ ID NO: 914806
cagaguuuacaugacggua

SEQ ID NO: 1032175 - RNA, 19 nt, Artificial Sequence
  Description of Artificial Sequence: Synthetic oligonucleotide
  Antisense strand to SEQ ID NO: 1032174
uaccgucauguaaacucug

SEQ ID NO: 1032176 - RNA, 19 nt, Artificial Sequence
  Description of Artificial Sequence: Synthetic oligonucleotide
  Sense strand starting at position 3482 of SEQ ID NO: 914806
cguguaacugcagagugau

SEQ ID NO: 1032177 - RNA, 19 nt, Artificial Sequence
  Description of Artificial Sequence: Synthetic oligonucleotide
  Antisense strand to SEQ ID NO: 1032176
aucacucugcaguuacacg

SEQ ID NO: 1032178 - RNA, 19 nt, Artificial Sequence
  Description of Artificial Sequence: Synthetic oligonucleotide
  Sense strand starting at position 3488 of SEQ ID NO: 914806
acugcagagugauguguuu

SEQ ID NO: 1032179 - RNA, 19 nt, Artificial Sequence
  Description of Artificial Sequence: Synthetic oligonucleotide
  Antisense strand to SEQ ID NO: 1032178
aaacacaucacucugcagu

SEQ ID NO: 1032180 - RNA, 19 nt, Artificial Sequence
  Description of Artificial Sequence: Synthetic oligonucleotide
  Sense strand starting at position 3490 of SEQ ID NO: 914806
ugcagagugauguguuuga

SEQ ID NO: 1032181 - RNA, 19 nt, Artificial Sequence
  Description of Artificial Sequence: Synthetic oligonucleotide
  Antisense strand to SEQ ID NO: 1032180
ucaaacacaucacucugca

SEQ ID NO: 1032182 - RNA, 19 nt, Artificial Sequence
  Description of Artificial Sequence: Synthetic oligonucleotide
  Sense strand starting at position 3494 of SEQ ID NO: 914806
gagugauguguuugaguaa

SEQ ID NO: 1032183 - RNA, 19 nt, Artificial Sequence
  Description of Artificial Sequence: Synthetic oligonucleotide
  Antisense strand to SEQ ID NO: 1032182
uuacucaaacacaucacuc

SEQ ID NO: 1032184 - RNA, 19 nt, Artificial Sequence
  Description of Artificial Sequence: Synthetic oligonucleotide
  Sense strand starting at position 3495 of SEQ ID NO: 914806
agugauguguuugaguaac

SEQ ID NO: 1032185 - RNA, 19 nt, Artificial Sequence
  Description of Artificial Sequence: Synthetic oligonucleotide
  Antisense strand to SEQ ID NO: 1032184
guuacucaaacacaucacu

SEQ ID NO: 1032186 - RNA, 19 nt, Artificial Sequence
  Description of Artificial Sequence: Synthetic oligonucleotide
  Sense strand starting at position 3497 of SEQ ID NO: 914806
ugauguguuugaguaacga

SEQ ID NO: 1032187 - RNA, 19 nt, Artificial Sequence
  Description of Artificial Sequence: Synthetic oligonucleotide
  Antisense strand to SEQ ID NO: 1032186
ucguuacucaaacacauca

SEQ ID NO: 1032188 - RNA, 19 nt, Artificial Sequence
  Description of Artificial Sequence: Synthetic oligonucleotide
  Sense strand starting at position 3513 of SEQ ID NO: 914806
cgaugacuuuggcucuaua

SEQ ID NO: 1032189 - RNA, 19 nt, Artificial Sequence
  Description of Artificial Sequence: Synthetic oligonucleotide
  Antisense strand to SEQ ID NO: 1032188
uauagagccaaagucaucg

SEQ ID NO: 1032190 - RNA, 19 nt, Artificial Sequence
  Description of Artificial Sequence: Synthetic oligonucleotide
  Sense strand starting at position 3516 of SEQ ID NO: 914806
ugacuuuggcucuauaaga

SEQ ID NO: 1032191 - RNA, 19 nt, Artificial Sequence
  Description of Artificial Sequence: Synthetic oligonucleotide
  Antisense strand to SEQ ID NO: 1032190
ucuuauagagccaaaguca

SEQ ID NO: 1032192 - RNA, 19 nt, Artificial Sequence
  Description of Artificial Sequence: Synthetic oligonucleotide
  Sense strand starting at position 3521 of SEQ ID NO: 914806
uuggcucuauaagauaaau

SEQ ID NO: 1032193 - RNA, 19 nt, Artificial Sequence
  Description of Artificial Sequence: Synthetic oligonucleotide
  Antisense strand to SEQ ID NO: 1032192
auuuaucuuauagagccaa

SEQ ID NO: 1032194 - RNA, 19 nt, Artificial Sequence
  Description of Artificial Sequence: Synthetic oligonucleotide
  Sense strand starting at position 3607 of SEQ ID NO: 914806
agugcuucucgacgucgaa

SEQ ID NO: 1032195 - RNA, 19 nt, Artificial Sequence
  Description of Artificial Sequence: Synthetic oligonucleotide
  Antisense strand to SEQ ID NO: 1032194
uucgacgucgagaagcacu

SEQ ID NO: 1032196 - RNA, 19 nt, Artificial Sequence
  Description of Artificial Sequence: Synthetic oligonucleotide
  Sense strand starting at position 3662 of SEQ ID NO: 914806
gcucuaagggcuuagccau

SEQ ID NO: 1032197 - RNA, 19 nt, Artificial Sequence
  Description of Artificial Sequence: Synthetic oligonucleotide
  Antisense strand to SEQ ID NO: 1032196
auggcuaagcccuuagagc

SEQ ID NO: 1032198 - RNA, 19 nt, Artificial Sequence
  Description of Artificial Sequence: Synthetic oligonucleotide
  Sense strand starting at position 3728 of SEQ ID NO: 914806
cacagaauguccugggauc

SEQ ID NO: 1032199 - RNA, 19 nt, Artificial Sequence
  Description of Artificial Sequence: Synthetic oligonucleotide
  Antisense strand to SEQ ID NO: 1032198
gaucccaggacauucugug

SEQ ID NO: 1032200 - RNA, 19 nt, Artificial Sequence
  Description of Artificial Sequence: Synthetic oligonucleotide
  Sense strand starting at position 3729 of SEQ ID NO: 914806
acagaauguccugggaucu

SEQ ID NO: 1032201 - RNA, 19 nt, Artificial Sequence
  Description of Artificial Sequence: Synthetic oligonucleotide
  Antisense strand to SEQ ID NO: 1032200
agaucccaggacauucugu

SEQ ID NO: 1032202 - RNA, 19 nt, Artificial Sequence
  Description of Artificial Sequence: Synthetic oligonucleotide
  Sense strand starting at position 3943 of SEQ ID NO: 914806
guuggacaggccuacuuau

SEQ ID NO: 1032203 - RNA, 19 nt, Artificial Sequence
  Description of Artificial Sequence: Synthetic oligonucleotide
  Antisense strand to SEQ ID NO: 1032202
auaaguaggccuguccaac

SEQ ID NO: 1032204 - RNA, 19 nt, Artificial Sequence
  Description of Artificial Sequence: Synthetic oligonucleotide
  Sense strand starting at position 61 of SEQ ID NO: 914807
agguaacuucgaugagggu

SEQ ID NO: 1032205 - RNA, 19 nt, Artificial Sequence
  Description of Artificial Sequence: Synthetic oligonucleotide
  Antisense strand to SEQ ID NO: 1032204
acccucaucgaaguuaccu

SEQ ID NO: 1032206 - RNA, 19 nt, Artificial Sequence
  Description of Artificial Sequence: Synthetic oligonucleotide
  Sense strand starting at position 508 of SEQ ID NO: 914807
acugacguucccggaaaga

SEQ ID NO: 1032207 - RNA, 19 nt, Artificial Sequence
  Description of Artificial Sequence: Synthetic oligonucleotide
  Antisense strand to SEQ ID NO: 1032206
ucuuuccgggaacgucagu

SEQ ID NO: 1032208 - RNA, 19 nt, Artificial Sequence
  Description of Artificial Sequence: Synthetic oligonucleotide
  Sense strand starting at position 908 of SEQ ID NO: 914807
agugaugccuccugaucua

SEQ ID NO: 1032209 - RNA, 19 nt, Artificial Sequence
  Description of Artificial Sequence: Synthetic oligonucleotide
  Antisense strand to SEQ ID NO: 1032208
uagaucaggaggcaucacu

SEQ ID NO: 1032210 - RNA, 19 nt, Artificial Sequence
  Description of Artificial Sequence: Synthetic oligonucleotide
  Sense strand starting at position 925 of SEQ ID NO: 914807
uauccauaggccuggaaga

SEQ ID NO: 1032211 - RNA, 19 nt, Artificial Sequence
  Description of Artificial Sequence: Synthetic oligonucleotide
  Antisense strand to SEQ ID NO: 1032210
ucuuccaggccuauggaua

SEQ ID NO: 1032212 - RNA, 19 nt, Artificial Sequence
  Description of Artificial Sequence: Synthetic oligonucleotide
  Sense strand starting at position 926 of SEQ ID NO: 914807
auccauaggccuggaagau

SEQ ID NO: 1032213 - RNA, 19 nt, Artificial Sequence
  Description of Artificial Sequence: Synthetic oligonucleotide
  Antisense strand to SEQ ID NO: 1032212
aucuuccaggccuauggau

SEQ ID NO: 1032214 - RNA, 19 nt, Artificial Sequence
  Description of Artificial Sequence: Synthetic oligonucleotide
  Sense strand starting at position 959 of SEQ ID NO: 914807
cgaugagcagaauggucau

SEQ ID NO: 1032215 - RNA, 19 nt, Artificial Sequence
  Description of Artificial Sequence: Synthetic oligonucleotide
  Antisense strand to SEQ ID NO: 1032214
augaccauucugcucaucg

SEQ ID NO: 1032216 - RNA, 19 nt, Artificial Sequence
  Description of Artificial Sequence: Synthetic oligonucleotide
  Sense strand starting at position 974 of SEQ ID NO: 914807
ucaugaggaugcccagaau

SEQ ID NO: 1032217 - RNA, 19 nt, Artificial Sequence
  Description of Artificial Sequence: Synthetic oligonucleotide
  Antisense strand to SEQ ID NO: 1032216
auucugggcauccucauga

SEQ ID NO: 1032218 - RNA, 19 nt, Artificial Sequence
  Description of Artificial Sequence: Synthetic oligonucleotide
  Sense strand starting at position 1280 of SEQ ID NO: 914807
ggugaagucaccugugagu

SEQ ID NO: 1032219 - RNA, 19 nt, Artificial Sequence
  Description of Artificial Sequence: Synthetic oligonucleotide
  Antisense strand to SEQ ID NO: 1032218
acucacaggugacuucacc

SEQ ID NO: 1032220 - RNA, 19 nt, Artificial Sequence
  Description of Artificial Sequence: Synthetic oligonucleotide
  Sense strand starting at position 1282 of SEQ ID NO: 914807
ugaagucaccugugaguuc

SEQ ID NO: 1032221 - RNA, 19 nt, Artificial Sequence
  Description of Artificial Sequence: Synthetic oligonucleotide
  Antisense strand to SEQ ID NO: 1032220
gaacucacaggugacuuca

SEQ ID NO: 1032222 - RNA, 19 nt, Artificial Sequence
  Description of Artificial Sequence: Synthetic oligonucleotide
  Sense strand starting at position 1302 of SEQ ID NO: 914807
cuucucacuuucugggaga

SEQ ID NO: 1032223 - RNA, 19 nt, Artificial Sequence
  Description of Artificial Sequence: Synthetic oligonucleotide
  Antisense strand to SEQ ID NO: 1032222
ucucccagaaagugagaag

SEQ ID NO: 1032224 - RNA, 19 nt, Artificial Sequence
  Description of Artificial Sequence: Synthetic oligonucleotide
  Sense strand starting at position 1350 of SEQ ID NO: 914807
guaauuucuuacugggcua

SEQ ID NO: 1032225 - RNA, 19 nt, Artificial Sequence
  Description of Artificial Sequence: Synthetic oligonucleotide
  Antisense strand to SEQ ID NO: 1032224
uagcccaguaagaaauuac

SEQ ID NO: 1032226 - RNA, 19 nt, Artificial Sequence
  Description of Artificial Sequence: Synthetic oligonucleotide
  Sense strand starting at position 1372 of SEQ ID NO: 914807
ggagaacugcucugggcua

SEQ ID NO: 1032227 - RNA, 19 nt, Artificial Sequence
  Description of Artificial Sequence: Synthetic oligonucleotide
  Antisense strand to SEQ ID NO: 1032226
uagcccagagcaguucucc

SEQ ID NO: 1032228 - RNA, 19 nt, Artificial Sequence
  Description of Artificial Sequence: Synthetic oligonucleotide
  Sense strand starting at position 1432 of SEQ ID NO: 914807
ccuggagccuccuccuaaa

SEQ ID NO: 1032229 - RNA, 19 nt, Artificial Sequence
  Description of Artificial Sequence: Synthetic oligonucleotide
  Antisense strand to SEQ ID NO: 1032228
uuuaggaggaggcuccagg

SEQ ID NO: 1032230 - RNA, 19 nt, Artificial Sequence
  Description of Artificial Sequence: Synthetic oligonucleotide
  Sense strand starting at position 1878 of SEQ ID NO: 914807
agguuuggacagugugauu

SEQ ID NO: 1032231 - RNA, 19 nt, Artificial Sequence
  Description of Artificial Sequence: Synthetic oligonucleotide
  Antisense strand to SEQ ID NO: 1032230
aaucacacuguccaaaccu

SEQ ID NO: 1032232 - RNA, 19 nt, Artificial Sequence
  Description of Artificial Sequence: Synthetic oligonucleotide
  Sense strand starting at position 1893 of SEQ ID NO: 914807
gauucaugguguccagcga

SEQ ID NO: 1032233 - RNA, 19 nt, Artificial Sequence
  Description of Artificial Sequence: Synthetic oligonucleotide
  Antisense strand to SEQ ID NO: 1032232
ucgcuggacaccaugaauc

SEQ ID NO: 1032234 - RNA, 19 nt, Artificial Sequence
  Description of Artificial Sequence: Synthetic oligonucleotide
  Sense strand starting at position 1894 of SEQ ID NO: 914807
auucaugguguccagcgaa

SEQ ID NO: 1032235 - RNA, 19 nt, Artificial Sequence
  Description of Artificial Sequence: Synthetic oligonucleotide
  Antisense strand to SEQ ID NO: 1032234
uucgcuggacaccaugaau

SEQ ID NO: 1032236 - RNA, 19 nt, Artificial Sequence
  Description of Artificial Sequence: Synthetic oligonucleotide
  Sense strand starting at position 1933 of SEQ ID NO: 914807
cugggaugguucucaguga

SEQ ID NO: 1032237 - RNA, 19 nt, Artificial Sequence
  Description of Artificial Sequence: Synthetic oligonucleotide
  Antisense strand to SEQ ID NO: 1032236
ucacugagaaccaucccag

SEQ ID NO: 1032238 - RNA, 19 nt, Artificial Sequence
  Description of Artificial Sequence: Synthetic oligonucleotide
  Sense strand starting at position 1969 of SEQ ID NO: 914807
uaguuucgguuucucaaca

SEQ ID NO: 1032239 - RNA, 19 nt, Artificial Sequence
  Description of Artificial Sequence: Synthetic oligonucleotide
  Antisense strand to SEQ ID NO: 1032238
uguugagaaaccgaaacua

SEQ ID NO: 1032240 - RNA, 19 nt, Artificial Sequence
  Description of Artificial Sequence: Synthetic oligonucleotide
  Sense strand starting at position 2043 of SEQ ID NO: 914807
ggaacaaauuccugaggau

SEQ ID NO: 1032241 - RNA, 19 nt, Artificial Sequence
  Description of Artificial Sequence: Synthetic oligonucleotide
  Antisense strand to SEQ ID NO: 1032240
auccucaggaauuuguucc

SEQ ID NO: 1032242 - RNA, 19 nt, Artificial Sequence
  Description of Artificial Sequence: Synthetic oligonucleotide
  Sense strand starting at position 2046 of SEQ ID NO: 914807
acaaauuccugaggaucaa

SEQ ID NO: 1032243 - RNA, 19 nt, Artificial Sequence
  Description of Artificial Sequence: Synthetic oligonucleotide
  Antisense strand to SEQ ID NO: 1032242
uugauccucaggaauuugu

SEQ ID NO: 1032244 - RNA, 19 nt, Artificial Sequence
  Description of Artificial Sequence: Synthetic oligonucleotide
  Sense strand starting at position 2134 of SEQ ID NO: 914807
gcacaaggcucaucuuguu

SEQ ID NO: 1032245 - RNA, 19 nt, Artificial Sequence
  Description of Artificial Sequence: Synthetic oligonucleotide
  Antisense strand to SEQ ID NO: 1032244
aacaagaugagccuugugc

SEQ ID NO: 1032246 - RNA, 19 nt, Artificial Sequence
  Description of Artificial Sequence: Synthetic oligonucleotide
  Sense strand starting at position 2137 of SEQ ID NO: 914807
caaggcucaucuuguuagu

SEQ ID NO: 1032247 - RNA, 19 nt, Artificial Sequence
  Description of Artificial Sequence: Synthetic oligonucleotide
  Antisense strand to SEQ ID NO: 1032246
acuaacaagaugagccuug

SEQ ID NO: 1032248 - RNA, 19 nt, Artificial Sequence
  Description of Artificial Sequence: Synthetic oligonucleotide
  Sense strand starting at position 2140 of SEQ ID NO: 914807
ggcucaucuuguuaguggu

SEQ ID NO: 1032249 - RNA, 19 nt, Artificial Sequence
  Description of Artificial Sequence: Synthetic oligonucleotide
  Antisense strand to SEQ ID NO: 1032248
accacuaacaagaugagcc

SEQ ID NO: 1032250 - RNA, 19 nt, Artificial Sequence
  Description of Artificial Sequence: Synthetic oligonucleotide
  Sense strand starting at position 2686 of SEQ ID NO: 914807
gcagcuggauuaucccaua

SEQ ID NO: 1032251 - RNA, 19 nt, Artificial Sequence
  Description of Artificial Sequence: Synthetic oligonucleotide
  Antisense strand to SEQ ID NO: 1032250
uaugggauaauccagcugc

SEQ ID NO: 1032252 - RNA, 19 nt, Artificial Sequence
  Description of Artificial Sequence: Synthetic oligonucleotide
  Sense strand starting at position 2689 of SEQ ID NO: 914807
gcuggauuaucccauaacc

SEQ ID NO: 1032253 - RNA, 19 nt, Artificial Sequence
  Description of Artificial Sequence: Synthetic oligonucleotide
  Antisense strand to SEQ ID NO: 1032252
gguuaugggauaauccagc

SEQ ID NO: 1032254 - RNA, 19 nt, Artificial Sequence
  Description of Artificial Sequence: Synthetic oligonucleotide
  Sense strand starting at position 3837 of SEQ ID NO: 914807
uucuucucccuguguuaag

SEQ ID NO: 1032255 - RNA, 19 nt, Artificial Sequence
  Description of Artificial Sequence: Synthetic oligonucleotide
  Antisense strand to SEQ ID NO: 1032254
cuuaacacagggagaagaa

SEQ ID NO: 1032256 - RNA, 19 nt, Artificial Sequence
  Description of Artificial Sequence: Synthetic oligonucleotide
  Sense strand starting at position 3864 of SEQ ID NO: 914807
gggagagucucagagcaca

SEQ ID NO: 1032257 - RNA, 19 nt, Artificial Sequence
  Description of Artificial Sequence: Synthetic oligonucleotide
  Antisense strand to SEQ ID NO: 1032256
ugugcucugagacucuccc

SEQ ID NO: 1032258 - RNA, 19 nt, Artificial Sequence
  Description of Artificial Sequence: Synthetic oligonucleotide
  Sense strand starting at position 22 of SEQ ID NO: 914808
uucugccuuucuggauaua

SEQ ID NO: 1032259 - RNA, 19 nt, Artificial Sequence
  Description of Artificial Sequence: Synthetic oligonucleotide
  Antisense strand to SEQ ID NO: 1032258
uauauccagaaaggcagaa

SEQ ID NO: 1032260 - RNA, 19 nt, Artificial Sequence
  Description of Artificial Sequence: Synthetic oligonucleotide
  Sense strand starting at position 25 of SEQ ID NO: 914808
ugccuuucuggauauaguu

SEQ ID NO: 1032261 - RNA, 19 nt, Artificial Sequence
  Description of Artificial Sequence: Synthetic oligonucleotide
  Antisense strand to SEQ ID NO: 1032260
aacuauauccagaaaggca

SEQ ID NO: 1032262 - RNA, 19 nt, Artificial Sequence
  Description of Artificial Sequence: Synthetic oligonucleotide
  Sense strand starting at position 208 of SEQ ID NO: 914808
ugggauuucucagaauuaa

SEQ ID NO: 1032263 - RNA, 19 nt, Artificial Sequence
  Description of Artificial Sequence: Synthetic oligonucleotide
  Antisense strand to SEQ ID NO: 1032262
uuaauucugagaaauccca

SEQ ID NO: 1032264 - RNA, 19 nt, Artificial Sequence
  Description of Artificial Sequence: Synthetic oligonucleotide
  Sense strand starting at position 397 of SEQ ID NO: 914808
caugauguucuggagcaca

SEQ ID NO: 1032265 - RNA, 19 nt, Artificial Sequence
  Description of Artificial Sequence: Synthetic oligonucleotide
  Antisense strand to SEQ ID NO: 1032264
ugugcuccagaacaucaug

SEQ ID NO: 1032266 - RNA, 19 nt, Artificial Sequence
  Description of Artificial Sequence: Synthetic oligonucleotide
  Sense strand starting at position 976 of SEQ ID NO: 914808
cagucauaguccgcgucau

SEQ ID NO: 1032267 - RNA, 19 nt, Artificial Sequence
  Description of Artificial Sequence: Synthetic oligonucleotide
  Antisense strand to SEQ ID NO: 1032266
augacgcggacuaugacug

SEQ ID NO: 1032268 - RNA, 19 nt, Artificial Sequence
  Description of Artificial Sequence: Synthetic oligonucleotide
  Sense strand starting at position 977 of SEQ ID NO: 914808
agucauaguccgcgucauc

SEQ ID NO: 1032269 - RNA, 19 nt, Artificial Sequence
  Description of Artificial Sequence: Synthetic oligonucleotide
  Antisense strand to SEQ ID NO: 1032268
gaugacgcggacuaugacu

SEQ ID NO: 1032270 - RNA, 19 nt, Artificial Sequence
  Description of Artificial Sequence: Synthetic oligonucleotide
  Sense strand starting at position 978 of SEQ ID NO: 914808
gucauaguccgcgucauca

SEQ ID NO: 1032271 - RNA, 19 nt, Artificial Sequence
  Description of Artificial Sequence: Synthetic oligonucleotide
  Antisense strand to SEQ ID NO: 1032270
ugaugacgcggacuaugac

SEQ ID NO: 1032272 - RNA, 19 nt, Artificial Sequence
  Description of Artificial Sequence: Synthetic oligonucleotide
  Sense strand starting at position 980 of SEQ ID NO: 914808
cauaguccgcgucaucaaa

SEQ ID NO: 1032273 - RNA, 19 nt, Artificial Sequence
  Description of Artificial Sequence: Synthetic oligonucleotide
  Antisense strand to SEQ ID NO: 1032272
uuugaugacgcggacuaug

SEQ ID NO: 1032274 - RNA, 19 nt, Artificial Sequence
  Description of Artificial Sequence: Synthetic oligonucleotide
  Sense strand starting at position 992 of SEQ ID NO: 914808
caucaaacuuggugcugaa

SEQ ID NO: 1032275 - RNA, 19 nt, Artificial Sequence
  Description of Artificial Sequence: Synthetic oligonucleotide
  Antisense strand to SEQ ID NO: 1032274
uucagcaccaaguuugaug

SEQ ID NO: 1032276 - RNA, 19 nt, Artificial Sequence
  Description of Artificial Sequence: Synthetic oligonucleotide
  Sense strand starting at position 995 of SEQ ID NO: 914808
caaacuuggugcugaagaa

SEQ ID NO: 1032277 - RNA, 19 nt, Artificial Sequence
  Description of Artificial Sequence: Synthetic oligonucleotide
  Antisense strand to SEQ ID NO: 1032276
uucuucagcaccaaguuug

SEQ ID NO: 1032278 - RNA, 19 nt, Artificial Sequence
  Description of Artificial Sequence: Synthetic oligonucleotide
  Sense strand starting at position 1381 of SEQ ID NO: 914808
aucagagcucucuaugggu

SEQ ID NO: 1032279 - RNA, 19 nt, Artificial Sequence
  Description of Artificial Sequence: Synthetic oligonucleotide
  Antisense strand to SEQ ID NO: 1032278
acccauagagagcucugau

SEQ ID NO: 1032280 - RNA, 19 nt, Artificial Sequence
  Description of Artificial Sequence: Synthetic oligonucleotide
  Sense strand starting at position 1383 of SEQ ID NO: 914808
cagagcucucuauggguga

SEQ ID NO: 1032281 - RNA, 19 nt, Artificial Sequence
  Description of Artificial Sequence: Synthetic oligonucleotide
  Antisense strand to SEQ ID NO: 1032280
ucacccauagagagcucug

SEQ ID NO: 1032282 - RNA, 19 nt, Artificial Sequence
  Description of Artificial Sequence: Synthetic oligonucleotide
  Sense strand starting at position 1583 of SEQ ID NO: 914808
ggccuugccuucgugagga

SEQ ID NO: 1032283 - RNA, 19 nt, Artificial Sequence
  Description of Artificial Sequence: Synthetic oligonucleotide
  Antisense strand to SEQ ID NO: 1032282
uccucacgaaggcaaggcc

SEQ ID NO: 1032284 - RNA, 19 nt, Artificial Sequence
  Description of Artificial Sequence: Synthetic oligonucleotide
  Sense strand starting at position 1600 of SEQ ID NO: 914808
gagcucuuucccggccaua

SEQ ID NO: 1032285 - RNA, 19 nt, Artificial Sequence
  Description of Artificial Sequence: Synthetic oligonucleotide
  Antisense strand to SEQ ID NO: 1032284
uauggccgggaaagagcuc

SEQ ID NO: 1032286 - RNA, 19 nt, Artificial Sequence
  Description of Artificial Sequence: Synthetic oligonucleotide
  Sense strand starting at position 2165 of SEQ ID NO: 914808
cagggucccuccugacaga

SEQ ID NO: 1032287 - RNA, 19 nt, Artificial Sequence
  Description of Artificial Sequence: Synthetic oligonucleotide
  Antisense strand to SEQ ID NO: 1032286
ucugucaggagggacccug

SEQ ID NO: 1032288 - RNA, 19 nt, Artificial Sequence
  Description of Artificial Sequence: Synthetic oligonucleotide
  Sense strand starting at position 2168 of SEQ ID NO: 914808
ggucccuccugacagacau

SEQ ID NO: 1032289 - RNA, 19 nt, Artificial Sequence
  Description of Artificial Sequence: Synthetic oligonucleotide
  Antisense strand to SEQ ID NO: 1032288
augucugucaggagggacc

SEQ ID NO: 1032290 - RNA, 19 nt, Artificial Sequence
  Description of Artificial Sequence: Synthetic oligonucleotide
  Sense strand starting at position 2352 of SEQ ID NO: 914808
ggccaugggccucauaauu

SEQ ID NO: 1032291 - RNA, 19 nt, Artificial Sequence
  Description of Artificial Sequence: Synthetic oligonucleotide
  Antisense strand to SEQ ID NO: 1032290
aauuaugaggcccauggcc

SEQ ID NO: 1032292 - RNA, 19 nt, Artificial Sequence
  Description of Artificial Sequence: Synthetic oligonucleotide
  Sense strand starting at position 2716 of SEQ ID NO: 914808
cccagaaugucugugguga

SEQ ID NO: 1032293 - RNA, 19 nt, Artificial Sequence
  Description of Artificial Sequence: Synthetic oligonucleotide
  Antisense strand to SEQ ID NO: 1032292
ucaccacagacauucuggg

SEQ ID NO: 1032294 - RNA, 19 nt, Artificial Sequence
  Description of Artificial Sequence: Synthetic oligonucleotide
  Sense strand starting at position 2717 of SEQ ID NO: 914808
ccagaaugucuguggugag

SEQ ID NO: 1032295 - RNA, 19 nt, Artificial Sequence
  Description of Artificial Sequence: Synthetic oligonucleotide
  Antisense strand to SEQ ID NO: 1032294
cucaccacagacauucugg

SEQ ID NO: 1032296 - RNA, 19 nt, Artificial Sequence
  Description of Artificial Sequence: Synthetic oligonucleotide
  Sense strand starting at position 2718 of SEQ ID NO: 914808
cagaaugucuguggugagu

SEQ ID NO: 1032297 - RNA, 19 nt, Artificial Sequence
  Description of Artificial Sequence: Synthetic oligonucleotide
  Antisense strand to SEQ ID NO: 1032296
acucaccacagacauucug

SEQ ID NO: 1032298 - RNA, 19 nt, Artificial Sequence
  Description of Artificial Sequence: Synthetic oligonucleotide
  Sense strand starting at position 2766 of SEQ ID NO: 914808
agucuugucucuggcugua

SEQ ID NO: 1032299 - RNA, 19 nt, Artificial Sequence
  Description of Artificial Sequence: Synthetic oligonucleotide
  Antisense strand to SEQ ID NO: 1032298
uacagccagagacaagacu

SEQ ID NO: 1032300 - RNA, 19 nt, Artificial Sequence
  Description of Artificial Sequence: Synthetic oligonucleotide
  Sense strand starting at position 2768 of SEQ ID NO: 914808
ucuugucucuggcuguaga

SEQ ID NO: 1032301 - RNA, 19 nt, Artificial Sequence
  Description of Artificial Sequence: Synthetic oligonucleotide
  Antisense strand to SEQ ID NO: 1032300
ucuacagccagagacaaga

SEQ ID NO: 1032302 - RNA, 19 nt, Artificial Sequence
  Description of Artificial Sequence: Synthetic oligonucleotide
  Sense strand starting at position 2769 of SEQ ID NO: 914808
cuugucucuggcuguagau

SEQ ID NO: 1032303 - RNA, 19 nt, Artificial Sequence
  Description of Artificial Sequence: Synthetic oligonucleotide
  Antisense strand to SEQ ID NO: 1032302
aucuacagccagagacaag

SEQ ID NO: 1032304 - RNA, 19 nt, Artificial Sequence
  Description of Artificial Sequence: Synthetic oligonucleotide
  Sense strand starting at position 2798 of SEQ ID NO: 914808
gcugacgacucacauuuau

SEQ ID NO: 1032305 - RNA, 19 nt, Artificial Sequence
  Description of Artificial Sequence: Synthetic oligonucleotide
  Antisense strand to SEQ ID NO: 1032304
auaaaugugagucgucagc

SEQ ID NO: 1032306 - RNA, 19 nt, Artificial Sequence
  Description of Artificial Sequence: Synthetic oligonucleotide
  Sense strand starting at position 3430 of SEQ ID NO: 914808
cugacuugcuucuccaaag

SEQ ID NO: 1032307 - RNA, 19 nt, Artificial Sequence
  Description of Artificial Sequence: Synthetic oligonucleotide
  Antisense strand to SEQ ID NO: 1032306
cuuuggagaagcaagucag

SEQ ID NO: 1032308 - RNA, 19 nt, Artificial Sequence
  Description of Artificial Sequence: Synthetic oligonucleotide
  Sense strand starting at position 3713 of SEQ ID NO: 914808
ccauguuggucaggaugaa

SEQ ID NO: 1032309 - RNA, 19 nt, Artificial Sequence
  Description of Artificial Sequence: Synthetic oligonucleotide
  Antisense strand to SEQ ID NO: 1032308
uucauccugaccaacaugg

SEQ ID NO: 1032310 - RNA, 19 nt, Artificial Sequence
  Description of Artificial Sequence: Synthetic oligonucleotide
  Sense strand starting at position 3753 of SEQ ID NO: 914808
uuuaaagagguuuguccua

SEQ ID NO: 1032311 - RNA, 19 nt, Artificial Sequence
  Description of Artificial Sequence: Synthetic oligonucleotide
  Antisense strand to SEQ ID NO: 1032310
uaggacaaaccucuuuaaa

SEQ ID NO: 1032312 - RNA, 19 nt, Artificial Sequence
  Description of Artificial Sequence: Synthetic oligonucleotide
  Sense strand starting at position 3760 of SEQ ID NO: 914808
agguuuguccuacgccgaa

SEQ ID NO: 1032313 - RNA, 19 nt, Artificial Sequence
  Description of Artificial Sequence: Synthetic oligonucleotide
  Antisense strand to SEQ ID NO: 1032312
uucggcguaggacaaaccu

SEQ ID NO: 1032314 - RNA, 19 nt, Artificial Sequence
  Description of Artificial Sequence: Synthetic oligonucleotide
  Sense strand starting at position 3762 of SEQ ID NO: 914808
guuuguccuacgccgaaua

SEQ ID NO: 1032315 - RNA, 19 nt, Artificial Sequence
  Description of Artificial Sequence: Synthetic oligonucleotide
  Antisense strand to SEQ ID NO: 1032314
uauucggcguaggacaaac

SEQ ID NO: 1032316 - RNA, 19 nt, Artificial Sequence
  Description of Artificial Sequence: Synthetic oligonucleotide
  Sense strand starting at position 3784 of SEQ ID NO: 914808
cugaccacggcucaugaua

SEQ ID NO: 1032317 - RNA, 19 nt, Artificial Sequence
  Description of Artificial Sequence: Synthetic oligonucleotide
  Antisense strand to SEQ ID NO: 1032316
uaucaugagccguggucag

SEQ ID NO: 1032318 - RNA, 19 nt, Artificial Sequence
  Description of Artificial Sequence: Synthetic oligonucleotide
  Sense strand starting at position 3798 of SEQ ID NO: 914808
ugauacagccuccagaguu

SEQ ID NO: 1032319 - RNA, 19 nt, Artificial Sequence
  Description of Artificial Sequence: Synthetic oligonucleotide
  Antisense strand to SEQ ID NO: 1032318
aacucuggaggcuguauca

SEQ ID NO: 1032320 - RNA, 19 nt, Artificial Sequence
  Description of Artificial Sequence: Synthetic oligonucleotide
  Sense strand starting at position 3806 of SEQ ID NO: 914808
ccuccagaguuccagcaaa

SEQ ID NO: 1032321 - RNA, 19 nt, Artificial Sequence
  Description of Artificial Sequence: Synthetic oligonucleotide
  Antisense strand to SEQ ID NO: 1032320
uuugcuggaacucuggagg

SEQ ID NO: 1032322 - RNA, 19 nt, Artificial Sequence
  Description of Artificial Sequence: Synthetic oligonucleotide
  Sense strand starting at position 3901 of SEQ ID NO: 914808
caauacaagugucaacgaa

SEQ ID NO: 1032323 - RNA, 19 nt, Artificial Sequence
  Description of Artificial Sequence: Synthetic oligonucleotide
  Antisense strand to SEQ ID NO: 1032322
uucguugacacuuguauug

SEQ ID NO: 1032324 - RNA, 19 nt, Artificial Sequence
  Description of Artificial Sequence: Synthetic oligonucleotide
  Sense strand starting at position 3921 of SEQ ID NO: 914808
agaguccaacucugcgaaa

SEQ ID NO: 1032325 - RNA, 19 nt, Artificial Sequence
  Description of Artificial Sequence: Synthetic oligonucleotide
  Antisense strand to SEQ ID NO: 1032324
uuucgcagaguuggacucu

SEQ ID NO: 1032326 - RNA, 19 nt, Artificial Sequence
  Description of Artificial Sequence: Synthetic oligonucleotide
  Sense strand starting at position 3922 of SEQ ID NO: 914808
gaguccaacucugcgaaau

SEQ ID NO: 1032327 - RNA, 19 nt, Artificial Sequence
  Description of Artificial Sequence: Synthetic oligonucleotide
  Antisense strand to SEQ ID NO: 1032326
auuucgcagaguuggacuc

SEQ ID NO: 1032328 - RNA, 19 nt, Artificial Sequence
  Description of Artificial Sequence: Synthetic oligonucleotide
  Sense strand starting at position 3923 of SEQ ID NO: 914808
aguccaacucugcgaaaua

SEQ ID NO: 1032329 - RNA, 19 nt, Artificial Sequence
  Description of Artificial Sequence: Synthetic oligonucleotide
  Antisense strand to SEQ ID NO: 1032328
uauuucgcagaguuggacu

SEQ ID NO: 1032330 - RNA, 19 nt, Artificial Sequence
  Description of Artificial Sequence: Synthetic oligonucleotide
  Sense strand starting at position 3924 of SEQ ID NO: 914808
guccaacucugcgaaauau

SEQ ID NO: 1032331 - RNA, 19 nt, Artificial Sequence
  Description of Artificial Sequence: Synthetic oligonucleotide
  Antisense strand to SEQ ID NO: 1032330
auauuucgcagaguuggac

SEQ ID NO: 1032332 - RNA, 19 nt, Artificial Sequence
  Description of Artificial Sequence: Synthetic oligonucleotide
  Sense strand starting at position 3933 of SEQ ID NO: 914808
ugcgaaauauuugaagaga

SEQ ID NO: 1032333 - RNA, 19 nt, Artificial Sequence
  Description of Artificial Sequence: Synthetic oligonucleotide
  Antisense strand to SEQ ID NO: 1032332
ucucuucaaauauuucgca

SEQ ID NO: 1032334 - RNA, 19 nt, Artificial Sequence
  Description of Artificial Sequence: Synthetic oligonucleotide
  Sense strand starting at position 207 of SEQ ID NO: 914809
ccacauuuggcauguguuu

SEQ ID NO: 1032335 - RNA, 19 nt, Artificial Sequence
  Description of Artificial Sequence: Synthetic oligonucleotide
  Antisense strand to SEQ ID NO: 1032334
aaacacaugccaaaugugg

SEQ ID NO: 1032336 - RNA, 19 nt, Artificial Sequence
  Description of Artificial Sequence: Synthetic oligonucleotide
  Sense strand starting at position 216 of SEQ ID NO: 914809
gcauguguuuacucauuug

SEQ ID NO: 1032337 - RNA, 19 nt, Artificial Sequence
  Description of Artificial Sequence: Synthetic oligonucleotide
  Antisense strand to SEQ ID NO: 1032336
caaaugaguaaacacaugc

SEQ ID NO: 1032338 - RNA, 19 nt, Artificial Sequence
  Description of Artificial Sequence: Synthetic oligonucleotide
  Sense strand starting at position 219 of SEQ ID NO: 914809
uguguuuacucauuuguca

SEQ ID NO: 1032339 - RNA, 19 nt, Artificial Sequence
  Description of Artificial Sequence: Synthetic oligonucleotide
  Antisense strand to SEQ ID NO: 1032338
ugacaaaugaguaaacaca

SEQ ID NO: 1032340 - RNA, 19 nt, Artificial Sequence
  Description of Artificial Sequence: Synthetic oligonucleotide
  Sense strand starting at position 272 of SEQ ID NO: 914809
gggacauugugucauuuaa

SEQ ID NO: 1032341 - RNA, 19 nt, Artificial Sequence
  Description of Artificial Sequence: Synthetic oligonucleotide
  Antisense strand to SEQ ID NO: 1032340
uuaaaugacacaauguccc

SEQ ID NO: 1032342 - RNA, 19 nt, Artificial Sequence
  Description of Artificial Sequence: Synthetic oligonucleotide
  Sense strand starting at position 343 of SEQ ID NO: 914809
aaugcuuguuggccagaca

SEQ ID NO: 1032343 - RNA, 19 nt, Artificial Sequence
  Description of Artificial Sequence: Synthetic oligonucleotide
  Antisense strand to SEQ ID NO: 1032342
ugucuggccaacaagcauu

SEQ ID NO: 1032344 - RNA, 19 nt, Artificial Sequence
  Description of Artificial Sequence: Synthetic oligonucleotide
  Sense strand starting at position 346 of SEQ ID NO: 914809
gcuuguuggccagacacga

SEQ ID NO: 1032345 - RNA, 19 nt, Artificial Sequence
  Description of Artificial Sequence: Synthetic oligonucleotide
  Antisense strand to SEQ ID NO: 1032344
ucgugucuggccaacaagc

SEQ ID NO: 1032346 - RNA, 19 nt, Artificial Sequence
  Description of Artificial Sequence: Synthetic oligonucleotide
  Sense strand starting at position 637 of SEQ ID NO: 914809
cagugaauuccuggcagac

SEQ ID NO: 1032347 - RNA, 19 nt, Artificial Sequence
  Description of Artificial Sequence: Synthetic oligonucleotide
  Antisense strand to SEQ ID NO: 1032346
gucugccaggaauucacug

SEQ ID NO: 1032348 - RNA, 19 nt, Artificial Sequence
  Description of Artificial Sequence: Synthetic oligonucleotide
  Sense strand starting at position 778 of SEQ ID NO: 914809
guaaauugacgcugaaagu

SEQ ID NO: 1032349 - RNA, 19 nt, Artificial Sequence
  Description of Artificial Sequence: Synthetic oligonucleotide
  Antisense strand to SEQ ID NO: 1032348
acuuucagcgucaauuuac

SEQ ID NO: 1032350 - RNA, 19 nt, Artificial Sequence
  Description of Artificial Sequence: Synthetic oligonucleotide
  Sense strand starting at position 826 of SEQ ID NO: 914809
cuugaagacaaccgugaau

SEQ ID NO: 1032351 - RNA, 19 nt, Artificial Sequence
  Description of Artificial Sequence: Synthetic oligonucleotide
  Antisense strand to SEQ ID NO: 1032350
auucacgguugucuucaag

SEQ ID NO: 1032352 - RNA, 19 nt, Artificial Sequence
  Description of Artificial Sequence: Synthetic oligonucleotide
  Sense strand starting at position 860 of SEQ ID NO: 914809
aguagcauuucucuucuuu

SEQ ID NO: 1032353 - RNA, 19 nt, Artificial Sequence
  Description of Artificial Sequence: Synthetic oligonucleotide
  Antisense strand to SEQ ID NO: 1032352
aaagaagagaaaugcuacu

SEQ ID NO: 1032354 - RNA, 19 nt, Artificial Sequence
  Description of Artificial Sequence: Synthetic oligonucleotide
  Sense strand starting at position 943 of SEQ ID NO: 914809
ucucuagacgcucaucaua

SEQ ID NO: 1032355 - RNA, 19 nt, Artificial Sequence
  Description of Artificial Sequence: Synthetic oligonucleotide
  Antisense strand to SEQ ID NO: 1032354
uaugaugagcgucuagaga

SEQ ID NO: 1032356 - RNA, 19 nt, Artificial Sequence
  Description of Artificial Sequence: Synthetic oligonucleotide
  Sense strand starting at position 975 of SEQ ID NO: 914809
acaaccuuggucuaagcaa

SEQ ID NO: 1032357 - RNA, 19 nt, Artificial Sequence
  Description of Artificial Sequence: Synthetic oligonucleotide
  Antisense strand to SEQ ID NO: 1032356
uugcuuagaccaagguugu

SEQ ID NO: 1032358 - RNA, 19 nt, Artificial Sequence
  Description of Artificial Sequence: Synthetic oligonucleotide
  Sense strand starting at position 1011 of SEQ ID NO: 914809
agcuccuaucaugagacau

SEQ ID NO: 1032359 - RNA, 19 nt, Artificial Sequence
  Description of Artificial Sequence: Synthetic oligonucleotide
  Antisense strand to SEQ ID NO: 1032358
augucucaugauaggagcu

SEQ ID NO: 1032360 - RNA, 19 nt, Artificial Sequence
  Description of Artificial Sequence: Synthetic oligonucleotide
  Sense strand starting at position 1033 of SEQ ID NO: 914809
gcacucugccaggagguau

SEQ ID NO: 1032361 - RNA, 19 nt, Artificial Sequence
  Description of Artificial Sequence: Synthetic oligonucleotide
  Antisense strand to SEQ ID NO: 1032360
auaccuccuggcagagugc

SEQ ID NO: 1032362 - RNA, 19 nt, Artificial Sequence
  Description of Artificial Sequence: Synthetic oligonucleotide
  Sense strand starting at position 1149 of SEQ ID NO: 914809
cggucaagcaguuaaguca

SEQ ID NO: 1032363 - RNA, 19 nt, Artificial Sequence
  Description of Artificial Sequence: Synthetic oligonucleotide
  Antisense strand to SEQ ID NO: 1032362
ugacuuaacugcuugaccg

SEQ ID NO: 1032364 - RNA, 19 nt, Artificial Sequence
  Description of Artificial Sequence: Synthetic oligonucleotide
  Sense strand starting at position 1218 of SEQ ID NO: 914809
agggaaucguggagggaaa

SEQ ID NO: 1032365 - RNA, 19 nt, Artificial Sequence
  Description of Artificial Sequence: Synthetic oligonucleotide
  Antisense strand to SEQ ID NO: 1032364
uuucccuccacgauucccu

SEQ ID NO: 1032366 - RNA, 19 nt, Artificial Sequence
  Description of Artificial Sequence: Synthetic oligonucleotide
  Sense strand starting at position 1318 of SEQ ID NO: 914809
uguugagguuucucaggga

SEQ ID NO: 1032367 - RNA, 19 nt, Artificial Sequence
  Description of Artificial Sequence: Synthetic oligonucleotide
  Antisense strand to SEQ ID NO: 1032366
ucccugagaaaccucaaca

SEQ ID NO: 1032368 - RNA, 19 nt, Artificial Sequence
  Description of Artificial Sequence: Synthetic oligonucleotide
  Sense strand starting at position 1523 of SEQ ID NO: 914809
ccuuaucuugcagauagga

SEQ ID NO: 1032369 - RNA, 19 nt, Artificial Sequence
  Description of Artificial Sequence: Synthetic oligonucleotide
  Antisense strand to SEQ ID NO: 1032368
uccuaucugcaagauaagg

SEQ ID NO: 1032370 - RNA, 19 nt, Artificial Sequence
  Description of Artificial Sequence: Synthetic oligonucleotide
  Sense strand starting at position 1729 of SEQ ID NO: 914809
auccgucuccucuauaaug

SEQ ID NO: 1032371 - RNA, 19 nt, Artificial Sequence
  Description of Artificial Sequence: Synthetic oligonucleotide
  Antisense strand to SEQ ID NO: 1032370
cauuauagaggagacggau

SEQ ID NO: 1032372 - RNA, 19 nt, Artificial Sequence
  Description of Artificial Sequence: Synthetic oligonucleotide
  Sense strand starting at position 1731 of SEQ ID NO: 914809
ccgucuccucuauaaugga

SEQ ID NO: 1032373 - RNA, 19 nt, Artificial Sequence
  Description of Artificial Sequence: Synthetic oligonucleotide
  Antisense strand to SEQ ID NO: 1032372
uccauuauagaggagacgg

SEQ ID NO: 1032374 - RNA, 19 nt, Artificial Sequence
  Description of Artificial Sequence: Synthetic oligonucleotide
  Sense strand starting at position 2046 of SEQ ID NO: 914809
ggcaacgcggcugauaaau

SEQ ID NO: 1032375 - RNA, 19 nt, Artificial Sequence
  Description of Artificial Sequence: Synthetic oligonucleotide
  Antisense strand to SEQ ID NO: 1032374
auuuaucagccgcguugcc

SEQ ID NO: 1032376 - RNA, 19 nt, Artificial Sequence
  Description of Artificial Sequence: Synthetic oligonucleotide
  Sense strand starting at position 2060 of SEQ ID NO: 914809
uaaauuucgggcuggugua

SEQ ID NO: 1032377 - RNA, 19 nt, Artificial Sequence
  Description of Artificial Sequence: Synthetic oligonucleotide
  Antisense strand to SEQ ID NO: 1032376
uacaccagcccgaaauuua

SEQ ID NO: 1032378 - RNA, 19 nt, Artificial Sequence
  Description of Artificial Sequence: Synthetic oligonucleotide
  Sense strand starting at position 2157 of SEQ ID NO: 914809
agaucagucuuaccaggau

SEQ ID NO: 1032379 - RNA, 19 nt, Artificial Sequence
  Description of Artificial Sequence: Synthetic oligonucleotide
  Antisense strand to SEQ ID NO: 1032378
auccugguaagacugaucu

SEQ ID NO: 1032380 - RNA, 19 nt, Artificial Sequence
  Description of Artificial Sequence: Synthetic oligonucleotide
  Sense strand starting at position 2160 of SEQ ID NO: 914809
ucagucuuaccaggaugua

SEQ ID NO: 1032381 - RNA, 19 nt, Artificial Sequence
  Description of Artificial Sequence: Synthetic oligonucleotide
  Antisense strand to SEQ ID NO: 1032380
uacauccugguaagacuga

SEQ ID NO: 1032382 - RNA, 19 nt, Artificial Sequence
  Description of Artificial Sequence: Synthetic oligonucleotide
  Sense strand starting at position 2291 of SEQ ID NO: 914809
auaaauuauuccuugggua

SEQ ID NO: 1032383 - RNA, 19 nt, Artificial Sequence
  Description of Artificial Sequence: Synthetic oligonucleotide
  Antisense strand to SEQ ID NO: 1032382
uacccaaggaauaauuuau

SEQ ID NO: 1032384 - RNA, 19 nt, Artificial Sequence
  Description of Artificial Sequence: Synthetic oligonucleotide
  Sense strand starting at position 2640 of SEQ ID NO: 914809
uguccugucuuucuuauuu

SEQ ID NO: 1032385 - RNA, 19 nt, Artificial Sequence
  Description of Artificial Sequence: Synthetic oligonucleotide
  Antisense strand to SEQ ID NO: 1032384
aaauaagaaagacaggaca

SEQ ID NO: 1032386 - RNA, 19 nt, Artificial Sequence
  Description of Artificial Sequence: Synthetic oligonucleotide
  Sense strand starting at position 2644 of SEQ ID NO: 914809
cugucuuucuuauuugcua

SEQ ID NO: 1032387 - RNA, 19 nt, Artificial Sequence
  Description of Artificial Sequence: Synthetic oligonucleotide
  Antisense strand to SEQ ID NO: 1032386
uagcaaauaagaaagacag

SEQ ID NO: 1032388 - RNA, 19 nt, Artificial Sequence
  Description of Artificial Sequence: Synthetic oligonucleotide
  Sense strand starting at position 2685 of SEQ ID NO: 914809
aagcaagaccugugucuaa

SEQ ID NO: 1032389 - RNA, 19 nt, Artificial Sequence
  Description of Artificial Sequence: Synthetic oligonucleotide
  Antisense strand to SEQ ID NO: 1032388
uuagacacaggucuugcuu

SEQ ID NO: 1032390 - RNA, 19 nt, Artificial Sequence
  Description of Artificial Sequence: Synthetic oligonucleotide
  Sense strand starting at position 2727 of SEQ ID NO: 914809
caguguauugcagaaauua

SEQ ID NO: 1032391 - RNA, 19 nt, Artificial Sequence
  Description of Artificial Sequence: Synthetic oligonucleotide
  Antisense strand to SEQ ID NO: 1032390
uaauuucugcaauacacug

SEQ ID NO: 1032392 - RNA, 19 nt, Artificial Sequence
  Description of Artificial Sequence: Synthetic oligonucleotide
  Sense strand starting at position 2757 of SEQ ID NO: 914809
ugcucauuggguggaugaa

SEQ ID NO: 1032393 - RNA, 19 nt, Artificial Sequence
  Description of Artificial Sequence: Synthetic oligonucleotide
  Antisense strand to SEQ ID NO: 1032392
uucauccacccaaugagca

SEQ ID NO: 1032394 - RNA, 19 nt, Artificial Sequence
  Description of Artificial Sequence: Synthetic oligonucleotide
  Sense strand starting at position 2758 of SEQ ID NO: 914809
gcucauuggguggaugaau

SEQ ID NO: 1032395 - RNA, 19 nt, Artificial Sequence
  Description of Artificial Sequence: Synthetic oligonucleotide
  Antisense strand to SEQ ID NO: 1032394
auucauccacccaaugagc

SEQ ID NO: 1032396 - RNA, 19 nt, Artificial Sequence
  Description of Artificial Sequence: Synthetic oligonucleotide
  Sense strand starting at position 2767 of SEQ ID NO: 914809
guggaugaaucgaggaaug

SEQ ID NO: 1032397 - RNA, 19 nt, Artificial Sequence
  Description of Artificial Sequence: Synthetic oligonucleotide
  Antisense strand to SEQ ID NO: 1032396
cauuccucgauucauccac

SEQ ID NO: 1032398 - RNA, 19 nt, Artificial Sequence
  Description of Artificial Sequence: Synthetic oligonucleotide
  Sense strand starting at position 3674 of SEQ ID NO: 914809
gcucguaauaguggauaug

SEQ ID NO: 1032399 - RNA, 19 nt, Artificial Sequence
  Description of Artificial Sequence: Synthetic oligonucleotide
  Antisense strand to SEQ ID NO: 1032398
cauauccacuauuacgagc

SEQ ID NO: 1032400 - RNA, 19 nt, Artificial Sequence
  Description of Artificial Sequence: Synthetic oligonucleotide
  Sense strand starting at position 3675 of SEQ ID NO: 914809
cucguaauaguggauaugu

SEQ ID NO: 1032401 - RNA, 19 nt, Artificial Sequence
  Description of Artificial Sequence: Synthetic oligonucleotide
  Antisense strand to SEQ ID NO: 1032400
acauauccacuauuacgag

SEQ ID NO: 1032402 - RNA, 19 nt, Artificial Sequence
  Description of Artificial Sequence: Synthetic oligonucleotide
  Sense strand starting at position 3677 of SEQ ID NO: 914809
cguaauaguggauauguaa

SEQ ID NO: 1032403 - RNA, 19 nt, Artificial Sequence
  Description of Artificial Sequence: Synthetic oligonucleotide
  Antisense strand to SEQ ID NO: 1032402
uuacauauccacuauuacg

SEQ ID NO: 1032404 - RNA, 19 nt, Artificial Sequence
  Description of Artificial Sequence: Synthetic oligonucleotide
  Sense strand starting at position 3686 of SEQ ID NO: 914809
ggauauguaaugugcagua

SEQ ID NO: 1032405 - RNA, 19 nt, Artificial Sequence
  Description of Artificial Sequence: Synthetic oligonucleotide
  Antisense strand to SEQ ID NO: 1032404
uacugcacauuacauaucc

SEQ ID NO: 1032406 - RNA, 19 nt, Artificial Sequence
  Description of Artificial Sequence: Synthetic oligonucleotide
  Sense strand starting at position 3700 of SEQ ID NO: 914809
caguacuuacuauguagga

SEQ ID NO: 1032407 - RNA, 19 nt, Artificial Sequence
  Description of Artificial Sequence: Synthetic oligonucleotide
  Antisense strand to SEQ ID NO: 1032406
uccuacauaguaaguacug

SEQ ID NO: 1032408 - RNA, 19 nt, Artificial Sequence
  Description of Artificial Sequence: Synthetic oligonucleotide
  Sense strand starting at position 3806 of SEQ ID NO: 914809
agauuaaguaauugaggcu

SEQ ID NO: 1032409 - RNA, 19 nt, Artificial Sequence
  Description of Artificial Sequence: Synthetic oligonucleotide
  Antisense strand to SEQ ID NO: 1032408
agccucaauuacuuaaucu

SEQ ID NO: 1032410 - RNA, 19 nt, Artificial Sequence
  Description of Artificial Sequence: Synthetic oligonucleotide
  Sense strand starting at position 3821 of SEQ ID NO: 914809
ggcuuagacaguuaaagua

SEQ ID NO: 1032411 - RNA, 19 nt, Artificial Sequence
  Description of Artificial Sequence: Synthetic oligonucleotide
  Antisense strand to SEQ ID NO: 1032410
uacuuuaacugucuaagcc

SEQ ID NO: 1032412 - RNA, 19 nt, Artificial Sequence
  Description of Artificial Sequence: Synthetic oligonucleotide
  Sense strand starting at position 3889 of SEQ ID NO: 914809
aggucagucugauuccuaa

SEQ ID NO: 1032413 - RNA, 19 nt, Artificial Sequence
  Description of Artificial Sequence: Synthetic oligonucleotide
  Antisense strand to SEQ ID NO: 1032412
uuaggaaucagacugaccu

SEQ ID NO: 1032414 - RNA, 19 nt, Artificial Sequence
  Description of Artificial Sequence: Synthetic oligonucleotide
  Sense strand starting at position 82 of SEQ ID NO: 914810
gggugcuguccgagaggca

SEQ ID NO: 1032415 - RNA, 19 nt, Artificial Sequence
  Description of Artificial Sequence: Synthetic oligonucleotide
  Antisense strand to SEQ ID NO: 1032414
ugccucucggacagcaccc

SEQ ID NO: 1032416 - RNA, 19 nt, Artificial Sequence
  Description of Artificial Sequence: Synthetic oligonucleotide
  Sense strand starting at position 691 of SEQ ID NO: 914810
cgggacuccuguuuggaaa

SEQ ID NO: 1032417 - RNA, 19 nt, Artificial Sequence
  Description of Artificial Sequence: Synthetic oligonucleotide
  Antisense strand to SEQ ID NO: 1032416
uuuccaaacaggagucccg

SEQ ID NO: 1032418 - RNA, 19 nt, Artificial Sequence
  Description of Artificial Sequence: Synthetic oligonucleotide
  Sense strand starting at position 692 of SEQ ID NO: 914810
gggacuccuguuuggaaau

SEQ ID NO: 1032419 - RNA, 19 nt, Artificial Sequence
  Description of Artificial Sequence: Synthetic oligonucleotide
  Antisense strand to SEQ ID NO: 1032418
auuuccaaacaggaguccc

SEQ ID NO: 1032420 - RNA, 19 nt, Artificial Sequence
  Description of Artificial Sequence: Synthetic oligonucleotide
  Sense strand starting at position 693 of SEQ ID NO: 914810
ggacuccuguuuggaaaug

SEQ ID NO: 1032421 - RNA, 19 nt, Artificial Sequence
  Description of Artificial Sequence: Synthetic oligonucleotide
  Antisense strand to SEQ ID NO: 1032420
cauuuccaaacaggagucc

SEQ ID NO: 1032422 - RNA, 19 nt, Artificial Sequence
  Description of Artificial Sequence: Synthetic oligonucleotide
  Sense strand starting at position 694 of SEQ ID NO: 914810
gacuccuguuuggaaaugu

SEQ ID NO: 1032423 - RNA, 19 nt, Artificial Sequence
  Description of Artificial Sequence: Synthetic oligonucleotide
  Antisense strand to SEQ ID NO: 1032422
acauuuccaaacaggaguc

SEQ ID NO: 1032424 - RNA, 19 nt, Artificial Sequence
  Description of Artificial Sequence: Synthetic oligonucleotide
  Sense strand starting at position 704 of SEQ ID NO: 914810
uggaaauguugcggacaga

SEQ ID NO: 1032425 - RNA, 19 nt, Artificial Sequence
  Description of Artificial Sequence: Synthetic oligonucleotide
  Antisense strand to SEQ ID NO: 1032424
ucuguccgcaacauuucca

SEQ ID NO: 1032426 - RNA, 19 nt, Artificial Sequence
  Description of Artificial Sequence: Synthetic oligonucleotide
  Sense strand starting at position 705 of SEQ ID NO: 914810
ggaaauguugcggacagag

SEQ ID NO: 1032427 - RNA, 19 nt, Artificial Sequence
  Description of Artificial Sequence: Synthetic oligonucleotide
  Antisense strand to SEQ ID NO: 1032426
cucuguccgcaacauuucc

SEQ ID NO: 1032428 - RNA, 19 nt, Artificial Sequence
  Description of Artificial Sequence: Synthetic oligonucleotide
  Sense strand starting at position 739 of SEQ ID NO: 914810
gggagaugucgcgaaugug

SEQ ID NO: 1032429 - RNA, 19 nt, Artificial Sequence
  Description of Artificial Sequence: Synthetic oligonucleotide
  Antisense strand to SEQ ID NO: 1032428
cacauucgcgacaucuccc

SEQ ID NO: 1032430 - RNA, 19 nt, Artificial Sequence
  Description of Artificial Sequence: Synthetic oligonucleotide
  Sense strand starting at position 924 of SEQ ID NO: 914810
gcacgaaucacacauguga

SEQ ID NO: 1032431 - RNA, 19 nt, Artificial Sequence
  Description of Artificial Sequence: Synthetic oligonucleotide
  Antisense strand to SEQ ID NO: 1032430
ucacaugugugauucgugc

SEQ ID NO: 1032432 - RNA, 19 nt, Artificial Sequence
  Description of Artificial Sequence: Synthetic oligonucleotide
  Sense strand starting at position 1425 of SEQ ID NO: 914810
ggagaauucgucugauugu

SEQ ID NO: 1032433 - RNA, 19 nt, Artificial Sequence
  Description of Artificial Sequence: Synthetic oligonucleotide
  Antisense strand to SEQ ID NO: 1032432
acaaucagacgaauucucc

SEQ ID NO: 1032434 - RNA, 19 nt, Artificial Sequence
  Description of Artificial Sequence: Synthetic oligonucleotide
  Sense strand starting at position 1426 of SEQ ID NO: 914810
gagaauucgucugauuguc

SEQ ID NO: 1032435 - RNA, 19 nt, Artificial Sequence
  Description of Artificial Sequence: Synthetic oligonucleotide
  Antisense strand to SEQ ID NO: 1032434
gacaaucagacgaauucuc

SEQ ID NO: 1032436 - RNA, 19 nt, Artificial Sequence
  Description of Artificial Sequence: Synthetic oligonucleotide
  Sense strand starting at position 1428 of SEQ ID NO: 914810
gaauucgucugauugucca

SEQ ID NO: 1032437 - RNA, 19 nt, Artificial Sequence
  Description of Artificial Sequence: Synthetic oligonucleotide
  Antisense strand to SEQ ID NO: 1032436
uggacaaucagacgaauuc

SEQ ID NO: 1032438 - RNA, 19 nt, Artificial Sequence
  Description of Artificial Sequence: Synthetic oligonucleotide
  Sense strand starting at position 1432 of SEQ ID NO: 914810
ucgucugauuguccaggga

SEQ ID NO: 1032439 - RNA, 19 nt, Artificial Sequence
  Description of Artificial Sequence: Synthetic oligonucleotide
  Antisense strand to SEQ ID NO: 1032438
ucccuggacaaucagacga

SEQ ID NO: 1032440 - RNA, 19 nt, Artificial Sequence
  Description of Artificial Sequence: Synthetic oligonucleotide
  Sense strand starting at position 1434 of SEQ ID NO: 914810
gucugauuguccagggagg

SEQ ID NO: 1032441 - RNA, 19 nt, Artificial Sequence
  Description of Artificial Sequence: Synthetic oligonucleotide
  Antisense strand to SEQ ID NO: 1032440
ccucccuggacaaucagac

SEQ ID NO: 1032442 - RNA, 19 nt, Artificial Sequence
  Description of Artificial Sequence: Synthetic oligonucleotide
  Sense strand starting at position 1435 of SEQ ID NO: 914810
ucugauuguccagggagga

SEQ ID NO: 1032443 - RNA, 19 nt, Artificial Sequence
  Description of Artificial Sequence: Synthetic oligonucleotide
  Antisense strand to SEQ ID NO: 1032442
uccucccuggacaaucaga

SEQ ID NO: 1032444 - RNA, 19 nt, Artificial Sequence
  Description of Artificial Sequence: Synthetic oligonucleotide
  Sense strand starting at position 1521 of SEQ ID NO: 914810
gaggucagcuguuguauca

SEQ ID NO: 1032445 - RNA, 19 nt, Artificial Sequence
  Description of Artificial Sequence: Synthetic oligonucleotide
  Antisense strand to SEQ ID NO: 1032444
ugauacaacagcugaccuc

SEQ ID NO: 1032446 - RNA, 19 nt, Artificial Sequence
  Description of Artificial Sequence: Synthetic oligonucleotide
  Sense strand starting at position 1673 of SEQ ID NO: 914810
acagaaagcguguaauuaa

SEQ ID NO: 1032447 - RNA, 19 nt, Artificial Sequence
  Description of Artificial Sequence: Synthetic oligonucleotide
  Antisense strand to SEQ ID NO: 1032446
uuaauuacacgcuuucugu

SEQ ID NO: 1032448 - RNA, 19 nt, Artificial Sequence
  Description of Artificial Sequence: Synthetic oligonucleotide
  Sense strand starting at position 1680 of SEQ ID NO: 914810
gcguguaauuaauccacuu

SEQ ID NO: 1032449 - RNA, 19 nt, Artificial Sequence
  Description of Artificial Sequence: Synthetic oligonucleotide
  Antisense strand to SEQ ID NO: 1032448
aaguggauuaauuacacgc

SEQ ID NO: 1032450 - RNA, 19 nt, Artificial Sequence
  Description of Artificial Sequence: Synthetic oligonucleotide
  Sense strand starting at position 1781 of SEQ ID NO: 914810
gggaagguugcgggagaaa

SEQ ID NO: 1032451 - RNA, 19 nt, Artificial Sequence
  Description of Artificial Sequence: Synthetic oligonucleotide
  Antisense strand to SEQ ID NO: 1032450
uuucucccgcaaccuuccc

SEQ ID NO: 1032452 - RNA, 19 nt, Artificial Sequence
  Description of Artificial Sequence: Synthetic oligonucleotide
  Sense strand starting at position 2693 of SEQ ID NO: 914810
gaaugcccguucuagagaa

SEQ ID NO: 1032453 - RNA, 19 nt, Artificial Sequence
  Description of Artificial Sequence: Synthetic oligonucleotide
  Antisense strand to SEQ ID NO: 1032452
uucucuagaacgggcauuc

SEQ ID NO: 1032454 - RNA, 19 nt, Artificial Sequence
  Description of Artificial Sequence: Synthetic oligonucleotide
  Sense strand starting at position 2695 of SEQ ID NO: 914810
augcccguucuagagaauu

SEQ ID NO: 1032455 - RNA, 19 nt, Artificial Sequence
  Description of Artificial Sequence: Synthetic oligonucleotide
  Antisense strand to SEQ ID NO: 1032454
aauucucuagaacgggcau

SEQ ID NO: 1032456 - RNA, 19 nt, Artificial Sequence
  Description of Artificial Sequence: Synthetic oligonucleotide
  Sense strand starting at position 3316 of SEQ ID NO: 914810
aaaccaucuccuggagagu

SEQ ID NO: 1032457 - RNA, 19 nt, Artificial Sequence
  Description of Artificial Sequence: Synthetic oligonucleotide
  Antisense strand to SEQ ID NO: 1032456
acucuccaggagaugguuu

SEQ ID NO: 1032458 - RNA, 19 nt, Artificial Sequence
  Description of Artificial Sequence: Synthetic oligonucleotide
  Sense strand starting at position 3325 of SEQ ID NO: 914810
ccuggagaguuugaacgau

SEQ ID NO: 1032459 - RNA, 19 nt, Artificial Sequence
  Description of Artificial Sequence: Synthetic oligonucleotide
  Antisense strand to SEQ ID NO: 1032458
aucguucaaacucuccagg

SEQ ID NO: 1032460 - RNA, 19 nt, Artificial Sequence
  Description of Artificial Sequence: Synthetic oligonucleotide
  Sense strand starting at position 3329 of SEQ ID NO: 914810
gagaguuugaacgauguaa

SEQ ID NO: 1032461 - RNA, 19 nt, Artificial Sequence
  Description of Artificial Sequence: Synthetic oligonucleotide
  Antisense strand to SEQ ID NO: 1032460
uuacaucguucaaacucuc

SEQ ID NO: 1032462 - RNA, 19 nt, Artificial Sequence
  Description of Artificial Sequence: Synthetic oligonucleotide
  Sense strand starting at position 3331 of SEQ ID NO: 914810
gaguuugaacgauguaaga

SEQ ID NO: 1032463 - RNA, 19 nt, Artificial Sequence
  Description of Artificial Sequence: Synthetic oligonucleotide
  Antisense strand to SEQ ID NO: 1032462
ucuuacaucguucaaacuc

SEQ ID NO: 1032464 - RNA, 19 nt, Artificial Sequence
  Description of Artificial Sequence: Synthetic oligonucleotide
  Sense strand starting at position 3344 of SEQ ID NO: 914810
guaagaaagcacugugauu

SEQ ID NO: 1032465 - RNA, 19 nt, Artificial Sequence
  Description of Artificial Sequence: Synthetic oligonucleotide
  Antisense strand to SEQ ID NO: 1032464
aaucacagugcuuucuuac

SEQ ID NO: 1032466 - RNA, 19 nt, Artificial Sequence
  Description of Artificial Sequence: Synthetic oligonucleotide
  Sense strand starting at position 1082 of SEQ ID NO: 914811
ucugcaaagucuccuguuu

SEQ ID NO: 1032467 - RNA, 19 nt, Artificial Sequence
  Description of Artificial Sequence: Synthetic oligonucleotide
  Antisense strand to SEQ ID NO: 1032466
aaacaggagacuuugcaga

SEQ ID NO: 1032468 - RNA, 19 nt, Artificial Sequence
  Description of Artificial Sequence: Synthetic oligonucleotide
  Sense strand starting at position 1084 of SEQ ID NO: 914811
ugcaaagucuccuguuugu

SEQ ID NO: 1032469 - RNA, 19 nt, Artificial Sequence
  Description of Artificial Sequence: Synthetic oligonucleotide
  Antisense strand to SEQ ID NO: 1032468
acaaacaggagacuuugca

SEQ ID NO: 1032470 - RNA, 19 nt, Artificial Sequence
  Description of Artificial Sequence: Synthetic oligonucleotide
  Sense strand starting at position 1093 of SEQ ID NO: 914811
uccuguuugucucugggaa

SEQ ID NO: 1032471 - RNA, 19 nt, Artificial Sequence
  Description of Artificial Sequence: Synthetic oligonucleotide
  Antisense strand to SEQ ID NO: 1032470
uucccagagacaaacagga

SEQ ID NO: 1032472 - RNA, 19 nt, Artificial Sequence
  Description of Artificial Sequence: Synthetic oligonucleotide
  Sense strand starting at position 1094 of SEQ ID NO: 914811
ccuguuugucucugggaau

SEQ ID NO: 1032473 - RNA, 19 nt, Artificial Sequence
  Description of Artificial Sequence: Synthetic oligonucleotide
  Antisense strand to SEQ ID NO: 1032472
auucccagagacaaacagg

SEQ ID NO: 1032474 - RNA, 19 nt, Artificial Sequence
  Description of Artificial Sequence: Synthetic oligonucleotide
  Sense strand starting at position 1095 of SEQ ID NO: 914811
cuguuugucucugggaaug

SEQ ID NO: 1032475 - RNA, 19 nt, Artificial Sequence
  Description of Artificial Sequence: Synthetic oligonucleotide
  Antisense strand to SEQ ID NO: 1032474
cauucccagagacaaacag

SEQ ID NO: 1032476 - RNA, 19 nt, Artificial Sequence
  Description of Artificial Sequence: Synthetic oligonucleotide
  Sense strand starting at position 1183 of SEQ ID NO: 914811
cuguguguucccgcuggga

SEQ ID NO: 1032477 - RNA, 19 nt, Artificial Sequence
  Description of Artificial Sequence: Synthetic oligonucleotide
  Antisense strand to SEQ ID NO: 1032476
ucccagcgggaacacacag

SEQ ID NO: 1032478 - RNA, 19 nt, Artificial Sequence
  Description of Artificial Sequence: Synthetic oligonucleotide
  Sense strand starting at position 1185 of SEQ ID NO: 914811
guguguucccgcugggaag

SEQ ID NO: 1032479 - RNA, 19 nt, Artificial Sequence
  Description of Artificial Sequence: Synthetic oligonucleotide
  Antisense strand to SEQ ID NO: 1032478
cuucccagcgggaacacac

SEQ ID NO: 1032480 - RNA, 19 nt, Artificial Sequence
  Description of Artificial Sequence: Synthetic oligonucleotide
  Sense strand starting at position 1186 of SEQ ID NO: 914811
uguguucccgcugggaaga

SEQ ID NO: 1032481 - RNA, 19 nt, Artificial Sequence
  Description of Artificial Sequence: Synthetic oligonucleotide
  Antisense strand to SEQ ID NO: 1032480
ucuucccagcgggaacaca

SEQ ID NO: 1032482 - RNA, 19 nt, Artificial Sequence
  Description of Artificial Sequence: Synthetic oligonucleotide
  Sense strand starting at position 1514 of SEQ ID NO: 914811
cccaguuaccuguacucua

SEQ ID NO: 1032483 - RNA, 19 nt, Artificial Sequence
  Description of Artificial Sequence: Synthetic oligonucleotide
  Antisense strand to SEQ ID NO: 1032482
uagaguacagguaacuggg

SEQ ID NO: 1032484 - RNA, 19 nt, Artificial Sequence
  Description of Artificial Sequence: Synthetic oligonucleotide
  Sense strand starting at position 1843 of SEQ ID NO: 914811
acugaaaugauggguuuac

SEQ ID NO: 1032485 - RNA, 19 nt, Artificial Sequence
  Description of Artificial Sequence: Synthetic oligonucleotide
  Antisense strand to SEQ ID NO: 1032484
guaaacccaucauuucagu

SEQ ID NO: 1032486 - RNA, 19 nt, Artificial Sequence
  Description of Artificial Sequence: Synthetic oligonucleotide
  Sense strand starting at position 2107 of SEQ ID NO: 914811
gggaguggguguagcuuua

SEQ ID NO: 1032487 - RNA, 19 nt, Artificial Sequence
  Description of Artificial Sequence: Synthetic oligonucleotide
  Antisense strand to SEQ ID NO: 1032486
uaaagcuacacccacuccc

SEQ ID NO: 1032488 - RNA, 19 nt, Artificial Sequence
  Description of Artificial Sequence: Synthetic oligonucleotide
  Sense strand starting at position 2114 of SEQ ID NO: 914811
gguguagcuuuacuuagag

SEQ ID NO: 1032489 - RNA, 19 nt, Artificial Sequence
  Description of Artificial Sequence: Synthetic oligonucleotide
  Antisense strand to SEQ ID NO: 1032488
cucuaaguaaagcuacacc

SEQ ID NO: 1032490 - RNA, 19 nt, Artificial Sequence
  Description of Artificial Sequence: Synthetic oligonucleotide
  Sense strand starting at position 2130 of SEQ ID NO: 914811
gagugacacuuggcaguua

SEQ ID NO: 1032491 - RNA, 19 nt, Artificial Sequence
  Description of Artificial Sequence: Synthetic oligonucleotide
  Antisense strand to SEQ ID NO: 1032490
uaacugccaagugucacuc

SEQ ID NO: 1032492 - RNA, 19 nt, Artificial Sequence
  Description of Artificial Sequence: Synthetic oligonucleotide
  Sense strand starting at position 2271 of SEQ ID NO: 914811
aguuauguacugugcaguu

SEQ ID NO: 1032493 - RNA, 19 nt, Artificial Sequence
  Description of Artificial Sequence: Synthetic oligonucleotide
  Antisense strand to SEQ ID NO: 1032492
aacugcacaguacauaacu

SEQ ID NO: 1032494 - RNA, 19 nt, Artificial Sequence
  Description of Artificial Sequence: Synthetic oligonucleotide
  Sense strand starting at position 2273 of SEQ ID NO: 914811
uuauguacugugcaguuau

SEQ ID NO: 1032495 - RNA, 19 nt, Artificial Sequence
  Description of Artificial Sequence: Synthetic oligonucleotide
  Antisense strand to SEQ ID NO: 1032494
auaacugcacaguacauaa

SEQ ID NO: 1032496 - RNA, 19 nt, Artificial Sequence
  Description of Artificial Sequence: Synthetic oligonucleotide
  Sense strand starting at position 2284 of SEQ ID NO: 914811
gcaguuauguccuuccauc

SEQ ID NO: 1032497 - RNA, 19 nt, Artificial Sequence
  Description of Artificial Sequence: Synthetic oligonucleotide
  Antisense strand to SEQ ID NO: 1032496
gauggaaggacauaacugc

SEQ ID NO: 1032498 - RNA, 19 nt, Artificial Sequence
  Description of Artificial Sequence: Synthetic oligonucleotide
  Sense strand starting at position 2367 of SEQ ID NO: 914811
agacacucccuguguggua

SEQ ID NO: 1032499 - RNA, 19 nt, Artificial Sequence
  Description of Artificial Sequence: Synthetic oligonucleotide
  Antisense strand to SEQ ID NO: 1032498
uaccacacagggagugucu

SEQ ID NO: 1032500 - RNA, 19 nt, Artificial Sequence
  Description of Artificial Sequence: Synthetic oligonucleotide
  Sense strand starting at position 2382 of SEQ ID NO: 914811
gguacuaagcucuaaugac

SEQ ID NO: 1032501 - RNA, 19 nt, Artificial Sequence
  Description of Artificial Sequence: Synthetic oligonucleotide
  Antisense strand to SEQ ID NO: 1032500
gucauuagagcuuaguacc

SEQ ID NO: 1032502 - RNA, 19 nt, Artificial Sequence
  Description of Artificial Sequence: Synthetic oligonucleotide
  Sense strand starting at position 2451 of SEQ ID NO: 914811
guucgcagccuuucuaauu

SEQ ID NO: 1032503 - RNA, 19 nt, Artificial Sequence
  Description of Artificial Sequence: Synthetic oligonucleotide
  Antisense strand to SEQ ID NO: 1032502
aauuagaaaggcugcgaac

SEQ ID NO: 1032504 - RNA, 19 nt, Artificial Sequence
  Description of Artificial Sequence: Synthetic oligonucleotide
  Sense strand starting at position 2452 of SEQ ID NO: 914811
uucgcagccuuucuaauua

SEQ ID NO: 1032505 - RNA, 19 nt, Artificial Sequence
  Description of Artificial Sequence: Synthetic oligonucleotide
  Antisense strand to SEQ ID NO: 1032504
uaauuagaaaggcugcgaa

SEQ ID NO: 1032506 - RNA, 19 nt, Artificial Sequence
  Description of Artificial Sequence: Synthetic oligonucleotide
  Sense strand starting at position 2591 of SEQ ID NO: 914811
gaggcaaagacguguacuu

SEQ ID NO: 1032507 - RNA, 19 nt, Artificial Sequence
  Description of Artificial Sequence: Synthetic oligonucleotide
  Antisense strand to SEQ ID NO: 1032506
aaguacacgucuuugccuc

SEQ ID NO: 1032508 - RNA, 19 nt, Artificial Sequence
  Description of Artificial Sequence: Synthetic oligonucleotide
  Sense strand starting at position 2600 of SEQ ID NO: 914811
acguguacuuuccagagag

SEQ ID NO: 1032509 - RNA, 19 nt, Artificial Sequence
  Description of Artificial Sequence: Synthetic oligonucleotide
  Antisense strand to SEQ ID NO: 1032508
cucucuggaaaguacacgu

SEQ ID NO: 1032510 - RNA, 19 nt, Artificial Sequence
  Description of Artificial Sequence: Synthetic oligonucleotide
  Sense strand starting at position 2680 of SEQ ID NO: 914811
uagccuguguugggauuua

SEQ ID NO: 1032511 - RNA, 19 nt, Artificial Sequence
  Description of Artificial Sequence: Synthetic oligonucleotide
  Antisense strand to SEQ ID NO: 1032510
uaaaucccaacacaggcua

SEQ ID NO: 1032512 - RNA, 19 nt, Artificial Sequence
  Description of Artificial Sequence: Synthetic oligonucleotide
  Sense strand starting at position 2797 of SEQ ID NO: 914811
ggaagagaguuagacuuga

SEQ ID NO: 1032513 - RNA, 19 nt, Artificial Sequence
  Description of Artificial Sequence: Synthetic oligonucleotide
  Antisense strand to SEQ ID NO: 1032512
ucaagucuaacucucuucc

SEQ ID NO: 1032514 - RNA, 19 nt, Artificial Sequence
  Description of Artificial Sequence: Synthetic oligonucleotide
  Sense strand starting at position 3059 of SEQ ID NO: 914811
gaucaagucuuacugggaa

SEQ ID NO: 1032515 - RNA, 19 nt, Artificial Sequence
  Description of Artificial Sequence: Synthetic oligonucleotide
  Antisense strand to SEQ ID NO: 1032514
uucccaguaagacuugauc

SEQ ID NO: 1032516 - RNA, 19 nt, Artificial Sequence
  Description of Artificial Sequence: Synthetic oligonucleotide
  Sense strand starting at position 3063 of SEQ ID NO: 914811
aagucuuacugggaauuug

SEQ ID NO: 1032517 - RNA, 19 nt, Artificial Sequence
  Description of Artificial Sequence: Synthetic oligonucleotide
  Antisense strand to SEQ ID NO: 1032516
caaauucccaguaagacuu

SEQ ID NO: 1032518 - RNA, 19 nt, Artificial Sequence
  Description of Artificial Sequence: Synthetic oligonucleotide
  Sense strand starting at position 3189 of SEQ ID NO: 914811
ggcucuauggcuuagagac

SEQ ID NO: 1032519 - RNA, 19 nt, Artificial Sequence
  Description of Artificial Sequence: Synthetic oligonucleotide
  Antisense strand to SEQ ID NO: 1032518
gucucuaagccauagagcc

SEQ ID NO: 1032520 - RNA, 19 nt, Artificial Sequence
  Description of Artificial Sequence: Synthetic oligonucleotide
  Sense strand starting at position 3226 of SEQ ID NO: 914811
cccagugucugcugcaaga

SEQ ID NO: 1032521 - RNA, 19 nt, Artificial Sequence
  Description of Artificial Sequence: Synthetic oligonucleotide
  Antisense strand to SEQ ID NO: 1032520
ucuugcagcagacacuggg

SEQ ID NO: 1032522 - RNA, 19 nt, Artificial Sequence
  Description of Artificial Sequence: Synthetic oligonucleotide
  Sense strand starting at position 3228 of SEQ ID NO: 914811
cagugucugcugcaagaug

SEQ ID NO: 1032523 - RNA, 19 nt, Artificial Sequence
  Description of Artificial Sequence: Synthetic oligonucleotide
  Antisense strand to SEQ ID NO: 1032522
caucuugcagcagacacug

SEQ ID NO: 1032524 - RNA, 19 nt, Artificial Sequence
  Description of Artificial Sequence: Synthetic oligonucleotide
  Sense strand starting at position 3237 of SEQ ID NO: 914811
cugcaagaugcccaaaugu

SEQ ID NO: 1032525 - RNA, 19 nt, Artificial Sequence
  Description of Artificial Sequence: Synthetic oligonucleotide
  Antisense strand to SEQ ID NO: 1032524
acauuugggcaucuugcag

SEQ ID NO: 1032526 - RNA, 19 nt, Artificial Sequence
  Description of Artificial Sequence: Synthetic oligonucleotide
  Sense strand starting at position 3349 of SEQ ID NO: 914811
gccagaugaagugauucca

SEQ ID NO: 1032527 - RNA, 19 nt, Artificial Sequence
  Description of Artificial Sequence: Synthetic oligonucleotide
  Antisense strand to SEQ ID NO: 1032526
uggaaucacuucaucuggc

SEQ ID NO: 1032528 - RNA, 19 nt, Artificial Sequence
  Description of Artificial Sequence: Synthetic oligonucleotide
  Sense strand starting at position 3444 of SEQ ID NO: 914811
aggucaaacuccuggaaac

SEQ ID NO: 1032529 - RNA, 19 nt, Artificial Sequence
  Description of Artificial Sequence: Synthetic oligonucleotide
  Antisense strand to SEQ ID NO: 1032528
guuuccaggaguuugaccu

SEQ ID NO: 1032530 - RNA, 19 nt, Artificial Sequence
  Description of Artificial Sequence: Synthetic oligonucleotide
  Sense strand starting at position 3479 of SEQ ID NO: 914811
ccacaauggugucuugaau

SEQ ID NO: 1032531 - RNA, 19 nt, Artificial Sequence
  Description of Artificial Sequence: Synthetic oligonucleotide
  Antisense strand to SEQ ID NO: 1032530
auucaagacaccauugugg

SEQ ID NO: 1032532 - RNA, 19 nt, Artificial Sequence
  Description of Artificial Sequence: Synthetic oligonucleotide
  Sense strand starting at position 3554 of SEQ ID NO: 914811
ucuagucuccaaggcuauu

SEQ ID NO: 1032533 - RNA, 19 nt, Artificial Sequence
  Description of Artificial Sequence: Synthetic oligonucleotide
  Antisense strand to SEQ ID NO: 1032532
aauagccuuggagacuaga

SEQ ID NO: 1032534 - RNA, 19 nt, Artificial Sequence
  Description of Artificial Sequence: Synthetic oligonucleotide
  Sense strand starting at position 3790 of SEQ ID NO: 914811
gcuuuauggagacagguga

SEQ ID NO: 1032535 - RNA, 19 nt, Artificial Sequence
  Description of Artificial Sequence: Synthetic oligonucleotide
  Antisense strand to SEQ ID NO: 1032534
ucaccugucuccauaaagc

SEQ ID NO: 1032536 - RNA, 19 nt, Artificial Sequence
  Description of Artificial Sequence: Synthetic oligonucleotide
  Sense strand starting at position 3925 of SEQ ID NO: 914811
gcaugagagucuugggaac

SEQ ID NO: 1032537 - RNA, 19 nt, Artificial Sequence
  Description of Artificial Sequence: Synthetic oligonucleotide
  Antisense strand to SEQ ID NO: 1032536
guucccaagacucucaugc

SEQ ID NO: 1032538 - RNA, 19 nt, Artificial Sequence
  Description of Artificial Sequence: Synthetic oligonucleotide
  Sense strand starting at position 545 of SEQ ID NO: 914812
augcccguucuagagaauu

SEQ ID NO: 1032539 - RNA, 19 nt, Artificial Sequence
  Description of Artificial Sequence: Synthetic oligonucleotide
  Antisense strand to SEQ ID NO: 1032538
aauucucuagaacgggcau

SEQ ID NO: 1032540 - RNA, 19 nt, Artificial Sequence
  Description of Artificial Sequence: Synthetic oligonucleotide
  Sense strand starting at position 1166 of SEQ ID NO: 914812
aaaccaucuccuggagagu

SEQ ID NO: 1032541 - RNA, 19 nt, Artificial Sequence
  Description of Artificial Sequence: Synthetic oligonucleotide
  Antisense strand to SEQ ID NO: 1032540
acucuccaggagaugguuu

SEQ ID NO: 1032542 - RNA, 19 nt, Artificial Sequence
  Description of Artificial Sequence: Synthetic oligonucleotide
  Sense strand starting at position 1179 of SEQ ID NO: 914812
gagaguuugaacgauguaa

SEQ ID NO: 1032543 - RNA, 19 nt, Artificial Sequence
  Description of Artificial Sequence: Synthetic oligonucleotide
  Antisense strand to SEQ ID NO: 1032542
uuacaucguucaaacucuc

SEQ ID NO: 1032544 - RNA, 19 nt, Artificial Sequence
  Description of Artificial Sequence: Synthetic oligonucleotide
  Sense strand starting at position 1181 of SEQ ID NO: 914812
gaguuugaacgauguaaga

SEQ ID NO: 1032545 - RNA, 19 nt, Artificial Sequence
  Description of Artificial Sequence: Synthetic oligonucleotide
  Antisense strand to SEQ ID NO: 1032544
ucuuacaucguucaaacuc

SEQ ID NO: 1032546 - RNA, 19 nt, Artificial Sequence
  Description of Artificial Sequence: Synthetic oligonucleotide
  Sense strand starting at position 1194 of SEQ ID NO: 914812
guaagaaagcacugugauu

SEQ ID NO: 1032547 - RNA, 19 nt, Artificial Sequence
  Description of Artificial Sequence: Synthetic oligonucleotide
  Antisense strand to SEQ ID NO: 1032546
aaucacagugcuuucuuac

SEQ ID NO: 1032548 - RNA, 19 nt, Artificial Sequence
  Description of Artificial Sequence: Synthetic oligonucleotide
  Sense strand starting at position 1995 of SEQ ID NO: 914812
guguguuugggcaacgcua

SEQ ID NO: 1032549 - RNA, 19 nt, Artificial Sequence
  Description of Artificial Sequence: Synthetic oligonucleotide
  Antisense strand to SEQ ID NO: 1032548
uagcguugcccaaacacac

SEQ ID NO: 1032550 - RNA, 19 nt, Artificial Sequence
  Description of Artificial Sequence: Synthetic oligonucleotide
  Sense strand starting at position 2129 of SEQ ID NO: 914812
cgggaacaaugcccaaauu

SEQ ID NO: 1032551 - RNA, 19 nt, Artificial Sequence
  Description of Artificial Sequence: Synthetic oligonucleotide
  Antisense strand to SEQ ID NO: 1032550
aauuugggcauuguucccg

SEQ ID NO: 1032552 - RNA, 19 nt, Artificial Sequence
  Description of Artificial Sequence: Synthetic oligonucleotide
  Sense strand starting at position 2231 of SEQ ID NO: 914812
uaaugugggaaccgugauu

SEQ ID NO: 1032553 - RNA, 19 nt, Artificial Sequence
  Description of Artificial Sequence: Synthetic oligonucleotide
  Antisense strand to SEQ ID NO: 1032552
aaucacgguucccacauua

SEQ ID NO: 1032554 - RNA, 19 nt, Artificial Sequence
  Description of Artificial Sequence: Synthetic oligonucleotide
  Sense strand starting at position 2236 of SEQ ID NO: 914812
ugggaaccgugauuaauga

SEQ ID NO: 1032555 - RNA, 19 nt, Artificial Sequence
  Description of Artificial Sequence: Synthetic oligonucleotide
  Antisense strand to SEQ ID NO: 1032554
ucauuaaucacgguuccca

SEQ ID NO: 1032556 - RNA, 19 nt, Artificial Sequence
  Description of Artificial Sequence: Synthetic oligonucleotide
  Sense strand starting at position 2243 of SEQ ID NO: 914812
cgugauuaaugacuaaacu

SEQ ID NO: 1032557 - RNA, 19 nt, Artificial Sequence
  Description of Artificial Sequence: Synthetic oligonucleotide
  Antisense strand to SEQ ID NO: 1032556
aguuuagucauuaaucacg

SEQ ID NO: 1032558 - RNA, 19 nt, Artificial Sequence
  Description of Artificial Sequence: Synthetic oligonucleotide
  Sense strand starting at position 2303 of SEQ ID NO: 914812
gaaguugcuccaugcaauu

SEQ ID NO: 1032559 - RNA, 19 nt, Artificial Sequence
  Description of Artificial Sequence: Synthetic oligonucleotide
  Antisense strand to SEQ ID NO: 1032558
aauugcauggagcaacuuc

SEQ ID NO: 1032560 - RNA, 19 nt, Artificial Sequence
  Description of Artificial Sequence: Synthetic oligonucleotide
  Sense strand starting at position 2489 of SEQ ID NO: 914812
aacacauucuugguguguu

SEQ ID NO: 1032561 - RNA, 19 nt, Artificial Sequence
  Description of Artificial Sequence: Synthetic oligonucleotide
  Antisense strand to SEQ ID NO: 1032560
aacacaccaagaauguguu

SEQ ID NO: 1032562 - RNA, 19 nt, Artificial Sequence
  Description of Artificial Sequence: Synthetic oligonucleotide
  Sense strand starting at position 2672 of SEQ ID NO: 914812
ccuggagugugaucaguac

SEQ ID NO: 1032563 - RNA, 19 nt, Artificial Sequence
  Description of Artificial Sequence: Synthetic oligonucleotide
  Antisense strand to SEQ ID NO: 1032562
guacugaucacacuccagg

SEQ ID NO: 1032564 - RNA, 19 nt, Artificial Sequence
  Description of Artificial Sequence: Synthetic oligonucleotide
  Sense strand starting at position 2812 of SEQ ID NO: 914812
cuggaugucgucugcauuu

SEQ ID NO: 1032565 - RNA, 19 nt, Artificial Sequence
  Description of Artificial Sequence: Synthetic oligonucleotide
  Antisense strand to SEQ ID NO: 1032564
aaaugcagacgacauccag

SEQ ID NO: 1032566 - RNA, 19 nt, Artificial Sequence
  Description of Artificial Sequence: Synthetic oligonucleotide
  Sense strand starting at position 2909 of SEQ ID NO: 914812
cuggaaaccuaguuaguag

SEQ ID NO: 1032567 - RNA, 19 nt, Artificial Sequence
  Description of Artificial Sequence: Synthetic oligonucleotide
  Antisense strand to SEQ ID NO: 1032566
cuacuaacuagguuuccag

SEQ ID NO: 1032568 - RNA, 19 nt, Artificial Sequence
  Description of Artificial Sequence: Synthetic oligonucleotide
  Sense strand starting at position 2916 of SEQ ID NO: 914812
ccuaguuaguagcuaggaa

SEQ ID NO: 1032569 - RNA, 19 nt, Artificial Sequence
  Description of Artificial Sequence: Synthetic oligonucleotide
  Antisense strand to SEQ ID NO: 1032568
uuccuagcuacuaacuagg

SEQ ID NO: 1032570 - RNA, 19 nt, Artificial Sequence
  Description of Artificial Sequence: Synthetic oligonucleotide
  Sense strand starting at position 2917 of SEQ ID NO: 914812
cuaguuaguagcuaggaaa

SEQ ID NO: 1032571 - RNA, 19 nt, Artificial Sequence
  Description of Artificial Sequence: Synthetic oligonucleotide
  Antisense strand to SEQ ID NO: 1032570
uuuccuagcuacuaacuag

SEQ ID NO: 1032572 - RNA, 19 nt, Artificial Sequence
  Description of Artificial Sequence: Synthetic oligonucleotide
  Sense strand starting at position 2963 of SEQ ID NO: 914812
ugggauuucuugggaccca

SEQ ID NO: 1032573 - RNA, 19 nt, Artificial Sequence
  Description of Artificial Sequence: Synthetic oligonucleotide
  Antisense strand to SEQ ID NO: 1032572
ugggucccaagaaauccca

SEQ ID NO: 1032574 - RNA, 19 nt, Artificial Sequence
  Description of Artificial Sequence: Synthetic oligonucleotide
  Sense strand starting at position 3060 of SEQ ID NO: 914812
ucaggagacucauaaauca

SEQ ID NO: 1032575 - RNA, 19 nt, Artificial Sequence
  Description of Artificial Sequence: Synthetic oligonucleotide
  Antisense strand to SEQ ID NO: 1032574
ugauuuaugagucuccuga

SEQ ID NO: 1032576 - RNA, 19 nt, Artificial Sequence
  Description of Artificial Sequence: Synthetic oligonucleotide
  Sense strand starting at position 3204 of SEQ ID NO: 914812
uagggaaguugcucagagu

SEQ ID NO: 1032577 - RNA, 19 nt, Artificial Sequence
  Description of Artificial Sequence: Synthetic oligonucleotide
  Antisense strand to SEQ ID NO: 1032576
acucugagcaacuucccua

SEQ ID NO: 1032578 - RNA, 19 nt, Artificial Sequence
  Description of Artificial Sequence: Synthetic oligonucleotide
  Sense strand starting at position 3215 of SEQ ID NO: 914812
cucagaguccuuggaggac

SEQ ID NO: 1032579 - RNA, 19 nt, Artificial Sequence
  Description of Artificial Sequence: Synthetic oligonucleotide
  Antisense strand to SEQ ID NO: 1032578
guccuccaaggacucugag

SEQ ID NO: 1032580 - RNA, 19 nt, Artificial Sequence
  Description of Artificial Sequence: Synthetic oligonucleotide
  Sense strand starting at position 3270 of SEQ ID NO: 914812
ucagaauuccuaggucuua

SEQ ID NO: 1032581 - RNA, 19 nt, Artificial Sequence
  Description of Artificial Sequence: Synthetic oligonucleotide
  Antisense strand to SEQ ID NO: 1032580
uaagaccuaggaauucuga

SEQ ID NO: 1032582 - RNA, 19 nt, Artificial Sequence
  Description of Artificial Sequence: Synthetic oligonucleotide
  Sense strand starting at position 3325 of SEQ ID NO: 914812
ugcagugugcuugaaggaa

SEQ ID NO: 1032583 - RNA, 19 nt, Artificial Sequence
  Description of Artificial Sequence: Synthetic oligonucleotide
  Antisense strand to SEQ ID NO: 1032582
uuccuucaagcacacugca

SEQ ID NO: 1032584 - RNA, 19 nt, Artificial Sequence
  Description of Artificial Sequence: Synthetic oligonucleotide
  Sense strand starting at position 3329 of SEQ ID NO: 914812
gugugcuugaaggaaauau

SEQ ID NO: 1032585 - RNA, 19 nt, Artificial Sequence
  Description of Artificial Sequence: Synthetic oligonucleotide
  Antisense strand to SEQ ID NO: 1032584
auauuuccuucaagcacac

SEQ ID NO: 1032586 - RNA, 19 nt, Artificial Sequence
  Description of Artificial Sequence: Synthetic oligonucleotide
  Sense strand starting at position 3339 of SEQ ID NO: 914812
aggaaauauugcuuaacuu

SEQ ID NO: 1032587 - RNA, 19 nt, Artificial Sequence
  Description of Artificial Sequence: Synthetic oligonucleotide
  Antisense strand to SEQ ID NO: 1032586
aaguuaagcaauauuuccu

SEQ ID NO: 1032588 - RNA, 19 nt, Artificial Sequence
  Description of Artificial Sequence: Synthetic oligonucleotide
  Sense strand starting at position 3346 of SEQ ID NO: 914812
auugcuuaacuuugagaug

SEQ ID NO: 1032589 - RNA, 19 nt, Artificial Sequence
  Description of Artificial Sequence: Synthetic oligonucleotide
  Antisense strand to SEQ ID NO: 1032588
caucucaaaguuaagcaau

SEQ ID NO: 1032590 - RNA, 19 nt, Artificial Sequence
  Description of Artificial Sequence: Synthetic oligonucleotide
  Sense strand starting at position 3358 of SEQ ID NO: 914812
ugagaugacucaguggguu

SEQ ID NO: 1032591 - RNA, 19 nt, Artificial Sequence
  Description of Artificial Sequence: Synthetic oligonucleotide
  Antisense strand to SEQ ID NO: 1032590
aacccacugagucaucuca

SEQ ID NO: 1032592 - RNA, 19 nt, Artificial Sequence
  Description of Artificial Sequence: Synthetic oligonucleotide
  Sense strand starting at position 3386 of SEQ ID NO: 914812
ccaagaaaucagugcuguc

SEQ ID NO: 1032593 - RNA, 19 nt, Artificial Sequence
  Description of Artificial Sequence: Synthetic oligonucleotide
  Antisense strand to SEQ ID NO: 1032592
gacagcacugauuucuugg

SEQ ID NO: 1032594 - RNA, 19 nt, Artificial Sequence
  Description of Artificial Sequence: Synthetic oligonucleotide
  Sense strand starting at position 3405 of SEQ ID NO: 914812
cugugauccgagggcaaug

SEQ ID NO: 1032595 - RNA, 19 nt, Artificial Sequence
  Description of Artificial Sequence: Synthetic oligonucleotide
  Antisense strand to SEQ ID NO: 1032594
cauugcccucggaucacag

SEQ ID NO: 1032596 - RNA, 19 nt, Artificial Sequence
  Description of Artificial Sequence: Synthetic oligonucleotide
  Sense strand starting at position 3414 of SEQ ID NO: 914812
gagggcaaugcugaauguu

SEQ ID NO: 1032597 - RNA, 19 nt, Artificial Sequence
  Description of Artificial Sequence: Synthetic oligonucleotide
  Antisense strand to SEQ ID NO: 1032596
aacauucagcauugcccuc

SEQ ID NO: 1032598 - RNA, 19 nt, Artificial Sequence
  Description of Artificial Sequence: Synthetic oligonucleotide
  Sense strand starting at position 3420 of SEQ ID NO: 914812
aaugcugaauguuccuaga

SEQ ID NO: 1032599 - RNA, 19 nt, Artificial Sequence
  Description of Artificial Sequence: Synthetic oligonucleotide
  Antisense strand to SEQ ID NO: 1032598
ucuaggaacauucagcauu

SEQ ID NO: 1032600 - RNA, 19 nt, Artificial Sequence
  Description of Artificial Sequence: Synthetic oligonucleotide
  Sense strand starting at position 3546 of SEQ ID NO: 914812
gcaagauucuuguuaugaa

SEQ ID NO: 1032601 - RNA, 19 nt, Artificial Sequence
  Description of Artificial Sequence: Synthetic oligonucleotide
  Antisense strand to SEQ ID NO: 1032600
uucauaacaagaaucuugc

SEQ ID NO: 1032602 - RNA, 19 nt, Artificial Sequence
  Description of Artificial Sequence: Synthetic oligonucleotide
  Sense strand starting at position 3599 of SEQ ID NO: 914812
uauguugugaugcagagaa

SEQ ID NO: 1032603 - RNA, 19 nt, Artificial Sequence
  Description of Artificial Sequence: Synthetic oligonucleotide
  Antisense strand to SEQ ID NO: 1032602
uucucugcaucacaacaua

SEQ ID NO: 1032604 - RNA, 19 nt, Artificial Sequence
  Description of Artificial Sequence: Synthetic oligonucleotide
  Sense strand starting at position 3601 of SEQ ID NO: 914812
uguugugaugcagagaaag

SEQ ID NO: 1032605 - RNA, 19 nt, Artificial Sequence
  Description of Artificial Sequence: Synthetic oligonucleotide
  Antisense strand to SEQ ID NO: 1032604
cuuucucugcaucacaaca

SEQ ID NO: 1032606 - RNA, 19 nt, Artificial Sequence
  Description of Artificial Sequence: Synthetic oligonucleotide
  Sense strand starting at position 3611 of SEQ ID NO: 914812
cagagaaagugcucggaau

SEQ ID NO: 1032607 - RNA, 19 nt, Artificial Sequence
  Description of Artificial Sequence: Synthetic oligonucleotide
  Antisense strand to SEQ ID NO: 1032606
auuccgagcacuuucucug

SEQ ID NO: 1032608 - RNA, 19 nt, Artificial Sequence
  Description of Artificial Sequence: Synthetic oligonucleotide
  Sense strand starting at position 3612 of SEQ ID NO: 914812
agagaaagugcucggaaug

SEQ ID NO: 1032609 - RNA, 19 nt, Artificial Sequence
  Description of Artificial Sequence: Synthetic oligonucleotide
  Antisense strand to SEQ ID NO: 1032608
cauuccgagcacuuucucu

SEQ ID NO: 1032610 - RNA, 19 nt, Artificial Sequence
  Description of Artificial Sequence: Synthetic oligonucleotide
  Sense strand starting at position 3613 of SEQ ID NO: 914812
gagaaagugcucggaaugu

SEQ ID NO: 1032611 - RNA, 19 nt, Artificial Sequence
  Description of Artificial Sequence: Synthetic oligonucleotide
  Antisense strand to SEQ ID NO: 1032610
acauuccgagcacuuucuc

SEQ ID NO: 1032612 - RNA, 19 nt, Artificial Sequence
  Description of Artificial Sequence: Synthetic oligonucleotide
  Sense strand starting at position 3758 of SEQ ID NO: 914812
uggagaauccugggucaca

SEQ ID NO: 1032613 - RNA, 19 nt, Artificial Sequence
  Description of Artificial Sequence: Synthetic oligonucleotide
  Antisense strand to SEQ ID NO: 1032612
ugugacccaggauucucca

SEQ ID NO: 1032614 - RNA, 19 nt, Artificial Sequence
  Description of Artificial Sequence: Synthetic oligonucleotide
  Sense strand starting at position 3759 of SEQ ID NO: 914812
ggagaauccugggucacac

SEQ ID NO: 1032615 - RNA, 19 nt, Artificial Sequence
  Description of Artificial Sequence: Synthetic oligonucleotide
  Antisense strand to SEQ ID NO: 1032614
gugugacccaggauucucc

SEQ ID NO: 1032616 - RNA, 19 nt, Artificial Sequence
  Description of Artificial Sequence: Synthetic oligonucleotide
  Sense strand starting at position 3823 of SEQ ID NO: 914812
uggcacugucuacaucuua

SEQ ID NO: 1032617 - RNA, 19 nt, Artificial Sequence
  Description of Artificial Sequence: Synthetic oligonucleotide
  Antisense strand to SEQ ID NO: 1032616
uaagauguagacagugcca

SEQ ID NO: 1032618 - RNA, 19 nt, Artificial Sequence
  Description of Artificial Sequence: Synthetic oligonucleotide
  Sense strand starting at position 67 of SEQ ID NO: 914813
ccagcuacuuacugaagua

SEQ ID NO: 1032619 - RNA, 19 nt, Artificial Sequence
  Description of Artificial Sequence: Synthetic oligonucleotide
  Antisense strand to SEQ ID NO: 1032618
uacuucaguaaguagcugg

SEQ ID NO: 1032620 - RNA, 19 nt, Artificial Sequence
  Description of Artificial Sequence: Synthetic oligonucleotide
  Sense strand starting at position 355 of SEQ ID NO: 914813
acggcuuuccuauaaacau

SEQ ID NO: 1032621 - RNA, 19 nt, Artificial Sequence
  Description of Artificial Sequence: Synthetic oligonucleotide
  Antisense strand to SEQ ID NO: 1032620
auguuuauaggaaagccgu

SEQ ID NO: 1032622 - RNA, 19 nt, Artificial Sequence
  Description of Artificial Sequence: Synthetic oligonucleotide
  Sense strand starting at position 400 of SEQ ID NO: 914813
ggucauaaugccgagguga

SEQ ID NO: 1032623 - RNA, 19 nt, Artificial Sequence
  Description of Artificial Sequence: Synthetic oligonucleotide
  Antisense strand to SEQ ID NO: 1032622
ucaccucggcauuaugacc

SEQ ID NO: 1032624 - RNA, 19 nt, Artificial Sequence
  Description of Artificial Sequence: Synthetic oligonucleotide
  Sense strand starting at position 426 of SEQ ID NO: 914813
gggccaugugcagaaugaa

SEQ ID NO: 1032625 - RNA, 19 nt, Artificial Sequence
  Description of Artificial Sequence: Synthetic oligonucleotide
  Antisense strand to SEQ ID NO: 1032624
uucauucugcacauggccc

SEQ ID NO: 1032626 - RNA, 19 nt, Artificial Sequence
  Description of Artificial Sequence: Synthetic oligonucleotide
  Sense strand starting at position 532 of SEQ ID NO: 914813
ucauuauugcaggagcuca

SEQ ID NO: 1032627 - RNA, 19 nt, Artificial Sequence
  Description of Artificial Sequence: Synthetic oligonucleotide
  Antisense strand to SEQ ID NO: 1032626
ugagcuccugcaauaauga

SEQ ID NO: 1032628 - RNA, 19 nt, Artificial Sequence
  Description of Artificial Sequence: Synthetic oligonucleotide
  Sense strand starting at position 593 of SEQ ID NO: 914813
uggccuccguccuaugaca

SEQ ID NO: 1032629 - RNA, 19 nt, Artificial Sequence
  Description of Artificial Sequence: Synthetic oligonucleotide
  Antisense strand to SEQ ID NO: 1032628
ugucauaggacggaggcca

SEQ ID NO: 1032630 - RNA, 19 nt, Artificial Sequence
  Description of Artificial Sequence: Synthetic oligonucleotide
  Sense strand starting at position 1051 of SEQ ID NO: 914813
cccuauuugcgcuaccaaa

SEQ ID NO: 1032631 - RNA, 19 nt, Artificial Sequence
  Description of Artificial Sequence: Synthetic oligonucleotide
  Antisense strand to SEQ ID NO: 1032630
uuugguagcgcaaauaggg

SEQ ID NO: 1032632 - RNA, 19 nt, Artificial Sequence
  Description of Artificial Sequence: Synthetic oligonucleotide
  Sense strand starting at position 1154 of SEQ ID NO: 914813
aggccagucuuaggacaca

SEQ ID NO: 1032633 - RNA, 19 nt, Artificial Sequence
  Description of Artificial Sequence: Synthetic oligonucleotide
  Antisense strand to SEQ ID NO: 1032632
uguguccuaagacuggccu

SEQ ID NO: 1032634 - RNA, 19 nt, Artificial Sequence
  Description of Artificial Sequence: Synthetic oligonucleotide
  Sense strand starting at position 1440 of SEQ ID NO: 914813
ggucaucuccuugacugga

SEQ ID NO: 1032635 - RNA, 19 nt, Artificial Sequence
  Description of Artificial Sequence: Synthetic oligonucleotide
  Antisense strand to SEQ ID NO: 1032634
uccagucaaggagaugacc

SEQ ID NO: 1032636 - RNA, 19 nt, Artificial Sequence
  Description of Artificial Sequence: Synthetic oligonucleotide
  Sense strand starting at position 1768 of SEQ ID NO: 914813
gggugcuguccgagaggca

SEQ ID NO: 1032637 - RNA, 19 nt, Artificial Sequence
  Description of Artificial Sequence: Synthetic oligonucleotide
  Antisense strand to SEQ ID NO: 1032636
ugccucucggacagcaccc

SEQ ID NO: 1032638 - RNA, 19 nt, Artificial Sequence
  Description of Artificial Sequence: Synthetic oligonucleotide
  Sense strand starting at position 2377 of SEQ ID NO: 914813
cgggacuccuguuuggaaa

SEQ ID NO: 1032639 - RNA, 19 nt, Artificial Sequence
  Description of Artificial Sequence: Synthetic oligonucleotide
  Antisense strand to SEQ ID NO: 1032638
uuuccaaacaggagucccg

SEQ ID NO: 1032640 - RNA, 19 nt, Artificial Sequence
  Description of Artificial Sequence: Synthetic oligonucleotide
  Sense strand starting at position 2378 of SEQ ID NO: 914813
gggacuccuguuuggaaau

SEQ ID NO: 1032641 - RNA, 19 nt, Artificial Sequence
  Description of Artificial Sequence: Synthetic oligonucleotide
  Antisense strand to SEQ ID NO: 1032640
auuuccaaacaggaguccc

SEQ ID NO: 1032642 - RNA, 19 nt, Artificial Sequence
  Description of Artificial Sequence: Synthetic oligonucleotide
  Sense strand starting at position 2379 of SEQ ID NO: 914813
ggacuccuguuuggaaaug

SEQ ID NO: 1032643 - RNA, 19 nt, Artificial Sequence
  Description of Artificial Sequence: Synthetic oligonucleotide
  Antisense strand to SEQ ID NO: 1032642
cauuuccaaacaggagucc

SEQ ID NO: 1032644 - RNA, 19 nt, Artificial Sequence
  Description of Artificial Sequence: Synthetic oligonucleotide
  Sense strand starting at position 2380 of SEQ ID NO: 914813
gacuccuguuuggaaaugu

SEQ ID NO: 1032645 - RNA, 19 nt, Artificial Sequence
  Description of Artificial Sequence: Synthetic oligonucleotide
  Antisense strand to SEQ ID NO: 1032644
acauuuccaaacaggaguc

SEQ ID NO: 1032646 - RNA, 19 nt, Artificial Sequence
  Description of Artificial Sequence: Synthetic oligonucleotide
  Sense strand starting at position 2390 of SEQ ID NO: 914813
uggaaauguugcggacaga

SEQ ID NO: 1032647 - RNA, 19 nt, Artificial Sequence
  Description of Artificial Sequence: Synthetic oligonucleotide
  Antisense strand to SEQ ID NO: 1032646
ucuguccgcaacauuucca

SEQ ID NO: 1032648 - RNA, 19 nt, Artificial Sequence
  Description of Artificial Sequence: Synthetic oligonucleotide
  Sense strand starting at position 2391 of SEQ ID NO: 914813
ggaaauguugcggacagag

SEQ ID NO: 1032649 - RNA, 19 nt, Artificial Sequence
  Description of Artificial Sequence: Synthetic oligonucleotide
  Antisense strand to SEQ ID NO: 1032648
cucuguccgcaacauuucc

SEQ ID NO: 1032650 - RNA, 19 nt, Artificial Sequence
  Description of Artificial Sequence: Synthetic oligonucleotide
  Sense strand starting at position 2425 of SEQ ID NO: 914813
gggagaugucgcgaaugug

SEQ ID NO: 1032651 - RNA, 19 nt, Artificial Sequence
  Description of Artificial Sequence: Synthetic oligonucleotide
  Antisense strand to SEQ ID NO: 1032650
cacauucgcgacaucuccc

SEQ ID NO: 1032652 - RNA, 19 nt, Artificial Sequence
  Description of Artificial Sequence: Synthetic oligonucleotide
  Sense strand starting at position 2610 of SEQ ID NO: 914813
gcacgaaucacacauguga

SEQ ID NO: 1032653 - RNA, 19 nt, Artificial Sequence
  Description of Artificial Sequence: Synthetic oligonucleotide
  Antisense strand to SEQ ID NO: 1032652
ucacaugugugauucgugc

SEQ ID NO: 1032654 - RNA, 19 nt, Artificial Sequence
  Description of Artificial Sequence: Synthetic oligonucleotide
  Sense strand starting at position 3111 of SEQ ID NO: 914813
ggagaauucgucugauugu

SEQ ID NO: 1032655 - RNA, 19 nt, Artificial Sequence
  Description of Artificial Sequence: Synthetic oligonucleotide
  Antisense strand to SEQ ID NO: 1032654
acaaucagacgaauucucc

SEQ ID NO: 1032656 - RNA, 19 nt, Artificial Sequence
  Description of Artificial Sequence: Synthetic oligonucleotide
  Sense strand starting at position 3112 of SEQ ID NO: 914813
gagaauucgucugauuguc

SEQ ID NO: 1032657 - RNA, 19 nt, Artificial Sequence
  Description of Artificial Sequence: Synthetic oligonucleotide
  Antisense strand to SEQ ID NO: 1032656
gacaaucagacgaauucuc

SEQ ID NO: 1032658 - RNA, 19 nt, Artificial Sequence
  Description of Artificial Sequence: Synthetic oligonucleotide
  Sense strand starting at position 3114 of SEQ ID NO: 914813
gaauucgucugauugucca

SEQ ID NO: 1032659 - RNA, 19 nt, Artificial Sequence
  Description of Artificial Sequence: Synthetic oligonucleotide
  Antisense strand to SEQ ID NO: 1032658
uggacaaucagacgaauuc

SEQ ID NO: 1032660 - RNA, 19 nt, Artificial Sequence
  Description of Artificial Sequence: Synthetic oligonucleotide
  Sense strand starting at position 3118 of SEQ ID NO: 914813
ucgucugauuguccaggga

SEQ ID NO: 1032661 - RNA, 19 nt, Artificial Sequence
  Description of Artificial Sequence: Synthetic oligonucleotide
  Antisense strand to SEQ ID NO: 1032660
ucccuggacaaucagacga

SEQ ID NO: 1032662 - RNA, 19 nt, Artificial Sequence
  Description of Artificial Sequence: Synthetic oligonucleotide
  Sense strand starting at position 3120 of SEQ ID NO: 914813
gucugauuguccagggagg

SEQ ID NO: 1032663 - RNA, 19 nt, Artificial Sequence
  Description of Artificial Sequence: Synthetic oligonucleotide
  Antisense strand to SEQ ID NO: 1032662
ccucccuggacaaucagac

SEQ ID NO: 1032664 - RNA, 19 nt, Artificial Sequence
  Description of Artificial Sequence: Synthetic oligonucleotide
  Sense strand starting at position 3121 of SEQ ID NO: 914813
ucugauuguccagggagga

SEQ ID NO: 1032665 - RNA, 19 nt, Artificial Sequence
  Description of Artificial Sequence: Synthetic oligonucleotide
  Antisense strand to SEQ ID NO: 1032664
uccucccuggacaaucaga

SEQ ID NO: 1032666 - RNA, 19 nt, Artificial Sequence
  Description of Artificial Sequence: Synthetic oligonucleotide
  Sense strand starting at position 3207 of SEQ ID NO: 914813
gaggucagcuguuguauca

SEQ ID NO: 1032667 - RNA, 19 nt, Artificial Sequence
  Description of Artificial Sequence: Synthetic oligonucleotide
  Antisense strand to SEQ ID NO: 1032666
ugauacaacagcugaccuc

SEQ ID NO: 1032668 - RNA, 19 nt, Artificial Sequence
  Description of Artificial Sequence: Synthetic oligonucleotide
  Sense strand starting at position 3359 of SEQ ID NO: 914813
acagaaagcguguaauuaa

SEQ ID NO: 1032669 - RNA, 19 nt, Artificial Sequence
  Description of Artificial Sequence: Synthetic oligonucleotide
  Antisense strand to SEQ ID NO: 1032668
uuaauuacacgcuuucugu

SEQ ID NO: 1032670 - RNA, 19 nt, Artificial Sequence
  Description of Artificial Sequence: Synthetic oligonucleotide
  Sense strand starting at position 3366 of SEQ ID NO: 914813
gcguguaauuaauccacuu

SEQ ID NO: 1032671 - RNA, 19 nt, Artificial Sequence
  Description of Artificial Sequence: Synthetic oligonucleotide
  Antisense strand to SEQ ID NO: 1032670
aaguggauuaauuacacgc

SEQ ID NO: 1032672 - RNA, 19 nt, Artificial Sequence
  Description of Artificial Sequence: Synthetic oligonucleotide
  Sense strand starting at position 3467 of SEQ ID NO: 914813
gggaagguugcgggagaaa

SEQ ID NO: 1032673 - RNA, 19 nt, Artificial Sequence
  Description of Artificial Sequence: Synthetic oligonucleotide
  Antisense strand to SEQ ID NO: 1032672
uuucucccgcaaccuuccc

SEQ ID NO: 1032674 - RNA, 19 nt, Artificial Sequence
  Description of Artificial Sequence: Synthetic oligonucleotide
  Sense strand starting at position 76 of SEQ ID NO: 914814
ggacuucucugccucucau

SEQ ID NO: 1032675 - RNA, 19 nt, Artificial Sequence
  Description of Artificial Sequence: Synthetic oligonucleotide
  Antisense strand to SEQ ID NO: 1032674
augagaggcagagaagucc

SEQ ID NO: 1032676 - RNA, 19 nt, Artificial Sequence
  Description of Artificial Sequence: Synthetic oligonucleotide
  Sense strand starting at position 129 of SEQ ID NO: 914814
acugcucaccuggacuaaa

SEQ ID NO: 1032677 - RNA, 19 nt, Artificial Sequence
  Description of Artificial Sequence: Synthetic oligonucleotide
  Antisense strand to SEQ ID NO: 1032676
uuuaguccaggugagcagu

SEQ ID NO: 1032678 - RNA, 19 nt, Artificial Sequence
  Description of Artificial Sequence: Synthetic oligonucleotide
  Sense strand starting at position 288 of SEQ ID NO: 914814
acagaagacuagcuccuua

SEQ ID NO: 1032679 - RNA, 19 nt, Artificial Sequence
  Description of Artificial Sequence: Synthetic oligonucleotide
  Antisense strand to SEQ ID NO: 1032678
uaaggagcuagucuucugu

SEQ ID NO: 1032680 - RNA, 19 nt, Artificial Sequence
  Description of Artificial Sequence: Synthetic oligonucleotide
  Sense strand starting at position 339 of SEQ ID NO: 914814
ugcucagcauccucagaaa

SEQ ID NO: 1032681 - RNA, 19 nt, Artificial Sequence
  Description of Artificial Sequence: Synthetic oligonucleotide
  Antisense strand to SEQ ID NO: 1032680
uuucugaggaugcugagca

SEQ ID NO: 1032682 - RNA, 19 nt, Artificial Sequence
  Description of Artificial Sequence: Synthetic oligonucleotide
  Sense strand starting at position 440 of SEQ ID NO: 914814
aagccugugaggugggaau

SEQ ID NO: 1032683 - RNA, 19 nt, Artificial Sequence
  Description of Artificial Sequence: Synthetic oligonucleotide
  Antisense strand to SEQ ID NO: 1032682
auucccaccucacaggcuu

SEQ ID NO: 1032684 - RNA, 19 nt, Artificial Sequence
  Description of Artificial Sequence: Synthetic oligonucleotide
  Sense strand starting at position 511 of SEQ ID NO: 914814
gucacacagccauaaauga

SEQ ID NO: 1032685 - RNA, 19 nt, Artificial Sequence
  Description of Artificial Sequence: Synthetic oligonucleotide
  Antisense strand to SEQ ID NO: 1032684
ucauuuauggcugugugac

SEQ ID NO: 1032686 - RNA, 19 nt, Artificial Sequence
  Description of Artificial Sequence: Synthetic oligonucleotide
  Sense strand starting at position 1104 of SEQ ID NO: 914814
agaauuaacgcauggaaag

SEQ ID NO: 1032687 - RNA, 19 nt, Artificial Sequence
  Description of Artificial Sequence: Synthetic oligonucleotide
  Antisense strand to SEQ ID NO: 1032686
cuuuccaugcguuaauucu

SEQ ID NO: 1032688 - RNA, 19 nt, Artificial Sequence
  Description of Artificial Sequence: Synthetic oligonucleotide
  Sense strand starting at position 1105 of SEQ ID NO: 914814
gaauuaacgcauggaaagu

SEQ ID NO: 1032689 - RNA, 19 nt, Artificial Sequence
  Description of Artificial Sequence: Synthetic oligonucleotide
  Antisense strand to SEQ ID NO: 1032688
acuuuccaugcguuaauuc

SEQ ID NO: 1032690 - RNA, 19 nt, Artificial Sequence
  Description of Artificial Sequence: Synthetic oligonucleotide
  Sense strand starting at position 1152 of SEQ ID NO: 914814
acaaguaaauagucccauu

SEQ ID NO: 1032691 - RNA, 19 nt, Artificial Sequence
  Description of Artificial Sequence: Synthetic oligonucleotide
  Antisense strand to SEQ ID NO: 1032690
aaugggacuauuuacuugu

SEQ ID NO: 1032692 - RNA, 19 nt, Artificial Sequence
  Description of Artificial Sequence: Synthetic oligonucleotide
  Sense strand starting at position 1378 of SEQ ID NO: 914814
aagggacucucugcuuaug

SEQ ID NO: 1032693 - RNA, 19 nt, Artificial Sequence
  Description of Artificial Sequence: Synthetic oligonucleotide
  Antisense strand to SEQ ID NO: 1032692
cauaagcagagagucccuu

SEQ ID NO: 1032694 - RNA, 19 nt, Artificial Sequence
  Description of Artificial Sequence: Synthetic oligonucleotide
  Sense strand starting at position 1550 of SEQ ID NO: 914814
ccaggaguguaagcuuagu

SEQ ID NO: 1032695 - RNA, 19 nt, Artificial Sequence
  Description of Artificial Sequence: Synthetic oligonucleotide
  Antisense strand to SEQ ID NO: 1032694
acuaagcuuacacuccugg

SEQ ID NO: 1032696 - RNA, 19 nt, Artificial Sequence
  Description of Artificial Sequence: Synthetic oligonucleotide
  Sense strand starting at position 1572 of SEQ ID NO: 914814
gggucucgggucgggaaau

SEQ ID NO: 1032697 - RNA, 19 nt, Artificial Sequence
  Description of Artificial Sequence: Synthetic oligonucleotide
  Antisense strand to SEQ ID NO: 1032696
auuucccgacccgagaccc

SEQ ID NO: 1032698 - RNA, 19 nt, Artificial Sequence
  Description of Artificial Sequence: Synthetic oligonucleotide
  Sense strand starting at position 1584 of SEQ ID NO: 914814
gggaaaucaaagugcuucu

SEQ ID NO: 1032699 - RNA, 19 nt, Artificial Sequence
  Description of Artificial Sequence: Synthetic oligonucleotide
  Antisense strand to SEQ ID NO: 1032698
agaagcacuuugauuuccc

SEQ ID NO: 1032700 - RNA, 19 nt, Artificial Sequence
  Description of Artificial Sequence: Synthetic oligonucleotide
  Sense strand starting at position 1701 of SEQ ID NO: 914814
aagggucggagacgaaauu

SEQ ID NO: 1032701 - RNA, 19 nt, Artificial Sequence
  Description of Artificial Sequence: Synthetic oligonucleotide
  Antisense strand to SEQ ID NO: 1032700
aauuucgucuccgacccuu

SEQ ID NO: 1032702 - RNA, 19 nt, Artificial Sequence
  Description of Artificial Sequence: Synthetic oligonucleotide
  Sense strand starting at position 2126 of SEQ ID NO: 914814
gcaggugagaccugggaua

SEQ ID NO: 1032703 - RNA, 19 nt, Artificial Sequence
  Description of Artificial Sequence: Synthetic oligonucleotide
  Antisense strand to SEQ ID NO: 1032702
uaucccaggucucaccugc

SEQ ID NO: 1032704 - RNA, 19 nt, Artificial Sequence
  Description of Artificial Sequence: Synthetic oligonucleotide
  Sense strand starting at position 2223 of SEQ ID NO: 914814
uuguguguugaucgcauuu

SEQ ID NO: 1032705 - RNA, 19 nt, Artificial Sequence
  Description of Artificial Sequence: Synthetic oligonucleotide
  Antisense strand to SEQ ID NO: 1032704
aaaugcgaucaacacacaa

SEQ ID NO: 1032706 - RNA, 19 nt, Artificial Sequence
  Description of Artificial Sequence: Synthetic oligonucleotide
  Sense strand starting at position 2302 of SEQ ID NO: 914814
caguuaguagccugaauac

SEQ ID NO: 1032707 - RNA, 19 nt, Artificial Sequence
  Description of Artificial Sequence: Synthetic oligonucleotide
  Antisense strand to SEQ ID NO: 1032706
guauucaggcuacuaacug

SEQ ID NO: 1032708 - RNA, 19 nt, Artificial Sequence
  Description of Artificial Sequence: Synthetic oligonucleotide
  Sense strand starting at position 2329 of SEQ ID NO: 914814
gcccuugaacuuugguaua

SEQ ID NO: 1032709 - RNA, 19 nt, Artificial Sequence
  Description of Artificial Sequence: Synthetic oligonucleotide
  Antisense strand to SEQ ID NO: 1032708
uauaccaaaguucaagggc

SEQ ID NO: 1032710 - RNA, 19 nt, Artificial Sequence
  Description of Artificial Sequence: Synthetic oligonucleotide
  Sense strand starting at position 2341 of SEQ ID NO: 914814
ugguauaggcccuauguua

SEQ ID NO: 1032711 - RNA, 19 nt, Artificial Sequence
  Description of Artificial Sequence: Synthetic oligonucleotide
  Antisense strand to SEQ ID NO: 1032710
uaacauagggccuauacca

SEQ ID NO: 1032712 - RNA, 19 nt, Artificial Sequence
  Description of Artificial Sequence: Synthetic oligonucleotide
  Sense strand starting at position 2444 of SEQ ID NO: 914814
gcagucauuucggcuccaa

SEQ ID NO: 1032713 - RNA, 19 nt, Artificial Sequence
  Description of Artificial Sequence: Synthetic oligonucleotide
  Antisense strand to SEQ ID NO: 1032712
uuggagccgaaaugacugc

SEQ ID NO: 1032714 - RNA, 19 nt, Artificial Sequence
  Description of Artificial Sequence: Synthetic oligonucleotide
  Sense strand starting at position 2515 of SEQ ID NO: 914814
gauggauauccucgccuaa

SEQ ID NO: 1032715 - RNA, 19 nt, Artificial Sequence
  Description of Artificial Sequence: Synthetic oligonucleotide
  Antisense strand to SEQ ID NO: 1032714
uuaggcgaggauauccauc

SEQ ID NO: 1032716 - RNA, 19 nt, Artificial Sequence
  Description of Artificial Sequence: Synthetic oligonucleotide
  Sense strand starting at position 2517 of SEQ ID NO: 914814
uggauauccucgccuaauc

SEQ ID NO: 1032717 - RNA, 19 nt, Artificial Sequence
  Description of Artificial Sequence: Synthetic oligonucleotide
  Antisense strand to SEQ ID NO: 1032716
gauuaggcgaggauaucca

SEQ ID NO: 1032718 - RNA, 19 nt, Artificial Sequence
  Description of Artificial Sequence: Synthetic oligonucleotide
  Sense strand starting at position 2597 of SEQ ID NO: 914814
aaagguuauguccguuaaa

SEQ ID NO: 1032719 - RNA, 19 nt, Artificial Sequence
  Description of Artificial Sequence: Synthetic oligonucleotide
  Antisense strand to SEQ ID NO: 1032718
uuuaacggacauaaccuuu

SEQ ID NO: 1032720 - RNA, 19 nt, Artificial Sequence
  Description of Artificial Sequence: Synthetic oligonucleotide
  Sense strand starting at position 2642 of SEQ ID NO: 914814
gguuggaguguguauuugu

SEQ ID NO: 1032721 - RNA, 19 nt, Artificial Sequence
  Description of Artificial Sequence: Synthetic oligonucleotide
  Antisense strand to SEQ ID NO: 1032720
acaaauacacacuccaacc

SEQ ID NO: 1032722 - RNA, 19 nt, Artificial Sequence
  Description of Artificial Sequence: Synthetic oligonucleotide
  Sense strand starting at position 2651 of SEQ ID NO: 914814
guguauuugugugcaugag

SEQ ID NO: 1032723 - RNA, 19 nt, Artificial Sequence
  Description of Artificial Sequence: Synthetic oligonucleotide
  Antisense strand to SEQ ID NO: 1032722
cucaugcacacaaauacac

SEQ ID NO: 1032724 - RNA, 19 nt, Artificial Sequence
  Description of Artificial Sequence: Synthetic oligonucleotide
  Sense strand starting at position 2655 of SEQ ID NO: 914814
auuugugugcaugaguguu

SEQ ID NO: 1032725 - RNA, 19 nt, Artificial Sequence
  Description of Artificial Sequence: Synthetic oligonucleotide
  Antisense strand to SEQ ID NO: 1032724
aacacucaugcacacaaau

SEQ ID NO: 1032726 - RNA, 19 nt, Artificial Sequence
  Description of Artificial Sequence: Synthetic oligonucleotide
  Sense strand starting at position 2740 of SEQ ID NO: 914814
cucuauauuggacgauauu

SEQ ID NO: 1032727 - RNA, 19 nt, Artificial Sequence
  Description of Artificial Sequence: Synthetic oligonucleotide
  Antisense strand to SEQ ID NO: 1032726
aauaucguccaauauagag

SEQ ID NO: 1032728 - RNA, 19 nt, Artificial Sequence
  Description of Artificial Sequence: Synthetic oligonucleotide
  Sense strand starting at position 2898 of SEQ ID NO: 914814
ggaggaaacuuacauacau

SEQ ID NO: 1032729 - RNA, 19 nt, Artificial Sequence
  Description of Artificial Sequence: Synthetic oligonucleotide
  Antisense strand to SEQ ID NO: 1032728
auguauguaaguuuccucc

SEQ ID NO: 1032730 - RNA, 19 nt, Artificial Sequence
  Description of Artificial Sequence: Synthetic oligonucleotide
  Sense strand starting at position 2909 of SEQ ID NO: 914814
acauacauguuacuaagua

SEQ ID NO: 1032731 - RNA, 19 nt, Artificial Sequence
  Description of Artificial Sequence: Synthetic oligonucleotide
  Antisense strand to SEQ ID NO: 1032730
uacuuaguaacauguaugu

SEQ ID NO: 1032732 - RNA, 19 nt, Artificial Sequence
  Description of Artificial Sequence: Synthetic oligonucleotide
  Sense strand starting at position 2955 of SEQ ID NO: 914814
cuuguauguuucccacuau

SEQ ID NO: 1032733 - RNA, 19 nt, Artificial Sequence
  Description of Artificial Sequence: Synthetic oligonucleotide
  Antisense strand to SEQ ID NO: 1032732
auagugggaaacauacaag

SEQ ID NO: 1032734 - RNA, 19 nt, Artificial Sequence
  Description of Artificial Sequence: Synthetic oligonucleotide
  Sense strand starting at position 2961 of SEQ ID NO: 914814
uguuucccacuaugacauu

SEQ ID NO: 1032735 - RNA, 19 nt, Artificial Sequence
  Description of Artificial Sequence: Synthetic oligonucleotide
  Antisense strand to SEQ ID NO: 1032734
aaugucauagugggaaaca

SEQ ID NO: 1032736 - RNA, 19 nt, Artificial Sequence
  Description of Artificial Sequence: Synthetic oligonucleotide
  Sense strand starting at position 3251 of SEQ ID NO: 914814
gagggauguugauaggaag

SEQ ID NO: 1032737 - RNA, 19 nt, Artificial Sequence
  Description of Artificial Sequence: Synthetic oligonucleotide
  Antisense strand to SEQ ID NO: 1032736
cuuccuaucaacaucccuc

SEQ ID NO: 1032738 - RNA, 19 nt, Artificial Sequence
  Description of Artificial Sequence: Synthetic oligonucleotide
  Sense strand starting at position 3399 of SEQ ID NO: 914814
aggcaauguagaugccaaa

SEQ ID NO: 1032739 - RNA, 19 nt, Artificial Sequence
  Description of Artificial Sequence: Synthetic oligonucleotide
  Antisense strand to SEQ ID NO: 1032738
uuuggcaucuacauugccu

SEQ ID NO: 1032740 - RNA, 19 nt, Artificial Sequence
  Description of Artificial Sequence: Synthetic oligonucleotide
  Sense strand starting at position 3452 of SEQ ID NO: 914814
agggauaauugagagaguu

SEQ ID NO: 1032741 - RNA, 19 nt, Artificial Sequence
  Description of Artificial Sequence: Synthetic oligonucleotide
  Antisense strand to SEQ ID NO: 1032740
aacucucucaauuaucccu

SEQ ID NO: 1032742 - RNA, 19 nt, Artificial Sequence
  Description of Artificial Sequence: Synthetic oligonucleotide
  Sense strand starting at position 3526 of SEQ ID NO: 914814
gguuuaaguaggcaggaaa

SEQ ID NO: 1032743 - RNA, 19 nt, Artificial Sequence
  Description of Artificial Sequence: Synthetic oligonucleotide
  Antisense strand to SEQ ID NO: 1032742
uuuccugccuacuuaaacc

SEQ ID NO: 1032744 - RNA, 19 nt, Artificial Sequence
  Description of Artificial Sequence: Synthetic oligonucleotide
  Sense strand starting at position 3529 of SEQ ID NO: 914814
uuaaguaggcaggaaaguu

SEQ ID NO: 1032745 - RNA, 19 nt, Artificial Sequence
  Description of Artificial Sequence: Synthetic oligonucleotide
  Antisense strand to SEQ ID NO: 1032744
aacuuuccugccuacuuaa

SEQ ID NO: 1032746 - RNA, 19 nt, Artificial Sequence
  Description of Artificial Sequence: Synthetic oligonucleotide
  Sense strand starting at position 3698 of SEQ ID NO: 914814
ggccuugaagagugagcaa

SEQ ID NO: 1032747 - RNA, 19 nt, Artificial Sequence
  Description of Artificial Sequence: Synthetic oligonucleotide
  Antisense strand to SEQ ID NO: 1032746
uugcucacucuucaaggcc

SEQ ID NO: 1032748 - RNA, 19 nt, Artificial Sequence
  Description of Artificial Sequence: Synthetic oligonucleotide
  Sense strand starting at position 3717 of SEQ ID NO: 914814
aggagacgugauggaagua

SEQ ID NO: 1032749 - RNA, 19 nt, Artificial Sequence
  Description of Artificial Sequence: Synthetic oligonucleotide
  Antisense strand to SEQ ID NO: 1032748
uacuuccaucacgucuccu

SEQ ID NO: 1032750 - RNA, 19 nt, Artificial Sequence
  Description of Artificial Sequence: Synthetic oligonucleotide
  Sense strand starting at position 3893 of SEQ ID NO: 914814
aguagugugcgagagaaga

SEQ ID NO: 1032751 - RNA, 19 nt, Artificial Sequence
  Description of Artificial Sequence: Synthetic oligonucleotide
  Antisense strand to SEQ ID NO: 1032750
ucuucucucgcacacuacu

SEQ ID NO: 1032752 - RNA, 19 nt, Artificial Sequence
  Description of Artificial Sequence: Synthetic oligonucleotide
  Sense strand starting at position 3954 of SEQ ID NO: 914814
ugaaguugcccucauguga

SEQ ID NO: 1032753 - RNA, 19 nt, Artificial Sequence
  Description of Artificial Sequence: Synthetic oligonucleotide
  Antisense strand to SEQ ID NO: 1032752
ucacaugagggcaacuuca

SEQ ID NO: 1032754 - RNA, 19 nt, Artificial Sequence
  Description of Artificial Sequence: Synthetic oligonucleotide
  Sense strand starting at position 21 of SEQ ID NO: 914815
ugggcacucaccugugaga

SEQ ID NO: 1032755 - RNA, 19 nt, Artificial Sequence
  Description of Artificial Sequence: Synthetic oligonucleotide
  Antisense strand to SEQ ID NO: 1032754
ucucacaggugagugccca

SEQ ID NO: 1032756 - RNA, 19 nt, Artificial Sequence
  Description of Artificial Sequence: Synthetic oligonucleotide
  Sense strand starting at position 23 of SEQ ID NO: 914815
ggcacucaccugugagacu

SEQ ID NO: 1032757 - RNA, 19 nt, Artificial Sequence
  Description of Artificial Sequence: Synthetic oligonucleotide
  Antisense strand to SEQ ID NO: 1032756
agucucacaggugagugcc

SEQ ID NO: 1032758 - RNA, 19 nt, Artificial Sequence
  Description of Artificial Sequence: Synthetic oligonucleotide
  Sense strand starting at position 83 of SEQ ID NO: 914815
gagggagauucagagaugu

SEQ ID NO: 1032759 - RNA, 19 nt, Artificial Sequence
  Description of Artificial Sequence: Synthetic oligonucleotide
  Antisense strand to SEQ ID NO: 1032758
acaucucugaaucucccuc

SEQ ID NO: 1032760 - RNA, 19 nt, Artificial Sequence
  Description of Artificial Sequence: Synthetic oligonucleotide
  Sense strand starting at position 224 of SEQ ID NO: 914815
ccuguccucucacugagua

SEQ ID NO: 1032761 - RNA, 19 nt, Artificial Sequence
  Description of Artificial Sequence: Synthetic oligonucleotide
  Antisense strand to SEQ ID NO: 1032760
uacucagugagaggacagg

SEQ ID NO: 1032762 - RNA, 19 nt, Artificial Sequence
  Description of Artificial Sequence: Synthetic oligonucleotide
  Sense strand starting at position 225 of SEQ ID NO: 914815
cuguccucucacugaguaa

SEQ ID NO: 1032763 - RNA, 19 nt, Artificial Sequence
  Description of Artificial Sequence: Synthetic oligonucleotide
  Antisense strand to SEQ ID NO: 1032762
uuacucagugagaggacag

SEQ ID NO: 1032764 - RNA, 19 nt, Artificial Sequence
  Description of Artificial Sequence: Synthetic oligonucleotide
  Sense strand starting at position 275 of SEQ ID NO: 914815
gguuauagggcuuagacuu

SEQ ID NO: 1032765 - RNA, 19 nt, Artificial Sequence
  Description of Artificial Sequence: Synthetic oligonucleotide
  Antisense strand to SEQ ID NO: 1032764
aagucuaagcccuauaacc

SEQ ID NO: 1032766 - RNA, 19 nt, Artificial Sequence
  Description of Artificial Sequence: Synthetic oligonucleotide
  Sense strand starting at position 323 of SEQ ID NO: 914815
aguugaggauaccuauuga

SEQ ID NO: 1032767 - RNA, 19 nt, Artificial Sequence
  Description of Artificial Sequence: Synthetic oligonucleotide
  Antisense strand to SEQ ID NO: 1032766
ucaauagguauccucaacu

SEQ ID NO: 1032768 - RNA, 19 nt, Artificial Sequence
  Description of Artificial Sequence: Synthetic oligonucleotide
  Sense strand starting at position 336 of SEQ ID NO: 914815
uauugauagcuacauggca

SEQ ID NO: 1032769 - RNA, 19 nt, Artificial Sequence
  Description of Artificial Sequence: Synthetic oligonucleotide
  Antisense strand to SEQ ID NO: 1032768
ugccauguagcuaucaaua

SEQ ID NO: 1032770 - RNA, 19 nt, Artificial Sequence
  Description of Artificial Sequence: Synthetic oligonucleotide
  Sense strand starting at position 360 of SEQ ID NO: 914815
gaggcagugcuggauguuu

SEQ ID NO: 1032771 - RNA, 19 nt, Artificial Sequence
  Description of Artificial Sequence: Synthetic oligonucleotide
  Antisense strand to SEQ ID NO: 1032770
aaacauccagcacugccuc

SEQ ID NO: 1032772 - RNA, 19 nt, Artificial Sequence
  Description of Artificial Sequence: Synthetic oligonucleotide
  Sense strand starting at position 369 of SEQ ID NO: 914815
cuggauguuucaucaggag

SEQ ID NO: 1032773 - RNA, 19 nt, Artificial Sequence
  Description of Artificial Sequence: Synthetic oligonucleotide
  Antisense strand to SEQ ID NO: 1032772
cuccugaugaaacauccag

SEQ ID NO: 1032774 - RNA, 19 nt, Artificial Sequence
  Description of Artificial Sequence: Synthetic oligonucleotide
  Sense strand starting at position 375 of SEQ ID NO: 914815
guuucaucaggagggaaug

SEQ ID NO: 1032775 - RNA, 19 nt, Artificial Sequence
  Description of Artificial Sequence: Synthetic oligonucleotide
  Antisense strand to SEQ ID NO: 1032774
cauucccuccugaugaaac

SEQ ID NO: 1032776 - RNA, 19 nt, Artificial Sequence
  Description of Artificial Sequence: Synthetic oligonucleotide
  Sense strand starting at position 447 of SEQ ID NO: 914815
gaaggaagcugugucucuu

SEQ ID NO: 1032777 - RNA, 19 nt, Artificial Sequence
  Description of Artificial Sequence: Synthetic oligonucleotide
  Antisense strand to SEQ ID NO: 1032776
aagagacacagcuuccuuc

SEQ ID NO: 1032778 - RNA, 19 nt, Artificial Sequence
  Description of Artificial Sequence: Synthetic oligonucleotide
  Sense strand starting at position 750 of SEQ ID NO: 914815
acucauguguucuuaucau

SEQ ID NO: 1032779 - RNA, 19 nt, Artificial Sequence
  Description of Artificial Sequence: Synthetic oligonucleotide
  Antisense strand to SEQ ID NO: 1032778
augauaagaacacaugagu

SEQ ID NO: 1032780 - RNA, 19 nt, Artificial Sequence
  Description of Artificial Sequence: Synthetic oligonucleotide
  Sense strand starting at position 848 of SEQ ID NO: 914815
uaaugugucuuggagauuu

SEQ ID NO: 1032781 - RNA, 19 nt, Artificial Sequence
  Description of Artificial Sequence: Synthetic oligonucleotide
  Antisense strand to SEQ ID NO: 1032780
aaaucuccaagacacauua

SEQ ID NO: 1032782 - RNA, 19 nt, Artificial Sequence
  Description of Artificial Sequence: Synthetic oligonucleotide
  Sense strand starting at position 879 of SEQ ID NO: 914815
augauagcguuuccucauu

SEQ ID NO: 1032783 - RNA, 19 nt, Artificial Sequence
  Description of Artificial Sequence: Synthetic oligonucleotide
  Antisense strand to SEQ ID NO: 1032782
aaugaggaaacgcuaucau

SEQ ID NO: 1032784 - RNA, 19 nt, Artificial Sequence
  Description of Artificial Sequence: Synthetic oligonucleotide
  Sense strand starting at position 955 of SEQ ID NO: 914815
uugggugaucucggcucau

SEQ ID NO: 1032785 - RNA, 19 nt, Artificial Sequence
  Description of Artificial Sequence: Synthetic oligonucleotide
  Antisense strand to SEQ ID NO: 1032784
augagccgagaucacccaa

SEQ ID NO: 1032786 - RNA, 19 nt, Artificial Sequence
  Description of Artificial Sequence: Synthetic oligonucleotide
  Sense strand starting at position 1533 of SEQ ID NO: 914815
uauuucguauaugaggaaa

SEQ ID NO: 1032787 - RNA, 19 nt, Artificial Sequence
  Description of Artificial Sequence: Synthetic oligonucleotide
  Antisense strand to SEQ ID NO: 1032786
uuuccucauauacgaaaua

SEQ ID NO: 1032788 - RNA, 19 nt, Artificial Sequence
  Description of Artificial Sequence: Synthetic oligonucleotide
  Sense strand starting at position 1647 of SEQ ID NO: 914815
uucuuuaacccagguaguu

SEQ ID NO: 1032789 - RNA, 19 nt, Artificial Sequence
  Description of Artificial Sequence: Synthetic oligonucleotide
  Antisense strand to SEQ ID NO: 1032788
aacuaccuggguuaaagaa

SEQ ID NO: 1032790 - RNA, 19 nt, Artificial Sequence
  Description of Artificial Sequence: Synthetic oligonucleotide
  Sense strand starting at position 1968 of SEQ ID NO: 914815
agugucaucuguuccuuaa

SEQ ID NO: 1032791 - RNA, 19 nt, Artificial Sequence
  Description of Artificial Sequence: Synthetic oligonucleotide
  Antisense strand to SEQ ID NO: 1032790
uuaaggaacagaugacacu

SEQ ID NO: 1032792 - RNA, 19 nt, Artificial Sequence
  Description of Artificial Sequence: Synthetic oligonucleotide
  Sense strand starting at position 1970 of SEQ ID NO: 914815
ugucaucuguuccuuaaau

SEQ ID NO: 1032793 - RNA, 19 nt, Artificial Sequence
  Description of Artificial Sequence: Synthetic oligonucleotide
  Antisense strand to SEQ ID NO: 1032792
auuuaaggaacagaugaca

SEQ ID NO: 1032794 - RNA, 19 nt, Artificial Sequence
  Description of Artificial Sequence: Synthetic oligonucleotide
  Sense strand starting at position 1971 of SEQ ID NO: 914815
gucaucuguuccuuaaaug

SEQ ID NO: 1032795 - RNA, 19 nt, Artificial Sequence
  Description of Artificial Sequence: Synthetic oligonucleotide
  Antisense strand to SEQ ID NO: 1032794
cauuuaaggaacagaugac

SEQ ID NO: 1032796 - RNA, 19 nt, Artificial Sequence
  Description of Artificial Sequence: Synthetic oligonucleotide
  Sense strand starting at position 2452 of SEQ ID NO: 914815
gccugaguaucuuuacaag

SEQ ID NO: 1032797 - RNA, 19 nt, Artificial Sequence
  Description of Artificial Sequence: Synthetic oligonucleotide
  Antisense strand to SEQ ID NO: 1032796
cuuguaaagauacucaggc

SEQ ID NO: 1032798 - RNA, 19 nt, Artificial Sequence
  Description of Artificial Sequence: Synthetic oligonucleotide
  Sense strand starting at position 2490 of SEQ ID NO: 914815
gggaaauguuaggucuccu

SEQ ID NO: 1032799 - RNA, 19 nt, Artificial Sequence
  Description of Artificial Sequence: Synthetic oligonucleotide
  Antisense strand to SEQ ID NO: 1032798
aggagaccuaacauuuccc

SEQ ID NO: 1032800 - RNA, 19 nt, Artificial Sequence
  Description of Artificial Sequence: Synthetic oligonucleotide
  Sense strand starting at position 2535 of SEQ ID NO: 914815
cucccuaaucuggguagaa

SEQ ID NO: 1032801 - RNA, 19 nt, Artificial Sequence
  Description of Artificial Sequence: Synthetic oligonucleotide
  Antisense strand to SEQ ID NO: 1032800
uucuacccagauuagggag

SEQ ID NO: 1032802 - RNA, 19 nt, Artificial Sequence
  Description of Artificial Sequence: Synthetic oligonucleotide
  Sense strand starting at position 2536 of SEQ ID NO: 914815
ucccuaaucuggguagaag

SEQ ID NO: 1032803 - RNA, 19 nt, Artificial Sequence
  Description of Artificial Sequence: Synthetic oligonucleotide
  Antisense strand to SEQ ID NO: 1032802
cuucuacccagauuaggga

SEQ ID NO: 1032804 - RNA, 19 nt, Artificial Sequence
  Description of Artificial Sequence: Synthetic oligonucleotide
  Sense strand starting at position 2981 of SEQ ID NO: 914815
ucucaucaucuguagcaca

SEQ ID NO: 1032805 - RNA, 19 nt, Artificial Sequence
  Description of Artificial Sequence: Synthetic oligonucleotide
  Antisense strand to SEQ ID NO: 1032804
ugugcuacagaugaugaga

SEQ ID NO: 1032806 - RNA, 19 nt, Artificial Sequence
  Description of Artificial Sequence: Synthetic oligonucleotide
  Sense strand starting at position 3043 of SEQ ID NO: 914815
cuuguaaggacuuguuggu

SEQ ID NO: 1032807 - RNA, 19 nt, Artificial Sequence
  Description of Artificial Sequence: Synthetic oligonucleotide
  Antisense strand to SEQ ID NO: 1032806
accaacaaguccuuacaag

SEQ ID NO: 1032808 - RNA, 19 nt, Artificial Sequence
  Description of Artificial Sequence: Synthetic oligonucleotide
  Sense strand starting at position 3264 of SEQ ID NO: 914815
gggaaauuacugggcugca

SEQ ID NO: 1032809 - RNA, 19 nt, Artificial Sequence
  Description of Artificial Sequence: Synthetic oligonucleotide
  Antisense strand to SEQ ID NO: 1032808
ugcagcccaguaauuuccc

SEQ ID NO: 1032810 - RNA, 19 nt, Artificial Sequence
  Description of Artificial Sequence: Synthetic oligonucleotide
  Sense strand starting at position 3290 of SEQ ID NO: 914815
uugggaucuguggagcuaa

SEQ ID NO: 1032811 - RNA, 19 nt, Artificial Sequence
  Description of Artificial Sequence: Synthetic oligonucleotide
  Antisense strand to SEQ ID NO: 1032810
uuagcuccacagaucccaa

SEQ ID NO: 1032812 - RNA, 19 nt, Artificial Sequence
  Description of Artificial Sequence: Synthetic oligonucleotide
  Sense strand starting at position 3302 of SEQ ID NO: 914815
gagcuaacaugggauaaga

SEQ ID NO: 1032813 - RNA, 19 nt, Artificial Sequence
  Description of Artificial Sequence: Synthetic oligonucleotide
  Antisense strand to SEQ ID NO: 1032812
ucuuaucccauguuagcuc

SEQ ID NO: 1032814 - RNA, 19 nt, Artificial Sequence
  Description of Artificial Sequence: Synthetic oligonucleotide
  Sense strand starting at position 3312 of SEQ ID NO: 914815
gggauaagaguuuggccaa

SEQ ID NO: 1032815 - RNA, 19 nt, Artificial Sequence
  Description of Artificial Sequence: Synthetic oligonucleotide
  Antisense strand to SEQ ID NO: 1032814
uuggccaaacucuuauccc

SEQ ID NO: 1032816 - RNA, 19 nt, Artificial Sequence
  Description of Artificial Sequence: Synthetic oligonucleotide
  Sense strand starting at position 3342 of SEQ ID NO: 914815
cugggugugaccugaaugu

SEQ ID NO: 1032817 - RNA, 19 nt, Artificial Sequence
  Description of Artificial Sequence: Synthetic oligonucleotide
  Antisense strand to SEQ ID NO: 1032816
acauucaggucacacccag

SEQ ID NO: 1032818 - RNA, 19 nt, Artificial Sequence
  Description of Artificial Sequence: Synthetic oligonucleotide
  Sense strand starting at position 3349 of SEQ ID NO: 914815
ugaccugaaugucuccuua

SEQ ID NO: 1032819 - RNA, 19 nt, Artificial Sequence
  Description of Artificial Sequence: Synthetic oligonucleotide
  Antisense strand to SEQ ID NO: 1032818
uaaggagacauucagguca

SEQ ID NO: 1032820 - RNA, 19 nt, Artificial Sequence
  Description of Artificial Sequence: Synthetic oligonucleotide
  Sense strand starting at position 3387 of SEQ ID NO: 914815
ggcacaucuguuggaaaug

SEQ ID NO: 1032821 - RNA, 19 nt, Artificial Sequence
  Description of Artificial Sequence: Synthetic oligonucleotide
  Antisense strand to SEQ ID NO: 1032820
cauuuccaacagaugugcc

SEQ ID NO: 1032822 - RNA, 19 nt, Artificial Sequence
  Description of Artificial Sequence: Synthetic oligonucleotide
  Sense strand starting at position 3494 of SEQ ID NO: 914815
ggcugaggcugugugagaa

SEQ ID NO: 1032823 - RNA, 19 nt, Artificial Sequence
  Description of Artificial Sequence: Synthetic oligonucleotide
  Antisense strand to SEQ ID NO: 1032822
uucucacacagccucagcc

SEQ ID NO: 1032824 - RNA, 19 nt, Artificial Sequence
  Description of Artificial Sequence: Synthetic oligonucleotide
  Sense strand starting at position 3508 of SEQ ID NO: 914815
gagaauccugcagaauguu

SEQ ID NO: 1032825 - RNA, 19 nt, Artificial Sequence
  Description of Artificial Sequence: Synthetic oligonucleotide
  Antisense strand to SEQ ID NO: 1032824
aacauucugcaggauucuc

SEQ ID NO: 1032826 - RNA, 19 nt, Artificial Sequence
  Description of Artificial Sequence: Synthetic oligonucleotide
  Sense strand starting at position 3516 of SEQ ID NO: 914815
ugcagaauguucccaguuu

SEQ ID NO: 1032827 - RNA, 19 nt, Artificial Sequence
  Description of Artificial Sequence: Synthetic oligonucleotide
  Antisense strand to SEQ ID NO: 1032826
aaacugggaacauucugca

SEQ ID NO: 1032828 - RNA, 19 nt, Artificial Sequence
  Description of Artificial Sequence: Synthetic oligonucleotide
  Sense strand starting at position 3528 of SEQ ID NO: 914815
ccaguuuggcuuuacaaau

SEQ ID NO: 1032829 - RNA, 19 nt, Artificial Sequence
  Description of Artificial Sequence: Synthetic oligonucleotide
  Antisense strand to SEQ ID NO: 1032828
auuuguaaagccaaacugg

SEQ ID NO: 1032830 - RNA, 19 nt, Artificial Sequence
  Description of Artificial Sequence: Synthetic oligonucleotide
  Sense strand starting at position 3775 of SEQ ID NO: 914815
cugucugccgugggauaaa

SEQ ID NO: 1032831 - RNA, 19 nt, Artificial Sequence
  Description of Artificial Sequence: Synthetic oligonucleotide
  Antisense strand to SEQ ID NO: 1032830
uuuaucccacggcagacag

SEQ ID NO: 1032832 - RNA, 19 nt, Artificial Sequence
  Description of Artificial Sequence: Synthetic oligonucleotide
  Sense strand starting at position 3778 of SEQ ID NO: 914815
ucugccgugggauaaauau

SEQ ID NO: 1032833 - RNA, 19 nt, Artificial Sequence
  Description of Artificial Sequence: Synthetic oligonucleotide
  Antisense strand to SEQ ID NO: 1032832
auauuuaucccacggcaga

SEQ ID NO: 1032834 - RNA, 19 nt, Artificial Sequence
  Description of Artificial Sequence: Synthetic oligonucleotide
  Sense strand starting at position 104 of SEQ ID NO: 914816
cccucugcacccugaaaga

SEQ ID NO: 1032835 - RNA, 19 nt, Artificial Sequence
  Description of Artificial Sequence: Synthetic oligonucleotide
  Antisense strand to SEQ ID NO: 1032834
ucuuucagggugcagaggg

SEQ ID NO: 1032836 - RNA, 19 nt, Artificial Sequence
  Description of Artificial Sequence: Synthetic oligonucleotide
  Sense strand starting at position 186 of SEQ ID NO: 914816
cugcguguugcugcaguau

SEQ ID NO: 1032837 - RNA, 19 nt, Artificial Sequence
  Description of Artificial Sequence: Synthetic oligonucleotide
  Antisense strand to SEQ ID NO: 1032836
auacugcagcaacacgcag

SEQ ID NO: 1032838 - RNA, 19 nt, Artificial Sequence
  Description of Artificial Sequence: Synthetic oligonucleotide
  Sense strand starting at position 189 of SEQ ID NO: 914816
cguguugcugcaguauaaa

SEQ ID NO: 1032839 - RNA, 19 nt, Artificial Sequence
  Description of Artificial Sequence: Synthetic oligonucleotide
  Antisense strand to SEQ ID NO: 1032838
uuuauacugcagcaacacg

SEQ ID NO: 1032840 - RNA, 19 nt, Artificial Sequence
  Description of Artificial Sequence: Synthetic oligonucleotide
  Sense strand starting at position 215 of SEQ ID NO: 914816
uccuuuauucugggcugaa

SEQ ID NO: 1032841 - RNA, 19 nt, Artificial Sequence
  Description of Artificial Sequence: Synthetic oligonucleotide
  Antisense strand to SEQ ID NO: 1032840
uucagcccagaauaaagga

SEQ ID NO: 1032842 - RNA, 19 nt, Artificial Sequence
  Description of Artificial Sequence: Synthetic oligonucleotide
  Sense strand starting at position 216 of SEQ ID NO: 914816
ccuuuauucugggcugaaa

SEQ ID NO: 1032843 - RNA, 19 nt, Artificial Sequence
  Description of Artificial Sequence: Synthetic oligonucleotide
  Antisense strand to SEQ ID NO: 1032842
uuucagcccagaauaaagg

SEQ ID NO: 1032844 - RNA, 19 nt, Artificial Sequence
  Description of Artificial Sequence: Synthetic oligonucleotide
  Sense strand starting at position 218 of SEQ ID NO: 914816
uuuauucugggcugaaacu

SEQ ID NO: 1032845 - RNA, 19 nt, Artificial Sequence
  Description of Artificial Sequence: Synthetic oligonucleotide
  Antisense strand to SEQ ID NO: 1032844
aguuucagcccagaauaaa

SEQ ID NO: 1032846 - RNA, 19 nt, Artificial Sequence
  Description of Artificial Sequence: Synthetic oligonucleotide
  Sense strand starting at position 219 of SEQ ID NO: 914816
uuauucugggcugaaacuu

SEQ ID NO: 1032847 - RNA, 19 nt, Artificial Sequence
  Description of Artificial Sequence: Synthetic oligonucleotide
  Antisense strand to SEQ ID NO: 1032846
aaguuucagcccagaauaa

SEQ ID NO: 1032848 - RNA, 19 nt, Artificial Sequence
  Description of Artificial Sequence: Synthetic oligonucleotide
  Sense strand starting at position 336 of SEQ ID NO: 914816
uugugcuuucagggacagu

SEQ ID NO: 1032849 - RNA, 19 nt, Artificial Sequence
  Description of Artificial Sequence: Synthetic oligonucleotide
  Antisense strand to SEQ ID NO: 1032848
acugucccugaaagcacaa

SEQ ID NO: 1032850 - RNA, 19 nt, Artificial Sequence
  Description of Artificial Sequence: Synthetic oligonucleotide
  Sense strand starting at position 353 of SEQ ID NO: 914816
gucccauagcaggaacaua

SEQ ID NO: 1032851 - RNA, 19 nt, Artificial Sequence
  Description of Artificial Sequence: Synthetic oligonucleotide
  Antisense strand to SEQ ID NO: 1032850
uauguuccugcuaugggac

SEQ ID NO: 1032852 - RNA, 19 nt, Artificial Sequence
  Description of Artificial Sequence: Synthetic oligonucleotide
  Sense strand starting at position 522 of SEQ ID NO: 914816
guguucccaccugacaaau

SEQ ID NO: 1032853 - RNA, 19 nt, Artificial Sequence
  Description of Artificial Sequence: Synthetic oligonucleotide
  Antisense strand to SEQ ID NO: 1032852
auuugucaggugggaacac

SEQ ID NO: 1032854 - RNA, 19 nt, Artificial Sequence
  Description of Artificial Sequence: Synthetic oligonucleotide
  Sense strand starting at position 563 of SEQ ID NO: 914816
accaacaugucaguuaaca

SEQ ID NO: 1032855 - RNA, 19 nt, Artificial Sequence
  Description of Artificial Sequence: Synthetic oligonucleotide
  Antisense strand to SEQ ID NO: 1032854
uguuaacugacauguuggu

SEQ ID NO: 1032856 - RNA, 19 nt, Artificial Sequence
  Description of Artificial Sequence: Synthetic oligonucleotide
  Sense strand starting at position 660 of SEQ ID NO: 914816
cauuccauuccggaaaguu

SEQ ID NO: 1032857 - RNA, 19 nt, Artificial Sequence
  Description of Artificial Sequence: Synthetic oligonucleotide
  Antisense strand to SEQ ID NO: 1032856
aacuuuccggaauggaaug

SEQ ID NO: 1032858 - RNA, 19 nt, Artificial Sequence
  Description of Artificial Sequence: Synthetic oligonucleotide
  Sense strand starting at position 668 of SEQ ID NO: 914816
uccggaaaguuuccugaag

SEQ ID NO: 1032859 - RNA, 19 nt, Artificial Sequence
  Description of Artificial Sequence: Synthetic oligonucleotide
  Antisense strand to SEQ ID NO: 1032858
cuucaggaaacuuuccgga

SEQ ID NO: 1032860 - RNA, 19 nt, Artificial Sequence
  Description of Artificial Sequence: Synthetic oligonucleotide
  Sense strand starting at position 1314 of SEQ ID NO: 914816
cgaagcuggccucaucaau

SEQ ID NO: 1032861 - RNA, 19 nt, Artificial Sequence
  Description of Artificial Sequence: Synthetic oligonucleotide
  Antisense strand to SEQ ID NO: 1032860
auugaugaggccagcuucg

SEQ ID NO: 1032862 - RNA, 19 nt, Artificial Sequence
  Description of Artificial Sequence: Synthetic oligonucleotide
  Sense strand starting at position 1961 of SEQ ID NO: 914816
cgaucacacuugcuaugaa

SEQ ID NO: 1032863 - RNA, 19 nt, Artificial Sequence
  Description of Artificial Sequence: Synthetic oligonucleotide
  Antisense strand to SEQ ID NO: 1032862
uucauagcaagugugaucg

SEQ ID NO: 1032864 - RNA, 19 nt, Artificial Sequence
  Description of Artificial Sequence: Synthetic oligonucleotide
  Sense strand starting at position 1964 of SEQ ID NO: 914816
ucacacuugcuaugaaagu

SEQ ID NO: 1032865 - RNA, 19 nt, Artificial Sequence
  Description of Artificial Sequence: Synthetic oligonucleotide
  Antisense strand to SEQ ID NO: 1032864
acuuucauagcaaguguga

SEQ ID NO: 1032866 - RNA, 19 nt, Artificial Sequence
  Description of Artificial Sequence: Synthetic oligonucleotide
  Sense strand starting at position 1973 of SEQ ID NO: 914816
cuaugaaaguggccacaua

SEQ ID NO: 1032867 - RNA, 19 nt, Artificial Sequence
  Description of Artificial Sequence: Synthetic oligonucleotide
  Antisense strand to SEQ ID NO: 1032866
uauguggccacuuucauag

SEQ ID NO: 1032868 - RNA, 19 nt, Artificial Sequence
  Description of Artificial Sequence: Synthetic oligonucleotide
  Sense strand starting at position 2498 of SEQ ID NO: 914816
gggaaaugguagcuucuaa

SEQ ID NO: 1032869 - RNA, 19 nt, Artificial Sequence
  Description of Artificial Sequence: Synthetic oligonucleotide
  Antisense strand to SEQ ID NO: 1032868
uuagaagcuaccauuuccc

SEQ ID NO: 1032870 - RNA, 19 nt, Artificial Sequence
  Description of Artificial Sequence: Synthetic oligonucleotide
  Sense strand starting at position 2613 of SEQ ID NO: 914816
aaagcaguucccgagagga

SEQ ID NO: 1032871 - RNA, 19 nt, Artificial Sequence
  Description of Artificial Sequence: Synthetic oligonucleotide
  Antisense strand to SEQ ID NO: 1032870
uccucucgggaacugcuuu

SEQ ID NO: 1032872 - RNA, 19 nt, Artificial Sequence
  Description of Artificial Sequence: Synthetic oligonucleotide
  Sense strand starting at position 2827 of SEQ ID NO: 914816
cucucaaagucgcuaagau

SEQ ID NO: 1032873 - RNA, 19 nt, Artificial Sequence
  Description of Artificial Sequence: Synthetic oligonucleotide
  Antisense strand to SEQ ID NO: 1032872
aucuuagcgacuuugagag

SEQ ID NO: 1032874 - RNA, 19 nt, Artificial Sequence
  Description of Artificial Sequence: Synthetic oligonucleotide
  Sense strand starting at position 2828 of SEQ ID NO: 914816
ucucaaagucgcuaagauu

SEQ ID NO: 1032875 - RNA, 19 nt, Artificial Sequence
  Description of Artificial Sequence: Synthetic oligonucleotide
  Antisense strand to SEQ ID NO: 1032874
aaucuuagcgacuuugaga

SEQ ID NO: 1032876 - RNA, 19 nt, Artificial Sequence
  Description of Artificial Sequence: Synthetic oligonucleotide
  Sense strand starting at position 2849 of SEQ ID NO: 914816
gagugagucauuggcucag

SEQ ID NO: 1032877 - RNA, 19 nt, Artificial Sequence
  Description of Artificial Sequence: Synthetic oligonucleotide
  Antisense strand to SEQ ID NO: 1032876
cugagccaaugacucacuc

SEQ ID NO: 1032878 - RNA, 19 nt, Artificial Sequence
  Description of Artificial Sequence: Synthetic oligonucleotide
  Sense strand starting at position 2929 of SEQ ID NO: 914816
gucacugcugcucaucauu

SEQ ID NO: 1032879 - RNA, 19 nt, Artificial Sequence
  Description of Artificial Sequence: Synthetic oligonucleotide
  Antisense strand to SEQ ID NO: 1032878
aaugaugagcagcagugac

SEQ ID NO: 1032880 - RNA, 19 nt, Artificial Sequence
  Description of Artificial Sequence: Synthetic oligonucleotide
  Sense strand starting at position 3062 of SEQ ID NO: 914816
ccgacucggccgcaugaaa

SEQ ID NO: 1032881 - RNA, 19 nt, Artificial Sequence
  Description of Artificial Sequence: Synthetic oligonucleotide
  Antisense strand to SEQ ID NO: 1032880
uuucaugcggccgagucgg

SEQ ID NO: 1032882 - RNA, 19 nt, Artificial Sequence
  Description of Artificial Sequence: Synthetic oligonucleotide
  Sense strand starting at position 3101 of SEQ ID NO: 914816
gcuuuaggagucugggaug

SEQ ID NO: 1032883 - RNA, 19 nt, Artificial Sequence
  Description of Artificial Sequence: Synthetic oligonucleotide
  Antisense strand to SEQ ID NO: 1032882
caucccagacuccuaaagc

SEQ ID NO: 1032884 - RNA, 19 nt, Artificial Sequence
  Description of Artificial Sequence: Synthetic oligonucleotide
  Sense strand starting at position 3141 of SEQ ID NO: 914816
aggagcuucucauccuaca

SEQ ID NO: 1032885 - RNA, 19 nt, Artificial Sequence
  Description of Artificial Sequence: Synthetic oligonucleotide
  Antisense strand to SEQ ID NO: 1032884
uguaggaugagaagcuccu

SEQ ID NO: 1032886 - RNA, 19 nt, Artificial Sequence
  Description of Artificial Sequence: Synthetic oligonucleotide
  Sense strand starting at position 3178 of SEQ ID NO: 914816
acuggaaggucuucguaug

SEQ ID NO: 1032887 - RNA, 19 nt, Artificial Sequence
  Description of Artificial Sequence: Synthetic oligonucleotide
  Antisense strand to SEQ ID NO: 1032886
cauacgaagaccuuccagu

SEQ ID NO: 1032888 - RNA, 19 nt, Artificial Sequence
  Description of Artificial Sequence: Synthetic oligonucleotide
  Sense strand starting at position 3259 of SEQ ID NO: 914816
gaaauaaaugagugucaug

SEQ ID NO: 1032889 - RNA, 19 nt, Artificial Sequence
  Description of Artificial Sequence: Synthetic oligonucleotide
  Antisense strand to SEQ ID NO: 1032888
caugacacucauuuauuuc

SEQ ID NO: 1032890 - RNA, 19 nt, Artificial Sequence
  Description of Artificial Sequence: Synthetic oligonucleotide
  Sense strand starting at position 3325 of SEQ ID NO: 914816
cagugaagauguuuguucu

SEQ ID NO: 1032891 - RNA, 19 nt, Artificial Sequence
  Description of Artificial Sequence: Synthetic oligonucleotide
  Antisense strand to SEQ ID NO: 1032890
agaacaaacaucuucacug

SEQ ID NO: 1032892 - RNA, 19 nt, Artificial Sequence
  Description of Artificial Sequence: Synthetic oligonucleotide
  Sense strand starting at position 3326 of SEQ ID NO: 914816
agugaagauguuuguucuu

SEQ ID NO: 1032893 - RNA, 19 nt, Artificial Sequence
  Description of Artificial Sequence: Synthetic oligonucleotide
  Antisense strand to SEQ ID NO: 1032892
aagaacaaacaucuucacu

SEQ ID NO: 1032894 - RNA, 19 nt, Artificial Sequence
  Description of Artificial Sequence: Synthetic oligonucleotide
  Sense strand starting at position 3457 of SEQ ID NO: 914816
agcacucguuagccacaaa

SEQ ID NO: 1032895 - RNA, 19 nt, Artificial Sequence
  Description of Artificial Sequence: Synthetic oligonucleotide
  Antisense strand to SEQ ID NO: 1032894
uuuguggcuaacgagugcu

SEQ ID NO: 1032896 - RNA, 19 nt, Artificial Sequence
  Description of Artificial Sequence: Synthetic oligonucleotide
  Sense strand starting at position 3587 of SEQ ID NO: 914816
gguggagcauucccugaca

SEQ ID NO: 1032897 - RNA, 19 nt, Artificial Sequence
  Description of Artificial Sequence: Synthetic oligonucleotide
  Antisense strand to SEQ ID NO: 1032896
ugucagggaaugcuccacc

SEQ ID NO: 1032898 - RNA, 19 nt, Artificial Sequence
  Description of Artificial Sequence: Synthetic oligonucleotide
  Sense strand starting at position 3666 of SEQ ID NO: 914816
cagugagcacauggauaaa

SEQ ID NO: 1032899 - RNA, 19 nt, Artificial Sequence
  Description of Artificial Sequence: Synthetic oligonucleotide
  Antisense strand to SEQ ID NO: 1032898
uuuauccaugugcucacug

SEQ ID NO: 1032900 - RNA, 19 nt, Artificial Sequence
  Description of Artificial Sequence: Synthetic oligonucleotide
  Sense strand starting at position 3814 of SEQ ID NO: 914816
gguucucuucuugggcaaa

SEQ ID NO: 1032901 - RNA, 19 nt, Artificial Sequence
  Description of Artificial Sequence: Synthetic oligonucleotide
  Antisense strand to SEQ ID NO: 1032900
uuugcccaagaagagaacc

SEQ ID NO: 1032902 - RNA, 19 nt, Artificial Sequence
  Description of Artificial Sequence: Synthetic oligonucleotide
  Sense strand starting at position 3816 of SEQ ID NO: 914816
uucucuucuugggcaaaga

SEQ ID NO: 1032903 - RNA, 19 nt, Artificial Sequence
  Description of Artificial Sequence: Synthetic oligonucleotide
  Antisense strand to SEQ ID NO: 1032902
ucuuugcccaagaagagaa

SEQ ID NO: 1032904 - RNA, 19 nt, Artificial Sequence
  Description of Artificial Sequence: Synthetic oligonucleotide
  Sense strand starting at position 3817 of SEQ ID NO: 914816
ucucuucuugggcaaagau

SEQ ID NO: 1032905 - RNA, 19 nt, Artificial Sequence
  Description of Artificial Sequence: Synthetic oligonucleotide
  Antisense strand to SEQ ID NO: 1032904
aucuuugcccaagaagaga

SEQ ID NO: 1032906 - RNA, 19 nt, Artificial Sequence
  Description of Artificial Sequence: Synthetic oligonucleotide
  Sense strand starting at position 3870 of SEQ ID NO: 914816
gucucauugaugcagugau

SEQ ID NO: 1032907 - RNA, 19 nt, Artificial Sequence
  Description of Artificial Sequence: Synthetic oligonucleotide
  Antisense strand to SEQ ID NO: 1032906
aucacugcaucaaugagac

SEQ ID NO: 1032908 - RNA, 19 nt, Artificial Sequence
  Description of Artificial Sequence: Synthetic oligonucleotide
  Sense strand starting at position 3882 of SEQ ID NO: 914816
cagugaucuccaggucuca

SEQ ID NO: 1032909 - RNA, 19 nt, Artificial Sequence
  Description of Artificial Sequence: Synthetic oligonucleotide
  Antisense strand to SEQ ID NO: 1032908
ugagaccuggagaucacug

SEQ ID NO: 1032910 - RNA, 19 nt, Artificial Sequence
  Description of Artificial Sequence: Synthetic oligonucleotide
  Sense strand starting at position 3907 of SEQ ID NO: 914816
cagugauuuccagguggca

SEQ ID NO: 1032911 - RNA, 19 nt, Artificial Sequence
  Description of Artificial Sequence: Synthetic oligonucleotide
  Antisense strand to SEQ ID NO: 1032910
ugccaccuggaaaucacug

SEQ ID NO: 1032912 - RNA, 19 nt, Artificial Sequence
  Description of Artificial Sequence: Synthetic oligonucleotide
  Sense strand starting at position 3909 of SEQ ID NO: 914816
gugauuuccagguggcaug

SEQ ID NO: 1032913 - RNA, 19 nt, Artificial Sequence
  Description of Artificial Sequence: Synthetic oligonucleotide
  Antisense strand to SEQ ID NO: 1032912
caugccaccuggaaaucac

SEQ ID NO: 1032914 - RNA, 19 nt, Artificial Sequence
  Description of Artificial Sequence: Synthetic oligonucleotide
  Sense strand starting at position 157 of SEQ ID NO: 914817
uccacaugugucugauucu

SEQ ID NO: 1032915 - RNA, 19 nt, Artificial Sequence
  Description of Artificial Sequence: Synthetic oligonucleotide
  Antisense strand to SEQ ID NO: 1032914
agaaucagacacaugugga

SEQ ID NO: 1032916 - RNA, 19 nt, Artificial Sequence
  Description of Artificial Sequence: Synthetic oligonucleotide
  Sense strand starting at position 160 of SEQ ID NO: 914817
acaugugucugauucuaga

SEQ ID NO: 1032917 - RNA, 19 nt, Artificial Sequence
  Description of Artificial Sequence: Synthetic oligonucleotide
  Antisense strand to SEQ ID NO: 1032916
ucuagaaucagacacaugu

SEQ ID NO: 1032918 - RNA, 19 nt, Artificial Sequence
  Description of Artificial Sequence: Synthetic oligonucleotide
  Sense strand starting at position 209 of SEQ ID NO: 914817
ugcucucugugaucagaag

SEQ ID NO: 1032919 - RNA, 19 nt, Artificial Sequence
  Description of Artificial Sequence: Synthetic oligonucleotide
  Antisense strand to SEQ ID NO: 1032918
cuucugaucacagagagca

SEQ ID NO: 1032920 - RNA, 19 nt, Artificial Sequence
  Description of Artificial Sequence: Synthetic oligonucleotide
  Sense strand starting at position 313 of SEQ ID NO: 914817
ugagcucucagauguguua

SEQ ID NO: 1032921 - RNA, 19 nt, Artificial Sequence
  Description of Artificial Sequence: Synthetic oligonucleotide
  Antisense strand to SEQ ID NO: 1032920
uaacacaucugagagcuca

SEQ ID NO: 1032922 - RNA, 19 nt, Artificial Sequence
  Description of Artificial Sequence: Synthetic oligonucleotide
  Sense strand starting at position 545 of SEQ ID NO: 914817
cugggagggcuuugccuau

SEQ ID NO: 1032923 - RNA, 19 nt, Artificial Sequence
  Description of Artificial Sequence: Synthetic oligonucleotide
  Antisense strand to SEQ ID NO: 1032922
auaggcaaagcccucccag

SEQ ID NO: 1032924 - RNA, 19 nt, Artificial Sequence
  Description of Artificial Sequence: Synthetic oligonucleotide
  Sense strand starting at position 754 of SEQ ID NO: 914817
ggcauugucuucuuuguaa

SEQ ID NO: 1032925 - RNA, 19 nt, Artificial Sequence
  Description of Artificial Sequence: Synthetic oligonucleotide
  Antisense strand to SEQ ID NO: 1032924
uuacaaagaagacaaugcc

SEQ ID NO: 1032926 - RNA, 19 nt, Artificial Sequence
  Description of Artificial Sequence: Synthetic oligonucleotide
  Sense strand starting at position 757 of SEQ ID NO: 914817
auugucuucuuuguaagaa

SEQ ID NO: 1032927 - RNA, 19 nt, Artificial Sequence
  Description of Artificial Sequence: Synthetic oligonucleotide
  Antisense strand to SEQ ID NO: 1032926
uucuuacaaagaagacaau

SEQ ID NO: 1032928 - RNA, 19 nt, Artificial Sequence
  Description of Artificial Sequence: Synthetic oligonucleotide
  Sense strand starting at position 795 of SEQ ID NO: 914817
uuaagagucuuguugauca

SEQ ID NO: 1032929 - RNA, 19 nt, Artificial Sequence
  Description of Artificial Sequence: Synthetic oligonucleotide
  Antisense strand to SEQ ID NO: 1032928
ugaucaacaagacucuuaa

SEQ ID NO: 1032930 - RNA, 19 nt, Artificial Sequence
  Description of Artificial Sequence: Synthetic oligonucleotide
  Sense strand starting at position 799 of SEQ ID NO: 914817
gagucuuguugaucaagca

SEQ ID NO: 1032931 - RNA, 19 nt, Artificial Sequence
  Description of Artificial Sequence: Synthetic oligonucleotide
  Antisense strand to SEQ ID NO: 1032930
ugcuugaucaacaagacuc

SEQ ID NO: 1032932 - RNA, 19 nt, Artificial Sequence
  Description of Artificial Sequence: Synthetic oligonucleotide
  Sense strand starting at position 1014 of SEQ ID NO: 914817
cuuauaccgucuuugaucu

SEQ ID NO: 1032933 - RNA, 19 nt, Artificial Sequence
  Description of Artificial Sequence: Synthetic oligonucleotide
  Antisense strand to SEQ ID NO: 1032932
agaucaaagacgguauaag

SEQ ID NO: 1032934 - RNA, 19 nt, Artificial Sequence
  Description of Artificial Sequence: Synthetic oligonucleotide
  Sense strand starting at position 1035 of SEQ ID NO: 914817
acgucagugccuugauuuc

SEQ ID NO: 1032935 - RNA, 19 nt, Artificial Sequence
  Description of Artificial Sequence: Synthetic oligonucleotide
  Antisense strand to SEQ ID NO: 1032934
gaaaucaaggcacugacgu

SEQ ID NO: 1032936 - RNA, 19 nt, Artificial Sequence
  Description of Artificial Sequence: Synthetic oligonucleotide
  Sense strand starting at position 1042 of SEQ ID NO: 914817
ugccuugauuucgaaacau

SEQ ID NO: 1032937 - RNA, 19 nt, Artificial Sequence
  Description of Artificial Sequence: Synthetic oligonucleotide
  Antisense strand to SEQ ID NO: 1032936
auguuucgaaaucaaggca

SEQ ID NO: 1032938 - RNA, 19 nt, Artificial Sequence
  Description of Artificial Sequence: Synthetic oligonucleotide
  Sense strand starting at position 1081 of SEQ ID NO: 914817
cagcgagucguugugguau

SEQ ID NO: 1032939 - RNA, 19 nt, Artificial Sequence
  Description of Artificial Sequence: Synthetic oligonucleotide
  Antisense strand to SEQ ID NO: 1032938
auaccacaacgacucgcug

SEQ ID NO: 1032940 - RNA, 19 nt, Artificial Sequence
  Description of Artificial Sequence: Synthetic oligonucleotide
  Sense strand starting at position 1094 of SEQ ID NO: 914817
ugguauuugggcugcacau

SEQ ID NO: 1032941 - RNA, 19 nt, Artificial Sequence
  Description of Artificial Sequence: Synthetic oligonucleotide
  Antisense strand to SEQ ID NO: 1032940
augugcagcccaaauacca

SEQ ID NO: 1032942 - RNA, 19 nt, Artificial Sequence
  Description of Artificial Sequence: Synthetic oligonucleotide
  Sense strand starting at position 1274 of SEQ ID NO: 914817
gcagaaaccuugccggaga

SEQ ID NO: 1032943 - RNA, 19 nt, Artificial Sequence
  Description of Artificial Sequence: Synthetic oligonucleotide
  Antisense strand to SEQ ID NO: 1032942
ucuccggcaagguuucugc

SEQ ID NO: 1032944 - RNA, 19 nt, Artificial Sequence
  Description of Artificial Sequence: Synthetic oligonucleotide
  Sense strand starting at position 1277 of SEQ ID NO: 914817
gaaaccuugccggagaacu

SEQ ID NO: 1032945 - RNA, 19 nt, Artificial Sequence
  Description of Artificial Sequence: Synthetic oligonucleotide
  Antisense strand to SEQ ID NO: 1032944
aguucuccggcaagguuuc

SEQ ID NO: 1032946 - RNA, 19 nt, Artificial Sequence
  Description of Artificial Sequence: Synthetic oligonucleotide
  Sense strand starting at position 1287 of SEQ ID NO: 914817
cggagaacugucuggguua

SEQ ID NO: 1032947 - RNA, 19 nt, Artificial Sequence
  Description of Artificial Sequence: Synthetic oligonucleotide
  Antisense strand to SEQ ID NO: 1032946
uaacccagacaguucuccg

SEQ ID NO: 1032948 - RNA, 19 nt, Artificial Sequence
  Description of Artificial Sequence: Synthetic oligonucleotide
  Sense strand starting at position 1290 of SEQ ID NO: 914817
agaacugucuggguuagga

SEQ ID NO: 1032949 - RNA, 19 nt, Artificial Sequence
  Description of Artificial Sequence: Synthetic oligonucleotide
  Antisense strand to SEQ ID NO: 1032948
uccuaacccagacaguucu

SEQ ID NO: 1032950 - RNA, 19 nt, Artificial Sequence
  Description of Artificial Sequence: Synthetic oligonucleotide
  Sense strand starting at position 1307 of SEQ ID NO: 914817
gagccugaacuggguuaga

SEQ ID NO: 1032951 - RNA, 19 nt, Artificial Sequence
  Description of Artificial Sequence: Synthetic oligonucleotide
  Antisense strand to SEQ ID NO: 1032950
ucuaacccaguucaggcuc

SEQ ID NO: 1032952 - RNA, 19 nt, Artificial Sequence
  Description of Artificial Sequence: Synthetic oligonucleotide
  Sense strand starting at position 1318 of SEQ ID NO: 914817
ggguuagaagccugaacug

SEQ ID NO: 1032953 - RNA, 19 nt, Artificial Sequence
  Description of Artificial Sequence: Synthetic oligonucleotide
  Antisense strand to SEQ ID NO: 1032952
caguucaggcuucuaaccc

SEQ ID NO: 1032954 - RNA, 19 nt, Artificial Sequence
  Description of Artificial Sequence: Synthetic oligonucleotide
  Sense strand starting at position 1327 of SEQ ID NO: 914817
gccugaacuggcuggguua

SEQ ID NO: 1032955 - RNA, 19 nt, Artificial Sequence
  Description of Artificial Sequence: Synthetic oligonucleotide
  Antisense strand to SEQ ID NO: 1032954
uaacccagccaguucaggc

SEQ ID NO: 1032956 - RNA, 19 nt, Artificial Sequence
  Description of Artificial Sequence: Synthetic oligonucleotide
  Sense strand starting at position 1416 of SEQ ID NO: 914817
gugaucagugagggaugaa

SEQ ID NO: 1032957 - RNA, 19 nt, Artificial Sequence
  Description of Artificial Sequence: Synthetic oligonucleotide
  Antisense strand to SEQ ID NO: 1032956
uucaucccucacugaucac

SEQ ID NO: 1032958 - RNA, 19 nt, Artificial Sequence
  Description of Artificial Sequence: Synthetic oligonucleotide
  Sense strand starting at position 1573 of SEQ ID NO: 914817
acuuacggcucaucuagaa

SEQ ID NO: 1032959 - RNA, 19 nt, Artificial Sequence
  Description of Artificial Sequence: Synthetic oligonucleotide
  Antisense strand to SEQ ID NO: 1032958
uucuagaugagccguaagu

SEQ ID NO: 1032960 - RNA, 19 nt, Artificial Sequence
  Description of Artificial Sequence: Synthetic oligonucleotide
  Sense strand starting at position 1713 of SEQ ID NO: 914817
gauccagguuugccagagu

SEQ ID NO: 1032961 - RNA, 19 nt, Artificial Sequence
  Description of Artificial Sequence: Synthetic oligonucleotide
  Antisense strand to SEQ ID NO: 1032960
acucuggcaaaccuggauc

SEQ ID NO: 1032962 - RNA, 19 nt, Artificial Sequence
  Description of Artificial Sequence: Synthetic oligonucleotide
  Sense strand starting at position 2365 of SEQ ID NO: 914817
ccggcuuggcguuaaggau

SEQ ID NO: 1032963 - RNA, 19 nt, Artificial Sequence
  Description of Artificial Sequence: Synthetic oligonucleotide
  Antisense strand to SEQ ID NO: 1032962
auccuuaacgccaagccgg

SEQ ID NO: 1032964 - RNA, 19 nt, Artificial Sequence
  Description of Artificial Sequence: Synthetic oligonucleotide
  Sense strand starting at position 3023 of SEQ ID NO: 914817
uccucugggccucaagaua

SEQ ID NO: 1032965 - RNA, 19 nt, Artificial Sequence
  Description of Artificial Sequence: Synthetic oligonucleotide
  Antisense strand to SEQ ID NO: 1032964
uaucuugaggcccagagga

SEQ ID NO: 1032966 - RNA, 19 nt, Artificial Sequence
  Description of Artificial Sequence: Synthetic oligonucleotide
  Sense strand starting at position 3050 of SEQ ID NO: 914817
agacaaacugcauguaugu

SEQ ID NO: 1032967 - RNA, 19 nt, Artificial Sequence
  Description of Artificial Sequence: Synthetic oligonucleotide
  Antisense strand to SEQ ID NO: 1032966
acauacaugcaguuugucu

SEQ ID NO: 1032968 - RNA, 19 nt, Artificial Sequence
  Description of Artificial Sequence: Synthetic oligonucleotide
  Sense strand starting at position 3133 of SEQ ID NO: 914817
acuguacucccaugccuua

SEQ ID NO: 1032969 - RNA, 19 nt, Artificial Sequence
  Description of Artificial Sequence: Synthetic oligonucleotide
  Antisense strand to SEQ ID NO: 1032968
uaaggcaugggaguacagu

SEQ ID NO: 1032970 - RNA, 19 nt, Artificial Sequence
  Description of Artificial Sequence: Synthetic oligonucleotide
  Sense strand starting at position 3191 of SEQ ID NO: 914817
augcucuuaccuggucaua

SEQ ID NO: 1032971 - RNA, 19 nt, Artificial Sequence
  Description of Artificial Sequence: Synthetic oligonucleotide
  Antisense strand to SEQ ID NO: 1032970
uaugaccagguaagagcau

SEQ ID NO: 1032972 - RNA, 19 nt, Artificial Sequence
  Description of Artificial Sequence: Synthetic oligonucleotide
  Sense strand starting at position 3193 of SEQ ID NO: 914817
gcucuuaccuggucauaua

SEQ ID NO: 1032973 - RNA, 19 nt, Artificial Sequence
  Description of Artificial Sequence: Synthetic oligonucleotide
  Antisense strand to SEQ ID NO: 1032972
uauaugaccagguaagagc

SEQ ID NO: 1032974 - RNA, 19 nt, Artificial Sequence
  Description of Artificial Sequence: Synthetic oligonucleotide
  Sense strand starting at position 3194 of SEQ ID NO: 914817
cucuuaccuggucauauau

SEQ ID NO: 1032975 - RNA, 19 nt, Artificial Sequence
  Description of Artificial Sequence: Synthetic oligonucleotide
  Antisense strand to SEQ ID NO: 1032974
auauaugaccagguaagag

SEQ ID NO: 1032976 - RNA, 19 nt, Artificial Sequence
  Description of Artificial Sequence: Synthetic oligonucleotide
  Sense strand starting at position 3309 of SEQ ID NO: 914817
ccugcugaagaguaacuaa

SEQ ID NO: 1032977 - RNA, 19 nt, Artificial Sequence
  Description of Artificial Sequence: Synthetic oligonucleotide
  Antisense strand to SEQ ID NO: 1032976
uuaguuacucuucagcagg

SEQ ID NO: 1032978 - RNA, 19 nt, Artificial Sequence
  Description of Artificial Sequence: Synthetic oligonucleotide
  Sense strand starting at position 3619 of SEQ ID NO: 914817
acauccaguuucuucgaaa

SEQ ID NO: 1032979 - RNA, 19 nt, Artificial Sequence
  Description of Artificial Sequence: Synthetic oligonucleotide
  Antisense strand to SEQ ID NO: 1032978
uuucgaagaaacuggaugu

SEQ ID NO: 1032980 - RNA, 19 nt, Artificial Sequence
  Description of Artificial Sequence: Synthetic oligonucleotide
  Sense strand starting at position 3752 of SEQ ID NO: 914817
acaguugaaguaugauaac

SEQ ID NO: 1032981 - RNA, 19 nt, Artificial Sequence
  Description of Artificial Sequence: Synthetic oligonucleotide
  Antisense strand to SEQ ID NO: 1032980
guuaucauacuucaacugu

SEQ ID NO: 1032982 - RNA, 19 nt, Artificial Sequence
  Description of Artificial Sequence: Synthetic oligonucleotide
  Sense strand starting at position 3802 of SEQ ID NO: 914817
acaguaaguguuugcacuu

SEQ ID NO: 1032983 - RNA, 19 nt, Artificial Sequence
  Description of Artificial Sequence: Synthetic oligonucleotide
  Antisense strand to SEQ ID NO: 1032982
aagugcaaacacuuacugu

SEQ ID NO: 1032984 - RNA, 19 nt, Artificial Sequence
  Description of Artificial Sequence: Synthetic oligonucleotide
  Sense strand starting at position 3803 of SEQ ID NO: 914817
caguaaguguuugcacuua

SEQ ID NO: 1032985 - RNA, 19 nt, Artificial Sequence
  Description of Artificial Sequence: Synthetic oligonucleotide
  Antisense strand to SEQ ID NO: 1032984
uaagugcaaacacuuacug

SEQ ID NO: 1032986 - RNA, 19 nt, Artificial Sequence
  Description of Artificial Sequence: Synthetic oligonucleotide
  Sense strand starting at position 3844 of SEQ ID NO: 914817
gggaaucucagaggucuuc

SEQ ID NO: 1032987 - RNA, 19 nt, Artificial Sequence
  Description of Artificial Sequence: Synthetic oligonucleotide
  Antisense strand to SEQ ID NO: 1032986
gaagaccucugagauuccc

SEQ ID NO: 1032988 - RNA, 19 nt, Artificial Sequence
  Description of Artificial Sequence: Synthetic oligonucleotide
  Sense strand starting at position 3961 of SEQ ID NO: 914817
uucccuugcuugcuugaaa

SEQ ID NO: 1032989 - RNA, 19 nt, Artificial Sequence
  Description of Artificial Sequence: Synthetic oligonucleotide
  Antisense strand to SEQ ID NO: 1032988
uuucaagcaagcaagggaa

SEQ ID NO: 1032990 - RNA, 19 nt, Artificial Sequence
  Description of Artificial Sequence: Synthetic oligonucleotide
  Sense strand starting at position 3962 of SEQ ID NO: 914817
ucccuugcuugcuugaaau

SEQ ID NO: 1032991 - RNA, 19 nt, Artificial Sequence
  Description of Artificial Sequence: Synthetic oligonucleotide
  Antisense strand to SEQ ID NO: 1032990
auuucaagcaagcaaggga

SEQ ID NO: 1032992 - RNA, 19 nt, Artificial Sequence
  Description of Artificial Sequence: Synthetic oligonucleotide
  Sense strand starting at position 3964 of SEQ ID NO: 914817
ccuugcuugcuugaaaucu

SEQ ID NO: 1032993 - RNA, 19 nt, Artificial Sequence
  Description of Artificial Sequence: Synthetic oligonucleotide
  Antisense strand to SEQ ID NO: 1032992
agauuucaagcaagcaagg

SEQ ID NO: 1032994 - RNA, 19 nt, Artificial Sequence
  Description of Artificial Sequence: Synthetic oligonucleotide
  Sense strand starting at position 112 of SEQ ID NO: 914818
gcuuaaagauuugaauaga

SEQ ID NO: 1032995 - RNA, 19 nt, Artificial Sequence
  Description of Artificial Sequence: Synthetic oligonucleotide
  Antisense strand to SEQ ID NO: 1032994
ucuauucaaaucuuuaagc

SEQ ID NO: 1032996 - RNA, 19 nt, Artificial Sequence
  Description of Artificial Sequence: Synthetic oligonucleotide
  Sense strand starting at position 191 of SEQ ID NO: 914818
acugaauagagcgauguuu

SEQ ID NO: 1032997 - RNA, 19 nt, Artificial Sequence
  Description of Artificial Sequence: Synthetic oligonucleotide
  Antisense strand to SEQ ID NO: 1032996
aaacaucgcucuauucagu

SEQ ID NO: 1032998 - RNA, 19 nt, Artificial Sequence
  Description of Artificial Sequence: Synthetic oligonucleotide
  Sense strand starting at position 598 of SEQ ID NO: 914818
uauggagggcuuuggaaau

SEQ ID NO: 1032999 - RNA, 19 nt, Artificial Sequence
  Description of Artificial Sequence: Synthetic oligonucleotide
  Antisense strand to SEQ ID NO: 1032998
auuuccaaagcccuccaua

SEQ ID NO: 1033000 - RNA, 19 nt, Artificial Sequence
  Description of Artificial Sequence: Synthetic oligonucleotide
  Sense strand starting at position 793 of SEQ ID NO: 914818
ugaguaguucuacaggcau

SEQ ID NO: 1033001 - RNA, 19 nt, Artificial Sequence
  Description of Artificial Sequence: Synthetic oligonucleotide
  Antisense strand to SEQ ID NO: 1033000
augccuguagaacuacuca

SEQ ID NO: 1033002 - RNA, 19 nt, Artificial Sequence
  Description of Artificial Sequence: Synthetic oligonucleotide
  Sense strand starting at position 951 of SEQ ID NO: 914818
cguaaaguagcugaauaua

SEQ ID NO: 1033003 - RNA, 19 nt, Artificial Sequence
  Description of Artificial Sequence: Synthetic oligonucleotide
  Antisense strand to SEQ ID NO: 1033002
uauauucagcuacuuuacg

SEQ ID NO: 1033004 - RNA, 19 nt, Artificial Sequence
  Description of Artificial Sequence: Synthetic oligonucleotide
  Sense strand starting at position 1143 of SEQ ID NO: 914818
gaugacuaaccaugggcaa

SEQ ID NO: 1033005 - RNA, 19 nt, Artificial Sequence
  Description of Artificial Sequence: Synthetic oligonucleotide
  Antisense strand to SEQ ID NO: 1033004
uugcccaugguuagucauc

SEQ ID NO: 1033006 - RNA, 19 nt, Artificial Sequence
  Description of Artificial Sequence: Synthetic oligonucleotide
  Sense strand starting at position 1144 of SEQ ID NO: 914818
augacuaaccaugggcaaa

SEQ ID NO: 1033007 - RNA, 19 nt, Artificial Sequence
  Description of Artificial Sequence: Synthetic oligonucleotide
  Antisense strand to SEQ ID NO: 1033006
uuugcccaugguuagucau

SEQ ID NO: 1033008 - RNA, 19 nt, Artificial Sequence
  Description of Artificial Sequence: Synthetic oligonucleotide
  Sense strand starting at position 1184 of SEQ ID NO: 914818
aacugauucugucuugaga

SEQ ID NO: 1033009 - RNA, 19 nt, Artificial Sequence
  Description of Artificial Sequence: Synthetic oligonucleotide
  Antisense strand to SEQ ID NO: 1033008
ucucaagacagaaucaguu

SEQ ID NO: 1033010 - RNA, 19 nt, Artificial Sequence
  Description of Artificial Sequence: Synthetic oligonucleotide
  Sense strand starting at position 1187 of SEQ ID NO: 914818
ugauucugucuugagauuc

SEQ ID NO: 1033011 - RNA, 19 nt, Artificial Sequence
  Description of Artificial Sequence: Synthetic oligonucleotide
  Antisense strand to SEQ ID NO: 1033010
gaaucucaagacagaauca

SEQ ID NO: 1033012 - RNA, 19 nt, Artificial Sequence
  Description of Artificial Sequence: Synthetic oligonucleotide
  Sense strand starting at position 1321 of SEQ ID NO: 914818
cucucaugaguguacaaca

SEQ ID NO: 1033013 - RNA, 19 nt, Artificial Sequence
  Description of Artificial Sequence: Synthetic oligonucleotide
  Antisense strand to SEQ ID NO: 1033012
uguuguacacucaugagag

SEQ ID NO: 1033014 - RNA, 19 nt, Artificial Sequence
  Description of Artificial Sequence: Synthetic oligonucleotide
  Sense strand starting at position 1326 of SEQ ID NO: 914818
augaguguacaacagaguu

SEQ ID NO: 1033015 - RNA, 19 nt, Artificial Sequence
  Description of Artificial Sequence: Synthetic oligonucleotide
  Antisense strand to SEQ ID NO: 1033014
aacucuguuguacacucau

SEQ ID NO: 1033016 - RNA, 19 nt, Artificial Sequence
  Description of Artificial Sequence: Synthetic oligonucleotide
  Sense strand starting at position 1338 of SEQ ID NO: 914818
cagaguuuaccagaggcua

SEQ ID NO: 1033017 - RNA, 19 nt, Artificial Sequence
  Description of Artificial Sequence: Synthetic oligonucleotide
  Antisense strand to SEQ ID NO: 1033016
uagccucugguaaacucug

SEQ ID NO: 1033018 - RNA, 19 nt, Artificial Sequence
  Description of Artificial Sequence: Synthetic oligonucleotide
  Sense strand starting at position 1409 of SEQ ID NO: 914818
agaucuauauggcuucuau

SEQ ID NO: 1033019 - RNA, 19 nt, Artificial Sequence
  Description of Artificial Sequence: Synthetic oligonucleotide
  Antisense strand to SEQ ID NO: 1033018
auagaagccauauagaucu

SEQ ID NO: 1033020 - RNA, 19 nt, Artificial Sequence
  Description of Artificial Sequence: Synthetic oligonucleotide
  Sense strand starting at position 1684 of SEQ ID NO: 914818
cguagugaugcuagauggu

SEQ ID NO: 1033021 - RNA, 19 nt, Artificial Sequence
  Description of Artificial Sequence: Synthetic oligonucleotide
  Antisense strand to SEQ ID NO: 1033020
accaucuagcaucacuacg

SEQ ID NO: 1033022 - RNA, 19 nt, Artificial Sequence
  Description of Artificial Sequence: Synthetic oligonucleotide
  Sense strand starting at position 1749 of SEQ ID NO: 914818
auggcugacuuuccaaaua

SEQ ID NO: 1033023 - RNA, 19 nt, Artificial Sequence
  Description of Artificial Sequence: Synthetic oligonucleotide
  Antisense strand to SEQ ID NO: 1033022
uauuuggaaagucagccau

SEQ ID NO: 1033024 - RNA, 19 nt, Artificial Sequence
  Description of Artificial Sequence: Synthetic oligonucleotide
  Sense strand starting at position 1776 of SEQ ID NO: 914818
ugauauuucuuaccugcga

SEQ ID NO: 1033025 - RNA, 19 nt, Artificial Sequence
  Description of Artificial Sequence: Synthetic oligonucleotide
  Antisense strand to SEQ ID NO: 1033024
ucgcagguaagaaauauca

SEQ ID NO: 1033026 - RNA, 19 nt, Artificial Sequence
  Description of Artificial Sequence: Synthetic oligonucleotide
  Sense strand starting at position 1800 of SEQ ID NO: 914818
aguuuguugcgagaggaag

SEQ ID NO: 1033027 - RNA, 19 nt, Artificial Sequence
  Description of Artificial Sequence: Synthetic oligonucleotide
  Antisense strand to SEQ ID NO: 1033026
cuuccucucgcaacaaacu

SEQ ID NO: 1033028 - RNA, 19 nt, Artificial Sequence
  Description of Artificial Sequence: Synthetic oligonucleotide
  Sense strand starting at position 1929 of SEQ ID NO: 914818
ggagacaauuccuugcuga

SEQ ID NO: 1033029 - RNA, 19 nt, Artificial Sequence
  Description of Artificial Sequence: Synthetic oligonucleotide
  Antisense strand to SEQ ID NO: 1033028
ucagcaaggaauugucucc

SEQ ID NO: 1033030 - RNA, 19 nt, Artificial Sequence
  Description of Artificial Sequence: Synthetic oligonucleotide
  Sense strand starting at position 2073 of SEQ ID NO: 914818
ggcaauggaagucgaaaua

SEQ ID NO: 1033031 - RNA, 19 nt, Artificial Sequence
  Description of Artificial Sequence: Synthetic oligonucleotide
  Antisense strand to SEQ ID NO: 1033030
uauuucgacuuccauugcc

SEQ ID NO: 1033032 - RNA, 19 nt, Artificial Sequence
  Description of Artificial Sequence: Synthetic oligonucleotide
  Sense strand starting at position 2231 of SEQ ID NO: 914818
accuccuuaguccauuaga

SEQ ID NO: 1033033 - RNA, 19 nt, Artificial Sequence
  Description of Artificial Sequence: Synthetic oligonucleotide
  Antisense strand to SEQ ID NO: 1033032
ucuaauggacuaaggaggu

SEQ ID NO: 1033034 - RNA, 19 nt, Artificial Sequence
  Description of Artificial Sequence: Synthetic oligonucleotide
  Sense strand starting at position 2355 of SEQ ID NO: 914818
ggguaauuccuacaauguu

SEQ ID NO: 1033035 - RNA, 19 nt, Artificial Sequence
  Description of Artificial Sequence: Synthetic oligonucleotide
  Antisense strand to SEQ ID NO: 1033034
aacauuguaggaauuaccc

SEQ ID NO: 1033036 - RNA, 19 nt, Artificial Sequence
  Description of Artificial Sequence: Synthetic oligonucleotide
  Sense strand starting at position 2486 of SEQ ID NO: 914818
uauggugucaaaggauagu

SEQ ID NO: 1033037 - RNA, 19 nt, Artificial Sequence
  Description of Artificial Sequence: Synthetic oligonucleotide
  Antisense strand to SEQ ID NO: 1033036
acuauccuuugacaccaua

SEQ ID NO: 1033038 - RNA, 19 nt, Artificial Sequence
  Description of Artificial Sequence: Synthetic oligonucleotide
  Sense strand starting at position 2489 of SEQ ID NO: 914818
ggugucaaaggauaguuga

SEQ ID NO: 1033039 - RNA, 19 nt, Artificial Sequence
  Description of Artificial Sequence: Synthetic oligonucleotide
  Antisense strand to SEQ ID NO: 1033038
ucaacuauccuuugacacc

SEQ ID NO: 1033040 - RNA, 19 nt, Artificial Sequence
  Description of Artificial Sequence: Synthetic oligonucleotide
  Sense strand starting at position 2594 of SEQ ID NO: 914818
cggauaccaucauuagaau

SEQ ID NO: 1033041 - RNA, 19 nt, Artificial Sequence
  Description of Artificial Sequence: Synthetic oligonucleotide
  Antisense strand to SEQ ID NO: 1033040
auucuaaugaugguauccg

SEQ ID NO: 1033042 - RNA, 19 nt, Artificial Sequence
  Description of Artificial Sequence: Synthetic oligonucleotide
  Sense strand starting at position 2689 of SEQ ID NO: 914818
gcaaauauuuacuugcagu

SEQ ID NO: 1033043 - RNA, 19 nt, Artificial Sequence
  Description of Artificial Sequence: Synthetic oligonucleotide
  Antisense strand to SEQ ID NO: 1033042
acugcaaguaaauauuugc

SEQ ID NO: 1033044 - RNA, 19 nt, Artificial Sequence
  Description of Artificial Sequence: Synthetic oligonucleotide
  Sense strand starting at position 2722 of SEQ ID NO: 914818
cuuucuauuccuggaauga

SEQ ID NO: 1033045 - RNA, 19 nt, Artificial Sequence
  Description of Artificial Sequence: Synthetic oligonucleotide
  Antisense strand to SEQ ID NO: 1033044
ucauuccaggaauagaaag

SEQ ID NO: 1033046 - RNA, 19 nt, Artificial Sequence
  Description of Artificial Sequence: Synthetic oligonucleotide
  Sense strand starting at position 2831 of SEQ ID NO: 914818
aaauguaacguuugaagag

SEQ ID NO: 1033047 - RNA, 19 nt, Artificial Sequence
  Description of Artificial Sequence: Synthetic oligonucleotide
  Antisense strand to SEQ ID NO: 1033046
cucuucaaacguuacauuu

SEQ ID NO: 1033048 - RNA, 19 nt, Artificial Sequence
  Description of Artificial Sequence: Synthetic oligonucleotide
  Sense strand starting at position 2843 of SEQ ID NO: 914818
ugaagagcagaguguaaau

SEQ ID NO: 1033049 - RNA, 19 nt, Artificial Sequence
  Description of Artificial Sequence: Synthetic oligonucleotide
  Antisense strand to SEQ ID NO: 1033048
auuuacacucugcucuuca

SEQ ID NO: 1033050 - RNA, 19 nt, Artificial Sequence
  Description of Artificial Sequence: Synthetic oligonucleotide
  Sense strand starting at position 3180 of SEQ ID NO: 914818
ugguguggugacuaucaga

SEQ ID NO: 1033051 - RNA, 19 nt, Artificial Sequence
  Description of Artificial Sequence: Synthetic oligonucleotide
  Antisense strand to SEQ ID NO: 1033050
ucugauagucaccacacca

SEQ ID NO: 1033052 - RNA, 19 nt, Artificial Sequence
  Description of Artificial Sequence: Synthetic oligonucleotide
  Sense strand starting at position 3289 of SEQ ID NO: 914818
guccaauugggccaauuaa

SEQ ID NO: 1033053 - RNA, 19 nt, Artificial Sequence
  Description of Artificial Sequence: Synthetic oligonucleotide
  Antisense strand to SEQ ID NO: 1033052
uuaauuggcccaauuggac

SEQ ID NO: 1033054 - RNA, 19 nt, Artificial Sequence
  Description of Artificial Sequence: Synthetic oligonucleotide
  Sense strand starting at position 3377 of SEQ ID NO: 914818
uuccauugccagugaauuu

SEQ ID NO: 1033055 - RNA, 19 nt, Artificial Sequence
  Description of Artificial Sequence: Synthetic oligonucleotide
  Antisense strand to SEQ ID NO: 1033054
aaauucacuggcaauggaa

SEQ ID NO: 1033056 - RNA, 19 nt, Artificial Sequence
  Description of Artificial Sequence: Synthetic oligonucleotide
  Sense strand starting at position 3394 of SEQ ID NO: 914818
uuucuccagcuguaaagau

SEQ ID NO: 1033057 - RNA, 19 nt, Artificial Sequence
  Description of Artificial Sequence: Synthetic oligonucleotide
  Antisense strand to SEQ ID NO: 1033056
aucuuuacagcuggagaaa

SEQ ID NO: 1033058 - RNA, 19 nt, Artificial Sequence
  Description of Artificial Sequence: Synthetic oligonucleotide
  Sense strand starting at position 3402 of SEQ ID NO: 914818
gcuguaaagaugcagaaug

SEQ ID NO: 1033059 - RNA, 19 nt, Artificial Sequence
  Description of Artificial Sequence: Synthetic oligonucleotide
  Antisense strand to SEQ ID NO: 1033058
cauucugcaucuuuacagc

SEQ ID NO: 1033060 - RNA, 19 nt, Artificial Sequence
  Description of Artificial Sequence: Synthetic oligonucleotide
  Sense strand starting at position 3407 of SEQ ID NO: 914818
aaagaugcagaauguguaa

SEQ ID NO: 1033061 - RNA, 19 nt, Artificial Sequence
  Description of Artificial Sequence: Synthetic oligonucleotide
  Antisense strand to SEQ ID NO: 1033060
uuacacauucugcaucuuu

SEQ ID NO: 1033062 - RNA, 19 nt, Artificial Sequence
  Description of Artificial Sequence: Synthetic oligonucleotide
  Sense strand starting at position 3540 of SEQ ID NO: 914818
augacagcccuuugaauau

SEQ ID NO: 1033063 - RNA, 19 nt, Artificial Sequence
  Description of Artificial Sequence: Synthetic oligonucleotide
  Antisense strand to SEQ ID NO: 1033062
auauucaaagggcugucau

SEQ ID NO: 1033064 - RNA, 19 nt, Artificial Sequence
  Description of Artificial Sequence: Synthetic oligonucleotide
  Sense strand starting at position 3607 of SEQ ID NO: 914818
gcuuaugcaauggaaguua

SEQ ID NO: 1033065 - RNA, 19 nt, Artificial Sequence
  Description of Artificial Sequence: Synthetic oligonucleotide
  Antisense strand to SEQ ID NO: 1033064
uaacuuccauugcauaagc

SEQ ID NO: 1033066 - RNA, 19 nt, Artificial Sequence
  Description of Artificial Sequence: Synthetic oligonucleotide
  Sense strand starting at position 3688 of SEQ ID NO: 914818
uaugcauuagguggaauca

SEQ ID NO: 1033067 - RNA, 19 nt, Artificial Sequence
  Description of Artificial Sequence: Synthetic oligonucleotide
  Antisense strand to SEQ ID NO: 1033066
ugauuccaccuaaugcaua

SEQ ID NO: 1033068 - RNA, 19 nt, Artificial Sequence
  Description of Artificial Sequence: Synthetic oligonucleotide
  Sense strand starting at position 3689 of SEQ ID NO: 914818
augcauuagguggaaucau

SEQ ID NO: 1033069 - RNA, 19 nt, Artificial Sequence
  Description of Artificial Sequence: Synthetic oligonucleotide
  Antisense strand to SEQ ID NO: 1033068
augauuccaccuaaugcau

SEQ ID NO: 1033070 - RNA, 19 nt, Artificial Sequence
  Description of Artificial Sequence: Synthetic oligonucleotide
  Sense strand starting at position 3754 of SEQ ID NO: 914818
aauaucauacagugugaag

SEQ ID NO: 1033071 - RNA, 19 nt, Artificial Sequence
  Description of Artificial Sequence: Synthetic oligonucleotide
  Antisense strand to SEQ ID NO: 1033070
cuucacacuguaugauauu

SEQ ID NO: 1033072 - RNA, 19 nt, Artificial Sequence
  Description of Artificial Sequence: Synthetic oligonucleotide
  Sense strand starting at position 3779 of SEQ ID NO: 914818
agaugaauuccaugaguau

SEQ ID NO: 1033073 - RNA, 19 nt, Artificial Sequence
  Description of Artificial Sequence: Synthetic oligonucleotide
  Antisense strand to SEQ ID NO: 1033072
auacucauggaauucaucu

SEQ ID NO: 1033074 - RNA, 19 nt, Artificial Sequence
  Description of Artificial Sequence: Synthetic oligonucleotide
  Sense strand starting at position 123 of SEQ ID NO: 914819
uccugugaccauuacuuau

SEQ ID NO: 1033075 - RNA, 19 nt, Artificial Sequence
  Description of Artificial Sequence: Synthetic oligonucleotide
  Antisense strand to SEQ ID NO: 1033074
auaaguaauggucacagga

SEQ ID NO: 1033076 - RNA, 19 nt, Artificial Sequence
  Description of Artificial Sequence: Synthetic oligonucleotide
  Sense strand starting at position 130 of SEQ ID NO: 914819
accauuacuuaugucuuga

SEQ ID NO: 1033077 - RNA, 19 nt, Artificial Sequence
  Description of Artificial Sequence: Synthetic oligonucleotide
  Antisense strand to SEQ ID NO: 1033076
ucaagacauaaguaauggu

SEQ ID NO: 1033078 - RNA, 19 nt, Artificial Sequence
  Description of Artificial Sequence: Synthetic oligonucleotide
  Sense strand starting at position 143 of SEQ ID NO: 914819
ucuugaguucucuguccua

SEQ ID NO: 1033079 - RNA, 19 nt, Artificial Sequence
  Description of Artificial Sequence: Synthetic oligonucleotide
  Antisense strand to SEQ ID NO: 1033078
uaggacagagaacucaaga

SEQ ID NO: 1033080 - RNA, 19 nt, Artificial Sequence
  Description of Artificial Sequence: Synthetic oligonucleotide
  Sense strand starting at position 146 of SEQ ID NO: 914819
ugaguucucuguccuauuu

SEQ ID NO: 1033081 - RNA, 19 nt, Artificial Sequence
  Description of Artificial Sequence: Synthetic oligonucleotide
  Antisense strand to SEQ ID NO: 1033080
aaauaggacagagaacuca

SEQ ID NO: 1033082 - RNA, 19 nt, Artificial Sequence
  Description of Artificial Sequence: Synthetic oligonucleotide
  Sense strand starting at position 148 of SEQ ID NO: 914819
aguucucuguccuauuuga

SEQ ID NO: 1033083 - RNA, 19 nt, Artificial Sequence
  Description of Artificial Sequence: Synthetic oligonucleotide
  Antisense strand to SEQ ID NO: 1033082
ucaaauaggacagagaacu

SEQ ID NO: 1033084 - RNA, 19 nt, Artificial Sequence
  Description of Artificial Sequence: Synthetic oligonucleotide
  Sense strand starting at position 158 of SEQ ID NO: 914819
ccuauuugauagggagcau

SEQ ID NO: 1033085 - RNA, 19 nt, Artificial Sequence
  Description of Artificial Sequence: Synthetic oligonucleotide
  Antisense strand to SEQ ID NO: 1033084
augcucccuaucaaauagg

SEQ ID NO: 1033086 - RNA, 19 nt, Artificial Sequence
  Description of Artificial Sequence: Synthetic oligonucleotide
  Sense strand starting at position 223 of SEQ ID NO: 914819
ggagaauggugcgugcuca

SEQ ID NO: 1033087 - RNA, 19 nt, Artificial Sequence
  Description of Artificial Sequence: Synthetic oligonucleotide
  Antisense strand to SEQ ID NO: 1033086
ugagcacgcaccauucucc

SEQ ID NO: 1033088 - RNA, 19 nt, Artificial Sequence
  Description of Artificial Sequence: Synthetic oligonucleotide
  Sense strand starting at position 638 of SEQ ID NO: 914819
cagagaugucuggguucua

SEQ ID NO: 1033089 - RNA, 19 nt, Artificial Sequence
  Description of Artificial Sequence: Synthetic oligonucleotide
  Antisense strand to SEQ ID NO: 1033088
uagaacccagacaucucug

SEQ ID NO: 1033090 - RNA, 19 nt, Artificial Sequence
  Description of Artificial Sequence: Synthetic oligonucleotide
  Sense strand starting at position 647 of SEQ ID NO: 914819
cuggguucuagccagggaa

SEQ ID NO: 1033091 - RNA, 19 nt, Artificial Sequence
  Description of Artificial Sequence: Synthetic oligonucleotide
  Antisense strand to SEQ ID NO: 1033090
uucccuggcuagaacccag

SEQ ID NO: 1033092 - RNA, 19 nt, Artificial Sequence
  Description of Artificial Sequence: Synthetic oligonucleotide
  Sense strand starting at position 649 of SEQ ID NO: 914819
ggguucuagccagggaauc

SEQ ID NO: 1033093 - RNA, 19 nt, Artificial Sequence
  Description of Artificial Sequence: Synthetic oligonucleotide
  Antisense strand to SEQ ID NO: 1033092
gauucccuggcuagaaccc

SEQ ID NO: 1033094 - RNA, 19 nt, Artificial Sequence
  Description of Artificial Sequence: Synthetic oligonucleotide
  Sense strand starting at position 650 of SEQ ID NO: 914819
gguucuagccagggaauca

SEQ ID NO: 1033095 - RNA, 19 nt, Artificial Sequence
  Description of Artificial Sequence: Synthetic oligonucleotide
  Antisense strand to SEQ ID NO: 1033094
ugauucccuggcuagaacc

SEQ ID NO: 1033096 - RNA, 19 nt, Artificial Sequence
  Description of Artificial Sequence: Synthetic oligonucleotide
  Sense strand starting at position 799 of SEQ ID NO: 914819
ggugguuugccuuggagug

SEQ ID NO: 1033097 - RNA, 19 nt, Artificial Sequence
  Description of Artificial Sequence: Synthetic oligonucleotide
  Antisense strand to SEQ ID NO: 1033096
cacuccaaggcaaaccacc

SEQ ID NO: 1033098 - RNA, 19 nt, Artificial Sequence
  Description of Artificial Sequence: Synthetic oligonucleotide
  Sense strand starting at position 800 of SEQ ID NO: 914819
gugguuugccuuggaguga

SEQ ID NO: 1033099 - RNA, 19 nt, Artificial Sequence
  Description of Artificial Sequence: Synthetic oligonucleotide
  Antisense strand to SEQ ID NO: 1033098
ucacuccaaggcaaaccac

SEQ ID NO: 1033100 - RNA, 19 nt, Artificial Sequence
  Description of Artificial Sequence: Synthetic oligonucleotide
  Sense strand starting at position 813 of SEQ ID NO: 914819
gagugaaggcuccggguua

SEQ ID NO: 1033101 - RNA, 19 nt, Artificial Sequence
  Description of Artificial Sequence: Synthetic oligonucleotide
  Antisense strand to SEQ ID NO: 1033100
uaacccggagccuucacuc

SEQ ID NO: 1033102 - RNA, 19 nt, Artificial Sequence
  Description of Artificial Sequence: Synthetic oligonucleotide
  Sense strand starting at position 1861 of SEQ ID NO: 914819
ggucuagguucacuaguag

SEQ ID NO: 1033103 - RNA, 19 nt, Artificial Sequence
  Description of Artificial Sequence: Synthetic oligonucleotide
  Antisense strand to SEQ ID NO: 1033102
cuacuagugaaccuagacc

SEQ ID NO: 1033104 - RNA, 19 nt, Artificial Sequence
  Description of Artificial Sequence: Synthetic oligonucleotide
  Sense strand starting at position 2016 of SEQ ID NO: 914819
uuccuccuugucuguagaa

SEQ ID NO: 1033105 - RNA, 19 nt, Artificial Sequence
  Description of Artificial Sequence: Synthetic oligonucleotide
  Antisense strand to SEQ ID NO: 1033104
uucuacagacaaggaggaa

SEQ ID NO: 1033106 - RNA, 19 nt, Artificial Sequence
  Description of Artificial Sequence: Synthetic oligonucleotide
  Sense strand starting at position 2018 of SEQ ID NO: 914819
ccuccuugucuguagaacu

SEQ ID NO: 1033107 - RNA, 19 nt, Artificial Sequence
  Description of Artificial Sequence: Synthetic oligonucleotide
  Antisense strand to SEQ ID NO: 1033106
aguucuacagacaaggagg

SEQ ID NO: 1033108 - RNA, 19 nt, Artificial Sequence
  Description of Artificial Sequence: Synthetic oligonucleotide
  Sense strand starting at position 2151 of SEQ ID NO: 914819
gagucuacaucagaauaug

SEQ ID NO: 1033109 - RNA, 19 nt, Artificial Sequence
  Description of Artificial Sequence: Synthetic oligonucleotide
  Antisense strand to SEQ ID NO: 1033108
cauauucugauguagacuc

SEQ ID NO: 1033110 - RNA, 19 nt, Artificial Sequence
  Description of Artificial Sequence: Synthetic oligonucleotide
  Sense strand starting at position 2165 of SEQ ID NO: 914819
auaugaaucuugucacuga

SEQ ID NO: 1033111 - RNA, 19 nt, Artificial Sequence
  Description of Artificial Sequence: Synthetic oligonucleotide
  Antisense strand to SEQ ID NO: 1033110
ucagugacaagauucauau

SEQ ID NO: 1033112 - RNA, 19 nt, Artificial Sequence
  Description of Artificial Sequence: Synthetic oligonucleotide
  Sense strand starting at position 2172 of SEQ ID NO: 914819
ucuugucacugaugggaca

SEQ ID NO: 1033113 - RNA, 19 nt, Artificial Sequence
  Description of Artificial Sequence: Synthetic oligonucleotide
  Antisense strand to SEQ ID NO: 1033112
ugucccaucagugacaaga

SEQ ID NO: 1033114 - RNA, 19 nt, Artificial Sequence
  Description of Artificial Sequence: Synthetic oligonucleotide
  Sense strand starting at position 2174 of SEQ ID NO: 914819
uugucacugaugggacaaa

SEQ ID NO: 1033115 - RNA, 19 nt, Artificial Sequence
  Description of Artificial Sequence: Synthetic oligonucleotide
  Antisense strand to SEQ ID NO: 1033114
uuugucccaucagugacaa

SEQ ID NO: 1033116 - RNA, 19 nt, Artificial Sequence
  Description of Artificial Sequence: Synthetic oligonucleotide
  Sense strand starting at position 2175 of SEQ ID NO: 914819
ugucacugaugggacaaau

SEQ ID NO: 1033117 - RNA, 19 nt, Artificial Sequence
  Description of Artificial Sequence: Synthetic oligonucleotide
  Antisense strand to SEQ ID NO: 1033116
auuugucccaucagugaca

SEQ ID NO: 1033118 - RNA, 19 nt, Artificial Sequence
  Description of Artificial Sequence: Synthetic oligonucleotide
  Sense strand starting at position 2225 of SEQ ID NO: 914819
gggugaggcgugugaggaa

SEQ ID NO: 1033119 - RNA, 19 nt, Artificial Sequence
  Description of Artificial Sequence: Synthetic oligonucleotide
  Antisense strand to SEQ ID NO: 1033118
uuccucacacgccucaccc

SEQ ID NO: 1033120 - RNA, 19 nt, Artificial Sequence
  Description of Artificial Sequence: Synthetic oligonucleotide
  Sense strand starting at position 2252 of SEQ ID NO: 914819
gcuaaaucuaaggagguuu

SEQ ID NO: 1033121 - RNA, 19 nt, Artificial Sequence
  Description of Artificial Sequence: Synthetic oligonucleotide
  Antisense strand to SEQ ID NO: 1033120
aaaccuccuuagauuuagc

SEQ ID NO: 1033122 - RNA, 19 nt, Artificial Sequence
  Description of Artificial Sequence: Synthetic oligonucleotide
  Sense strand starting at position 2278 of SEQ ID NO: 914819
gggucaugcaguuauccau

SEQ ID NO: 1033123 - RNA, 19 nt, Artificial Sequence
  Description of Artificial Sequence: Synthetic oligonucleotide
  Antisense strand to SEQ ID NO: 1033122
auggauaacugcaugaccc

SEQ ID NO: 1033124 - RNA, 19 nt, Artificial Sequence
  Description of Artificial Sequence: Synthetic oligonucleotide
  Sense strand starting at position 2285 of SEQ ID NO: 914819
gcaguuauccauggaggca

SEQ ID NO: 1033125 - RNA, 19 nt, Artificial Sequence
  Description of Artificial Sequence: Synthetic oligonucleotide
  Antisense strand to SEQ ID NO: 1033124
ugccuccauggauaacugc

SEQ ID NO: 1033126 - RNA, 19 nt, Artificial Sequence
  Description of Artificial Sequence: Synthetic oligonucleotide
  Sense strand starting at position 2334 of SEQ ID NO: 914819
gcauauauuaaguguggac

SEQ ID NO: 1033127 - RNA, 19 nt, Artificial Sequence
  Description of Artificial Sequence: Synthetic oligonucleotide
  Antisense strand to SEQ ID NO: 1033126
guccacacuuaauauaugc

SEQ ID NO: 1033128 - RNA, 19 nt, Artificial Sequence
  Description of Artificial Sequence: Synthetic oligonucleotide
  Sense strand starting at position 2362 of SEQ ID NO: 914819
augucugagguuugugacu

SEQ ID NO: 1033129 - RNA, 19 nt, Artificial Sequence
  Description of Artificial Sequence: Synthetic oligonucleotide
  Antisense strand to SEQ ID NO: 1033128
agucacaaaccucagacau

SEQ ID NO: 1033130 - RNA, 19 nt, Artificial Sequence
  Description of Artificial Sequence: Synthetic oligonucleotide
  Sense strand starting at position 2367 of SEQ ID NO: 914819
ugagguuugugacuccugu

SEQ ID NO: 1033131 - RNA, 19 nt, Artificial Sequence
  Description of Artificial Sequence: Synthetic oligonucleotide
  Antisense strand to SEQ ID NO: 1033130
acaggagucacaaaccuca

SEQ ID NO: 1033132 - RNA, 19 nt, Artificial Sequence
  Description of Artificial Sequence: Synthetic oligonucleotide
  Sense strand starting at position 2441 of SEQ ID NO: 914819
ggguuugguggaugcauca

SEQ ID NO: 1033133 - RNA, 19 nt, Artificial Sequence
  Description of Artificial Sequence: Synthetic oligonucleotide
  Antisense strand to SEQ ID NO: 1033132
ugaugcauccaccaaaccc

SEQ ID NO: 1033134 - RNA, 19 nt, Artificial Sequence
  Description of Artificial Sequence: Synthetic oligonucleotide
  Sense strand starting at position 2556 of SEQ ID NO: 914819
cuaggugucuaguucaugu

SEQ ID NO: 1033135 - RNA, 19 nt, Artificial Sequence
  Description of Artificial Sequence: Synthetic oligonucleotide
  Antisense strand to SEQ ID NO: 1033134
acaugaacuagacaccuag

SEQ ID NO: 1033136 - RNA, 19 nt, Artificial Sequence
  Description of Artificial Sequence: Synthetic oligonucleotide
  Sense strand starting at position 2615 of SEQ ID NO: 914819
gggcuucuagcauguaaga

SEQ ID NO: 1033137 - RNA, 19 nt, Artificial Sequence
  Description of Artificial Sequence: Synthetic oligonucleotide
  Antisense strand to SEQ ID NO: 1033136
ucuuacaugcuagaagccc

SEQ ID NO: 1033138 - RNA, 19 nt, Artificial Sequence
  Description of Artificial Sequence: Synthetic oligonucleotide
  Sense strand starting at position 2617 of SEQ ID NO: 914819
gcuucuagcauguaagaug

SEQ ID NO: 1033139 - RNA, 19 nt, Artificial Sequence
  Description of Artificial Sequence: Synthetic oligonucleotide
  Antisense strand to SEQ ID NO: 1033138
caucuuacaugcuagaagc

SEQ ID NO: 1033140 - RNA, 19 nt, Artificial Sequence
  Description of Artificial Sequence: Synthetic oligonucleotide
  Sense strand starting at position 2624 of SEQ ID NO: 914819
gcauguaagaugcaggaga

SEQ ID NO: 1033141 - RNA, 19 nt, Artificial Sequence
  Description of Artificial Sequence: Synthetic oligonucleotide
  Antisense strand to SEQ ID NO: 1033140
ucuccugcaucuuacaugc

SEQ ID NO: 1033142 - RNA, 19 nt, Artificial Sequence
  Description of Artificial Sequence: Synthetic oligonucleotide
  Sense strand starting at position 2660 of SEQ ID NO: 914819
ccagcaucuccaggaguua

SEQ ID NO: 1033143 - RNA, 19 nt, Artificial Sequence
  Description of Artificial Sequence: Synthetic oligonucleotide
  Antisense strand to SEQ ID NO: 1033142
uaacuccuggagaugcugg

SEQ ID NO: 1033144 - RNA, 19 nt, Artificial Sequence
  Description of Artificial Sequence: Synthetic oligonucleotide
  Sense strand starting at position 2673 of SEQ ID NO: 914819
gaguuaggucaggaggcaa

SEQ ID NO: 1033145 - RNA, 19 nt, Artificial Sequence
  Description of Artificial Sequence: Synthetic oligonucleotide
  Antisense strand to SEQ ID NO: 1033144
uugccuccugaccuaacuc

SEQ ID NO: 1033146 - RNA, 19 nt, Artificial Sequence
  Description of Artificial Sequence: Synthetic oligonucleotide
  Sense strand starting at position 2744 of SEQ ID NO: 914819
augacaggacucugucuua

SEQ ID NO: 1033147 - RNA, 19 nt, Artificial Sequence
  Description of Artificial Sequence: Synthetic oligonucleotide
  Antisense strand to SEQ ID NO: 1033146
uaagacagaguccugucau

SEQ ID NO: 1033148 - RNA, 19 nt, Artificial Sequence
  Description of Artificial Sequence: Synthetic oligonucleotide
  Sense strand starting at position 2803 of SEQ ID NO: 914819
gggacucagaacuguuaca

SEQ ID NO: 1033149 - RNA, 19 nt, Artificial Sequence
  Description of Artificial Sequence: Synthetic oligonucleotide
  Antisense strand to SEQ ID NO: 1033148
uguaacaguucugaguccc

SEQ ID NO: 1033150 - RNA, 19 nt, Artificial Sequence
  Description of Artificial Sequence: Synthetic oligonucleotide
  Sense strand starting at position 3024 of SEQ ID NO: 914819
gagugugguccucaggaag

SEQ ID NO: 1033151 - RNA, 19 nt, Artificial Sequence
  Description of Artificial Sequence: Synthetic oligonucleotide
  Antisense strand to SEQ ID NO: 1033150
cuuccugaggaccacacuc

SEQ ID NO: 1033152 - RNA, 19 nt, Artificial Sequence
  Description of Artificial Sequence: Synthetic oligonucleotide
  Sense strand starting at position 3084 of SEQ ID NO: 914819
agagcaaccucagucugaa

SEQ ID NO: 1033153 - RNA, 19 nt, Artificial Sequence
  Description of Artificial Sequence: Synthetic oligonucleotide
  Antisense strand to SEQ ID NO: 1033152
uucagacugagguugcucu

SEQ ID NO: 1033154 - RNA, 19 nt, Artificial Sequence
  Description of Artificial Sequence: Synthetic oligonucleotide
  Sense strand starting at position 538 of SEQ ID NO: 914820
aaggaaaggucaugagaag

SEQ ID NO: 1033155 - RNA, 19 nt, Artificial Sequence
  Description of Artificial Sequence: Synthetic oligonucleotide
  Antisense strand to SEQ ID NO: 1033154
cuucucaugaccuuuccuu

SEQ ID NO: 1033156 - RNA, 19 nt, Artificial Sequence
  Description of Artificial Sequence: Synthetic oligonucleotide
  Sense strand starting at position 862 of SEQ ID NO: 914820
ggugggaacguccguuaca

SEQ ID NO: 1033157 - RNA, 19 nt, Artificial Sequence
  Description of Artificial Sequence: Synthetic oligonucleotide
  Antisense strand to SEQ ID NO: 1033156
uguaacggacguucccacc

SEQ ID NO: 1033158 - RNA, 19 nt, Artificial Sequence
  Description of Artificial Sequence: Synthetic oligonucleotide
  Sense strand starting at position 865 of SEQ ID NO: 914820
gggaacguccguuacagaa

SEQ ID NO: 1033159 - RNA, 19 nt, Artificial Sequence
  Description of Artificial Sequence: Synthetic oligonucleotide
  Antisense strand to SEQ ID NO: 1033158
uucuguaacggacguuccc

SEQ ID NO: 1033160 - RNA, 19 nt, Artificial Sequence
  Description of Artificial Sequence: Synthetic oligonucleotide
  Sense strand starting at position 929 of SEQ ID NO: 914820
gaggaaugguccuugguuc

SEQ ID NO: 1033161 - RNA, 19 nt, Artificial Sequence
  Description of Artificial Sequence: Synthetic oligonucleotide
  Antisense strand to SEQ ID NO: 1033160
gaaccaaggaccauuccuc

SEQ ID NO: 1033162 - RNA, 19 nt, Artificial Sequence
  Description of Artificial Sequence: Synthetic oligonucleotide
  Sense strand starting at position 930 of SEQ ID NO: 914820
aggaaugguccuugguuca

SEQ ID NO: 1033163 - RNA, 19 nt, Artificial Sequence
  Description of Artificial Sequence: Synthetic oligonucleotide
  Antisense strand to SEQ ID NO: 1033162
ugaaccaaggaccauuccu

SEQ ID NO: 1033164 - RNA, 19 nt, Artificial Sequence
  Description of Artificial Sequence: Synthetic oligonucleotide
  Sense strand starting at position 940 of SEQ ID NO: 914820
cuugguucacgugaugaau

SEQ ID NO: 1033165 - RNA, 19 nt, Artificial Sequence
  Description of Artificial Sequence: Synthetic oligonucleotide
  Antisense strand to SEQ ID NO: 1033164
auucaucacgugaaccaag

SEQ ID NO: 1033166 - RNA, 19 nt, Artificial Sequence
  Description of Artificial Sequence: Synthetic oligonucleotide
  Sense strand starting at position 967 of SEQ ID NO: 914820
gaaccugucuccucaggau

SEQ ID NO: 1033167 - RNA, 19 nt, Artificial Sequence
  Description of Artificial Sequence: Synthetic oligonucleotide
  Antisense strand to SEQ ID NO: 1033166
auccugaggagacagguuc

SEQ ID NO: 1033168 - RNA, 19 nt, Artificial Sequence
  Description of Artificial Sequence: Synthetic oligonucleotide
  Sense strand starting at position 1138 of SEQ ID NO: 914820
uccugugaccauuacuuau

SEQ ID NO: 1033169 - RNA, 19 nt, Artificial Sequence
  Description of Artificial Sequence: Synthetic oligonucleotide
  Antisense strand to SEQ ID NO: 1033168
auaaguaauggucacagga

SEQ ID NO: 1033170 - RNA, 19 nt, Artificial Sequence
  Description of Artificial Sequence: Synthetic oligonucleotide
  Sense strand starting at position 1145 of SEQ ID NO: 914820
accauuacuuaugucuuga

SEQ ID NO: 1033171 - RNA, 19 nt, Artificial Sequence
  Description of Artificial Sequence: Synthetic oligonucleotide
  Antisense strand to SEQ ID NO: 1033170
ucaagacauaaguaauggu

SEQ ID NO: 1033172 - RNA, 19 nt, Artificial Sequence
  Description of Artificial Sequence: Synthetic oligonucleotide
  Sense strand starting at position 1158 of SEQ ID NO: 914820
ucuugaguucucuguccua

SEQ ID NO: 1033173 - RNA, 19 nt, Artificial Sequence
  Description of Artificial Sequence: Synthetic oligonucleotide
  Antisense strand to SEQ ID NO: 1033172
uaggacagagaacucaaga

SEQ ID NO: 1033174 - RNA, 19 nt, Artificial Sequence
  Description of Artificial Sequence: Synthetic oligonucleotide
  Sense strand starting at position 1161 of SEQ ID NO: 914820
ugaguucucuguccuauuu

SEQ ID NO: 1033175 - RNA, 19 nt, Artificial Sequence
  Description of Artificial Sequence: Synthetic oligonucleotide
  Antisense strand to SEQ ID NO: 1033174
aaauaggacagagaacuca

SEQ ID NO: 1033176 - RNA, 19 nt, Artificial Sequence
  Description of Artificial Sequence: Synthetic oligonucleotide
  Sense strand starting at position 1163 of SEQ ID NO: 914820
aguucucuguccuauuuga

SEQ ID NO: 1033177 - RNA, 19 nt, Artificial Sequence
  Description of Artificial Sequence: Synthetic oligonucleotide
  Antisense strand to SEQ ID NO: 1033176
ucaaauaggacagagaacu

SEQ ID NO: 1033178 - RNA, 19 nt, Artificial Sequence
  Description of Artificial Sequence: Synthetic oligonucleotide
  Sense strand starting at position 1173 of SEQ ID NO: 914820
ccuauuugauagggagcau

SEQ ID NO: 1033179 - RNA, 19 nt, Artificial Sequence
  Description of Artificial Sequence: Synthetic oligonucleotide
  Antisense strand to SEQ ID NO: 1033178
augcucccuaucaaauagg

SEQ ID NO: 1033180 - RNA, 19 nt, Artificial Sequence
  Description of Artificial Sequence: Synthetic oligonucleotide
  Sense strand starting at position 1653 of SEQ ID NO: 914820
cagagaugucuggguucua

SEQ ID NO: 1033181 - RNA, 19 nt, Artificial Sequence
  Description of Artificial Sequence: Synthetic oligonucleotide
  Antisense strand to SEQ ID NO: 1033180
uagaacccagacaucucug

SEQ ID NO: 1033182 - RNA, 19 nt, Artificial Sequence
  Description of Artificial Sequence: Synthetic oligonucleotide
  Sense strand starting at position 1662 of SEQ ID NO: 914820
cuggguucuagccagggaa

SEQ ID NO: 1033183 - RNA, 19 nt, Artificial Sequence
  Description of Artificial Sequence: Synthetic oligonucleotide
  Antisense strand to SEQ ID NO: 1033182
uucccuggcuagaacccag

SEQ ID NO: 1033184 - RNA, 19 nt, Artificial Sequence
  Description of Artificial Sequence: Synthetic oligonucleotide
  Sense strand starting at position 1664 of SEQ ID NO: 914820
ggguucuagccagggaauc

SEQ ID NO: 1033185 - RNA, 19 nt, Artificial Sequence
  Description of Artificial Sequence: Synthetic oligonucleotide
  Antisense strand to SEQ ID NO: 1033184
gauucccuggcuagaaccc

SEQ ID NO: 1033186 - RNA, 19 nt, Artificial Sequence
  Description of Artificial Sequence: Synthetic oligonucleotide
  Sense strand starting at position 1665 of SEQ ID NO: 914820
gguucuagccagggaauca

SEQ ID NO: 1033187 - RNA, 19 nt, Artificial Sequence
  Description of Artificial Sequence: Synthetic oligonucleotide
  Antisense strand to SEQ ID NO: 1033186
ugauucccuggcuagaacc

SEQ ID NO: 1033188 - RNA, 19 nt, Artificial Sequence
  Description of Artificial Sequence: Synthetic oligonucleotide
  Sense strand starting at position 1828 of SEQ ID NO: 914820
gagugaaggcuccggguua

SEQ ID NO: 1033189 - RNA, 19 nt, Artificial Sequence
  Description of Artificial Sequence: Synthetic oligonucleotide
  Antisense strand to SEQ ID NO: 1033188
uaacccggagccuucacuc

SEQ ID NO: 1033190 - RNA, 19 nt, Artificial Sequence
  Description of Artificial Sequence: Synthetic oligonucleotide
  Sense strand starting at position 2876 of SEQ ID NO: 914820
ggucuagguucacuaguag

SEQ ID NO: 1033191 - RNA, 19 nt, Artificial Sequence
  Description of Artificial Sequence: Synthetic oligonucleotide
  Antisense strand to SEQ ID NO: 1033190
cuacuagugaaccuagacc

SEQ ID NO: 1033192 - RNA, 19 nt, Artificial Sequence
  Description of Artificial Sequence: Synthetic oligonucleotide
  Sense strand starting at position 3031 of SEQ ID NO: 914820
uuccuccuugucuguagaa

SEQ ID NO: 1033193 - RNA, 19 nt, Artificial Sequence
  Description of Artificial Sequence: Synthetic oligonucleotide
  Antisense strand to SEQ ID NO: 1033192
uucuacagacaaggaggaa

SEQ ID NO: 1033194 - RNA, 19 nt, Artificial Sequence
  Description of Artificial Sequence: Synthetic oligonucleotide
  Sense strand starting at position 3033 of SEQ ID NO: 914820
ccuccuugucuguagaacu

SEQ ID NO: 1033195 - RNA, 19 nt, Artificial Sequence
  Description of Artificial Sequence: Synthetic oligonucleotide
  Antisense strand to SEQ ID NO: 1033194
aguucuacagacaaggagg

SEQ ID NO: 1033196 - RNA, 19 nt, Artificial Sequence
  Description of Artificial Sequence: Synthetic oligonucleotide
  Sense strand starting at position 3166 of SEQ ID NO: 914820
gagucuacaucagaauaug

SEQ ID NO: 1033197 - RNA, 19 nt, Artificial Sequence
  Description of Artificial Sequence: Synthetic oligonucleotide
  Antisense strand to SEQ ID NO: 1033196
cauauucugauguagacuc

SEQ ID NO: 1033198 - RNA, 19 nt, Artificial Sequence
  Description of Artificial Sequence: Synthetic oligonucleotide
  Sense strand starting at position 3180 of SEQ ID NO: 914820
auaugaaucuugucacuga

SEQ ID NO: 1033199 - RNA, 19 nt, Artificial Sequence
  Description of Artificial Sequence: Synthetic oligonucleotide
  Antisense strand to SEQ ID NO: 1033198
ucagugacaagauucauau

SEQ ID NO: 1033200 - RNA, 19 nt, Artificial Sequence
  Description of Artificial Sequence: Synthetic oligonucleotide
  Sense strand starting at position 3189 of SEQ ID NO: 914820
uugucacugaugggacaaa

SEQ ID NO: 1033201 - RNA, 19 nt, Artificial Sequence
  Description of Artificial Sequence: Synthetic oligonucleotide
  Antisense strand to SEQ ID NO: 1033200
uuugucccaucagugacaa

SEQ ID NO: 1033202 - RNA, 19 nt, Artificial Sequence
  Description of Artificial Sequence: Synthetic oligonucleotide
  Sense strand starting at position 3240 of SEQ ID NO: 914820
gggugaggcgugugaggaa

SEQ ID NO: 1033203 - RNA, 19 nt, Artificial Sequence
  Description of Artificial Sequence: Synthetic oligonucleotide
  Antisense strand to SEQ ID NO: 1033202
uuccucacacgccucaccc

SEQ ID NO: 1033204 - RNA, 19 nt, Artificial Sequence
  Description of Artificial Sequence: Synthetic oligonucleotide
  Sense strand starting at position 3267 of SEQ ID NO: 914820
gcuaaaucuaaggagguuu

SEQ ID NO: 1033205 - RNA, 19 nt, Artificial Sequence
  Description of Artificial Sequence: Synthetic oligonucleotide
  Antisense strand to SEQ ID NO: 1033204
aaaccuccuuagauuuagc

SEQ ID NO: 1033206 - RNA, 19 nt, Artificial Sequence
  Description of Artificial Sequence: Synthetic oligonucleotide
  Sense strand starting at position 3293 of SEQ ID NO: 914820
gggucaugcaguuauccau

SEQ ID NO: 1033207 - RNA, 19 nt, Artificial Sequence
  Description of Artificial Sequence: Synthetic oligonucleotide
  Antisense strand to SEQ ID NO: 1033206
auggauaacugcaugaccc

SEQ ID NO: 1033208 - RNA, 19 nt, Artificial Sequence
  Description of Artificial Sequence: Synthetic oligonucleotide
  Sense strand starting at position 3300 of SEQ ID NO: 914820
gcaguuauccauggaggca

SEQ ID NO: 1033209 - RNA, 19 nt, Artificial Sequence
  Description of Artificial Sequence: Synthetic oligonucleotide
  Antisense strand to SEQ ID NO: 1033208
ugccuccauggauaacugc

SEQ ID NO: 1033210 - RNA, 19 nt, Artificial Sequence
  Description of Artificial Sequence: Synthetic oligonucleotide
  Sense strand starting at position 3349 of SEQ ID NO: 914820
gcauauauuaaguguggac

SEQ ID NO: 1033211 - RNA, 19 nt, Artificial Sequence
  Description of Artificial Sequence: Synthetic oligonucleotide
  Antisense strand to SEQ ID NO: 1033210
guccacacuuaauauaugc

SEQ ID NO: 1033212 - RNA, 19 nt, Artificial Sequence
  Description of Artificial Sequence: Synthetic oligonucleotide
  Sense strand starting at position 3377 of SEQ ID NO: 914820
augucugagguuugugacu

SEQ ID NO: 1033213 - RNA, 19 nt, Artificial Sequence
  Description of Artificial Sequence: Synthetic oligonucleotide
  Antisense strand to SEQ ID NO: 1033212
agucacaaaccucagacau

SEQ ID NO: 1033214 - RNA, 19 nt, Artificial Sequence
  Description of Artificial Sequence: Synthetic oligonucleotide
  Sense strand starting at position 3382 of SEQ ID NO: 914820
ugagguuugugacuccugu

SEQ ID NO: 1033215 - RNA, 19 nt, Artificial Sequence
  Description of Artificial Sequence: Synthetic oligonucleotide
  Antisense strand to SEQ ID NO: 1033214
acaggagucacaaaccuca

SEQ ID NO: 1033216 - RNA, 19 nt, Artificial Sequence
  Description of Artificial Sequence: Synthetic oligonucleotide
  Sense strand starting at position 3456 of SEQ ID NO: 914820
ggguuugguggaugcauca

SEQ ID NO: 1033217 - RNA, 19 nt, Artificial Sequence
  Description of Artificial Sequence: Synthetic oligonucleotide
  Antisense strand to SEQ ID NO: 1033216
ugaugcauccaccaaaccc

SEQ ID NO: 1033218 - RNA, 19 nt, Artificial Sequence
  Description of Artificial Sequence: Synthetic oligonucleotide
  Sense strand starting at position 3571 of SEQ ID NO: 914820
cuaggugucuaguucaugu

SEQ ID NO: 1033219 - RNA, 19 nt, Artificial Sequence
  Description of Artificial Sequence: Synthetic oligonucleotide
  Antisense strand to SEQ ID NO: 1033218
acaugaacuagacaccuag

SEQ ID NO: 1033220 - RNA, 19 nt, Artificial Sequence
  Description of Artificial Sequence: Synthetic oligonucleotide
  Sense strand starting at position 3630 of SEQ ID NO: 914820
gggcuucuagcauguaaga

SEQ ID NO: 1033221 - RNA, 19 nt, Artificial Sequence
  Description of Artificial Sequence: Synthetic oligonucleotide
  Antisense strand to SEQ ID NO: 1033220
ucuuacaugcuagaagccc

SEQ ID NO: 1033222 - RNA, 19 nt, Artificial Sequence
  Description of Artificial Sequence: Synthetic oligonucleotide
  Sense strand starting at position 3632 of SEQ ID NO: 914820
gcuucuagcauguaagaug

SEQ ID NO: 1033223 - RNA, 19 nt, Artificial Sequence
  Description of Artificial Sequence: Synthetic oligonucleotide
  Antisense strand to SEQ ID NO: 1033222
caucuuacaugcuagaagc

SEQ ID NO: 1033224 - RNA, 19 nt, Artificial Sequence
  Description of Artificial Sequence: Synthetic oligonucleotide
  Sense strand starting at position 3639 of SEQ ID NO: 914820
gcauguaagaugcaggaga

SEQ ID NO: 1033225 - RNA, 19 nt, Artificial Sequence
  Description of Artificial Sequence: Synthetic oligonucleotide
  Antisense strand to SEQ ID NO: 1033224
ucuccugcaucuuacaugc

SEQ ID NO: 1033226 - RNA, 19 nt, Artificial Sequence
  Description of Artificial Sequence: Synthetic oligonucleotide
  Sense strand starting at position 3675 of SEQ ID NO: 914820
ccagcaucuccaggaguua

SEQ ID NO: 1033227 - RNA, 19 nt, Artificial Sequence
  Description of Artificial Sequence: Synthetic oligonucleotide
  Antisense strand to SEQ ID NO: 1033226
uaacuccuggagaugcugg

SEQ ID NO: 1033228 - RNA, 19 nt, Artificial Sequence
  Description of Artificial Sequence: Synthetic oligonucleotide
  Sense strand starting at position 3688 of SEQ ID NO: 914820
gaguuaggucaggaggcaa

SEQ ID NO: 1033229 - RNA, 19 nt, Artificial Sequence
  Description of Artificial Sequence: Synthetic oligonucleotide
  Antisense strand to SEQ ID NO: 1033228
uugccuccugaccuaacuc

SEQ ID NO: 1033230 - RNA, 19 nt, Artificial Sequence
  Description of Artificial Sequence: Synthetic oligonucleotide
  Sense strand starting at position 3759 of SEQ ID NO: 914820
augacaggacucugucuua

SEQ ID NO: 1033231 - RNA, 19 nt, Artificial Sequence
  Description of Artificial Sequence: Synthetic oligonucleotide
  Antisense strand to SEQ ID NO: 1033230
uaagacagaguccugucau

SEQ ID NO: 1033232 - RNA, 19 nt, Artificial Sequence
  Description of Artificial Sequence: Synthetic oligonucleotide
  Sense strand starting at position 3818 of SEQ ID NO: 914820
gggacucagaacuguuaca

SEQ ID NO: 1033233 - RNA, 19 nt, Artificial Sequence
  Description of Artificial Sequence: Synthetic oligonucleotide
  Antisense strand to SEQ ID NO: 1033232
uguaacaguucugaguccc

SEQ ID NO: 1033234 - RNA, 19 nt, Artificial Sequence
  Description of Artificial Sequence: Synthetic oligonucleotide
  Sense strand starting at position 228 of SEQ ID NO: 914821
aaggaaaggucaugagaag

SEQ ID NO: 1033235 - RNA, 19 nt, Artificial Sequence
  Description of Artificial Sequence: Synthetic oligonucleotide
  Antisense strand to SEQ ID NO: 1033234
cuucucaugaccuuuccuu

SEQ ID NO: 1033236 - RNA, 19 nt, Artificial Sequence
  Description of Artificial Sequence: Synthetic oligonucleotide
  Sense strand starting at position 552 of SEQ ID NO: 914821
ggugggaacguccguuaca

SEQ ID NO: 1033237 - RNA, 19 nt, Artificial Sequence
  Description of Artificial Sequence: Synthetic oligonucleotide
  Antisense strand to SEQ ID NO: 1033236
uguaacggacguucccacc

SEQ ID NO: 1033238 - RNA, 19 nt, Artificial Sequence
  Description of Artificial Sequence: Synthetic oligonucleotide
  Sense strand starting at position 555 of SEQ ID NO: 914821
gggaacguccguuacagaa

SEQ ID NO: 1033239 - RNA, 19 nt, Artificial Sequence
  Description of Artificial Sequence: Synthetic oligonucleotide
  Antisense strand to SEQ ID NO: 1033238
uucuguaacggacguuccc

SEQ ID NO: 1033240 - RNA, 19 nt, Artificial Sequence
  Description of Artificial Sequence: Synthetic oligonucleotide
  Sense strand starting at position 619 of SEQ ID NO: 914821
gaggaaugguccuugguuc

SEQ ID NO: 1033241 - RNA, 19 nt, Artificial Sequence
  Description of Artificial Sequence: Synthetic oligonucleotide
  Antisense strand to SEQ ID NO: 1033240
gaaccaaggaccauuccuc

SEQ ID NO: 1033242 - RNA, 19 nt, Artificial Sequence
  Description of Artificial Sequence: Synthetic oligonucleotide
  Sense strand starting at position 620 of SEQ ID NO: 914821
aggaaugguccuugguuca

SEQ ID NO: 1033243 - RNA, 19 nt, Artificial Sequence
  Description of Artificial Sequence: Synthetic oligonucleotide
  Antisense strand to SEQ ID NO: 1033242
ugaaccaaggaccauuccu

SEQ ID NO: 1033244 - RNA, 19 nt, Artificial Sequence
  Description of Artificial Sequence: Synthetic oligonucleotide
  Sense strand starting at position 630 of SEQ ID NO: 914821
cuugguucacgugaugaau

SEQ ID NO: 1033245 - RNA, 19 nt, Artificial Sequence
  Description of Artificial Sequence: Synthetic oligonucleotide
  Antisense strand to SEQ ID NO: 1033244
auucaucacgugaaccaag

SEQ ID NO: 1033246 - RNA, 19 nt, Artificial Sequence
  Description of Artificial Sequence: Synthetic oligonucleotide
  Sense strand starting at position 657 of SEQ ID NO: 914821
gaaccugucuccucaggau

SEQ ID NO: 1033247 - RNA, 19 nt, Artificial Sequence
  Description of Artificial Sequence: Synthetic oligonucleotide
  Antisense strand to SEQ ID NO: 1033246
auccugaggagacagguuc

SEQ ID NO: 1033248 - RNA, 19 nt, Artificial Sequence
  Description of Artificial Sequence: Synthetic oligonucleotide
  Sense strand starting at position 828 of SEQ ID NO: 914821
uccugugaccauuacuuau

SEQ ID NO: 1033249 - RNA, 19 nt, Artificial Sequence
  Description of Artificial Sequence: Synthetic oligonucleotide
  Antisense strand to SEQ ID NO: 1033248
auaaguaauggucacagga

SEQ ID NO: 1033250 - RNA, 19 nt, Artificial Sequence
  Description of Artificial Sequence: Synthetic oligonucleotide
  Sense strand starting at position 835 of SEQ ID NO: 914821
accauuacuuaugucuuga

SEQ ID NO: 1033251 - RNA, 19 nt, Artificial Sequence
  Description of Artificial Sequence: Synthetic oligonucleotide
  Antisense strand to SEQ ID NO: 1033250
ucaagacauaaguaauggu

SEQ ID NO: 1033252 - RNA, 19 nt, Artificial Sequence
  Description of Artificial Sequence: Synthetic oligonucleotide
  Sense strand starting at position 848 of SEQ ID NO: 914821
ucuugaguucucuguccua

SEQ ID NO: 1033253 - RNA, 19 nt, Artificial Sequence
  Description of Artificial Sequence: Synthetic oligonucleotide
  Antisense strand to SEQ ID NO: 1033252
uaggacagagaacucaaga

SEQ ID NO: 1033254 - RNA, 19 nt, Artificial Sequence
  Description of Artificial Sequence: Synthetic oligonucleotide
  Sense strand starting at position 851 of SEQ ID NO: 914821
ugaguucucuguccuauuu

SEQ ID NO: 1033255 - RNA, 19 nt, Artificial Sequence
  Description of Artificial Sequence: Synthetic oligonucleotide
  Antisense strand to SEQ ID NO: 1033254
aaauaggacagagaacuca

SEQ ID NO: 1033256 - RNA, 19 nt, Artificial Sequence
  Description of Artificial Sequence: Synthetic oligonucleotide
  Sense strand starting at position 863 of SEQ ID NO: 914821
ccuauuugauagggagcau

SEQ ID NO: 1033257 - RNA, 19 nt, Artificial Sequence
  Description of Artificial Sequence: Synthetic oligonucleotide
  Antisense strand to SEQ ID NO: 1033256
augcucccuaucaaauagg

SEQ ID NO: 1033258 - RNA, 19 nt, Artificial Sequence
  Description of Artificial Sequence: Synthetic oligonucleotide
  Sense strand starting at position 1343 of SEQ ID NO: 914821
cagagaugucuggguucua

SEQ ID NO: 1033259 - RNA, 19 nt, Artificial Sequence
  Description of Artificial Sequence: Synthetic oligonucleotide
  Antisense strand to SEQ ID NO: 1033258
uagaacccagacaucucug

SEQ ID NO: 1033260 - RNA, 19 nt, Artificial Sequence
  Description of Artificial Sequence: Synthetic oligonucleotide
  Sense strand starting at position 1352 of SEQ ID NO: 914821
cuggguucuagccagggaa

SEQ ID NO: 1033261 - RNA, 19 nt, Artificial Sequence
  Description of Artificial Sequence: Synthetic oligonucleotide
  Antisense strand to SEQ ID NO: 1033260
uucccuggcuagaacccag

SEQ ID NO: 1033262 - RNA, 19 nt, Artificial Sequence
  Description of Artificial Sequence: Synthetic oligonucleotide
  Sense strand starting at position 1354 of SEQ ID NO: 914821
ggguucuagccagggaauc

SEQ ID NO: 1033263 - RNA, 19 nt, Artificial Sequence
  Description of Artificial Sequence: Synthetic oligonucleotide
  Antisense strand to SEQ ID NO: 1033262
gauucccuggcuagaaccc

SEQ ID NO: 1033264 - RNA, 19 nt, Artificial Sequence
  Description of Artificial Sequence: Synthetic oligonucleotide
  Sense strand starting at position 1355 of SEQ ID NO: 914821
gguucuagccagggaauca

SEQ ID NO: 1033265 - RNA, 19 nt, Artificial Sequence
  Description of Artificial Sequence: Synthetic oligonucleotide
  Antisense strand to SEQ ID NO: 1033264
ugauucccuggcuagaacc

SEQ ID NO: 1033266 - RNA, 19 nt, Artificial Sequence
  Description of Artificial Sequence: Synthetic oligonucleotide
  Sense strand starting at position 1518 of SEQ ID NO: 914821
gagugaaggcuccggguua

SEQ ID NO: 1033267 - RNA, 19 nt, Artificial Sequence
  Description of Artificial Sequence: Synthetic oligonucleotide
  Antisense strand to SEQ ID NO: 1033266
uaacccggagccuucacuc

SEQ ID NO: 1033268 - RNA, 19 nt, Artificial Sequence
  Description of Artificial Sequence: Synthetic oligonucleotide
  Sense strand starting at position 2566 of SEQ ID NO: 914821
ggucuagguucacuaguag

SEQ ID NO: 1033269 - RNA, 19 nt, Artificial Sequence
  Description of Artificial Sequence: Synthetic oligonucleotide
  Antisense strand to SEQ ID NO: 1033268
cuacuagugaaccuagacc

SEQ ID NO: 1033270 - RNA, 19 nt, Artificial Sequence
  Description of Artificial Sequence: Synthetic oligonucleotide
  Sense strand starting at position 2721 of SEQ ID NO: 914821
uuccuccuugucuguagaa

SEQ ID NO: 1033271 - RNA, 19 nt, Artificial Sequence
  Description of Artificial Sequence: Synthetic oligonucleotide
  Antisense strand to SEQ ID NO: 1033270
uucuacagacaaggaggaa

SEQ ID NO: 1033272 - RNA, 19 nt, Artificial Sequence
  Description of Artificial Sequence: Synthetic oligonucleotide
  Sense strand starting at position 2723 of SEQ ID NO: 914821
ccuccuugucuguagaacu

SEQ ID NO: 1033273 - RNA, 19 nt, Artificial Sequence
  Description of Artificial Sequence: Synthetic oligonucleotide
  Antisense strand to SEQ ID NO: 1033272
aguucuacagacaaggagg

SEQ ID NO: 1033274 - RNA, 19 nt, Artificial Sequence
  Description of Artificial Sequence: Synthetic oligonucleotide
  Sense strand starting at position 2856 of SEQ ID NO: 914821
gagucuacaucagaauaug

SEQ ID NO: 1033275 - RNA, 19 nt, Artificial Sequence
  Description of Artificial Sequence: Synthetic oligonucleotide
  Antisense strand to SEQ ID NO: 1033274
cauauucugauguagacuc

SEQ ID NO: 1033276 - RNA, 19 nt, Artificial Sequence
  Description of Artificial Sequence: Synthetic oligonucleotide
  Sense strand starting at position 2870 of SEQ ID NO: 914821
auaugaaucuugucacuga

SEQ ID NO: 1033277 - RNA, 19 nt, Artificial Sequence
  Description of Artificial Sequence: Synthetic oligonucleotide
  Antisense strand to SEQ ID NO: 1033276
ucagugacaagauucauau

SEQ ID NO: 1033278 - RNA, 19 nt, Artificial Sequence
  Description of Artificial Sequence: Synthetic oligonucleotide
  Sense strand starting at position 2879 of SEQ ID NO: 914821
uugucacugaugggacaaa

SEQ ID NO: 1033279 - RNA, 19 nt, Artificial Sequence
  Description of Artificial Sequence: Synthetic oligonucleotide
  Antisense strand to SEQ ID NO: 1033278
uuugucccaucagugacaa

SEQ ID NO: 1033280 - RNA, 19 nt, Artificial Sequence
  Description of Artificial Sequence: Synthetic oligonucleotide
  Sense strand starting at position 2930 of SEQ ID NO: 914821
gggugaggcgugugaggaa

SEQ ID NO: 1033281 - RNA, 19 nt, Artificial Sequence
  Description of Artificial Sequence: Synthetic oligonucleotide
  Antisense strand to SEQ ID NO: 1033280
uuccucacacgccucaccc

SEQ ID NO: 1033282 - RNA, 19 nt, Artificial Sequence
  Description of Artificial Sequence: Synthetic oligonucleotide
  Sense strand starting at position 2957 of SEQ ID NO: 914821
gcuaaaucuaaggagguuu

SEQ ID NO: 1033283 - RNA, 19 nt, Artificial Sequence
  Description of Artificial Sequence: Synthetic oligonucleotide
  Antisense strand to SEQ ID NO: 1033282
aaaccuccuuagauuuagc

SEQ ID NO: 1033284 - RNA, 19 nt, Artificial Sequence
  Description of Artificial Sequence: Synthetic oligonucleotide
  Sense strand starting at position 2983 of SEQ ID NO: 914821
gggucaugcaguuauccau

SEQ ID NO: 1033285 - RNA, 19 nt, Artificial Sequence
  Description of Artificial Sequence: Synthetic oligonucleotide
  Antisense strand to SEQ ID NO: 1033284
auggauaacugcaugaccc

SEQ ID NO: 1033286 - RNA, 19 nt, Artificial Sequence
  Description of Artificial Sequence: Synthetic oligonucleotide
  Sense strand starting at position 2990 of SEQ ID NO: 914821
gcaguuauccauggaggca

SEQ ID NO: 1033287 - RNA, 19 nt, Artificial Sequence
  Description of Artificial Sequence: Synthetic oligonucleotide
  Antisense strand to SEQ ID NO: 1033286
ugccuccauggauaacugc

SEQ ID NO: 1033288 - RNA, 19 nt, Artificial Sequence
  Description of Artificial Sequence: Synthetic oligonucleotide
  Sense strand starting at position 3039 of SEQ ID NO: 914821
gcauauauuaaguguggac

SEQ ID NO: 1033289 - RNA, 19 nt, Artificial Sequence
  Description of Artificial Sequence: Synthetic oligonucleotide
  Antisense strand to SEQ ID NO: 1033288
guccacacuuaauauaugc

SEQ ID NO: 1033290 - RNA, 19 nt, Artificial Sequence
  Description of Artificial Sequence: Synthetic oligonucleotide
  Sense strand starting at position 3067 of SEQ ID NO: 914821
augucugagguuugugacu

SEQ ID NO: 1033291 - RNA, 19 nt, Artificial Sequence
  Description of Artificial Sequence: Synthetic oligonucleotide
  Antisense strand to SEQ ID NO: 1033290
agucacaaaccucagacau

SEQ ID NO: 1033292 - RNA, 19 nt, Artificial Sequence
  Description of Artificial Sequence: Synthetic oligonucleotide
  Sense strand starting at position 3072 of SEQ ID NO: 914821
ugagguuugugacuccugu

SEQ ID NO: 1033293 - RNA, 19 nt, Artificial Sequence
  Description of Artificial Sequence: Synthetic oligonucleotide
  Antisense strand to SEQ ID NO: 1033292
acaggagucacaaaccuca

SEQ ID NO: 1033294 - RNA, 19 nt, Artificial Sequence
  Description of Artificial Sequence: Synthetic oligonucleotide
  Sense strand starting at position 3146 of SEQ ID NO: 914821
ggguuugguggaugcauca

SEQ ID NO: 1033295 - RNA, 19 nt, Artificial Sequence
  Description of Artificial Sequence: Synthetic oligonucleotide
  Antisense strand to SEQ ID NO: 1033294
ugaugcauccaccaaaccc

SEQ ID NO: 1033296 - RNA, 19 nt, Artificial Sequence
  Description of Artificial Sequence: Synthetic oligonucleotide
  Sense strand starting at position 3320 of SEQ ID NO: 914821
gggcuucuagcauguaaga

SEQ ID NO: 1033297 - RNA, 19 nt, Artificial Sequence
  Description of Artificial Sequence: Synthetic oligonucleotide
  Antisense strand to SEQ ID NO: 1033296
ucuuacaugcuagaagccc

SEQ ID NO: 1033298 - RNA, 19 nt, Artificial Sequence
  Description of Artificial Sequence: Synthetic oligonucleotide
  Sense strand starting at position 3322 of SEQ ID NO: 914821
gcuucuagcauguaagaug

SEQ ID NO: 1033299 - RNA, 19 nt, Artificial Sequence
  Description of Artificial Sequence: Synthetic oligonucleotide
  Antisense strand to SEQ ID NO: 1033298
caucuuacaugcuagaagc

SEQ ID NO: 1033300 - RNA, 19 nt, Artificial Sequence
  Description of Artificial Sequence: Synthetic oligonucleotide
  Sense strand starting at position 3329 of SEQ ID NO: 914821
gcauguaagaugcaggaga

SEQ ID NO: 1033301 - RNA, 19 nt, Artificial Sequence
  Description of Artificial Sequence: Synthetic oligonucleotide
  Antisense strand to SEQ ID NO: 1033300
ucuccugcaucuuacaugc

SEQ ID NO: 1033302 - RNA, 19 nt, Artificial Sequence
  Description of Artificial Sequence: Synthetic oligonucleotide
  Sense strand starting at position 3365 of SEQ ID NO: 914821
ccagcaucuccaggaguua

SEQ ID NO: 1033303 - RNA, 19 nt, Artificial Sequence
  Description of Artificial Sequence: Synthetic oligonucleotide
  Antisense strand to SEQ ID NO: 1033302
uaacuccuggagaugcugg

SEQ ID NO: 1033304 - RNA, 19 nt, Artificial Sequence
  Description of Artificial Sequence: Synthetic oligonucleotide
  Sense strand starting at position 3378 of SEQ ID NO: 914821
gaguuaggucaggaggcaa

SEQ ID NO: 1033305 - RNA, 19 nt, Artificial Sequence
  Description of Artificial Sequence: Synthetic oligonucleotide
  Antisense strand to SEQ ID NO: 1033304
uugccuccugaccuaacuc

SEQ ID NO: 1033306 - RNA, 19 nt, Artificial Sequence
  Description of Artificial Sequence: Synthetic oligonucleotide
  Sense strand starting at position 3449 of SEQ ID NO: 914821
augacaggacucugucuua

SEQ ID NO: 1033307 - RNA, 19 nt, Artificial Sequence
  Description of Artificial Sequence: Synthetic oligonucleotide
  Antisense strand to SEQ ID NO: 1033306
uaagacagaguccugucau

SEQ ID NO: 1033308 - RNA, 19 nt, Artificial Sequence
  Description of Artificial Sequence: Synthetic oligonucleotide
  Sense strand starting at position 3508 of SEQ ID NO: 914821
gggacucagaacuguuaca

SEQ ID NO: 1033309 - RNA, 19 nt, Artificial Sequence
  Description of Artificial Sequence: Synthetic oligonucleotide
  Antisense strand to SEQ ID NO: 1033308
uguaacaguucugaguccc

SEQ ID NO: 1033310 - RNA, 19 nt, Artificial Sequence
  Description of Artificial Sequence: Synthetic oligonucleotide
  Sense strand starting at position 3729 of SEQ ID NO: 914821
gagugugguccucaggaag

SEQ ID NO: 1033311 - RNA, 19 nt, Artificial Sequence
  Description of Artificial Sequence: Synthetic oligonucleotide
  Antisense strand to SEQ ID NO: 1033310
cuuccugaggaccacacuc

SEQ ID NO: 1033312 - RNA, 19 nt, Artificial Sequence
  Description of Artificial Sequence: Synthetic oligonucleotide
  Sense strand starting at position 3789 of SEQ ID NO: 914821
agagcaaccucagucugaa

SEQ ID NO: 1033313 - RNA, 19 nt, Artificial Sequence
  Description of Artificial Sequence: Synthetic oligonucleotide
  Antisense strand to SEQ ID NO: 1033312
uucagacugagguugcucu

SEQ ID NO: 1033314 - RNA, 19 nt, Artificial Sequence
  Description of Artificial Sequence: Synthetic oligonucleotide
  Sense strand starting at position 1 of SEQ ID NO: 914822
gggaacguccguuacagaa

SEQ ID NO: 1033315 - RNA, 19 nt, Artificial Sequence
  Description of Artificial Sequence: Synthetic oligonucleotide
  Antisense strand to SEQ ID NO: 1033314
uucuguaacggacguuccc

SEQ ID NO: 1033316 - RNA, 19 nt, Artificial Sequence
  Description of Artificial Sequence: Synthetic oligonucleotide
  Sense strand starting at position 65 of SEQ ID NO: 914822
gaggaaugguccuugguuc

SEQ ID NO: 1033317 - RNA, 19 nt, Artificial Sequence
  Description of Artificial Sequence: Synthetic oligonucleotide
  Antisense strand to SEQ ID NO: 1033316
gaaccaaggaccauuccuc

SEQ ID NO: 1033318 - RNA, 19 nt, Artificial Sequence
  Description of Artificial Sequence: Synthetic oligonucleotide
  Sense strand starting at position 66 of SEQ ID NO: 914822
aggaaugguccuugguuca

SEQ ID NO: 1033319 - RNA, 19 nt, Artificial Sequence
  Description of Artificial Sequence: Synthetic oligonucleotide
  Antisense strand to SEQ ID NO: 1033318
ugaaccaaggaccauuccu

SEQ ID NO: 1033320 - RNA, 19 nt, Artificial Sequence
  Description of Artificial Sequence: Synthetic oligonucleotide
  Sense strand starting at position 76 of SEQ ID NO: 914822
cuugguucacgugaugaau

SEQ ID NO: 1033321 - RNA, 19 nt, Artificial Sequence
  Description of Artificial Sequence: Synthetic oligonucleotide
  Antisense strand to SEQ ID NO: 1033320
auucaucacgugaaccaag

SEQ ID NO: 1033322 - RNA, 19 nt, Artificial Sequence
  Description of Artificial Sequence: Synthetic oligonucleotide
  Sense strand starting at position 103 of SEQ ID NO: 914822
gaaccugucuccucaggau

SEQ ID NO: 1033323 - RNA, 19 nt, Artificial Sequence
  Description of Artificial Sequence: Synthetic oligonucleotide
  Antisense strand to SEQ ID NO: 1033322
auccugaggagacagguuc

SEQ ID NO: 1033324 - RNA, 19 nt, Artificial Sequence
  Description of Artificial Sequence: Synthetic oligonucleotide
  Sense strand starting at position 274 of SEQ ID NO: 914822
uccugugaccauuacuuau

SEQ ID NO: 1033325 - RNA, 19 nt, Artificial Sequence
  Description of Artificial Sequence: Synthetic oligonucleotide
  Antisense strand to SEQ ID NO: 1033324
auaaguaauggucacagga

SEQ ID NO: 1033326 - RNA, 19 nt, Artificial Sequence
  Description of Artificial Sequence: Synthetic oligonucleotide
  Sense strand starting at position 281 of SEQ ID NO: 914822
accauuacuuaugucuuga

SEQ ID NO: 1033327 - RNA, 19 nt, Artificial Sequence
  Description of Artificial Sequence: Synthetic oligonucleotide
  Antisense strand to SEQ ID NO: 1033326
ucaagacauaaguaauggu

SEQ ID NO: 1033328 - RNA, 19 nt, Artificial Sequence
  Description of Artificial Sequence: Synthetic oligonucleotide
  Sense strand starting at position 294 of SEQ ID NO: 914822
ucuugaguucucuguccua

SEQ ID NO: 1033329 - RNA, 19 nt, Artificial Sequence
  Description of Artificial Sequence: Synthetic oligonucleotide
  Antisense strand to SEQ ID NO: 1033328
uaggacagagaacucaaga

SEQ ID NO: 1033330 - RNA, 19 nt, Artificial Sequence
  Description of Artificial Sequence: Synthetic oligonucleotide
  Sense strand starting at position 297 of SEQ ID NO: 914822
ugaguucucuguccuauuu

SEQ ID NO: 1033331 - RNA, 19 nt, Artificial Sequence
  Description of Artificial Sequence: Synthetic oligonucleotide
  Antisense strand to SEQ ID NO: 1033330
aaauaggacagagaacuca

SEQ ID NO: 1033332 - RNA, 19 nt, Artificial Sequence
  Description of Artificial Sequence: Synthetic oligonucleotide
  Sense strand starting at position 299 of SEQ ID NO: 914822
aguucucuguccuauuuga

SEQ ID NO: 1033333 - RNA, 19 nt, Artificial Sequence
  Description of Artificial Sequence: Synthetic oligonucleotide
  Antisense strand to SEQ ID NO: 1033332
ucaaauaggacagagaacu

SEQ ID NO: 1033334 - RNA, 19 nt, Artificial Sequence
  Description of Artificial Sequence: Synthetic oligonucleotide
  Sense strand starting at position 309 of SEQ ID NO: 914822
ccuauuugauagggagcau

SEQ ID NO: 1033335 - RNA, 19 nt, Artificial Sequence
  Description of Artificial Sequence: Synthetic oligonucleotide
  Antisense strand to SEQ ID NO: 1033334
augcucccuaucaaauagg

SEQ ID NO: 1033336 - RNA, 19 nt, Artificial Sequence
  Description of Artificial Sequence: Synthetic oligonucleotide
  Sense strand starting at position 789 of SEQ ID NO: 914822
cagagaugucuggguucua

SEQ ID NO: 1033337 - RNA, 19 nt, Artificial Sequence
  Description of Artificial Sequence: Synthetic oligonucleotide
  Antisense strand to SEQ ID NO: 1033336
uagaacccagacaucucug

SEQ ID NO: 1033338 - RNA, 19 nt, Artificial Sequence
  Description of Artificial Sequence: Synthetic oligonucleotide
  Sense strand starting at position 798 of SEQ ID NO: 914822
cuggguucuagccagggaa

SEQ ID NO: 1033339 - RNA, 19 nt, Artificial Sequence
  Description of Artificial Sequence: Synthetic oligonucleotide
  Antisense strand to SEQ ID NO: 1033338
uucccuggcuagaacccag

SEQ ID NO: 1033340 - RNA, 19 nt, Artificial Sequence
  Description of Artificial Sequence: Synthetic oligonucleotide
  Sense strand starting at position 800 of SEQ ID NO: 914822
ggguucuagccagggaauc

SEQ ID NO: 1033341 - RNA, 19 nt, Artificial Sequence
  Description of Artificial Sequence: Synthetic oligonucleotide
  Antisense strand to SEQ ID NO: 1033340
gauucccuggcuagaaccc

SEQ ID NO: 1033342 - RNA, 19 nt, Artificial Sequence
  Description of Artificial Sequence: Synthetic oligonucleotide
  Sense strand starting at position 801 of SEQ ID NO: 914822
gguucuagccagggaauca

SEQ ID NO: 1033343 - RNA, 19 nt, Artificial Sequence
  Description of Artificial Sequence: Synthetic oligonucleotide
  Antisense strand to SEQ ID NO: 1033342
ugauucccuggcuagaacc

SEQ ID NO: 1033344 - RNA, 19 nt, Artificial Sequence
  Description of Artificial Sequence: Synthetic oligonucleotide
  Sense strand starting at position 964 of SEQ ID NO: 914822
gagugaaggcuccggguua

SEQ ID NO: 1033345 - RNA, 19 nt, Artificial Sequence
  Description of Artificial Sequence: Synthetic oligonucleotide
  Antisense strand to SEQ ID NO: 1033344
uaacccggagccuucacuc

SEQ ID NO: 1033346 - RNA, 19 nt, Artificial Sequence
  Description of Artificial Sequence: Synthetic oligonucleotide
  Sense strand starting at position 2012 of SEQ ID NO: 914822
ggucuagguucacuaguag

SEQ ID NO: 1033347 - RNA, 19 nt, Artificial Sequence
  Description of Artificial Sequence: Synthetic oligonucleotide
  Antisense strand to SEQ ID NO: 1033346
cuacuagugaaccuagacc

SEQ ID NO: 1033348 - RNA, 19 nt, Artificial Sequence
  Description of Artificial Sequence: Synthetic oligonucleotide
  Sense strand starting at position 2167 of SEQ ID NO: 914822
uuccuccuugucuguagaa

SEQ ID NO: 1033349 - RNA, 19 nt, Artificial Sequence
  Description of Artificial Sequence: Synthetic oligonucleotide
  Antisense strand to SEQ ID NO: 1033348
uucuacagacaaggaggaa

SEQ ID NO: 1033350 - RNA, 19 nt, Artificial Sequence
  Description of Artificial Sequence: Synthetic oligonucleotide
  Sense strand starting at position 2169 of SEQ ID NO: 914822
ccuccuugucuguagaacu

SEQ ID NO: 1033351 - RNA, 19 nt, Artificial Sequence
  Description of Artificial Sequence: Synthetic oligonucleotide
  Antisense strand to SEQ ID NO: 1033350
aguucuacagacaaggagg

SEQ ID NO: 1033352 - RNA, 19 nt, Artificial Sequence
  Description of Artificial Sequence: Synthetic oligonucleotide
  Sense strand starting at position 2302 of SEQ ID NO: 914822
gagucuacaucagaauaug

SEQ ID NO: 1033353 - RNA, 19 nt, Artificial Sequence
  Description of Artificial Sequence: Synthetic oligonucleotide
  Antisense strand to SEQ ID NO: 1033352
cauauucugauguagacuc

SEQ ID NO: 1033354 - RNA, 19 nt, Artificial Sequence
  Description of Artificial Sequence: Synthetic oligonucleotide
  Sense strand starting at position 2316 of SEQ ID NO: 914822
auaugaaucuugucacuga

SEQ ID NO: 1033355 - RNA, 19 nt, Artificial Sequence
  Description of Artificial Sequence: Synthetic oligonucleotide
  Antisense strand to SEQ ID NO: 1033354
ucagugacaagauucauau

SEQ ID NO: 1033356 - RNA, 19 nt, Artificial Sequence
  Description of Artificial Sequence: Synthetic oligonucleotide
  Sense strand starting at position 2325 of SEQ ID NO: 914822
uugucacugaugggacaaa

SEQ ID NO: 1033357 - RNA, 19 nt, Artificial Sequence
  Description of Artificial Sequence: Synthetic oligonucleotide
  Antisense strand to SEQ ID NO: 1033356
uuugucccaucagugacaa

SEQ ID NO: 1033358 - RNA, 19 nt, Artificial Sequence
  Description of Artificial Sequence: Synthetic oligonucleotide
  Sense strand starting at position 2376 of SEQ ID NO: 914822
gggugaggcgugugaggaa

SEQ ID NO: 1033359 - RNA, 19 nt, Artificial Sequence
  Description of Artificial Sequence: Synthetic oligonucleotide
  Antisense strand to SEQ ID NO: 1033358
uuccucacacgccucaccc

SEQ ID NO: 1033360 - RNA, 19 nt, Artificial Sequence
  Description of Artificial Sequence: Synthetic oligonucleotide
  Sense strand starting at position 2403 of SEQ ID NO: 914822
gcuaaaucuaaggagguuu

SEQ ID NO: 1033361 - RNA, 19 nt, Artificial Sequence
  Description of Artificial Sequence: Synthetic oligonucleotide
  Antisense strand to SEQ ID NO: 1033360
aaaccuccuuagauuuagc

SEQ ID NO: 1033362 - RNA, 19 nt, Artificial Sequence
  Description of Artificial Sequence: Synthetic oligonucleotide
  Sense strand starting at position 2429 of SEQ ID NO: 914822
gggucaugcaguuauccau

SEQ ID NO: 1033363 - RNA, 19 nt, Artificial Sequence
  Description of Artificial Sequence: Synthetic oligonucleotide
  Antisense strand to SEQ ID NO: 1033362
auggauaacugcaugaccc

SEQ ID NO: 1033364 - RNA, 19 nt, Artificial Sequence
  Description of Artificial Sequence: Synthetic oligonucleotide
  Sense strand starting at position 2436 of SEQ ID NO: 914822
gcaguuauccauggaggca

SEQ ID NO: 1033365 - RNA, 19 nt, Artificial Sequence
  Description of Artificial Sequence: Synthetic oligonucleotide
  Antisense strand to SEQ ID NO: 1033364
ugccuccauggauaacugc

SEQ ID NO: 1033366 - RNA, 19 nt, Artificial Sequence
  Description of Artificial Sequence: Synthetic oligonucleotide
  Sense strand starting at position 2485 of SEQ ID NO: 914822
gcauauauuaaguguggac

SEQ ID NO: 1033367 - RNA, 19 nt, Artificial Sequence
  Description of Artificial Sequence: Synthetic oligonucleotide
  Antisense strand to SEQ ID NO: 1033366
guccacacuuaauauaugc

SEQ ID NO: 1033368 - RNA, 19 nt, Artificial Sequence
  Description of Artificial Sequence: Synthetic oligonucleotide
  Sense strand starting at position 2513 of SEQ ID NO: 914822
augucugagguuugugacu

SEQ ID NO: 1033369 - RNA, 19 nt, Artificial Sequence
  Description of Artificial Sequence: Synthetic oligonucleotide
  Antisense strand to SEQ ID NO: 1033368
agucacaaaccucagacau

SEQ ID NO: 1033370 - RNA, 19 nt, Artificial Sequence
  Description of Artificial Sequence: Synthetic oligonucleotide
  Sense strand starting at position 2518 of SEQ ID NO: 914822
ugagguuugugacuccugu

SEQ ID NO: 1033371 - RNA, 19 nt, Artificial Sequence
  Description of Artificial Sequence: Synthetic oligonucleotide
  Antisense strand to SEQ ID NO: 1033370
acaggagucacaaaccuca

SEQ ID NO: 1033372 - RNA, 19 nt, Artificial Sequence
  Description of Artificial Sequence: Synthetic oligonucleotide
  Sense strand starting at position 2592 of SEQ ID NO: 914822
ggguuugguggaugcauca

SEQ ID NO: 1033373 - RNA, 19 nt, Artificial Sequence
  Description of Artificial Sequence: Synthetic oligonucleotide
  Antisense strand to SEQ ID NO: 1033372
ugaugcauccaccaaaccc

SEQ ID NO: 1033374 - RNA, 19 nt, Artificial Sequence
  Description of Artificial Sequence: Synthetic oligonucleotide
  Sense strand starting at position 2707 of SEQ ID NO: 914822
cuaggugucuaguucaugu

SEQ ID NO: 1033375 - RNA, 19 nt, Artificial Sequence
  Description of Artificial Sequence: Synthetic oligonucleotide
  Antisense strand to SEQ ID NO: 1033374
acaugaacuagacaccuag

SEQ ID NO: 1033376 - RNA, 19 nt, Artificial Sequence
  Description of Artificial Sequence: Synthetic oligonucleotide
  Sense strand starting at position 2766 of SEQ ID NO: 914822
gggcuucuagcauguaaga

SEQ ID NO: 1033377 - RNA, 19 nt, Artificial Sequence
  Description of Artificial Sequence: Synthetic oligonucleotide
  Antisense strand to SEQ ID NO: 1033376
ucuuacaugcuagaagccc

SEQ ID NO: 1033378 - RNA, 19 nt, Artificial Sequence
  Description of Artificial Sequence: Synthetic oligonucleotide
  Sense strand starting at position 2768 of SEQ ID NO: 914822
gcuucuagcauguaagaug

SEQ ID NO: 1033379 - RNA, 19 nt, Artificial Sequence
  Description of Artificial Sequence: Synthetic oligonucleotide
  Antisense strand to SEQ ID NO: 1033378
caucuuacaugcuagaagc

SEQ ID NO: 1033380 - RNA, 19 nt, Artificial Sequence
  Description of Artificial Sequence: Synthetic oligonucleotide
  Sense strand starting at position 2775 of SEQ ID NO: 914822
gcauguaagaugcaggaga

SEQ ID NO: 1033381 - RNA, 19 nt, Artificial Sequence
  Description of Artificial Sequence: Synthetic oligonucleotide
  Antisense strand to SEQ ID NO: 1033380
ucuccugcaucuuacaugc

SEQ ID NO: 1033382 - RNA, 19 nt, Artificial Sequence
  Description of Artificial Sequence: Synthetic oligonucleotide
  Sense strand starting at position 2811 of SEQ ID NO: 914822
ccagcaucuccaggaguua

SEQ ID NO: 1033383 - RNA, 19 nt, Artificial Sequence
  Description of Artificial Sequence: Synthetic oligonucleotide
  Antisense strand to SEQ ID NO: 1033382
uaacuccuggagaugcugg

SEQ ID NO: 1033384 - RNA, 19 nt, Artificial Sequence
  Description of Artificial Sequence: Synthetic oligonucleotide
  Sense strand starting at position 2824 of SEQ ID NO: 914822
gaguuaggucaggaggcaa

SEQ ID NO: 1033385 - RNA, 19 nt, Artificial Sequence
  Description of Artificial Sequence: Synthetic oligonucleotide
  Antisense strand to SEQ ID NO: 1033384
uugccuccugaccuaacuc

SEQ ID NO: 1033386 - RNA, 19 nt, Artificial Sequence
  Description of Artificial Sequence: Synthetic oligonucleotide
  Sense strand starting at position 2895 of SEQ ID NO: 914822
augacaggacucugucuua

SEQ ID NO: 1033387 - RNA, 19 nt, Artificial Sequence
  Description of Artificial Sequence: Synthetic oligonucleotide
  Antisense strand to SEQ ID NO: 1033386
uaagacagaguccugucau

SEQ ID NO: 1033388 - RNA, 19 nt, Artificial Sequence
  Description of Artificial Sequence: Synthetic oligonucleotide
  Sense strand starting at position 2954 of SEQ ID NO: 914822
gggacucagaacuguuaca

SEQ ID NO: 1033389 - RNA, 19 nt, Artificial Sequence
  Description of Artificial Sequence: Synthetic oligonucleotide
  Antisense strand to SEQ ID NO: 1033388
uguaacaguucugaguccc

SEQ ID NO: 1033390 - RNA, 19 nt, Artificial Sequence
  Description of Artificial Sequence: Synthetic oligonucleotide
  Sense strand starting at position 3175 of SEQ ID NO: 914822
gagugugguccucaggaag

SEQ ID NO: 1033391 - RNA, 19 nt, Artificial Sequence
  Description of Artificial Sequence: Synthetic oligonucleotide
  Antisense strand to SEQ ID NO: 1033390
cuuccugaggaccacacuc

SEQ ID NO: 1033392 - RNA, 19 nt, Artificial Sequence
  Description of Artificial Sequence: Synthetic oligonucleotide
  Sense strand starting at position 3235 of SEQ ID NO: 914822
agagcaaccucagucugaa

SEQ ID NO: 1033393 - RNA, 19 nt, Artificial Sequence
  Description of Artificial Sequence: Synthetic oligonucleotide
  Antisense strand to SEQ ID NO: 1033392
uucagacugagguugcucu

SEQ ID NO: 1033394 - RNA, 19 nt, Artificial Sequence
  Description of Artificial Sequence: Synthetic oligonucleotide
  Sense strand starting at position 137 of SEQ ID NO: 914823
accugaguuuacccaucca

SEQ ID NO: 1033395 - RNA, 19 nt, Artificial Sequence
  Description of Artificial Sequence: Synthetic oligonucleotide
  Antisense strand to SEQ ID NO: 1033394
uggauggguaaacucaggu

SEQ ID NO: 1033396 - RNA, 19 nt, Artificial Sequence
  Description of Artificial Sequence: Synthetic oligonucleotide
  Sense strand starting at position 234 of SEQ ID NO: 914823
guucuuugaucucucagua

SEQ ID NO: 1033397 - RNA, 19 nt, Artificial Sequence
  Description of Artificial Sequence: Synthetic oligonucleotide
  Antisense strand to SEQ ID NO: 1033396
uacugagagaucaaagaac

SEQ ID NO: 1033398 - RNA, 19 nt, Artificial Sequence
  Description of Artificial Sequence: Synthetic oligonucleotide
  Sense strand starting at position 463 of SEQ ID NO: 914823
ugcuaucuauaugcugaua

SEQ ID NO: 1033399 - RNA, 19 nt, Artificial Sequence
  Description of Artificial Sequence: Synthetic oligonucleotide
  Antisense strand to SEQ ID NO: 1033398
uaucagcauauagauagca

SEQ ID NO: 1033400 - RNA, 19 nt, Artificial Sequence
  Description of Artificial Sequence: Synthetic oligonucleotide
  Sense strand starting at position 567 of SEQ ID NO: 914823
gcuguauugucaccuuaac

SEQ ID NO: 1033401 - RNA, 19 nt, Artificial Sequence
  Description of Artificial Sequence: Synthetic oligonucleotide
  Antisense strand to SEQ ID NO: 1033400
guuaaggugacaauacagc

SEQ ID NO: 1033402 - RNA, 19 nt, Artificial Sequence
  Description of Artificial Sequence: Synthetic oligonucleotide
  Sense strand starting at position 786 of SEQ ID NO: 914823
ucauuacuucuacgaugaa

SEQ ID NO: 1033403 - RNA, 19 nt, Artificial Sequence
  Description of Artificial Sequence: Synthetic oligonucleotide
  Antisense strand to SEQ ID NO: 1033402
uucaucguagaaguaauga

SEQ ID NO: 1033404 - RNA, 19 nt, Artificial Sequence
  Description of Artificial Sequence: Synthetic oligonucleotide
  Sense strand starting at position 789 of SEQ ID NO: 914823
uuacuucuacgaugaacua

SEQ ID NO: 1033405 - RNA, 19 nt, Artificial Sequence
  Description of Artificial Sequence: Synthetic oligonucleotide
  Antisense strand to SEQ ID NO: 1033404
uaguucaucguagaaguaa

SEQ ID NO: 1033406 - RNA, 19 nt, Artificial Sequence
  Description of Artificial Sequence: Synthetic oligonucleotide
  Sense strand starting at position 865 of SEQ ID NO: 914823
uggacaaucucauuauguc

SEQ ID NO: 1033407 - RNA, 19 nt, Artificial Sequence
  Description of Artificial Sequence: Synthetic oligonucleotide
  Antisense strand to SEQ ID NO: 1033406
gacauaaugagauugucca

SEQ ID NO: 1033408 - RNA, 19 nt, Artificial Sequence
  Description of Artificial Sequence: Synthetic oligonucleotide
  Sense strand starting at position 931 of SEQ ID NO: 914823
gccuaaauaugcuugcaug

SEQ ID NO: 1033409 - RNA, 19 nt, Artificial Sequence
  Description of Artificial Sequence: Synthetic oligonucleotide
  Antisense strand to SEQ ID NO: 1033408
caugcaagcauauuuaggc

SEQ ID NO: 1033410 - RNA, 19 nt, Artificial Sequence
  Description of Artificial Sequence: Synthetic oligonucleotide
  Sense strand starting at position 932 of SEQ ID NO: 914823
ccuaaauaugcuugcauga

SEQ ID NO: 1033411 - RNA, 19 nt, Artificial Sequence
  Description of Artificial Sequence: Synthetic oligonucleotide
  Antisense strand to SEQ ID NO: 1033410
ucaugcaagcauauuuagg

SEQ ID NO: 1033412 - RNA, 19 nt, Artificial Sequence
  Description of Artificial Sequence: Synthetic oligonucleotide
  Sense strand starting at position 945 of SEQ ID NO: 914823
gcaugaucuggcugauccu

SEQ ID NO: 1033413 - RNA, 19 nt, Artificial Sequence
  Description of Artificial Sequence: Synthetic oligonucleotide
  Antisense strand to SEQ ID NO: 1033412
aggaucagccagaucaugc

SEQ ID NO: 1033414 - RNA, 19 nt, Artificial Sequence
  Description of Artificial Sequence: Synthetic oligonucleotide
  Sense strand starting at position 951 of SEQ ID NO: 914823
ucuggcugauccuuggaga

SEQ ID NO: 1033415 - RNA, 19 nt, Artificial Sequence
  Description of Artificial Sequence: Synthetic oligonucleotide
  Antisense strand to SEQ ID NO: 1033414
ucuccaaggaucagccaga

SEQ ID NO: 1033416 - RNA, 19 nt, Artificial Sequence
  Description of Artificial Sequence: Synthetic oligonucleotide
  Sense strand starting at position 1153 of SEQ ID NO: 914823
gugaaacucuuauucugca

SEQ ID NO: 1033417 - RNA, 19 nt, Artificial Sequence
  Description of Artificial Sequence: Synthetic oligonucleotide
  Antisense strand to SEQ ID NO: 1033416
ugcagaauaagaguuucac

SEQ ID NO: 1033418 - RNA, 19 nt, Artificial Sequence
  Description of Artificial Sequence: Synthetic oligonucleotide
  Sense strand starting at position 1301 of SEQ ID NO: 914823
ccaggagaucucuagccuu

SEQ ID NO: 1033419 - RNA, 19 nt, Artificial Sequence
  Description of Artificial Sequence: Synthetic oligonucleotide
  Antisense strand to SEQ ID NO: 1033418
aaggcuagagaucuccugg

SEQ ID NO: 1033420 - RNA, 19 nt, Artificial Sequence
  Description of Artificial Sequence: Synthetic oligonucleotide
  Sense strand starting at position 2199 of SEQ ID NO: 914823
cgacccucauguucgaaga

SEQ ID NO: 1033421 - RNA, 19 nt, Artificial Sequence
  Description of Artificial Sequence: Synthetic oligonucleotide
  Antisense strand to SEQ ID NO: 1033420
ucuucgaacaugagggucg

SEQ ID NO: 1033422 - RNA, 19 nt, Artificial Sequence
  Description of Artificial Sequence: Synthetic oligonucleotide
  Sense strand starting at position 2416 of SEQ ID NO: 914823
cgaguccugaucugaagau

SEQ ID NO: 1033423 - RNA, 19 nt, Artificial Sequence
  Description of Artificial Sequence: Synthetic oligonucleotide
  Antisense strand to SEQ ID NO: 1033422
aucuucagaucaggacucg

SEQ ID NO: 1033424 - RNA, 19 nt, Artificial Sequence
  Description of Artificial Sequence: Synthetic oligonucleotide
  Sense strand starting at position 2471 of SEQ ID NO: 914823
gagaguuguugaguagaag

SEQ ID NO: 1033425 - RNA, 19 nt, Artificial Sequence
  Description of Artificial Sequence: Synthetic oligonucleotide
  Antisense strand to SEQ ID NO: 1033424
cuucuacucaacaacucuc

SEQ ID NO: 1033426 - RNA, 19 nt, Artificial Sequence
  Description of Artificial Sequence: Synthetic oligonucleotide
  Sense strand starting at position 2472 of SEQ ID NO: 914823
agaguuguugaguagaagu

SEQ ID NO: 1033427 - RNA, 19 nt, Artificial Sequence
  Description of Artificial Sequence: Synthetic oligonucleotide
  Antisense strand to SEQ ID NO: 1033426
acuucuacucaacaacucu

SEQ ID NO: 1033428 - RNA, 19 nt, Artificial Sequence
  Description of Artificial Sequence: Synthetic oligonucleotide
  Sense strand starting at position 2499 of SEQ ID NO: 914823
cgaagaggguucuucagac

SEQ ID NO: 1033429 - RNA, 19 nt, Artificial Sequence
  Description of Artificial Sequence: Synthetic oligonucleotide
  Antisense strand to SEQ ID NO: 1033428
gucugaagaacccucuucg

SEQ ID NO: 1033430 - RNA, 19 nt, Artificial Sequence
  Description of Artificial Sequence: Synthetic oligonucleotide
  Sense strand starting at position 2551 of SEQ ID NO: 914823
agagcauguucugucagag

SEQ ID NO: 1033431 - RNA, 19 nt, Artificial Sequence
  Description of Artificial Sequence: Synthetic oligonucleotide
  Antisense strand to SEQ ID NO: 1033430
cucugacagaacaugcucu

SEQ ID NO: 1033432 - RNA, 19 nt, Artificial Sequence
  Description of Artificial Sequence: Synthetic oligonucleotide
  Sense strand starting at position 2583 of SEQ ID NO: 914823
ugguccuugugguugaaau

SEQ ID NO: 1033433 - RNA, 19 nt, Artificial Sequence
  Description of Artificial Sequence: Synthetic oligonucleotide
  Antisense strand to SEQ ID NO: 1033432
auuucaaccacaaggacca

SEQ ID NO: 1033434 - RNA, 19 nt, Artificial Sequence
  Description of Artificial Sequence: Synthetic oligonucleotide
  Sense strand starting at position 2584 of SEQ ID NO: 914823
gguccuugugguugaaaua

SEQ ID NO: 1033435 - RNA, 19 nt, Artificial Sequence
  Description of Artificial Sequence: Synthetic oligonucleotide
  Antisense strand to SEQ ID NO: 1033434
uauuucaaccacaaggacc

SEQ ID NO: 1033436 - RNA, 19 nt, Artificial Sequence
  Description of Artificial Sequence: Synthetic oligonucleotide
  Sense strand starting at position 2585 of SEQ ID NO: 914823
guccuugugguugaaauac

SEQ ID NO: 1033437 - RNA, 19 nt, Artificial Sequence
  Description of Artificial Sequence: Synthetic oligonucleotide
  Antisense strand to SEQ ID NO: 1033436
guauuucaaccacaaggac

SEQ ID NO: 1033438 - RNA, 19 nt, Artificial Sequence
  Description of Artificial Sequence: Synthetic oligonucleotide
  Sense strand starting at position 2591 of SEQ ID NO: 914823
gugguugaaauacauagua

SEQ ID NO: 1033439 - RNA, 19 nt, Artificial Sequence
  Description of Artificial Sequence: Synthetic oligonucleotide
  Antisense strand to SEQ ID NO: 1033438
uacuauguauuucaaccac

SEQ ID NO: 1033440 - RNA, 19 nt, Artificial Sequence
  Description of Artificial Sequence: Synthetic oligonucleotide
  Sense strand starting at position 2637 of SEQ ID NO: 914823
guucaagagguagaaguuu

SEQ ID NO: 1033441 - RNA, 19 nt, Artificial Sequence
  Description of Artificial Sequence: Synthetic oligonucleotide
  Antisense strand to SEQ ID NO: 1033440
aaacuucuaccucuugaac

SEQ ID NO: 1033442 - RNA, 19 nt, Artificial Sequence
  Description of Artificial Sequence: Synthetic oligonucleotide
  Sense strand starting at position 2764 of SEQ ID NO: 914823
gacaguaagaguugucagu

SEQ ID NO: 1033443 - RNA, 19 nt, Artificial Sequence
  Description of Artificial Sequence: Synthetic oligonucleotide
  Antisense strand to SEQ ID NO: 1033442
acugacaacucuuacuguc

SEQ ID NO: 1033444 - RNA, 19 nt, Artificial Sequence
  Description of Artificial Sequence: Synthetic oligonucleotide
  Sense strand starting at position 2766 of SEQ ID NO: 914823
caguaagaguugucaguau

SEQ ID NO: 1033445 - RNA, 19 nt, Artificial Sequence
  Description of Artificial Sequence: Synthetic oligonucleotide
  Antisense strand to SEQ ID NO: 1033444
auacugacaacucuuacug

SEQ ID NO: 1033446 - RNA, 19 nt, Artificial Sequence
  Description of Artificial Sequence: Synthetic oligonucleotide
  Sense strand starting at position 2770 of SEQ ID NO: 914823
aagaguugucaguaucauu

SEQ ID NO: 1033447 - RNA, 19 nt, Artificial Sequence
  Description of Artificial Sequence: Synthetic oligonucleotide
  Antisense strand to SEQ ID NO: 1033446
aaugauacugacaacucuu

SEQ ID NO: 1033448 - RNA, 19 nt, Artificial Sequence
  Description of Artificial Sequence: Synthetic oligonucleotide
  Sense strand starting at position 2836 of SEQ ID NO: 914823
cuaggauuaccugguagga

SEQ ID NO: 1033449 - RNA, 19 nt, Artificial Sequence
  Description of Artificial Sequence: Synthetic oligonucleotide
  Antisense strand to SEQ ID NO: 1033448
uccuaccagguaauccuag

SEQ ID NO: 1033450 - RNA, 19 nt, Artificial Sequence
  Description of Artificial Sequence: Synthetic oligonucleotide
  Sense strand starting at position 2867 of SEQ ID NO: 914823
aucagccuucccgacaaua

SEQ ID NO: 1033451 - RNA, 19 nt, Artificial Sequence
  Description of Artificial Sequence: Synthetic oligonucleotide
  Antisense strand to SEQ ID NO: 1033450
uauugucgggaaggcugau

SEQ ID NO: 1033452 - RNA, 19 nt, Artificial Sequence
  Description of Artificial Sequence: Synthetic oligonucleotide
  Sense strand starting at position 3098 of SEQ ID NO: 914823
auuuaauauacguguguga

SEQ ID NO: 1033453 - RNA, 19 nt, Artificial Sequence
  Description of Artificial Sequence: Synthetic oligonucleotide
  Antisense strand to SEQ ID NO: 1033452
ucacacacguauauuaaau

SEQ ID NO: 1033454 - RNA, 19 nt, Artificial Sequence
  Description of Artificial Sequence: Synthetic oligonucleotide
  Sense strand starting at position 3100 of SEQ ID NO: 914823
uuaauauacgugugugauc

SEQ ID NO: 1033455 - RNA, 19 nt, Artificial Sequence
  Description of Artificial Sequence: Synthetic oligonucleotide
  Antisense strand to SEQ ID NO: 1033454
gaucacacacguauauuaa

SEQ ID NO: 1033456 - RNA, 19 nt, Artificial Sequence
  Description of Artificial Sequence: Synthetic oligonucleotide
  Sense strand starting at position 3101 of SEQ ID NO: 914823
uaauauacgugugugauca

SEQ ID NO: 1033457 - RNA, 19 nt, Artificial Sequence
  Description of Artificial Sequence: Synthetic oligonucleotide
  Antisense strand to SEQ ID NO: 1033456
ugaucacacacguauauua

SEQ ID NO: 1033458 - RNA, 19 nt, Artificial Sequence
  Description of Artificial Sequence: Synthetic oligonucleotide
  Sense strand starting at position 3102 of SEQ ID NO: 914823
aauauacgugugugaucau

SEQ ID NO: 1033459 - RNA, 19 nt, Artificial Sequence
  Description of Artificial Sequence: Synthetic oligonucleotide
  Antisense strand to SEQ ID NO: 1033458
augaucacacacguauauu

SEQ ID NO: 1033460 - RNA, 19 nt, Artificial Sequence
  Description of Artificial Sequence: Synthetic oligonucleotide
  Sense strand starting at position 3157 of SEQ ID NO: 914823
agaaauguaucagcucuag

SEQ ID NO: 1033461 - RNA, 19 nt, Artificial Sequence
  Description of Artificial Sequence: Synthetic oligonucleotide
  Antisense strand to SEQ ID NO: 1033460
cuagagcugauacauuucu

SEQ ID NO: 1033462 - RNA, 19 nt, Artificial Sequence
  Description of Artificial Sequence: Synthetic oligonucleotide
  Sense strand starting at position 3161 of SEQ ID NO: 914823
auguaucagcucuaggcaa

SEQ ID NO: 1033463 - RNA, 19 nt, Artificial Sequence
  Description of Artificial Sequence: Synthetic oligonucleotide
  Antisense strand to SEQ ID NO: 1033462
uugccuagagcugauacau

SEQ ID NO: 1033464 - RNA, 19 nt, Artificial Sequence
  Description of Artificial Sequence: Synthetic oligonucleotide
  Sense strand starting at position 3196 of SEQ ID NO: 914823
guuggaauuccuggucucu

SEQ ID NO: 1033465 - RNA, 19 nt, Artificial Sequence
  Description of Artificial Sequence: Synthetic oligonucleotide
  Antisense strand to SEQ ID NO: 1033464
agagaccaggaauuccaac

SEQ ID NO: 1033466 - RNA, 19 nt, Artificial Sequence
  Description of Artificial Sequence: Synthetic oligonucleotide
  Sense strand starting at position 3857 of SEQ ID NO: 914823
gguaccauuggauguguau

SEQ ID NO: 1033467 - RNA, 19 nt, Artificial Sequence
  Description of Artificial Sequence: Synthetic oligonucleotide
  Antisense strand to SEQ ID NO: 1033466
auacacauccaaugguacc

SEQ ID NO: 1033468 - RNA, 19 nt, Artificial Sequence
  Description of Artificial Sequence: Synthetic oligonucleotide
  Sense strand starting at position 3931 of SEQ ID NO: 914823
gugauuauccacugccauu

SEQ ID NO: 1033469 - RNA, 19 nt, Artificial Sequence
  Description of Artificial Sequence: Synthetic oligonucleotide
  Antisense strand to SEQ ID NO: 1033468
aauggcaguggauaaucac

SEQ ID NO: 1033470 - RNA, 19 nt, Artificial Sequence
  Description of Artificial Sequence: Synthetic oligonucleotide
  Sense strand starting at position 3937 of SEQ ID NO: 914823
auccacugccauuaggauu

SEQ ID NO: 1033471 - RNA, 19 nt, Artificial Sequence
  Description of Artificial Sequence: Synthetic oligonucleotide
  Antisense strand to SEQ ID NO: 1033470
aauccuaauggcaguggau

SEQ ID NO: 1033472 - RNA, 19 nt, Artificial Sequence
  Description of Artificial Sequence: Synthetic oligonucleotide
  Sense strand starting at position 3965 of SEQ ID NO: 914823
gguguacucaggcaauaag

SEQ ID NO: 1033473 - RNA, 19 nt, Artificial Sequence
  Description of Artificial Sequence: Synthetic oligonucleotide
  Antisense strand to SEQ ID NO: 1033472
cuuauugccugaguacacc

SEQ ID NO: 1033474 - RNA, 19 nt, Artificial Sequence
  Description of Artificial Sequence: Synthetic oligonucleotide
  Sense strand starting at position 239 of SEQ ID NO: 914824
accugaguuuacccaucca

SEQ ID NO: 1033475 - RNA, 19 nt, Artificial Sequence
  Description of Artificial Sequence: Synthetic oligonucleotide
  Antisense strand to SEQ ID NO: 1033474
uggauggguaaacucaggu

SEQ ID NO: 1033476 - RNA, 19 nt, Artificial Sequence
  Description of Artificial Sequence: Synthetic oligonucleotide
  Sense strand starting at position 336 of SEQ ID NO: 914824
guucuuugaucucucagua

SEQ ID NO: 1033477 - RNA, 19 nt, Artificial Sequence
  Description of Artificial Sequence: Synthetic oligonucleotide
  Antisense strand to SEQ ID NO: 1033476
uacugagagaucaaagaac

SEQ ID NO: 1033478 - RNA, 19 nt, Artificial Sequence
  Description of Artificial Sequence: Synthetic oligonucleotide
  Sense strand starting at position 565 of SEQ ID NO: 914824
ugcuaucuauaugcugaua

SEQ ID NO: 1033479 - RNA, 19 nt, Artificial Sequence
  Description of Artificial Sequence: Synthetic oligonucleotide
  Antisense strand to SEQ ID NO: 1033478
uaucagcauauagauagca

SEQ ID NO: 1033480 - RNA, 19 nt, Artificial Sequence
  Description of Artificial Sequence: Synthetic oligonucleotide
  Sense strand starting at position 669 of SEQ ID NO: 914824
gcuguauugucaccuuaac

SEQ ID NO: 1033481 - RNA, 19 nt, Artificial Sequence
  Description of Artificial Sequence: Synthetic oligonucleotide
  Antisense strand to SEQ ID NO: 1033480
guuaaggugacaauacagc

SEQ ID NO: 1033482 - RNA, 19 nt, Artificial Sequence
  Description of Artificial Sequence: Synthetic oligonucleotide
  Sense strand starting at position 888 of SEQ ID NO: 914824
ucauuacuucuacgaugaa

SEQ ID NO: 1033483 - RNA, 19 nt, Artificial Sequence
  Description of Artificial Sequence: Synthetic oligonucleotide
  Antisense strand to SEQ ID NO: 1033482
uucaucguagaaguaauga

SEQ ID NO: 1033484 - RNA, 19 nt, Artificial Sequence
  Description of Artificial Sequence: Synthetic oligonucleotide
  Sense strand starting at position 891 of SEQ ID NO: 914824
uuacuucuacgaugaacua

SEQ ID NO: 1033485 - RNA, 19 nt, Artificial Sequence
  Description of Artificial Sequence: Synthetic oligonucleotide
  Antisense strand to SEQ ID NO: 1033484
uaguucaucguagaaguaa

SEQ ID NO: 1033486 - RNA, 19 nt, Artificial Sequence
  Description of Artificial Sequence: Synthetic oligonucleotide
  Sense strand starting at position 967 of SEQ ID NO: 914824
uggacaaucucauuauguc

SEQ ID NO: 1033487 - RNA, 19 nt, Artificial Sequence
  Description of Artificial Sequence: Synthetic oligonucleotide
  Antisense strand to SEQ ID NO: 1033486
gacauaaugagauugucca

SEQ ID NO: 1033488 - RNA, 19 nt, Artificial Sequence
  Description of Artificial Sequence: Synthetic oligonucleotide
  Sense strand starting at position 1033 of SEQ ID NO: 914824
gccuaaauaugcuugcaug

SEQ ID NO: 1033489 - RNA, 19 nt, Artificial Sequence
  Description of Artificial Sequence: Synthetic oligonucleotide
  Antisense strand to SEQ ID NO: 1033488
caugcaagcauauuuaggc

SEQ ID NO: 1033490 - RNA, 19 nt, Artificial Sequence
  Description of Artificial Sequence: Synthetic oligonucleotide
  Sense strand starting at position 1034 of SEQ ID NO: 914824
ccuaaauaugcuugcauga

SEQ ID NO: 1033491 - RNA, 19 nt, Artificial Sequence
  Description of Artificial Sequence: Synthetic oligonucleotide
  Antisense strand to SEQ ID NO: 1033490
ucaugcaagcauauuuagg

SEQ ID NO: 1033492 - RNA, 19 nt, Artificial Sequence
  Description of Artificial Sequence: Synthetic oligonucleotide
  Sense strand starting at position 1047 of SEQ ID NO: 914824
gcaugaucuggcugauccu

SEQ ID NO: 1033493 - RNA, 19 nt, Artificial Sequence
  Description of Artificial Sequence: Synthetic oligonucleotide
  Antisense strand to SEQ ID NO: 1033492
aggaucagccagaucaugc

SEQ ID NO: 1033494 - RNA, 19 nt, Artificial Sequence
  Description of Artificial Sequence: Synthetic oligonucleotide
  Sense strand starting at position 1053 of SEQ ID NO: 914824
ucuggcugauccuuggaga

SEQ ID NO: 1033495 - RNA, 19 nt, Artificial Sequence
  Description of Artificial Sequence: Synthetic oligonucleotide
  Antisense strand to SEQ ID NO: 1033494
ucuccaaggaucagccaga

SEQ ID NO: 1033496 - RNA, 19 nt, Artificial Sequence
  Description of Artificial Sequence: Synthetic oligonucleotide
  Sense strand starting at position 1255 of SEQ ID NO: 914824
gugaaacucuuauucugca

SEQ ID NO: 1033497 - RNA, 19 nt, Artificial Sequence
  Description of Artificial Sequence: Synthetic oligonucleotide
  Antisense strand to SEQ ID NO: 1033496
ugcagaauaagaguuucac

SEQ ID NO: 1033498 - RNA, 19 nt, Artificial Sequence
  Description of Artificial Sequence: Synthetic oligonucleotide
  Sense strand starting at position 1403 of SEQ ID NO: 914824
ccaggagaucucuagccuu

SEQ ID NO: 1033499 - RNA, 19 nt, Artificial Sequence
  Description of Artificial Sequence: Synthetic oligonucleotide
  Antisense strand to SEQ ID NO: 1033498
aaggcuagagaucuccugg

SEQ ID NO: 1033500 - RNA, 19 nt, Artificial Sequence
  Description of Artificial Sequence: Synthetic oligonucleotide
  Sense strand starting at position 2301 of SEQ ID NO: 914824
cgacccucauguucgaaga

SEQ ID NO: 1033501 - RNA, 19 nt, Artificial Sequence
  Description of Artificial Sequence: Synthetic oligonucleotide
  Antisense strand to SEQ ID NO: 1033500
ucuucgaacaugagggucg

SEQ ID NO: 1033502 - RNA, 19 nt, Artificial Sequence
  Description of Artificial Sequence: Synthetic oligonucleotide
  Sense strand starting at position 2518 of SEQ ID NO: 914824
cgaguccugaucugaagau

SEQ ID NO: 1033503 - RNA, 19 nt, Artificial Sequence
  Description of Artificial Sequence: Synthetic oligonucleotide
  Antisense strand to SEQ ID NO: 1033502
aucuucagaucaggacucg

SEQ ID NO: 1033504 - RNA, 19 nt, Artificial Sequence
  Description of Artificial Sequence: Synthetic oligonucleotide
  Sense strand starting at position 2573 of SEQ ID NO: 914824
gagaguuguugaguagaag

SEQ ID NO: 1033505 - RNA, 19 nt, Artificial Sequence
  Description of Artificial Sequence: Synthetic oligonucleotide
  Antisense strand to SEQ ID NO: 1033504
cuucuacucaacaacucuc

SEQ ID NO: 1033506 - RNA, 19 nt, Artificial Sequence
  Description of Artificial Sequence: Synthetic oligonucleotide
  Sense strand starting at position 2574 of SEQ ID NO: 914824
agaguuguugaguagaagu

SEQ ID NO: 1033507 - RNA, 19 nt, Artificial Sequence
  Description of Artificial Sequence: Synthetic oligonucleotide
  Antisense strand to SEQ ID NO: 1033506
acuucuacucaacaacucu

SEQ ID NO: 1033508 - RNA, 19 nt, Artificial Sequence
  Description of Artificial Sequence: Synthetic oligonucleotide
  Sense strand starting at position 2601 of SEQ ID NO: 914824
cgaagaggguucuucagac

SEQ ID NO: 1033509 - RNA, 19 nt, Artificial Sequence
  Description of Artificial Sequence: Synthetic oligonucleotide
  Antisense strand to SEQ ID NO: 1033508
gucugaagaacccucuucg

SEQ ID NO: 1033510 - RNA, 19 nt, Artificial Sequence
  Description of Artificial Sequence: Synthetic oligonucleotide
  Sense strand starting at position 2653 of SEQ ID NO: 914824
agagcauguucugucagag

SEQ ID NO: 1033511 - RNA, 19 nt, Artificial Sequence
  Description of Artificial Sequence: Synthetic oligonucleotide
  Antisense strand to SEQ ID NO: 1033510
cucugacagaacaugcucu

SEQ ID NO: 1033512 - RNA, 19 nt, Artificial Sequence
  Description of Artificial Sequence: Synthetic oligonucleotide
  Sense strand starting at position 2680 of SEQ ID NO: 914824
acaagugguccuugugguu

SEQ ID NO: 1033513 - RNA, 19 nt, Artificial Sequence
  Description of Artificial Sequence: Synthetic oligonucleotide
  Antisense strand to SEQ ID NO: 1033512
aaccacaaggaccacuugu

SEQ ID NO: 1033514 - RNA, 19 nt, Artificial Sequence
  Description of Artificial Sequence: Synthetic oligonucleotide
  Sense strand starting at position 2685 of SEQ ID NO: 914824
ugguccuugugguugaaau

SEQ ID NO: 1033515 - RNA, 19 nt, Artificial Sequence
  Description of Artificial Sequence: Synthetic oligonucleotide
  Antisense strand to SEQ ID NO: 1033514
auuucaaccacaaggacca

SEQ ID NO: 1033516 - RNA, 19 nt, Artificial Sequence
  Description of Artificial Sequence: Synthetic oligonucleotide
  Sense strand starting at position 2686 of SEQ ID NO: 914824
gguccuugugguugaaaua

SEQ ID NO: 1033517 - RNA, 19 nt, Artificial Sequence
  Description of Artificial Sequence: Synthetic oligonucleotide
  Antisense strand to SEQ ID NO: 1033516
uauuucaaccacaaggacc

SEQ ID NO: 1033518 - RNA, 19 nt, Artificial Sequence
  Description of Artificial Sequence: Synthetic oligonucleotide
  Sense strand starting at position 2687 of SEQ ID NO: 914824
guccuugugguugaaauac

SEQ ID NO: 1033519 - RNA, 19 nt, Artificial Sequence
  Description of Artificial Sequence: Synthetic oligonucleotide
  Antisense strand to SEQ ID NO: 1033518
guauuucaaccacaaggac

SEQ ID NO: 1033520 - RNA, 19 nt, Artificial Sequence
  Description of Artificial Sequence: Synthetic oligonucleotide
  Sense strand starting at position 2693 of SEQ ID NO: 914824
gugguugaaauacauagua

SEQ ID NO: 1033521 - RNA, 19 nt, Artificial Sequence
  Description of Artificial Sequence: Synthetic oligonucleotide
  Antisense strand to SEQ ID NO: 1033520
uacuauguauuucaaccac

SEQ ID NO: 1033522 - RNA, 19 nt, Artificial Sequence
  Description of Artificial Sequence: Synthetic oligonucleotide
  Sense strand starting at position 2739 of SEQ ID NO: 914824
guucaagagguagaaguuu

SEQ ID NO: 1033523 - RNA, 19 nt, Artificial Sequence
  Description of Artificial Sequence: Synthetic oligonucleotide
  Antisense strand to SEQ ID NO: 1033522
aaacuucuaccucuugaac

SEQ ID NO: 1033524 - RNA, 19 nt, Artificial Sequence
  Description of Artificial Sequence: Synthetic oligonucleotide
  Sense strand starting at position 2826 of SEQ ID NO: 914824
uugaaagggucgucgguua

SEQ ID NO: 1033525 - RNA, 19 nt, Artificial Sequence
  Description of Artificial Sequence: Synthetic oligonucleotide
  Antisense strand to SEQ ID NO: 1033524
uaaccgacgacccuuucaa

SEQ ID NO: 1033526 - RNA, 19 nt, Artificial Sequence
  Description of Artificial Sequence: Synthetic oligonucleotide
  Sense strand starting at position 2866 of SEQ ID NO: 914824
gacaguaagaguugucagu

SEQ ID NO: 1033527 - RNA, 19 nt, Artificial Sequence
  Description of Artificial Sequence: Synthetic oligonucleotide
  Antisense strand to SEQ ID NO: 1033526
acugacaacucuuacuguc

SEQ ID NO: 1033528 - RNA, 19 nt, Artificial Sequence
  Description of Artificial Sequence: Synthetic oligonucleotide
  Sense strand starting at position 2868 of SEQ ID NO: 914824
caguaagaguugucaguau

SEQ ID NO: 1033529 - RNA, 19 nt, Artificial Sequence
  Description of Artificial Sequence: Synthetic oligonucleotide
  Antisense strand to SEQ ID NO: 1033528
auacugacaacucuuacug

SEQ ID NO: 1033530 - RNA, 19 nt, Artificial Sequence
  Description of Artificial Sequence: Synthetic oligonucleotide
  Sense strand starting at position 2872 of SEQ ID NO: 914824
aagaguugucaguaucauu

SEQ ID NO: 1033531 - RNA, 19 nt, Artificial Sequence
  Description of Artificial Sequence: Synthetic oligonucleotide
  Antisense strand to SEQ ID NO: 1033530
aaugauacugacaacucuu

SEQ ID NO: 1033532 - RNA, 19 nt, Artificial Sequence
  Description of Artificial Sequence: Synthetic oligonucleotide
  Sense strand starting at position 2938 of SEQ ID NO: 914824
cuaggauuaccugguagga

SEQ ID NO: 1033533 - RNA, 19 nt, Artificial Sequence
  Description of Artificial Sequence: Synthetic oligonucleotide
  Antisense strand to SEQ ID NO: 1033532
uccuaccagguaauccuag

SEQ ID NO: 1033534 - RNA, 19 nt, Artificial Sequence
  Description of Artificial Sequence: Synthetic oligonucleotide
  Sense strand starting at position 2969 of SEQ ID NO: 914824
aucagccuucccgacaaua

SEQ ID NO: 1033535 - RNA, 19 nt, Artificial Sequence
  Description of Artificial Sequence: Synthetic oligonucleotide
  Antisense strand to SEQ ID NO: 1033534
uauugucgggaaggcugau

SEQ ID NO: 1033536 - RNA, 19 nt, Artificial Sequence
  Description of Artificial Sequence: Synthetic oligonucleotide
  Sense strand starting at position 3200 of SEQ ID NO: 914824
auuuaauauacguguguga

SEQ ID NO: 1033537 - RNA, 19 nt, Artificial Sequence
  Description of Artificial Sequence: Synthetic oligonucleotide
  Antisense strand to SEQ ID NO: 1033536
ucacacacguauauuaaau

SEQ ID NO: 1033538 - RNA, 19 nt, Artificial Sequence
  Description of Artificial Sequence: Synthetic oligonucleotide
  Sense strand starting at position 3202 of SEQ ID NO: 914824
uuaauauacgugugugauc

SEQ ID NO: 1033539 - RNA, 19 nt, Artificial Sequence
  Description of Artificial Sequence: Synthetic oligonucleotide
  Antisense strand to SEQ ID NO: 1033538
gaucacacacguauauuaa

SEQ ID NO: 1033540 - RNA, 19 nt, Artificial Sequence
  Description of Artificial Sequence: Synthetic oligonucleotide
  Sense strand starting at position 3203 of SEQ ID NO: 914824
uaauauacgugugugauca

SEQ ID NO: 1033541 - RNA, 19 nt, Artificial Sequence
  Description of Artificial Sequence: Synthetic oligonucleotide
  Antisense strand to SEQ ID NO: 1033540
ugaucacacacguauauua

SEQ ID NO: 1033542 - RNA, 19 nt, Artificial Sequence
  Description of Artificial Sequence: Synthetic oligonucleotide
  Sense strand starting at position 3204 of SEQ ID NO: 914824
aauauacgugugugaucau

SEQ ID NO: 1033543 - RNA, 19 nt, Artificial Sequence
  Description of Artificial Sequence: Synthetic oligonucleotide
  Antisense strand to SEQ ID NO: 1033542
augaucacacacguauauu

SEQ ID NO: 1033544 - RNA, 19 nt, Artificial Sequence
  Description of Artificial Sequence: Synthetic oligonucleotide
  Sense strand starting at position 3259 of SEQ ID NO: 914824
agaaauguaucagcucuag

SEQ ID NO: 1033545 - RNA, 19 nt, Artificial Sequence
  Description of Artificial Sequence: Synthetic oligonucleotide
  Antisense strand to SEQ ID NO: 1033544
cuagagcugauacauuucu

SEQ ID NO: 1033546 - RNA, 19 nt, Artificial Sequence
  Description of Artificial Sequence: Synthetic oligonucleotide
  Sense strand starting at position 3263 of SEQ ID NO: 914824
auguaucagcucuaggcaa

SEQ ID NO: 1033547 - RNA, 19 nt, Artificial Sequence
  Description of Artificial Sequence: Synthetic oligonucleotide
  Antisense strand to SEQ ID NO: 1033546
uugccuagagcugauacau

SEQ ID NO: 1033548 - RNA, 19 nt, Artificial Sequence
  Description of Artificial Sequence: Synthetic oligonucleotide
  Sense strand starting at position 3298 of SEQ ID NO: 914824
guuggaauuccuggucucu

SEQ ID NO: 1033549 - RNA, 19 nt, Artificial Sequence
  Description of Artificial Sequence: Synthetic oligonucleotide
  Antisense strand to SEQ ID NO: 1033548
agagaccaggaauuccaac

SEQ ID NO: 1033550 - RNA, 19 nt, Artificial Sequence
  Description of Artificial Sequence: Synthetic oligonucleotide
  Sense strand starting at position 3472 of SEQ ID NO: 914824
aggcuugacugggaagaau

SEQ ID NO: 1033551 - RNA, 19 nt, Artificial Sequence
  Description of Artificial Sequence: Synthetic oligonucleotide
  Antisense strand to SEQ ID NO: 1033550
auucuucccagucaagccu

SEQ ID NO: 1033552 - RNA, 19 nt, Artificial Sequence
  Description of Artificial Sequence: Synthetic oligonucleotide
  Sense strand starting at position 3959 of SEQ ID NO: 914824
gguaccauuggauguguau

SEQ ID NO: 1033553 - RNA, 19 nt, Artificial Sequence
  Description of Artificial Sequence: Synthetic oligonucleotide
  Antisense strand to SEQ ID NO: 1033552
auacacauccaaugguacc

SEQ ID NO: 1033554 - RNA, 19 nt, Artificial Sequence
  Description of Artificial Sequence: Synthetic oligonucleotide
  Sense strand starting at position 11 of SEQ ID NO: 914825
uacaaugguguuuaccaga

SEQ ID NO: 1033555 - RNA, 19 nt, Artificial Sequence
  Description of Artificial Sequence: Synthetic oligonucleotide
  Antisense strand to SEQ ID NO: 1033554
ucugguaaacaccauugua

SEQ ID NO: 1033556 - RNA, 19 nt, Artificial Sequence
  Description of Artificial Sequence: Synthetic oligonucleotide
  Sense strand starting at position 184 of SEQ ID NO: 914825
aaauguaaacaguguagau

SEQ ID NO: 1033557 - RNA, 19 nt, Artificial Sequence
  Description of Artificial Sequence: Synthetic oligonucleotide
  Antisense strand to SEQ ID NO: 1033556
aucuacacuguuuacauuu

SEQ ID NO: 1033558 - RNA, 19 nt, Artificial Sequence
  Description of Artificial Sequence: Synthetic oligonucleotide
  Sense strand starting at position 188 of SEQ ID NO: 914825
guaaacaguguagauguua

SEQ ID NO: 1033559 - RNA, 19 nt, Artificial Sequence
  Description of Artificial Sequence: Synthetic oligonucleotide
  Antisense strand to SEQ ID NO: 1033558
uaacaucuacacuguuuac

SEQ ID NO: 1033560 - RNA, 19 nt, Artificial Sequence
  Description of Artificial Sequence: Synthetic oligonucleotide
  Sense strand starting at position 608 of SEQ ID NO: 914825
ucuuccuagugcuuauuua

SEQ ID NO: 1033561 - RNA, 19 nt, Artificial Sequence
  Description of Artificial Sequence: Synthetic oligonucleotide
  Antisense strand to SEQ ID NO: 1033560
uaaauaagcacuaggaaga

SEQ ID NO: 1033562 - RNA, 19 nt, Artificial Sequence
  Description of Artificial Sequence: Synthetic oligonucleotide
  Sense strand starting at position 642 of SEQ ID NO: 914825
agcacaugcuauuuaaugu

SEQ ID NO: 1033563 - RNA, 19 nt, Artificial Sequence
  Description of Artificial Sequence: Synthetic oligonucleotide
  Antisense strand to SEQ ID NO: 1033562
acauuaaauagcaugugcu

SEQ ID NO: 1033564 - RNA, 19 nt, Artificial Sequence
  Description of Artificial Sequence: Synthetic oligonucleotide
  Sense strand starting at position 988 of SEQ ID NO: 914825
ucaacaggucagugagauu

SEQ ID NO: 1033565 - RNA, 19 nt, Artificial Sequence
  Description of Artificial Sequence: Synthetic oligonucleotide
  Antisense strand to SEQ ID NO: 1033564
aaucucacugaccuguuga

SEQ ID NO: 1033566 - RNA, 19 nt, Artificial Sequence
  Description of Artificial Sequence: Synthetic oligonucleotide
  Sense strand starting at position 1009 of SEQ ID NO: 914825
aaacaauucgauggcaaga

SEQ ID NO: 1033567 - RNA, 19 nt, Artificial Sequence
  Description of Artificial Sequence: Synthetic oligonucleotide
  Antisense strand to SEQ ID NO: 1033566
ucuugccaucgaauuguuu

SEQ ID NO: 1033568 - RNA, 19 nt, Artificial Sequence
  Description of Artificial Sequence: Synthetic oligonucleotide
  Sense strand starting at position 1036 of SEQ ID NO: 914825
gagguuuggcucuaauuaa

SEQ ID NO: 1033569 - RNA, 19 nt, Artificial Sequence
  Description of Artificial Sequence: Synthetic oligonucleotide
  Antisense strand to SEQ ID NO: 1033568
uuaauuagagccaaaccuc

SEQ ID NO: 1033570 - RNA, 19 nt, Artificial Sequence
  Description of Artificial Sequence: Synthetic oligonucleotide
  Sense strand starting at position 1094 of SEQ ID NO: 914825
gugcgguaaugauuuggga

SEQ ID NO: 1033571 - RNA, 19 nt, Artificial Sequence
  Description of Artificial Sequence: Synthetic oligonucleotide
  Antisense strand to SEQ ID NO: 1033570
ucccaaaucauuaccgcac

SEQ ID NO: 1033572 - RNA, 19 nt, Artificial Sequence
  Description of Artificial Sequence: Synthetic oligonucleotide
  Sense strand starting at position 1096 of SEQ ID NO: 914825
gcgguaaugauuugggagu

SEQ ID NO: 1033573 - RNA, 19 nt, Artificial Sequence
  Description of Artificial Sequence: Synthetic oligonucleotide
  Antisense strand to SEQ ID NO: 1033572
acucccaaaucauuaccgc

SEQ ID NO: 1033574 - RNA, 19 nt, Artificial Sequence
  Description of Artificial Sequence: Synthetic oligonucleotide
  Sense strand starting at position 1381 of SEQ ID NO: 914825
acgacaauuaaauguguga

SEQ ID NO: 1033575 - RNA, 19 nt, Artificial Sequence
  Description of Artificial Sequence: Synthetic oligonucleotide
  Antisense strand to SEQ ID NO: 1033574
ucacacauuuaauugucgu

SEQ ID NO: 1033576 - RNA, 19 nt, Artificial Sequence
  Description of Artificial Sequence: Synthetic oligonucleotide
  Sense strand starting at position 1384 of SEQ ID NO: 914825
acaauuaaaugugugaaca

SEQ ID NO: 1033577 - RNA, 19 nt, Artificial Sequence
  Description of Artificial Sequence: Synthetic oligonucleotide
  Antisense strand to SEQ ID NO: 1033576
uguucacacauuuaauugu

SEQ ID NO: 1033578 - RNA, 19 nt, Artificial Sequence
  Description of Artificial Sequence: Synthetic oligonucleotide
  Sense strand starting at position 1397 of SEQ ID NO: 914825
ugaacaagguugucagagu

SEQ ID NO: 1033579 - RNA, 19 nt, Artificial Sequence
  Description of Artificial Sequence: Synthetic oligonucleotide
  Antisense strand to SEQ ID NO: 1033578
acucugacaaccuuguuca

SEQ ID NO: 1033580 - RNA, 19 nt, Artificial Sequence
  Description of Artificial Sequence: Synthetic oligonucleotide
  Sense strand starting at position 1502 of SEQ ID NO: 914825
uugucagagagcuauaguu

SEQ ID NO: 1033581 - RNA, 19 nt, Artificial Sequence
  Description of Artificial Sequence: Synthetic oligonucleotide
  Antisense strand to SEQ ID NO: 1033580
aacuauagcucucugacaa

SEQ ID NO: 1033582 - RNA, 19 nt, Artificial Sequence
  Description of Artificial Sequence: Synthetic oligonucleotide
  Sense strand starting at position 1504 of SEQ ID NO: 914825
gucagagagcuauaguuug

SEQ ID NO: 1033583 - RNA, 19 nt, Artificial Sequence
  Description of Artificial Sequence: Synthetic oligonucleotide
  Antisense strand to SEQ ID NO: 1033582
caaacuauagcucucugac

SEQ ID NO: 1033584 - RNA, 19 nt, Artificial Sequence
  Description of Artificial Sequence: Synthetic oligonucleotide
  Sense strand starting at position 1537 of SEQ ID NO: 914825
accagauagccucaaaguu

SEQ ID NO: 1033585 - RNA, 19 nt, Artificial Sequence
  Description of Artificial Sequence: Synthetic oligonucleotide
  Antisense strand to SEQ ID NO: 1033584
aacuuugaggcuaucuggu

SEQ ID NO: 1033586 - RNA, 19 nt, Artificial Sequence
  Description of Artificial Sequence: Synthetic oligonucleotide
  Sense strand starting at position 1630 of SEQ ID NO: 914825
gcaaccaacucauuaaggu

SEQ ID NO: 1033587 - RNA, 19 nt, Artificial Sequence
  Description of Artificial Sequence: Synthetic oligonucleotide
  Antisense strand to SEQ ID NO: 1033586
accuuaaugaguugguugc

SEQ ID NO: 1033588 - RNA, 19 nt, Artificial Sequence
  Description of Artificial Sequence: Synthetic oligonucleotide
  Sense strand starting at position 1796 of SEQ ID NO: 914825
cuugauaagcccuaagggu

SEQ ID NO: 1033589 - RNA, 19 nt, Artificial Sequence
  Description of Artificial Sequence: Synthetic oligonucleotide
  Antisense strand to SEQ ID NO: 1033588
acccuuagggcuuaucaag

SEQ ID NO: 1033590 - RNA, 19 nt, Artificial Sequence
  Description of Artificial Sequence: Synthetic oligonucleotide
  Sense strand starting at position 1868 of SEQ ID NO: 914825
ggagaagaacguuacguga

SEQ ID NO: 1033591 - RNA, 19 nt, Artificial Sequence
  Description of Artificial Sequence: Synthetic oligonucleotide
  Antisense strand to SEQ ID NO: 1033590
ucacguaacguucuucucc

SEQ ID NO: 1033592 - RNA, 19 nt, Artificial Sequence
  Description of Artificial Sequence: Synthetic oligonucleotide
  Sense strand starting at position 2043 of SEQ ID NO: 914825
aguccuauugguuacgaga

SEQ ID NO: 1033593 - RNA, 19 nt, Artificial Sequence
  Description of Artificial Sequence: Synthetic oligonucleotide
  Antisense strand to SEQ ID NO: 1033592
ucucguaaccaauaggacu

SEQ ID NO: 1033594 - RNA, 19 nt, Artificial Sequence
  Description of Artificial Sequence: Synthetic oligonucleotide
  Sense strand starting at position 2500 of SEQ ID NO: 914825
agagaauagccuggucuga

SEQ ID NO: 1033595 - RNA, 19 nt, Artificial Sequence
  Description of Artificial Sequence: Synthetic oligonucleotide
  Antisense strand to SEQ ID NO: 1033594
ucagaccaggcuauucucu

SEQ ID NO: 1033596 - RNA, 19 nt, Artificial Sequence
  Description of Artificial Sequence: Synthetic oligonucleotide
  Sense strand starting at position 2626 of SEQ ID NO: 914825
ucauauuacggaggaauuc

SEQ ID NO: 1033597 - RNA, 19 nt, Artificial Sequence
  Description of Artificial Sequence: Synthetic oligonucleotide
  Antisense strand to SEQ ID NO: 1033596
gaauuccuccguaauauga

SEQ ID NO: 1033598 - RNA, 19 nt, Artificial Sequence
  Description of Artificial Sequence: Synthetic oligonucleotide
  Sense strand starting at position 2666 of SEQ ID NO: 914825
augcuuucuagucaaggga

SEQ ID NO: 1033599 - RNA, 19 nt, Artificial Sequence
  Description of Artificial Sequence: Synthetic oligonucleotide
  Antisense strand to SEQ ID NO: 1033598
ucccuugacuagaaagcau

SEQ ID NO: 1033600 - RNA, 19 nt, Artificial Sequence
  Description of Artificial Sequence: Synthetic oligonucleotide
  Sense strand starting at position 2669 of SEQ ID NO: 914825
cuuucuagucaagggaaga

SEQ ID NO: 1033601 - RNA, 19 nt, Artificial Sequence
  Description of Artificial Sequence: Synthetic oligonucleotide
  Antisense strand to SEQ ID NO: 1033600
ucuucccuugacuagaaag

SEQ ID NO: 1033602 - RNA, 19 nt, Artificial Sequence
  Description of Artificial Sequence: Synthetic oligonucleotide
  Sense strand starting at position 2687 of SEQ ID NO: 914825
acauuaauuuauggagaug

SEQ ID NO: 1033603 - RNA, 19 nt, Artificial Sequence
  Description of Artificial Sequence: Synthetic oligonucleotide
  Antisense strand to SEQ ID NO: 1033602
caucuccauaaauuaaugu

SEQ ID NO: 1033604 - RNA, 19 nt, Artificial Sequence
  Description of Artificial Sequence: Synthetic oligonucleotide
  Sense strand starting at position 2891 of SEQ ID NO: 914825
cuuuaagagagcgaauguu

SEQ ID NO: 1033605 - RNA, 19 nt, Artificial Sequence
  Description of Artificial Sequence: Synthetic oligonucleotide
  Antisense strand to SEQ ID NO: 1033604
aacauucgcucucuuaaag

SEQ ID NO: 1033606 - RNA, 19 nt, Artificial Sequence
  Description of Artificial Sequence: Synthetic oligonucleotide
  Sense strand starting at position 2911 of SEQ ID NO: 914825
aaggcuuauguugacacau

SEQ ID NO: 1033607 - RNA, 19 nt, Artificial Sequence
  Description of Artificial Sequence: Synthetic oligonucleotide
  Antisense strand to SEQ ID NO: 1033606
augugucaacauaagccuu

SEQ ID NO: 1033608 - RNA, 19 nt, Artificial Sequence
  Description of Artificial Sequence: Synthetic oligonucleotide
  Sense strand starting at position 2949 of SEQ ID NO: 914825
gagccugucguugauauuu

SEQ ID NO: 1033609 - RNA, 19 nt, Artificial Sequence
  Description of Artificial Sequence: Synthetic oligonucleotide
  Antisense strand to SEQ ID NO: 1033608
aaauaucaacgacaggcuc

SEQ ID NO: 1033610 - RNA, 19 nt, Artificial Sequence
  Description of Artificial Sequence: Synthetic oligonucleotide
  Sense strand starting at position 3044 of SEQ ID NO: 914825
ugcuacauuccauacgaca

SEQ ID NO: 1033611 - RNA, 19 nt, Artificial Sequence
  Description of Artificial Sequence: Synthetic oligonucleotide
  Antisense strand to SEQ ID NO: 1033610
ugucguauggaauguagca

SEQ ID NO: 1033612 - RNA, 19 nt, Artificial Sequence
  Description of Artificial Sequence: Synthetic oligonucleotide
  Sense strand starting at position 3195 of SEQ ID NO: 914825
ccagauuaaguugguagga

SEQ ID NO: 1033613 - RNA, 19 nt, Artificial Sequence
  Description of Artificial Sequence: Synthetic oligonucleotide
  Antisense strand to SEQ ID NO: 1033612
uccuaccaacuuaaucugg

SEQ ID NO: 1033614 - RNA, 19 nt, Artificial Sequence
  Description of Artificial Sequence: Synthetic oligonucleotide
  Sense strand starting at position 3213 of SEQ ID NO: 914825
acagauuugcuguguuaau

SEQ ID NO: 1033615 - RNA, 19 nt, Artificial Sequence
  Description of Artificial Sequence: Synthetic oligonucleotide
  Antisense strand to SEQ ID NO: 1033614
auuaacacagcaaaucugu

SEQ ID NO: 1033616 - RNA, 19 nt, Artificial Sequence
  Description of Artificial Sequence: Synthetic oligonucleotide
  Sense strand starting at position 3214 of SEQ ID NO: 914825
cagauuugcuguguuaaua

SEQ ID NO: 1033617 - RNA, 19 nt, Artificial Sequence
  Description of Artificial Sequence: Synthetic oligonucleotide
  Antisense strand to SEQ ID NO: 1033616
uauuaacacagcaaaucug

SEQ ID NO: 1033618 - RNA, 19 nt, Artificial Sequence
  Description of Artificial Sequence: Synthetic oligonucleotide
  Sense strand starting at position 3244 of SEQ ID NO: 914825
uuaauuucugaaugcuguu

SEQ ID NO: 1033619 - RNA, 19 nt, Artificial Sequence
  Description of Artificial Sequence: Synthetic oligonucleotide
  Antisense strand to SEQ ID NO: 1033618
aacagcauucagaaauuaa

SEQ ID NO: 1033620 - RNA, 19 nt, Artificial Sequence
  Description of Artificial Sequence: Synthetic oligonucleotide
  Sense strand starting at position 3375 of SEQ ID NO: 914825
uuugacauuucuuucgguu

SEQ ID NO: 1033621 - RNA, 19 nt, Artificial Sequence
  Description of Artificial Sequence: Synthetic oligonucleotide
  Antisense strand to SEQ ID NO: 1033620
aaccgaaagaaaugucaaa

SEQ ID NO: 1033622 - RNA, 19 nt, Artificial Sequence
  Description of Artificial Sequence: Synthetic oligonucleotide
  Sense strand starting at position 3419 of SEQ ID NO: 914825
auagguuuagugcagagaa

SEQ ID NO: 1033623 - RNA, 19 nt, Artificial Sequence
  Description of Artificial Sequence: Synthetic oligonucleotide
  Antisense strand to SEQ ID NO: 1033622
uucucugcacuaaaccuau

SEQ ID NO: 1033624 - RNA, 19 nt, Artificial Sequence
  Description of Artificial Sequence: Synthetic oligonucleotide
  Sense strand starting at position 3421 of SEQ ID NO: 914825
agguuuagugcagagaaag

SEQ ID NO: 1033625 - RNA, 19 nt, Artificial Sequence
  Description of Artificial Sequence: Synthetic oligonucleotide
  Antisense strand to SEQ ID NO: 1033624
cuuucucugcacuaaaccu

SEQ ID NO: 1033626 - RNA, 19 nt, Artificial Sequence
  Description of Artificial Sequence: Synthetic oligonucleotide
  Sense strand starting at position 3570 of SEQ ID NO: 914825
ugguacuguaaauagaagu

SEQ ID NO: 1033627 - RNA, 19 nt, Artificial Sequence
  Description of Artificial Sequence: Synthetic oligonucleotide
  Antisense strand to SEQ ID NO: 1033626
acuucuauuuacaguacca

SEQ ID NO: 1033628 - RNA, 19 nt, Artificial Sequence
  Description of Artificial Sequence: Synthetic oligonucleotide
  Sense strand starting at position 3683 of SEQ ID NO: 914825
agcuauuucuaggccuuau

SEQ ID NO: 1033629 - RNA, 19 nt, Artificial Sequence
  Description of Artificial Sequence: Synthetic oligonucleotide
  Antisense strand to SEQ ID NO: 1033628
auaaggccuagaaauagcu

SEQ ID NO: 1033630 - RNA, 19 nt, Artificial Sequence
  Description of Artificial Sequence: Synthetic oligonucleotide
  Sense strand starting at position 3843 of SEQ ID NO: 914825
guagauucucaguaaguug

SEQ ID NO: 1033631 - RNA, 19 nt, Artificial Sequence
  Description of Artificial Sequence: Synthetic oligonucleotide
  Antisense strand to SEQ ID NO: 1033630
caacuuacugagaaucuac

SEQ ID NO: 1033632 - RNA, 19 nt, Artificial Sequence
  Description of Artificial Sequence: Synthetic oligonucleotide
  Sense strand starting at position 3852 of SEQ ID NO: 914825
caguaaguuguugaauaca

SEQ ID NO: 1033633 - RNA, 19 nt, Artificial Sequence
  Description of Artificial Sequence: Synthetic oligonucleotide
  Antisense strand to SEQ ID NO: 1033632
uguauucaacaacuuacug

SEQ ID NO: 1033634 - RNA, 19 nt, Artificial Sequence
  Description of Artificial Sequence: Synthetic oligonucleotide
  Sense strand starting at position 64 of SEQ ID NO: 914826
gauuguaauucucugcaga

SEQ ID NO: 1033635 - RNA, 19 nt, Artificial Sequence
  Description of Artificial Sequence: Synthetic oligonucleotide
  Antisense strand to SEQ ID NO: 1033634
ucugcagagaauuacaauc

SEQ ID NO: 1033636 - RNA, 19 nt, Artificial Sequence
  Description of Artificial Sequence: Synthetic oligonucleotide
  Sense strand starting at position 65 of SEQ ID NO: 914826
auuguaauucucugcagag

SEQ ID NO: 1033637 - RNA, 19 nt, Artificial Sequence
  Description of Artificial Sequence: Synthetic oligonucleotide
  Antisense strand to SEQ ID NO: 1033636
cucugcagagaauuacaau

SEQ ID NO: 1033638 - RNA, 19 nt, Artificial Sequence
  Description of Artificial Sequence: Synthetic oligonucleotide
  Sense strand starting at position 66 of SEQ ID NO: 914826
uuguaauucucugcagagc

SEQ ID NO: 1033639 - RNA, 19 nt, Artificial Sequence
  Description of Artificial Sequence: Synthetic oligonucleotide
  Antisense strand to SEQ ID NO: 1033638
gcucugcagagaauuacaa

SEQ ID NO: 1033640 - RNA, 19 nt, Artificial Sequence
  Description of Artificial Sequence: Synthetic oligonucleotide
  Sense strand starting at position 67 of SEQ ID NO: 914826
uguaauucucugcagagca

SEQ ID NO: 1033641 - RNA, 19 nt, Artificial Sequence
  Description of Artificial Sequence: Synthetic oligonucleotide
  Antisense strand to SEQ ID NO: 1033640
ugcucugcagagaauuaca

SEQ ID NO: 1033642 - RNA, 19 nt, Artificial Sequence
  Description of Artificial Sequence: Synthetic oligonucleotide
  Sense strand starting at position 212 of SEQ ID NO: 914826
aggacuauuuguuaaauga

SEQ ID NO: 1033643 - RNA, 19 nt, Artificial Sequence
  Description of Artificial Sequence: Synthetic oligonucleotide
  Antisense strand to SEQ ID NO: 1033642
ucauuuaacaaauaguccu

SEQ ID NO: 1033644 - RNA, 19 nt, Artificial Sequence
  Description of Artificial Sequence: Synthetic oligonucleotide
  Sense strand starting at position 311 of SEQ ID NO: 914826
acuuaaucugcacagguua

SEQ ID NO: 1033645 - RNA, 19 nt, Artificial Sequence
  Description of Artificial Sequence: Synthetic oligonucleotide
  Antisense strand to SEQ ID NO: 1033644
uaaccugugcagauuaagu

SEQ ID NO: 1033646 - RNA, 19 nt, Artificial Sequence
  Description of Artificial Sequence: Synthetic oligonucleotide
  Sense strand starting at position 715 of SEQ ID NO: 914826
accuuagcgcaacgauuua

SEQ ID NO: 1033647 - RNA, 19 nt, Artificial Sequence
  Description of Artificial Sequence: Synthetic oligonucleotide
  Antisense strand to SEQ ID NO: 1033646
uaaaucguugcgcuaaggu

SEQ ID NO: 1033648 - RNA, 19 nt, Artificial Sequence
  Description of Artificial Sequence: Synthetic oligonucleotide
  Sense strand starting at position 1067 of SEQ ID NO: 914826
gcccgagucagacaucauc

SEQ ID NO: 1033649 - RNA, 19 nt, Artificial Sequence
  Description of Artificial Sequence: Synthetic oligonucleotide
  Antisense strand to SEQ ID NO: 1033648
gaugaugucugacucgggc

SEQ ID NO: 1033650 - RNA, 19 nt, Artificial Sequence
  Description of Artificial Sequence: Synthetic oligonucleotide
  Sense strand starting at position 1070 of SEQ ID NO: 914826
cgagucagacaucaucuca

SEQ ID NO: 1033651 - RNA, 19 nt, Artificial Sequence
  Description of Artificial Sequence: Synthetic oligonucleotide
  Antisense strand to SEQ ID NO: 1033650
ugagaugaugucugacucg

SEQ ID NO: 1033652 - RNA, 19 nt, Artificial Sequence
  Description of Artificial Sequence: Synthetic oligonucleotide
  Sense strand starting at position 1285 of SEQ ID NO: 914826
cagucuuggcucugggcaa

SEQ ID NO: 1033653 - RNA, 19 nt, Artificial Sequence
  Description of Artificial Sequence: Synthetic oligonucleotide
  Antisense strand to SEQ ID NO: 1033652
uugcccagagccaagacug

SEQ ID NO: 1033654 - RNA, 19 nt, Artificial Sequence
  Description of Artificial Sequence: Synthetic oligonucleotide
  Sense strand starting at position 1319 of SEQ ID NO: 914826
auguuagcugaaugagacu

SEQ ID NO: 1033655 - RNA, 19 nt, Artificial Sequence
  Description of Artificial Sequence: Synthetic oligonucleotide
  Antisense strand to SEQ ID NO: 1033654
agucucauucagcuaacau

SEQ ID NO: 1033656 - RNA, 19 nt, Artificial Sequence
  Description of Artificial Sequence: Synthetic oligonucleotide
  Sense strand starting at position 1388 of SEQ ID NO: 914826
uccggaaauggucaguuua

SEQ ID NO: 1033657 - RNA, 19 nt, Artificial Sequence
  Description of Artificial Sequence: Synthetic oligonucleotide
  Antisense strand to SEQ ID NO: 1033656
uaaacugaccauuuccgga

SEQ ID NO: 1033658 - RNA, 19 nt, Artificial Sequence
  Description of Artificial Sequence: Synthetic oligonucleotide
  Sense strand starting at position 1390 of SEQ ID NO: 914826
cggaaauggucaguuuaaa

SEQ ID NO: 1033659 - RNA, 19 nt, Artificial Sequence
  Description of Artificial Sequence: Synthetic oligonucleotide
  Antisense strand to SEQ ID NO: 1033658
uuuaaacugaccauuuccg

SEQ ID NO: 1033660 - RNA, 19 nt, Artificial Sequence
  Description of Artificial Sequence: Synthetic oligonucleotide
  Sense strand starting at position 1445 of SEQ ID NO: 914826
gguuuaacugcacagaaau

SEQ ID NO: 1033661 - RNA, 19 nt, Artificial Sequence
  Description of Artificial Sequence: Synthetic oligonucleotide
  Antisense strand to SEQ ID NO: 1033660
auuucugugcaguuaaacc

SEQ ID NO: 1033662 - RNA, 19 nt, Artificial Sequence
  Description of Artificial Sequence: Synthetic oligonucleotide
  Sense strand starting at position 1472 of SEQ ID NO: 914826
gcaucauuccgccaaacaa

SEQ ID NO: 1033663 - RNA, 19 nt, Artificial Sequence
  Description of Artificial Sequence: Synthetic oligonucleotide
  Antisense strand to SEQ ID NO: 1033662
uuguuuggcggaaugaugc

SEQ ID NO: 1033664 - RNA, 19 nt, Artificial Sequence
  Description of Artificial Sequence: Synthetic oligonucleotide
  Sense strand starting at position 1516 of SEQ ID NO: 914826
cguccaagucaacacuaau

SEQ ID NO: 1033665 - RNA, 19 nt, Artificial Sequence
  Description of Artificial Sequence: Synthetic oligonucleotide
  Antisense strand to SEQ ID NO: 1033664
auuaguguugacuuggacg

SEQ ID NO: 1033666 - RNA, 19 nt, Artificial Sequence
  Description of Artificial Sequence: Synthetic oligonucleotide
  Sense strand starting at position 1985 of SEQ ID NO: 914826
agccaauccucggcaaguu

SEQ ID NO: 1033667 - RNA, 19 nt, Artificial Sequence
  Description of Artificial Sequence: Synthetic oligonucleotide
  Antisense strand to SEQ ID NO: 1033666
aacuugccgaggauuggcu

SEQ ID NO: 1033668 - RNA, 19 nt, Artificial Sequence
  Description of Artificial Sequence: Synthetic oligonucleotide
  Sense strand starting at position 1986 of SEQ ID NO: 914826
gccaauccucggcaaguuu

SEQ ID NO: 1033669 - RNA, 19 nt, Artificial Sequence
  Description of Artificial Sequence: Synthetic oligonucleotide
  Antisense strand to SEQ ID NO: 1033668
aaacuugccgaggauuggc

SEQ ID NO: 1033670 - RNA, 19 nt, Artificial Sequence
  Description of Artificial Sequence: Synthetic oligonucleotide
  Sense strand starting at position 2069 of SEQ ID NO: 914826
ggccauauccacuagcaau

SEQ ID NO: 1033671 - RNA, 19 nt, Artificial Sequence
  Description of Artificial Sequence: Synthetic oligonucleotide
  Antisense strand to SEQ ID NO: 1033670
auugcuaguggauauggcc

SEQ ID NO: 1033672 - RNA, 19 nt, Artificial Sequence
  Description of Artificial Sequence: Synthetic oligonucleotide
  Sense strand starting at position 2081 of SEQ ID NO: 914826
uagcaaucugcgggacuaa

SEQ ID NO: 1033673 - RNA, 19 nt, Artificial Sequence
  Description of Artificial Sequence: Synthetic oligonucleotide
  Antisense strand to SEQ ID NO: 1033672
uuagucccgcagauugcua

SEQ ID NO: 1033674 - RNA, 19 nt, Artificial Sequence
  Description of Artificial Sequence: Synthetic oligonucleotide
  Sense strand starting at position 2359 of SEQ ID NO: 914826
guaacaaauuaucuaggua

SEQ ID NO: 1033675 - RNA, 19 nt, Artificial Sequence
  Description of Artificial Sequence: Synthetic oligonucleotide
  Antisense strand to SEQ ID NO: 1033674
uaccuagauaauuuguuac

SEQ ID NO: 1033676 - RNA, 19 nt, Artificial Sequence
  Description of Artificial Sequence: Synthetic oligonucleotide
  Sense strand starting at position 2522 of SEQ ID NO: 914826
auggaauaguuccaccaaa

SEQ ID NO: 1033677 - RNA, 19 nt, Artificial Sequence
  Description of Artificial Sequence: Synthetic oligonucleotide
  Antisense strand to SEQ ID NO: 1033676
uuugguggaacuauuccau

SEQ ID NO: 1033678 - RNA, 19 nt, Artificial Sequence
  Description of Artificial Sequence: Synthetic oligonucleotide
  Sense strand starting at position 2642 of SEQ ID NO: 914826
agcuauaaggaguguaacu

SEQ ID NO: 1033679 - RNA, 19 nt, Artificial Sequence
  Description of Artificial Sequence: Synthetic oligonucleotide
  Antisense strand to SEQ ID NO: 1033678
aguuacacuccuuauagcu

SEQ ID NO: 1033680 - RNA, 19 nt, Artificial Sequence
  Description of Artificial Sequence: Synthetic oligonucleotide
  Sense strand starting at position 2727 of SEQ ID NO: 914826
uacgguauuuggcucauga

SEQ ID NO: 1033681 - RNA, 19 nt, Artificial Sequence
  Description of Artificial Sequence: Synthetic oligonucleotide
  Antisense strand to SEQ ID NO: 1033680
ucaugagccaaauaccgua

SEQ ID NO: 1033682 - RNA, 19 nt, Artificial Sequence
  Description of Artificial Sequence: Synthetic oligonucleotide
  Sense strand starting at position 3018 of SEQ ID NO: 914826
ggacuaauauguccuauaa

SEQ ID NO: 1033683 - RNA, 19 nt, Artificial Sequence
  Description of Artificial Sequence: Synthetic oligonucleotide
  Antisense strand to SEQ ID NO: 1033682
uuauaggacauauuagucc

SEQ ID NO: 1033684 - RNA, 19 nt, Artificial Sequence
  Description of Artificial Sequence: Synthetic oligonucleotide
  Sense strand starting at position 3483 of SEQ ID NO: 914826
cggagugugcguuuaucua

SEQ ID NO: 1033685 - RNA, 19 nt, Artificial Sequence
  Description of Artificial Sequence: Synthetic oligonucleotide
  Antisense strand to SEQ ID NO: 1033684
uagauaaacgcacacuccg

SEQ ID NO: 1033686 - RNA, 19 nt, Artificial Sequence
  Description of Artificial Sequence: Synthetic oligonucleotide
  Sense strand starting at position 3490 of SEQ ID NO: 914826
ugcguuuaucuagagccuu

SEQ ID NO: 1033687 - RNA, 19 nt, Artificial Sequence
  Description of Artificial Sequence: Synthetic oligonucleotide
  Antisense strand to SEQ ID NO: 1033686
aaggcucuagauaaacgca

SEQ ID NO: 1033688 - RNA, 19 nt, Artificial Sequence
  Description of Artificial Sequence: Synthetic oligonucleotide
  Sense strand starting at position 3512 of SEQ ID NO: 914826
ucaucucuugggcgacaga

SEQ ID NO: 1033689 - RNA, 19 nt, Artificial Sequence
  Description of Artificial Sequence: Synthetic oligonucleotide
  Antisense strand to SEQ ID NO: 1033688
ucugucgcccaagagauga

SEQ ID NO: 1033690 - RNA, 19 nt, Artificial Sequence
  Description of Artificial Sequence: Synthetic oligonucleotide
  Sense strand starting at position 3513 of SEQ ID NO: 914826
caucucuugggcgacagaa

SEQ ID NO: 1033691 - RNA, 19 nt, Artificial Sequence
  Description of Artificial Sequence: Synthetic oligonucleotide
  Antisense strand to SEQ ID NO: 1033690
uucugucgcccaagagaug

SEQ ID NO: 1033692 - RNA, 19 nt, Artificial Sequence
  Description of Artificial Sequence: Synthetic oligonucleotide
  Sense strand starting at position 3523 of SEQ ID NO: 914826
gcgacagaauccuugguca

SEQ ID NO: 1033693 - RNA, 19 nt, Artificial Sequence
  Description of Artificial Sequence: Synthetic oligonucleotide
  Antisense strand to SEQ ID NO: 1033692
ugaccaaggauucugucgc

SEQ ID NO: 1033694 - RNA, 19 nt, Artificial Sequence
  Description of Artificial Sequence: Synthetic oligonucleotide
  Sense strand starting at position 3556 of SEQ ID NO: 914826
ggacguuucuugagagaag

SEQ ID NO: 1033695 - RNA, 19 nt, Artificial Sequence
  Description of Artificial Sequence: Synthetic oligonucleotide
  Antisense strand to SEQ ID NO: 1033694
cuucucucaagaaacgucc

SEQ ID NO: 1033696 - RNA, 19 nt, Artificial Sequence
  Description of Artificial Sequence: Synthetic oligonucleotide
  Sense strand starting at position 3574 of SEQ ID NO: 914826
gugguucucaugcagagga

SEQ ID NO: 1033697 - RNA, 19 nt, Artificial Sequence
  Description of Artificial Sequence: Synthetic oligonucleotide
  Antisense strand to SEQ ID NO: 1033696
uccucugcaugagaaccac

SEQ ID NO: 1033698 - RNA, 19 nt, Artificial Sequence
  Description of Artificial Sequence: Synthetic oligonucleotide
  Sense strand starting at position 3616 of SEQ ID NO: 914826
cacauuuggcaguguguga

SEQ ID NO: 1033699 - RNA, 19 nt, Artificial Sequence
  Description of Artificial Sequence: Synthetic oligonucleotide
  Antisense strand to SEQ ID NO: 1033698
ucacacacugccaaaugug

SEQ ID NO: 1033700 - RNA, 19 nt, Artificial Sequence
  Description of Artificial Sequence: Synthetic oligonucleotide
  Sense strand starting at position 3637 of SEQ ID NO: 914826
ucauuuggguuugggagaa

SEQ ID NO: 1033701 - RNA, 19 nt, Artificial Sequence
  Description of Artificial Sequence: Synthetic oligonucleotide
  Antisense strand to SEQ ID NO: 1033700
uucucccaaacccaaauga

SEQ ID NO: 1033702 - RNA, 19 nt, Artificial Sequence
  Description of Artificial Sequence: Synthetic oligonucleotide
  Sense strand starting at position 3701 of SEQ ID NO: 914826
cgccaucuagugcauaaga

SEQ ID NO: 1033703 - RNA, 19 nt, Artificial Sequence
  Description of Artificial Sequence: Synthetic oligonucleotide
  Antisense strand to SEQ ID NO: 1033702
ucuuaugcacuagauggcg

SEQ ID NO: 1033704 - RNA, 19 nt, Artificial Sequence
  Description of Artificial Sequence: Synthetic oligonucleotide
  Sense strand starting at position 3703 of SEQ ID NO: 914826
ccaucuagugcauaagaca

SEQ ID NO: 1033705 - RNA, 19 nt, Artificial Sequence
  Description of Artificial Sequence: Synthetic oligonucleotide
  Antisense strand to SEQ ID NO: 1033704
ugucuuaugcacuagaugg

SEQ ID NO: 1033706 - RNA, 19 nt, Artificial Sequence
  Description of Artificial Sequence: Synthetic oligonucleotide
  Sense strand starting at position 3771 of SEQ ID NO: 914826
uugagaaacugcuuuagac

SEQ ID NO: 1033707 - RNA, 19 nt, Artificial Sequence
  Description of Artificial Sequence: Synthetic oligonucleotide
  Antisense strand to SEQ ID NO: 1033706
gucuaaagcaguuucucaa

SEQ ID NO: 1033708 - RNA, 19 nt, Artificial Sequence
  Description of Artificial Sequence: Synthetic oligonucleotide
  Sense strand starting at position 3793 of SEQ ID NO: 914826
gucacuuuacucugugagu

SEQ ID NO: 1033709 - RNA, 19 nt, Artificial Sequence
  Description of Artificial Sequence: Synthetic oligonucleotide
  Antisense strand to SEQ ID NO: 1033708
acucacagaguaaagugac

SEQ ID NO: 1033710 - RNA, 19 nt, Artificial Sequence
  Description of Artificial Sequence: Synthetic oligonucleotide
  Sense strand starting at position 3815 of SEQ ID NO: 914826
gguugcuguuaccuguaaa

SEQ ID NO: 1033711 - RNA, 19 nt, Artificial Sequence
  Description of Artificial Sequence: Synthetic oligonucleotide
  Antisense strand to SEQ ID NO: 1033710
uuuacagguaacagcaacc

SEQ ID NO: 1033712 - RNA, 19 nt, Artificial Sequence
  Description of Artificial Sequence: Synthetic oligonucleotide
  Sense strand starting at position 3904 of SEQ ID NO: 914826
ccaggucgucuguaguauu

SEQ ID NO: 1033713 - RNA, 19 nt, Artificial Sequence
  Description of Artificial Sequence: Synthetic oligonucleotide
  Antisense strand to SEQ ID NO: 1033712
aauacuacagacgaccugg

SEQ ID NO: 1033714 - RNA, 19 nt, Artificial Sequence
  Description of Artificial Sequence: Synthetic oligonucleotide
  Sense strand starting at position 138 of SEQ ID NO: 914827
agacuugaggccuaagcua

SEQ ID NO: 1033715 - RNA, 19 nt, Artificial Sequence
  Description of Artificial Sequence: Synthetic oligonucleotide
  Antisense strand to SEQ ID NO: 1033714
uagcuuaggccucaagucu

SEQ ID NO: 1033716 - RNA, 19 nt, Artificial Sequence
  Description of Artificial Sequence: Synthetic oligonucleotide
  Sense strand starting at position 146 of SEQ ID NO: 914827
ggccuaagcuaagacuuau

SEQ ID NO: 1033717 - RNA, 19 nt, Artificial Sequence
  Description of Artificial Sequence: Synthetic oligonucleotide
  Antisense strand to SEQ ID NO: 1033716
auaagucuuagcuuaggcc

SEQ ID NO: 1033718 - RNA, 19 nt, Artificial Sequence
  Description of Artificial Sequence: Synthetic oligonucleotide
  Sense strand starting at position 171 of SEQ ID NO: 914827
ccuuccuuguugggucaau

SEQ ID NO: 1033719 - RNA, 19 nt, Artificial Sequence
  Description of Artificial Sequence: Synthetic oligonucleotide
  Antisense strand to SEQ ID NO: 1033718
auugacccaacaaggaagg

SEQ ID NO: 1033720 - RNA, 19 nt, Artificial Sequence
  Description of Artificial Sequence: Synthetic oligonucleotide
  Sense strand starting at position 172 of SEQ ID NO: 914827
cuuccuuguugggucaauu

SEQ ID NO: 1033721 - RNA, 19 nt, Artificial Sequence
  Description of Artificial Sequence: Synthetic oligonucleotide
  Antisense strand to SEQ ID NO: 1033720
aauugacccaacaaggaag

SEQ ID NO: 1033722 - RNA, 19 nt, Artificial Sequence
  Description of Artificial Sequence: Synthetic oligonucleotide
  Sense strand starting at position 182 of SEQ ID NO: 914827
gggucaauugccuaggcua

SEQ ID NO: 1033723 - RNA, 19 nt, Artificial Sequence
  Description of Artificial Sequence: Synthetic oligonucleotide
  Antisense strand to SEQ ID NO: 1033722
uagccuaggcaauugaccc

SEQ ID NO: 1033724 - RNA, 19 nt, Artificial Sequence
  Description of Artificial Sequence: Synthetic oligonucleotide
  Sense strand starting at position 184 of SEQ ID NO: 914827
gucaauugccuaggcuaga

SEQ ID NO: 1033725 - RNA, 19 nt, Artificial Sequence
  Description of Artificial Sequence: Synthetic oligonucleotide
  Antisense strand to SEQ ID NO: 1033724
ucuagccuaggcaauugac

SEQ ID NO: 1033726 - RNA, 19 nt, Artificial Sequence
  Description of Artificial Sequence: Synthetic oligonucleotide
  Sense strand starting at position 262 of SEQ ID NO: 914827
ucucuugugcacuguagaa

SEQ ID NO: 1033727 - RNA, 19 nt, Artificial Sequence
  Description of Artificial Sequence: Synthetic oligonucleotide
  Antisense strand to SEQ ID NO: 1033726
uucuacagugcacaagaga

SEQ ID NO: 1033728 - RNA, 19 nt, Artificial Sequence
  Description of Artificial Sequence: Synthetic oligonucleotide
  Sense strand starting at position 326 of SEQ ID NO: 914827
ccaucccaguugugacaau

SEQ ID NO: 1033729 - RNA, 19 nt, Artificial Sequence
  Description of Artificial Sequence: Synthetic oligonucleotide
  Antisense strand to SEQ ID NO: 1033728
auugucacaacugggaugg

SEQ ID NO: 1033730 - RNA, 19 nt, Artificial Sequence
  Description of Artificial Sequence: Synthetic oligonucleotide
  Sense strand starting at position 694 of SEQ ID NO: 914827
gaccaaagaugucaggaga

SEQ ID NO: 1033731 - RNA, 19 nt, Artificial Sequence
  Description of Artificial Sequence: Synthetic oligonucleotide
  Antisense strand to SEQ ID NO: 1033730
ucuccugacaucuuugguc

SEQ ID NO: 1033732 - RNA, 19 nt, Artificial Sequence
  Description of Artificial Sequence: Synthetic oligonucleotide
  Sense strand starting at position 1359 of SEQ ID NO: 914827
ucccuucuaccuggaggau

SEQ ID NO: 1033733 - RNA, 19 nt, Artificial Sequence
  Description of Artificial Sequence: Synthetic oligonucleotide
  Antisense strand to SEQ ID NO: 1033732
auccuccagguagaaggga

SEQ ID NO: 1033734 - RNA, 19 nt, Artificial Sequence
  Description of Artificial Sequence: Synthetic oligonucleotide
  Sense strand starting at position 1458 of SEQ ID NO: 914827
ccucaaggcuccugaaagu

SEQ ID NO: 1033735 - RNA, 19 nt, Artificial Sequence
  Description of Artificial Sequence: Synthetic oligonucleotide
  Antisense strand to SEQ ID NO: 1033734
acuuucaggagccuugagg

SEQ ID NO: 1033736 - RNA, 19 nt, Artificial Sequence
  Description of Artificial Sequence: Synthetic oligonucleotide
  Sense strand starting at position 2051 of SEQ ID NO: 914827
cggccucaacuugaagaga

SEQ ID NO: 1033737 - RNA, 19 nt, Artificial Sequence
  Description of Artificial Sequence: Synthetic oligonucleotide
  Antisense strand to SEQ ID NO: 1033736
ucucuucaaguugaggccg

SEQ ID NO: 1033738 - RNA, 19 nt, Artificial Sequence
  Description of Artificial Sequence: Synthetic oligonucleotide
  Sense strand starting at position 2398 of SEQ ID NO: 914827
ccauaaaggucugauucca

SEQ ID NO: 1033739 - RNA, 19 nt, Artificial Sequence
  Description of Artificial Sequence: Synthetic oligonucleotide
  Antisense strand to SEQ ID NO: 1033738
uggaaucagaccuuuaugg

SEQ ID NO: 1033740 - RNA, 19 nt, Artificial Sequence
  Description of Artificial Sequence: Synthetic oligonucleotide
  Sense strand starting at position 2615 of SEQ ID NO: 914827
gggagauucccuggcuaac

SEQ ID NO: 1033741 - RNA, 19 nt, Artificial Sequence
  Description of Artificial Sequence: Synthetic oligonucleotide
  Antisense strand to SEQ ID NO: 1033740
guuagccagggaaucuccc

SEQ ID NO: 1033742 - RNA, 19 nt, Artificial Sequence
  Description of Artificial Sequence: Synthetic oligonucleotide
  Sense strand starting at position 2822 of SEQ ID NO: 914827
gcccgucuaguagaaaguu

SEQ ID NO: 1033743 - RNA, 19 nt, Artificial Sequence
  Description of Artificial Sequence: Synthetic oligonucleotide
  Antisense strand to SEQ ID NO: 1033742
aacuuucuacuagacgggc

SEQ ID NO: 1033744 - RNA, 19 nt, Artificial Sequence
  Description of Artificial Sequence: Synthetic oligonucleotide
  Sense strand starting at position 3253 of SEQ ID NO: 914827
gaaggugacagcuguguaa

SEQ ID NO: 1033745 - RNA, 19 nt, Artificial Sequence
  Description of Artificial Sequence: Synthetic oligonucleotide
  Antisense strand to SEQ ID NO: 1033744
uuacacagcugucaccuuc

SEQ ID NO: 1033746 - RNA, 19 nt, Artificial Sequence
  Description of Artificial Sequence: Synthetic oligonucleotide
  Sense strand starting at position 3255 of SEQ ID NO: 914827
aggugacagcuguguaaac

SEQ ID NO: 1033747 - RNA, 19 nt, Artificial Sequence
  Description of Artificial Sequence: Synthetic oligonucleotide
  Antisense strand to SEQ ID NO: 1033746
guuuacacagcugucaccu

SEQ ID NO: 1033748 - RNA, 19 nt, Artificial Sequence
  Description of Artificial Sequence: Synthetic oligonucleotide
  Sense strand starting at position 3262 of SEQ ID NO: 914827
agcuguguaaacuguaaag

SEQ ID NO: 1033749 - RNA, 19 nt, Artificial Sequence
  Description of Artificial Sequence: Synthetic oligonucleotide
  Antisense strand to SEQ ID NO: 1033748
cuuuacaguuuacacagcu

SEQ ID NO: 1033750 - RNA, 19 nt, Artificial Sequence
  Description of Artificial Sequence: Synthetic oligonucleotide
  Sense strand starting at position 3646 of SEQ ID NO: 914827
ccuuuaaccugggagagaa

SEQ ID NO: 1033751 - RNA, 19 nt, Artificial Sequence
  Description of Artificial Sequence: Synthetic oligonucleotide
  Antisense strand to SEQ ID NO: 1033750
uucucucccagguuaaagg

SEQ ID NO: 1033752 - RNA, 19 nt, Artificial Sequence
  Description of Artificial Sequence: Synthetic oligonucleotide
  Sense strand starting at position 3679 of SEQ ID NO: 914827
cguugaaccuguugacgga

SEQ ID NO: 1033753 - RNA, 19 nt, Artificial Sequence
  Description of Artificial Sequence: Synthetic oligonucleotide
  Antisense strand to SEQ ID NO: 1033752
uccgucaacagguucaacg

SEQ ID NO: 1033754 - RNA, 19 nt, Artificial Sequence
  Description of Artificial Sequence: Synthetic oligonucleotide
  Sense strand starting at position 3714 of SEQ ID NO: 914827
cgagcuccuuccucuauuu

SEQ ID NO: 1033755 - RNA, 19 nt, Artificial Sequence
  Description of Artificial Sequence: Synthetic oligonucleotide
  Antisense strand to SEQ ID NO: 1033754
aaauagaggaaggagcucg

SEQ ID NO: 1033756 - RNA, 19 nt, Artificial Sequence
  Description of Artificial Sequence: Synthetic oligonucleotide
  Sense strand starting at position 3794 of SEQ ID NO: 914827
ggccuuccacacuagauaa

SEQ ID NO: 1033757 - RNA, 19 nt, Artificial Sequence
  Description of Artificial Sequence: Synthetic oligonucleotide
  Antisense strand to SEQ ID NO: 1033756
uuaucuaguguggaaggcc

SEQ ID NO: 1033758 - RNA, 19 nt, Artificial Sequence
  Description of Artificial Sequence: Synthetic oligonucleotide
  Sense strand starting at position 175 of SEQ ID NO: 914828
gggacuccaucagaaauaa

SEQ ID NO: 1033759 - RNA, 19 nt, Artificial Sequence
  Description of Artificial Sequence: Synthetic oligonucleotide
  Antisense strand to SEQ ID NO: 1033758
uuauuucugauggaguccc

SEQ ID NO: 1033760 - RNA, 19 nt, Artificial Sequence
  Description of Artificial Sequence: Synthetic oligonucleotide
  Sense strand starting at position 639 of SEQ ID NO: 914828
gcgucuaguugcaguaguu

SEQ ID NO: 1033761 - RNA, 19 nt, Artificial Sequence
  Description of Artificial Sequence: Synthetic oligonucleotide
  Antisense strand to SEQ ID NO: 1033760
aacuacugcaacuagacgc

SEQ ID NO: 1033762 - RNA, 19 nt, Artificial Sequence
  Description of Artificial Sequence: Synthetic oligonucleotide
  Sense strand starting at position 688 of SEQ ID NO: 914828
acagcauuguuccacaaug

SEQ ID NO: 1033763 - RNA, 19 nt, Artificial Sequence
  Description of Artificial Sequence: Synthetic oligonucleotide
  Antisense strand to SEQ ID NO: 1033762
cauuguggaacaaugcugu

SEQ ID NO: 1033764 - RNA, 19 nt, Artificial Sequence
  Description of Artificial Sequence: Synthetic oligonucleotide
  Sense strand starting at position 1041 of SEQ ID NO: 914828
aggugaucccaguacuucu

SEQ ID NO: 1033765 - RNA, 19 nt, Artificial Sequence
  Description of Artificial Sequence: Synthetic oligonucleotide
  Antisense strand to SEQ ID NO: 1033764
agaaguacugggaucaccu

SEQ ID NO: 1033766 - RNA, 19 nt, Artificial Sequence
  Description of Artificial Sequence: Synthetic oligonucleotide
  Sense strand starting at position 1177 of SEQ ID NO: 914828
ggguguucgcccagaggca

SEQ ID NO: 1033767 - RNA, 19 nt, Artificial Sequence
  Description of Artificial Sequence: Synthetic oligonucleotide
  Antisense strand to SEQ ID NO: 1033766
ugccucugggcgaacaccc

SEQ ID NO: 1033768 - RNA, 19 nt, Artificial Sequence
  Description of Artificial Sequence: Synthetic oligonucleotide
  Sense strand starting at position 1251 of SEQ ID NO: 914828
acuugaaucugcggucauc

SEQ ID NO: 1033769 - RNA, 19 nt, Artificial Sequence
  Description of Artificial Sequence: Synthetic oligonucleotide
  Antisense strand to SEQ ID NO: 1033768
gaugaccgcagauucaagu

SEQ ID NO: 1033770 - RNA, 19 nt, Artificial Sequence
  Description of Artificial Sequence: Synthetic oligonucleotide
  Sense strand starting at position 1254 of SEQ ID NO: 914828
ugaaucugcggucaucaaa

SEQ ID NO: 1033771 - RNA, 19 nt, Artificial Sequence
  Description of Artificial Sequence: Synthetic oligonucleotide
  Antisense strand to SEQ ID NO: 1033770
uuugaugaccgcagauuca

SEQ ID NO: 1033772 - RNA, 19 nt, Artificial Sequence
  Description of Artificial Sequence: Synthetic oligonucleotide
  Sense strand starting at position 1332 of SEQ ID NO: 914828
ugcccacccucugauguau

SEQ ID NO: 1033773 - RNA, 19 nt, Artificial Sequence
  Description of Artificial Sequence: Synthetic oligonucleotide
  Antisense strand to SEQ ID NO: 1033772
auacaucagagggugggca

SEQ ID NO: 1033774 - RNA, 19 nt, Artificial Sequence
  Description of Artificial Sequence: Synthetic oligonucleotide
  Sense strand starting at position 1373 of SEQ ID NO: 914828
ccguccucaggcugagauu

SEQ ID NO: 1033775 - RNA, 19 nt, Artificial Sequence
  Description of Artificial Sequence: Synthetic oligonucleotide
  Antisense strand to SEQ ID NO: 1033774
aaucucagccugaggacgg

SEQ ID NO: 1033776 - RNA, 19 nt, Artificial Sequence
  Description of Artificial Sequence: Synthetic oligonucleotide
  Sense strand starting at position 1600 of SEQ ID NO: 914828
gggucuuggguguguagaa

SEQ ID NO: 1033777 - RNA, 19 nt, Artificial Sequence
  Description of Artificial Sequence: Synthetic oligonucleotide
  Antisense strand to SEQ ID NO: 1033776
uucuacacacccaagaccc

SEQ ID NO: 1033778 - RNA, 19 nt, Artificial Sequence
  Description of Artificial Sequence: Synthetic oligonucleotide
  Sense strand starting at position 2020 of SEQ ID NO: 914828
cuggcuuuauagucucaga

SEQ ID NO: 1033779 - RNA, 19 nt, Artificial Sequence
  Description of Artificial Sequence: Synthetic oligonucleotide
  Antisense strand to SEQ ID NO: 1033778
ucugagacuauaaagccag

SEQ ID NO: 1033780 - RNA, 19 nt, Artificial Sequence
  Description of Artificial Sequence: Synthetic oligonucleotide
  Sense strand starting at position 2123 of SEQ ID NO: 914828
gcugcaauuuccggaccau

SEQ ID NO: 1033781 - RNA, 19 nt, Artificial Sequence
  Description of Artificial Sequence: Synthetic oligonucleotide
  Antisense strand to SEQ ID NO: 1033780
augguccggaaauugcagc

SEQ ID NO: 1033782 - RNA, 19 nt, Artificial Sequence
  Description of Artificial Sequence: Synthetic oligonucleotide
  Sense strand starting at position 2151 of SEQ ID NO: 914828
gcugggucugugggaagau

SEQ ID NO: 1033783 - RNA, 19 nt, Artificial Sequence
  Description of Artificial Sequence: Synthetic oligonucleotide
  Antisense strand to SEQ ID NO: 1033782
aucuucccacagacccagc

SEQ ID NO: 1033784 - RNA, 19 nt, Artificial Sequence
  Description of Artificial Sequence: Synthetic oligonucleotide
  Sense strand starting at position 2160 of SEQ ID NO: 914828
gugggaagaucuccuuggu

SEQ ID NO: 1033785 - RNA, 19 nt, Artificial Sequence
  Description of Artificial Sequence: Synthetic oligonucleotide
  Antisense strand to SEQ ID NO: 1033784
accaaggagaucuucccac

SEQ ID NO: 1033786 - RNA, 19 nt, Artificial Sequence
  Description of Artificial Sequence: Synthetic oligonucleotide
  Sense strand starting at position 2163 of SEQ ID NO: 914828
ggaagaucuccuuggucgu

SEQ ID NO: 1033787 - RNA, 19 nt, Artificial Sequence
  Description of Artificial Sequence: Synthetic oligonucleotide
  Antisense strand to SEQ ID NO: 1033786
acgaccaaggagaucuucc

SEQ ID NO: 1033788 - RNA, 19 nt, Artificial Sequence
  Description of Artificial Sequence: Synthetic oligonucleotide
  Sense strand starting at position 2209 of SEQ ID NO: 914828
ucauuagagucuuaaccag

SEQ ID NO: 1033789 - RNA, 19 nt, Artificial Sequence
  Description of Artificial Sequence: Synthetic oligonucleotide
  Antisense strand to SEQ ID NO: 1033788
cugguuaagacucuaauga

SEQ ID NO: 1033790 - RNA, 19 nt, Artificial Sequence
  Description of Artificial Sequence: Synthetic oligonucleotide
  Sense strand starting at position 2265 of SEQ ID NO: 914828
gggcaaaugucuccaggag

SEQ ID NO: 1033791 - RNA, 19 nt, Artificial Sequence
  Description of Artificial Sequence: Synthetic oligonucleotide
  Antisense strand to SEQ ID NO: 1033790
cuccuggagacauuugccc

SEQ ID NO: 1033792 - RNA, 19 nt, Artificial Sequence
  Description of Artificial Sequence: Synthetic oligonucleotide
  Sense strand starting at position 2301 of SEQ ID NO: 914828
ggccacuuuccacauuaga

SEQ ID NO: 1033793 - RNA, 19 nt, Artificial Sequence
  Description of Artificial Sequence: Synthetic oligonucleotide
  Antisense strand to SEQ ID NO: 1033792
ucuaauguggaaaguggcc

SEQ ID NO: 1033794 - RNA, 19 nt, Artificial Sequence
  Description of Artificial Sequence: Synthetic oligonucleotide
  Sense strand starting at position 2780 of SEQ ID NO: 914828
ccaagaugccgccauggau

SEQ ID NO: 1033795 - RNA, 19 nt, Artificial Sequence
  Description of Artificial Sequence: Synthetic oligonucleotide
  Antisense strand to SEQ ID NO: 1033794
auccauggcggcaucuugg

SEQ ID NO: 1033796 - RNA, 19 nt, Artificial Sequence
  Description of Artificial Sequence: Synthetic oligonucleotide
  Sense strand starting at position 2983 of SEQ ID NO: 914828
gaccucaucuuccguguga

SEQ ID NO: 1033797 - RNA, 19 nt, Artificial Sequence
  Description of Artificial Sequence: Synthetic oligonucleotide
  Antisense strand to SEQ ID NO: 1033796
ucacacggaagaugagguc

SEQ ID NO: 1033798 - RNA, 19 nt, Artificial Sequence
  Description of Artificial Sequence: Synthetic oligonucleotide
  Sense strand starting at position 2984 of SEQ ID NO: 914828
accucaucuuccgugugau

SEQ ID NO: 1033799 - RNA, 19 nt, Artificial Sequence
  Description of Artificial Sequence: Synthetic oligonucleotide
  Antisense strand to SEQ ID NO: 1033798
aucacacggaagaugaggu

SEQ ID NO: 1033800 - RNA, 19 nt, Artificial Sequence
  Description of Artificial Sequence: Synthetic oligonucleotide
  Sense strand starting at position 2985 of SEQ ID NO: 914828
ccucaucuuccgugugauc

SEQ ID NO: 1033801 - RNA, 19 nt, Artificial Sequence
  Description of Artificial Sequence: Synthetic oligonucleotide
  Antisense strand to SEQ ID NO: 1033800
gaucacacggaagaugagg

SEQ ID NO: 1033802 - RNA, 19 nt, Artificial Sequence
  Description of Artificial Sequence: Synthetic oligonucleotide
  Sense strand starting at position 2987 of SEQ ID NO: 914828
ucaucuuccgugugaucug

SEQ ID NO: 1033803 - RNA, 19 nt, Artificial Sequence
  Description of Artificial Sequence: Synthetic oligonucleotide
  Antisense strand to SEQ ID NO: 1033802
cagaucacacggaagauga

SEQ ID NO: 1033804 - RNA, 19 nt, Artificial Sequence
  Description of Artificial Sequence: Synthetic oligonucleotide
  Sense strand starting at position 3795 of SEQ ID NO: 914828
gcacuaacaagguguguga

SEQ ID NO: 1033805 - RNA, 19 nt, Artificial Sequence
  Description of Artificial Sequence: Synthetic oligonucleotide
  Antisense strand to SEQ ID NO: 1033804
ucacacaccuuguuagugc

SEQ ID NO: 1033806 - RNA, 19 nt, Artificial Sequence
  Description of Artificial Sequence: Synthetic oligonucleotide
  Sense strand starting at position 3799 of SEQ ID NO: 914828
uaacaaggugugugaggaa

SEQ ID NO: 1033807 - RNA, 19 nt, Artificial Sequence
  Description of Artificial Sequence: Synthetic oligonucleotide
  Antisense strand to SEQ ID NO: 1033806
uuccucacacaccuuguua

SEQ ID NO: 1033808 - RNA, 19 nt, Artificial Sequence
  Description of Artificial Sequence: Synthetic oligonucleotide
  Sense strand starting at position 3862 of SEQ ID NO: 914828
cguggaugaguaggaguuu

SEQ ID NO: 1033809 - RNA, 19 nt, Artificial Sequence
  Description of Artificial Sequence: Synthetic oligonucleotide
  Antisense strand to SEQ ID NO: 1033808
aaacuccuacucauccacg

SEQ ID NO: 1033810 - RNA, 19 nt, Artificial Sequence
  Description of Artificial Sequence: Synthetic oligonucleotide
  Sense strand starting at position 3871 of SEQ ID NO: 914828
guaggaguuugccaguguu

SEQ ID NO: 1033811 - RNA, 19 nt, Artificial Sequence
  Description of Artificial Sequence: Synthetic oligonucleotide
  Antisense strand to SEQ ID NO: 1033810
aacacuggcaaacuccuac

SEQ ID NO: 1033812 - RNA, 19 nt, Artificial Sequence
  Description of Artificial Sequence: Synthetic oligonucleotide
  Sense strand starting at position 3874 of SEQ ID NO: 914828
ggaguuugccaguguuguc

SEQ ID NO: 1033813 - RNA, 19 nt, Artificial Sequence
  Description of Artificial Sequence: Synthetic oligonucleotide
  Antisense strand to SEQ ID NO: 1033812
gacaacacuggcaaacucc

SEQ ID NO: 1033814 - RNA, 19 nt, Artificial Sequence
  Description of Artificial Sequence: Synthetic oligonucleotide
  Sense strand starting at position 7 of SEQ ID NO: 914829
ccuagaaugagacgguuua

SEQ ID NO: 1033815 - RNA, 19 nt, Artificial Sequence
  Description of Artificial Sequence: Synthetic oligonucleotide
  Antisense strand to SEQ ID NO: 1033814
uaaaccgucucauucuagg

SEQ ID NO: 1033816 - RNA, 19 nt, Artificial Sequence
  Description of Artificial Sequence: Synthetic oligonucleotide
  Sense strand starting at position 8 of SEQ ID NO: 914829
cuagaaugagacgguuuau

SEQ ID NO: 1033817 - RNA, 19 nt, Artificial Sequence
  Description of Artificial Sequence: Synthetic oligonucleotide
  Antisense strand to SEQ ID NO: 1033816
auaaaccgucucauucuag

SEQ ID NO: 1033818 - RNA, 19 nt, Artificial Sequence
  Description of Artificial Sequence: Synthetic oligonucleotide
  Sense strand starting at position 129 of SEQ ID NO: 914829
uucuaacuucggcacauaa

SEQ ID NO: 1033819 - RNA, 19 nt, Artificial Sequence
  Description of Artificial Sequence: Synthetic oligonucleotide
  Antisense strand to SEQ ID NO: 1033818
uuaugugccgaaguuagaa

SEQ ID NO: 1033820 - RNA, 19 nt, Artificial Sequence
  Description of Artificial Sequence: Synthetic oligonucleotide
  Sense strand starting at position 131 of SEQ ID NO: 914829
cuaacuucggcacauaaga

SEQ ID NO: 1033821 - RNA, 19 nt, Artificial Sequence
  Description of Artificial Sequence: Synthetic oligonucleotide
  Antisense strand to SEQ ID NO: 1033820
ucuuaugugccgaaguuag

SEQ ID NO: 1033822 - RNA, 19 nt, Artificial Sequence
  Description of Artificial Sequence: Synthetic oligonucleotide
  Sense strand starting at position 211 of SEQ ID NO: 914829
ggaacuugauuccuaccca

SEQ ID NO: 1033823 - RNA, 19 nt, Artificial Sequence
  Description of Artificial Sequence: Synthetic oligonucleotide
  Antisense strand to SEQ ID NO: 1033822
uggguaggaaucaaguucc

SEQ ID NO: 1033824 - RNA, 19 nt, Artificial Sequence
  Description of Artificial Sequence: Synthetic oligonucleotide
  Sense strand starting at position 355 of SEQ ID NO: 914829
cuuggagguccucaagcaa

SEQ ID NO: 1033825 - RNA, 19 nt, Artificial Sequence
  Description of Artificial Sequence: Synthetic oligonucleotide
  Antisense strand to SEQ ID NO: 1033824
uugcuugaggaccuccaag

SEQ ID NO: 1033826 - RNA, 19 nt, Artificial Sequence
  Description of Artificial Sequence: Synthetic oligonucleotide
  Sense strand starting at position 764 of SEQ ID NO: 914829
ccagaacagccugauucua

SEQ ID NO: 1033827 - RNA, 19 nt, Artificial Sequence
  Description of Artificial Sequence: Synthetic oligonucleotide
  Antisense strand to SEQ ID NO: 1033826
uagaaucaggcuguucugg

SEQ ID NO: 1033828 - RNA, 19 nt, Artificial Sequence
  Description of Artificial Sequence: Synthetic oligonucleotide
  Sense strand starting at position 906 of SEQ ID NO: 914829
ugcagaaucuucucucuga

SEQ ID NO: 1033829 - RNA, 19 nt, Artificial Sequence
  Description of Artificial Sequence: Synthetic oligonucleotide
  Antisense strand to SEQ ID NO: 1033828
ucagagagaagauucugca

SEQ ID NO: 1033830 - RNA, 19 nt, Artificial Sequence
  Description of Artificial Sequence: Synthetic oligonucleotide
  Sense strand starting at position 907 of SEQ ID NO: 914829
gcagaaucuucucucugag

SEQ ID NO: 1033831 - RNA, 19 nt, Artificial Sequence
  Description of Artificial Sequence: Synthetic oligonucleotide
  Antisense strand to SEQ ID NO: 1033830
cucagagagaagauucugc

SEQ ID NO: 1033832 - RNA, 19 nt, Artificial Sequence
  Description of Artificial Sequence: Synthetic oligonucleotide
  Sense strand starting at position 909 of SEQ ID NO: 914829
agaaucuucucucugaguc

SEQ ID NO: 1033833 - RNA, 19 nt, Artificial Sequence
  Description of Artificial Sequence: Synthetic oligonucleotide
  Antisense strand to SEQ ID NO: 1033832
gacucagagagaagauucu

SEQ ID NO: 1033834 - RNA, 19 nt, Artificial Sequence
  Description of Artificial Sequence: Synthetic oligonucleotide
  Sense strand starting at position 1109 of SEQ ID NO: 914829
aguugucaugugccuguua

SEQ ID NO: 1033835 - RNA, 19 nt, Artificial Sequence
  Description of Artificial Sequence: Synthetic oligonucleotide
  Antisense strand to SEQ ID NO: 1033834
uaacaggcacaugacaacu

SEQ ID NO: 1033836 - RNA, 19 nt, Artificial Sequence
  Description of Artificial Sequence: Synthetic oligonucleotide
  Sense strand starting at position 1430 of SEQ ID NO: 914829
cucuacuacuuucuaguga

SEQ ID NO: 1033837 - RNA, 19 nt, Artificial Sequence
  Description of Artificial Sequence: Synthetic oligonucleotide
  Antisense strand to SEQ ID NO: 1033836
ucacuagaaaguaguagag

SEQ ID NO: 1033838 - RNA, 19 nt, Artificial Sequence
  Description of Artificial Sequence: Synthetic oligonucleotide
  Sense strand starting at position 1444 of SEQ ID NO: 914829
agugaugaguccuuggaca

SEQ ID NO: 1033839 - RNA, 19 nt, Artificial Sequence
  Description of Artificial Sequence: Synthetic oligonucleotide
  Antisense strand to SEQ ID NO: 1033838
uguccaaggacucaucacu

SEQ ID NO: 1033840 - RNA, 19 nt, Artificial Sequence
  Description of Artificial Sequence: Synthetic oligonucleotide
  Sense strand starting at position 1446 of SEQ ID NO: 914829
ugaugaguccuuggacaaa

SEQ ID NO: 1033841 - RNA, 19 nt, Artificial Sequence
  Description of Artificial Sequence: Synthetic oligonucleotide
  Antisense strand to SEQ ID NO: 1033840
uuuguccaaggacucauca

SEQ ID NO: 1033842 - RNA, 19 nt, Artificial Sequence
  Description of Artificial Sequence: Synthetic oligonucleotide
  Sense strand starting at position 1530 of SEQ ID NO: 914829
agcucaugagguuguugaa

SEQ ID NO: 1033843 - RNA, 19 nt, Artificial Sequence
  Description of Artificial Sequence: Synthetic oligonucleotide
  Antisense strand to SEQ ID NO: 1033842
uucaacaaccucaugagcu

SEQ ID NO: 1033844 - RNA, 19 nt, Artificial Sequence
  Description of Artificial Sequence: Synthetic oligonucleotide
  Sense strand starting at position 1539 of SEQ ID NO: 914829
gguuguugaaaguaugaag

SEQ ID NO: 1033845 - RNA, 19 nt, Artificial Sequence
  Description of Artificial Sequence: Synthetic oligonucleotide
  Antisense strand to SEQ ID NO: 1033844
cuucauacuuucaacaacc

SEQ ID NO: 1033846 - RNA, 19 nt, Artificial Sequence
  Description of Artificial Sequence: Synthetic oligonucleotide
  Sense strand starting at position 1555 of SEQ ID NO: 914829
aagugaggucaaggaugua

SEQ ID NO: 1033847 - RNA, 19 nt, Artificial Sequence
  Description of Artificial Sequence: Synthetic oligonucleotide
  Antisense strand to SEQ ID NO: 1033846
uacauccuugaccucacuu

SEQ ID NO: 1033848 - RNA, 19 nt, Artificial Sequence
  Description of Artificial Sequence: Synthetic oligonucleotide
  Sense strand starting at position 1631 of SEQ ID NO: 914829
ucauaaacagaucgauguu

SEQ ID NO: 1033849 - RNA, 19 nt, Artificial Sequence
  Description of Artificial Sequence: Synthetic oligonucleotide
  Antisense strand to SEQ ID NO: 1033848
aacaucgaucuguuuauga

SEQ ID NO: 1033850 - RNA, 19 nt, Artificial Sequence
  Description of Artificial Sequence: Synthetic oligonucleotide
  Sense strand starting at position 1718 of SEQ ID NO: 914829
ggaacagacuugguuuguu

SEQ ID NO: 1033851 - RNA, 19 nt, Artificial Sequence
  Description of Artificial Sequence: Synthetic oligonucleotide
  Antisense strand to SEQ ID NO: 1033850
aacaaaccaagucuguucc

SEQ ID NO: 1033852 - RNA, 19 nt, Artificial Sequence
  Description of Artificial Sequence: Synthetic oligonucleotide
  Sense strand starting at position 1721 of SEQ ID NO: 914829
acagacuugguuuguuaga

SEQ ID NO: 1033853 - RNA, 19 nt, Artificial Sequence
  Description of Artificial Sequence: Synthetic oligonucleotide
  Antisense strand to SEQ ID NO: 1033852
ucuaacaaaccaagucugu

SEQ ID NO: 1033854 - RNA, 19 nt, Artificial Sequence
  Description of Artificial Sequence: Synthetic oligonucleotide
  Sense strand starting at position 1722 of SEQ ID NO: 914829
cagacuugguuuguuagau

SEQ ID NO: 1033855 - RNA, 19 nt, Artificial Sequence
  Description of Artificial Sequence: Synthetic oligonucleotide
  Antisense strand to SEQ ID NO: 1033854
aucuaacaaaccaagucug

SEQ ID NO: 1033856 - RNA, 19 nt, Artificial Sequence
  Description of Artificial Sequence: Synthetic oligonucleotide
  Sense strand starting at position 1723 of SEQ ID NO: 914829
agacuugguuuguuagaug

SEQ ID NO: 1033857 - RNA, 19 nt, Artificial Sequence
  Description of Artificial Sequence: Synthetic oligonucleotide
  Antisense strand to SEQ ID NO: 1033856
caucuaacaaaccaagucu

SEQ ID NO: 1033858 - RNA, 19 nt, Artificial Sequence
  Description of Artificial Sequence: Synthetic oligonucleotide
  Sense strand starting at position 2038 of SEQ ID NO: 914829
gggccauggcccugagaag

SEQ ID NO: 1033859 - RNA, 19 nt, Artificial Sequence
  Description of Artificial Sequence: Synthetic oligonucleotide
  Antisense strand to SEQ ID NO: 1033858
cuucucagggccauggccc

SEQ ID NO: 1033860 - RNA, 19 nt, Artificial Sequence
  Description of Artificial Sequence: Synthetic oligonucleotide
  Sense strand starting at position 2050 of SEQ ID NO: 914829
ugagaaggccugugacuca

SEQ ID NO: 1033861 - RNA, 19 nt, Artificial Sequence
  Description of Artificial Sequence: Synthetic oligonucleotide
  Antisense strand to SEQ ID NO: 1033860
ugagucacaggccuucuca

SEQ ID NO: 1033862 - RNA, 19 nt, Artificial Sequence
  Description of Artificial Sequence: Synthetic oligonucleotide
  Sense strand starting at position 2178 of SEQ ID NO: 914829
cugugcuguccugcuuaau

SEQ ID NO: 1033863 - RNA, 19 nt, Artificial Sequence
  Description of Artificial Sequence: Synthetic oligonucleotide
  Antisense strand to SEQ ID NO: 1033862
auuaagcaggacagcacag

SEQ ID NO: 1033864 - RNA, 19 nt, Artificial Sequence
  Description of Artificial Sequence: Synthetic oligonucleotide
  Sense strand starting at position 2179 of SEQ ID NO: 914829
ugugcuguccugcuuaauu

SEQ ID NO: 1033865 - RNA, 19 nt, Artificial Sequence
  Description of Artificial Sequence: Synthetic oligonucleotide
  Antisense strand to SEQ ID NO: 1033864
aauuaagcaggacagcaca

SEQ ID NO: 1033866 - RNA, 19 nt, Artificial Sequence
  Description of Artificial Sequence: Synthetic oligonucleotide
  Sense strand starting at position 2465 of SEQ ID NO: 914829
agguaucaauugcucuaau

SEQ ID NO: 1033867 - RNA, 19 nt, Artificial Sequence
  Description of Artificial Sequence: Synthetic oligonucleotide
  Antisense strand to SEQ ID NO: 1033866
auuagagcaauugauaccu

SEQ ID NO: 1033868 - RNA, 19 nt, Artificial Sequence
  Description of Artificial Sequence: Synthetic oligonucleotide
  Sense strand starting at position 2466 of SEQ ID NO: 914829
gguaucaauugcucuaauc

SEQ ID NO: 1033869 - RNA, 19 nt, Artificial Sequence
  Description of Artificial Sequence: Synthetic oligonucleotide
  Antisense strand to SEQ ID NO: 1033868
gauuagagcaauugauacc

SEQ ID NO: 1033870 - RNA, 19 nt, Artificial Sequence
  Description of Artificial Sequence: Synthetic oligonucleotide
  Sense strand starting at position 2709 of SEQ ID NO: 914829
gaggccaggugguuuaaau

SEQ ID NO: 1033871 - RNA, 19 nt, Artificial Sequence
  Description of Artificial Sequence: Synthetic oligonucleotide
  Antisense strand to SEQ ID NO: 1033870
auuuaaaccaccuggccuc

SEQ ID NO: 1033872 - RNA, 19 nt, Artificial Sequence
  Description of Artificial Sequence: Synthetic oligonucleotide
  Sense strand starting at position 2902 of SEQ ID NO: 914829
agcuguaucaggcaaaggu

SEQ ID NO: 1033873 - RNA, 19 nt, Artificial Sequence
  Description of Artificial Sequence: Synthetic oligonucleotide
  Antisense strand to SEQ ID NO: 1033872
accuuugccugauacagcu

SEQ ID NO: 1033874 - RNA, 19 nt, Artificial Sequence
  Description of Artificial Sequence: Synthetic oligonucleotide
  Sense strand starting at position 3098 of SEQ ID NO: 914829
cccaguauucccuagauag

SEQ ID NO: 1033875 - RNA, 19 nt, Artificial Sequence
  Description of Artificial Sequence: Synthetic oligonucleotide
  Antisense strand to SEQ ID NO: 1033874
cuaucuagggaauacuggg

SEQ ID NO: 1033876 - RNA, 19 nt, Artificial Sequence
  Description of Artificial Sequence: Synthetic oligonucleotide
  Sense strand starting at position 3108 of SEQ ID NO: 914829
ccuagauagucacugaaag

SEQ ID NO: 1033877 - RNA, 19 nt, Artificial Sequence
  Description of Artificial Sequence: Synthetic oligonucleotide
  Antisense strand to SEQ ID NO: 1033876
cuuucagugacuaucuagg

SEQ ID NO: 1033878 - RNA, 19 nt, Artificial Sequence
  Description of Artificial Sequence: Synthetic oligonucleotide
  Sense strand starting at position 3304 of SEQ ID NO: 914829
acguguugcccgagggagu

SEQ ID NO: 1033879 - RNA, 19 nt, Artificial Sequence
  Description of Artificial Sequence: Synthetic oligonucleotide
  Antisense strand to SEQ ID NO: 1033878
acucccucgggcaacacgu

SEQ ID NO: 1033880 - RNA, 19 nt, Artificial Sequence
  Description of Artificial Sequence: Synthetic oligonucleotide
  Sense strand starting at position 3326 of SEQ ID NO: 914829
aguuauacuguaggaagau

SEQ ID NO: 1033881 - RNA, 19 nt, Artificial Sequence
  Description of Artificial Sequence: Synthetic oligonucleotide
  Antisense strand to SEQ ID NO: 1033880
aucuuccuacaguauaacu

SEQ ID NO: 1033882 - RNA, 19 nt, Artificial Sequence
  Description of Artificial Sequence: Synthetic oligonucleotide
  Sense strand starting at position 3488 of SEQ ID NO: 914829
caaugaaguccugagucca

SEQ ID NO: 1033883 - RNA, 19 nt, Artificial Sequence
  Description of Artificial Sequence: Synthetic oligonucleotide
  Antisense strand to SEQ ID NO: 1033882
uggacucaggacuucauug

SEQ ID NO: 1033884 - RNA, 19 nt, Artificial Sequence
  Description of Artificial Sequence: Synthetic oligonucleotide
  Sense strand starting at position 3887 of SEQ ID NO: 914829
aggcaauagcucuaagaug

SEQ ID NO: 1033885 - RNA, 19 nt, Artificial Sequence
  Description of Artificial Sequence: Synthetic oligonucleotide
  Antisense strand to SEQ ID NO: 1033884
caucuuagagcuauugccu

SEQ ID NO: 1033886 - RNA, 19 nt, Artificial Sequence
  Description of Artificial Sequence: Synthetic oligonucleotide
  Sense strand starting at position 3908 of SEQ ID NO: 914829
gagauauucugagcugaag

SEQ ID NO: 1033887 - RNA, 19 nt, Artificial Sequence
  Description of Artificial Sequence: Synthetic oligonucleotide
  Antisense strand to SEQ ID NO: 1033886
cuucagcucagaauaucuc

SEQ ID NO: 1033888 - RNA, 19 nt, Artificial Sequence
  Description of Artificial Sequence: Synthetic oligonucleotide
  Sense strand starting at position 3949 of SEQ ID NO: 914829
ccaggugauguugauacua

SEQ ID NO: 1033889 - RNA, 19 nt, Artificial Sequence
  Description of Artificial Sequence: Synthetic oligonucleotide
  Antisense strand to SEQ ID NO: 1033888
uaguaucaacaucaccugg

SEQ ID NO: 1033890 - RNA, 19 nt, Artificial Sequence
  Description of Artificial Sequence: Synthetic oligonucleotide
  Sense strand starting at position 3974 of SEQ ID NO: 914829
uggagaucaugcuuugaga

SEQ ID NO: 1033891 - RNA, 19 nt, Artificial Sequence
  Description of Artificial Sequence: Synthetic oligonucleotide
  Antisense strand to SEQ ID NO: 1033890
ucucaaagcaugaucucca

SEQ ID NO: 1033892 - RNA, 19 nt, Artificial Sequence
  Description of Artificial Sequence: Synthetic oligonucleotide
  Sense strand starting at position 3976 of SEQ ID NO: 914829
gagaucaugcuuugagaac

SEQ ID NO: 1033893 - RNA, 19 nt, Artificial Sequence
  Description of Artificial Sequence: Synthetic oligonucleotide
  Antisense strand to SEQ ID NO: 1033892
guucucaaagcaugaucuc

SEQ ID NO: 1033894 - RNA, 19 nt, Artificial Sequence
  Description of Artificial Sequence: Synthetic oligonucleotide
  Sense strand starting at position 288 of SEQ ID NO: 914830
cuggguaccucacugaagu

SEQ ID NO: 1033895 - RNA, 19 nt, Artificial Sequence
  Description of Artificial Sequence: Synthetic oligonucleotide
  Antisense strand to SEQ ID NO: 1033894
acuucagugagguacccag

SEQ ID NO: 1033896 - RNA, 19 nt, Artificial Sequence
  Description of Artificial Sequence: Synthetic oligonucleotide
  Sense strand starting at position 289 of SEQ ID NO: 914830
uggguaccucacugaagua

SEQ ID NO: 1033897 - RNA, 19 nt, Artificial Sequence
  Description of Artificial Sequence: Synthetic oligonucleotide
  Antisense strand to SEQ ID NO: 1033896
uacuucagugagguaccca

SEQ ID NO: 1033898 - RNA, 19 nt, Artificial Sequence
  Description of Artificial Sequence: Synthetic oligonucleotide
  Sense strand starting at position 290 of SEQ ID NO: 914830
ggguaccucacugaaguau

SEQ ID NO: 1033899 - RNA, 19 nt, Artificial Sequence
  Description of Artificial Sequence: Synthetic oligonucleotide
  Antisense strand to SEQ ID NO: 1033898
auacuucagugagguaccc

SEQ ID NO: 1033900 - RNA, 19 nt, Artificial Sequence
  Description of Artificial Sequence: Synthetic oligonucleotide
  Sense strand starting at position 664 of SEQ ID NO: 914830
gcaaguguaauccagagua

SEQ ID NO: 1033901 - RNA, 19 nt, Artificial Sequence
  Description of Artificial Sequence: Synthetic oligonucleotide
  Antisense strand to SEQ ID NO: 1033900
uacucuggauuacacuugc

SEQ ID NO: 1033902 - RNA, 19 nt, Artificial Sequence
  Description of Artificial Sequence: Synthetic oligonucleotide
  Sense strand starting at position 666 of SEQ ID NO: 914830
aaguguaauccagaguaua

SEQ ID NO: 1033903 - RNA, 19 nt, Artificial Sequence
  Description of Artificial Sequence: Synthetic oligonucleotide
  Antisense strand to SEQ ID NO: 1033902
uauacucuggauuacacuu

SEQ ID NO: 1033904 - RNA, 19 nt, Artificial Sequence
  Description of Artificial Sequence: Synthetic oligonucleotide
  Sense strand starting at position 802 of SEQ ID NO: 914830
uucuaagucccagagcuaa

SEQ ID NO: 1033905 - RNA, 19 nt, Artificial Sequence
  Description of Artificial Sequence: Synthetic oligonucleotide
  Antisense strand to SEQ ID NO: 1033904
uuagcucugggacuuagaa

SEQ ID NO: 1033906 - RNA, 19 nt, Artificial Sequence
  Description of Artificial Sequence: Synthetic oligonucleotide
  Sense strand starting at position 922 of SEQ ID NO: 914830
agccaaagucccugacuua

SEQ ID NO: 1033907 - RNA, 19 nt, Artificial Sequence
  Description of Artificial Sequence: Synthetic oligonucleotide
  Antisense strand to SEQ ID NO: 1033906
uaagucagggacuuuggcu

SEQ ID NO: 1033908 - RNA, 19 nt, Artificial Sequence
  Description of Artificial Sequence: Synthetic oligonucleotide
  Sense strand starting at position 923 of SEQ ID NO: 914830
gccaaagucccugacuuaa

SEQ ID NO: 1033909 - RNA, 19 nt, Artificial Sequence
  Description of Artificial Sequence: Synthetic oligonucleotide
  Antisense strand to SEQ ID NO: 1033908
uuaagucagggacuuuggc

SEQ ID NO: 1033910 - RNA, 19 nt, Artificial Sequence
  Description of Artificial Sequence: Synthetic oligonucleotide
  Sense strand starting at position 1107 of SEQ ID NO: 914830
guuguccacagguauacau

SEQ ID NO: 1033911 - RNA, 19 nt, Artificial Sequence
  Description of Artificial Sequence: Synthetic oligonucleotide
  Antisense strand to SEQ ID NO: 1033910
auguauaccuguggacaac

SEQ ID NO: 1033912 - RNA, 19 nt, Artificial Sequence
  Description of Artificial Sequence: Synthetic oligonucleotide
  Sense strand starting at position 1117 of SEQ ID NO: 914830
gguauacauguugaaagug

SEQ ID NO: 1033913 - RNA, 19 nt, Artificial Sequence
  Description of Artificial Sequence: Synthetic oligonucleotide
  Antisense strand to SEQ ID NO: 1033912
cacuuucaacauguauacc

SEQ ID NO: 1033914 - RNA, 19 nt, Artificial Sequence
  Description of Artificial Sequence: Synthetic oligonucleotide
  Sense strand starting at position 1122 of SEQ ID NO: 914830
acauguugaaagugugaau

SEQ ID NO: 1033915 - RNA, 19 nt, Artificial Sequence
  Description of Artificial Sequence: Synthetic oligonucleotide
  Antisense strand to SEQ ID NO: 1033914
auucacacuuucaacaugu

SEQ ID NO: 1033916 - RNA, 19 nt, Artificial Sequence
  Description of Artificial Sequence: Synthetic oligonucleotide
  Sense strand starting at position 1129 of SEQ ID NO: 914830
gaaagugugaaugguugca

SEQ ID NO: 1033917 - RNA, 19 nt, Artificial Sequence
  Description of Artificial Sequence: Synthetic oligonucleotide
  Antisense strand to SEQ ID NO: 1033916
ugcaaccauucacacuuuc

SEQ ID NO: 1033918 - RNA, 19 nt, Artificial Sequence
  Description of Artificial Sequence: Synthetic oligonucleotide
  Sense strand starting at position 1143 of SEQ ID NO: 914830
uugcauggcuauccugaga

SEQ ID NO: 1033919 - RNA, 19 nt, Artificial Sequence
  Description of Artificial Sequence: Synthetic oligonucleotide
  Antisense strand to SEQ ID NO: 1033918
ucucaggauagccaugcaa

SEQ ID NO: 1033920 - RNA, 19 nt, Artificial Sequence
  Description of Artificial Sequence: Synthetic oligonucleotide
  Sense strand starting at position 1156 of SEQ ID NO: 914830
cugagaagagugugugcaa

SEQ ID NO: 1033921 - RNA, 19 nt, Artificial Sequence
  Description of Artificial Sequence: Synthetic oligonucleotide
  Antisense strand to SEQ ID NO: 1033920
uugcacacacucuucucag

SEQ ID NO: 1033922 - RNA, 19 nt, Artificial Sequence
  Description of Artificial Sequence: Synthetic oligonucleotide
  Sense strand starting at position 1187 of SEQ ID NO: 914830
uggacaggaauguguguau

SEQ ID NO: 1033923 - RNA, 19 nt, Artificial Sequence
  Description of Artificial Sequence: Synthetic oligonucleotide
  Antisense strand to SEQ ID NO: 1033922
auacacacauuccugucca

SEQ ID NO: 1033924 - RNA, 19 nt, Artificial Sequence
  Description of Artificial Sequence: Synthetic oligonucleotide
  Sense strand starting at position 1198 of SEQ ID NO: 914830
guguguaugcugagcaugu

SEQ ID NO: 1033925 - RNA, 19 nt, Artificial Sequence
  Description of Artificial Sequence: Synthetic oligonucleotide
  Antisense strand to SEQ ID NO: 1033924
acaugcucagcauacacac

SEQ ID NO: 1033926 - RNA, 19 nt, Artificial Sequence
  Description of Artificial Sequence: Synthetic oligonucleotide
  Sense strand starting at position 1223 of SEQ ID NO: 914830
gggugcacugcgaguguuu

SEQ ID NO: 1033927 - RNA, 19 nt, Artificial Sequence
  Description of Artificial Sequence: Synthetic oligonucleotide
  Antisense strand to SEQ ID NO: 1033926
aaacacucgcagugcaccc

SEQ ID NO: 1033928 - RNA, 19 nt, Artificial Sequence
  Description of Artificial Sequence: Synthetic oligonucleotide
  Sense strand starting at position 1254 of SEQ ID NO: 914830
ggccauaugguccacucau

SEQ ID NO: 1033929 - RNA, 19 nt, Artificial Sequence
  Description of Artificial Sequence: Synthetic oligonucleotide
  Antisense strand to SEQ ID NO: 1033928
augaguggaccauauggcc

SEQ ID NO: 1033930 - RNA, 19 nt, Artificial Sequence
  Description of Artificial Sequence: Synthetic oligonucleotide
  Sense strand starting at position 1288 of SEQ ID NO: 914830
cucuucuccugguuuaaga

SEQ ID NO: 1033931 - RNA, 19 nt, Artificial Sequence
  Description of Artificial Sequence: Synthetic oligonucleotide
  Antisense strand to SEQ ID NO: 1033930
ucuuaaaccaggagaagag

SEQ ID NO: 1033932 - RNA, 19 nt, Artificial Sequence
  Description of Artificial Sequence: Synthetic oligonucleotide
  Sense strand starting at position 1290 of SEQ ID NO: 914830
cuucuccugguuuaagagu

SEQ ID NO: 1033933 - RNA, 19 nt, Artificial Sequence
  Description of Artificial Sequence: Synthetic oligonucleotide
  Antisense strand to SEQ ID NO: 1033932
acucuuaaaccaggagaag

SEQ ID NO: 1033934 - RNA, 19 nt, Artificial Sequence
  Description of Artificial Sequence: Synthetic oligonucleotide
  Sense strand starting at position 1409 of SEQ ID NO: 914830
uucuccaagcccugagaaa

SEQ ID NO: 1033935 - RNA, 19 nt, Artificial Sequence
  Description of Artificial Sequence: Synthetic oligonucleotide
  Antisense strand to SEQ ID NO: 1033934
uuucucagggcuuggagaa

SEQ ID NO: 1033936 - RNA, 19 nt, Artificial Sequence
  Description of Artificial Sequence: Synthetic oligonucleotide
  Sense strand starting at position 1853 of SEQ ID NO: 914830
gugacaaaccugcacuguu

SEQ ID NO: 1033937 - RNA, 19 nt, Artificial Sequence
  Description of Artificial Sequence: Synthetic oligonucleotide
  Antisense strand to SEQ ID NO: 1033936
aacagugcagguuugucac

SEQ ID NO: 1033938 - RNA, 19 nt, Artificial Sequence
  Description of Artificial Sequence: Synthetic oligonucleotide
  Sense strand starting at position 1920 of SEQ ID NO: 914830
ggagcugucuacuuacuua

SEQ ID NO: 1033939 - RNA, 19 nt, Artificial Sequence
  Description of Artificial Sequence: Synthetic oligonucleotide
  Antisense strand to SEQ ID NO: 1033938
uaaguaaguagacagcucc

SEQ ID NO: 1033940 - RNA, 19 nt, Artificial Sequence
  Description of Artificial Sequence: Synthetic oligonucleotide
  Sense strand starting at position 2493 of SEQ ID NO: 914830
gccacccagcuuugauaga

SEQ ID NO: 1033941 - RNA, 19 nt, Artificial Sequence
  Description of Artificial Sequence: Synthetic oligonucleotide
  Antisense strand to SEQ ID NO: 1033940
ucuaucaaagcuggguggc

SEQ ID NO: 1033942 - RNA, 19 nt, Artificial Sequence
  Description of Artificial Sequence: Synthetic oligonucleotide
  Sense strand starting at position 2521 of SEQ ID NO: 914830
ccuagaaugagacgguuua

SEQ ID NO: 1033943 - RNA, 19 nt, Artificial Sequence
  Description of Artificial Sequence: Synthetic oligonucleotide
  Antisense strand to SEQ ID NO: 1033942
uaaaccgucucauucuagg

SEQ ID NO: 1033944 - RNA, 19 nt, Artificial Sequence
  Description of Artificial Sequence: Synthetic oligonucleotide
  Sense strand starting at position 2522 of SEQ ID NO: 914830
cuagaaugagacgguuuau

SEQ ID NO: 1033945 - RNA, 19 nt, Artificial Sequence
  Description of Artificial Sequence: Synthetic oligonucleotide
  Antisense strand to SEQ ID NO: 1033944
auaaaccgucucauucuag

SEQ ID NO: 1033946 - RNA, 19 nt, Artificial Sequence
  Description of Artificial Sequence: Synthetic oligonucleotide
  Sense strand starting at position 2642 of SEQ ID NO: 914830
cuucuaacuucggcacaua

SEQ ID NO: 1033947 - RNA, 19 nt, Artificial Sequence
  Description of Artificial Sequence: Synthetic oligonucleotide
  Antisense strand to SEQ ID NO: 1033946
uaugugccgaaguuagaag

SEQ ID NO: 1033948 - RNA, 19 nt, Artificial Sequence
  Description of Artificial Sequence: Synthetic oligonucleotide
  Sense strand starting at position 2643 of SEQ ID NO: 914830
uucuaacuucggcacauaa

SEQ ID NO: 1033949 - RNA, 19 nt, Artificial Sequence
  Description of Artificial Sequence: Synthetic oligonucleotide
  Antisense strand to SEQ ID NO: 1033948
uuaugugccgaaguuagaa

SEQ ID NO: 1033950 - RNA, 19 nt, Artificial Sequence
  Description of Artificial Sequence: Synthetic oligonucleotide
  Sense strand starting at position 2645 of SEQ ID NO: 914830
cuaacuucggcacauaaga

SEQ ID NO: 1033951 - RNA, 19 nt, Artificial Sequence
  Description of Artificial Sequence: Synthetic oligonucleotide
  Antisense strand to SEQ ID NO: 1033950
ucuuaugugccgaaguuag

SEQ ID NO: 1033952 - RNA, 19 nt, Artificial Sequence
  Description of Artificial Sequence: Synthetic oligonucleotide
  Sense strand starting at position 2725 of SEQ ID NO: 914830
ggaacuugauuccuaccca

SEQ ID NO: 1033953 - RNA, 19 nt, Artificial Sequence
  Description of Artificial Sequence: Synthetic oligonucleotide
  Antisense strand to SEQ ID NO: 1033952
uggguaggaaucaaguucc

SEQ ID NO: 1033954 - RNA, 19 nt, Artificial Sequence
  Description of Artificial Sequence: Synthetic oligonucleotide
  Sense strand starting at position 2869 of SEQ ID NO: 914830
cuuggagguccucaagcaa

SEQ ID NO: 1033955 - RNA, 19 nt, Artificial Sequence
  Description of Artificial Sequence: Synthetic oligonucleotide
  Antisense strand to SEQ ID NO: 1033954
uugcuugaggaccuccaag

SEQ ID NO: 1033956 - RNA, 19 nt, Artificial Sequence
  Description of Artificial Sequence: Synthetic oligonucleotide
  Sense strand starting at position 3164 of SEQ ID NO: 914830
acaguagcucucugauauu

SEQ ID NO: 1033957 - RNA, 19 nt, Artificial Sequence
  Description of Artificial Sequence: Synthetic oligonucleotide
  Antisense strand to SEQ ID NO: 1033956
aauaucagagagcuacugu

SEQ ID NO: 1033958 - RNA, 19 nt, Artificial Sequence
  Description of Artificial Sequence: Synthetic oligonucleotide
  Sense strand starting at position 3278 of SEQ ID NO: 914830
ccagaacagccugauucua

SEQ ID NO: 1033959 - RNA, 19 nt, Artificial Sequence
  Description of Artificial Sequence: Synthetic oligonucleotide
  Antisense strand to SEQ ID NO: 1033958
uagaaucaggcuguucugg

SEQ ID NO: 1033960 - RNA, 19 nt, Artificial Sequence
  Description of Artificial Sequence: Synthetic oligonucleotide
  Sense strand starting at position 3420 of SEQ ID NO: 914830
ugcagaaucuucucucuga

SEQ ID NO: 1033961 - RNA, 19 nt, Artificial Sequence
  Description of Artificial Sequence: Synthetic oligonucleotide
  Antisense strand to SEQ ID NO: 1033960
ucagagagaagauucugca

SEQ ID NO: 1033962 - RNA, 19 nt, Artificial Sequence
  Description of Artificial Sequence: Synthetic oligonucleotide
  Sense strand starting at position 3421 of SEQ ID NO: 914830
gcagaaucuucucucugag

SEQ ID NO: 1033963 - RNA, 19 nt, Artificial Sequence
  Description of Artificial Sequence: Synthetic oligonucleotide
  Antisense strand to SEQ ID NO: 1033962
cucagagagaagauucugc

SEQ ID NO: 1033964 - RNA, 19 nt, Artificial Sequence
  Description of Artificial Sequence: Synthetic oligonucleotide
  Sense strand starting at position 3423 of SEQ ID NO: 914830
agaaucuucucucugaguc

SEQ ID NO: 1033965 - RNA, 19 nt, Artificial Sequence
  Description of Artificial Sequence: Synthetic oligonucleotide
  Antisense strand to SEQ ID NO: 1033964
gacucagagagaagauucu

SEQ ID NO: 1033966 - RNA, 19 nt, Artificial Sequence
  Description of Artificial Sequence: Synthetic oligonucleotide
  Sense strand starting at position 3623 of SEQ ID NO: 914830
aguugucaugugccuguua

SEQ ID NO: 1033967 - RNA, 19 nt, Artificial Sequence
  Description of Artificial Sequence: Synthetic oligonucleotide
  Antisense strand to SEQ ID NO: 1033966
uaacaggcacaugacaacu

SEQ ID NO: 1033968 - RNA, 19 nt, Artificial Sequence
  Description of Artificial Sequence: Synthetic oligonucleotide
  Sense strand starting at position 3944 of SEQ ID NO: 914830
cucuacuacuuucuaguga

SEQ ID NO: 1033969 - RNA, 19 nt, Artificial Sequence
  Description of Artificial Sequence: Synthetic oligonucleotide
  Antisense strand to SEQ ID NO: 1033968
ucacuagaaaguaguagag

SEQ ID NO: 1033970 - RNA, 19 nt, Artificial Sequence
  Description of Artificial Sequence: Synthetic oligonucleotide
  Sense strand starting at position 3958 of SEQ ID NO: 914830
agugaugaguccuuggaca

SEQ ID NO: 1033971 - RNA, 19 nt, Artificial Sequence
  Description of Artificial Sequence: Synthetic oligonucleotide
  Antisense strand to SEQ ID NO: 1033970
uguccaaggacucaucacu

SEQ ID NO: 1033972 - RNA, 19 nt, Artificial Sequence
  Description of Artificial Sequence: Synthetic oligonucleotide
  Sense strand starting at position 3960 of SEQ ID NO: 914830
ugaugaguccuuggacaaa

SEQ ID NO: 1033973 - RNA, 19 nt, Artificial Sequence
  Description of Artificial Sequence: Synthetic oligonucleotide
  Antisense strand to SEQ ID NO: 1033972
uuuguccaaggacucauca

SEQ ID NO: 1033974 - RNA, 19 nt, Artificial Sequence
  Description of Artificial Sequence: Synthetic oligonucleotide
  Sense strand starting at position 21 of SEQ ID NO: 914831
uucuaugaccugggaaagu

SEQ ID NO: 1033975 - RNA, 19 nt, Artificial Sequence
  Description of Artificial Sequence: Synthetic oligonucleotide
  Antisense strand to SEQ ID NO: 1033974
acuuucccaggucauagaa

SEQ ID NO: 1033976 - RNA, 19 nt, Artificial Sequence
  Description of Artificial Sequence: Synthetic oligonucleotide
  Sense strand starting at position 132 of SEQ ID NO: 914831
ugccacuauguugaagaaa

SEQ ID NO: 1033977 - RNA, 19 nt, Artificial Sequence
  Description of Artificial Sequence: Synthetic oligonucleotide
  Antisense strand to SEQ ID NO: 1033976
uuucuucaacauaguggca

SEQ ID NO: 1033978 - RNA, 19 nt, Artificial Sequence
  Description of Artificial Sequence: Synthetic oligonucleotide
  Sense strand starting at position 222 of SEQ ID NO: 914831
acccaagucugauuccaag

SEQ ID NO: 1033979 - RNA, 19 nt, Artificial Sequence
  Description of Artificial Sequence: Synthetic oligonucleotide
  Antisense strand to SEQ ID NO: 1033978
cuuggaaucagacuugggu

SEQ ID NO: 1033980 - RNA, 19 nt, Artificial Sequence
  Description of Artificial Sequence: Synthetic oligonucleotide
  Sense strand starting at position 329 of SEQ ID NO: 914831
gaaagcaucccaggagacu

SEQ ID NO: 1033981 - RNA, 19 nt, Artificial Sequence
  Description of Artificial Sequence: Synthetic oligonucleotide
  Antisense strand to SEQ ID NO: 1033980
agucuccugggaugcuuuc

SEQ ID NO: 1033982 - RNA, 19 nt, Artificial Sequence
  Description of Artificial Sequence: Synthetic oligonucleotide
  Sense strand starting at position 583 of SEQ ID NO: 914831
ggcaguacuuguuuauuua

SEQ ID NO: 1033983 - RNA, 19 nt, Artificial Sequence
  Description of Artificial Sequence: Synthetic oligonucleotide
  Antisense strand to SEQ ID NO: 1033982
uaaauaaacaaguacugcc

SEQ ID NO: 1033984 - RNA, 19 nt, Artificial Sequence
  Description of Artificial Sequence: Synthetic oligonucleotide
  Sense strand starting at position 607 of SEQ ID NO: 914831
gugcacugaggugaacaau

SEQ ID NO: 1033985 - RNA, 19 nt, Artificial Sequence
  Description of Artificial Sequence: Synthetic oligonucleotide
  Antisense strand to SEQ ID NO: 1033984
auuguucaccucagugcac

SEQ ID NO: 1033986 - RNA, 19 nt, Artificial Sequence
  Description of Artificial Sequence: Synthetic oligonucleotide
  Sense strand starting at position 704 of SEQ ID NO: 914831
agacaauaaccaugguguu

SEQ ID NO: 1033987 - RNA, 19 nt, Artificial Sequence
  Description of Artificial Sequence: Synthetic oligonucleotide
  Antisense strand to SEQ ID NO: 1033986
aacaccaugguuauugucu

SEQ ID NO: 1033988 - RNA, 19 nt, Artificial Sequence
  Description of Artificial Sequence: Synthetic oligonucleotide
  Sense strand starting at position 705 of SEQ ID NO: 914831
gacaauaaccaugguguua

SEQ ID NO: 1033989 - RNA, 19 nt, Artificial Sequence
  Description of Artificial Sequence: Synthetic oligonucleotide
  Antisense strand to SEQ ID NO: 1033988
uaacaccaugguuauuguc

SEQ ID NO: 1033990 - RNA, 19 nt, Artificial Sequence
  Description of Artificial Sequence: Synthetic oligonucleotide
  Sense strand starting at position 969 of SEQ ID NO: 914831
aggcuuugaacguauuaaa

SEQ ID NO: 1033991 - RNA, 19 nt, Artificial Sequence
  Description of Artificial Sequence: Synthetic oligonucleotide
  Antisense strand to SEQ ID NO: 1033990
uuuaauacguucaaagccu

SEQ ID NO: 1033992 - RNA, 19 nt, Artificial Sequence
  Description of Artificial Sequence: Synthetic oligonucleotide
  Sense strand starting at position 1023 of SEQ ID NO: 914831
cuaucagaacugugaggau

SEQ ID NO: 1033993 - RNA, 19 nt, Artificial Sequence
  Description of Artificial Sequence: Synthetic oligonucleotide
  Antisense strand to SEQ ID NO: 1033992
auccucacaguucugauag

SEQ ID NO: 1033994 - RNA, 19 nt, Artificial Sequence
  Description of Artificial Sequence: Synthetic oligonucleotide
  Sense strand starting at position 1090 of SEQ ID NO: 914831
gccauaauuccugauguua

SEQ ID NO: 1033995 - RNA, 19 nt, Artificial Sequence
  Description of Artificial Sequence: Synthetic oligonucleotide
  Antisense strand to SEQ ID NO: 1033994
uaacaucaggaauuauggc

SEQ ID NO: 1033996 - RNA, 19 nt, Artificial Sequence
  Description of Artificial Sequence: Synthetic oligonucleotide
  Sense strand starting at position 1133 of SEQ ID NO: 914831
auugauuugcugugcaaga

SEQ ID NO: 1033997 - RNA, 19 nt, Artificial Sequence
  Description of Artificial Sequence: Synthetic oligonucleotide
  Antisense strand to SEQ ID NO: 1033996
ucuugcacagcaaaucaau

SEQ ID NO: 1033998 - RNA, 19 nt, Artificial Sequence
  Description of Artificial Sequence: Synthetic oligonucleotide
  Sense strand starting at position 1134 of SEQ ID NO: 914831
uugauuugcugugcaagau

SEQ ID NO: 1033999 - RNA, 19 nt, Artificial Sequence
  Description of Artificial Sequence: Synthetic oligonucleotide
  Antisense strand to SEQ ID NO: 1033998
aucuugcacagcaaaucaa

SEQ ID NO: 1034000 - RNA, 19 nt, Artificial Sequence
  Description of Artificial Sequence: Synthetic oligonucleotide
  Sense strand starting at position 1143 of SEQ ID NO: 914831
ugugcaagaucaguuagaa

SEQ ID NO: 1034001 - RNA, 19 nt, Artificial Sequence
  Description of Artificial Sequence: Synthetic oligonucleotide
  Antisense strand to SEQ ID NO: 1034000
uucuaacugaucuugcaca

SEQ ID NO: 1034002 - RNA, 19 nt, Artificial Sequence
  Description of Artificial Sequence: Synthetic oligonucleotide
  Sense strand starting at position 1661 of SEQ ID NO: 914831
ugggauaugccugauucuu

SEQ ID NO: 1034003 - RNA, 19 nt, Artificial Sequence
  Description of Artificial Sequence: Synthetic oligonucleotide
  Antisense strand to SEQ ID NO: 1034002
aagaaucaggcauauccca

SEQ ID NO: 1034004 - RNA, 19 nt, Artificial Sequence
  Description of Artificial Sequence: Synthetic oligonucleotide
  Sense strand starting at position 2273 of SEQ ID NO: 914831
auacguauugcacaggaca

SEQ ID NO: 1034005 - RNA, 19 nt, Artificial Sequence
  Description of Artificial Sequence: Synthetic oligonucleotide
  Antisense strand to SEQ ID NO: 1034004
uguccugugcaauacguau

SEQ ID NO: 1034006 - RNA, 19 nt, Artificial Sequence
  Description of Artificial Sequence: Synthetic oligonucleotide
  Sense strand starting at position 2307 of SEQ ID NO: 914831
guaucuaugguuuaucuga

SEQ ID NO: 1034007 - RNA, 19 nt, Artificial Sequence
  Description of Artificial Sequence: Synthetic oligonucleotide
  Antisense strand to SEQ ID NO: 1034006
ucagauaaaccauagauac

SEQ ID NO: 1034008 - RNA, 19 nt, Artificial Sequence
  Description of Artificial Sequence: Synthetic oligonucleotide
  Sense strand starting at position 2309 of SEQ ID NO: 914831
aucuaugguuuaucugaga

SEQ ID NO: 1034009 - RNA, 19 nt, Artificial Sequence
  Description of Artificial Sequence: Synthetic oligonucleotide
  Antisense strand to SEQ ID NO: 1034008
ucucagauaaaccauagau

SEQ ID NO: 1034010 - RNA, 19 nt, Artificial Sequence
  Description of Artificial Sequence: Synthetic oligonucleotide
  Sense strand starting at position 2394 of SEQ ID NO: 914831
cuguuaccacuguagaacu

SEQ ID NO: 1034011 - RNA, 19 nt, Artificial Sequence
  Description of Artificial Sequence: Synthetic oligonucleotide
  Antisense strand to SEQ ID NO: 1034010
aguucuacagugguaacag

SEQ ID NO: 1034012 - RNA, 19 nt, Artificial Sequence
  Description of Artificial Sequence: Synthetic oligonucleotide
  Sense strand starting at position 2762 of SEQ ID NO: 914831
cuggguccuugaucacuaa

SEQ ID NO: 1034013 - RNA, 19 nt, Artificial Sequence
  Description of Artificial Sequence: Synthetic oligonucleotide
  Antisense strand to SEQ ID NO: 1034012
uuagugaucaaggacccag

SEQ ID NO: 1034014 - RNA, 19 nt, Artificial Sequence
  Description of Artificial Sequence: Synthetic oligonucleotide
  Sense strand starting at position 2766 of SEQ ID NO: 914831
guccuugaucacuaagcca

SEQ ID NO: 1034015 - RNA, 19 nt, Artificial Sequence
  Description of Artificial Sequence: Synthetic oligonucleotide
  Antisense strand to SEQ ID NO: 1034014
uggcuuagugaucaaggac

SEQ ID NO: 1034016 - RNA, 19 nt, Artificial Sequence
  Description of Artificial Sequence: Synthetic oligonucleotide
  Sense strand starting at position 2821 of SEQ ID NO: 914831
ggcuuccuauuaucuaaga

SEQ ID NO: 1034017 - RNA, 19 nt, Artificial Sequence
  Description of Artificial Sequence: Synthetic oligonucleotide
  Antisense strand to SEQ ID NO: 1034016
ucuuagauaauaggaagcc

SEQ ID NO: 1034018 - RNA, 19 nt, Artificial Sequence
  Description of Artificial Sequence: Synthetic oligonucleotide
  Sense strand starting at position 2916 of SEQ ID NO: 914831
aagaguaacccagguucca

SEQ ID NO: 1034019 - RNA, 19 nt, Artificial Sequence
  Description of Artificial Sequence: Synthetic oligonucleotide
  Antisense strand to SEQ ID NO: 1034018
uggaaccuggguuacucuu

SEQ ID NO: 1034020 - RNA, 19 nt, Artificial Sequence
  Description of Artificial Sequence: Synthetic oligonucleotide
  Sense strand starting at position 3131 of SEQ ID NO: 914831
cccugaggaauaugcagau

SEQ ID NO: 1034021 - RNA, 19 nt, Artificial Sequence
  Description of Artificial Sequence: Synthetic oligonucleotide
  Antisense strand to SEQ ID NO: 1034020
aucugcauauuccucaggg

SEQ ID NO: 1034022 - RNA, 19 nt, Artificial Sequence
  Description of Artificial Sequence: Synthetic oligonucleotide
  Sense strand starting at position 3178 of SEQ ID NO: 914831
agaagagucuuacuccaug

SEQ ID NO: 1034023 - RNA, 19 nt, Artificial Sequence
  Description of Artificial Sequence: Synthetic oligonucleotide
  Antisense strand to SEQ ID NO: 1034022
cauggaguaagacucuucu

SEQ ID NO: 1034024 - RNA, 19 nt, Artificial Sequence
  Description of Artificial Sequence: Synthetic oligonucleotide
  Sense strand starting at position 3181 of SEQ ID NO: 914831
agagucuuacuccaugauu

SEQ ID NO: 1034025 - RNA, 19 nt, Artificial Sequence
  Description of Artificial Sequence: Synthetic oligonucleotide
  Antisense strand to SEQ ID NO: 1034024
aaucauggaguaagacucu

SEQ ID NO: 1034026 - RNA, 19 nt, Artificial Sequence
  Description of Artificial Sequence: Synthetic oligonucleotide
  Sense strand starting at position 3183 of SEQ ID NO: 914831
agucuuacuccaugauuac

SEQ ID NO: 1034027 - RNA, 19 nt, Artificial Sequence
  Description of Artificial Sequence: Synthetic oligonucleotide
  Antisense strand to SEQ ID NO: 1034026
guaaucauggaguaagacu

SEQ ID NO: 1034028 - RNA, 19 nt, Artificial Sequence
  Description of Artificial Sequence: Synthetic oligonucleotide
  Sense strand starting at position 3184 of SEQ ID NO: 914831
gucuuacuccaugauuaca

SEQ ID NO: 1034029 - RNA, 19 nt, Artificial Sequence
  Description of Artificial Sequence: Synthetic oligonucleotide
  Antisense strand to SEQ ID NO: 1034028
uguaaucauggaguaagac

SEQ ID NO: 1034030 - RNA, 19 nt, Artificial Sequence
  Description of Artificial Sequence: Synthetic oligonucleotide
  Sense strand starting at position 3244 of SEQ ID NO: 914831
agugaugugggugaacaca

SEQ ID NO: 1034031 - RNA, 19 nt, Artificial Sequence
  Description of Artificial Sequence: Synthetic oligonucleotide
  Antisense strand to SEQ ID NO: 1034030
uguguucacccacaucacu

SEQ ID NO: 1034032 - RNA, 19 nt, Artificial Sequence
  Description of Artificial Sequence: Synthetic oligonucleotide
  Sense strand starting at position 3270 of SEQ ID NO: 914831
ccucauaaugcugggaaga

SEQ ID NO: 1034033 - RNA, 19 nt, Artificial Sequence
  Description of Artificial Sequence: Synthetic oligonucleotide
  Antisense strand to SEQ ID NO: 1034032
ucuucccagcauuaugagg

SEQ ID NO: 1034034 - RNA, 19 nt, Artificial Sequence
  Description of Artificial Sequence: Synthetic oligonucleotide
  Sense strand starting at position 3271 of SEQ ID NO: 914831
cucauaaugcugggaagaa

SEQ ID NO: 1034035 - RNA, 19 nt, Artificial Sequence
  Description of Artificial Sequence: Synthetic oligonucleotide
  Antisense strand to SEQ ID NO: 1034034
uucuucccagcauuaugag

SEQ ID NO: 1034036 - RNA, 19 nt, Artificial Sequence
  Description of Artificial Sequence: Synthetic oligonucleotide
  Sense strand starting at position 3346 of SEQ ID NO: 914831
ggugcuagauaauuccaga

SEQ ID NO: 1034037 - RNA, 19 nt, Artificial Sequence
  Description of Artificial Sequence: Synthetic oligonucleotide
  Antisense strand to SEQ ID NO: 1034036
ucuggaauuaucuagcacc

SEQ ID NO: 1034038 - RNA, 19 nt, Artificial Sequence
  Description of Artificial Sequence: Synthetic oligonucleotide
  Sense strand starting at position 3391 of SEQ ID NO: 914831
gucuguggagcuuacuaga

SEQ ID NO: 1034039 - RNA, 19 nt, Artificial Sequence
  Description of Artificial Sequence: Synthetic oligonucleotide
  Antisense strand to SEQ ID NO: 1034038
ucuaguaagcuccacagac

SEQ ID NO: 1034040 - RNA, 19 nt, Artificial Sequence
  Description of Artificial Sequence: Synthetic oligonucleotide
  Sense strand starting at position 3605 of SEQ ID NO: 914831
ugagauuaggaacguggaa

SEQ ID NO: 1034041 - RNA, 19 nt, Artificial Sequence
  Description of Artificial Sequence: Synthetic oligonucleotide
  Antisense strand to SEQ ID NO: 1034040
uuccacguuccuaaucuca

SEQ ID NO: 1034042 - RNA, 19 nt, Artificial Sequence
  Description of Artificial Sequence: Synthetic oligonucleotide
  Sense strand starting at position 3620 of SEQ ID NO: 914831
ggaagaauauggccaacgu

SEQ ID NO: 1034043 - RNA, 19 nt, Artificial Sequence
  Description of Artificial Sequence: Synthetic oligonucleotide
  Antisense strand to SEQ ID NO: 1034042
acguuggccauauucuucc

SEQ ID NO: 1034044 - RNA, 19 nt, Artificial Sequence
  Description of Artificial Sequence: Synthetic oligonucleotide
  Sense strand starting at position 3621 of SEQ ID NO: 914831
gaagaauauggccaacgua

SEQ ID NO: 1034045 - RNA, 19 nt, Artificial Sequence
  Description of Artificial Sequence: Synthetic oligonucleotide
  Antisense strand to SEQ ID NO: 1034044
uacguuggccauauucuuc

SEQ ID NO: 1034046 - RNA, 19 nt, Artificial Sequence
  Description of Artificial Sequence: Synthetic oligonucleotide
  Sense strand starting at position 3624 of SEQ ID NO: 914831
gaauauggccaacguaaga

SEQ ID NO: 1034047 - RNA, 19 nt, Artificial Sequence
  Description of Artificial Sequence: Synthetic oligonucleotide
  Antisense strand to SEQ ID NO: 1034046
ucuuacguuggccauauuc

SEQ ID NO: 1034048 - RNA, 19 nt, Artificial Sequence
  Description of Artificial Sequence: Synthetic oligonucleotide
  Sense strand starting at position 3810 of SEQ ID NO: 914831
ucauuacugucauuauuga

SEQ ID NO: 1034049 - RNA, 19 nt, Artificial Sequence
  Description of Artificial Sequence: Synthetic oligonucleotide
  Antisense strand to SEQ ID NO: 1034048
ucaauaaugacaguaauga

SEQ ID NO: 1034050 - RNA, 19 nt, Artificial Sequence
  Description of Artificial Sequence: Synthetic oligonucleotide
  Sense strand starting at position 3820 of SEQ ID NO: 914831
cauuauugagaagguauau

SEQ ID NO: 1034051 - RNA, 19 nt, Artificial Sequence
  Description of Artificial Sequence: Synthetic oligonucleotide
  Antisense strand to SEQ ID NO: 1034050
auauaccuucucaauaaug

SEQ ID NO: 1034052 - RNA, 19 nt, Artificial Sequence
  Description of Artificial Sequence: Synthetic oligonucleotide
  Sense strand starting at position 3924 of SEQ ID NO: 914831
ugauauguuugacuaaagu

SEQ ID NO: 1034053 - RNA, 19 nt, Artificial Sequence
  Description of Artificial Sequence: Synthetic oligonucleotide
  Antisense strand to SEQ ID NO: 1034052
acuuuagucaaacauauca

SEQ ID NO: 1034054 - RNA, 19 nt, Artificial Sequence
  Description of Artificial Sequence: Synthetic oligonucleotide
  Sense strand starting at position 175 of SEQ ID NO: 914832
gggacuccaucagaaauaa

SEQ ID NO: 1034055 - RNA, 19 nt, Artificial Sequence
  Description of Artificial Sequence: Synthetic oligonucleotide
  Antisense strand to SEQ ID NO: 1034054
uuauuucugauggaguccc

SEQ ID NO: 1034056 - RNA, 19 nt, Artificial Sequence
  Description of Artificial Sequence: Synthetic oligonucleotide
  Sense strand starting at position 639 of SEQ ID NO: 914832
gcgucuaguugcaguaguu

SEQ ID NO: 1034057 - RNA, 19 nt, Artificial Sequence
  Description of Artificial Sequence: Synthetic oligonucleotide
  Antisense strand to SEQ ID NO: 1034056
aacuacugcaacuagacgc

SEQ ID NO: 1034058 - RNA, 19 nt, Artificial Sequence
  Description of Artificial Sequence: Synthetic oligonucleotide
  Sense strand starting at position 688 of SEQ ID NO: 914832
acagcauuguuccacaaug

SEQ ID NO: 1034059 - RNA, 19 nt, Artificial Sequence
  Description of Artificial Sequence: Synthetic oligonucleotide
  Antisense strand to SEQ ID NO: 1034058
cauuguggaacaaugcugu

SEQ ID NO: 1034060 - RNA, 19 nt, Artificial Sequence
  Description of Artificial Sequence: Synthetic oligonucleotide
  Sense strand starting at position 1041 of SEQ ID NO: 914832
aggugaucccaguacuucu

SEQ ID NO: 1034061 - RNA, 19 nt, Artificial Sequence
  Description of Artificial Sequence: Synthetic oligonucleotide
  Antisense strand to SEQ ID NO: 1034060
agaaguacugggaucaccu

SEQ ID NO: 1034062 - RNA, 19 nt, Artificial Sequence
  Description of Artificial Sequence: Synthetic oligonucleotide
  Sense strand starting at position 1177 of SEQ ID NO: 914832
ggguguucgcccagaggca

SEQ ID NO: 1034063 - RNA, 19 nt, Artificial Sequence
  Description of Artificial Sequence: Synthetic oligonucleotide
  Antisense strand to SEQ ID NO: 1034062
ugccucugggcgaacaccc

SEQ ID NO: 1034064 - RNA, 19 nt, Artificial Sequence
  Description of Artificial Sequence: Synthetic oligonucleotide
  Sense strand starting at position 1251 of SEQ ID NO: 914832
acuugaaucugcggucauc

SEQ ID NO: 1034065 - RNA, 19 nt, Artificial Sequence
  Description of Artificial Sequence: Synthetic oligonucleotide
  Antisense strand to SEQ ID NO: 1034064
gaugaccgcagauucaagu

SEQ ID NO: 1034066 - RNA, 19 nt, Artificial Sequence
  Description of Artificial Sequence: Synthetic oligonucleotide
  Sense strand starting at position 1254 of SEQ ID NO: 914832
ugaaucugcggucaucaaa

SEQ ID NO: 1034067 - RNA, 19 nt, Artificial Sequence
  Description of Artificial Sequence: Synthetic oligonucleotide
  Antisense strand to SEQ ID NO: 1034066
uuugaugaccgcagauuca

SEQ ID NO: 1034068 - RNA, 19 nt, Artificial Sequence
  Description of Artificial Sequence: Synthetic oligonucleotide
  Sense strand starting at position 1332 of SEQ ID NO: 914832
ugcccacccucugauguau

SEQ ID NO: 1034069 - RNA, 19 nt, Artificial Sequence
  Description of Artificial Sequence: Synthetic oligonucleotide
  Antisense strand to SEQ ID NO: 1034068
auacaucagagggugggca

SEQ ID NO: 1034070 - RNA, 19 nt, Artificial Sequence
  Description of Artificial Sequence: Synthetic oligonucleotide
  Sense strand starting at position 1373 of SEQ ID NO: 914832
ccguccucaggcugagauu

SEQ ID NO: 1034071 - RNA, 19 nt, Artificial Sequence
  Description of Artificial Sequence: Synthetic oligonucleotide
  Antisense strand to SEQ ID NO: 1034070
aaucucagccugaggacgg

SEQ ID NO: 1034072 - RNA, 19 nt, Artificial Sequence
  Description of Artificial Sequence: Synthetic oligonucleotide
  Sense strand starting at position 1600 of SEQ ID NO: 914832
gggucuuggguguguagaa

SEQ ID NO: 1034073 - RNA, 19 nt, Artificial Sequence
  Description of Artificial Sequence: Synthetic oligonucleotide
  Antisense strand to SEQ ID NO: 1034072
uucuacacacccaagaccc

SEQ ID NO: 1034074 - RNA, 19 nt, Artificial Sequence
  Description of Artificial Sequence: Synthetic oligonucleotide
  Sense strand starting at position 2020 of SEQ ID NO: 914832
cuggcuuuauagucucaga

SEQ ID NO: 1034075 - RNA, 19 nt, Artificial Sequence
  Description of Artificial Sequence: Synthetic oligonucleotide
  Antisense strand to SEQ ID NO: 1034074
ucugagacuauaaagccag

SEQ ID NO: 1034076 - RNA, 19 nt, Artificial Sequence
  Description of Artificial Sequence: Synthetic oligonucleotide
  Sense strand starting at position 2123 of SEQ ID NO: 914832
gcugcaauuuccggaccau

SEQ ID NO: 1034077 - RNA, 19 nt, Artificial Sequence
  Description of Artificial Sequence: Synthetic oligonucleotide
  Antisense strand to SEQ ID NO: 1034076
augguccggaaauugcagc

SEQ ID NO: 1034078 - RNA, 19 nt, Artificial Sequence
  Description of Artificial Sequence: Synthetic oligonucleotide
  Sense strand starting at position 2151 of SEQ ID NO: 914832
gcugggucugugggaagau

SEQ ID NO: 1034079 - RNA, 19 nt, Artificial Sequence
  Description of Artificial Sequence: Synthetic oligonucleotide
  Antisense strand to SEQ ID NO: 1034078
aucuucccacagacccagc

SEQ ID NO: 1034080 - RNA, 19 nt, Artificial Sequence
  Description of Artificial Sequence: Synthetic oligonucleotide
  Sense strand starting at position 2160 of SEQ ID NO: 914832
gugggaagaucuccuuggu

SEQ ID NO: 1034081 - RNA, 19 nt, Artificial Sequence
  Description of Artificial Sequence: Synthetic oligonucleotide
  Antisense strand to SEQ ID NO: 1034080
accaaggagaucuucccac

SEQ ID NO: 1034082 - RNA, 19 nt, Artificial Sequence
  Description of Artificial Sequence: Synthetic oligonucleotide
  Sense strand starting at position 2163 of SEQ ID NO: 914832
ggaagaucuccuuggucgu

SEQ ID NO: 1034083 - RNA, 19 nt, Artificial Sequence
  Description of Artificial Sequence: Synthetic oligonucleotide
  Antisense strand to SEQ ID NO: 1034082
acgaccaaggagaucuucc

SEQ ID NO: 1034084 - RNA, 19 nt, Artificial Sequence
  Description of Artificial Sequence: Synthetic oligonucleotide
  Sense strand starting at position 2209 of SEQ ID NO: 914832
ucauuagagucuuaaccag

SEQ ID NO: 1034085 - RNA, 19 nt, Artificial Sequence
  Description of Artificial Sequence: Synthetic oligonucleotide
  Antisense strand to SEQ ID NO: 1034084
cugguuaagacucuaauga

SEQ ID NO: 1034086 - RNA, 19 nt, Artificial Sequence
  Description of Artificial Sequence: Synthetic oligonucleotide
  Sense strand starting at position 2265 of SEQ ID NO: 914832
gggcaaaugucuccaggag

SEQ ID NO: 1034087 - RNA, 19 nt, Artificial Sequence
  Description of Artificial Sequence: Synthetic oligonucleotide
  Antisense strand to SEQ ID NO: 1034086
cuccuggagacauuugccc

SEQ ID NO: 1034088 - RNA, 19 nt, Artificial Sequence
  Description of Artificial Sequence: Synthetic oligonucleotide
  Sense strand starting at position 2301 of SEQ ID NO: 914832
ggccacuuuccacauuaga

SEQ ID NO: 1034089 - RNA, 19 nt, Artificial Sequence
  Description of Artificial Sequence: Synthetic oligonucleotide
  Antisense strand to SEQ ID NO: 1034088
ucuaauguggaaaguggcc

SEQ ID NO: 1034090 - RNA, 19 nt, Artificial Sequence
  Description of Artificial Sequence: Synthetic oligonucleotide
  Sense strand starting at position 2780 of SEQ ID NO: 914832
ccaagaugccgccauggau

SEQ ID NO: 1034091 - RNA, 19 nt, Artificial Sequence
  Description of Artificial Sequence: Synthetic oligonucleotide
  Antisense strand to SEQ ID NO: 1034090
auccauggcggcaucuugg

SEQ ID NO: 1034092 - RNA, 19 nt, Artificial Sequence
  Description of Artificial Sequence: Synthetic oligonucleotide
  Sense strand starting at position 2983 of SEQ ID NO: 914832
gaccucaucuuccguguga

SEQ ID NO: 1034093 - RNA, 19 nt, Artificial Sequence
  Description of Artificial Sequence: Synthetic oligonucleotide
  Antisense strand to SEQ ID NO: 1034092
ucacacggaagaugagguc

SEQ ID NO: 1034094 - RNA, 19 nt, Artificial Sequence
  Description of Artificial Sequence: Synthetic oligonucleotide
  Sense strand starting at position 2984 of SEQ ID NO: 914832
accucaucuuccgugugau

SEQ ID NO: 1034095 - RNA, 19 nt, Artificial Sequence
  Description of Artificial Sequence: Synthetic oligonucleotide
  Antisense strand to SEQ ID NO: 1034094
aucacacggaagaugaggu

SEQ ID NO: 1034096 - RNA, 19 nt, Artificial Sequence
  Description of Artificial Sequence: Synthetic oligonucleotide
  Sense strand starting at position 2985 of SEQ ID NO: 914832
ccucaucuuccgugugauc

SEQ ID NO: 1034097 - RNA, 19 nt, Artificial Sequence
  Description of Artificial Sequence: Synthetic oligonucleotide
  Antisense strand to SEQ ID NO: 1034096
gaucacacggaagaugagg

SEQ ID NO: 1034098 - RNA, 19 nt, Artificial Sequence
  Description of Artificial Sequence: Synthetic oligonucleotide
  Sense strand starting at position 2987 of SEQ ID NO: 914832
ucaucuuccgugugaucug

SEQ ID NO: 1034099 - RNA, 19 nt, Artificial Sequence
  Description of Artificial Sequence: Synthetic oligonucleotide
  Antisense strand to SEQ ID NO: 1034098
cagaucacacggaagauga

SEQ ID NO: 1034100 - RNA, 19 nt, Artificial Sequence
  Description of Artificial Sequence: Synthetic oligonucleotide
  Sense strand starting at position 3795 of SEQ ID NO: 914832
gcacuaacaagguguguga

SEQ ID NO: 1034101 - RNA, 19 nt, Artificial Sequence
  Description of Artificial Sequence: Synthetic oligonucleotide
  Antisense strand to SEQ ID NO: 1034100
ucacacaccuuguuagugc

SEQ ID NO: 1034102 - RNA, 19 nt, Artificial Sequence
  Description of Artificial Sequence: Synthetic oligonucleotide
  Sense strand starting at position 3799 of SEQ ID NO: 914832
uaacaaggugugugaggaa

SEQ ID NO: 1034103 - RNA, 19 nt, Artificial Sequence
  Description of Artificial Sequence: Synthetic oligonucleotide
  Antisense strand to SEQ ID NO: 1034102
uuccucacacaccuuguua

SEQ ID NO: 1034104 - RNA, 19 nt, Artificial Sequence
  Description of Artificial Sequence: Synthetic oligonucleotide
  Sense strand starting at position 3862 of SEQ ID NO: 914832
cguggaugaguaggaguuu

SEQ ID NO: 1034105 - RNA, 19 nt, Artificial Sequence
  Description of Artificial Sequence: Synthetic oligonucleotide
  Antisense strand to SEQ ID NO: 1034104
aaacuccuacucauccacg

SEQ ID NO: 1034106 - RNA, 19 nt, Artificial Sequence
  Description of Artificial Sequence: Synthetic oligonucleotide
  Sense strand starting at position 3871 of SEQ ID NO: 914832
guaggaguuugccaguguu

SEQ ID NO: 1034107 - RNA, 19 nt, Artificial Sequence
  Description of Artificial Sequence: Synthetic oligonucleotide
  Antisense strand to SEQ ID NO: 1034106
aacacuggcaaacuccuac

SEQ ID NO: 1034108 - RNA, 19 nt, Artificial Sequence
  Description of Artificial Sequence: Synthetic oligonucleotide
  Sense strand starting at position 3874 of SEQ ID NO: 914832
ggaguuugccaguguuguc

SEQ ID NO: 1034109 - RNA, 19 nt, Artificial Sequence
  Description of Artificial Sequence: Synthetic oligonucleotide
  Antisense strand to SEQ ID NO: 1034108
gacaacacuggcaaacucc

SEQ ID NO: 1034110 - RNA, 19 nt, Artificial Sequence
  Description of Artificial Sequence: Synthetic oligonucleotide
  Sense strand starting at position 117 of SEQ ID NO: 914833
agagcuagucgauaaaucu

SEQ ID NO: 1034111 - RNA, 19 nt, Artificial Sequence
  Description of Artificial Sequence: Synthetic oligonucleotide
  Antisense strand to SEQ ID NO: 1034110
agauuuaucgacuagcucu

SEQ ID NO: 1034112 - RNA, 19 nt, Artificial Sequence
  Description of Artificial Sequence: Synthetic oligonucleotide
  Sense strand starting at position 124 of SEQ ID NO: 914833
gucgauaaaucuguuauua

SEQ ID NO: 1034113 - RNA, 19 nt, Artificial Sequence
  Description of Artificial Sequence: Synthetic oligonucleotide
  Antisense strand to SEQ ID NO: 1034112
uaauaacagauuuaucgac

SEQ ID NO: 1034114 - RNA, 19 nt, Artificial Sequence
  Description of Artificial Sequence: Synthetic oligonucleotide
  Sense strand starting at position 167 of SEQ ID NO: 914833
guaagugcuaggcacauau

SEQ ID NO: 1034115 - RNA, 19 nt, Artificial Sequence
  Description of Artificial Sequence: Synthetic oligonucleotide
  Antisense strand to SEQ ID NO: 1034114
auaugugccuagcacuuac

SEQ ID NO: 1034116 - RNA, 19 nt, Artificial Sequence
  Description of Artificial Sequence: Synthetic oligonucleotide
  Sense strand starting at position 171 of SEQ ID NO: 914833
gugcuaggcacauaucagu

SEQ ID NO: 1034117 - RNA, 19 nt, Artificial Sequence
  Description of Artificial Sequence: Synthetic oligonucleotide
  Antisense strand to SEQ ID NO: 1034116
acugauaugugccuagcac

SEQ ID NO: 1034118 - RNA, 19 nt, Artificial Sequence
  Description of Artificial Sequence: Synthetic oligonucleotide
  Sense strand starting at position 495 of SEQ ID NO: 914833
ggagaugagccaggcauua

SEQ ID NO: 1034119 - RNA, 19 nt, Artificial Sequence
  Description of Artificial Sequence: Synthetic oligonucleotide
  Antisense strand to SEQ ID NO: 1034118
uaaugccuggcucaucucc

SEQ ID NO: 1034120 - RNA, 19 nt, Artificial Sequence
  Description of Artificial Sequence: Synthetic oligonucleotide
  Sense strand starting at position 661 of SEQ ID NO: 914833
ugggucuugaagcacaaau

SEQ ID NO: 1034121 - RNA, 19 nt, Artificial Sequence
  Description of Artificial Sequence: Synthetic oligonucleotide
  Antisense strand to SEQ ID NO: 1034120
auuugugcuucaagaccca

SEQ ID NO: 1034122 - RNA, 19 nt, Artificial Sequence
  Description of Artificial Sequence: Synthetic oligonucleotide
  Sense strand starting at position 663 of SEQ ID NO: 914833
ggucuugaagcacaaaugu

SEQ ID NO: 1034123 - RNA, 19 nt, Artificial Sequence
  Description of Artificial Sequence: Synthetic oligonucleotide
  Antisense strand to SEQ ID NO: 1034122
acauuugugcuucaagacc

SEQ ID NO: 1034124 - RNA, 19 nt, Artificial Sequence
  Description of Artificial Sequence: Synthetic oligonucleotide
  Sense strand starting at position 713 of SEQ ID NO: 914833
ggaagaauggcauguauuc

SEQ ID NO: 1034125 - RNA, 19 nt, Artificial Sequence
  Description of Artificial Sequence: Synthetic oligonucleotide
  Antisense strand to SEQ ID NO: 1034124
gaauacaugccauucuucc

SEQ ID NO: 1034126 - RNA, 19 nt, Artificial Sequence
  Description of Artificial Sequence: Synthetic oligonucleotide
  Sense strand starting at position 722 of SEQ ID NO: 914833
gcauguauucugugagaag

SEQ ID NO: 1034127 - RNA, 19 nt, Artificial Sequence
  Description of Artificial Sequence: Synthetic oligonucleotide
  Antisense strand to SEQ ID NO: 1034126
cuucucacagaauacaugc

SEQ ID NO: 1034128 - RNA, 19 nt, Artificial Sequence
  Description of Artificial Sequence: Synthetic oligonucleotide
  Sense strand starting at position 788 of SEQ ID NO: 914833
ggcauaucuggucauguga

SEQ ID NO: 1034129 - RNA, 19 nt, Artificial Sequence
  Description of Artificial Sequence: Synthetic oligonucleotide
  Antisense strand to SEQ ID NO: 1034128
ucacaugaccagauaugcc

SEQ ID NO: 1034130 - RNA, 19 nt, Artificial Sequence
  Description of Artificial Sequence: Synthetic oligonucleotide
  Sense strand starting at position 824 of SEQ ID NO: 914833
cugagcagucuugggaaau

SEQ ID NO: 1034131 - RNA, 19 nt, Artificial Sequence
  Description of Artificial Sequence: Synthetic oligonucleotide
  Antisense strand to SEQ ID NO: 1034130
auuucccaagacugcucag

SEQ ID NO: 1034132 - RNA, 19 nt, Artificial Sequence
  Description of Artificial Sequence: Synthetic oligonucleotide
  Sense strand starting at position 850 of SEQ ID NO: 914833
acagaauguugggaagaga

SEQ ID NO: 1034133 - RNA, 19 nt, Artificial Sequence
  Description of Artificial Sequence: Synthetic oligonucleotide
  Antisense strand to SEQ ID NO: 1034132
ucucuucccaacauucugu

SEQ ID NO: 1034134 - RNA, 19 nt, Artificial Sequence
  Description of Artificial Sequence: Synthetic oligonucleotide
  Sense strand starting at position 868 of SEQ ID NO: 914833
aggaaaucacauugugcaa

SEQ ID NO: 1034135 - RNA, 19 nt, Artificial Sequence
  Description of Artificial Sequence: Synthetic oligonucleotide
  Antisense strand to SEQ ID NO: 1034134
uugcacaaugugauuuccu

SEQ ID NO: 1034136 - RNA, 19 nt, Artificial Sequence
  Description of Artificial Sequence: Synthetic oligonucleotide
  Sense strand starting at position 989 of SEQ ID NO: 914833
uuuaaugcuggaugaauga

SEQ ID NO: 1034137 - RNA, 19 nt, Artificial Sequence
  Description of Artificial Sequence: Synthetic oligonucleotide
  Antisense strand to SEQ ID NO: 1034136
ucauucauccagcauuaaa

SEQ ID NO: 1034138 - RNA, 19 nt, Artificial Sequence
  Description of Artificial Sequence: Synthetic oligonucleotide
  Sense strand starting at position 1010 of SEQ ID NO: 914833
ccauguaauguuuaaggau

SEQ ID NO: 1034139 - RNA, 19 nt, Artificial Sequence
  Description of Artificial Sequence: Synthetic oligonucleotide
  Antisense strand to SEQ ID NO: 1034138
auccuuaaacauuacaugg

SEQ ID NO: 1034140 - RNA, 19 nt, Artificial Sequence
  Description of Artificial Sequence: Synthetic oligonucleotide
  Sense strand starting at position 1116 of SEQ ID NO: 914833
gcaugucaggaaugcagaa

SEQ ID NO: 1034141 - RNA, 19 nt, Artificial Sequence
  Description of Artificial Sequence: Synthetic oligonucleotide
  Antisense strand to SEQ ID NO: 1034140
uucugcauuccugacaugc

SEQ ID NO: 1034142 - RNA, 19 nt, Artificial Sequence
  Description of Artificial Sequence: Synthetic oligonucleotide
  Sense strand starting at position 1193 of SEQ ID NO: 914833
ccagguaauuuguauacac

SEQ ID NO: 1034143 - RNA, 19 nt, Artificial Sequence
  Description of Artificial Sequence: Synthetic oligonucleotide
  Antisense strand to SEQ ID NO: 1034142
guguauacaaauuaccugg

SEQ ID NO: 1034144 - RNA, 19 nt, Artificial Sequence
  Description of Artificial Sequence: Synthetic oligonucleotide
  Sense strand starting at position 1236 of SEQ ID NO: 914833
caggaugauuuaggaucaa

SEQ ID NO: 1034145 - RNA, 19 nt, Artificial Sequence
  Description of Artificial Sequence: Synthetic oligonucleotide
  Antisense strand to SEQ ID NO: 1034144
uugauccuaaaucauccug

SEQ ID NO: 1034146 - RNA, 19 nt, Artificial Sequence
  Description of Artificial Sequence: Synthetic oligonucleotide
  Sense strand starting at position 1463 of SEQ ID NO: 914833
cccuuagaaccuuguguau

SEQ ID NO: 1034147 - RNA, 19 nt, Artificial Sequence
  Description of Artificial Sequence: Synthetic oligonucleotide
  Antisense strand to SEQ ID NO: 1034146
auacacaagguucuaaggg

SEQ ID NO: 1034148 - RNA, 19 nt, Artificial Sequence
  Description of Artificial Sequence: Synthetic oligonucleotide
  Sense strand starting at position 1466 of SEQ ID NO: 914833
uuagaaccuuguguauauu

SEQ ID NO: 1034149 - RNA, 19 nt, Artificial Sequence
  Description of Artificial Sequence: Synthetic oligonucleotide
  Antisense strand to SEQ ID NO: 1034148
aauauacacaagguucuaa

SEQ ID NO: 1034150 - RNA, 19 nt, Artificial Sequence
  Description of Artificial Sequence: Synthetic oligonucleotide
  Sense strand starting at position 1472 of SEQ ID NO: 914833
ccuuguguauauuccaacu

SEQ ID NO: 1034151 - RNA, 19 nt, Artificial Sequence
  Description of Artificial Sequence: Synthetic oligonucleotide
  Antisense strand to SEQ ID NO: 1034150
aguuggaauauacacaagg

SEQ ID NO: 1034152 - RNA, 19 nt, Artificial Sequence
  Description of Artificial Sequence: Synthetic oligonucleotide
  Sense strand starting at position 1632 of SEQ ID NO: 914833
agcaaaguugugugagaga

SEQ ID NO: 1034153 - RNA, 19 nt, Artificial Sequence
  Description of Artificial Sequence: Synthetic oligonucleotide
  Antisense strand to SEQ ID NO: 1034152
ucucucacacaacuuugcu

SEQ ID NO: 1034154 - RNA, 19 nt, Artificial Sequence
  Description of Artificial Sequence: Synthetic oligonucleotide
  Sense strand starting at position 1669 of SEQ ID NO: 914833
uaagacaguuucguaaauu

SEQ ID NO: 1034155 - RNA, 19 nt, Artificial Sequence
  Description of Artificial Sequence: Synthetic oligonucleotide
  Antisense strand to SEQ ID NO: 1034154
aauuuacgaaacugucuua

SEQ ID NO: 1034156 - RNA, 19 nt, Artificial Sequence
  Description of Artificial Sequence: Synthetic oligonucleotide
  Sense strand starting at position 1789 of SEQ ID NO: 914833
aucagagauuaucaacaag

SEQ ID NO: 1034157 - RNA, 19 nt, Artificial Sequence
  Description of Artificial Sequence: Synthetic oligonucleotide
  Antisense strand to SEQ ID NO: 1034156
cuuguugauaaucucugau

SEQ ID NO: 1034158 - RNA, 19 nt, Artificial Sequence
  Description of Artificial Sequence: Synthetic oligonucleotide
  Sense strand starting at position 1847 of SEQ ID NO: 914833
ggcaaagugccugggauuu

SEQ ID NO: 1034159 - RNA, 19 nt, Artificial Sequence
  Description of Artificial Sequence: Synthetic oligonucleotide
  Antisense strand to SEQ ID NO: 1034158
aaaucccaggcacuuugcc

SEQ ID NO: 1034160 - RNA, 19 nt, Artificial Sequence
  Description of Artificial Sequence: Synthetic oligonucleotide
  Sense strand starting at position 1920 of SEQ ID NO: 914833
ugaaccacuuucgugaauu

SEQ ID NO: 1034161 - RNA, 19 nt, Artificial Sequence
  Description of Artificial Sequence: Synthetic oligonucleotide
  Antisense strand to SEQ ID NO: 1034160
aauucacgaaagugguuca

SEQ ID NO: 1034162 - RNA, 19 nt, Artificial Sequence
  Description of Artificial Sequence: Synthetic oligonucleotide
  Sense strand starting at position 1928 of SEQ ID NO: 914833
uuucgugaauuccucauaa

SEQ ID NO: 1034163 - RNA, 19 nt, Artificial Sequence
  Description of Artificial Sequence: Synthetic oligonucleotide
  Antisense strand to SEQ ID NO: 1034162
uuaugaggaauucacgaaa

SEQ ID NO: 1034164 - RNA, 19 nt, Artificial Sequence
  Description of Artificial Sequence: Synthetic oligonucleotide
  Sense strand starting at position 1930 of SEQ ID NO: 914833
ucgugaauuccucauaaac

SEQ ID NO: 1034165 - RNA, 19 nt, Artificial Sequence
  Description of Artificial Sequence: Synthetic oligonucleotide
  Antisense strand to SEQ ID NO: 1034164
guuuaugaggaauucacga

SEQ ID NO: 1034166 - RNA, 19 nt, Artificial Sequence
  Description of Artificial Sequence: Synthetic oligonucleotide
  Sense strand starting at position 2062 of SEQ ID NO: 914833
guggaugacuugccgagau

SEQ ID NO: 1034167 - RNA, 19 nt, Artificial Sequence
  Description of Artificial Sequence: Synthetic oligonucleotide
  Antisense strand to SEQ ID NO: 1034166
aucucggcaagucauccac

SEQ ID NO: 1034168 - RNA, 19 nt, Artificial Sequence
  Description of Artificial Sequence: Synthetic oligonucleotide
  Sense strand starting at position 2599 of SEQ ID NO: 914833
cucugauagcuauaguaca

SEQ ID NO: 1034169 - RNA, 19 nt, Artificial Sequence
  Description of Artificial Sequence: Synthetic oligonucleotide
  Antisense strand to SEQ ID NO: 1034168
uguacuauagcuaucagag

SEQ ID NO: 1034170 - RNA, 19 nt, Artificial Sequence
  Description of Artificial Sequence: Synthetic oligonucleotide
  Sense strand starting at position 2607 of SEQ ID NO: 914833
gcuauaguacaguagaaga

SEQ ID NO: 1034171 - RNA, 19 nt, Artificial Sequence
  Description of Artificial Sequence: Synthetic oligonucleotide
  Antisense strand to SEQ ID NO: 1034170
ucuucuacuguacuauagc

SEQ ID NO: 1034172 - RNA, 19 nt, Artificial Sequence
  Description of Artificial Sequence: Synthetic oligonucleotide
  Sense strand starting at position 2621 of SEQ ID NO: 914833
gaagacuucugagaccaag

SEQ ID NO: 1034173 - RNA, 19 nt, Artificial Sequence
  Description of Artificial Sequence: Synthetic oligonucleotide
  Antisense strand to SEQ ID NO: 1034172
cuuggucucagaagucuuc

SEQ ID NO: 1034174 - RNA, 19 nt, Artificial Sequence
  Description of Artificial Sequence: Synthetic oligonucleotide
  Sense strand starting at position 2669 of SEQ ID NO: 914833
ucugguucuugagcaaaug

SEQ ID NO: 1034175 - RNA, 19 nt, Artificial Sequence
  Description of Artificial Sequence: Synthetic oligonucleotide
  Antisense strand to SEQ ID NO: 1034174
cauuugcucaagaaccaga

SEQ ID NO: 1034176 - RNA, 19 nt, Artificial Sequence
  Description of Artificial Sequence: Synthetic oligonucleotide
  Sense strand starting at position 2727 of SEQ ID NO: 914833
agaugugacaauggaguga

SEQ ID NO: 1034177 - RNA, 19 nt, Artificial Sequence
  Description of Artificial Sequence: Synthetic oligonucleotide
  Antisense strand to SEQ ID NO: 1034176
ucacuccauugucacaucu

SEQ ID NO: 1034178 - RNA, 19 nt, Artificial Sequence
  Description of Artificial Sequence: Synthetic oligonucleotide
  Sense strand starting at position 3141 of SEQ ID NO: 914833
gcgagacuccguuaucaaa

SEQ ID NO: 1034179 - RNA, 19 nt, Artificial Sequence
  Description of Artificial Sequence: Synthetic oligonucleotide
  Antisense strand to SEQ ID NO: 1034178
uuugauaacggagucucgc

SEQ ID NO: 1034180 - RNA, 19 nt, Artificial Sequence
  Description of Artificial Sequence: Synthetic oligonucleotide
  Sense strand starting at position 3171 of SEQ ID NO: 914833
agaauuaaugugggauagu

SEQ ID NO: 1034181 - RNA, 19 nt, Artificial Sequence
  Description of Artificial Sequence: Synthetic oligonucleotide
  Antisense strand to SEQ ID NO: 1034180
acuaucccacauuaauucu

SEQ ID NO: 1034182 - RNA, 19 nt, Artificial Sequence
  Description of Artificial Sequence: Synthetic oligonucleotide
  Sense strand starting at position 3266 of SEQ ID NO: 914833
gguccuacaaucugagaag

SEQ ID NO: 1034183 - RNA, 19 nt, Artificial Sequence
  Description of Artificial Sequence: Synthetic oligonucleotide
  Antisense strand to SEQ ID NO: 1034182
cuucucagauuguaggacc

SEQ ID NO: 1034184 - RNA, 19 nt, Artificial Sequence
  Description of Artificial Sequence: Synthetic oligonucleotide
  Sense strand starting at position 3269 of SEQ ID NO: 914833
ccuacaaucugagaagaca

SEQ ID NO: 1034185 - RNA, 19 nt, Artificial Sequence
  Description of Artificial Sequence: Synthetic oligonucleotide
  Antisense strand to SEQ ID NO: 1034184
ugucuucucagauuguagg

SEQ ID NO: 1034186 - RNA, 19 nt, Artificial Sequence
  Description of Artificial Sequence: Synthetic oligonucleotide
  Sense strand starting at position 3316 of SEQ ID NO: 914833
cugaaaugugcuggguaac

SEQ ID NO: 1034187 - RNA, 19 nt, Artificial Sequence
  Description of Artificial Sequence: Synthetic oligonucleotide
  Antisense strand to SEQ ID NO: 1034186
guuacccagcacauuucag

SEQ ID NO: 1034188 - RNA, 19 nt, Artificial Sequence
  Description of Artificial Sequence: Synthetic oligonucleotide
  Sense strand starting at position 3368 of SEQ ID NO: 914833
uucagagugccucagggaa

SEQ ID NO: 1034189 - RNA, 19 nt, Artificial Sequence
  Description of Artificial Sequence: Synthetic oligonucleotide
  Antisense strand to SEQ ID NO: 1034188
uucccugaggcacucugaa

SEQ ID NO: 1034190 - RNA, 19 nt, Artificial Sequence
  Description of Artificial Sequence: Synthetic oligonucleotide
  Sense strand starting at position 140 of SEQ ID NO: 914834
guaauaauaucagcaacag

SEQ ID NO: 1034191 - RNA, 19 nt, Artificial Sequence
  Description of Artificial Sequence: Synthetic oligonucleotide
  Antisense strand to SEQ ID NO: 1034190
cuguugcugauauuauuac

SEQ ID NO: 1034192 - RNA, 19 nt, Artificial Sequence
  Description of Artificial Sequence: Synthetic oligonucleotide
  Sense strand starting at position 191 of SEQ ID NO: 914834
aguacuuugcguguauuau

SEQ ID NO: 1034193 - RNA, 19 nt, Artificial Sequence
  Description of Artificial Sequence: Synthetic oligonucleotide
  Antisense strand to SEQ ID NO: 1034192
auaauacacgcaaaguacu

SEQ ID NO: 1034194 - RNA, 19 nt, Artificial Sequence
  Description of Artificial Sequence: Synthetic oligonucleotide
  Sense strand starting at position 228 of SEQ ID NO: 914834
ucaauaaguuagguacuau

SEQ ID NO: 1034195 - RNA, 19 nt, Artificial Sequence
  Description of Artificial Sequence: Synthetic oligonucleotide
  Antisense strand to SEQ ID NO: 1034194
auaguaccuaacuuauuga

SEQ ID NO: 1034196 - RNA, 19 nt, Artificial Sequence
  Description of Artificial Sequence: Synthetic oligonucleotide
  Sense strand starting at position 240 of SEQ ID NO: 914834
guacuauuaugaucccauu

SEQ ID NO: 1034197 - RNA, 19 nt, Artificial Sequence
  Description of Artificial Sequence: Synthetic oligonucleotide
  Antisense strand to SEQ ID NO: 1034196
aaugggaucauaauaguac

SEQ ID NO: 1034198 - RNA, 19 nt, Artificial Sequence
  Description of Artificial Sequence: Synthetic oligonucleotide
  Sense strand starting at position 559 of SEQ ID NO: 914834
cgaaaucaagguuaagcaa

SEQ ID NO: 1034199 - RNA, 19 nt, Artificial Sequence
  Description of Artificial Sequence: Synthetic oligonucleotide
  Antisense strand to SEQ ID NO: 1034198
uugcuuaaccuugauuucg

SEQ ID NO: 1034200 - RNA, 19 nt, Artificial Sequence
  Description of Artificial Sequence: Synthetic oligonucleotide
  Sense strand starting at position 581 of SEQ ID NO: 914834
gacuauaugcgccaugagu

SEQ ID NO: 1034201 - RNA, 19 nt, Artificial Sequence
  Description of Artificial Sequence: Synthetic oligonucleotide
  Antisense strand to SEQ ID NO: 1034200
acucauggcgcauauaguc

SEQ ID NO: 1034202 - RNA, 19 nt, Artificial Sequence
  Description of Artificial Sequence: Synthetic oligonucleotide
  Sense strand starting at position 655 of SEQ ID NO: 914834
guauauggaagguagucaa

SEQ ID NO: 1034203 - RNA, 19 nt, Artificial Sequence
  Description of Artificial Sequence: Synthetic oligonucleotide
  Antisense strand to SEQ ID NO: 1034202
uugacuaccuuccauauac

SEQ ID NO: 1034204 - RNA, 19 nt, Artificial Sequence
  Description of Artificial Sequence: Synthetic oligonucleotide
  Sense strand starting at position 658 of SEQ ID NO: 914834
uauggaagguagucaauaa

SEQ ID NO: 1034205 - RNA, 19 nt, Artificial Sequence
  Description of Artificial Sequence: Synthetic oligonucleotide
  Antisense strand to SEQ ID NO: 1034204
uuauugacuaccuuccaua

SEQ ID NO: 1034206 - RNA, 19 nt, Artificial Sequence
  Description of Artificial Sequence: Synthetic oligonucleotide
  Sense strand starting at position 674 of SEQ ID NO: 914834
uaaauaucuguugaguuga

SEQ ID NO: 1034207 - RNA, 19 nt, Artificial Sequence
  Description of Artificial Sequence: Synthetic oligonucleotide
  Antisense strand to SEQ ID NO: 1034206
ucaacucaacagauauuua

SEQ ID NO: 1034208 - RNA, 19 nt, Artificial Sequence
  Description of Artificial Sequence: Synthetic oligonucleotide
  Sense strand starting at position 679 of SEQ ID NO: 914834
aucuguugaguugacuaua

SEQ ID NO: 1034209 - RNA, 19 nt, Artificial Sequence
  Description of Artificial Sequence: Synthetic oligonucleotide
  Antisense strand to SEQ ID NO: 1034208
uauagucaacucaacagau

SEQ ID NO: 1034210 - RNA, 19 nt, Artificial Sequence
  Description of Artificial Sequence: Synthetic oligonucleotide
  Sense strand starting at position 688 of SEQ ID NO: 914834
guugacuauauuuguguuu

SEQ ID NO: 1034211 - RNA, 19 nt, Artificial Sequence
  Description of Artificial Sequence: Synthetic oligonucleotide
  Antisense strand to SEQ ID NO: 1034210
aaacacaaauauagucaac

SEQ ID NO: 1034212 - RNA, 19 nt, Artificial Sequence
  Description of Artificial Sequence: Synthetic oligonucleotide
  Sense strand starting at position 749 of SEQ ID NO: 914834
gccucacgucuguaauccu

SEQ ID NO: 1034213 - RNA, 19 nt, Artificial Sequence
  Description of Artificial Sequence: Synthetic oligonucleotide
  Antisense strand to SEQ ID NO: 1034212
aggauuacagacgugaggc

SEQ ID NO: 1034214 - RNA, 19 nt, Artificial Sequence
  Description of Artificial Sequence: Synthetic oligonucleotide
  Sense strand starting at position 1132 of SEQ ID NO: 914834
uuguaagcaccuuauuaag

SEQ ID NO: 1034215 - RNA, 19 nt, Artificial Sequence
  Description of Artificial Sequence: Synthetic oligonucleotide
  Antisense strand to SEQ ID NO: 1034214
cuuaauaaggugcuuacaa

SEQ ID NO: 1034216 - RNA, 19 nt, Artificial Sequence
  Description of Artificial Sequence: Synthetic oligonucleotide
  Sense strand starting at position 1239 of SEQ ID NO: 914834
cccucaaugugcuuggaca

SEQ ID NO: 1034217 - RNA, 19 nt, Artificial Sequence
  Description of Artificial Sequence: Synthetic oligonucleotide
  Antisense strand to SEQ ID NO: 1034216
uguccaagcacauugaggg

SEQ ID NO: 1034218 - RNA, 19 nt, Artificial Sequence
  Description of Artificial Sequence: Synthetic oligonucleotide
  Sense strand starting at position 1240 of SEQ ID NO: 914834
ccucaaugugcuuggacau

SEQ ID NO: 1034219 - RNA, 19 nt, Artificial Sequence
  Description of Artificial Sequence: Synthetic oligonucleotide
  Antisense strand to SEQ ID NO: 1034218
auguccaagcacauugagg

SEQ ID NO: 1034220 - RNA, 19 nt, Artificial Sequence
  Description of Artificial Sequence: Synthetic oligonucleotide
  Sense strand starting at position 1350 of SEQ ID NO: 914834
uguuaugggagguggcaaa

SEQ ID NO: 1034221 - RNA, 19 nt, Artificial Sequence
  Description of Artificial Sequence: Synthetic oligonucleotide
  Antisense strand to SEQ ID NO: 1034220
uuugccaccucccauaaca

SEQ ID NO: 1034222 - RNA, 19 nt, Artificial Sequence
  Description of Artificial Sequence: Synthetic oligonucleotide
  Sense strand starting at position 1421 of SEQ ID NO: 914834
cugauaaggcucuaacagu

SEQ ID NO: 1034223 - RNA, 19 nt, Artificial Sequence
  Description of Artificial Sequence: Synthetic oligonucleotide
  Antisense strand to SEQ ID NO: 1034222
acuguuagagccuuaucag

SEQ ID NO: 1034224 - RNA, 19 nt, Artificial Sequence
  Description of Artificial Sequence: Synthetic oligonucleotide
  Sense strand starting at position 1467 of SEQ ID NO: 914834
acccuaauauaagggaaua

SEQ ID NO: 1034225 - RNA, 19 nt, Artificial Sequence
  Description of Artificial Sequence: Synthetic oligonucleotide
  Antisense strand to SEQ ID NO: 1034224
uauucccuuauauuagggu

SEQ ID NO: 1034226 - RNA, 19 nt, Artificial Sequence
  Description of Artificial Sequence: Synthetic oligonucleotide
  Sense strand starting at position 1479 of SEQ ID NO: 914834
gggaauaucucagccggac

SEQ ID NO: 1034227 - RNA, 19 nt, Artificial Sequence
  Description of Artificial Sequence: Synthetic oligonucleotide
  Antisense strand to SEQ ID NO: 1034226
guccggcugagauauuccc

SEQ ID NO: 1034228 - RNA, 19 nt, Artificial Sequence
  Description of Artificial Sequence: Synthetic oligonucleotide
  Sense strand starting at position 1551 of SEQ ID NO: 914834
cuggguuuccuagggucaa

SEQ ID NO: 1034229 - RNA, 19 nt, Artificial Sequence
  Description of Artificial Sequence: Synthetic oligonucleotide
  Antisense strand to SEQ ID NO: 1034228
uugacccuaggaaacccag

SEQ ID NO: 1034230 - RNA, 19 nt, Artificial Sequence
  Description of Artificial Sequence: Synthetic oligonucleotide
  Sense strand starting at position 1719 of SEQ ID NO: 914834
gaagcagucccugaguucu

SEQ ID NO: 1034231 - RNA, 19 nt, Artificial Sequence
  Description of Artificial Sequence: Synthetic oligonucleotide
  Antisense strand to SEQ ID NO: 1034230
agaacucagggacugcuuc

SEQ ID NO: 1034232 - RNA, 19 nt, Artificial Sequence
  Description of Artificial Sequence: Synthetic oligonucleotide
  Sense strand starting at position 1727 of SEQ ID NO: 914834
cccugaguucugggaggac

SEQ ID NO: 1034233 - RNA, 19 nt, Artificial Sequence
  Description of Artificial Sequence: Synthetic oligonucleotide
  Antisense strand to SEQ ID NO: 1034232
guccucccagaacucaggg

SEQ ID NO: 1034234 - RNA, 19 nt, Artificial Sequence
  Description of Artificial Sequence: Synthetic oligonucleotide
  Sense strand starting at position 1750 of SEQ ID NO: 914834
ccaagaaucugagaacccu

SEQ ID NO: 1034235 - RNA, 19 nt, Artificial Sequence
  Description of Artificial Sequence: Synthetic oligonucleotide
  Antisense strand to SEQ ID NO: 1034234
aggguucucagauucuugg

SEQ ID NO: 1034236 - RNA, 19 nt, Artificial Sequence
  Description of Artificial Sequence: Synthetic oligonucleotide
  Sense strand starting at position 1768 of SEQ ID NO: 914834
ugacgugaguucucgaggu

SEQ ID NO: 1034237 - RNA, 19 nt, Artificial Sequence
  Description of Artificial Sequence: Synthetic oligonucleotide
  Antisense strand to SEQ ID NO: 1034236
accucgagaacucacguca

SEQ ID NO: 1034238 - RNA, 19 nt, Artificial Sequence
  Description of Artificial Sequence: Synthetic oligonucleotide
  Sense strand starting at position 1770 of SEQ ID NO: 914834
acgugaguucucgagguag

SEQ ID NO: 1034239 - RNA, 19 nt, Artificial Sequence
  Description of Artificial Sequence: Synthetic oligonucleotide
  Antisense strand to SEQ ID NO: 1034238
cuaccucgagaacucacgu

SEQ ID NO: 1034240 - RNA, 19 nt, Artificial Sequence
  Description of Artificial Sequence: Synthetic oligonucleotide
  Sense strand starting at position 1772 of SEQ ID NO: 914834
gugaguucucgagguagga

SEQ ID NO: 1034241 - RNA, 19 nt, Artificial Sequence
  Description of Artificial Sequence: Synthetic oligonucleotide
  Antisense strand to SEQ ID NO: 1034240
uccuaccucgagaacucac

SEQ ID NO: 1034242 - RNA, 19 nt, Artificial Sequence
  Description of Artificial Sequence: Synthetic oligonucleotide
  Sense strand starting at position 1774 of SEQ ID NO: 914834
gaguucucgagguaggauc

SEQ ID NO: 1034243 - RNA, 19 nt, Artificial Sequence
  Description of Artificial Sequence: Synthetic oligonucleotide
  Antisense strand to SEQ ID NO: 1034242
gauccuaccucgagaacuc

SEQ ID NO: 1034244 - RNA, 19 nt, Artificial Sequence
  Description of Artificial Sequence: Synthetic oligonucleotide
  Sense strand starting at position 1795 of SEQ ID NO: 914834
gguuucuaccgagaaggcu

SEQ ID NO: 1034245 - RNA, 19 nt, Artificial Sequence
  Description of Artificial Sequence: Synthetic oligonucleotide
  Antisense strand to SEQ ID NO: 1034244
agccuucucgguagaaacc

SEQ ID NO: 1034246 - RNA, 19 nt, Artificial Sequence
  Description of Artificial Sequence: Synthetic oligonucleotide
  Sense strand starting at position 2050 of SEQ ID NO: 914834
aaauuaauccggcgauguc

SEQ ID NO: 1034247 - RNA, 19 nt, Artificial Sequence
  Description of Artificial Sequence: Synthetic oligonucleotide
  Antisense strand to SEQ ID NO: 1034246
gacaucgccggauuaauuu

SEQ ID NO: 1034248 - RNA, 19 nt, Artificial Sequence
  Description of Artificial Sequence: Synthetic oligonucleotide
  Sense strand starting at position 2099 of SEQ ID NO: 914834
gucggagucccagagcaua

SEQ ID NO: 1034249 - RNA, 19 nt, Artificial Sequence
  Description of Artificial Sequence: Synthetic oligonucleotide
  Antisense strand to SEQ ID NO: 1034248
uaugcucugggacuccgac

SEQ ID NO: 1034250 - RNA, 19 nt, Artificial Sequence
  Description of Artificial Sequence: Synthetic oligonucleotide
  Sense strand starting at position 2111 of SEQ ID NO: 914834
gagcauaaucccgggacga

SEQ ID NO: 1034251 - RNA, 19 nt, Artificial Sequence
  Description of Artificial Sequence: Synthetic oligonucleotide
  Antisense strand to SEQ ID NO: 1034250
ucgucccgggauuaugcuc

SEQ ID NO: 1034252 - RNA, 19 nt, Artificial Sequence
  Description of Artificial Sequence: Synthetic oligonucleotide
  Sense strand starting at position 2112 of SEQ ID NO: 914834
agcauaaucccgggacgau

SEQ ID NO: 1034253 - RNA, 19 nt, Artificial Sequence
  Description of Artificial Sequence: Synthetic oligonucleotide
  Antisense strand to SEQ ID NO: 1034252
aucgucccgggauuaugcu

SEQ ID NO: 1034254 - RNA, 19 nt, Artificial Sequence
  Description of Artificial Sequence: Synthetic oligonucleotide
  Sense strand starting at position 2113 of SEQ ID NO: 914834
gcauaaucccgggacgaug

SEQ ID NO: 1034255 - RNA, 19 nt, Artificial Sequence
  Description of Artificial Sequence: Synthetic oligonucleotide
  Antisense strand to SEQ ID NO: 1034254
caucgucccgggauuaugc

SEQ ID NO: 1034256 - RNA, 19 nt, Artificial Sequence
  Description of Artificial Sequence: Synthetic oligonucleotide
  Sense strand starting at position 2144 of SEQ ID NO: 914834
cgauucgcccuauaugcaa

SEQ ID NO: 1034257 - RNA, 19 nt, Artificial Sequence
  Description of Artificial Sequence: Synthetic oligonucleotide
  Antisense strand to SEQ ID NO: 1034256
uugcauauagggcgaaucg

SEQ ID NO: 1034258 - RNA, 19 nt, Artificial Sequence
  Description of Artificial Sequence: Synthetic oligonucleotide
  Sense strand starting at position 2932 of SEQ ID NO: 914834
gccucaacucaggacuuua

SEQ ID NO: 1034259 - RNA, 19 nt, Artificial Sequence
  Description of Artificial Sequence: Synthetic oligonucleotide
  Antisense strand to SEQ ID NO: 1034258
uaaaguccugaguugaggc

SEQ ID NO: 1034260 - RNA, 19 nt, Artificial Sequence
  Description of Artificial Sequence: Synthetic oligonucleotide
  Sense strand starting at position 3083 of SEQ ID NO: 914834
cagcguucuagguagcuga

SEQ ID NO: 1034261 - RNA, 19 nt, Artificial Sequence
  Description of Artificial Sequence: Synthetic oligonucleotide
  Antisense strand to SEQ ID NO: 1034260
ucagcuaccuagaacgcug

SEQ ID NO: 1034262 - RNA, 19 nt, Artificial Sequence
  Description of Artificial Sequence: Synthetic oligonucleotide
  Sense strand starting at position 3087 of SEQ ID NO: 914834
guucuagguagcugagauu

SEQ ID NO: 1034263 - RNA, 19 nt, Artificial Sequence
  Description of Artificial Sequence: Synthetic oligonucleotide
  Antisense strand to SEQ ID NO: 1034262
aaucucagcuaccuagaac

SEQ ID NO: 1034264 - RNA, 19 nt, Artificial Sequence
  Description of Artificial Sequence: Synthetic oligonucleotide
  Sense strand starting at position 3519 of SEQ ID NO: 914834
ccgccaaucuggucucaaa

SEQ ID NO: 1034265 - RNA, 19 nt, Artificial Sequence
  Description of Artificial Sequence: Synthetic oligonucleotide
  Antisense strand to SEQ ID NO: 1034264
uuugagaccagauuggcgg

SEQ ID NO: 1034266 - RNA, 19 nt, Artificial Sequence
  Description of Artificial Sequence: Synthetic oligonucleotide
  Sense strand starting at position 3651 of SEQ ID NO: 914834
ugcagucucgucucugcaa

SEQ ID NO: 1034267 - RNA, 19 nt, Artificial Sequence
  Description of Artificial Sequence: Synthetic oligonucleotide
  Antisense strand to SEQ ID NO: 1034266
uugcagagacgagacugca

SEQ ID NO: 1034268 - RNA, 19 nt, Artificial Sequence
  Description of Artificial Sequence: Synthetic oligonucleotide
  Sense strand starting at position 3749 of SEQ ID NO: 914834
cagcuaauuggagacaugu

SEQ ID NO: 1034269 - RNA, 19 nt, Artificial Sequence
  Description of Artificial Sequence: Synthetic oligonucleotide
  Antisense strand to SEQ ID NO: 1034268
acaugucuccaauuagcug

SEQ ID NO: 1034270 - RNA, 19 nt, Artificial Sequence
  Description of Artificial Sequence: Synthetic oligonucleotide
  Sense strand starting at position 101 of SEQ ID NO: 914835
gagcaaagucaugguagaa

SEQ ID NO: 1034271 - RNA, 19 nt, Artificial Sequence
  Description of Artificial Sequence: Synthetic oligonucleotide
  Antisense strand to SEQ ID NO: 1034270
uucuaccaugacuuugcuc

SEQ ID NO: 1034272 - RNA, 19 nt, Artificial Sequence
  Description of Artificial Sequence: Synthetic oligonucleotide
  Sense strand starting at position 246 of SEQ ID NO: 914835
ccuuccauaguuugguaau

SEQ ID NO: 1034273 - RNA, 19 nt, Artificial Sequence
  Description of Artificial Sequence: Synthetic oligonucleotide
  Antisense strand to SEQ ID NO: 1034272
auuaccaaacuauggaagg

SEQ ID NO: 1034274 - RNA, 19 nt, Artificial Sequence
  Description of Artificial Sequence: Synthetic oligonucleotide
  Sense strand starting at position 329 of SEQ ID NO: 914835
aggugacucugagucuaaa

SEQ ID NO: 1034275 - RNA, 19 nt, Artificial Sequence
  Description of Artificial Sequence: Synthetic oligonucleotide
  Antisense strand to SEQ ID NO: 1034274
uuuagacucagagucaccu

SEQ ID NO: 1034276 - RNA, 19 nt, Artificial Sequence
  Description of Artificial Sequence: Synthetic oligonucleotide
  Sense strand starting at position 364 of SEQ ID NO: 914835
caucacuuugugugguaua

SEQ ID NO: 1034277 - RNA, 19 nt, Artificial Sequence
  Description of Artificial Sequence: Synthetic oligonucleotide
  Antisense strand to SEQ ID NO: 1034276
uauaccacacaaagugaug

SEQ ID NO: 1034278 - RNA, 19 nt, Artificial Sequence
  Description of Artificial Sequence: Synthetic oligonucleotide
  Sense strand starting at position 369 of SEQ ID NO: 914835
cuuugugugguauaauaau

SEQ ID NO: 1034279 - RNA, 19 nt, Artificial Sequence
  Description of Artificial Sequence: Synthetic oligonucleotide
  Antisense strand to SEQ ID NO: 1034278
auuauuauaccacacaaag

SEQ ID NO: 1034280 - RNA, 19 nt, Artificial Sequence
  Description of Artificial Sequence: Synthetic oligonucleotide
  Sense strand starting at position 444 of SEQ ID NO: 914835
uguguaaacucuguaggua

SEQ ID NO: 1034281 - RNA, 19 nt, Artificial Sequence
  Description of Artificial Sequence: Synthetic oligonucleotide
  Antisense strand to SEQ ID NO: 1034280
uaccuacagaguuuacaca

SEQ ID NO: 1034282 - RNA, 19 nt, Artificial Sequence
  Description of Artificial Sequence: Synthetic oligonucleotide
  Sense strand starting at position 445 of SEQ ID NO: 914835
guguaaacucuguagguag

SEQ ID NO: 1034283 - RNA, 19 nt, Artificial Sequence
  Description of Artificial Sequence: Synthetic oligonucleotide
  Antisense strand to SEQ ID NO: 1034282
cuaccuacagaguuuacac

SEQ ID NO: 1034284 - RNA, 19 nt, Artificial Sequence
  Description of Artificial Sequence: Synthetic oligonucleotide
  Sense strand starting at position 457 of SEQ ID NO: 914835
uagguagucuucuugaacu

SEQ ID NO: 1034285 - RNA, 19 nt, Artificial Sequence
  Description of Artificial Sequence: Synthetic oligonucleotide
  Antisense strand to SEQ ID NO: 1034284
aguucaagaagacuaccua

SEQ ID NO: 1034286 - RNA, 19 nt, Artificial Sequence
  Description of Artificial Sequence: Synthetic oligonucleotide
  Sense strand starting at position 459 of SEQ ID NO: 914835
gguagucuucuugaacugu

SEQ ID NO: 1034287 - RNA, 19 nt, Artificial Sequence
  Description of Artificial Sequence: Synthetic oligonucleotide
  Antisense strand to SEQ ID NO: 1034286
acaguucaagaagacuacc

SEQ ID NO: 1034288 - RNA, 19 nt, Artificial Sequence
  Description of Artificial Sequence: Synthetic oligonucleotide
  Sense strand starting at position 508 of SEQ ID NO: 914835
agcccuuuacacugaaagu

SEQ ID NO: 1034289 - RNA, 19 nt, Artificial Sequence
  Description of Artificial Sequence: Synthetic oligonucleotide
  Antisense strand to SEQ ID NO: 1034288
acuuucaguguaaagggcu

SEQ ID NO: 1034290 - RNA, 19 nt, Artificial Sequence
  Description of Artificial Sequence: Synthetic oligonucleotide
  Sense strand starting at position 531 of SEQ ID NO: 914835
uuaguaauauuucugcugu

SEQ ID NO: 1034291 - RNA, 19 nt, Artificial Sequence
  Description of Artificial Sequence: Synthetic oligonucleotide
  Antisense strand to SEQ ID NO: 1034290
acagcagaaauauuacuaa

SEQ ID NO: 1034292 - RNA, 19 nt, Artificial Sequence
  Description of Artificial Sequence: Synthetic oligonucleotide
  Sense strand starting at position 533 of SEQ ID NO: 914835
aguaauauuucugcuguuu

SEQ ID NO: 1034293 - RNA, 19 nt, Artificial Sequence
  Description of Artificial Sequence: Synthetic oligonucleotide
  Antisense strand to SEQ ID NO: 1034292
aaacagcagaaauauuacu

SEQ ID NO: 1034294 - RNA, 19 nt, Artificial Sequence
  Description of Artificial Sequence: Synthetic oligonucleotide
  Sense strand starting at position 1025 of SEQ ID NO: 914835
ggaucaagagguuaagcga

SEQ ID NO: 1034295 - RNA, 19 nt, Artificial Sequence
  Description of Artificial Sequence: Synthetic oligonucleotide
  Antisense strand to SEQ ID NO: 1034294
ucgcuuaaccucuugaucc

SEQ ID NO: 1034296 - RNA, 19 nt, Artificial Sequence
  Description of Artificial Sequence: Synthetic oligonucleotide
  Sense strand starting at position 1064 of SEQ ID NO: 914835
gaaucaauggugcagcuau

SEQ ID NO: 1034297 - RNA, 19 nt, Artificial Sequence
  Description of Artificial Sequence: Synthetic oligonucleotide
  Antisense strand to SEQ ID NO: 1034296
auagcugcaccauugauuc

SEQ ID NO: 1034298 - RNA, 19 nt, Artificial Sequence
  Description of Artificial Sequence: Synthetic oligonucleotide
  Sense strand starting at position 1076 of SEQ ID NO: 914835
cagcuauaccuagaagggu

SEQ ID NO: 1034299 - RNA, 19 nt, Artificial Sequence
  Description of Artificial Sequence: Synthetic oligonucleotide
  Antisense strand to SEQ ID NO: 1034298
acccuucuagguauagcug

SEQ ID NO: 1034300 - RNA, 19 nt, Artificial Sequence
  Description of Artificial Sequence: Synthetic oligonucleotide
  Sense strand starting at position 1165 of SEQ ID NO: 914835
gggaucagacucugugagu

SEQ ID NO: 1034301 - RNA, 19 nt, Artificial Sequence
  Description of Artificial Sequence: Synthetic oligonucleotide
  Antisense strand to SEQ ID NO: 1034300
acucacagagucugauccc

SEQ ID NO: 1034302 - RNA, 19 nt, Artificial Sequence
  Description of Artificial Sequence: Synthetic oligonucleotide
  Sense strand starting at position 1630 of SEQ ID NO: 914835
guggaagucgccgucagau

SEQ ID NO: 1034303 - RNA, 19 nt, Artificial Sequence
  Description of Artificial Sequence: Synthetic oligonucleotide
  Antisense strand to SEQ ID NO: 1034302
aucugacggcgacuuccac

SEQ ID NO: 1034304 - RNA, 19 nt, Artificial Sequence
  Description of Artificial Sequence: Synthetic oligonucleotide
  Sense strand starting at position 2113 of SEQ ID NO: 914835
gccugagcugucguuccua

SEQ ID NO: 1034305 - RNA, 19 nt, Artificial Sequence
  Description of Artificial Sequence: Synthetic oligonucleotide
  Antisense strand to SEQ ID NO: 1034304
uaggaacgacagcucaggc

SEQ ID NO: 1034306 - RNA, 19 nt, Artificial Sequence
  Description of Artificial Sequence: Synthetic oligonucleotide
  Sense strand starting at position 2122 of SEQ ID NO: 914835
gucguuccuacagacaagu

SEQ ID NO: 1034307 - RNA, 19 nt, Artificial Sequence
  Description of Artificial Sequence: Synthetic oligonucleotide
  Antisense strand to SEQ ID NO: 1034306
acuugucuguaggaacgac

SEQ ID NO: 1034308 - RNA, 19 nt, Artificial Sequence
  Description of Artificial Sequence: Synthetic oligonucleotide
  Sense strand starting at position 2131 of SEQ ID NO: 914835
acagacaagucuuucuguu

SEQ ID NO: 1034309 - RNA, 19 nt, Artificial Sequence
  Description of Artificial Sequence: Synthetic oligonucleotide
  Antisense strand to SEQ ID NO: 1034308
aacagaaagacuugucugu

SEQ ID NO: 1034310 - RNA, 19 nt, Artificial Sequence
  Description of Artificial Sequence: Synthetic oligonucleotide
  Sense strand starting at position 2272 of SEQ ID NO: 914835
uugcuaauggcugcgugau

SEQ ID NO: 1034311 - RNA, 19 nt, Artificial Sequence
  Description of Artificial Sequence: Synthetic oligonucleotide
  Antisense strand to SEQ ID NO: 1034310
aucacgcagccauuagcaa

SEQ ID NO: 1034312 - RNA, 19 nt, Artificial Sequence
  Description of Artificial Sequence: Synthetic oligonucleotide
  Sense strand starting at position 2280 of SEQ ID NO: 914835
ggcugcgugauugaaggaa

SEQ ID NO: 1034313 - RNA, 19 nt, Artificial Sequence
  Description of Artificial Sequence: Synthetic oligonucleotide
  Antisense strand to SEQ ID NO: 1034312
uuccuucaaucacgcagcc

SEQ ID NO: 1034314 - RNA, 19 nt, Artificial Sequence
  Description of Artificial Sequence: Synthetic oligonucleotide
  Sense strand starting at position 2284 of SEQ ID NO: 914835
gcgugauugaaggaaacuu

SEQ ID NO: 1034315 - RNA, 19 nt, Artificial Sequence
  Description of Artificial Sequence: Synthetic oligonucleotide
  Antisense strand to SEQ ID NO: 1034314
aaguuuccuucaaucacgc

SEQ ID NO: 1034316 - RNA, 19 nt, Artificial Sequence
  Description of Artificial Sequence: Synthetic oligonucleotide
  Sense strand starting at position 2308 of SEQ ID NO: 914835
aaagcaauuugagaugugu

SEQ ID NO: 1034317 - RNA, 19 nt, Artificial Sequence
  Description of Artificial Sequence: Synthetic oligonucleotide
  Antisense strand to SEQ ID NO: 1034316
acacaucucaaauugcuuu

SEQ ID NO: 1034318 - RNA, 19 nt, Artificial Sequence
  Description of Artificial Sequence: Synthetic oligonucleotide
  Sense strand starting at position 2317 of SEQ ID NO: 914835
ugagauguguuucugauag

SEQ ID NO: 1034319 - RNA, 19 nt, Artificial Sequence
  Description of Artificial Sequence: Synthetic oligonucleotide
  Antisense strand to SEQ ID NO: 1034318
cuaucagaaacacaucuca

SEQ ID NO: 1034320 - RNA, 19 nt, Artificial Sequence
  Description of Artificial Sequence: Synthetic oligonucleotide
  Sense strand starting at position 2324 of SEQ ID NO: 914835
uguuucugauagccacuaa

SEQ ID NO: 1034321 - RNA, 19 nt, Artificial Sequence
  Description of Artificial Sequence: Synthetic oligonucleotide
  Antisense strand to SEQ ID NO: 1034320
uuaguggcuaucagaaaca

SEQ ID NO: 1034322 - RNA, 19 nt, Artificial Sequence
  Description of Artificial Sequence: Synthetic oligonucleotide
  Sense strand starting at position 2704 of SEQ ID NO: 914835
aggcaauaacacggaagau

SEQ ID NO: 1034323 - RNA, 19 nt, Artificial Sequence
  Description of Artificial Sequence: Synthetic oligonucleotide
  Antisense strand to SEQ ID NO: 1034322
aucuuccguguuauugccu

SEQ ID NO: 1034324 - RNA, 19 nt, Artificial Sequence
  Description of Artificial Sequence: Synthetic oligonucleotide
  Sense strand starting at position 2725 of SEQ ID NO: 914835
aaugaacuuuaugugugaa

SEQ ID NO: 1034325 - RNA, 19 nt, Artificial Sequence
  Description of Artificial Sequence: Synthetic oligonucleotide
  Antisense strand to SEQ ID NO: 1034324
uucacacauaaaguucauu

SEQ ID NO: 1034326 - RNA, 19 nt, Artificial Sequence
  Description of Artificial Sequence: Synthetic oligonucleotide
  Sense strand starting at position 2727 of SEQ ID NO: 914835
ugaacuuuaugugugaaag

SEQ ID NO: 1034327 - RNA, 19 nt, Artificial Sequence
  Description of Artificial Sequence: Synthetic oligonucleotide
  Antisense strand to SEQ ID NO: 1034326
cuuucacacauaaaguuca

SEQ ID NO: 1034328 - RNA, 19 nt, Artificial Sequence
  Description of Artificial Sequence: Synthetic oligonucleotide
  Sense strand starting at position 2760 of SEQ ID NO: 914835
acguauuaguaauuaccaa

SEQ ID NO: 1034329 - RNA, 19 nt, Artificial Sequence
  Description of Artificial Sequence: Synthetic oligonucleotide
  Antisense strand to SEQ ID NO: 1034328
uugguaauuacuaauacgu

SEQ ID NO: 1034330 - RNA, 19 nt, Artificial Sequence
  Description of Artificial Sequence: Synthetic oligonucleotide
  Sense strand starting at position 2840 of SEQ ID NO: 914835
ccucuuaaugcagaguaaa

SEQ ID NO: 1034331 - RNA, 19 nt, Artificial Sequence
  Description of Artificial Sequence: Synthetic oligonucleotide
  Antisense strand to SEQ ID NO: 1034330
uuuacucugcauuaagagg

SEQ ID NO: 1034332 - RNA, 19 nt, Artificial Sequence
  Description of Artificial Sequence: Synthetic oligonucleotide
  Sense strand starting at position 3274 of SEQ ID NO: 914835
uaagaucgugccuaugagu

SEQ ID NO: 1034333 - RNA, 19 nt, Artificial Sequence
  Description of Artificial Sequence: Synthetic oligonucleotide
  Antisense strand to SEQ ID NO: 1034332
acucauaggcacgaucuua

SEQ ID NO: 1034334 - RNA, 19 nt, Artificial Sequence
  Description of Artificial Sequence: Synthetic oligonucleotide
  Sense strand starting at position 3550 of SEQ ID NO: 914835
aggacugguuaagcaaaua

SEQ ID NO: 1034335 - RNA, 19 nt, Artificial Sequence
  Description of Artificial Sequence: Synthetic oligonucleotide
  Antisense strand to SEQ ID NO: 1034334
uauuugcuuaaccaguccu

SEQ ID NO: 1034336 - RNA, 19 nt, Artificial Sequence
  Description of Artificial Sequence: Synthetic oligonucleotide
  Sense strand starting at position 3634 of SEQ ID NO: 914835
aggauauagcuuuguaaca

SEQ ID NO: 1034337 - RNA, 19 nt, Artificial Sequence
  Description of Artificial Sequence: Synthetic oligonucleotide
  Antisense strand to SEQ ID NO: 1034336
uguuacaaagcuauauccu

SEQ ID NO: 1034338 - RNA, 19 nt, Artificial Sequence
  Description of Artificial Sequence: Synthetic oligonucleotide
  Sense strand starting at position 3635 of SEQ ID NO: 914835
ggauauagcuuuguaacau

SEQ ID NO: 1034339 - RNA, 19 nt, Artificial Sequence
  Description of Artificial Sequence: Synthetic oligonucleotide
  Antisense strand to SEQ ID NO: 1034338
auguuacaaagcuauaucc

SEQ ID NO: 1034340 - RNA, 19 nt, Artificial Sequence
  Description of Artificial Sequence: Synthetic oligonucleotide
  Sense strand starting at position 3713 of SEQ ID NO: 914835
uggugagauuuggaguaau

SEQ ID NO: 1034341 - RNA, 19 nt, Artificial Sequence
  Description of Artificial Sequence: Synthetic oligonucleotide
  Antisense strand to SEQ ID NO: 1034340
auuacuccaaaucucacca

SEQ ID NO: 1034342 - RNA, 19 nt, Artificial Sequence
  Description of Artificial Sequence: Synthetic oligonucleotide
  Sense strand starting at position 3815 of SEQ ID NO: 914835
guuaaaugaucacuuauug

SEQ ID NO: 1034343 - RNA, 19 nt, Artificial Sequence
  Description of Artificial Sequence: Synthetic oligonucleotide
  Antisense strand to SEQ ID NO: 1034342
caauaagugaucauuuaac

SEQ ID NO: 1034344 - RNA, 19 nt, Artificial Sequence
  Description of Artificial Sequence: Synthetic oligonucleotide
  Sense strand starting at position 3869 of SEQ ID NO: 914835
acgaaagccuuucccugaa

SEQ ID NO: 1034345 - RNA, 19 nt, Artificial Sequence
  Description of Artificial Sequence: Synthetic oligonucleotide
  Antisense strand to SEQ ID NO: 1034344
uucagggaaaggcuuucgu

SEQ ID NO: 1034346 - RNA, 19 nt, Artificial Sequence
  Description of Artificial Sequence: Synthetic oligonucleotide
  Sense strand starting at position 3903 of SEQ ID NO: 914835
auguuacuaccuuguauau

SEQ ID NO: 1034347 - RNA, 19 nt, Artificial Sequence
  Description of Artificial Sequence: Synthetic oligonucleotide
  Antisense strand to SEQ ID NO: 1034346
auauacaagguaguaacau

SEQ ID NO: 1034348 - RNA, 19 nt, Artificial Sequence
  Description of Artificial Sequence: Synthetic oligonucleotide
  Sense strand starting at position 3935 of SEQ ID NO: 914835
ccuggaaguacuggaagua

SEQ ID NO: 1034349 - RNA, 19 nt, Artificial Sequence
  Description of Artificial Sequence: Synthetic oligonucleotide
  Antisense strand to SEQ ID NO: 1034348
uacuuccaguacuuccagg

SEQ ID NO: 1034350 - RNA, 19 nt, Artificial Sequence
  Description of Artificial Sequence: Synthetic oligonucleotide
  Sense strand starting at position 611 of SEQ ID NO: 914836
ccagcuuccuggcugugaa

SEQ ID NO: 1034351 - RNA, 19 nt, Artificial Sequence
  Description of Artificial Sequence: Synthetic oligonucleotide
  Antisense strand to SEQ ID NO: 1034350
uucacagccaggaagcugg

SEQ ID NO: 1034352 - RNA, 19 nt, Artificial Sequence
  Description of Artificial Sequence: Synthetic oligonucleotide
  Sense strand starting at position 855 of SEQ ID NO: 914836
ccgaguuaucccgcagcau

SEQ ID NO: 1034353 - RNA, 19 nt, Artificial Sequence
  Description of Artificial Sequence: Synthetic oligonucleotide
  Antisense strand to SEQ ID NO: 1034352
augcugcgggauaacucgg

SEQ ID NO: 1034354 - RNA, 19 nt, Artificial Sequence
  Description of Artificial Sequence: Synthetic oligonucleotide
  Sense strand starting at position 856 of SEQ ID NO: 914836
cgaguuaucccgcagcauc

SEQ ID NO: 1034355 - RNA, 19 nt, Artificial Sequence
  Description of Artificial Sequence: Synthetic oligonucleotide
  Antisense strand to SEQ ID NO: 1034354
gaugcugcgggauaacucg

SEQ ID NO: 1034356 - RNA, 19 nt, Artificial Sequence
  Description of Artificial Sequence: Synthetic oligonucleotide
  Sense strand starting at position 1393 of SEQ ID NO: 914836
gcggucagguguuauaaca

SEQ ID NO: 1034357 - RNA, 19 nt, Artificial Sequence
  Description of Artificial Sequence: Synthetic oligonucleotide
  Antisense strand to SEQ ID NO: 1034356
uguuauaacaccugaccgc

SEQ ID NO: 1034358 - RNA, 19 nt, Artificial Sequence
  Description of Artificial Sequence: Synthetic oligonucleotide
  Sense strand starting at position 1592 of SEQ ID NO: 914836
ugaagucacagguguugaa

SEQ ID NO: 1034359 - RNA, 19 nt, Artificial Sequence
  Description of Artificial Sequence: Synthetic oligonucleotide
  Antisense strand to SEQ ID NO: 1034358
uucaacaccugugacuuca

SEQ ID NO: 1034360 - RNA, 19 nt, Artificial Sequence
  Description of Artificial Sequence: Synthetic oligonucleotide
  Sense strand starting at position 2014 of SEQ ID NO: 914836
cgccgccuguucuuauuau

SEQ ID NO: 1034361 - RNA, 19 nt, Artificial Sequence
  Description of Artificial Sequence: Synthetic oligonucleotide
  Antisense strand to SEQ ID NO: 1034360
auaauaagaacaggcggcg

SEQ ID NO: 1034362 - RNA, 19 nt, Artificial Sequence
  Description of Artificial Sequence: Synthetic oligonucleotide
  Sense strand starting at position 2015 of SEQ ID NO: 914836
gccgccuguucuuauuauu

SEQ ID NO: 1034363 - RNA, 19 nt, Artificial Sequence
  Description of Artificial Sequence: Synthetic oligonucleotide
  Antisense strand to SEQ ID NO: 1034362
aauaauaagaacaggcggc

SEQ ID NO: 1034364 - RNA, 19 nt, Artificial Sequence
  Description of Artificial Sequence: Synthetic oligonucleotide
  Sense strand starting at position 2018 of SEQ ID NO: 914836
gccuguucuuauuauugga

SEQ ID NO: 1034365 - RNA, 19 nt, Artificial Sequence
  Description of Artificial Sequence: Synthetic oligonucleotide
  Antisense strand to SEQ ID NO: 1034364
uccaauaauaagaacaggc

SEQ ID NO: 1034366 - RNA, 19 nt, Artificial Sequence
  Description of Artificial Sequence: Synthetic oligonucleotide
  Sense strand starting at position 2023 of SEQ ID NO: 914836
uucuuauuauuggaugcga

SEQ ID NO: 1034367 - RNA, 19 nt, Artificial Sequence
  Description of Artificial Sequence: Synthetic oligonucleotide
  Antisense strand to SEQ ID NO: 1034366
ucgcauccaauaauaagaa

SEQ ID NO: 1034368 - RNA, 19 nt, Artificial Sequence
  Description of Artificial Sequence: Synthetic oligonucleotide
  Sense strand starting at position 2591 of SEQ ID NO: 914836
aggaauuaaugguguauuu

SEQ ID NO: 1034369 - RNA, 19 nt, Artificial Sequence
  Description of Artificial Sequence: Synthetic oligonucleotide
  Antisense strand to SEQ ID NO: 1034368
aaauacaccauuaauuccu

SEQ ID NO: 1034370 - RNA, 19 nt, Artificial Sequence
  Description of Artificial Sequence: Synthetic oligonucleotide
  Sense strand starting at position 2604 of SEQ ID NO: 914836
guauuuccauuagggaaag

SEQ ID NO: 1034371 - RNA, 19 nt, Artificial Sequence
  Description of Artificial Sequence: Synthetic oligonucleotide
  Antisense strand to SEQ ID NO: 1034370
cuuucccuaauggaaauac

SEQ ID NO: 1034372 - RNA, 19 nt, Artificial Sequence
  Description of Artificial Sequence: Synthetic oligonucleotide
  Sense strand starting at position 2645 of SEQ ID NO: 914836
ccuugaugguucugggcau

SEQ ID NO: 1034373 - RNA, 19 nt, Artificial Sequence
  Description of Artificial Sequence: Synthetic oligonucleotide
  Antisense strand to SEQ ID NO: 1034372
augcccagaaccaucaagg

SEQ ID NO: 1034374 - RNA, 19 nt, Artificial Sequence
  Description of Artificial Sequence: Synthetic oligonucleotide
  Sense strand starting at position 2982 of SEQ ID NO: 914836
gccugagaucuccggugca

SEQ ID NO: 1034375 - RNA, 19 nt, Artificial Sequence
  Description of Artificial Sequence: Synthetic oligonucleotide
  Antisense strand to SEQ ID NO: 1034374
ugcaccggagaucucaggc

SEQ ID NO: 1034376 - RNA, 19 nt, Artificial Sequence
  Description of Artificial Sequence: Synthetic oligonucleotide
  Sense strand starting at position 3044 of SEQ ID NO: 914836
agaggaacuucccagacua

SEQ ID NO: 1034377 - RNA, 19 nt, Artificial Sequence
  Description of Artificial Sequence: Synthetic oligonucleotide
  Antisense strand to SEQ ID NO: 1034376
uagucugggaaguuccucu

SEQ ID NO: 1034378 - RNA, 19 nt, Artificial Sequence
  Description of Artificial Sequence: Synthetic oligonucleotide
  Sense strand starting at position 3259 of SEQ ID NO: 914836
ucgggagccuugcuuuauu

SEQ ID NO: 1034379 - RNA, 19 nt, Artificial Sequence
  Description of Artificial Sequence: Synthetic oligonucleotide
  Antisense strand to SEQ ID NO: 1034378
aauaaagcaaggcucccga

SEQ ID NO: 1034380 - RNA, 19 nt, Artificial Sequence
  Description of Artificial Sequence: Synthetic oligonucleotide
  Sense strand starting at position 3345 of SEQ ID NO: 914836
gggccacuuagauguagga

SEQ ID NO: 1034381 - RNA, 19 nt, Artificial Sequence
  Description of Artificial Sequence: Synthetic oligonucleotide
  Antisense strand to SEQ ID NO: 1034380
uccuacaucuaaguggccc

SEQ ID NO: 1034382 - RNA, 19 nt, Artificial Sequence
  Description of Artificial Sequence: Synthetic oligonucleotide
  Sense strand starting at position 3347 of SEQ ID NO: 914836
gccacuuagauguaggagu

SEQ ID NO: 1034383 - RNA, 19 nt, Artificial Sequence
  Description of Artificial Sequence: Synthetic oligonucleotide
  Antisense strand to SEQ ID NO: 1034382
acuccuacaucuaaguggc

SEQ ID NO: 1034384 - RNA, 19 nt, Artificial Sequence
  Description of Artificial Sequence: Synthetic oligonucleotide
  Sense strand starting at position 3349 of SEQ ID NO: 914836
cacuuagauguaggaguca

SEQ ID NO: 1034385 - RNA, 19 nt, Artificial Sequence
  Description of Artificial Sequence: Synthetic oligonucleotide
  Antisense strand to SEQ ID NO: 1034384
ugacuccuacaucuaagug

SEQ ID NO: 1034386 - RNA, 19 nt, Artificial Sequence
  Description of Artificial Sequence: Synthetic oligonucleotide
  Sense strand starting at position 3495 of SEQ ID NO: 914836
ucccgauguccucgccaaa

SEQ ID NO: 1034387 - RNA, 19 nt, Artificial Sequence
  Description of Artificial Sequence: Synthetic oligonucleotide
  Antisense strand to SEQ ID NO: 1034386
uuuggcgaggacaucggga

SEQ ID NO: 1034388 - RNA, 19 nt, Artificial Sequence
  Description of Artificial Sequence: Synthetic oligonucleotide
  Sense strand starting at position 3498 of SEQ ID NO: 914836
cgauguccucgccaaacca

SEQ ID NO: 1034389 - RNA, 19 nt, Artificial Sequence
  Description of Artificial Sequence: Synthetic oligonucleotide
  Antisense strand to SEQ ID NO: 1034388
ugguuuggcgaggacaucg

SEQ ID NO: 1034390 - RNA, 19 nt, Artificial Sequence
  Description of Artificial Sequence: Synthetic oligonucleotide
  Sense strand starting at position 3720 of SEQ ID NO: 914836
ccuuguggucagggaggaa

SEQ ID NO: 1034391 - RNA, 19 nt, Artificial Sequence
  Description of Artificial Sequence: Synthetic oligonucleotide
  Antisense strand to SEQ ID NO: 1034390
uuccucccugaccacaagg

SEQ ID NO: 1034392 - RNA, 19 nt, Artificial Sequence
  Description of Artificial Sequence: Synthetic oligonucleotide
  Sense strand starting at position 882 of SEQ ID NO: 914837
ccagcuuccuggcugugaa

SEQ ID NO: 1034393 - RNA, 19 nt, Artificial Sequence
  Description of Artificial Sequence: Synthetic oligonucleotide
  Antisense strand to SEQ ID NO: 1034392
uucacagccaggaagcugg

SEQ ID NO: 1034394 - RNA, 19 nt, Artificial Sequence
  Description of Artificial Sequence: Synthetic oligonucleotide
  Sense strand starting at position 1126 of SEQ ID NO: 914837
ccgaguuaucccgcagcau

SEQ ID NO: 1034395 - RNA, 19 nt, Artificial Sequence
  Description of Artificial Sequence: Synthetic oligonucleotide
  Antisense strand to SEQ ID NO: 1034394
augcugcgggauaacucgg

SEQ ID NO: 1034396 - RNA, 19 nt, Artificial Sequence
  Description of Artificial Sequence: Synthetic oligonucleotide
  Sense strand starting at position 1127 of SEQ ID NO: 914837
cgaguuaucccgcagcauc

SEQ ID NO: 1034397 - RNA, 19 nt, Artificial Sequence
  Description of Artificial Sequence: Synthetic oligonucleotide
  Antisense strand to SEQ ID NO: 1034396
gaugcugcgggauaacucg

SEQ ID NO: 1034398 - RNA, 19 nt, Artificial Sequence
  Description of Artificial Sequence: Synthetic oligonucleotide
  Sense strand starting at position 1664 of SEQ ID NO: 914837
gcggucagguguuauaaca

SEQ ID NO: 1034399 - RNA, 19 nt, Artificial Sequence
  Description of Artificial Sequence: Synthetic oligonucleotide
  Antisense strand to SEQ ID NO: 1034398
uguuauaacaccugaccgc

SEQ ID NO: 1034400 - RNA, 19 nt, Artificial Sequence
  Description of Artificial Sequence: Synthetic oligonucleotide
  Sense strand starting at position 1863 of SEQ ID NO: 914837
ugaagucacagguguugaa

SEQ ID NO: 1034401 - RNA, 19 nt, Artificial Sequence
  Description of Artificial Sequence: Synthetic oligonucleotide
  Antisense strand to SEQ ID NO: 1034400
uucaacaccugugacuuca

SEQ ID NO: 1034402 - RNA, 19 nt, Artificial Sequence
  Description of Artificial Sequence: Synthetic oligonucleotide
  Sense strand starting at position 2285 of SEQ ID NO: 914837
cgccgccuguucuuauuau

SEQ ID NO: 1034403 - RNA, 19 nt, Artificial Sequence
  Description of Artificial Sequence: Synthetic oligonucleotide
  Antisense strand to SEQ ID NO: 1034402
auaauaagaacaggcggcg

SEQ ID NO: 1034404 - RNA, 19 nt, Artificial Sequence
  Description of Artificial Sequence: Synthetic oligonucleotide
  Sense strand starting at position 2286 of SEQ ID NO: 914837
gccgccuguucuuauuauu

SEQ ID NO: 1034405 - RNA, 19 nt, Artificial Sequence
  Description of Artificial Sequence: Synthetic oligonucleotide
  Antisense strand to SEQ ID NO: 1034404
aauaauaagaacaggcggc

SEQ ID NO: 1034406 - RNA, 19 nt, Artificial Sequence
  Description of Artificial Sequence: Synthetic oligonucleotide
  Sense strand starting at position 2289 of SEQ ID NO: 914837
gccuguucuuauuauugga

SEQ ID NO: 1034407 - RNA, 19 nt, Artificial Sequence
  Description of Artificial Sequence: Synthetic oligonucleotide
  Antisense strand to SEQ ID NO: 1034406
uccaauaauaagaacaggc

SEQ ID NO: 1034408 - RNA, 19 nt, Artificial Sequence
  Description of Artificial Sequence: Synthetic oligonucleotide
  Sense strand starting at position 2294 of SEQ ID NO: 914837
uucuuauuauuggaugcga

SEQ ID NO: 1034409 - RNA, 19 nt, Artificial Sequence
  Description of Artificial Sequence: Synthetic oligonucleotide
  Antisense strand to SEQ ID NO: 1034408
ucgcauccaauaauaagaa

SEQ ID NO: 1034410 - RNA, 19 nt, Artificial Sequence
  Description of Artificial Sequence: Synthetic oligonucleotide
  Sense strand starting at position 2862 of SEQ ID NO: 914837
aggaauuaaugguguauuu

SEQ ID NO: 1034411 - RNA, 19 nt, Artificial Sequence
  Description of Artificial Sequence: Synthetic oligonucleotide
  Antisense strand to SEQ ID NO: 1034410
aaauacaccauuaauuccu

SEQ ID NO: 1034412 - RNA, 19 nt, Artificial Sequence
  Description of Artificial Sequence: Synthetic oligonucleotide
  Sense strand starting at position 2875 of SEQ ID NO: 914837
guauuuccauuagggaaag

SEQ ID NO: 1034413 - RNA, 19 nt, Artificial Sequence
  Description of Artificial Sequence: Synthetic oligonucleotide
  Antisense strand to SEQ ID NO: 1034412
cuuucccuaauggaaauac

SEQ ID NO: 1034414 - RNA, 19 nt, Artificial Sequence
  Description of Artificial Sequence: Synthetic oligonucleotide
  Sense strand starting at position 2916 of SEQ ID NO: 914837
ccuugaugguucugggcau

SEQ ID NO: 1034415 - RNA, 19 nt, Artificial Sequence
  Description of Artificial Sequence: Synthetic oligonucleotide
  Antisense strand to SEQ ID NO: 1034414
augcccagaaccaucaagg

SEQ ID NO: 1034416 - RNA, 19 nt, Artificial Sequence
  Description of Artificial Sequence: Synthetic oligonucleotide
  Sense strand starting at position 3253 of SEQ ID NO: 914837
gccugagaucuccggugca

SEQ ID NO: 1034417 - RNA, 19 nt, Artificial Sequence
  Description of Artificial Sequence: Synthetic oligonucleotide
  Antisense strand to SEQ ID NO: 1034416
ugcaccggagaucucaggc

SEQ ID NO: 1034418 - RNA, 19 nt, Artificial Sequence
  Description of Artificial Sequence: Synthetic oligonucleotide
  Sense strand starting at position 3315 of SEQ ID NO: 914837
agaggaacuucccagacua

SEQ ID NO: 1034419 - RNA, 19 nt, Artificial Sequence
  Description of Artificial Sequence: Synthetic oligonucleotide
  Antisense strand to SEQ ID NO: 1034418
uagucugggaaguuccucu

SEQ ID NO: 1034420 - RNA, 19 nt, Artificial Sequence
  Description of Artificial Sequence: Synthetic oligonucleotide
  Sense strand starting at position 3530 of SEQ ID NO: 914837
ucgggagccuugcuuuauu

SEQ ID NO: 1034421 - RNA, 19 nt, Artificial Sequence
  Description of Artificial Sequence: Synthetic oligonucleotide
  Antisense strand to SEQ ID NO: 1034420
aauaaagcaaggcucccga

SEQ ID NO: 1034422 - RNA, 19 nt, Artificial Sequence
  Description of Artificial Sequence: Synthetic oligonucleotide
  Sense strand starting at position 3616 of SEQ ID NO: 914837
gggccacuuagauguagga

SEQ ID NO: 1034423 - RNA, 19 nt, Artificial Sequence
  Description of Artificial Sequence: Synthetic oligonucleotide
  Antisense strand to SEQ ID NO: 1034422
uccuacaucuaaguggccc

SEQ ID NO: 1034424 - RNA, 19 nt, Artificial Sequence
  Description of Artificial Sequence: Synthetic oligonucleotide
  Sense strand starting at position 3618 of SEQ ID NO: 914837
gccacuuagauguaggagu

SEQ ID NO: 1034425 - RNA, 19 nt, Artificial Sequence
  Description of Artificial Sequence: Synthetic oligonucleotide
  Antisense strand to SEQ ID NO: 1034424
acuccuacaucuaaguggc

SEQ ID NO: 1034426 - RNA, 19 nt, Artificial Sequence
  Description of Artificial Sequence: Synthetic oligonucleotide
  Sense strand starting at position 3620 of SEQ ID NO: 914837
cacuuagauguaggaguca

SEQ ID NO: 1034427 - RNA, 19 nt, Artificial Sequence
  Description of Artificial Sequence: Synthetic oligonucleotide
  Antisense strand to SEQ ID NO: 1034426
ugacuccuacaucuaagug

SEQ ID NO: 1034428 - RNA, 19 nt, Artificial Sequence
  Description of Artificial Sequence: Synthetic oligonucleotide
  Sense strand starting at position 3766 of SEQ ID NO: 914837
ucccgauguccucgccaaa

SEQ ID NO: 1034429 - RNA, 19 nt, Artificial Sequence
  Description of Artificial Sequence: Synthetic oligonucleotide
  Antisense strand to SEQ ID NO: 1034428
uuuggcgaggacaucggga

SEQ ID NO: 1034430 - RNA, 19 nt, Artificial Sequence
  Description of Artificial Sequence: Synthetic oligonucleotide
  Sense strand starting at position 3769 of SEQ ID NO: 914837
cgauguccucgccaaacca

SEQ ID NO: 1034431 - RNA, 19 nt, Artificial Sequence
  Description of Artificial Sequence: Synthetic oligonucleotide
  Antisense strand to SEQ ID NO: 1034430
ugguuuggcgaggacaucg

SEQ ID NO: 1034432 - RNA, 19 nt, Artificial Sequence
  Description of Artificial Sequence: Synthetic oligonucleotide
  Sense strand starting at position 479 of SEQ ID NO: 914838
ugcagucauagccagagau

SEQ ID NO: 1034433 - RNA, 19 nt, Artificial Sequence
  Description of Artificial Sequence: Synthetic oligonucleotide
  Antisense strand to SEQ ID NO: 1034432
aucucuggcuaugacugca

SEQ ID NO: 1034434 - RNA, 19 nt, Artificial Sequence
  Description of Artificial Sequence: Synthetic oligonucleotide
  Sense strand starting at position 481 of SEQ ID NO: 914838
cagucauagccagagauua

SEQ ID NO: 1034435 - RNA, 19 nt, Artificial Sequence
  Description of Artificial Sequence: Synthetic oligonucleotide
  Antisense strand to SEQ ID NO: 1034434
uaaucucuggcuaugacug

SEQ ID NO: 1034436 - RNA, 19 nt, Artificial Sequence
  Description of Artificial Sequence: Synthetic oligonucleotide
  Sense strand starting at position 578 of SEQ ID NO: 914838
ccauaaagccucuaagugu

SEQ ID NO: 1034437 - RNA, 19 nt, Artificial Sequence
  Description of Artificial Sequence: Synthetic oligonucleotide
  Antisense strand to SEQ ID NO: 1034436
acacuuagaggcuuuaugg

SEQ ID NO: 1034438 - RNA, 19 nt, Artificial Sequence
  Description of Artificial Sequence: Synthetic oligonucleotide
  Sense strand starting at position 614 of SEQ ID NO: 914838
caaugaggcuaagagauuu

SEQ ID NO: 1034439 - RNA, 19 nt, Artificial Sequence
  Description of Artificial Sequence: Synthetic oligonucleotide
  Antisense strand to SEQ ID NO: 1034438
aaaucucuuagccucauug

SEQ ID NO: 1034440 - RNA, 19 nt, Artificial Sequence
  Description of Artificial Sequence: Synthetic oligonucleotide
  Sense strand starting at position 790 of SEQ ID NO: 914838
ugcucuuguccauagggaa

SEQ ID NO: 1034441 - RNA, 19 nt, Artificial Sequence
  Description of Artificial Sequence: Synthetic oligonucleotide
  Antisense strand to SEQ ID NO: 1034440
uucccuauggacaagagca

SEQ ID NO: 1034442 - RNA, 19 nt, Artificial Sequence
  Description of Artificial Sequence: Synthetic oligonucleotide
  Sense strand starting at position 839 of SEQ ID NO: 914838
gcggcaucagcauaagauc

SEQ ID NO: 1034443 - RNA, 19 nt, Artificial Sequence
  Description of Artificial Sequence: Synthetic oligonucleotide
  Antisense strand to SEQ ID NO: 1034442
gaucuuaugcugaugccgc

SEQ ID NO: 1034444 - RNA, 19 nt, Artificial Sequence
  Description of Artificial Sequence: Synthetic oligonucleotide
  Sense strand starting at position 846 of SEQ ID NO: 914838
cagcauaagaucgggugaa

SEQ ID NO: 1034445 - RNA, 19 nt, Artificial Sequence
  Description of Artificial Sequence: Synthetic oligonucleotide
  Antisense strand to SEQ ID NO: 1034444
uucacccgaucuuaugcug

SEQ ID NO: 1034446 - RNA, 19 nt, Artificial Sequence
  Description of Artificial Sequence: Synthetic oligonucleotide
  Sense strand starting at position 850 of SEQ ID NO: 914838
auaagaucgggugaaagcu

SEQ ID NO: 1034447 - RNA, 19 nt, Artificial Sequence
  Description of Artificial Sequence: Synthetic oligonucleotide
  Antisense strand to SEQ ID NO: 1034446
agcuuucacccgaucuuau

SEQ ID NO: 1034448 - RNA, 19 nt, Artificial Sequence
  Description of Artificial Sequence: Synthetic oligonucleotide
  Sense strand starting at position 1173 of SEQ ID NO: 914838
ucggcaagugucuagggaa

SEQ ID NO: 1034449 - RNA, 19 nt, Artificial Sequence
  Description of Artificial Sequence: Synthetic oligonucleotide
  Antisense strand to SEQ ID NO: 1034448
uucccuagacacuugccga

SEQ ID NO: 1034450 - RNA, 19 nt, Artificial Sequence
  Description of Artificial Sequence: Synthetic oligonucleotide
  Sense strand starting at position 1235 of SEQ ID NO: 914838
gugggaugccuuuagcuag

SEQ ID NO: 1034451 - RNA, 19 nt, Artificial Sequence
  Description of Artificial Sequence: Synthetic oligonucleotide
  Antisense strand to SEQ ID NO: 1034450
cuagcuaaaggcaucccac

SEQ ID NO: 1034452 - RNA, 19 nt, Artificial Sequence
  Description of Artificial Sequence: Synthetic oligonucleotide
  Sense strand starting at position 1341 of SEQ ID NO: 914838
cugcuacaguccucuagaa

SEQ ID NO: 1034453 - RNA, 19 nt, Artificial Sequence
  Description of Artificial Sequence: Synthetic oligonucleotide
  Antisense strand to SEQ ID NO: 1034452
uucuagaggacuguagcag

SEQ ID NO: 1034454 - RNA, 19 nt, Artificial Sequence
  Description of Artificial Sequence: Synthetic oligonucleotide
  Sense strand starting at position 1343 of SEQ ID NO: 914838
gcuacaguccucuagaaac

SEQ ID NO: 1034455 - RNA, 19 nt, Artificial Sequence
  Description of Artificial Sequence: Synthetic oligonucleotide
  Antisense strand to SEQ ID NO: 1034454
guuucuagaggacuguagc

SEQ ID NO: 1034456 - RNA, 19 nt, Artificial Sequence
  Description of Artificial Sequence: Synthetic oligonucleotide
  Sense strand starting at position 1482 of SEQ ID NO: 914838
gccaaaugccagcuguguu

SEQ ID NO: 1034457 - RNA, 19 nt, Artificial Sequence
  Description of Artificial Sequence: Synthetic oligonucleotide
  Antisense strand to SEQ ID NO: 1034456
aacacagcuggcauuuggc

SEQ ID NO: 1034458 - RNA, 19 nt, Artificial Sequence
  Description of Artificial Sequence: Synthetic oligonucleotide
  Sense strand starting at position 1546 of SEQ ID NO: 914838
ggucacauaagucauaugu

SEQ ID NO: 1034459 - RNA, 19 nt, Artificial Sequence
  Description of Artificial Sequence: Synthetic oligonucleotide
  Antisense strand to SEQ ID NO: 1034458
acauaugacuuaugugacc

SEQ ID NO: 1034460 - RNA, 19 nt, Artificial Sequence
  Description of Artificial Sequence: Synthetic oligonucleotide
  Sense strand starting at position 1659 of SEQ ID NO: 914838
gcuagagcagcucagaaau

SEQ ID NO: 1034461 - RNA, 19 nt, Artificial Sequence
  Description of Artificial Sequence: Synthetic oligonucleotide
  Antisense strand to SEQ ID NO: 1034460
auuucugagcugcucuagc

SEQ ID NO: 1034462 - RNA, 19 nt, Artificial Sequence
  Description of Artificial Sequence: Synthetic oligonucleotide
  Sense strand starting at position 1695 of SEQ ID NO: 914838
uggcucuuauggucucaaa

SEQ ID NO: 1034463 - RNA, 19 nt, Artificial Sequence
  Description of Artificial Sequence: Synthetic oligonucleotide
  Antisense strand to SEQ ID NO: 1034462
uuugagaccauaagagcca

SEQ ID NO: 1034464 - RNA, 19 nt, Artificial Sequence
  Description of Artificial Sequence: Synthetic oligonucleotide
  Sense strand starting at position 1768 of SEQ ID NO: 914838
ccaaaugaucaggguugau

SEQ ID NO: 1034465 - RNA, 19 nt, Artificial Sequence
  Description of Artificial Sequence: Synthetic oligonucleotide
  Antisense strand to SEQ ID NO: 1034464
aucaacccugaucauuugg

SEQ ID NO: 1034466 - RNA, 19 nt, Artificial Sequence
  Description of Artificial Sequence: Synthetic oligonucleotide
  Sense strand starting at position 1856 of SEQ ID NO: 914838
cucuguaccuccucauaga

SEQ ID NO: 1034467 - RNA, 19 nt, Artificial Sequence
  Description of Artificial Sequence: Synthetic oligonucleotide
  Antisense strand to SEQ ID NO: 1034466
ucuaugaggagguacagag

SEQ ID NO: 1034468 - RNA, 19 nt, Artificial Sequence
  Description of Artificial Sequence: Synthetic oligonucleotide
  Sense strand starting at position 2356 of SEQ ID NO: 914838
gugguaaugagagguagug

SEQ ID NO: 1034469 - RNA, 19 nt, Artificial Sequence
  Description of Artificial Sequence: Synthetic oligonucleotide
  Antisense strand to SEQ ID NO: 1034468
cacuaccucucauuaccac

SEQ ID NO: 1034470 - RNA, 19 nt, Artificial Sequence
  Description of Artificial Sequence: Synthetic oligonucleotide
  Sense strand starting at position 2515 of SEQ ID NO: 914838
uggacccaucauggugaaa

SEQ ID NO: 1034471 - RNA, 19 nt, Artificial Sequence
  Description of Artificial Sequence: Synthetic oligonucleotide
  Antisense strand to SEQ ID NO: 1034470
uuucaccaugaugggucca

SEQ ID NO: 1034472 - RNA, 19 nt, Artificial Sequence
  Description of Artificial Sequence: Synthetic oligonucleotide
  Sense strand starting at position 2546 of SEQ ID NO: 914838
agccuacccuggucuaaga

SEQ ID NO: 1034473 - RNA, 19 nt, Artificial Sequence
  Description of Artificial Sequence: Synthetic oligonucleotide
  Antisense strand to SEQ ID NO: 1034472
ucuuagaccaggguaggcu

SEQ ID NO: 1034474 - RNA, 19 nt, Artificial Sequence
  Description of Artificial Sequence: Synthetic oligonucleotide
  Sense strand starting at position 2557 of SEQ ID NO: 914838
gucuaagagccucaaacau

SEQ ID NO: 1034475 - RNA, 19 nt, Artificial Sequence
  Description of Artificial Sequence: Synthetic oligonucleotide
  Antisense strand to SEQ ID NO: 1034474
auguuugaggcucuuagac

SEQ ID NO: 1034476 - RNA, 19 nt, Artificial Sequence
  Description of Artificial Sequence: Synthetic oligonucleotide
  Sense strand starting at position 2669 of SEQ ID NO: 914838
agccauggccuugaauauu

SEQ ID NO: 1034477 - RNA, 19 nt, Artificial Sequence
  Description of Artificial Sequence: Synthetic oligonucleotide
  Antisense strand to SEQ ID NO: 1034476
aauauucaaggccauggcu

SEQ ID NO: 1034478 - RNA, 19 nt, Artificial Sequence
  Description of Artificial Sequence: Synthetic oligonucleotide
  Sense strand starting at position 2693 of SEQ ID NO: 914838
agaaucagaucuguuaggu

SEQ ID NO: 1034479 - RNA, 19 nt, Artificial Sequence
  Description of Artificial Sequence: Synthetic oligonucleotide
  Antisense strand to SEQ ID NO: 1034478
accuaacagaucugauucu

SEQ ID NO: 1034480 - RNA, 19 nt, Artificial Sequence
  Description of Artificial Sequence: Synthetic oligonucleotide
  Sense strand starting at position 2941 of SEQ ID NO: 914838
guggguuccgaggaaguuu

SEQ ID NO: 1034481 - RNA, 19 nt, Artificial Sequence
  Description of Artificial Sequence: Synthetic oligonucleotide
  Antisense strand to SEQ ID NO: 1034480
aaacuuccucggaacccac

SEQ ID NO: 1034482 - RNA, 19 nt, Artificial Sequence
  Description of Artificial Sequence: Synthetic oligonucleotide
  Sense strand starting at position 2950 of SEQ ID NO: 914838
gaggaaguuugcuuccuca

SEQ ID NO: 1034483 - RNA, 19 nt, Artificial Sequence
  Description of Artificial Sequence: Synthetic oligonucleotide
  Antisense strand to SEQ ID NO: 1034482
ugaggaagcaaacuuccuc

SEQ ID NO: 1034484 - RNA, 19 nt, Artificial Sequence
  Description of Artificial Sequence: Synthetic oligonucleotide
  Sense strand starting at position 2953 of SEQ ID NO: 914838
gaaguuugcuuccucagag

SEQ ID NO: 1034485 - RNA, 19 nt, Artificial Sequence
  Description of Artificial Sequence: Synthetic oligonucleotide
  Antisense strand to SEQ ID NO: 1034484
cucugaggaagcaaacuuc

SEQ ID NO: 1034486 - RNA, 19 nt, Artificial Sequence
  Description of Artificial Sequence: Synthetic oligonucleotide
  Sense strand starting at position 2954 of SEQ ID NO: 914838
aaguuugcuuccucagaga

SEQ ID NO: 1034487 - RNA, 19 nt, Artificial Sequence
  Description of Artificial Sequence: Synthetic oligonucleotide
  Antisense strand to SEQ ID NO: 1034486
ucucugaggaagcaaacuu

SEQ ID NO: 1034488 - RNA, 19 nt, Artificial Sequence
  Description of Artificial Sequence: Synthetic oligonucleotide
  Sense strand starting at position 3072 of SEQ ID NO: 914838
acucaaauucucugucagu

SEQ ID NO: 1034489 - RNA, 19 nt, Artificial Sequence
  Description of Artificial Sequence: Synthetic oligonucleotide
  Antisense strand to SEQ ID NO: 1034488
acugacagagaauuugagu

SEQ ID NO: 1034490 - RNA, 19 nt, Artificial Sequence
  Description of Artificial Sequence: Synthetic oligonucleotide
  Sense strand starting at position 3073 of SEQ ID NO: 914838
cucaaauucucugucaguu

SEQ ID NO: 1034491 - RNA, 19 nt, Artificial Sequence
  Description of Artificial Sequence: Synthetic oligonucleotide
  Antisense strand to SEQ ID NO: 1034490
aacugacagagaauuugag

SEQ ID NO: 1034492 - RNA, 19 nt, Artificial Sequence
  Description of Artificial Sequence: Synthetic oligonucleotide
  Sense strand starting at position 3236 of SEQ ID NO: 914838
uccuauguucuguuccgua

SEQ ID NO: 1034493 - RNA, 19 nt, Artificial Sequence
  Description of Artificial Sequence: Synthetic oligonucleotide
  Antisense strand to SEQ ID NO: 1034492
uacggaacagaacauagga

SEQ ID NO: 1034494 - RNA, 19 nt, Artificial Sequence
  Description of Artificial Sequence: Synthetic oligonucleotide
  Sense strand starting at position 3512 of SEQ ID NO: 914838
ugaaauauucuacaagugu

SEQ ID NO: 1034495 - RNA, 19 nt, Artificial Sequence
  Description of Artificial Sequence: Synthetic oligonucleotide
  Antisense strand to SEQ ID NO: 1034494
acacuuguagaauauuuca

SEQ ID NO: 1034496 - RNA, 19 nt, Artificial Sequence
  Description of Artificial Sequence: Synthetic oligonucleotide
  Sense strand starting at position 3525 of SEQ ID NO: 914838
aaguguucucagcagugau

SEQ ID NO: 1034497 - RNA, 19 nt, Artificial Sequence
  Description of Artificial Sequence: Synthetic oligonucleotide
  Antisense strand to SEQ ID NO: 1034496
aucacugcugagaacacuu

SEQ ID NO: 1034498 - RNA, 19 nt, Artificial Sequence
  Description of Artificial Sequence: Synthetic oligonucleotide
  Sense strand starting at position 3540 of SEQ ID NO: 914838
ugaucauauuugcaagacu

SEQ ID NO: 1034499 - RNA, 19 nt, Artificial Sequence
  Description of Artificial Sequence: Synthetic oligonucleotide
  Antisense strand to SEQ ID NO: 1034498
agucuugcaaauaugauca

SEQ ID NO: 1034500 - RNA, 19 nt, Artificial Sequence
  Description of Artificial Sequence: Synthetic oligonucleotide
  Sense strand starting at position 3580 of SEQ ID NO: 914838
auuggaaacuuggauagga

SEQ ID NO: 1034501 - RNA, 19 nt, Artificial Sequence
  Description of Artificial Sequence: Synthetic oligonucleotide
  Antisense strand to SEQ ID NO: 1034500
uccuauccaaguuuccaau

SEQ ID NO: 1034502 - RNA, 19 nt, Artificial Sequence
  Description of Artificial Sequence: Synthetic oligonucleotide
  Sense strand starting at position 3639 of SEQ ID NO: 914838
ggagcauauuucuuuguuu

SEQ ID NO: 1034503 - RNA, 19 nt, Artificial Sequence
  Description of Artificial Sequence: Synthetic oligonucleotide
  Antisense strand to SEQ ID NO: 1034502
aaacaaagaaauaugcucc

SEQ ID NO: 1034504 - RNA, 19 nt, Artificial Sequence
  Description of Artificial Sequence: Synthetic oligonucleotide
  Sense strand starting at position 3697 of SEQ ID NO: 914838
agcugaaaucacugaaguu

SEQ ID NO: 1034505 - RNA, 19 nt, Artificial Sequence
  Description of Artificial Sequence: Synthetic oligonucleotide
  Antisense strand to SEQ ID NO: 1034504
aacuucagugauuucagcu

SEQ ID NO: 1034506 - RNA, 19 nt, Artificial Sequence
  Description of Artificial Sequence: Synthetic oligonucleotide
  Sense strand starting at position 3796 of SEQ ID NO: 914838
acaacugauguguaaagca

SEQ ID NO: 1034507 - RNA, 19 nt, Artificial Sequence
  Description of Artificial Sequence: Synthetic oligonucleotide
  Antisense strand to SEQ ID NO: 1034506
ugcuuuacacaucaguugu

SEQ ID NO: 1034508 - RNA, 19 nt, Artificial Sequence
  Description of Artificial Sequence: Synthetic oligonucleotide
  Sense strand starting at position 3803 of SEQ ID NO: 914838
auguguaaagcauauacua

SEQ ID NO: 1034509 - RNA, 19 nt, Artificial Sequence
  Description of Artificial Sequence: Synthetic oligonucleotide
  Antisense strand to SEQ ID NO: 1034508
uaguauaugcuuuacacau

SEQ ID NO: 1034510 - RNA, 19 nt, Artificial Sequence
  Description of Artificial Sequence: Synthetic oligonucleotide
  Sense strand starting at position 3864 of SEQ ID NO: 914838
acugaaugcugagcacaaa

SEQ ID NO: 1034511 - RNA, 19 nt, Artificial Sequence
  Description of Artificial Sequence: Synthetic oligonucleotide
  Antisense strand to SEQ ID NO: 1034510
uuugugcucagcauucagu

SEQ ID NO: 1034512 - RNA, 19 nt, Artificial Sequence
  Description of Artificial Sequence: Synthetic oligonucleotide
  Sense strand starting at position 120 of SEQ ID NO: 914839
agugaagcucuuugcauuu

SEQ ID NO: 1034513 - RNA, 19 nt, Artificial Sequence
  Description of Artificial Sequence: Synthetic oligonucleotide
  Antisense strand to SEQ ID NO: 1034512
aaaugcaaagagcuucacu

SEQ ID NO: 1034514 - RNA, 19 nt, Artificial Sequence
  Description of Artificial Sequence: Synthetic oligonucleotide
  Sense strand starting at position 396 of SEQ ID NO: 914839
guauacagacuuugccuua

SEQ ID NO: 1034515 - RNA, 19 nt, Artificial Sequence
  Description of Artificial Sequence: Synthetic oligonucleotide
  Antisense strand to SEQ ID NO: 1034514
uaaggcaaagucuguauac

SEQ ID NO: 1034516 - RNA, 19 nt, Artificial Sequence
  Description of Artificial Sequence: Synthetic oligonucleotide
  Sense strand starting at position 417 of SEQ ID NO: 914839
guacauaaucuauacgcua

SEQ ID NO: 1034517 - RNA, 19 nt, Artificial Sequence
  Description of Artificial Sequence: Synthetic oligonucleotide
  Antisense strand to SEQ ID NO: 1034516
uagcguauagauuauguac

SEQ ID NO: 1034518 - RNA, 19 nt, Artificial Sequence
  Description of Artificial Sequence: Synthetic oligonucleotide
  Sense strand starting at position 463 of SEQ ID NO: 914839
cgagcaucccauuagcaua

SEQ ID NO: 1034519 - RNA, 19 nt, Artificial Sequence
  Description of Artificial Sequence: Synthetic oligonucleotide
  Antisense strand to SEQ ID NO: 1034518
uaugcuaaugggaugcucg

SEQ ID NO: 1034520 - RNA, 19 nt, Artificial Sequence
  Description of Artificial Sequence: Synthetic oligonucleotide
  Sense strand starting at position 580 of SEQ ID NO: 914839
augggaugacaguggcaau

SEQ ID NO: 1034521 - RNA, 19 nt, Artificial Sequence
  Description of Artificial Sequence: Synthetic oligonucleotide
  Antisense strand to SEQ ID NO: 1034520
auugccacugucaucccau

SEQ ID NO: 1034522 - RNA, 19 nt, Artificial Sequence
  Description of Artificial Sequence: Synthetic oligonucleotide
  Sense strand starting at position 581 of SEQ ID NO: 914839
ugggaugacaguggcaauu

SEQ ID NO: 1034523 - RNA, 19 nt, Artificial Sequence
  Description of Artificial Sequence: Synthetic oligonucleotide
  Antisense strand to SEQ ID NO: 1034522
aauugccacugucauccca

SEQ ID NO: 1034524 - RNA, 19 nt, Artificial Sequence
  Description of Artificial Sequence: Synthetic oligonucleotide
  Sense strand starting at position 676 of SEQ ID NO: 914839
gguguccugcuuuagguaa

SEQ ID NO: 1034525 - RNA, 19 nt, Artificial Sequence
  Description of Artificial Sequence: Synthetic oligonucleotide
  Antisense strand to SEQ ID NO: 1034524
uuaccuaaagcaggacacc

SEQ ID NO: 1034526 - RNA, 19 nt, Artificial Sequence
  Description of Artificial Sequence: Synthetic oligonucleotide
  Sense strand starting at position 805 of SEQ ID NO: 914839
acgagauaauggcuccaaa

SEQ ID NO: 1034527 - RNA, 19 nt, Artificial Sequence
  Description of Artificial Sequence: Synthetic oligonucleotide
  Antisense strand to SEQ ID NO: 1034526
uuuggagccauuaucucgu

SEQ ID NO: 1034528 - RNA, 19 nt, Artificial Sequence
  Description of Artificial Sequence: Synthetic oligonucleotide
  Sense strand starting at position 817 of SEQ ID NO: 914839
cuccaaagugccuaguaga

SEQ ID NO: 1034529 - RNA, 19 nt, Artificial Sequence
  Description of Artificial Sequence: Synthetic oligonucleotide
  Antisense strand to SEQ ID NO: 1034528
ucuacuaggcacuuuggag

SEQ ID NO: 1034530 - RNA, 19 nt, Artificial Sequence
  Description of Artificial Sequence: Synthetic oligonucleotide
  Sense strand starting at position 864 of SEQ ID NO: 914839
uuuaguccucuguacaacu

SEQ ID NO: 1034531 - RNA, 19 nt, Artificial Sequence
  Description of Artificial Sequence: Synthetic oligonucleotide
  Antisense strand to SEQ ID NO: 1034530
aguuguacagaggacuaaa

SEQ ID NO: 1034532 - RNA, 19 nt, Artificial Sequence
  Description of Artificial Sequence: Synthetic oligonucleotide
  Sense strand starting at position 942 of SEQ ID NO: 914839
cuaucaaguuuauuagugu

SEQ ID NO: 1034533 - RNA, 19 nt, Artificial Sequence
  Description of Artificial Sequence: Synthetic oligonucleotide
  Antisense strand to SEQ ID NO: 1034532
acacuaauaaacuugauag

SEQ ID NO: 1034534 - RNA, 19 nt, Artificial Sequence
  Description of Artificial Sequence: Synthetic oligonucleotide
  Sense strand starting at position 1036 of SEQ ID NO: 914839
aagguacuggauugauauc

SEQ ID NO: 1034535 - RNA, 19 nt, Artificial Sequence
  Description of Artificial Sequence: Synthetic oligonucleotide
  Antisense strand to SEQ ID NO: 1034534
gauaucaauccaguaccuu

SEQ ID NO: 1034536 - RNA, 19 nt, Artificial Sequence
  Description of Artificial Sequence: Synthetic oligonucleotide
  Sense strand starting at position 2065 of SEQ ID NO: 914839
ggaggagaguaaagaagua

SEQ ID NO: 1034537 - RNA, 19 nt, Artificial Sequence
  Description of Artificial Sequence: Synthetic oligonucleotide
  Antisense strand to SEQ ID NO: 1034536
uacuucuuuacucuccucc

SEQ ID NO: 1034538 - RNA, 19 nt, Artificial Sequence
  Description of Artificial Sequence: Synthetic oligonucleotide
  Sense strand starting at position 2072 of SEQ ID NO: 914839
aguaaagaaguauguacaa

SEQ ID NO: 1034539 - RNA, 19 nt, Artificial Sequence
  Description of Artificial Sequence: Synthetic oligonucleotide
  Antisense strand to SEQ ID NO: 1034538
uuguacauacuucuuuacu

SEQ ID NO: 1034540 - RNA, 19 nt, Artificial Sequence
  Description of Artificial Sequence: Synthetic oligonucleotide
  Sense strand starting at position 2089 of SEQ ID NO: 914839
aagagugaagcaggguaua

SEQ ID NO: 1034541 - RNA, 19 nt, Artificial Sequence
  Description of Artificial Sequence: Synthetic oligonucleotide
  Antisense strand to SEQ ID NO: 1034540
uauacccugcuucacucuu

SEQ ID NO: 1034542 - RNA, 19 nt, Artificial Sequence
  Description of Artificial Sequence: Synthetic oligonucleotide
  Sense strand starting at position 2208 of SEQ ID NO: 914839
cagcccaguuaucuuggaa

SEQ ID NO: 1034543 - RNA, 19 nt, Artificial Sequence
  Description of Artificial Sequence: Synthetic oligonucleotide
  Antisense strand to SEQ ID NO: 1034542
uuccaagauaacugggcug

SEQ ID NO: 1034544 - RNA, 19 nt, Artificial Sequence
  Description of Artificial Sequence: Synthetic oligonucleotide
  Sense strand starting at position 2211 of SEQ ID NO: 914839
cccaguuaucuuggaagca

SEQ ID NO: 1034545 - RNA, 19 nt, Artificial Sequence
  Description of Artificial Sequence: Synthetic oligonucleotide
  Antisense strand to SEQ ID NO: 1034544
ugcuuccaagauaacuggg

SEQ ID NO: 1034546 - RNA, 19 nt, Artificial Sequence
  Description of Artificial Sequence: Synthetic oligonucleotide
  Sense strand starting at position 2359 of SEQ ID NO: 914839
guuuaugugguagaucaaa

SEQ ID NO: 1034547 - RNA, 19 nt, Artificial Sequence
  Description of Artificial Sequence: Synthetic oligonucleotide
  Antisense strand to SEQ ID NO: 1034546
uuugaucuaccacauaaac

SEQ ID NO: 1034548 - RNA, 19 nt, Artificial Sequence
  Description of Artificial Sequence: Synthetic oligonucleotide
  Sense strand starting at position 2385 of SEQ ID NO: 914839
uggcauacccaauaguuua

SEQ ID NO: 1034549 - RNA, 19 nt, Artificial Sequence
  Description of Artificial Sequence: Synthetic oligonucleotide
  Antisense strand to SEQ ID NO: 1034548
uaaacuauuggguaugcca

SEQ ID NO: 1034550 - RNA, 19 nt, Artificial Sequence
  Description of Artificial Sequence: Synthetic oligonucleotide
  Sense strand starting at position 2396 of SEQ ID NO: 914839
auaguuuauucugcagaaa

SEQ ID NO: 1034551 - RNA, 19 nt, Artificial Sequence
  Description of Artificial Sequence: Synthetic oligonucleotide
  Antisense strand to SEQ ID NO: 1034550
uuucugcagaauaaacuau

SEQ ID NO: 1034552 - RNA, 19 nt, Artificial Sequence
  Description of Artificial Sequence: Synthetic oligonucleotide
  Sense strand starting at position 2437 of SEQ ID NO: 914839
auuucugaauacugggaga

SEQ ID NO: 1034553 - RNA, 19 nt, Artificial Sequence
  Description of Artificial Sequence: Synthetic oligonucleotide
  Antisense strand to SEQ ID NO: 1034552
ucucccaguauucagaaau

SEQ ID NO: 1034554 - RNA, 19 nt, Artificial Sequence
  Description of Artificial Sequence: Synthetic oligonucleotide
  Sense strand starting at position 2440 of SEQ ID NO: 914839
ucugaauacugggagauag

SEQ ID NO: 1034555 - RNA, 19 nt, Artificial Sequence
  Description of Artificial Sequence: Synthetic oligonucleotide
  Antisense strand to SEQ ID NO: 1034554
cuaucucccaguauucaga

SEQ ID NO: 1034556 - RNA, 19 nt, Artificial Sequence
  Description of Artificial Sequence: Synthetic oligonucleotide
  Sense strand starting at position 2644 of SEQ ID NO: 914839
gcagucuagcaacagaauu

SEQ ID NO: 1034557 - RNA, 19 nt, Artificial Sequence
  Description of Artificial Sequence: Synthetic oligonucleotide
  Antisense strand to SEQ ID NO: 1034556
aauucuguugcuagacugc

SEQ ID NO: 1034558 - RNA, 19 nt, Artificial Sequence
  Description of Artificial Sequence: Synthetic oligonucleotide
  Sense strand starting at position 2828 of SEQ ID NO: 914839
cgugaaauagauugagauu

SEQ ID NO: 1034559 - RNA, 19 nt, Artificial Sequence
  Description of Artificial Sequence: Synthetic oligonucleotide
  Antisense strand to SEQ ID NO: 1034558
aaucucaaucuauuucacg

SEQ ID NO: 1034560 - RNA, 19 nt, Artificial Sequence
  Description of Artificial Sequence: Synthetic oligonucleotide
  Sense strand starting at position 2839 of SEQ ID NO: 914839
uugagauuguugccaagaa

SEQ ID NO: 1034561 - RNA, 19 nt, Artificial Sequence
  Description of Artificial Sequence: Synthetic oligonucleotide
  Antisense strand to SEQ ID NO: 1034560
uucuuggcaacaaucucaa

SEQ ID NO: 1034562 - RNA, 19 nt, Artificial Sequence
  Description of Artificial Sequence: Synthetic oligonucleotide
  Sense strand starting at position 2843 of SEQ ID NO: 914839
gauuguugccaagaauaug

SEQ ID NO: 1034563 - RNA, 19 nt, Artificial Sequence
  Description of Artificial Sequence: Synthetic oligonucleotide
  Antisense strand to SEQ ID NO: 1034562
cauauucuuggcaacaauc

SEQ ID NO: 1034564 - RNA, 19 nt, Artificial Sequence
  Description of Artificial Sequence: Synthetic oligonucleotide
  Sense strand starting at position 2866 of SEQ ID NO: 914839
aguuuccaucacuguauaa

SEQ ID NO: 1034565 - RNA, 19 nt, Artificial Sequence
  Description of Artificial Sequence: Synthetic oligonucleotide
  Antisense strand to SEQ ID NO: 1034564
uuauacagugauggaaacu

SEQ ID NO: 1034566 - RNA, 19 nt, Artificial Sequence
  Description of Artificial Sequence: Synthetic oligonucleotide
  Sense strand starting at position 2876 of SEQ ID NO: 914839
acuguauaaucuucuuugu

SEQ ID NO: 1034567 - RNA, 19 nt, Artificial Sequence
  Description of Artificial Sequence: Synthetic oligonucleotide
  Antisense strand to SEQ ID NO: 1034566
acaaagaagauuauacagu

SEQ ID NO: 1034568 - RNA, 19 nt, Artificial Sequence
  Description of Artificial Sequence: Synthetic oligonucleotide
  Sense strand starting at position 2908 of SEQ ID NO: 914839
ugcucagaucuuuauguua

SEQ ID NO: 1034569 - RNA, 19 nt, Artificial Sequence
  Description of Artificial Sequence: Synthetic oligonucleotide
  Antisense strand to SEQ ID NO: 1034568
uaacauaaagaucugagca

SEQ ID NO: 1034570 - RNA, 19 nt, Artificial Sequence
  Description of Artificial Sequence: Synthetic oligonucleotide
  Sense strand starting at position 2992 of SEQ ID NO: 914839
cuaugauucugucuuuccu

SEQ ID NO: 1034571 - RNA, 19 nt, Artificial Sequence
  Description of Artificial Sequence: Synthetic oligonucleotide
  Antisense strand to SEQ ID NO: 1034570
aggaaagacagaaucauag

SEQ ID NO: 1034572 - RNA, 19 nt, Artificial Sequence
  Description of Artificial Sequence: Synthetic oligonucleotide
  Sense strand starting at position 3207 of SEQ ID NO: 914839
gucacauggccaggcauau

SEQ ID NO: 1034573 - RNA, 19 nt, Artificial Sequence
  Description of Artificial Sequence: Synthetic oligonucleotide
  Antisense strand to SEQ ID NO: 1034572
auaugccuggccaugugac

SEQ ID NO: 1034574 - RNA, 19 nt, Artificial Sequence
  Description of Artificial Sequence: Synthetic oligonucleotide
  Sense strand starting at position 3236 of SEQ ID NO: 914839
gaaggaacuguuuggguua

SEQ ID NO: 1034575 - RNA, 19 nt, Artificial Sequence
  Description of Artificial Sequence: Synthetic oligonucleotide
  Antisense strand to SEQ ID NO: 1034574
uaacccaaacaguuccuuc

SEQ ID NO: 1034576 - RNA, 19 nt, Artificial Sequence
  Description of Artificial Sequence: Synthetic oligonucleotide
  Sense strand starting at position 3239 of SEQ ID NO: 914839
ggaacuguuuggguuacuu

SEQ ID NO: 1034577 - RNA, 19 nt, Artificial Sequence
  Description of Artificial Sequence: Synthetic oligonucleotide
  Antisense strand to SEQ ID NO: 1034576
aaguaacccaaacaguucc

SEQ ID NO: 1034578 - RNA, 19 nt, Artificial Sequence
  Description of Artificial Sequence: Synthetic oligonucleotide
  Sense strand starting at position 3251 of SEQ ID NO: 914839
guuacuuggaaaugugaga

SEQ ID NO: 1034579 - RNA, 19 nt, Artificial Sequence
  Description of Artificial Sequence: Synthetic oligonucleotide
  Antisense strand to SEQ ID NO: 1034578
ucucacauuuccaaguaac

SEQ ID NO: 1034580 - RNA, 19 nt, Artificial Sequence
  Description of Artificial Sequence: Synthetic oligonucleotide
  Sense strand starting at position 3395 of SEQ ID NO: 914839
ugaaacucagaccgagauu

SEQ ID NO: 1034581 - RNA, 19 nt, Artificial Sequence
  Description of Artificial Sequence: Synthetic oligonucleotide
  Antisense strand to SEQ ID NO: 1034580
aaucucggucugaguuuca

SEQ ID NO: 1034582 - RNA, 19 nt, Artificial Sequence
  Description of Artificial Sequence: Synthetic oligonucleotide
  Sense strand starting at position 3517 of SEQ ID NO: 914839
ucggcaugucauuaccaac

SEQ ID NO: 1034583 - RNA, 19 nt, Artificial Sequence
  Description of Artificial Sequence: Synthetic oligonucleotide
  Antisense strand to SEQ ID NO: 1034582
guugguaaugacaugccga

SEQ ID NO: 1034584 - RNA, 19 nt, Artificial Sequence
  Description of Artificial Sequence: Synthetic oligonucleotide
  Sense strand starting at position 3538 of SEQ ID NO: 914839
cugagacaguuccuggaau

SEQ ID NO: 1034585 - RNA, 19 nt, Artificial Sequence
  Description of Artificial Sequence: Synthetic oligonucleotide
  Antisense strand to SEQ ID NO: 1034584
auuccaggaacugucucag

SEQ ID NO: 1034586 - RNA, 19 nt, Artificial Sequence
  Description of Artificial Sequence: Synthetic oligonucleotide
  Sense strand starting at position 3694 of SEQ ID NO: 914839
cagcaaaguccuggaagca

SEQ ID NO: 1034587 - RNA, 19 nt, Artificial Sequence
  Description of Artificial Sequence: Synthetic oligonucleotide
  Antisense strand to SEQ ID NO: 1034586
ugcuuccaggacuuugcug

SEQ ID NO: 1034588 - RNA, 19 nt, Artificial Sequence
  Description of Artificial Sequence: Synthetic oligonucleotide
  Sense strand starting at position 3695 of SEQ ID NO: 914839
agcaaaguccuggaagcau

SEQ ID NO: 1034589 - RNA, 19 nt, Artificial Sequence
  Description of Artificial Sequence: Synthetic oligonucleotide
  Antisense strand to SEQ ID NO: 1034588
augcuuccaggacuuugcu

SEQ ID NO: 1034590 - RNA, 19 nt, Artificial Sequence
  Description of Artificial Sequence: Synthetic oligonucleotide
  Sense strand starting at position 3775 of SEQ ID NO: 914839
auuucuaagguguggcuua

SEQ ID NO: 1034591 - RNA, 19 nt, Artificial Sequence
  Description of Artificial Sequence: Synthetic oligonucleotide
  Antisense strand to SEQ ID NO: 1034590
uaagccacaccuuagaaau

SEQ ID NO: 1034592 - RNA, 19 nt, Artificial Sequence
  Description of Artificial Sequence: Synthetic oligonucleotide
  Sense strand starting at position 2139 of SEQ ID NO: 914840
ggcgcuuugaaaggugaga

SEQ ID NO: 1034593 - RNA, 19 nt, Artificial Sequence
  Description of Artificial Sequence: Synthetic oligonucleotide
  Antisense strand to SEQ ID NO: 1034592
ucucaccuuucaaagcgcc

SEQ ID NO: 1034594 - RNA, 19 nt, Artificial Sequence
  Description of Artificial Sequence: Synthetic oligonucleotide
  Sense strand starting at position 2210 of SEQ ID NO: 914840
gugcuaaugguuuaugaga

SEQ ID NO: 1034595 - RNA, 19 nt, Artificial Sequence
  Description of Artificial Sequence: Synthetic oligonucleotide
  Antisense strand to SEQ ID NO: 1034594
ucucauaaaccauuagcac

SEQ ID NO: 1034596 - RNA, 19 nt, Artificial Sequence
  Description of Artificial Sequence: Synthetic oligonucleotide
  Sense strand starting at position 2381 of SEQ ID NO: 914840
ggaggugcuuggaacugau

SEQ ID NO: 1034597 - RNA, 19 nt, Artificial Sequence
  Description of Artificial Sequence: Synthetic oligonucleotide
  Antisense strand to SEQ ID NO: 1034596
aucaguuccaagcaccucc

SEQ ID NO: 1034598 - RNA, 19 nt, Artificial Sequence
  Description of Artificial Sequence: Synthetic oligonucleotide
  Sense strand starting at position 2384 of SEQ ID NO: 914840
ggugcuuggaacugaugua

SEQ ID NO: 1034599 - RNA, 19 nt, Artificial Sequence
  Description of Artificial Sequence: Synthetic oligonucleotide
  Antisense strand to SEQ ID NO: 1034598
uacaucaguuccaagcacc

SEQ ID NO: 1034600 - RNA, 19 nt, Artificial Sequence
  Description of Artificial Sequence: Synthetic oligonucleotide
  Sense strand starting at position 2412 of SEQ ID NO: 914840
guuggugauuucucggguu

SEQ ID NO: 1034601 - RNA, 19 nt, Artificial Sequence
  Description of Artificial Sequence: Synthetic oligonucleotide
  Antisense strand to SEQ ID NO: 1034600
aacccgagaaaucaccaac

SEQ ID NO: 1034602 - RNA, 19 nt, Artificial Sequence
  Description of Artificial Sequence: Synthetic oligonucleotide
  Sense strand starting at position 2414 of SEQ ID NO: 914840
uggugauuucucggguuuc

SEQ ID NO: 1034603 - RNA, 19 nt, Artificial Sequence
  Description of Artificial Sequence: Synthetic oligonucleotide
  Antisense strand to SEQ ID NO: 1034602
gaaacccgagaaaucacca

SEQ ID NO: 1034604 - RNA, 19 nt, Artificial Sequence
  Description of Artificial Sequence: Synthetic oligonucleotide
  Sense strand starting at position 2622 of SEQ ID NO: 914840
gccaaagagguuuguaauc

SEQ ID NO: 1034605 - RNA, 19 nt, Artificial Sequence
  Description of Artificial Sequence: Synthetic oligonucleotide
  Antisense strand to SEQ ID NO: 1034604
gauuacaaaccucuuuggc

SEQ ID NO: 1034606 - RNA, 19 nt, Artificial Sequence
  Description of Artificial Sequence: Synthetic oligonucleotide
  Sense strand starting at position 2627 of SEQ ID NO: 914840
agagguuuguaaucaugaa

SEQ ID NO: 1034607 - RNA, 19 nt, Artificial Sequence
  Description of Artificial Sequence: Synthetic oligonucleotide
  Antisense strand to SEQ ID NO: 1034606
uucaugauuacaaaccucu

SEQ ID NO: 1034608 - RNA, 19 nt, Artificial Sequence
  Description of Artificial Sequence: Synthetic oligonucleotide
  Sense strand starting at position 2631 of SEQ ID NO: 914840
guuuguaaucaugaaaguc

SEQ ID NO: 1034609 - RNA, 19 nt, Artificial Sequence
  Description of Artificial Sequence: Synthetic oligonucleotide
  Antisense strand to SEQ ID NO: 1034608
gacuuucaugauuacaaac

SEQ ID NO: 1034610 - RNA, 19 nt, Artificial Sequence
  Description of Artificial Sequence: Synthetic oligonucleotide
  Sense strand starting at position 2649 of SEQ ID NO: 914840
cacccuuccggguguuaau

SEQ ID NO: 1034611 - RNA, 19 nt, Artificial Sequence
  Description of Artificial Sequence: Synthetic oligonucleotide
  Antisense strand to SEQ ID NO: 1034610
auuaacacccggaagggug

SEQ ID NO: 1034612 - RNA, 19 nt, Artificial Sequence
  Description of Artificial Sequence: Synthetic oligonucleotide
  Sense strand starting at position 2658 of SEQ ID NO: 914840
ggguguuaauuccugagag

SEQ ID NO: 1034613 - RNA, 19 nt, Artificial Sequence
  Description of Artificial Sequence: Synthetic oligonucleotide
  Antisense strand to SEQ ID NO: 1034612
cucucaggaauuaacaccc

SEQ ID NO: 1034614 - RNA, 19 nt, Artificial Sequence
  Description of Artificial Sequence: Synthetic oligonucleotide
  Sense strand starting at position 2660 of SEQ ID NO: 914840
guguuaauuccugagagga

SEQ ID NO: 1034615 - RNA, 19 nt, Artificial Sequence
  Description of Artificial Sequence: Synthetic oligonucleotide
  Antisense strand to SEQ ID NO: 1034614
uccucucaggaauuaacac

SEQ ID NO: 1034616 - RNA, 19 nt, Artificial Sequence
  Description of Artificial Sequence: Synthetic oligonucleotide
  Sense strand starting at position 2743 of SEQ ID NO: 914840
auaauauaguuaucccgga

SEQ ID NO: 1034617 - RNA, 19 nt, Artificial Sequence
  Description of Artificial Sequence: Synthetic oligonucleotide
  Antisense strand to SEQ ID NO: 1034616
uccgggauaacuauauuau

SEQ ID NO: 1034618 - RNA, 19 nt, Artificial Sequence
  Description of Artificial Sequence: Synthetic oligonucleotide
  Sense strand starting at position 2744 of SEQ ID NO: 914840
uaauauaguuaucccggau

SEQ ID NO: 1034619 - RNA, 19 nt, Artificial Sequence
  Description of Artificial Sequence: Synthetic oligonucleotide
  Antisense strand to SEQ ID NO: 1034618
auccgggauaacuauauua

SEQ ID NO: 1034620 - RNA, 19 nt, Artificial Sequence
  Description of Artificial Sequence: Synthetic oligonucleotide
  Sense strand starting at position 2747 of SEQ ID NO: 914840
uauaguuaucccggauacc

SEQ ID NO: 1034621 - RNA, 19 nt, Artificial Sequence
  Description of Artificial Sequence: Synthetic oligonucleotide
  Antisense strand to SEQ ID NO: 1034620
gguauccgggauaacuaua

SEQ ID NO: 1034622 - RNA, 19 nt, Artificial Sequence
  Description of Artificial Sequence: Synthetic oligonucleotide
  Sense strand starting at position 2748 of SEQ ID NO: 914840
auaguuaucccggauacca

SEQ ID NO: 1034623 - RNA, 19 nt, Artificial Sequence
  Description of Artificial Sequence: Synthetic oligonucleotide
  Antisense strand to SEQ ID NO: 1034622
ugguauccgggauaacuau

SEQ ID NO: 1034624 - RNA, 19 nt, Artificial Sequence
  Description of Artificial Sequence: Synthetic oligonucleotide
  Sense strand starting at position 2773 of SEQ ID NO: 914840
caggauccacuuugcgaaa

SEQ ID NO: 1034625 - RNA, 19 nt, Artificial Sequence
  Description of Artificial Sequence: Synthetic oligonucleotide
  Antisense strand to SEQ ID NO: 1034624
uuucgcaaaguggauccug

SEQ ID NO: 1034626 - RNA, 19 nt, Artificial Sequence
  Description of Artificial Sequence: Synthetic oligonucleotide
  Sense strand starting at position 2774 of SEQ ID NO: 914840
aggauccacuuugcgaaau

SEQ ID NO: 1034627 - RNA, 19 nt, Artificial Sequence
  Description of Artificial Sequence: Synthetic oligonucleotide
  Antisense strand to SEQ ID NO: 1034626
auuucgcaaaguggauccu

SEQ ID NO: 1034628 - RNA, 19 nt, Artificial Sequence
  Description of Artificial Sequence: Synthetic oligonucleotide
  Sense strand starting at position 2785 of SEQ ID NO: 914840
ugcgaaauuguggacuguu

SEQ ID NO: 1034629 - RNA, 19 nt, Artificial Sequence
  Description of Artificial Sequence: Synthetic oligonucleotide
  Antisense strand to SEQ ID NO: 1034628
aacaguccacaauuucgca

SEQ ID NO: 1034630 - RNA, 19 nt, Artificial Sequence
  Description of Artificial Sequence: Synthetic oligonucleotide
  Sense strand starting at position 2788 of SEQ ID NO: 914840
gaaauuguggacuguugga

SEQ ID NO: 1034631 - RNA, 19 nt, Artificial Sequence
  Description of Artificial Sequence: Synthetic oligonucleotide
  Antisense strand to SEQ ID NO: 1034630
uccaacaguccacaauuuc

SEQ ID NO: 1034632 - RNA, 19 nt, Artificial Sequence
  Description of Artificial Sequence: Synthetic oligonucleotide
  Sense strand starting at position 2801 of SEQ ID NO: 914840
guuggacugugauucuaag

SEQ ID NO: 1034633 - RNA, 19 nt, Artificial Sequence
  Description of Artificial Sequence: Synthetic oligonucleotide
  Antisense strand to SEQ ID NO: 1034632
cuuagaaucacaguccaac

SEQ ID NO: 1034634 - RNA, 19 nt, Artificial Sequence
  Description of Artificial Sequence: Synthetic oligonucleotide
  Sense strand starting at position 2872 of SEQ ID NO: 914840
ugucauguucugucuuguu

SEQ ID NO: 1034635 - RNA, 19 nt, Artificial Sequence
  Description of Artificial Sequence: Synthetic oligonucleotide
  Antisense strand to SEQ ID NO: 1034634
aacaagacagaacaugaca

SEQ ID NO: 1034636 - RNA, 19 nt, Artificial Sequence
  Description of Artificial Sequence: Synthetic oligonucleotide
  Sense strand starting at position 2969 of SEQ ID NO: 914840
ccucaaaucguguauuaug

SEQ ID NO: 1034637 - RNA, 19 nt, Artificial Sequence
  Description of Artificial Sequence: Synthetic oligonucleotide
  Antisense strand to SEQ ID NO: 1034636
cauaauacacgauuugagg

SEQ ID NO: 1034638 - RNA, 19 nt, Artificial Sequence
  Description of Artificial Sequence: Synthetic oligonucleotide
  Sense strand starting at position 2979 of SEQ ID NO: 914840
uguauuaugcuggcuuguu

SEQ ID NO: 1034639 - RNA, 19 nt, Artificial Sequence
  Description of Artificial Sequence: Synthetic oligonucleotide
  Antisense strand to SEQ ID NO: 1034638
aacaagccagcauaauaca

SEQ ID NO: 1034640 - RNA, 19 nt, Artificial Sequence
  Description of Artificial Sequence: Synthetic oligonucleotide
  Sense strand starting at position 3171 of SEQ ID NO: 914840
aucgaagaggagugauguu

SEQ ID NO: 1034641 - RNA, 19 nt, Artificial Sequence
  Description of Artificial Sequence: Synthetic oligonucleotide
  Antisense strand to SEQ ID NO: 1034640
aacaucacuccucuucgau

SEQ ID NO: 1034642 - RNA, 19 nt, Artificial Sequence
  Description of Artificial Sequence: Synthetic oligonucleotide
  Sense strand starting at position 3203 of SEQ ID NO: 914840
uggaucccuccugguagaa

SEQ ID NO: 1034643 - RNA, 19 nt, Artificial Sequence
  Description of Artificial Sequence: Synthetic oligonucleotide
  Antisense strand to SEQ ID NO: 1034642
uucuaccaggagggaucca

SEQ ID NO: 1034644 - RNA, 19 nt, Artificial Sequence
  Description of Artificial Sequence: Synthetic oligonucleotide
  Sense strand starting at position 3301 of SEQ ID NO: 914840
guaggugauuucuagaaug

SEQ ID NO: 1034645 - RNA, 19 nt, Artificial Sequence
  Description of Artificial Sequence: Synthetic oligonucleotide
  Antisense strand to SEQ ID NO: 1034644
cauucuagaaaucaccuac

SEQ ID NO: 1034646 - RNA, 19 nt, Artificial Sequence
  Description of Artificial Sequence: Synthetic oligonucleotide
  Sense strand starting at position 3344 of SEQ ID NO: 914840
ccucaaaguuuagaaggaa

SEQ ID NO: 1034647 - RNA, 19 nt, Artificial Sequence
  Description of Artificial Sequence: Synthetic oligonucleotide
  Antisense strand to SEQ ID NO: 1034646
uuccuucuaaacuuugagg

SEQ ID NO: 1034648 - RNA, 19 nt, Artificial Sequence
  Description of Artificial Sequence: Synthetic oligonucleotide
  Sense strand starting at position 3363 of SEQ ID NO: 914840
cuauauuucuucugaugag

SEQ ID NO: 1034649 - RNA, 19 nt, Artificial Sequence
  Description of Artificial Sequence: Synthetic oligonucleotide
  Antisense strand to SEQ ID NO: 1034648
cucaucagaagaaauauag

SEQ ID NO: 1034650 - RNA, 19 nt, Artificial Sequence
  Description of Artificial Sequence: Synthetic oligonucleotide
  Sense strand starting at position 3385 of SEQ ID NO: 914840
gucaaauggcaucaucaaa

SEQ ID NO: 1034651 - RNA, 19 nt, Artificial Sequence
  Description of Artificial Sequence: Synthetic oligonucleotide
  Antisense strand to SEQ ID NO: 1034650
uuugaugaugccauuugac

SEQ ID NO: 1034652 - RNA, 19 nt, Artificial Sequence
  Description of Artificial Sequence: Synthetic oligonucleotide
  Sense strand starting at position 3417 of SEQ ID NO: 914840
uagaguuacuguguuagag

SEQ ID NO: 1034653 - RNA, 19 nt, Artificial Sequence
  Description of Artificial Sequence: Synthetic oligonucleotide
  Antisense strand to SEQ ID NO: 1034652
cucuaacacaguaacucua

SEQ ID NO: 1034654 - RNA, 19 nt, Artificial Sequence
  Description of Artificial Sequence: Synthetic oligonucleotide
  Sense strand starting at position 3471 of SEQ ID NO: 914840
auauauucuuuggcagaua

SEQ ID NO: 1034655 - RNA, 19 nt, Artificial Sequence
  Description of Artificial Sequence: Synthetic oligonucleotide
  Antisense strand to SEQ ID NO: 1034654
uaucugccaaagaauauau

SEQ ID NO: 1034656 - RNA, 19 nt, Artificial Sequence
  Description of Artificial Sequence: Synthetic oligonucleotide
  Sense strand starting at position 3487 of SEQ ID NO: 914840
auaacauagcuauguaugu

SEQ ID NO: 1034657 - RNA, 19 nt, Artificial Sequence
  Description of Artificial Sequence: Synthetic oligonucleotide
  Antisense strand to SEQ ID NO: 1034656
acauacauagcuauguuau

SEQ ID NO: 1034658 - RNA, 19 nt, Artificial Sequence
  Description of Artificial Sequence: Synthetic oligonucleotide
  Sense strand starting at position 3570 of SEQ ID NO: 914840
aaugcuuucuguuuggagu

SEQ ID NO: 1034659 - RNA, 19 nt, Artificial Sequence
  Description of Artificial Sequence: Synthetic oligonucleotide
  Antisense strand to SEQ ID NO: 1034658
acuccaaacagaaagcauu

SEQ ID NO: 1034660 - RNA, 19 nt, Artificial Sequence
  Description of Artificial Sequence: Synthetic oligonucleotide
  Sense strand starting at position 3596 of SEQ ID NO: 914840
uuucucuuugcuuaaaggu

SEQ ID NO: 1034661 - RNA, 19 nt, Artificial Sequence
  Description of Artificial Sequence: Synthetic oligonucleotide
  Antisense strand to SEQ ID NO: 1034660
accuuuaagcaaagagaaa

SEQ ID NO: 1034662 - RNA, 19 nt, Artificial Sequence
  Description of Artificial Sequence: Synthetic oligonucleotide
  Sense strand starting at position 3602 of SEQ ID NO: 914840
uuugcuuaaagguaaggua

SEQ ID NO: 1034663 - RNA, 19 nt, Artificial Sequence
  Description of Artificial Sequence: Synthetic oligonucleotide
  Antisense strand to SEQ ID NO: 1034662
uaccuuaccuuuaagcaaa

SEQ ID NO: 1034664 - RNA, 19 nt, Artificial Sequence
  Description of Artificial Sequence: Synthetic oligonucleotide
  Sense strand starting at position 3623 of SEQ ID NO: 914840
auuacagaagcucgauaaa

SEQ ID NO: 1034665 - RNA, 19 nt, Artificial Sequence
  Description of Artificial Sequence: Synthetic oligonucleotide
  Antisense strand to SEQ ID NO: 1034664
uuuaucgagcuucuguaau

SEQ ID NO: 1034666 - RNA, 19 nt, Artificial Sequence
  Description of Artificial Sequence: Synthetic oligonucleotide
  Sense strand starting at position 3651 of SEQ ID NO: 914840
ucaggaaauuaaguguaua

SEQ ID NO: 1034667 - RNA, 19 nt, Artificial Sequence
  Description of Artificial Sequence: Synthetic oligonucleotide
  Antisense strand to SEQ ID NO: 1034666
uauacacuuaauuuccuga

SEQ ID NO: 1034668 - RNA, 19 nt, Artificial Sequence
  Description of Artificial Sequence: Synthetic oligonucleotide
  Sense strand starting at position 3734 of SEQ ID NO: 914840
agagguaucuuacccauca

SEQ ID NO: 1034669 - RNA, 19 nt, Artificial Sequence
  Description of Artificial Sequence: Synthetic oligonucleotide
  Antisense strand to SEQ ID NO: 1034668
ugauggguaagauaccucu

SEQ ID NO: 1034670 - RNA, 19 nt, Artificial Sequence
  Description of Artificial Sequence: Synthetic oligonucleotide
  Sense strand starting at position 3942 of SEQ ID NO: 914840
augagagacccuggcaauu

SEQ ID NO: 1034671 - RNA, 19 nt, Artificial Sequence
  Description of Artificial Sequence: Synthetic oligonucleotide
  Antisense strand to SEQ ID NO: 1034670
aauugccagggucucucau

SEQ ID NO: 1034672 - RNA, 19 nt, Artificial Sequence
  Description of Artificial Sequence: Synthetic oligonucleotide
  Sense strand starting at position 4 of SEQ ID NO: 914841
ugaacaauguucugccugu

SEQ ID NO: 1034673 - RNA, 19 nt, Artificial Sequence
  Description of Artificial Sequence: Synthetic oligonucleotide
  Antisense strand to SEQ ID NO: 1034672
acaggcagaacauuguuca

SEQ ID NO: 1034674 - RNA, 19 nt, Artificial Sequence
  Description of Artificial Sequence: Synthetic oligonucleotide
  Sense strand starting at position 222 of SEQ ID NO: 914841
gcuccauucugccgagaua

SEQ ID NO: 1034675 - RNA, 19 nt, Artificial Sequence
  Description of Artificial Sequence: Synthetic oligonucleotide
  Antisense strand to SEQ ID NO: 1034674
uaucucggcagaauggagc

SEQ ID NO: 1034676 - RNA, 19 nt, Artificial Sequence
  Description of Artificial Sequence: Synthetic oligonucleotide
  Sense strand starting at position 223 of SEQ ID NO: 914841
cuccauucugccgagauag

SEQ ID NO: 1034677 - RNA, 19 nt, Artificial Sequence
  Description of Artificial Sequence: Synthetic oligonucleotide
  Antisense strand to SEQ ID NO: 1034676
cuaucucggcagaauggag

SEQ ID NO: 1034678 - RNA, 19 nt, Artificial Sequence
  Description of Artificial Sequence: Synthetic oligonucleotide
  Sense strand starting at position 225 of SEQ ID NO: 914841
ccauucugccgagauagua

SEQ ID NO: 1034679 - RNA, 19 nt, Artificial Sequence
  Description of Artificial Sequence: Synthetic oligonucleotide
  Antisense strand to SEQ ID NO: 1034678
uacuaucucggcagaaugg

SEQ ID NO: 1034680 - RNA, 19 nt, Artificial Sequence
  Description of Artificial Sequence: Synthetic oligonucleotide
  Sense strand starting at position 251 of SEQ ID NO: 914841
aagggauggcugugaaaug

SEQ ID NO: 1034681 - RNA, 19 nt, Artificial Sequence
  Description of Artificial Sequence: Synthetic oligonucleotide
  Antisense strand to SEQ ID NO: 1034680
cauuucacagccaucccuu

SEQ ID NO: 1034682 - RNA, 19 nt, Artificial Sequence
  Description of Artificial Sequence: Synthetic oligonucleotide
  Sense strand starting at position 252 of SEQ ID NO: 914841
agggauggcugugaaauga

SEQ ID NO: 1034683 - RNA, 19 nt, Artificial Sequence
  Description of Artificial Sequence: Synthetic oligonucleotide
  Antisense strand to SEQ ID NO: 1034682
ucauuucacagccaucccu

SEQ ID NO: 1034684 - RNA, 19 nt, Artificial Sequence
  Description of Artificial Sequence: Synthetic oligonucleotide
  Sense strand starting at position 404 of SEQ ID NO: 914841
uccguuucugcagagagaa

SEQ ID NO: 1034685 - RNA, 19 nt, Artificial Sequence
  Description of Artificial Sequence: Synthetic oligonucleotide
  Antisense strand to SEQ ID NO: 1034684
uucucucugcagaaacgga

SEQ ID NO: 1034686 - RNA, 19 nt, Artificial Sequence
  Description of Artificial Sequence: Synthetic oligonucleotide
  Sense strand starting at position 469 of SEQ ID NO: 914841
aaagcaaggucccuggaau

SEQ ID NO: 1034687 - RNA, 19 nt, Artificial Sequence
  Description of Artificial Sequence: Synthetic oligonucleotide
  Antisense strand to SEQ ID NO: 1034686
auuccagggaccuugcuuu

SEQ ID NO: 1034688 - RNA, 19 nt, Artificial Sequence
  Description of Artificial Sequence: Synthetic oligonucleotide
  Sense strand starting at position 470 of SEQ ID NO: 914841
aagcaaggucccuggaauu

SEQ ID NO: 1034689 - RNA, 19 nt, Artificial Sequence
  Description of Artificial Sequence: Synthetic oligonucleotide
  Antisense strand to SEQ ID NO: 1034688
aauuccagggaccuugcuu

SEQ ID NO: 1034690 - RNA, 19 nt, Artificial Sequence
  Description of Artificial Sequence: Synthetic oligonucleotide
  Sense strand starting at position 480 of SEQ ID NO: 914841
ccuggaauugcugagggua

SEQ ID NO: 1034691 - RNA, 19 nt, Artificial Sequence
  Description of Artificial Sequence: Synthetic oligonucleotide
  Antisense strand to SEQ ID NO: 1034690
uacccucagcaauuccagg

SEQ ID NO: 1034692 - RNA, 19 nt, Artificial Sequence
  Description of Artificial Sequence: Synthetic oligonucleotide
  Sense strand starting at position 661 of SEQ ID NO: 914841
gagauagguccagggucuu

SEQ ID NO: 1034693 - RNA, 19 nt, Artificial Sequence
  Description of Artificial Sequence: Synthetic oligonucleotide
  Antisense strand to SEQ ID NO: 1034692
aagacccuggaccuaucuc

SEQ ID NO: 1034694 - RNA, 19 nt, Artificial Sequence
  Description of Artificial Sequence: Synthetic oligonucleotide
  Sense strand starting at position 794 of SEQ ID NO: 914841
gggagcuacaugugcaauu

SEQ ID NO: 1034695 - RNA, 19 nt, Artificial Sequence
  Description of Artificial Sequence: Synthetic oligonucleotide
  Antisense strand to SEQ ID NO: 1034694
aauugcacauguagcuccc

SEQ ID NO: 1034696 - RNA, 19 nt, Artificial Sequence
  Description of Artificial Sequence: Synthetic oligonucleotide
  Sense strand starting at position 795 of SEQ ID NO: 914841
ggagcuacaugugcaauuu

SEQ ID NO: 1034697 - RNA, 19 nt, Artificial Sequence
  Description of Artificial Sequence: Synthetic oligonucleotide
  Antisense strand to SEQ ID NO: 1034696
aaauugcacauguagcucc

SEQ ID NO: 1034698 - RNA, 19 nt, Artificial Sequence
  Description of Artificial Sequence: Synthetic oligonucleotide
  Sense strand starting at position 1073 of SEQ ID NO: 914841
guuuguugacuguagcagu

SEQ ID NO: 1034699 - RNA, 19 nt, Artificial Sequence
  Description of Artificial Sequence: Synthetic oligonucleotide
  Antisense strand to SEQ ID NO: 1034698
acugcuacagucaacaaac

SEQ ID NO: 1034700 - RNA, 19 nt, Artificial Sequence
  Description of Artificial Sequence: Synthetic oligonucleotide
  Sense strand starting at position 1229 of SEQ ID NO: 914841
cggccagggcuaugagaau

SEQ ID NO: 1034701 - RNA, 19 nt, Artificial Sequence
  Description of Artificial Sequence: Synthetic oligonucleotide
  Antisense strand to SEQ ID NO: 1034700
auucucauagcccuggccg

SEQ ID NO: 1034702 - RNA, 19 nt, Artificial Sequence
  Description of Artificial Sequence: Synthetic oligonucleotide
  Sense strand starting at position 1339 of SEQ ID NO: 914841
gcacuuaggucucuccuaa

SEQ ID NO: 1034703 - RNA, 19 nt, Artificial Sequence
  Description of Artificial Sequence: Synthetic oligonucleotide
  Antisense strand to SEQ ID NO: 1034702
uuaggagagaccuaagugc

SEQ ID NO: 1034704 - RNA, 19 nt, Artificial Sequence
  Description of Artificial Sequence: Synthetic oligonucleotide
  Sense strand starting at position 2051 of SEQ ID NO: 914841
ggcuuugucggagggaagu

SEQ ID NO: 1034705 - RNA, 19 nt, Artificial Sequence
  Description of Artificial Sequence: Synthetic oligonucleotide
  Antisense strand to SEQ ID NO: 1034704
acuucccuccgacaaagcc

SEQ ID NO: 1034706 - RNA, 19 nt, Artificial Sequence
  Description of Artificial Sequence: Synthetic oligonucleotide
  Sense strand starting at position 2097 of SEQ ID NO: 914841
agguguugccgggagucaa

SEQ ID NO: 1034707 - RNA, 19 nt, Artificial Sequence
  Description of Artificial Sequence: Synthetic oligonucleotide
  Antisense strand to SEQ ID NO: 1034706
uugacucccggcaacaccu

SEQ ID NO: 1034708 - RNA, 19 nt, Artificial Sequence
  Description of Artificial Sequence: Synthetic oligonucleotide
  Sense strand starting at position 2098 of SEQ ID NO: 914841
gguguugccgggagucaac

SEQ ID NO: 1034709 - RNA, 19 nt, Artificial Sequence
  Description of Artificial Sequence: Synthetic oligonucleotide
  Antisense strand to SEQ ID NO: 1034708
guugacucccggcaacacc

SEQ ID NO: 1034710 - RNA, 19 nt, Artificial Sequence
  Description of Artificial Sequence: Synthetic oligonucleotide
  Sense strand starting at position 2181 of SEQ ID NO: 914841
ggacuucauuccguaggca

SEQ ID NO: 1034711 - RNA, 19 nt, Artificial Sequence
  Description of Artificial Sequence: Synthetic oligonucleotide
  Antisense strand to SEQ ID NO: 1034710
ugccuacggaaugaagucc

SEQ ID NO: 1034712 - RNA, 19 nt, Artificial Sequence
  Description of Artificial Sequence: Synthetic oligonucleotide
  Sense strand starting at position 2208 of SEQ ID NO: 914841
cagggaagauuccuagcuu

SEQ ID NO: 1034713 - RNA, 19 nt, Artificial Sequence
  Description of Artificial Sequence: Synthetic oligonucleotide
  Antisense strand to SEQ ID NO: 1034712
aagcuaggaaucuucccug

SEQ ID NO: 1034714 - RNA, 19 nt, Artificial Sequence
  Description of Artificial Sequence: Synthetic oligonucleotide
  Sense strand starting at position 2209 of SEQ ID NO: 914841
agggaagauuccuagcuuu

SEQ ID NO: 1034715 - RNA, 19 nt, Artificial Sequence
  Description of Artificial Sequence: Synthetic oligonucleotide
  Antisense strand to SEQ ID NO: 1034714
aaagcuaggaaucuucccu

SEQ ID NO: 1034716 - RNA, 19 nt, Artificial Sequence
  Description of Artificial Sequence: Synthetic oligonucleotide
  Sense strand starting at position 2889 of SEQ ID NO: 914841
acagguucuuggcaucuaa

SEQ ID NO: 1034717 - RNA, 19 nt, Artificial Sequence
  Description of Artificial Sequence: Synthetic oligonucleotide
  Antisense strand to SEQ ID NO: 1034716
uuagaugccaagaaccugu

SEQ ID NO: 1034718 - RNA, 19 nt, Artificial Sequence
  Description of Artificial Sequence: Synthetic oligonucleotide
  Sense strand starting at position 3274 of SEQ ID NO: 914841
gaaaguacacuccaguguu

SEQ ID NO: 1034719 - RNA, 19 nt, Artificial Sequence
  Description of Artificial Sequence: Synthetic oligonucleotide
  Antisense strand to SEQ ID NO: 1034718
aacacuggaguguacuuuc

SEQ ID NO: 1034720 - RNA, 19 nt, Artificial Sequence
  Description of Artificial Sequence: Synthetic oligonucleotide
  Sense strand starting at position 3328 of SEQ ID NO: 914841
uacagaauuuguuggaguu

SEQ ID NO: 1034721 - RNA, 19 nt, Artificial Sequence
  Description of Artificial Sequence: Synthetic oligonucleotide
  Antisense strand to SEQ ID NO: 1034720
aacuccaacaaauucugua

SEQ ID NO: 1034722 - RNA, 19 nt, Artificial Sequence
  Description of Artificial Sequence: Synthetic oligonucleotide
  Sense strand starting at position 3330 of SEQ ID NO: 914841
cagaauuuguuggaguuua

SEQ ID NO: 1034723 - RNA, 19 nt, Artificial Sequence
  Description of Artificial Sequence: Synthetic oligonucleotide
  Antisense strand to SEQ ID NO: 1034722
uaaacuccaacaaauucug

SEQ ID NO: 1034724 - RNA, 19 nt, Artificial Sequence
  Description of Artificial Sequence: Synthetic oligonucleotide
  Sense strand starting at position 3359 of SEQ ID NO: 914841
ggaggauuccauugguuau

SEQ ID NO: 1034725 - RNA, 19 nt, Artificial Sequence
  Description of Artificial Sequence: Synthetic oligonucleotide
  Antisense strand to SEQ ID NO: 1034724
auaaccaauggaauccucc

SEQ ID NO: 1034726 - RNA, 19 nt, Artificial Sequence
  Description of Artificial Sequence: Synthetic oligonucleotide
  Sense strand starting at position 3369 of SEQ ID NO: 914841
auugguuauuugggauaug

SEQ ID NO: 1034727 - RNA, 19 nt, Artificial Sequence
  Description of Artificial Sequence: Synthetic oligonucleotide
  Antisense strand to SEQ ID NO: 1034726
cauaucccaaauaaccaau

SEQ ID NO: 1034728 - RNA, 19 nt, Artificial Sequence
  Description of Artificial Sequence: Synthetic oligonucleotide
  Sense strand starting at position 3379 of SEQ ID NO: 914841
ugggauaugccauauguaa

SEQ ID NO: 1034729 - RNA, 19 nt, Artificial Sequence
  Description of Artificial Sequence: Synthetic oligonucleotide
  Antisense strand to SEQ ID NO: 1034728
uuacauauggcauauccca

SEQ ID NO: 1034730 - RNA, 19 nt, Artificial Sequence
  Description of Artificial Sequence: Synthetic oligonucleotide
  Sense strand starting at position 3421 of SEQ ID NO: 914841
caaagucauuuagggugua

SEQ ID NO: 1034731 - RNA, 19 nt, Artificial Sequence
  Description of Artificial Sequence: Synthetic oligonucleotide
  Antisense strand to SEQ ID NO: 1034730
uacacccuaaaugacuuug

SEQ ID NO: 1034732 - RNA, 19 nt, Artificial Sequence
  Description of Artificial Sequence: Synthetic oligonucleotide
  Sense strand starting at position 3433 of SEQ ID NO: 914841
ggguguacucccuaaggag

SEQ ID NO: 1034733 - RNA, 19 nt, Artificial Sequence
  Description of Artificial Sequence: Synthetic oligonucleotide
  Antisense strand to SEQ ID NO: 1034732
cuccuuagggaguacaccc

SEQ ID NO: 1034734 - RNA, 19 nt, Artificial Sequence
  Description of Artificial Sequence: Synthetic oligonucleotide
  Sense strand starting at position 3478 of SEQ ID NO: 914841
gugaaucagccuuauaugu

SEQ ID NO: 1034735 - RNA, 19 nt, Artificial Sequence
  Description of Artificial Sequence: Synthetic oligonucleotide
  Antisense strand to SEQ ID NO: 1034734
acauauaaggcugauucac

SEQ ID NO: 1034736 - RNA, 19 nt, Artificial Sequence
  Description of Artificial Sequence: Synthetic oligonucleotide
  Sense strand starting at position 3556 of SEQ ID NO: 914841
cuauaaucccaguguuaca

SEQ ID NO: 1034737 - RNA, 19 nt, Artificial Sequence
  Description of Artificial Sequence: Synthetic oligonucleotide
  Antisense strand to SEQ ID NO: 1034736
uguaacacugggauuauag

SEQ ID NO: 1034738 - RNA, 19 nt, Artificial Sequence
  Description of Artificial Sequence: Synthetic oligonucleotide
  Sense strand starting at position 3561 of SEQ ID NO: 914841
aucccaguguuacaggaaa

SEQ ID NO: 1034739 - RNA, 19 nt, Artificial Sequence
  Description of Artificial Sequence: Synthetic oligonucleotide
  Antisense strand to SEQ ID NO: 1034738
uuuccuguaacacugggau

SEQ ID NO: 1034740 - RNA, 19 nt, Artificial Sequence
  Description of Artificial Sequence: Synthetic oligonucleotide
  Sense strand starting at position 3612 of SEQ ID NO: 914841
uuggaucucgugcaauaaa

SEQ ID NO: 1034741 - RNA, 19 nt, Artificial Sequence
  Description of Artificial Sequence: Synthetic oligonucleotide
  Antisense strand to SEQ ID NO: 1034740
uuuauugcacgagauccaa

SEQ ID NO: 1034742 - RNA, 19 nt, Artificial Sequence
  Description of Artificial Sequence: Synthetic oligonucleotide
  Sense strand starting at position 3615 of SEQ ID NO: 914841
gaucucgugcaauaaagaa

SEQ ID NO: 1034743 - RNA, 19 nt, Artificial Sequence
  Description of Artificial Sequence: Synthetic oligonucleotide
  Antisense strand to SEQ ID NO: 1034742
uucuuuauugcacgagauc

SEQ ID NO: 1034744 - RNA, 19 nt, Artificial Sequence
  Description of Artificial Sequence: Synthetic oligonucleotide
  Sense strand starting at position 5 of SEQ ID NO: 914842
cagagacauucuguuuggu

SEQ ID NO: 1034745 - RNA, 19 nt, Artificial Sequence
  Description of Artificial Sequence: Synthetic oligonucleotide
  Antisense strand to SEQ ID NO: 1034744
accaaacagaaugucucug

SEQ ID NO: 1034746 - RNA, 19 nt, Artificial Sequence
  Description of Artificial Sequence: Synthetic oligonucleotide
  Sense strand starting at position 7 of SEQ ID NO: 914842
gagacauucuguuugguau

SEQ ID NO: 1034747 - RNA, 19 nt, Artificial Sequence
  Description of Artificial Sequence: Synthetic oligonucleotide
  Antisense strand to SEQ ID NO: 1034746
auaccaaacagaaugucuc

SEQ ID NO: 1034748 - RNA, 19 nt, Artificial Sequence
  Description of Artificial Sequence: Synthetic oligonucleotide
  Sense strand starting at position 8 of SEQ ID NO: 914842
agacauucuguuugguaug

SEQ ID NO: 1034749 - RNA, 19 nt, Artificial Sequence
  Description of Artificial Sequence: Synthetic oligonucleotide
  Antisense strand to SEQ ID NO: 1034748
cauaccaaacagaaugucu

SEQ ID NO: 1034750 - RNA, 19 nt, Artificial Sequence
  Description of Artificial Sequence: Synthetic oligonucleotide
  Sense strand starting at position 135 of SEQ ID NO: 914842
uguauuaggcuccauagau

SEQ ID NO: 1034751 - RNA, 19 nt, Artificial Sequence
  Description of Artificial Sequence: Synthetic oligonucleotide
  Antisense strand to SEQ ID NO: 1034750
aucuauggagccuaauaca

SEQ ID NO: 1034752 - RNA, 19 nt, Artificial Sequence
  Description of Artificial Sequence: Synthetic oligonucleotide
  Sense strand starting at position 164 of SEQ ID NO: 914842
gagaucuugcucgauggua

SEQ ID NO: 1034753 - RNA, 19 nt, Artificial Sequence
  Description of Artificial Sequence: Synthetic oligonucleotide
  Antisense strand to SEQ ID NO: 1034752
uaccaucgagcaagaucuc

SEQ ID NO: 1034754 - RNA, 19 nt, Artificial Sequence
  Description of Artificial Sequence: Synthetic oligonucleotide
  Sense strand starting at position 235 of SEQ ID NO: 914842
uugucuccaucaguaauaa

SEQ ID NO: 1034755 - RNA, 19 nt, Artificial Sequence
  Description of Artificial Sequence: Synthetic oligonucleotide
  Antisense strand to SEQ ID NO: 1034754
uuauuacugauggagacaa

SEQ ID NO: 1034756 - RNA, 19 nt, Artificial Sequence
  Description of Artificial Sequence: Synthetic oligonucleotide
  Sense strand starting at position 236 of SEQ ID NO: 914842
ugucuccaucaguaauaac

SEQ ID NO: 1034757 - RNA, 19 nt, Artificial Sequence
  Description of Artificial Sequence: Synthetic oligonucleotide
  Antisense strand to SEQ ID NO: 1034756
guuauuacugauggagaca

SEQ ID NO: 1034758 - RNA, 19 nt, Artificial Sequence
  Description of Artificial Sequence: Synthetic oligonucleotide
  Sense strand starting at position 264 of SEQ ID NO: 914842
gaacaugugcaauaacgua

SEQ ID NO: 1034759 - RNA, 19 nt, Artificial Sequence
  Description of Artificial Sequence: Synthetic oligonucleotide
  Antisense strand to SEQ ID NO: 1034758
uacguuauugcacauguuc

SEQ ID NO: 1034760 - RNA, 19 nt, Artificial Sequence
  Description of Artificial Sequence: Synthetic oligonucleotide
  Sense strand starting at position 388 of SEQ ID NO: 914842
gugaguuaugaucauugcu

SEQ ID NO: 1034761 - RNA, 19 nt, Artificial Sequence
  Description of Artificial Sequence: Synthetic oligonucleotide
  Antisense strand to SEQ ID NO: 1034760
agcaaugaucauaacucac

SEQ ID NO: 1034762 - RNA, 19 nt, Artificial Sequence
  Description of Artificial Sequence: Synthetic oligonucleotide
  Sense strand starting at position 390 of SEQ ID NO: 914842
gaguuaugaucauugcuga

SEQ ID NO: 1034763 - RNA, 19 nt, Artificial Sequence
  Description of Artificial Sequence: Synthetic oligonucleotide
  Antisense strand to SEQ ID NO: 1034762
ucagcaaugaucauaacuc

SEQ ID NO: 1034764 - RNA, 19 nt, Artificial Sequence
  Description of Artificial Sequence: Synthetic oligonucleotide
  Sense strand starting at position 393 of SEQ ID NO: 914842
uuaugaucauugcugauau

SEQ ID NO: 1034765 - RNA, 19 nt, Artificial Sequence
  Description of Artificial Sequence: Synthetic oligonucleotide
  Antisense strand to SEQ ID NO: 1034764
auaucagcaaugaucauaa

SEQ ID NO: 1034766 - RNA, 19 nt, Artificial Sequence
  Description of Artificial Sequence: Synthetic oligonucleotide
  Sense strand starting at position 401 of SEQ ID NO: 914842
auugcugauauggguauua

SEQ ID NO: 1034767 - RNA, 19 nt, Artificial Sequence
  Description of Artificial Sequence: Synthetic oligonucleotide
  Antisense strand to SEQ ID NO: 1034766
uaauacccauaucagcaau

SEQ ID NO: 1034768 - RNA, 19 nt, Artificial Sequence
  Description of Artificial Sequence: Synthetic oligonucleotide
  Sense strand starting at position 403 of SEQ ID NO: 914842
ugcugauauggguauuagu

SEQ ID NO: 1034769 - RNA, 19 nt, Artificial Sequence
  Description of Artificial Sequence: Synthetic oligonucleotide
  Antisense strand to SEQ ID NO: 1034768
acuaauacccauaucagca

SEQ ID NO: 1034770 - RNA, 19 nt, Artificial Sequence
  Description of Artificial Sequence: Synthetic oligonucleotide
  Sense strand starting at position 477 of SEQ ID NO: 914842
uuugccuuaccagauugua

SEQ ID NO: 1034771 - RNA, 19 nt, Artificial Sequence
  Description of Artificial Sequence: Synthetic oligonucleotide
  Antisense strand to SEQ ID NO: 1034770
uacaaucugguaaggcaaa

SEQ ID NO: 1034772 - RNA, 19 nt, Artificial Sequence
  Description of Artificial Sequence: Synthetic oligonucleotide
  Sense strand starting at position 551 of SEQ ID NO: 914842
guuagcuaagaugauauau

SEQ ID NO: 1034773 - RNA, 19 nt, Artificial Sequence
  Description of Artificial Sequence: Synthetic oligonucleotide
  Antisense strand to SEQ ID NO: 1034772
auauaucaucuuagcuaac

SEQ ID NO: 1034774 - RNA, 19 nt, Artificial Sequence
  Description of Artificial Sequence: Synthetic oligonucleotide
  Sense strand starting at position 733 of SEQ ID NO: 914842
cagaaaucauaggcaggua

SEQ ID NO: 1034775 - RNA, 19 nt, Artificial Sequence
  Description of Artificial Sequence: Synthetic oligonucleotide
  Antisense strand to SEQ ID NO: 1034774
uaccugccuaugauuucug

SEQ ID NO: 1034776 - RNA, 19 nt, Artificial Sequence
  Description of Artificial Sequence: Synthetic oligonucleotide
  Sense strand starting at position 736 of SEQ ID NO: 914842
aaaucauaggcagguaauu

SEQ ID NO: 1034777 - RNA, 19 nt, Artificial Sequence
  Description of Artificial Sequence: Synthetic oligonucleotide
  Antisense strand to SEQ ID NO: 1034776
aauuaccugccuaugauuu

SEQ ID NO: 1034778 - RNA, 19 nt, Artificial Sequence
  Description of Artificial Sequence: Synthetic oligonucleotide
  Sense strand starting at position 782 of SEQ ID NO: 914842
cugauauuuccgggcaguc

SEQ ID NO: 1034779 - RNA, 19 nt, Artificial Sequence
  Description of Artificial Sequence: Synthetic oligonucleotide
  Antisense strand to SEQ ID NO: 1034778
gacugcccggaaauaucag

SEQ ID NO: 1034780 - RNA, 19 nt, Artificial Sequence
  Description of Artificial Sequence: Synthetic oligonucleotide
  Sense strand starting at position 828 of SEQ ID NO: 914842
cgcaguaccgcacuuuaau

SEQ ID NO: 1034781 - RNA, 19 nt, Artificial Sequence
  Description of Artificial Sequence: Synthetic oligonucleotide
  Antisense strand to SEQ ID NO: 1034780
auuaaagugcgguacugcg

SEQ ID NO: 1034782 - RNA, 19 nt, Artificial Sequence
  Description of Artificial Sequence: Synthetic oligonucleotide
  Sense strand starting at position 868 of SEQ ID NO: 914842
cagucaucugcagagacca

SEQ ID NO: 1034783 - RNA, 19 nt, Artificial Sequence
  Description of Artificial Sequence: Synthetic oligonucleotide
  Antisense strand to SEQ ID NO: 1034782
uggucucugcagaugacug

SEQ ID NO: 1034784 - RNA, 19 nt, Artificial Sequence
  Description of Artificial Sequence: Synthetic oligonucleotide
  Sense strand starting at position 921 of SEQ ID NO: 914842
gaucgcgugggcuuucaua

SEQ ID NO: 1034785 - RNA, 19 nt, Artificial Sequence
  Description of Artificial Sequence: Synthetic oligonucleotide
  Antisense strand to SEQ ID NO: 1034784
uaugaaagcccacgcgauc

SEQ ID NO: 1034786 - RNA, 19 nt, Artificial Sequence
  Description of Artificial Sequence: Synthetic oligonucleotide
  Sense strand starting at position 1032 of SEQ ID NO: 914842
guuauuuacuuguuucugu

SEQ ID NO: 1034787 - RNA, 19 nt, Artificial Sequence
  Description of Artificial Sequence: Synthetic oligonucleotide
  Antisense strand to SEQ ID NO: 1034786
acagaaacaaguaaauaac

SEQ ID NO: 1034788 - RNA, 19 nt, Artificial Sequence
  Description of Artificial Sequence: Synthetic oligonucleotide
  Sense strand starting at position 1069 of SEQ ID NO: 914842
cucugucaugauggaaaca

SEQ ID NO: 1034789 - RNA, 19 nt, Artificial Sequence
  Description of Artificial Sequence: Synthetic oligonucleotide
  Antisense strand to SEQ ID NO: 1034788
uguuuccaucaugacagag

SEQ ID NO: 1034790 - RNA, 19 nt, Artificial Sequence
  Description of Artificial Sequence: Synthetic oligonucleotide
  Sense strand starting at position 1135 of SEQ ID NO: 914842
caggcuuggcaauagcaaa

SEQ ID NO: 1034791 - RNA, 19 nt, Artificial Sequence
  Description of Artificial Sequence: Synthetic oligonucleotide
  Antisense strand to SEQ ID NO: 1034790
uuugcuauugccaagccug

SEQ ID NO: 1034792 - RNA, 19 nt, Artificial Sequence
  Description of Artificial Sequence: Synthetic oligonucleotide
  Sense strand starting at position 1370 of SEQ ID NO: 914842
gaaggaacucagggcugau

SEQ ID NO: 1034793 - RNA, 19 nt, Artificial Sequence
  Description of Artificial Sequence: Synthetic oligonucleotide
  Antisense strand to SEQ ID NO: 1034792
aucagcccugaguuccuuc

SEQ ID NO: 1034794 - RNA, 19 nt, Artificial Sequence
  Description of Artificial Sequence: Synthetic oligonucleotide
  Sense strand starting at position 1738 of SEQ ID NO: 914842
ccuacuugacgucauacaa

SEQ ID NO: 1034795 - RNA, 19 nt, Artificial Sequence
  Description of Artificial Sequence: Synthetic oligonucleotide
  Antisense strand to SEQ ID NO: 1034794
uuguaugacgucaaguagg

SEQ ID NO: 1034796 - RNA, 19 nt, Artificial Sequence
  Description of Artificial Sequence: Synthetic oligonucleotide
  Sense strand starting at position 2368 of SEQ ID NO: 914842
ggcuguaaacauuaucucu

SEQ ID NO: 1034797 - RNA, 19 nt, Artificial Sequence
  Description of Artificial Sequence: Synthetic oligonucleotide
  Antisense strand to SEQ ID NO: 1034796
agagauaauguuuacagcc

SEQ ID NO: 1034798 - RNA, 19 nt, Artificial Sequence
  Description of Artificial Sequence: Synthetic oligonucleotide
  Sense strand starting at position 2804 of SEQ ID NO: 914842
uugaaacaaccgugaauua

SEQ ID NO: 1034799 - RNA, 19 nt, Artificial Sequence
  Description of Artificial Sequence: Synthetic oligonucleotide
  Antisense strand to SEQ ID NO: 1034798
uaauucacgguuguuucaa

SEQ ID NO: 1034800 - RNA, 19 nt, Artificial Sequence
  Description of Artificial Sequence: Synthetic oligonucleotide
  Sense strand starting at position 2869 of SEQ ID NO: 914842
acacuuucuguuugaaaug

SEQ ID NO: 1034801 - RNA, 19 nt, Artificial Sequence
  Description of Artificial Sequence: Synthetic oligonucleotide
  Antisense strand to SEQ ID NO: 1034800
cauuucaaacagaaagugu

SEQ ID NO: 1034802 - RNA, 19 nt, Artificial Sequence
  Description of Artificial Sequence: Synthetic oligonucleotide
  Sense strand starting at position 2878 of SEQ ID NO: 914842
guuugaaauguagacuagu

SEQ ID NO: 1034803 - RNA, 19 nt, Artificial Sequence
  Description of Artificial Sequence: Synthetic oligonucleotide
  Antisense strand to SEQ ID NO: 1034802
acuagucuacauuucaaac

SEQ ID NO: 1034804 - RNA, 19 nt, Artificial Sequence
  Description of Artificial Sequence: Synthetic oligonucleotide
  Sense strand starting at position 2884 of SEQ ID NO: 914842
aauguagacuaguugauaa

SEQ ID NO: 1034805 - RNA, 19 nt, Artificial Sequence
  Description of Artificial Sequence: Synthetic oligonucleotide
  Antisense strand to SEQ ID NO: 1034804
uuaucaacuagucuacauu

SEQ ID NO: 1034806 - RNA, 19 nt, Artificial Sequence
  Description of Artificial Sequence: Synthetic oligonucleotide
  Sense strand starting at position 2886 of SEQ ID NO: 914842
uguagacuaguugauaauu

SEQ ID NO: 1034807 - RNA, 19 nt, Artificial Sequence
  Description of Artificial Sequence: Synthetic oligonucleotide
  Antisense strand to SEQ ID NO: 1034806
aauuaucaacuagucuaca

SEQ ID NO: 1034808 - RNA, 19 nt, Artificial Sequence
  Description of Artificial Sequence: Synthetic oligonucleotide
  Sense strand starting at position 3160 of SEQ ID NO: 914842
gaagcugggugaucaauau

SEQ ID NO: 1034809 - RNA, 19 nt, Artificial Sequence
  Description of Artificial Sequence: Synthetic oligonucleotide
  Antisense strand to SEQ ID NO: 1034808
auauugaucacccagcuuc

SEQ ID NO: 1034810 - RNA, 19 nt, Artificial Sequence
  Description of Artificial Sequence: Synthetic oligonucleotide
  Sense strand starting at position 3299 of SEQ ID NO: 914842
ugaaauaugcuacaguuaa

SEQ ID NO: 1034811 - RNA, 19 nt, Artificial Sequence
  Description of Artificial Sequence: Synthetic oligonucleotide
  Antisense strand to SEQ ID NO: 1034810
uuaacuguagcauauuuca

SEQ ID NO: 1034812 - RNA, 19 nt, Artificial Sequence
  Description of Artificial Sequence: Synthetic oligonucleotide
  Sense strand starting at position 3391 of SEQ ID NO: 914842
gguagaauacugcauaagu

SEQ ID NO: 1034813 - RNA, 19 nt, Artificial Sequence
  Description of Artificial Sequence: Synthetic oligonucleotide
  Antisense strand to SEQ ID NO: 1034812
acuuaugcaguauucuacc

SEQ ID NO: 1034814 - RNA, 19 nt, Artificial Sequence
  Description of Artificial Sequence: Synthetic oligonucleotide
  Sense strand starting at position 3402 of SEQ ID NO: 914842
gcauaaguauaaucucaug

SEQ ID NO: 1034815 - RNA, 19 nt, Artificial Sequence
  Description of Artificial Sequence: Synthetic oligonucleotide
  Antisense strand to SEQ ID NO: 1034814
caugagauuauacuuaugc

SEQ ID NO: 1034816 - RNA, 19 nt, Artificial Sequence
  Description of Artificial Sequence: Synthetic oligonucleotide
  Sense strand starting at position 3425 of SEQ ID NO: 914842
uguuuauauguagaguuag

SEQ ID NO: 1034817 - RNA, 19 nt, Artificial Sequence
  Description of Artificial Sequence: Synthetic oligonucleotide
  Antisense strand to SEQ ID NO: 1034816
cuaacucuacauauaaaca

SEQ ID NO: 1034818 - RNA, 19 nt, Artificial Sequence
  Description of Artificial Sequence: Synthetic oligonucleotide
  Sense strand starting at position 3664 of SEQ ID NO: 914842
gcauacagugugcuuguau

SEQ ID NO: 1034819 - RNA, 19 nt, Artificial Sequence
  Description of Artificial Sequence: Synthetic oligonucleotide
  Antisense strand to SEQ ID NO: 1034818
auacaagcacacuguaugc

SEQ ID NO: 1034820 - RNA, 19 nt, Artificial Sequence
  Description of Artificial Sequence: Synthetic oligonucleotide
  Sense strand starting at position 3679 of SEQ ID NO: 914842
guaucuuuaguagacauca

SEQ ID NO: 1034821 - RNA, 19 nt, Artificial Sequence
  Description of Artificial Sequence: Synthetic oligonucleotide
  Antisense strand to SEQ ID NO: 1034820
ugaugucuacuaaagauac

SEQ ID NO: 1034822 - RNA, 19 nt, Artificial Sequence
  Description of Artificial Sequence: Synthetic oligonucleotide
  Sense strand starting at position 3684 of SEQ ID NO: 914842
uuuaguagacaucaguaca

SEQ ID NO: 1034823 - RNA, 19 nt, Artificial Sequence
  Description of Artificial Sequence: Synthetic oligonucleotide
  Antisense strand to SEQ ID NO: 1034822
uguacugaugucuacuaaa

SEQ ID NO: 1034824 - RNA, 19 nt, Artificial Sequence
  Description of Artificial Sequence: Synthetic oligonucleotide
  Sense strand starting at position 45 of SEQ ID NO: 914843
agguuaggauuguuuccua

SEQ ID NO: 1034825 - RNA, 19 nt, Artificial Sequence
  Description of Artificial Sequence: Synthetic oligonucleotide
  Antisense strand to SEQ ID NO: 1034824
uaggaaacaauccuaaccu

SEQ ID NO: 1034826 - RNA, 19 nt, Artificial Sequence
  Description of Artificial Sequence: Synthetic oligonucleotide
  Sense strand starting at position 301 of SEQ ID NO: 914843
cagguuaucucaguaagaa

SEQ ID NO: 1034827 - RNA, 19 nt, Artificial Sequence
  Description of Artificial Sequence: Synthetic oligonucleotide
  Antisense strand to SEQ ID NO: 1034826
uucuuacugagauaaccug

SEQ ID NO: 1034828 - RNA, 19 nt, Artificial Sequence
  Description of Artificial Sequence: Synthetic oligonucleotide
  Sense strand starting at position 430 of SEQ ID NO: 914843
cccuaaacuuacccgagau

SEQ ID NO: 1034829 - RNA, 19 nt, Artificial Sequence
  Description of Artificial Sequence: Synthetic oligonucleotide
  Antisense strand to SEQ ID NO: 1034828
aucucggguaaguuuaggg

SEQ ID NO: 1034830 - RNA, 19 nt, Artificial Sequence
  Description of Artificial Sequence: Synthetic oligonucleotide
  Sense strand starting at position 443 of SEQ ID NO: 914843
cgagaugauaucugugagu

SEQ ID NO: 1034831 - RNA, 19 nt, Artificial Sequence
  Description of Artificial Sequence: Synthetic oligonucleotide
  Antisense strand to SEQ ID NO: 1034830
acucacagauaucaucucg

SEQ ID NO: 1034832 - RNA, 19 nt, Artificial Sequence
  Description of Artificial Sequence: Synthetic oligonucleotide
  Sense strand starting at position 445 of SEQ ID NO: 914843
agaugauaucugugaguaa

SEQ ID NO: 1034833 - RNA, 19 nt, Artificial Sequence
  Description of Artificial Sequence: Synthetic oligonucleotide
  Antisense strand to SEQ ID NO: 1034832
uuacucacagauaucaucu

SEQ ID NO: 1034834 - RNA, 19 nt, Artificial Sequence
  Description of Artificial Sequence: Synthetic oligonucleotide
  Sense strand starting at position 477 of SEQ ID NO: 914843
uggagaaauuccucuguau

SEQ ID NO: 1034835 - RNA, 19 nt, Artificial Sequence
  Description of Artificial Sequence: Synthetic oligonucleotide
  Antisense strand to SEQ ID NO: 1034834
auacagaggaauuucucca

SEQ ID NO: 1034836 - RNA, 19 nt, Artificial Sequence
  Description of Artificial Sequence: Synthetic oligonucleotide
  Sense strand starting at position 526 of SEQ ID NO: 914843
agugcuuggcagccguaua

SEQ ID NO: 1034837 - RNA, 19 nt, Artificial Sequence
  Description of Artificial Sequence: Synthetic oligonucleotide
  Antisense strand to SEQ ID NO: 1034836
uauacggcugccaagcacu

SEQ ID NO: 1034838 - RNA, 19 nt, Artificial Sequence
  Description of Artificial Sequence: Synthetic oligonucleotide
  Sense strand starting at position 623 of SEQ ID NO: 914843
ccgagagcauuccucaaag

SEQ ID NO: 1034839 - RNA, 19 nt, Artificial Sequence
  Description of Artificial Sequence: Synthetic oligonucleotide
  Antisense strand to SEQ ID NO: 1034838
cuuugaggaaugcucucgg

SEQ ID NO: 1034840 - RNA, 19 nt, Artificial Sequence
  Description of Artificial Sequence: Synthetic oligonucleotide
  Sense strand starting at position 642 of SEQ ID NO: 914843
agagaugucagcugauaca

SEQ ID NO: 1034841 - RNA, 19 nt, Artificial Sequence
  Description of Artificial Sequence: Synthetic oligonucleotide
  Antisense strand to SEQ ID NO: 1034840
uguaucagcugacaucucu

SEQ ID NO: 1034842 - RNA, 19 nt, Artificial Sequence
  Description of Artificial Sequence: Synthetic oligonucleotide
  Sense strand starting at position 796 of SEQ ID NO: 914843
ucagguuggaagugaacau

SEQ ID NO: 1034843 - RNA, 19 nt, Artificial Sequence
  Description of Artificial Sequence: Synthetic oligonucleotide
  Antisense strand to SEQ ID NO: 1034842
auguucacuuccaaccuga

SEQ ID NO: 1034844 - RNA, 19 nt, Artificial Sequence
  Description of Artificial Sequence: Synthetic oligonucleotide
  Sense strand starting at position 948 of SEQ ID NO: 914843
ccugaaugugaccgaucuu

SEQ ID NO: 1034845 - RNA, 19 nt, Artificial Sequence
  Description of Artificial Sequence: Synthetic oligonucleotide
  Antisense strand to SEQ ID NO: 1034844
aagaucggucacauucagg

SEQ ID NO: 1034846 - RNA, 19 nt, Artificial Sequence
  Description of Artificial Sequence: Synthetic oligonucleotide
  Sense strand starting at position 949 of SEQ ID NO: 914843
cugaaugugaccgaucuuu

SEQ ID NO: 1034847 - RNA, 19 nt, Artificial Sequence
  Description of Artificial Sequence: Synthetic oligonucleotide
  Antisense strand to SEQ ID NO: 1034846
aaagaucggucacauucag

SEQ ID NO: 1034848 - RNA, 19 nt, Artificial Sequence
  Description of Artificial Sequence: Synthetic oligonucleotide
  Sense strand starting at position 954 of SEQ ID NO: 914843
ugugaccgaucuuugaaag

SEQ ID NO: 1034849 - RNA, 19 nt, Artificial Sequence
  Description of Artificial Sequence: Synthetic oligonucleotide
  Antisense strand to SEQ ID NO: 1034848
cuuucaaagaucggucaca

SEQ ID NO: 1034850 - RNA, 19 nt, Artificial Sequence
  Description of Artificial Sequence: Synthetic oligonucleotide
  Sense strand starting at position 1076 of SEQ ID NO: 914843
ucuugaguaaccugaggaa

SEQ ID NO: 1034851 - RNA, 19 nt, Artificial Sequence
  Description of Artificial Sequence: Synthetic oligonucleotide
  Antisense strand to SEQ ID NO: 1034850
uuccucagguuacucaaga

SEQ ID NO: 1034852 - RNA, 19 nt, Artificial Sequence
  Description of Artificial Sequence: Synthetic oligonucleotide
  Sense strand starting at position 1310 of SEQ ID NO: 914843
acggaauaauuccuuucca

SEQ ID NO: 1034853 - RNA, 19 nt, Artificial Sequence
  Description of Artificial Sequence: Synthetic oligonucleotide
  Antisense strand to SEQ ID NO: 1034852
uggaaaggaauuauuccgu

SEQ ID NO: 1034854 - RNA, 19 nt, Artificial Sequence
  Description of Artificial Sequence: Synthetic oligonucleotide
  Sense strand starting at position 1311 of SEQ ID NO: 914843
cggaauaauuccuuuccau

SEQ ID NO: 1034855 - RNA, 19 nt, Artificial Sequence
  Description of Artificial Sequence: Synthetic oligonucleotide
  Antisense strand to SEQ ID NO: 1034854
auggaaaggaauuauuccg

SEQ ID NO: 1034856 - RNA, 19 nt, Artificial Sequence
  Description of Artificial Sequence: Synthetic oligonucleotide
  Sense strand starting at position 1540 of SEQ ID NO: 914843
gaagccuagccugggauau

SEQ ID NO: 1034857 - RNA, 19 nt, Artificial Sequence
  Description of Artificial Sequence: Synthetic oligonucleotide
  Antisense strand to SEQ ID NO: 1034856
auaucccaggcuaggcuuc

SEQ ID NO: 1034858 - RNA, 19 nt, Artificial Sequence
  Description of Artificial Sequence: Synthetic oligonucleotide
  Sense strand starting at position 2458 of SEQ ID NO: 914843
cuggcaaaucuuggagauc

SEQ ID NO: 1034859 - RNA, 19 nt, Artificial Sequence
  Description of Artificial Sequence: Synthetic oligonucleotide
  Antisense strand to SEQ ID NO: 1034858
gaucuccaagauuugccag

SEQ ID NO: 1034860 - RNA, 19 nt, Artificial Sequence
  Description of Artificial Sequence: Synthetic oligonucleotide
  Sense strand starting at position 2470 of SEQ ID NO: 914843
ggagaucugacuugcagug

SEQ ID NO: 1034861 - RNA, 19 nt, Artificial Sequence
  Description of Artificial Sequence: Synthetic oligonucleotide
  Antisense strand to SEQ ID NO: 1034860
cacugcaagucagaucucc

SEQ ID NO: 1034862 - RNA, 19 nt, Artificial Sequence
  Description of Artificial Sequence: Synthetic oligonucleotide
  Sense strand starting at position 2633 of SEQ ID NO: 914843
cucagagcccuguaauaau

SEQ ID NO: 1034863 - RNA, 19 nt, Artificial Sequence
  Description of Artificial Sequence: Synthetic oligonucleotide
  Antisense strand to SEQ ID NO: 1034862
auuauuacagggcucugag

SEQ ID NO: 1034864 - RNA, 19 nt, Artificial Sequence
  Description of Artificial Sequence: Synthetic oligonucleotide
  Sense strand starting at position 2652 of SEQ ID NO: 914843
aguaccuagcguuaauuga

SEQ ID NO: 1034865 - RNA, 19 nt, Artificial Sequence
  Description of Artificial Sequence: Synthetic oligonucleotide
  Antisense strand to SEQ ID NO: 1034864
ucaauuaacgcuagguacu

SEQ ID NO: 1034866 - RNA, 19 nt, Artificial Sequence
  Description of Artificial Sequence: Synthetic oligonucleotide
  Sense strand starting at position 2895 of SEQ ID NO: 914843
gugugauugcucagugguu

SEQ ID NO: 1034867 - RNA, 19 nt, Artificial Sequence
  Description of Artificial Sequence: Synthetic oligonucleotide
  Antisense strand to SEQ ID NO: 1034866
aaccacugagcaaucacac

SEQ ID NO: 1034868 - RNA, 19 nt, Artificial Sequence
  Description of Artificial Sequence: Synthetic oligonucleotide
  Sense strand starting at position 2919 of SEQ ID NO: 914843
uugcaugaaugaguaugua

SEQ ID NO: 1034869 - RNA, 19 nt, Artificial Sequence
  Description of Artificial Sequence: Synthetic oligonucleotide
  Antisense strand to SEQ ID NO: 1034868
uacauacucauucaugcaa

SEQ ID NO: 1034870 - RNA, 19 nt, Artificial Sequence
  Description of Artificial Sequence: Synthetic oligonucleotide
  Sense strand starting at position 2922 of SEQ ID NO: 914843
caugaaugaguauguacau

SEQ ID NO: 1034871 - RNA, 19 nt, Artificial Sequence
  Description of Artificial Sequence: Synthetic oligonucleotide
  Antisense strand to SEQ ID NO: 1034870
auguacauacucauucaug

SEQ ID NO: 1034872 - RNA, 19 nt, Artificial Sequence
  Description of Artificial Sequence: Synthetic oligonucleotide
  Sense strand starting at position 2923 of SEQ ID NO: 914843
augaaugaguauguacaua

SEQ ID NO: 1034873 - RNA, 19 nt, Artificial Sequence
  Description of Artificial Sequence: Synthetic oligonucleotide
  Antisense strand to SEQ ID NO: 1034872
uauguacauacucauucau

SEQ ID NO: 1034874 - RNA, 19 nt, Artificial Sequence
  Description of Artificial Sequence: Synthetic oligonucleotide
  Sense strand starting at position 3118 of SEQ ID NO: 914843
agagucugugagggaucuu

SEQ ID NO: 1034875 - RNA, 19 nt, Artificial Sequence
  Description of Artificial Sequence: Synthetic oligonucleotide
  Antisense strand to SEQ ID NO: 1034874
aagaucccucacagacucu

SEQ ID NO: 1034876 - RNA, 19 nt, Artificial Sequence
  Description of Artificial Sequence: Synthetic oligonucleotide
  Sense strand starting at position 3144 of SEQ ID NO: 914843
ugaaguucuuagcuugaga

SEQ ID NO: 1034877 - RNA, 19 nt, Artificial Sequence
  Description of Artificial Sequence: Synthetic oligonucleotide
  Antisense strand to SEQ ID NO: 1034876
ucucaagcuaagaacuuca

SEQ ID NO: 1034878 - RNA, 19 nt, Artificial Sequence
  Description of Artificial Sequence: Synthetic oligonucleotide
  Sense strand starting at position 3146 of SEQ ID NO: 914843
aaguucuuagcuugagaac

SEQ ID NO: 1034879 - RNA, 19 nt, Artificial Sequence
  Description of Artificial Sequence: Synthetic oligonucleotide
  Antisense strand to SEQ ID NO: 1034878
guucucaagcuaagaacuu

SEQ ID NO: 1034880 - RNA, 19 nt, Artificial Sequence
  Description of Artificial Sequence: Synthetic oligonucleotide
  Sense strand starting at position 3155 of SEQ ID NO: 914843
gcuugagaaccugguauaa

SEQ ID NO: 1034881 - RNA, 19 nt, Artificial Sequence
  Description of Artificial Sequence: Synthetic oligonucleotide
  Antisense strand to SEQ ID NO: 1034880
uuauaccagguucucaagc

SEQ ID NO: 1034882 - RNA, 19 nt, Artificial Sequence
  Description of Artificial Sequence: Synthetic oligonucleotide
  Sense strand starting at position 3232 of SEQ ID NO: 914843
cuuagucugacaggagaac

SEQ ID NO: 1034883 - RNA, 19 nt, Artificial Sequence
  Description of Artificial Sequence: Synthetic oligonucleotide
  Antisense strand to SEQ ID NO: 1034882
guucuccugucagacuaag

SEQ ID NO: 1034884 - RNA, 19 nt, Artificial Sequence
  Description of Artificial Sequence: Synthetic oligonucleotide
  Sense strand starting at position 3253 of SEQ ID NO: 914843
agacuacugcuuuagcaga

SEQ ID NO: 1034885 - RNA, 19 nt, Artificial Sequence
  Description of Artificial Sequence: Synthetic oligonucleotide
  Antisense strand to SEQ ID NO: 1034884
ucugcuaaagcaguagucu

SEQ ID NO: 1034886 - RNA, 19 nt, Artificial Sequence
  Description of Artificial Sequence: Synthetic oligonucleotide
  Sense strand starting at position 3255 of SEQ ID NO: 914843
acuacugcuuuagcagaaa

SEQ ID NO: 1034887 - RNA, 19 nt, Artificial Sequence
  Description of Artificial Sequence: Synthetic oligonucleotide
  Antisense strand to SEQ ID NO: 1034886
uuucugcuaaagcaguagu

SEQ ID NO: 1034888 - RNA, 19 nt, Artificial Sequence
  Description of Artificial Sequence: Synthetic oligonucleotide
  Sense strand starting at position 3338 of SEQ ID NO: 914843
uaguaagagucuuucugag

SEQ ID NO: 1034889 - RNA, 19 nt, Artificial Sequence
  Description of Artificial Sequence: Synthetic oligonucleotide
  Antisense strand to SEQ ID NO: 1034888
cucagaaagacucuuacua

SEQ ID NO: 1034890 - RNA, 19 nt, Artificial Sequence
  Description of Artificial Sequence: Synthetic oligonucleotide
  Sense strand starting at position 3340 of SEQ ID NO: 914843
guaagagucuuucugagga

SEQ ID NO: 1034891 - RNA, 19 nt, Artificial Sequence
  Description of Artificial Sequence: Synthetic oligonucleotide
  Antisense strand to SEQ ID NO: 1034890
uccucagaaagacucuuac

SEQ ID NO: 1034892 - RNA, 19 nt, Artificial Sequence
  Description of Artificial Sequence: Synthetic oligonucleotide
  Sense strand starting at position 3449 of SEQ ID NO: 914843
cagggagccuuuccuggau

SEQ ID NO: 1034893 - RNA, 19 nt, Artificial Sequence
  Description of Artificial Sequence: Synthetic oligonucleotide
  Antisense strand to SEQ ID NO: 1034892
auccaggaaaggcucccug

SEQ ID NO: 1034894 - RNA, 19 nt, Artificial Sequence
  Description of Artificial Sequence: Synthetic oligonucleotide
  Sense strand starting at position 3652 of SEQ ID NO: 914843
agguaauacuuacuaaugu

SEQ ID NO: 1034895 - RNA, 19 nt, Artificial Sequence
  Description of Artificial Sequence: Synthetic oligonucleotide
  Antisense strand to SEQ ID NO: 1034894
acauuaguaaguauuaccu

SEQ ID NO: 1034896 - RNA, 19 nt, Artificial Sequence
  Description of Artificial Sequence: Synthetic oligonucleotide
  Sense strand starting at position 3669 of SEQ ID NO: 914843
guuauuugggucuggguca

SEQ ID NO: 1034897 - RNA, 19 nt, Artificial Sequence
  Description of Artificial Sequence: Synthetic oligonucleotide
  Antisense strand to SEQ ID NO: 1034896
ugacccagacccaaauaac

SEQ ID NO: 1034898 - RNA, 19 nt, Artificial Sequence
  Description of Artificial Sequence: Synthetic oligonucleotide
  Sense strand starting at position 3676 of SEQ ID NO: 914843
gggucugggucaagaaaga

SEQ ID NO: 1034899 - RNA, 19 nt, Artificial Sequence
  Description of Artificial Sequence: Synthetic oligonucleotide
  Antisense strand to SEQ ID NO: 1034898
ucuuucuugacccagaccc

SEQ ID NO: 1034900 - RNA, 19 nt, Artificial Sequence
  Description of Artificial Sequence: Synthetic oligonucleotide
  Sense strand starting at position 3781 of SEQ ID NO: 914843
agcauuaaaccaggugacu

SEQ ID NO: 1034901 - RNA, 19 nt, Artificial Sequence
  Description of Artificial Sequence: Synthetic oligonucleotide
  Antisense strand to SEQ ID NO: 1034900
agucaccugguuuaaugcu

SEQ ID NO: 1034902 - RNA, 19 nt, Artificial Sequence
  Description of Artificial Sequence: Synthetic oligonucleotide
  Sense strand starting at position 3794 of SEQ ID NO: 914843
gugacuccagcugaaguua

SEQ ID NO: 1034903 - RNA, 19 nt, Artificial Sequence
  Description of Artificial Sequence: Synthetic oligonucleotide
  Antisense strand to SEQ ID NO: 1034902
uaacuucagcuggagucac

SEQ ID NO: 1034904 - RNA, 19 nt, Artificial Sequence
  Description of Artificial Sequence: Synthetic oligonucleotide
  Sense strand starting at position 255 of SEQ ID NO: 914844
cagguuaucucaguaagaa

SEQ ID NO: 1034905 - RNA, 19 nt, Artificial Sequence
  Description of Artificial Sequence: Synthetic oligonucleotide
  Antisense strand to SEQ ID NO: 1034904
uucuuacugagauaaccug

SEQ ID NO: 1034906 - RNA, 19 nt, Artificial Sequence
  Description of Artificial Sequence: Synthetic oligonucleotide
  Sense strand starting at position 384 of SEQ ID NO: 914844
cccuaaacuuacccgagau

SEQ ID NO: 1034907 - RNA, 19 nt, Artificial Sequence
  Description of Artificial Sequence: Synthetic oligonucleotide
  Antisense strand to SEQ ID NO: 1034906
aucucggguaaguuuaggg

SEQ ID NO: 1034908 - RNA, 19 nt, Artificial Sequence
  Description of Artificial Sequence: Synthetic oligonucleotide
  Sense strand starting at position 397 of SEQ ID NO: 914844
cgagaugauaucugugagu

SEQ ID NO: 1034909 - RNA, 19 nt, Artificial Sequence
  Description of Artificial Sequence: Synthetic oligonucleotide
  Antisense strand to SEQ ID NO: 1034908
acucacagauaucaucucg

SEQ ID NO: 1034910 - RNA, 19 nt, Artificial Sequence
  Description of Artificial Sequence: Synthetic oligonucleotide
  Sense strand starting at position 399 of SEQ ID NO: 914844
agaugauaucugugaguaa

SEQ ID NO: 1034911 - RNA, 19 nt, Artificial Sequence
  Description of Artificial Sequence: Synthetic oligonucleotide
  Antisense strand to SEQ ID NO: 1034910
uuacucacagauaucaucu

SEQ ID NO: 1034912 - RNA, 19 nt, Artificial Sequence
  Description of Artificial Sequence: Synthetic oligonucleotide
  Sense strand starting at position 431 of SEQ ID NO: 914844
uggagaaauuccucuguau

SEQ ID NO: 1034913 - RNA, 19 nt, Artificial Sequence
  Description of Artificial Sequence: Synthetic oligonucleotide
  Antisense strand to SEQ ID NO: 1034912
auacagaggaauuucucca

SEQ ID NO: 1034914 - RNA, 19 nt, Artificial Sequence
  Description of Artificial Sequence: Synthetic oligonucleotide
  Sense strand starting at position 480 of SEQ ID NO: 914844
agugcuuggcagccguaua

SEQ ID NO: 1034915 - RNA, 19 nt, Artificial Sequence
  Description of Artificial Sequence: Synthetic oligonucleotide
  Antisense strand to SEQ ID NO: 1034914
uauacggcugccaagcacu

SEQ ID NO: 1034916 - RNA, 19 nt, Artificial Sequence
  Description of Artificial Sequence: Synthetic oligonucleotide
  Sense strand starting at position 577 of SEQ ID NO: 914844
ccgagagcauuccucaaag

SEQ ID NO: 1034917 - RNA, 19 nt, Artificial Sequence
  Description of Artificial Sequence: Synthetic oligonucleotide
  Antisense strand to SEQ ID NO: 1034916
cuuugaggaaugcucucgg

SEQ ID NO: 1034918 - RNA, 19 nt, Artificial Sequence
  Description of Artificial Sequence: Synthetic oligonucleotide
  Sense strand starting at position 596 of SEQ ID NO: 914844
agagaugucagcugauaca

SEQ ID NO: 1034919 - RNA, 19 nt, Artificial Sequence
  Description of Artificial Sequence: Synthetic oligonucleotide
  Antisense strand to SEQ ID NO: 1034918
uguaucagcugacaucucu

SEQ ID NO: 1034920 - RNA, 19 nt, Artificial Sequence
  Description of Artificial Sequence: Synthetic oligonucleotide
  Sense strand starting at position 750 of SEQ ID NO: 914844
ucagguuggaagugaacau

SEQ ID NO: 1034921 - RNA, 19 nt, Artificial Sequence
  Description of Artificial Sequence: Synthetic oligonucleotide
  Antisense strand to SEQ ID NO: 1034920
auguucacuuccaaccuga

SEQ ID NO: 1034922 - RNA, 19 nt, Artificial Sequence
  Description of Artificial Sequence: Synthetic oligonucleotide
  Sense strand starting at position 902 of SEQ ID NO: 914844
ccugaaugugaccgaucuu

SEQ ID NO: 1034923 - RNA, 19 nt, Artificial Sequence
  Description of Artificial Sequence: Synthetic oligonucleotide
  Antisense strand to SEQ ID NO: 1034922
aagaucggucacauucagg

SEQ ID NO: 1034924 - RNA, 19 nt, Artificial Sequence
  Description of Artificial Sequence: Synthetic oligonucleotide
  Sense strand starting at position 903 of SEQ ID NO: 914844
cugaaugugaccgaucuuu

SEQ ID NO: 1034925 - RNA, 19 nt, Artificial Sequence
  Description of Artificial Sequence: Synthetic oligonucleotide
  Antisense strand to SEQ ID NO: 1034924
aaagaucggucacauucag

SEQ ID NO: 1034926 - RNA, 19 nt, Artificial Sequence
  Description of Artificial Sequence: Synthetic oligonucleotide
  Sense strand starting at position 908 of SEQ ID NO: 914844
ugugaccgaucuuugaaag

SEQ ID NO: 1034927 - RNA, 19 nt, Artificial Sequence
  Description of Artificial Sequence: Synthetic oligonucleotide
  Antisense strand to SEQ ID NO: 1034926
cuuucaaagaucggucaca

SEQ ID NO: 1034928 - RNA, 19 nt, Artificial Sequence
  Description of Artificial Sequence: Synthetic oligonucleotide
  Sense strand starting at position 1030 of SEQ ID NO: 914844
ucuugaguaaccugaggaa

SEQ ID NO: 1034929 - RNA, 19 nt, Artificial Sequence
  Description of Artificial Sequence: Synthetic oligonucleotide
  Antisense strand to SEQ ID NO: 1034928
uuccucagguuacucaaga

SEQ ID NO: 1034930 - RNA, 19 nt, Artificial Sequence
  Description of Artificial Sequence: Synthetic oligonucleotide
  Sense strand starting at position 1150 of SEQ ID NO: 914844
caugaugucccugacgcua

SEQ ID NO: 1034931 - RNA, 19 nt, Artificial Sequence
  Description of Artificial Sequence: Synthetic oligonucleotide
  Antisense strand to SEQ ID NO: 1034930
uagcgucagggacaucaug

SEQ ID NO: 1034932 - RNA, 19 nt, Artificial Sequence
  Description of Artificial Sequence: Synthetic oligonucleotide
  Sense strand starting at position 1264 of SEQ ID NO: 914844
acggaauaauuccuuucca

SEQ ID NO: 1034933 - RNA, 19 nt, Artificial Sequence
  Description of Artificial Sequence: Synthetic oligonucleotide
  Antisense strand to SEQ ID NO: 1034932
uggaaaggaauuauuccgu

SEQ ID NO: 1034934 - RNA, 19 nt, Artificial Sequence
  Description of Artificial Sequence: Synthetic oligonucleotide
  Sense strand starting at position 1265 of SEQ ID NO: 914844
cggaauaauuccuuuccau

SEQ ID NO: 1034935 - RNA, 19 nt, Artificial Sequence
  Description of Artificial Sequence: Synthetic oligonucleotide
  Antisense strand to SEQ ID NO: 1034934
auggaaaggaauuauuccg

SEQ ID NO: 1034936 - RNA, 19 nt, Artificial Sequence
  Description of Artificial Sequence: Synthetic oligonucleotide
  Sense strand starting at position 1494 of SEQ ID NO: 914844
gaagccuagccugggauau

SEQ ID NO: 1034937 - RNA, 19 nt, Artificial Sequence
  Description of Artificial Sequence: Synthetic oligonucleotide
  Antisense strand to SEQ ID NO: 1034936
auaucccaggcuaggcuuc

SEQ ID NO: 1034938 - RNA, 19 nt, Artificial Sequence
  Description of Artificial Sequence: Synthetic oligonucleotide
  Sense strand starting at position 2412 of SEQ ID NO: 914844
cuggcaaaucuuggagauc

SEQ ID NO: 1034939 - RNA, 19 nt, Artificial Sequence
  Description of Artificial Sequence: Synthetic oligonucleotide
  Antisense strand to SEQ ID NO: 1034938
gaucuccaagauuugccag

SEQ ID NO: 1034940 - RNA, 19 nt, Artificial Sequence
  Description of Artificial Sequence: Synthetic oligonucleotide
  Sense strand starting at position 2424 of SEQ ID NO: 914844
ggagaucugacuugcagug

SEQ ID NO: 1034941 - RNA, 19 nt, Artificial Sequence
  Description of Artificial Sequence: Synthetic oligonucleotide
  Antisense strand to SEQ ID NO: 1034940
cacugcaagucagaucucc

SEQ ID NO: 1034942 - RNA, 19 nt, Artificial Sequence
  Description of Artificial Sequence: Synthetic oligonucleotide
  Sense strand starting at position 2587 of SEQ ID NO: 914844
cucagagcccuguaauaau

SEQ ID NO: 1034943 - RNA, 19 nt, Artificial Sequence
  Description of Artificial Sequence: Synthetic oligonucleotide
  Antisense strand to SEQ ID NO: 1034942
auuauuacagggcucugag

SEQ ID NO: 1034944 - RNA, 19 nt, Artificial Sequence
  Description of Artificial Sequence: Synthetic oligonucleotide
  Sense strand starting at position 2606 of SEQ ID NO: 914844
aguaccuagcguuaauuga

SEQ ID NO: 1034945 - RNA, 19 nt, Artificial Sequence
  Description of Artificial Sequence: Synthetic oligonucleotide
  Antisense strand to SEQ ID NO: 1034944
ucaauuaacgcuagguacu

SEQ ID NO: 1034946 - RNA, 19 nt, Artificial Sequence
  Description of Artificial Sequence: Synthetic oligonucleotide
  Sense strand starting at position 2849 of SEQ ID NO: 914844
gugugauugcucagugguu

SEQ ID NO: 1034947 - RNA, 19 nt, Artificial Sequence
  Description of Artificial Sequence: Synthetic oligonucleotide
  Antisense strand to SEQ ID NO: 1034946
aaccacugagcaaucacac

SEQ ID NO: 1034948 - RNA, 19 nt, Artificial Sequence
  Description of Artificial Sequence: Synthetic oligonucleotide
  Sense strand starting at position 2873 of SEQ ID NO: 914844
uugcaugaaugaguaugua

SEQ ID NO: 1034949 - RNA, 19 nt, Artificial Sequence
  Description of Artificial Sequence: Synthetic oligonucleotide
  Antisense strand to SEQ ID NO: 1034948
uacauacucauucaugcaa

SEQ ID NO: 1034950 - RNA, 19 nt, Artificial Sequence
  Description of Artificial Sequence: Synthetic oligonucleotide
  Sense strand starting at position 2876 of SEQ ID NO: 914844
caugaaugaguauguacau

SEQ ID NO: 1034951 - RNA, 19 nt, Artificial Sequence
  Description of Artificial Sequence: Synthetic oligonucleotide
  Antisense strand to SEQ ID NO: 1034950
auguacauacucauucaug

SEQ ID NO: 1034952 - RNA, 19 nt, Artificial Sequence
  Description of Artificial Sequence: Synthetic oligonucleotide
  Sense strand starting at position 2877 of SEQ ID NO: 914844
augaaugaguauguacaua

SEQ ID NO: 1034953 - RNA, 19 nt, Artificial Sequence
  Description of Artificial Sequence: Synthetic oligonucleotide
  Antisense strand to SEQ ID NO: 1034952
uauguacauacucauucau

SEQ ID NO: 1034954 - RNA, 19 nt, Artificial Sequence
  Description of Artificial Sequence: Synthetic oligonucleotide
  Sense strand starting at position 3072 of SEQ ID NO: 914844
agagucugugagggaucuu

SEQ ID NO: 1034955 - RNA, 19 nt, Artificial Sequence
  Description of Artificial Sequence: Synthetic oligonucleotide
  Antisense strand to SEQ ID NO: 1034954
aagaucccucacagacucu

SEQ ID NO: 1034956 - RNA, 19 nt, Artificial Sequence
  Description of Artificial Sequence: Synthetic oligonucleotide
  Sense strand starting at position 3098 of SEQ ID NO: 914844
ugaaguucuuagcuugaga

SEQ ID NO: 1034957 - RNA, 19 nt, Artificial Sequence
  Description of Artificial Sequence: Synthetic oligonucleotide
  Antisense strand to SEQ ID NO: 1034956
ucucaagcuaagaacuuca

SEQ ID NO: 1034958 - RNA, 19 nt, Artificial Sequence
  Description of Artificial Sequence: Synthetic oligonucleotide
  Sense strand starting at position 3100 of SEQ ID NO: 914844
aaguucuuagcuugagaac

SEQ ID NO: 1034959 - RNA, 19 nt, Artificial Sequence
  Description of Artificial Sequence: Synthetic oligonucleotide
  Antisense strand to SEQ ID NO: 1034958
guucucaagcuaagaacuu

SEQ ID NO: 1034960 - RNA, 19 nt, Artificial Sequence
  Description of Artificial Sequence: Synthetic oligonucleotide
  Sense strand starting at position 3109 of SEQ ID NO: 914844
gcuugagaaccugguauaa

SEQ ID NO: 1034961 - RNA, 19 nt, Artificial Sequence
  Description of Artificial Sequence: Synthetic oligonucleotide
  Antisense strand to SEQ ID NO: 1034960
uuauaccagguucucaagc

SEQ ID NO: 1034962 - RNA, 19 nt, Artificial Sequence
  Description of Artificial Sequence: Synthetic oligonucleotide
  Sense strand starting at position 3186 of SEQ ID NO: 914844
cuuagucugacaggagaac

SEQ ID NO: 1034963 - RNA, 19 nt, Artificial Sequence
  Description of Artificial Sequence: Synthetic oligonucleotide
  Antisense strand to SEQ ID NO: 1034962
guucuccugucagacuaag

SEQ ID NO: 1034964 - RNA, 19 nt, Artificial Sequence
  Description of Artificial Sequence: Synthetic oligonucleotide
  Sense strand starting at position 3207 of SEQ ID NO: 914844
agacuacugcuuuagcaga

SEQ ID NO: 1034965 - RNA, 19 nt, Artificial Sequence
  Description of Artificial Sequence: Synthetic oligonucleotide
  Antisense strand to SEQ ID NO: 1034964
ucugcuaaagcaguagucu

SEQ ID NO: 1034966 - RNA, 19 nt, Artificial Sequence
  Description of Artificial Sequence: Synthetic oligonucleotide
  Sense strand starting at position 3209 of SEQ ID NO: 914844
acuacugcuuuagcagaaa

SEQ ID NO: 1034967 - RNA, 19 nt, Artificial Sequence
  Description of Artificial Sequence: Synthetic oligonucleotide
  Antisense strand to SEQ ID NO: 1034966
uuucugcuaaagcaguagu

SEQ ID NO: 1034968 - RNA, 19 nt, Artificial Sequence
  Description of Artificial Sequence: Synthetic oligonucleotide
  Sense strand starting at position 3292 of SEQ ID NO: 914844
uaguaagagucuuucugag

SEQ ID NO: 1034969 - RNA, 19 nt, Artificial Sequence
  Description of Artificial Sequence: Synthetic oligonucleotide
  Antisense strand to SEQ ID NO: 1034968
cucagaaagacucuuacua

SEQ ID NO: 1034970 - RNA, 19 nt, Artificial Sequence
  Description of Artificial Sequence: Synthetic oligonucleotide
  Sense strand starting at position 3294 of SEQ ID NO: 914844
guaagagucuuucugagga

SEQ ID NO: 1034971 - RNA, 19 nt, Artificial Sequence
  Description of Artificial Sequence: Synthetic oligonucleotide
  Antisense strand to SEQ ID NO: 1034970
uccucagaaagacucuuac

SEQ ID NO: 1034972 - RNA, 19 nt, Artificial Sequence
  Description of Artificial Sequence: Synthetic oligonucleotide
  Sense strand starting at position 3403 of SEQ ID NO: 914844
cagggagccuuuccuggau

SEQ ID NO: 1034973 - RNA, 19 nt, Artificial Sequence
  Description of Artificial Sequence: Synthetic oligonucleotide
  Antisense strand to SEQ ID NO: 1034972
auccaggaaaggcucccug

SEQ ID NO: 1034974 - RNA, 19 nt, Artificial Sequence
  Description of Artificial Sequence: Synthetic oligonucleotide
  Sense strand starting at position 3606 of SEQ ID NO: 914844
agguaauacuuacuaaugu

SEQ ID NO: 1034975 - RNA, 19 nt, Artificial Sequence
  Description of Artificial Sequence: Synthetic oligonucleotide
  Antisense strand to SEQ ID NO: 1034974
acauuaguaaguauuaccu

SEQ ID NO: 1034976 - RNA, 19 nt, Artificial Sequence
  Description of Artificial Sequence: Synthetic oligonucleotide
  Sense strand starting at position 3623 of SEQ ID NO: 914844
guuauuugggucuggguca

SEQ ID NO: 1034977 - RNA, 19 nt, Artificial Sequence
  Description of Artificial Sequence: Synthetic oligonucleotide
  Antisense strand to SEQ ID NO: 1034976
ugacccagacccaaauaac

SEQ ID NO: 1034978 - RNA, 19 nt, Artificial Sequence
  Description of Artificial Sequence: Synthetic oligonucleotide
  Sense strand starting at position 3630 of SEQ ID NO: 914844
gggucugggucaagaaaga

SEQ ID NO: 1034979 - RNA, 19 nt, Artificial Sequence
  Description of Artificial Sequence: Synthetic oligonucleotide
  Antisense strand to SEQ ID NO: 1034978
ucuuucuugacccagaccc

SEQ ID NO: 1034980 - RNA, 19 nt, Artificial Sequence
  Description of Artificial Sequence: Synthetic oligonucleotide
  Sense strand starting at position 3735 of SEQ ID NO: 914844
agcauuaaaccaggugacu

SEQ ID NO: 1034981 - RNA, 19 nt, Artificial Sequence
  Description of Artificial Sequence: Synthetic oligonucleotide
  Antisense strand to SEQ ID NO: 1034980
agucaccugguuuaaugcu

SEQ ID NO: 1034982 - RNA, 19 nt, Artificial Sequence
  Description of Artificial Sequence: Synthetic oligonucleotide
  Sense strand starting at position 3748 of SEQ ID NO: 914844
gugacuccagcugaaguua

SEQ ID NO: 1034983 - RNA, 19 nt, Artificial Sequence
  Description of Artificial Sequence: Synthetic oligonucleotide
  Antisense strand to SEQ ID NO: 1034982
uaacuucagcuggagucac

SEQ ID NO: 1034984 - RNA, 19 nt, Artificial Sequence
  Description of Artificial Sequence: Synthetic oligonucleotide
  Sense strand starting at position 65 of SEQ ID NO: 914845
ggcauuugauugcaacaca

SEQ ID NO: 1034985 - RNA, 19 nt, Artificial Sequence
  Description of Artificial Sequence: Synthetic oligonucleotide
  Antisense strand to SEQ ID NO: 1034984
uguguugcaaucaaaugcc

SEQ ID NO: 1034986 - RNA, 19 nt, Artificial Sequence
  Description of Artificial Sequence: Synthetic oligonucleotide
  Sense strand starting at position 165 of SEQ ID NO: 914845
ugaaauguuuacccucaag

SEQ ID NO: 1034987 - RNA, 19 nt, Artificial Sequence
  Description of Artificial Sequence: Synthetic oligonucleotide
  Antisense strand to SEQ ID NO: 1034986
cuugaggguaaacauuuca

SEQ ID NO: 1034988 - RNA, 19 nt, Artificial Sequence
  Description of Artificial Sequence: Synthetic oligonucleotide
  Sense strand starting at position 270 of SEQ ID NO: 914845
gaccaaauagccugagagu

SEQ ID NO: 1034989 - RNA, 19 nt, Artificial Sequence
  Description of Artificial Sequence: Synthetic oligonucleotide
  Antisense strand to SEQ ID NO: 1034988
acucucaggcuauuugguc

SEQ ID NO: 1034990 - RNA, 19 nt, Artificial Sequence
  Description of Artificial Sequence: Synthetic oligonucleotide
  Sense strand starting at position 271 of SEQ ID NO: 914845
accaaauagccugagaguu

SEQ ID NO: 1034991 - RNA, 19 nt, Artificial Sequence
  Description of Artificial Sequence: Synthetic oligonucleotide
  Antisense strand to SEQ ID NO: 1034990
aacucucaggcuauuuggu

SEQ ID NO: 1034992 - RNA, 19 nt, Artificial Sequence
  Description of Artificial Sequence: Synthetic oligonucleotide
  Sense strand starting at position 281 of SEQ ID NO: 914845
cugagaguuugcucaguuu

SEQ ID NO: 1034993 - RNA, 19 nt, Artificial Sequence
  Description of Artificial Sequence: Synthetic oligonucleotide
  Antisense strand to SEQ ID NO: 1034992
aaacugagcaaacucucag

SEQ ID NO: 1034994 - RNA, 19 nt, Artificial Sequence
  Description of Artificial Sequence: Synthetic oligonucleotide
  Sense strand starting at position 353 of SEQ ID NO: 914845
caaguuccuguauaguuga

SEQ ID NO: 1034995 - RNA, 19 nt, Artificial Sequence
  Description of Artificial Sequence: Synthetic oligonucleotide
  Antisense strand to SEQ ID NO: 1034994
ucaacuauacaggaacuug

SEQ ID NO: 1034996 - RNA, 19 nt, Artificial Sequence
  Description of Artificial Sequence: Synthetic oligonucleotide
  Sense strand starting at position 356 of SEQ ID NO: 914845
guuccuguauaguugaaua

SEQ ID NO: 1034997 - RNA, 19 nt, Artificial Sequence
  Description of Artificial Sequence: Synthetic oligonucleotide
  Antisense strand to SEQ ID NO: 1034996
uauucaacuauacaggaac

SEQ ID NO: 1034998 - RNA, 19 nt, Artificial Sequence
  Description of Artificial Sequence: Synthetic oligonucleotide
  Sense strand starting at position 358 of SEQ ID NO: 914845
uccuguauaguugaauacu

SEQ ID NO: 1034999 - RNA, 19 nt, Artificial Sequence
  Description of Artificial Sequence: Synthetic oligonucleotide
  Antisense strand to SEQ ID NO: 1034998
aguauucaacuauacagga

SEQ ID NO: 1035000 - RNA, 19 nt, Artificial Sequence
  Description of Artificial Sequence: Synthetic oligonucleotide
  Sense strand starting at position 361 of SEQ ID NO: 914845
uguauaguugaauacuaca

SEQ ID NO: 1035001 - RNA, 19 nt, Artificial Sequence
  Description of Artificial Sequence: Synthetic oligonucleotide
  Antisense strand to SEQ ID NO: 1035000
uguaguauucaacuauaca

SEQ ID NO: 1035002 - RNA, 19 nt, Artificial Sequence
  Description of Artificial Sequence: Synthetic oligonucleotide
  Sense strand starting at position 415 of SEQ ID NO: 914845
ucaugaauuagcgagucuu

SEQ ID NO: 1035003 - RNA, 19 nt, Artificial Sequence
  Description of Artificial Sequence: Synthetic oligonucleotide
  Antisense strand to SEQ ID NO: 1035002
aagacucgcuaauucauga

SEQ ID NO: 1035004 - RNA, 19 nt, Artificial Sequence
  Description of Artificial Sequence: Synthetic oligonucleotide
  Sense strand starting at position 421 of SEQ ID NO: 914845
auuagcgagucuucuaauu

SEQ ID NO: 1035005 - RNA, 19 nt, Artificial Sequence
  Description of Artificial Sequence: Synthetic oligonucleotide
  Antisense strand to SEQ ID NO: 1035004
aauuagaagacucgcuaau

SEQ ID NO: 1035006 - RNA, 19 nt, Artificial Sequence
  Description of Artificial Sequence: Synthetic oligonucleotide
  Sense strand starting at position 673 of SEQ ID NO: 914845
agcaaaucagacugguuua

SEQ ID NO: 1035007 - RNA, 19 nt, Artificial Sequence
  Description of Artificial Sequence: Synthetic oligonucleotide
  Antisense strand to SEQ ID NO: 1035006
uaaaccagucugauuugcu

SEQ ID NO: 1035008 - RNA, 19 nt, Artificial Sequence
  Description of Artificial Sequence: Synthetic oligonucleotide
  Sense strand starting at position 925 of SEQ ID NO: 914845
ugcuaauuccugcaacugu

SEQ ID NO: 1035009 - RNA, 19 nt, Artificial Sequence
  Description of Artificial Sequence: Synthetic oligonucleotide
  Antisense strand to SEQ ID NO: 1035008
acaguugcaggaauuagca

SEQ ID NO: 1035010 - RNA, 19 nt, Artificial Sequence
  Description of Artificial Sequence: Synthetic oligonucleotide
  Sense strand starting at position 1023 of SEQ ID NO: 914845
agccaccaccgugagaaau

SEQ ID NO: 1035011 - RNA, 19 nt, Artificial Sequence
  Description of Artificial Sequence: Synthetic oligonucleotide
  Antisense strand to SEQ ID NO: 1035010
auuucucacggugguggcu

SEQ ID NO: 1035012 - RNA, 19 nt, Artificial Sequence
  Description of Artificial Sequence: Synthetic oligonucleotide
  Sense strand starting at position 1074 of SEQ ID NO: 914845
cuauguauguugcucaaau

SEQ ID NO: 1035013 - RNA, 19 nt, Artificial Sequence
  Description of Artificial Sequence: Synthetic oligonucleotide
  Antisense strand to SEQ ID NO: 1035012
auuugagcaacauacauag

SEQ ID NO: 1035014 - RNA, 19 nt, Artificial Sequence
  Description of Artificial Sequence: Synthetic oligonucleotide
  Sense strand starting at position 1083 of SEQ ID NO: 914845
uugcucaaaugcucggaaa

SEQ ID NO: 1035015 - RNA, 19 nt, Artificial Sequence
  Description of Artificial Sequence: Synthetic oligonucleotide
  Antisense strand to SEQ ID NO: 1035014
uuuccgagcauuugagcaa

SEQ ID NO: 1035016 - RNA, 19 nt, Artificial Sequence
  Description of Artificial Sequence: Synthetic oligonucleotide
  Sense strand starting at position 1423 of SEQ ID NO: 914845
ucugucacauucccgauau

SEQ ID NO: 1035017 - RNA, 19 nt, Artificial Sequence
  Description of Artificial Sequence: Synthetic oligonucleotide
  Antisense strand to SEQ ID NO: 1035016
auaucgggaaugugacaga

SEQ ID NO: 1035018 - RNA, 19 nt, Artificial Sequence
  Description of Artificial Sequence: Synthetic oligonucleotide
  Sense strand starting at position 1425 of SEQ ID NO: 914845
ugucacauucccgauauua

SEQ ID NO: 1035019 - RNA, 19 nt, Artificial Sequence
  Description of Artificial Sequence: Synthetic oligonucleotide
  Antisense strand to SEQ ID NO: 1035018
uaauaucgggaaugugaca

SEQ ID NO: 1035020 - RNA, 19 nt, Artificial Sequence
  Description of Artificial Sequence: Synthetic oligonucleotide
  Sense strand starting at position 1457 of SEQ ID NO: 914845
uguccacuguuucuuaaca

SEQ ID NO: 1035021 - RNA, 19 nt, Artificial Sequence
  Description of Artificial Sequence: Synthetic oligonucleotide
  Antisense strand to SEQ ID NO: 1035020
uguuaagaaacaguggaca

SEQ ID NO: 1035022 - RNA, 19 nt, Artificial Sequence
  Description of Artificial Sequence: Synthetic oligonucleotide
  Sense strand starting at position 1697 of SEQ ID NO: 914845
uccaaauauccacggaaca

SEQ ID NO: 1035023 - RNA, 19 nt, Artificial Sequence
  Description of Artificial Sequence: Synthetic oligonucleotide
  Antisense strand to SEQ ID NO: 1035022
uguuccguggauauuugga

SEQ ID NO: 1035024 - RNA, 19 nt, Artificial Sequence
  Description of Artificial Sequence: Synthetic oligonucleotide
  Sense strand starting at position 1710 of SEQ ID NO: 914845
ggaacaaguucuguugccu

SEQ ID NO: 1035025 - RNA, 19 nt, Artificial Sequence
  Description of Artificial Sequence: Synthetic oligonucleotide
  Antisense strand to SEQ ID NO: 1035024
aggcaacagaacuuguucc

SEQ ID NO: 1035026 - RNA, 19 nt, Artificial Sequence
  Description of Artificial Sequence: Synthetic oligonucleotide
  Sense strand starting at position 1903 of SEQ ID NO: 914845
acuuguuaagcccgaauuc

SEQ ID NO: 1035027 - RNA, 19 nt, Artificial Sequence
  Description of Artificial Sequence: Synthetic oligonucleotide
  Antisense strand to SEQ ID NO: 1035026
gaauucgggcuuaacaagu

SEQ ID NO: 1035028 - RNA, 19 nt, Artificial Sequence
  Description of Artificial Sequence: Synthetic oligonucleotide
  Sense strand starting at position 2145 of SEQ ID NO: 914845
gaucgauuccaggagucuu

SEQ ID NO: 1035029 - RNA, 19 nt, Artificial Sequence
  Description of Artificial Sequence: Synthetic oligonucleotide
  Antisense strand to SEQ ID NO: 1035028
aagacuccuggaaucgauc

SEQ ID NO: 1035030 - RNA, 19 nt, Artificial Sequence
  Description of Artificial Sequence: Synthetic oligonucleotide
  Sense strand starting at position 2189 of SEQ ID NO: 914845
gcaaauccuggagaagugu

SEQ ID NO: 1035031 - RNA, 19 nt, Artificial Sequence
  Description of Artificial Sequence: Synthetic oligonucleotide
  Antisense strand to SEQ ID NO: 1035030
acacuucuccaggauuugc

SEQ ID NO: 1035032 - RNA, 19 nt, Artificial Sequence
  Description of Artificial Sequence: Synthetic oligonucleotide
  Sense strand starting at position 3038 of SEQ ID NO: 914845
caugcauggugguuuaaca

SEQ ID NO: 1035033 - RNA, 19 nt, Artificial Sequence
  Description of Artificial Sequence: Synthetic oligonucleotide
  Antisense strand to SEQ ID NO: 1035032
uguuaaaccaccaugcaug

SEQ ID NO: 1035034 - RNA, 19 nt, Artificial Sequence
  Description of Artificial Sequence: Synthetic oligonucleotide
  Sense strand starting at position 3066 of SEQ ID NO: 914845
auaggacguauguaucauu

SEQ ID NO: 1035035 - RNA, 19 nt, Artificial Sequence
  Description of Artificial Sequence: Synthetic oligonucleotide
  Antisense strand to SEQ ID NO: 1035034
aaugauacauacguccuau

SEQ ID NO: 1035036 - RNA, 19 nt, Artificial Sequence
  Description of Artificial Sequence: Synthetic oligonucleotide
  Sense strand starting at position 3215 of SEQ ID NO: 914845
cgaaacuucugguuaauag

SEQ ID NO: 1035037 - RNA, 19 nt, Artificial Sequence
  Description of Artificial Sequence: Synthetic oligonucleotide
  Antisense strand to SEQ ID NO: 1035036
cuauuaaccagaaguuucg

SEQ ID NO: 1035038 - RNA, 19 nt, Artificial Sequence
  Description of Artificial Sequence: Synthetic oligonucleotide
  Sense strand starting at position 3216 of SEQ ID NO: 914845
gaaacuucugguuaauagc

SEQ ID NO: 1035039 - RNA, 19 nt, Artificial Sequence
  Description of Artificial Sequence: Synthetic oligonucleotide
  Antisense strand to SEQ ID NO: 1035038
gcuauuaaccagaaguuuc

SEQ ID NO: 1035040 - RNA, 19 nt, Artificial Sequence
  Description of Artificial Sequence: Synthetic oligonucleotide
  Sense strand starting at position 3262 of SEQ ID NO: 914845
ggaguuacaguuugaggaa

SEQ ID NO: 1035041 - RNA, 19 nt, Artificial Sequence
  Description of Artificial Sequence: Synthetic oligonucleotide
  Antisense strand to SEQ ID NO: 1035040
uuccucaaacuguaacucc

SEQ ID NO: 1035042 - RNA, 19 nt, Artificial Sequence
  Description of Artificial Sequence: Synthetic oligonucleotide
  Sense strand starting at position 3289 of SEQ ID NO: 914845
ccuuguuucuuguuuauuu

SEQ ID NO: 1035043 - RNA, 19 nt, Artificial Sequence
  Description of Artificial Sequence: Synthetic oligonucleotide
  Antisense strand to SEQ ID NO: 1035042
aaauaaacaagaaacaagg

SEQ ID NO: 1035044 - RNA, 19 nt, Artificial Sequence
  Description of Artificial Sequence: Synthetic oligonucleotide
  Sense strand starting at position 3296 of SEQ ID NO: 914845
ucuuguuuauuucuucgga

SEQ ID NO: 1035045 - RNA, 19 nt, Artificial Sequence
  Description of Artificial Sequence: Synthetic oligonucleotide
  Antisense strand to SEQ ID NO: 1035044
uccgaagaaauaaacaaga

SEQ ID NO: 1035046 - RNA, 19 nt, Artificial Sequence
  Description of Artificial Sequence: Synthetic oligonucleotide
  Sense strand starting at position 3299 of SEQ ID NO: 914845
uguuuauuucuucggacca

SEQ ID NO: 1035047 - RNA, 19 nt, Artificial Sequence
  Description of Artificial Sequence: Synthetic oligonucleotide
  Antisense strand to SEQ ID NO: 1035046
ugguccgaagaaauaaaca

SEQ ID NO: 1035048 - RNA, 19 nt, Artificial Sequence
  Description of Artificial Sequence: Synthetic oligonucleotide
  Sense strand starting at position 3301 of SEQ ID NO: 914845
uuuauuucuucggaccaca

SEQ ID NO: 1035049 - RNA, 19 nt, Artificial Sequence
  Description of Artificial Sequence: Synthetic oligonucleotide
  Antisense strand to SEQ ID NO: 1035048
ugugguccgaagaaauaaa

SEQ ID NO: 1035050 - RNA, 19 nt, Artificial Sequence
  Description of Artificial Sequence: Synthetic oligonucleotide
  Sense strand starting at position 3348 of SEQ ID NO: 914845
gucucaggcuugccagaau

SEQ ID NO: 1035051 - RNA, 19 nt, Artificial Sequence
  Description of Artificial Sequence: Synthetic oligonucleotide
  Antisense strand to SEQ ID NO: 1035050
auucuggcaagccugagac

SEQ ID NO: 1035052 - RNA, 19 nt, Artificial Sequence
  Description of Artificial Sequence: Synthetic oligonucleotide
  Sense strand starting at position 3351 of SEQ ID NO: 914845
ucaggcuugccagaaucaa

SEQ ID NO: 1035053 - RNA, 19 nt, Artificial Sequence
  Description of Artificial Sequence: Synthetic oligonucleotide
  Antisense strand to SEQ ID NO: 1035052
uugauucuggcaagccuga

SEQ ID NO: 1035054 - RNA, 19 nt, Artificial Sequence
  Description of Artificial Sequence: Synthetic oligonucleotide
  Sense strand starting at position 3393 of SEQ ID NO: 914845
ggaggacucuaucuuagug

SEQ ID NO: 1035055 - RNA, 19 nt, Artificial Sequence
  Description of Artificial Sequence: Synthetic oligonucleotide
  Antisense strand to SEQ ID NO: 1035054
cacuaagauagaguccucc

SEQ ID NO: 1035056 - RNA, 19 nt, Artificial Sequence
  Description of Artificial Sequence: Synthetic oligonucleotide
  Sense strand starting at position 3778 of SEQ ID NO: 914845
agggaaauauucccgagcu

SEQ ID NO: 1035057 - RNA, 19 nt, Artificial Sequence
  Description of Artificial Sequence: Synthetic oligonucleotide
  Antisense strand to SEQ ID NO: 1035056
agcucgggaauauuucccu

SEQ ID NO: 1035058 - RNA, 19 nt, Artificial Sequence
  Description of Artificial Sequence: Synthetic oligonucleotide
  Sense strand starting at position 3780 of SEQ ID NO: 914845
ggaaauauucccgagcuga

SEQ ID NO: 1035059 - RNA, 19 nt, Artificial Sequence
  Description of Artificial Sequence: Synthetic oligonucleotide
  Antisense strand to SEQ ID NO: 1035058
ucagcucgggaauauuucc

SEQ ID NO: 1035060 - RNA, 19 nt, Artificial Sequence
  Description of Artificial Sequence: Synthetic oligonucleotide
  Sense strand starting at position 3802 of SEQ ID NO: 914845
auagauaugccuugcacuc

SEQ ID NO: 1035061 - RNA, 19 nt, Artificial Sequence
  Description of Artificial Sequence: Synthetic oligonucleotide
  Antisense strand to SEQ ID NO: 1035060
gagugcaaggcauaucuau

SEQ ID NO: 1035062 - RNA, 19 nt, Artificial Sequence
  Description of Artificial Sequence: Synthetic oligonucleotide
  Sense strand starting at position 3928 of SEQ ID NO: 914845
aucgaauuguaaucagugu

SEQ ID NO: 1035063 - RNA, 19 nt, Artificial Sequence
  Description of Artificial Sequence: Synthetic oligonucleotide
  Antisense strand to SEQ ID NO: 1035062
acacugauuacaauucgau

SEQ ID NO: 1035064 - RNA, 19 nt, Artificial Sequence
  Description of Artificial Sequence: Synthetic oligonucleotide
  Sense strand starting at position 255 of SEQ ID NO: 914846
gccuuagggucucucuuua

SEQ ID NO: 1035065 - RNA, 19 nt, Artificial Sequence
  Description of Artificial Sequence: Synthetic oligonucleotide
  Antisense strand to SEQ ID NO: 1035064
uaaagagagacccuaaggc

SEQ ID NO: 1035066 - RNA, 19 nt, Artificial Sequence
  Description of Artificial Sequence: Synthetic oligonucleotide
  Sense strand starting at position 351 of SEQ ID NO: 914846
gggcucagucacugauguu

SEQ ID NO: 1035067 - RNA, 19 nt, Artificial Sequence
  Description of Artificial Sequence: Synthetic oligonucleotide
  Antisense strand to SEQ ID NO: 1035066
aacaucagugacugagccc

SEQ ID NO: 1035068 - RNA, 19 nt, Artificial Sequence
  Description of Artificial Sequence: Synthetic oligonucleotide
  Sense strand starting at position 374 of SEQ ID NO: 914846
cagcaaggcccuuaagagu

SEQ ID NO: 1035069 - RNA, 19 nt, Artificial Sequence
  Description of Artificial Sequence: Synthetic oligonucleotide
  Antisense strand to SEQ ID NO: 1035068
acucuuaagggccuugcug

SEQ ID NO: 1035070 - RNA, 19 nt, Artificial Sequence
  Description of Artificial Sequence: Synthetic oligonucleotide
  Sense strand starting at position 474 of SEQ ID NO: 914846
uguccuuucuuccuaggaa

SEQ ID NO: 1035071 - RNA, 19 nt, Artificial Sequence
  Description of Artificial Sequence: Synthetic oligonucleotide
  Antisense strand to SEQ ID NO: 1035070
uuccuaggaagaaaggaca

SEQ ID NO: 1035072 - RNA, 19 nt, Artificial Sequence
  Description of Artificial Sequence: Synthetic oligonucleotide
  Sense strand starting at position 475 of SEQ ID NO: 914846
guccuuucuuccuaggaac

SEQ ID NO: 1035073 - RNA, 19 nt, Artificial Sequence
  Description of Artificial Sequence: Synthetic oligonucleotide
  Antisense strand to SEQ ID NO: 1035072
guuccuaggaagaaaggac

SEQ ID NO: 1035074 - RNA, 19 nt, Artificial Sequence
  Description of Artificial Sequence: Synthetic oligonucleotide
  Sense strand starting at position 766 of SEQ ID NO: 914846
cgagauuagccauggagau

SEQ ID NO: 1035075 - RNA, 19 nt, Artificial Sequence
  Description of Artificial Sequence: Synthetic oligonucleotide
  Antisense strand to SEQ ID NO: 1035074
aucuccauggcuaaucucg

SEQ ID NO: 1035076 - RNA, 19 nt, Artificial Sequence
  Description of Artificial Sequence: Synthetic oligonucleotide
  Sense strand starting at position 767 of SEQ ID NO: 914846
gagauuagccauggagaug

SEQ ID NO: 1035077 - RNA, 19 nt, Artificial Sequence
  Description of Artificial Sequence: Synthetic oligonucleotide
  Antisense strand to SEQ ID NO: 1035076
caucuccauggcuaaucuc

SEQ ID NO: 1035078 - RNA, 19 nt, Artificial Sequence
  Description of Artificial Sequence: Synthetic oligonucleotide
  Sense strand starting at position 947 of SEQ ID NO: 914846
cacugaaaucucgagagca

SEQ ID NO: 1035079 - RNA, 19 nt, Artificial Sequence
  Description of Artificial Sequence: Synthetic oligonucleotide
  Antisense strand to SEQ ID NO: 1035078
ugcucucgagauuucagug

SEQ ID NO: 1035080 - RNA, 19 nt, Artificial Sequence
  Description of Artificial Sequence: Synthetic oligonucleotide
  Sense strand starting at position 949 of SEQ ID NO: 914846
cugaaaucucgagagcagu

SEQ ID NO: 1035081 - RNA, 19 nt, Artificial Sequence
  Description of Artificial Sequence: Synthetic oligonucleotide
  Antisense strand to SEQ ID NO: 1035080
acugcucucgagauuucag

SEQ ID NO: 1035082 - RNA, 19 nt, Artificial Sequence
  Description of Artificial Sequence: Synthetic oligonucleotide
  Sense strand starting at position 957 of SEQ ID NO: 914846
ucgagagcaguccauacuu

SEQ ID NO: 1035083 - RNA, 19 nt, Artificial Sequence
  Description of Artificial Sequence: Synthetic oligonucleotide
  Antisense strand to SEQ ID NO: 1035082
aaguauggacugcucucga

SEQ ID NO: 1035084 - RNA, 19 nt, Artificial Sequence
  Description of Artificial Sequence: Synthetic oligonucleotide
  Sense strand starting at position 1346 of SEQ ID NO: 914846
ccgcucuucugauggguaa

SEQ ID NO: 1035085 - RNA, 19 nt, Artificial Sequence
  Description of Artificial Sequence: Synthetic oligonucleotide
  Antisense strand to SEQ ID NO: 1035084
uuacccaucagaagagcgg

SEQ ID NO: 1035086 - RNA, 19 nt, Artificial Sequence
  Description of Artificial Sequence: Synthetic oligonucleotide
  Sense strand starting at position 1347 of SEQ ID NO: 914846
cgcucuucugauggguaaa

SEQ ID NO: 1035087 - RNA, 19 nt, Artificial Sequence
  Description of Artificial Sequence: Synthetic oligonucleotide
  Antisense strand to SEQ ID NO: 1035086
uuuacccaucagaagagcg

SEQ ID NO: 1035088 - RNA, 19 nt, Artificial Sequence
  Description of Artificial Sequence: Synthetic oligonucleotide
  Sense strand starting at position 1348 of SEQ ID NO: 914846
gcucuucugauggguaaau

SEQ ID NO: 1035089 - RNA, 19 nt, Artificial Sequence
  Description of Artificial Sequence: Synthetic oligonucleotide
  Antisense strand to SEQ ID NO: 1035088
auuuacccaucagaagagc

SEQ ID NO: 1035090 - RNA, 19 nt, Artificial Sequence
  Description of Artificial Sequence: Synthetic oligonucleotide
  Sense strand starting at position 1349 of SEQ ID NO: 914846
cucuucugauggguaaauu

SEQ ID NO: 1035091 - RNA, 19 nt, Artificial Sequence
  Description of Artificial Sequence: Synthetic oligonucleotide
  Antisense strand to SEQ ID NO: 1035090
aauuuacccaucagaagag

SEQ ID NO: 1035092 - RNA, 19 nt, Artificial Sequence
  Description of Artificial Sequence: Synthetic oligonucleotide
  Sense strand starting at position 1357 of SEQ ID NO: 914846
auggguaaauugucacuua

SEQ ID NO: 1035093 - RNA, 19 nt, Artificial Sequence
  Description of Artificial Sequence: Synthetic oligonucleotide
  Antisense strand to SEQ ID NO: 1035092
uaagugacaauuuacccau

SEQ ID NO: 1035094 - RNA, 19 nt, Artificial Sequence
  Description of Artificial Sequence: Synthetic oligonucleotide
  Sense strand starting at position 1358 of SEQ ID NO: 914846
uggguaaauugucacuuac

SEQ ID NO: 1035095 - RNA, 19 nt, Artificial Sequence
  Description of Artificial Sequence: Synthetic oligonucleotide
  Antisense strand to SEQ ID NO: 1035094
guaagugacaauuuaccca

SEQ ID NO: 1035096 - RNA, 19 nt, Artificial Sequence
  Description of Artificial Sequence: Synthetic oligonucleotide
  Sense strand starting at position 2376 of SEQ ID NO: 914846
gagaaaucggcacaaagcu

SEQ ID NO: 1035097 - RNA, 19 nt, Artificial Sequence
  Description of Artificial Sequence: Synthetic oligonucleotide
  Antisense strand to SEQ ID NO: 1035096
agcuuugugccgauuucuc

SEQ ID NO: 1035098 - RNA, 19 nt, Artificial Sequence
  Description of Artificial Sequence: Synthetic oligonucleotide
  Sense strand starting at position 3500 of SEQ ID NO: 914846
ucugaucccuggugagaca

SEQ ID NO: 1035099 - RNA, 19 nt, Artificial Sequence
  Description of Artificial Sequence: Synthetic oligonucleotide
  Antisense strand to SEQ ID NO: 1035098
ugucucaccagggaucaga

SEQ ID NO: 1035100 - RNA, 19 nt, Artificial Sequence
  Description of Artificial Sequence: Synthetic oligonucleotide
  Sense strand starting at position 3517 of SEQ ID NO: 914846
caaagcucucccggaguuu

SEQ ID NO: 1035101 - RNA, 19 nt, Artificial Sequence
  Description of Artificial Sequence: Synthetic oligonucleotide
  Antisense strand to SEQ ID NO: 1035100
aaacuccgggagagcuuug

SEQ ID NO: 1035102 - RNA, 19 nt, Artificial Sequence
  Description of Artificial Sequence: Synthetic oligonucleotide
  Sense strand starting at position 3625 of SEQ ID NO: 914846
auguuccuuccauggguaa

SEQ ID NO: 1035103 - RNA, 19 nt, Artificial Sequence
  Description of Artificial Sequence: Synthetic oligonucleotide
  Antisense strand to SEQ ID NO: 1035102
uuacccauggaaggaacau

SEQ ID NO: 1035104 - RNA, 19 nt, Artificial Sequence
  Description of Artificial Sequence: Synthetic oligonucleotide
  Sense strand starting at position 3626 of SEQ ID NO: 914846
uguuccuuccauggguaau

SEQ ID NO: 1035105 - RNA, 19 nt, Artificial Sequence
  Description of Artificial Sequence: Synthetic oligonucleotide
  Antisense strand to SEQ ID NO: 1035104
auuacccauggaaggaaca

SEQ ID NO: 1035106 - RNA, 19 nt, Artificial Sequence
  Description of Artificial Sequence: Synthetic oligonucleotide
  Sense strand starting at position 3627 of SEQ ID NO: 914846
guuccuuccauggguaaug

SEQ ID NO: 1035107 - RNA, 19 nt, Artificial Sequence
  Description of Artificial Sequence: Synthetic oligonucleotide
  Antisense strand to SEQ ID NO: 1035106
cauuacccauggaaggaac

SEQ ID NO: 1035108 - RNA, 19 nt, Artificial Sequence
  Description of Artificial Sequence: Synthetic oligonucleotide
  Sense strand starting at position 3637 of SEQ ID NO: 914846
uggguaaugucuugcauga

SEQ ID NO: 1035109 - RNA, 19 nt, Artificial Sequence
  Description of Artificial Sequence: Synthetic oligonucleotide
  Antisense strand to SEQ ID NO: 1035108
ucaugcaagacauuaccca

SEQ ID NO: 1035110 - RNA, 19 nt, Artificial Sequence
  Description of Artificial Sequence: Synthetic oligonucleotide
  Sense strand starting at position 3639 of SEQ ID NO: 914846
gguaaugucuugcaugaac

SEQ ID NO: 1035111 - RNA, 19 nt, Artificial Sequence
  Description of Artificial Sequence: Synthetic oligonucleotide
  Antisense strand to SEQ ID NO: 1035110
guucaugcaagacauuacc

SEQ ID NO: 1035112 - RNA, 19 nt, Artificial Sequence
  Description of Artificial Sequence: Synthetic oligonucleotide
  Sense strand starting at position 3784 of SEQ ID NO: 914846
gagggagucucccaugagu

SEQ ID NO: 1035113 - RNA, 19 nt, Artificial Sequence
  Description of Artificial Sequence: Synthetic oligonucleotide
  Antisense strand to SEQ ID NO: 1035112
acucaugggagacucccuc

SEQ ID NO: 1035114 - RNA, 19 nt, Artificial Sequence
  Description of Artificial Sequence: Synthetic oligonucleotide
  Sense strand starting at position 3795 of SEQ ID NO: 914846
ccaugagugccacauccau

SEQ ID NO: 1035115 - RNA, 19 nt, Artificial Sequence
  Description of Artificial Sequence: Synthetic oligonucleotide
  Antisense strand to SEQ ID NO: 1035114
auggauguggcacucaugg

SEQ ID NO: 1035116 - RNA, 19 nt, Artificial Sequence
  Description of Artificial Sequence: Synthetic oligonucleotide
  Sense strand starting at position 3901 of SEQ ID NO: 914846
gcagcaacugcucguaguu

SEQ ID NO: 1035117 - RNA, 19 nt, Artificial Sequence
  Description of Artificial Sequence: Synthetic oligonucleotide
  Antisense strand to SEQ ID NO: 1035116
aacuacgagcaguugcugc

SEQ ID NO: 1035118 - RNA, 19 nt, Artificial Sequence
  Description of Artificial Sequence: Synthetic oligonucleotide
  Sense strand starting at position 3902 of SEQ ID NO: 914846
cagcaacugcucguaguuu

SEQ ID NO: 1035119 - RNA, 19 nt, Artificial Sequence
  Description of Artificial Sequence: Synthetic oligonucleotide
  Antisense strand to SEQ ID NO: 1035118
aaacuacgagcaguugcug

SEQ ID NO: 1035120 - RNA, 19 nt, Artificial Sequence
  Description of Artificial Sequence: Synthetic oligonucleotide
  Sense strand starting at position 3911 of SEQ ID NO: 914846
cucguaguuucccugagca

SEQ ID NO: 1035121 - RNA, 19 nt, Artificial Sequence
  Description of Artificial Sequence: Synthetic oligonucleotide
  Antisense strand to SEQ ID NO: 1035120
ugcucagggaaacuacgag

SEQ ID NO: 1035122 - RNA, 19 nt, Artificial Sequence
  Description of Artificial Sequence: Synthetic oligonucleotide
  Sense strand starting at position 3913 of SEQ ID NO: 914846
cguaguuucccugagcacu

SEQ ID NO: 1035123 - RNA, 19 nt, Artificial Sequence
  Description of Artificial Sequence: Synthetic oligonucleotide
  Antisense strand to SEQ ID NO: 1035122
agugcucagggaaacuacg

SEQ ID NO: 1035124 - RNA, 19 nt, Artificial Sequence
  Description of Artificial Sequence: Synthetic oligonucleotide
  Sense strand starting at position 3915 of SEQ ID NO: 914846
uaguuucccugagcacuga

SEQ ID NO: 1035125 - RNA, 19 nt, Artificial Sequence
  Description of Artificial Sequence: Synthetic oligonucleotide
  Antisense strand to SEQ ID NO: 1035124
ucagugcucagggaaacua

SEQ ID NO: 1035126 - RNA, 19 nt, Artificial Sequence
  Description of Artificial Sequence: Synthetic oligonucleotide
  Sense strand starting at position 3961 of SEQ ID NO: 914846
ucaacugcccugggugaua

SEQ ID NO: 1035127 - RNA, 19 nt, Artificial Sequence
  Description of Artificial Sequence: Synthetic oligonucleotide
  Antisense strand to SEQ ID NO: 1035126
uaucacccagggcaguuga

SEQ ID NO: 1035128 - RNA, 19 nt, Artificial Sequence
  Description of Artificial Sequence: Synthetic oligonucleotide
  Sense strand starting at position 3972 of SEQ ID NO: 914846
gggugauaagcugguguua

SEQ ID NO: 1035129 - RNA, 19 nt, Artificial Sequence
  Description of Artificial Sequence: Synthetic oligonucleotide
  Antisense strand to SEQ ID NO: 1035128
uaacaccagcuuaucaccc

SEQ ID NO: 1035130 - RNA, 19 nt, Artificial Sequence
  Description of Artificial Sequence: Synthetic oligonucleotide
  Sense strand starting at position 3974 of SEQ ID NO: 914846
gugauaagcugguguuaug

SEQ ID NO: 1035131 - RNA, 19 nt, Artificial Sequence
  Description of Artificial Sequence: Synthetic oligonucleotide
  Antisense strand to SEQ ID NO: 1035130
cauaacaccagcuuaucac

SEQ ID NO: 1035132 - RNA, 19 nt, Artificial Sequence
  Description of Artificial Sequence: Synthetic oligonucleotide
  Sense strand starting at position 77 of SEQ ID NO: 914847
gugaucuugccguucaagu

SEQ ID NO: 1035133 - RNA, 19 nt, Artificial Sequence
  Description of Artificial Sequence: Synthetic oligonucleotide
  Antisense strand to SEQ ID NO: 1035132
acuugaacggcaagaucac

SEQ ID NO: 1035134 - RNA, 19 nt, Artificial Sequence
  Description of Artificial Sequence: Synthetic oligonucleotide
  Sense strand starting at position 139 of SEQ ID NO: 914847
guccuugagcacugcauuu

SEQ ID NO: 1035135 - RNA, 19 nt, Artificial Sequence
  Description of Artificial Sequence: Synthetic oligonucleotide
  Antisense strand to SEQ ID NO: 1035134
aaaugcagugcucaaggac

SEQ ID NO: 1035136 - RNA, 19 nt, Artificial Sequence
  Description of Artificial Sequence: Synthetic oligonucleotide
  Sense strand starting at position 422 of SEQ ID NO: 914847
ucuucuugauucccaggaa

SEQ ID NO: 1035137 - RNA, 19 nt, Artificial Sequence
  Description of Artificial Sequence: Synthetic oligonucleotide
  Antisense strand to SEQ ID NO: 1035136
uuccugggaaucaagaaga

SEQ ID NO: 1035138 - RNA, 19 nt, Artificial Sequence
  Description of Artificial Sequence: Synthetic oligonucleotide
  Sense strand starting at position 425 of SEQ ID NO: 914847
ucuugauucccaggaaccu

SEQ ID NO: 1035139 - RNA, 19 nt, Artificial Sequence
  Description of Artificial Sequence: Synthetic oligonucleotide
  Antisense strand to SEQ ID NO: 1035138
agguuccugggaaucaaga

SEQ ID NO: 1035140 - RNA, 19 nt, Artificial Sequence
  Description of Artificial Sequence: Synthetic oligonucleotide
  Sense strand starting at position 669 of SEQ ID NO: 914847
ucaucaguaagauggaguu

SEQ ID NO: 1035141 - RNA, 19 nt, Artificial Sequence
  Description of Artificial Sequence: Synthetic oligonucleotide
  Antisense strand to SEQ ID NO: 1035140
aacuccaucuuacugauga

SEQ ID NO: 1035142 - RNA, 19 nt, Artificial Sequence
  Description of Artificial Sequence: Synthetic oligonucleotide
  Sense strand starting at position 728 of SEQ ID NO: 914847
gcacauuaaguuuauggau

SEQ ID NO: 1035143 - RNA, 19 nt, Artificial Sequence
  Description of Artificial Sequence: Synthetic oligonucleotide
  Antisense strand to SEQ ID NO: 1035142
auccauaaacuuaaugugc

SEQ ID NO: 1035144 - RNA, 19 nt, Artificial Sequence
  Description of Artificial Sequence: Synthetic oligonucleotide
  Sense strand starting at position 748 of SEQ ID NO: 914847
ugcuuugagacguauagac

SEQ ID NO: 1035145 - RNA, 19 nt, Artificial Sequence
  Description of Artificial Sequence: Synthetic oligonucleotide
  Antisense strand to SEQ ID NO: 1035144
gucuauacgucucaaagca

SEQ ID NO: 1035146 - RNA, 19 nt, Artificial Sequence
  Description of Artificial Sequence: Synthetic oligonucleotide
  Sense strand starting at position 755 of SEQ ID NO: 914847
agacguauagacugaguga

SEQ ID NO: 1035147 - RNA, 19 nt, Artificial Sequence
  Description of Artificial Sequence: Synthetic oligonucleotide
  Antisense strand to SEQ ID NO: 1035146
ucacucagucuauacgucu

SEQ ID NO: 1035148 - RNA, 19 nt, Artificial Sequence
  Description of Artificial Sequence: Synthetic oligonucleotide
  Sense strand starting at position 779 of SEQ ID NO: 914847
ggagaaggugaugguuauc

SEQ ID NO: 1035149 - RNA, 19 nt, Artificial Sequence
  Description of Artificial Sequence: Synthetic oligonucleotide
  Antisense strand to SEQ ID NO: 1035148
gauaaccaucaccuucucc

SEQ ID NO: 1035150 - RNA, 19 nt, Artificial Sequence
  Description of Artificial Sequence: Synthetic oligonucleotide
  Sense strand starting at position 782 of SEQ ID NO: 914847
gaaggugaugguuaucauc

SEQ ID NO: 1035151 - RNA, 19 nt, Artificial Sequence
  Description of Artificial Sequence: Synthetic oligonucleotide
  Antisense strand to SEQ ID NO: 1035150
gaugauaaccaucaccuuc

SEQ ID NO: 1035152 - RNA, 19 nt, Artificial Sequence
  Description of Artificial Sequence: Synthetic oligonucleotide
  Sense strand starting at position 784 of SEQ ID NO: 914847
aggugaugguuaucaucuc

SEQ ID NO: 1035153 - RNA, 19 nt, Artificial Sequence
  Description of Artificial Sequence: Synthetic oligonucleotide
  Antisense strand to SEQ ID NO: 1035152
gagaugauaaccaucaccu

SEQ ID NO: 1035154 - RNA, 19 nt, Artificial Sequence
  Description of Artificial Sequence: Synthetic oligonucleotide
  Sense strand starting at position 793 of SEQ ID NO: 914847
uuaucaucucaaggaguca

SEQ ID NO: 1035155 - RNA, 19 nt, Artificial Sequence
  Description of Artificial Sequence: Synthetic oligonucleotide
  Antisense strand to SEQ ID NO: 1035154
ugacuccuugagaugauaa

SEQ ID NO: 1035156 - RNA, 19 nt, Artificial Sequence
  Description of Artificial Sequence: Synthetic oligonucleotide
  Sense strand starting at position 1026 of SEQ ID NO: 914847
gggcaucaguuucccuaua

SEQ ID NO: 1035157 - RNA, 19 nt, Artificial Sequence
  Description of Artificial Sequence: Synthetic oligonucleotide
  Antisense strand to SEQ ID NO: 1035156
uauagggaaacugaugccc

SEQ ID NO: 1035158 - RNA, 19 nt, Artificial Sequence
  Description of Artificial Sequence: Synthetic oligonucleotide
  Sense strand starting at position 1028 of SEQ ID NO: 914847
gcaucaguuucccuauaug

SEQ ID NO: 1035159 - RNA, 19 nt, Artificial Sequence
  Description of Artificial Sequence: Synthetic oligonucleotide
  Antisense strand to SEQ ID NO: 1035158
cauauagggaaacugaugc

SEQ ID NO: 1035160 - RNA, 19 nt, Artificial Sequence
  Description of Artificial Sequence: Synthetic oligonucleotide
  Sense strand starting at position 1272 of SEQ ID NO: 914847
gccuguaaacuagaacuca

SEQ ID NO: 1035161 - RNA, 19 nt, Artificial Sequence
  Description of Artificial Sequence: Synthetic oligonucleotide
  Antisense strand to SEQ ID NO: 1035160
ugaguucuaguuuacaggc

SEQ ID NO: 1035162 - RNA, 19 nt, Artificial Sequence
  Description of Artificial Sequence: Synthetic oligonucleotide
  Sense strand starting at position 1468 of SEQ ID NO: 914847
ugaaaugucguuucugcgu

SEQ ID NO: 1035163 - RNA, 19 nt, Artificial Sequence
  Description of Artificial Sequence: Synthetic oligonucleotide
  Antisense strand to SEQ ID NO: 1035162
acgcagaaacgacauuuca

SEQ ID NO: 1035164 - RNA, 19 nt, Artificial Sequence
  Description of Artificial Sequence: Synthetic oligonucleotide
  Sense strand starting at position 1555 of SEQ ID NO: 914847
cgucuugagggcugggaau

SEQ ID NO: 1035165 - RNA, 19 nt, Artificial Sequence
  Description of Artificial Sequence: Synthetic oligonucleotide
  Antisense strand to SEQ ID NO: 1035164
auucccagcccucaagacg

SEQ ID NO: 1035166 - RNA, 19 nt, Artificial Sequence
  Description of Artificial Sequence: Synthetic oligonucleotide
  Sense strand starting at position 1557 of SEQ ID NO: 914847
ucuugagggcugggaauaa

SEQ ID NO: 1035167 - RNA, 19 nt, Artificial Sequence
  Description of Artificial Sequence: Synthetic oligonucleotide
  Antisense strand to SEQ ID NO: 1035166
uuauucccagcccucaaga

SEQ ID NO: 1035168 - RNA, 19 nt, Artificial Sequence
  Description of Artificial Sequence: Synthetic oligonucleotide
  Sense strand starting at position 1681 of SEQ ID NO: 914847
ggaggacuagcuugguauu

SEQ ID NO: 1035169 - RNA, 19 nt, Artificial Sequence
  Description of Artificial Sequence: Synthetic oligonucleotide
  Antisense strand to SEQ ID NO: 1035168
aauaccaagcuaguccucc

SEQ ID NO: 1035170 - RNA, 19 nt, Artificial Sequence
  Description of Artificial Sequence: Synthetic oligonucleotide
  Sense strand starting at position 2348 of SEQ ID NO: 914847
aggcuuaugguugagguca

SEQ ID NO: 1035171 - RNA, 19 nt, Artificial Sequence
  Description of Artificial Sequence: Synthetic oligonucleotide
  Antisense strand to SEQ ID NO: 1035170
ugaccucaaccauaagccu

SEQ ID NO: 1035172 - RNA, 19 nt, Artificial Sequence
  Description of Artificial Sequence: Synthetic oligonucleotide
  Sense strand starting at position 2369 of SEQ ID NO: 914847
ugagaccuuugaguccaaa

SEQ ID NO: 1035173 - RNA, 19 nt, Artificial Sequence
  Description of Artificial Sequence: Synthetic oligonucleotide
  Antisense strand to SEQ ID NO: 1035172
uuuggacucaaaggucuca

SEQ ID NO: 1035174 - RNA, 19 nt, Artificial Sequence
  Description of Artificial Sequence: Synthetic oligonucleotide
  Sense strand starting at position 2372 of SEQ ID NO: 914847
gaccuuugaguccaaagua

SEQ ID NO: 1035175 - RNA, 19 nt, Artificial Sequence
  Description of Artificial Sequence: Synthetic oligonucleotide
  Antisense strand to SEQ ID NO: 1035174
uacuuuggacucaaagguc

SEQ ID NO: 1035176 - RNA, 19 nt, Artificial Sequence
  Description of Artificial Sequence: Synthetic oligonucleotide
  Sense strand starting at position 2475 of SEQ ID NO: 914847
gggauuugcccagguagca

SEQ ID NO: 1035177 - RNA, 19 nt, Artificial Sequence
  Description of Artificial Sequence: Synthetic oligonucleotide
  Antisense strand to SEQ ID NO: 1035176
ugcuaccugggcaaauccc

SEQ ID NO: 1035178 - RNA, 19 nt, Artificial Sequence
  Description of Artificial Sequence: Synthetic oligonucleotide
  Sense strand starting at position 2620 of SEQ ID NO: 914847
aucucugucccagaacagu

SEQ ID NO: 1035179 - RNA, 19 nt, Artificial Sequence
  Description of Artificial Sequence: Synthetic oligonucleotide
  Antisense strand to SEQ ID NO: 1035178
acuguucugggacagagau

SEQ ID NO: 1035180 - RNA, 19 nt, Artificial Sequence
  Description of Artificial Sequence: Synthetic oligonucleotide
  Sense strand starting at position 2875 of SEQ ID NO: 914847
aaaggucugcuccaggaua

SEQ ID NO: 1035181 - RNA, 19 nt, Artificial Sequence
  Description of Artificial Sequence: Synthetic oligonucleotide
  Antisense strand to SEQ ID NO: 1035180
uauccuggagcagaccuuu

SEQ ID NO: 1035182 - RNA, 19 nt, Artificial Sequence
  Description of Artificial Sequence: Synthetic oligonucleotide
  Sense strand starting at position 2877 of SEQ ID NO: 914847
aggucugcuccaggauauc

SEQ ID NO: 1035183 - RNA, 19 nt, Artificial Sequence
  Description of Artificial Sequence: Synthetic oligonucleotide
  Antisense strand to SEQ ID NO: 1035182
gauauccuggagcagaccu

SEQ ID NO: 1035184 - RNA, 19 nt, Artificial Sequence
  Description of Artificial Sequence: Synthetic oligonucleotide
  Sense strand starting at position 2975 of SEQ ID NO: 914847
ggguauauuguauauugua

SEQ ID NO: 1035185 - RNA, 19 nt, Artificial Sequence
  Description of Artificial Sequence: Synthetic oligonucleotide
  Antisense strand to SEQ ID NO: 1035184
uacaauauacaauauaccc

SEQ ID NO: 1035186 - RNA, 19 nt, Artificial Sequence
  Description of Artificial Sequence: Synthetic oligonucleotide
  Sense strand starting at position 3010 of SEQ ID NO: 914847
gguauauuguacccaccuu

SEQ ID NO: 1035187 - RNA, 19 nt, Artificial Sequence
  Description of Artificial Sequence: Synthetic oligonucleotide
  Antisense strand to SEQ ID NO: 1035186
aagguggguacaauauacc

SEQ ID NO: 1035188 - RNA, 19 nt, Artificial Sequence
  Description of Artificial Sequence: Synthetic oligonucleotide
  Sense strand starting at position 3217 of SEQ ID NO: 914847
gagugauuauggcucacag

SEQ ID NO: 1035189 - RNA, 19 nt, Artificial Sequence
  Description of Artificial Sequence: Synthetic oligonucleotide
  Antisense strand to SEQ ID NO: 1035188
cugugagccauaaucacuc

SEQ ID NO: 1035190 - RNA, 19 nt, Artificial Sequence
  Description of Artificial Sequence: Synthetic oligonucleotide
  Sense strand starting at position 3585 of SEQ ID NO: 914847
uccaaaugacucugaugca

SEQ ID NO: 1035191 - RNA, 19 nt, Artificial Sequence
  Description of Artificial Sequence: Synthetic oligonucleotide
  Antisense strand to SEQ ID NO: 1035190
ugcaucagagucauuugga

SEQ ID NO: 1035192 - RNA, 19 nt, Artificial Sequence
  Description of Artificial Sequence: Synthetic oligonucleotide
  Sense strand starting at position 3600 of SEQ ID NO: 914847
ugcaaaugguucuugagac

SEQ ID NO: 1035193 - RNA, 19 nt, Artificial Sequence
  Description of Artificial Sequence: Synthetic oligonucleotide
  Antisense strand to SEQ ID NO: 1035192
gucucaagaaccauuugca

SEQ ID NO: 1035194 - RNA, 19 nt, Artificial Sequence
  Description of Artificial Sequence: Synthetic oligonucleotide
  Sense strand starting at position 3607 of SEQ ID NO: 914847
gguucuugagacuagccau

SEQ ID NO: 1035195 - RNA, 19 nt, Artificial Sequence
  Description of Artificial Sequence: Synthetic oligonucleotide
  Antisense strand to SEQ ID NO: 1035194
auggcuagucucaagaacc

SEQ ID NO: 1035196 - RNA, 19 nt, Artificial Sequence
  Description of Artificial Sequence: Synthetic oligonucleotide
  Sense strand starting at position 3648 of SEQ ID NO: 914847
caggguucuuucucagauc

SEQ ID NO: 1035197 - RNA, 19 nt, Artificial Sequence
  Description of Artificial Sequence: Synthetic oligonucleotide
  Antisense strand to SEQ ID NO: 1035196
gaucugagaaagaacccug

SEQ ID NO: 1035198 - RNA, 19 nt, Artificial Sequence
  Description of Artificial Sequence: Synthetic oligonucleotide
  Sense strand starting at position 3693 of SEQ ID NO: 914847
uaggacugucuaugacagu

SEQ ID NO: 1035199 - RNA, 19 nt, Artificial Sequence
  Description of Artificial Sequence: Synthetic oligonucleotide
  Antisense strand to SEQ ID NO: 1035198
acugucauagacaguccua

SEQ ID NO: 1035200 - RNA, 19 nt, Artificial Sequence
  Description of Artificial Sequence: Synthetic oligonucleotide
  Sense strand starting at position 3747 of SEQ ID NO: 914847
gguugugaguucuuugaag

SEQ ID NO: 1035201 - RNA, 19 nt, Artificial Sequence
  Description of Artificial Sequence: Synthetic oligonucleotide
  Antisense strand to SEQ ID NO: 1035200
cuucaaagaacucacaacc

SEQ ID NO: 1035202 - RNA, 19 nt, Artificial Sequence
  Description of Artificial Sequence: Synthetic oligonucleotide
  Sense strand starting at position 3749 of SEQ ID NO: 914847
uugugaguucuuugaagau

SEQ ID NO: 1035203 - RNA, 19 nt, Artificial Sequence
  Description of Artificial Sequence: Synthetic oligonucleotide
  Antisense strand to SEQ ID NO: 1035202
aucuucaaagaacucacaa

SEQ ID NO: 1035204 - RNA, 19 nt, Artificial Sequence
  Description of Artificial Sequence: Synthetic oligonucleotide
  Sense strand starting at position 3762 of SEQ ID NO: 914847
gaagauagggauugucuuu

SEQ ID NO: 1035205 - RNA, 19 nt, Artificial Sequence
  Description of Artificial Sequence: Synthetic oligonucleotide
  Antisense strand to SEQ ID NO: 1035204
aaagacaaucccuaucuuc

SEQ ID NO: 1035206 - RNA, 19 nt, Artificial Sequence
  Description of Artificial Sequence: Synthetic oligonucleotide
  Sense strand starting at position 3828 of SEQ ID NO: 914847
aggguucuggaauguaaau

SEQ ID NO: 1035207 - RNA, 19 nt, Artificial Sequence
  Description of Artificial Sequence: Synthetic oligonucleotide
  Antisense strand to SEQ ID NO: 1035206
auuuacauuccagaacccu

SEQ ID NO: 1035208 - RNA, 19 nt, Artificial Sequence
  Description of Artificial Sequence: Synthetic oligonucleotide
  Sense strand starting at position 3861 of SEQ ID NO: 914847
agaguuuccuagucaaauc

SEQ ID NO: 1035209 - RNA, 19 nt, Artificial Sequence
  Description of Artificial Sequence: Synthetic oligonucleotide
  Antisense strand to SEQ ID NO: 1035208
gauuugacuaggaaacucu

SEQ ID NO: 1035210 - RNA, 19 nt, Artificial Sequence
  Description of Artificial Sequence: Synthetic oligonucleotide
  Sense strand starting at position 3879 of SEQ ID NO: 914847
cccucaugagccuaacaga

SEQ ID NO: 1035211 - RNA, 19 nt, Artificial Sequence
  Description of Artificial Sequence: Synthetic oligonucleotide
  Antisense strand to SEQ ID NO: 1035210
ucuguuaggcucaugaggg

SEQ ID NO: 1035212 - RNA, 19 nt, Artificial Sequence
  Description of Artificial Sequence: Synthetic oligonucleotide
  Sense strand starting at position 124 of SEQ ID NO: 914848
gcaauaauuucugagaaau

SEQ ID NO: 1035213 - RNA, 19 nt, Artificial Sequence
  Description of Artificial Sequence: Synthetic oligonucleotide
  Antisense strand to SEQ ID NO: 1035212
auuucucagaaauuauugc

SEQ ID NO: 1035214 - RNA, 19 nt, Artificial Sequence
  Description of Artificial Sequence: Synthetic oligonucleotide
  Sense strand starting at position 481 of SEQ ID NO: 914848
agacaaguauuggucauau

SEQ ID NO: 1035215 - RNA, 19 nt, Artificial Sequence
  Description of Artificial Sequence: Synthetic oligonucleotide
  Antisense strand to SEQ ID NO: 1035214
auaugaccaauacuugucu

SEQ ID NO: 1035216 - RNA, 19 nt, Artificial Sequence
  Description of Artificial Sequence: Synthetic oligonucleotide
  Sense strand starting at position 506 of SEQ ID NO: 914848
uuguuaaaugcugaacacu

SEQ ID NO: 1035217 - RNA, 19 nt, Artificial Sequence
  Description of Artificial Sequence: Synthetic oligonucleotide
  Antisense strand to SEQ ID NO: 1035216
aguguucagcauuuaacaa

SEQ ID NO: 1035218 - RNA, 19 nt, Artificial Sequence
  Description of Artificial Sequence: Synthetic oligonucleotide
  Sense strand starting at position 545 of SEQ ID NO: 914848
ccaaccagauggucucaua

SEQ ID NO: 1035219 - RNA, 19 nt, Artificial Sequence
  Description of Artificial Sequence: Synthetic oligonucleotide
  Antisense strand to SEQ ID NO: 1035218
uaugagaccaucugguugg

SEQ ID NO: 1035220 - RNA, 19 nt, Artificial Sequence
  Description of Artificial Sequence: Synthetic oligonucleotide
  Sense strand starting at position 563 of SEQ ID NO: 914848
agggcuucuccauaaaucu

SEQ ID NO: 1035221 - RNA, 19 nt, Artificial Sequence
  Description of Artificial Sequence: Synthetic oligonucleotide
  Antisense strand to SEQ ID NO: 1035220
agauuuauggagaagcccu

SEQ ID NO: 1035222 - RNA, 19 nt, Artificial Sequence
  Description of Artificial Sequence: Synthetic oligonucleotide
  Sense strand starting at position 874 of SEQ ID NO: 914848
augacauuacugugacuuc

SEQ ID NO: 1035223 - RNA, 19 nt, Artificial Sequence
  Description of Artificial Sequence: Synthetic oligonucleotide
  Antisense strand to SEQ ID NO: 1035222
gaagucacaguaaugucau

SEQ ID NO: 1035224 - RNA, 19 nt, Artificial Sequence
  Description of Artificial Sequence: Synthetic oligonucleotide
  Sense strand starting at position 877 of SEQ ID NO: 914848
acauuacugugacuuccau

SEQ ID NO: 1035225 - RNA, 19 nt, Artificial Sequence
  Description of Artificial Sequence: Synthetic oligonucleotide
  Antisense strand to SEQ ID NO: 1035224
auggaagucacaguaaugu

SEQ ID NO: 1035226 - RNA, 19 nt, Artificial Sequence
  Description of Artificial Sequence: Synthetic oligonucleotide
  Sense strand starting at position 930 of SEQ ID NO: 914848
acaccugacaguggugaaa

SEQ ID NO: 1035227 - RNA, 19 nt, Artificial Sequence
  Description of Artificial Sequence: Synthetic oligonucleotide
  Antisense strand to SEQ ID NO: 1035226
uuucaccacugucaggugu

SEQ ID NO: 1035228 - RNA, 19 nt, Artificial Sequence
  Description of Artificial Sequence: Synthetic oligonucleotide
  Sense strand starting at position 954 of SEQ ID NO: 914848
agucauaaacgcuagauua

SEQ ID NO: 1035229 - RNA, 19 nt, Artificial Sequence
  Description of Artificial Sequence: Synthetic oligonucleotide
  Antisense strand to SEQ ID NO: 1035228
uaaucuagcguuuaugacu

SEQ ID NO: 1035230 - RNA, 19 nt, Artificial Sequence
  Description of Artificial Sequence: Synthetic oligonucleotide
  Sense strand starting at position 1119 of SEQ ID NO: 914848
gcgaaaccaacugagugau

SEQ ID NO: 1035231 - RNA, 19 nt, Artificial Sequence
  Description of Artificial Sequence: Synthetic oligonucleotide
  Antisense strand to SEQ ID NO: 1035230
aucacucaguugguuucgc

SEQ ID NO: 1035232 - RNA, 19 nt, Artificial Sequence
  Description of Artificial Sequence: Synthetic oligonucleotide
  Sense strand starting at position 1152 of SEQ ID NO: 914848
agugauaucccacaguguc

SEQ ID NO: 1035233 - RNA, 19 nt, Artificial Sequence
  Description of Artificial Sequence: Synthetic oligonucleotide
  Antisense strand to SEQ ID NO: 1035232
gacacugugggauaucacu

SEQ ID NO: 1035234 - RNA, 19 nt, Artificial Sequence
  Description of Artificial Sequence: Synthetic oligonucleotide
  Sense strand starting at position 1403 of SEQ ID NO: 914848
gcaugugagguacagagaa

SEQ ID NO: 1035235 - RNA, 19 nt, Artificial Sequence
  Description of Artificial Sequence: Synthetic oligonucleotide
  Antisense strand to SEQ ID NO: 1035234
uucucuguaccucacaugc

SEQ ID NO: 1035236 - RNA, 19 nt, Artificial Sequence
  Description of Artificial Sequence: Synthetic oligonucleotide
  Sense strand starting at position 1421 of SEQ ID NO: 914848
aggaaauggucuucuccuu

SEQ ID NO: 1035237 - RNA, 19 nt, Artificial Sequence
  Description of Artificial Sequence: Synthetic oligonucleotide
  Antisense strand to SEQ ID NO: 1035236
aaggagaagaccauuuccu

SEQ ID NO: 1035238 - RNA, 19 nt, Artificial Sequence
  Description of Artificial Sequence: Synthetic oligonucleotide
  Sense strand starting at position 1744 of SEQ ID NO: 914848
ccugauugaucacuugaau

SEQ ID NO: 1035239 - RNA, 19 nt, Artificial Sequence
  Description of Artificial Sequence: Synthetic oligonucleotide
  Antisense strand to SEQ ID NO: 1035238
auucaagugaucaaucagg

SEQ ID NO: 1035240 - RNA, 19 nt, Artificial Sequence
  Description of Artificial Sequence: Synthetic oligonucleotide
  Sense strand starting at position 1750 of SEQ ID NO: 914848
ugaucacuugaauaacguu

SEQ ID NO: 1035241 - RNA, 19 nt, Artificial Sequence
  Description of Artificial Sequence: Synthetic oligonucleotide
  Antisense strand to SEQ ID NO: 1035240
aacguuauucaagugauca

SEQ ID NO: 1035242 - RNA, 19 nt, Artificial Sequence
  Description of Artificial Sequence: Synthetic oligonucleotide
  Sense strand starting at position 1775 of SEQ ID NO: 914848
ccaugacugcauuaaugau

SEQ ID NO: 1035243 - RNA, 19 nt, Artificial Sequence
  Description of Artificial Sequence: Synthetic oligonucleotide
  Antisense strand to SEQ ID NO: 1035242
aucauuaaugcagucaugg

SEQ ID NO: 1035244 - RNA, 19 nt, Artificial Sequence
  Description of Artificial Sequence: Synthetic oligonucleotide
  Sense strand starting at position 1807 of SEQ ID NO: 914848
ccuggcuuuccagagaggu

SEQ ID NO: 1035245 - RNA, 19 nt, Artificial Sequence
  Description of Artificial Sequence: Synthetic oligonucleotide
  Antisense strand to SEQ ID NO: 1035244
accucucuggaaagccagg

SEQ ID NO: 1035246 - RNA, 19 nt, Artificial Sequence
  Description of Artificial Sequence: Synthetic oligonucleotide
  Sense strand starting at position 1809 of SEQ ID NO: 914848
uggcuuuccagagagguga

SEQ ID NO: 1035247 - RNA, 19 nt, Artificial Sequence
  Description of Artificial Sequence: Synthetic oligonucleotide
  Antisense strand to SEQ ID NO: 1035246
ucaccucucuggaaagcca

SEQ ID NO: 1035248 - RNA, 19 nt, Artificial Sequence
  Description of Artificial Sequence: Synthetic oligonucleotide
  Sense strand starting at position 1920 of SEQ ID NO: 914848
ucuuucuaugcagacugau

SEQ ID NO: 1035249 - RNA, 19 nt, Artificial Sequence
  Description of Artificial Sequence: Synthetic oligonucleotide
  Antisense strand to SEQ ID NO: 1035248
aucagucugcauagaaaga

SEQ ID NO: 1035250 - RNA, 19 nt, Artificial Sequence
  Description of Artificial Sequence: Synthetic oligonucleotide
  Sense strand starting at position 1958 of SEQ ID NO: 914848
auuuauuguaggcgacagu

SEQ ID NO: 1035251 - RNA, 19 nt, Artificial Sequence
  Description of Artificial Sequence: Synthetic oligonucleotide
  Antisense strand to SEQ ID NO: 1035250
acugucgccuacaauaaau

SEQ ID NO: 1035252 - RNA, 19 nt, Artificial Sequence
  Description of Artificial Sequence: Synthetic oligonucleotide
  Sense strand starting at position 1985 of SEQ ID NO: 914848
ugacgcuaauuuguguaaa

SEQ ID NO: 1035253 - RNA, 19 nt, Artificial Sequence
  Description of Artificial Sequence: Synthetic oligonucleotide
  Antisense strand to SEQ ID NO: 1035252
uuuacacaaauuagcguca

SEQ ID NO: 1035254 - RNA, 19 nt, Artificial Sequence
  Description of Artificial Sequence: Synthetic oligonucleotide
  Sense strand starting at position 1987 of SEQ ID NO: 914848
acgcuaauuuguguaaacu

SEQ ID NO: 1035255 - RNA, 19 nt, Artificial Sequence
  Description of Artificial Sequence: Synthetic oligonucleotide
  Antisense strand to SEQ ID NO: 1035254
aguuuacacaaauuagcgu

SEQ ID NO: 1035256 - RNA, 19 nt, Artificial Sequence
  Description of Artificial Sequence: Synthetic oligonucleotide
  Sense strand starting at position 1988 of SEQ ID NO: 914848
cgcuaauuuguguaaacuu

SEQ ID NO: 1035257 - RNA, 19 nt, Artificial Sequence
  Description of Artificial Sequence: Synthetic oligonucleotide
  Antisense strand to SEQ ID NO: 1035256
aaguuuacacaaauuagcg

SEQ ID NO: 1035258 - RNA, 19 nt, Artificial Sequence
  Description of Artificial Sequence: Synthetic oligonucleotide
  Sense strand starting at position 1995 of SEQ ID NO: 914848
uuguguaaacuuggaaaca

SEQ ID NO: 1035259 - RNA, 19 nt, Artificial Sequence
  Description of Artificial Sequence: Synthetic oligonucleotide
  Antisense strand to SEQ ID NO: 1035258
uguuuccaaguuuacacaa

SEQ ID NO: 1035260 - RNA, 19 nt, Artificial Sequence
  Description of Artificial Sequence: Synthetic oligonucleotide
  Sense strand starting at position 2012 of SEQ ID NO: 914848
cacuuaauuugauagugga

SEQ ID NO: 1035261 - RNA, 19 nt, Artificial Sequence
  Description of Artificial Sequence: Synthetic oligonucleotide
  Antisense strand to SEQ ID NO: 1035260
uccacuaucaaauuaagug

SEQ ID NO: 1035262 - RNA, 19 nt, Artificial Sequence
  Description of Artificial Sequence: Synthetic oligonucleotide
  Sense strand starting at position 2025 of SEQ ID NO: 914848
aguggagucgugugauuua

SEQ ID NO: 1035263 - RNA, 19 nt, Artificial Sequence
  Description of Artificial Sequence: Synthetic oligonucleotide
  Antisense strand to SEQ ID NO: 1035262
uaaaucacacgacuccacu

SEQ ID NO: 1035264 - RNA, 19 nt, Artificial Sequence
  Description of Artificial Sequence: Synthetic oligonucleotide
  Sense strand starting at position 2028 of SEQ ID NO: 914848
ggagucgugugauuuaaac

SEQ ID NO: 1035265 - RNA, 19 nt, Artificial Sequence
  Description of Artificial Sequence: Synthetic oligonucleotide
  Antisense strand to SEQ ID NO: 1035264
guuuaaaucacacgacucc

SEQ ID NO: 1035266 - RNA, 19 nt, Artificial Sequence
  Description of Artificial Sequence: Synthetic oligonucleotide
  Sense strand starting at position 2268 of SEQ ID NO: 914848
cggaaacacuuacuuauca

SEQ ID NO: 1035267 - RNA, 19 nt, Artificial Sequence
  Description of Artificial Sequence: Synthetic oligonucleotide
  Antisense strand to SEQ ID NO: 1035266
ugauaaguaaguguuuccg

SEQ ID NO: 1035268 - RNA, 19 nt, Artificial Sequence
  Description of Artificial Sequence: Synthetic oligonucleotide
  Sense strand starting at position 2484 of SEQ ID NO: 914848
guuggaagucuuuauuauu

SEQ ID NO: 1035269 - RNA, 19 nt, Artificial Sequence
  Description of Artificial Sequence: Synthetic oligonucleotide
  Antisense strand to SEQ ID NO: 1035268
aauaauaaagacuuccaac

SEQ ID NO: 1035270 - RNA, 19 nt, Artificial Sequence
  Description of Artificial Sequence: Synthetic oligonucleotide
  Sense strand starting at position 2736 of SEQ ID NO: 914848
augaacucuuaggugauua

SEQ ID NO: 1035271 - RNA, 19 nt, Artificial Sequence
  Description of Artificial Sequence: Synthetic oligonucleotide
  Antisense strand to SEQ ID NO: 1035270
uaaucaccuaagaguucau

SEQ ID NO: 1035272 - RNA, 19 nt, Artificial Sequence
  Description of Artificial Sequence: Synthetic oligonucleotide
  Sense strand starting at position 2737 of SEQ ID NO: 914848
ugaacucuuaggugauuag

SEQ ID NO: 1035273 - RNA, 19 nt, Artificial Sequence
  Description of Artificial Sequence: Synthetic oligonucleotide
  Antisense strand to SEQ ID NO: 1035272
cuaaucaccuaagaguuca

SEQ ID NO: 1035274 - RNA, 19 nt, Artificial Sequence
  Description of Artificial Sequence: Synthetic oligonucleotide
  Sense strand starting at position 2740 of SEQ ID NO: 914848
acucuuaggugauuagaga

SEQ ID NO: 1035275 - RNA, 19 nt, Artificial Sequence
  Description of Artificial Sequence: Synthetic oligonucleotide
  Antisense strand to SEQ ID NO: 1035274
ucucuaaucaccuaagagu

SEQ ID NO: 1035276 - RNA, 19 nt, Artificial Sequence
  Description of Artificial Sequence: Synthetic oligonucleotide
  Sense strand starting at position 2766 of SEQ ID NO: 914848
uggugucuggguuauauaa

SEQ ID NO: 1035277 - RNA, 19 nt, Artificial Sequence
  Description of Artificial Sequence: Synthetic oligonucleotide
  Antisense strand to SEQ ID NO: 1035276
uuauauaacccagacacca

SEQ ID NO: 1035278 - RNA, 19 nt, Artificial Sequence
  Description of Artificial Sequence: Synthetic oligonucleotide
  Sense strand starting at position 3008 of SEQ ID NO: 914848
gcuuguucuguaggauuuc

SEQ ID NO: 1035279 - RNA, 19 nt, Artificial Sequence
  Description of Artificial Sequence: Synthetic oligonucleotide
  Antisense strand to SEQ ID NO: 1035278
gaaauccuacagaacaagc

SEQ ID NO: 1035280 - RNA, 19 nt, Artificial Sequence
  Description of Artificial Sequence: Synthetic oligonucleotide
  Sense strand starting at position 3253 of SEQ ID NO: 914848
caaugaugauauguugaua

SEQ ID NO: 1035281 - RNA, 19 nt, Artificial Sequence
  Description of Artificial Sequence: Synthetic oligonucleotide
  Antisense strand to SEQ ID NO: 1035280
uaucaacauaucaucauug

SEQ ID NO: 1035282 - RNA, 19 nt, Artificial Sequence
  Description of Artificial Sequence: Synthetic oligonucleotide
  Sense strand starting at position 3295 of SEQ ID NO: 914848
accauugugcuagacauca

SEQ ID NO: 1035283 - RNA, 19 nt, Artificial Sequence
  Description of Artificial Sequence: Synthetic oligonucleotide
  Antisense strand to SEQ ID NO: 1035282
ugaugucuagcacaauggu

SEQ ID NO: 1035284 - RNA, 19 nt, Artificial Sequence
  Description of Artificial Sequence: Synthetic oligonucleotide
  Sense strand starting at position 3378 of SEQ ID NO: 914848
augugucaauaaucuauga

SEQ ID NO: 1035285 - RNA, 19 nt, Artificial Sequence
  Description of Artificial Sequence: Synthetic oligonucleotide
  Antisense strand to SEQ ID NO: 1035284
ucauagauuauugacacau

SEQ ID NO: 1035286 - RNA, 19 nt, Artificial Sequence
  Description of Artificial Sequence: Synthetic oligonucleotide
  Sense strand starting at position 3406 of SEQ ID NO: 914848
ugaugaaugccaggauaug

SEQ ID NO: 1035287 - RNA, 19 nt, Artificial Sequence
  Description of Artificial Sequence: Synthetic oligonucleotide
  Antisense strand to SEQ ID NO: 1035286
cauauccuggcauucauca

SEQ ID NO: 1035288 - RNA, 19 nt, Artificial Sequence
  Description of Artificial Sequence: Synthetic oligonucleotide
  Sense strand starting at position 3501 of SEQ ID NO: 914848
guuagagucacauauagua

SEQ ID NO: 1035289 - RNA, 19 nt, Artificial Sequence
  Description of Artificial Sequence: Synthetic oligonucleotide
  Antisense strand to SEQ ID NO: 1035288
uacuauaugugacucuaac

SEQ ID NO: 1035290 - RNA, 19 nt, Artificial Sequence
  Description of Artificial Sequence: Synthetic oligonucleotide
  Sense strand starting at position 3921 of SEQ ID NO: 914848
ucuaaauaagucugaaguc

SEQ ID NO: 1035291 - RNA, 19 nt, Artificial Sequence
  Description of Artificial Sequence: Synthetic oligonucleotide
  Antisense strand to SEQ ID NO: 1035290
gacuucagacuuauuuaga

SEQ ID NO: 1035292 - RNA, 19 nt, Artificial Sequence
  Description of Artificial Sequence: Synthetic oligonucleotide
  Sense strand starting at position 23 of SEQ ID NO: 914849
agugguuucccaggaccua

SEQ ID NO: 1035293 - RNA, 19 nt, Artificial Sequence
  Description of Artificial Sequence: Synthetic oligonucleotide
  Antisense strand to SEQ ID NO: 1035292
uagguccugggaaaccacu

SEQ ID NO: 1035294 - RNA, 19 nt, Artificial Sequence
  Description of Artificial Sequence: Synthetic oligonucleotide
  Sense strand starting at position 66 of SEQ ID NO: 914849
auuacaagcuuguugaaag

SEQ ID NO: 1035295 - RNA, 19 nt, Artificial Sequence
  Description of Artificial Sequence: Synthetic oligonucleotide
  Antisense strand to SEQ ID NO: 1035294
cuuucaacaagcuuguaau

SEQ ID NO: 1035296 - RNA, 19 nt, Artificial Sequence
  Description of Artificial Sequence: Synthetic oligonucleotide
  Sense strand starting at position 240 of SEQ ID NO: 914849
aagcaauuccacugagagg

SEQ ID NO: 1035297 - RNA, 19 nt, Artificial Sequence
  Description of Artificial Sequence: Synthetic oligonucleotide
  Antisense strand to SEQ ID NO: 1035296
ccucucaguggaauugcuu

SEQ ID NO: 1035298 - RNA, 19 nt, Artificial Sequence
  Description of Artificial Sequence: Synthetic oligonucleotide
  Sense strand starting at position 323 of SEQ ID NO: 914849
agcugaaucccuggacaau

SEQ ID NO: 1035299 - RNA, 19 nt, Artificial Sequence
  Description of Artificial Sequence: Synthetic oligonucleotide
  Antisense strand to SEQ ID NO: 1035298
auuguccagggauucagcu

SEQ ID NO: 1035300 - RNA, 19 nt, Artificial Sequence
  Description of Artificial Sequence: Synthetic oligonucleotide
  Sense strand starting at position 324 of SEQ ID NO: 914849
gcugaaucccuggacaauc

SEQ ID NO: 1035301 - RNA, 19 nt, Artificial Sequence
  Description of Artificial Sequence: Synthetic oligonucleotide
  Antisense strand to SEQ ID NO: 1035300
gauuguccagggauucagc

SEQ ID NO: 1035302 - RNA, 19 nt, Artificial Sequence
  Description of Artificial Sequence: Synthetic oligonucleotide
  Sense strand starting at position 336 of SEQ ID NO: 914849
gacaaucacugagcuguga

SEQ ID NO: 1035303 - RNA, 19 nt, Artificial Sequence
  Description of Artificial Sequence: Synthetic oligonucleotide
  Antisense strand to SEQ ID NO: 1035302
ucacagcucagugauuguc

SEQ ID NO: 1035304 - RNA, 19 nt, Artificial Sequence
  Description of Artificial Sequence: Synthetic oligonucleotide
  Sense strand starting at position 716 of SEQ ID NO: 914849
gaagcugacuuagugagaa

SEQ ID NO: 1035305 - RNA, 19 nt, Artificial Sequence
  Description of Artificial Sequence: Synthetic oligonucleotide
  Antisense strand to SEQ ID NO: 1035304
uucucacuaagucagcuuc

SEQ ID NO: 1035306 - RNA, 19 nt, Artificial Sequence
  Description of Artificial Sequence: Synthetic oligonucleotide
  Sense strand starting at position 718 of SEQ ID NO: 914849
agcugacuuagugagaauc

SEQ ID NO: 1035307 - RNA, 19 nt, Artificial Sequence
  Description of Artificial Sequence: Synthetic oligonucleotide
  Antisense strand to SEQ ID NO: 1035306
gauucucacuaagucagcu

SEQ ID NO: 1035308 - RNA, 19 nt, Artificial Sequence
  Description of Artificial Sequence: Synthetic oligonucleotide
  Sense strand starting at position 963 of SEQ ID NO: 914849
ccaagucccuguccauaaa

SEQ ID NO: 1035309 - RNA, 19 nt, Artificial Sequence
  Description of Artificial Sequence: Synthetic oligonucleotide
  Antisense strand to SEQ ID NO: 1035308
uuuauggacagggacuugg

SEQ ID NO: 1035310 - RNA, 19 nt, Artificial Sequence
  Description of Artificial Sequence: Synthetic oligonucleotide
  Sense strand starting at position 1060 of SEQ ID NO: 914849
aaagauugcugguugcgaa

SEQ ID NO: 1035311 - RNA, 19 nt, Artificial Sequence
  Description of Artificial Sequence: Synthetic oligonucleotide
  Antisense strand to SEQ ID NO: 1035310
uucgcaaccagcaaucuuu

SEQ ID NO: 1035312 - RNA, 19 nt, Artificial Sequence
  Description of Artificial Sequence: Synthetic oligonucleotide
  Sense strand starting at position 1103 of SEQ ID NO: 914849
ugcaccaaaucuguaagau

SEQ ID NO: 1035313 - RNA, 19 nt, Artificial Sequence
  Description of Artificial Sequence: Synthetic oligonucleotide
  Antisense strand to SEQ ID NO: 1035312
aucuuacagauuuggugca

SEQ ID NO: 1035314 - RNA, 19 nt, Artificial Sequence
  Description of Artificial Sequence: Synthetic oligonucleotide
  Sense strand starting at position 1104 of SEQ ID NO: 914849
gcaccaaaucuguaagaua

SEQ ID NO: 1035315 - RNA, 19 nt, Artificial Sequence
  Description of Artificial Sequence: Synthetic oligonucleotide
  Antisense strand to SEQ ID NO: 1035314
uaucuuacagauuuggugc

SEQ ID NO: 1035316 - RNA, 19 nt, Artificial Sequence
  Description of Artificial Sequence: Synthetic oligonucleotide
  Sense strand starting at position 1301 of SEQ ID NO: 914849
gaaagacauuugggugaag

SEQ ID NO: 1035317 - RNA, 19 nt, Artificial Sequence
  Description of Artificial Sequence: Synthetic oligonucleotide
  Antisense strand to SEQ ID NO: 1035316
cuucacccaaaugucuuuc

SEQ ID NO: 1035318 - RNA, 19 nt, Artificial Sequence
  Description of Artificial Sequence: Synthetic oligonucleotide
  Sense strand starting at position 1445 of SEQ ID NO: 914849
aaggucuugcuacaauuga

SEQ ID NO: 1035319 - RNA, 19 nt, Artificial Sequence
  Description of Artificial Sequence: Synthetic oligonucleotide
  Antisense strand to SEQ ID NO: 1035318
ucaauuguagcaagaccuu

SEQ ID NO: 1035320 - RNA, 19 nt, Artificial Sequence
  Description of Artificial Sequence: Synthetic oligonucleotide
  Sense strand starting at position 1697 of SEQ ID NO: 914849
agacaagucugccuagauu

SEQ ID NO: 1035321 - RNA, 19 nt, Artificial Sequence
  Description of Artificial Sequence: Synthetic oligonucleotide
  Antisense strand to SEQ ID NO: 1035320
aaucuaggcagacuugucu

SEQ ID NO: 1035322 - RNA, 19 nt, Artificial Sequence
  Description of Artificial Sequence: Synthetic oligonucleotide
  Sense strand starting at position 1773 of SEQ ID NO: 914849
gagacaaugagguguuucu

SEQ ID NO: 1035323 - RNA, 19 nt, Artificial Sequence
  Description of Artificial Sequence: Synthetic oligonucleotide
  Antisense strand to SEQ ID NO: 1035322
agaaacaccucauugucuc

SEQ ID NO: 1035324 - RNA, 19 nt, Artificial Sequence
  Description of Artificial Sequence: Synthetic oligonucleotide
  Sense strand starting at position 1780 of SEQ ID NO: 914849
ugagguguuucuccucuua

SEQ ID NO: 1035325 - RNA, 19 nt, Artificial Sequence
  Description of Artificial Sequence: Synthetic oligonucleotide
  Antisense strand to SEQ ID NO: 1035324
uaagaggagaaacaccuca

SEQ ID NO: 1035326 - RNA, 19 nt, Artificial Sequence
  Description of Artificial Sequence: Synthetic oligonucleotide
  Sense strand starting at position 1840 of SEQ ID NO: 914849
uuucuuggucuccaagaaa

SEQ ID NO: 1035327 - RNA, 19 nt, Artificial Sequence
  Description of Artificial Sequence: Synthetic oligonucleotide
  Antisense strand to SEQ ID NO: 1035326
uuucuuggagaccaagaaa

SEQ ID NO: 1035328 - RNA, 19 nt, Artificial Sequence
  Description of Artificial Sequence: Synthetic oligonucleotide
  Sense strand starting at position 1843 of SEQ ID NO: 914849
cuuggucuccaagaaagca

SEQ ID NO: 1035329 - RNA, 19 nt, Artificial Sequence
  Description of Artificial Sequence: Synthetic oligonucleotide
  Antisense strand to SEQ ID NO: 1035328
ugcuuucuuggagaccaag

SEQ ID NO: 1035330 - RNA, 19 nt, Artificial Sequence
  Description of Artificial Sequence: Synthetic oligonucleotide
  Sense strand starting at position 1865 of SEQ ID NO: 914849
agauucucgaugugagcaa

SEQ ID NO: 1035331 - RNA, 19 nt, Artificial Sequence
  Description of Artificial Sequence: Synthetic oligonucleotide
  Antisense strand to SEQ ID NO: 1035330
uugcucacaucgagaaucu

SEQ ID NO: 1035332 - RNA, 19 nt, Artificial Sequence
  Description of Artificial Sequence: Synthetic oligonucleotide
  Sense strand starting at position 1890 of SEQ ID NO: 914849
gcaccuuugaugcaagagu

SEQ ID NO: 1035333 - RNA, 19 nt, Artificial Sequence
  Description of Artificial Sequence: Synthetic oligonucleotide
  Antisense strand to SEQ ID NO: 1035332
acucuugcaucaaaggugc

SEQ ID NO: 1035334 - RNA, 19 nt, Artificial Sequence
  Description of Artificial Sequence: Synthetic oligonucleotide
  Sense strand starting at position 1898 of SEQ ID NO: 914849
gaugcaagaguuuggauau

SEQ ID NO: 1035335 - RNA, 19 nt, Artificial Sequence
  Description of Artificial Sequence: Synthetic oligonucleotide
  Antisense strand to SEQ ID NO: 1035334
auauccaaacucuugcauc

SEQ ID NO: 1035336 - RNA, 19 nt, Artificial Sequence
  Description of Artificial Sequence: Synthetic oligonucleotide
  Sense strand starting at position 1994 of SEQ ID NO: 914849
augcaacaguucucaaaga

SEQ ID NO: 1035337 - RNA, 19 nt, Artificial Sequence
  Description of Artificial Sequence: Synthetic oligonucleotide
  Antisense strand to SEQ ID NO: 1035336
ucuuugagaacuguugcau

SEQ ID NO: 1035338 - RNA, 19 nt, Artificial Sequence
  Description of Artificial Sequence: Synthetic oligonucleotide
  Sense strand starting at position 2055 of SEQ ID NO: 914849
gcaguuaagugagugagau

SEQ ID NO: 1035339 - RNA, 19 nt, Artificial Sequence
  Description of Artificial Sequence: Synthetic oligonucleotide
  Antisense strand to SEQ ID NO: 1035338
aucucacucacuuaacugc

SEQ ID NO: 1035340 - RNA, 19 nt, Artificial Sequence
  Description of Artificial Sequence: Synthetic oligonucleotide
  Sense strand starting at position 2056 of SEQ ID NO: 914849
caguuaagugagugagaua

SEQ ID NO: 1035341 - RNA, 19 nt, Artificial Sequence
  Description of Artificial Sequence: Synthetic oligonucleotide
  Antisense strand to SEQ ID NO: 1035340
uaucucacucacuuaacug

SEQ ID NO: 1035342 - RNA, 19 nt, Artificial Sequence
  Description of Artificial Sequence: Synthetic oligonucleotide
  Sense strand starting at position 2153 of SEQ ID NO: 914849
gcucaugucgaugugucua

SEQ ID NO: 1035343 - RNA, 19 nt, Artificial Sequence
  Description of Artificial Sequence: Synthetic oligonucleotide
  Antisense strand to SEQ ID NO: 1035342
uagacacaucgacaugagc

SEQ ID NO: 1035344 - RNA, 19 nt, Artificial Sequence
  Description of Artificial Sequence: Synthetic oligonucleotide
  Sense strand starting at position 2161 of SEQ ID NO: 914849
cgaugugucuaagucaaag

SEQ ID NO: 1035345 - RNA, 19 nt, Artificial Sequence
  Description of Artificial Sequence: Synthetic oligonucleotide
  Antisense strand to SEQ ID NO: 1035344
cuuugacuuagacacaucg

SEQ ID NO: 1035346 - RNA, 19 nt, Artificial Sequence
  Description of Artificial Sequence: Synthetic oligonucleotide
  Sense strand starting at position 2171 of SEQ ID NO: 914849
aagucaaaggcaugaaguu

SEQ ID NO: 1035347 - RNA, 19 nt, Artificial Sequence
  Description of Artificial Sequence: Synthetic oligonucleotide
  Antisense strand to SEQ ID NO: 1035346
aacuucaugccuuugacuu

SEQ ID NO: 1035348 - RNA, 19 nt, Artificial Sequence
  Description of Artificial Sequence: Synthetic oligonucleotide
  Sense strand starting at position 2263 of SEQ ID NO: 914849
ucuccuguccugugaauca

SEQ ID NO: 1035349 - RNA, 19 nt, Artificial Sequence
  Description of Artificial Sequence: Synthetic oligonucleotide
  Antisense strand to SEQ ID NO: 1035348
ugauucacaggacaggaga

SEQ ID NO: 1035350 - RNA, 19 nt, Artificial Sequence
  Description of Artificial Sequence: Synthetic oligonucleotide
  Sense strand starting at position 2415 of SEQ ID NO: 914849
uugugaacuuuguuucuac

SEQ ID NO: 1035351 - RNA, 19 nt, Artificial Sequence
  Description of Artificial Sequence: Synthetic oligonucleotide
  Antisense strand to SEQ ID NO: 1035350
guagaaacaaaguucacaa

SEQ ID NO: 1035352 - RNA, 19 nt, Artificial Sequence
  Description of Artificial Sequence: Synthetic oligonucleotide
  Sense strand starting at position 2416 of SEQ ID NO: 914849
ugugaacuuuguuucuacu

SEQ ID NO: 1035353 - RNA, 19 nt, Artificial Sequence
  Description of Artificial Sequence: Synthetic oligonucleotide
  Antisense strand to SEQ ID NO: 1035352
aguagaaacaaaguucaca

SEQ ID NO: 1035354 - RNA, 19 nt, Artificial Sequence
  Description of Artificial Sequence: Synthetic oligonucleotide
  Sense strand starting at position 3574 of SEQ ID NO: 914849
gcaguaaugugagccauag

SEQ ID NO: 1035355 - RNA, 19 nt, Artificial Sequence
  Description of Artificial Sequence: Synthetic oligonucleotide
  Antisense strand to SEQ ID NO: 1035354
cuauggcucacauuacugc

SEQ ID NO: 1035356 - RNA, 19 nt, Artificial Sequence
  Description of Artificial Sequence: Synthetic oligonucleotide
  Sense strand starting at position 3585 of SEQ ID NO: 914849
agccauagggaguggucaa

SEQ ID NO: 1035357 - RNA, 19 nt, Artificial Sequence
  Description of Artificial Sequence: Synthetic oligonucleotide
  Antisense strand to SEQ ID NO: 1035356
uugaccacucccuauggcu

SEQ ID NO: 1035358 - RNA, 19 nt, Artificial Sequence
  Description of Artificial Sequence: Synthetic oligonucleotide
  Sense strand starting at position 3586 of SEQ ID NO: 914849
gccauagggaguggucaaa

SEQ ID NO: 1035359 - RNA, 19 nt, Artificial Sequence
  Description of Artificial Sequence: Synthetic oligonucleotide
  Antisense strand to SEQ ID NO: 1035358
uuugaccacucccuauggc

SEQ ID NO: 1035360 - RNA, 19 nt, Artificial Sequence
  Description of Artificial Sequence: Synthetic oligonucleotide
  Sense strand starting at position 3715 of SEQ ID NO: 914849
ugacuuucucuuggccauu

SEQ ID NO: 1035361 - RNA, 19 nt, Artificial Sequence
  Description of Artificial Sequence: Synthetic oligonucleotide
  Antisense strand to SEQ ID NO: 1035360
aauggccaagagaaaguca

SEQ ID NO: 1035362 - RNA, 19 nt, Artificial Sequence
  Description of Artificial Sequence: Synthetic oligonucleotide
  Sense strand starting at position 3835 of SEQ ID NO: 914849
agcuucucaccucagaagu

SEQ ID NO: 1035363 - RNA, 19 nt, Artificial Sequence
  Description of Artificial Sequence: Synthetic oligonucleotide
  Antisense strand to SEQ ID NO: 1035362
acuucugaggugagaagcu

SEQ ID NO: 1035364 - RNA, 19 nt, Artificial Sequence
  Description of Artificial Sequence: Synthetic oligonucleotide
  Sense strand starting at position 3872 of SEQ ID NO: 914849
gagauagcauauguaauac

SEQ ID NO: 1035365 - RNA, 19 nt, Artificial Sequence
  Description of Artificial Sequence: Synthetic oligonucleotide
  Antisense strand to SEQ ID NO: 1035364
guauuacauaugcuaucuc

SEQ ID NO: 1035366 - RNA, 19 nt, Artificial Sequence
  Description of Artificial Sequence: Synthetic oligonucleotide
  Sense strand starting at position 3884 of SEQ ID NO: 914849
guaauacacuugucauuga

SEQ ID NO: 1035367 - RNA, 19 nt, Artificial Sequence
  Description of Artificial Sequence: Synthetic oligonucleotide
  Antisense strand to SEQ ID NO: 1035366
ucaaugacaaguguauuac

SEQ ID NO: 1035368 - RNA, 19 nt, Artificial Sequence
  Description of Artificial Sequence: Synthetic oligonucleotide
  Sense strand starting at position 3887 of SEQ ID NO: 914849
auacacuugucauugaaug

SEQ ID NO: 1035369 - RNA, 19 nt, Artificial Sequence
  Description of Artificial Sequence: Synthetic oligonucleotide
  Antisense strand to SEQ ID NO: 1035368
cauucaaugacaaguguau

SEQ ID NO: 1035370 - RNA, 19 nt, Artificial Sequence
  Description of Artificial Sequence: Synthetic oligonucleotide
  Sense strand starting at position 3974 of SEQ ID NO: 914849
gccaucucccacuaggaga

SEQ ID NO: 1035371 - RNA, 19 nt, Artificial Sequence
  Description of Artificial Sequence: Synthetic oligonucleotide
  Antisense strand to SEQ ID NO: 1035370
ucuccuagugggagauggc

SEQ ID NO: 1035372 - RNA, 19 nt, Artificial Sequence
  Description of Artificial Sequence: Synthetic oligonucleotide
  Sense strand starting at position 104 of SEQ ID NO: 914850
gaaauagcauagugacaag

SEQ ID NO: 1035373 - RNA, 19 nt, Artificial Sequence
  Description of Artificial Sequence: Synthetic oligonucleotide
  Antisense strand to SEQ ID NO: 1035372
cuugucacuaugcuauuuc

SEQ ID NO: 1035374 - RNA, 19 nt, Artificial Sequence
  Description of Artificial Sequence: Synthetic oligonucleotide
  Sense strand starting at position 114 of SEQ ID NO: 914850
agugacaagugccuuguaa

SEQ ID NO: 1035375 - RNA, 19 nt, Artificial Sequence
  Description of Artificial Sequence: Synthetic oligonucleotide
  Antisense strand to SEQ ID NO: 1035374
uuacaaggcacuugucacu

SEQ ID NO: 1035376 - RNA, 19 nt, Artificial Sequence
  Description of Artificial Sequence: Synthetic oligonucleotide
  Sense strand starting at position 116 of SEQ ID NO: 914850
ugacaagugccuuguaaca

SEQ ID NO: 1035377 - RNA, 19 nt, Artificial Sequence
  Description of Artificial Sequence: Synthetic oligonucleotide
  Antisense strand to SEQ ID NO: 1035376
uguuacaaggcacuuguca

SEQ ID NO: 1035378 - RNA, 19 nt, Artificial Sequence
  Description of Artificial Sequence: Synthetic oligonucleotide
  Sense strand starting at position 126 of SEQ ID NO: 914850
cuuguaacacccuggauga

SEQ ID NO: 1035379 - RNA, 19 nt, Artificial Sequence
  Description of Artificial Sequence: Synthetic oligonucleotide
  Antisense strand to SEQ ID NO: 1035378
ucauccaggguguuacaag

SEQ ID NO: 1035380 - RNA, 19 nt, Artificial Sequence
  Description of Artificial Sequence: Synthetic oligonucleotide
  Sense strand starting at position 439 of SEQ ID NO: 914850
uggaguaguccacagagua

SEQ ID NO: 1035381 - RNA, 19 nt, Artificial Sequence
  Description of Artificial Sequence: Synthetic oligonucleotide
  Antisense strand to SEQ ID NO: 1035380
uacucuguggacuacucca

SEQ ID NO: 1035382 - RNA, 19 nt, Artificial Sequence
  Description of Artificial Sequence: Synthetic oligonucleotide
  Sense strand starting at position 645 of SEQ ID NO: 914850
gcaucaaugacaugguaga

SEQ ID NO: 1035383 - RNA, 19 nt, Artificial Sequence
  Description of Artificial Sequence: Synthetic oligonucleotide
  Antisense strand to SEQ ID NO: 1035382
ucuaccaugucauugaugc

SEQ ID NO: 1035384 - RNA, 19 nt, Artificial Sequence
  Description of Artificial Sequence: Synthetic oligonucleotide
  Sense strand starting at position 646 of SEQ ID NO: 914850
caucaaugacaugguagau

SEQ ID NO: 1035385 - RNA, 19 nt, Artificial Sequence
  Description of Artificial Sequence: Synthetic oligonucleotide
  Antisense strand to SEQ ID NO: 1035384
aucuaccaugucauugaug

SEQ ID NO: 1035386 - RNA, 19 nt, Artificial Sequence
  Description of Artificial Sequence: Synthetic oligonucleotide
  Sense strand starting at position 862 of SEQ ID NO: 914850
gggcgaucaccgcaugcuu

SEQ ID NO: 1035387 - RNA, 19 nt, Artificial Sequence
  Description of Artificial Sequence: Synthetic oligonucleotide
  Antisense strand to SEQ ID NO: 1035386
aagcaugcggugaucgccc

SEQ ID NO: 1035388 - RNA, 19 nt, Artificial Sequence
  Description of Artificial Sequence: Synthetic oligonucleotide
  Sense strand starting at position 870 of SEQ ID NO: 914850
accgcaugcuugcugaaga

SEQ ID NO: 1035389 - RNA, 19 nt, Artificial Sequence
  Description of Artificial Sequence: Synthetic oligonucleotide
  Antisense strand to SEQ ID NO: 1035388
ucuucagcaagcaugcggu

SEQ ID NO: 1035390 - RNA, 19 nt, Artificial Sequence
  Description of Artificial Sequence: Synthetic oligonucleotide
  Sense strand starting at position 917 of SEQ ID NO: 914850
ggcagucuucaugaagaug

SEQ ID NO: 1035391 - RNA, 19 nt, Artificial Sequence
  Description of Artificial Sequence: Synthetic oligonucleotide
  Antisense strand to SEQ ID NO: 1035390
caucuucaugaagacugcc

SEQ ID NO: 1035392 - RNA, 19 nt, Artificial Sequence
  Description of Artificial Sequence: Synthetic oligonucleotide
  Sense strand starting at position 943 of SEQ ID NO: 914850
gcaugauggcguugaucau

SEQ ID NO: 1035393 - RNA, 19 nt, Artificial Sequence
  Description of Artificial Sequence: Synthetic oligonucleotide
  Antisense strand to SEQ ID NO: 1035392
augaucaacgccaucaugc

SEQ ID NO: 1035394 - RNA, 19 nt, Artificial Sequence
  Description of Artificial Sequence: Synthetic oligonucleotide
  Sense strand starting at position 967 of SEQ ID NO: 914850
ccacgauguucugcacgau

SEQ ID NO: 1035395 - RNA, 19 nt, Artificial Sequence
  Description of Artificial Sequence: Synthetic oligonucleotide
  Antisense strand to SEQ ID NO: 1035394
aucgugcagaacaucgugg

SEQ ID NO: 1035396 - RNA, 19 nt, Artificial Sequence
  Description of Artificial Sequence: Synthetic oligonucleotide
  Sense strand starting at position 970 of SEQ ID NO: 914850
cgauguucugcacgaugag

SEQ ID NO: 1035397 - RNA, 19 nt, Artificial Sequence
  Description of Artificial Sequence: Synthetic oligonucleotide
  Antisense strand to SEQ ID NO: 1035396
cucaucgugcagaacaucg

SEQ ID NO: 1035398 - RNA, 19 nt, Artificial Sequence
  Description of Artificial Sequence: Synthetic oligonucleotide
  Sense strand starting at position 973 of SEQ ID NO: 914850
uguucugcacgaugaggau

SEQ ID NO: 1035399 - RNA, 19 nt, Artificial Sequence
  Description of Artificial Sequence: Synthetic oligonucleotide
  Antisense strand to SEQ ID NO: 1035398
auccucaucgugcagaaca

SEQ ID NO: 1035400 - RNA, 19 nt, Artificial Sequence
  Description of Artificial Sequence: Synthetic oligonucleotide
  Sense strand starting at position 1208 of SEQ ID NO: 914850
gaagaugagcaaugugugu

SEQ ID NO: 1035401 - RNA, 19 nt, Artificial Sequence
  Description of Artificial Sequence: Synthetic oligonucleotide
  Antisense strand to SEQ ID NO: 1035400
acacacauugcucaucuuc

SEQ ID NO: 1035402 - RNA, 19 nt, Artificial Sequence
  Description of Artificial Sequence: Synthetic oligonucleotide
  Sense strand starting at position 1310 of SEQ ID NO: 914850
guugccuuucuuggacaca

SEQ ID NO: 1035403 - RNA, 19 nt, Artificial Sequence
  Description of Artificial Sequence: Synthetic oligonucleotide
  Antisense strand to SEQ ID NO: 1035402
uguguccaagaaaggcaac

SEQ ID NO: 1035404 - RNA, 19 nt, Artificial Sequence
  Description of Artificial Sequence: Synthetic oligonucleotide
  Sense strand starting at position 1311 of SEQ ID NO: 914850
uugccuuucuuggacacaa

SEQ ID NO: 1035405 - RNA, 19 nt, Artificial Sequence
  Description of Artificial Sequence: Synthetic oligonucleotide
  Antisense strand to SEQ ID NO: 1035404
uuguguccaagaaaggcaa

SEQ ID NO: 1035406 - RNA, 19 nt, Artificial Sequence
  Description of Artificial Sequence: Synthetic oligonucleotide
  Sense strand starting at position 1408 of SEQ ID NO: 914850
ggaugaugcccuugcggga

SEQ ID NO: 1035407 - RNA, 19 nt, Artificial Sequence
  Description of Artificial Sequence: Synthetic oligonucleotide
  Antisense strand to SEQ ID NO: 1035406
ucccgcaagggcaucaucc

SEQ ID NO: 1035408 - RNA, 19 nt, Artificial Sequence
  Description of Artificial Sequence: Synthetic oligonucleotide
  Sense strand starting at position 1558 of SEQ ID NO: 914850
uggccucacuucugagaua

SEQ ID NO: 1035409 - RNA, 19 nt, Artificial Sequence
  Description of Artificial Sequence: Synthetic oligonucleotide
  Antisense strand to SEQ ID NO: 1035408
uaucucagaagugaggcca

SEQ ID NO: 1035410 - RNA, 19 nt, Artificial Sequence
  Description of Artificial Sequence: Synthetic oligonucleotide
  Sense strand starting at position 1559 of SEQ ID NO: 914850
ggccucacuucugagauaa

SEQ ID NO: 1035411 - RNA, 19 nt, Artificial Sequence
  Description of Artificial Sequence: Synthetic oligonucleotide
  Antisense strand to SEQ ID NO: 1035410
uuaucucagaagugaggcc

SEQ ID NO: 1035412 - RNA, 19 nt, Artificial Sequence
  Description of Artificial Sequence: Synthetic oligonucleotide
  Sense strand starting at position 2325 of SEQ ID NO: 914850
cucucugucuccuugggau

SEQ ID NO: 1035413 - RNA, 19 nt, Artificial Sequence
  Description of Artificial Sequence: Synthetic oligonucleotide
  Antisense strand to SEQ ID NO: 1035412
aucccaaggagacagagag

SEQ ID NO: 1035414 - RNA, 19 nt, Artificial Sequence
  Description of Artificial Sequence: Synthetic oligonucleotide
  Sense strand starting at position 2963 of SEQ ID NO: 914850
auccguauuugggucagua

SEQ ID NO: 1035415 - RNA, 19 nt, Artificial Sequence
  Description of Artificial Sequence: Synthetic oligonucleotide
  Antisense strand to SEQ ID NO: 1035414
uacugacccaaauacggau

SEQ ID NO: 1035416 - RNA, 19 nt, Artificial Sequence
  Description of Artificial Sequence: Synthetic oligonucleotide
  Sense strand starting at position 3116 of SEQ ID NO: 914850
ggaugcucuuaaucuuagu

SEQ ID NO: 1035417 - RNA, 19 nt, Artificial Sequence
  Description of Artificial Sequence: Synthetic oligonucleotide
  Antisense strand to SEQ ID NO: 1035416
acuaagauuaagagcaucc

SEQ ID NO: 1035418 - RNA, 19 nt, Artificial Sequence
  Description of Artificial Sequence: Synthetic oligonucleotide
  Sense strand starting at position 3132 of SEQ ID NO: 914850
agucuugaauccuuugaca

SEQ ID NO: 1035419 - RNA, 19 nt, Artificial Sequence
  Description of Artificial Sequence: Synthetic oligonucleotide
  Antisense strand to SEQ ID NO: 1035418
ugucaaaggauucaagacu

SEQ ID NO: 1035420 - RNA, 19 nt, Artificial Sequence
  Description of Artificial Sequence: Synthetic oligonucleotide
  Sense strand starting at position 3371 of SEQ ID NO: 914850
uuaggucaugggugguauu

SEQ ID NO: 1035421 - RNA, 19 nt, Artificial Sequence
  Description of Artificial Sequence: Synthetic oligonucleotide
  Antisense strand to SEQ ID NO: 1035420
aauaccacccaugaccuaa

SEQ ID NO: 1035422 - RNA, 19 nt, Artificial Sequence
  Description of Artificial Sequence: Synthetic oligonucleotide
  Sense strand starting at position 3391 of SEQ ID NO: 914850
aggccugaacaguguguua

SEQ ID NO: 1035423 - RNA, 19 nt, Artificial Sequence
  Description of Artificial Sequence: Synthetic oligonucleotide
  Antisense strand to SEQ ID NO: 1035422
uaacacacuguucaggccu

SEQ ID NO: 1035424 - RNA, 19 nt, Artificial Sequence
  Description of Artificial Sequence: Synthetic oligonucleotide
  Sense strand starting at position 3458 of SEQ ID NO: 914850
gguguuucuguucaggcau

SEQ ID NO: 1035425 - RNA, 19 nt, Artificial Sequence
  Description of Artificial Sequence: Synthetic oligonucleotide
  Antisense strand to SEQ ID NO: 1035424
augccugaacagaaacacc

SEQ ID NO: 1035426 - RNA, 19 nt, Artificial Sequence
  Description of Artificial Sequence: Synthetic oligonucleotide
  Sense strand starting at position 3523 of SEQ ID NO: 914850
gggaaagccugcuagaucu

SEQ ID NO: 1035427 - RNA, 19 nt, Artificial Sequence
  Description of Artificial Sequence: Synthetic oligonucleotide
  Antisense strand to SEQ ID NO: 1035426
agaucuagcaggcuuuccc

SEQ ID NO: 1035428 - RNA, 19 nt, Artificial Sequence
  Description of Artificial Sequence: Synthetic oligonucleotide
  Sense strand starting at position 3531 of SEQ ID NO: 914850
cugcuagaucucuguuguu

SEQ ID NO: 1035429 - RNA, 19 nt, Artificial Sequence
  Description of Artificial Sequence: Synthetic oligonucleotide
  Antisense strand to SEQ ID NO: 1035428
aacaacagagaucuagcag

SEQ ID NO: 1035430 - RNA, 19 nt, Artificial Sequence
  Description of Artificial Sequence: Synthetic oligonucleotide
  Sense strand starting at position 3569 of SEQ ID NO: 914850
cgcugucuguggcucagau

SEQ ID NO: 1035431 - RNA, 19 nt, Artificial Sequence
  Description of Artificial Sequence: Synthetic oligonucleotide
  Antisense strand to SEQ ID NO: 1035430
aucugagccacagacagcg

SEQ ID NO: 1035432 - RNA, 19 nt, Artificial Sequence
  Description of Artificial Sequence: Synthetic oligonucleotide
  Sense strand starting at position 3578 of SEQ ID NO: 914850
uggcucagauccuuaugga

SEQ ID NO: 1035433 - RNA, 19 nt, Artificial Sequence
  Description of Artificial Sequence: Synthetic oligonucleotide
  Antisense strand to SEQ ID NO: 1035432
uccauaaggaucugagcca

SEQ ID NO: 1035434 - RNA, 19 nt, Artificial Sequence
  Description of Artificial Sequence: Synthetic oligonucleotide
  Sense strand starting at position 3581 of SEQ ID NO: 914850
cucagauccuuauggaaga

SEQ ID NO: 1035435 - RNA, 19 nt, Artificial Sequence
  Description of Artificial Sequence: Synthetic oligonucleotide
  Antisense strand to SEQ ID NO: 1035434
ucuuccauaaggaucugag

SEQ ID NO: 1035436 - RNA, 19 nt, Artificial Sequence
  Description of Artificial Sequence: Synthetic oligonucleotide
  Sense strand starting at position 3582 of SEQ ID NO: 914850
ucagauccuuauggaagaa

SEQ ID NO: 1035437 - RNA, 19 nt, Artificial Sequence
  Description of Artificial Sequence: Synthetic oligonucleotide
  Antisense strand to SEQ ID NO: 1035436
uucuuccauaaggaucuga

SEQ ID NO: 1035438 - RNA, 19 nt, Artificial Sequence
  Description of Artificial Sequence: Synthetic oligonucleotide
  Sense strand starting at position 3759 of SEQ ID NO: 914850
aaaggaugggugugaucau

SEQ ID NO: 1035439 - RNA, 19 nt, Artificial Sequence
  Description of Artificial Sequence: Synthetic oligonucleotide
  Antisense strand to SEQ ID NO: 1035438
augaucacacccauccuuu

SEQ ID NO: 1035440 - RNA, 19 nt, Artificial Sequence
  Description of Artificial Sequence: Synthetic oligonucleotide
  Sense strand starting at position 3766 of SEQ ID NO: 914850
gggugugaucaugggcuau

SEQ ID NO: 1035441 - RNA, 19 nt, Artificial Sequence
  Description of Artificial Sequence: Synthetic oligonucleotide
  Antisense strand to SEQ ID NO: 1035440
auagcccaugaucacaccc

SEQ ID NO: 1035442 - RNA, 19 nt, Artificial Sequence
  Description of Artificial Sequence: Synthetic oligonucleotide
  Sense strand starting at position 3768 of SEQ ID NO: 914850
gugugaucaugggcuauau

SEQ ID NO: 1035443 - RNA, 19 nt, Artificial Sequence
  Description of Artificial Sequence: Synthetic oligonucleotide
  Antisense strand to SEQ ID NO: 1035442
auauagcccaugaucacac

SEQ ID NO: 1035444 - RNA, 19 nt, Artificial Sequence
  Description of Artificial Sequence: Synthetic oligonucleotide
  Sense strand starting at position 3770 of SEQ ID NO: 914850
gugaucaugggcuauauua

SEQ ID NO: 1035445 - RNA, 19 nt, Artificial Sequence
  Description of Artificial Sequence: Synthetic oligonucleotide
  Antisense strand to SEQ ID NO: 1035444
uaauauagcccaugaucac

SEQ ID NO: 1035446 - RNA, 19 nt, Artificial Sequence
  Description of Artificial Sequence: Synthetic oligonucleotide
  Sense strand starting at position 3778 of SEQ ID NO: 914850
gggcuauauuaacaaagau

SEQ ID NO: 1035447 - RNA, 19 nt, Artificial Sequence
  Description of Artificial Sequence: Synthetic oligonucleotide
  Antisense strand to SEQ ID NO: 1035446
aucuuuguuaauauagccc

SEQ ID NO: 1035448 - RNA, 19 nt, Artificial Sequence
  Description of Artificial Sequence: Synthetic oligonucleotide
  Sense strand starting at position 3868 of SEQ ID NO: 914850
ggaaaucucugaggcaacu

SEQ ID NO: 1035449 - RNA, 19 nt, Artificial Sequence
  Description of Artificial Sequence: Synthetic oligonucleotide
  Antisense strand to SEQ ID NO: 1035448
aguugccucagagauuucc

SEQ ID NO: 1035450 - RNA, 19 nt, Artificial Sequence
  Description of Artificial Sequence: Synthetic oligonucleotide
  Sense strand starting at position 3931 of SEQ ID NO: 914850
ggcacuauugcagaaacac

SEQ ID NO: 1035451 - RNA, 19 nt, Artificial Sequence
  Description of Artificial Sequence: Synthetic oligonucleotide
  Antisense strand to SEQ ID NO: 1035450
guguuucugcaauagugcc

SEQ ID NO: 1035452 - RNA, 19 nt, Artificial Sequence
  Description of Artificial Sequence: Synthetic oligonucleotide
  Sense strand starting at position 190 of SEQ ID NO: 914851
gggcgaucaccgcaugcuu

SEQ ID NO: 1035453 - RNA, 19 nt, Artificial Sequence
  Description of Artificial Sequence: Synthetic oligonucleotide
  Antisense strand to SEQ ID NO: 1035452
aagcaugcggugaucgccc

SEQ ID NO: 1035454 - RNA, 19 nt, Artificial Sequence
  Description of Artificial Sequence: Synthetic oligonucleotide
  Sense strand starting at position 198 of SEQ ID NO: 914851
accgcaugcuugcugaaga

SEQ ID NO: 1035455 - RNA, 19 nt, Artificial Sequence
  Description of Artificial Sequence: Synthetic oligonucleotide
  Antisense strand to SEQ ID NO: 1035454
ucuucagcaagcaugcggu

SEQ ID NO: 1035456 - RNA, 19 nt, Artificial Sequence
  Description of Artificial Sequence: Synthetic oligonucleotide
  Sense strand starting at position 245 of SEQ ID NO: 914851
ggcagucuucaugaagaug

SEQ ID NO: 1035457 - RNA, 19 nt, Artificial Sequence
  Description of Artificial Sequence: Synthetic oligonucleotide
  Antisense strand to SEQ ID NO: 1035456
caucuucaugaagacugcc

SEQ ID NO: 1035458 - RNA, 19 nt, Artificial Sequence
  Description of Artificial Sequence: Synthetic oligonucleotide
  Sense strand starting at position 271 of SEQ ID NO: 914851
gcaugauggcguugaucau

SEQ ID NO: 1035459 - RNA, 19 nt, Artificial Sequence
  Description of Artificial Sequence: Synthetic oligonucleotide
  Antisense strand to SEQ ID NO: 1035458
augaucaacgccaucaugc

SEQ ID NO: 1035460 - RNA, 19 nt, Artificial Sequence
  Description of Artificial Sequence: Synthetic oligonucleotide
  Sense strand starting at position 295 of SEQ ID NO: 914851
ccacgauguucugcacgau

SEQ ID NO: 1035461 - RNA, 19 nt, Artificial Sequence
  Description of Artificial Sequence: Synthetic oligonucleotide
  Antisense strand to SEQ ID NO: 1035460
aucgugcagaacaucgugg

SEQ ID NO: 1035462 - RNA, 19 nt, Artificial Sequence
  Description of Artificial Sequence: Synthetic oligonucleotide
  Sense strand starting at position 298 of SEQ ID NO: 914851
cgauguucugcacgaugag

SEQ ID NO: 1035463 - RNA, 19 nt, Artificial Sequence
  Description of Artificial Sequence: Synthetic oligonucleotide
  Antisense strand to SEQ ID NO: 1035462
cucaucgugcagaacaucg

SEQ ID NO: 1035464 - RNA, 19 nt, Artificial Sequence
  Description of Artificial Sequence: Synthetic oligonucleotide
  Sense strand starting at position 301 of SEQ ID NO: 914851
uguucugcacgaugaggau

SEQ ID NO: 1035465 - RNA, 19 nt, Artificial Sequence
  Description of Artificial Sequence: Synthetic oligonucleotide
  Antisense strand to SEQ ID NO: 1035464
auccucaucgugcagaaca

SEQ ID NO: 1035466 - RNA, 19 nt, Artificial Sequence
  Description of Artificial Sequence: Synthetic oligonucleotide
  Sense strand starting at position 536 of SEQ ID NO: 914851
gaagaugagcaaugugugu

SEQ ID NO: 1035467 - RNA, 19 nt, Artificial Sequence
  Description of Artificial Sequence: Synthetic oligonucleotide
  Antisense strand to SEQ ID NO: 1035466
acacacauugcucaucuuc

SEQ ID NO: 1035468 - RNA, 19 nt, Artificial Sequence
  Description of Artificial Sequence: Synthetic oligonucleotide
  Sense strand starting at position 638 of SEQ ID NO: 914851
guugccuuucuuggacaca

SEQ ID NO: 1035469 - RNA, 19 nt, Artificial Sequence
  Description of Artificial Sequence: Synthetic oligonucleotide
  Antisense strand to SEQ ID NO: 1035468
uguguccaagaaaggcaac

SEQ ID NO: 1035470 - RNA, 19 nt, Artificial Sequence
  Description of Artificial Sequence: Synthetic oligonucleotide
  Sense strand starting at position 639 of SEQ ID NO: 914851
uugccuuucuuggacacaa

SEQ ID NO: 1035471 - RNA, 19 nt, Artificial Sequence
  Description of Artificial Sequence: Synthetic oligonucleotide
  Antisense strand to SEQ ID NO: 1035470
uuguguccaagaaaggcaa

SEQ ID NO: 1035472 - RNA, 19 nt, Artificial Sequence
  Description of Artificial Sequence: Synthetic oligonucleotide
  Sense strand starting at position 736 of SEQ ID NO: 914851
ggaugaugcccuugcggga

SEQ ID NO: 1035473 - RNA, 19 nt, Artificial Sequence
  Description of Artificial Sequence: Synthetic oligonucleotide
  Antisense strand to SEQ ID NO: 1035472
ucccgcaagggcaucaucc

SEQ ID NO: 1035474 - RNA, 19 nt, Artificial Sequence
  Description of Artificial Sequence: Synthetic oligonucleotide
  Sense strand starting at position 886 of SEQ ID NO: 914851
uggccucacuucugagaua

SEQ ID NO: 1035475 - RNA, 19 nt, Artificial Sequence
  Description of Artificial Sequence: Synthetic oligonucleotide
  Antisense strand to SEQ ID NO: 1035474
uaucucagaagugaggcca

SEQ ID NO: 1035476 - RNA, 19 nt, Artificial Sequence
  Description of Artificial Sequence: Synthetic oligonucleotide
  Sense strand starting at position 887 of SEQ ID NO: 914851
ggccucacuucugagauaa

SEQ ID NO: 1035477 - RNA, 19 nt, Artificial Sequence
  Description of Artificial Sequence: Synthetic oligonucleotide
  Antisense strand to SEQ ID NO: 1035476
uuaucucagaagugaggcc

SEQ ID NO: 1035478 - RNA, 19 nt, Artificial Sequence
  Description of Artificial Sequence: Synthetic oligonucleotide
  Sense strand starting at position 1653 of SEQ ID NO: 914851
cucucugucuccuugggau

SEQ ID NO: 1035479 - RNA, 19 nt, Artificial Sequence
  Description of Artificial Sequence: Synthetic oligonucleotide
  Antisense strand to SEQ ID NO: 1035478
aucccaaggagacagagag

SEQ ID NO: 1035480 - RNA, 19 nt, Artificial Sequence
  Description of Artificial Sequence: Synthetic oligonucleotide
  Sense strand starting at position 2291 of SEQ ID NO: 914851
auccguauuugggucagua

SEQ ID NO: 1035481 - RNA, 19 nt, Artificial Sequence
  Description of Artificial Sequence: Synthetic oligonucleotide
  Antisense strand to SEQ ID NO: 1035480
uacugacccaaauacggau

SEQ ID NO: 1035482 - RNA, 19 nt, Artificial Sequence
  Description of Artificial Sequence: Synthetic oligonucleotide
  Sense strand starting at position 2444 of SEQ ID NO: 914851
ggaugcucuuaaucuuagu

SEQ ID NO: 1035483 - RNA, 19 nt, Artificial Sequence
  Description of Artificial Sequence: Synthetic oligonucleotide
  Antisense strand to SEQ ID NO: 1035482
acuaagauuaagagcaucc

SEQ ID NO: 1035484 - RNA, 19 nt, Artificial Sequence
  Description of Artificial Sequence: Synthetic oligonucleotide
  Sense strand starting at position 2460 of SEQ ID NO: 914851
agucuugaauccuuugaca

SEQ ID NO: 1035485 - RNA, 19 nt, Artificial Sequence
  Description of Artificial Sequence: Synthetic oligonucleotide
  Antisense strand to SEQ ID NO: 1035484
ugucaaaggauucaagacu

SEQ ID NO: 1035486 - RNA, 19 nt, Artificial Sequence
  Description of Artificial Sequence: Synthetic oligonucleotide
  Sense strand starting at position 2683 of SEQ ID NO: 914851
ccugacuucuuccacguua

SEQ ID NO: 1035487 - RNA, 19 nt, Artificial Sequence
  Description of Artificial Sequence: Synthetic oligonucleotide
  Antisense strand to SEQ ID NO: 1035486
uaacguggaagaagucagg

SEQ ID NO: 1035488 - RNA, 19 nt, Artificial Sequence
  Description of Artificial Sequence: Synthetic oligonucleotide
  Sense strand starting at position 2699 of SEQ ID NO: 914851
uuaggucaugggugguauu

SEQ ID NO: 1035489 - RNA, 19 nt, Artificial Sequence
  Description of Artificial Sequence: Synthetic oligonucleotide
  Antisense strand to SEQ ID NO: 1035488
aauaccacccaugaccuaa

SEQ ID NO: 1035490 - RNA, 19 nt, Artificial Sequence
  Description of Artificial Sequence: Synthetic oligonucleotide
  Sense strand starting at position 2719 of SEQ ID NO: 914851
aggccugaacaguguguua

SEQ ID NO: 1035491 - RNA, 19 nt, Artificial Sequence
  Description of Artificial Sequence: Synthetic oligonucleotide
  Antisense strand to SEQ ID NO: 1035490
uaacacacuguucaggccu

SEQ ID NO: 1035492 - RNA, 19 nt, Artificial Sequence
  Description of Artificial Sequence: Synthetic oligonucleotide
  Sense strand starting at position 2786 of SEQ ID NO: 914851
gguguuucuguucaggcau

SEQ ID NO: 1035493 - RNA, 19 nt, Artificial Sequence
  Description of Artificial Sequence: Synthetic oligonucleotide
  Antisense strand to SEQ ID NO: 1035492
augccugaacagaaacacc

SEQ ID NO: 1035494 - RNA, 19 nt, Artificial Sequence
  Description of Artificial Sequence: Synthetic oligonucleotide
  Sense strand starting at position 2851 of SEQ ID NO: 914851
gggaaagccugcuagaucu

SEQ ID NO: 1035495 - RNA, 19 nt, Artificial Sequence
  Description of Artificial Sequence: Synthetic oligonucleotide
  Antisense strand to SEQ ID NO: 1035494
agaucuagcaggcuuuccc

SEQ ID NO: 1035496 - RNA, 19 nt, Artificial Sequence
  Description of Artificial Sequence: Synthetic oligonucleotide
  Sense strand starting at position 2859 of SEQ ID NO: 914851
cugcuagaucucuguuguu

SEQ ID NO: 1035497 - RNA, 19 nt, Artificial Sequence
  Description of Artificial Sequence: Synthetic oligonucleotide
  Antisense strand to SEQ ID NO: 1035496
aacaacagagaucuagcag

SEQ ID NO: 1035498 - RNA, 19 nt, Artificial Sequence
  Description of Artificial Sequence: Synthetic oligonucleotide
  Sense strand starting at position 2865 of SEQ ID NO: 914851
gaucucuguuguuggaaca

SEQ ID NO: 1035499 - RNA, 19 nt, Artificial Sequence
  Description of Artificial Sequence: Synthetic oligonucleotide
  Antisense strand to SEQ ID NO: 1035498
uguuccaacaacagagauc

SEQ ID NO: 1035500 - RNA, 19 nt, Artificial Sequence
  Description of Artificial Sequence: Synthetic oligonucleotide
  Sense strand starting at position 2897 of SEQ ID NO: 914851
cgcugucuguggcucagau

SEQ ID NO: 1035501 - RNA, 19 nt, Artificial Sequence
  Description of Artificial Sequence: Synthetic oligonucleotide
  Antisense strand to SEQ ID NO: 1035500
aucugagccacagacagcg

SEQ ID NO: 1035502 - RNA, 19 nt, Artificial Sequence
  Description of Artificial Sequence: Synthetic oligonucleotide
  Sense strand starting at position 2906 of SEQ ID NO: 914851
uggcucagauccuuaugga

SEQ ID NO: 1035503 - RNA, 19 nt, Artificial Sequence
  Description of Artificial Sequence: Synthetic oligonucleotide
  Antisense strand to SEQ ID NO: 1035502
uccauaaggaucugagcca

SEQ ID NO: 1035504 - RNA, 19 nt, Artificial Sequence
  Description of Artificial Sequence: Synthetic oligonucleotide
  Sense strand starting at position 2909 of SEQ ID NO: 914851
cucagauccuuauggaaga

SEQ ID NO: 1035505 - RNA, 19 nt, Artificial Sequence
  Description of Artificial Sequence: Synthetic oligonucleotide
  Antisense strand to SEQ ID NO: 1035504
ucuuccauaaggaucugag

SEQ ID NO: 1035506 - RNA, 19 nt, Artificial Sequence
  Description of Artificial Sequence: Synthetic oligonucleotide
  Sense strand starting at position 2910 of SEQ ID NO: 914851
ucagauccuuauggaagaa

SEQ ID NO: 1035507 - RNA, 19 nt, Artificial Sequence
  Description of Artificial Sequence: Synthetic oligonucleotide
  Antisense strand to SEQ ID NO: 1035506
uucuuccauaaggaucuga

SEQ ID NO: 1035508 - RNA, 19 nt, Artificial Sequence
  Description of Artificial Sequence: Synthetic oligonucleotide
  Sense strand starting at position 3087 of SEQ ID NO: 914851
aaaggaugggugugaucau

SEQ ID NO: 1035509 - RNA, 19 nt, Artificial Sequence
  Description of Artificial Sequence: Synthetic oligonucleotide
  Antisense strand to SEQ ID NO: 1035508
augaucacacccauccuuu

SEQ ID NO: 1035510 - RNA, 19 nt, Artificial Sequence
  Description of Artificial Sequence: Synthetic oligonucleotide
  Sense strand starting at position 3094 of SEQ ID NO: 914851
gggugugaucaugggcuau

SEQ ID NO: 1035511 - RNA, 19 nt, Artificial Sequence
  Description of Artificial Sequence: Synthetic oligonucleotide
  Antisense strand to SEQ ID NO: 1035510
auagcccaugaucacaccc

SEQ ID NO: 1035512 - RNA, 19 nt, Artificial Sequence
  Description of Artificial Sequence: Synthetic oligonucleotide
  Sense strand starting at position 3096 of SEQ ID NO: 914851
gugugaucaugggcuauau

SEQ ID NO: 1035513 - RNA, 19 nt, Artificial Sequence
  Description of Artificial Sequence: Synthetic oligonucleotide
  Antisense strand to SEQ ID NO: 1035512
auauagcccaugaucacac

SEQ ID NO: 1035514 - RNA, 19 nt, Artificial Sequence
  Description of Artificial Sequence: Synthetic oligonucleotide
  Sense strand starting at position 3098 of SEQ ID NO: 914851
gugaucaugggcuauauua

SEQ ID NO: 1035515 - RNA, 19 nt, Artificial Sequence
  Description of Artificial Sequence: Synthetic oligonucleotide
  Antisense strand to SEQ ID NO: 1035514
uaauauagcccaugaucac

SEQ ID NO: 1035516 - RNA, 19 nt, Artificial Sequence
  Description of Artificial Sequence: Synthetic oligonucleotide
  Sense strand starting at position 3106 of SEQ ID NO: 914851
gggcuauauuaacaaagau

SEQ ID NO: 1035517 - RNA, 19 nt, Artificial Sequence
  Description of Artificial Sequence: Synthetic oligonucleotide
  Antisense strand to SEQ ID NO: 1035516
aucuuuguuaauauagccc

SEQ ID NO: 1035518 - RNA, 19 nt, Artificial Sequence
  Description of Artificial Sequence: Synthetic oligonucleotide
  Sense strand starting at position 3196 of SEQ ID NO: 914851
ggaaaucucugaggcaacu

SEQ ID NO: 1035519 - RNA, 19 nt, Artificial Sequence
  Description of Artificial Sequence: Synthetic oligonucleotide
  Antisense strand to SEQ ID NO: 1035518
aguugccucagagauuucc

SEQ ID NO: 1035520 - RNA, 19 nt, Artificial Sequence
  Description of Artificial Sequence: Synthetic oligonucleotide
  Sense strand starting at position 3259 of SEQ ID NO: 914851
ggcacuauugcagaaacac

SEQ ID NO: 1035521 - RNA, 19 nt, Artificial Sequence
  Description of Artificial Sequence: Synthetic oligonucleotide
  Antisense strand to SEQ ID NO: 1035520
guguuucugcaauagugcc

SEQ ID NO: 1035522 - RNA, 19 nt, Artificial Sequence
  Description of Artificial Sequence: Synthetic oligonucleotide
  Sense strand starting at position 3372 of SEQ ID NO: 914851
augcaagagucaguucuaa

SEQ ID NO: 1035523 - RNA, 19 nt, Artificial Sequence
  Description of Artificial Sequence: Synthetic oligonucleotide
  Antisense strand to SEQ ID NO: 1035522
uuagaacugacucuugcau

SEQ ID NO: 1035524 - RNA, 19 nt, Artificial Sequence
  Description of Artificial Sequence: Synthetic oligonucleotide
  Sense strand starting at position 3444 of SEQ ID NO: 914851
ggccaugagggauguuaua

SEQ ID NO: 1035525 - RNA, 19 nt, Artificial Sequence
  Description of Artificial Sequence: Synthetic oligonucleotide
  Antisense strand to SEQ ID NO: 1035524
uauaacaucccucauggcc

SEQ ID NO: 1035526 - RNA, 19 nt, Artificial Sequence
  Description of Artificial Sequence: Synthetic oligonucleotide
  Sense strand starting at position 3609 of SEQ ID NO: 914851
ggcucugcucuugggagau

SEQ ID NO: 1035527 - RNA, 19 nt, Artificial Sequence
  Description of Artificial Sequence: Synthetic oligonucleotide
  Antisense strand to SEQ ID NO: 1035526
aucucccaagagcagagcc

SEQ ID NO: 1035528 - RNA, 19 nt, Artificial Sequence
  Description of Artificial Sequence: Synthetic oligonucleotide
  Sense strand starting at position 3801 of SEQ ID NO: 914851
ugcuuauagucaucuccac

SEQ ID NO: 1035529 - RNA, 19 nt, Artificial Sequence
  Description of Artificial Sequence: Synthetic oligonucleotide
  Antisense strand to SEQ ID NO: 1035528
guggagaugacuauaagca

SEQ ID NO: 1035530 - RNA, 19 nt, Artificial Sequence
  Description of Artificial Sequence: Synthetic oligonucleotide
  Sense strand starting at position 3911 of SEQ ID NO: 914851
agggcucucugauaugaug

SEQ ID NO: 1035531 - RNA, 19 nt, Artificial Sequence
  Description of Artificial Sequence: Synthetic oligonucleotide
  Antisense strand to SEQ ID NO: 1035530
caucauaucagagagcccu

SEQ ID NO: 1035532 - RNA, 19 nt, Artificial Sequence
  Description of Artificial Sequence: Synthetic oligonucleotide
  Sense strand starting at position 66 of SEQ ID NO: 914852
gccagcaauuucucuaugu

SEQ ID NO: 1035533 - RNA, 19 nt, Artificial Sequence
  Description of Artificial Sequence: Synthetic oligonucleotide
  Antisense strand to SEQ ID NO: 1035532
acauagagaaauugcuggc

SEQ ID NO: 1035534 - RNA, 19 nt, Artificial Sequence
  Description of Artificial Sequence: Synthetic oligonucleotide
  Sense strand starting at position 67 of SEQ ID NO: 914852
ccagcaauuucucuaugug

SEQ ID NO: 1035535 - RNA, 19 nt, Artificial Sequence
  Description of Artificial Sequence: Synthetic oligonucleotide
  Antisense strand to SEQ ID NO: 1035534
cacauagagaaauugcugg

SEQ ID NO: 1035536 - RNA, 19 nt, Artificial Sequence
  Description of Artificial Sequence: Synthetic oligonucleotide
  Sense strand starting at position 70 of SEQ ID NO: 914852
gcaauuucucuauguguug

SEQ ID NO: 1035537 - RNA, 19 nt, Artificial Sequence
  Description of Artificial Sequence: Synthetic oligonucleotide
  Antisense strand to SEQ ID NO: 1035536
caacacauagagaaauugc

SEQ ID NO: 1035538 - RNA, 19 nt, Artificial Sequence
  Description of Artificial Sequence: Synthetic oligonucleotide
  Sense strand starting at position 170 of SEQ ID NO: 914852
uuaugccucuaggcagaau

SEQ ID NO: 1035539 - RNA, 19 nt, Artificial Sequence
  Description of Artificial Sequence: Synthetic oligonucleotide
  Antisense strand to SEQ ID NO: 1035538
auucugccuagaggcauaa

SEQ ID NO: 1035540 - RNA, 19 nt, Artificial Sequence
  Description of Artificial Sequence: Synthetic oligonucleotide
  Sense strand starting at position 246 of SEQ ID NO: 914852
cucuuuaugccagagucca

SEQ ID NO: 1035541 - RNA, 19 nt, Artificial Sequence
  Description of Artificial Sequence: Synthetic oligonucleotide
  Antisense strand to SEQ ID NO: 1035540
uggacucuggcauaaagag

SEQ ID NO: 1035542 - RNA, 19 nt, Artificial Sequence
  Description of Artificial Sequence: Synthetic oligonucleotide
  Sense strand starting at position 312 of SEQ ID NO: 914852
cucagauuccaggaagccu

SEQ ID NO: 1035543 - RNA, 19 nt, Artificial Sequence
  Description of Artificial Sequence: Synthetic oligonucleotide
  Antisense strand to SEQ ID NO: 1035542
aggcuuccuggaaucugag

SEQ ID NO: 1035544 - RNA, 19 nt, Artificial Sequence
  Description of Artificial Sequence: Synthetic oligonucleotide
  Sense strand starting at position 490 of SEQ ID NO: 914852
ccacuuagugccuggaauu

SEQ ID NO: 1035545 - RNA, 19 nt, Artificial Sequence
  Description of Artificial Sequence: Synthetic oligonucleotide
  Antisense strand to SEQ ID NO: 1035544
aauuccaggcacuaagugg

SEQ ID NO: 1035546 - RNA, 19 nt, Artificial Sequence
  Description of Artificial Sequence: Synthetic oligonucleotide
  Sense strand starting at position 491 of SEQ ID NO: 914852
cacuuagugccuggaauuc

SEQ ID NO: 1035547 - RNA, 19 nt, Artificial Sequence
  Description of Artificial Sequence: Synthetic oligonucleotide
  Antisense strand to SEQ ID NO: 1035546
gaauuccaggcacuaagug

SEQ ID NO: 1035548 - RNA, 19 nt, Artificial Sequence
  Description of Artificial Sequence: Synthetic oligonucleotide
  Sense strand starting at position 582 of SEQ ID NO: 914852
cauguaaacguauauagcu

SEQ ID NO: 1035549 - RNA, 19 nt, Artificial Sequence
  Description of Artificial Sequence: Synthetic oligonucleotide
  Antisense strand to SEQ ID NO: 1035548
agcuauauacguuuacaug

SEQ ID NO: 1035550 - RNA, 19 nt, Artificial Sequence
  Description of Artificial Sequence: Synthetic oligonucleotide
  Sense strand starting at position 854 of SEQ ID NO: 914852
uggcguguuccuguugauc

SEQ ID NO: 1035551 - RNA, 19 nt, Artificial Sequence
  Description of Artificial Sequence: Synthetic oligonucleotide
  Antisense strand to SEQ ID NO: 1035550
gaucaacaggaacacgcca

SEQ ID NO: 1035552 - RNA, 19 nt, Artificial Sequence
  Description of Artificial Sequence: Synthetic oligonucleotide
  Sense strand starting at position 937 of SEQ ID NO: 914852
caggguaggcccuagaacu

SEQ ID NO: 1035553 - RNA, 19 nt, Artificial Sequence
  Description of Artificial Sequence: Synthetic oligonucleotide
  Antisense strand to SEQ ID NO: 1035552
aguucuagggccuacccug

SEQ ID NO: 1035554 - RNA, 19 nt, Artificial Sequence
  Description of Artificial Sequence: Synthetic oligonucleotide
  Sense strand starting at position 1241 of SEQ ID NO: 914852
ccaguuuggccacacuuaa

SEQ ID NO: 1035555 - RNA, 19 nt, Artificial Sequence
  Description of Artificial Sequence: Synthetic oligonucleotide
  Antisense strand to SEQ ID NO: 1035554
uuaaguguggccaaacugg

SEQ ID NO: 1035556 - RNA, 19 nt, Artificial Sequence
  Description of Artificial Sequence: Synthetic oligonucleotide
  Sense strand starting at position 1345 of SEQ ID NO: 914852
agaguccuaccaggugaaa

SEQ ID NO: 1035557 - RNA, 19 nt, Artificial Sequence
  Description of Artificial Sequence: Synthetic oligonucleotide
  Antisense strand to SEQ ID NO: 1035556
uuucaccugguaggacucu

SEQ ID NO: 1035558 - RNA, 19 nt, Artificial Sequence
  Description of Artificial Sequence: Synthetic oligonucleotide
  Sense strand starting at position 1449 of SEQ ID NO: 914852
ggucuagugccagaaguga

SEQ ID NO: 1035559 - RNA, 19 nt, Artificial Sequence
  Description of Artificial Sequence: Synthetic oligonucleotide
  Antisense strand to SEQ ID NO: 1035558
ucacuucuggcacuagacc

SEQ ID NO: 1035560 - RNA, 19 nt, Artificial Sequence
  Description of Artificial Sequence: Synthetic oligonucleotide
  Sense strand starting at position 1457 of SEQ ID NO: 914852
gccagaagugaagguguuu

SEQ ID NO: 1035561 - RNA, 19 nt, Artificial Sequence
  Description of Artificial Sequence: Synthetic oligonucleotide
  Antisense strand to SEQ ID NO: 1035560
aaacaccuucacuucuggc

SEQ ID NO: 1035562 - RNA, 19 nt, Artificial Sequence
  Description of Artificial Sequence: Synthetic oligonucleotide
  Sense strand starting at position 1689 of SEQ ID NO: 914852
acaacuuacuuguugagau

SEQ ID NO: 1035563 - RNA, 19 nt, Artificial Sequence
  Description of Artificial Sequence: Synthetic oligonucleotide
  Antisense strand to SEQ ID NO: 1035562
aucucaacaaguaaguugu

SEQ ID NO: 1035564 - RNA, 19 nt, Artificial Sequence
  Description of Artificial Sequence: Synthetic oligonucleotide
  Sense strand starting at position 2058 of SEQ ID NO: 914852
acaaaugaaucucugggua

SEQ ID NO: 1035565 - RNA, 19 nt, Artificial Sequence
  Description of Artificial Sequence: Synthetic oligonucleotide
  Antisense strand to SEQ ID NO: 1035564
uacccagagauucauuugu

SEQ ID NO: 1035566 - RNA, 19 nt, Artificial Sequence
  Description of Artificial Sequence: Synthetic oligonucleotide
  Sense strand starting at position 2061 of SEQ ID NO: 914852
aaugaaucucuggguagua

SEQ ID NO: 1035567 - RNA, 19 nt, Artificial Sequence
  Description of Artificial Sequence: Synthetic oligonucleotide
  Antisense strand to SEQ ID NO: 1035566
uacuacccagagauucauu

SEQ ID NO: 1035568 - RNA, 19 nt, Artificial Sequence
  Description of Artificial Sequence: Synthetic oligonucleotide
  Sense strand starting at position 2062 of SEQ ID NO: 914852
augaaucucuggguaguaa

SEQ ID NO: 1035569 - RNA, 19 nt, Artificial Sequence
  Description of Artificial Sequence: Synthetic oligonucleotide
  Antisense strand to SEQ ID NO: 1035568
uuacuacccagagauucau

SEQ ID NO: 1035570 - RNA, 19 nt, Artificial Sequence
  Description of Artificial Sequence: Synthetic oligonucleotide
  Sense strand starting at position 2441 of SEQ ID NO: 914852
gcagaaaucuuggcucgga

SEQ ID NO: 1035571 - RNA, 19 nt, Artificial Sequence
  Description of Artificial Sequence: Synthetic oligonucleotide
  Antisense strand to SEQ ID NO: 1035570
uccgagccaagauuucugc

SEQ ID NO: 1035572 - RNA, 19 nt, Artificial Sequence
  Description of Artificial Sequence: Synthetic oligonucleotide
  Sense strand starting at position 2519 of SEQ ID NO: 914852
cgccguuucccgagaggga

SEQ ID NO: 1035573 - RNA, 19 nt, Artificial Sequence
  Description of Artificial Sequence: Synthetic oligonucleotide
  Antisense strand to SEQ ID NO: 1035572
ucccucucgggaaacggcg

SEQ ID NO: 1035574 - RNA, 19 nt, Artificial Sequence
  Description of Artificial Sequence: Synthetic oligonucleotide
  Sense strand starting at position 2520 of SEQ ID NO: 914852
gccguuucccgagagggau

SEQ ID NO: 1035575 - RNA, 19 nt, Artificial Sequence
  Description of Artificial Sequence: Synthetic oligonucleotide
  Antisense strand to SEQ ID NO: 1035574
aucccucucgggaaacggc

SEQ ID NO: 1035576 - RNA, 19 nt, Artificial Sequence
  Description of Artificial Sequence: Synthetic oligonucleotide
  Sense strand starting at position 2665 of SEQ ID NO: 914852
gggaguagguccagggaca

SEQ ID NO: 1035577 - RNA, 19 nt, Artificial Sequence
  Description of Artificial Sequence: Synthetic oligonucleotide
  Antisense strand to SEQ ID NO: 1035576
ugucccuggaccuacuccc

SEQ ID NO: 1035578 - RNA, 19 nt, Artificial Sequence
  Description of Artificial Sequence: Synthetic oligonucleotide
  Sense strand starting at position 2916 of SEQ ID NO: 914852
accagaguguguucuuuaa

SEQ ID NO: 1035579 - RNA, 19 nt, Artificial Sequence
  Description of Artificial Sequence: Synthetic oligonucleotide
  Antisense strand to SEQ ID NO: 1035578
uuaaagaacacacucuggu

SEQ ID NO: 1035580 - RNA, 19 nt, Artificial Sequence
  Description of Artificial Sequence: Synthetic oligonucleotide
  Sense strand starting at position 2920 of SEQ ID NO: 914852
gaguguguucuuuaauucg

SEQ ID NO: 1035581 - RNA, 19 nt, Artificial Sequence
  Description of Artificial Sequence: Synthetic oligonucleotide
  Antisense strand to SEQ ID NO: 1035580
cgaauuaaagaacacacuc

SEQ ID NO: 1035582 - RNA, 19 nt, Artificial Sequence
  Description of Artificial Sequence: Synthetic oligonucleotide
  Sense strand starting at position 2926 of SEQ ID NO: 914852
guucuuuaauucguggaag

SEQ ID NO: 1035583 - RNA, 19 nt, Artificial Sequence
  Description of Artificial Sequence: Synthetic oligonucleotide
  Antisense strand to SEQ ID NO: 1035582
cuuccacgaauuaaagaac

SEQ ID NO: 1035584 - RNA, 19 nt, Artificial Sequence
  Description of Artificial Sequence: Synthetic oligonucleotide
  Sense strand starting at position 3173 of SEQ ID NO: 914852
acaagugcuaggugaauga

SEQ ID NO: 1035585 - RNA, 19 nt, Artificial Sequence
  Description of Artificial Sequence: Synthetic oligonucleotide
  Antisense strand to SEQ ID NO: 1035584
ucauucaccuagcacuugu

SEQ ID NO: 1035586 - RNA, 19 nt, Artificial Sequence
  Description of Artificial Sequence: Synthetic oligonucleotide
  Sense strand starting at position 3183 of SEQ ID NO: 914852
ggugaaugaugucuacgac

SEQ ID NO: 1035587 - RNA, 19 nt, Artificial Sequence
  Description of Artificial Sequence: Synthetic oligonucleotide
  Antisense strand to SEQ ID NO: 1035586
gucguagacaucauucacc

SEQ ID NO: 1035588 - RNA, 19 nt, Artificial Sequence
  Description of Artificial Sequence: Synthetic oligonucleotide
  Sense strand starting at position 3186 of SEQ ID NO: 914852
gaaugaugucuacgaccag

SEQ ID NO: 1035589 - RNA, 19 nt, Artificial Sequence
  Description of Artificial Sequence: Synthetic oligonucleotide
  Antisense strand to SEQ ID NO: 1035588
cuggucguagacaucauuc

SEQ ID NO: 1035590 - RNA, 19 nt, Artificial Sequence
  Description of Artificial Sequence: Synthetic oligonucleotide
  Sense strand starting at position 3265 of SEQ ID NO: 914852
aguccauccucuccuguaa

SEQ ID NO: 1035591 - RNA, 19 nt, Artificial Sequence
  Description of Artificial Sequence: Synthetic oligonucleotide
  Antisense strand to SEQ ID NO: 1035590
uuacaggagaggauggacu

SEQ ID NO: 1035592 - RNA, 19 nt, Artificial Sequence
  Description of Artificial Sequence: Synthetic oligonucleotide
  Sense strand starting at position 3293 of SEQ ID NO: 914852
cagggaaacuuagucucua

SEQ ID NO: 1035593 - RNA, 19 nt, Artificial Sequence
  Description of Artificial Sequence: Synthetic oligonucleotide
  Antisense strand to SEQ ID NO: 1035592
uagagacuaaguuucccug

SEQ ID NO: 1035594 - RNA, 19 nt, Artificial Sequence
  Description of Artificial Sequence: Synthetic oligonucleotide
  Sense strand starting at position 3294 of SEQ ID NO: 914852
agggaaacuuagucucuaa

SEQ ID NO: 1035595 - RNA, 19 nt, Artificial Sequence
  Description of Artificial Sequence: Synthetic oligonucleotide
  Antisense strand to SEQ ID NO: 1035594
uuagagacuaaguuucccu

SEQ ID NO: 1035596 - RNA, 19 nt, Artificial Sequence
  Description of Artificial Sequence: Synthetic oligonucleotide
  Sense strand starting at position 3551 of SEQ ID NO: 914852
guuugaccucagggcuuaa

SEQ ID NO: 1035597 - RNA, 19 nt, Artificial Sequence
  Description of Artificial Sequence: Synthetic oligonucleotide
  Antisense strand to SEQ ID NO: 1035596
uuaagcccugaggucaaac

SEQ ID NO: 1035598 - RNA, 19 nt, Artificial Sequence
  Description of Artificial Sequence: Synthetic oligonucleotide
  Sense strand starting at position 3578 of SEQ ID NO: 914852
uggagaaaguucuuaauuc

SEQ ID NO: 1035599 - RNA, 19 nt, Artificial Sequence
  Description of Artificial Sequence: Synthetic oligonucleotide
  Antisense strand to SEQ ID NO: 1035598
gaauuaagaacuuucucca

SEQ ID NO: 1035600 - RNA, 19 nt, Artificial Sequence
  Description of Artificial Sequence: Synthetic oligonucleotide
  Sense strand starting at position 3603 of SEQ ID NO: 914852
ugccuaguucuugggagag

SEQ ID NO: 1035601 - RNA, 19 nt, Artificial Sequence
  Description of Artificial Sequence: Synthetic oligonucleotide
  Antisense strand to SEQ ID NO: 1035600
cucucccaagaacuaggca

SEQ ID NO: 1035602 - RNA, 19 nt, Artificial Sequence
  Description of Artificial Sequence: Synthetic oligonucleotide
  Sense strand starting at position 3635 of SEQ ID NO: 914852
aguucucagguccagauaa

SEQ ID NO: 1035603 - RNA, 19 nt, Artificial Sequence
  Description of Artificial Sequence: Synthetic oligonucleotide
  Antisense strand to SEQ ID NO: 1035602
uuaucuggaccugagaacu

SEQ ID NO: 1035604 - RNA, 19 nt, Artificial Sequence
  Description of Artificial Sequence: Synthetic oligonucleotide
  Sense strand starting at position 3801 of SEQ ID NO: 914852
uagggugcucugggaaaua

SEQ ID NO: 1035605 - RNA, 19 nt, Artificial Sequence
  Description of Artificial Sequence: Synthetic oligonucleotide
  Antisense strand to SEQ ID NO: 1035604
uauuucccagagcacccua

SEQ ID NO: 1035606 - RNA, 19 nt, Artificial Sequence
  Description of Artificial Sequence: Synthetic oligonucleotide
  Sense strand starting at position 3920 of SEQ ID NO: 914852
gauucuaguccugagcaau

SEQ ID NO: 1035607 - RNA, 19 nt, Artificial Sequence
  Description of Artificial Sequence: Synthetic oligonucleotide
  Antisense strand to SEQ ID NO: 1035606
auugcucaggacuagaauc

SEQ ID NO: 1035608 - RNA, 19 nt, Artificial Sequence
  Description of Artificial Sequence: Synthetic oligonucleotide
  Sense strand starting at position 3923 of SEQ ID NO: 914852
ucuaguccugagcaauugu

SEQ ID NO: 1035609 - RNA, 19 nt, Artificial Sequence
  Description of Artificial Sequence: Synthetic oligonucleotide
  Antisense strand to SEQ ID NO: 1035608
acaauugcucaggacuaga

SEQ ID NO: 1035610 - RNA, 19 nt, Artificial Sequence
  Description of Artificial Sequence: Synthetic oligonucleotide
  Sense strand starting at position 3953 of SEQ ID NO: 914852
ggagcuuugagaggcccaa

SEQ ID NO: 1035611 - RNA, 19 nt, Artificial Sequence
  Description of Artificial Sequence: Synthetic oligonucleotide
  Antisense strand to SEQ ID NO: 1035610
uugggccucucaaagcucc

SEQ ID NO: 1035612 - RNA, 19 nt, Artificial Sequence
  Description of Artificial Sequence: Synthetic oligonucleotide
  Sense strand starting at position 3 of SEQ ID NO: 914853
cguccucagggauacugau

SEQ ID NO: 1035613 - RNA, 19 nt, Artificial Sequence
  Description of Artificial Sequence: Synthetic oligonucleotide
  Antisense strand to SEQ ID NO: 1035612
aucaguaucccugaggacg

SEQ ID NO: 1035614 - RNA, 19 nt, Artificial Sequence
  Description of Artificial Sequence: Synthetic oligonucleotide
  Sense strand starting at position 11 of SEQ ID NO: 914853
gggauacugaucugaaagc

SEQ ID NO: 1035615 - RNA, 19 nt, Artificial Sequence
  Description of Artificial Sequence: Synthetic oligonucleotide
  Antisense strand to SEQ ID NO: 1035614
gcuuucagaucaguauccc

SEQ ID NO: 1035616 - RNA, 19 nt, Artificial Sequence
  Description of Artificial Sequence: Synthetic oligonucleotide
  Sense strand starting at position 12 of SEQ ID NO: 914853
ggauacugaucugaaagca

SEQ ID NO: 1035617 - RNA, 19 nt, Artificial Sequence
  Description of Artificial Sequence: Synthetic oligonucleotide
  Antisense strand to SEQ ID NO: 1035616
ugcuuucagaucaguaucc

SEQ ID NO: 1035618 - RNA, 19 nt, Artificial Sequence
  Description of Artificial Sequence: Synthetic oligonucleotide
  Sense strand starting at position 481 of SEQ ID NO: 914853
cugcacuguccacagacau

SEQ ID NO: 1035619 - RNA, 19 nt, Artificial Sequence
  Description of Artificial Sequence: Synthetic oligonucleotide
  Antisense strand to SEQ ID NO: 1035618
augucuguggacagugcag

SEQ ID NO: 1035620 - RNA, 19 nt, Artificial Sequence
  Description of Artificial Sequence: Synthetic oligonucleotide
  Sense strand starting at position 685 of SEQ ID NO: 914853
cgaggaaauguguggagcu

SEQ ID NO: 1035621 - RNA, 19 nt, Artificial Sequence
  Description of Artificial Sequence: Synthetic oligonucleotide
  Antisense strand to SEQ ID NO: 1035620
agcuccacacauuuccucg

SEQ ID NO: 1035622 - RNA, 19 nt, Artificial Sequence
  Description of Artificial Sequence: Synthetic oligonucleotide
  Sense strand starting at position 686 of SEQ ID NO: 914853
gaggaaauguguggagcuu

SEQ ID NO: 1035623 - RNA, 19 nt, Artificial Sequence
  Description of Artificial Sequence: Synthetic oligonucleotide
  Antisense strand to SEQ ID NO: 1035622
aagcuccacacauuuccuc

SEQ ID NO: 1035624 - RNA, 19 nt, Artificial Sequence
  Description of Artificial Sequence: Synthetic oligonucleotide
  Sense strand starting at position 2557 of SEQ ID NO: 914853
gggugcuguucugggcauu

SEQ ID NO: 1035625 - RNA, 19 nt, Artificial Sequence
  Description of Artificial Sequence: Synthetic oligonucleotide
  Antisense strand to SEQ ID NO: 1035624
aaugcccagaacagcaccc

SEQ ID NO: 1035626 - RNA, 19 nt, Artificial Sequence
  Description of Artificial Sequence: Synthetic oligonucleotide
  Sense strand starting at position 2558 of SEQ ID NO: 914853
ggugcuguucugggcauua

SEQ ID NO: 1035627 - RNA, 19 nt, Artificial Sequence
  Description of Artificial Sequence: Synthetic oligonucleotide
  Antisense strand to SEQ ID NO: 1035626
uaaugcccagaacagcacc

SEQ ID NO: 1035628 - RNA, 19 nt, Artificial Sequence
  Description of Artificial Sequence: Synthetic oligonucleotide
  Sense strand starting at position 2578 of SEQ ID NO: 914853
ggaggccaguguuuagaaa

SEQ ID NO: 1035629 - RNA, 19 nt, Artificial Sequence
  Description of Artificial Sequence: Synthetic oligonucleotide
  Antisense strand to SEQ ID NO: 1035628
uuucuaaacacuggccucc

SEQ ID NO: 1035630 - RNA, 19 nt, Artificial Sequence
  Description of Artificial Sequence: Synthetic oligonucleotide
  Sense strand starting at position 2579 of SEQ ID NO: 914853
gaggccaguguuuagaaau

SEQ ID NO: 1035631 - RNA, 19 nt, Artificial Sequence
  Description of Artificial Sequence: Synthetic oligonucleotide
  Antisense strand to SEQ ID NO: 1035630
auuucuaaacacuggccuc

SEQ ID NO: 1035632 - RNA, 19 nt, Artificial Sequence
  Description of Artificial Sequence: Synthetic oligonucleotide
  Sense strand starting at position 2682 of SEQ ID NO: 914853
ucaagcugauucucuauga

SEQ ID NO: 1035633 - RNA, 19 nt, Artificial Sequence
  Description of Artificial Sequence: Synthetic oligonucleotide
  Antisense strand to SEQ ID NO: 1035632
ucauagagaaucagcuuga

SEQ ID NO: 1035634 - RNA, 19 nt, Artificial Sequence
  Description of Artificial Sequence: Synthetic oligonucleotide
  Sense strand starting at position 2686 of SEQ ID NO: 914853
gcugauucucuaugagucu

SEQ ID NO: 1035635 - RNA, 19 nt, Artificial Sequence
  Description of Artificial Sequence: Synthetic oligonucleotide
  Antisense strand to SEQ ID NO: 1035634
agacucauagagaaucagc

SEQ ID NO: 1035636 - RNA, 19 nt, Artificial Sequence
  Description of Artificial Sequence: Synthetic oligonucleotide
  Sense strand starting at position 2741 of SEQ ID NO: 914853
ccaggauggucccaaguaa

SEQ ID NO: 1035637 - RNA, 19 nt, Artificial Sequence
  Description of Artificial Sequence: Synthetic oligonucleotide
  Antisense strand to SEQ ID NO: 1035636
uuacuugggaccauccugg

SEQ ID NO: 1035638 - RNA, 19 nt, Artificial Sequence
  Description of Artificial Sequence: Synthetic oligonucleotide
  Sense strand starting at position 2780 of SEQ ID NO: 914853
gugauaagccaagggaacu

SEQ ID NO: 1035639 - RNA, 19 nt, Artificial Sequence
  Description of Artificial Sequence: Synthetic oligonucleotide
  Antisense strand to SEQ ID NO: 1035638
aguucccuuggcuuaucac

SEQ ID NO: 1035640 - RNA, 19 nt, Artificial Sequence
  Description of Artificial Sequence: Synthetic oligonucleotide
  Sense strand starting at position 2898 of SEQ ID NO: 914853
ggcagugacuaugcuacua

SEQ ID NO: 1035641 - RNA, 19 nt, Artificial Sequence
  Description of Artificial Sequence: Synthetic oligonucleotide
  Antisense strand to SEQ ID NO: 1035640
uaguagcauagucacugcc

SEQ ID NO: 1035642 - RNA, 19 nt, Artificial Sequence
  Description of Artificial Sequence: Synthetic oligonucleotide
  Sense strand starting at position 2963 of SEQ ID NO: 914853
accuguacaucugggcaaa

SEQ ID NO: 1035643 - RNA, 19 nt, Artificial Sequence
  Description of Artificial Sequence: Synthetic oligonucleotide
  Antisense strand to SEQ ID NO: 1035642
uuugcccagauguacaggu

SEQ ID NO: 1035644 - RNA, 19 nt, Artificial Sequence
  Description of Artificial Sequence: Synthetic oligonucleotide
  Sense strand starting at position 3122 of SEQ ID NO: 914853
gguuaagacucagaagcug

SEQ ID NO: 1035645 - RNA, 19 nt, Artificial Sequence
  Description of Artificial Sequence: Synthetic oligonucleotide
  Antisense strand to SEQ ID NO: 1035644
cagcuucugagucuuaacc

SEQ ID NO: 1035646 - RNA, 19 nt, Artificial Sequence
  Description of Artificial Sequence: Synthetic oligonucleotide
  Sense strand starting at position 3455 of SEQ ID NO: 914853
gccacauaaucaguaaugu

SEQ ID NO: 1035647 - RNA, 19 nt, Artificial Sequence
  Description of Artificial Sequence: Synthetic oligonucleotide
  Antisense strand to SEQ ID NO: 1035646
acauuacugauuauguggc

SEQ ID NO: 1035648 - RNA, 19 nt, Artificial Sequence
  Description of Artificial Sequence: Synthetic oligonucleotide
  Sense strand starting at position 3456 of SEQ ID NO: 914853
ccacauaaucaguaaugug

SEQ ID NO: 1035649 - RNA, 19 nt, Artificial Sequence
  Description of Artificial Sequence: Synthetic oligonucleotide
  Antisense strand to SEQ ID NO: 1035648
cacauuacugauuaugugg

SEQ ID NO: 1035650 - RNA, 19 nt, Artificial Sequence
  Description of Artificial Sequence: Synthetic oligonucleotide
  Sense strand starting at position 3503 of SEQ ID NO: 914853
gucccuugaccaggagaca

SEQ ID NO: 1035651 - RNA, 19 nt, Artificial Sequence
  Description of Artificial Sequence: Synthetic oligonucleotide
  Antisense strand to SEQ ID NO: 1035650
ugucuccuggucaagggac

SEQ ID NO: 1035652 - RNA, 19 nt, Artificial Sequence
  Description of Artificial Sequence: Synthetic oligonucleotide
  Sense strand starting at position 3548 of SEQ ID NO: 914853
ugacgcaggucuugaggaa

SEQ ID NO: 1035653 - RNA, 19 nt, Artificial Sequence
  Description of Artificial Sequence: Synthetic oligonucleotide
  Antisense strand to SEQ ID NO: 1035652
uuccucaagaccugcguca

SEQ ID NO: 1035654 - RNA, 19 nt, Artificial Sequence
  Description of Artificial Sequence: Synthetic oligonucleotide
  Sense strand starting at position 3549 of SEQ ID NO: 914853
gacgcaggucuugaggaaa

SEQ ID NO: 1035655 - RNA, 19 nt, Artificial Sequence
  Description of Artificial Sequence: Synthetic oligonucleotide
  Antisense strand to SEQ ID NO: 1035654
uuuccucaagaccugcguc

SEQ ID NO: 1035656 - RNA, 19 nt, Artificial Sequence
  Description of Artificial Sequence: Synthetic oligonucleotide
  Sense strand starting at position 3609 of SEQ ID NO: 914853
gggcaauucugggccagga

SEQ ID NO: 1035657 - RNA, 19 nt, Artificial Sequence
  Description of Artificial Sequence: Synthetic oligonucleotide
  Antisense strand to SEQ ID NO: 1035656
uccuggcccagaauugccc

SEQ ID NO: 1035658 - RNA, 19 nt, Artificial Sequence
  Description of Artificial Sequence: Synthetic oligonucleotide
  Sense strand starting at position 3611 of SEQ ID NO: 914853
gcaauucugggccaggaga

SEQ ID NO: 1035659 - RNA, 19 nt, Artificial Sequence
  Description of Artificial Sequence: Synthetic oligonucleotide
  Antisense strand to SEQ ID NO: 1035658
ucuccuggcccagaauugc

SEQ ID NO: 1035660 - RNA, 19 nt, Artificial Sequence
  Description of Artificial Sequence: Synthetic oligonucleotide
  Sense strand starting at position 3622 of SEQ ID NO: 914853
ccaggagagcuuugagaac

SEQ ID NO: 1035661 - RNA, 19 nt, Artificial Sequence
  Description of Artificial Sequence: Synthetic oligonucleotide
  Antisense strand to SEQ ID NO: 1035660
guucucaaagcucuccugg

SEQ ID NO: 1035662 - RNA, 19 nt, Artificial Sequence
  Description of Artificial Sequence: Synthetic oligonucleotide
  Sense strand starting at position 233 of SEQ ID NO: 914854
uguacugggaucugaauca

SEQ ID NO: 1035663 - RNA, 19 nt, Artificial Sequence
  Description of Artificial Sequence: Synthetic oligonucleotide
  Antisense strand to SEQ ID NO: 1035662
ugauucagaucccaguaca

SEQ ID NO: 1035664 - RNA, 19 nt, Artificial Sequence
  Description of Artificial Sequence: Synthetic oligonucleotide
  Sense strand starting at position 473 of SEQ ID NO: 914854
aagugugagcuguauccaa

SEQ ID NO: 1035665 - RNA, 19 nt, Artificial Sequence
  Description of Artificial Sequence: Synthetic oligonucleotide
  Antisense strand to SEQ ID NO: 1035664
uuggauacagcucacacuu

SEQ ID NO: 1035666 - RNA, 19 nt, Artificial Sequence
  Description of Artificial Sequence: Synthetic oligonucleotide
  Sense strand starting at position 520 of SEQ ID NO: 914854
gauguugccuugcagggau

SEQ ID NO: 1035667 - RNA, 19 nt, Artificial Sequence
  Description of Artificial Sequence: Synthetic oligonucleotide
  Antisense strand to SEQ ID NO: 1035666
aucccugcaaggcaacauc

SEQ ID NO: 1035668 - RNA, 19 nt, Artificial Sequence
  Description of Artificial Sequence: Synthetic oligonucleotide
  Sense strand starting at position 584 of SEQ ID NO: 914854
gaaauaugagcugggcaca

SEQ ID NO: 1035669 - RNA, 19 nt, Artificial Sequence
  Description of Artificial Sequence: Synthetic oligonucleotide
  Antisense strand to SEQ ID NO: 1035668
ugugcccagcucauauuuc

SEQ ID NO: 1035670 - RNA, 19 nt, Artificial Sequence
  Description of Artificial Sequence: Synthetic oligonucleotide
  Sense strand starting at position 997 of SEQ ID NO: 914854
acgcgauuucucugcagga

SEQ ID NO: 1035671 - RNA, 19 nt, Artificial Sequence
  Description of Artificial Sequence: Synthetic oligonucleotide
  Antisense strand to SEQ ID NO: 1035670
uccugcagagaaaucgcgu

SEQ ID NO: 1035672 - RNA, 19 nt, Artificial Sequence
  Description of Artificial Sequence: Synthetic oligonucleotide
  Sense strand starting at position 998 of SEQ ID NO: 914854
cgcgauuucucugcaggac

SEQ ID NO: 1035673 - RNA, 19 nt, Artificial Sequence
  Description of Artificial Sequence: Synthetic oligonucleotide
  Antisense strand to SEQ ID NO: 1035672
guccugcagagaaaucgcg

SEQ ID NO: 1035674 - RNA, 19 nt, Artificial Sequence
  Description of Artificial Sequence: Synthetic oligonucleotide
  Sense strand starting at position 2174 of SEQ ID NO: 914854
guguuuacacaagaaaccu

SEQ ID NO: 1035675 - RNA, 19 nt, Artificial Sequence
  Description of Artificial Sequence: Synthetic oligonucleotide
  Antisense strand to SEQ ID NO: 1035674
agguuucuuguguaaacac

SEQ ID NO: 1035676 - RNA, 19 nt, Artificial Sequence
  Description of Artificial Sequence: Synthetic oligonucleotide
  Sense strand starting at position 2213 of SEQ ID NO: 914854
accucacauugucaugagu

SEQ ID NO: 1035677 - RNA, 19 nt, Artificial Sequence
  Description of Artificial Sequence: Synthetic oligonucleotide
  Antisense strand to SEQ ID NO: 1035676
acucaugacaaugugaggu

SEQ ID NO: 1035678 - RNA, 19 nt, Artificial Sequence
  Description of Artificial Sequence: Synthetic oligonucleotide
  Sense strand starting at position 2215 of SEQ ID NO: 914854
cucacauugucaugaguuc

SEQ ID NO: 1035679 - RNA, 19 nt, Artificial Sequence
  Description of Artificial Sequence: Synthetic oligonucleotide
  Antisense strand to SEQ ID NO: 1035678
gaacucaugacaaugugag

SEQ ID NO: 1035680 - RNA, 19 nt, Artificial Sequence
  Description of Artificial Sequence: Synthetic oligonucleotide
  Sense strand starting at position 2222 of SEQ ID NO: 914854
ugucaugaguuccaugaag

SEQ ID NO: 1035681 - RNA, 19 nt, Artificial Sequence
  Description of Artificial Sequence: Synthetic oligonucleotide
  Antisense strand to SEQ ID NO: 1035680
cuucauggaacucaugaca

SEQ ID NO: 1035682 - RNA, 19 nt, Artificial Sequence
  Description of Artificial Sequence: Synthetic oligonucleotide
  Sense strand starting at position 2224 of SEQ ID NO: 914854
ucaugaguuccaugaagga

SEQ ID NO: 1035683 - RNA, 19 nt, Artificial Sequence
  Description of Artificial Sequence: Synthetic oligonucleotide
  Antisense strand to SEQ ID NO: 1035682
uccuucauggaacucauga

SEQ ID NO: 1035684 - RNA, 19 nt, Artificial Sequence
  Description of Artificial Sequence: Synthetic oligonucleotide
  Sense strand starting at position 2282 of SEQ ID NO: 914854
ggguuaucucacugggaaa

SEQ ID NO: 1035685 - RNA, 19 nt, Artificial Sequence
  Description of Artificial Sequence: Synthetic oligonucleotide
  Antisense strand to SEQ ID NO: 1035684
uuucccagugagauaaccc

SEQ ID NO: 1035686 - RNA, 19 nt, Artificial Sequence
  Description of Artificial Sequence: Synthetic oligonucleotide
  Sense strand starting at position 2283 of SEQ ID NO: 914854
gguuaucucacugggaaag

SEQ ID NO: 1035687 - RNA, 19 nt, Artificial Sequence
  Description of Artificial Sequence: Synthetic oligonucleotide
  Antisense strand to SEQ ID NO: 1035686
cuuucccagugagauaacc

SEQ ID NO: 1035688 - RNA, 19 nt, Artificial Sequence
  Description of Artificial Sequence: Synthetic oligonucleotide
  Sense strand starting at position 2293 of SEQ ID NO: 914854
cugggaaagcucugcuaag

SEQ ID NO: 1035689 - RNA, 19 nt, Artificial Sequence
  Description of Artificial Sequence: Synthetic oligonucleotide
  Antisense strand to SEQ ID NO: 1035688
cuuagcagagcuuucccag

SEQ ID NO: 1035690 - RNA, 19 nt, Artificial Sequence
  Description of Artificial Sequence: Synthetic oligonucleotide
  Sense strand starting at position 2304 of SEQ ID NO: 914854
cugcuaaggaggugauauu

SEQ ID NO: 1035691 - RNA, 19 nt, Artificial Sequence
  Description of Artificial Sequence: Synthetic oligonucleotide
  Antisense strand to SEQ ID NO: 1035690
aauaucaccuccuuagcag

SEQ ID NO: 1035692 - RNA, 19 nt, Artificial Sequence
  Description of Artificial Sequence: Synthetic oligonucleotide
  Sense strand starting at position 2435 of SEQ ID NO: 914854
ggcccuugaggauaaaugu

SEQ ID NO: 1035693 - RNA, 19 nt, Artificial Sequence
  Description of Artificial Sequence: Synthetic oligonucleotide
  Antisense strand to SEQ ID NO: 1035692
acauuuauccucaagggcc

SEQ ID NO: 1035694 - RNA, 19 nt, Artificial Sequence
  Description of Artificial Sequence: Synthetic oligonucleotide
  Sense strand starting at position 2441 of SEQ ID NO: 914854
ugaggauaaauguggucca

SEQ ID NO: 1035695 - RNA, 19 nt, Artificial Sequence
  Description of Artificial Sequence: Synthetic oligonucleotide
  Antisense strand to SEQ ID NO: 1035694
uggaccacauuuauccuca

SEQ ID NO: 1035696 - RNA, 19 nt, Artificial Sequence
  Description of Artificial Sequence: Synthetic oligonucleotide
  Sense strand starting at position 2478 of SEQ ID NO: 914854
uacuguaggcgucauggau

SEQ ID NO: 1035697 - RNA, 19 nt, Artificial Sequence
  Description of Artificial Sequence: Synthetic oligonucleotide
  Antisense strand to SEQ ID NO: 1035696
auccaugacgccuacagua

SEQ ID NO: 1035698 - RNA, 19 nt, Artificial Sequence
  Description of Artificial Sequence: Synthetic oligonucleotide
  Sense strand starting at position 2486 of SEQ ID NO: 914854
gcgucauggauggagugau

SEQ ID NO: 1035699 - RNA, 19 nt, Artificial Sequence
  Description of Artificial Sequence: Synthetic oligonucleotide
  Antisense strand to SEQ ID NO: 1035698
aucacuccauccaugacgc

SEQ ID NO: 1035700 - RNA, 19 nt, Artificial Sequence
  Description of Artificial Sequence: Synthetic oligonucleotide
  Sense strand starting at position 2487 of SEQ ID NO: 914854
cgucauggauggagugauu

SEQ ID NO: 1035701 - RNA, 19 nt, Artificial Sequence
  Description of Artificial Sequence: Synthetic oligonucleotide
  Antisense strand to SEQ ID NO: 1035700
aaucacuccauccaugacg

SEQ ID NO: 1035702 - RNA, 19 nt, Artificial Sequence
  Description of Artificial Sequence: Synthetic oligonucleotide
  Sense strand starting at position 2632 of SEQ ID NO: 914854
gccaguucuuccugagaac

SEQ ID NO: 1035703 - RNA, 19 nt, Artificial Sequence
  Description of Artificial Sequence: Synthetic oligonucleotide
  Antisense strand to SEQ ID NO: 1035702
guucucaggaagaacuggc

SEQ ID NO: 1035704 - RNA, 19 nt, Artificial Sequence
  Description of Artificial Sequence: Synthetic oligonucleotide
  Sense strand starting at position 2633 of SEQ ID NO: 914854
ccaguucuuccugagaacg

SEQ ID NO: 1035705 - RNA, 19 nt, Artificial Sequence
  Description of Artificial Sequence: Synthetic oligonucleotide
  Antisense strand to SEQ ID NO: 1035704
cguucucaggaagaacugg

SEQ ID NO: 1035706 - RNA, 19 nt, Artificial Sequence
  Description of Artificial Sequence: Synthetic oligonucleotide
  Sense strand starting at position 2635 of SEQ ID NO: 914854
aguucuuccugagaacgcu

SEQ ID NO: 1035707 - RNA, 19 nt, Artificial Sequence
  Description of Artificial Sequence: Synthetic oligonucleotide
  Antisense strand to SEQ ID NO: 1035706
agcguucucaggaagaacu

SEQ ID NO: 1035708 - RNA, 19 nt, Artificial Sequence
  Description of Artificial Sequence: Synthetic oligonucleotide
  Sense strand starting at position 2643 of SEQ ID NO: 914854
cugagaacgcuuugugccu

SEQ ID NO: 1035709 - RNA, 19 nt, Artificial Sequence
  Description of Artificial Sequence: Synthetic oligonucleotide
  Antisense strand to SEQ ID NO: 1035708
aggcacaaagcguucucag

SEQ ID NO: 1035710 - RNA, 19 nt, Artificial Sequence
  Description of Artificial Sequence: Synthetic oligonucleotide
  Sense strand starting at position 2982 of SEQ ID NO: 914854
gguggaacuuacuacucuu

SEQ ID NO: 1035711 - RNA, 19 nt, Artificial Sequence
  Description of Artificial Sequence: Synthetic oligonucleotide
  Antisense strand to SEQ ID NO: 1035710
aagaguaguaaguuccacc

SEQ ID NO: 1035712 - RNA, 19 nt, Artificial Sequence
  Description of Artificial Sequence: Synthetic oligonucleotide
  Sense strand starting at position 3558 of SEQ ID NO: 914854
ccaaacugcugugaugaca

SEQ ID NO: 1035713 - RNA, 19 nt, Artificial Sequence
  Description of Artificial Sequence: Synthetic oligonucleotide
  Antisense strand to SEQ ID NO: 1035712
ugucaucacagcaguuugg

SEQ ID NO: 1035714 - RNA, 19 nt, Artificial Sequence
  Description of Artificial Sequence: Synthetic oligonucleotide
  Sense strand starting at position 3599 of SEQ ID NO: 914854
cgagaagagccuugaauga

SEQ ID NO: 1035715 - RNA, 19 nt, Artificial Sequence
  Description of Artificial Sequence: Synthetic oligonucleotide
  Antisense strand to SEQ ID NO: 1035714
ucauucaaggcucuucucg

SEQ ID NO: 1035716 - RNA, 19 nt, Artificial Sequence
  Description of Artificial Sequence: Synthetic oligonucleotide
  Sense strand starting at position 3632 of SEQ ID NO: 914854
uggauuuggucccaggaga

SEQ ID NO: 1035717 - RNA, 19 nt, Artificial Sequence
  Description of Artificial Sequence: Synthetic oligonucleotide
  Antisense strand to SEQ ID NO: 1035716
ucuccugggaccaaaucca

SEQ ID NO: 1035718 - RNA, 19 nt, Artificial Sequence
  Description of Artificial Sequence: Synthetic oligonucleotide
  Sense strand starting at position 3697 of SEQ ID NO: 914854
acaccaggguuguaugaua

SEQ ID NO: 1035719 - RNA, 19 nt, Artificial Sequence
  Description of Artificial Sequence: Synthetic oligonucleotide
  Antisense strand to SEQ ID NO: 1035718
uaucauacaacccuggugu

SEQ ID NO: 1035720 - RNA, 19 nt, Artificial Sequence
  Description of Artificial Sequence: Synthetic oligonucleotide
  Sense strand starting at position 3884 of SEQ ID NO: 914854
gcaggagguccaugcucua

SEQ ID NO: 1035721 - RNA, 19 nt, Artificial Sequence
  Description of Artificial Sequence: Synthetic oligonucleotide
  Antisense strand to SEQ ID NO: 1035720
uagagcauggaccuccugc

SEQ ID NO: 1035722 - RNA, 19 nt, Artificial Sequence
  Description of Artificial Sequence: Synthetic oligonucleotide
  Sense strand starting at position 3924 of SEQ ID NO: 914854
guagcaggacuuggucaaa

SEQ ID NO: 1035723 - RNA, 19 nt, Artificial Sequence
  Description of Artificial Sequence: Synthetic oligonucleotide
  Antisense strand to SEQ ID NO: 1035722
uuugaccaaguccugcuac

SEQ ID NO: 1035724 - RNA, 19 nt, Artificial Sequence
  Description of Artificial Sequence: Synthetic oligonucleotide
  Sense strand starting at position 48 of SEQ ID NO: 914855
ccuggcaucugcuagacau

SEQ ID NO: 1035725 - RNA, 19 nt, Artificial Sequence
  Description of Artificial Sequence: Synthetic oligonucleotide
  Antisense strand to SEQ ID NO: 1035724
augucuagcagaugccagg

SEQ ID NO: 1035726 - RNA, 19 nt, Artificial Sequence
  Description of Artificial Sequence: Synthetic oligonucleotide
  Sense strand starting at position 209 of SEQ ID NO: 914855
acugacaugucaggagaca

SEQ ID NO: 1035727 - RNA, 19 nt, Artificial Sequence
  Description of Artificial Sequence: Synthetic oligonucleotide
  Antisense strand to SEQ ID NO: 1035726
ugucuccugacaugucagu

SEQ ID NO: 1035728 - RNA, 19 nt, Artificial Sequence
  Description of Artificial Sequence: Synthetic oligonucleotide
  Sense strand starting at position 276 of SEQ ID NO: 914855
ccacaucuuugaggaggga

SEQ ID NO: 1035729 - RNA, 19 nt, Artificial Sequence
  Description of Artificial Sequence: Synthetic oligonucleotide
  Antisense strand to SEQ ID NO: 1035728
ucccuccucaaagaugugg

SEQ ID NO: 1035730 - RNA, 19 nt, Artificial Sequence
  Description of Artificial Sequence: Synthetic oligonucleotide
  Sense strand starting at position 521 of SEQ ID NO: 914855
aggagaugcuuccaccuga

SEQ ID NO: 1035731 - RNA, 19 nt, Artificial Sequence
  Description of Artificial Sequence: Synthetic oligonucleotide
  Antisense strand to SEQ ID NO: 1035730
ucagguggaagcaucuccu

SEQ ID NO: 1035732 - RNA, 19 nt, Artificial Sequence
  Description of Artificial Sequence: Synthetic oligonucleotide
  Sense strand starting at position 595 of SEQ ID NO: 914855
augggaugucuggguagag

SEQ ID NO: 1035733 - RNA, 19 nt, Artificial Sequence
  Description of Artificial Sequence: Synthetic oligonucleotide
  Antisense strand to SEQ ID NO: 1035732
cucuacccagacaucccau

SEQ ID NO: 1035734 - RNA, 19 nt, Artificial Sequence
  Description of Artificial Sequence: Synthetic oligonucleotide
  Sense strand starting at position 751 of SEQ ID NO: 914855
caggccugucccugagaaa

SEQ ID NO: 1035735 - RNA, 19 nt, Artificial Sequence
  Description of Artificial Sequence: Synthetic oligonucleotide
  Antisense strand to SEQ ID NO: 1035734
uuucucagggacaggccug

SEQ ID NO: 1035736 - RNA, 19 nt, Artificial Sequence
  Description of Artificial Sequence: Synthetic oligonucleotide
  Sense strand starting at position 752 of SEQ ID NO: 914855
aggccugucccugagaaau

SEQ ID NO: 1035737 - RNA, 19 nt, Artificial Sequence
  Description of Artificial Sequence: Synthetic oligonucleotide
  Antisense strand to SEQ ID NO: 1035736
auuucucagggacaggccu

SEQ ID NO: 1035738 - RNA, 19 nt, Artificial Sequence
  Description of Artificial Sequence: Synthetic oligonucleotide
  Sense strand starting at position 763 of SEQ ID NO: 914855
ugagaaauccagugcccag

SEQ ID NO: 1035739 - RNA, 19 nt, Artificial Sequence
  Description of Artificial Sequence: Synthetic oligonucleotide
  Antisense strand to SEQ ID NO: 1035738
cugggcacuggauuucuca

SEQ ID NO: 1035740 - RNA, 19 nt, Artificial Sequence
  Description of Artificial Sequence: Synthetic oligonucleotide
  Sense strand starting at position 792 of SEQ ID NO: 914855
gcacgcuguaccgggaauu

SEQ ID NO: 1035741 - RNA, 19 nt, Artificial Sequence
  Description of Artificial Sequence: Synthetic oligonucleotide
  Antisense strand to SEQ ID NO: 1035740
aauucccgguacagcgugc

SEQ ID NO: 1035742 - RNA, 19 nt, Artificial Sequence
  Description of Artificial Sequence: Synthetic oligonucleotide
  Sense strand starting at position 855 of SEQ ID NO: 914855
gcugcuuucuccgggagca

SEQ ID NO: 1035743 - RNA, 19 nt, Artificial Sequence
  Description of Artificial Sequence: Synthetic oligonucleotide
  Antisense strand to SEQ ID NO: 1035742
ugcucccggagaaagcagc

SEQ ID NO: 1035744 - RNA, 19 nt, Artificial Sequence
  Description of Artificial Sequence: Synthetic oligonucleotide
  Sense strand starting at position 857 of SEQ ID NO: 914855
ugcuuucuccgggagcaca

SEQ ID NO: 1035745 - RNA, 19 nt, Artificial Sequence
  Description of Artificial Sequence: Synthetic oligonucleotide
  Antisense strand to SEQ ID NO: 1035744
ugugcucccggagaaagca

SEQ ID NO: 1035746 - RNA, 19 nt, Artificial Sequence
  Description of Artificial Sequence: Synthetic oligonucleotide
  Sense strand starting at position 1137 of SEQ ID NO: 914855
agccgaccuugaggaguua

SEQ ID NO: 1035747 - RNA, 19 nt, Artificial Sequence
  Description of Artificial Sequence: Synthetic oligonucleotide
  Antisense strand to SEQ ID NO: 1035746
uaacuccucaaggucggcu

SEQ ID NO: 1035748 - RNA, 19 nt, Artificial Sequence
  Description of Artificial Sequence: Synthetic oligonucleotide
  Sense strand starting at position 1185 of SEQ ID NO: 914855
gcacgcuucucuucccaga

SEQ ID NO: 1035749 - RNA, 19 nt, Artificial Sequence
  Description of Artificial Sequence: Synthetic oligonucleotide
  Antisense strand to SEQ ID NO: 1035748
ucugggaagagaagcgugc

SEQ ID NO: 1035750 - RNA, 19 nt, Artificial Sequence
  Description of Artificial Sequence: Synthetic oligonucleotide
  Sense strand starting at position 1352 of SEQ ID NO: 914855
gagugcagaguuuguguuu

SEQ ID NO: 1035751 - RNA, 19 nt, Artificial Sequence
  Description of Artificial Sequence: Synthetic oligonucleotide
  Antisense strand to SEQ ID NO: 1035750
aaacacaaacucugcacuc

SEQ ID NO: 1035752 - RNA, 19 nt, Artificial Sequence
  Description of Artificial Sequence: Synthetic oligonucleotide
  Sense strand starting at position 1359 of SEQ ID NO: 914855
gaguuuguguuucugcguu

SEQ ID NO: 1035753 - RNA, 19 nt, Artificial Sequence
  Description of Artificial Sequence: Synthetic oligonucleotide
  Antisense strand to SEQ ID NO: 1035752
aacgcagaaacacaaacuc

SEQ ID NO: 1035754 - RNA, 19 nt, Artificial Sequence
  Description of Artificial Sequence: Synthetic oligonucleotide
  Sense strand starting at position 2984 of SEQ ID NO: 914855
ccuaguaacuuggagaaug

SEQ ID NO: 1035755 - RNA, 19 nt, Artificial Sequence
  Description of Artificial Sequence: Synthetic oligonucleotide
  Antisense strand to SEQ ID NO: 1035754
cauucuccaaguuacuagg

SEQ ID NO: 1035756 - RNA, 19 nt, Artificial Sequence
  Description of Artificial Sequence: Synthetic oligonucleotide
  Sense strand starting at position 3070 of SEQ ID NO: 914855
guggguuggucacaucgga

SEQ ID NO: 1035757 - RNA, 19 nt, Artificial Sequence
  Description of Artificial Sequence: Synthetic oligonucleotide
  Antisense strand to SEQ ID NO: 1035756
uccgaugugaccaacccac

SEQ ID NO: 1035758 - RNA, 19 nt, Artificial Sequence
  Description of Artificial Sequence: Synthetic oligonucleotide
  Sense strand starting at position 3074 of SEQ ID NO: 914855
guuggucacaucggaagau

SEQ ID NO: 1035759 - RNA, 19 nt, Artificial Sequence
  Description of Artificial Sequence: Synthetic oligonucleotide
  Antisense strand to SEQ ID NO: 1035758
aucuuccgaugugaccaac

SEQ ID NO: 1035760 - RNA, 19 nt, Artificial Sequence
  Description of Artificial Sequence: Synthetic oligonucleotide
  Sense strand starting at position 3075 of SEQ ID NO: 914855
uuggucacaucggaagauu

SEQ ID NO: 1035761 - RNA, 19 nt, Artificial Sequence
  Description of Artificial Sequence: Synthetic oligonucleotide
  Antisense strand to SEQ ID NO: 1035760
aaucuuccgaugugaccaa

SEQ ID NO: 1035762 - RNA, 19 nt, Artificial Sequence
  Description of Artificial Sequence: Synthetic oligonucleotide
  Sense strand starting at position 3318 of SEQ ID NO: 914855
cugggucaauuugauguau

SEQ ID NO: 1035763 - RNA, 19 nt, Artificial Sequence
  Description of Artificial Sequence: Synthetic oligonucleotide
  Antisense strand to SEQ ID NO: 1035762
auacaucaaauugacccag

SEQ ID NO: 1035764 - RNA, 19 nt, Artificial Sequence
  Description of Artificial Sequence: Synthetic oligonucleotide
  Sense strand starting at position 3320 of SEQ ID NO: 914855
gggucaauuugauguaucu

SEQ ID NO: 1035765 - RNA, 19 nt, Artificial Sequence
  Description of Artificial Sequence: Synthetic oligonucleotide
  Antisense strand to SEQ ID NO: 1035764
agauacaucaaauugaccc

SEQ ID NO: 1035766 - RNA, 19 nt, Artificial Sequence
  Description of Artificial Sequence: Synthetic oligonucleotide
  Sense strand starting at position 3434 of SEQ ID NO: 914855
gagugcacagucuguauuu

SEQ ID NO: 1035767 - RNA, 19 nt, Artificial Sequence
  Description of Artificial Sequence: Synthetic oligonucleotide
  Antisense strand to SEQ ID NO: 1035766
aaauacagacugugcacuc

SEQ ID NO: 1035768 - RNA, 19 nt, Artificial Sequence
  Description of Artificial Sequence: Synthetic oligonucleotide
  Sense strand starting at position 3484 of SEQ ID NO: 914855
ugugcugggcgcugugaua

SEQ ID NO: 1035769 - RNA, 19 nt, Artificial Sequence
  Description of Artificial Sequence: Synthetic oligonucleotide
  Antisense strand to SEQ ID NO: 1035768
uaucacagcgcccagcaca

SEQ ID NO: 1035770 - RNA, 19 nt, Artificial Sequence
  Description of Artificial Sequence: Synthetic oligonucleotide
  Sense strand starting at position 3485 of SEQ ID NO: 914855
gugcugggcgcugugauaa

SEQ ID NO: 1035771 - RNA, 19 nt, Artificial Sequence
  Description of Artificial Sequence: Synthetic oligonucleotide
  Antisense strand to SEQ ID NO: 1035770
uuaucacagcgcccagcac

SEQ ID NO: 1035772 - RNA, 19 nt, Artificial Sequence
  Description of Artificial Sequence: Synthetic oligonucleotide
  Sense strand starting at position 3522 of SEQ ID NO: 914855
gaggguaccuuccugggaa

SEQ ID NO: 1035773 - RNA, 19 nt, Artificial Sequence
  Description of Artificial Sequence: Synthetic oligonucleotide
  Antisense strand to SEQ ID NO: 1035772
uucccaggaagguacccuc

SEQ ID NO: 1035774 - RNA, 19 nt, Artificial Sequence
  Description of Artificial Sequence: Synthetic oligonucleotide
  Sense strand starting at position 3525 of SEQ ID NO: 914855
gguaccuuccugggaagca

SEQ ID NO: 1035775 - RNA, 19 nt, Artificial Sequence
  Description of Artificial Sequence: Synthetic oligonucleotide
  Antisense strand to SEQ ID NO: 1035774
ugcuucccaggaagguacc

SEQ ID NO: 1035776 - RNA, 19 nt, Artificial Sequence
  Description of Artificial Sequence: Synthetic oligonucleotide
  Sense strand starting at position 3526 of SEQ ID NO: 914855
guaccuuccugggaagcau

SEQ ID NO: 1035777 - RNA, 19 nt, Artificial Sequence
  Description of Artificial Sequence: Synthetic oligonucleotide
  Antisense strand to SEQ ID NO: 1035776
augcuucccaggaagguac

SEQ ID NO: 1035778 - RNA, 19 nt, Artificial Sequence
  Description of Artificial Sequence: Synthetic oligonucleotide
  Sense strand starting at position 3535 of SEQ ID NO: 914855
ugggaagcauaucagugaa

SEQ ID NO: 1035779 - RNA, 19 nt, Artificial Sequence
  Description of Artificial Sequence: Synthetic oligonucleotide
  Antisense strand to SEQ ID NO: 1035778
uucacugauaugcuuccca

SEQ ID NO: 1035780 - RNA, 19 nt, Artificial Sequence
  Description of Artificial Sequence: Synthetic oligonucleotide
  Sense strand starting at position 3538 of SEQ ID NO: 914855
gaagcauaucagugaaggu

SEQ ID NO: 1035781 - RNA, 19 nt, Artificial Sequence
  Description of Artificial Sequence: Synthetic oligonucleotide
  Antisense strand to SEQ ID NO: 1035780
accuucacugauaugcuuc

SEQ ID NO: 1035782 - RNA, 19 nt, Artificial Sequence
  Description of Artificial Sequence: Synthetic oligonucleotide
  Sense strand starting at position 3625 of SEQ ID NO: 914855
gcaguuacuuuccggguga

SEQ ID NO: 1035783 - RNA, 19 nt, Artificial Sequence
  Description of Artificial Sequence: Synthetic oligonucleotide
  Antisense strand to SEQ ID NO: 1035782
ucacccggaaaguaacugc

SEQ ID NO: 1035784 - RNA, 19 nt, Artificial Sequence
  Description of Artificial Sequence: Synthetic oligonucleotide
  Sense strand starting at position 3626 of SEQ ID NO: 914855
caguuacuuuccgggugaa

SEQ ID NO: 1035785 - RNA, 19 nt, Artificial Sequence
  Description of Artificial Sequence: Synthetic oligonucleotide
  Antisense strand to SEQ ID NO: 1035784
uucacccggaaaguaacug

SEQ ID NO: 1035786 - RNA, 19 nt, Artificial Sequence
  Description of Artificial Sequence: Synthetic oligonucleotide
  Sense strand starting at position 3627 of SEQ ID NO: 914855
aguuacuuuccgggugaac

SEQ ID NO: 1035787 - RNA, 19 nt, Artificial Sequence
  Description of Artificial Sequence: Synthetic oligonucleotide
  Antisense strand to SEQ ID NO: 1035786
guucacccggaaaguaacu

SEQ ID NO: 1035788 - RNA, 19 nt, Artificial Sequence
  Description of Artificial Sequence: Synthetic oligonucleotide
  Sense strand starting at position 3629 of SEQ ID NO: 914855
uuacuuuccgggugaacau

SEQ ID NO: 1035789 - RNA, 19 nt, Artificial Sequence
  Description of Artificial Sequence: Synthetic oligonucleotide
  Antisense strand to SEQ ID NO: 1035788
auguucacccggaaaguaa

SEQ ID NO: 1035790 - RNA, 19 nt, Artificial Sequence
  Description of Artificial Sequence: Synthetic oligonucleotide
  Sense strand starting at position 3630 of SEQ ID NO: 914855
uacuuuccgggugaacaua

SEQ ID NO: 1035791 - RNA, 19 nt, Artificial Sequence
  Description of Artificial Sequence: Synthetic oligonucleotide
  Antisense strand to SEQ ID NO: 1035790
uauguucacccggaaagua

SEQ ID NO: 1035792 - RNA, 19 nt, Artificial Sequence
  Description of Artificial Sequence: Synthetic oligonucleotide
  Sense strand starting at position 3697 of SEQ ID NO: 914855
gaaggugagcuuugaauaa

SEQ ID NO: 1035793 - RNA, 19 nt, Artificial Sequence
  Description of Artificial Sequence: Synthetic oligonucleotide
  Antisense strand to SEQ ID NO: 1035792
uuauucaaagcucaccuuc

SEQ ID NO: 1035794 - RNA, 19 nt, Artificial Sequence
  Description of Artificial Sequence: Synthetic oligonucleotide
  Sense strand starting at position 3730 of SEQ ID NO: 914855
acuggacagucauaaagaa

SEQ ID NO: 1035795 - RNA, 19 nt, Artificial Sequence
  Description of Artificial Sequence: Synthetic oligonucleotide
  Antisense strand to SEQ ID NO: 1035794
uucuuuaugacuguccagu

SEQ ID NO: 1035796 - RNA, 19 nt, Artificial Sequence
  Description of Artificial Sequence: Synthetic oligonucleotide
  Sense strand starting at position 3802 of SEQ ID NO: 914855
gaaucagaggcucaagugu

SEQ ID NO: 1035797 - RNA, 19 nt, Artificial Sequence
  Description of Artificial Sequence: Synthetic oligonucleotide
  Antisense strand to SEQ ID NO: 1035796
acacuugagccucugauuc

SEQ ID NO: 1035798 - RNA, 19 nt, Artificial Sequence
  Description of Artificial Sequence: Synthetic oligonucleotide
  Sense strand starting at position 3826 of SEQ ID NO: 914855
gugagaugaagccaugcaa

SEQ ID NO: 1035799 - RNA, 19 nt, Artificial Sequence
  Description of Artificial Sequence: Synthetic oligonucleotide
  Antisense strand to SEQ ID NO: 1035798
uugcauggcuucaucucac

SEQ ID NO: 1035800 - RNA, 19 nt, Artificial Sequence
  Description of Artificial Sequence: Synthetic oligonucleotide
  Sense strand starting at position 3860 of SEQ ID NO: 914855
acaggucaauuccucaaga

SEQ ID NO: 1035801 - RNA, 19 nt, Artificial Sequence
  Description of Artificial Sequence: Synthetic oligonucleotide
  Antisense strand to SEQ ID NO: 1035800
ucuugaggaauugaccugu

SEQ ID NO: 1035802 - RNA, 19 nt, Artificial Sequence
  Description of Artificial Sequence: Synthetic oligonucleotide
  Sense strand starting at position 3877 of SEQ ID NO: 914855
gaaccugugaaucgggaaa

SEQ ID NO: 1035803 - RNA, 19 nt, Artificial Sequence
  Description of Artificial Sequence: Synthetic oligonucleotide
  Antisense strand to SEQ ID NO: 1035802
uuucccgauucacagguuc

SEQ ID NO: 1035804 - RNA, 19 nt, Artificial Sequence
  Description of Artificial Sequence: Synthetic oligonucleotide
  Sense strand starting at position 107 of SEQ ID NO: 914856
gcaaauguauccucagcag

SEQ ID NO: 1035805 - RNA, 19 nt, Artificial Sequence
  Description of Artificial Sequence: Synthetic oligonucleotide
  Antisense strand to SEQ ID NO: 1035804
cugcugaggauacauuugc

SEQ ID NO: 1035806 - RNA, 19 nt, Artificial Sequence
  Description of Artificial Sequence: Synthetic oligonucleotide
  Sense strand starting at position 376 of SEQ ID NO: 914856
cagguauaucccugaagga

SEQ ID NO: 1035807 - RNA, 19 nt, Artificial Sequence
  Description of Artificial Sequence: Synthetic oligonucleotide
  Antisense strand to SEQ ID NO: 1035806
uccuucagggauauaccug

SEQ ID NO: 1035808 - RNA, 19 nt, Artificial Sequence
  Description of Artificial Sequence: Synthetic oligonucleotide
  Sense strand starting at position 583 of SEQ ID NO: 914856
agguuuggucccugucacu

SEQ ID NO: 1035809 - RNA, 19 nt, Artificial Sequence
  Description of Artificial Sequence: Synthetic oligonucleotide
  Antisense strand to SEQ ID NO: 1035808
agugacagggaccaaaccu

SEQ ID NO: 1035810 - RNA, 19 nt, Artificial Sequence
  Description of Artificial Sequence: Synthetic oligonucleotide
  Sense strand starting at position 970 of SEQ ID NO: 914856
ggcaaugucacaggugguu

SEQ ID NO: 1035811 - RNA, 19 nt, Artificial Sequence
  Description of Artificial Sequence: Synthetic oligonucleotide
  Antisense strand to SEQ ID NO: 1035810
aaccaccugugacauugcc

SEQ ID NO: 1035812 - RNA, 19 nt, Artificial Sequence
  Description of Artificial Sequence: Synthetic oligonucleotide
  Sense strand starting at position 990 of SEQ ID NO: 914856
ccgucaugccaggaagaga

SEQ ID NO: 1035813 - RNA, 19 nt, Artificial Sequence
  Description of Artificial Sequence: Synthetic oligonucleotide
  Antisense strand to SEQ ID NO: 1035812
ucucuuccuggcaugacgg

SEQ ID NO: 1035814 - RNA, 19 nt, Artificial Sequence
  Description of Artificial Sequence: Synthetic oligonucleotide
  Sense strand starting at position 1007 of SEQ ID NO: 914856
gauggugcauucuagaaac

SEQ ID NO: 1035815 - RNA, 19 nt, Artificial Sequence
  Description of Artificial Sequence: Synthetic oligonucleotide
  Antisense strand to SEQ ID NO: 1035814
guuucuagaaugcaccauc

SEQ ID NO: 1035816 - RNA, 19 nt, Artificial Sequence
  Description of Artificial Sequence: Synthetic oligonucleotide
  Sense strand starting at position 1009 of SEQ ID NO: 914856
uggugcauucuagaaacca

SEQ ID NO: 1035817 - RNA, 19 nt, Artificial Sequence
  Description of Artificial Sequence: Synthetic oligonucleotide
  Antisense strand to SEQ ID NO: 1035816
ugguuucuagaaugcacca

SEQ ID NO: 1035818 - RNA, 19 nt, Artificial Sequence
  Description of Artificial Sequence: Synthetic oligonucleotide
  Sense strand starting at position 1347 of SEQ ID NO: 914856
gaaggauucuugugaaucc

SEQ ID NO: 1035819 - RNA, 19 nt, Artificial Sequence
  Description of Artificial Sequence: Synthetic oligonucleotide
  Antisense strand to SEQ ID NO: 1035818
ggauucacaagaauccuuc

SEQ ID NO: 1035820 - RNA, 19 nt, Artificial Sequence
  Description of Artificial Sequence: Synthetic oligonucleotide
  Sense strand starting at position 1354 of SEQ ID NO: 914856
ucuugugaaucccagaaag

SEQ ID NO: 1035821 - RNA, 19 nt, Artificial Sequence
  Description of Artificial Sequence: Synthetic oligonucleotide
  Antisense strand to SEQ ID NO: 1035820
cuuucugggauucacaaga

SEQ ID NO: 1035822 - RNA, 19 nt, Artificial Sequence
  Description of Artificial Sequence: Synthetic oligonucleotide
  Sense strand starting at position 2381 of SEQ ID NO: 914856
cggccauuggcucacagau

SEQ ID NO: 1035823 - RNA, 19 nt, Artificial Sequence
  Description of Artificial Sequence: Synthetic oligonucleotide
  Antisense strand to SEQ ID NO: 1035822
aucugugagccaauggccg

SEQ ID NO: 1035824 - RNA, 19 nt, Artificial Sequence
  Description of Artificial Sequence: Synthetic oligonucleotide
  Sense strand starting at position 2816 of SEQ ID NO: 914856
augcaaauuugcgguccaa

SEQ ID NO: 1035825 - RNA, 19 nt, Artificial Sequence
  Description of Artificial Sequence: Synthetic oligonucleotide
  Antisense strand to SEQ ID NO: 1035824
uuggaccgcaaauuugcau

SEQ ID NO: 1035826 - RNA, 19 nt, Artificial Sequence
  Description of Artificial Sequence: Synthetic oligonucleotide
  Sense strand starting at position 3471 of SEQ ID NO: 914856
ggguucacgucagcuacua

SEQ ID NO: 1035827 - RNA, 19 nt, Artificial Sequence
  Description of Artificial Sequence: Synthetic oligonucleotide
  Antisense strand to SEQ ID NO: 1035826
uaguagcugacgugaaccc

SEQ ID NO: 1035828 - RNA, 19 nt, Artificial Sequence
  Description of Artificial Sequence: Synthetic oligonucleotide
  Sense strand starting at position 124 of SEQ ID NO: 914857
agcugugugcuuccuguga

SEQ ID NO: 1035829 - RNA, 19 nt, Artificial Sequence
  Description of Artificial Sequence: Synthetic oligonucleotide
  Antisense strand to SEQ ID NO: 1035828
ucacaggaagcacacagcu

SEQ ID NO: 1035830 - RNA, 19 nt, Artificial Sequence
  Description of Artificial Sequence: Synthetic oligonucleotide
  Sense strand starting at position 403 of SEQ ID NO: 914857
ggaguuauuucucaaauug

SEQ ID NO: 1035831 - RNA, 19 nt, Artificial Sequence
  Description of Artificial Sequence: Synthetic oligonucleotide
  Antisense strand to SEQ ID NO: 1035830
caauuugagaaauaacucc

SEQ ID NO: 1035832 - RNA, 19 nt, Artificial Sequence
  Description of Artificial Sequence: Synthetic oligonucleotide
  Sense strand starting at position 417 of SEQ ID NO: 914857
aauuguuagcaguagugaa

SEQ ID NO: 1035833 - RNA, 19 nt, Artificial Sequence
  Description of Artificial Sequence: Synthetic oligonucleotide
  Antisense strand to SEQ ID NO: 1035832
uucacuacugcuaacaauu

SEQ ID NO: 1035834 - RNA, 19 nt, Artificial Sequence
  Description of Artificial Sequence: Synthetic oligonucleotide
  Sense strand starting at position 448 of SEQ ID NO: 914857
uguaguaaccuccauucuu

SEQ ID NO: 1035835 - RNA, 19 nt, Artificial Sequence
  Description of Artificial Sequence: Synthetic oligonucleotide
  Antisense strand to SEQ ID NO: 1035834
aagaauggagguuacuaca

SEQ ID NO: 1035836 - RNA, 19 nt, Artificial Sequence
  Description of Artificial Sequence: Synthetic oligonucleotide
  Sense strand starting at position 620 of SEQ ID NO: 914857
gagagauccuuguccgguu

SEQ ID NO: 1035837 - RNA, 19 nt, Artificial Sequence
  Description of Artificial Sequence: Synthetic oligonucleotide
  Antisense strand to SEQ ID NO: 1035836
aaccggacaaggaucucuc

SEQ ID NO: 1035838 - RNA, 19 nt, Artificial Sequence
  Description of Artificial Sequence: Synthetic oligonucleotide
  Sense strand starting at position 633 of SEQ ID NO: 914857
ccgguuugacauuggacuu

SEQ ID NO: 1035839 - RNA, 19 nt, Artificial Sequence
  Description of Artificial Sequence: Synthetic oligonucleotide
  Antisense strand to SEQ ID NO: 1035838
aaguccaaugucaaaccgg

SEQ ID NO: 1035840 - RNA, 19 nt, Artificial Sequence
  Description of Artificial Sequence: Synthetic oligonucleotide
  Sense strand starting at position 699 of SEQ ID NO: 914857
cuugauauuuccuuggugu

SEQ ID NO: 1035841 - RNA, 19 nt, Artificial Sequence
  Description of Artificial Sequence: Synthetic oligonucleotide
  Antisense strand to SEQ ID NO: 1035840
acaccaaggaaauaucaag

SEQ ID NO: 1035842 - RNA, 19 nt, Artificial Sequence
  Description of Artificial Sequence: Synthetic oligonucleotide
  Sense strand starting at position 700 of SEQ ID NO: 914857
uugauauuuccuuggugug

SEQ ID NO: 1035843 - RNA, 19 nt, Artificial Sequence
  Description of Artificial Sequence: Synthetic oligonucleotide
  Antisense strand to SEQ ID NO: 1035842
cacaccaaggaaauaucaa

SEQ ID NO: 1035844 - RNA, 19 nt, Artificial Sequence
  Description of Artificial Sequence: Synthetic oligonucleotide
  Sense strand starting at position 770 of SEQ ID NO: 914857
guaguauguuuacugaaau

SEQ ID NO: 1035845 - RNA, 19 nt, Artificial Sequence
  Description of Artificial Sequence: Synthetic oligonucleotide
  Antisense strand to SEQ ID NO: 1035844
auuucaguaaacauacuac

SEQ ID NO: 1035846 - RNA, 19 nt, Artificial Sequence
  Description of Artificial Sequence: Synthetic oligonucleotide
  Sense strand starting at position 856 of SEQ ID NO: 914857
aaguuaagcugugccauuu

SEQ ID NO: 1035847 - RNA, 19 nt, Artificial Sequence
  Description of Artificial Sequence: Synthetic oligonucleotide
  Antisense strand to SEQ ID NO: 1035846
aaauggcacagcuuaacuu

SEQ ID NO: 1035848 - RNA, 19 nt, Artificial Sequence
  Description of Artificial Sequence: Synthetic oligonucleotide
  Sense strand starting at position 1240 of SEQ ID NO: 914857
ucccucugccucuggaaua

SEQ ID NO: 1035849 - RNA, 19 nt, Artificial Sequence
  Description of Artificial Sequence: Synthetic oligonucleotide
  Antisense strand to SEQ ID NO: 1035848
uauuccagaggcagaggga

SEQ ID NO: 1035850 - RNA, 19 nt, Artificial Sequence
  Description of Artificial Sequence: Synthetic oligonucleotide
  Sense strand starting at position 1251 of SEQ ID NO: 914857
cuggaauaaugguuggcaa

SEQ ID NO: 1035851 - RNA, 19 nt, Artificial Sequence
  Description of Artificial Sequence: Synthetic oligonucleotide
  Antisense strand to SEQ ID NO: 1035850
uugccaaccauuauuccag

SEQ ID NO: 1035852 - RNA, 19 nt, Artificial Sequence
  Description of Artificial Sequence: Synthetic oligonucleotide
  Sense strand starting at position 1252 of SEQ ID NO: 914857
uggaauaaugguuggcaau

SEQ ID NO: 1035853 - RNA, 19 nt, Artificial Sequence
  Description of Artificial Sequence: Synthetic oligonucleotide
  Antisense strand to SEQ ID NO: 1035852
auugccaaccauuauucca

SEQ ID NO: 1035854 - RNA, 19 nt, Artificial Sequence
  Description of Artificial Sequence: Synthetic oligonucleotide
  Sense strand starting at position 1253 of SEQ ID NO: 914857
ggaauaaugguuggcaauc

SEQ ID NO: 1035855 - RNA, 19 nt, Artificial Sequence
  Description of Artificial Sequence: Synthetic oligonucleotide
  Antisense strand to SEQ ID NO: 1035854
gauugccaaccauuauucc

SEQ ID NO: 1035856 - RNA, 19 nt, Artificial Sequence
  Description of Artificial Sequence: Synthetic oligonucleotide
  Sense strand starting at position 1405 of SEQ ID NO: 914857
aaaguuagcuuggccuaaa

SEQ ID NO: 1035857 - RNA, 19 nt, Artificial Sequence
  Description of Artificial Sequence: Synthetic oligonucleotide
  Antisense strand to SEQ ID NO: 1035856
uuuaggccaagcuaacuuu

SEQ ID NO: 1035858 - RNA, 19 nt, Artificial Sequence
  Description of Artificial Sequence: Synthetic oligonucleotide
  Sense strand starting at position 1416 of SEQ ID NO: 914857
ggccuaaacccaggaguga

SEQ ID NO: 1035859 - RNA, 19 nt, Artificial Sequence
  Description of Artificial Sequence: Synthetic oligonucleotide
  Antisense strand to SEQ ID NO: 1035858
ucacuccuggguuuaggcc

SEQ ID NO: 1035860 - RNA, 19 nt, Artificial Sequence
  Description of Artificial Sequence: Synthetic oligonucleotide
  Sense strand starting at position 1566 of SEQ ID NO: 914857
ucuuuauaaggguacuacu

SEQ ID NO: 1035861 - RNA, 19 nt, Artificial Sequence
  Description of Artificial Sequence: Synthetic oligonucleotide
  Antisense strand to SEQ ID NO: 1035860
aguaguacccuuauaaaga

SEQ ID NO: 1035862 - RNA, 19 nt, Artificial Sequence
  Description of Artificial Sequence: Synthetic oligonucleotide
  Sense strand starting at position 1821 of SEQ ID NO: 914857
gagcguuugccagaauaau

SEQ ID NO: 1035863 - RNA, 19 nt, Artificial Sequence
  Description of Artificial Sequence: Synthetic oligonucleotide
  Antisense strand to SEQ ID NO: 1035862
auuauucuggcaaacgcuc

SEQ ID NO: 1035864 - RNA, 19 nt, Artificial Sequence
  Description of Artificial Sequence: Synthetic oligonucleotide
  Sense strand starting at position 1832 of SEQ ID NO: 914857
agaauaauggccugcacuu

SEQ ID NO: 1035865 - RNA, 19 nt, Artificial Sequence
  Description of Artificial Sequence: Synthetic oligonucleotide
  Antisense strand to SEQ ID NO: 1035864
aagugcaggccauuauucu

SEQ ID NO: 1035866 - RNA, 19 nt, Artificial Sequence
  Description of Artificial Sequence: Synthetic oligonucleotide
  Sense strand starting at position 1859 of SEQ ID NO: 914857
gcuggaauuaccugacagu

SEQ ID NO: 1035867 - RNA, 19 nt, Artificial Sequence
  Description of Artificial Sequence: Synthetic oligonucleotide
  Antisense strand to SEQ ID NO: 1035866
acugucagguaauuccagc

SEQ ID NO: 1035868 - RNA, 19 nt, Artificial Sequence
  Description of Artificial Sequence: Synthetic oligonucleotide
  Sense strand starting at position 2064 of SEQ ID NO: 914857
uggugagggugucuuggaa

SEQ ID NO: 1035869 - RNA, 19 nt, Artificial Sequence
  Description of Artificial Sequence: Synthetic oligonucleotide
  Antisense strand to SEQ ID NO: 1035868
uuccaagacacccucacca

SEQ ID NO: 1035870 - RNA, 19 nt, Artificial Sequence
  Description of Artificial Sequence: Synthetic oligonucleotide
  Sense strand starting at position 2077 of SEQ ID NO: 914857
uuggaaagaugagaggauu

SEQ ID NO: 1035871 - RNA, 19 nt, Artificial Sequence
  Description of Artificial Sequence: Synthetic oligonucleotide
  Antisense strand to SEQ ID NO: 1035870
aauccucucaucuuuccaa

SEQ ID NO: 1035872 - RNA, 19 nt, Artificial Sequence
  Description of Artificial Sequence: Synthetic oligonucleotide
  Sense strand starting at position 2096 of SEQ ID NO: 914857
ugacaauugugagccggaa

SEQ ID NO: 1035873 - RNA, 19 nt, Artificial Sequence
  Description of Artificial Sequence: Synthetic oligonucleotide
  Antisense strand to SEQ ID NO: 1035872
uuccggcucacaauuguca

SEQ ID NO: 1035874 - RNA, 19 nt, Artificial Sequence
  Description of Artificial Sequence: Synthetic oligonucleotide
  Sense strand starting at position 2098 of SEQ ID NO: 914857
acaauugugagccggaaag

SEQ ID NO: 1035875 - RNA, 19 nt, Artificial Sequence
  Description of Artificial Sequence: Synthetic oligonucleotide
  Antisense strand to SEQ ID NO: 1035874
cuuuccggcucacaauugu

SEQ ID NO: 1035876 - RNA, 19 nt, Artificial Sequence
  Description of Artificial Sequence: Synthetic oligonucleotide
  Sense strand starting at position 2100 of SEQ ID NO: 914857
aauugugagccggaaagcu

SEQ ID NO: 1035877 - RNA, 19 nt, Artificial Sequence
  Description of Artificial Sequence: Synthetic oligonucleotide
  Antisense strand to SEQ ID NO: 1035876
agcuuuccggcucacaauu

SEQ ID NO: 1035878 - RNA, 19 nt, Artificial Sequence
  Description of Artificial Sequence: Synthetic oligonucleotide
  Sense strand starting at position 2108 of SEQ ID NO: 914857
gccggaaagcucgcguguu

SEQ ID NO: 1035879 - RNA, 19 nt, Artificial Sequence
  Description of Artificial Sequence: Synthetic oligonucleotide
  Antisense strand to SEQ ID NO: 1035878
aacacgcgagcuuuccggc

SEQ ID NO: 1035880 - RNA, 19 nt, Artificial Sequence
  Description of Artificial Sequence: Synthetic oligonucleotide
  Sense strand starting at position 2338 of SEQ ID NO: 914857
aggagagccuauccuaaag

SEQ ID NO: 1035881 - RNA, 19 nt, Artificial Sequence
  Description of Artificial Sequence: Synthetic oligonucleotide
  Antisense strand to SEQ ID NO: 1035880
cuuuaggauaggcucuccu

SEQ ID NO: 1035882 - RNA, 19 nt, Artificial Sequence
  Description of Artificial Sequence: Synthetic oligonucleotide
  Sense strand starting at position 2446 of SEQ ID NO: 914857
ggaaguuaugguggaguuu

SEQ ID NO: 1035883 - RNA, 19 nt, Artificial Sequence
  Description of Artificial Sequence: Synthetic oligonucleotide
  Antisense strand to SEQ ID NO: 1035882
aaacuccaccauaacuucc

SEQ ID NO: 1035884 - RNA, 19 nt, Artificial Sequence
  Description of Artificial Sequence: Synthetic oligonucleotide
  Sense strand starting at position 2477 of SEQ ID NO: 914857
aggcaugcuggagaaucau

SEQ ID NO: 1035885 - RNA, 19 nt, Artificial Sequence
  Description of Artificial Sequence: Synthetic oligonucleotide
  Antisense strand to SEQ ID NO: 1035884
augauucuccagcaugccu

SEQ ID NO: 1035886 - RNA, 19 nt, Artificial Sequence
  Description of Artificial Sequence: Synthetic oligonucleotide
  Sense strand starting at position 2483 of SEQ ID NO: 914857
gcuggagaaucaucaguau

SEQ ID NO: 1035887 - RNA, 19 nt, Artificial Sequence
  Description of Artificial Sequence: Synthetic oligonucleotide
  Antisense strand to SEQ ID NO: 1035886
auacugaugauucuccagc

SEQ ID NO: 1035888 - RNA, 19 nt, Artificial Sequence
  Description of Artificial Sequence: Synthetic oligonucleotide
  Sense strand starting at position 2510 of SEQ ID NO: 914857
guauguaucuugcuauuuc

SEQ ID NO: 1035889 - RNA, 19 nt, Artificial Sequence
  Description of Artificial Sequence: Synthetic oligonucleotide
  Antisense strand to SEQ ID NO: 1035888
gaaauagcaagauacauac

SEQ ID NO: 1035890 - RNA, 19 nt, Artificial Sequence
  Description of Artificial Sequence: Synthetic oligonucleotide
  Sense strand starting at position 2551 of SEQ ID NO: 914857
gcuugcauuuauuccuaga

SEQ ID NO: 1035891 - RNA, 19 nt, Artificial Sequence
  Description of Artificial Sequence: Synthetic oligonucleotide
  Antisense strand to SEQ ID NO: 1035890
ucuaggaauaaaugcaagc

SEQ ID NO: 1035892 - RNA, 19 nt, Artificial Sequence
  Description of Artificial Sequence: Synthetic oligonucleotide
  Sense strand starting at position 2650 of SEQ ID NO: 914857
ucauguagccauuacuaag

SEQ ID NO: 1035893 - RNA, 19 nt, Artificial Sequence
  Description of Artificial Sequence: Synthetic oligonucleotide
  Antisense strand to SEQ ID NO: 1035892
cuuaguaauggcuacauga

SEQ ID NO: 1035894 - RNA, 19 nt, Artificial Sequence
  Description of Artificial Sequence: Synthetic oligonucleotide
  Sense strand starting at position 2660 of SEQ ID NO: 914857
auuacuaagcuugggaaau

SEQ ID NO: 1035895 - RNA, 19 nt, Artificial Sequence
  Description of Artificial Sequence: Synthetic oligonucleotide
  Antisense strand to SEQ ID NO: 1035894
auuucccaagcuuaguaau

SEQ ID NO: 1035896 - RNA, 19 nt, Artificial Sequence
  Description of Artificial Sequence: Synthetic oligonucleotide
  Sense strand starting at position 2785 of SEQ ID NO: 914857
uuacuaccuguguagguau

SEQ ID NO: 1035897 - RNA, 19 nt, Artificial Sequence
  Description of Artificial Sequence: Synthetic oligonucleotide
  Antisense strand to SEQ ID NO: 1035896
auaccuacacagguaguaa

SEQ ID NO: 1035898 - RNA, 19 nt, Artificial Sequence
  Description of Artificial Sequence: Synthetic oligonucleotide
  Sense strand starting at position 2787 of SEQ ID NO: 914857
acuaccuguguagguauaa

SEQ ID NO: 1035899 - RNA, 19 nt, Artificial Sequence
  Description of Artificial Sequence: Synthetic oligonucleotide
  Antisense strand to SEQ ID NO: 1035898
uuauaccuacacagguagu

SEQ ID NO: 1035900 - RNA, 19 nt, Artificial Sequence
  Description of Artificial Sequence: Synthetic oligonucleotide
  Sense strand starting at position 2788 of SEQ ID NO: 914857
cuaccuguguagguauaaa

SEQ ID NO: 1035901 - RNA, 19 nt, Artificial Sequence
  Description of Artificial Sequence: Synthetic oligonucleotide
  Antisense strand to SEQ ID NO: 1035900
uuuauaccuacacagguag

SEQ ID NO: 1035902 - RNA, 19 nt, Artificial Sequence
  Description of Artificial Sequence: Synthetic oligonucleotide
  Sense strand starting at position 3320 of SEQ ID NO: 914857
ugacgaaacuuauauuucu

SEQ ID NO: 1035903 - RNA, 19 nt, Artificial Sequence
  Description of Artificial Sequence: Synthetic oligonucleotide
  Antisense strand to SEQ ID NO: 1035902
agaaauauaaguuucguca

SEQ ID NO: 1035904 - RNA, 19 nt, Artificial Sequence
  Description of Artificial Sequence: Synthetic oligonucleotide
  Sense strand starting at position 3730 of SEQ ID NO: 914857
gggagaauccuuugagccu

SEQ ID NO: 1035905 - RNA, 19 nt, Artificial Sequence
  Description of Artificial Sequence: Synthetic oligonucleotide
  Antisense strand to SEQ ID NO: 1035904
aggcucaaaggauucuccc

SEQ ID NO: 1035906 - RNA, 19 nt, Artificial Sequence
  Description of Artificial Sequence: Synthetic oligonucleotide
  Sense strand starting at position 3763 of SEQ ID NO: 914857
acagcaagccgugauuaug

SEQ ID NO: 1035907 - RNA, 19 nt, Artificial Sequence
  Description of Artificial Sequence: Synthetic oligonucleotide
  Antisense strand to SEQ ID NO: 1035906
cauaaucacggcuugcugu

SEQ ID NO: 1035908 - RNA, 19 nt, Artificial Sequence
  Description of Artificial Sequence: Synthetic oligonucleotide
  Sense strand starting at position 462 of SEQ ID NO: 914858
guacaaaucugauccuguc

SEQ ID NO: 1035909 - RNA, 19 nt, Artificial Sequence
  Description of Artificial Sequence: Synthetic oligonucleotide
  Antisense strand to SEQ ID NO: 1035908
gacaggaucagauuuguac

SEQ ID NO: 1035910 - RNA, 19 nt, Artificial Sequence
  Description of Artificial Sequence: Synthetic oligonucleotide
  Sense strand starting at position 475 of SEQ ID NO: 914858
ccugucacucccugcauua

SEQ ID NO: 1035911 - RNA, 19 nt, Artificial Sequence
  Description of Artificial Sequence: Synthetic oligonucleotide
  Antisense strand to SEQ ID NO: 1035910
uaaugcagggagugacagg

SEQ ID NO: 1035912 - RNA, 19 nt, Artificial Sequence
  Description of Artificial Sequence: Synthetic oligonucleotide
  Sense strand starting at position 718 of SEQ ID NO: 914858
gaugaauuccucugggagu

SEQ ID NO: 1035913 - RNA, 19 nt, Artificial Sequence
  Description of Artificial Sequence: Synthetic oligonucleotide
  Antisense strand to SEQ ID NO: 1035912
acucccagaggaauucauc

SEQ ID NO: 1035914 - RNA, 19 nt, Artificial Sequence
  Description of Artificial Sequence: Synthetic oligonucleotide
  Sense strand starting at position 719 of SEQ ID NO: 914858
augaauuccucugggaguc

SEQ ID NO: 1035915 - RNA, 19 nt, Artificial Sequence
  Description of Artificial Sequence: Synthetic oligonucleotide
  Antisense strand to SEQ ID NO: 1035914
gacucccagaggaauucau

SEQ ID NO: 1035916 - RNA, 19 nt, Artificial Sequence
  Description of Artificial Sequence: Synthetic oligonucleotide
  Sense strand starting at position 746 of SEQ ID NO: 914858
uggguugucucacugugau

SEQ ID NO: 1035917 - RNA, 19 nt, Artificial Sequence
  Description of Artificial Sequence: Synthetic oligonucleotide
  Antisense strand to SEQ ID NO: 1035916
aucacagugagacaaccca

SEQ ID NO: 1035918 - RNA, 19 nt, Artificial Sequence
  Description of Artificial Sequence: Synthetic oligonucleotide
  Sense strand starting at position 752 of SEQ ID NO: 914858
gucucacugugaucccaga

SEQ ID NO: 1035919 - RNA, 19 nt, Artificial Sequence
  Description of Artificial Sequence: Synthetic oligonucleotide
  Antisense strand to SEQ ID NO: 1035918
ucugggaucacagugagac

SEQ ID NO: 1035920 - RNA, 19 nt, Artificial Sequence
  Description of Artificial Sequence: Synthetic oligonucleotide
  Sense strand starting at position 802 of SEQ ID NO: 914858
ggcaguucuucccuugcaa

SEQ ID NO: 1035921 - RNA, 19 nt, Artificial Sequence
  Description of Artificial Sequence: Synthetic oligonucleotide
  Antisense strand to SEQ ID NO: 1035920
uugcaagggaagaacugcc

SEQ ID NO: 1035922 - RNA, 19 nt, Artificial Sequence
  Description of Artificial Sequence: Synthetic oligonucleotide
  Sense strand starting at position 853 of SEQ ID NO: 914858
ggccaagugcuguguuuca

SEQ ID NO: 1035923 - RNA, 19 nt, Artificial Sequence
  Description of Artificial Sequence: Synthetic oligonucleotide
  Antisense strand to SEQ ID NO: 1035922
ugaaacacagcacuuggcc

SEQ ID NO: 1035924 - RNA, 19 nt, Artificial Sequence
  Description of Artificial Sequence: Synthetic oligonucleotide
  Sense strand starting at position 1028 of SEQ ID NO: 914858
ggaauauccucugauuuac

SEQ ID NO: 1035925 - RNA, 19 nt, Artificial Sequence
  Description of Artificial Sequence: Synthetic oligonucleotide
  Antisense strand to SEQ ID NO: 1035924
guaaaucagaggauauucc

SEQ ID NO: 1035926 - RNA, 19 nt, Artificial Sequence
  Description of Artificial Sequence: Synthetic oligonucleotide
  Sense strand starting at position 1170 of SEQ ID NO: 914858
gcauguggcuuugucaaua

SEQ ID NO: 1035927 - RNA, 19 nt, Artificial Sequence
  Description of Artificial Sequence: Synthetic oligonucleotide
  Antisense strand to SEQ ID NO: 1035926
uauugacaaagccacaugc

SEQ ID NO: 1035928 - RNA, 19 nt, Artificial Sequence
  Description of Artificial Sequence: Synthetic oligonucleotide
  Sense strand starting at position 1175 of SEQ ID NO: 914858
uggcuuugucaauagccaa

SEQ ID NO: 1035929 - RNA, 19 nt, Artificial Sequence
  Description of Artificial Sequence: Synthetic oligonucleotide
  Antisense strand to SEQ ID NO: 1035928
uuggcuauugacaaagcca

SEQ ID NO: 1035930 - RNA, 19 nt, Artificial Sequence
  Description of Artificial Sequence: Synthetic oligonucleotide
  Sense strand starting at position 1200 of SEQ ID NO: 914858
ugacgugaucauggcccua

SEQ ID NO: 1035931 - RNA, 19 nt, Artificial Sequence
  Description of Artificial Sequence: Synthetic oligonucleotide
  Antisense strand to SEQ ID NO: 1035930
uagggccaugaucacguca

SEQ ID NO: 1035932 - RNA, 19 nt, Artificial Sequence
  Description of Artificial Sequence: Synthetic oligonucleotide
  Sense strand starting at position 1202 of SEQ ID NO: 914858
acgugaucauggcccuauu

SEQ ID NO: 1035933 - RNA, 19 nt, Artificial Sequence
  Description of Artificial Sequence: Synthetic oligonucleotide
  Antisense strand to SEQ ID NO: 1035932
aauagggccaugaucacgu

SEQ ID NO: 1035934 - RNA, 19 nt, Artificial Sequence
  Description of Artificial Sequence: Synthetic oligonucleotide
  Sense strand starting at position 1205 of SEQ ID NO: 914858
ugaucauggcccuauuaga

SEQ ID NO: 1035935 - RNA, 19 nt, Artificial Sequence
  Description of Artificial Sequence: Synthetic oligonucleotide
  Antisense strand to SEQ ID NO: 1035934
ucuaauagggccaugauca

SEQ ID NO: 1035936 - RNA, 19 nt, Artificial Sequence
  Description of Artificial Sequence: Synthetic oligonucleotide
  Sense strand starting at position 2065 of SEQ ID NO: 914858
cguggcuugcagugagacu

SEQ ID NO: 1035937 - RNA, 19 nt, Artificial Sequence
  Description of Artificial Sequence: Synthetic oligonucleotide
  Antisense strand to SEQ ID NO: 1035936
agucucacugcaagccacg

SEQ ID NO: 1035938 - RNA, 19 nt, Artificial Sequence
  Description of Artificial Sequence: Synthetic oligonucleotide
  Sense strand starting at position 2102 of SEQ ID NO: 914858
aauggacagucugucuauu

SEQ ID NO: 1035939 - RNA, 19 nt, Artificial Sequence
  Description of Artificial Sequence: Synthetic oligonucleotide
  Antisense strand to SEQ ID NO: 1035938
aauagacagacuguccauu

SEQ ID NO: 1035940 - RNA, 19 nt, Artificial Sequence
  Description of Artificial Sequence: Synthetic oligonucleotide
  Sense strand starting at position 2135 of SEQ ID NO: 914858
guuguuaggcccugagaag

SEQ ID NO: 1035941 - RNA, 19 nt, Artificial Sequence
  Description of Artificial Sequence: Synthetic oligonucleotide
  Antisense strand to SEQ ID NO: 1035940
cuucucagggccuaacaac

SEQ ID NO: 1035942 - RNA, 19 nt, Artificial Sequence
  Description of Artificial Sequence: Synthetic oligonucleotide
  Sense strand starting at position 2452 of SEQ ID NO: 914858
cuugaaucccguuauuaaa

SEQ ID NO: 1035943 - RNA, 19 nt, Artificial Sequence
  Description of Artificial Sequence: Synthetic oligonucleotide
  Antisense strand to SEQ ID NO: 1035942
uuuaauaacgggauucaag

SEQ ID NO: 1035944 - RNA, 19 nt, Artificial Sequence
  Description of Artificial Sequence: Synthetic oligonucleotide
  Sense strand starting at position 2454 of SEQ ID NO: 914858
ugaaucccguuauuaaagu

SEQ ID NO: 1035945 - RNA, 19 nt, Artificial Sequence
  Description of Artificial Sequence: Synthetic oligonucleotide
  Antisense strand to SEQ ID NO: 1035944
acuuuaauaacgggauuca

SEQ ID NO: 1035946 - RNA, 19 nt, Artificial Sequence
  Description of Artificial Sequence: Synthetic oligonucleotide
  Sense strand starting at position 2503 of SEQ ID NO: 914858
cggaguucccaguagugaa

SEQ ID NO: 1035947 - RNA, 19 nt, Artificial Sequence
  Description of Artificial Sequence: Synthetic oligonucleotide
  Antisense strand to SEQ ID NO: 1035946
uucacuacugggaacuccg

SEQ ID NO: 1035948 - RNA, 19 nt, Artificial Sequence
  Description of Artificial Sequence: Synthetic oligonucleotide
  Sense strand starting at position 2540 of SEQ ID NO: 914858
auugacauugacugacauu

SEQ ID NO: 1035949 - RNA, 19 nt, Artificial Sequence
  Description of Artificial Sequence: Synthetic oligonucleotide
  Antisense strand to SEQ ID NO: 1035948
aaugucagucaaugucaau

SEQ ID NO: 1035950 - RNA, 19 nt, Artificial Sequence
  Description of Artificial Sequence: Synthetic oligonucleotide
  Sense strand starting at position 2586 of SEQ ID NO: 914858
aguccuagggagugaaaga

SEQ ID NO: 1035951 - RNA, 19 nt, Artificial Sequence
  Description of Artificial Sequence: Synthetic oligonucleotide
  Antisense strand to SEQ ID NO: 1035950
ucuuucacucccuaggacu

SEQ ID NO: 1035952 - RNA, 19 nt, Artificial Sequence
  Description of Artificial Sequence: Synthetic oligonucleotide
  Sense strand starting at position 2664 of SEQ ID NO: 914858
aaauguaaagucugaggau

SEQ ID NO: 1035953 - RNA, 19 nt, Artificial Sequence
  Description of Artificial Sequence: Synthetic oligonucleotide
  Antisense strand to SEQ ID NO: 1035952
auccucagacuuuacauuu

SEQ ID NO: 1035954 - RNA, 19 nt, Artificial Sequence
  Description of Artificial Sequence: Synthetic oligonucleotide
  Sense strand starting at position 2665 of SEQ ID NO: 914858
aauguaaagucugaggauc

SEQ ID NO: 1035955 - RNA, 19 nt, Artificial Sequence
  Description of Artificial Sequence: Synthetic oligonucleotide
  Antisense strand to SEQ ID NO: 1035954
gauccucagacuuuacauu

SEQ ID NO: 1035956 - RNA, 19 nt, Artificial Sequence
  Description of Artificial Sequence: Synthetic oligonucleotide
  Sense strand starting at position 2667 of SEQ ID NO: 914858
uguaaagucugaggaucaa

SEQ ID NO: 1035957 - RNA, 19 nt, Artificial Sequence
  Description of Artificial Sequence: Synthetic oligonucleotide
  Antisense strand to SEQ ID NO: 1035956
uugauccucagacuuuaca

SEQ ID NO: 1035958 - RNA, 19 nt, Artificial Sequence
  Description of Artificial Sequence: Synthetic oligonucleotide
  Sense strand starting at position 2696 of SEQ ID NO: 914858
uuaagaguauacuugagua

SEQ ID NO: 1035959 - RNA, 19 nt, Artificial Sequence
  Description of Artificial Sequence: Synthetic oligonucleotide
  Antisense strand to SEQ ID NO: 1035958
uacucaaguauacucuuaa

SEQ ID NO: 1035960 - RNA, 19 nt, Artificial Sequence
  Description of Artificial Sequence: Synthetic oligonucleotide
  Sense strand starting at position 2700 of SEQ ID NO: 914858
gaguauacuugaguaacag

SEQ ID NO: 1035961 - RNA, 19 nt, Artificial Sequence
  Description of Artificial Sequence: Synthetic oligonucleotide
  Antisense strand to SEQ ID NO: 1035960
cuguuacucaaguauacuc

SEQ ID NO: 1035962 - RNA, 19 nt, Artificial Sequence
  Description of Artificial Sequence: Synthetic oligonucleotide
  Sense strand starting at position 2752 of SEQ ID NO: 914858
gagguugaguguucccaug

SEQ ID NO: 1035963 - RNA, 19 nt, Artificial Sequence
  Description of Artificial Sequence: Synthetic oligonucleotide
  Antisense strand to SEQ ID NO: 1035962
caugggaacacucaaccuc

SEQ ID NO: 1035964 - RNA, 19 nt, Artificial Sequence
  Description of Artificial Sequence: Synthetic oligonucleotide
  Sense strand starting at position 2754 of SEQ ID NO: 914858
gguugaguguucccaugac

SEQ ID NO: 1035965 - RNA, 19 nt, Artificial Sequence
  Description of Artificial Sequence: Synthetic oligonucleotide
  Antisense strand to SEQ ID NO: 1035964
gucaugggaacacucaacc

SEQ ID NO: 1035966 - RNA, 19 nt, Artificial Sequence
  Description of Artificial Sequence: Synthetic oligonucleotide
  Sense strand starting at position 2758 of SEQ ID NO: 914858
gaguguucccaugacaaug

SEQ ID NO: 1035967 - RNA, 19 nt, Artificial Sequence
  Description of Artificial Sequence: Synthetic oligonucleotide
  Antisense strand to SEQ ID NO: 1035966
cauugucaugggaacacuc

SEQ ID NO: 1035968 - RNA, 19 nt, Artificial Sequence
  Description of Artificial Sequence: Synthetic oligonucleotide
  Sense strand starting at position 3230 of SEQ ID NO: 914858
uuugguuuccuuuguugaa

SEQ ID NO: 1035969 - RNA, 19 nt, Artificial Sequence
  Description of Artificial Sequence: Synthetic oligonucleotide
  Antisense strand to SEQ ID NO: 1035968
uucaacaaaggaaaccaaa

SEQ ID NO: 1035970 - RNA, 19 nt, Artificial Sequence
  Description of Artificial Sequence: Synthetic oligonucleotide
  Sense strand starting at position 3231 of SEQ ID NO: 914858
uugguuuccuuuguugaaa

SEQ ID NO: 1035971 - RNA, 19 nt, Artificial Sequence
  Description of Artificial Sequence: Synthetic oligonucleotide
  Antisense strand to SEQ ID NO: 1035970
uuucaacaaaggaaaccaa

SEQ ID NO: 1035972 - RNA, 19 nt, Artificial Sequence
  Description of Artificial Sequence: Synthetic oligonucleotide
  Sense strand starting at position 3281 of SEQ ID NO: 914858
gcugcuugugguuggcuaa

SEQ ID NO: 1035973 - RNA, 19 nt, Artificial Sequence
  Description of Artificial Sequence: Synthetic oligonucleotide
  Antisense strand to SEQ ID NO: 1035972
uuagccaaccacaagcagc

SEQ ID NO: 1035974 - RNA, 19 nt, Artificial Sequence
  Description of Artificial Sequence: Synthetic oligonucleotide
  Sense strand starting at position 3295 of SEQ ID NO: 914858
gcuaauguuaaguuucguu

SEQ ID NO: 1035975 - RNA, 19 nt, Artificial Sequence
  Description of Artificial Sequence: Synthetic oligonucleotide
  Antisense strand to SEQ ID NO: 1035974
aacgaaacuuaacauuagc

SEQ ID NO: 1035976 - RNA, 19 nt, Artificial Sequence
  Description of Artificial Sequence: Synthetic oligonucleotide
  Sense strand starting at position 3300 of SEQ ID NO: 914858
uguuaaguuucguuucugu

SEQ ID NO: 1035977 - RNA, 19 nt, Artificial Sequence
  Description of Artificial Sequence: Synthetic oligonucleotide
  Antisense strand to SEQ ID NO: 1035976
acagaaacgaaacuuaaca

SEQ ID NO: 1035978 - RNA, 19 nt, Artificial Sequence
  Description of Artificial Sequence: Synthetic oligonucleotide
  Sense strand starting at position 3303 of SEQ ID NO: 914858
uaaguuucguuucugucua

SEQ ID NO: 1035979 - RNA, 19 nt, Artificial Sequence
  Description of Artificial Sequence: Synthetic oligonucleotide
  Antisense strand to SEQ ID NO: 1035978
uagacagaaacgaaacuua

SEQ ID NO: 1035980 - RNA, 19 nt, Artificial Sequence
  Description of Artificial Sequence: Synthetic oligonucleotide
  Sense strand starting at position 3307 of SEQ ID NO: 914858
uuucguuucugucuaacau

SEQ ID NO: 1035981 - RNA, 19 nt, Artificial Sequence
  Description of Artificial Sequence: Synthetic oligonucleotide
  Antisense strand to SEQ ID NO: 1035980
auguuagacagaaacgaaa

SEQ ID NO: 1035982 - RNA, 19 nt, Artificial Sequence
  Description of Artificial Sequence: Synthetic oligonucleotide
  Sense strand starting at position 3308 of SEQ ID NO: 914858
uucguuucugucuaacauu

SEQ ID NO: 1035983 - RNA, 19 nt, Artificial Sequence
  Description of Artificial Sequence: Synthetic oligonucleotide
  Antisense strand to SEQ ID NO: 1035982
aauguuagacagaaacgaa

SEQ ID NO: 1035984 - RNA, 19 nt, Artificial Sequence
  Description of Artificial Sequence: Synthetic oligonucleotide
  Sense strand starting at position 3646 of SEQ ID NO: 914858
gggcaacaagaguguaauc

SEQ ID NO: 1035985 - RNA, 19 nt, Artificial Sequence
  Description of Artificial Sequence: Synthetic oligonucleotide
  Antisense strand to SEQ ID NO: 1035984
gauuacacucuuguugccc

SEQ ID NO: 1035986 - RNA, 19 nt, Artificial Sequence
  Description of Artificial Sequence: Synthetic oligonucleotide
  Sense strand starting at position 3651 of SEQ ID NO: 914858
acaagaguguaaucccauc

SEQ ID NO: 1035987 - RNA, 19 nt, Artificial Sequence
  Description of Artificial Sequence: Synthetic oligonucleotide
  Antisense strand to SEQ ID NO: 1035986
gaugggauuacacucuugu

SEQ ID NO: 1035988 - RNA, 19 nt, Artificial Sequence
  Description of Artificial Sequence: Synthetic oligonucleotide
  Sense strand starting at position 159 of SEQ ID NO: 914859
ccaggucucucagcuggaa

SEQ ID NO: 1035989 - RNA, 19 nt, Artificial Sequence
  Description of Artificial Sequence: Synthetic oligonucleotide
  Antisense strand to SEQ ID NO: 1035988
uuccagcugagagaccugg

SEQ ID NO: 1035990 - RNA, 19 nt, Artificial Sequence
  Description of Artificial Sequence: Synthetic oligonucleotide
  Sense strand starting at position 161 of SEQ ID NO: 914859
aggucucucagcuggaauu

SEQ ID NO: 1035991 - RNA, 19 nt, Artificial Sequence
  Description of Artificial Sequence: Synthetic oligonucleotide
  Antisense strand to SEQ ID NO: 1035990
aauuccagcugagagaccu

SEQ ID NO: 1035992 - RNA, 19 nt, Artificial Sequence
  Description of Artificial Sequence: Synthetic oligonucleotide
  Sense strand starting at position 192 of SEQ ID NO: 914859
ucugcaucugcggagaauu

SEQ ID NO: 1035993 - RNA, 19 nt, Artificial Sequence
  Description of Artificial Sequence: Synthetic oligonucleotide
  Antisense strand to SEQ ID NO: 1035992
aauucuccgcagaugcaga

SEQ ID NO: 1035994 - RNA, 19 nt, Artificial Sequence
  Description of Artificial Sequence: Synthetic oligonucleotide
  Sense strand starting at position 335 of SEQ ID NO: 914859
uuucucuccuguuuaguca

SEQ ID NO: 1035995 - RNA, 19 nt, Artificial Sequence
  Description of Artificial Sequence: Synthetic oligonucleotide
  Antisense strand to SEQ ID NO: 1035994
ugacuaaacaggagagaaa

SEQ ID NO: 1035996 - RNA, 19 nt, Artificial Sequence
  Description of Artificial Sequence: Synthetic oligonucleotide
  Sense strand starting at position 338 of SEQ ID NO: 914859
cucuccuguuuagucagau

SEQ ID NO: 1035997 - RNA, 19 nt, Artificial Sequence
  Description of Artificial Sequence: Synthetic oligonucleotide
  Antisense strand to SEQ ID NO: 1035996
aucugacuaaacaggagag

SEQ ID NO: 1035998 - RNA, 19 nt, Artificial Sequence
  Description of Artificial Sequence: Synthetic oligonucleotide
  Sense strand starting at position 339 of SEQ ID NO: 914859
ucuccuguuuagucagauc

SEQ ID NO: 1035999 - RNA, 19 nt, Artificial Sequence
  Description of Artificial Sequence: Synthetic oligonucleotide
  Antisense strand to SEQ ID NO: 1035998
gaucugacuaaacaggaga

SEQ ID NO: 1036000 - RNA, 19 nt, Artificial Sequence
  Description of Artificial Sequence: Synthetic oligonucleotide
  Sense strand starting at position 438 of SEQ ID NO: 914859
ugacaaggccgaggugauu

SEQ ID NO: 1036001 - RNA, 19 nt, Artificial Sequence
  Description of Artificial Sequence: Synthetic oligonucleotide
  Antisense strand to SEQ ID NO: 1036000
aaucaccucggccuuguca

SEQ ID NO: 1036002 - RNA, 19 nt, Artificial Sequence
  Description of Artificial Sequence: Synthetic oligonucleotide
  Sense strand starting at position 449 of SEQ ID NO: 914859
aggugauuacuugggagua

SEQ ID NO: 1036003 - RNA, 19 nt, Artificial Sequence
  Description of Artificial Sequence: Synthetic oligonucleotide
  Antisense strand to SEQ ID NO: 1036002
uacucccaaguaaucaccu

SEQ ID NO: 1036004 - RNA, 19 nt, Artificial Sequence
  Description of Artificial Sequence: Synthetic oligonucleotide
  Sense strand starting at position 463 of SEQ ID NO: 914859
gaguaaaugcaaggagagu

SEQ ID NO: 1036005 - RNA, 19 nt, Artificial Sequence
  Description of Artificial Sequence: Synthetic oligonucleotide
  Antisense strand to SEQ ID NO: 1036004
acucuccuugcauuuacuc

SEQ ID NO: 1036006 - RNA, 19 nt, Artificial Sequence
  Description of Artificial Sequence: Synthetic oligonucleotide
  Sense strand starting at position 476 of SEQ ID NO: 914859
gagaguuuccacugcguaa

SEQ ID NO: 1036007 - RNA, 19 nt, Artificial Sequence
  Description of Artificial Sequence: Synthetic oligonucleotide
  Antisense strand to SEQ ID NO: 1036006
uuacgcaguggaaacucuc

SEQ ID NO: 1036008 - RNA, 19 nt, Artificial Sequence
  Description of Artificial Sequence: Synthetic oligonucleotide
  Sense strand starting at position 675 of SEQ ID NO: 914859
aagagcugcgucuauaauu

SEQ ID NO: 1036009 - RNA, 19 nt, Artificial Sequence
  Description of Artificial Sequence: Synthetic oligonucleotide
  Antisense strand to SEQ ID NO: 1036008
aauuauagacgcagcucuu

SEQ ID NO: 1036010 - RNA, 19 nt, Artificial Sequence
  Description of Artificial Sequence: Synthetic oligonucleotide
  Sense strand starting at position 724 of SEQ ID NO: 914859
uccgaaggcugcucuauua

SEQ ID NO: 1036011 - RNA, 19 nt, Artificial Sequence
  Description of Artificial Sequence: Synthetic oligonucleotide
  Antisense strand to SEQ ID NO: 1036010
uaauagagcagccuucgga

SEQ ID NO: 1036012 - RNA, 19 nt, Artificial Sequence
  Description of Artificial Sequence: Synthetic oligonucleotide
  Sense strand starting at position 1138 of SEQ ID NO: 914859
cugguccugccagacaauu

SEQ ID NO: 1036013 - RNA, 19 nt, Artificial Sequence
  Description of Artificial Sequence: Synthetic oligonucleotide
  Antisense strand to SEQ ID NO: 1036012
aauugucuggcaggaccag

SEQ ID NO: 1036014 - RNA, 19 nt, Artificial Sequence
  Description of Artificial Sequence: Synthetic oligonucleotide
  Sense strand starting at position 1237 of SEQ ID NO: 914859
aaagcaaggucuuugaagu

SEQ ID NO: 1036015 - RNA, 19 nt, Artificial Sequence
  Description of Artificial Sequence: Synthetic oligonucleotide
  Antisense strand to SEQ ID NO: 1036014
acuucaaagaccuugcuuu

SEQ ID NO: 1036016 - RNA, 19 nt, Artificial Sequence
  Description of Artificial Sequence: Synthetic oligonucleotide
  Sense strand starting at position 1238 of SEQ ID NO: 914859
aagcaaggucuuugaagua

SEQ ID NO: 1036017 - RNA, 19 nt, Artificial Sequence
  Description of Artificial Sequence: Synthetic oligonucleotide
  Antisense strand to SEQ ID NO: 1036016
uacuucaaagaccuugcuu

SEQ ID NO: 1036018 - RNA, 19 nt, Artificial Sequence
  Description of Artificial Sequence: Synthetic oligonucleotide
  Sense strand starting at position 1354 of SEQ ID NO: 914859
gugggaggucaaugagauc

SEQ ID NO: 1036019 - RNA, 19 nt, Artificial Sequence
  Description of Artificial Sequence: Synthetic oligonucleotide
  Antisense strand to SEQ ID NO: 1036018
gaucucauugaccucccac

SEQ ID NO: 1036020 - RNA, 19 nt, Artificial Sequence
  Description of Artificial Sequence: Synthetic oligonucleotide
  Sense strand starting at position 1363 of SEQ ID NO: 914859
caaugagaucacuggugug

SEQ ID NO: 1036021 - RNA, 19 nt, Artificial Sequence
  Description of Artificial Sequence: Synthetic oligonucleotide
  Antisense strand to SEQ ID NO: 1036020
cacaccagugaucucauug

SEQ ID NO: 1036022 - RNA, 19 nt, Artificial Sequence
  Description of Artificial Sequence: Synthetic oligonucleotide
  Sense strand starting at position 1420 of SEQ ID NO: 914859
aguaaagggagguguucua

SEQ ID NO: 1036023 - RNA, 19 nt, Artificial Sequence
  Description of Artificial Sequence: Synthetic oligonucleotide
  Antisense strand to SEQ ID NO: 1036022
uagaacaccucccuuuacu

SEQ ID NO: 1036024 - RNA, 19 nt, Artificial Sequence
  Description of Artificial Sequence: Synthetic oligonucleotide
  Sense strand starting at position 1427 of SEQ ID NO: 914859
ggagguguucuaugcauca

SEQ ID NO: 1036025 - RNA, 19 nt, Artificial Sequence
  Description of Artificial Sequence: Synthetic oligonucleotide
  Antisense strand to SEQ ID NO: 1036024
ugaugcauagaacaccucc

SEQ ID NO: 1036026 - RNA, 19 nt, Artificial Sequence
  Description of Artificial Sequence: Synthetic oligonucleotide
  Sense strand starting at position 1499 of SEQ ID NO: 914859
gggcaaguucccugucauc

SEQ ID NO: 1036027 - RNA, 19 nt, Artificial Sequence
  Description of Artificial Sequence: Synthetic oligonucleotide
  Antisense strand to SEQ ID NO: 1036026
gaugacagggaacuugccc

SEQ ID NO: 1036028 - RNA, 19 nt, Artificial Sequence
  Description of Artificial Sequence: Synthetic oligonucleotide
  Sense strand starting at position 1856 of SEQ ID NO: 914859
ugggauagauuagucucau

SEQ ID NO: 1036029 - RNA, 19 nt, Artificial Sequence
  Description of Artificial Sequence: Synthetic oligonucleotide
  Antisense strand to SEQ ID NO: 1036028
augagacuaaucuauccca

SEQ ID NO: 1036030 - RNA, 19 nt, Artificial Sequence
  Description of Artificial Sequence: Synthetic oligonucleotide
  Sense strand starting at position 1857 of SEQ ID NO: 914859
gggauagauuagucucaug

SEQ ID NO: 1036031 - RNA, 19 nt, Artificial Sequence
  Description of Artificial Sequence: Synthetic oligonucleotide
  Antisense strand to SEQ ID NO: 1036030
caugagacuaaucuauccc

SEQ ID NO: 1036032 - RNA, 19 nt, Artificial Sequence
  Description of Artificial Sequence: Synthetic oligonucleotide
  Sense strand starting at position 2596 of SEQ ID NO: 914859
uuucgagaacccuggacuu

SEQ ID NO: 1036033 - RNA, 19 nt, Artificial Sequence
  Description of Artificial Sequence: Synthetic oligonucleotide
  Antisense strand to SEQ ID NO: 1036032
aaguccaggguucucgaaa

SEQ ID NO: 1036034 - RNA, 19 nt, Artificial Sequence
  Description of Artificial Sequence: Synthetic oligonucleotide
  Sense strand starting at position 2634 of SEQ ID NO: 914859
ucgggagaucugggugcau

SEQ ID NO: 1036035 - RNA, 19 nt, Artificial Sequence
  Description of Artificial Sequence: Synthetic oligonucleotide
  Antisense strand to SEQ ID NO: 1036034
augcacccagaucucccga

SEQ ID NO: 1036036 - RNA, 19 nt, Artificial Sequence
  Description of Artificial Sequence: Synthetic oligonucleotide
  Sense strand starting at position 2697 of SEQ ID NO: 914859
auuccucucugggcauuaa

SEQ ID NO: 1036037 - RNA, 19 nt, Artificial Sequence
  Description of Artificial Sequence: Synthetic oligonucleotide
  Antisense strand to SEQ ID NO: 1036036
uuaaugcccagagaggaau

SEQ ID NO: 1036038 - RNA, 19 nt, Artificial Sequence
  Description of Artificial Sequence: Synthetic oligonucleotide
  Sense strand starting at position 2698 of SEQ ID NO: 914859
uuccucucugggcauuaau

SEQ ID NO: 1036039 - RNA, 19 nt, Artificial Sequence
  Description of Artificial Sequence: Synthetic oligonucleotide
  Antisense strand to SEQ ID NO: 1036038
auuaaugcccagagaggaa

SEQ ID NO: 1036040 - RNA, 19 nt, Artificial Sequence
  Description of Artificial Sequence: Synthetic oligonucleotide
  Sense strand starting at position 2726 of SEQ ID NO: 914859
ucaucaauuguaugucgaa

SEQ ID NO: 1036041 - RNA, 19 nt, Artificial Sequence
  Description of Artificial Sequence: Synthetic oligonucleotide
  Antisense strand to SEQ ID NO: 1036040
uucgacauacaauugauga

SEQ ID NO: 1036042 - RNA, 19 nt, Artificial Sequence
  Description of Artificial Sequence: Synthetic oligonucleotide
  Sense strand starting at position 2727 of SEQ ID NO: 914859
caucaauuguaugucgaag

SEQ ID NO: 1036043 - RNA, 19 nt, Artificial Sequence
  Description of Artificial Sequence: Synthetic oligonucleotide
  Antisense strand to SEQ ID NO: 1036042
cuucgacauacaauugaug

SEQ ID NO: 1036044 - RNA, 19 nt, Artificial Sequence
  Description of Artificial Sequence: Synthetic oligonucleotide
  Sense strand starting at position 3154 of SEQ ID NO: 914859
cuccuuauccuuugaggaa

SEQ ID NO: 1036045 - RNA, 19 nt, Artificial Sequence
  Description of Artificial Sequence: Synthetic oligonucleotide
  Antisense strand to SEQ ID NO: 1036044
uuccucaaaggauaaggag

SEQ ID NO: 1036046 - RNA, 19 nt, Artificial Sequence
  Description of Artificial Sequence: Synthetic oligonucleotide
  Sense strand starting at position 3278 of SEQ ID NO: 914859
caggguugccuuggguaga

SEQ ID NO: 1036047 - RNA, 19 nt, Artificial Sequence
  Description of Artificial Sequence: Synthetic oligonucleotide
  Antisense strand to SEQ ID NO: 1036046
ucuacccaaggcaacccug

SEQ ID NO: 1036048 - RNA, 19 nt, Artificial Sequence
  Description of Artificial Sequence: Synthetic oligonucleotide
  Sense strand starting at position 3281 of SEQ ID NO: 914859
gguugccuuggguagaagu

SEQ ID NO: 1036049 - RNA, 19 nt, Artificial Sequence
  Description of Artificial Sequence: Synthetic oligonucleotide
  Antisense strand to SEQ ID NO: 1036048
acuucuacccaaggcaacc

SEQ ID NO: 1036050 - RNA, 19 nt, Artificial Sequence
  Description of Artificial Sequence: Synthetic oligonucleotide
  Sense strand starting at position 3289 of SEQ ID NO: 914859
uggguagaaguucaguuaa

SEQ ID NO: 1036051 - RNA, 19 nt, Artificial Sequence
  Description of Artificial Sequence: Synthetic oligonucleotide
  Antisense strand to SEQ ID NO: 1036050
uuaacugaacuucuaccca

SEQ ID NO: 1036052 - RNA, 19 nt, Artificial Sequence
  Description of Artificial Sequence: Synthetic oligonucleotide
  Sense strand starting at position 3462 of SEQ ID NO: 914859
gaggaaaugugcuccucag

SEQ ID NO: 1036053 - RNA, 19 nt, Artificial Sequence
  Description of Artificial Sequence: Synthetic oligonucleotide
  Antisense strand to SEQ ID NO: 1036052
cugaggagcacauuuccuc

SEQ ID NO: 1036054 - RNA, 19 nt, Artificial Sequence
  Description of Artificial Sequence: Synthetic oligonucleotide
  Sense strand starting at position 3527 of SEQ ID NO: 914859
gcagggagagguugaguaa

SEQ ID NO: 1036055 - RNA, 19 nt, Artificial Sequence
  Description of Artificial Sequence: Synthetic oligonucleotide
  Antisense strand to SEQ ID NO: 1036054
uuacucaaccucucccugc

SEQ ID NO: 1036056 - RNA, 19 nt, Artificial Sequence
  Description of Artificial Sequence: Synthetic oligonucleotide
  Sense strand starting at position 3571 of SEQ ID NO: 914859
cuaggagauucugugagcu

SEQ ID NO: 1036057 - RNA, 19 nt, Artificial Sequence
  Description of Artificial Sequence: Synthetic oligonucleotide
  Antisense strand to SEQ ID NO: 1036056
agcucacagaaucuccuag

SEQ ID NO: 1036058 - RNA, 19 nt, Artificial Sequence
  Description of Artificial Sequence: Synthetic oligonucleotide
  Sense strand starting at position 3662 of SEQ ID NO: 914859
ugcuuugguuguuugaaca

SEQ ID NO: 1036059 - RNA, 19 nt, Artificial Sequence
  Description of Artificial Sequence: Synthetic oligonucleotide
  Antisense strand to SEQ ID NO: 1036058
uguucaaacaaccaaagca

SEQ ID NO: 1036060 - RNA, 19 nt, Artificial Sequence
  Description of Artificial Sequence: Synthetic oligonucleotide
  Sense strand starting at position 3729 of SEQ ID NO: 914859
ggcuuucuugacugauguu

SEQ ID NO: 1036061 - RNA, 19 nt, Artificial Sequence
  Description of Artificial Sequence: Synthetic oligonucleotide
  Antisense strand to SEQ ID NO: 1036060
aacaucagucaagaaagcc

SEQ ID NO: 1036062 - RNA, 19 nt, Artificial Sequence
  Description of Artificial Sequence: Synthetic oligonucleotide
  Sense strand starting at position 3735 of SEQ ID NO: 914859
cuugacugauguuuaagau

SEQ ID NO: 1036063 - RNA, 19 nt, Artificial Sequence
  Description of Artificial Sequence: Synthetic oligonucleotide
  Antisense strand to SEQ ID NO: 1036062
aucuuaaacaucagucaag

SEQ ID NO: 1036064 - RNA, 19 nt, Artificial Sequence
  Description of Artificial Sequence: Synthetic oligonucleotide
  Sense strand starting at position 3846 of SEQ ID NO: 914859
gugguuacaucuuugguuu

SEQ ID NO: 1036065 - RNA, 19 nt, Artificial Sequence
  Description of Artificial Sequence: Synthetic oligonucleotide
  Antisense strand to SEQ ID NO: 1036064
aaaccaaagauguaaccac

SEQ ID NO: 1036066 - RNA, 19 nt, Artificial Sequence
  Description of Artificial Sequence: Synthetic oligonucleotide
  Sense strand starting at position 3878 of SEQ ID NO: 914859
ugucacaugucucucauga

SEQ ID NO: 1036067 - RNA, 19 nt, Artificial Sequence
  Description of Artificial Sequence: Synthetic oligonucleotide
  Antisense strand to SEQ ID NO: 1036066
ucaugagagacaugugaca

SEQ ID NO: 1036068 - RNA, 19 nt, Artificial Sequence
  Description of Artificial Sequence: Synthetic oligonucleotide
  Sense strand starting at position 16 of SEQ ID NO: 914860
auauguccauggcuacaaa

SEQ ID NO: 1036069 - RNA, 19 nt, Artificial Sequence
  Description of Artificial Sequence: Synthetic oligonucleotide
  Antisense strand to SEQ ID NO: 1036068
uuuguagccauggacauau

SEQ ID NO: 1036070 - RNA, 19 nt, Artificial Sequence
  Description of Artificial Sequence: Synthetic oligonucleotide
  Sense strand starting at position 40 of SEQ ID NO: 914860
gcugaauaaaugugagaga

SEQ ID NO: 1036071 - RNA, 19 nt, Artificial Sequence
  Description of Artificial Sequence: Synthetic oligonucleotide
  Antisense strand to SEQ ID NO: 1036070
ucucucacauuuauucagc

SEQ ID NO: 1036072 - RNA, 19 nt, Artificial Sequence
  Description of Artificial Sequence: Synthetic oligonucleotide
  Sense strand starting at position 147 of SEQ ID NO: 914860
gucaauagagucggaauua

SEQ ID NO: 1036073 - RNA, 19 nt, Artificial Sequence
  Description of Artificial Sequence: Synthetic oligonucleotide
  Antisense strand to SEQ ID NO: 1036072
uaauuccgacucuauugac

SEQ ID NO: 1036074 - RNA, 19 nt, Artificial Sequence
  Description of Artificial Sequence: Synthetic oligonucleotide
  Sense strand starting at position 178 of SEQ ID NO: 914860
gcauaucaugcauaugaaa

SEQ ID NO: 1036075 - RNA, 19 nt, Artificial Sequence
  Description of Artificial Sequence: Synthetic oligonucleotide
  Antisense strand to SEQ ID NO: 1036074
uuucauaugcaugauaugc

SEQ ID NO: 1036076 - RNA, 19 nt, Artificial Sequence
  Description of Artificial Sequence: Synthetic oligonucleotide
  Sense strand starting at position 197 of SEQ ID NO: 914860
ccaguugucugaguauuua

SEQ ID NO: 1036077 - RNA, 19 nt, Artificial Sequence
  Description of Artificial Sequence: Synthetic oligonucleotide
  Antisense strand to SEQ ID NO: 1036076
uaaauacucagacaacugg

SEQ ID NO: 1036078 - RNA, 19 nt, Artificial Sequence
  Description of Artificial Sequence: Synthetic oligonucleotide
  Sense strand starting at position 271 of SEQ ID NO: 914860
gguguucugaaucaaaugu

SEQ ID NO: 1036079 - RNA, 19 nt, Artificial Sequence
  Description of Artificial Sequence: Synthetic oligonucleotide
  Antisense strand to SEQ ID NO: 1036078
acauuugauucagaacacc

SEQ ID NO: 1036080 - RNA, 19 nt, Artificial Sequence
  Description of Artificial Sequence: Synthetic oligonucleotide
  Sense strand starting at position 376 of SEQ ID NO: 914860
uaaagucauuugcuuggca

SEQ ID NO: 1036081 - RNA, 19 nt, Artificial Sequence
  Description of Artificial Sequence: Synthetic oligonucleotide
  Antisense strand to SEQ ID NO: 1036080
ugccaagcaaaugacuuua

SEQ ID NO: 1036082 - RNA, 19 nt, Artificial Sequence
  Description of Artificial Sequence: Synthetic oligonucleotide
  Sense strand starting at position 377 of SEQ ID NO: 914860
aaagucauuugcuuggcau

SEQ ID NO: 1036083 - RNA, 19 nt, Artificial Sequence
  Description of Artificial Sequence: Synthetic oligonucleotide
  Antisense strand to SEQ ID NO: 1036082
augccaagcaaaugacuuu

SEQ ID NO: 1036084 - RNA, 19 nt, Artificial Sequence
  Description of Artificial Sequence: Synthetic oligonucleotide
  Sense strand starting at position 378 of SEQ ID NO: 914860
aagucauuugcuuggcauu

SEQ ID NO: 1036085 - RNA, 19 nt, Artificial Sequence
  Description of Artificial Sequence: Synthetic oligonucleotide
  Antisense strand to SEQ ID NO: 1036084
aaugccaagcaaaugacuu

SEQ ID NO: 1036086 - RNA, 19 nt, Artificial Sequence
  Description of Artificial Sequence: Synthetic oligonucleotide
  Sense strand starting at position 574 of SEQ ID NO: 914860
ccugaaaucuuccuggauu

SEQ ID NO: 1036087 - RNA, 19 nt, Artificial Sequence
  Description of Artificial Sequence: Synthetic oligonucleotide
  Antisense strand to SEQ ID NO: 1036086
aauccaggaagauuucagg

SEQ ID NO: 1036088 - RNA, 19 nt, Artificial Sequence
  Description of Artificial Sequence: Synthetic oligonucleotide
  Sense strand starting at position 654 of SEQ ID NO: 914860
uuguacagugaucaguuau

SEQ ID NO: 1036089 - RNA, 19 nt, Artificial Sequence
  Description of Artificial Sequence: Synthetic oligonucleotide
  Antisense strand to SEQ ID NO: 1036088
auaacugaucacuguacaa

SEQ ID NO: 1036090 - RNA, 19 nt, Artificial Sequence
  Description of Artificial Sequence: Synthetic oligonucleotide
  Sense strand starting at position 660 of SEQ ID NO: 914860
agugaucaguuauuugcau

SEQ ID NO: 1036091 - RNA, 19 nt, Artificial Sequence
  Description of Artificial Sequence: Synthetic oligonucleotide
  Antisense strand to SEQ ID NO: 1036090
augcaaauaacugaucacu

SEQ ID NO: 1036092 - RNA, 19 nt, Artificial Sequence
  Description of Artificial Sequence: Synthetic oligonucleotide
  Sense strand starting at position 671 of SEQ ID NO: 914860
auuugcaugucuuugacca

SEQ ID NO: 1036093 - RNA, 19 nt, Artificial Sequence
  Description of Artificial Sequence: Synthetic oligonucleotide
  Antisense strand to SEQ ID NO: 1036092
uggucaaagacaugcaaau

SEQ ID NO: 1036094 - RNA, 19 nt, Artificial Sequence
  Description of Artificial Sequence: Synthetic oligonucleotide
  Sense strand starting at position 734 of SEQ ID NO: 914860
uuagauucccagcagaauu

SEQ ID NO: 1036095 - RNA, 19 nt, Artificial Sequence
  Description of Artificial Sequence: Synthetic oligonucleotide
  Antisense strand to SEQ ID NO: 1036094
aauucugcugggaaucuaa

SEQ ID NO: 1036096 - RNA, 19 nt, Artificial Sequence
  Description of Artificial Sequence: Synthetic oligonucleotide
  Sense strand starting at position 854 of SEQ ID NO: 914860
ugcuuugcccagcugucaa

SEQ ID NO: 1036097 - RNA, 19 nt, Artificial Sequence
  Description of Artificial Sequence: Synthetic oligonucleotide
  Antisense strand to SEQ ID NO: 1036096
uugacagcugggcaaagca

SEQ ID NO: 1036098 - RNA, 19 nt, Artificial Sequence
  Description of Artificial Sequence: Synthetic oligonucleotide
  Sense strand starting at position 945 of SEQ ID NO: 914860
gaggcacugguuuauucua

SEQ ID NO: 1036099 - RNA, 19 nt, Artificial Sequence
  Description of Artificial Sequence: Synthetic oligonucleotide
  Antisense strand to SEQ ID NO: 1036098
uagaauaaaccagugccuc

SEQ ID NO: 1036100 - RNA, 19 nt, Artificial Sequence
  Description of Artificial Sequence: Synthetic oligonucleotide
  Sense strand starting at position 1022 of SEQ ID NO: 914860
agcaaauccugacugacaa

SEQ ID NO: 1036101 - RNA, 19 nt, Artificial Sequence
  Description of Artificial Sequence: Synthetic oligonucleotide
  Antisense strand to SEQ ID NO: 1036100
uugucagucaggauuugcu

SEQ ID NO: 1036102 - RNA, 19 nt, Artificial Sequence
  Description of Artificial Sequence: Synthetic oligonucleotide
  Sense strand starting at position 1023 of SEQ ID NO: 914860
gcaaauccugacugacaac

SEQ ID NO: 1036103 - RNA, 19 nt, Artificial Sequence
  Description of Artificial Sequence: Synthetic oligonucleotide
  Antisense strand to SEQ ID NO: 1036102
guugucagucaggauuugc

SEQ ID NO: 1036104 - RNA, 19 nt, Artificial Sequence
  Description of Artificial Sequence: Synthetic oligonucleotide
  Sense strand starting at position 1079 of SEQ ID NO: 914860
aagguuaagacgugaagga

SEQ ID NO: 1036105 - RNA, 19 nt, Artificial Sequence
  Description of Artificial Sequence: Synthetic oligonucleotide
  Antisense strand to SEQ ID NO: 1036104
uccuucacgucuuaaccuu

SEQ ID NO: 1036106 - RNA, 19 nt, Artificial Sequence
  Description of Artificial Sequence: Synthetic oligonucleotide
  Sense strand starting at position 1279 of SEQ ID NO: 914860
ugacauuuccucugcguag

SEQ ID NO: 1036107 - RNA, 19 nt, Artificial Sequence
  Description of Artificial Sequence: Synthetic oligonucleotide
  Antisense strand to SEQ ID NO: 1036106
cuacgcagaggaaauguca

SEQ ID NO: 1036108 - RNA, 19 nt, Artificial Sequence
  Description of Artificial Sequence: Synthetic oligonucleotide
  Sense strand starting at position 1281 of SEQ ID NO: 914860
acauuuccucugcguagga

SEQ ID NO: 1036109 - RNA, 19 nt, Artificial Sequence
  Description of Artificial Sequence: Synthetic oligonucleotide
  Antisense strand to SEQ ID NO: 1036108
uccuacgcagaggaaaugu

SEQ ID NO: 1036110 - RNA, 19 nt, Artificial Sequence
  Description of Artificial Sequence: Synthetic oligonucleotide
  Sense strand starting at position 1294 of SEQ ID NO: 914860
guaggauuucguugcucca

SEQ ID NO: 1036111 - RNA, 19 nt, Artificial Sequence
  Description of Artificial Sequence: Synthetic oligonucleotide
  Antisense strand to SEQ ID NO: 1036110
uggagcaacgaaauccuac

SEQ ID NO: 1036112 - RNA, 19 nt, Artificial Sequence
  Description of Artificial Sequence: Synthetic oligonucleotide
  Sense strand starting at position 1296 of SEQ ID NO: 914860
aggauuucguugcuccaaa

SEQ ID NO: 1036113 - RNA, 19 nt, Artificial Sequence
  Description of Artificial Sequence: Synthetic oligonucleotide
  Antisense strand to SEQ ID NO: 1036112
uuuggagcaacgaaauccu

SEQ ID NO: 1036114 - RNA, 19 nt, Artificial Sequence
  Description of Artificial Sequence: Synthetic oligonucleotide
  Sense strand starting at position 1297 of SEQ ID NO: 914860
ggauuucguugcuccaaac

SEQ ID NO: 1036115 - RNA, 19 nt, Artificial Sequence
  Description of Artificial Sequence: Synthetic oligonucleotide
  Antisense strand to SEQ ID NO: 1036114
guuuggagcaacgaaaucc

SEQ ID NO: 1036116 - RNA, 19 nt, Artificial Sequence
  Description of Artificial Sequence: Synthetic oligonucleotide
  Sense strand starting at position 2763 of SEQ ID NO: 914860
ccaagaucgauguaguuua

SEQ ID NO: 1036117 - RNA, 19 nt, Artificial Sequence
  Description of Artificial Sequence: Synthetic oligonucleotide
  Antisense strand to SEQ ID NO: 1036116
uaaacuacaucgaucuugg

SEQ ID NO: 1036118 - RNA, 19 nt, Artificial Sequence
  Description of Artificial Sequence: Synthetic oligonucleotide
  Sense strand starting at position 2768 of SEQ ID NO: 914860
aucgauguaguuuagggaa

SEQ ID NO: 1036119 - RNA, 19 nt, Artificial Sequence
  Description of Artificial Sequence: Synthetic oligonucleotide
  Antisense strand to SEQ ID NO: 1036118
uucccuaaacuacaucgau

SEQ ID NO: 1036120 - RNA, 19 nt, Artificial Sequence
  Description of Artificial Sequence: Synthetic oligonucleotide
  Sense strand starting at position 2994 of SEQ ID NO: 914860
ccagcagguguuuacagaa

SEQ ID NO: 1036121 - RNA, 19 nt, Artificial Sequence
  Description of Artificial Sequence: Synthetic oligonucleotide
  Antisense strand to SEQ ID NO: 1036120
uucuguaaacaccugcugg

SEQ ID NO: 1036122 - RNA, 19 nt, Artificial Sequence
  Description of Artificial Sequence: Synthetic oligonucleotide
  Sense strand starting at position 3117 of SEQ ID NO: 914860
cuguaaucgaagugggaga

SEQ ID NO: 1036123 - RNA, 19 nt, Artificial Sequence
  Description of Artificial Sequence: Synthetic oligonucleotide
  Antisense strand to SEQ ID NO: 1036122
ucucccacuucgauuacag

SEQ ID NO: 1036124 - RNA, 19 nt, Artificial Sequence
  Description of Artificial Sequence: Synthetic oligonucleotide
  Sense strand starting at position 3206 of SEQ ID NO: 914860
agagauugucaagguuacu

SEQ ID NO: 1036125 - RNA, 19 nt, Artificial Sequence
  Description of Artificial Sequence: Synthetic oligonucleotide
  Antisense strand to SEQ ID NO: 1036124
aguaaccuugacaaucucu

SEQ ID NO: 1036126 - RNA, 19 nt, Artificial Sequence
  Description of Artificial Sequence: Synthetic oligonucleotide
  Sense strand starting at position 3278 of SEQ ID NO: 914860
guuaauggauuguuaauag

SEQ ID NO: 1036127 - RNA, 19 nt, Artificial Sequence
  Description of Artificial Sequence: Synthetic oligonucleotide
  Antisense strand to SEQ ID NO: 1036126
cuauuaacaauccauuaac

SEQ ID NO: 1036128 - RNA, 19 nt, Artificial Sequence
  Description of Artificial Sequence: Synthetic oligonucleotide
  Sense strand starting at position 3326 of SEQ ID NO: 914860
ucuccucuggcugaaugau

SEQ ID NO: 1036129 - RNA, 19 nt, Artificial Sequence
  Description of Artificial Sequence: Synthetic oligonucleotide
  Antisense strand to SEQ ID NO: 1036128
aucauucagccagaggaga

SEQ ID NO: 1036130 - RNA, 19 nt, Artificial Sequence
  Description of Artificial Sequence: Synthetic oligonucleotide
  Sense strand starting at position 3332 of SEQ ID NO: 914860
cuggcugaaugauccagaa

SEQ ID NO: 1036131 - RNA, 19 nt, Artificial Sequence
  Description of Artificial Sequence: Synthetic oligonucleotide
  Antisense strand to SEQ ID NO: 1036130
uucuggaucauucagccag

SEQ ID NO: 1036132 - RNA, 19 nt, Artificial Sequence
  Description of Artificial Sequence: Synthetic oligonucleotide
  Sense strand starting at position 3562 of SEQ ID NO: 914860
agugguuauggacaguauu

SEQ ID NO: 1036133 - RNA, 19 nt, Artificial Sequence
  Description of Artificial Sequence: Synthetic oligonucleotide
  Antisense strand to SEQ ID NO: 1036132
aauacuguccauaaccacu

SEQ ID NO: 1036134 - RNA, 19 nt, Artificial Sequence
  Description of Artificial Sequence: Synthetic oligonucleotide
  Sense strand starting at position 3565 of SEQ ID NO: 914860
gguuauggacaguauucuu

SEQ ID NO: 1036135 - RNA, 19 nt, Artificial Sequence
  Description of Artificial Sequence: Synthetic oligonucleotide
  Antisense strand to SEQ ID NO: 1036134
aagaauacuguccauaacc

SEQ ID NO: 1036136 - RNA, 19 nt, Artificial Sequence
  Description of Artificial Sequence: Synthetic oligonucleotide
  Sense strand starting at position 3579 of SEQ ID NO: 914860
uucuuuguacuuuggaaag

SEQ ID NO: 1036137 - RNA, 19 nt, Artificial Sequence
  Description of Artificial Sequence: Synthetic oligonucleotide
  Antisense strand to SEQ ID NO: 1036136
cuuuccaaaguacaaagaa

SEQ ID NO: 1036138 - RNA, 19 nt, Artificial Sequence
  Description of Artificial Sequence: Synthetic oligonucleotide
  Sense strand starting at position 3614 of SEQ ID NO: 914860
gucaguugccgguaaauuu

SEQ ID NO: 1036139 - RNA, 19 nt, Artificial Sequence
  Description of Artificial Sequence: Synthetic oligonucleotide
  Antisense strand to SEQ ID NO: 1036138
aaauuuaccggcaacugac

SEQ ID NO: 1036140 - RNA, 19 nt, Artificial Sequence
  Description of Artificial Sequence: Synthetic oligonucleotide
  Sense strand starting at position 3634 of SEQ ID NO: 914860
agggcuaaaguguaacauu

SEQ ID NO: 1036141 - RNA, 19 nt, Artificial Sequence
  Description of Artificial Sequence: Synthetic oligonucleotide
  Antisense strand to SEQ ID NO: 1036140
aauguuacacuuuagcccu

SEQ ID NO: 1036142 - RNA, 19 nt, Artificial Sequence
  Description of Artificial Sequence: Synthetic oligonucleotide
  Sense strand starting at position 3645 of SEQ ID NO: 914860
guaacauuacuugguauua

SEQ ID NO: 1036143 - RNA, 19 nt, Artificial Sequence
  Description of Artificial Sequence: Synthetic oligonucleotide
  Antisense strand to SEQ ID NO: 1036142
uaauaccaaguaauguuac

SEQ ID NO: 1036144 - RNA, 19 nt, Artificial Sequence
  Description of Artificial Sequence: Synthetic oligonucleotide
  Sense strand starting at position 3695 of SEQ ID NO: 914860
gucuccuugcuuuaaauag

SEQ ID NO: 1036145 - RNA, 19 nt, Artificial Sequence
  Description of Artificial Sequence: Synthetic oligonucleotide
  Antisense strand to SEQ ID NO: 1036144
cuauuuaaagcaaggagac

SEQ ID NO: 1036146 - RNA, 19 nt, Artificial Sequence
  Description of Artificial Sequence: Synthetic oligonucleotide
  Sense strand starting at position 3828 of SEQ ID NO: 914860
ccgguacuggauuauagua

SEQ ID NO: 1036147 - RNA, 19 nt, Artificial Sequence
  Description of Artificial Sequence: Synthetic oligonucleotide
  Antisense strand to SEQ ID NO: 1036146
uacuauaauccaguaccgg

SEQ ID NO: 1036148 - RNA, 19 nt, Artificial Sequence
  Description of Artificial Sequence: Synthetic oligonucleotide
  Sense strand starting at position 322 of SEQ ID NO: 914861
ccuuaugagcccuaaagca

SEQ ID NO: 1036149 - RNA, 19 nt, Artificial Sequence
  Description of Artificial Sequence: Synthetic oligonucleotide
  Antisense strand to SEQ ID NO: 1036148
ugcuuuagggcucauaagg

SEQ ID NO: 1036150 - RNA, 19 nt, Artificial Sequence
  Description of Artificial Sequence: Synthetic oligonucleotide
  Sense strand starting at position 390 of SEQ ID NO: 914861
uggcuacccuagguaugua

SEQ ID NO: 1036151 - RNA, 19 nt, Artificial Sequence
  Description of Artificial Sequence: Synthetic oligonucleotide
  Antisense strand to SEQ ID NO: 1036150
uacauaccuaggguagcca

SEQ ID NO: 1036152 - RNA, 19 nt, Artificial Sequence
  Description of Artificial Sequence: Synthetic oligonucleotide
  Sense strand starting at position 504 of SEQ ID NO: 914861
gugugcucugucccggaga

SEQ ID NO: 1036153 - RNA, 19 nt, Artificial Sequence
  Description of Artificial Sequence: Synthetic oligonucleotide
  Antisense strand to SEQ ID NO: 1036152
ucuccgggacagagcacac

SEQ ID NO: 1036154 - RNA, 19 nt, Artificial Sequence
  Description of Artificial Sequence: Synthetic oligonucleotide
  Sense strand starting at position 805 of SEQ ID NO: 914861
cuaaucucccuagggugaa

SEQ ID NO: 1036155 - RNA, 19 nt, Artificial Sequence
  Description of Artificial Sequence: Synthetic oligonucleotide
  Antisense strand to SEQ ID NO: 1036154
uucacccuagggagauuag

SEQ ID NO: 1036156 - RNA, 19 nt, Artificial Sequence
  Description of Artificial Sequence: Synthetic oligonucleotide
  Sense strand starting at position 905 of SEQ ID NO: 914861
gcccauuuccucugcugaa

SEQ ID NO: 1036157 - RNA, 19 nt, Artificial Sequence
  Description of Artificial Sequence: Synthetic oligonucleotide
  Antisense strand to SEQ ID NO: 1036156
uucagcagaggaaaugggc

SEQ ID NO: 1036158 - RNA, 19 nt, Artificial Sequence
  Description of Artificial Sequence: Synthetic oligonucleotide
  Sense strand starting at position 978 of SEQ ID NO: 914861
acaguaagaucugcgauug

SEQ ID NO: 1036159 - RNA, 19 nt, Artificial Sequence
  Description of Artificial Sequence: Synthetic oligonucleotide
  Antisense strand to SEQ ID NO: 1036158
caaucgcagaucuuacugu

SEQ ID NO: 1036160 - RNA, 19 nt, Artificial Sequence
  Description of Artificial Sequence: Synthetic oligonucleotide
  Sense strand starting at position 990 of SEQ ID NO: 914861
gcgauuguucaagaguaga

SEQ ID NO: 1036161 - RNA, 19 nt, Artificial Sequence
  Description of Artificial Sequence: Synthetic oligonucleotide
  Antisense strand to SEQ ID NO: 1036160
ucuacucuugaacaaucgc

SEQ ID NO: 1036162 - RNA, 19 nt, Artificial Sequence
  Description of Artificial Sequence: Synthetic oligonucleotide
  Sense strand starting at position 1037 of SEQ ID NO: 914861
gucuaauucuaccugcaag

SEQ ID NO: 1036163 - RNA, 19 nt, Artificial Sequence
  Description of Artificial Sequence: Synthetic oligonucleotide
  Antisense strand to SEQ ID NO: 1036162
cuugcagguagaauuagac

SEQ ID NO: 1036164 - RNA, 19 nt, Artificial Sequence
  Description of Artificial Sequence: Synthetic oligonucleotide
  Sense strand starting at position 1636 of SEQ ID NO: 914861
ccagaaaggguuugccgau

SEQ ID NO: 1036165 - RNA, 19 nt, Artificial Sequence
  Description of Artificial Sequence: Synthetic oligonucleotide
  Antisense strand to SEQ ID NO: 1036164
aucggcaaacccuuucugg

SEQ ID NO: 1036166 - RNA, 19 nt, Artificial Sequence
  Description of Artificial Sequence: Synthetic oligonucleotide
  Sense strand starting at position 2431 of SEQ ID NO: 914861
cgccucucuggaugaacua

SEQ ID NO: 1036167 - RNA, 19 nt, Artificial Sequence
  Description of Artificial Sequence: Synthetic oligonucleotide
  Antisense strand to SEQ ID NO: 1036166
uaguucauccagagaggcg

SEQ ID NO: 1036168 - RNA, 19 nt, Artificial Sequence
  Description of Artificial Sequence: Synthetic oligonucleotide
  Sense strand starting at position 2456 of SEQ ID NO: 914861
ggagcugaguuccucuuga

SEQ ID NO: 1036169 - RNA, 19 nt, Artificial Sequence
  Description of Artificial Sequence: Synthetic oligonucleotide
  Antisense strand to SEQ ID NO: 1036168
ucaagaggaacucagcucc

SEQ ID NO: 1036170 - RNA, 19 nt, Artificial Sequence
  Description of Artificial Sequence: Synthetic oligonucleotide
  Sense strand starting at position 2461 of SEQ ID NO: 914861
ugaguuccucuugaguuau

SEQ ID NO: 1036171 - RNA, 19 nt, Artificial Sequence
  Description of Artificial Sequence: Synthetic oligonucleotide
  Antisense strand to SEQ ID NO: 1036170
auaacucaagaggaacuca

SEQ ID NO: 1036172 - RNA, 19 nt, Artificial Sequence
  Description of Artificial Sequence: Synthetic oligonucleotide
  Sense strand starting at position 2463 of SEQ ID NO: 914861
aguuccucuugaguuaucu

SEQ ID NO: 1036173 - RNA, 19 nt, Artificial Sequence
  Description of Artificial Sequence: Synthetic oligonucleotide
  Antisense strand to SEQ ID NO: 1036172
agauaacucaagaggaacu

SEQ ID NO: 1036174 - RNA, 19 nt, Artificial Sequence
  Description of Artificial Sequence: Synthetic oligonucleotide
  Sense strand starting at position 2542 of SEQ ID NO: 914861
ccagaaucugccuaugugu

SEQ ID NO: 1036175 - RNA, 19 nt, Artificial Sequence
  Description of Artificial Sequence: Synthetic oligonucleotide
  Antisense strand to SEQ ID NO: 1036174
acacauaggcagauucugg

SEQ ID NO: 1036176 - RNA, 19 nt, Artificial Sequence
  Description of Artificial Sequence: Synthetic oligonucleotide
  Sense strand starting at position 2573 of SEQ ID NO: 914861
ucagaaauggcccauguca

SEQ ID NO: 1036177 - RNA, 19 nt, Artificial Sequence
  Description of Artificial Sequence: Synthetic oligonucleotide
  Antisense strand to SEQ ID NO: 1036176
ugacaugggccauuucuga

SEQ ID NO: 1036178 - RNA, 19 nt, Artificial Sequence
  Description of Artificial Sequence: Synthetic oligonucleotide
  Sense strand starting at position 2643 of SEQ ID NO: 914861
acagaugccugcuucugau

SEQ ID NO: 1036179 - RNA, 19 nt, Artificial Sequence
  Description of Artificial Sequence: Synthetic oligonucleotide
  Antisense strand to SEQ ID NO: 1036178
aucagaagcaggcaucugu

SEQ ID NO: 1036180 - RNA, 19 nt, Artificial Sequence
  Description of Artificial Sequence: Synthetic oligonucleotide
  Sense strand starting at position 2685 of SEQ ID NO: 914861
aguacaguacuagaaaugu

SEQ ID NO: 1036181 - RNA, 19 nt, Artificial Sequence
  Description of Artificial Sequence: Synthetic oligonucleotide
  Antisense strand to SEQ ID NO: 1036180
acauuucuaguacuguacu

SEQ ID NO: 1036182 - RNA, 19 nt, Artificial Sequence
  Description of Artificial Sequence: Synthetic oligonucleotide
  Sense strand starting at position 2833 of SEQ ID NO: 914861
cuccucugccuguaagauu

SEQ ID NO: 1036183 - RNA, 19 nt, Artificial Sequence
  Description of Artificial Sequence: Synthetic oligonucleotide
  Antisense strand to SEQ ID NO: 1036182
aaucuuacaggcagaggag

SEQ ID NO: 1036184 - RNA, 19 nt, Artificial Sequence
  Description of Artificial Sequence: Synthetic oligonucleotide
  Sense strand starting at position 2861 of SEQ ID NO: 914861
ucagaauaccaguauugua

SEQ ID NO: 1036185 - RNA, 19 nt, Artificial Sequence
  Description of Artificial Sequence: Synthetic oligonucleotide
  Antisense strand to SEQ ID NO: 1036184
uacaauacugguauucuga

SEQ ID NO: 1036186 - RNA, 19 nt, Artificial Sequence
  Description of Artificial Sequence: Synthetic oligonucleotide
  Sense strand starting at position 2869 of SEQ ID NO: 914861
ccaguauuguacucuugga

SEQ ID NO: 1036187 - RNA, 19 nt, Artificial Sequence
  Description of Artificial Sequence: Synthetic oligonucleotide
  Antisense strand to SEQ ID NO: 1036186
uccaagaguacaauacugg

SEQ ID NO: 1036188 - RNA, 19 nt, Artificial Sequence
  Description of Artificial Sequence: Synthetic oligonucleotide
  Sense strand starting at position 2905 of SEQ ID NO: 914861
gucuguuugccugucucau

SEQ ID NO: 1036189 - RNA, 19 nt, Artificial Sequence
  Description of Artificial Sequence: Synthetic oligonucleotide
  Antisense strand to SEQ ID NO: 1036188
augagacaggcaaacagac

SEQ ID NO: 1036190 - RNA, 19 nt, Artificial Sequence
  Description of Artificial Sequence: Synthetic oligonucleotide
  Sense strand starting at position 2914 of SEQ ID NO: 914861
ccugucucauucuugauau

SEQ ID NO: 1036191 - RNA, 19 nt, Artificial Sequence
  Description of Artificial Sequence: Synthetic oligonucleotide
  Antisense strand to SEQ ID NO: 1036190
auaucaagaaugagacagg

SEQ ID NO: 1036192 - RNA, 19 nt, Artificial Sequence
  Description of Artificial Sequence: Synthetic oligonucleotide
  Sense strand starting at position 2916 of SEQ ID NO: 914861
ugucucauucuugauauuc

SEQ ID NO: 1036193 - RNA, 19 nt, Artificial Sequence
  Description of Artificial Sequence: Synthetic oligonucleotide
  Antisense strand to SEQ ID NO: 1036192
gaauaucaagaaugagaca

SEQ ID NO: 1036194 - RNA, 19 nt, Artificial Sequence
  Description of Artificial Sequence: Synthetic oligonucleotide
  Sense strand starting at position 3122 of SEQ ID NO: 914861
cugguugaguuucuaguga

SEQ ID NO: 1036195 - RNA, 19 nt, Artificial Sequence
  Description of Artificial Sequence: Synthetic oligonucleotide
  Antisense strand to SEQ ID NO: 1036194
ucacuagaaacucaaccag

SEQ ID NO: 1036196 - RNA, 19 nt, Artificial Sequence
  Description of Artificial Sequence: Synthetic oligonucleotide
  Sense strand starting at position 3133 of SEQ ID NO: 914861
ucuagugauccacagugua

SEQ ID NO: 1036197 - RNA, 19 nt, Artificial Sequence
  Description of Artificial Sequence: Synthetic oligonucleotide
  Antisense strand to SEQ ID NO: 1036196
uacacuguggaucacuaga

SEQ ID NO: 1036198 - RNA, 19 nt, Artificial Sequence
  Description of Artificial Sequence: Synthetic oligonucleotide
  Sense strand starting at position 3170 of SEQ ID NO: 914861
gaaccugaguaggaaucaa

SEQ ID NO: 1036199 - RNA, 19 nt, Artificial Sequence
  Description of Artificial Sequence: Synthetic oligonucleotide
  Antisense strand to SEQ ID NO: 1036198
uugauuccuacucagguuc

SEQ ID NO: 1036200 - RNA, 19 nt, Artificial Sequence
  Description of Artificial Sequence: Synthetic oligonucleotide
  Sense strand starting at position 3330 of SEQ ID NO: 914861
ccaggacaguuguuugagu

SEQ ID NO: 1036201 - RNA, 19 nt, Artificial Sequence
  Description of Artificial Sequence: Synthetic oligonucleotide
  Antisense strand to SEQ ID NO: 1036200
acucaaacaacuguccugg

SEQ ID NO: 1036202 - RNA, 19 nt, Artificial Sequence
  Description of Artificial Sequence: Synthetic oligonucleotide
  Sense strand starting at position 3332 of SEQ ID NO: 914861
aggacaguuguuugaguga

SEQ ID NO: 1036203 - RNA, 19 nt, Artificial Sequence
  Description of Artificial Sequence: Synthetic oligonucleotide
  Antisense strand to SEQ ID NO: 1036202
ucacucaaacaacuguccu

SEQ ID NO: 1036204 - RNA, 19 nt, Artificial Sequence
  Description of Artificial Sequence: Synthetic oligonucleotide
  Sense strand starting at position 3337 of SEQ ID NO: 914861
aguuguuugagugaguuuc

SEQ ID NO: 1036205 - RNA, 19 nt, Artificial Sequence
  Description of Artificial Sequence: Synthetic oligonucleotide
  Antisense strand to SEQ ID NO: 1036204
gaaacucacucaaacaacu

SEQ ID NO: 1036206 - RNA, 19 nt, Artificial Sequence
  Description of Artificial Sequence: Synthetic oligonucleotide
  Sense strand starting at position 3384 of SEQ ID NO: 914861
uucuaaagucuggagcuuu

SEQ ID NO: 1036207 - RNA, 19 nt, Artificial Sequence
  Description of Artificial Sequence: Synthetic oligonucleotide
  Antisense strand to SEQ ID NO: 1036206
aaagcuccagacuuuagaa

SEQ ID NO: 1036208 - RNA, 19 nt, Artificial Sequence
  Description of Artificial Sequence: Synthetic oligonucleotide
  Sense strand starting at position 3471 of SEQ ID NO: 914861
ggcugagcuucuccuggaa

SEQ ID NO: 1036209 - RNA, 19 nt, Artificial Sequence
  Description of Artificial Sequence: Synthetic oligonucleotide
  Antisense strand to SEQ ID NO: 1036208
uuccaggagaagcucagcc

SEQ ID NO: 1036210 - RNA, 19 nt, Artificial Sequence
  Description of Artificial Sequence: Synthetic oligonucleotide
  Sense strand starting at position 3474 of SEQ ID NO: 914861
ugagcuucuccuggaaaug

SEQ ID NO: 1036211 - RNA, 19 nt, Artificial Sequence
  Description of Artificial Sequence: Synthetic oligonucleotide
  Antisense strand to SEQ ID NO: 1036210
cauuuccaggagaagcuca

SEQ ID NO: 1036212 - RNA, 19 nt, Artificial Sequence
  Description of Artificial Sequence: Synthetic oligonucleotide
  Sense strand starting at position 3491 of SEQ ID NO: 914861
ugcuuauauggucauccua

SEQ ID NO: 1036213 - RNA, 19 nt, Artificial Sequence
  Description of Artificial Sequence: Synthetic oligonucleotide
  Antisense strand to SEQ ID NO: 1036212
uaggaugaccauauaagca

SEQ ID NO: 1036214 - RNA, 19 nt, Artificial Sequence
  Description of Artificial Sequence: Synthetic oligonucleotide
  Sense strand starting at position 3525 of SEQ ID NO: 914861
cggacacuguaucuuaaga

SEQ ID NO: 1036215 - RNA, 19 nt, Artificial Sequence
  Description of Artificial Sequence: Synthetic oligonucleotide
  Antisense strand to SEQ ID NO: 1036214
ucuuaagauacaguguccg

SEQ ID NO: 1036216 - RNA, 19 nt, Artificial Sequence
  Description of Artificial Sequence: Synthetic oligonucleotide
  Sense strand starting at position 3575 of SEQ ID NO: 914861
uugaaaggcuuuccuuaac

SEQ ID NO: 1036217 - RNA, 19 nt, Artificial Sequence
  Description of Artificial Sequence: Synthetic oligonucleotide
  Antisense strand to SEQ ID NO: 1036216
guuaaggaaagccuuucaa

SEQ ID NO: 1036218 - RNA, 19 nt, Artificial Sequence
  Description of Artificial Sequence: Synthetic oligonucleotide
  Sense strand starting at position 3587 of SEQ ID NO: 914861
ccuuaacagugaucuagcu

SEQ ID NO: 1036219 - RNA, 19 nt, Artificial Sequence
  Description of Artificial Sequence: Synthetic oligonucleotide
  Antisense strand to SEQ ID NO: 1036218
agcuagaucacuguuaagg

SEQ ID NO: 1036220 - RNA, 19 nt, Artificial Sequence
  Description of Artificial Sequence: Synthetic oligonucleotide
  Sense strand starting at position 3665 of SEQ ID NO: 914861
gauaguaaaguaugaauac

SEQ ID NO: 1036221 - RNA, 19 nt, Artificial Sequence
  Description of Artificial Sequence: Synthetic oligonucleotide
  Antisense strand to SEQ ID NO: 1036220
guauucauacuuuacuauc

SEQ ID NO: 1036222 - RNA, 19 nt, Artificial Sequence
  Description of Artificial Sequence: Synthetic oligonucleotide
  Sense strand starting at position 3735 of SEQ ID NO: 914861
gugcaaauucuagaggcca

SEQ ID NO: 1036223 - RNA, 19 nt, Artificial Sequence
  Description of Artificial Sequence: Synthetic oligonucleotide
  Antisense strand to SEQ ID NO: 1036222
uggccucuagaauuugcac

SEQ ID NO: 1036224 - RNA, 19 nt, Artificial Sequence
  Description of Artificial Sequence: Synthetic oligonucleotide
  Sense strand starting at position 3790 of SEQ ID NO: 914861
acucacucccaguaaguuu

SEQ ID NO: 1036225 - RNA, 19 nt, Artificial Sequence
  Description of Artificial Sequence: Synthetic oligonucleotide
  Antisense strand to SEQ ID NO: 1036224
aaacuuacugggagugagu

SEQ ID NO: 1036226 - RNA, 19 nt, Artificial Sequence
  Description of Artificial Sequence: Synthetic oligonucleotide
  Sense strand starting at position 3843 of SEQ ID NO: 914861
cccuccugcuaauugagaa

SEQ ID NO: 1036227 - RNA, 19 nt, Artificial Sequence
  Description of Artificial Sequence: Synthetic oligonucleotide
  Antisense strand to SEQ ID NO: 1036226
uucucaauuagcaggaggg

SEQ ID NO: 1036228 - RNA, 19 nt, Artificial Sequence
  Description of Artificial Sequence: Synthetic oligonucleotide
  Sense strand starting at position 83 of SEQ ID NO: 914862
ugugcuuucuguucacgga

SEQ ID NO: 1036229 - RNA, 19 nt, Artificial Sequence
  Description of Artificial Sequence: Synthetic oligonucleotide
  Antisense strand to SEQ ID NO: 1036228
uccgugaacagaaagcaca

SEQ ID NO: 1036230 - RNA, 19 nt, Artificial Sequence
  Description of Artificial Sequence: Synthetic oligonucleotide
  Sense strand starting at position 84 of SEQ ID NO: 914862
gugcuuucuguucacggaa

SEQ ID NO: 1036231 - RNA, 19 nt, Artificial Sequence
  Description of Artificial Sequence: Synthetic oligonucleotide
  Antisense strand to SEQ ID NO: 1036230
uuccgugaacagaaagcac

SEQ ID NO: 1036232 - RNA, 19 nt, Artificial Sequence
  Description of Artificial Sequence: Synthetic oligonucleotide
  Sense strand starting at position 86 of SEQ ID NO: 914862
gcuuucuguucacggaaag

SEQ ID NO: 1036233 - RNA, 19 nt, Artificial Sequence
  Description of Artificial Sequence: Synthetic oligonucleotide
  Antisense strand to SEQ ID NO: 1036232
cuuuccgugaacagaaagc

SEQ ID NO: 1036234 - RNA, 19 nt, Artificial Sequence
  Description of Artificial Sequence: Synthetic oligonucleotide
  Sense strand starting at position 103 of SEQ ID NO: 914862
aggaguauuuaagguaagu

SEQ ID NO: 1036235 - RNA, 19 nt, Artificial Sequence
  Description of Artificial Sequence: Synthetic oligonucleotide
  Antisense strand to SEQ ID NO: 1036234
acuuaccuuaaauacuccu

SEQ ID NO: 1036236 - RNA, 19 nt, Artificial Sequence
  Description of Artificial Sequence: Synthetic oligonucleotide
  Sense strand starting at position 154 of SEQ ID NO: 914862
ucaugaguuugggaccuuu

SEQ ID NO: 1036237 - RNA, 19 nt, Artificial Sequence
  Description of Artificial Sequence: Synthetic oligonucleotide
  Antisense strand to SEQ ID NO: 1036236
aaaggucccaaacucauga

SEQ ID NO: 1036238 - RNA, 19 nt, Artificial Sequence
  Description of Artificial Sequence: Synthetic oligonucleotide
  Sense strand starting at position 245 of SEQ ID NO: 914862
acgagauguugguuucagu

SEQ ID NO: 1036239 - RNA, 19 nt, Artificial Sequence
  Description of Artificial Sequence: Synthetic oligonucleotide
  Antisense strand to SEQ ID NO: 1036238
acugaaaccaacaucucgu

SEQ ID NO: 1036240 - RNA, 19 nt, Artificial Sequence
  Description of Artificial Sequence: Synthetic oligonucleotide
  Sense strand starting at position 255 of SEQ ID NO: 914862
gguuucaguuccuugugga

SEQ ID NO: 1036241 - RNA, 19 nt, Artificial Sequence
  Description of Artificial Sequence: Synthetic oligonucleotide
  Antisense strand to SEQ ID NO: 1036240
uccacaaggaacugaaacc

SEQ ID NO: 1036242 - RNA, 19 nt, Artificial Sequence
  Description of Artificial Sequence: Synthetic oligonucleotide
  Sense strand starting at position 586 of SEQ ID NO: 914862
cggaucuuaucauucccaa

SEQ ID NO: 1036243 - RNA, 19 nt, Artificial Sequence
  Description of Artificial Sequence: Synthetic oligonucleotide
  Antisense strand to SEQ ID NO: 1036242
uugggaaugauaagauccg

SEQ ID NO: 1036244 - RNA, 19 nt, Artificial Sequence
  Description of Artificial Sequence: Synthetic oligonucleotide
  Sense strand starting at position 624 of SEQ ID NO: 914862
acaagaugugcacaacucu

SEQ ID NO: 1036245 - RNA, 19 nt, Artificial Sequence
  Description of Artificial Sequence: Synthetic oligonucleotide
  Antisense strand to SEQ ID NO: 1036244
agaguugugcacaucuugu

SEQ ID NO: 1036246 - RNA, 19 nt, Artificial Sequence
  Description of Artificial Sequence: Synthetic oligonucleotide
  Sense strand starting at position 630 of SEQ ID NO: 914862
ugugcacaacucugaaaca

SEQ ID NO: 1036247 - RNA, 19 nt, Artificial Sequence
  Description of Artificial Sequence: Synthetic oligonucleotide
  Antisense strand to SEQ ID NO: 1036246
uguuucagaguugugcaca

SEQ ID NO: 1036248 - RNA, 19 nt, Artificial Sequence
  Description of Artificial Sequence: Synthetic oligonucleotide
  Sense strand starting at position 631 of SEQ ID NO: 914862
gugcacaacucugaaacaa

SEQ ID NO: 1036249 - RNA, 19 nt, Artificial Sequence
  Description of Artificial Sequence: Synthetic oligonucleotide
  Antisense strand to SEQ ID NO: 1036248
uuguuucagaguugugcac

SEQ ID NO: 1036250 - RNA, 19 nt, Artificial Sequence
  Description of Artificial Sequence: Synthetic oligonucleotide
  Sense strand starting at position 821 of SEQ ID NO: 914862
uucuaaauauucucgugga

SEQ ID NO: 1036251 - RNA, 19 nt, Artificial Sequence
  Description of Artificial Sequence: Synthetic oligonucleotide
  Antisense strand to SEQ ID NO: 1036250
uccacgagaauauuuagaa

SEQ ID NO: 1036252 - RNA, 19 nt, Artificial Sequence
  Description of Artificial Sequence: Synthetic oligonucleotide
  Sense strand starting at position 822 of SEQ ID NO: 914862
ucuaaauauucucguggau

SEQ ID NO: 1036253 - RNA, 19 nt, Artificial Sequence
  Description of Artificial Sequence: Synthetic oligonucleotide
  Antisense strand to SEQ ID NO: 1036252
auccacgagaauauuuaga

SEQ ID NO: 1036254 - RNA, 19 nt, Artificial Sequence
  Description of Artificial Sequence: Synthetic oligonucleotide
  Sense strand starting at position 824 of SEQ ID NO: 914862
uaaauauucucguggauaa

SEQ ID NO: 1036255 - RNA, 19 nt, Artificial Sequence
  Description of Artificial Sequence: Synthetic oligonucleotide
  Antisense strand to SEQ ID NO: 1036254
uuauccacgagaauauuua

SEQ ID NO: 1036256 - RNA, 19 nt, Artificial Sequence
  Description of Artificial Sequence: Synthetic oligonucleotide
  Sense strand starting at position 825 of SEQ ID NO: 914862
aaauauucucguggauaau

SEQ ID NO: 1036257 - RNA, 19 nt, Artificial Sequence
  Description of Artificial Sequence: Synthetic oligonucleotide
  Antisense strand to SEQ ID NO: 1036256
auuauccacgagaauauuu

SEQ ID NO: 1036258 - RNA, 19 nt, Artificial Sequence
  Description of Artificial Sequence: Synthetic oligonucleotide
  Sense strand starting at position 826 of SEQ ID NO: 914862
aauauucucguggauaaug

SEQ ID NO: 1036259 - RNA, 19 nt, Artificial Sequence
  Description of Artificial Sequence: Synthetic oligonucleotide
  Antisense strand to SEQ ID NO: 1036258
cauuauccacgagaauauu

SEQ ID NO: 1036260 - RNA, 19 nt, Artificial Sequence
  Description of Artificial Sequence: Synthetic oligonucleotide
  Sense strand starting at position 834 of SEQ ID NO: 914862
cguggauaauggcuuccau

SEQ ID NO: 1036261 - RNA, 19 nt, Artificial Sequence
  Description of Artificial Sequence: Synthetic oligonucleotide
  Antisense strand to SEQ ID NO: 1036260
auggaagccauuauccacg

SEQ ID NO: 1036262 - RNA, 19 nt, Artificial Sequence
  Description of Artificial Sequence: Synthetic oligonucleotide
  Sense strand starting at position 844 of SEQ ID NO: 914862
ggcuuccauugagaacaca

SEQ ID NO: 1036263 - RNA, 19 nt, Artificial Sequence
  Description of Artificial Sequence: Synthetic oligonucleotide
  Antisense strand to SEQ ID NO: 1036262
uguguucucaauggaagcc

SEQ ID NO: 1036264 - RNA, 19 nt, Artificial Sequence
  Description of Artificial Sequence: Synthetic oligonucleotide
  Sense strand starting at position 2190 of SEQ ID NO: 914862
ggaugcgucggccucgaau

SEQ ID NO: 1036265 - RNA, 19 nt, Artificial Sequence
  Description of Artificial Sequence: Synthetic oligonucleotide
  Antisense strand to SEQ ID NO: 1036264
auucgaggccgacgcaucc

SEQ ID NO: 1036266 - RNA, 19 nt, Artificial Sequence
  Description of Artificial Sequence: Synthetic oligonucleotide
  Sense strand starting at position 3266 of SEQ ID NO: 914862
gaagaugucuccuguuggu

SEQ ID NO: 1036267 - RNA, 19 nt, Artificial Sequence
  Description of Artificial Sequence: Synthetic oligonucleotide
  Antisense strand to SEQ ID NO: 1036266
accaacaggagacaucuuc

SEQ ID NO: 1036268 - RNA, 19 nt, Artificial Sequence
  Description of Artificial Sequence: Synthetic oligonucleotide
  Sense strand starting at position 3579 of SEQ ID NO: 914862
cuugcugagcggugucaca

SEQ ID NO: 1036269 - RNA, 19 nt, Artificial Sequence
  Description of Artificial Sequence: Synthetic oligonucleotide
  Antisense strand to SEQ ID NO: 1036268
ugugacaccgcucagcaag

SEQ ID NO: 1036270 - RNA, 19 nt, Artificial Sequence
  Description of Artificial Sequence: Synthetic oligonucleotide
  Sense strand starting at position 3586 of SEQ ID NO: 914862
agcggugucacacaaaucu

SEQ ID NO: 1036271 - RNA, 19 nt, Artificial Sequence
  Description of Artificial Sequence: Synthetic oligonucleotide
  Antisense strand to SEQ ID NO: 1036270
agauuugugugacaccgcu

SEQ ID NO: 1036272 - RNA, 19 nt, Artificial Sequence
  Description of Artificial Sequence: Synthetic oligonucleotide
  Sense strand starting at position 3729 of SEQ ID NO: 914862
ggacguuagcgagacaauu

SEQ ID NO: 1036273 - RNA, 19 nt, Artificial Sequence
  Description of Artificial Sequence: Synthetic oligonucleotide
  Antisense strand to SEQ ID NO: 1036272
aauugucucgcuaacgucc

SEQ ID NO: 1036274 - RNA, 19 nt, Artificial Sequence
  Description of Artificial Sequence: Synthetic oligonucleotide
  Sense strand starting at position 3731 of SEQ ID NO: 914862
acguuagcgagacaauuaa

SEQ ID NO: 1036275 - RNA, 19 nt, Artificial Sequence
  Description of Artificial Sequence: Synthetic oligonucleotide
  Antisense strand to SEQ ID NO: 1036274
uuaauugucucgcuaacgu

SEQ ID NO: 1036276 - RNA, 19 nt, Artificial Sequence
  Description of Artificial Sequence: Synthetic oligonucleotide
  Sense strand starting at position 3776 of SEQ ID NO: 914862
aggcuugaacuccaaggua

SEQ ID NO: 1036277 - RNA, 19 nt, Artificial Sequence
  Description of Artificial Sequence: Synthetic oligonucleotide
  Antisense strand to SEQ ID NO: 1036276
uaccuuggaguucaagccu

SEQ ID NO: 1036278 - RNA, 19 nt, Artificial Sequence
  Description of Artificial Sequence: Synthetic oligonucleotide
  Sense strand starting at position 3803 of SEQ ID NO: 914862
acguaaaugcaagguauua

SEQ ID NO: 1036279 - RNA, 19 nt, Artificial Sequence
  Description of Artificial Sequence: Synthetic oligonucleotide
  Antisense strand to SEQ ID NO: 1036278
uaauaccuugcauuuacgu

SEQ ID NO: 1036280 - RNA, 19 nt, Artificial Sequence
  Description of Artificial Sequence: Synthetic oligonucleotide
  Sense strand starting at position 3864 of SEQ ID NO: 914862
ggaguuuguacagacauuc

SEQ ID NO: 1036281 - RNA, 19 nt, Artificial Sequence
  Description of Artificial Sequence: Synthetic oligonucleotide
  Antisense strand to SEQ ID NO: 1036280
gaaugucuguacaaacucc

SEQ ID NO: 1036282 - RNA, 19 nt, Artificial Sequence
  Description of Artificial Sequence: Synthetic oligonucleotide
  Sense strand starting at position 3896 of SEQ ID NO: 914862
acaacauccuuaggagaca

SEQ ID NO: 1036283 - RNA, 19 nt, Artificial Sequence
  Description of Artificial Sequence: Synthetic oligonucleotide
  Antisense strand to SEQ ID NO: 1036282
ugucuccuaaggauguugu

SEQ ID NO: 1036284 - RNA, 19 nt, Artificial Sequence
  Description of Artificial Sequence: Synthetic oligonucleotide
  Sense strand starting at position 3922 of SEQ ID NO: 914862
gugccuguuagcgcuauau

SEQ ID NO: 1036285 - RNA, 19 nt, Artificial Sequence
  Description of Artificial Sequence: Synthetic oligonucleotide
  Antisense strand to SEQ ID NO: 1036284
auauagcgcuaacaggcac

SEQ ID NO: 1036286 - RNA, 19 nt, Artificial Sequence
  Description of Artificial Sequence: Synthetic oligonucleotide
  Sense strand starting at position 3924 of SEQ ID NO: 914862
gccuguuagcgcuauauuc

SEQ ID NO: 1036287 - RNA, 19 nt, Artificial Sequence
  Description of Artificial Sequence: Synthetic oligonucleotide
  Antisense strand to SEQ ID NO: 1036286
gaauauagcgcuaacaggc

SEQ ID NO: 1036288 - RNA, 19 nt, Artificial Sequence
  Description of Artificial Sequence: Synthetic oligonucleotide
  Sense strand starting at position 3974 of SEQ ID NO: 914862
gguuaaagagcuugcauaa

SEQ ID NO: 1036289 - RNA, 19 nt, Artificial Sequence
  Description of Artificial Sequence: Synthetic oligonucleotide
  Antisense strand to SEQ ID NO: 1036288
uuaugcaagcucuuuaacc

SEQ ID NO: 1036290 - RNA, 19 nt, Artificial Sequence
  Description of Artificial Sequence: Synthetic oligonucleotide
  Sense strand starting at position 14 of SEQ ID NO: 914863
ccuggaacuuauguucuaa

SEQ ID NO: 1036291 - RNA, 19 nt, Artificial Sequence
  Description of Artificial Sequence: Synthetic oligonucleotide
  Antisense strand to SEQ ID NO: 1036290
uuagaacauaaguuccagg

SEQ ID NO: 1036292 - RNA, 19 nt, Artificial Sequence
  Description of Artificial Sequence: Synthetic oligonucleotide
  Sense strand starting at position 16 of SEQ ID NO: 914863
uggaacuuauguucuaaua

SEQ ID NO: 1036293 - RNA, 19 nt, Artificial Sequence
  Description of Artificial Sequence: Synthetic oligonucleotide
  Antisense strand to SEQ ID NO: 1036292
uauuagaacauaaguucca

SEQ ID NO: 1036294 - RNA, 19 nt, Artificial Sequence
  Description of Artificial Sequence: Synthetic oligonucleotide
  Sense strand starting at position 371 of SEQ ID NO: 914863
uagaauagacucugguaau

SEQ ID NO: 1036295 - RNA, 19 nt, Artificial Sequence
  Description of Artificial Sequence: Synthetic oligonucleotide
  Antisense strand to SEQ ID NO: 1036294
auuaccagagucuauucua

SEQ ID NO: 1036296 - RNA, 19 nt, Artificial Sequence
  Description of Artificial Sequence: Synthetic oligonucleotide
  Sense strand starting at position 628 of SEQ ID NO: 914863
gcgagugacugauuggaag

SEQ ID NO: 1036297 - RNA, 19 nt, Artificial Sequence
  Description of Artificial Sequence: Synthetic oligonucleotide
  Antisense strand to SEQ ID NO: 1036296
cuuccaaucagucacucgc

SEQ ID NO: 1036298 - RNA, 19 nt, Artificial Sequence
  Description of Artificial Sequence: Synthetic oligonucleotide
  Sense strand starting at position 645 of SEQ ID NO: 914863
agugaagucuggaagguag

SEQ ID NO: 1036299 - RNA, 19 nt, Artificial Sequence
  Description of Artificial Sequence: Synthetic oligonucleotide
  Antisense strand to SEQ ID NO: 1036298
cuaccuuccagacuucacu

SEQ ID NO: 1036300 - RNA, 19 nt, Artificial Sequence
  Description of Artificial Sequence: Synthetic oligonucleotide
  Sense strand starting at position 943 of SEQ ID NO: 914863
guaaaugaaccguauguga

SEQ ID NO: 1036301 - RNA, 19 nt, Artificial Sequence
  Description of Artificial Sequence: Synthetic oligonucleotide
  Antisense strand to SEQ ID NO: 1036300
ucacauacgguucauuuac

SEQ ID NO: 1036302 - RNA, 19 nt, Artificial Sequence
  Description of Artificial Sequence: Synthetic oligonucleotide
  Sense strand starting at position 945 of SEQ ID NO: 914863
aaaugaaccguaugugaag

SEQ ID NO: 1036303 - RNA, 19 nt, Artificial Sequence
  Description of Artificial Sequence: Synthetic oligonucleotide
  Antisense strand to SEQ ID NO: 1036302
cuucacauacgguucauuu

SEQ ID NO: 1036304 - RNA, 19 nt, Artificial Sequence
  Description of Artificial Sequence: Synthetic oligonucleotide
  Sense strand starting at position 951 of SEQ ID NO: 914863
accguaugugaagagugaa

SEQ ID NO: 1036305 - RNA, 19 nt, Artificial Sequence
  Description of Artificial Sequence: Synthetic oligonucleotide
  Antisense strand to SEQ ID NO: 1036304
uucacucuucacauacggu

SEQ ID NO: 1036306 - RNA, 19 nt, Artificial Sequence
  Description of Artificial Sequence: Synthetic oligonucleotide
  Sense strand starting at position 954 of SEQ ID NO: 914863
guaugugaagagugaauga

SEQ ID NO: 1036307 - RNA, 19 nt, Artificial Sequence
  Description of Artificial Sequence: Synthetic oligonucleotide
  Antisense strand to SEQ ID NO: 1036306
ucauucacucuucacauac

SEQ ID NO: 1036308 - RNA, 19 nt, Artificial Sequence
  Description of Artificial Sequence: Synthetic oligonucleotide
  Sense strand starting at position 1009 of SEQ ID NO: 914863
gaguaacuagcaugaugau

SEQ ID NO: 1036309 - RNA, 19 nt, Artificial Sequence
  Description of Artificial Sequence: Synthetic oligonucleotide
  Antisense strand to SEQ ID NO: 1036308
aucaucaugcuaguuacuc

SEQ ID NO: 1036310 - RNA, 19 nt, Artificial Sequence
  Description of Artificial Sequence: Synthetic oligonucleotide
  Sense strand starting at position 1035 of SEQ ID NO: 914863
uuuagugagacuuguuaag

SEQ ID NO: 1036311 - RNA, 19 nt, Artificial Sequence
  Description of Artificial Sequence: Synthetic oligonucleotide
  Antisense strand to SEQ ID NO: 1036310
cuuaacaagucucacuaaa

SEQ ID NO: 1036312 - RNA, 19 nt, Artificial Sequence
  Description of Artificial Sequence: Synthetic oligonucleotide
  Sense strand starting at position 1037 of SEQ ID NO: 914863
uagugagacuuguuaagac

SEQ ID NO: 1036313 - RNA, 19 nt, Artificial Sequence
  Description of Artificial Sequence: Synthetic oligonucleotide
  Antisense strand to SEQ ID NO: 1036312
gucuuaacaagucucacua

SEQ ID NO: 1036314 - RNA, 19 nt, Artificial Sequence
  Description of Artificial Sequence: Synthetic oligonucleotide
  Sense strand starting at position 1061 of SEQ ID NO: 914863
gagggauaccuucgguaag

SEQ ID NO: 1036315 - RNA, 19 nt, Artificial Sequence
  Description of Artificial Sequence: Synthetic oligonucleotide
  Antisense strand to SEQ ID NO: 1036314
cuuaccgaagguaucccuc

SEQ ID NO: 1036316 - RNA, 19 nt, Artificial Sequence
  Description of Artificial Sequence: Synthetic oligonucleotide
  Sense strand starting at position 1063 of SEQ ID NO: 914863
gggauaccuucgguaagaa

SEQ ID NO: 1036317 - RNA, 19 nt, Artificial Sequence
  Description of Artificial Sequence: Synthetic oligonucleotide
  Antisense strand to SEQ ID NO: 1036316
uucuuaccgaagguauccc

SEQ ID NO: 1036318 - RNA, 19 nt, Artificial Sequence
  Description of Artificial Sequence: Synthetic oligonucleotide
  Sense strand starting at position 1097 of SEQ ID NO: 914863
ucuugaacucuaugacuga

SEQ ID NO: 1036319 - RNA, 19 nt, Artificial Sequence
  Description of Artificial Sequence: Synthetic oligonucleotide
  Antisense strand to SEQ ID NO: 1036318
ucagucauagaguucaaga

SEQ ID NO: 1036320 - RNA, 19 nt, Artificial Sequence
  Description of Artificial Sequence: Synthetic oligonucleotide
  Sense strand starting at position 1284 of SEQ ID NO: 914863
ggucuaugugaugagauac

SEQ ID NO: 1036321 - RNA, 19 nt, Artificial Sequence
  Description of Artificial Sequence: Synthetic oligonucleotide
  Antisense strand to SEQ ID NO: 1036320
guaucucaucacauagacc

SEQ ID NO: 1036322 - RNA, 19 nt, Artificial Sequence
  Description of Artificial Sequence: Synthetic oligonucleotide
  Sense strand starting at position 1602 of SEQ ID NO: 914863
caggaaugguaccuuugua

SEQ ID NO: 1036323 - RNA, 19 nt, Artificial Sequence
  Description of Artificial Sequence: Synthetic oligonucleotide
  Antisense strand to SEQ ID NO: 1036322
uacaaagguaccauuccug

SEQ ID NO: 1036324 - RNA, 19 nt, Artificial Sequence
  Description of Artificial Sequence: Synthetic oligonucleotide
  Sense strand starting at position 1606 of SEQ ID NO: 914863
aaugguaccuuuguaaaga

SEQ ID NO: 1036325 - RNA, 19 nt, Artificial Sequence
  Description of Artificial Sequence: Synthetic oligonucleotide
  Antisense strand to SEQ ID NO: 1036324
ucuuuacaaagguaccauu

SEQ ID NO: 1036326 - RNA, 19 nt, Artificial Sequence
  Description of Artificial Sequence: Synthetic oligonucleotide
  Sense strand starting at position 2129 of SEQ ID NO: 914863
agugguaauggcgucugua

SEQ ID NO: 1036327 - RNA, 19 nt, Artificial Sequence
  Description of Artificial Sequence: Synthetic oligonucleotide
  Antisense strand to SEQ ID NO: 1036326
uacagacgccauuaccacu

SEQ ID NO: 1036328 - RNA, 19 nt, Artificial Sequence
  Description of Artificial Sequence: Synthetic oligonucleotide
  Sense strand starting at position 2130 of SEQ ID NO: 914863
gugguaauggcgucuguau

SEQ ID NO: 1036329 - RNA, 19 nt, Artificial Sequence
  Description of Artificial Sequence: Synthetic oligonucleotide
  Antisense strand to SEQ ID NO: 1036328
auacagacgccauuaccac

SEQ ID NO: 1036330 - RNA, 19 nt, Artificial Sequence
  Description of Artificial Sequence: Synthetic oligonucleotide
  Sense strand starting at position 2200 of SEQ ID NO: 914863
auaggagauuaucuuucuu

SEQ ID NO: 1036331 - RNA, 19 nt, Artificial Sequence
  Description of Artificial Sequence: Synthetic oligonucleotide
  Antisense strand to SEQ ID NO: 1036330
aagaaagauaaucuccuau

SEQ ID NO: 1036332 - RNA, 19 nt, Artificial Sequence
  Description of Artificial Sequence: Synthetic oligonucleotide
  Sense strand starting at position 2202 of SEQ ID NO: 914863
aggagauuaucuuucuuau

SEQ ID NO: 1036333 - RNA, 19 nt, Artificial Sequence
  Description of Artificial Sequence: Synthetic oligonucleotide
  Antisense strand to SEQ ID NO: 1036332
auaagaaagauaaucuccu

SEQ ID NO: 1036334 - RNA, 19 nt, Artificial Sequence
  Description of Artificial Sequence: Synthetic oligonucleotide
  Sense strand starting at position 2500 of SEQ ID NO: 914863
gggaggccggagugauaau

SEQ ID NO: 1036335 - RNA, 19 nt, Artificial Sequence
  Description of Artificial Sequence: Synthetic oligonucleotide
  Antisense strand to SEQ ID NO: 1036334
auuaucacuccggccuccc

SEQ ID NO: 1036336 - RNA, 19 nt, Artificial Sequence
  Description of Artificial Sequence: Synthetic oligonucleotide
  Sense strand starting at position 2501 of SEQ ID NO: 914863
ggaggccggagugauaauu

SEQ ID NO: 1036337 - RNA, 19 nt, Artificial Sequence
  Description of Artificial Sequence: Synthetic oligonucleotide
  Antisense strand to SEQ ID NO: 1036336
aauuaucacuccggccucc

SEQ ID NO: 1036338 - RNA, 19 nt, Artificial Sequence
  Description of Artificial Sequence: Synthetic oligonucleotide
  Sense strand starting at position 2891 of SEQ ID NO: 914863
aacaaacgguuguuuaaga

SEQ ID NO: 1036339 - RNA, 19 nt, Artificial Sequence
  Description of Artificial Sequence: Synthetic oligonucleotide
  Antisense strand to SEQ ID NO: 1036338
ucuuaaacaaccguuuguu

SEQ ID NO: 1036340 - RNA, 19 nt, Artificial Sequence
  Description of Artificial Sequence: Synthetic oligonucleotide
  Sense strand starting at position 2892 of SEQ ID NO: 914863
acaaacgguuguuuaagaa

SEQ ID NO: 1036341 - RNA, 19 nt, Artificial Sequence
  Description of Artificial Sequence: Synthetic oligonucleotide
  Antisense strand to SEQ ID NO: 1036340
uucuuaaacaaccguuugu

SEQ ID NO: 1036342 - RNA, 19 nt, Artificial Sequence
  Description of Artificial Sequence: Synthetic oligonucleotide
  Sense strand starting at position 2928 of SEQ ID NO: 914863
gucauugaaguuuaacaca

SEQ ID NO: 1036343 - RNA, 19 nt, Artificial Sequence
  Description of Artificial Sequence: Synthetic oligonucleotide
  Antisense strand to SEQ ID NO: 1036342
uguguuaaacuucaaugac

SEQ ID NO: 1036344 - RNA, 19 nt, Artificial Sequence
  Description of Artificial Sequence: Synthetic oligonucleotide
  Sense strand starting at position 2955 of SEQ ID NO: 914863
ugggacauuuaguaacuuu

SEQ ID NO: 1036345 - RNA, 19 nt, Artificial Sequence
  Description of Artificial Sequence: Synthetic oligonucleotide
  Antisense strand to SEQ ID NO: 1036344
aaaguuacuaaauguccca

SEQ ID NO: 1036346 - RNA, 19 nt, Artificial Sequence
  Description of Artificial Sequence: Synthetic oligonucleotide
  Sense strand starting at position 3021 of SEQ ID NO: 914863
auuugcuauugugugaagu

SEQ ID NO: 1036347 - RNA, 19 nt, Artificial Sequence
  Description of Artificial Sequence: Synthetic oligonucleotide
  Antisense strand to SEQ ID NO: 1036346
acuucacacaauagcaaau

SEQ ID NO: 1036348 - RNA, 19 nt, Artificial Sequence
  Description of Artificial Sequence: Synthetic oligonucleotide
  Sense strand starting at position 3029 of SEQ ID NO: 914863
uugugugaaguuuagauaa

SEQ ID NO: 1036349 - RNA, 19 nt, Artificial Sequence
  Description of Artificial Sequence: Synthetic oligonucleotide
  Antisense strand to SEQ ID NO: 1036348
uuaucuaaacuucacacaa

SEQ ID NO: 1036350 - RNA, 19 nt, Artificial Sequence
  Description of Artificial Sequence: Synthetic oligonucleotide
  Sense strand starting at position 3073 of SEQ ID NO: 914863
gaguaagguugaguuggaa

SEQ ID NO: 1036351 - RNA, 19 nt, Artificial Sequence
  Description of Artificial Sequence: Synthetic oligonucleotide
  Antisense strand to SEQ ID NO: 1036350
uuccaacucaaccuuacuc

SEQ ID NO: 1036352 - RNA, 19 nt, Artificial Sequence
  Description of Artificial Sequence: Synthetic oligonucleotide
  Sense strand starting at position 3076 of SEQ ID NO: 914863
uaagguugaguuggaaauu

SEQ ID NO: 1036353 - RNA, 19 nt, Artificial Sequence
  Description of Artificial Sequence: Synthetic oligonucleotide
  Antisense strand to SEQ ID NO: 1036352
aauuuccaacucaaccuua

SEQ ID NO: 1036354 - RNA, 19 nt, Artificial Sequence
  Description of Artificial Sequence: Synthetic oligonucleotide
  Sense strand starting at position 3077 of SEQ ID NO: 914863
aagguugaguuggaaauuu

SEQ ID NO: 1036355 - RNA, 19 nt, Artificial Sequence
  Description of Artificial Sequence: Synthetic oligonucleotide
  Antisense strand to SEQ ID NO: 1036354
aaauuuccaacucaaccuu

SEQ ID NO: 1036356 - RNA, 19 nt, Artificial Sequence
  Description of Artificial Sequence: Synthetic oligonucleotide
  Sense strand starting at position 3198 of SEQ ID NO: 914863
aaaguuaagccaggugacu

SEQ ID NO: 1036357 - RNA, 19 nt, Artificial Sequence
  Description of Artificial Sequence: Synthetic oligonucleotide
  Antisense strand to SEQ ID NO: 1036356
agucaccuggcuuaacuuu

SEQ ID NO: 1036358 - RNA, 19 nt, Artificial Sequence
  Description of Artificial Sequence: Synthetic oligonucleotide
  Sense strand starting at position 3446 of SEQ ID NO: 914863
guuuguaauguuggaaaua

SEQ ID NO: 1036359 - RNA, 19 nt, Artificial Sequence
  Description of Artificial Sequence: Synthetic oligonucleotide
  Antisense strand to SEQ ID NO: 1036358
uauuuccaacauuacaaac

SEQ ID NO: 1036360 - RNA, 19 nt, Artificial Sequence
  Description of Artificial Sequence: Synthetic oligonucleotide
  Sense strand starting at position 3681 of SEQ ID NO: 914863
uggcauggucaugauauag

SEQ ID NO: 1036361 - RNA, 19 nt, Artificial Sequence
  Description of Artificial Sequence: Synthetic oligonucleotide
  Antisense strand to SEQ ID NO: 1036360
cuauaucaugaccaugcca

SEQ ID NO: 1036362 - RNA, 19 nt, Artificial Sequence
  Description of Artificial Sequence: Synthetic oligonucleotide
  Sense strand starting at position 3693 of SEQ ID NO: 914863
gauauaguaguauguuuga

SEQ ID NO: 1036363 - RNA, 19 nt, Artificial Sequence
  Description of Artificial Sequence: Synthetic oligonucleotide
  Antisense strand to SEQ ID NO: 1036362
ucaaacauacuacuauauc

SEQ ID NO: 1036364 - RNA, 19 nt, Artificial Sequence
  Description of Artificial Sequence: Synthetic oligonucleotide
  Sense strand starting at position 3747 of SEQ ID NO: 914863
gcaauaggauguuuaacac

SEQ ID NO: 1036365 - RNA, 19 nt, Artificial Sequence
  Description of Artificial Sequence: Synthetic oligonucleotide
  Antisense strand to SEQ ID NO: 1036364
guguuaaacauccuauugc

SEQ ID NO: 1036366 - RNA, 19 nt, Artificial Sequence
  Description of Artificial Sequence: Synthetic oligonucleotide
  Sense strand starting at position 3848 of SEQ ID NO: 914863
auaauaaugccucagagua

SEQ ID NO: 1036367 - RNA, 19 nt, Artificial Sequence
  Description of Artificial Sequence: Synthetic oligonucleotide
  Antisense strand to SEQ ID NO: 1036366
uacucugaggcauuauuau

SEQ ID NO: 1036368 - RNA, 19 nt, Artificial Sequence
  Description of Artificial Sequence: Synthetic oligonucleotide
  Sense strand starting at position 3876 of SEQ ID NO: 914863
agcaccagucaguauauua

SEQ ID NO: 1036369 - RNA, 19 nt, Artificial Sequence
  Description of Artificial Sequence: Synthetic oligonucleotide
  Antisense strand to SEQ ID NO: 1036368
uaauauacugacuggugcu

SEQ ID NO: 1036370 - RNA, 19 nt, Artificial Sequence
  Description of Artificial Sequence: Synthetic oligonucleotide
  Sense strand starting at position 2014 of SEQ ID NO: 914864
cagcuagugucccacugua

SEQ ID NO: 1036371 - RNA, 19 nt, Artificial Sequence
  Description of Artificial Sequence: Synthetic oligonucleotide
  Antisense strand to SEQ ID NO: 1036370
uacagugggacacuagcug

SEQ ID NO: 1036372 - RNA, 19 nt, Artificial Sequence
  Description of Artificial Sequence: Synthetic oligonucleotide
  Sense strand starting at position 2171 of SEQ ID NO: 914864
augcuaacaucaggauaug

SEQ ID NO: 1036373 - RNA, 19 nt, Artificial Sequence
  Description of Artificial Sequence: Synthetic oligonucleotide
  Antisense strand to SEQ ID NO: 1036372
cauauccugauguuagcau

SEQ ID NO: 1036374 - RNA, 19 nt, Artificial Sequence
  Description of Artificial Sequence: Synthetic oligonucleotide
  Sense strand starting at position 2172 of SEQ ID NO: 914864
ugcuaacaucaggauaugu

SEQ ID NO: 1036375 - RNA, 19 nt, Artificial Sequence
  Description of Artificial Sequence: Synthetic oligonucleotide
  Antisense strand to SEQ ID NO: 1036374
acauauccugauguuagca

SEQ ID NO: 1036376 - RNA, 19 nt, Artificial Sequence
  Description of Artificial Sequence: Synthetic oligonucleotide
  Sense strand starting at position 2580 of SEQ ID NO: 914864
gccugcacccaggagaaau

SEQ ID NO: 1036377 - RNA, 19 nt, Artificial Sequence
  Description of Artificial Sequence: Synthetic oligonucleotide
  Antisense strand to SEQ ID NO: 1036376
auuucuccugggugcaggc

SEQ ID NO: 1036378 - RNA, 19 nt, Artificial Sequence
  Description of Artificial Sequence: Synthetic oligonucleotide
  Sense strand starting at position 2653 of SEQ ID NO: 914864
gugagacauuucgugccga

SEQ ID NO: 1036379 - RNA, 19 nt, Artificial Sequence
  Description of Artificial Sequence: Synthetic oligonucleotide
  Antisense strand to SEQ ID NO: 1036378
ucggcacgaaaugucucac

SEQ ID NO: 1036380 - RNA, 19 nt, Artificial Sequence
  Description of Artificial Sequence: Synthetic oligonucleotide
  Sense strand starting at position 2654 of SEQ ID NO: 914864
ugagacauuucgugccgaa

SEQ ID NO: 1036381 - RNA, 19 nt, Artificial Sequence
  Description of Artificial Sequence: Synthetic oligonucleotide
  Antisense strand to SEQ ID NO: 1036380
uucggcacgaaaugucuca

SEQ ID NO: 1036382 - RNA, 19 nt, Artificial Sequence
  Description of Artificial Sequence: Synthetic oligonucleotide
  Sense strand starting at position 2657 of SEQ ID NO: 914864
gacauuucgugccgaagac

SEQ ID NO: 1036383 - RNA, 19 nt, Artificial Sequence
  Description of Artificial Sequence: Synthetic oligonucleotide
  Antisense strand to SEQ ID NO: 1036382
gucuucggcacgaaauguc

SEQ ID NO: 1036384 - RNA, 19 nt, Artificial Sequence
  Description of Artificial Sequence: Synthetic oligonucleotide
  Sense strand starting at position 3028 of SEQ ID NO: 914864
ggaugugucucugauuauu

SEQ ID NO: 1036385 - RNA, 19 nt, Artificial Sequence
  Description of Artificial Sequence: Synthetic oligonucleotide
  Antisense strand to SEQ ID NO: 1036384
aauaaucagagacacaucc

SEQ ID NO: 1036386 - RNA, 19 nt, Artificial Sequence
  Description of Artificial Sequence: Synthetic oligonucleotide
  Sense strand starting at position 3062 of SEQ ID NO: 914864
ggugucugaucuccgcauu

SEQ ID NO: 1036387 - RNA, 19 nt, Artificial Sequence
  Description of Artificial Sequence: Synthetic oligonucleotide
  Antisense strand to SEQ ID NO: 1036386
aaugcggagaucagacacc

SEQ ID NO: 1036388 - RNA, 19 nt, Artificial Sequence
  Description of Artificial Sequence: Synthetic oligonucleotide
  Sense strand starting at position 3193 of SEQ ID NO: 914864
cugugucucuacccuuauu

SEQ ID NO: 1036389 - RNA, 19 nt, Artificial Sequence
  Description of Artificial Sequence: Synthetic oligonucleotide
  Antisense strand to SEQ ID NO: 1036388
aauaaggguagagacacag

SEQ ID NO: 1036390 - RNA, 19 nt, Artificial Sequence
  Description of Artificial Sequence: Synthetic oligonucleotide
  Sense strand starting at position 3534 of SEQ ID NO: 914864
agagacuugucccaaaucu

SEQ ID NO: 1036391 - RNA, 19 nt, Artificial Sequence
  Description of Artificial Sequence: Synthetic oligonucleotide
  Antisense strand to SEQ ID NO: 1036390
agauuugggacaagucucu

SEQ ID NO: 1036392 - RNA, 19 nt, Artificial Sequence
  Description of Artificial Sequence: Synthetic oligonucleotide
  Sense strand starting at position 109 of SEQ ID NO: 914865
augucauucuaauucugga

SEQ ID NO: 1036393 - RNA, 19 nt, Artificial Sequence
  Description of Artificial Sequence: Synthetic oligonucleotide
  Antisense strand to SEQ ID NO: 1036392
uccagaauuagaaugacau

SEQ ID NO: 1036394 - RNA, 19 nt, Artificial Sequence
  Description of Artificial Sequence: Synthetic oligonucleotide
  Sense strand starting at position 131 of SEQ ID NO: 914865
gagucuauuugguuguguu

SEQ ID NO: 1036395 - RNA, 19 nt, Artificial Sequence
  Description of Artificial Sequence: Synthetic oligonucleotide
  Antisense strand to SEQ ID NO: 1036394
aacacaaccaaauagacuc

SEQ ID NO: 1036396 - RNA, 19 nt, Artificial Sequence
  Description of Artificial Sequence: Synthetic oligonucleotide
  Sense strand starting at position 154 of SEQ ID NO: 914865
caaaguauugcuggauucu

SEQ ID NO: 1036397 - RNA, 19 nt, Artificial Sequence
  Description of Artificial Sequence: Synthetic oligonucleotide
  Antisense strand to SEQ ID NO: 1036396
agaauccagcaauacuuug

SEQ ID NO: 1036398 - RNA, 19 nt, Artificial Sequence
  Description of Artificial Sequence: Synthetic oligonucleotide
  Sense strand starting at position 321 of SEQ ID NO: 914865
gagauaaaucagggucgug

SEQ ID NO: 1036399 - RNA, 19 nt, Artificial Sequence
  Description of Artificial Sequence: Synthetic oligonucleotide
  Antisense strand to SEQ ID NO: 1036398
cacgacccugauuuaucuc

SEQ ID NO: 1036400 - RNA, 19 nt, Artificial Sequence
  Description of Artificial Sequence: Synthetic oligonucleotide
  Sense strand starting at position 336 of SEQ ID NO: 914865
cguguaauagcaguugugu

SEQ ID NO: 1036401 - RNA, 19 nt, Artificial Sequence
  Description of Artificial Sequence: Synthetic oligonucleotide
  Antisense strand to SEQ ID NO: 1036400
acacaacugcuauuacacg

SEQ ID NO: 1036402 - RNA, 19 nt, Artificial Sequence
  Description of Artificial Sequence: Synthetic oligonucleotide
  Sense strand starting at position 337 of SEQ ID NO: 914865
guguaauagcaguuguguc

SEQ ID NO: 1036403 - RNA, 19 nt, Artificial Sequence
  Description of Artificial Sequence: Synthetic oligonucleotide
  Antisense strand to SEQ ID NO: 1036402
gacacaacugcuauuacac

SEQ ID NO: 1036404 - RNA, 19 nt, Artificial Sequence
  Description of Artificial Sequence: Synthetic oligonucleotide
  Sense strand starting at position 344 of SEQ ID NO: 914865
agcaguuguguccaagaaa

SEQ ID NO: 1036405 - RNA, 19 nt, Artificial Sequence
  Description of Artificial Sequence: Synthetic oligonucleotide
  Antisense strand to SEQ ID NO: 1036404
uuucuuggacacaacugcu

SEQ ID NO: 1036406 - RNA, 19 nt, Artificial Sequence
  Description of Artificial Sequence: Synthetic oligonucleotide
  Sense strand starting at position 533 of SEQ ID NO: 914865
uugagaaccugcccaaaga

SEQ ID NO: 1036407 - RNA, 19 nt, Artificial Sequence
  Description of Artificial Sequence: Synthetic oligonucleotide
  Antisense strand to SEQ ID NO: 1036406
ucuuugggcagguucucaa

SEQ ID NO: 1036408 - RNA, 19 nt, Artificial Sequence
  Description of Artificial Sequence: Synthetic oligonucleotide
  Sense strand starting at position 580 of SEQ ID NO: 914865
cagaaagcaugaucggaga

SEQ ID NO: 1036409 - RNA, 19 nt, Artificial Sequence
  Description of Artificial Sequence: Synthetic oligonucleotide
  Antisense strand to SEQ ID NO: 1036408
ucuccgaucaugcuuucug

SEQ ID NO: 1036410 - RNA, 19 nt, Artificial Sequence
  Description of Artificial Sequence: Synthetic oligonucleotide
  Sense strand starting at position 616 of SEQ ID NO: 914865
agugaagcucuauacacau

SEQ ID NO: 1036411 - RNA, 19 nt, Artificial Sequence
  Description of Artificial Sequence: Synthetic oligonucleotide
  Antisense strand to SEQ ID NO: 1036410
auguguauagagcuucacu

SEQ ID NO: 1036412 - RNA, 19 nt, Artificial Sequence
  Description of Artificial Sequence: Synthetic oligonucleotide
  Sense strand starting at position 1004 of SEQ ID NO: 914865
uuaaccaacucuucgagaa

SEQ ID NO: 1036413 - RNA, 19 nt, Artificial Sequence
  Description of Artificial Sequence: Synthetic oligonucleotide
  Antisense strand to SEQ ID NO: 1036412
uucucgaagaguugguuaa

SEQ ID NO: 1036414 - RNA, 19 nt, Artificial Sequence
  Description of Artificial Sequence: Synthetic oligonucleotide
  Sense strand starting at position 1031 of SEQ ID NO: 914865
guuaauccagauuguaaag

SEQ ID NO: 1036415 - RNA, 19 nt, Artificial Sequence
  Description of Artificial Sequence: Synthetic oligonucleotide
  Antisense strand to SEQ ID NO: 1036414
cuuuacaaucuggauuaac

SEQ ID NO: 1036416 - RNA, 19 nt, Artificial Sequence
  Description of Artificial Sequence: Synthetic oligonucleotide
  Sense strand starting at position 1144 of SEQ ID NO: 914865
gccuuuagcagcucuggua

SEQ ID NO: 1036417 - RNA, 19 nt, Artificial Sequence
  Description of Artificial Sequence: Synthetic oligonucleotide
  Antisense strand to SEQ ID NO: 1036416
uaccagagcugcuaaaggc

SEQ ID NO: 1036418 - RNA, 19 nt, Artificial Sequence
  Description of Artificial Sequence: Synthetic oligonucleotide
  Sense strand starting at position 1165 of SEQ ID NO: 914865
ugcauuuagggcuguguua

SEQ ID NO: 1036419 - RNA, 19 nt, Artificial Sequence
  Description of Artificial Sequence: Synthetic oligonucleotide
  Antisense strand to SEQ ID NO: 1036418
uaacacagcccuaaaugca

SEQ ID NO: 1036420 - RNA, 19 nt, Artificial Sequence
  Description of Artificial Sequence: Synthetic oligonucleotide
  Sense strand starting at position 1178 of SEQ ID NO: 914865
guguuaggauaacuguuaa

SEQ ID NO: 1036421 - RNA, 19 nt, Artificial Sequence
  Description of Artificial Sequence: Synthetic oligonucleotide
  Antisense strand to SEQ ID NO: 1036420
uuaacaguuauccuaacac

SEQ ID NO: 1036422 - RNA, 19 nt, Artificial Sequence
  Description of Artificial Sequence: Synthetic oligonucleotide
  Sense strand starting at position 1248 of SEQ ID NO: 914865
cuccaaguaguacgauaaa

SEQ ID NO: 1036423 - RNA, 19 nt, Artificial Sequence
  Description of Artificial Sequence: Synthetic oligonucleotide
  Antisense strand to SEQ ID NO: 1036422
uuuaucguacuacuuggag

SEQ ID NO: 1036424 - RNA, 19 nt, Artificial Sequence
  Description of Artificial Sequence: Synthetic oligonucleotide
  Sense strand starting at position 1251 of SEQ ID NO: 914865
caaguaguacgauaaauca

SEQ ID NO: 1036425 - RNA, 19 nt, Artificial Sequence
  Description of Artificial Sequence: Synthetic oligonucleotide
  Antisense strand to SEQ ID NO: 1036424
ugauuuaucguacuacuug

SEQ ID NO: 1036426 - RNA, 19 nt, Artificial Sequence
  Description of Artificial Sequence: Synthetic oligonucleotide
  Sense strand starting at position 1483 of SEQ ID NO: 914865
gcacuaagaugacuugcua

SEQ ID NO: 1036427 - RNA, 19 nt, Artificial Sequence
  Description of Artificial Sequence: Synthetic oligonucleotide
  Antisense strand to SEQ ID NO: 1036426
uagcaagucaucuuagugc

SEQ ID NO: 1036428 - RNA, 19 nt, Artificial Sequence
  Description of Artificial Sequence: Synthetic oligonucleotide
  Sense strand starting at position 1487 of SEQ ID NO: 914865
uaagaugacuugcuaguuu

SEQ ID NO: 1036429 - RNA, 19 nt, Artificial Sequence
  Description of Artificial Sequence: Synthetic oligonucleotide
  Antisense strand to SEQ ID NO: 1036428
aaacuagcaagucaucuua

SEQ ID NO: 1036430 - RNA, 19 nt, Artificial Sequence
  Description of Artificial Sequence: Synthetic oligonucleotide
  Sense strand starting at position 2282 of SEQ ID NO: 914865
gggaggagucugcagugau

SEQ ID NO: 1036431 - RNA, 19 nt, Artificial Sequence
  Description of Artificial Sequence: Synthetic oligonucleotide
  Antisense strand to SEQ ID NO: 1036430
aucacugcagacuccuccc

SEQ ID NO: 1036432 - RNA, 19 nt, Artificial Sequence
  Description of Artificial Sequence: Synthetic oligonucleotide
  Sense strand starting at position 2415 of SEQ ID NO: 914865
gucuuugugaaguggaaau

SEQ ID NO: 1036433 - RNA, 19 nt, Artificial Sequence
  Description of Artificial Sequence: Synthetic oligonucleotide
  Antisense strand to SEQ ID NO: 1036432
auuuccacuucacaaagac

SEQ ID NO: 1036434 - RNA, 19 nt, Artificial Sequence
  Description of Artificial Sequence: Synthetic oligonucleotide
  Sense strand starting at position 2549 of SEQ ID NO: 914865
ucucgcauugcugccagau

SEQ ID NO: 1036435 - RNA, 19 nt, Artificial Sequence
  Description of Artificial Sequence: Synthetic oligonucleotide
  Antisense strand to SEQ ID NO: 1036434
aucuggcagcaaugcgaga

SEQ ID NO: 1036436 - RNA, 19 nt, Artificial Sequence
  Description of Artificial Sequence: Synthetic oligonucleotide
  Sense strand starting at position 2550 of SEQ ID NO: 914865
cucgcauugcugccagauu

SEQ ID NO: 1036437 - RNA, 19 nt, Artificial Sequence
  Description of Artificial Sequence: Synthetic oligonucleotide
  Antisense strand to SEQ ID NO: 1036436
aaucuggcagcaaugcgag

SEQ ID NO: 1036438 - RNA, 19 nt, Artificial Sequence
  Description of Artificial Sequence: Synthetic oligonucleotide
  Sense strand starting at position 2595 of SEQ ID NO: 914865
uagcaaucucuugggaaga

SEQ ID NO: 1036439 - RNA, 19 nt, Artificial Sequence
  Description of Artificial Sequence: Synthetic oligonucleotide
  Antisense strand to SEQ ID NO: 1036438
ucuucccaagagauugcua

SEQ ID NO: 1036440 - RNA, 19 nt, Artificial Sequence
  Description of Artificial Sequence: Synthetic oligonucleotide
  Sense strand starting at position 2625 of SEQ ID NO: 914865
agaucaucgcauugaaaug

SEQ ID NO: 1036441 - RNA, 19 nt, Artificial Sequence
  Description of Artificial Sequence: Synthetic oligonucleotide
  Antisense strand to SEQ ID NO: 1036440
cauuucaaugcgaugaucu

SEQ ID NO: 1036442 - RNA, 19 nt, Artificial Sequence
  Description of Artificial Sequence: Synthetic oligonucleotide
  Sense strand starting at position 2680 of SEQ ID NO: 914865
gacacuaguuuauuggcua

SEQ ID NO: 1036443 - RNA, 19 nt, Artificial Sequence
  Description of Artificial Sequence: Synthetic oligonucleotide
  Antisense strand to SEQ ID NO: 1036442
uagccaauaaacuaguguc

SEQ ID NO: 1036444 - RNA, 19 nt, Artificial Sequence
  Description of Artificial Sequence: Synthetic oligonucleotide
  Sense strand starting at position 2685 of SEQ ID NO: 914865
uaguuuauuggcuaugcaa

SEQ ID NO: 1036445 - RNA, 19 nt, Artificial Sequence
  Description of Artificial Sequence: Synthetic oligonucleotide
  Antisense strand to SEQ ID NO: 1036444
uugcauagccaauaaacua

SEQ ID NO: 1036446 - RNA, 19 nt, Artificial Sequence
  Description of Artificial Sequence: Synthetic oligonucleotide
  Sense strand starting at position 2732 of SEQ ID NO: 914865
auuguuggagccuaaugua

SEQ ID NO: 1036447 - RNA, 19 nt, Artificial Sequence
  Description of Artificial Sequence: Synthetic oligonucleotide
  Antisense strand to SEQ ID NO: 1036446
uacauuaggcuccaacaau

SEQ ID NO: 1036448 - RNA, 19 nt, Artificial Sequence
  Description of Artificial Sequence: Synthetic oligonucleotide
  Sense strand starting at position 3161 of SEQ ID NO: 914865
ggcaauggccuugauucua

SEQ ID NO: 1036449 - RNA, 19 nt, Artificial Sequence
  Description of Artificial Sequence: Synthetic oligonucleotide
  Antisense strand to SEQ ID NO: 1036448
uagaaucaaggccauugcc

SEQ ID NO: 1036450 - RNA, 19 nt, Artificial Sequence
  Description of Artificial Sequence: Synthetic oligonucleotide
  Sense strand starting at position 3215 of SEQ ID NO: 914865
gggugaucugaguaaagua

SEQ ID NO: 1036451 - RNA, 19 nt, Artificial Sequence
  Description of Artificial Sequence: Synthetic oligonucleotide
  Antisense strand to SEQ ID NO: 1036450
uacuuuacucagaucaccc

SEQ ID NO: 1036452 - RNA, 19 nt, Artificial Sequence
  Description of Artificial Sequence: Synthetic oligonucleotide
  Sense strand starting at position 3239 of SEQ ID NO: 914865
gugcaaaguacagaugaau

SEQ ID NO: 1036453 - RNA, 19 nt, Artificial Sequence
  Description of Artificial Sequence: Synthetic oligonucleotide
  Antisense strand to SEQ ID NO: 1036452
auucaucuguacuuugcac

SEQ ID NO: 1036454 - RNA, 19 nt, Artificial Sequence
  Description of Artificial Sequence: Synthetic oligonucleotide
  Sense strand starting at position 3248 of SEQ ID NO: 914865
acagaugaauaugagaaua

SEQ ID NO: 1036455 - RNA, 19 nt, Artificial Sequence
  Description of Artificial Sequence: Synthetic oligonucleotide
  Antisense strand to SEQ ID NO: 1036454
uauucucauauucaucugu

SEQ ID NO: 1036456 - RNA, 19 nt, Artificial Sequence
  Description of Artificial Sequence: Synthetic oligonucleotide
  Sense strand starting at position 3295 of SEQ ID NO: 914865
augguuagcuuuccagaag

SEQ ID NO: 1036457 - RNA, 19 nt, Artificial Sequence
  Description of Artificial Sequence: Synthetic oligonucleotide
  Antisense strand to SEQ ID NO: 1036456
cuucuggaaagcuaaccau

SEQ ID NO: 1036458 - RNA, 19 nt, Artificial Sequence
  Description of Artificial Sequence: Synthetic oligonucleotide
  Sense strand starting at position 3332 of SEQ ID NO: 914865
auuaguuugcgaucucgua

SEQ ID NO: 1036459 - RNA, 19 nt, Artificial Sequence
  Description of Artificial Sequence: Synthetic oligonucleotide
  Antisense strand to SEQ ID NO: 1036458
uacgagaucgcaaacuaau

SEQ ID NO: 1036460 - RNA, 19 nt, Artificial Sequence
  Description of Artificial Sequence: Synthetic oligonucleotide
  Sense strand starting at position 3333 of SEQ ID NO: 914865
uuaguuugcgaucucguaa

SEQ ID NO: 1036461 - RNA, 19 nt, Artificial Sequence
  Description of Artificial Sequence: Synthetic oligonucleotide
  Antisense strand to SEQ ID NO: 1036460
uuacgagaucgcaaacuaa

SEQ ID NO: 1036462 - RNA, 19 nt, Artificial Sequence
  Description of Artificial Sequence: Synthetic oligonucleotide
  Sense strand starting at position 3378 of SEQ ID NO: 914865
cuugguauauuagcacuaa

SEQ ID NO: 1036463 - RNA, 19 nt, Artificial Sequence
  Description of Artificial Sequence: Synthetic oligonucleotide
  Antisense strand to SEQ ID NO: 1036462
uuagugcuaauauaccaag

SEQ ID NO: 1036464 - RNA, 19 nt, Artificial Sequence
  Description of Artificial Sequence: Synthetic oligonucleotide
  Sense strand starting at position 3575 of SEQ ID NO: 914865
gauguugagguaggagauu

SEQ ID NO: 1036465 - RNA, 19 nt, Artificial Sequence
  Description of Artificial Sequence: Synthetic oligonucleotide
  Antisense strand to SEQ ID NO: 1036464
aaucuccuaccucaacauc

SEQ ID NO: 1036466 - RNA, 19 nt, Artificial Sequence
  Description of Artificial Sequence: Synthetic oligonucleotide
  Sense strand starting at position 3654 of SEQ ID NO: 914865
uuaugaagguaguucugau

SEQ ID NO: 1036467 - RNA, 19 nt, Artificial Sequence
  Description of Artificial Sequence: Synthetic oligonucleotide
  Antisense strand to SEQ ID NO: 1036466
aucagaacuaccuucauaa

SEQ ID NO: 1036468 - RNA, 19 nt, Artificial Sequence
  Description of Artificial Sequence: Synthetic oligonucleotide
  Sense strand starting at position 3747 of SEQ ID NO: 914865
acaauuaggcccuauuaug

SEQ ID NO: 1036469 - RNA, 19 nt, Artificial Sequence
  Description of Artificial Sequence: Synthetic oligonucleotide
  Antisense strand to SEQ ID NO: 1036468
cauaauagggccuaauugu

SEQ ID NO: 1036470 - RNA, 19 nt, Artificial Sequence
  Description of Artificial Sequence: Synthetic oligonucleotide
  Sense strand starting at position 3753 of SEQ ID NO: 914865
aggcccuauuaugucuaaa

SEQ ID NO: 1036471 - RNA, 19 nt, Artificial Sequence
  Description of Artificial Sequence: Synthetic oligonucleotide
  Antisense strand to SEQ ID NO: 1036470
uuuagacauaauagggccu

SEQ ID NO: 1036472 - RNA, 19 nt, Artificial Sequence
  Description of Artificial Sequence: Synthetic oligonucleotide
  Sense strand starting at position 1992 of SEQ ID NO: 914866
gauggaaugaggugaguca

SEQ ID NO: 1036473 - RNA, 19 nt, Artificial Sequence
  Description of Artificial Sequence: Synthetic oligonucleotide
  Antisense strand to SEQ ID NO: 1036472
ugacucaccucauuccauc

SEQ ID NO: 1036474 - RNA, 19 nt, Artificial Sequence
  Description of Artificial Sequence: Synthetic oligonucleotide
  Sense strand starting at position 2069 of SEQ ID NO: 914866
gaugcuuugaaauggagga

SEQ ID NO: 1036475 - RNA, 19 nt, Artificial Sequence
  Description of Artificial Sequence: Synthetic oligonucleotide
  Antisense strand to SEQ ID NO: 1036474
uccuccauuucaaagcauc

SEQ ID NO: 1036476 - RNA, 19 nt, Artificial Sequence
  Description of Artificial Sequence: Synthetic oligonucleotide
  Sense strand starting at position 2082 of SEQ ID NO: 914866
ggaggaagucccugcccau

SEQ ID NO: 1036477 - RNA, 19 nt, Artificial Sequence
  Description of Artificial Sequence: Synthetic oligonucleotide
  Antisense strand to SEQ ID NO: 1036476
augggcagggacuuccucc

SEQ ID NO: 1036478 - RNA, 19 nt, Artificial Sequence
  Description of Artificial Sequence: Synthetic oligonucleotide
  Sense strand starting at position 2239 of SEQ ID NO: 914866
ucgguagaauccuuggaag

SEQ ID NO: 1036479 - RNA, 19 nt, Artificial Sequence
  Description of Artificial Sequence: Synthetic oligonucleotide
  Antisense strand to SEQ ID NO: 1036478
cuuccaaggauucuaccga

SEQ ID NO: 1036480 - RNA, 19 nt, Artificial Sequence
  Description of Artificial Sequence: Synthetic oligonucleotide
  Sense strand starting at position 2241 of SEQ ID NO: 914866
gguagaauccuuggaaggu

SEQ ID NO: 1036481 - RNA, 19 nt, Artificial Sequence
  Description of Artificial Sequence: Synthetic oligonucleotide
  Antisense strand to SEQ ID NO: 1036480
accuuccaaggauucuacc

SEQ ID NO: 1036482 - RNA, 19 nt, Artificial Sequence
  Description of Artificial Sequence: Synthetic oligonucleotide
  Sense strand starting at position 2269 of SEQ ID NO: 914866
gcgcuauguccgcuuccuu

SEQ ID NO: 1036483 - RNA, 19 nt, Artificial Sequence
  Description of Artificial Sequence: Synthetic oligonucleotide
  Antisense strand to SEQ ID NO: 1036482
aaggaagcggacauagcgc

SEQ ID NO: 1036484 - RNA, 19 nt, Artificial Sequence
  Description of Artificial Sequence: Synthetic oligonucleotide
  Sense strand starting at position 2311 of SEQ ID NO: 914866
gcgugagcccuaguucugu

SEQ ID NO: 1036485 - RNA, 19 nt, Artificial Sequence
  Description of Artificial Sequence: Synthetic oligonucleotide
  Antisense strand to SEQ ID NO: 1036484
acagaacuagggcucacgc

SEQ ID NO: 1036486 - RNA, 19 nt, Artificial Sequence
  Description of Artificial Sequence: Synthetic oligonucleotide
  Sense strand starting at position 2429 of SEQ ID NO: 914866
accugacuucugugaaagg

SEQ ID NO: 1036487 - RNA, 19 nt, Artificial Sequence
  Description of Artificial Sequence: Synthetic oligonucleotide
  Antisense strand to SEQ ID NO: 1036486
ccuuucacagaagucaggu

SEQ ID NO: 1036488 - RNA, 19 nt, Artificial Sequence
  Description of Artificial Sequence: Synthetic oligonucleotide
  Sense strand starting at position 2444 of SEQ ID NO: 914866
aaggccauguuggugaaau

SEQ ID NO: 1036489 - RNA, 19 nt, Artificial Sequence
  Description of Artificial Sequence: Synthetic oligonucleotide
  Antisense strand to SEQ ID NO: 1036488
auuucaccaacauggccuu

SEQ ID NO: 1036490 - RNA, 19 nt, Artificial Sequence
  Description of Artificial Sequence: Synthetic oligonucleotide
  Sense strand starting at position 2446 of SEQ ID NO: 914866
ggccauguuggugaaauug

SEQ ID NO: 1036491 - RNA, 19 nt, Artificial Sequence
  Description of Artificial Sequence: Synthetic oligonucleotide
  Antisense strand to SEQ ID NO: 1036490
caauuucaccaacauggcc

SEQ ID NO: 1036492 - RNA, 19 nt, Artificial Sequence
  Description of Artificial Sequence: Synthetic oligonucleotide
  Sense strand starting at position 2452 of SEQ ID NO: 914866
guuggugaaauugguaaca

SEQ ID NO: 1036493 - RNA, 19 nt, Artificial Sequence
  Description of Artificial Sequence: Synthetic oligonucleotide
  Antisense strand to SEQ ID NO: 1036492
uguuaccaauuucaccaac

SEQ ID NO: 1036494 - RNA, 19 nt, Artificial Sequence
  Description of Artificial Sequence: Synthetic oligonucleotide
  Sense strand starting at position 2501 of SEQ ID NO: 914866
gggugacauucaucuguag

SEQ ID NO: 1036495 - RNA, 19 nt, Artificial Sequence
  Description of Artificial Sequence: Synthetic oligonucleotide
  Antisense strand to SEQ ID NO: 1036494
cuacagaugaaugucaccc

SEQ ID NO: 1036496 - RNA, 19 nt, Artificial Sequence
  Description of Artificial Sequence: Synthetic oligonucleotide
  Sense strand starting at position 2519 of SEQ ID NO: 914866
gauugucuguuccugugaa

SEQ ID NO: 1036497 - RNA, 19 nt, Artificial Sequence
  Description of Artificial Sequence: Synthetic oligonucleotide
  Antisense strand to SEQ ID NO: 1036496
uucacaggaacagacaauc

SEQ ID NO: 1036498 - RNA, 19 nt, Artificial Sequence
  Description of Artificial Sequence: Synthetic oligonucleotide
  Sense strand starting at position 2557 of SEQ ID NO: 914866
gguguuggaugcucaugaa

SEQ ID NO: 1036499 - RNA, 19 nt, Artificial Sequence
  Description of Artificial Sequence: Synthetic oligonucleotide
  Antisense strand to SEQ ID NO: 1036498
uucaugagcauccaacacc

SEQ ID NO: 1036500 - RNA, 19 nt, Artificial Sequence
  Description of Artificial Sequence: Synthetic oligonucleotide
  Sense strand starting at position 2599 of SEQ ID NO: 914866
gagacaaaggugugugcaa

SEQ ID NO: 1036501 - RNA, 19 nt, Artificial Sequence
  Description of Artificial Sequence: Synthetic oligonucleotide
  Antisense strand to SEQ ID NO: 1036500
uugcacacaccuuugucuc

SEQ ID NO: 1036502 - RNA, 19 nt, Artificial Sequence
  Description of Artificial Sequence: Synthetic oligonucleotide
  Sense strand starting at position 2734 of SEQ ID NO: 914866
gcaguuucugaugaaguga

SEQ ID NO: 1036503 - RNA, 19 nt, Artificial Sequence
  Description of Artificial Sequence: Synthetic oligonucleotide
  Antisense strand to SEQ ID NO: 1036502
ucacuucaucagaaacugc

SEQ ID NO: 1036504 - RNA, 19 nt, Artificial Sequence
  Description of Artificial Sequence: Synthetic oligonucleotide
  Sense strand starting at position 2745 of SEQ ID NO: 914866
ugaagugaugcuuaaggca

SEQ ID NO: 1036505 - RNA, 19 nt, Artificial Sequence
  Description of Artificial Sequence: Synthetic oligonucleotide
  Antisense strand to SEQ ID NO: 1036504
ugccuuaagcaucacuuca

SEQ ID NO: 1036506 - RNA, 19 nt, Artificial Sequence
  Description of Artificial Sequence: Synthetic oligonucleotide
  Sense strand starting at position 2812 of SEQ ID NO: 914866
caaggcguggacugugaaa

SEQ ID NO: 1036507 - RNA, 19 nt, Artificial Sequence
  Description of Artificial Sequence: Synthetic oligonucleotide
  Antisense strand to SEQ ID NO: 1036506
uuucacaguccacgccuug

SEQ ID NO: 1036508 - RNA, 19 nt, Artificial Sequence
  Description of Artificial Sequence: Synthetic oligonucleotide
  Sense strand starting at position 2814 of SEQ ID NO: 914866
aggcguggacugugaaacu

SEQ ID NO: 1036509 - RNA, 19 nt, Artificial Sequence
  Description of Artificial Sequence: Synthetic oligonucleotide
  Antisense strand to SEQ ID NO: 1036508
aguuucacaguccacgccu

SEQ ID NO: 1036510 - RNA, 19 nt, Artificial Sequence
  Description of Artificial Sequence: Synthetic oligonucleotide
  Sense strand starting at position 2912 of SEQ ID NO: 914866
aaagaagaacuguguauuc

SEQ ID NO: 1036511 - RNA, 19 nt, Artificial Sequence
  Description of Artificial Sequence: Synthetic oligonucleotide
  Antisense strand to SEQ ID NO: 1036510
gaauacacaguucuucuuu

SEQ ID NO: 1036512 - RNA, 19 nt, Artificial Sequence
  Description of Artificial Sequence: Synthetic oligonucleotide
  Sense strand starting at position 2993 of SEQ ID NO: 914866
uuggaaagauggcuccaau

SEQ ID NO: 1036513 - RNA, 19 nt, Artificial Sequence
  Description of Artificial Sequence: Synthetic oligonucleotide
  Antisense strand to SEQ ID NO: 1036512
auuggagccaucuuuccaa

SEQ ID NO: 1036514 - RNA, 19 nt, Artificial Sequence
  Description of Artificial Sequence: Synthetic oligonucleotide
  Sense strand starting at position 3381 of SEQ ID NO: 914866
ccaagaaauuggccuuaca

SEQ ID NO: 1036515 - RNA, 19 nt, Artificial Sequence
  Description of Artificial Sequence: Synthetic oligonucleotide
  Antisense strand to SEQ ID NO: 1036514
uguaaggccaauuucuugg

SEQ ID NO: 1036516 - RNA, 19 nt, Artificial Sequence
  Description of Artificial Sequence: Synthetic oligonucleotide
  Sense strand starting at position 3420 of SEQ ID NO: 914866
gguauaagccaauacuaca

SEQ ID NO: 1036517 - RNA, 19 nt, Artificial Sequence
  Description of Artificial Sequence: Synthetic oligonucleotide
  Antisense strand to SEQ ID NO: 1036516
uguaguauuggcuuauacc

SEQ ID NO: 1036518 - RNA, 19 nt, Artificial Sequence
  Description of Artificial Sequence: Synthetic oligonucleotide
  Sense strand starting at position 3440 of SEQ ID NO: 914866
cagguuuguugacuugauu

SEQ ID NO: 1036519 - RNA, 19 nt, Artificial Sequence
  Description of Artificial Sequence: Synthetic oligonucleotide
  Antisense strand to SEQ ID NO: 1036518
aaucaagucaacaaaccug

SEQ ID NO: 1036520 - RNA, 19 nt, Artificial Sequence
  Description of Artificial Sequence: Synthetic oligonucleotide
  Sense strand starting at position 3484 of SEQ ID NO: 914866
cuaggcaggccguaaucau

SEQ ID NO: 1036521 - RNA, 19 nt, Artificial Sequence
  Description of Artificial Sequence: Synthetic oligonucleotide
  Antisense strand to SEQ ID NO: 1036520
augauuacggccugccuag

SEQ ID NO: 1036522 - RNA, 19 nt, Artificial Sequence
  Description of Artificial Sequence: Synthetic oligonucleotide
  Sense strand starting at position 3554 of SEQ ID NO: 914866
gugcuuucugaagagccaa

SEQ ID NO: 1036523 - RNA, 19 nt, Artificial Sequence
  Description of Artificial Sequence: Synthetic oligonucleotide
  Antisense strand to SEQ ID NO: 1036522
uuggcucuucagaaagcac

SEQ ID NO: 1036524 - RNA, 19 nt, Artificial Sequence
  Description of Artificial Sequence: Synthetic oligonucleotide
  Sense strand starting at position 3642 of SEQ ID NO: 914866
acacuaaagucugcauagu

SEQ ID NO: 1036525 - RNA, 19 nt, Artificial Sequence
  Description of Artificial Sequence: Synthetic oligonucleotide
  Antisense strand to SEQ ID NO: 1036524
acuaugcagacuuuagugu

SEQ ID NO: 1036526 - RNA, 19 nt, Artificial Sequence
  Description of Artificial Sequence: Synthetic oligonucleotide
  Sense strand starting at position 3698 of SEQ ID NO: 914866
caugguuugcaauggaaau

SEQ ID NO: 1036527 - RNA, 19 nt, Artificial Sequence
  Description of Artificial Sequence: Synthetic oligonucleotide
  Antisense strand to SEQ ID NO: 1036526
auuuccauugcaaaccaug

SEQ ID NO: 1036528 - RNA, 19 nt, Artificial Sequence
  Description of Artificial Sequence: Synthetic oligonucleotide
  Sense strand starting at position 3699 of SEQ ID NO: 914866
augguuugcaauggaaauu

SEQ ID NO: 1036529 - RNA, 19 nt, Artificial Sequence
  Description of Artificial Sequence: Synthetic oligonucleotide
  Antisense strand to SEQ ID NO: 1036528
aauuuccauugcaaaccau

SEQ ID NO: 1036530 - RNA, 19 nt, Artificial Sequence
  Description of Artificial Sequence: Synthetic oligonucleotide
  Sense strand starting at position 3710 of SEQ ID NO: 914866
uggaaauuguguuucuaug

SEQ ID NO: 1036531 - RNA, 19 nt, Artificial Sequence
  Description of Artificial Sequence: Synthetic oligonucleotide
  Antisense strand to SEQ ID NO: 1036530
cauagaaacacaauuucca

SEQ ID NO: 1036532 - RNA, 19 nt, Artificial Sequence
  Description of Artificial Sequence: Synthetic oligonucleotide
  Sense strand starting at position 3712 of SEQ ID NO: 914866
gaaauuguguuucuauguu

SEQ ID NO: 1036533 - RNA, 19 nt, Artificial Sequence
  Description of Artificial Sequence: Synthetic oligonucleotide
  Antisense strand to SEQ ID NO: 1036532
aacauagaaacacaauuuc

SEQ ID NO: 1036534 - RNA, 19 nt, Artificial Sequence
  Description of Artificial Sequence: Synthetic oligonucleotide
  Sense strand starting at position 3870 of SEQ ID NO: 914866
agucuuaucugguuacuua

SEQ ID NO: 1036535 - RNA, 19 nt, Artificial Sequence
  Description of Artificial Sequence: Synthetic oligonucleotide
  Antisense strand to SEQ ID NO: 1036534
uaaguaaccagauaagacu

SEQ ID NO: 1036536 - RNA, 19 nt, Artificial Sequence
  Description of Artificial Sequence: Synthetic oligonucleotide
  Sense strand starting at position 3871 of SEQ ID NO: 914866
gucuuaucugguuacuuau

SEQ ID NO: 1036537 - RNA, 19 nt, Artificial Sequence
  Description of Artificial Sequence: Synthetic oligonucleotide
  Antisense strand to SEQ ID NO: 1036536
auaaguaaccagauaagac

SEQ ID NO: 1036538 - RNA, 19 nt, Artificial Sequence
  Description of Artificial Sequence: Synthetic oligonucleotide
  Sense strand starting at position 3873 of SEQ ID NO: 914866
cuuaucugguuacuuauau

SEQ ID NO: 1036539 - RNA, 19 nt, Artificial Sequence
  Description of Artificial Sequence: Synthetic oligonucleotide
  Antisense strand to SEQ ID NO: 1036538
auauaaguaaccagauaag

SEQ ID NO: 1036540 - RNA, 19 nt, Artificial Sequence
  Description of Artificial Sequence: Synthetic oligonucleotide
  Sense strand starting at position 3879 of SEQ ID NO: 914866
ugguuacuuauauggguaa

SEQ ID NO: 1036541 - RNA, 19 nt, Artificial Sequence
  Description of Artificial Sequence: Synthetic oligonucleotide
  Antisense strand to SEQ ID NO: 1036540
uuacccauauaaguaacca

SEQ ID NO: 1036542 - RNA, 19 nt, Artificial Sequence
  Description of Artificial Sequence: Synthetic oligonucleotide
  Sense strand starting at position 3967 of SEQ ID NO: 914866
guggaugucaggugaaauc

SEQ ID NO: 1036543 - RNA, 19 nt, Artificial Sequence
  Description of Artificial Sequence: Synthetic oligonucleotide
  Antisense strand to SEQ ID NO: 1036542
gauuucaccugacauccac

SEQ ID NO: 1036544 - RNA, 19 nt, Artificial Sequence
  Description of Artificial Sequence: Synthetic oligonucleotide
  Sense strand starting at position 3974 of SEQ ID NO: 914866
ucaggugaaaucuguguag

SEQ ID NO: 1036545 - RNA, 19 nt, Artificial Sequence
  Description of Artificial Sequence: Synthetic oligonucleotide
  Antisense strand to SEQ ID NO: 1036544
cuacacagauuucaccuga

SEQ ID NO: 1036546 - RNA, 19 nt, Artificial Sequence
  Description of Artificial Sequence: Synthetic oligonucleotide
  Sense strand starting at position 3976 of SEQ ID NO: 914866
aggugaaaucuguguagga

SEQ ID NO: 1036547 - RNA, 19 nt, Artificial Sequence
  Description of Artificial Sequence: Synthetic oligonucleotide
  Antisense strand to SEQ ID NO: 1036546
uccuacacagauuucaccu

SEQ ID NO: 1036548 - RNA, 19 nt, Artificial Sequence
  Description of Artificial Sequence: Synthetic oligonucleotide
  Sense strand starting at position 3977 of SEQ ID NO: 914866
ggugaaaucuguguaggau

SEQ ID NO: 1036549 - RNA, 19 nt, Artificial Sequence
  Description of Artificial Sequence: Synthetic oligonucleotide
  Antisense strand to SEQ ID NO: 1036548
auccuacacagauuucacc

SEQ ID NO: 1036550 - RNA, 19 nt, Artificial Sequence
  Description of Artificial Sequence: Synthetic oligonucleotide
  Sense strand starting at position 3978 of SEQ ID NO: 914866
gugaaaucuguguaggauu

SEQ ID NO: 1036551 - RNA, 19 nt, Artificial Sequence
  Description of Artificial Sequence: Synthetic oligonucleotide
  Antisense strand to SEQ ID NO: 1036550
aauccuacacagauuucac

SEQ ID NO: 1036552 - RNA, 19 nt, Artificial Sequence
  Description of Artificial Sequence: Synthetic oligonucleotide
  Sense strand starting at position 85 of SEQ ID NO: 914867
acagaaguagagugacagu

SEQ ID NO: 1036553 - RNA, 19 nt, Artificial Sequence
  Description of Artificial Sequence: Synthetic oligonucleotide
  Antisense strand to SEQ ID NO: 1036552
acugucacucuacuucugu

SEQ ID NO: 1036554 - RNA, 19 nt, Artificial Sequence
  Description of Artificial Sequence: Synthetic oligonucleotide
  Sense strand starting at position 385 of SEQ ID NO: 914867
cgugucucuuaauugauuu

SEQ ID NO: 1036555 - RNA, 19 nt, Artificial Sequence
  Description of Artificial Sequence: Synthetic oligonucleotide
  Antisense strand to SEQ ID NO: 1036554
aaaucaauuaagagacacg

SEQ ID NO: 1036556 - RNA, 19 nt, Artificial Sequence
  Description of Artificial Sequence: Synthetic oligonucleotide
  Sense strand starting at position 405 of SEQ ID NO: 914867
ggguauuucuaugauggga

SEQ ID NO: 1036557 - RNA, 19 nt, Artificial Sequence
  Description of Artificial Sequence: Synthetic oligonucleotide
  Antisense strand to SEQ ID NO: 1036556
ucccaucauagaaauaccc

SEQ ID NO: 1036558 - RNA, 19 nt, Artificial Sequence
  Description of Artificial Sequence: Synthetic oligonucleotide
  Sense strand starting at position 919 of SEQ ID NO: 914867
acuaucuagucauuggaua

SEQ ID NO: 1036559 - RNA, 19 nt, Artificial Sequence
  Description of Artificial Sequence: Synthetic oligonucleotide
  Antisense strand to SEQ ID NO: 1036558
uauccaaugacuagauagu

SEQ ID NO: 1036560 - RNA, 19 nt, Artificial Sequence
  Description of Artificial Sequence: Synthetic oligonucleotide
  Sense strand starting at position 920 of SEQ ID NO: 914867
cuaucuagucauuggauau

SEQ ID NO: 1036561 - RNA, 19 nt, Artificial Sequence
  Description of Artificial Sequence: Synthetic oligonucleotide
  Antisense strand to SEQ ID NO: 1036560
auauccaaugacuagauag

SEQ ID NO: 1036562 - RNA, 19 nt, Artificial Sequence
  Description of Artificial Sequence: Synthetic oligonucleotide
  Sense strand starting at position 1022 of SEQ ID NO: 914867
aaaucuguagagugccuaa

SEQ ID NO: 1036563 - RNA, 19 nt, Artificial Sequence
  Description of Artificial Sequence: Synthetic oligonucleotide
  Antisense strand to SEQ ID NO: 1036562
uuaggcacucuacagauuu

SEQ ID NO: 1036564 - RNA, 19 nt, Artificial Sequence
  Description of Artificial Sequence: Synthetic oligonucleotide
  Sense strand starting at position 1142 of SEQ ID NO: 914867
uuggcuucucuguaacuga

SEQ ID NO: 1036565 - RNA, 19 nt, Artificial Sequence
  Description of Artificial Sequence: Synthetic oligonucleotide
  Antisense strand to SEQ ID NO: 1036564
ucaguuacagagaagccaa

SEQ ID NO: 1036566 - RNA, 19 nt, Artificial Sequence
  Description of Artificial Sequence: Synthetic oligonucleotide
  Sense strand starting at position 1149 of SEQ ID NO: 914867
cucuguaacugagugacua

SEQ ID NO: 1036567 - RNA, 19 nt, Artificial Sequence
  Description of Artificial Sequence: Synthetic oligonucleotide
  Antisense strand to SEQ ID NO: 1036566
uagucacucaguuacagag

SEQ ID NO: 1036568 - RNA, 19 nt, Artificial Sequence
  Description of Artificial Sequence: Synthetic oligonucleotide
  Sense strand starting at position 1150 of SEQ ID NO: 914867
ucuguaacugagugacuaa

SEQ ID NO: 1036569 - RNA, 19 nt, Artificial Sequence
  Description of Artificial Sequence: Synthetic oligonucleotide
  Antisense strand to SEQ ID NO: 1036568
uuagucacucaguuacaga

SEQ ID NO: 1036570 - RNA, 19 nt, Artificial Sequence
  Description of Artificial Sequence: Synthetic oligonucleotide
  Sense strand starting at position 1153 of SEQ ID NO: 914867
guaacugagugacuaauga

SEQ ID NO: 1036571 - RNA, 19 nt, Artificial Sequence
  Description of Artificial Sequence: Synthetic oligonucleotide
  Antisense strand to SEQ ID NO: 1036570
ucauuagucacucaguuac

SEQ ID NO: 1036572 - RNA, 19 nt, Artificial Sequence
  Description of Artificial Sequence: Synthetic oligonucleotide
  Sense strand starting at position 1302 of SEQ ID NO: 914867
ucggcaaucccguuaggca

SEQ ID NO: 1036573 - RNA, 19 nt, Artificial Sequence
  Description of Artificial Sequence: Synthetic oligonucleotide
  Antisense strand to SEQ ID NO: 1036572
ugccuaacgggauugccga

SEQ ID NO: 1036574 - RNA, 19 nt, Artificial Sequence
  Description of Artificial Sequence: Synthetic oligonucleotide
  Sense strand starting at position 1644 of SEQ ID NO: 914867
agcugagcagucgaggauu

SEQ ID NO: 1036575 - RNA, 19 nt, Artificial Sequence
  Description of Artificial Sequence: Synthetic oligonucleotide
  Antisense strand to SEQ ID NO: 1036574
aauccucgacugcucagcu

SEQ ID NO: 1036576 - RNA, 19 nt, Artificial Sequence
  Description of Artificial Sequence: Synthetic oligonucleotide
  Sense strand starting at position 2245 of SEQ ID NO: 914867
gaguuaagggugugaguga

SEQ ID NO: 1036577 - RNA, 19 nt, Artificial Sequence
  Description of Artificial Sequence: Synthetic oligonucleotide
  Antisense strand to SEQ ID NO: 1036576
ucacucacacccuuaacuc

SEQ ID NO: 1036578 - RNA, 19 nt, Artificial Sequence
  Description of Artificial Sequence: Synthetic oligonucleotide
  Sense strand starting at position 2313 of SEQ ID NO: 914867
ggaguuuggguguggauua

SEQ ID NO: 1036579 - RNA, 19 nt, Artificial Sequence
  Description of Artificial Sequence: Synthetic oligonucleotide
  Antisense strand to SEQ ID NO: 1036578
uaauccacacccaaacucc

SEQ ID NO: 1036580 - RNA, 19 nt, Artificial Sequence
  Description of Artificial Sequence: Synthetic oligonucleotide
  Sense strand starting at position 2390 of SEQ ID NO: 914867
gggaccuguuucuuccaga

SEQ ID NO: 1036581 - RNA, 19 nt, Artificial Sequence
  Description of Artificial Sequence: Synthetic oligonucleotide
  Antisense strand to SEQ ID NO: 1036580
ucuggaagaaacagguccc

SEQ ID NO: 1036582 - RNA, 19 nt, Artificial Sequence
  Description of Artificial Sequence: Synthetic oligonucleotide
  Sense strand starting at position 2391 of SEQ ID NO: 914867
ggaccuguuucuuccagac

SEQ ID NO: 1036583 - RNA, 19 nt, Artificial Sequence
  Description of Artificial Sequence: Synthetic oligonucleotide
  Antisense strand to SEQ ID NO: 1036582
gucuggaagaaacaggucc

SEQ ID NO: 1036584 - RNA, 19 nt, Artificial Sequence
  Description of Artificial Sequence: Synthetic oligonucleotide
  Sense strand starting at position 2395 of SEQ ID NO: 914867
cuguuucuuccagacacau

SEQ ID NO: 1036585 - RNA, 19 nt, Artificial Sequence
  Description of Artificial Sequence: Synthetic oligonucleotide
  Antisense strand to SEQ ID NO: 1036584
augugucuggaagaaacag

SEQ ID NO: 1036586 - RNA, 19 nt, Artificial Sequence
  Description of Artificial Sequence: Synthetic oligonucleotide
  Sense strand starting at position 2505 of SEQ ID NO: 914867
gccuacucccauuaguacu

SEQ ID NO: 1036587 - RNA, 19 nt, Artificial Sequence
  Description of Artificial Sequence: Synthetic oligonucleotide
  Antisense strand to SEQ ID NO: 1036586
aguacuaaugggaguaggc

SEQ ID NO: 1036588 - RNA, 19 nt, Artificial Sequence
  Description of Artificial Sequence: Synthetic oligonucleotide
  Sense strand starting at position 2515 of SEQ ID NO: 914867
auuaguacugaccgugaaa

SEQ ID NO: 1036589 - RNA, 19 nt, Artificial Sequence
  Description of Artificial Sequence: Synthetic oligonucleotide
  Antisense strand to SEQ ID NO: 1036588
uuucacggucaguacuaau

SEQ ID NO: 1036590 - RNA, 19 nt, Artificial Sequence
  Description of Artificial Sequence: Synthetic oligonucleotide
  Sense strand starting at position 2517 of SEQ ID NO: 914867
uaguacugaccgugaaacu

SEQ ID NO: 1036591 - RNA, 19 nt, Artificial Sequence
  Description of Artificial Sequence: Synthetic oligonucleotide
  Antisense strand to SEQ ID NO: 1036590
aguuucacggucaguacua

SEQ ID NO: 1036592 - RNA, 19 nt, Artificial Sequence
  Description of Artificial Sequence: Synthetic oligonucleotide
  Sense strand starting at position 2518 of SEQ ID NO: 914867
aguacugaccgugaaacua

SEQ ID NO: 1036593 - RNA, 19 nt, Artificial Sequence
  Description of Artificial Sequence: Synthetic oligonucleotide
  Antisense strand to SEQ ID NO: 1036592
uaguuucacggucaguacu

SEQ ID NO: 1036594 - RNA, 19 nt, Artificial Sequence
  Description of Artificial Sequence: Synthetic oligonucleotide
  Sense strand starting at position 2565 of SEQ ID NO: 914867
cugucuaaugauggcauaa

SEQ ID NO: 1036595 - RNA, 19 nt, Artificial Sequence
  Description of Artificial Sequence: Synthetic oligonucleotide
  Antisense strand to SEQ ID NO: 1036594
uuaugccaucauuagacag

SEQ ID NO: 1036596 - RNA, 19 nt, Artificial Sequence
  Description of Artificial Sequence: Synthetic oligonucleotide
  Sense strand starting at position 2612 of SEQ ID NO: 914867
uuuauuauuaggugaagug

SEQ ID NO: 1036597 - RNA, 19 nt, Artificial Sequence
  Description of Artificial Sequence: Synthetic oligonucleotide
  Antisense strand to SEQ ID NO: 1036596
cacuucaccuaauaauaaa

SEQ ID NO: 1036598 - RNA, 19 nt, Artificial Sequence
  Description of Artificial Sequence: Synthetic oligonucleotide
  Sense strand starting at position 2639 of SEQ ID NO: 914867
uaagucccagguuauagau

SEQ ID NO: 1036599 - RNA, 19 nt, Artificial Sequence
  Description of Artificial Sequence: Synthetic oligonucleotide
  Antisense strand to SEQ ID NO: 1036598
aucuauaaccugggacuua

SEQ ID NO: 1036600 - RNA, 19 nt, Artificial Sequence
  Description of Artificial Sequence: Synthetic oligonucleotide
  Sense strand starting at position 2916 of SEQ ID NO: 914867
acccaugcagaguauuaua

SEQ ID NO: 1036601 - RNA, 19 nt, Artificial Sequence
  Description of Artificial Sequence: Synthetic oligonucleotide
  Antisense strand to SEQ ID NO: 1036600
uauaauacucugcaugggu

SEQ ID NO: 1036602 - RNA, 19 nt, Artificial Sequence
  Description of Artificial Sequence: Synthetic oligonucleotide
  Sense strand starting at position 2948 of SEQ ID NO: 914867
auggaaaccucuguauuau

SEQ ID NO: 1036603 - RNA, 19 nt, Artificial Sequence
  Description of Artificial Sequence: Synthetic oligonucleotide
  Antisense strand to SEQ ID NO: 1036602
auaauacagagguuuccau

SEQ ID NO: 1036604 - RNA, 19 nt, Artificial Sequence
  Description of Artificial Sequence: Synthetic oligonucleotide
  Sense strand starting at position 2969 of SEQ ID NO: 914867
acauuuauuuccuguugag

SEQ ID NO: 1036605 - RNA, 19 nt, Artificial Sequence
  Description of Artificial Sequence: Synthetic oligonucleotide
  Antisense strand to SEQ ID NO: 1036604
cucaacaggaaauaaaugu

SEQ ID NO: 1036606 - RNA, 19 nt, Artificial Sequence
  Description of Artificial Sequence: Synthetic oligonucleotide
  Sense strand starting at position 2995 of SEQ ID NO: 914867
gggaguauuguguacugua

SEQ ID NO: 1036607 - RNA, 19 nt, Artificial Sequence
  Description of Artificial Sequence: Synthetic oligonucleotide
  Antisense strand to SEQ ID NO: 1036606
uacaguacacaauacuccc

SEQ ID NO: 1036608 - RNA, 19 nt, Artificial Sequence
  Description of Artificial Sequence: Synthetic oligonucleotide
  Sense strand starting at position 3032 of SEQ ID NO: 914867
auuguuucugaucacuaga

SEQ ID NO: 1036609 - RNA, 19 nt, Artificial Sequence
  Description of Artificial Sequence: Synthetic oligonucleotide
  Antisense strand to SEQ ID NO: 1036608
ucuagugaucagaaacaau

SEQ ID NO: 1036610 - RNA, 19 nt, Artificial Sequence
  Description of Artificial Sequence: Synthetic oligonucleotide
  Sense strand starting at position 3034 of SEQ ID NO: 914867
uguuucugaucacuagaca

SEQ ID NO: 1036611 - RNA, 19 nt, Artificial Sequence
  Description of Artificial Sequence: Synthetic oligonucleotide
  Antisense strand to SEQ ID NO: 1036610
ugucuagugaucagaaaca

SEQ ID NO: 1036612 - RNA, 19 nt, Artificial Sequence
  Description of Artificial Sequence: Synthetic oligonucleotide
  Sense strand starting at position 3083 of SEQ ID NO: 914867
gcuguauuacguguaucuu

SEQ ID NO: 1036613 - RNA, 19 nt, Artificial Sequence
  Description of Artificial Sequence: Synthetic oligonucleotide
  Antisense strand to SEQ ID NO: 1036612
aagauacacguaauacagc

SEQ ID NO: 1036614 - RNA, 19 nt, Artificial Sequence
  Description of Artificial Sequence: Synthetic oligonucleotide
  Sense strand starting at position 3168 of SEQ ID NO: 914867
guaagaacucauuguauag

SEQ ID NO: 1036615 - RNA, 19 nt, Artificial Sequence
  Description of Artificial Sequence: Synthetic oligonucleotide
  Antisense strand to SEQ ID NO: 1036614
cuauacaaugaguucuuac

SEQ ID NO: 1036616 - RNA, 19 nt, Artificial Sequence
  Description of Artificial Sequence: Synthetic oligonucleotide
  Sense strand starting at position 3260 of SEQ ID NO: 914867
gcccaugagacguagguaa

SEQ ID NO: 1036617 - RNA, 19 nt, Artificial Sequence
  Description of Artificial Sequence: Synthetic oligonucleotide
  Antisense strand to SEQ ID NO: 1036616
uuaccuacgucucaugggc

SEQ ID NO: 1036618 - RNA, 19 nt, Artificial Sequence
  Description of Artificial Sequence: Synthetic oligonucleotide
  Sense strand starting at position 3262 of SEQ ID NO: 914867
ccaugagacguagguaaua

SEQ ID NO: 1036619 - RNA, 19 nt, Artificial Sequence
  Description of Artificial Sequence: Synthetic oligonucleotide
  Antisense strand to SEQ ID NO: 1036618
uauuaccuacgucucaugg

SEQ ID NO: 1036620 - RNA, 19 nt, Artificial Sequence
  Description of Artificial Sequence: Synthetic oligonucleotide
  Sense strand starting at position 3264 of SEQ ID NO: 914867
augagacguagguaauauu

SEQ ID NO: 1036621 - RNA, 19 nt, Artificial Sequence
  Description of Artificial Sequence: Synthetic oligonucleotide
  Antisense strand to SEQ ID NO: 1036620
aauauuaccuacgucucau

SEQ ID NO: 1036622 - RNA, 19 nt, Artificial Sequence
  Description of Artificial Sequence: Synthetic oligonucleotide
  Sense strand starting at position 3535 of SEQ ID NO: 914867
uuguauaagguuuaucagu

SEQ ID NO: 1036623 - RNA, 19 nt, Artificial Sequence
  Description of Artificial Sequence: Synthetic oligonucleotide
  Antisense strand to SEQ ID NO: 1036622
acugauaaaccuuauacaa

SEQ ID NO: 1036624 - RNA, 19 nt, Artificial Sequence
  Description of Artificial Sequence: Synthetic oligonucleotide
  Sense strand starting at position 3603 of SEQ ID NO: 914867
guguuacacuugccauuua

SEQ ID NO: 1036625 - RNA, 19 nt, Artificial Sequence
  Description of Artificial Sequence: Synthetic oligonucleotide
  Antisense strand to SEQ ID NO: 1036624
uaaauggcaaguguaacac

SEQ ID NO: 1036626 - RNA, 19 nt, Artificial Sequence
  Description of Artificial Sequence: Synthetic oligonucleotide
  Sense strand starting at position 3800 of SEQ ID NO: 914867
guguuaucagaauacaagu

SEQ ID NO: 1036627 - RNA, 19 nt, Artificial Sequence
  Description of Artificial Sequence: Synthetic oligonucleotide
  Antisense strand to SEQ ID NO: 1036626
acuuguauucugauaacac

SEQ ID NO: 1036628 - RNA, 19 nt, Artificial Sequence
  Description of Artificial Sequence: Synthetic oligonucleotide
  Sense strand starting at position 3925 of SEQ ID NO: 914867
auuuaaacauggcaauagu

SEQ ID NO: 1036629 - RNA, 19 nt, Artificial Sequence
  Description of Artificial Sequence: Synthetic oligonucleotide
  Antisense strand to SEQ ID NO: 1036628
acuauugccauguuuaaau

SEQ ID NO: 1036630 - RNA, 19 nt, Artificial Sequence
  Description of Artificial Sequence: Synthetic oligonucleotide
  Sense strand starting at position 3963 of SEQ ID NO: 914867
ccaggaaagucguuuggaa

SEQ ID NO: 1036631 - RNA, 19 nt, Artificial Sequence
  Description of Artificial Sequence: Synthetic oligonucleotide
  Antisense strand to SEQ ID NO: 1036630
uuccaaacgacuuuccugg

SEQ ID NO: 1036632 - RNA, 19 nt, Artificial Sequence
  Description of Artificial Sequence: Synthetic oligonucleotide
  Sense strand starting at position 10 of SEQ ID NO: 914868
uccugagugaacugguaag

SEQ ID NO: 1036633 - RNA, 19 nt, Artificial Sequence
  Description of Artificial Sequence: Synthetic oligonucleotide
  Antisense strand to SEQ ID NO: 1036632
cuuaccaguucacucagga

SEQ ID NO: 1036634 - RNA, 19 nt, Artificial Sequence
  Description of Artificial Sequence: Synthetic oligonucleotide
  Sense strand starting at position 120 of SEQ ID NO: 914868
aggguaaucuuaccaaaug

SEQ ID NO: 1036635 - RNA, 19 nt, Artificial Sequence
  Description of Artificial Sequence: Synthetic oligonucleotide
  Antisense strand to SEQ ID NO: 1036634
cauuugguaagauuacccu

SEQ ID NO: 1036636 - RNA, 19 nt, Artificial Sequence
  Description of Artificial Sequence: Synthetic oligonucleotide
  Sense strand starting at position 160 of SEQ ID NO: 914868
cuauaccaguguucugaga

SEQ ID NO: 1036637 - RNA, 19 nt, Artificial Sequence
  Description of Artificial Sequence: Synthetic oligonucleotide
  Antisense strand to SEQ ID NO: 1036636
ucucagaacacugguauag

SEQ ID NO: 1036638 - RNA, 19 nt, Artificial Sequence
  Description of Artificial Sequence: Synthetic oligonucleotide
  Sense strand starting at position 236 of SEQ ID NO: 914868
guagggagccuuggugaga

SEQ ID NO: 1036639 - RNA, 19 nt, Artificial Sequence
  Description of Artificial Sequence: Synthetic oligonucleotide
  Antisense strand to SEQ ID NO: 1036638
ucucaccaaggcucccuac

SEQ ID NO: 1036640 - RNA, 19 nt, Artificial Sequence
  Description of Artificial Sequence: Synthetic oligonucleotide
  Sense strand starting at position 237 of SEQ ID NO: 914868
uagggagccuuggugagaa

SEQ ID NO: 1036641 - RNA, 19 nt, Artificial Sequence
  Description of Artificial Sequence: Synthetic oligonucleotide
  Antisense strand to SEQ ID NO: 1036640
uucucaccaaggcucccua

SEQ ID NO: 1036642 - RNA, 19 nt, Artificial Sequence
  Description of Artificial Sequence: Synthetic oligonucleotide
  Sense strand starting at position 298 of SEQ ID NO: 914868
guguacauacauuaucauu

SEQ ID NO: 1036643 - RNA, 19 nt, Artificial Sequence
  Description of Artificial Sequence: Synthetic oligonucleotide
  Antisense strand to SEQ ID NO: 1036642
aaugauaauguauguacac

SEQ ID NO: 1036644 - RNA, 19 nt, Artificial Sequence
  Description of Artificial Sequence: Synthetic oligonucleotide
  Sense strand starting at position 323 of SEQ ID NO: 914868
aggcauuaguaugcacaua

SEQ ID NO: 1036645 - RNA, 19 nt, Artificial Sequence
  Description of Artificial Sequence: Synthetic oligonucleotide
  Antisense strand to SEQ ID NO: 1036644
uaugugcauacuaaugccu

SEQ ID NO: 1036646 - RNA, 19 nt, Artificial Sequence
  Description of Artificial Sequence: Synthetic oligonucleotide
  Sense strand starting at position 393 of SEQ ID NO: 914868
guuugaacugcacagauaa

SEQ ID NO: 1036647 - RNA, 19 nt, Artificial Sequence
  Description of Artificial Sequence: Synthetic oligonucleotide
  Antisense strand to SEQ ID NO: 1036646
uuaucugugcaguucaaac

SEQ ID NO: 1036648 - RNA, 19 nt, Artificial Sequence
  Description of Artificial Sequence: Synthetic oligonucleotide
  Sense strand starting at position 411 of SEQ ID NO: 914868
aggagaaagucugcaguga

SEQ ID NO: 1036649 - RNA, 19 nt, Artificial Sequence
  Description of Artificial Sequence: Synthetic oligonucleotide
  Antisense strand to SEQ ID NO: 1036648
ucacugcagacuuucuccu

SEQ ID NO: 1036650 - RNA, 19 nt, Artificial Sequence
  Description of Artificial Sequence: Synthetic oligonucleotide
  Sense strand starting at position 550 of SEQ ID NO: 914868
agugcuuugcuuucucgaa

SEQ ID NO: 1036651 - RNA, 19 nt, Artificial Sequence
  Description of Artificial Sequence: Synthetic oligonucleotide
  Antisense strand to SEQ ID NO: 1036650
uucgagaaagcaaagcacu

SEQ ID NO: 1036652 - RNA, 19 nt, Artificial Sequence
  Description of Artificial Sequence: Synthetic oligonucleotide
  Sense strand starting at position 869 of SEQ ID NO: 914868
aaguucuuuccggagaguc

SEQ ID NO: 1036653 - RNA, 19 nt, Artificial Sequence
  Description of Artificial Sequence: Synthetic oligonucleotide
  Antisense strand to SEQ ID NO: 1036652
gacucuccggaaagaacuu

SEQ ID NO: 1036654 - RNA, 19 nt, Artificial Sequence
  Description of Artificial Sequence: Synthetic oligonucleotide
  Sense strand starting at position 871 of SEQ ID NO: 914868
guucuuuccggagagucca

SEQ ID NO: 1036655 - RNA, 19 nt, Artificial Sequence
  Description of Artificial Sequence: Synthetic oligonucleotide
  Antisense strand to SEQ ID NO: 1036654
uggacucuccggaaagaac

SEQ ID NO: 1036656 - RNA, 19 nt, Artificial Sequence
  Description of Artificial Sequence: Synthetic oligonucleotide
  Sense strand starting at position 1003 of SEQ ID NO: 914868
uagggaacucgaugacguu

SEQ ID NO: 1036657 - RNA, 19 nt, Artificial Sequence
  Description of Artificial Sequence: Synthetic oligonucleotide
  Antisense strand to SEQ ID NO: 1036656
aacgucaucgaguucccua

SEQ ID NO: 1036658 - RNA, 19 nt, Artificial Sequence
  Description of Artificial Sequence: Synthetic oligonucleotide
  Sense strand starting at position 1010 of SEQ ID NO: 914868
cucgaugacguucaaugaa

SEQ ID NO: 1036659 - RNA, 19 nt, Artificial Sequence
  Description of Artificial Sequence: Synthetic oligonucleotide
  Antisense strand to SEQ ID NO: 1036658
uucauugaacgucaucgag

SEQ ID NO: 1036660 - RNA, 19 nt, Artificial Sequence
  Description of Artificial Sequence: Synthetic oligonucleotide
  Sense strand starting at position 1254 of SEQ ID NO: 914868
gcggcauaaccacagagau

SEQ ID NO: 1036661 - RNA, 19 nt, Artificial Sequence
  Description of Artificial Sequence: Synthetic oligonucleotide
  Antisense strand to SEQ ID NO: 1036660
aucucugugguuaugccgc

SEQ ID NO: 1036662 - RNA, 19 nt, Artificial Sequence
  Description of Artificial Sequence: Synthetic oligonucleotide
  Sense strand starting at position 1317 of SEQ ID NO: 914868
uggagaguuugagcuggau

SEQ ID NO: 1036663 - RNA, 19 nt, Artificial Sequence
  Description of Artificial Sequence: Synthetic oligonucleotide
  Antisense strand to SEQ ID NO: 1036662
auccagcucaaacucucca

SEQ ID NO: 1036664 - RNA, 19 nt, Artificial Sequence
  Description of Artificial Sequence: Synthetic oligonucleotide
  Sense strand starting at position 1319 of SEQ ID NO: 914868
gagaguuugagcuggauau

SEQ ID NO: 1036665 - RNA, 19 nt, Artificial Sequence
  Description of Artificial Sequence: Synthetic oligonucleotide
  Antisense strand to SEQ ID NO: 1036664
auauccagcucaaacucuc

SEQ ID NO: 1036666 - RNA, 19 nt, Artificial Sequence
  Description of Artificial Sequence: Synthetic oligonucleotide
  Sense strand starting at position 1320 of SEQ ID NO: 914868
agaguuugagcuggauauu

SEQ ID NO: 1036667 - RNA, 19 nt, Artificial Sequence
  Description of Artificial Sequence: Synthetic oligonucleotide
  Antisense strand to SEQ ID NO: 1036666
aauauccagcucaaacucu

SEQ ID NO: 1036668 - RNA, 19 nt, Artificial Sequence
  Description of Artificial Sequence: Synthetic oligonucleotide
  Sense strand starting at position 1321 of SEQ ID NO: 914868
gaguuugagcuggauauug

SEQ ID NO: 1036669 - RNA, 19 nt, Artificial Sequence
  Description of Artificial Sequence: Synthetic oligonucleotide
  Antisense strand to SEQ ID NO: 1036668
caauauccagcucaaacuc

SEQ ID NO: 1036670 - RNA, 19 nt, Artificial Sequence
  Description of Artificial Sequence: Synthetic oligonucleotide
  Sense strand starting at position 1578 of SEQ ID NO: 914868
guccuaccuugacugaaga

SEQ ID NO: 1036671 - RNA, 19 nt, Artificial Sequence
  Description of Artificial Sequence: Synthetic oligonucleotide
  Antisense strand to SEQ ID NO: 1036670
ucuucagucaagguaggac

SEQ ID NO: 1036672 - RNA, 19 nt, Artificial Sequence
  Description of Artificial Sequence: Synthetic oligonucleotide
  Sense strand starting at position 1857 of SEQ ID NO: 914868
cgggauugucagcaauguc

SEQ ID NO: 1036673 - RNA, 19 nt, Artificial Sequence
  Description of Artificial Sequence: Synthetic oligonucleotide
  Antisense strand to SEQ ID NO: 1036672
gacauugcugacaaucccg

SEQ ID NO: 1036674 - RNA, 19 nt, Artificial Sequence
  Description of Artificial Sequence: Synthetic oligonucleotide
  Sense strand starting at position 1963 of SEQ ID NO: 914868
gcuagugacgagugacaga

SEQ ID NO: 1036675 - RNA, 19 nt, Artificial Sequence
  Description of Artificial Sequence: Synthetic oligonucleotide
  Antisense strand to SEQ ID NO: 1036674
ucugucacucgucacuagc

SEQ ID NO: 1036676 - RNA, 19 nt, Artificial Sequence
  Description of Artificial Sequence: Synthetic oligonucleotide
  Sense strand starting at position 2208 of SEQ ID NO: 914868
ccuguuuaacagugaaguu

SEQ ID NO: 1036677 - RNA, 19 nt, Artificial Sequence
  Description of Artificial Sequence: Synthetic oligonucleotide
  Antisense strand to SEQ ID NO: 1036676
aacuucacuguuaaacagg

SEQ ID NO: 1036678 - RNA, 19 nt, Artificial Sequence
  Description of Artificial Sequence: Synthetic oligonucleotide
  Sense strand starting at position 2328 of SEQ ID NO: 914868
caucuuucccucggaagga

SEQ ID NO: 1036679 - RNA, 19 nt, Artificial Sequence
  Description of Artificial Sequence: Synthetic oligonucleotide
  Antisense strand to SEQ ID NO: 1036678
uccuuccgagggaaagaug

SEQ ID NO: 1036680 - RNA, 19 nt, Artificial Sequence
  Description of Artificial Sequence: Synthetic oligonucleotide
  Sense strand starting at position 2390 of SEQ ID NO: 914868
auaagcaugcuuugcauuu

SEQ ID NO: 1036681 - RNA, 19 nt, Artificial Sequence
  Description of Artificial Sequence: Synthetic oligonucleotide
  Antisense strand to SEQ ID NO: 1036680
aaaugcaaagcaugcuuau

SEQ ID NO: 1036682 - RNA, 19 nt, Artificial Sequence
  Description of Artificial Sequence: Synthetic oligonucleotide
  Sense strand starting at position 2469 of SEQ ID NO: 914868
ccugaacauuuggaucuua

SEQ ID NO: 1036683 - RNA, 19 nt, Artificial Sequence
  Description of Artificial Sequence: Synthetic oligonucleotide
  Antisense strand to SEQ ID NO: 1036682
uaagauccaaauguucagg

SEQ ID NO: 1036684 - RNA, 19 nt, Artificial Sequence
  Description of Artificial Sequence: Synthetic oligonucleotide
  Sense strand starting at position 2797 of SEQ ID NO: 914868
cucgguuuccuccaggaua

SEQ ID NO: 1036685 - RNA, 19 nt, Artificial Sequence
  Description of Artificial Sequence: Synthetic oligonucleotide
  Antisense strand to SEQ ID NO: 1036684
uauccuggaggaaaccgag

SEQ ID NO: 1036686 - RNA, 19 nt, Artificial Sequence
  Description of Artificial Sequence: Synthetic oligonucleotide
  Sense strand starting at position 2800 of SEQ ID NO: 914868
gguuuccuccaggauauca

SEQ ID NO: 1036687 - RNA, 19 nt, Artificial Sequence
  Description of Artificial Sequence: Synthetic oligonucleotide
  Antisense strand to SEQ ID NO: 1036686
ugauauccuggaggaaacc

SEQ ID NO: 1036688 - RNA, 19 nt, Artificial Sequence
  Description of Artificial Sequence: Synthetic oligonucleotide
  Sense strand starting at position 2857 of SEQ ID NO: 914868
uaggcaugcuugguauaag

SEQ ID NO: 1036689 - RNA, 19 nt, Artificial Sequence
  Description of Artificial Sequence: Synthetic oligonucleotide
  Antisense strand to SEQ ID NO: 1036688
cuuauaccaagcaugccua

SEQ ID NO: 1036690 - RNA, 19 nt, Artificial Sequence
  Description of Artificial Sequence: Synthetic oligonucleotide
  Sense strand starting at position 3191 of SEQ ID NO: 914868
gaggacucugcucacuaca

SEQ ID NO: 1036691 - RNA, 19 nt, Artificial Sequence
  Description of Artificial Sequence: Synthetic oligonucleotide
  Antisense strand to SEQ ID NO: 1036690
uguagugagcagaguccuc

SEQ ID NO: 1036692 - RNA, 19 nt, Artificial Sequence
  Description of Artificial Sequence: Synthetic oligonucleotide
  Sense strand starting at position 3236 of SEQ ID NO: 914868
ugcggauguuaacuuuaaa

SEQ ID NO: 1036693 - RNA, 19 nt, Artificial Sequence
  Description of Artificial Sequence: Synthetic oligonucleotide
  Antisense strand to SEQ ID NO: 1036692
uuuaaaguuaacauccgca

SEQ ID NO: 1036694 - RNA, 19 nt, Artificial Sequence
  Description of Artificial Sequence: Synthetic oligonucleotide
  Sense strand starting at position 3264 of SEQ ID NO: 914868
cuugguauuugugaacaag

SEQ ID NO: 1036695 - RNA, 19 nt, Artificial Sequence
  Description of Artificial Sequence: Synthetic oligonucleotide
  Antisense strand to SEQ ID NO: 1036694
cuuguucacaaauaccaag

SEQ ID NO: 1036696 - RNA, 19 nt, Artificial Sequence
  Description of Artificial Sequence: Synthetic oligonucleotide
  Sense strand starting at position 3320 of SEQ ID NO: 914868
ggagcugacaucugguagu

SEQ ID NO: 1036697 - RNA, 19 nt, Artificial Sequence
  Description of Artificial Sequence: Synthetic oligonucleotide
  Antisense strand to SEQ ID NO: 1036696
acuaccagaugucagcucc

SEQ ID NO: 1036698 - RNA, 19 nt, Artificial Sequence
  Description of Artificial Sequence: Synthetic oligonucleotide
  Sense strand starting at position 3419 of SEQ ID NO: 914868
ucccuuagaggcuguuaaa

SEQ ID NO: 1036699 - RNA, 19 nt, Artificial Sequence
  Description of Artificial Sequence: Synthetic oligonucleotide
  Antisense strand to SEQ ID NO: 1036698
uuuaacagccucuaaggga

SEQ ID NO: 1036700 - RNA, 19 nt, Artificial Sequence
  Description of Artificial Sequence: Synthetic oligonucleotide
  Sense strand starting at position 3445 of SEQ ID NO: 914868
aagggaaauuuguaagcaa

SEQ ID NO: 1036701 - RNA, 19 nt, Artificial Sequence
  Description of Artificial Sequence: Synthetic oligonucleotide
  Antisense strand to SEQ ID NO: 1036700
uugcuuacaaauuucccuu

SEQ ID NO: 1036702 - RNA, 19 nt, Artificial Sequence
  Description of Artificial Sequence: Synthetic oligonucleotide
  Sense strand starting at position 3590 of SEQ ID NO: 914868
gguguaacagaucaugcaa

SEQ ID NO: 1036703 - RNA, 19 nt, Artificial Sequence
  Description of Artificial Sequence: Synthetic oligonucleotide
  Antisense strand to SEQ ID NO: 1036702
uugcaugaucuguuacacc

SEQ ID NO: 1036704 - RNA, 19 nt, Artificial Sequence
  Description of Artificial Sequence: Synthetic oligonucleotide
  Sense strand starting at position 3783 of SEQ ID NO: 914868
gccauucuugcagggaaua

SEQ ID NO: 1036705 - RNA, 19 nt, Artificial Sequence
  Description of Artificial Sequence: Synthetic oligonucleotide
  Antisense strand to SEQ ID NO: 1036704
uauucccugcaagaauggc

SEQ ID NO: 1036706 - RNA, 19 nt, Artificial Sequence
  Description of Artificial Sequence: Synthetic oligonucleotide
  Sense strand starting at position 3835 of SEQ ID NO: 914868
gguagcaacauuugacguu

SEQ ID NO: 1036707 - RNA, 19 nt, Artificial Sequence
  Description of Artificial Sequence: Synthetic oligonucleotide
  Antisense strand to SEQ ID NO: 1036706
aacgucaaauguugcuacc

SEQ ID NO: 1036708 - RNA, 19 nt, Artificial Sequence
  Description of Artificial Sequence: Synthetic oligonucleotide
  Sense strand starting at position 3893 of SEQ ID NO: 914868
gagugcuaauuccucaaug

SEQ ID NO: 1036709 - RNA, 19 nt, Artificial Sequence
  Description of Artificial Sequence: Synthetic oligonucleotide
  Antisense strand to SEQ ID NO: 1036708
cauugaggaauuagcacuc

SEQ ID NO: 1036710 - RNA, 19 nt, Artificial Sequence
  Description of Artificial Sequence: Synthetic oligonucleotide
  Sense strand starting at position 3918 of SEQ ID NO: 914868
ggcccagauuugcuuaauu

SEQ ID NO: 1036711 - RNA, 19 nt, Artificial Sequence
  Description of Artificial Sequence: Synthetic oligonucleotide
  Antisense strand to SEQ ID NO: 1036710
aauuaagcaaaucugggcc

SEQ ID NO: 1036712 - RNA, 19 nt, Artificial Sequence
  Description of Artificial Sequence: Synthetic oligonucleotide
  Sense strand starting at position 12 of SEQ ID NO: 914869
ugagguuuauucuccacau

SEQ ID NO: 1036713 - RNA, 19 nt, Artificial Sequence
  Description of Artificial Sequence: Synthetic oligonucleotide
  Antisense strand to SEQ ID NO: 1036712
auguggagaauaaaccuca

SEQ ID NO: 1036714 - RNA, 19 nt, Artificial Sequence
  Description of Artificial Sequence: Synthetic oligonucleotide
  Sense strand starting at position 105 of SEQ ID NO: 914869
cugauuuccugagaauaaa

SEQ ID NO: 1036715 - RNA, 19 nt, Artificial Sequence
  Description of Artificial Sequence: Synthetic oligonucleotide
  Antisense strand to SEQ ID NO: 1036714
uuuauucucaggaaaucag

SEQ ID NO: 1036716 - RNA, 19 nt, Artificial Sequence
  Description of Artificial Sequence: Synthetic oligonucleotide
  Sense strand starting at position 211 of SEQ ID NO: 914869
acaguucuucccugaguuc

SEQ ID NO: 1036717 - RNA, 19 nt, Artificial Sequence
  Description of Artificial Sequence: Synthetic oligonucleotide
  Antisense strand to SEQ ID NO: 1036716
gaacucagggaagaacugu

SEQ ID NO: 1036718 - RNA, 19 nt, Artificial Sequence
  Description of Artificial Sequence: Synthetic oligonucleotide
  Sense strand starting at position 334 of SEQ ID NO: 914869
gucauuuccucacagaagu

SEQ ID NO: 1036719 - RNA, 19 nt, Artificial Sequence
  Description of Artificial Sequence: Synthetic oligonucleotide
  Antisense strand to SEQ ID NO: 1036718
acuucugugaggaaaugac

SEQ ID NO: 1036720 - RNA, 19 nt, Artificial Sequence
  Description of Artificial Sequence: Synthetic oligonucleotide
  Sense strand starting at position 354 of SEQ ID NO: 914869
cugccugaccaguagacaa

SEQ ID NO: 1036721 - RNA, 19 nt, Artificial Sequence
  Description of Artificial Sequence: Synthetic oligonucleotide
  Antisense strand to SEQ ID NO: 1036720
uugucuacuggucaggcag

SEQ ID NO: 1036722 - RNA, 19 nt, Artificial Sequence
  Description of Artificial Sequence: Synthetic oligonucleotide
  Sense strand starting at position 378 of SEQ ID NO: 914869
gcugcugcgagcuaucaua

SEQ ID NO: 1036723 - RNA, 19 nt, Artificial Sequence
  Description of Artificial Sequence: Synthetic oligonucleotide
  Antisense strand to SEQ ID NO: 1036722
uaugauagcucgcagcagc

SEQ ID NO: 1036724 - RNA, 19 nt, Artificial Sequence
  Description of Artificial Sequence: Synthetic oligonucleotide
  Sense strand starting at position 441 of SEQ ID NO: 914869
accaauuauuucuguaugu

SEQ ID NO: 1036725 - RNA, 19 nt, Artificial Sequence
  Description of Artificial Sequence: Synthetic oligonucleotide
  Antisense strand to SEQ ID NO: 1036724
acauacagaaauaauuggu

SEQ ID NO: 1036726 - RNA, 19 nt, Artificial Sequence
  Description of Artificial Sequence: Synthetic oligonucleotide
  Sense strand starting at position 544 of SEQ ID NO: 914869
cucaucuguuaacgaguga

SEQ ID NO: 1036727 - RNA, 19 nt, Artificial Sequence
  Description of Artificial Sequence: Synthetic oligonucleotide
  Antisense strand to SEQ ID NO: 1036726
ucacucguuaacagaugag

SEQ ID NO: 1036728 - RNA, 19 nt, Artificial Sequence
  Description of Artificial Sequence: Synthetic oligonucleotide
  Sense strand starting at position 545 of SEQ ID NO: 914869
ucaucuguuaacgagugaa

SEQ ID NO: 1036729 - RNA, 19 nt, Artificial Sequence
  Description of Artificial Sequence: Synthetic oligonucleotide
  Antisense strand to SEQ ID NO: 1036728
uucacucguuaacagauga

SEQ ID NO: 1036730 - RNA, 19 nt, Artificial Sequence
  Description of Artificial Sequence: Synthetic oligonucleotide
  Sense strand starting at position 548 of SEQ ID NO: 914869
ucuguuaacgagugaauag

SEQ ID NO: 1036731 - RNA, 19 nt, Artificial Sequence
  Description of Artificial Sequence: Synthetic oligonucleotide
  Antisense strand to SEQ ID NO: 1036730
cuauucacucguuaacaga

SEQ ID NO: 1036732 - RNA, 19 nt, Artificial Sequence
  Description of Artificial Sequence: Synthetic oligonucleotide
  Sense strand starting at position 549 of SEQ ID NO: 914869
cuguuaacgagugaauaga

SEQ ID NO: 1036733 - RNA, 19 nt, Artificial Sequence
  Description of Artificial Sequence: Synthetic oligonucleotide
  Antisense strand to SEQ ID NO: 1036732
ucuauucacucguuaacag

SEQ ID NO: 1036734 - RNA, 19 nt, Artificial Sequence
  Description of Artificial Sequence: Synthetic oligonucleotide
  Sense strand starting at position 583 of SEQ ID NO: 914869
gaggcuauguuuccuuaag

SEQ ID NO: 1036735 - RNA, 19 nt, Artificial Sequence
  Description of Artificial Sequence: Synthetic oligonucleotide
  Antisense strand to SEQ ID NO: 1036734
cuuaaggaaacauagccuc

SEQ ID NO: 1036736 - RNA, 19 nt, Artificial Sequence
  Description of Artificial Sequence: Synthetic oligonucleotide
  Sense strand starting at position 585 of SEQ ID NO: 914869
ggcuauguuuccuuaagga

SEQ ID NO: 1036737 - RNA, 19 nt, Artificial Sequence
  Description of Artificial Sequence: Synthetic oligonucleotide
  Antisense strand to SEQ ID NO: 1036736
uccuuaaggaaacauagcc

SEQ ID NO: 1036738 - RNA, 19 nt, Artificial Sequence
  Description of Artificial Sequence: Synthetic oligonucleotide
  Sense strand starting at position 682 of SEQ ID NO: 914869
gggugaucauggucucuua

SEQ ID NO: 1036739 - RNA, 19 nt, Artificial Sequence
  Description of Artificial Sequence: Synthetic oligonucleotide
  Antisense strand to SEQ ID NO: 1036738
uaagagaccaugaucaccc

SEQ ID NO: 1036740 - RNA, 19 nt, Artificial Sequence
  Description of Artificial Sequence: Synthetic oligonucleotide
  Sense strand starting at position 783 of SEQ ID NO: 914869
acgguucccugcucagauu

SEQ ID NO: 1036741 - RNA, 19 nt, Artificial Sequence
  Description of Artificial Sequence: Synthetic oligonucleotide
  Antisense strand to SEQ ID NO: 1036740
aaucugagcagggaaccgu

SEQ ID NO: 1036742 - RNA, 19 nt, Artificial Sequence
  Description of Artificial Sequence: Synthetic oligonucleotide
  Sense strand starting at position 2393 of SEQ ID NO: 914869
cgcuguuaucuggcucgca

SEQ ID NO: 1036743 - RNA, 19 nt, Artificial Sequence
  Description of Artificial Sequence: Synthetic oligonucleotide
  Antisense strand to SEQ ID NO: 1036742
ugcgagccagauaacagcg

SEQ ID NO: 1036744 - RNA, 19 nt, Artificial Sequence
  Description of Artificial Sequence: Synthetic oligonucleotide
  Sense strand starting at position 2396 of SEQ ID NO: 914869
uguuaucuggcucgcagau

SEQ ID NO: 1036745 - RNA, 19 nt, Artificial Sequence
  Description of Artificial Sequence: Synthetic oligonucleotide
  Antisense strand to SEQ ID NO: 1036744
aucugcgagccagauaaca

SEQ ID NO: 1036746 - RNA, 19 nt, Artificial Sequence
  Description of Artificial Sequence: Synthetic oligonucleotide
  Sense strand starting at position 2508 of SEQ ID NO: 914869
ggugacagguagcuuacua

SEQ ID NO: 1036747 - RNA, 19 nt, Artificial Sequence
  Description of Artificial Sequence: Synthetic oligonucleotide
  Antisense strand to SEQ ID NO: 1036746
uaguaagcuaccugucacc

SEQ ID NO: 1036748 - RNA, 19 nt, Artificial Sequence
  Description of Artificial Sequence: Synthetic oligonucleotide
  Sense strand starting at position 2525 of SEQ ID NO: 914869
uacguuuggcucugagaca

SEQ ID NO: 1036749 - RNA, 19 nt, Artificial Sequence
  Description of Artificial Sequence: Synthetic oligonucleotide
  Antisense strand to SEQ ID NO: 1036748
ugucucagagccaaacgua

SEQ ID NO: 1036750 - RNA, 19 nt, Artificial Sequence
  Description of Artificial Sequence: Synthetic oligonucleotide
  Sense strand starting at position 2526 of SEQ ID NO: 914869
acguuuggcucugagacaa

SEQ ID NO: 1036751 - RNA, 19 nt, Artificial Sequence
  Description of Artificial Sequence: Synthetic oligonucleotide
  Antisense strand to SEQ ID NO: 1036750
uugucucagagccaaacgu

SEQ ID NO: 1036752 - RNA, 19 nt, Artificial Sequence
  Description of Artificial Sequence: Synthetic oligonucleotide
  Sense strand starting at position 2537 of SEQ ID NO: 914869
ugagacaacucggaagguu

SEQ ID NO: 1036753 - RNA, 19 nt, Artificial Sequence
  Description of Artificial Sequence: Synthetic oligonucleotide
  Antisense strand to SEQ ID NO: 1036752
aaccuuccgaguugucuca

SEQ ID NO: 1036754 - RNA, 19 nt, Artificial Sequence
  Description of Artificial Sequence: Synthetic oligonucleotide
  Sense strand starting at position 2639 of SEQ ID NO: 914869
ugcucccuugugucaguua

SEQ ID NO: 1036755 - RNA, 19 nt, Artificial Sequence
  Description of Artificial Sequence: Synthetic oligonucleotide
  Antisense strand to SEQ ID NO: 1036754
uaacugacacaagggagca

SEQ ID NO: 1036756 - RNA, 19 nt, Artificial Sequence
  Description of Artificial Sequence: Synthetic oligonucleotide
  Sense strand starting at position 2640 of SEQ ID NO: 914869
gcucccuugugucaguuaa

SEQ ID NO: 1036757 - RNA, 19 nt, Artificial Sequence
  Description of Artificial Sequence: Synthetic oligonucleotide
  Antisense strand to SEQ ID NO: 1036756
uuaacugacacaagggagc

SEQ ID NO: 1036758 - RNA, 19 nt, Artificial Sequence
  Description of Artificial Sequence: Synthetic oligonucleotide
  Sense strand starting at position 2644 of SEQ ID NO: 914869
ccuugugucaguuaaggua

SEQ ID NO: 1036759 - RNA, 19 nt, Artificial Sequence
  Description of Artificial Sequence: Synthetic oligonucleotide
  Antisense strand to SEQ ID NO: 1036758
uaccuuaacugacacaagg

SEQ ID NO: 1036760 - RNA, 19 nt, Artificial Sequence
  Description of Artificial Sequence: Synthetic oligonucleotide
  Sense strand starting at position 2647 of SEQ ID NO: 914869
ugugucaguuaagguauuu

SEQ ID NO: 1036761 - RNA, 19 nt, Artificial Sequence
  Description of Artificial Sequence: Synthetic oligonucleotide
  Antisense strand to SEQ ID NO: 1036760
aaauaccuuaacugacaca

SEQ ID NO: 1036762 - RNA, 19 nt, Artificial Sequence
  Description of Artificial Sequence: Synthetic oligonucleotide
  Sense strand starting at position 3034 of SEQ ID NO: 914869
agugacagguucuuacuuu

SEQ ID NO: 1036763 - RNA, 19 nt, Artificial Sequence
  Description of Artificial Sequence: Synthetic oligonucleotide
  Antisense strand to SEQ ID NO: 1036762
aaaguaagaaccugucacu

SEQ ID NO: 1036764 - RNA, 19 nt, Artificial Sequence
  Description of Artificial Sequence: Synthetic oligonucleotide
  Sense strand starting at position 3035 of SEQ ID NO: 914869
gugacagguucuuacuuua

SEQ ID NO: 1036765 - RNA, 19 nt, Artificial Sequence
  Description of Artificial Sequence: Synthetic oligonucleotide
  Antisense strand to SEQ ID NO: 1036764
uaaaguaagaaccugucac

SEQ ID NO: 1036766 - RNA, 19 nt, Artificial Sequence
  Description of Artificial Sequence: Synthetic oligonucleotide
  Sense strand starting at position 3038 of SEQ ID NO: 914869
acagguucuuacuuuauca

SEQ ID NO: 1036767 - RNA, 19 nt, Artificial Sequence
  Description of Artificial Sequence: Synthetic oligonucleotide
  Antisense strand to SEQ ID NO: 1036766
ugauaaaguaagaaccugu

SEQ ID NO: 1036768 - RNA, 19 nt, Artificial Sequence
  Description of Artificial Sequence: Synthetic oligonucleotide
  Sense strand starting at position 3972 of SEQ ID NO: 914869
uguaguuaucucugugacu

SEQ ID NO: 1036769 - RNA, 19 nt, Artificial Sequence
  Description of Artificial Sequence: Synthetic oligonucleotide
  Antisense strand to SEQ ID NO: 1036768
agucacagagauaacuaca

SEQ ID NO: 1036770 - RNA, 19 nt, Artificial Sequence
  Description of Artificial Sequence: Synthetic oligonucleotide
  Sense strand starting at position 3973 of SEQ ID NO: 914869
guaguuaucucugugacug

SEQ ID NO: 1036771 - RNA, 19 nt, Artificial Sequence
  Description of Artificial Sequence: Synthetic oligonucleotide
  Antisense strand to SEQ ID NO: 1036770
cagucacagagauaacuac

SEQ ID NO: 1036772 - RNA, 19 nt, Artificial Sequence
  Description of Artificial Sequence: Synthetic oligonucleotide
  Sense strand starting at position 32 of SEQ ID NO: 914870
accaauuauuucuguaugu

SEQ ID NO: 1036773 - RNA, 19 nt, Artificial Sequence
  Description of Artificial Sequence: Synthetic oligonucleotide
  Antisense strand to SEQ ID NO: 1036772
acauacagaaauaauuggu

SEQ ID NO: 1036774 - RNA, 19 nt, Artificial Sequence
  Description of Artificial Sequence: Synthetic oligonucleotide
  Sense strand starting at position 135 of SEQ ID NO: 914870
cucaucuguuaacgaguga

SEQ ID NO: 1036775 - RNA, 19 nt, Artificial Sequence
  Description of Artificial Sequence: Synthetic oligonucleotide
  Antisense strand to SEQ ID NO: 1036774
ucacucguuaacagaugag

SEQ ID NO: 1036776 - RNA, 19 nt, Artificial Sequence
  Description of Artificial Sequence: Synthetic oligonucleotide
  Sense strand starting at position 136 of SEQ ID NO: 914870
ucaucuguuaacgagugaa

SEQ ID NO: 1036777 - RNA, 19 nt, Artificial Sequence
  Description of Artificial Sequence: Synthetic oligonucleotide
  Antisense strand to SEQ ID NO: 1036776
uucacucguuaacagauga

SEQ ID NO: 1036778 - RNA, 19 nt, Artificial Sequence
  Description of Artificial Sequence: Synthetic oligonucleotide
  Sense strand starting at position 139 of SEQ ID NO: 914870
ucuguuaacgagugaauag

SEQ ID NO: 1036779 - RNA, 19 nt, Artificial Sequence
  Description of Artificial Sequence: Synthetic oligonucleotide
  Antisense strand to SEQ ID NO: 1036778
cuauucacucguuaacaga

SEQ ID NO: 1036780 - RNA, 19 nt, Artificial Sequence
  Description of Artificial Sequence: Synthetic oligonucleotide
  Sense strand starting at position 140 of SEQ ID NO: 914870
cuguuaacgagugaauaga

SEQ ID NO: 1036781 - RNA, 19 nt, Artificial Sequence
  Description of Artificial Sequence: Synthetic oligonucleotide
  Antisense strand to SEQ ID NO: 1036780
ucuauucacucguuaacag

SEQ ID NO: 1036782 - RNA, 19 nt, Artificial Sequence
  Description of Artificial Sequence: Synthetic oligonucleotide
  Sense strand starting at position 174 of SEQ ID NO: 914870
gaggcuauguuuccuuaag

SEQ ID NO: 1036783 - RNA, 19 nt, Artificial Sequence
  Description of Artificial Sequence: Synthetic oligonucleotide
  Antisense strand to SEQ ID NO: 1036782
cuuaaggaaacauagccuc

SEQ ID NO: 1036784 - RNA, 19 nt, Artificial Sequence
  Description of Artificial Sequence: Synthetic oligonucleotide
  Sense strand starting at position 176 of SEQ ID NO: 914870
ggcuauguuuccuuaagga

SEQ ID NO: 1036785 - RNA, 19 nt, Artificial Sequence
  Description of Artificial Sequence: Synthetic oligonucleotide
  Antisense strand to SEQ ID NO: 1036784
uccuuaaggaaacauagcc

SEQ ID NO: 1036786 - RNA, 19 nt, Artificial Sequence
  Description of Artificial Sequence: Synthetic oligonucleotide
  Sense strand starting at position 273 of SEQ ID NO: 914870
gggugaucauggucucuua

SEQ ID NO: 1036787 - RNA, 19 nt, Artificial Sequence
  Description of Artificial Sequence: Synthetic oligonucleotide
  Antisense strand to SEQ ID NO: 1036786
uaagagaccaugaucaccc

SEQ ID NO: 1036788 - RNA, 19 nt, Artificial Sequence
  Description of Artificial Sequence: Synthetic oligonucleotide
  Sense strand starting at position 374 of SEQ ID NO: 914870
acgguucccugcucagauu

SEQ ID NO: 1036789 - RNA, 19 nt, Artificial Sequence
  Description of Artificial Sequence: Synthetic oligonucleotide
  Antisense strand to SEQ ID NO: 1036788
aaucugagcagggaaccgu

SEQ ID NO: 1036790 - RNA, 19 nt, Artificial Sequence
  Description of Artificial Sequence: Synthetic oligonucleotide
  Sense strand starting at position 1984 of SEQ ID NO: 914870
cgcuguuaucuggcucgca

SEQ ID NO: 1036791 - RNA, 19 nt, Artificial Sequence
  Description of Artificial Sequence: Synthetic oligonucleotide
  Antisense strand to SEQ ID NO: 1036790
ugcgagccagauaacagcg

SEQ ID NO: 1036792 - RNA, 19 nt, Artificial Sequence
  Description of Artificial Sequence: Synthetic oligonucleotide
  Sense strand starting at position 1987 of SEQ ID NO: 914870
uguuaucuggcucgcagau

SEQ ID NO: 1036793 - RNA, 19 nt, Artificial Sequence
  Description of Artificial Sequence: Synthetic oligonucleotide
  Antisense strand to SEQ ID NO: 1036792
aucugcgagccagauaaca

SEQ ID NO: 1036794 - RNA, 19 nt, Artificial Sequence
  Description of Artificial Sequence: Synthetic oligonucleotide
  Sense strand starting at position 2099 of SEQ ID NO: 914870
ggugacagguagcuuacua

SEQ ID NO: 1036795 - RNA, 19 nt, Artificial Sequence
  Description of Artificial Sequence: Synthetic oligonucleotide
  Antisense strand to SEQ ID NO: 1036794
uaguaagcuaccugucacc

SEQ ID NO: 1036796 - RNA, 19 nt, Artificial Sequence
  Description of Artificial Sequence: Synthetic oligonucleotide
  Sense strand starting at position 2116 of SEQ ID NO: 914870
uacguuuggcucugagaca

SEQ ID NO: 1036797 - RNA, 19 nt, Artificial Sequence
  Description of Artificial Sequence: Synthetic oligonucleotide
  Antisense strand to SEQ ID NO: 1036796
ugucucagagccaaacgua

SEQ ID NO: 1036798 - RNA, 19 nt, Artificial Sequence
  Description of Artificial Sequence: Synthetic oligonucleotide
  Sense strand starting at position 2117 of SEQ ID NO: 914870
acguuuggcucugagacaa

SEQ ID NO: 1036799 - RNA, 19 nt, Artificial Sequence
  Description of Artificial Sequence: Synthetic oligonucleotide
  Antisense strand to SEQ ID NO: 1036798
uugucucagagccaaacgu

SEQ ID NO: 1036800 - RNA, 19 nt, Artificial Sequence
  Description of Artificial Sequence: Synthetic oligonucleotide
  Sense strand starting at position 2128 of SEQ ID NO: 914870
ugagacaacucggaagguu

SEQ ID NO: 1036801 - RNA, 19 nt, Artificial Sequence
  Description of Artificial Sequence: Synthetic oligonucleotide
  Antisense strand to SEQ ID NO: 1036800
aaccuuccgaguugucuca

SEQ ID NO: 1036802 - RNA, 19 nt, Artificial Sequence
  Description of Artificial Sequence: Synthetic oligonucleotide
  Sense strand starting at position 2230 of SEQ ID NO: 914870
ugcucccuugugucaguua

SEQ ID NO: 1036803 - RNA, 19 nt, Artificial Sequence
  Description of Artificial Sequence: Synthetic oligonucleotide
  Antisense strand to SEQ ID NO: 1036802
uaacugacacaagggagca

SEQ ID NO: 1036804 - RNA, 19 nt, Artificial Sequence
  Description of Artificial Sequence: Synthetic oligonucleotide
  Sense strand starting at position 2235 of SEQ ID NO: 914870
ccuugugucaguuaaggua

SEQ ID NO: 1036805 - RNA, 19 nt, Artificial Sequence
  Description of Artificial Sequence: Synthetic oligonucleotide
  Antisense strand to SEQ ID NO: 1036804
uaccuuaacugacacaagg

SEQ ID NO: 1036806 - RNA, 19 nt, Artificial Sequence
  Description of Artificial Sequence: Synthetic oligonucleotide
  Sense strand starting at position 2238 of SEQ ID NO: 914870
ugugucaguuaagguauuu

SEQ ID NO: 1036807 - RNA, 19 nt, Artificial Sequence
  Description of Artificial Sequence: Synthetic oligonucleotide
  Antisense strand to SEQ ID NO: 1036806
aaauaccuuaacugacaca

SEQ ID NO: 1036808 - RNA, 19 nt, Artificial Sequence
  Description of Artificial Sequence: Synthetic oligonucleotide
  Sense strand starting at position 2625 of SEQ ID NO: 914870
agugacagguucuuacuuu

SEQ ID NO: 1036809 - RNA, 19 nt, Artificial Sequence
  Description of Artificial Sequence: Synthetic oligonucleotide
  Antisense strand to SEQ ID NO: 1036808
aaaguaagaaccugucacu

SEQ ID NO: 1036810 - RNA, 19 nt, Artificial Sequence
  Description of Artificial Sequence: Synthetic oligonucleotide
  Sense strand starting at position 2626 of SEQ ID NO: 914870
gugacagguucuuacuuua

SEQ ID NO: 1036811 - RNA, 19 nt, Artificial Sequence
  Description of Artificial Sequence: Synthetic oligonucleotide
  Antisense strand to SEQ ID NO: 1036810
uaaaguaagaaccugucac

SEQ ID NO: 1036812 - RNA, 19 nt, Artificial Sequence
  Description of Artificial Sequence: Synthetic oligonucleotide
  Sense strand starting at position 2629 of SEQ ID NO: 914870
acagguucuuacuuuauca

SEQ ID NO: 1036813 - RNA, 19 nt, Artificial Sequence
  Description of Artificial Sequence: Synthetic oligonucleotide
  Antisense strand to SEQ ID NO: 1036812
ugauaaaguaagaaccugu

SEQ ID NO: 1036814 - RNA, 19 nt, Artificial Sequence
  Description of Artificial Sequence: Synthetic oligonucleotide
  Sense strand starting at position 3563 of SEQ ID NO: 914870
uguaguuaucucugugacu

SEQ ID NO: 1036815 - RNA, 19 nt, Artificial Sequence
  Description of Artificial Sequence: Synthetic oligonucleotide
  Antisense strand to SEQ ID NO: 1036814
agucacagagauaacuaca

SEQ ID NO: 1036816 - RNA, 19 nt, Artificial Sequence
  Description of Artificial Sequence: Synthetic oligonucleotide
  Sense strand starting at position 3564 of SEQ ID NO: 914870
guaguuaucucugugacug

SEQ ID NO: 1036817 - RNA, 19 nt, Artificial Sequence
  Description of Artificial Sequence: Synthetic oligonucleotide
  Antisense strand to SEQ ID NO: 1036816
cagucacagagauaacuac

SEQ ID NO: 1036818 - RNA, 19 nt, Artificial Sequence
  Description of Artificial Sequence: Synthetic oligonucleotide
  Sense strand starting at position 3613 of SEQ ID NO: 914870
gaagcaacuucuguuguuu

SEQ ID NO: 1036819 - RNA, 19 nt, Artificial Sequence
  Description of Artificial Sequence: Synthetic oligonucleotide
  Antisense strand to SEQ ID NO: 1036818
aaacaacagaaguugcuuc

SEQ ID NO: 1036820 - RNA, 19 nt, Artificial Sequence
  Description of Artificial Sequence: Synthetic oligonucleotide
  Sense strand starting at position 3625 of SEQ ID NO: 914870
guuguuucuuauguccauu

SEQ ID NO: 1036821 - RNA, 19 nt, Artificial Sequence
  Description of Artificial Sequence: Synthetic oligonucleotide
  Antisense strand to SEQ ID NO: 1036820
aauggacauaagaaacaac

SEQ ID NO: 1036822 - RNA, 19 nt, Artificial Sequence
  Description of Artificial Sequence: Synthetic oligonucleotide
  Sense strand starting at position 3627 of SEQ ID NO: 914870
uguuucuuauguccauuga

SEQ ID NO: 1036823 - RNA, 19 nt, Artificial Sequence
  Description of Artificial Sequence: Synthetic oligonucleotide
  Antisense strand to SEQ ID NO: 1036822
ucaauggacauaagaaaca

SEQ ID NO: 1036824 - RNA, 19 nt, Artificial Sequence
  Description of Artificial Sequence: Synthetic oligonucleotide
  Sense strand starting at position 3628 of SEQ ID NO: 914870
guuucuuauguccauugau

SEQ ID NO: 1036825 - RNA, 19 nt, Artificial Sequence
  Description of Artificial Sequence: Synthetic oligonucleotide
  Antisense strand to SEQ ID NO: 1036824
aucaauggacauaagaaac

SEQ ID NO: 1036826 - RNA, 19 nt, Artificial Sequence
  Description of Artificial Sequence: Synthetic oligonucleotide
  Sense strand starting at position 3631 of SEQ ID NO: 914870
ucuuauguccauugauuau

SEQ ID NO: 1036827 - RNA, 19 nt, Artificial Sequence
  Description of Artificial Sequence: Synthetic oligonucleotide
  Antisense strand to SEQ ID NO: 1036826
auaaucaauggacauaaga

SEQ ID NO: 1036828 - RNA, 19 nt, Artificial Sequence
  Description of Artificial Sequence: Synthetic oligonucleotide
  Sense strand starting at position 3635 of SEQ ID NO: 914870
auguccauugauuauguua

SEQ ID NO: 1036829 - RNA, 19 nt, Artificial Sequence
  Description of Artificial Sequence: Synthetic oligonucleotide
  Antisense strand to SEQ ID NO: 1036828
uaacauaaucaauggacau

SEQ ID NO: 1036830 - RNA, 19 nt, Artificial Sequence
  Description of Artificial Sequence: Synthetic oligonucleotide
  Sense strand starting at position 3637 of SEQ ID NO: 914870
guccauugauuauguuauu

SEQ ID NO: 1036831 - RNA, 19 nt, Artificial Sequence
  Description of Artificial Sequence: Synthetic oligonucleotide
  Antisense strand to SEQ ID NO: 1036830
aauaacauaaucaauggac

SEQ ID NO: 1036832 - RNA, 19 nt, Artificial Sequence
  Description of Artificial Sequence: Synthetic oligonucleotide
  Sense strand starting at position 3643 of SEQ ID NO: 914870
ugauuauguuauuugcauc

SEQ ID NO: 1036833 - RNA, 19 nt, Artificial Sequence
  Description of Artificial Sequence: Synthetic oligonucleotide
  Antisense strand to SEQ ID NO: 1036832
gaugcaaauaacauaauca

SEQ ID NO: 1036834 - RNA, 19 nt, Artificial Sequence
  Description of Artificial Sequence: Synthetic oligonucleotide
  Sense strand starting at position 3646 of SEQ ID NO: 914870
uuauguuauuugcaucagu

SEQ ID NO: 1036835 - RNA, 19 nt, Artificial Sequence
  Description of Artificial Sequence: Synthetic oligonucleotide
  Antisense strand to SEQ ID NO: 1036834
acugaugcaaauaacauaa

SEQ ID NO: 1036836 - RNA, 19 nt, Artificial Sequence
  Description of Artificial Sequence: Synthetic oligonucleotide
  Sense strand starting at position 3662 of SEQ ID NO: 914870
agugcugagcuuguguuua

SEQ ID NO: 1036837 - RNA, 19 nt, Artificial Sequence
  Description of Artificial Sequence: Synthetic oligonucleotide
  Antisense strand to SEQ ID NO: 1036836
uaaacacaagcucagcacu

SEQ ID NO: 1036838 - RNA, 19 nt, Artificial Sequence
  Description of Artificial Sequence: Synthetic oligonucleotide
  Sense strand starting at position 3664 of SEQ ID NO: 914870
ugcugagcuuguguuuauc

SEQ ID NO: 1036839 - RNA, 19 nt, Artificial Sequence
  Description of Artificial Sequence: Synthetic oligonucleotide
  Antisense strand to SEQ ID NO: 1036838
gauaaacacaagcucagca

SEQ ID NO: 1036840 - RNA, 19 nt, Artificial Sequence
  Description of Artificial Sequence: Synthetic oligonucleotide
  Sense strand starting at position 3672 of SEQ ID NO: 914870
uuguguuuauccuugucca

SEQ ID NO: 1036841 - RNA, 19 nt, Artificial Sequence
  Description of Artificial Sequence: Synthetic oligonucleotide
  Antisense strand to SEQ ID NO: 1036840
uggacaaggauaaacacaa

SEQ ID NO: 1036842 - RNA, 19 nt, Artificial Sequence
  Description of Artificial Sequence: Synthetic oligonucleotide
  Sense strand starting at position 3673 of SEQ ID NO: 914870
uguguuuauccuuguccau

SEQ ID NO: 1036843 - RNA, 19 nt, Artificial Sequence
  Description of Artificial Sequence: Synthetic oligonucleotide
  Antisense strand to SEQ ID NO: 1036842
auggacaaggauaaacaca

SEQ ID NO: 1036844 - RNA, 19 nt, Artificial Sequence
  Description of Artificial Sequence: Synthetic oligonucleotide
  Sense strand starting at position 3675 of SEQ ID NO: 914870
uguuuauccuuguccauuu

SEQ ID NO: 1036845 - RNA, 19 nt, Artificial Sequence
  Description of Artificial Sequence: Synthetic oligonucleotide
  Antisense strand to SEQ ID NO: 1036844
aaauggacaaggauaaaca

SEQ ID NO: 1036846 - RNA, 19 nt, Artificial Sequence
  Description of Artificial Sequence: Synthetic oligonucleotide
  Sense strand starting at position 3731 of SEQ ID NO: 914870
ggucuguugcguuugggau

SEQ ID NO: 1036847 - RNA, 19 nt, Artificial Sequence
  Description of Artificial Sequence: Synthetic oligonucleotide
  Antisense strand to SEQ ID NO: 1036846
aucccaaacgcaacagacc

SEQ ID NO: 1036848 - RNA, 19 nt, Artificial Sequence
  Description of Artificial Sequence: Synthetic oligonucleotide
  Sense strand starting at position 3732 of SEQ ID NO: 914870
gucuguugcguuugggauc

SEQ ID NO: 1036849 - RNA, 19 nt, Artificial Sequence
  Description of Artificial Sequence: Synthetic oligonucleotide
  Antisense strand to SEQ ID NO: 1036848
gaucccaaacgcaacagac

SEQ ID NO: 1036850 - RNA, 19 nt, Artificial Sequence
  Description of Artificial Sequence: Synthetic oligonucleotide
  Sense strand starting at position 3739 of SEQ ID NO: 914870
gcguuugggaucugugauc

SEQ ID NO: 1036851 - RNA, 19 nt, Artificial Sequence
  Description of Artificial Sequence: Synthetic oligonucleotide
  Antisense strand to SEQ ID NO: 1036850
gaucacagaucccaaacgc

SEQ ID NO: 1036852 - RNA, 19 nt, Artificial Sequence
  Description of Artificial Sequence: Synthetic oligonucleotide
  Sense strand starting at position 22 of SEQ ID NO: 914871
cugauuuccugagaauaaa

SEQ ID NO: 1036853 - RNA, 19 nt, Artificial Sequence
  Description of Artificial Sequence: Synthetic oligonucleotide
  Antisense strand to SEQ ID NO: 1036852
uuuauucucaggaaaucag

SEQ ID NO: 1036854 - RNA, 19 nt, Artificial Sequence
  Description of Artificial Sequence: Synthetic oligonucleotide
  Sense strand starting at position 128 of SEQ ID NO: 914871
acaguucuucccugaguuc

SEQ ID NO: 1036855 - RNA, 19 nt, Artificial Sequence
  Description of Artificial Sequence: Synthetic oligonucleotide
  Antisense strand to SEQ ID NO: 1036854
gaacucagggaagaacugu

SEQ ID NO: 1036856 - RNA, 19 nt, Artificial Sequence
  Description of Artificial Sequence: Synthetic oligonucleotide
  Sense strand starting at position 251 of SEQ ID NO: 914871
gucauuuccucacagaagu

SEQ ID NO: 1036857 - RNA, 19 nt, Artificial Sequence
  Description of Artificial Sequence: Synthetic oligonucleotide
  Antisense strand to SEQ ID NO: 1036856
acuucugugaggaaaugac

SEQ ID NO: 1036858 - RNA, 19 nt, Artificial Sequence
  Description of Artificial Sequence: Synthetic oligonucleotide
  Sense strand starting at position 271 of SEQ ID NO: 914871
cugccugaccaguagacaa

SEQ ID NO: 1036859 - RNA, 19 nt, Artificial Sequence
  Description of Artificial Sequence: Synthetic oligonucleotide
  Antisense strand to SEQ ID NO: 1036858
uugucuacuggucaggcag

SEQ ID NO: 1036860 - RNA, 19 nt, Artificial Sequence
  Description of Artificial Sequence: Synthetic oligonucleotide
  Sense strand starting at position 295 of SEQ ID NO: 914871
gcugcugcgagcuaucaua

SEQ ID NO: 1036861 - RNA, 19 nt, Artificial Sequence
  Description of Artificial Sequence: Synthetic oligonucleotide
  Antisense strand to SEQ ID NO: 1036860
uaugauagcucgcagcagc

SEQ ID NO: 1036862 - RNA, 19 nt, Artificial Sequence
  Description of Artificial Sequence: Synthetic oligonucleotide
  Sense strand starting at position 358 of SEQ ID NO: 914871
accaauuauuucuguaugu

SEQ ID NO: 1036863 - RNA, 19 nt, Artificial Sequence
  Description of Artificial Sequence: Synthetic oligonucleotide
  Antisense strand to SEQ ID NO: 1036862
acauacagaaauaauuggu

SEQ ID NO: 1036864 - RNA, 19 nt, Artificial Sequence
  Description of Artificial Sequence: Synthetic oligonucleotide
  Sense strand starting at position 461 of SEQ ID NO: 914871
cucaucuguuaacgaguga

SEQ ID NO: 1036865 - RNA, 19 nt, Artificial Sequence
  Description of Artificial Sequence: Synthetic oligonucleotide
  Antisense strand to SEQ ID NO: 1036864
ucacucguuaacagaugag

SEQ ID NO: 1036866 - RNA, 19 nt, Artificial Sequence
  Description of Artificial Sequence: Synthetic oligonucleotide
  Sense strand starting at position 462 of SEQ ID NO: 914871
ucaucuguuaacgagugaa

SEQ ID NO: 1036867 - RNA, 19 nt, Artificial Sequence
  Description of Artificial Sequence: Synthetic oligonucleotide
  Antisense strand to SEQ ID NO: 1036866
uucacucguuaacagauga

SEQ ID NO: 1036868 - RNA, 19 nt, Artificial Sequence
  Description of Artificial Sequence: Synthetic oligonucleotide
  Sense strand starting at position 465 of SEQ ID NO: 914871
ucuguuaacgagugaauag

SEQ ID NO: 1036869 - RNA, 19 nt, Artificial Sequence
  Description of Artificial Sequence: Synthetic oligonucleotide
  Antisense strand to SEQ ID NO: 1036868
cuauucacucguuaacaga

SEQ ID NO: 1036870 - RNA, 19 nt, Artificial Sequence
  Description of Artificial Sequence: Synthetic oligonucleotide
  Sense strand starting at position 466 of SEQ ID NO: 914871
cuguuaacgagugaauaga

SEQ ID NO: 1036871 - RNA, 19 nt, Artificial Sequence
  Description of Artificial Sequence: Synthetic oligonucleotide
  Antisense strand to SEQ ID NO: 1036870
ucuauucacucguuaacag

SEQ ID NO: 1036872 - RNA, 19 nt, Artificial Sequence
  Description of Artificial Sequence: Synthetic oligonucleotide
  Sense strand starting at position 500 of SEQ ID NO: 914871
gaggcuauguuuccuuaag

SEQ ID NO: 1036873 - RNA, 19 nt, Artificial Sequence
  Description of Artificial Sequence: Synthetic oligonucleotide
  Antisense strand to SEQ ID NO: 1036872
cuuaaggaaacauagccuc

SEQ ID NO: 1036874 - RNA, 19 nt, Artificial Sequence
  Description of Artificial Sequence: Synthetic oligonucleotide
  Sense strand starting at position 502 of SEQ ID NO: 914871
ggcuauguuuccuuaagga

SEQ ID NO: 1036875 - RNA, 19 nt, Artificial Sequence
  Description of Artificial Sequence: Synthetic oligonucleotide
  Antisense strand to SEQ ID NO: 1036874
uccuuaaggaaacauagcc

SEQ ID NO: 1036876 - RNA, 19 nt, Artificial Sequence
  Description of Artificial Sequence: Synthetic oligonucleotide
  Sense strand starting at position 599 of SEQ ID NO: 914871
gggugaucauggucucuua

SEQ ID NO: 1036877 - RNA, 19 nt, Artificial Sequence
  Description of Artificial Sequence: Synthetic oligonucleotide
  Antisense strand to SEQ ID NO: 1036876
uaagagaccaugaucaccc

SEQ ID NO: 1036878 - RNA, 19 nt, Artificial Sequence
  Description of Artificial Sequence: Synthetic oligonucleotide
  Sense strand starting at position 700 of SEQ ID NO: 914871
acgguucccugcucagauu

SEQ ID NO: 1036879 - RNA, 19 nt, Artificial Sequence
  Description of Artificial Sequence: Synthetic oligonucleotide
  Antisense strand to SEQ ID NO: 1036878
aaucugagcagggaaccgu

SEQ ID NO: 1036880 - RNA, 19 nt, Artificial Sequence
  Description of Artificial Sequence: Synthetic oligonucleotide
  Sense strand starting at position 2310 of SEQ ID NO: 914871
cgcuguuaucuggcucgca

SEQ ID NO: 1036881 - RNA, 19 nt, Artificial Sequence
  Description of Artificial Sequence: Synthetic oligonucleotide
  Antisense strand to SEQ ID NO: 1036880
ugcgagccagauaacagcg

SEQ ID NO: 1036882 - RNA, 19 nt, Artificial Sequence
  Description of Artificial Sequence: Synthetic oligonucleotide
  Sense strand starting at position 2313 of SEQ ID NO: 914871
uguuaucuggcucgcagau

SEQ ID NO: 1036883 - RNA, 19 nt, Artificial Sequence
  Description of Artificial Sequence: Synthetic oligonucleotide
  Antisense strand to SEQ ID NO: 1036882
aucugcgagccagauaaca

SEQ ID NO: 1036884 - RNA, 19 nt, Artificial Sequence
  Description of Artificial Sequence: Synthetic oligonucleotide
  Sense strand starting at position 2425 of SEQ ID NO: 914871
ggugacagguagcuuacua

SEQ ID NO: 1036885 - RNA, 19 nt, Artificial Sequence
  Description of Artificial Sequence: Synthetic oligonucleotide
  Antisense strand to SEQ ID NO: 1036884
uaguaagcuaccugucacc

SEQ ID NO: 1036886 - RNA, 19 nt, Artificial Sequence
  Description of Artificial Sequence: Synthetic oligonucleotide
  Sense strand starting at position 2442 of SEQ ID NO: 914871
uacguuuggcucugagaca

SEQ ID NO: 1036887 - RNA, 19 nt, Artificial Sequence
  Description of Artificial Sequence: Synthetic oligonucleotide
  Antisense strand to SEQ ID NO: 1036886
ugucucagagccaaacgua

SEQ ID NO: 1036888 - RNA, 19 nt, Artificial Sequence
  Description of Artificial Sequence: Synthetic oligonucleotide
  Sense strand starting at position 2443 of SEQ ID NO: 914871
acguuuggcucugagacaa

SEQ ID NO: 1036889 - RNA, 19 nt, Artificial Sequence
  Description of Artificial Sequence: Synthetic oligonucleotide
  Antisense strand to SEQ ID NO: 1036888
uugucucagagccaaacgu

SEQ ID NO: 1036890 - RNA, 19 nt, Artificial Sequence
  Description of Artificial Sequence: Synthetic oligonucleotide
  Sense strand starting at position 2454 of SEQ ID NO: 914871
ugagacaacucggaagguu

SEQ ID NO: 1036891 - RNA, 19 nt, Artificial Sequence
  Description of Artificial Sequence: Synthetic oligonucleotide
  Antisense strand to SEQ ID NO: 1036890
aaccuuccgaguugucuca

SEQ ID NO: 1036892 - RNA, 19 nt, Artificial Sequence
  Description of Artificial Sequence: Synthetic oligonucleotide
  Sense strand starting at position 2556 of SEQ ID NO: 914871
ugcucccuugugucaguua

SEQ ID NO: 1036893 - RNA, 19 nt, Artificial Sequence
  Description of Artificial Sequence: Synthetic oligonucleotide
  Antisense strand to SEQ ID NO: 1036892
uaacugacacaagggagca

SEQ ID NO: 1036894 - RNA, 19 nt, Artificial Sequence
  Description of Artificial Sequence: Synthetic oligonucleotide
  Sense strand starting at position 2557 of SEQ ID NO: 914871
gcucccuugugucaguuaa

SEQ ID NO: 1036895 - RNA, 19 nt, Artificial Sequence
  Description of Artificial Sequence: Synthetic oligonucleotide
  Antisense strand to SEQ ID NO: 1036894
uuaacugacacaagggagc

SEQ ID NO: 1036896 - RNA, 19 nt, Artificial Sequence
  Description of Artificial Sequence: Synthetic oligonucleotide
  Sense strand starting at position 2561 of SEQ ID NO: 914871
ccuugugucaguuaaggua

SEQ ID NO: 1036897 - RNA, 19 nt, Artificial Sequence
  Description of Artificial Sequence: Synthetic oligonucleotide
  Antisense strand to SEQ ID NO: 1036896
uaccuuaacugacacaagg

SEQ ID NO: 1036898 - RNA, 19 nt, Artificial Sequence
  Description of Artificial Sequence: Synthetic oligonucleotide
  Sense strand starting at position 2564 of SEQ ID NO: 914871
ugugucaguuaagguauuu

SEQ ID NO: 1036899 - RNA, 19 nt, Artificial Sequence
  Description of Artificial Sequence: Synthetic oligonucleotide
  Antisense strand to SEQ ID NO: 1036898
aaauaccuuaacugacaca

SEQ ID NO: 1036900 - RNA, 19 nt, Artificial Sequence
  Description of Artificial Sequence: Synthetic oligonucleotide
  Sense strand starting at position 2951 of SEQ ID NO: 914871
agugacagguucuuacuuu

SEQ ID NO: 1036901 - RNA, 19 nt, Artificial Sequence
  Description of Artificial Sequence: Synthetic oligonucleotide
  Antisense strand to SEQ ID NO: 1036900
aaaguaagaaccugucacu

SEQ ID NO: 1036902 - RNA, 19 nt, Artificial Sequence
  Description of Artificial Sequence: Synthetic oligonucleotide
  Sense strand starting at position 2952 of SEQ ID NO: 914871
gugacagguucuuacuuua

SEQ ID NO: 1036903 - RNA, 19 nt, Artificial Sequence
  Description of Artificial Sequence: Synthetic oligonucleotide
  Antisense strand to SEQ ID NO: 1036902
uaaaguaagaaccugucac

SEQ ID NO: 1036904 - RNA, 19 nt, Artificial Sequence
  Description of Artificial Sequence: Synthetic oligonucleotide
  Sense strand starting at position 2955 of SEQ ID NO: 914871
acagguucuuacuuuauca

SEQ ID NO: 1036905 - RNA, 19 nt, Artificial Sequence
  Description of Artificial Sequence: Synthetic oligonucleotide
  Antisense strand to SEQ ID NO: 1036904
ugauaaaguaagaaccugu

SEQ ID NO: 1036906 - RNA, 19 nt, Artificial Sequence
  Description of Artificial Sequence: Synthetic oligonucleotide
  Sense strand starting at position 3889 of SEQ ID NO: 914871
uguaguuaucucugugacu

SEQ ID NO: 1036907 - RNA, 19 nt, Artificial Sequence
  Description of Artificial Sequence: Synthetic oligonucleotide
  Antisense strand to SEQ ID NO: 1036906
agucacagagauaacuaca

SEQ ID NO: 1036908 - RNA, 19 nt, Artificial Sequence
  Description of Artificial Sequence: Synthetic oligonucleotide
  Sense strand starting at position 3890 of SEQ ID NO: 914871
guaguuaucucugugacug

SEQ ID NO: 1036909 - RNA, 19 nt, Artificial Sequence
  Description of Artificial Sequence: Synthetic oligonucleotide
  Antisense strand to SEQ ID NO: 1036908
cagucacagagauaacuac

SEQ ID NO: 1036910 - RNA, 19 nt, Artificial Sequence
  Description of Artificial Sequence: Synthetic oligonucleotide
  Sense strand starting at position 3938 of SEQ ID NO: 914871
ggaagcaacuucuguuguu

SEQ ID NO: 1036911 - RNA, 19 nt, Artificial Sequence
  Description of Artificial Sequence: Synthetic oligonucleotide
  Antisense strand to SEQ ID NO: 1036910
aacaacagaaguugcuucc

SEQ ID NO: 1036912 - RNA, 19 nt, Artificial Sequence
  Description of Artificial Sequence: Synthetic oligonucleotide
  Sense strand starting at position 3939 of SEQ ID NO: 914871
gaagcaacuucuguuguuu

SEQ ID NO: 1036913 - RNA, 19 nt, Artificial Sequence
  Description of Artificial Sequence: Synthetic oligonucleotide
  Antisense strand to SEQ ID NO: 1036912
aaacaacagaaguugcuuc

SEQ ID NO: 1036914 - RNA, 19 nt, Artificial Sequence
  Description of Artificial Sequence: Synthetic oligonucleotide
  Sense strand starting at position 3951 of SEQ ID NO: 914871
guuguuucuuauguccauu

SEQ ID NO: 1036915 - RNA, 19 nt, Artificial Sequence
  Description of Artificial Sequence: Synthetic oligonucleotide
  Antisense strand to SEQ ID NO: 1036914
aauggacauaagaaacaac

SEQ ID NO: 1036916 - RNA, 19 nt, Artificial Sequence
  Description of Artificial Sequence: Synthetic oligonucleotide
  Sense strand starting at position 3953 of SEQ ID NO: 914871
uguuucuuauguccauuga

SEQ ID NO: 1036917 - RNA, 19 nt, Artificial Sequence
  Description of Artificial Sequence: Synthetic oligonucleotide
  Antisense strand to SEQ ID NO: 1036916
ucaauggacauaagaaaca

SEQ ID NO: 1036918 - RNA, 19 nt, Artificial Sequence
  Description of Artificial Sequence: Synthetic oligonucleotide
  Sense strand starting at position 3954 of SEQ ID NO: 914871
guuucuuauguccauugau

SEQ ID NO: 1036919 - RNA, 19 nt, Artificial Sequence
  Description of Artificial Sequence: Synthetic oligonucleotide
  Antisense strand to SEQ ID NO: 1036918
aucaauggacauaagaaac

SEQ ID NO: 1036920 - RNA, 19 nt, Artificial Sequence
  Description of Artificial Sequence: Synthetic oligonucleotide
  Sense strand starting at position 3957 of SEQ ID NO: 914871
ucuuauguccauugauuau

SEQ ID NO: 1036921 - RNA, 19 nt, Artificial Sequence
  Description of Artificial Sequence: Synthetic oligonucleotide
  Antisense strand to SEQ ID NO: 1036920
auaaucaauggacauaaga

SEQ ID NO: 1036922 - RNA, 19 nt, Artificial Sequence
  Description of Artificial Sequence: Synthetic oligonucleotide
  Sense strand starting at position 3961 of SEQ ID NO: 914871
auguccauugauuauguua

SEQ ID NO: 1036923 - RNA, 19 nt, Artificial Sequence
  Description of Artificial Sequence: Synthetic oligonucleotide
  Antisense strand to SEQ ID NO: 1036922
uaacauaaucaauggacau

SEQ ID NO: 1036924 - RNA, 19 nt, Artificial Sequence
  Description of Artificial Sequence: Synthetic oligonucleotide
  Sense strand starting at position 3963 of SEQ ID NO: 914871
guccauugauuauguuauu

SEQ ID NO: 1036925 - RNA, 19 nt, Artificial Sequence
  Description of Artificial Sequence: Synthetic oligonucleotide
  Antisense strand to SEQ ID NO: 1036924
aauaacauaaucaauggac

SEQ ID NO: 1036926 - RNA, 19 nt, Artificial Sequence
  Description of Artificial Sequence: Synthetic oligonucleotide
  Sense strand starting at position 3969 of SEQ ID NO: 914871
ugauuauguuauuugcauc

SEQ ID NO: 1036927 - RNA, 19 nt, Artificial Sequence
  Description of Artificial Sequence: Synthetic oligonucleotide
  Antisense strand to SEQ ID NO: 1036926
gaugcaaauaacauaauca

SEQ ID NO: 1036928 - RNA, 19 nt, Artificial Sequence
  Description of Artificial Sequence: Synthetic oligonucleotide
  Sense strand starting at position 3972 of SEQ ID NO: 914871
uuauguuauuugcaucagu

SEQ ID NO: 1036929 - RNA, 19 nt, Artificial Sequence
  Description of Artificial Sequence: Synthetic oligonucleotide
  Antisense strand to SEQ ID NO: 1036928
acugaugcaaauaacauaa

SEQ ID NO: 1036930 - RNA, 19 nt, Artificial Sequence
  Description of Artificial Sequence: Synthetic oligonucleotide
  Sense strand starting at position 206 of SEQ ID NO: 914872
gcauucugcugaccucuaa

SEQ ID NO: 1036931 - RNA, 19 nt, Artificial Sequence
  Description of Artificial Sequence: Synthetic oligonucleotide
  Antisense strand to SEQ ID NO: 1036930
uuagaggucagcagaaugc

SEQ ID NO: 1036932 - RNA, 19 nt, Artificial Sequence
  Description of Artificial Sequence: Synthetic oligonucleotide
  Sense strand starting at position 279 of SEQ ID NO: 914872
ucguuuaaucuguauggca

SEQ ID NO: 1036933 - RNA, 19 nt, Artificial Sequence
  Description of Artificial Sequence: Synthetic oligonucleotide
  Antisense strand to SEQ ID NO: 1036932
ugccauacagauuaaacga

SEQ ID NO: 1036934 - RNA, 19 nt, Artificial Sequence
  Description of Artificial Sequence: Synthetic oligonucleotide
  Sense strand starting at position 295 of SEQ ID NO: 914872
gcaguucuauuaguaggga

SEQ ID NO: 1036935 - RNA, 19 nt, Artificial Sequence
  Description of Artificial Sequence: Synthetic oligonucleotide
  Antisense strand to SEQ ID NO: 1036934
ucccuacuaauagaacugc

SEQ ID NO: 1036936 - RNA, 19 nt, Artificial Sequence
  Description of Artificial Sequence: Synthetic oligonucleotide
  Sense strand starting at position 298 of SEQ ID NO: 914872
guucuauuaguagggauua

SEQ ID NO: 1036937 - RNA, 19 nt, Artificial Sequence
  Description of Artificial Sequence: Synthetic oligonucleotide
  Antisense strand to SEQ ID NO: 1036936
uaaucccuacuaauagaac

SEQ ID NO: 1036938 - RNA, 19 nt, Artificial Sequence
  Description of Artificial Sequence: Synthetic oligonucleotide
  Sense strand starting at position 371 of SEQ ID NO: 914872
gccauuaagcgucagagcu

SEQ ID NO: 1036939 - RNA, 19 nt, Artificial Sequence
  Description of Artificial Sequence: Synthetic oligonucleotide
  Antisense strand to SEQ ID NO: 1036938
agcucugacgcuuaauggc

SEQ ID NO: 1036940 - RNA, 19 nt, Artificial Sequence
  Description of Artificial Sequence: Synthetic oligonucleotide
  Sense strand starting at position 377 of SEQ ID NO: 914872
aagcgucagagcuggaauu

SEQ ID NO: 1036941 - RNA, 19 nt, Artificial Sequence
  Description of Artificial Sequence: Synthetic oligonucleotide
  Antisense strand to SEQ ID NO: 1036940
aauuccagcucugacgcuu

SEQ ID NO: 1036942 - RNA, 19 nt, Artificial Sequence
  Description of Artificial Sequence: Synthetic oligonucleotide
  Sense strand starting at position 379 of SEQ ID NO: 914872
gcgucagagcuggaauuca

SEQ ID NO: 1036943 - RNA, 19 nt, Artificial Sequence
  Description of Artificial Sequence: Synthetic oligonucleotide
  Antisense strand to SEQ ID NO: 1036942
ugaauuccagcucugacgc

SEQ ID NO: 1036944 - RNA, 19 nt, Artificial Sequence
  Description of Artificial Sequence: Synthetic oligonucleotide
  Sense strand starting at position 402 of SEQ ID NO: 914872
cagguuugucugucgcuaa

SEQ ID NO: 1036945 - RNA, 19 nt, Artificial Sequence
  Description of Artificial Sequence: Synthetic oligonucleotide
  Antisense strand to SEQ ID NO: 1036944
uuagcgacagacaaaccug

SEQ ID NO: 1036946 - RNA, 19 nt, Artificial Sequence
  Description of Artificial Sequence: Synthetic oligonucleotide
  Sense strand starting at position 502 of SEQ ID NO: 914872
uccauuaagccggauaacu

SEQ ID NO: 1036947 - RNA, 19 nt, Artificial Sequence
  Description of Artificial Sequence: Synthetic oligonucleotide
  Antisense strand to SEQ ID NO: 1036946
aguuauccggcuuaaugga

SEQ ID NO: 1036948 - RNA, 19 nt, Artificial Sequence
  Description of Artificial Sequence: Synthetic oligonucleotide
  Sense strand starting at position 563 of SEQ ID NO: 914872
aucugacgccaccagaauu

SEQ ID NO: 1036949 - RNA, 19 nt, Artificial Sequence
  Description of Artificial Sequence: Synthetic oligonucleotide
  Antisense strand to SEQ ID NO: 1036948
aauucugguggcgucagau

SEQ ID NO: 1036950 - RNA, 19 nt, Artificial Sequence
  Description of Artificial Sequence: Synthetic oligonucleotide
  Sense strand starting at position 856 of SEQ ID NO: 914872
cacagaacuugcguagagu

SEQ ID NO: 1036951 - RNA, 19 nt, Artificial Sequence
  Description of Artificial Sequence: Synthetic oligonucleotide
  Antisense strand to SEQ ID NO: 1036950
acucuacgcaaguucugug

SEQ ID NO: 1036952 - RNA, 19 nt, Artificial Sequence
  Description of Artificial Sequence: Synthetic oligonucleotide
  Sense strand starting at position 857 of SEQ ID NO: 914872
acagaacuugcguagagua

SEQ ID NO: 1036953 - RNA, 19 nt, Artificial Sequence
  Description of Artificial Sequence: Synthetic oligonucleotide
  Antisense strand to SEQ ID NO: 1036952
uacucuacgcaaguucugu

SEQ ID NO: 1036954 - RNA, 19 nt, Artificial Sequence
  Description of Artificial Sequence: Synthetic oligonucleotide
  Sense strand starting at position 859 of SEQ ID NO: 914872
agaacuugcguagaguagu

SEQ ID NO: 1036955 - RNA, 19 nt, Artificial Sequence
  Description of Artificial Sequence: Synthetic oligonucleotide
  Antisense strand to SEQ ID NO: 1036954
acuacucuacgcaaguucu

SEQ ID NO: 1036956 - RNA, 19 nt, Artificial Sequence
  Description of Artificial Sequence: Synthetic oligonucleotide
  Sense strand starting at position 872 of SEQ ID NO: 914872
aguaguaaguacucggaau

SEQ ID NO: 1036957 - RNA, 19 nt, Artificial Sequence
  Description of Artificial Sequence: Synthetic oligonucleotide
  Antisense strand to SEQ ID NO: 1036956
auuccgaguacuuacuacu

SEQ ID NO: 1036958 - RNA, 19 nt, Artificial Sequence
  Description of Artificial Sequence: Synthetic oligonucleotide
  Sense strand starting at position 873 of SEQ ID NO: 914872
guaguaaguacucggaauu

SEQ ID NO: 1036959 - RNA, 19 nt, Artificial Sequence
  Description of Artificial Sequence: Synthetic oligonucleotide
  Antisense strand to SEQ ID NO: 1036958
aauuccgaguacuuacuac

SEQ ID NO: 1036960 - RNA, 19 nt, Artificial Sequence
  Description of Artificial Sequence: Synthetic oligonucleotide
  Sense strand starting at position 874 of SEQ ID NO: 914872
uaguaaguacucggaauua

SEQ ID NO: 1036961 - RNA, 19 nt, Artificial Sequence
  Description of Artificial Sequence: Synthetic oligonucleotide
  Antisense strand to SEQ ID NO: 1036960
uaauuccgaguacuuacua

SEQ ID NO: 1036962 - RNA, 19 nt, Artificial Sequence
  Description of Artificial Sequence: Synthetic oligonucleotide
  Sense strand starting at position 971 of SEQ ID NO: 914872
gcagaauuaugggcaccga

SEQ ID NO: 1036963 - RNA, 19 nt, Artificial Sequence
  Description of Artificial Sequence: Synthetic oligonucleotide
  Antisense strand to SEQ ID NO: 1036962
ucggugcccauaauucugc

SEQ ID NO: 1036964 - RNA, 19 nt, Artificial Sequence
  Description of Artificial Sequence: Synthetic oligonucleotide
  Sense strand starting at position 1053 of SEQ ID NO: 914872
gaaugaaugagcgguggaa

SEQ ID NO: 1036965 - RNA, 19 nt, Artificial Sequence
  Description of Artificial Sequence: Synthetic oligonucleotide
  Antisense strand to SEQ ID NO: 1036964
uuccaccgcucauucauuc

SEQ ID NO: 1036966 - RNA, 19 nt, Artificial Sequence
  Description of Artificial Sequence: Synthetic oligonucleotide
  Sense strand starting at position 1334 of SEQ ID NO: 914872
agcgcauggccgcuucaaa

SEQ ID NO: 1036967 - RNA, 19 nt, Artificial Sequence
  Description of Artificial Sequence: Synthetic oligonucleotide
  Antisense strand to SEQ ID NO: 1036966
uuugaagcggccaugcgcu

SEQ ID NO: 1036968 - RNA, 19 nt, Artificial Sequence
  Description of Artificial Sequence: Synthetic oligonucleotide
  Sense strand starting at position 2246 of SEQ ID NO: 914872
uaucgauaucugcagguaa

SEQ ID NO: 1036969 - RNA, 19 nt, Artificial Sequence
  Description of Artificial Sequence: Synthetic oligonucleotide
  Antisense strand to SEQ ID NO: 1036968
uuaccugcagauaucgaua

SEQ ID NO: 1036970 - RNA, 19 nt, Artificial Sequence
  Description of Artificial Sequence: Synthetic oligonucleotide
  Sense strand starting at position 2248 of SEQ ID NO: 914872
ucgauaucugcagguaaca

SEQ ID NO: 1036971 - RNA, 19 nt, Artificial Sequence
  Description of Artificial Sequence: Synthetic oligonucleotide
  Antisense strand to SEQ ID NO: 1036970
uguuaccugcagauaucga

SEQ ID NO: 1036972 - RNA, 19 nt, Artificial Sequence
  Description of Artificial Sequence: Synthetic oligonucleotide
  Sense strand starting at position 2362 of SEQ ID NO: 914872
ggcugugucccaggauacu

SEQ ID NO: 1036973 - RNA, 19 nt, Artificial Sequence
  Description of Artificial Sequence: Synthetic oligonucleotide
  Antisense strand to SEQ ID NO: 1036972
aguauccugggacacagcc

SEQ ID NO: 1036974 - RNA, 19 nt, Artificial Sequence
  Description of Artificial Sequence: Synthetic oligonucleotide
  Sense strand starting at position 2432 of SEQ ID NO: 914872
guuacuggaaccuggaaau

SEQ ID NO: 1036975 - RNA, 19 nt, Artificial Sequence
  Description of Artificial Sequence: Synthetic oligonucleotide
  Antisense strand to SEQ ID NO: 1036974
auuuccagguuccaguaac

SEQ ID NO: 1036976 - RNA, 19 nt, Artificial Sequence
  Description of Artificial Sequence: Synthetic oligonucleotide
  Sense strand starting at position 2443 of SEQ ID NO: 914872
cuggaaauauaucugugua

SEQ ID NO: 1036977 - RNA, 19 nt, Artificial Sequence
  Description of Artificial Sequence: Synthetic oligonucleotide
  Antisense strand to SEQ ID NO: 1036976
uacacagauauauuuccag

SEQ ID NO: 1036978 - RNA, 19 nt, Artificial Sequence
  Description of Artificial Sequence: Synthetic oligonucleotide
  Sense strand starting at position 2445 of SEQ ID NO: 914872
ggaaauauaucuguguaag

SEQ ID NO: 1036979 - RNA, 19 nt, Artificial Sequence
  Description of Artificial Sequence: Synthetic oligonucleotide
  Antisense strand to SEQ ID NO: 1036978
cuuacacagauauauuucc

SEQ ID NO: 1036980 - RNA, 19 nt, Artificial Sequence
  Description of Artificial Sequence: Synthetic oligonucleotide
  Sense strand starting at position 2446 of SEQ ID NO: 914872
gaaauauaucuguguaagg

SEQ ID NO: 1036981 - RNA, 19 nt, Artificial Sequence
  Description of Artificial Sequence: Synthetic oligonucleotide
  Antisense strand to SEQ ID NO: 1036980
ccuuacacagauauauuuc

SEQ ID NO: 1036982 - RNA, 19 nt, Artificial Sequence
  Description of Artificial Sequence: Synthetic oligonucleotide
  Sense strand starting at position 2447 of SEQ ID NO: 914872
aaauauaucuguguaagga

SEQ ID NO: 1036983 - RNA, 19 nt, Artificial Sequence
  Description of Artificial Sequence: Synthetic oligonucleotide
  Antisense strand to SEQ ID NO: 1036982
uccuuacacagauauauuu

SEQ ID NO: 1036984 - RNA, 19 nt, Artificial Sequence
  Description of Artificial Sequence: Synthetic oligonucleotide
  Sense strand starting at position 2680 of SEQ ID NO: 914872
aaacgaauucgacaaguau

SEQ ID NO: 1036985 - RNA, 19 nt, Artificial Sequence
  Description of Artificial Sequence: Synthetic oligonucleotide
  Antisense strand to SEQ ID NO: 1036984
auacuugucgaauucguuu

SEQ ID NO: 1036986 - RNA, 19 nt, Artificial Sequence
  Description of Artificial Sequence: Synthetic oligonucleotide
  Sense strand starting at position 2895 of SEQ ID NO: 914872
cgaauucugaaagguuaga

SEQ ID NO: 1036987 - RNA, 19 nt, Artificial Sequence
  Description of Artificial Sequence: Synthetic oligonucleotide
  Antisense strand to SEQ ID NO: 1036986
ucuaaccuuucagaauucg

SEQ ID NO: 1036988 - RNA, 19 nt, Artificial Sequence
  Description of Artificial Sequence: Synthetic oligonucleotide
  Sense strand starting at position 2942 of SEQ ID NO: 914872
ucuagugaguucucuuggu

SEQ ID NO: 1036989 - RNA, 19 nt, Artificial Sequence
  Description of Artificial Sequence: Synthetic oligonucleotide
  Antisense strand to SEQ ID NO: 1036988
accaagagaacucacuaga

SEQ ID NO: 1036990 - RNA, 19 nt, Artificial Sequence
  Description of Artificial Sequence: Synthetic oligonucleotide
  Sense strand starting at position 3152 of SEQ ID NO: 914872
uuacaugggcuguaugaaa

SEQ ID NO: 1036991 - RNA, 19 nt, Artificial Sequence
  Description of Artificial Sequence: Synthetic oligonucleotide
  Antisense strand to SEQ ID NO: 1036990
uuucauacagcccauguaa

SEQ ID NO: 1036992 - RNA, 19 nt, Artificial Sequence
  Description of Artificial Sequence: Synthetic oligonucleotide
  Sense strand starting at position 3196 of SEQ ID NO: 914872
auggguguuucccuauauu

SEQ ID NO: 1036993 - RNA, 19 nt, Artificial Sequence
  Description of Artificial Sequence: Synthetic oligonucleotide
  Antisense strand to SEQ ID NO: 1036992
aauauagggaaacacccau

SEQ ID NO: 1036994 - RNA, 19 nt, Artificial Sequence
  Description of Artificial Sequence: Synthetic oligonucleotide
  Sense strand starting at position 3199 of SEQ ID NO: 914872
gguguuucccuauauugcu

SEQ ID NO: 1036995 - RNA, 19 nt, Artificial Sequence
  Description of Artificial Sequence: Synthetic oligonucleotide
  Antisense strand to SEQ ID NO: 1036994
agcaauauagggaaacacc

SEQ ID NO: 1036996 - RNA, 19 nt, Artificial Sequence
  Description of Artificial Sequence: Synthetic oligonucleotide
  Sense strand starting at position 3321 of SEQ ID NO: 914872
cccuuuaguuugucauaag

SEQ ID NO: 1036997 - RNA, 19 nt, Artificial Sequence
  Description of Artificial Sequence: Synthetic oligonucleotide
  Antisense strand to SEQ ID NO: 1036996
cuuaugacaaacuaaaggg

SEQ ID NO: 1036998 - RNA, 19 nt, Artificial Sequence
  Description of Artificial Sequence: Synthetic oligonucleotide
  Sense strand starting at position 3328 of SEQ ID NO: 914872
guuugucauaagggaaaca

SEQ ID NO: 1036999 - RNA, 19 nt, Artificial Sequence
  Description of Artificial Sequence: Synthetic oligonucleotide
  Antisense strand to SEQ ID NO: 1036998
uguuucccuuaugacaaac

SEQ ID NO: 1037000 - RNA, 19 nt, Artificial Sequence
  Description of Artificial Sequence: Synthetic oligonucleotide
  Sense strand starting at position 3435 of SEQ ID NO: 914872
gggccaugcugguuaugau

SEQ ID NO: 1037001 - RNA, 19 nt, Artificial Sequence
  Description of Artificial Sequence: Synthetic oligonucleotide
  Antisense strand to SEQ ID NO: 1037000
aucauaaccagcauggccc

SEQ ID NO: 1037002 - RNA, 19 nt, Artificial Sequence
  Description of Artificial Sequence: Synthetic oligonucleotide
  Sense strand starting at position 3436 of SEQ ID NO: 914872
ggccaugcugguuaugauu

SEQ ID NO: 1037003 - RNA, 19 nt, Artificial Sequence
  Description of Artificial Sequence: Synthetic oligonucleotide
  Antisense strand to SEQ ID NO: 1037002
aaucauaaccagcauggcc

SEQ ID NO: 1037004 - RNA, 19 nt, Artificial Sequence
  Description of Artificial Sequence: Synthetic oligonucleotide
  Sense strand starting at position 3609 of SEQ ID NO: 914872
gucagaucccgccuagugu

SEQ ID NO: 1037005 - RNA, 19 nt, Artificial Sequence
  Description of Artificial Sequence: Synthetic oligonucleotide
  Antisense strand to SEQ ID NO: 1037004
acacuaggcgggaucugac

SEQ ID NO: 1037006 - RNA, 19 nt, Artificial Sequence
  Description of Artificial Sequence: Synthetic oligonucleotide
  Sense strand starting at position 3670 of SEQ ID NO: 914872
ccuggucagcaucaugaga

SEQ ID NO: 1037007 - RNA, 19 nt, Artificial Sequence
  Description of Artificial Sequence: Synthetic oligonucleotide
  Antisense strand to SEQ ID NO: 1037006
ucucaugaugcugaccagg

SEQ ID NO: 1037008 - RNA, 19 nt, Artificial Sequence
  Description of Artificial Sequence: Synthetic oligonucleotide
  Sense strand starting at position 3929 of SEQ ID NO: 914872
gucucaucagcauaaggau

SEQ ID NO: 1037009 - RNA, 19 nt, Artificial Sequence
  Description of Artificial Sequence: Synthetic oligonucleotide
  Antisense strand to SEQ ID NO: 1037008
auccuuaugcugaugagac

SEQ ID NO: 1037010 - RNA, 19 nt, Artificial Sequence
  Description of Artificial Sequence: Synthetic oligonucleotide
  Sense strand starting at position 167 of SEQ ID NO: 914873
gccgaauaauguuuauaga

SEQ ID NO: 1037011 - RNA, 19 nt, Artificial Sequence
  Description of Artificial Sequence: Synthetic oligonucleotide
  Antisense strand to SEQ ID NO: 1037010
ucuauaaacauuauucggc

SEQ ID NO: 1037012 - RNA, 19 nt, Artificial Sequence
  Description of Artificial Sequence: Synthetic oligonucleotide
  Sense strand starting at position 280 of SEQ ID NO: 914873
ccaaguccuuucuaaggaa

SEQ ID NO: 1037013 - RNA, 19 nt, Artificial Sequence
  Description of Artificial Sequence: Synthetic oligonucleotide
  Antisense strand to SEQ ID NO: 1037012
uuccuuagaaaggacuugg

SEQ ID NO: 1037014 - RNA, 19 nt, Artificial Sequence
  Description of Artificial Sequence: Synthetic oligonucleotide
  Sense strand starting at position 295 of SEQ ID NO: 914873
ggaauaacuuugcuugaua

SEQ ID NO: 1037015 - RNA, 19 nt, Artificial Sequence
  Description of Artificial Sequence: Synthetic oligonucleotide
  Antisense strand to SEQ ID NO: 1037014
uaucaagcaaaguuauucc

SEQ ID NO: 1037016 - RNA, 19 nt, Artificial Sequence
  Description of Artificial Sequence: Synthetic oligonucleotide
  Sense strand starting at position 359 of SEQ ID NO: 914873
guauaacugucccuuaucu

SEQ ID NO: 1037017 - RNA, 19 nt, Artificial Sequence
  Description of Artificial Sequence: Synthetic oligonucleotide
  Antisense strand to SEQ ID NO: 1037016
agauaagggacaguuauac

SEQ ID NO: 1037018 - RNA, 19 nt, Artificial Sequence
  Description of Artificial Sequence: Synthetic oligonucleotide
  Sense strand starting at position 442 of SEQ ID NO: 914873
guggaucaauaaugaaaug

SEQ ID NO: 1037019 - RNA, 19 nt, Artificial Sequence
  Description of Artificial Sequence: Synthetic oligonucleotide
  Antisense strand to SEQ ID NO: 1037018
cauuucauuauugauccac

SEQ ID NO: 1037020 - RNA, 19 nt, Artificial Sequence
  Description of Artificial Sequence: Synthetic oligonucleotide
  Sense strand starting at position 756 of SEQ ID NO: 914873
guaauucccggcuaccaau

SEQ ID NO: 1037021 - RNA, 19 nt, Artificial Sequence
  Description of Artificial Sequence: Synthetic oligonucleotide
  Antisense strand to SEQ ID NO: 1037020
auugguagccgggaauuac

SEQ ID NO: 1037022 - RNA, 19 nt, Artificial Sequence
  Description of Artificial Sequence: Synthetic oligonucleotide
  Sense strand starting at position 818 of SEQ ID NO: 914873
gagacugcuguaugaggaa

SEQ ID NO: 1037023 - RNA, 19 nt, Artificial Sequence
  Description of Artificial Sequence: Synthetic oligonucleotide
  Antisense strand to SEQ ID NO: 1037022
uuccucauacagcagucuc

SEQ ID NO: 1037024 - RNA, 19 nt, Artificial Sequence
  Description of Artificial Sequence: Synthetic oligonucleotide
  Sense strand starting at position 832 of SEQ ID NO: 914873
aggaaucaccguuaucuuc

SEQ ID NO: 1037025 - RNA, 19 nt, Artificial Sequence
  Description of Artificial Sequence: Synthetic oligonucleotide
  Antisense strand to SEQ ID NO: 1037024
gaagauaacggugauuccu

SEQ ID NO: 1037026 - RNA, 19 nt, Artificial Sequence
  Description of Artificial Sequence: Synthetic oligonucleotide
  Sense strand starting at position 1202 of SEQ ID NO: 914873
ggaggaaucuugcucggau

SEQ ID NO: 1037027 - RNA, 19 nt, Artificial Sequence
  Description of Artificial Sequence: Synthetic oligonucleotide
  Antisense strand to SEQ ID NO: 1037026
auccgagcaagauuccucc

SEQ ID NO: 1037028 - RNA, 19 nt, Artificial Sequence
  Description of Artificial Sequence: Synthetic oligonucleotide
  Sense strand starting at position 1203 of SEQ ID NO: 914873
gaggaaucuugcucggaug

SEQ ID NO: 1037029 - RNA, 19 nt, Artificial Sequence
  Description of Artificial Sequence: Synthetic oligonucleotide
  Antisense strand to SEQ ID NO: 1037028
cauccgagcaagauuccuc

SEQ ID NO: 1037030 - RNA, 19 nt, Artificial Sequence
  Description of Artificial Sequence: Synthetic oligonucleotide
  Sense strand starting at position 1204 of SEQ ID NO: 914873
aggaaucuugcucggauga

SEQ ID NO: 1037031 - RNA, 19 nt, Artificial Sequence
  Description of Artificial Sequence: Synthetic oligonucleotide
  Antisense strand to SEQ ID NO: 1037030
ucauccgagcaagauuccu

SEQ ID NO: 1037032 - RNA, 19 nt, Artificial Sequence
  Description of Artificial Sequence: Synthetic oligonucleotide
  Sense strand starting at position 1220 of SEQ ID NO: 914873
ugagguaaucugugaaagg

SEQ ID NO: 1037033 - RNA, 19 nt, Artificial Sequence
  Description of Artificial Sequence: Synthetic oligonucleotide
  Antisense strand to SEQ ID NO: 1037032
ccuuucacagauuaccuca

SEQ ID NO: 1037034 - RNA, 19 nt, Artificial Sequence
  Description of Artificial Sequence: Synthetic oligonucleotide
  Sense strand starting at position 1221 of SEQ ID NO: 914873
gagguaaucugugaaaggg

SEQ ID NO: 1037035 - RNA, 19 nt, Artificial Sequence
  Description of Artificial Sequence: Synthetic oligonucleotide
  Antisense strand to SEQ ID NO: 1037034
cccuuucacagauuaccuc

SEQ ID NO: 1037036 - RNA, 19 nt, Artificial Sequence
  Description of Artificial Sequence: Synthetic oligonucleotide
  Sense strand starting at position 1223 of SEQ ID NO: 914873
gguaaucugugaaagggag

SEQ ID NO: 1037037 - RNA, 19 nt, Artificial Sequence
  Description of Artificial Sequence: Synthetic oligonucleotide
  Antisense strand to SEQ ID NO: 1037036
cucccuuucacagauuacc

SEQ ID NO: 1037038 - RNA, 19 nt, Artificial Sequence
  Description of Artificial Sequence: Synthetic oligonucleotide
  Sense strand starting at position 2283 of SEQ ID NO: 914873
agaggcauugcucgggaaa

SEQ ID NO: 1037039 - RNA, 19 nt, Artificial Sequence
  Description of Artificial Sequence: Synthetic oligonucleotide
  Antisense strand to SEQ ID NO: 1037038
uuucccgagcaaugccucu

SEQ ID NO: 1037040 - RNA, 19 nt, Artificial Sequence
  Description of Artificial Sequence: Synthetic oligonucleotide
  Sense strand starting at position 2547 of SEQ ID NO: 914873
acggauacaagauggguua

SEQ ID NO: 1037041 - RNA, 19 nt, Artificial Sequence
  Description of Artificial Sequence: Synthetic oligonucleotide
  Antisense strand to SEQ ID NO: 1037040
uaacccaucuuguauccgu

SEQ ID NO: 1037042 - RNA, 19 nt, Artificial Sequence
  Description of Artificial Sequence: Synthetic oligonucleotide
  Sense strand starting at position 2558 of SEQ ID NO: 914873
auggguuagcccgaauuga

SEQ ID NO: 1037043 - RNA, 19 nt, Artificial Sequence
  Description of Artificial Sequence: Synthetic oligonucleotide
  Antisense strand to SEQ ID NO: 1037042
ucaauucgggcuaacccau

SEQ ID NO: 1037044 - RNA, 19 nt, Artificial Sequence
  Description of Artificial Sequence: Synthetic oligonucleotide
  Sense strand starting at position 2624 of SEQ ID NO: 914873
agcgcugcccaguuuacua

SEQ ID NO: 1037045 - RNA, 19 nt, Artificial Sequence
  Description of Artificial Sequence: Synthetic oligonucleotide
  Antisense strand to SEQ ID NO: 1037044
uaguaaacugggcagcgcu

SEQ ID NO: 1037046 - RNA, 19 nt, Artificial Sequence
  Description of Artificial Sequence: Synthetic oligonucleotide
  Sense strand starting at position 2807 of SEQ ID NO: 914873
agggaguuggguuguguuu

SEQ ID NO: 1037047 - RNA, 19 nt, Artificial Sequence
  Description of Artificial Sequence: Synthetic oligonucleotide
  Antisense strand to SEQ ID NO: 1037046
aaacacaacccaacucccu

SEQ ID NO: 1037048 - RNA, 19 nt, Artificial Sequence
  Description of Artificial Sequence: Synthetic oligonucleotide
  Sense strand starting at position 3018 of SEQ ID NO: 914873
ucgcgagcacguuucugau

SEQ ID NO: 1037049 - RNA, 19 nt, Artificial Sequence
  Description of Artificial Sequence: Synthetic oligonucleotide
  Antisense strand to SEQ ID NO: 1037048
aucagaaacgugcucgcga

SEQ ID NO: 1037050 - RNA, 19 nt, Artificial Sequence
  Description of Artificial Sequence: Synthetic oligonucleotide
  Sense strand starting at position 3024 of SEQ ID NO: 914873
gcacguuucugauuaagag

SEQ ID NO: 1037051 - RNA, 19 nt, Artificial Sequence
  Description of Artificial Sequence: Synthetic oligonucleotide
  Antisense strand to SEQ ID NO: 1037050
cucuuaaucagaaacgugc

SEQ ID NO: 1037052 - RNA, 19 nt, Artificial Sequence
  Description of Artificial Sequence: Synthetic oligonucleotide
  Sense strand starting at position 3025 of SEQ ID NO: 914873
cacguuucugauuaagaga

SEQ ID NO: 1037053 - RNA, 19 nt, Artificial Sequence
  Description of Artificial Sequence: Synthetic oligonucleotide
  Antisense strand to SEQ ID NO: 1037052
ucucuuaaucagaaacgug

SEQ ID NO: 1037054 - RNA, 19 nt, Artificial Sequence
  Description of Artificial Sequence: Synthetic oligonucleotide
  Sense strand starting at position 3057 of SEQ ID NO: 914873
agcguugggcauuaugaua

SEQ ID NO: 1037055 - RNA, 19 nt, Artificial Sequence
  Description of Artificial Sequence: Synthetic oligonucleotide
  Antisense strand to SEQ ID NO: 1037054
uaucauaaugcccaacgcu

SEQ ID NO: 1037056 - RNA, 19 nt, Artificial Sequence
  Description of Artificial Sequence: Synthetic oligonucleotide
  Sense strand starting at position 3172 of SEQ ID NO: 914873
augaauauccaccggguuu

SEQ ID NO: 1037057 - RNA, 19 nt, Artificial Sequence
  Description of Artificial Sequence: Synthetic oligonucleotide
  Antisense strand to SEQ ID NO: 1037056
aaacccgguggauauucau

SEQ ID NO: 1037058 - RNA, 19 nt, Artificial Sequence
  Description of Artificial Sequence: Synthetic oligonucleotide
  Sense strand starting at position 3173 of SEQ ID NO: 914873
ugaauauccaccggguuua

SEQ ID NO: 1037059 - RNA, 19 nt, Artificial Sequence
  Description of Artificial Sequence: Synthetic oligonucleotide
  Antisense strand to SEQ ID NO: 1037058
uaaacccgguggauauuca

SEQ ID NO: 1037060 - RNA, 19 nt, Artificial Sequence
  Description of Artificial Sequence: Synthetic oligonucleotide
  Sense strand starting at position 3190 of SEQ ID NO: 914873
uacuuuauugcgggaaaga

SEQ ID NO: 1037061 - RNA, 19 nt, Artificial Sequence
  Description of Artificial Sequence: Synthetic oligonucleotide
  Antisense strand to SEQ ID NO: 1037060
ucuuucccgcaauaaagua

SEQ ID NO: 1037062 - RNA, 19 nt, Artificial Sequence
  Description of Artificial Sequence: Synthetic oligonucleotide
  Sense strand starting at position 3228 of SEQ ID NO: 914873
uagcguuagacgccugcaa

SEQ ID NO: 1037063 - RNA, 19 nt, Artificial Sequence
  Description of Artificial Sequence: Synthetic oligonucleotide
  Antisense strand to SEQ ID NO: 1037062
uugcaggcgucuaacgcua

SEQ ID NO: 1037064 - RNA, 19 nt, Artificial Sequence
  Description of Artificial Sequence: Synthetic oligonucleotide
  Sense strand starting at position 3275 of SEQ ID NO: 914873
gguuugugucgggagaacu

SEQ ID NO: 1037065 - RNA, 19 nt, Artificial Sequence
  Description of Artificial Sequence: Synthetic oligonucleotide
  Antisense strand to SEQ ID NO: 1037064
aguucucccgacacaaacc

SEQ ID NO: 1037066 - RNA, 19 nt, Artificial Sequence
  Description of Artificial Sequence: Synthetic oligonucleotide
  Sense strand starting at position 3276 of SEQ ID NO: 914873
guuugugucgggagaacuu

SEQ ID NO: 1037067 - RNA, 19 nt, Artificial Sequence
  Description of Artificial Sequence: Synthetic oligonucleotide
  Antisense strand to SEQ ID NO: 1037066
aaguucucccgacacaaac

SEQ ID NO: 1037068 - RNA, 19 nt, Artificial Sequence
  Description of Artificial Sequence: Synthetic oligonucleotide
  Sense strand starting at position 3285 of SEQ ID NO: 914873
gggagaacuugcguuggcu

SEQ ID NO: 1037069 - RNA, 19 nt, Artificial Sequence
  Description of Artificial Sequence: Synthetic oligonucleotide
  Antisense strand to SEQ ID NO: 1037068
agccaacgcaaguucuccc

SEQ ID NO: 1037070 - RNA, 19 nt, Artificial Sequence
  Description of Artificial Sequence: Synthetic oligonucleotide
  Sense strand starting at position 3287 of SEQ ID NO: 914873
gagaacuugcguuggcuga

SEQ ID NO: 1037071 - RNA, 19 nt, Artificial Sequence
  Description of Artificial Sequence: Synthetic oligonucleotide
  Antisense strand to SEQ ID NO: 1037070
ucagccaacgcaaguucuc

SEQ ID NO: 1037072 - RNA, 19 nt, Artificial Sequence
  Description of Artificial Sequence: Synthetic oligonucleotide
  Sense strand starting at position 3416 of SEQ ID NO: 914873
cagcgcacugcauguaaua

SEQ ID NO: 1037073 - RNA, 19 nt, Artificial Sequence
  Description of Artificial Sequence: Synthetic oligonucleotide
  Antisense strand to SEQ ID NO: 1037072
uauuacaugcagugcgcug

SEQ ID NO: 1037074 - RNA, 19 nt, Artificial Sequence
  Description of Artificial Sequence: Synthetic oligonucleotide
  Sense strand starting at position 3418 of SEQ ID NO: 914873
gcgcacugcauguaauauu

SEQ ID NO: 1037075 - RNA, 19 nt, Artificial Sequence
  Description of Artificial Sequence: Synthetic oligonucleotide
  Antisense strand to SEQ ID NO: 1037074
aauauuacaugcagugcgc

SEQ ID NO: 1037076 - RNA, 19 nt, Artificial Sequence
  Description of Artificial Sequence: Synthetic oligonucleotide
  Sense strand starting at position 3581 of SEQ ID NO: 914873
ggcgaaacauuugugcaga

SEQ ID NO: 1037077 - RNA, 19 nt, Artificial Sequence
  Description of Artificial Sequence: Synthetic oligonucleotide
  Antisense strand to SEQ ID NO: 1037076
ucugcacaaauguuucgcc

SEQ ID NO: 1037078 - RNA, 19 nt, Artificial Sequence
  Description of Artificial Sequence: Synthetic oligonucleotide
  Sense strand starting at position 3681 of SEQ ID NO: 914873
aaucgaucuucguuccaac

SEQ ID NO: 1037079 - RNA, 19 nt, Artificial Sequence
  Description of Artificial Sequence: Synthetic oligonucleotide
  Antisense strand to SEQ ID NO: 1037078
guuggaacgaagaucgauu

SEQ ID NO: 1037080 - RNA, 19 nt, Artificial Sequence
  Description of Artificial Sequence: Synthetic oligonucleotide
  Sense strand starting at position 3758 of SEQ ID NO: 914873
gaacaagauuccguuguua

SEQ ID NO: 1037081 - RNA, 19 nt, Artificial Sequence
  Description of Artificial Sequence: Synthetic oligonucleotide
  Antisense strand to SEQ ID NO: 1037080
uaacaacggaaucuuguuc

SEQ ID NO: 1037082 - RNA, 19 nt, Artificial Sequence
  Description of Artificial Sequence: Synthetic oligonucleotide
  Sense strand starting at position 3760 of SEQ ID NO: 914873
acaagauuccguuguuaca

SEQ ID NO: 1037083 - RNA, 19 nt, Artificial Sequence
  Description of Artificial Sequence: Synthetic oligonucleotide
  Antisense strand to SEQ ID NO: 1037082
uguaacaacggaaucuugu

SEQ ID NO: 1037084 - RNA, 19 nt, Artificial Sequence
  Description of Artificial Sequence: Synthetic oligonucleotide
  Sense strand starting at position 3782 of SEQ ID NO: 914873
cgugguuuacuagaugcua

SEQ ID NO: 1037085 - RNA, 19 nt, Artificial Sequence
  Description of Artificial Sequence: Synthetic oligonucleotide
  Antisense strand to SEQ ID NO: 1037084
uagcaucuaguaaaccacg

SEQ ID NO: 1037086 - RNA, 19 nt, Artificial Sequence
  Description of Artificial Sequence: Synthetic oligonucleotide
  Sense strand starting at position 3877 of SEQ ID NO: 914873
cgguuucuccauugcaaua

SEQ ID NO: 1037087 - RNA, 19 nt, Artificial Sequence
  Description of Artificial Sequence: Synthetic oligonucleotide
  Antisense strand to SEQ ID NO: 1037086
uauugcaauggagaaaccg

SEQ ID NO: 1037088 - RNA, 19 nt, Artificial Sequence
  Description of Artificial Sequence: Synthetic oligonucleotide
  Sense strand starting at position 3965 of SEQ ID NO: 914873
cguggauucccucaagcau

SEQ ID NO: 1037089 - RNA, 19 nt, Artificial Sequence
  Description of Artificial Sequence: Synthetic oligonucleotide
  Antisense strand to SEQ ID NO: 1037088
augcuugagggaauccacg

SEQ ID NO: 1037090 - RNA, 19 nt, Artificial Sequence
  Description of Artificial Sequence: Synthetic oligonucleotide
  Sense strand starting at position 311 of SEQ ID NO: 914874
auacacuucuguuguacau

SEQ ID NO: 1037091 - RNA, 19 nt, Artificial Sequence
  Description of Artificial Sequence: Synthetic oligonucleotide
  Antisense strand to SEQ ID NO: 1037090
auguacaacagaaguguau

SEQ ID NO: 1037092 - RNA, 19 nt, Artificial Sequence
  Description of Artificial Sequence: Synthetic oligonucleotide
  Sense strand starting at position 365 of SEQ ID NO: 914874
agaauaagaccgcguggua

SEQ ID NO: 1037093 - RNA, 19 nt, Artificial Sequence
  Description of Artificial Sequence: Synthetic oligonucleotide
  Antisense strand to SEQ ID NO: 1037092
uaccacgcggucuuauucu

SEQ ID NO: 1037094 - RNA, 19 nt, Artificial Sequence
  Description of Artificial Sequence: Synthetic oligonucleotide
  Sense strand starting at position 728 of SEQ ID NO: 914874
gggugagcgguuuauugga

SEQ ID NO: 1037095 - RNA, 19 nt, Artificial Sequence
  Description of Artificial Sequence: Synthetic oligonucleotide
  Antisense strand to SEQ ID NO: 1037094
uccaauaaaccgcucaccc

SEQ ID NO: 1037096 - RNA, 19 nt, Artificial Sequence
  Description of Artificial Sequence: Synthetic oligonucleotide
  Sense strand starting at position 735 of SEQ ID NO: 914874
cgguuuauuggauguuuaa

SEQ ID NO: 1037097 - RNA, 19 nt, Artificial Sequence
  Description of Artificial Sequence: Synthetic oligonucleotide
  Antisense strand to SEQ ID NO: 1037096
uuaaacauccaauaaaccg

SEQ ID NO: 1037098 - RNA, 19 nt, Artificial Sequence
  Description of Artificial Sequence: Synthetic oligonucleotide
  Sense strand starting at position 927 of SEQ ID NO: 914874
gaaagucauucuucuugga

SEQ ID NO: 1037099 - RNA, 19 nt, Artificial Sequence
  Description of Artificial Sequence: Synthetic oligonucleotide
  Antisense strand to SEQ ID NO: 1037098
uccaagaagaaugacuuuc

SEQ ID NO: 1037100 - RNA, 19 nt, Artificial Sequence
  Description of Artificial Sequence: Synthetic oligonucleotide
  Sense strand starting at position 929 of SEQ ID NO: 914874
aagucauucuucuuggaug

SEQ ID NO: 1037101 - RNA, 19 nt, Artificial Sequence
  Description of Artificial Sequence: Synthetic oligonucleotide
  Antisense strand to SEQ ID NO: 1037100
cauccaagaagaaugacuu

SEQ ID NO: 1037102 - RNA, 19 nt, Artificial Sequence
  Description of Artificial Sequence: Synthetic oligonucleotide
  Sense strand starting at position 931 of SEQ ID NO: 914874
gucauucuucuuggaugca

SEQ ID NO: 1037103 - RNA, 19 nt, Artificial Sequence
  Description of Artificial Sequence: Synthetic oligonucleotide
  Antisense strand to SEQ ID NO: 1037102
ugcauccaagaagaaugac

SEQ ID NO: 1037104 - RNA, 19 nt, Artificial Sequence
  Description of Artificial Sequence: Synthetic oligonucleotide
  Sense strand starting at position 959 of SEQ ID NO: 914874
ggcauuucuugguagaagg

SEQ ID NO: 1037105 - RNA, 19 nt, Artificial Sequence
  Description of Artificial Sequence: Synthetic oligonucleotide
  Antisense strand to SEQ ID NO: 1037104
ccuucuaccaagaaaugcc

SEQ ID NO: 1037106 - RNA, 19 nt, Artificial Sequence
  Description of Artificial Sequence: Synthetic oligonucleotide
  Sense strand starting at position 1104 of SEQ ID NO: 914874
ugguaagaguccugcaaag

SEQ ID NO: 1037107 - RNA, 19 nt, Artificial Sequence
  Description of Artificial Sequence: Synthetic oligonucleotide
  Antisense strand to SEQ ID NO: 1037106
cuuugcaggacucuuacca

SEQ ID NO: 1037108 - RNA, 19 nt, Artificial Sequence
  Description of Artificial Sequence: Synthetic oligonucleotide
  Sense strand starting at position 1114 of SEQ ID NO: 914874
ccugcaaagccagaaauca

SEQ ID NO: 1037109 - RNA, 19 nt, Artificial Sequence
  Description of Artificial Sequence: Synthetic oligonucleotide
  Antisense strand to SEQ ID NO: 1037108
ugauuucuggcuuugcagg

SEQ ID NO: 1037110 - RNA, 19 nt, Artificial Sequence
  Description of Artificial Sequence: Synthetic oligonucleotide
  Sense strand starting at position 2193 of SEQ ID NO: 914874
ugcugaaucuguguccaga

SEQ ID NO: 1037111 - RNA, 19 nt, Artificial Sequence
  Description of Artificial Sequence: Synthetic oligonucleotide
  Antisense strand to SEQ ID NO: 1037110
ucuggacacagauucagca

SEQ ID NO: 1037112 - RNA, 19 nt, Artificial Sequence
  Description of Artificial Sequence: Synthetic oligonucleotide
  Sense strand starting at position 2195 of SEQ ID NO: 914874
cugaaucuguguccagacu

SEQ ID NO: 1037113 - RNA, 19 nt, Artificial Sequence
  Description of Artificial Sequence: Synthetic oligonucleotide
  Antisense strand to SEQ ID NO: 1037112
agucuggacacagauucag

SEQ ID NO: 1037114 - RNA, 19 nt, Artificial Sequence
  Description of Artificial Sequence: Synthetic oligonucleotide
  Sense strand starting at position 2196 of SEQ ID NO: 914874
ugaaucuguguccagacuu

SEQ ID NO: 1037115 - RNA, 19 nt, Artificial Sequence
  Description of Artificial Sequence: Synthetic oligonucleotide
  Antisense strand to SEQ ID NO: 1037114
aagucuggacacagauuca

SEQ ID NO: 1037116 - RNA, 19 nt, Artificial Sequence
  Description of Artificial Sequence: Synthetic oligonucleotide
  Sense strand starting at position 2732 of SEQ ID NO: 914874
uuaguugaacgaugguaua

SEQ ID NO: 1037117 - RNA, 19 nt, Artificial Sequence
  Description of Artificial Sequence: Synthetic oligonucleotide
  Antisense strand to SEQ ID NO: 1037116
uauaccaucguucaacuaa

SEQ ID NO: 1037118 - RNA, 19 nt, Artificial Sequence
  Description of Artificial Sequence: Synthetic oligonucleotide
  Sense strand starting at position 2735 of SEQ ID NO: 914874
guugaacgaugguauaaag

SEQ ID NO: 1037119 - RNA, 19 nt, Artificial Sequence
  Description of Artificial Sequence: Synthetic oligonucleotide
  Antisense strand to SEQ ID NO: 1037118
cuuuauaccaucguucaac

SEQ ID NO: 1037120 - RNA, 19 nt, Artificial Sequence
  Description of Artificial Sequence: Synthetic oligonucleotide
  Sense strand starting at position 2843 of SEQ ID NO: 914874
ccauauuguuucuguccca

SEQ ID NO: 1037121 - RNA, 19 nt, Artificial Sequence
  Description of Artificial Sequence: Synthetic oligonucleotide
  Antisense strand to SEQ ID NO: 1037120
ugggacagaaacaauaugg

SEQ ID NO: 1037122 - RNA, 19 nt, Artificial Sequence
  Description of Artificial Sequence: Synthetic oligonucleotide
  Sense strand starting at position 2897 of SEQ ID NO: 914874
ucaugaagguccucacacu

SEQ ID NO: 1037123 - RNA, 19 nt, Artificial Sequence
  Description of Artificial Sequence: Synthetic oligonucleotide
  Antisense strand to SEQ ID NO: 1037122
agugugaggaccuucauga

SEQ ID NO: 1037124 - RNA, 19 nt, Artificial Sequence
  Description of Artificial Sequence: Synthetic oligonucleotide
  Sense strand starting at position 3290 of SEQ ID NO: 914874
aacuuuauguaauggguau

SEQ ID NO: 1037125 - RNA, 19 nt, Artificial Sequence
  Description of Artificial Sequence: Synthetic oligonucleotide
  Antisense strand to SEQ ID NO: 1037124
auacccauuacauaaaguu

SEQ ID NO: 1037126 - RNA, 19 nt, Artificial Sequence
  Description of Artificial Sequence: Synthetic oligonucleotide
  Sense strand starting at position 3294 of SEQ ID NO: 914874
uuauguaauggguauuaca

SEQ ID NO: 1037127 - RNA, 19 nt, Artificial Sequence
  Description of Artificial Sequence: Synthetic oligonucleotide
  Antisense strand to SEQ ID NO: 1037126
uguaauacccauuacauaa

SEQ ID NO: 1037128 - RNA, 19 nt, Artificial Sequence
  Description of Artificial Sequence: Synthetic oligonucleotide
  Sense strand starting at position 3313 of SEQ ID NO: 914874
cuguauuucucuuucugua

SEQ ID NO: 1037129 - RNA, 19 nt, Artificial Sequence
  Description of Artificial Sequence: Synthetic oligonucleotide
  Antisense strand to SEQ ID NO: 1037128
uacagaaagagaaauacag

SEQ ID NO: 1037130 - RNA, 19 nt, Artificial Sequence
  Description of Artificial Sequence: Synthetic oligonucleotide
  Sense strand starting at position 3525 of SEQ ID NO: 914874
ggugugggugccugaaagu

SEQ ID NO: 1037131 - RNA, 19 nt, Artificial Sequence
  Description of Artificial Sequence: Synthetic oligonucleotide
  Antisense strand to SEQ ID NO: 1037130
acuuucaggcacccacacc

SEQ ID NO: 1037132 - RNA, 19 nt, Artificial Sequence
  Description of Artificial Sequence: Synthetic oligonucleotide
  Sense strand starting at position 3534 of SEQ ID NO: 914874
gccugaaagucaggagguu

SEQ ID NO: 1037133 - RNA, 19 nt, Artificial Sequence
  Description of Artificial Sequence: Synthetic oligonucleotide
  Antisense strand to SEQ ID NO: 1037132
aaccuccugacuuucaggc

SEQ ID NO: 1037134 - RNA, 19 nt, Artificial Sequence
  Description of Artificial Sequence: Synthetic oligonucleotide
  Sense strand starting at position 3546 of SEQ ID NO: 914874
ggagguucuuguuaccaag

SEQ ID NO: 1037135 - RNA, 19 nt, Artificial Sequence
  Description of Artificial Sequence: Synthetic oligonucleotide
  Antisense strand to SEQ ID NO: 1037134
cuugguaacaagaaccucc

SEQ ID NO: 1037136 - RNA, 19 nt, Artificial Sequence
  Description of Artificial Sequence: Synthetic oligonucleotide
  Sense strand starting at position 3605 of SEQ ID NO: 914874
ccagcauugccagagagcu

SEQ ID NO: 1037137 - RNA, 19 nt, Artificial Sequence
  Description of Artificial Sequence: Synthetic oligonucleotide
  Antisense strand to SEQ ID NO: 1037136
agcucucuggcaaugcugg

SEQ ID NO: 1037138 - RNA, 19 nt, Artificial Sequence
  Description of Artificial Sequence: Synthetic oligonucleotide
  Sense strand starting at position 3671 of SEQ ID NO: 914874
ccuucauguggguguguaa

SEQ ID NO: 1037139 - RNA, 19 nt, Artificial Sequence
  Description of Artificial Sequence: Synthetic oligonucleotide
  Antisense strand to SEQ ID NO: 1037138
uuacacacccacaugaagg

SEQ ID NO: 1037140 - RNA, 19 nt, Artificial Sequence
  Description of Artificial Sequence: Synthetic oligonucleotide
  Sense strand starting at position 3680 of SEQ ID NO: 914874
ggguguguaacacaguguu

SEQ ID NO: 1037141 - RNA, 19 nt, Artificial Sequence
  Description of Artificial Sequence: Synthetic oligonucleotide
  Antisense strand to SEQ ID NO: 1037140
aacacuguguuacacaccc

SEQ ID NO: 1037142 - RNA, 19 nt, Artificial Sequence
  Description of Artificial Sequence: Synthetic oligonucleotide
  Sense strand starting at position 3683 of SEQ ID NO: 914874
uguguaacacaguguuaca

SEQ ID NO: 1037143 - RNA, 19 nt, Artificial Sequence
  Description of Artificial Sequence: Synthetic oligonucleotide
  Antisense strand to SEQ ID NO: 1037142
uguaacacuguguuacaca

SEQ ID NO: 1037144 - RNA, 19 nt, Artificial Sequence
  Description of Artificial Sequence: Synthetic oligonucleotide
  Sense strand starting at position 3696 of SEQ ID NO: 914874
guuacacacugugguuuaa

SEQ ID NO: 1037145 - RNA, 19 nt, Artificial Sequence
  Description of Artificial Sequence: Synthetic oligonucleotide
  Antisense strand to SEQ ID NO: 1037144
uuaaaccacaguguguaac

SEQ ID NO: 1037146 - RNA, 19 nt, Artificial Sequence
  Description of Artificial Sequence: Synthetic oligonucleotide
  Sense strand starting at position 3741 of SEQ ID NO: 914874
ugcugugccucuuuccaua

SEQ ID NO: 1037147 - RNA, 19 nt, Artificial Sequence
  Description of Artificial Sequence: Synthetic oligonucleotide
  Antisense strand to SEQ ID NO: 1037146
uauggaaagaggcacagca

SEQ ID NO: 1037148 - RNA, 19 nt, Artificial Sequence
  Description of Artificial Sequence: Synthetic oligonucleotide
  Sense strand starting at position 3759 of SEQ ID NO: 914874
auggucaccugucauuaga

SEQ ID NO: 1037149 - RNA, 19 nt, Artificial Sequence
  Description of Artificial Sequence: Synthetic oligonucleotide
  Antisense strand to SEQ ID NO: 1037148
ucuaaugacaggugaccau

SEQ ID NO: 1037150 - RNA, 19 nt, Artificial Sequence
  Description of Artificial Sequence: Synthetic oligonucleotide
  Sense strand starting at position 3761 of SEQ ID NO: 914874
ggucaccugucauuagagu

SEQ ID NO: 1037151 - RNA, 19 nt, Artificial Sequence
  Description of Artificial Sequence: Synthetic oligonucleotide
  Antisense strand to SEQ ID NO: 1037150
acucuaaugacaggugacc

SEQ ID NO: 1037152 - RNA, 19 nt, Artificial Sequence
  Description of Artificial Sequence: Synthetic oligonucleotide
  Sense strand starting at position 3770 of SEQ ID NO: 914874
ucauuagagucucguuaau

SEQ ID NO: 1037153 - RNA, 19 nt, Artificial Sequence
  Description of Artificial Sequence: Synthetic oligonucleotide
  Antisense strand to SEQ ID NO: 1037152
auuaacgagacucuaauga

SEQ ID NO: 1037154 - RNA, 19 nt, Artificial Sequence
  Description of Artificial Sequence: Synthetic oligonucleotide
  Sense strand starting at position 3772 of SEQ ID NO: 914874
auuagagucucguuaauuu

SEQ ID NO: 1037155 - RNA, 19 nt, Artificial Sequence
  Description of Artificial Sequence: Synthetic oligonucleotide
  Antisense strand to SEQ ID NO: 1037154
aaauuaacgagacucuaau

SEQ ID NO: 1037156 - RNA, 19 nt, Artificial Sequence
  Description of Artificial Sequence: Synthetic oligonucleotide
  Sense strand starting at position 3913 of SEQ ID NO: 914874
gcuuuccaugcucgagcaa

SEQ ID NO: 1037157 - RNA, 19 nt, Artificial Sequence
  Description of Artificial Sequence: Synthetic oligonucleotide
  Antisense strand to SEQ ID NO: 1037156
uugcucgagcauggaaagc

SEQ ID NO: 1037158 - RNA, 19 nt, Artificial Sequence
  Description of Artificial Sequence: Synthetic oligonucleotide
  Sense strand starting at position 3914 of SEQ ID NO: 914874
cuuuccaugcucgagcaau

SEQ ID NO: 1037159 - RNA, 19 nt, Artificial Sequence
  Description of Artificial Sequence: Synthetic oligonucleotide
  Antisense strand to SEQ ID NO: 1037158
auugcucgagcauggaaag

SEQ ID NO: 1037160 - RNA, 19 nt, Artificial Sequence
  Description of Artificial Sequence: Synthetic oligonucleotide
  Sense strand starting at position 32 of SEQ ID NO: 914875
caguaucagcagucgcuua

SEQ ID NO: 1037161 - RNA, 19 nt, Artificial Sequence
  Description of Artificial Sequence: Synthetic oligonucleotide
  Antisense strand to SEQ ID NO: 1037160
uaagcgacugcugauacug

SEQ ID NO: 1037162 - RNA, 19 nt, Artificial Sequence
  Description of Artificial Sequence: Synthetic oligonucleotide
  Sense strand starting at position 37 of SEQ ID NO: 914875
ucagcagucgcuuagaucu

SEQ ID NO: 1037163 - RNA, 19 nt, Artificial Sequence
  Description of Artificial Sequence: Synthetic oligonucleotide
  Antisense strand to SEQ ID NO: 1037162
agaucuaagcgacugcuga

SEQ ID NO: 1037164 - RNA, 19 nt, Artificial Sequence
  Description of Artificial Sequence: Synthetic oligonucleotide
  Sense strand starting at position 141 of SEQ ID NO: 914875
uggagauuguccucagauc

SEQ ID NO: 1037165 - RNA, 19 nt, Artificial Sequence
  Description of Artificial Sequence: Synthetic oligonucleotide
  Antisense strand to SEQ ID NO: 1037164
gaucugaggacaaucucca

SEQ ID NO: 1037166 - RNA, 19 nt, Artificial Sequence
  Description of Artificial Sequence: Synthetic oligonucleotide
  Sense strand starting at position 177 of SEQ ID NO: 914875
cccagugcgugauuucuaa

SEQ ID NO: 1037167 - RNA, 19 nt, Artificial Sequence
  Description of Artificial Sequence: Synthetic oligonucleotide
  Antisense strand to SEQ ID NO: 1037166
uuagaaaucacgcacuggg

SEQ ID NO: 1037168 - RNA, 19 nt, Artificial Sequence
  Description of Artificial Sequence: Synthetic oligonucleotide
  Sense strand starting at position 193 of SEQ ID NO: 914875
uaaagccuugccugugaca

SEQ ID NO: 1037169 - RNA, 19 nt, Artificial Sequence
  Description of Artificial Sequence: Synthetic oligonucleotide
  Antisense strand to SEQ ID NO: 1037168
ugucacaggcaaggcuuua

SEQ ID NO: 1037170 - RNA, 19 nt, Artificial Sequence
  Description of Artificial Sequence: Synthetic oligonucleotide
  Sense strand starting at position 195 of SEQ ID NO: 914875
aagccuugccugugacacu

SEQ ID NO: 1037171 - RNA, 19 nt, Artificial Sequence
  Description of Artificial Sequence: Synthetic oligonucleotide
  Antisense strand to SEQ ID NO: 1037170
agugucacaggcaaggcuu

SEQ ID NO: 1037172 - RNA, 19 nt, Artificial Sequence
  Description of Artificial Sequence: Synthetic oligonucleotide
  Sense strand starting at position 202 of SEQ ID NO: 914875
gccugugacacuggucaga

SEQ ID NO: 1037173 - RNA, 19 nt, Artificial Sequence
  Description of Artificial Sequence: Synthetic oligonucleotide
  Antisense strand to SEQ ID NO: 1037172
ucugaccagugucacaggc

SEQ ID NO: 1037174 - RNA, 19 nt, Artificial Sequence
  Description of Artificial Sequence: Synthetic oligonucleotide
  Sense strand starting at position 204 of SEQ ID NO: 914875
cugugacacuggucagaga

SEQ ID NO: 1037175 - RNA, 19 nt, Artificial Sequence
  Description of Artificial Sequence: Synthetic oligonucleotide
  Antisense strand to SEQ ID NO: 1037174
ucucugaccagugucacag

SEQ ID NO: 1037176 - RNA, 19 nt, Artificial Sequence
  Description of Artificial Sequence: Synthetic oligonucleotide
  Sense strand starting at position 236 of SEQ ID NO: 914875
gguggcaugucaccaugaa

SEQ ID NO: 1037177 - RNA, 19 nt, Artificial Sequence
  Description of Artificial Sequence: Synthetic oligonucleotide
  Antisense strand to SEQ ID NO: 1037176
uucauggugacaugccacc

SEQ ID NO: 1037178 - RNA, 19 nt, Artificial Sequence
  Description of Artificial Sequence: Synthetic oligonucleotide
  Sense strand starting at position 237 of SEQ ID NO: 914875
guggcaugucaccaugaaa

SEQ ID NO: 1037179 - RNA, 19 nt, Artificial Sequence
  Description of Artificial Sequence: Synthetic oligonucleotide
  Antisense strand to SEQ ID NO: 1037178
uuucauggugacaugccac

SEQ ID NO: 1037180 - RNA, 19 nt, Artificial Sequence
  Description of Artificial Sequence: Synthetic oligonucleotide
  Sense strand starting at position 283 of SEQ ID NO: 914875
augugucacuucccaggaa

SEQ ID NO: 1037181 - RNA, 19 nt, Artificial Sequence
  Description of Artificial Sequence: Synthetic oligonucleotide
  Antisense strand to SEQ ID NO: 1037180
uuccugggaagugacacau

SEQ ID NO: 1037182 - RNA, 19 nt, Artificial Sequence
  Description of Artificial Sequence: Synthetic oligonucleotide
  Sense strand starting at position 349 of SEQ ID NO: 914875
uucuguaacuuccugguua

SEQ ID NO: 1037183 - RNA, 19 nt, Artificial Sequence
  Description of Artificial Sequence: Synthetic oligonucleotide
  Antisense strand to SEQ ID NO: 1037182
uaaccaggaaguuacagaa

SEQ ID NO: 1037184 - RNA, 19 nt, Artificial Sequence
  Description of Artificial Sequence: Synthetic oligonucleotide
  Sense strand starting at position 353 of SEQ ID NO: 914875
guaacuuccugguuaccuu

SEQ ID NO: 1037185 - RNA, 19 nt, Artificial Sequence
  Description of Artificial Sequence: Synthetic oligonucleotide
  Antisense strand to SEQ ID NO: 1037184
aagguaaccaggaaguuac

SEQ ID NO: 1037186 - RNA, 19 nt, Artificial Sequence
  Description of Artificial Sequence: Synthetic oligonucleotide
  Sense strand starting at position 360 of SEQ ID NO: 914875
ccugguuaccuuuaguuau

SEQ ID NO: 1037187 - RNA, 19 nt, Artificial Sequence
  Description of Artificial Sequence: Synthetic oligonucleotide
  Antisense strand to SEQ ID NO: 1037186
auaacuaaagguaaccagg

SEQ ID NO: 1037188 - RNA, 19 nt, Artificial Sequence
  Description of Artificial Sequence: Synthetic oligonucleotide
  Sense strand starting at position 363 of SEQ ID NO: 914875
gguuaccuuuaguuaugga

SEQ ID NO: 1037189 - RNA, 19 nt, Artificial Sequence
  Description of Artificial Sequence: Synthetic oligonucleotide
  Antisense strand to SEQ ID NO: 1037188
uccauaacuaaagguaacc

SEQ ID NO: 1037190 - RNA, 19 nt, Artificial Sequence
  Description of Artificial Sequence: Synthetic oligonucleotide
  Sense strand starting at position 380 of SEQ ID NO: 914875
gaaagccguugaccucaua

SEQ ID NO: 1037191 - RNA, 19 nt, Artificial Sequence
  Description of Artificial Sequence: Synthetic oligonucleotide
  Antisense strand to SEQ ID NO: 1037190
uaugaggucaacggcuuuc

SEQ ID NO: 1037192 - RNA, 19 nt, Artificial Sequence
  Description of Artificial Sequence: Synthetic oligonucleotide
  Sense strand starting at position 383 of SEQ ID NO: 914875
agccguugaccucauaauu

SEQ ID NO: 1037193 - RNA, 19 nt, Artificial Sequence
  Description of Artificial Sequence: Synthetic oligonucleotide
  Antisense strand to SEQ ID NO: 1037192
aauuaugaggucaacggcu

SEQ ID NO: 1037194 - RNA, 19 nt, Artificial Sequence
  Description of Artificial Sequence: Synthetic oligonucleotide
  Sense strand starting at position 407 of SEQ ID NO: 914875
aggcuaauugaauguuuga

SEQ ID NO: 1037195 - RNA, 19 nt, Artificial Sequence
  Description of Artificial Sequence: Synthetic oligonucleotide
  Antisense strand to SEQ ID NO: 1037194
ucaaacauucaauuagccu

SEQ ID NO: 1037196 - RNA, 19 nt, Artificial Sequence
  Description of Artificial Sequence: Synthetic oligonucleotide
  Sense strand starting at position 410 of SEQ ID NO: 914875
cuaauugaauguuugaauc

SEQ ID NO: 1037197 - RNA, 19 nt, Artificial Sequence
  Description of Artificial Sequence: Synthetic oligonucleotide
  Antisense strand to SEQ ID NO: 1037196
gauucaaacauucaauuag

SEQ ID NO: 1037198 - RNA, 19 nt, Artificial Sequence
  Description of Artificial Sequence: Synthetic oligonucleotide
  Sense strand starting at position 744 of SEQ ID NO: 914875
cccagcuuagcugacagau

SEQ ID NO: 1037199 - RNA, 19 nt, Artificial Sequence
  Description of Artificial Sequence: Synthetic oligonucleotide
  Antisense strand to SEQ ID NO: 1037198
aucugucagcuaagcuggg

SEQ ID NO: 1037200 - RNA, 19 nt, Artificial Sequence
  Description of Artificial Sequence: Synthetic oligonucleotide
  Sense strand starting at position 756 of SEQ ID NO: 914875
gacagaucagaacgcagaa

SEQ ID NO: 1037201 - RNA, 19 nt, Artificial Sequence
  Description of Artificial Sequence: Synthetic oligonucleotide
  Antisense strand to SEQ ID NO: 1037200
uucugcguucugaucuguc

SEQ ID NO: 1037202 - RNA, 19 nt, Artificial Sequence
  Description of Artificial Sequence: Synthetic oligonucleotide
  Sense strand starting at position 802 of SEQ ID NO: 914875
acagaauugcaccaagcau

SEQ ID NO: 1037203 - RNA, 19 nt, Artificial Sequence
  Description of Artificial Sequence: Synthetic oligonucleotide
  Antisense strand to SEQ ID NO: 1037202
augcuuggugcaauucugu

SEQ ID NO: 1037204 - RNA, 19 nt, Artificial Sequence
  Description of Artificial Sequence: Synthetic oligonucleotide
  Sense strand starting at position 821 of SEQ ID NO: 914875
gcagcugauuuacagacau

SEQ ID NO: 1037205 - RNA, 19 nt, Artificial Sequence
  Description of Artificial Sequence: Synthetic oligonucleotide
  Antisense strand to SEQ ID NO: 1037204
augucuguaaaucagcugc

SEQ ID NO: 1037206 - RNA, 19 nt, Artificial Sequence
  Description of Artificial Sequence: Synthetic oligonucleotide
  Sense strand starting at position 1984 of SEQ ID NO: 914875
guagauugaggguggauca

SEQ ID NO: 1037207 - RNA, 19 nt, Artificial Sequence
  Description of Artificial Sequence: Synthetic oligonucleotide
  Antisense strand to SEQ ID NO: 1037206
ugauccacccucaaucuac

SEQ ID NO: 1037208 - RNA, 19 nt, Artificial Sequence
  Description of Artificial Sequence: Synthetic oligonucleotide
  Sense strand starting at position 2060 of SEQ ID NO: 914875
uuauauaccuguccagaug

SEQ ID NO: 1037209 - RNA, 19 nt, Artificial Sequence
  Description of Artificial Sequence: Synthetic oligonucleotide
  Antisense strand to SEQ ID NO: 1037208
caucuggacagguauauaa

SEQ ID NO: 1037210 - RNA, 19 nt, Artificial Sequence
  Description of Artificial Sequence: Synthetic oligonucleotide
  Sense strand starting at position 2102 of SEQ ID NO: 914875
ucuugugacuguuuacauu

SEQ ID NO: 1037211 - RNA, 19 nt, Artificial Sequence
  Description of Artificial Sequence: Synthetic oligonucleotide
  Antisense strand to SEQ ID NO: 1037210
aauguaaacagucacaaga

SEQ ID NO: 1037212 - RNA, 19 nt, Artificial Sequence
  Description of Artificial Sequence: Synthetic oligonucleotide
  Sense strand starting at position 2180 of SEQ ID NO: 914875
gcaucuacuuucuuuguau

SEQ ID NO: 1037213 - RNA, 19 nt, Artificial Sequence
  Description of Artificial Sequence: Synthetic oligonucleotide
  Antisense strand to SEQ ID NO: 1037212
auacaaagaaaguagaugc

SEQ ID NO: 1037214 - RNA, 19 nt, Artificial Sequence
  Description of Artificial Sequence: Synthetic oligonucleotide
  Sense strand starting at position 2354 of SEQ ID NO: 914875
ucaucuuuccuguguuaac

SEQ ID NO: 1037215 - RNA, 19 nt, Artificial Sequence
  Description of Artificial Sequence: Synthetic oligonucleotide
  Antisense strand to SEQ ID NO: 1037214
guuaacacaggaaagauga

SEQ ID NO: 1037216 - RNA, 19 nt, Artificial Sequence
  Description of Artificial Sequence: Synthetic oligonucleotide
  Sense strand starting at position 2412 of SEQ ID NO: 914875
aguuauccauggucuuuau

SEQ ID NO: 1037217 - RNA, 19 nt, Artificial Sequence
  Description of Artificial Sequence: Synthetic oligonucleotide
  Antisense strand to SEQ ID NO: 1037216
auaaagaccauggauaacu

SEQ ID NO: 1037218 - RNA, 19 nt, Artificial Sequence
  Description of Artificial Sequence: Synthetic oligonucleotide
  Sense strand starting at position 2465 of SEQ ID NO: 914875
guuagaccauucuuugcau

SEQ ID NO: 1037219 - RNA, 19 nt, Artificial Sequence
  Description of Artificial Sequence: Synthetic oligonucleotide
  Antisense strand to SEQ ID NO: 1037218
augcaaagaauggucuaac

SEQ ID NO: 1037220 - RNA, 19 nt, Artificial Sequence
  Description of Artificial Sequence: Synthetic oligonucleotide
  Sense strand starting at position 2526 of SEQ ID NO: 914875
agagguuagaauggcucau

SEQ ID NO: 1037221 - RNA, 19 nt, Artificial Sequence
  Description of Artificial Sequence: Synthetic oligonucleotide
  Antisense strand to SEQ ID NO: 1037220
augagccauucuaaccucu

SEQ ID NO: 1037222 - RNA, 19 nt, Artificial Sequence
  Description of Artificial Sequence: Synthetic oligonucleotide
  Sense strand starting at position 3460 of SEQ ID NO: 914875
uggugauaucugugcccuu

SEQ ID NO: 1037223 - RNA, 19 nt, Artificial Sequence
  Description of Artificial Sequence: Synthetic oligonucleotide
  Antisense strand to SEQ ID NO: 1037222
aagggcacagauaucacca

SEQ ID NO: 1037224 - RNA, 19 nt, Artificial Sequence
  Description of Artificial Sequence: Synthetic oligonucleotide
  Sense strand starting at position 3573 of SEQ ID NO: 914875
accagaacucuuggugcau

SEQ ID NO: 1037225 - RNA, 19 nt, Artificial Sequence
  Description of Artificial Sequence: Synthetic oligonucleotide
  Antisense strand to SEQ ID NO: 1037224
augcaccaagaguucuggu

SEQ ID NO: 1037226 - RNA, 19 nt, Artificial Sequence
  Description of Artificial Sequence: Synthetic oligonucleotide
  Sense strand starting at position 3574 of SEQ ID NO: 914875
ccagaacucuuggugcauu

SEQ ID NO: 1037227 - RNA, 19 nt, Artificial Sequence
  Description of Artificial Sequence: Synthetic oligonucleotide
  Antisense strand to SEQ ID NO: 1037226
aaugcaccaagaguucugg

SEQ ID NO: 1037228 - RNA, 19 nt, Artificial Sequence
  Description of Artificial Sequence: Synthetic oligonucleotide
  Sense strand starting at position 3577 of SEQ ID NO: 914875
gaacucuuggugcauugau

SEQ ID NO: 1037229 - RNA, 19 nt, Artificial Sequence
  Description of Artificial Sequence: Synthetic oligonucleotide
  Antisense strand to SEQ ID NO: 1037228
aucaaugcaccaagaguuc

SEQ ID NO: 1037230 - RNA, 19 nt, Artificial Sequence
  Description of Artificial Sequence: Synthetic oligonucleotide
  Sense strand starting at position 3626 of SEQ ID NO: 914875
ucugauaccucuucuuguu

SEQ ID NO: 1037231 - RNA, 19 nt, Artificial Sequence
  Description of Artificial Sequence: Synthetic oligonucleotide
  Antisense strand to SEQ ID NO: 1037230
aacaagaagagguaucaga

SEQ ID NO: 1037232 - RNA, 19 nt, Artificial Sequence
  Description of Artificial Sequence: Synthetic oligonucleotide
  Sense strand starting at position 3729 of SEQ ID NO: 914875
cacagagccguguaccuau

SEQ ID NO: 1037233 - RNA, 19 nt, Artificial Sequence
  Description of Artificial Sequence: Synthetic oligonucleotide
  Antisense strand to SEQ ID NO: 1037232
auagguacacggcucugug

SEQ ID NO: 1037234 - RNA, 19 nt, Artificial Sequence
  Description of Artificial Sequence: Synthetic oligonucleotide
  Sense strand starting at position 3738 of SEQ ID NO: 914875
guguaccuaucaccauaau

SEQ ID NO: 1037235 - RNA, 19 nt, Artificial Sequence
  Description of Artificial Sequence: Synthetic oligonucleotide
  Antisense strand to SEQ ID NO: 1037234
auuauggugauagguacac

SEQ ID NO: 1037236 - RNA, 19 nt, Artificial Sequence
  Description of Artificial Sequence: Synthetic oligonucleotide
  Sense strand starting at position 3902 of SEQ ID NO: 914875
accgacauuucugaaagaa

SEQ ID NO: 1037237 - RNA, 19 nt, Artificial Sequence
  Description of Artificial Sequence: Synthetic oligonucleotide
  Antisense strand to SEQ ID NO: 1037236
uucuuucagaaaugucggu

SEQ ID NO: 1037238 - RNA, 19 nt, Artificial Sequence
  Description of Artificial Sequence: Synthetic oligonucleotide
  Sense strand starting at position 3949 of SEQ ID NO: 914875
aggaaugcucagcaucauu

SEQ ID NO: 1037239 - RNA, 19 nt, Artificial Sequence
  Description of Artificial Sequence: Synthetic oligonucleotide
  Antisense strand to SEQ ID NO: 1037238
aaugaugcugagcauuccu

SEQ ID NO: 1037240 - RNA, 19 nt, Artificial Sequence
  Description of Artificial Sequence: Synthetic oligonucleotide
  Sense strand starting at position 66 of SEQ ID NO: 914876
uccuaaaugugguugaaau

SEQ ID NO: 1037241 - RNA, 19 nt, Artificial Sequence
  Description of Artificial Sequence: Synthetic oligonucleotide
  Antisense strand to SEQ ID NO: 1037240
auuucaaccacauuuagga

SEQ ID NO: 1037242 - RNA, 19 nt, Artificial Sequence
  Description of Artificial Sequence: Synthetic oligonucleotide
  Sense strand starting at position 67 of SEQ ID NO: 914876
ccuaaaugugguugaaaua

SEQ ID NO: 1037243 - RNA, 19 nt, Artificial Sequence
  Description of Artificial Sequence: Synthetic oligonucleotide
  Antisense strand to SEQ ID NO: 1037242
uauuucaaccacauuuagg

SEQ ID NO: 1037244 - RNA, 19 nt, Artificial Sequence
  Description of Artificial Sequence: Synthetic oligonucleotide
  Sense strand starting at position 145 of SEQ ID NO: 914876
agaaauuugucuuggaaau

SEQ ID NO: 1037245 - RNA, 19 nt, Artificial Sequence
  Description of Artificial Sequence: Synthetic oligonucleotide
  Antisense strand to SEQ ID NO: 1037244
auuuccaagacaaauuucu

SEQ ID NO: 1037246 - RNA, 19 nt, Artificial Sequence
  Description of Artificial Sequence: Synthetic oligonucleotide
  Sense strand starting at position 185 of SEQ ID NO: 914876
caguaucagcagucgcuua

SEQ ID NO: 1037247 - RNA, 19 nt, Artificial Sequence
  Description of Artificial Sequence: Synthetic oligonucleotide
  Antisense strand to SEQ ID NO: 1037246
uaagcgacugcugauacug

SEQ ID NO: 1037248 - RNA, 19 nt, Artificial Sequence
  Description of Artificial Sequence: Synthetic oligonucleotide
  Sense strand starting at position 250 of SEQ ID NO: 914876
guguguugucuucccucca

SEQ ID NO: 1037249 - RNA, 19 nt, Artificial Sequence
  Description of Artificial Sequence: Synthetic oligonucleotide
  Antisense strand to SEQ ID NO: 1037248
uggagggaagacaacacac

SEQ ID NO: 1037250 - RNA, 19 nt, Artificial Sequence
  Description of Artificial Sequence: Synthetic oligonucleotide
  Sense strand starting at position 294 of SEQ ID NO: 914876
uggaaaucguccucagauc

SEQ ID NO: 1037251 - RNA, 19 nt, Artificial Sequence
  Description of Artificial Sequence: Synthetic oligonucleotide
  Antisense strand to SEQ ID NO: 1037250
gaucugaggacgauuucca

SEQ ID NO: 1037252 - RNA, 19 nt, Artificial Sequence
  Description of Artificial Sequence: Synthetic oligonucleotide
  Sense strand starting at position 295 of SEQ ID NO: 914876
ggaaaucguccucagauca

SEQ ID NO: 1037253 - RNA, 19 nt, Artificial Sequence
  Description of Artificial Sequence: Synthetic oligonucleotide
  Antisense strand to SEQ ID NO: 1037252
ugaucugaggacgauuucc

SEQ ID NO: 1037254 - RNA, 19 nt, Artificial Sequence
  Description of Artificial Sequence: Synthetic oligonucleotide
  Sense strand starting at position 392 of SEQ ID NO: 914876
ggcgcaucaccaugaaaca

SEQ ID NO: 1037255 - RNA, 19 nt, Artificial Sequence
  Description of Artificial Sequence: Synthetic oligonucleotide
  Antisense strand to SEQ ID NO: 1037254
uguuucauggugaugcgcc

SEQ ID NO: 1037256 - RNA, 19 nt, Artificial Sequence
  Description of Artificial Sequence: Synthetic oligonucleotide
  Sense strand starting at position 436 of SEQ ID NO: 914876
augugucacuucccaggaa

SEQ ID NO: 1037257 - RNA, 19 nt, Artificial Sequence
  Description of Artificial Sequence: Synthetic oligonucleotide
  Antisense strand to SEQ ID NO: 1037256
uuccugggaagugacacau

SEQ ID NO: 1037258 - RNA, 19 nt, Artificial Sequence
  Description of Artificial Sequence: Synthetic oligonucleotide
  Sense strand starting at position 533 of SEQ ID NO: 914876
gaaagccguugaccucaua

SEQ ID NO: 1037259 - RNA, 19 nt, Artificial Sequence
  Description of Artificial Sequence: Synthetic oligonucleotide
  Antisense strand to SEQ ID NO: 1037258
uaugaggucaacggcuuuc

SEQ ID NO: 1037260 - RNA, 19 nt, Artificial Sequence
  Description of Artificial Sequence: Synthetic oligonucleotide
  Sense strand starting at position 536 of SEQ ID NO: 914876
agccguugaccucauaauu

SEQ ID NO: 1037261 - RNA, 19 nt, Artificial Sequence
  Description of Artificial Sequence: Synthetic oligonucleotide
  Antisense strand to SEQ ID NO: 1037260
aauuaugaggucaacggcu

SEQ ID NO: 1037262 - RNA, 19 nt, Artificial Sequence
  Description of Artificial Sequence: Synthetic oligonucleotide
  Sense strand starting at position 569 of SEQ ID NO: 914876
gaguguuugaaucagagug

SEQ ID NO: 1037263 - RNA, 19 nt, Artificial Sequence
  Description of Artificial Sequence: Synthetic oligonucleotide
  Antisense strand to SEQ ID NO: 1037262
cacucugauucaaacacuc

SEQ ID NO: 1037264 - RNA, 19 nt, Artificial Sequence
  Description of Artificial Sequence: Synthetic oligonucleotide
  Sense strand starting at position 845 of SEQ ID NO: 914876
agaagugaacuucgugguu

SEQ ID NO: 1037265 - RNA, 19 nt, Artificial Sequence
  Description of Artificial Sequence: Synthetic oligonucleotide
  Antisense strand to SEQ ID NO: 1037264
aaccacgaaguucacuucu

SEQ ID NO: 1037266 - RNA, 19 nt, Artificial Sequence
  Description of Artificial Sequence: Synthetic oligonucleotide
  Sense strand starting at position 848 of SEQ ID NO: 914876
agugaacuucgugguucuu

SEQ ID NO: 1037267 - RNA, 19 nt, Artificial Sequence
  Description of Artificial Sequence: Synthetic oligonucleotide
  Antisense strand to SEQ ID NO: 1037266
aagaaccacgaaguucacu

SEQ ID NO: 1037268 - RNA, 19 nt, Artificial Sequence
  Description of Artificial Sequence: Synthetic oligonucleotide
  Sense strand starting at position 899 of SEQ ID NO: 914876
cccagcuuagcugacaaau

SEQ ID NO: 1037269 - RNA, 19 nt, Artificial Sequence
  Description of Artificial Sequence: Synthetic oligonucleotide
  Antisense strand to SEQ ID NO: 1037268
auuugucagcuaagcuggg

SEQ ID NO: 1037270 - RNA, 19 nt, Artificial Sequence
  Description of Artificial Sequence: Synthetic oligonucleotide
  Sense strand starting at position 957 of SEQ ID NO: 914876
acagaauugcaccaagugu

SEQ ID NO: 1037271 - RNA, 19 nt, Artificial Sequence
  Description of Artificial Sequence: Synthetic oligonucleotide
  Antisense strand to SEQ ID NO: 1037270
acacuuggugcaauucugu

SEQ ID NO: 1037272 - RNA, 19 nt, Artificial Sequence
  Description of Artificial Sequence: Synthetic oligonucleotide
  Sense strand starting at position 1118 of SEQ ID NO: 914876
ccagaaucccagugguggu

SEQ ID NO: 1037273 - RNA, 19 nt, Artificial Sequence
  Description of Artificial Sequence: Synthetic oligonucleotide
  Antisense strand to SEQ ID NO: 1037272
accaccacugggauucugg

SEQ ID NO: 1037274 - RNA, 19 nt, Artificial Sequence
  Description of Artificial Sequence: Synthetic oligonucleotide
  Sense strand starting at position 1125 of SEQ ID NO: 914876
cccaguggugguugagaaa

SEQ ID NO: 1037275 - RNA, 19 nt, Artificial Sequence
  Description of Artificial Sequence: Synthetic oligonucleotide
  Antisense strand to SEQ ID NO: 1037274
uuucucaaccaccacuggg

SEQ ID NO: 1037276 - RNA, 19 nt, Artificial Sequence
  Description of Artificial Sequence: Synthetic oligonucleotide
  Sense strand starting at position 1300 of SEQ ID NO: 914876
auguuuccggagugaggaa

SEQ ID NO: 1037277 - RNA, 19 nt, Artificial Sequence
  Description of Artificial Sequence: Synthetic oligonucleotide
  Antisense strand to SEQ ID NO: 1037276
uuccucacuccggaaacau

SEQ ID NO: 1037278 - RNA, 19 nt, Artificial Sequence
  Description of Artificial Sequence: Synthetic oligonucleotide
  Sense strand starting at position 1401 of SEQ ID NO: 914876
ucaggaugaugugugggau

SEQ ID NO: 1037279 - RNA, 19 nt, Artificial Sequence
  Description of Artificial Sequence: Synthetic oligonucleotide
  Antisense strand to SEQ ID NO: 1037278
aucccacacaucauccuga

SEQ ID NO: 1037280 - RNA, 19 nt, Artificial Sequence
  Description of Artificial Sequence: Synthetic oligonucleotide
  Sense strand starting at position 1404 of SEQ ID NO: 914876
ggaugaugugugggaugaa

SEQ ID NO: 1037281 - RNA, 19 nt, Artificial Sequence
  Description of Artificial Sequence: Synthetic oligonucleotide
  Antisense strand to SEQ ID NO: 1037280
uucaucccacacaucaucc

SEQ ID NO: 1037282 - RNA, 19 nt, Artificial Sequence
  Description of Artificial Sequence: Synthetic oligonucleotide
  Sense strand starting at position 1960 of SEQ ID NO: 914876
caugauucuggcggauuga

SEQ ID NO: 1037283 - RNA, 19 nt, Artificial Sequence
  Description of Artificial Sequence: Synthetic oligonucleotide
  Antisense strand to SEQ ID NO: 1037282
ucaauccgccagaaucaug

SEQ ID NO: 1037284 - RNA, 19 nt, Artificial Sequence
  Description of Artificial Sequence: Synthetic oligonucleotide
  Sense strand starting at position 2079 of SEQ ID NO: 914876
ggguccuuuccuugugacu

SEQ ID NO: 1037285 - RNA, 19 nt, Artificial Sequence
  Description of Artificial Sequence: Synthetic oligonucleotide
  Antisense strand to SEQ ID NO: 1037284
agucacaaggaaaggaccc

SEQ ID NO: 1037286 - RNA, 19 nt, Artificial Sequence
  Description of Artificial Sequence: Synthetic oligonucleotide
  Sense strand starting at position 2084 of SEQ ID NO: 914876
cuuuccuugugacuguuua

SEQ ID NO: 1037287 - RNA, 19 nt, Artificial Sequence
  Description of Artificial Sequence: Synthetic oligonucleotide
  Antisense strand to SEQ ID NO: 1037286
uaaacagucacaaggaaag

SEQ ID NO: 1037288 - RNA, 19 nt, Artificial Sequence
  Description of Artificial Sequence: Synthetic oligonucleotide
  Sense strand starting at position 2466 of SEQ ID NO: 914876
ggagauggauuugguagau

SEQ ID NO: 1037289 - RNA, 19 nt, Artificial Sequence
  Description of Artificial Sequence: Synthetic oligonucleotide
  Antisense strand to SEQ ID NO: 1037288
aucuaccaaauccaucucc

SEQ ID NO: 1037290 - RNA, 19 nt, Artificial Sequence
  Description of Artificial Sequence: Synthetic oligonucleotide
  Sense strand starting at position 2577 of SEQ ID NO: 914876
ccguucuuugcauugugua

SEQ ID NO: 1037291 - RNA, 19 nt, Artificial Sequence
  Description of Artificial Sequence: Synthetic oligonucleotide
  Antisense strand to SEQ ID NO: 1037290
uacacaaugcaaagaacgg

SEQ ID NO: 1037292 - RNA, 19 nt, Artificial Sequence
  Description of Artificial Sequence: Synthetic oligonucleotide
  Sense strand starting at position 2582 of SEQ ID NO: 914876
cuuugcauuguguaaagaa

SEQ ID NO: 1037293 - RNA, 19 nt, Artificial Sequence
  Description of Artificial Sequence: Synthetic oligonucleotide
  Antisense strand to SEQ ID NO: 1037292
uucuuuacacaaugcaaag

SEQ ID NO: 1037294 - RNA, 19 nt, Artificial Sequence
  Description of Artificial Sequence: Synthetic oligonucleotide
  Sense strand starting at position 2636 of SEQ ID NO: 914876
uuagaauggccaugguucu

SEQ ID NO: 1037295 - RNA, 19 nt, Artificial Sequence
  Description of Artificial Sequence: Synthetic oligonucleotide
  Antisense strand to SEQ ID NO: 1037294
agaaccauggccauucuaa

SEQ ID NO: 1037296 - RNA, 19 nt, Artificial Sequence
  Description of Artificial Sequence: Synthetic oligonucleotide
  Sense strand starting at position 2931 of SEQ ID NO: 914876
caaauuguaucaguggaga

SEQ ID NO: 1037297 - RNA, 19 nt, Artificial Sequence
  Description of Artificial Sequence: Synthetic oligonucleotide
  Antisense strand to SEQ ID NO: 1037296
ucuccacugauacaauuug

SEQ ID NO: 1037298 - RNA, 19 nt, Artificial Sequence
  Description of Artificial Sequence: Synthetic oligonucleotide
  Sense strand starting at position 3097 of SEQ ID NO: 914876
gacuauagaugugugucau

SEQ ID NO: 1037299 - RNA, 19 nt, Artificial Sequence
  Description of Artificial Sequence: Synthetic oligonucleotide
  Antisense strand to SEQ ID NO: 1037298
augacacacaucuauaguc

SEQ ID NO: 1037300 - RNA, 19 nt, Artificial Sequence
  Description of Artificial Sequence: Synthetic oligonucleotide
  Sense strand starting at position 3098 of SEQ ID NO: 914876
acuauagaugugugucauc

SEQ ID NO: 1037301 - RNA, 19 nt, Artificial Sequence
  Description of Artificial Sequence: Synthetic oligonucleotide
  Antisense strand to SEQ ID NO: 1037300
gaugacacacaucuauagu

SEQ ID NO: 1037302 - RNA, 19 nt, Artificial Sequence
  Description of Artificial Sequence: Synthetic oligonucleotide
  Sense strand starting at position 3103 of SEQ ID NO: 914876
agaugugugucaucauacc

SEQ ID NO: 1037303 - RNA, 19 nt, Artificial Sequence
  Description of Artificial Sequence: Synthetic oligonucleotide
  Antisense strand to SEQ ID NO: 1037302
gguaugaugacacacaucu

SEQ ID NO: 1037304 - RNA, 19 nt, Artificial Sequence
  Description of Artificial Sequence: Synthetic oligonucleotide
  Sense strand starting at position 3184 of SEQ ID NO: 914876
acuccuugucugcagugau

SEQ ID NO: 1037305 - RNA, 19 nt, Artificial Sequence
  Description of Artificial Sequence: Synthetic oligonucleotide
  Antisense strand to SEQ ID NO: 1037304
aucacugcagacaaggagu

SEQ ID NO: 1037306 - RNA, 19 nt, Artificial Sequence
  Description of Artificial Sequence: Synthetic oligonucleotide
  Sense strand starting at position 3272 of SEQ ID NO: 914876
uccuuuacgguccaaauaa

SEQ ID NO: 1037307 - RNA, 19 nt, Artificial Sequence
  Description of Artificial Sequence: Synthetic oligonucleotide
  Antisense strand to SEQ ID NO: 1037306
uuauuuggaccguaaagga

SEQ ID NO: 1037308 - RNA, 19 nt, Artificial Sequence
  Description of Artificial Sequence: Synthetic oligonucleotide
  Sense strand starting at position 3310 of SEQ ID NO: 914876
ugguguuugcagggaaucu

SEQ ID NO: 1037309 - RNA, 19 nt, Artificial Sequence
  Description of Artificial Sequence: Synthetic oligonucleotide
  Antisense strand to SEQ ID NO: 1037308
agauucccugcaaacacca

SEQ ID NO: 1037310 - RNA, 19 nt, Artificial Sequence
  Description of Artificial Sequence: Synthetic oligonucleotide
  Sense strand starting at position 3321 of SEQ ID NO: 914876
gggaaucucuuccucuacu

SEQ ID NO: 1037311 - RNA, 19 nt, Artificial Sequence
  Description of Artificial Sequence: Synthetic oligonucleotide
  Antisense strand to SEQ ID NO: 1037310
aguagaggaagagauuccc

SEQ ID NO: 1037312 - RNA, 19 nt, Artificial Sequence
  Description of Artificial Sequence: Synthetic oligonucleotide
  Sense strand starting at position 3579 of SEQ ID NO: 914876
gugcuuguaauggauuagu

SEQ ID NO: 1037313 - RNA, 19 nt, Artificial Sequence
  Description of Artificial Sequence: Synthetic oligonucleotide
  Antisense strand to SEQ ID NO: 1037312
acuaauccauuacaagcac

SEQ ID NO: 1037314 - RNA, 19 nt, Artificial Sequence
  Description of Artificial Sequence: Synthetic oligonucleotide
  Sense strand starting at position 3582 of SEQ ID NO: 914876
cuuguaauggauuaguaua

SEQ ID NO: 1037315 - RNA, 19 nt, Artificial Sequence
  Description of Artificial Sequence: Synthetic oligonucleotide
  Antisense strand to SEQ ID NO: 1037314
uauacuaauccauuacaag

SEQ ID NO: 1037316 - RNA, 19 nt, Artificial Sequence
  Description of Artificial Sequence: Synthetic oligonucleotide
  Sense strand starting at position 3584 of SEQ ID NO: 914876
uguaauggauuaguauacu

SEQ ID NO: 1037317 - RNA, 19 nt, Artificial Sequence
  Description of Artificial Sequence: Synthetic oligonucleotide
  Antisense strand to SEQ ID NO: 1037316
aguauacuaauccauuaca

SEQ ID NO: 1037318 - RNA, 19 nt, Artificial Sequence
  Description of Artificial Sequence: Synthetic oligonucleotide
  Sense strand starting at position 3833 of SEQ ID NO: 914876
ccgcgaugcgaggcguaaa

SEQ ID NO: 1037319 - RNA, 19 nt, Artificial Sequence
  Description of Artificial Sequence: Synthetic oligonucleotide
  Antisense strand to SEQ ID NO: 1037318
uuuacgccucgcaucgcgg

SEQ ID NO: 1037320 - RNA, 19 nt, Artificial Sequence
  Description of Artificial Sequence: Synthetic oligonucleotide
  Sense strand starting at position 47 of SEQ ID NO: 914877
agaaauuuguccuggaaau

SEQ ID NO: 1037321 - RNA, 19 nt, Artificial Sequence
  Description of Artificial Sequence: Synthetic oligonucleotide
  Antisense strand to SEQ ID NO: 1037320
auuuccaggacaaauuucu

SEQ ID NO: 1037322 - RNA, 19 nt, Artificial Sequence
  Description of Artificial Sequence: Synthetic oligonucleotide
  Sense strand starting at position 73 of SEQ ID NO: 914877
cugcucuucccuggcauua

SEQ ID NO: 1037323 - RNA, 19 nt, Artificial Sequence
  Description of Artificial Sequence: Synthetic oligonucleotide
  Antisense strand to SEQ ID NO: 1037322
uaaugccagggaagagcag

SEQ ID NO: 1037324 - RNA, 19 nt, Artificial Sequence
  Description of Artificial Sequence: Synthetic oligonucleotide
  Sense strand starting at position 86 of SEQ ID NO: 914877
gcauuaucagcagucgcuu

SEQ ID NO: 1037325 - RNA, 19 nt, Artificial Sequence
  Description of Artificial Sequence: Synthetic oligonucleotide
  Antisense strand to SEQ ID NO: 1037324
aagcgacugcugauaaugc

SEQ ID NO: 1037326 - RNA, 19 nt, Artificial Sequence
  Description of Artificial Sequence: Synthetic oligonucleotide
  Sense strand starting at position 100 of SEQ ID NO: 914877
cgcuuagaucugugggugu

SEQ ID NO: 1037327 - RNA, 19 nt, Artificial Sequence
  Description of Artificial Sequence: Synthetic oligonucleotide
  Antisense strand to SEQ ID NO: 1037326
acacccacagaucuaagcg

SEQ ID NO: 1037328 - RNA, 19 nt, Artificial Sequence
  Description of Artificial Sequence: Synthetic oligonucleotide
  Sense strand starting at position 185 of SEQ ID NO: 914877
guucgcuugucuggagauc

SEQ ID NO: 1037329 - RNA, 19 nt, Artificial Sequence
  Description of Artificial Sequence: Synthetic oligonucleotide
  Antisense strand to SEQ ID NO: 1037328
gaucuccagacaagcgaac

SEQ ID NO: 1037330 - RNA, 19 nt, Artificial Sequence
  Description of Artificial Sequence: Synthetic oligonucleotide
  Sense strand starting at position 186 of SEQ ID NO: 914877
uucgcuugucuggagauca

SEQ ID NO: 1037331 - RNA, 19 nt, Artificial Sequence
  Description of Artificial Sequence: Synthetic oligonucleotide
  Antisense strand to SEQ ID NO: 1037330
ugaucuccagacaagcgaa

SEQ ID NO: 1037332 - RNA, 19 nt, Artificial Sequence
  Description of Artificial Sequence: Synthetic oligonucleotide
  Sense strand starting at position 196 of SEQ ID NO: 914877
uggagaucauccucagauc

SEQ ID NO: 1037333 - RNA, 19 nt, Artificial Sequence
  Description of Artificial Sequence: Synthetic oligonucleotide
  Antisense strand to SEQ ID NO: 1037332
gaucugaggaugaucucca

SEQ ID NO: 1037334 - RNA, 19 nt, Artificial Sequence
  Description of Artificial Sequence: Synthetic oligonucleotide
  Sense strand starting at position 292 of SEQ ID NO: 914877
guggcacgucaccaugaaa

SEQ ID NO: 1037335 - RNA, 19 nt, Artificial Sequence
  Description of Artificial Sequence: Synthetic oligonucleotide
  Antisense strand to SEQ ID NO: 1037334
uuucauggugacgugccac

SEQ ID NO: 1037336 - RNA, 19 nt, Artificial Sequence
  Description of Artificial Sequence: Synthetic oligonucleotide
  Sense strand starting at position 339 of SEQ ID NO: 914877
ugugucauuucccaggaac

SEQ ID NO: 1037337 - RNA, 19 nt, Artificial Sequence
  Description of Artificial Sequence: Synthetic oligonucleotide
  Antisense strand to SEQ ID NO: 1037336
guuccugggaaaugacaca

SEQ ID NO: 1037338 - RNA, 19 nt, Artificial Sequence
  Description of Artificial Sequence: Synthetic oligonucleotide
  Sense strand starting at position 438 of SEQ ID NO: 914877
agccguugaccucaugauu

SEQ ID NO: 1037339 - RNA, 19 nt, Artificial Sequence
  Description of Artificial Sequence: Synthetic oligonucleotide
  Antisense strand to SEQ ID NO: 1037338
aaucaugaggucaacggcu

SEQ ID NO: 1037340 - RNA, 19 nt, Artificial Sequence
  Description of Artificial Sequence: Synthetic oligonucleotide
  Sense strand starting at position 441 of SEQ ID NO: 914877
cguugaccucaugauugua

SEQ ID NO: 1037341 - RNA, 19 nt, Artificial Sequence
  Description of Artificial Sequence: Synthetic oligonucleotide
  Antisense strand to SEQ ID NO: 1037340
uacaaucaugaggucaacg

SEQ ID NO: 1037342 - RNA, 19 nt, Artificial Sequence
  Description of Artificial Sequence: Synthetic oligonucleotide
  Sense strand starting at position 443 of SEQ ID NO: 914877
uugaccucaugauuguaaa

SEQ ID NO: 1037343 - RNA, 19 nt, Artificial Sequence
  Description of Artificial Sequence: Synthetic oligonucleotide
  Antisense strand to SEQ ID NO: 1037342
uuuacaaucaugaggucaa

SEQ ID NO: 1037344 - RNA, 19 nt, Artificial Sequence
  Description of Artificial Sequence: Synthetic oligonucleotide
  Sense strand starting at position 709 of SEQ ID NO: 914877
agcagagacugugaagaua

SEQ ID NO: 1037345 - RNA, 19 nt, Artificial Sequence
  Description of Artificial Sequence: Synthetic oligonucleotide
  Antisense strand to SEQ ID NO: 1037344
uaucuucacagucucugcu

SEQ ID NO: 1037346 - RNA, 19 nt, Artificial Sequence
  Description of Artificial Sequence: Synthetic oligonucleotide
  Sense strand starting at position 792 of SEQ ID NO: 914877
gcaggcguuucccagcuua

SEQ ID NO: 1037347 - RNA, 19 nt, Artificial Sequence
  Description of Artificial Sequence: Synthetic oligonucleotide
  Antisense strand to SEQ ID NO: 1037346
uaagcugggaaacgccugc

SEQ ID NO: 1037348 - RNA, 19 nt, Artificial Sequence
  Description of Artificial Sequence: Synthetic oligonucleotide
  Sense strand starting at position 802 of SEQ ID NO: 914877
cccagcuuagcugacagau

SEQ ID NO: 1037349 - RNA, 19 nt, Artificial Sequence
  Description of Artificial Sequence: Synthetic oligonucleotide
  Antisense strand to SEQ ID NO: 1037348
aucugucagcuaagcuggg

SEQ ID NO: 1037350 - RNA, 19 nt, Artificial Sequence
  Description of Artificial Sequence: Synthetic oligonucleotide
  Sense strand starting at position 804 of SEQ ID NO: 914877
cagcuuagcugacagauca

SEQ ID NO: 1037351 - RNA, 19 nt, Artificial Sequence
  Description of Artificial Sequence: Synthetic oligonucleotide
  Antisense strand to SEQ ID NO: 1037350
ugaucugucagcuaagcug

SEQ ID NO: 1037352 - RNA, 19 nt, Artificial Sequence
  Description of Artificial Sequence: Synthetic oligonucleotide
  Sense strand starting at position 860 of SEQ ID NO: 914877
acagaauugcaccaaguau

SEQ ID NO: 1037353 - RNA, 19 nt, Artificial Sequence
  Description of Artificial Sequence: Synthetic oligonucleotide
  Antisense strand to SEQ ID NO: 1037352
auacuuggugcaauucugu

SEQ ID NO: 1037354 - RNA, 19 nt, Artificial Sequence
  Description of Artificial Sequence: Synthetic oligonucleotide
  Sense strand starting at position 879 of SEQ ID NO: 914877
acaguugauuuacagacau

SEQ ID NO: 1037355 - RNA, 19 nt, Artificial Sequence
  Description of Artificial Sequence: Synthetic oligonucleotide
  Antisense strand to SEQ ID NO: 1037354
augucuguaaaucaacugu

SEQ ID NO: 1037356 - RNA, 19 nt, Artificial Sequence
  Description of Artificial Sequence: Synthetic oligonucleotide
  Sense strand starting at position 2935 of SEQ ID NO: 914877
gcuggcaaagcuugagaga

SEQ ID NO: 1037357 - RNA, 19 nt, Artificial Sequence
  Description of Artificial Sequence: Synthetic oligonucleotide
  Antisense strand to SEQ ID NO: 1037356
ucucucaagcuuugccagc

SEQ ID NO: 1037358 - RNA, 19 nt, Artificial Sequence
  Description of Artificial Sequence: Synthetic oligonucleotide
  Sense strand starting at position 3067 of SEQ ID NO: 914877
ucucaugauuggguauaua

SEQ ID NO: 1037359 - RNA, 19 nt, Artificial Sequence
  Description of Artificial Sequence: Synthetic oligonucleotide
  Antisense strand to SEQ ID NO: 1037358
uauauacccaaucaugaga

SEQ ID NO: 1037360 - RNA, 19 nt, Artificial Sequence
  Description of Artificial Sequence: Synthetic oligonucleotide
  Sense strand starting at position 3127 of SEQ ID NO: 914877
uccauauguuaauugcagu

SEQ ID NO: 1037361 - RNA, 19 nt, Artificial Sequence
  Description of Artificial Sequence: Synthetic oligonucleotide
  Antisense strand to SEQ ID NO: 1037360
acugcaauuaacauaugga

SEQ ID NO: 1037362 - RNA, 19 nt, Artificial Sequence
  Description of Artificial Sequence: Synthetic oligonucleotide
  Sense strand starting at position 3301 of SEQ ID NO: 914877
ccguuauccuaagggaacu

SEQ ID NO: 1037363 - RNA, 19 nt, Artificial Sequence
  Description of Artificial Sequence: Synthetic oligonucleotide
  Antisense strand to SEQ ID NO: 1037362
aguucccuuaggauaacgg

SEQ ID NO: 1037364 - RNA, 19 nt, Artificial Sequence
  Description of Artificial Sequence: Synthetic oligonucleotide
  Sense strand starting at position 3302 of SEQ ID NO: 914877
cguuauccuaagggaacua

SEQ ID NO: 1037365 - RNA, 19 nt, Artificial Sequence
  Description of Artificial Sequence: Synthetic oligonucleotide
  Antisense strand to SEQ ID NO: 1037364
uaguucccuuaggauaacg

SEQ ID NO: 1037366 - RNA, 19 nt, Artificial Sequence
  Description of Artificial Sequence: Synthetic oligonucleotide
  Sense strand starting at position 3368 of SEQ ID NO: 914877
gagcuaaacuuugagucca

SEQ ID NO: 1037367 - RNA, 19 nt, Artificial Sequence
  Description of Artificial Sequence: Synthetic oligonucleotide
  Antisense strand to SEQ ID NO: 1037366
uggacucaaaguuuagcuc

SEQ ID NO: 1037368 - RNA, 19 nt, Artificial Sequence
  Description of Artificial Sequence: Synthetic oligonucleotide
  Sense strand starting at position 3370 of SEQ ID NO: 914877
gcuaaacuuugaguccaca

SEQ ID NO: 1037369 - RNA, 19 nt, Artificial Sequence
  Description of Artificial Sequence: Synthetic oligonucleotide
  Antisense strand to SEQ ID NO: 1037368
uguggacucaaaguuuagc

SEQ ID NO: 1037370 - RNA, 19 nt, Artificial Sequence
  Description of Artificial Sequence: Synthetic oligonucleotide
  Sense strand starting at position 3599 of SEQ ID NO: 914877
acauguacugccugauucu

SEQ ID NO: 1037371 - RNA, 19 nt, Artificial Sequence
  Description of Artificial Sequence: Synthetic oligonucleotide
  Antisense strand to SEQ ID NO: 1037370
agaaucaggcaguacaugu

SEQ ID NO: 1037372 - RNA, 19 nt, Artificial Sequence
  Description of Artificial Sequence: Synthetic oligonucleotide
  Sense strand starting at position 3662 of SEQ ID NO: 914877
agaugcuuaucagauaucu

SEQ ID NO: 1037373 - RNA, 19 nt, Artificial Sequence
  Description of Artificial Sequence: Synthetic oligonucleotide
  Antisense strand to SEQ ID NO: 1037372
agauaucugauaagcaucu

SEQ ID NO: 1037374 - RNA, 19 nt, Artificial Sequence
  Description of Artificial Sequence: Synthetic oligonucleotide
  Sense strand starting at position 3735 of SEQ ID NO: 914877
uagcguccuuuggugcaaa

SEQ ID NO: 1037375 - RNA, 19 nt, Artificial Sequence
  Description of Artificial Sequence: Synthetic oligonucleotide
  Antisense strand to SEQ ID NO: 1037374
uuugcaccaaaggacgcua

SEQ ID NO: 1037376 - RNA, 19 nt, Artificial Sequence
  Description of Artificial Sequence: Synthetic oligonucleotide
  Sense strand starting at position 3875 of SEQ ID NO: 914877
agauuugacucuuaaaugu

SEQ ID NO: 1037377 - RNA, 19 nt, Artificial Sequence
  Description of Artificial Sequence: Synthetic oligonucleotide
  Antisense strand to SEQ ID NO: 1037376
acauuuaagagucaaaucu

SEQ ID NO: 1037378 - RNA, 19 nt, Artificial Sequence
  Description of Artificial Sequence: Synthetic oligonucleotide
  Sense strand starting at position 3921 of SEQ ID NO: 914877
uaguguauguggugugaag

SEQ ID NO: 1037379 - RNA, 19 nt, Artificial Sequence
  Description of Artificial Sequence: Synthetic oligonucleotide
  Antisense strand to SEQ ID NO: 1037378
cuucacaccacauacacua

SEQ ID NO: 1037380 - RNA, 19 nt, Artificial Sequence
  Description of Artificial Sequence: Synthetic oligonucleotide
  Sense strand starting at position 3923 of SEQ ID NO: 914877
guguauguggugugaagua

SEQ ID NO: 1037381 - RNA, 19 nt, Artificial Sequence
  Description of Artificial Sequence: Synthetic oligonucleotide
  Antisense strand to SEQ ID NO: 1037380
uacuucacaccacauacac

SEQ ID NO: 1037382 - RNA, 19 nt, Artificial Sequence
  Description of Artificial Sequence: Synthetic oligonucleotide
  Sense strand starting at position 3947 of SEQ ID NO: 914877
ccagcucauuccugugcau

SEQ ID NO: 1037383 - RNA, 19 nt, Artificial Sequence
  Description of Artificial Sequence: Synthetic oligonucleotide
  Antisense strand to SEQ ID NO: 1037382
augcacaggaaugagcugg

SEQ ID NO: 1037384 - RNA, 19 nt, Artificial Sequence
  Description of Artificial Sequence: Synthetic oligonucleotide
  Sense strand starting at position 3949 of SEQ ID NO: 914877
agcucauuccugugcaugu

SEQ ID NO: 1037385 - RNA, 19 nt, Artificial Sequence
  Description of Artificial Sequence: Synthetic oligonucleotide
  Antisense strand to SEQ ID NO: 1037384
acaugcacaggaaugagcu

SEQ ID NO: 1037386 - RNA, 19 nt, Artificial Sequence
  Description of Artificial Sequence: Synthetic oligonucleotide
  Sense strand starting at position 3966 of SEQ ID NO: 914877
guggaugucuaguuuccca

SEQ ID NO: 1037387 - RNA, 19 nt, Artificial Sequence
  Description of Artificial Sequence: Synthetic oligonucleotide
  Antisense strand to SEQ ID NO: 1037386
ugggaaacuagacauccac

SEQ ID NO: 1037388 - RNA, 19 nt, Artificial Sequence
  Description of Artificial Sequence: Synthetic oligonucleotide
  Sense strand starting at position 3974 of SEQ ID NO: 914877
cuaguuucccagcaucauu

SEQ ID NO: 1037389 - RNA, 19 nt, Artificial Sequence
  Description of Artificial Sequence: Synthetic oligonucleotide
  Antisense strand to SEQ ID NO: 1037388
aaugaugcugggaaacuag

SEQ ID NO: 1037390 - RNA, 19 nt, Artificial Sequence
  Description of Artificial Sequence: Synthetic oligonucleotide
  Sense strand starting at position 3983 of SEQ ID NO: 914877
cagcaucauuuguugaagu

SEQ ID NO: 1037391 - RNA, 19 nt, Artificial Sequence
  Description of Artificial Sequence: Synthetic oligonucleotide
  Antisense strand to SEQ ID NO: 1037390
acuucaacaaaugaugcug

SEQ ID NO: 1037392 - RNA, 19 nt, Artificial Sequence
  Description of Artificial Sequence: Synthetic oligonucleotide
  Sense strand starting at position 6 of SEQ ID NO: 914878
gcaggaaauagaugucugu

SEQ ID NO: 1037393 - RNA, 19 nt, Artificial Sequence
  Description of Artificial Sequence: Synthetic oligonucleotide
  Antisense strand to SEQ ID NO: 1037392
acagacaucuauuuccugc

SEQ ID NO: 1037394 - RNA, 19 nt, Artificial Sequence
  Description of Artificial Sequence: Synthetic oligonucleotide
  Sense strand starting at position 10 of SEQ ID NO: 914878
gaaauagaugucuguagga

SEQ ID NO: 1037395 - RNA, 19 nt, Artificial Sequence
  Description of Artificial Sequence: Synthetic oligonucleotide
  Antisense strand to SEQ ID NO: 1037394
uccuacagacaucuauuuc

SEQ ID NO: 1037396 - RNA, 19 nt, Artificial Sequence
  Description of Artificial Sequence: Synthetic oligonucleotide
  Sense strand starting at position 37 of SEQ ID NO: 914878
aggagaugcugagggauuu

SEQ ID NO: 1037397 - RNA, 19 nt, Artificial Sequence
  Description of Artificial Sequence: Synthetic oligonucleotide
  Antisense strand to SEQ ID NO: 1037396
aaaucccucagcaucuccu

SEQ ID NO: 1037398 - RNA, 19 nt, Artificial Sequence
  Description of Artificial Sequence: Synthetic oligonucleotide
  Sense strand starting at position 91 of SEQ ID NO: 914878
ccaauucuguauccuggaa

SEQ ID NO: 1037399 - RNA, 19 nt, Artificial Sequence
  Description of Artificial Sequence: Synthetic oligonucleotide
  Antisense strand to SEQ ID NO: 1037398
uuccaggauacagaauugg

SEQ ID NO: 1037400 - RNA, 19 nt, Artificial Sequence
  Description of Artificial Sequence: Synthetic oligonucleotide
  Sense strand starting at position 180 of SEQ ID NO: 914878
uggaguccucaacgcagua

SEQ ID NO: 1037401 - RNA, 19 nt, Artificial Sequence
  Description of Artificial Sequence: Synthetic oligonucleotide
  Antisense strand to SEQ ID NO: 1037400
uacugcguugaggacucca

SEQ ID NO: 1037402 - RNA, 19 nt, Artificial Sequence
  Description of Artificial Sequence: Synthetic oligonucleotide
  Sense strand starting at position 208 of SEQ ID NO: 914878
ggcaccuuauuugaagaua

SEQ ID NO: 1037403 - RNA, 19 nt, Artificial Sequence
  Description of Artificial Sequence: Synthetic oligonucleotide
  Antisense strand to SEQ ID NO: 1037402
uaucuucaaauaaggugcc

SEQ ID NO: 1037404 - RNA, 19 nt, Artificial Sequence
  Description of Artificial Sequence: Synthetic oligonucleotide
  Sense strand starting at position 283 of SEQ ID NO: 914878
agucuaaucuguguccuua

SEQ ID NO: 1037405 - RNA, 19 nt, Artificial Sequence
  Description of Artificial Sequence: Synthetic oligonucleotide
  Antisense strand to SEQ ID NO: 1037404
uaaggacacagauuagacu

SEQ ID NO: 1037406 - RNA, 19 nt, Artificial Sequence
  Description of Artificial Sequence: Synthetic oligonucleotide
  Sense strand starting at position 291 of SEQ ID NO: 914878
cuguguccuuaugcaaaga

SEQ ID NO: 1037407 - RNA, 19 nt, Artificial Sequence
  Description of Artificial Sequence: Synthetic oligonucleotide
  Antisense strand to SEQ ID NO: 1037406
ucuuugcauaaggacacag

SEQ ID NO: 1037408 - RNA, 19 nt, Artificial Sequence
  Description of Artificial Sequence: Synthetic oligonucleotide
  Sense strand starting at position 540 of SEQ ID NO: 914878
gagugcaacucuguggaaa

SEQ ID NO: 1037409 - RNA, 19 nt, Artificial Sequence
  Description of Artificial Sequence: Synthetic oligonucleotide
  Antisense strand to SEQ ID NO: 1037408
uuuccacagaguugcacuc

SEQ ID NO: 1037410 - RNA, 19 nt, Artificial Sequence
  Description of Artificial Sequence: Synthetic oligonucleotide
  Sense strand starting at position 541 of SEQ ID NO: 914878
agugcaacucuguggaaag

SEQ ID NO: 1037411 - RNA, 19 nt, Artificial Sequence
  Description of Artificial Sequence: Synthetic oligonucleotide
  Antisense strand to SEQ ID NO: 1037410
cuuuccacagaguugcacu

SEQ ID NO: 1037412 - RNA, 19 nt, Artificial Sequence
  Description of Artificial Sequence: Synthetic oligonucleotide
  Sense strand starting at position 618 of SEQ ID NO: 914878
ggaggugcagaucguauuu

SEQ ID NO: 1037413 - RNA, 19 nt, Artificial Sequence
  Description of Artificial Sequence: Synthetic oligonucleotide
  Antisense strand to SEQ ID NO: 1037412
aaauacgaucugcaccucc

SEQ ID NO: 1037414 - RNA, 19 nt, Artificial Sequence
  Description of Artificial Sequence: Synthetic oligonucleotide
  Sense strand starting at position 764 of SEQ ID NO: 914878
uuccgaguccucuagguca

SEQ ID NO: 1037415 - RNA, 19 nt, Artificial Sequence
  Description of Artificial Sequence: Synthetic oligonucleotide
  Antisense strand to SEQ ID NO: 1037414
ugaccuagaggacucggaa

SEQ ID NO: 1037416 - RNA, 19 nt, Artificial Sequence
  Description of Artificial Sequence: Synthetic oligonucleotide
  Sense strand starting at position 767 of SEQ ID NO: 914878
cgaguccucuaggucaacu

SEQ ID NO: 1037417 - RNA, 19 nt, Artificial Sequence
  Description of Artificial Sequence: Synthetic oligonucleotide
  Antisense strand to SEQ ID NO: 1037416
aguugaccuagaggacucg

SEQ ID NO: 1037418 - RNA, 19 nt, Artificial Sequence
  Description of Artificial Sequence: Synthetic oligonucleotide
  Sense strand starting at position 883 of SEQ ID NO: 914878
ggaggauuccagugucagc

SEQ ID NO: 1037419 - RNA, 19 nt, Artificial Sequence
  Description of Artificial Sequence: Synthetic oligonucleotide
  Antisense strand to SEQ ID NO: 1037418
gcugacacuggaauccucc

SEQ ID NO: 1037420 - RNA, 19 nt, Artificial Sequence
  Description of Artificial Sequence: Synthetic oligonucleotide
  Sense strand starting at position 990 of SEQ ID NO: 914878
acgggauuccgggaggguu

SEQ ID NO: 1037421 - RNA, 19 nt, Artificial Sequence
  Description of Artificial Sequence: Synthetic oligonucleotide
  Antisense strand to SEQ ID NO: 1037420
aacccucccggaaucccgu

SEQ ID NO: 1037422 - RNA, 19 nt, Artificial Sequence
  Description of Artificial Sequence: Synthetic oligonucleotide
  Sense strand starting at position 1116 of SEQ ID NO: 914878
agagacgugcuucaggaau

SEQ ID NO: 1037423 - RNA, 19 nt, Artificial Sequence
  Description of Artificial Sequence: Synthetic oligonucleotide
  Antisense strand to SEQ ID NO: 1037422
auuccugaagcacgucucu

SEQ ID NO: 1037424 - RNA, 19 nt, Artificial Sequence
  Description of Artificial Sequence: Synthetic oligonucleotide
  Sense strand starting at position 1146 of SEQ ID NO: 914878
cugcaaucauuccuggaga

SEQ ID NO: 1037425 - RNA, 19 nt, Artificial Sequence
  Description of Artificial Sequence: Synthetic oligonucleotide
  Antisense strand to SEQ ID NO: 1037424
ucuccaggaaugauugcag

SEQ ID NO: 1037426 - RNA, 19 nt, Artificial Sequence
  Description of Artificial Sequence: Synthetic oligonucleotide
  Sense strand starting at position 2031 of SEQ ID NO: 914878
uacugaacacgugaauacu

SEQ ID NO: 1037427 - RNA, 19 nt, Artificial Sequence
  Description of Artificial Sequence: Synthetic oligonucleotide
  Antisense strand to SEQ ID NO: 1037426
aguauucacguguucagua

SEQ ID NO: 1037428 - RNA, 19 nt, Artificial Sequence
  Description of Artificial Sequence: Synthetic oligonucleotide
  Sense strand starting at position 2037 of SEQ ID NO: 914878
acacgugaauacuucuguu

SEQ ID NO: 1037429 - RNA, 19 nt, Artificial Sequence
  Description of Artificial Sequence: Synthetic oligonucleotide
  Antisense strand to SEQ ID NO: 1037428
aacagaaguauucacgugu

SEQ ID NO: 1037430 - RNA, 19 nt, Artificial Sequence
  Description of Artificial Sequence: Synthetic oligonucleotide
  Sense strand starting at position 2041 of SEQ ID NO: 914878
gugaauacuucuguuguug

SEQ ID NO: 1037431 - RNA, 19 nt, Artificial Sequence
  Description of Artificial Sequence: Synthetic oligonucleotide
  Antisense strand to SEQ ID NO: 1037430
caacaacagaaguauucac

SEQ ID NO: 1037432 - RNA, 19 nt, Artificial Sequence
  Description of Artificial Sequence: Synthetic oligonucleotide
  Sense strand starting at position 2053 of SEQ ID NO: 914878
guuguuguuucugcuauuu

SEQ ID NO: 1037433 - RNA, 19 nt, Artificial Sequence
  Description of Artificial Sequence: Synthetic oligonucleotide
  Antisense strand to SEQ ID NO: 1037432
aaauagcagaaacaacaac

SEQ ID NO: 1037434 - RNA, 19 nt, Artificial Sequence
  Description of Artificial Sequence: Synthetic oligonucleotide
  Sense strand starting at position 2139 of SEQ ID NO: 914878
guccuuuccuugguuucua

SEQ ID NO: 1037435 - RNA, 19 nt, Artificial Sequence
  Description of Artificial Sequence: Synthetic oligonucleotide
  Antisense strand to SEQ ID NO: 1037434
uagaaaccaaggaaaggac

SEQ ID NO: 1037436 - RNA, 19 nt, Artificial Sequence
  Description of Artificial Sequence: Synthetic oligonucleotide
  Sense strand starting at position 2175 of SEQ ID NO: 914878
auagguguuucccuuuguu

SEQ ID NO: 1037437 - RNA, 19 nt, Artificial Sequence
  Description of Artificial Sequence: Synthetic oligonucleotide
  Antisense strand to SEQ ID NO: 1037436
aacaaagggaaacaccuau

SEQ ID NO: 1037438 - RNA, 19 nt, Artificial Sequence
  Description of Artificial Sequence: Synthetic oligonucleotide
  Sense strand starting at position 2178 of SEQ ID NO: 914878
gguguuucccuuuguuaga

SEQ ID NO: 1037439 - RNA, 19 nt, Artificial Sequence
  Description of Artificial Sequence: Synthetic oligonucleotide
  Antisense strand to SEQ ID NO: 1037438
ucuaacaaagggaaacacc

SEQ ID NO: 1037440 - RNA, 19 nt, Artificial Sequence
  Description of Artificial Sequence: Synthetic oligonucleotide
  Sense strand starting at position 2179 of SEQ ID NO: 914878
guguuucccuuuguuagaa

SEQ ID NO: 1037441 - RNA, 19 nt, Artificial Sequence
  Description of Artificial Sequence: Synthetic oligonucleotide
  Antisense strand to SEQ ID NO: 1037440
uucuaacaaagggaaacac

SEQ ID NO: 1037442 - RNA, 19 nt, Artificial Sequence
  Description of Artificial Sequence: Synthetic oligonucleotide
  Sense strand starting at position 2322 of SEQ ID NO: 914878
uggcauugguguuuauauc

SEQ ID NO: 1037443 - RNA, 19 nt, Artificial Sequence
  Description of Artificial Sequence: Synthetic oligonucleotide
  Antisense strand to SEQ ID NO: 1037442
gauauaaacaccaaugcca

SEQ ID NO: 1037444 - RNA, 19 nt, Artificial Sequence
  Description of Artificial Sequence: Synthetic oligonucleotide
  Sense strand starting at position 2323 of SEQ ID NO: 914878
ggcauugguguuuauauca

SEQ ID NO: 1037445 - RNA, 19 nt, Artificial Sequence
  Description of Artificial Sequence: Synthetic oligonucleotide
  Antisense strand to SEQ ID NO: 1037444
ugauauaaacaccaaugcc

SEQ ID NO: 1037446 - RNA, 19 nt, Artificial Sequence
  Description of Artificial Sequence: Synthetic oligonucleotide
  Sense strand starting at position 2331 of SEQ ID NO: 914878
uguuuauaucaaggauggu

SEQ ID NO: 1037447 - RNA, 19 nt, Artificial Sequence
  Description of Artificial Sequence: Synthetic oligonucleotide
  Antisense strand to SEQ ID NO: 1037446
accauccuugauauaaaca

SEQ ID NO: 1037448 - RNA, 19 nt, Artificial Sequence
  Description of Artificial Sequence: Synthetic oligonucleotide
  Sense strand starting at position 2332 of SEQ ID NO: 914878
guuuauaucaaggaugguc

SEQ ID NO: 1037449 - RNA, 19 nt, Artificial Sequence
  Description of Artificial Sequence: Synthetic oligonucleotide
  Antisense strand to SEQ ID NO: 1037448
gaccauccuugauauaaac

SEQ ID NO: 1037450 - RNA, 19 nt, Artificial Sequence
  Description of Artificial Sequence: Synthetic oligonucleotide
  Sense strand starting at position 2334 of SEQ ID NO: 914878
uuauaucaaggauggucau

SEQ ID NO: 1037451 - RNA, 19 nt, Artificial Sequence
  Description of Artificial Sequence: Synthetic oligonucleotide
  Antisense strand to SEQ ID NO: 1037450
augaccauccuugauauaa

SEQ ID NO: 1037452 - RNA, 19 nt, Artificial Sequence
  Description of Artificial Sequence: Synthetic oligonucleotide
  Sense strand starting at position 2694 of SEQ ID NO: 914878
aguuuauucuucuugaagg

SEQ ID NO: 1037453 - RNA, 19 nt, Artificial Sequence
  Description of Artificial Sequence: Synthetic oligonucleotide
  Antisense strand to SEQ ID NO: 1037452
ccuucaagaagaauaaacu

SEQ ID NO: 1037454 - RNA, 19 nt, Artificial Sequence
  Description of Artificial Sequence: Synthetic oligonucleotide
  Sense strand starting at position 2791 of SEQ ID NO: 914878
gaaggaguaucgcucuugu

SEQ ID NO: 1037455 - RNA, 19 nt, Artificial Sequence
  Description of Artificial Sequence: Synthetic oligonucleotide
  Antisense strand to SEQ ID NO: 1037454
acaagagcgauacuccuuc

SEQ ID NO: 1037456 - RNA, 19 nt, Artificial Sequence
  Description of Artificial Sequence: Synthetic oligonucleotide
  Sense strand starting at position 2804 of SEQ ID NO: 914878
ucuugucaccagggcuaaa

SEQ ID NO: 1037457 - RNA, 19 nt, Artificial Sequence
  Description of Artificial Sequence: Synthetic oligonucleotide
  Antisense strand to SEQ ID NO: 1037456
uuuagcccuggugacaaga

SEQ ID NO: 1037458 - RNA, 19 nt, Artificial Sequence
  Description of Artificial Sequence: Synthetic oligonucleotide
  Sense strand starting at position 3526 of SEQ ID NO: 914878
uguacaauuccaugaguuc

SEQ ID NO: 1037459 - RNA, 19 nt, Artificial Sequence
  Description of Artificial Sequence: Synthetic oligonucleotide
  Antisense strand to SEQ ID NO: 1037458
gaacucauggaauuguaca

SEQ ID NO: 1037460 - RNA, 19 nt, Artificial Sequence
  Description of Artificial Sequence: Synthetic oligonucleotide
  Sense strand starting at position 3718 of SEQ ID NO: 914878
guuucuuucccucacgaug

SEQ ID NO: 1037461 - RNA, 19 nt, Artificial Sequence
  Description of Artificial Sequence: Synthetic oligonucleotide
  Antisense strand to SEQ ID NO: 1037460
caucgugagggaaagaaac

SEQ ID NO: 1037462 - RNA, 19 nt, Artificial Sequence
  Description of Artificial Sequence: Synthetic oligonucleotide
  Sense strand starting at position 3723 of SEQ ID NO: 914878
uuucccucacgauguuauu

SEQ ID NO: 1037463 - RNA, 19 nt, Artificial Sequence
  Description of Artificial Sequence: Synthetic oligonucleotide
  Antisense strand to SEQ ID NO: 1037462
aauaacaucgugagggaaa

SEQ ID NO: 1037464 - RNA, 19 nt, Artificial Sequence
  Description of Artificial Sequence: Synthetic oligonucleotide
  Sense strand starting at position 3733 of SEQ ID NO: 914878
gauguuauucuguguguca

SEQ ID NO: 1037465 - RNA, 19 nt, Artificial Sequence
  Description of Artificial Sequence: Synthetic oligonucleotide
  Antisense strand to SEQ ID NO: 1037464
ugacacacagaauaacauc

SEQ ID NO: 1037466 - RNA, 19 nt, Artificial Sequence
  Description of Artificial Sequence: Synthetic oligonucleotide
  Sense strand starting at position 3734 of SEQ ID NO: 914878
auguuauucugugugucaa

SEQ ID NO: 1037467 - RNA, 19 nt, Artificial Sequence
  Description of Artificial Sequence: Synthetic oligonucleotide
  Antisense strand to SEQ ID NO: 1037466
uugacacacagaauaacau

SEQ ID NO: 1037468 - RNA, 19 nt, Artificial Sequence
  Description of Artificial Sequence: Synthetic oligonucleotide
  Sense strand starting at position 3736 of SEQ ID NO: 914878
guuauucugugugucaaug

SEQ ID NO: 1037469 - RNA, 19 nt, Artificial Sequence
  Description of Artificial Sequence: Synthetic oligonucleotide
  Antisense strand to SEQ ID NO: 1037468
cauugacacacagaauaac

SEQ ID NO: 1037470 - RNA, 19 nt, Artificial Sequence
  Description of Artificial Sequence: Synthetic oligonucleotide
  Sense strand starting at position 3956 of SEQ ID NO: 914878
guaaucaccgcauaguguu

SEQ ID NO: 1037471 - RNA, 19 nt, Artificial Sequence
  Description of Artificial Sequence: Synthetic oligonucleotide
  Antisense strand to SEQ ID NO: 1037470
aacacuaugcggugauuac

SEQ ID NO: 1037472 - RNA, 19 nt, Artificial Sequence
  Description of Artificial Sequence: Synthetic oligonucleotide
  Sense strand starting at position 113 of SEQ ID NO: 914879
guuaccguaagauagaguu

SEQ ID NO: 1037473 - RNA, 19 nt, Artificial Sequence
  Description of Artificial Sequence: Synthetic oligonucleotide
  Antisense strand to SEQ ID NO: 1037472
aacucuaucuuacgguaac

SEQ ID NO: 1037474 - RNA, 19 nt, Artificial Sequence
  Description of Artificial Sequence: Synthetic oligonucleotide
  Sense strand starting at position 123 of SEQ ID NO: 914879
gauagaguuucucuaucag

SEQ ID NO: 1037475 - RNA, 19 nt, Artificial Sequence
  Description of Artificial Sequence: Synthetic oligonucleotide
  Antisense strand to SEQ ID NO: 1037474
cugauagagaaacucuauc

SEQ ID NO: 1037476 - RNA, 19 nt, Artificial Sequence
  Description of Artificial Sequence: Synthetic oligonucleotide
  Sense strand starting at position 145 of SEQ ID NO: 914879
uagaauaagugccugauua

SEQ ID NO: 1037477 - RNA, 19 nt, Artificial Sequence
  Description of Artificial Sequence: Synthetic oligonucleotide
  Antisense strand to SEQ ID NO: 1037476
uaaucaggcacuuauucua

SEQ ID NO: 1037478 - RNA, 19 nt, Artificial Sequence
  Description of Artificial Sequence: Synthetic oligonucleotide
  Sense strand starting at position 146 of SEQ ID NO: 914879
agaauaagugccugauuau

SEQ ID NO: 1037479 - RNA, 19 nt, Artificial Sequence
  Description of Artificial Sequence: Synthetic oligonucleotide
  Antisense strand to SEQ ID NO: 1037478
auaaucaggcacuuauucu

SEQ ID NO: 1037480 - RNA, 19 nt, Artificial Sequence
  Description of Artificial Sequence: Synthetic oligonucleotide
  Sense strand starting at position 147 of SEQ ID NO: 914879
gaauaagugccugauuauu

SEQ ID NO: 1037481 - RNA, 19 nt, Artificial Sequence
  Description of Artificial Sequence: Synthetic oligonucleotide
  Antisense strand to SEQ ID NO: 1037480
aauaaucaggcacuuauuc

SEQ ID NO: 1037482 - RNA, 19 nt, Artificial Sequence
  Description of Artificial Sequence: Synthetic oligonucleotide
  Sense strand starting at position 170 of SEQ ID NO: 914879
uuuauauagucaucuucga

SEQ ID NO: 1037483 - RNA, 19 nt, Artificial Sequence
  Description of Artificial Sequence: Synthetic oligonucleotide
  Antisense strand to SEQ ID NO: 1037482
ucgaagaugacuauauaaa

SEQ ID NO: 1037484 - RNA, 19 nt, Artificial Sequence
  Description of Artificial Sequence: Synthetic oligonucleotide
  Sense strand starting at position 185 of SEQ ID NO: 914879
ucgaaauaaugacuugauu

SEQ ID NO: 1037485 - RNA, 19 nt, Artificial Sequence
  Description of Artificial Sequence: Synthetic oligonucleotide
  Antisense strand to SEQ ID NO: 1037484
aaucaagucauuauuucga

SEQ ID NO: 1037486 - RNA, 19 nt, Artificial Sequence
  Description of Artificial Sequence: Synthetic oligonucleotide
  Sense strand starting at position 317 of SEQ ID NO: 914879
uguguaucaguccaguuaa

SEQ ID NO: 1037487 - RNA, 19 nt, Artificial Sequence
  Description of Artificial Sequence: Synthetic oligonucleotide
  Antisense strand to SEQ ID NO: 1037486
uuaacuggacugauacaca

SEQ ID NO: 1037488 - RNA, 19 nt, Artificial Sequence
  Description of Artificial Sequence: Synthetic oligonucleotide
  Sense strand starting at position 370 of SEQ ID NO: 914879
uacagaguuucuccagguu

SEQ ID NO: 1037489 - RNA, 19 nt, Artificial Sequence
  Description of Artificial Sequence: Synthetic oligonucleotide
  Antisense strand to SEQ ID NO: 1037488
aaccuggagaaacucugua

SEQ ID NO: 1037490 - RNA, 19 nt, Artificial Sequence
  Description of Artificial Sequence: Synthetic oligonucleotide
  Sense strand starting at position 491 of SEQ ID NO: 914879
cggaguccgaaauauaaca

SEQ ID NO: 1037491 - RNA, 19 nt, Artificial Sequence
  Description of Artificial Sequence: Synthetic oligonucleotide
  Antisense strand to SEQ ID NO: 1037490
uguuauauuucggacuccg

SEQ ID NO: 1037492 - RNA, 19 nt, Artificial Sequence
  Description of Artificial Sequence: Synthetic oligonucleotide
  Sense strand starting at position 613 of SEQ ID NO: 914879
gcaacuuucuguuuaagau

SEQ ID NO: 1037493 - RNA, 19 nt, Artificial Sequence
  Description of Artificial Sequence: Synthetic oligonucleotide
  Antisense strand to SEQ ID NO: 1037492
aucuuaaacagaaaguugc

SEQ ID NO: 1037494 - RNA, 19 nt, Artificial Sequence
  Description of Artificial Sequence: Synthetic oligonucleotide
  Sense strand starting at position 627 of SEQ ID NO: 914879
aagauaaagcagugugauc

SEQ ID NO: 1037495 - RNA, 19 nt, Artificial Sequence
  Description of Artificial Sequence: Synthetic oligonucleotide
  Antisense strand to SEQ ID NO: 1037494
gaucacacugcuuuaucuu

SEQ ID NO: 1037496 - RNA, 19 nt, Artificial Sequence
  Description of Artificial Sequence: Synthetic oligonucleotide
  Sense strand starting at position 875 of SEQ ID NO: 914879
cagaguguuggacaugcaa

SEQ ID NO: 1037497 - RNA, 19 nt, Artificial Sequence
  Description of Artificial Sequence: Synthetic oligonucleotide
  Antisense strand to SEQ ID NO: 1037496
uugcauguccaacacucug

SEQ ID NO: 1037498 - RNA, 19 nt, Artificial Sequence
  Description of Artificial Sequence: Synthetic oligonucleotide
  Sense strand starting at position 877 of SEQ ID NO: 914879
gaguguuggacaugcaaag

SEQ ID NO: 1037499 - RNA, 19 nt, Artificial Sequence
  Description of Artificial Sequence: Synthetic oligonucleotide
  Antisense strand to SEQ ID NO: 1037498
cuuugcauguccaacacuc

SEQ ID NO: 1037500 - RNA, 19 nt, Artificial Sequence
  Description of Artificial Sequence: Synthetic oligonucleotide
  Sense strand starting at position 1076 of SEQ ID NO: 914879
gagagaauuuguuaggaga

SEQ ID NO: 1037501 - RNA, 19 nt, Artificial Sequence
  Description of Artificial Sequence: Synthetic oligonucleotide
  Antisense strand to SEQ ID NO: 1037500
ucuccuaacaaauucucuc

SEQ ID NO: 1037502 - RNA, 19 nt, Artificial Sequence
  Description of Artificial Sequence: Synthetic oligonucleotide
  Sense strand starting at position 1078 of SEQ ID NO: 914879
gagaauuuguuaggagaga

SEQ ID NO: 1037503 - RNA, 19 nt, Artificial Sequence
  Description of Artificial Sequence: Synthetic oligonucleotide
  Antisense strand to SEQ ID NO: 1037502
ucucuccuaacaaauucuc

SEQ ID NO: 1037504 - RNA, 19 nt, Artificial Sequence
  Description of Artificial Sequence: Synthetic oligonucleotide
  Sense strand starting at position 1079 of SEQ ID NO: 914879
agaauuuguuaggagagac

SEQ ID NO: 1037505 - RNA, 19 nt, Artificial Sequence
  Description of Artificial Sequence: Synthetic oligonucleotide
  Antisense strand to SEQ ID NO: 1037504
gucucuccuaacaaauucu

SEQ ID NO: 1037506 - RNA, 19 nt, Artificial Sequence
  Description of Artificial Sequence: Synthetic oligonucleotide
  Sense strand starting at position 1165 of SEQ ID NO: 914879
gggaauggacccugagcaa

SEQ ID NO: 1037507 - RNA, 19 nt, Artificial Sequence
  Description of Artificial Sequence: Synthetic oligonucleotide
  Antisense strand to SEQ ID NO: 1037506
uugcucaggguccauuccc

SEQ ID NO: 1037508 - RNA, 19 nt, Artificial Sequence
  Description of Artificial Sequence: Synthetic oligonucleotide
  Sense strand starting at position 1210 of SEQ ID NO: 914879
aggucacagcuuuggaaga

SEQ ID NO: 1037509 - RNA, 19 nt, Artificial Sequence
  Description of Artificial Sequence: Synthetic oligonucleotide
  Antisense strand to SEQ ID NO: 1037508
ucuuccaaagcugugaccu

SEQ ID NO: 1037510 - RNA, 19 nt, Artificial Sequence
  Description of Artificial Sequence: Synthetic oligonucleotide
  Sense strand starting at position 2037 of SEQ ID NO: 914879
cccuuauaucccuggguag

SEQ ID NO: 1037511 - RNA, 19 nt, Artificial Sequence
  Description of Artificial Sequence: Synthetic oligonucleotide
  Antisense strand to SEQ ID NO: 1037510
cuacccagggauauaaggg

SEQ ID NO: 1037512 - RNA, 19 nt, Artificial Sequence
  Description of Artificial Sequence: Synthetic oligonucleotide
  Sense strand starting at position 2050 of SEQ ID NO: 914879
ggguaggguugcucugaga

SEQ ID NO: 1037513 - RNA, 19 nt, Artificial Sequence
  Description of Artificial Sequence: Synthetic oligonucleotide
  Antisense strand to SEQ ID NO: 1037512
ucucagagcaacccuaccc

SEQ ID NO: 1037514 - RNA, 19 nt, Artificial Sequence
  Description of Artificial Sequence: Synthetic oligonucleotide
  Sense strand starting at position 2061 of SEQ ID NO: 914879
cucugagaccuuggucacu

SEQ ID NO: 1037515 - RNA, 19 nt, Artificial Sequence
  Description of Artificial Sequence: Synthetic oligonucleotide
  Antisense strand to SEQ ID NO: 1037514
agugaccaaggucucagag

SEQ ID NO: 1037516 - RNA, 19 nt, Artificial Sequence
  Description of Artificial Sequence: Synthetic oligonucleotide
  Sense strand starting at position 2092 of SEQ ID NO: 914879
gcacuuccuggguauguga

SEQ ID NO: 1037517 - RNA, 19 nt, Artificial Sequence
  Description of Artificial Sequence: Synthetic oligonucleotide
  Antisense strand to SEQ ID NO: 1037516
ucacauacccaggaagugc

SEQ ID NO: 1037518 - RNA, 19 nt, Artificial Sequence
  Description of Artificial Sequence: Synthetic oligonucleotide
  Sense strand starting at position 2094 of SEQ ID NO: 914879
acuuccuggguaugugauu

SEQ ID NO: 1037519 - RNA, 19 nt, Artificial Sequence
  Description of Artificial Sequence: Synthetic oligonucleotide
  Antisense strand to SEQ ID NO: 1037518
aaucacauacccaggaagu

SEQ ID NO: 1037520 - RNA, 19 nt, Artificial Sequence
  Description of Artificial Sequence: Synthetic oligonucleotide
  Sense strand starting at position 2095 of SEQ ID NO: 914879
cuuccuggguaugugauua

SEQ ID NO: 1037521 - RNA, 19 nt, Artificial Sequence
  Description of Artificial Sequence: Synthetic oligonucleotide
  Antisense strand to SEQ ID NO: 1037520
uaaucacauacccaggaag

SEQ ID NO: 1037522 - RNA, 19 nt, Artificial Sequence
  Description of Artificial Sequence: Synthetic oligonucleotide
  Sense strand starting at position 2103 of SEQ ID NO: 914879
guaugugauuauuuguuug

SEQ ID NO: 1037523 - RNA, 19 nt, Artificial Sequence
  Description of Artificial Sequence: Synthetic oligonucleotide
  Antisense strand to SEQ ID NO: 1037522
caaacaaauaaucacauac

SEQ ID NO: 1037524 - RNA, 19 nt, Artificial Sequence
  Description of Artificial Sequence: Synthetic oligonucleotide
  Sense strand starting at position 2135 of SEQ ID NO: 914879
ucucauuggccugauccaa

SEQ ID NO: 1037525 - RNA, 19 nt, Artificial Sequence
  Description of Artificial Sequence: Synthetic oligonucleotide
  Antisense strand to SEQ ID NO: 1037524
uuggaucaggccaaugaga

SEQ ID NO: 1037526 - RNA, 19 nt, Artificial Sequence
  Description of Artificial Sequence: Synthetic oligonucleotide
  Sense strand starting at position 2338 of SEQ ID NO: 914879
aacugugaacuuuguguga

SEQ ID NO: 1037527 - RNA, 19 nt, Artificial Sequence
  Description of Artificial Sequence: Synthetic oligonucleotide
  Antisense strand to SEQ ID NO: 1037526
ucacacaaaguucacaguu

SEQ ID NO: 1037528 - RNA, 19 nt, Artificial Sequence
  Description of Artificial Sequence: Synthetic oligonucleotide
  Sense strand starting at position 2341 of SEQ ID NO: 914879
ugugaacuuugugugaaga

SEQ ID NO: 1037529 - RNA, 19 nt, Artificial Sequence
  Description of Artificial Sequence: Synthetic oligonucleotide
  Antisense strand to SEQ ID NO: 1037528
ucuucacacaaaguucaca

SEQ ID NO: 1037530 - RNA, 19 nt, Artificial Sequence
  Description of Artificial Sequence: Synthetic oligonucleotide
  Sense strand starting at position 2342 of SEQ ID NO: 914879
gugaacuuugugugaagau

SEQ ID NO: 1037531 - RNA, 19 nt, Artificial Sequence
  Description of Artificial Sequence: Synthetic oligonucleotide
  Antisense strand to SEQ ID NO: 1037530
aucuucacacaaaguucac

SEQ ID NO: 1037532 - RNA, 19 nt, Artificial Sequence
  Description of Artificial Sequence: Synthetic oligonucleotide
  Sense strand starting at position 2623 of SEQ ID NO: 914879
acuauuagugagggugauu

SEQ ID NO: 1037533 - RNA, 19 nt, Artificial Sequence
  Description of Artificial Sequence: Synthetic oligonucleotide
  Antisense strand to SEQ ID NO: 1037532
aaucacccucacuaauagu

SEQ ID NO: 1037534 - RNA, 19 nt, Artificial Sequence
  Description of Artificial Sequence: Synthetic oligonucleotide
  Sense strand starting at position 2626 of SEQ ID NO: 914879
auuagugagggugauucuu

SEQ ID NO: 1037535 - RNA, 19 nt, Artificial Sequence
  Description of Artificial Sequence: Synthetic oligonucleotide
  Antisense strand to SEQ ID NO: 1037534
aagaaucacccucacuaau

SEQ ID NO: 1037536 - RNA, 19 nt, Artificial Sequence
  Description of Artificial Sequence: Synthetic oligonucleotide
  Sense strand starting at position 3013 of SEQ ID NO: 914879
uuauuuggauauugagaga

SEQ ID NO: 1037537 - RNA, 19 nt, Artificial Sequence
  Description of Artificial Sequence: Synthetic oligonucleotide
  Antisense strand to SEQ ID NO: 1037536
ucucucaauauccaaauaa

SEQ ID NO: 1037538 - RNA, 19 nt, Artificial Sequence
  Description of Artificial Sequence: Synthetic oligonucleotide
  Sense strand starting at position 3028 of SEQ ID NO: 914879
gagaacaaaucccuugugu

SEQ ID NO: 1037539 - RNA, 19 nt, Artificial Sequence
  Description of Artificial Sequence: Synthetic oligonucleotide
  Antisense strand to SEQ ID NO: 1037538
acacaagggauuuguucuc

SEQ ID NO: 1037540 - RNA, 19 nt, Artificial Sequence
  Description of Artificial Sequence: Synthetic oligonucleotide
  Sense strand starting at position 3073 of SEQ ID NO: 914879
aggcauguacuugaguuua

SEQ ID NO: 1037541 - RNA, 19 nt, Artificial Sequence
  Description of Artificial Sequence: Synthetic oligonucleotide
  Antisense strand to SEQ ID NO: 1037540
uaaacucaaguacaugccu

SEQ ID NO: 1037542 - RNA, 19 nt, Artificial Sequence
  Description of Artificial Sequence: Synthetic oligonucleotide
  Sense strand starting at position 3084 of SEQ ID NO: 914879
ugaguuuaauuucugacgu

SEQ ID NO: 1037543 - RNA, 19 nt, Artificial Sequence
  Description of Artificial Sequence: Synthetic oligonucleotide
  Antisense strand to SEQ ID NO: 1037542
acgucagaaauuaaacuca

SEQ ID NO: 1037544 - RNA, 19 nt, Artificial Sequence
  Description of Artificial Sequence: Synthetic oligonucleotide
  Sense strand starting at position 3518 of SEQ ID NO: 914879
ggauaaaggccuugucuua

SEQ ID NO: 1037545 - RNA, 19 nt, Artificial Sequence
  Description of Artificial Sequence: Synthetic oligonucleotide
  Antisense strand to SEQ ID NO: 1037544
uaagacaaggccuuuaucc

SEQ ID NO: 1037546 - RNA, 19 nt, Artificial Sequence
  Description of Artificial Sequence: Synthetic oligonucleotide
  Sense strand starting at position 3653 of SEQ ID NO: 914879
ggcuucuuccuagggaaca

SEQ ID NO: 1037547 - RNA, 19 nt, Artificial Sequence
  Description of Artificial Sequence: Synthetic oligonucleotide
  Antisense strand to SEQ ID NO: 1037546
uguucccuaggaagaagcc

SEQ ID NO: 1037548 - RNA, 19 nt, Artificial Sequence
  Description of Artificial Sequence: Synthetic oligonucleotide
  Sense strand starting at position 3761 of SEQ ID NO: 914879
ccuggauugugagcacaga

SEQ ID NO: 1037549 - RNA, 19 nt, Artificial Sequence
  Description of Artificial Sequence: Synthetic oligonucleotide
  Antisense strand to SEQ ID NO: 1037548
ucugugcucacaauccagg

SEQ ID NO: 1037550 - RNA, 19 nt, Artificial Sequence
  Description of Artificial Sequence: Synthetic oligonucleotide
  Sense strand starting at position 3983 of SEQ ID NO: 914879
acaugagauucuguaacag

SEQ ID NO: 1037551 - RNA, 19 nt, Artificial Sequence
  Description of Artificial Sequence: Synthetic oligonucleotide
  Antisense strand to SEQ ID NO: 1037550
cuguuacagaaucucaugu

SEQ ID NO: 1037552 - RNA, 19 nt, Artificial Sequence
  Description of Artificial Sequence: Synthetic oligonucleotide
  Sense strand starting at position 126 of SEQ ID NO: 914880
cucauuaccugguugauga

SEQ ID NO: 1037553 - RNA, 19 nt, Artificial Sequence
  Description of Artificial Sequence: Synthetic oligonucleotide
  Antisense strand to SEQ ID NO: 1037552
ucaucaaccagguaaugag

SEQ ID NO: 1037554 - RNA, 19 nt, Artificial Sequence
  Description of Artificial Sequence: Synthetic oligonucleotide
  Sense strand starting at position 127 of SEQ ID NO: 914880
ucauuaccugguugaugaa

SEQ ID NO: 1037555 - RNA, 19 nt, Artificial Sequence
  Description of Artificial Sequence: Synthetic oligonucleotide
  Antisense strand to SEQ ID NO: 1037554
uucaucaaccagguaauga

SEQ ID NO: 1037556 - RNA, 19 nt, Artificial Sequence
  Description of Artificial Sequence: Synthetic oligonucleotide
  Sense strand starting at position 236 of SEQ ID NO: 914880
aaagcuugucuccaggcua

SEQ ID NO: 1037557 - RNA, 19 nt, Artificial Sequence
  Description of Artificial Sequence: Synthetic oligonucleotide
  Antisense strand to SEQ ID NO: 1037556
uagccuggagacaagcuuu

SEQ ID NO: 1037558 - RNA, 19 nt, Artificial Sequence
  Description of Artificial Sequence: Synthetic oligonucleotide
  Sense strand starting at position 249 of SEQ ID NO: 914880
aggcuagguugccuuagaa

SEQ ID NO: 1037559 - RNA, 19 nt, Artificial Sequence
  Description of Artificial Sequence: Synthetic oligonucleotide
  Antisense strand to SEQ ID NO: 1037558
uucuaaggcaaccuagccu

SEQ ID NO: 1037560 - RNA, 19 nt, Artificial Sequence
  Description of Artificial Sequence: Synthetic oligonucleotide
  Sense strand starting at position 478 of SEQ ID NO: 914880
cuucuuagggccugaugua

SEQ ID NO: 1037561 - RNA, 19 nt, Artificial Sequence
  Description of Artificial Sequence: Synthetic oligonucleotide
  Antisense strand to SEQ ID NO: 1037560
uacaucaggcccuaagaag

SEQ ID NO: 1037562 - RNA, 19 nt, Artificial Sequence
  Description of Artificial Sequence: Synthetic oligonucleotide
  Sense strand starting at position 711 of SEQ ID NO: 914880
agcagaaagcuauagacgu

SEQ ID NO: 1037563 - RNA, 19 nt, Artificial Sequence
  Description of Artificial Sequence: Synthetic oligonucleotide
  Antisense strand to SEQ ID NO: 1037562
acgucuauagcuuucugcu

SEQ ID NO: 1037564 - RNA, 19 nt, Artificial Sequence
  Description of Artificial Sequence: Synthetic oligonucleotide
  Sense strand starting at position 715 of SEQ ID NO: 914880
gaaagcuauagacguuagu

SEQ ID NO: 1037565 - RNA, 19 nt, Artificial Sequence
  Description of Artificial Sequence: Synthetic oligonucleotide
  Antisense strand to SEQ ID NO: 1037564
acuaacgucuauagcuuuc

SEQ ID NO: 1037566 - RNA, 19 nt, Artificial Sequence
  Description of Artificial Sequence: Synthetic oligonucleotide
  Sense strand starting at position 728 of SEQ ID NO: 914880
guuaguucugugcaugaag

SEQ ID NO: 1037567 - RNA, 19 nt, Artificial Sequence
  Description of Artificial Sequence: Synthetic oligonucleotide
  Antisense strand to SEQ ID NO: 1037566
cuucaugcacagaacuaac

SEQ ID NO: 1037568 - RNA, 19 nt, Artificial Sequence
  Description of Artificial Sequence: Synthetic oligonucleotide
  Sense strand starting at position 730 of SEQ ID NO: 914880
uaguucugugcaugaagac

SEQ ID NO: 1037569 - RNA, 19 nt, Artificial Sequence
  Description of Artificial Sequence: Synthetic oligonucleotide
  Antisense strand to SEQ ID NO: 1037568
gucuucaugcacagaacua

SEQ ID NO: 1037570 - RNA, 19 nt, Artificial Sequence
  Description of Artificial Sequence: Synthetic oligonucleotide
  Sense strand starting at position 731 of SEQ ID NO: 914880
aguucugugcaugaagaca

SEQ ID NO: 1037571 - RNA, 19 nt, Artificial Sequence
  Description of Artificial Sequence: Synthetic oligonucleotide
  Antisense strand to SEQ ID NO: 1037570
ugucuucaugcacagaacu

SEQ ID NO: 1037572 - RNA, 19 nt, Artificial Sequence
  Description of Artificial Sequence: Synthetic oligonucleotide
  Sense strand starting at position 739 of SEQ ID NO: 914880
gcaugaagacauggaccau

SEQ ID NO: 1037573 - RNA, 19 nt, Artificial Sequence
  Description of Artificial Sequence: Synthetic oligonucleotide
  Antisense strand to SEQ ID NO: 1037572
augguccaugucuucaugc

SEQ ID NO: 1037574 - RNA, 19 nt, Artificial Sequence
  Description of Artificial Sequence: Synthetic oligonucleotide
  Sense strand starting at position 821 of SEQ ID NO: 914880
ugcuucugggaaugagaga

SEQ ID NO: 1037575 - RNA, 19 nt, Artificial Sequence
  Description of Artificial Sequence: Synthetic oligonucleotide
  Antisense strand to SEQ ID NO: 1037574
ucucucauucccagaagca

SEQ ID NO: 1037576 - RNA, 19 nt, Artificial Sequence
  Description of Artificial Sequence: Synthetic oligonucleotide
  Sense strand starting at position 869 of SEQ ID NO: 914880
ugagcuuugugcuuagaga

SEQ ID NO: 1037577 - RNA, 19 nt, Artificial Sequence
  Description of Artificial Sequence: Synthetic oligonucleotide
  Antisense strand to SEQ ID NO: 1037576
ucucuaagcacaaagcuca

SEQ ID NO: 1037578 - RNA, 19 nt, Artificial Sequence
  Description of Artificial Sequence: Synthetic oligonucleotide
  Sense strand starting at position 870 of SEQ ID NO: 914880
gagcuuugugcuuagagac

SEQ ID NO: 1037579 - RNA, 19 nt, Artificial Sequence
  Description of Artificial Sequence: Synthetic oligonucleotide
  Antisense strand to SEQ ID NO: 1037578
gucucuaagcacaaagcuc

SEQ ID NO: 1037580 - RNA, 19 nt, Artificial Sequence
  Description of Artificial Sequence: Synthetic oligonucleotide
  Sense strand starting at position 2044 of SEQ ID NO: 914880
ucuuuauaucccuguccag

SEQ ID NO: 1037581 - RNA, 19 nt, Artificial Sequence
  Description of Artificial Sequence: Synthetic oligonucleotide
  Antisense strand to SEQ ID NO: 1037580
cuggacagggauauaaaga

SEQ ID NO: 1037582 - RNA, 19 nt, Artificial Sequence
  Description of Artificial Sequence: Synthetic oligonucleotide
  Sense strand starting at position 2189 of SEQ ID NO: 914880
cugucaggucugugaugga

SEQ ID NO: 1037583 - RNA, 19 nt, Artificial Sequence
  Description of Artificial Sequence: Synthetic oligonucleotide
  Antisense strand to SEQ ID NO: 1037582
uccaucacagaccugacag

SEQ ID NO: 1037584 - RNA, 19 nt, Artificial Sequence
  Description of Artificial Sequence: Synthetic oligonucleotide
  Sense strand starting at position 2243 of SEQ ID NO: 914880
uuucccuuuccaugugaca

SEQ ID NO: 1037585 - RNA, 19 nt, Artificial Sequence
  Description of Artificial Sequence: Synthetic oligonucleotide
  Antisense strand to SEQ ID NO: 1037584
ugucacauggaaagggaaa

SEQ ID NO: 1037586 - RNA, 19 nt, Artificial Sequence
  Description of Artificial Sequence: Synthetic oligonucleotide
  Sense strand starting at position 2339 of SEQ ID NO: 914880
uggcuugcucccgggaaga

SEQ ID NO: 1037587 - RNA, 19 nt, Artificial Sequence
  Description of Artificial Sequence: Synthetic oligonucleotide
  Antisense strand to SEQ ID NO: 1037586
ucuucccgggagcaagcca

SEQ ID NO: 1037588 - RNA, 19 nt, Artificial Sequence
  Description of Artificial Sequence: Synthetic oligonucleotide
  Sense strand starting at position 2341 of SEQ ID NO: 914880
gcuugcucccgggaagauu

SEQ ID NO: 1037589 - RNA, 19 nt, Artificial Sequence
  Description of Artificial Sequence: Synthetic oligonucleotide
  Antisense strand to SEQ ID NO: 1037588
aaucuucccgggagcaagc

SEQ ID NO: 1037590 - RNA, 19 nt, Artificial Sequence
  Description of Artificial Sequence: Synthetic oligonucleotide
  Sense strand starting at position 2352 of SEQ ID NO: 914880
ggaagauuccucugcggga

SEQ ID NO: 1037591 - RNA, 19 nt, Artificial Sequence
  Description of Artificial Sequence: Synthetic oligonucleotide
  Antisense strand to SEQ ID NO: 1037590
ucccgcagaggaaucuucc

SEQ ID NO: 1037592 - RNA, 19 nt, Artificial Sequence
  Description of Artificial Sequence: Synthetic oligonucleotide
  Sense strand starting at position 2501 of SEQ ID NO: 914880
gguguaagacuuuguugga

SEQ ID NO: 1037593 - RNA, 19 nt, Artificial Sequence
  Description of Artificial Sequence: Synthetic oligonucleotide
  Antisense strand to SEQ ID NO: 1037592
uccaacaaagucuuacacc

SEQ ID NO: 1037594 - RNA, 19 nt, Artificial Sequence
  Description of Artificial Sequence: Synthetic oligonucleotide
  Sense strand starting at position 2502 of SEQ ID NO: 914880
guguaagacuuuguuggaa

SEQ ID NO: 1037595 - RNA, 19 nt, Artificial Sequence
  Description of Artificial Sequence: Synthetic oligonucleotide
  Antisense strand to SEQ ID NO: 1037594
uuccaacaaagucuuacac

SEQ ID NO: 1037596 - RNA, 19 nt, Artificial Sequence
  Description of Artificial Sequence: Synthetic oligonucleotide
  Sense strand starting at position 2592 of SEQ ID NO: 914880
aguguucuccugugauaac

SEQ ID NO: 1037597 - RNA, 19 nt, Artificial Sequence
  Description of Artificial Sequence: Synthetic oligonucleotide
  Antisense strand to SEQ ID NO: 1037596
guuaucacaggagaacacu

SEQ ID NO: 1037598 - RNA, 19 nt, Artificial Sequence
  Description of Artificial Sequence: Synthetic oligonucleotide
  Sense strand starting at position 2603 of SEQ ID NO: 914880
gugauaaccgcggucucuu

SEQ ID NO: 1037599 - RNA, 19 nt, Artificial Sequence
  Description of Artificial Sequence: Synthetic oligonucleotide
  Antisense strand to SEQ ID NO: 1037598
aagagaccgcgguuaucac

SEQ ID NO: 1037600 - RNA, 19 nt, Artificial Sequence
  Description of Artificial Sequence: Synthetic oligonucleotide
  Sense strand starting at position 3316 of SEQ ID NO: 914880
cauccagcgccugauacau

SEQ ID NO: 1037601 - RNA, 19 nt, Artificial Sequence
  Description of Artificial Sequence: Synthetic oligonucleotide
  Antisense strand to SEQ ID NO: 1037600
auguaucaggcgcuggaug

SEQ ID NO: 1037602 - RNA, 19 nt, Artificial Sequence
  Description of Artificial Sequence: Synthetic oligonucleotide
  Sense strand starting at position 3322 of SEQ ID NO: 914880
gcgccugauacauucgcau

SEQ ID NO: 1037603 - RNA, 19 nt, Artificial Sequence
  Description of Artificial Sequence: Synthetic oligonucleotide
  Antisense strand to SEQ ID NO: 1037602
augcgaauguaucaggcgc

SEQ ID NO: 1037604 - RNA, 19 nt, Artificial Sequence
  Description of Artificial Sequence: Synthetic oligonucleotide
  Sense strand starting at position 3344 of SEQ ID NO: 914880
gcgccugauacguucgcau

SEQ ID NO: 1037605 - RNA, 19 nt, Artificial Sequence
  Description of Artificial Sequence: Synthetic oligonucleotide
  Antisense strand to SEQ ID NO: 1037604
augcgaacguaucaggcgc

SEQ ID NO: 1037606 - RNA, 19 nt, Artificial Sequence
  Description of Artificial Sequence: Synthetic oligonucleotide
  Sense strand starting at position 3469 of SEQ ID NO: 914880
gucccagugcuugauacau

SEQ ID NO: 1037607 - RNA, 19 nt, Artificial Sequence
  Description of Artificial Sequence: Synthetic oligonucleotide
  Antisense strand to SEQ ID NO: 1037606
auguaucaagcacugggac

SEQ ID NO: 1037608 - RNA, 19 nt, Artificial Sequence
  Description of Artificial Sequence: Synthetic oligonucleotide
  Sense strand starting at position 3480 of SEQ ID NO: 914880
ugauacauuugcuuccagu

SEQ ID NO: 1037609 - RNA, 19 nt, Artificial Sequence
  Description of Artificial Sequence: Synthetic oligonucleotide
  Antisense strand to SEQ ID NO: 1037608
acuggaagcaaauguauca

SEQ ID NO: 1037610 - RNA, 19 nt, Artificial Sequence
  Description of Artificial Sequence: Synthetic oligonucleotide
  Sense strand starting at position 3556 of SEQ ID NO: 914880
uagugacacccuuggauca

SEQ ID NO: 1037611 - RNA, 19 nt, Artificial Sequence
  Description of Artificial Sequence: Synthetic oligonucleotide
  Antisense strand to SEQ ID NO: 1037610
ugauccaagggugucacua

SEQ ID NO: 1037612 - RNA, 19 nt, Artificial Sequence
  Description of Artificial Sequence: Synthetic oligonucleotide
  Sense strand starting at position 3713 of SEQ ID NO: 914880
cuuacaaugcucugaugga

SEQ ID NO: 1037613 - RNA, 19 nt, Artificial Sequence
  Description of Artificial Sequence: Synthetic oligonucleotide
  Antisense strand to SEQ ID NO: 1037612
uccaucagagcauuguaag

SEQ ID NO: 1037614 - RNA, 19 nt, Artificial Sequence
  Description of Artificial Sequence: Synthetic oligonucleotide
  Sense strand starting at position 3805 of SEQ ID NO: 914880
cccugaaauguguguauua

SEQ ID NO: 1037615 - RNA, 19 nt, Artificial Sequence
  Description of Artificial Sequence: Synthetic oligonucleotide
  Antisense strand to SEQ ID NO: 1037614
uaauacacacauuucaggg

SEQ ID NO: 1037616 - RNA, 19 nt, Artificial Sequence
  Description of Artificial Sequence: Synthetic oligonucleotide
  Sense strand starting at position 3806 of SEQ ID NO: 914880
ccugaaauguguguauuau

SEQ ID NO: 1037617 - RNA, 19 nt, Artificial Sequence
  Description of Artificial Sequence: Synthetic oligonucleotide
  Antisense strand to SEQ ID NO: 1037616
auaauacacacauuucagg

SEQ ID NO: 1037618 - RNA, 19 nt, Artificial Sequence
  Description of Artificial Sequence: Synthetic oligonucleotide
  Sense strand starting at position 3807 of SEQ ID NO: 914880
cugaaauguguguauuaua

SEQ ID NO: 1037619 - RNA, 19 nt, Artificial Sequence
  Description of Artificial Sequence: Synthetic oligonucleotide
  Antisense strand to SEQ ID NO: 1037618
uauaauacacacauuucag

SEQ ID NO: 1037620 - RNA, 19 nt, Artificial Sequence
  Description of Artificial Sequence: Synthetic oligonucleotide
  Sense strand starting at position 3830 of SEQ ID NO: 914880
gugcauaugcuccugucua

SEQ ID NO: 1037621 - RNA, 19 nt, Artificial Sequence
  Description of Artificial Sequence: Synthetic oligonucleotide
  Antisense strand to SEQ ID NO: 1037620
uagacaggagcauaugcac

SEQ ID NO: 1037622 - RNA, 19 nt, Artificial Sequence
  Description of Artificial Sequence: Synthetic oligonucleotide
  Sense strand starting at position 3832 of SEQ ID NO: 914880
gcauaugcuccugucuagu

SEQ ID NO: 1037623 - RNA, 19 nt, Artificial Sequence
  Description of Artificial Sequence: Synthetic oligonucleotide
  Antisense strand to SEQ ID NO: 1037622
acuagacaggagcauaugc

SEQ ID NO: 1037624 - RNA, 19 nt, Artificial Sequence
  Description of Artificial Sequence: Synthetic oligonucleotide
  Sense strand starting at position 3841 of SEQ ID NO: 914880
ccugucuagucauuugcua

SEQ ID NO: 1037625 - RNA, 19 nt, Artificial Sequence
  Description of Artificial Sequence: Synthetic oligonucleotide
  Antisense strand to SEQ ID NO: 1037624
uagcaaaugacuagacagg

SEQ ID NO: 1037626 - RNA, 19 nt, Artificial Sequence
  Description of Artificial Sequence: Synthetic oligonucleotide
  Sense strand starting at position 3899 of SEQ ID NO: 914880
gcguaaagcagacaugagu

SEQ ID NO: 1037627 - RNA, 19 nt, Artificial Sequence
  Description of Artificial Sequence: Synthetic oligonucleotide
  Antisense strand to SEQ ID NO: 1037626
acucaugucugcuuuacgc

SEQ ID NO: 1037628 - RNA, 19 nt, Artificial Sequence
  Description of Artificial Sequence: Synthetic oligonucleotide
  Sense strand starting at position 3907 of SEQ ID NO: 914880
cagacaugaguauguugua

SEQ ID NO: 1037629 - RNA, 19 nt, Artificial Sequence
  Description of Artificial Sequence: Synthetic oligonucleotide
  Antisense strand to SEQ ID NO: 1037628
uacaacauacucaugucug

SEQ ID NO: 1037630 - RNA, 19 nt, Artificial Sequence
  Description of Artificial Sequence: Synthetic oligonucleotide
  Sense strand starting at position 3932 of SEQ ID NO: 914880
gcuccugugcuccacauua

SEQ ID NO: 1037631 - RNA, 19 nt, Artificial Sequence
  Description of Artificial Sequence: Synthetic oligonucleotide
  Antisense strand to SEQ ID NO: 1037630
uaauguggagcacaggagc

SEQ ID NO: 1037632 - RNA, 19 nt, Artificial Sequence
  Description of Artificial Sequence: Synthetic oligonucleotide
  Sense strand starting at position 439 of SEQ ID NO: 914881
uuuaguuccguuuauguaa

SEQ ID NO: 1037633 - RNA, 19 nt, Artificial Sequence
  Description of Artificial Sequence: Synthetic oligonucleotide
  Antisense strand to SEQ ID NO: 1037632
uuacauaaacggaacuaaa

SEQ ID NO: 1037634 - RNA, 19 nt, Artificial Sequence
  Description of Artificial Sequence: Synthetic oligonucleotide
  Sense strand starting at position 714 of SEQ ID NO: 914881
aaagaaugagaucguguua

SEQ ID NO: 1037635 - RNA, 19 nt, Artificial Sequence
  Description of Artificial Sequence: Synthetic oligonucleotide
  Antisense strand to SEQ ID NO: 1037634
uaacacgaucucauucuuu

SEQ ID NO: 1037636 - RNA, 19 nt, Artificial Sequence
  Description of Artificial Sequence: Synthetic oligonucleotide
  Sense strand starting at position 723 of SEQ ID NO: 914881
gaucguguuauuggcagga

SEQ ID NO: 1037637 - RNA, 19 nt, Artificial Sequence
  Description of Artificial Sequence: Synthetic oligonucleotide
  Antisense strand to SEQ ID NO: 1037636
uccugccaauaacacgauc

SEQ ID NO: 1037638 - RNA, 19 nt, Artificial Sequence
  Description of Artificial Sequence: Synthetic oligonucleotide
  Sense strand starting at position 725 of SEQ ID NO: 914881
ucguguuauuggcaggaac

SEQ ID NO: 1037639 - RNA, 19 nt, Artificial Sequence
  Description of Artificial Sequence: Synthetic oligonucleotide
  Antisense strand to SEQ ID NO: 1037638
guuccugccaauaacacga

SEQ ID NO: 1037640 - RNA, 19 nt, Artificial Sequence
  Description of Artificial Sequence: Synthetic oligonucleotide
  Sense strand starting at position 727 of SEQ ID NO: 914881
guguuauuggcaggaacau

SEQ ID NO: 1037641 - RNA, 19 nt, Artificial Sequence
  Description of Artificial Sequence: Synthetic oligonucleotide
  Antisense strand to SEQ ID NO: 1037640
auguuccugccaauaacac

SEQ ID NO: 1037642 - RNA, 19 nt, Artificial Sequence
  Description of Artificial Sequence: Synthetic oligonucleotide
  Sense strand starting at position 934 of SEQ ID NO: 914881
ggguacuugguuuagugau

SEQ ID NO: 1037643 - RNA, 19 nt, Artificial Sequence
  Description of Artificial Sequence: Synthetic oligonucleotide
  Antisense strand to SEQ ID NO: 1037642
aucacuaaaccaaguaccc

SEQ ID NO: 1037644 - RNA, 19 nt, Artificial Sequence
  Description of Artificial Sequence: Synthetic oligonucleotide
  Sense strand starting at position 936 of SEQ ID NO: 914881
guacuugguuuagugauga

SEQ ID NO: 1037645 - RNA, 19 nt, Artificial Sequence
  Description of Artificial Sequence: Synthetic oligonucleotide
  Antisense strand to SEQ ID NO: 1037644
ucaucacuaaaccaaguac

SEQ ID NO: 1037646 - RNA, 19 nt, Artificial Sequence
  Description of Artificial Sequence: Synthetic oligonucleotide
  Sense strand starting at position 940 of SEQ ID NO: 914881
uugguuuagugaugaaaua

SEQ ID NO: 1037647 - RNA, 19 nt, Artificial Sequence
  Description of Artificial Sequence: Synthetic oligonucleotide
  Antisense strand to SEQ ID NO: 1037646
uauuucaucacuaaaccaa

SEQ ID NO: 1037648 - RNA, 19 nt, Artificial Sequence
  Description of Artificial Sequence: Synthetic oligonucleotide
  Sense strand starting at position 1083 of SEQ ID NO: 914881
aagccucaugggugggaaa

SEQ ID NO: 1037649 - RNA, 19 nt, Artificial Sequence
  Description of Artificial Sequence: Synthetic oligonucleotide
  Antisense strand to SEQ ID NO: 1037648
uuucccacccaugaggcuu

SEQ ID NO: 1037650 - RNA, 19 nt, Artificial Sequence
  Description of Artificial Sequence: Synthetic oligonucleotide
  Sense strand starting at position 1084 of SEQ ID NO: 914881
agccucaugggugggaaau

SEQ ID NO: 1037651 - RNA, 19 nt, Artificial Sequence
  Description of Artificial Sequence: Synthetic oligonucleotide
  Antisense strand to SEQ ID NO: 1037650
auuucccacccaugaggcu

SEQ ID NO: 1037652 - RNA, 19 nt, Artificial Sequence
  Description of Artificial Sequence: Synthetic oligonucleotide
  Sense strand starting at position 1085 of SEQ ID NO: 914881
gccucaugggugggaaaug

SEQ ID NO: 1037653 - RNA, 19 nt, Artificial Sequence
  Description of Artificial Sequence: Synthetic oligonucleotide
  Antisense strand to SEQ ID NO: 1037652
cauuucccacccaugaggc

SEQ ID NO: 1037654 - RNA, 19 nt, Artificial Sequence
  Description of Artificial Sequence: Synthetic oligonucleotide
  Sense strand starting at position 1117 of SEQ ID NO: 914881
ggucucagguccugcugaa

SEQ ID NO: 1037655 - RNA, 19 nt, Artificial Sequence
  Description of Artificial Sequence: Synthetic oligonucleotide
  Antisense strand to SEQ ID NO: 1037654
uucagcaggaccugagacc

SEQ ID NO: 1037656 - RNA, 19 nt, Artificial Sequence
  Description of Artificial Sequence: Synthetic oligonucleotide
  Sense strand starting at position 1307 of SEQ ID NO: 914881
gagcuuguuggaggagauu

SEQ ID NO: 1037657 - RNA, 19 nt, Artificial Sequence
  Description of Artificial Sequence: Synthetic oligonucleotide
  Antisense strand to SEQ ID NO: 1037656
aaucuccuccaacaagcuc

SEQ ID NO: 1037658 - RNA, 19 nt, Artificial Sequence
  Description of Artificial Sequence: Synthetic oligonucleotide
  Sense strand starting at position 2056 of SEQ ID NO: 914881
aggugugaugcuggacaca

SEQ ID NO: 1037659 - RNA, 19 nt, Artificial Sequence
  Description of Artificial Sequence: Synthetic oligonucleotide
  Antisense strand to SEQ ID NO: 1037658
uguguccagcaucacaccu

SEQ ID NO: 1037660 - RNA, 19 nt, Artificial Sequence
  Description of Artificial Sequence: Synthetic oligonucleotide
  Sense strand starting at position 2100 of SEQ ID NO: 914881
gccauuuccuuagggaaac

SEQ ID NO: 1037661 - RNA, 19 nt, Artificial Sequence
  Description of Artificial Sequence: Synthetic oligonucleotide
  Antisense strand to SEQ ID NO: 1037660
guuucccuaaggaaauggc

SEQ ID NO: 1037662 - RNA, 19 nt, Artificial Sequence
  Description of Artificial Sequence: Synthetic oligonucleotide
  Sense strand starting at position 2101 of SEQ ID NO: 914881
ccauuuccuuagggaaacu

SEQ ID NO: 1037663 - RNA, 19 nt, Artificial Sequence
  Description of Artificial Sequence: Synthetic oligonucleotide
  Antisense strand to SEQ ID NO: 1037662
aguuucccuaaggaaaugg

SEQ ID NO: 1037664 - RNA, 19 nt, Artificial Sequence
  Description of Artificial Sequence: Synthetic oligonucleotide
  Sense strand starting at position 2110 of SEQ ID NO: 914881
uagggaaacuguguuuguu

SEQ ID NO: 1037665 - RNA, 19 nt, Artificial Sequence
  Description of Artificial Sequence: Synthetic oligonucleotide
  Antisense strand to SEQ ID NO: 1037664
aacaaacacaguuucccua

SEQ ID NO: 1037666 - RNA, 19 nt, Artificial Sequence
  Description of Artificial Sequence: Synthetic oligonucleotide
  Sense strand starting at position 2112 of SEQ ID NO: 914881
gggaaacuguguuuguuug

SEQ ID NO: 1037667 - RNA, 19 nt, Artificial Sequence
  Description of Artificial Sequence: Synthetic oligonucleotide
  Antisense strand to SEQ ID NO: 1037666
caaacaaacacaguuuccc

SEQ ID NO: 1037668 - RNA, 19 nt, Artificial Sequence
  Description of Artificial Sequence: Synthetic oligonucleotide
  Sense strand starting at position 2119 of SEQ ID NO: 914881
uguguuuguuugcuuaauc

SEQ ID NO: 1037669 - RNA, 19 nt, Artificial Sequence
  Description of Artificial Sequence: Synthetic oligonucleotide
  Antisense strand to SEQ ID NO: 1037668
gauuaagcaaacaaacaca

SEQ ID NO: 1037670 - RNA, 19 nt, Artificial Sequence
  Description of Artificial Sequence: Synthetic oligonucleotide
  Sense strand starting at position 2120 of SEQ ID NO: 914881
guguuuguuugcuuaaucu

SEQ ID NO: 1037671 - RNA, 19 nt, Artificial Sequence
  Description of Artificial Sequence: Synthetic oligonucleotide
  Antisense strand to SEQ ID NO: 1037670
agauuaagcaaacaaacac

SEQ ID NO: 1037672 - RNA, 19 nt, Artificial Sequence
  Description of Artificial Sequence: Synthetic oligonucleotide
  Sense strand starting at position 2141 of SEQ ID NO: 914881
aaauaaccucaguggugua

SEQ ID NO: 1037673 - RNA, 19 nt, Artificial Sequence
  Description of Artificial Sequence: Synthetic oligonucleotide
  Antisense strand to SEQ ID NO: 1037672
uacaccacugagguuauuu

SEQ ID NO: 1037674 - RNA, 19 nt, Artificial Sequence
  Description of Artificial Sequence: Synthetic oligonucleotide
  Sense strand starting at position 2144 of SEQ ID NO: 914881
uaaccucagugguguacau

SEQ ID NO: 1037675 - RNA, 19 nt, Artificial Sequence
  Description of Artificial Sequence: Synthetic oligonucleotide
  Antisense strand to SEQ ID NO: 1037674
auguacaccacugagguua

SEQ ID NO: 1037676 - RNA, 19 nt, Artificial Sequence
  Description of Artificial Sequence: Synthetic oligonucleotide
  Sense strand starting at position 2226 of SEQ ID NO: 914881
ccuguccuucuguguuagu

SEQ ID NO: 1037677 - RNA, 19 nt, Artificial Sequence
  Description of Artificial Sequence: Synthetic oligonucleotide
  Antisense strand to SEQ ID NO: 1037676
acuaacacagaaggacagg

SEQ ID NO: 1037678 - RNA, 19 nt, Artificial Sequence
  Description of Artificial Sequence: Synthetic oligonucleotide
  Sense strand starting at position 2227 of SEQ ID NO: 914881
cuguccuucuguguuagua

SEQ ID NO: 1037679 - RNA, 19 nt, Artificial Sequence
  Description of Artificial Sequence: Synthetic oligonucleotide
  Antisense strand to SEQ ID NO: 1037678
uacuaacacagaaggacag

SEQ ID NO: 1037680 - RNA, 19 nt, Artificial Sequence
  Description of Artificial Sequence: Synthetic oligonucleotide
  Sense strand starting at position 2229 of SEQ ID NO: 914881
guccuucuguguuaguaag

SEQ ID NO: 1037681 - RNA, 19 nt, Artificial Sequence
  Description of Artificial Sequence: Synthetic oligonucleotide
  Antisense strand to SEQ ID NO: 1037680
cuuacuaacacagaaggac

SEQ ID NO: 1037682 - RNA, 19 nt, Artificial Sequence
  Description of Artificial Sequence: Synthetic oligonucleotide
  Sense strand starting at position 2282 of SEQ ID NO: 914881
gcucaucuuugcuaccagu

SEQ ID NO: 1037683 - RNA, 19 nt, Artificial Sequence
  Description of Artificial Sequence: Synthetic oligonucleotide
  Antisense strand to SEQ ID NO: 1037682
acugguagcaaagaugagc

SEQ ID NO: 1037684 - RNA, 19 nt, Artificial Sequence
  Description of Artificial Sequence: Synthetic oligonucleotide
  Sense strand starting at position 2396 of SEQ ID NO: 914881
ucaaguucuccgugggcca

SEQ ID NO: 1037685 - RNA, 19 nt, Artificial Sequence
  Description of Artificial Sequence: Synthetic oligonucleotide
  Antisense strand to SEQ ID NO: 1037684
uggcccacggagaacuuga

SEQ ID NO: 1037686 - RNA, 19 nt, Artificial Sequence
  Description of Artificial Sequence: Synthetic oligonucleotide
  Sense strand starting at position 2747 of SEQ ID NO: 914881
cugacuugacuccgaaagu

SEQ ID NO: 1037687 - RNA, 19 nt, Artificial Sequence
  Description of Artificial Sequence: Synthetic oligonucleotide
  Antisense strand to SEQ ID NO: 1037686
acuuucggagucaagucag

SEQ ID NO: 1037688 - RNA, 19 nt, Artificial Sequence
  Description of Artificial Sequence: Synthetic oligonucleotide
  Sense strand starting at position 2748 of SEQ ID NO: 914881
ugacuugacuccgaaaguc

SEQ ID NO: 1037689 - RNA, 19 nt, Artificial Sequence
  Description of Artificial Sequence: Synthetic oligonucleotide
  Antisense strand to SEQ ID NO: 1037688
gacuuucggagucaaguca

SEQ ID NO: 1037690 - RNA, 19 nt, Artificial Sequence
  Description of Artificial Sequence: Synthetic oligonucleotide
  Sense strand starting at position 2884 of SEQ ID NO: 914881
gagccaggaucaggaaaua

SEQ ID NO: 1037691 - RNA, 19 nt, Artificial Sequence
  Description of Artificial Sequence: Synthetic oligonucleotide
  Antisense strand to SEQ ID NO: 1037690
uauuuccugauccuggcuc

SEQ ID NO: 1037692 - RNA, 19 nt, Artificial Sequence
  Description of Artificial Sequence: Synthetic oligonucleotide
  Sense strand starting at position 2895 of SEQ ID NO: 914881
aggaaauacucaggaucag

SEQ ID NO: 1037693 - RNA, 19 nt, Artificial Sequence
  Description of Artificial Sequence: Synthetic oligonucleotide
  Antisense strand to SEQ ID NO: 1037692
cugauccugaguauuuccu

SEQ ID NO: 1037694 - RNA, 19 nt, Artificial Sequence
  Description of Artificial Sequence: Synthetic oligonucleotide
  Sense strand starting at position 3489 of SEQ ID NO: 914881
caggacaggucucaggaua

SEQ ID NO: 1037695 - RNA, 19 nt, Artificial Sequence
  Description of Artificial Sequence: Synthetic oligonucleotide
  Antisense strand to SEQ ID NO: 1037694
uauccugagaccuguccug

SEQ ID NO: 1037696 - RNA, 19 nt, Artificial Sequence
  Description of Artificial Sequence: Synthetic oligonucleotide
  Sense strand starting at position 3516 of SEQ ID NO: 914881
ccugcugucuugguuggaa

SEQ ID NO: 1037697 - RNA, 19 nt, Artificial Sequence
  Description of Artificial Sequence: Synthetic oligonucleotide
  Antisense strand to SEQ ID NO: 1037696
uuccaaccaagacagcagg

SEQ ID NO: 1037698 - RNA, 19 nt, Artificial Sequence
  Description of Artificial Sequence: Synthetic oligonucleotide
  Sense strand starting at position 3518 of SEQ ID NO: 914881
ugcugucuugguuggaaag

SEQ ID NO: 1037699 - RNA, 19 nt, Artificial Sequence
  Description of Artificial Sequence: Synthetic oligonucleotide
  Antisense strand to SEQ ID NO: 1037698
cuuuccaaccaagacagca

SEQ ID NO: 1037700 - RNA, 19 nt, Artificial Sequence
  Description of Artificial Sequence: Synthetic oligonucleotide
  Sense strand starting at position 3519 of SEQ ID NO: 914881
gcugucuugguuggaaaga

SEQ ID NO: 1037701 - RNA, 19 nt, Artificial Sequence
  Description of Artificial Sequence: Synthetic oligonucleotide
  Antisense strand to SEQ ID NO: 1037700
ucuuuccaaccaagacagc

SEQ ID NO: 1037702 - RNA, 19 nt, Artificial Sequence
  Description of Artificial Sequence: Synthetic oligonucleotide
  Sense strand starting at position 3613 of SEQ ID NO: 914881
ugguuuagggcuuagagau

SEQ ID NO: 1037703 - RNA, 19 nt, Artificial Sequence
  Description of Artificial Sequence: Synthetic oligonucleotide
  Antisense strand to SEQ ID NO: 1037702
aucucuaagcccuaaacca

SEQ ID NO: 1037704 - RNA, 19 nt, Artificial Sequence
  Description of Artificial Sequence: Synthetic oligonucleotide
  Sense strand starting at position 3625 of SEQ ID NO: 914881
uagagaugcugucagucag

SEQ ID NO: 1037705 - RNA, 19 nt, Artificial Sequence
  Description of Artificial Sequence: Synthetic oligonucleotide
  Antisense strand to SEQ ID NO: 1037704
cugacugacagcaucucua

SEQ ID NO: 1037706 - RNA, 19 nt, Artificial Sequence
  Description of Artificial Sequence: Synthetic oligonucleotide
  Sense strand starting at position 3732 of SEQ ID NO: 914881
gggcuuugcugacagagga

SEQ ID NO: 1037707 - RNA, 19 nt, Artificial Sequence
  Description of Artificial Sequence: Synthetic oligonucleotide
  Antisense strand to SEQ ID NO: 1037706
uccucugucagcaaagccc

SEQ ID NO: 1037708 - RNA, 19 nt, Artificial Sequence
  Description of Artificial Sequence: Synthetic oligonucleotide
  Sense strand starting at position 3760 of SEQ ID NO: 914881
gauagaaacucugagaaag

SEQ ID NO: 1037709 - RNA, 19 nt, Artificial Sequence
  Description of Artificial Sequence: Synthetic oligonucleotide
  Antisense strand to SEQ ID NO: 1037708
cuuucucagaguuucuauc

SEQ ID NO: 1037710 - RNA, 19 nt, Artificial Sequence
  Description of Artificial Sequence: Synthetic oligonucleotide
  Sense strand starting at position 3962 of SEQ ID NO: 914881
ggaacacucugauaccaua

SEQ ID NO: 1037711 - RNA, 19 nt, Artificial Sequence
  Description of Artificial Sequence: Synthetic oligonucleotide
  Antisense strand to SEQ ID NO: 1037710
uaugguaucagaguguucc

SEQ ID NO: 1037712 - RNA, 19 nt, Artificial Sequence
  Description of Artificial Sequence: Synthetic oligonucleotide
  Sense strand starting at position 186 of SEQ ID NO: 914882
uuguguucuuucuaugcuu

SEQ ID NO: 1037713 - RNA, 19 nt, Artificial Sequence
  Description of Artificial Sequence: Synthetic oligonucleotide
  Antisense strand to SEQ ID NO: 1037712
aagcauagaaagaacacaa

SEQ ID NO: 1037714 - RNA, 19 nt, Artificial Sequence
  Description of Artificial Sequence: Synthetic oligonucleotide
  Sense strand starting at position 192 of SEQ ID NO: 914882
ucuuucuaugcuuaggaca

SEQ ID NO: 1037715 - RNA, 19 nt, Artificial Sequence
  Description of Artificial Sequence: Synthetic oligonucleotide
  Antisense strand to SEQ ID NO: 1037714
uguccuaagcauagaaaga

SEQ ID NO: 1037716 - RNA, 19 nt, Artificial Sequence
  Description of Artificial Sequence: Synthetic oligonucleotide
  Sense strand starting at position 194 of SEQ ID NO: 914882
uuucuaugcuuaggacaua

SEQ ID NO: 1037717 - RNA, 19 nt, Artificial Sequence
  Description of Artificial Sequence: Synthetic oligonucleotide
  Antisense strand to SEQ ID NO: 1037716
uauguccuaagcauagaaa

SEQ ID NO: 1037718 - RNA, 19 nt, Artificial Sequence
  Description of Artificial Sequence: Synthetic oligonucleotide
  Sense strand starting at position 195 of SEQ ID NO: 914882
uucuaugcuuaggacauau

SEQ ID NO: 1037719 - RNA, 19 nt, Artificial Sequence
  Description of Artificial Sequence: Synthetic oligonucleotide
  Antisense strand to SEQ ID NO: 1037718
auauguccuaagcauagaa

SEQ ID NO: 1037720 - RNA, 19 nt, Artificial Sequence
  Description of Artificial Sequence: Synthetic oligonucleotide
  Sense strand starting at position 221 of SEQ ID NO: 914882
auaaauugcuguguuucca

SEQ ID NO: 1037721 - RNA, 19 nt, Artificial Sequence
  Description of Artificial Sequence: Synthetic oligonucleotide
  Antisense strand to SEQ ID NO: 1037720
uggaaacacagcaauuuau

SEQ ID NO: 1037722 - RNA, 19 nt, Artificial Sequence
  Description of Artificial Sequence: Synthetic oligonucleotide
  Sense strand starting at position 225 of SEQ ID NO: 914882
auugcuguguuuccaaaua

SEQ ID NO: 1037723 - RNA, 19 nt, Artificial Sequence
  Description of Artificial Sequence: Synthetic oligonucleotide
  Antisense strand to SEQ ID NO: 1037722
uauuuggaaacacagcaau

SEQ ID NO: 1037724 - RNA, 19 nt, Artificial Sequence
  Description of Artificial Sequence: Synthetic oligonucleotide
  Sense strand starting at position 330 of SEQ ID NO: 914882
gcgaccucgacucaucaca

SEQ ID NO: 1037725 - RNA, 19 nt, Artificial Sequence
  Description of Artificial Sequence: Synthetic oligonucleotide
  Antisense strand to SEQ ID NO: 1037724
ugugaugagucgaggucgc

SEQ ID NO: 1037726 - RNA, 19 nt, Artificial Sequence
  Description of Artificial Sequence: Synthetic oligonucleotide
  Sense strand starting at position 588 of SEQ ID NO: 914882
gcaauauuggcuuggugcu

SEQ ID NO: 1037727 - RNA, 19 nt, Artificial Sequence
  Description of Artificial Sequence: Synthetic oligonucleotide
  Antisense strand to SEQ ID NO: 1037726
agcaccaagccaauauugc

SEQ ID NO: 1037728 - RNA, 19 nt, Artificial Sequence
  Description of Artificial Sequence: Synthetic oligonucleotide
  Sense strand starting at position 589 of SEQ ID NO: 914882
caauauuggcuuggugcua

SEQ ID NO: 1037729 - RNA, 19 nt, Artificial Sequence
  Description of Artificial Sequence: Synthetic oligonucleotide
  Antisense strand to SEQ ID NO: 1037728
uagcaccaagccaauauug

SEQ ID NO: 1037730 - RNA, 19 nt, Artificial Sequence
  Description of Artificial Sequence: Synthetic oligonucleotide
  Sense strand starting at position 600 of SEQ ID NO: 914882
uggugcuaggaguguuuau

SEQ ID NO: 1037731 - RNA, 19 nt, Artificial Sequence
  Description of Artificial Sequence: Synthetic oligonucleotide
  Antisense strand to SEQ ID NO: 1037730
auaaacacuccuagcacca

SEQ ID NO: 1037732 - RNA, 19 nt, Artificial Sequence
  Description of Artificial Sequence: Synthetic oligonucleotide
  Sense strand starting at position 656 of SEQ ID NO: 914882
cagaguaaguugguuacaa

SEQ ID NO: 1037733 - RNA, 19 nt, Artificial Sequence
  Description of Artificial Sequence: Synthetic oligonucleotide
  Antisense strand to SEQ ID NO: 1037732
uuguaaccaacuuacucug

SEQ ID NO: 1037734 - RNA, 19 nt, Artificial Sequence
  Description of Artificial Sequence: Synthetic oligonucleotide
  Sense strand starting at position 657 of SEQ ID NO: 914882
agaguaaguugguuacaaa

SEQ ID NO: 1037735 - RNA, 19 nt, Artificial Sequence
  Description of Artificial Sequence: Synthetic oligonucleotide
  Antisense strand to SEQ ID NO: 1037734
uuuguaaccaacuuacucu

SEQ ID NO: 1037736 - RNA, 19 nt, Artificial Sequence
  Description of Artificial Sequence: Synthetic oligonucleotide
  Sense strand starting at position 788 of SEQ ID NO: 914882
uccugucuccaucagauca

SEQ ID NO: 1037737 - RNA, 19 nt, Artificial Sequence
  Description of Artificial Sequence: Synthetic oligonucleotide
  Antisense strand to SEQ ID NO: 1037736
ugaucugauggagacagga

SEQ ID NO: 1037738 - RNA, 19 nt, Artificial Sequence
  Description of Artificial Sequence: Synthetic oligonucleotide
  Sense strand starting at position 1023 of SEQ ID NO: 914882
ucaguuugucggcauggua

SEQ ID NO: 1037739 - RNA, 19 nt, Artificial Sequence
  Description of Artificial Sequence: Synthetic oligonucleotide
  Antisense strand to SEQ ID NO: 1037738
uaccaugccgacaaacuga

SEQ ID NO: 1037740 - RNA, 19 nt, Artificial Sequence
  Description of Artificial Sequence: Synthetic oligonucleotide
  Sense strand starting at position 1026 of SEQ ID NO: 914882
guuugucggcaugguauuu

SEQ ID NO: 1037741 - RNA, 19 nt, Artificial Sequence
  Description of Artificial Sequence: Synthetic oligonucleotide
  Antisense strand to SEQ ID NO: 1037740
aaauaccaugccgacaaac

SEQ ID NO: 1037742 - RNA, 19 nt, Artificial Sequence
  Description of Artificial Sequence: Synthetic oligonucleotide
  Sense strand starting at position 2089 of SEQ ID NO: 914882
gcuuccuugugacuguuua

SEQ ID NO: 1037743 - RNA, 19 nt, Artificial Sequence
  Description of Artificial Sequence: Synthetic oligonucleotide
  Antisense strand to SEQ ID NO: 1037742
uaaacagucacaaggaagc

SEQ ID NO: 1037744 - RNA, 19 nt, Artificial Sequence
  Description of Artificial Sequence: Synthetic oligonucleotide
  Sense strand starting at position 2096 of SEQ ID NO: 914882
ugugacuguuuacgcuauu

SEQ ID NO: 1037745 - RNA, 19 nt, Artificial Sequence
  Description of Artificial Sequence: Synthetic oligonucleotide
  Antisense strand to SEQ ID NO: 1037744
aauagcguaaacagucaca

SEQ ID NO: 1037746 - RNA, 19 nt, Artificial Sequence
  Description of Artificial Sequence: Synthetic oligonucleotide
  Sense strand starting at position 2097 of SEQ ID NO: 914882
gugacuguuuacgcuauuu

SEQ ID NO: 1037747 - RNA, 19 nt, Artificial Sequence
  Description of Artificial Sequence: Synthetic oligonucleotide
  Antisense strand to SEQ ID NO: 1037746
aaauagcguaaacagucac

SEQ ID NO: 1037748 - RNA, 19 nt, Artificial Sequence
  Description of Artificial Sequence: Synthetic oligonucleotide
  Sense strand starting at position 2346 of SEQ ID NO: 914882
ucaucuuuccuguguugac

SEQ ID NO: 1037749 - RNA, 19 nt, Artificial Sequence
  Description of Artificial Sequence: Synthetic oligonucleotide
  Antisense strand to SEQ ID NO: 1037748
gucaacacaggaaagauga

SEQ ID NO: 1037750 - RNA, 19 nt, Artificial Sequence
  Description of Artificial Sequence: Synthetic oligonucleotide
  Sense strand starting at position 2853 of SEQ ID NO: 914882
auguccuuacauugcagaa

SEQ ID NO: 1037751 - RNA, 19 nt, Artificial Sequence
  Description of Artificial Sequence: Synthetic oligonucleotide
  Antisense strand to SEQ ID NO: 1037750
uucugcaauguaaggacau

SEQ ID NO: 1037752 - RNA, 19 nt, Artificial Sequence
  Description of Artificial Sequence: Synthetic oligonucleotide
  Sense strand starting at position 2855 of SEQ ID NO: 914882
guccuuacauugcagaaua

SEQ ID NO: 1037753 - RNA, 19 nt, Artificial Sequence
  Description of Artificial Sequence: Synthetic oligonucleotide
  Antisense strand to SEQ ID NO: 1037752
uauucugcaauguaaggac

SEQ ID NO: 1037754 - RNA, 19 nt, Artificial Sequence
  Description of Artificial Sequence: Synthetic oligonucleotide
  Sense strand starting at position 3414 of SEQ ID NO: 914882
ucuacacugcccuaguaua

SEQ ID NO: 1037755 - RNA, 19 nt, Artificial Sequence
  Description of Artificial Sequence: Synthetic oligonucleotide
  Antisense strand to SEQ ID NO: 1037754
uauacuagggcaguguaga

SEQ ID NO: 1037756 - RNA, 19 nt, Artificial Sequence
  Description of Artificial Sequence: Synthetic oligonucleotide
  Sense strand starting at position 3478 of SEQ ID NO: 914882
ugcccaggcuuucucauaa

SEQ ID NO: 1037757 - RNA, 19 nt, Artificial Sequence
  Description of Artificial Sequence: Synthetic oligonucleotide
  Antisense strand to SEQ ID NO: 1037756
uuaugagaaagccugggca

SEQ ID NO: 1037758 - RNA, 19 nt, Artificial Sequence
  Description of Artificial Sequence: Synthetic oligonucleotide
  Sense strand starting at position 3539 of SEQ ID NO: 914882
cuuguauucuacgcaccua

SEQ ID NO: 1037759 - RNA, 19 nt, Artificial Sequence
  Description of Artificial Sequence: Synthetic oligonucleotide
  Antisense strand to SEQ ID NO: 1037758
uaggugcguagaauacaag

SEQ ID NO: 1037760 - RNA, 19 nt, Artificial Sequence
  Description of Artificial Sequence: Synthetic oligonucleotide
  Sense strand starting at position 3575 of SEQ ID NO: 914882
gggagcuaccaaggcuuau

SEQ ID NO: 1037761 - RNA, 19 nt, Artificial Sequence
  Description of Artificial Sequence: Synthetic oligonucleotide
  Antisense strand to SEQ ID NO: 1037760
auaagccuugguagcuccc

SEQ ID NO: 1037762 - RNA, 19 nt, Artificial Sequence
  Description of Artificial Sequence: Synthetic oligonucleotide
  Sense strand starting at position 3744 of SEQ ID NO: 914882
accucuaggucagugauga

SEQ ID NO: 1037763 - RNA, 19 nt, Artificial Sequence
  Description of Artificial Sequence: Synthetic oligonucleotide
  Antisense strand to SEQ ID NO: 1037762
ucaucacugaccuagaggu

SEQ ID NO: 1037764 - RNA, 19 nt, Artificial Sequence
  Description of Artificial Sequence: Synthetic oligonucleotide
  Sense strand starting at position 3745 of SEQ ID NO: 914882
ccucuaggucagugaugag

SEQ ID NO: 1037765 - RNA, 19 nt, Artificial Sequence
  Description of Artificial Sequence: Synthetic oligonucleotide
  Antisense strand to SEQ ID NO: 1037764
cucaucacugaccuagagg

SEQ ID NO: 1037766 - RNA, 19 nt, Artificial Sequence
  Description of Artificial Sequence: Synthetic oligonucleotide
  Sense strand starting at position 3805 of SEQ ID NO: 914882
uuccaauuguguuggcuau

SEQ ID NO: 1037767 - RNA, 19 nt, Artificial Sequence
  Description of Artificial Sequence: Synthetic oligonucleotide
  Antisense strand to SEQ ID NO: 1037766
auagccaacacaauuggaa

SEQ ID NO: 1037768 - RNA, 19 nt, Artificial Sequence
  Description of Artificial Sequence: Synthetic oligonucleotide
  Sense strand starting at position 3806 of SEQ ID NO: 914882
uccaauuguguuggcuauu

SEQ ID NO: 1037769 - RNA, 19 nt, Artificial Sequence
  Description of Artificial Sequence: Synthetic oligonucleotide
  Antisense strand to SEQ ID NO: 1037768
aauagccaacacaauugga

SEQ ID NO: 1037770 - RNA, 19 nt, Artificial Sequence
  Description of Artificial Sequence: Synthetic oligonucleotide
  Sense strand starting at position 3807 of SEQ ID NO: 914882
ccaauuguguuggcuauua

SEQ ID NO: 1037771 - RNA, 19 nt, Artificial Sequence
  Description of Artificial Sequence: Synthetic oligonucleotide
  Antisense strand to SEQ ID NO: 1037770
uaauagccaacacaauugg

SEQ ID NO: 1037772 - RNA, 19 nt, Artificial Sequence
  Description of Artificial Sequence: Synthetic oligonucleotide
  Sense strand starting at position 3819 of SEQ ID NO: 914882
gcuauuagcacuuggguuu

SEQ ID NO: 1037773 - RNA, 19 nt, Artificial Sequence
  Description of Artificial Sequence: Synthetic oligonucleotide
  Antisense strand to SEQ ID NO: 1037772
aaacccaagugcuaauagc

SEQ ID NO: 1037774 - RNA, 19 nt, Artificial Sequence
  Description of Artificial Sequence: Synthetic oligonucleotide
  Sense strand starting at position 3885 of SEQ ID NO: 914882
ucuauagccugcuuggauu

SEQ ID NO: 1037775 - RNA, 19 nt, Artificial Sequence
  Description of Artificial Sequence: Synthetic oligonucleotide
  Antisense strand to SEQ ID NO: 1037774
aauccaagcaggcuauaga

SEQ ID NO: 1037776 - RNA, 19 nt, Artificial Sequence
  Description of Artificial Sequence: Synthetic oligonucleotide
  Sense strand starting at position 3897 of SEQ ID NO: 914882
uuggauuccucuccugaua

SEQ ID NO: 1037777 - RNA, 19 nt, Artificial Sequence
  Description of Artificial Sequence: Synthetic oligonucleotide
  Antisense strand to SEQ ID NO: 1037776
uaucaggagaggaauccaa

SEQ ID NO: 1037778 - RNA, 19 nt, Artificial Sequence
  Description of Artificial Sequence: Synthetic oligonucleotide
  Sense strand starting at position 70 of SEQ ID NO: 914883
gagaaauggugucuguugu

SEQ ID NO: 1037779 - RNA, 19 nt, Artificial Sequence
  Description of Artificial Sequence: Synthetic oligonucleotide
  Antisense strand to SEQ ID NO: 1037778
acaacagacaccauuucuc

SEQ ID NO: 1037780 - RNA, 19 nt, Artificial Sequence
  Description of Artificial Sequence: Synthetic oligonucleotide
  Sense strand starting at position 71 of SEQ ID NO: 914883
agaaauggugucuguuguu

SEQ ID NO: 1037781 - RNA, 19 nt, Artificial Sequence
  Description of Artificial Sequence: Synthetic oligonucleotide
  Antisense strand to SEQ ID NO: 1037780
aacaacagacaccauuucu

SEQ ID NO: 1037782 - RNA, 19 nt, Artificial Sequence
  Description of Artificial Sequence: Synthetic oligonucleotide
  Sense strand starting at position 99 of SEQ ID NO: 914883
aggcuuacucuguggguuu

SEQ ID NO: 1037783 - RNA, 19 nt, Artificial Sequence
  Description of Artificial Sequence: Synthetic oligonucleotide
  Antisense strand to SEQ ID NO: 1037782
aaacccacagaguaagccu

SEQ ID NO: 1037784 - RNA, 19 nt, Artificial Sequence
  Description of Artificial Sequence: Synthetic oligonucleotide
  Sense strand starting at position 208 of SEQ ID NO: 914883
gcaggaaggaggugucuua

SEQ ID NO: 1037785 - RNA, 19 nt, Artificial Sequence
  Description of Artificial Sequence: Synthetic oligonucleotide
  Antisense strand to SEQ ID NO: 1037784
uaagacaccuccuuccugc

SEQ ID NO: 1037786 - RNA, 19 nt, Artificial Sequence
  Description of Artificial Sequence: Synthetic oligonucleotide
  Sense strand starting at position 211 of SEQ ID NO: 914883
ggaaggaggugucuuagga

SEQ ID NO: 1037787 - RNA, 19 nt, Artificial Sequence
  Description of Artificial Sequence: Synthetic oligonucleotide
  Antisense strand to SEQ ID NO: 1037786
uccuaagacaccuccuucc

SEQ ID NO: 1037788 - RNA, 19 nt, Artificial Sequence
  Description of Artificial Sequence: Synthetic oligonucleotide
  Sense strand starting at position 227 of SEQ ID NO: 914883
ggaugucuuccaggagaug

SEQ ID NO: 1037789 - RNA, 19 nt, Artificial Sequence
  Description of Artificial Sequence: Synthetic oligonucleotide
  Antisense strand to SEQ ID NO: 1037788
caucuccuggaagacaucc

SEQ ID NO: 1037790 - RNA, 19 nt, Artificial Sequence
  Description of Artificial Sequence: Synthetic oligonucleotide
  Sense strand starting at position 238 of SEQ ID NO: 914883
aggagaugcugugggauuu

SEQ ID NO: 1037791 - RNA, 19 nt, Artificial Sequence
  Description of Artificial Sequence: Synthetic oligonucleotide
  Antisense strand to SEQ ID NO: 1037790
aaaucccacagcaucuccu

SEQ ID NO: 1037792 - RNA, 19 nt, Artificial Sequence
  Description of Artificial Sequence: Synthetic oligonucleotide
  Sense strand starting at position 248 of SEQ ID NO: 914883
gugggauuuggcgacuugu

SEQ ID NO: 1037793 - RNA, 19 nt, Artificial Sequence
  Description of Artificial Sequence: Synthetic oligonucleotide
  Antisense strand to SEQ ID NO: 1037792
acaagucgccaaaucccac

SEQ ID NO: 1037794 - RNA, 19 nt, Artificial Sequence
  Description of Artificial Sequence: Synthetic oligonucleotide
  Sense strand starting at position 292 of SEQ ID NO: 914883
ccaauucuguauccuggaa

SEQ ID NO: 1037795 - RNA, 19 nt, Artificial Sequence
  Description of Artificial Sequence: Synthetic oligonucleotide
  Antisense strand to SEQ ID NO: 1037794
uuccaggauacagaauugg

SEQ ID NO: 1037796 - RNA, 19 nt, Artificial Sequence
  Description of Artificial Sequence: Synthetic oligonucleotide
  Sense strand starting at position 304 of SEQ ID NO: 914883
ccuggaagaugggaaagau

SEQ ID NO: 1037797 - RNA, 19 nt, Artificial Sequence
  Description of Artificial Sequence: Synthetic oligonucleotide
  Antisense strand to SEQ ID NO: 1037796
aucuuucccaucuuccagg

SEQ ID NO: 1037798 - RNA, 19 nt, Artificial Sequence
  Description of Artificial Sequence: Synthetic oligonucleotide
  Sense strand starting at position 381 of SEQ ID NO: 914883
uggaguccucacugcagua

SEQ ID NO: 1037799 - RNA, 19 nt, Artificial Sequence
  Description of Artificial Sequence: Synthetic oligonucleotide
  Antisense strand to SEQ ID NO: 1037798
uacugcagugaggacucca

SEQ ID NO: 1037800 - RNA, 19 nt, Artificial Sequence
  Description of Artificial Sequence: Synthetic oligonucleotide
  Sense strand starting at position 409 of SEQ ID NO: 914883
ggcaccuuauuuggagaua

SEQ ID NO: 1037801 - RNA, 19 nt, Artificial Sequence
  Description of Artificial Sequence: Synthetic oligonucleotide
  Antisense strand to SEQ ID NO: 1037800
uaucuccaaauaaggugcc

SEQ ID NO: 1037802 - RNA, 19 nt, Artificial Sequence
  Description of Artificial Sequence: Synthetic oligonucleotide
  Sense strand starting at position 410 of SEQ ID NO: 914883
gcaccuuauuuggagauag

SEQ ID NO: 1037803 - RNA, 19 nt, Artificial Sequence
  Description of Artificial Sequence: Synthetic oligonucleotide
  Antisense strand to SEQ ID NO: 1037802
cuaucuccaaauaaggugc

SEQ ID NO: 1037804 - RNA, 19 nt, Artificial Sequence
  Description of Artificial Sequence: Synthetic oligonucleotide
  Sense strand starting at position 479 of SEQ ID NO: 914883
gcccuaaucuaaucugugu

SEQ ID NO: 1037805 - RNA, 19 nt, Artificial Sequence
  Description of Artificial Sequence: Synthetic oligonucleotide
  Antisense strand to SEQ ID NO: 1037804
acacagauuagauuagggc

SEQ ID NO: 1037806 - RNA, 19 nt, Artificial Sequence
  Description of Artificial Sequence: Synthetic oligonucleotide
  Sense strand starting at position 486 of SEQ ID NO: 914883
ucuaaucuguguccuuaua

SEQ ID NO: 1037807 - RNA, 19 nt, Artificial Sequence
  Description of Artificial Sequence: Synthetic oligonucleotide
  Antisense strand to SEQ ID NO: 1037806
uauaaggacacagauuaga

SEQ ID NO: 1037808 - RNA, 19 nt, Artificial Sequence
  Description of Artificial Sequence: Synthetic oligonucleotide
  Sense strand starting at position 623 of SEQ ID NO: 914883
ggcagauucuggccuccaa

SEQ ID NO: 1037809 - RNA, 19 nt, Artificial Sequence
  Description of Artificial Sequence: Synthetic oligonucleotide
  Antisense strand to SEQ ID NO: 1037808
uuggaggccagaaucugcc

SEQ ID NO: 1037810 - RNA, 19 nt, Artificial Sequence
  Description of Artificial Sequence: Synthetic oligonucleotide
  Sense strand starting at position 2223 of SEQ ID NO: 914883
auagguguuucccuuuguu

SEQ ID NO: 1037811 - RNA, 19 nt, Artificial Sequence
  Description of Artificial Sequence: Synthetic oligonucleotide
  Antisense strand to SEQ ID NO: 1037810
aacaaagggaaacaccuau

SEQ ID NO: 1037812 - RNA, 19 nt, Artificial Sequence
  Description of Artificial Sequence: Synthetic oligonucleotide
  Sense strand starting at position 2226 of SEQ ID NO: 914883
gguguuucccuuuguuaga

SEQ ID NO: 1037813 - RNA, 19 nt, Artificial Sequence
  Description of Artificial Sequence: Synthetic oligonucleotide
  Antisense strand to SEQ ID NO: 1037812
ucuaacaaagggaaacacc

SEQ ID NO: 1037814 - RNA, 19 nt, Artificial Sequence
  Description of Artificial Sequence: Synthetic oligonucleotide
  Sense strand starting at position 2227 of SEQ ID NO: 914883
guguuucccuuuguuagaa

SEQ ID NO: 1037815 - RNA, 19 nt, Artificial Sequence
  Description of Artificial Sequence: Synthetic oligonucleotide
  Antisense strand to SEQ ID NO: 1037814
uucuaacaaagggaaacac

SEQ ID NO: 1037816 - RNA, 19 nt, Artificial Sequence
  Description of Artificial Sequence: Synthetic oligonucleotide
  Sense strand starting at position 2370 of SEQ ID NO: 914883
uggcauugguguuuauauc

SEQ ID NO: 1037817 - RNA, 19 nt, Artificial Sequence
  Description of Artificial Sequence: Synthetic oligonucleotide
  Antisense strand to SEQ ID NO: 1037816
gauauaaacaccaaugcca

SEQ ID NO: 1037818 - RNA, 19 nt, Artificial Sequence
  Description of Artificial Sequence: Synthetic oligonucleotide
  Sense strand starting at position 2371 of SEQ ID NO: 914883
ggcauugguguuuauauca

SEQ ID NO: 1037819 - RNA, 19 nt, Artificial Sequence
  Description of Artificial Sequence: Synthetic oligonucleotide
  Antisense strand to SEQ ID NO: 1037818
ugauauaaacaccaaugcc

SEQ ID NO: 1037820 - RNA, 19 nt, Artificial Sequence
  Description of Artificial Sequence: Synthetic oligonucleotide
  Sense strand starting at position 2379 of SEQ ID NO: 914883
uguuuauaucaacgguggu

SEQ ID NO: 1037821 - RNA, 19 nt, Artificial Sequence
  Description of Artificial Sequence: Synthetic oligonucleotide
  Antisense strand to SEQ ID NO: 1037820
accaccguugauauaaaca

SEQ ID NO: 1037822 - RNA, 19 nt, Artificial Sequence
  Description of Artificial Sequence: Synthetic oligonucleotide
  Sense strand starting at position 2382 of SEQ ID NO: 914883
uuauaucaacgguggucau

SEQ ID NO: 1037823 - RNA, 19 nt, Artificial Sequence
  Description of Artificial Sequence: Synthetic oligonucleotide
  Antisense strand to SEQ ID NO: 1037822
augaccaccguugauauaa

SEQ ID NO: 1037824 - RNA, 19 nt, Artificial Sequence
  Description of Artificial Sequence: Synthetic oligonucleotide
  Sense strand starting at position 2875 of SEQ ID NO: 914883
acuaaaucucacuguguug

SEQ ID NO: 1037825 - RNA, 19 nt, Artificial Sequence
  Description of Artificial Sequence: Synthetic oligonucleotide
  Antisense strand to SEQ ID NO: 1037824
caacacagugagauuuagu

SEQ ID NO: 1037826 - RNA, 19 nt, Artificial Sequence
  Description of Artificial Sequence: Synthetic oligonucleotide
  Sense strand starting at position 3291 of SEQ ID NO: 914883
uguacaauuccaugaguuc

SEQ ID NO: 1037827 - RNA, 19 nt, Artificial Sequence
  Description of Artificial Sequence: Synthetic oligonucleotide
  Antisense strand to SEQ ID NO: 1037826
gaacucauggaauuguaca

SEQ ID NO: 1037828 - RNA, 19 nt, Artificial Sequence
  Description of Artificial Sequence: Synthetic oligonucleotide
  Sense strand starting at position 3415 of SEQ ID NO: 914883
cagcuuugcugacuaguuu

SEQ ID NO: 1037829 - RNA, 19 nt, Artificial Sequence
  Description of Artificial Sequence: Synthetic oligonucleotide
  Antisense strand to SEQ ID NO: 1037828
aaacuagucagcaaagcug

SEQ ID NO: 1037830 - RNA, 19 nt, Artificial Sequence
  Description of Artificial Sequence: Synthetic oligonucleotide
  Sense strand starting at position 3442 of SEQ ID NO: 914883
auugaaugucgcggaaaug

SEQ ID NO: 1037831 - RNA, 19 nt, Artificial Sequence
  Description of Artificial Sequence: Synthetic oligonucleotide
  Antisense strand to SEQ ID NO: 1037830
cauuuccgcgacauucaau

SEQ ID NO: 1037832 - RNA, 19 nt, Artificial Sequence
  Description of Artificial Sequence: Synthetic oligonucleotide
  Sense strand starting at position 3443 of SEQ ID NO: 914883
uugaaugucgcggaaauga

SEQ ID NO: 1037833 - RNA, 19 nt, Artificial Sequence
  Description of Artificial Sequence: Synthetic oligonucleotide
  Antisense strand to SEQ ID NO: 1037832
ucauuuccgcgacauucaa

SEQ ID NO: 1037834 - RNA, 19 nt, Artificial Sequence
  Description of Artificial Sequence: Synthetic oligonucleotide
  Sense strand starting at position 3483 of SEQ ID NO: 914883
guuucuuucccucacgaug

SEQ ID NO: 1037835 - RNA, 19 nt, Artificial Sequence
  Description of Artificial Sequence: Synthetic oligonucleotide
  Antisense strand to SEQ ID NO: 1037834
caucgugagggaaagaaac

SEQ ID NO: 1037836 - RNA, 19 nt, Artificial Sequence
  Description of Artificial Sequence: Synthetic oligonucleotide
  Sense strand starting at position 3488 of SEQ ID NO: 914883
uuucccucacgauguuauu

SEQ ID NO: 1037837 - RNA, 19 nt, Artificial Sequence
  Description of Artificial Sequence: Synthetic oligonucleotide
  Antisense strand to SEQ ID NO: 1037836
aauaacaucgugagggaaa

SEQ ID NO: 1037838 - RNA, 19 nt, Artificial Sequence
  Description of Artificial Sequence: Synthetic oligonucleotide
  Sense strand starting at position 3718 of SEQ ID NO: 914883
uuuaaucaucgcguagugu

SEQ ID NO: 1037839 - RNA, 19 nt, Artificial Sequence
  Description of Artificial Sequence: Synthetic oligonucleotide
  Antisense strand to SEQ ID NO: 1037838
acacuacgcgaugauuaaa

SEQ ID NO: 1037840 - RNA, 19 nt, Artificial Sequence
  Description of Artificial Sequence: Synthetic oligonucleotide
  Sense strand starting at position 3726 of SEQ ID NO: 914883
ucgcguaguguuucgugua

SEQ ID NO: 1037841 - RNA, 19 nt, Artificial Sequence
  Description of Artificial Sequence: Synthetic oligonucleotide
  Antisense strand to SEQ ID NO: 1037840
uacacgaaacacuacgcga

SEQ ID NO: 1037842 - RNA, 19 nt, Artificial Sequence
  Description of Artificial Sequence: Synthetic oligonucleotide
  Sense strand starting at position 3788 of SEQ ID NO: 914883
auuugaauuguucgcaguu

SEQ ID NO: 1037843 - RNA, 19 nt, Artificial Sequence
  Description of Artificial Sequence: Synthetic oligonucleotide
  Antisense strand to SEQ ID NO: 1037842
aacugcgaacaauucaaau

SEQ ID NO: 1037844 - RNA, 19 nt, Artificial Sequence
  Description of Artificial Sequence: Synthetic oligonucleotide
  Sense strand starting at position 3891 of SEQ ID NO: 914883
gaggacuggccuugcuaga

SEQ ID NO: 1037845 - RNA, 19 nt, Artificial Sequence
  Description of Artificial Sequence: Synthetic oligonucleotide
  Antisense strand to SEQ ID NO: 1037844
ucuagcaaggccaguccuc

SEQ ID NO: 1037846 - RNA, 19 nt, Artificial Sequence
  Description of Artificial Sequence: Synthetic oligonucleotide
  Sense strand starting at position 3901 of SEQ ID NO: 914883
cuugcuagaccauagagua

SEQ ID NO: 1037847 - RNA, 19 nt, Artificial Sequence
  Description of Artificial Sequence: Synthetic oligonucleotide
  Antisense strand to SEQ ID NO: 1037846
uacucuauggucuagcaag

SEQ ID NO: 1037848 - RNA, 19 nt, Artificial Sequence
  Description of Artificial Sequence: Synthetic oligonucleotide
  Sense strand starting at position 3911 of SEQ ID NO: 914883
cauagaguaguguaugcuu

SEQ ID NO: 1037849 - RNA, 19 nt, Artificial Sequence
  Description of Artificial Sequence: Synthetic oligonucleotide
  Antisense strand to SEQ ID NO: 1037848
aagcauacacuacucuaug

SEQ ID NO: 1037850 - RNA, 19 nt, Artificial Sequence
  Description of Artificial Sequence: Synthetic oligonucleotide
  Sense strand starting at position 3913 of SEQ ID NO: 914883
uagaguaguguaugcuuaa

SEQ ID NO: 1037851 - RNA, 19 nt, Artificial Sequence
  Description of Artificial Sequence: Synthetic oligonucleotide
  Antisense strand to SEQ ID NO: 1037850
uuaagcauacacuacucua

SEQ ID NO: 1037852 - RNA, 19 nt, Artificial Sequence
  Description of Artificial Sequence: Synthetic oligonucleotide
  Sense strand starting at position 3914 of SEQ ID NO: 914883
agaguaguguaugcuuaac

SEQ ID NO: 1037853 - RNA, 19 nt, Artificial Sequence
  Description of Artificial Sequence: Synthetic oligonucleotide
  Antisense strand to SEQ ID NO: 1037852
guuaagcauacacuacucu

SEQ ID NO: 1037854 - RNA, 19 nt, Artificial Sequence
  Description of Artificial Sequence: Synthetic oligonucleotide
  Sense strand starting at position 3916 of SEQ ID NO: 914883
aguaguguaugcuuaacuu

SEQ ID NO: 1037855 - RNA, 19 nt, Artificial Sequence
  Description of Artificial Sequence: Synthetic oligonucleotide
  Antisense strand to SEQ ID NO: 1037854
aaguuaagcauacacuacu

SEQ ID NO: 1037856 - RNA, 19 nt, Artificial Sequence
  Description of Artificial Sequence: Synthetic oligonucleotide
  Sense strand starting at position 3920 of SEQ ID NO: 914883
guguaugcuuaacuuucua

SEQ ID NO: 1037857 - RNA, 19 nt, Artificial Sequence
  Description of Artificial Sequence: Synthetic oligonucleotide
  Antisense strand to SEQ ID NO: 1037856
uagaaaguuaagcauacac

SEQ ID NO: 1037858 - RNA, 19 nt, Artificial Sequence
  Description of Artificial Sequence: Synthetic oligonucleotide
  Sense strand starting at position 33 of SEQ ID NO: 914884
uguuauucuggcuauagcu

SEQ ID NO: 1037859 - RNA, 19 nt, Artificial Sequence
  Description of Artificial Sequence: Synthetic oligonucleotide
  Antisense strand to SEQ ID NO: 1037858
agcuauagccagaauaaca

SEQ ID NO: 1037860 - RNA, 19 nt, Artificial Sequence
  Description of Artificial Sequence: Synthetic oligonucleotide
  Sense strand starting at position 56 of SEQ ID NO: 914884
ugaaauguugcauagaagu

SEQ ID NO: 1037861 - RNA, 19 nt, Artificial Sequence
  Description of Artificial Sequence: Synthetic oligonucleotide
  Antisense strand to SEQ ID NO: 1037860
acuucuaugcaacauuuca

SEQ ID NO: 1037862 - RNA, 19 nt, Artificial Sequence
  Description of Artificial Sequence: Synthetic oligonucleotide
  Sense strand starting at position 93 of SEQ ID NO: 914884
uuuccuguuccugauccua

SEQ ID NO: 1037863 - RNA, 19 nt, Artificial Sequence
  Description of Artificial Sequence: Synthetic oligonucleotide
  Antisense strand to SEQ ID NO: 1037862
uaggaucaggaacaggaaa

SEQ ID NO: 1037864 - RNA, 19 nt, Artificial Sequence
  Description of Artificial Sequence: Synthetic oligonucleotide
  Sense strand starting at position 146 of SEQ ID NO: 914884
guguucacuguggguagau

SEQ ID NO: 1037865 - RNA, 19 nt, Artificial Sequence
  Description of Artificial Sequence: Synthetic oligonucleotide
  Antisense strand to SEQ ID NO: 1037864
aucuacccacagugaacac

SEQ ID NO: 1037866 - RNA, 19 nt, Artificial Sequence
  Description of Artificial Sequence: Synthetic oligonucleotide
  Sense strand starting at position 155 of SEQ ID NO: 914884
guggguagauggccuuuau

SEQ ID NO: 1037867 - RNA, 19 nt, Artificial Sequence
  Description of Artificial Sequence: Synthetic oligonucleotide
  Antisense strand to SEQ ID NO: 1037866
auaaaggccaucuacccac

SEQ ID NO: 1037868 - RNA, 19 nt, Artificial Sequence
  Description of Artificial Sequence: Synthetic oligonucleotide
  Sense strand starting at position 251 of SEQ ID NO: 914884
ucacucugagcccagagau

SEQ ID NO: 1037869 - RNA, 19 nt, Artificial Sequence
  Description of Artificial Sequence: Synthetic oligonucleotide
  Antisense strand to SEQ ID NO: 1037868
aucucugggcucagaguga

SEQ ID NO: 1037870 - RNA, 19 nt, Artificial Sequence
  Description of Artificial Sequence: Synthetic oligonucleotide
  Sense strand starting at position 329 of SEQ ID NO: 914884
uuuccaguguuguccuaca

SEQ ID NO: 1037871 - RNA, 19 nt, Artificial Sequence
  Description of Artificial Sequence: Synthetic oligonucleotide
  Antisense strand to SEQ ID NO: 1037870
uguaggacaacacuggaaa

SEQ ID NO: 1037872 - RNA, 19 nt, Artificial Sequence
  Description of Artificial Sequence: Synthetic oligonucleotide
  Sense strand starting at position 334 of SEQ ID NO: 914884
aguguuguccuacagagca

SEQ ID NO: 1037873 - RNA, 19 nt, Artificial Sequence
  Description of Artificial Sequence: Synthetic oligonucleotide
  Antisense strand to SEQ ID NO: 1037872
ugcucuguaggacaacacu

SEQ ID NO: 1037874 - RNA, 19 nt, Artificial Sequence
  Description of Artificial Sequence: Synthetic oligonucleotide
  Sense strand starting at position 359 of SEQ ID NO: 914884
ggacacagcucauucuagu

SEQ ID NO: 1037875 - RNA, 19 nt, Artificial Sequence
  Description of Artificial Sequence: Synthetic oligonucleotide
  Antisense strand to SEQ ID NO: 1037874
acuagaaugagcugugucc

SEQ ID NO: 1037876 - RNA, 19 nt, Artificial Sequence
  Description of Artificial Sequence: Synthetic oligonucleotide
  Sense strand starting at position 564 of SEQ ID NO: 914884
ugggacucccuguguacua

SEQ ID NO: 1037877 - RNA, 19 nt, Artificial Sequence
  Description of Artificial Sequence: Synthetic oligonucleotide
  Antisense strand to SEQ ID NO: 1037876
uaguacacagggaguccca

SEQ ID NO: 1037878 - RNA, 19 nt, Artificial Sequence
  Description of Artificial Sequence: Synthetic oligonucleotide
  Sense strand starting at position 565 of SEQ ID NO: 914884
gggacucccuguguacuaa

SEQ ID NO: 1037879 - RNA, 19 nt, Artificial Sequence
  Description of Artificial Sequence: Synthetic oligonucleotide
  Antisense strand to SEQ ID NO: 1037878
uuaguacacagggaguccc

SEQ ID NO: 1037880 - RNA, 19 nt, Artificial Sequence
  Description of Artificial Sequence: Synthetic oligonucleotide
  Sense strand starting at position 566 of SEQ ID NO: 914884
ggacucccuguguacuaau

SEQ ID NO: 1037881 - RNA, 19 nt, Artificial Sequence
  Description of Artificial Sequence: Synthetic oligonucleotide
  Antisense strand to SEQ ID NO: 1037880
auuaguacacagggagucc

SEQ ID NO: 1037882 - RNA, 19 nt, Artificial Sequence
  Description of Artificial Sequence: Synthetic oligonucleotide
  Sense strand starting at position 760 of SEQ ID NO: 914884
ccaguuugccaaugagaca

SEQ ID NO: 1037883 - RNA, 19 nt, Artificial Sequence
  Description of Artificial Sequence: Synthetic oligonucleotide
  Antisense strand to SEQ ID NO: 1037882
ugucucauuggcaaacugg

SEQ ID NO: 1037884 - RNA, 19 nt, Artificial Sequence
  Description of Artificial Sequence: Synthetic oligonucleotide
  Sense strand starting at position 2182 of SEQ ID NO: 914884
gccugagaauuaccugaga

SEQ ID NO: 1037885 - RNA, 19 nt, Artificial Sequence
  Description of Artificial Sequence: Synthetic oligonucleotide
  Antisense strand to SEQ ID NO: 1037884
ucucagguaauucucaggc

SEQ ID NO: 1037886 - RNA, 19 nt, Artificial Sequence
  Description of Artificial Sequence: Synthetic oligonucleotide
  Sense strand starting at position 2187 of SEQ ID NO: 914884
agaauuaccugagaucauu

SEQ ID NO: 1037887 - RNA, 19 nt, Artificial Sequence
  Description of Artificial Sequence: Synthetic oligonucleotide
  Antisense strand to SEQ ID NO: 1037886
aaugaucucagguaauucu

SEQ ID NO: 1037888 - RNA, 19 nt, Artificial Sequence
  Description of Artificial Sequence: Synthetic oligonucleotide
  Sense strand starting at position 2272 of SEQ ID NO: 914884
gcaggacugggucaauguu

SEQ ID NO: 1037889 - RNA, 19 nt, Artificial Sequence
  Description of Artificial Sequence: Synthetic oligonucleotide
  Antisense strand to SEQ ID NO: 1037888
aacauugacccaguccugc

SEQ ID NO: 1037890 - RNA, 19 nt, Artificial Sequence
  Description of Artificial Sequence: Synthetic oligonucleotide
  Sense strand starting at position 2383 of SEQ ID NO: 914884
gguaucuucucuguggcaa

SEQ ID NO: 1037891 - RNA, 19 nt, Artificial Sequence
  Description of Artificial Sequence: Synthetic oligonucleotide
  Antisense strand to SEQ ID NO: 1037890
uugccacagagaagauacc

SEQ ID NO: 1037892 - RNA, 19 nt, Artificial Sequence
  Description of Artificial Sequence: Synthetic oligonucleotide
  Sense strand starting at position 2384 of SEQ ID NO: 914884
guaucuucucuguggcaac

SEQ ID NO: 1037893 - RNA, 19 nt, Artificial Sequence
  Description of Artificial Sequence: Synthetic oligonucleotide
  Antisense strand to SEQ ID NO: 1037892
guugccacagagaagauac

SEQ ID NO: 1037894 - RNA, 19 nt, Artificial Sequence
  Description of Artificial Sequence: Synthetic oligonucleotide
  Sense strand starting at position 2492 of SEQ ID NO: 914884
ggcaaugggcucugugauu

SEQ ID NO: 1037895 - RNA, 19 nt, Artificial Sequence
  Description of Artificial Sequence: Synthetic oligonucleotide
  Antisense strand to SEQ ID NO: 1037894
aaucacagagcccauugcc

SEQ ID NO: 1037896 - RNA, 19 nt, Artificial Sequence
  Description of Artificial Sequence: Synthetic oligonucleotide
  Sense strand starting at position 2497 of SEQ ID NO: 914884
ugggcucugugauuacaga

SEQ ID NO: 1037897 - RNA, 19 nt, Artificial Sequence
  Description of Artificial Sequence: Synthetic oligonucleotide
  Antisense strand to SEQ ID NO: 1037896
ucuguaaucacagagccca

SEQ ID NO: 1037898 - RNA, 19 nt, Artificial Sequence
  Description of Artificial Sequence: Synthetic oligonucleotide
  Sense strand starting at position 2498 of SEQ ID NO: 914884
gggcucugugauuacagaa

SEQ ID NO: 1037899 - RNA, 19 nt, Artificial Sequence
  Description of Artificial Sequence: Synthetic oligonucleotide
  Antisense strand to SEQ ID NO: 1037898
uucuguaaucacagagccc

SEQ ID NO: 1037900 - RNA, 19 nt, Artificial Sequence
  Description of Artificial Sequence: Synthetic oligonucleotide
  Sense strand starting at position 2573 of SEQ ID NO: 914884
ugaaacuauugucuggaca

SEQ ID NO: 1037901 - RNA, 19 nt, Artificial Sequence
  Description of Artificial Sequence: Synthetic oligonucleotide
  Antisense strand to SEQ ID NO: 1037900
uguccagacaauaguuuca

SEQ ID NO: 1037902 - RNA, 19 nt, Artificial Sequence
  Description of Artificial Sequence: Synthetic oligonucleotide
  Sense strand starting at position 2574 of SEQ ID NO: 914884
gaaacuauugucuggacag

SEQ ID NO: 1037903 - RNA, 19 nt, Artificial Sequence
  Description of Artificial Sequence: Synthetic oligonucleotide
  Antisense strand to SEQ ID NO: 1037902
cuguccagacaauaguuuc

SEQ ID NO: 1037904 - RNA, 19 nt, Artificial Sequence
  Description of Artificial Sequence: Synthetic oligonucleotide
  Sense strand starting at position 2576 of SEQ ID NO: 914884
aacuauugucuggacaggu

SEQ ID NO: 1037905 - RNA, 19 nt, Artificial Sequence
  Description of Artificial Sequence: Synthetic oligonucleotide
  Antisense strand to SEQ ID NO: 1037904
accuguccagacaauaguu

SEQ ID NO: 1037906 - RNA, 19 nt, Artificial Sequence
  Description of Artificial Sequence: Synthetic oligonucleotide
  Sense strand starting at position 2592 of SEQ ID NO: 914884
gguucuucucuuggaggaa

SEQ ID NO: 1037907 - RNA, 19 nt, Artificial Sequence
  Description of Artificial Sequence: Synthetic oligonucleotide
  Antisense strand to SEQ ID NO: 1037906
uuccuccaagagaagaacc

SEQ ID NO: 1037908 - RNA, 19 nt, Artificial Sequence
  Description of Artificial Sequence: Synthetic oligonucleotide
  Sense strand starting at position 2780 of SEQ ID NO: 914884
augugugaugaguggaugu

SEQ ID NO: 1037909 - RNA, 19 nt, Artificial Sequence
  Description of Artificial Sequence: Synthetic oligonucleotide
  Antisense strand to SEQ ID NO: 1037908
acauccacucaucacacau

SEQ ID NO: 1037910 - RNA, 19 nt, Artificial Sequence
  Description of Artificial Sequence: Synthetic oligonucleotide
  Sense strand starting at position 2941 of SEQ ID NO: 914884
guggaucaguaguucagau

SEQ ID NO: 1037911 - RNA, 19 nt, Artificial Sequence
  Description of Artificial Sequence: Synthetic oligonucleotide
  Antisense strand to SEQ ID NO: 1037910
aucugaacuacugauccac

SEQ ID NO: 1037912 - RNA, 19 nt, Artificial Sequence
  Description of Artificial Sequence: Synthetic oligonucleotide
  Sense strand starting at position 3300 of SEQ ID NO: 914884
gcuagaaggugccuuauga

SEQ ID NO: 1037913 - RNA, 19 nt, Artificial Sequence
  Description of Artificial Sequence: Synthetic oligonucleotide
  Antisense strand to SEQ ID NO: 1037912
ucauaaggcaccuucuagc

SEQ ID NO: 1037914 - RNA, 19 nt, Artificial Sequence
  Description of Artificial Sequence: Synthetic oligonucleotide
  Sense strand starting at position 3412 of SEQ ID NO: 914884
aggagaaugacuugguguc

SEQ ID NO: 1037915 - RNA, 19 nt, Artificial Sequence
  Description of Artificial Sequence: Synthetic oligonucleotide
  Antisense strand to SEQ ID NO: 1037914
gacaccaagucauucuccu

SEQ ID NO: 1037916 - RNA, 19 nt, Artificial Sequence
  Description of Artificial Sequence: Synthetic oligonucleotide
  Sense strand starting at position 3413 of SEQ ID NO: 914884
ggagaaugacuugguguca

SEQ ID NO: 1037917 - RNA, 19 nt, Artificial Sequence
  Description of Artificial Sequence: Synthetic oligonucleotide
  Antisense strand to SEQ ID NO: 1037916
ugacaccaagucauucucc

SEQ ID NO: 1037918 - RNA, 19 nt, Artificial Sequence
  Description of Artificial Sequence: Synthetic oligonucleotide
  Sense strand starting at position 3414 of SEQ ID NO: 914884
gagaaugacuuggugucau

SEQ ID NO: 1037919 - RNA, 19 nt, Artificial Sequence
  Description of Artificial Sequence: Synthetic oligonucleotide
  Antisense strand to SEQ ID NO: 1037918
augacaccaagucauucuc

SEQ ID NO: 1037920 - RNA, 19 nt, Artificial Sequence
  Description of Artificial Sequence: Synthetic oligonucleotide
  Sense strand starting at position 3687 of SEQ ID NO: 914884
auccuuguuuguucuuaga

SEQ ID NO: 1037921 - RNA, 19 nt, Artificial Sequence
  Description of Artificial Sequence: Synthetic oligonucleotide
  Antisense strand to SEQ ID NO: 1037920
ucuaagaacaaacaaggau

SEQ ID NO: 1037922 - RNA, 19 nt, Artificial Sequence
  Description of Artificial Sequence: Synthetic oligonucleotide
  Sense strand starting at position 3689 of SEQ ID NO: 914884
ccuuguuuguucuuagagg

SEQ ID NO: 1037923 - RNA, 19 nt, Artificial Sequence
  Description of Artificial Sequence: Synthetic oligonucleotide
  Antisense strand to SEQ ID NO: 1037922
ccucuaagaacaaacaagg

SEQ ID NO: 1037924 - RNA, 19 nt, Artificial Sequence
  Description of Artificial Sequence: Synthetic oligonucleotide
  Sense strand starting at position 3801 of SEQ ID NO: 914884
gcuccaucaucgucauuga

SEQ ID NO: 1037925 - RNA, 19 nt, Artificial Sequence
  Description of Artificial Sequence: Synthetic oligonucleotide
  Antisense strand to SEQ ID NO: 1037924
ucaaugacgaugauggagc

SEQ ID NO: 1037926 - RNA, 19 nt, Artificial Sequence
  Description of Artificial Sequence: Synthetic oligonucleotide
  Sense strand starting at position 3804 of SEQ ID NO: 914884
ccaucaucgucauugagag

SEQ ID NO: 1037927 - RNA, 19 nt, Artificial Sequence
  Description of Artificial Sequence: Synthetic oligonucleotide
  Antisense strand to SEQ ID NO: 1037926
cucucaaugacgaugaugg

SEQ ID NO: 1037928 - RNA, 19 nt, Artificial Sequence
  Description of Artificial Sequence: Synthetic oligonucleotide
  Sense strand starting at position 3805 of SEQ ID NO: 914884
caucaucgucauugagaga

SEQ ID NO: 1037929 - RNA, 19 nt, Artificial Sequence
  Description of Artificial Sequence: Synthetic oligonucleotide
  Antisense strand to SEQ ID NO: 1037928
ucucucaaugacgaugaug

SEQ ID NO: 1037930 - RNA, 19 nt, Artificial Sequence
  Description of Artificial Sequence: Synthetic oligonucleotide
  Sense strand starting at position 3825 of SEQ ID NO: 914884
ggagguguuaacugaagaa

SEQ ID NO: 1037931 - RNA, 19 nt, Artificial Sequence
  Description of Artificial Sequence: Synthetic oligonucleotide
  Antisense strand to SEQ ID NO: 1037930
uucuucaguuaacaccucc

SEQ ID NO: 1037932 - RNA, 19 nt, Artificial Sequence
  Description of Artificial Sequence: Synthetic oligonucleotide
  Sense strand starting at position 3841 of SEQ ID NO: 914884
gaaggacgaggucgucaau

SEQ ID NO: 1037933 - RNA, 19 nt, Artificial Sequence
  Description of Artificial Sequence: Synthetic oligonucleotide
  Antisense strand to SEQ ID NO: 1037932
auugacgaccucguccuuc

SEQ ID NO: 1037934 - RNA, 19 nt, Artificial Sequence
  Description of Artificial Sequence: Synthetic oligonucleotide
  Sense strand starting at position 3851 of SEQ ID NO: 914884
gucgucaauuuggaaagga

SEQ ID NO: 1037935 - RNA, 19 nt, Artificial Sequence
  Description of Artificial Sequence: Synthetic oligonucleotide
  Antisense strand to SEQ ID NO: 1037934
uccuuuccaaauugacgac

SEQ ID NO: 1037936 - RNA, 19 nt, Artificial Sequence
  Description of Artificial Sequence: Synthetic oligonucleotide
  Sense strand starting at position 3870 of SEQ ID NO: 914884
gcgcuuuacuucucauaaa

SEQ ID NO: 1037937 - RNA, 19 nt, Artificial Sequence
  Description of Artificial Sequence: Synthetic oligonucleotide
  Antisense strand to SEQ ID NO: 1037936
uuuaugagaaguaaagcgc

SEQ ID NO: 1037938 - RNA, 19 nt, Artificial Sequence
  Description of Artificial Sequence: Synthetic oligonucleotide
  Sense strand starting at position 27 of SEQ ID NO: 914885
ggauaaaguacauggccua

SEQ ID NO: 1037939 - RNA, 19 nt, Artificial Sequence
  Description of Artificial Sequence: Synthetic oligonucleotide
  Antisense strand to SEQ ID NO: 1037938
uaggccauguacuuuaucc

SEQ ID NO: 1037940 - RNA, 19 nt, Artificial Sequence
  Description of Artificial Sequence: Synthetic oligonucleotide
  Sense strand starting at position 152 of SEQ ID NO: 914885
gaugucuggcaagagucaa

SEQ ID NO: 1037941 - RNA, 19 nt, Artificial Sequence
  Description of Artificial Sequence: Synthetic oligonucleotide
  Antisense strand to SEQ ID NO: 1037940
uugacucuugccagacauc

SEQ ID NO: 1037942 - RNA, 19 nt, Artificial Sequence
  Description of Artificial Sequence: Synthetic oligonucleotide
  Sense strand starting at position 458 of SEQ ID NO: 914885
uuucucauacggcauuaau

SEQ ID NO: 1037943 - RNA, 19 nt, Artificial Sequence
  Description of Artificial Sequence: Synthetic oligonucleotide
  Antisense strand to SEQ ID NO: 1037942
auuaaugccguaugagaaa

SEQ ID NO: 1037944 - RNA, 19 nt, Artificial Sequence
  Description of Artificial Sequence: Synthetic oligonucleotide
  Sense strand starting at position 467 of SEQ ID NO: 914885
cggcauuaauccuucuuga

SEQ ID NO: 1037945 - RNA, 19 nt, Artificial Sequence
  Description of Artificial Sequence: Synthetic oligonucleotide
  Antisense strand to SEQ ID NO: 1037944
ucaagaaggauuaaugccg

SEQ ID NO: 1037946 - RNA, 19 nt, Artificial Sequence
  Description of Artificial Sequence: Synthetic oligonucleotide
  Sense strand starting at position 483 of SEQ ID NO: 914885
ugacucauucccugcaaga

SEQ ID NO: 1037947 - RNA, 19 nt, Artificial Sequence
  Description of Artificial Sequence: Synthetic oligonucleotide
  Antisense strand to SEQ ID NO: 1037946
ucuugcagggaaugaguca

SEQ ID NO: 1037948 - RNA, 19 nt, Artificial Sequence
  Description of Artificial Sequence: Synthetic oligonucleotide
  Sense strand starting at position 485 of SEQ ID NO: 914885
acucauucccugcaagagu

SEQ ID NO: 1037949 - RNA, 19 nt, Artificial Sequence
  Description of Artificial Sequence: Synthetic oligonucleotide
  Antisense strand to SEQ ID NO: 1037948
acucuugcagggaaugagu

SEQ ID NO: 1037950 - RNA, 19 nt, Artificial Sequence
  Description of Artificial Sequence: Synthetic oligonucleotide
  Sense strand starting at position 493 of SEQ ID NO: 914885
ccugcaagaguccauauua

SEQ ID NO: 1037951 - RNA, 19 nt, Artificial Sequence
  Description of Artificial Sequence: Synthetic oligonucleotide
  Antisense strand to SEQ ID NO: 1037950
uaauauggacucuugcagg

SEQ ID NO: 1037952 - RNA, 19 nt, Artificial Sequence
  Description of Artificial Sequence: Synthetic oligonucleotide
  Sense strand starting at position 549 of SEQ ID NO: 914885
cccaguaggcaggguuauu

SEQ ID NO: 1037953 - RNA, 19 nt, Artificial Sequence
  Description of Artificial Sequence: Synthetic oligonucleotide
  Antisense strand to SEQ ID NO: 1037952
aauaacccugccuacuggg

SEQ ID NO: 1037954 - RNA, 19 nt, Artificial Sequence
  Description of Artificial Sequence: Synthetic oligonucleotide
  Sense strand starting at position 593 of SEQ ID NO: 914885
agugaagugagagguauua

SEQ ID NO: 1037955 - RNA, 19 nt, Artificial Sequence
  Description of Artificial Sequence: Synthetic oligonucleotide
  Antisense strand to SEQ ID NO: 1037954
uaauaccucucacuucacu

SEQ ID NO: 1037956 - RNA, 19 nt, Artificial Sequence
  Description of Artificial Sequence: Synthetic oligonucleotide
  Sense strand starting at position 641 of SEQ ID NO: 914885
ggaaauauguguucauugg

SEQ ID NO: 1037957 - RNA, 19 nt, Artificial Sequence
  Description of Artificial Sequence: Synthetic oligonucleotide
  Antisense strand to SEQ ID NO: 1037956
ccaaugaacacauauuucc

SEQ ID NO: 1037958 - RNA, 19 nt, Artificial Sequence
  Description of Artificial Sequence: Synthetic oligonucleotide
  Sense strand starting at position 721 of SEQ ID NO: 914885
ggcuuaagcccuuaaucca

SEQ ID NO: 1037959 - RNA, 19 nt, Artificial Sequence
  Description of Artificial Sequence: Synthetic oligonucleotide
  Antisense strand to SEQ ID NO: 1037958
uggauuaagggcuuaagcc

SEQ ID NO: 1037960 - RNA, 19 nt, Artificial Sequence
  Description of Artificial Sequence: Synthetic oligonucleotide
  Sense strand starting at position 758 of SEQ ID NO: 914885
acgaacuacuucccaagua

SEQ ID NO: 1037961 - RNA, 19 nt, Artificial Sequence
  Description of Artificial Sequence: Synthetic oligonucleotide
  Antisense strand to SEQ ID NO: 1037960
uacuugggaaguaguucgu

SEQ ID NO: 1037962 - RNA, 19 nt, Artificial Sequence
  Description of Artificial Sequence: Synthetic oligonucleotide
  Sense strand starting at position 844 of SEQ ID NO: 914885
cucucucaggucuacuaua

SEQ ID NO: 1037963 - RNA, 19 nt, Artificial Sequence
  Description of Artificial Sequence: Synthetic oligonucleotide
  Antisense strand to SEQ ID NO: 1037962
uauaguagaccugagagag

SEQ ID NO: 1037964 - RNA, 19 nt, Artificial Sequence
  Description of Artificial Sequence: Synthetic oligonucleotide
  Sense strand starting at position 1053 of SEQ ID NO: 914885
guaucagaucuacagccaa

SEQ ID NO: 1037965 - RNA, 19 nt, Artificial Sequence
  Description of Artificial Sequence: Synthetic oligonucleotide
  Antisense strand to SEQ ID NO: 1037964
uuggcuguagaucugauac

SEQ ID NO: 1037966 - RNA, 19 nt, Artificial Sequence
  Description of Artificial Sequence: Synthetic oligonucleotide
  Sense strand starting at position 1082 of SEQ ID NO: 914885
uaggcaugucuccagcuaa

SEQ ID NO: 1037967 - RNA, 19 nt, Artificial Sequence
  Description of Artificial Sequence: Synthetic oligonucleotide
  Antisense strand to SEQ ID NO: 1037966
uuagcuggagacaugccua

SEQ ID NO: 1037968 - RNA, 19 nt, Artificial Sequence
  Description of Artificial Sequence: Synthetic oligonucleotide
  Sense strand starting at position 1213 of SEQ ID NO: 914885
uguugcuucccagacaauu

SEQ ID NO: 1037969 - RNA, 19 nt, Artificial Sequence
  Description of Artificial Sequence: Synthetic oligonucleotide
  Antisense strand to SEQ ID NO: 1037968
aauugucugggaagcaaca

SEQ ID NO: 1037970 - RNA, 19 nt, Artificial Sequence
  Description of Artificial Sequence: Synthetic oligonucleotide
  Sense strand starting at position 1241 of SEQ ID NO: 914885
ucccgauguccucacugua

SEQ ID NO: 1037971 - RNA, 19 nt, Artificial Sequence
  Description of Artificial Sequence: Synthetic oligonucleotide
  Antisense strand to SEQ ID NO: 1037970
uacagugaggacaucggga

SEQ ID NO: 1037972 - RNA, 19 nt, Artificial Sequence
  Description of Artificial Sequence: Synthetic oligonucleotide
  Sense strand starting at position 2152 of SEQ ID NO: 914885
uuguguuaugcguucucgu

SEQ ID NO: 1037973 - RNA, 19 nt, Artificial Sequence
  Description of Artificial Sequence: Synthetic oligonucleotide
  Antisense strand to SEQ ID NO: 1037972
acgagaacgcauaacacaa

SEQ ID NO: 1037974 - RNA, 19 nt, Artificial Sequence
  Description of Artificial Sequence: Synthetic oligonucleotide
  Sense strand starting at position 2220 of SEQ ID NO: 914885
ccucguaugcccuugugau

SEQ ID NO: 1037975 - RNA, 19 nt, Artificial Sequence
  Description of Artificial Sequence: Synthetic oligonucleotide
  Antisense strand to SEQ ID NO: 1037974
aucacaagggcauacgagg

SEQ ID NO: 1037976 - RNA, 19 nt, Artificial Sequence
  Description of Artificial Sequence: Synthetic oligonucleotide
  Sense strand starting at position 2281 of SEQ ID NO: 914885
ccugaugcuccagaucgua

SEQ ID NO: 1037977 - RNA, 19 nt, Artificial Sequence
  Description of Artificial Sequence: Synthetic oligonucleotide
  Antisense strand to SEQ ID NO: 1037976
uacgaucuggagcaucagg

SEQ ID NO: 1037978 - RNA, 19 nt, Artificial Sequence
  Description of Artificial Sequence: Synthetic oligonucleotide
  Sense strand starting at position 2423 of SEQ ID NO: 914885
ggaucugcgacuuacagga

SEQ ID NO: 1037979 - RNA, 19 nt, Artificial Sequence
  Description of Artificial Sequence: Synthetic oligonucleotide
  Antisense strand to SEQ ID NO: 1037978
uccuguaagucgcagaucc

SEQ ID NO: 1037980 - RNA, 19 nt, Artificial Sequence
  Description of Artificial Sequence: Synthetic oligonucleotide
  Sense strand starting at position 2427 of SEQ ID NO: 914885
cugcgacuuacaggaagaa

SEQ ID NO: 1037981 - RNA, 19 nt, Artificial Sequence
  Description of Artificial Sequence: Synthetic oligonucleotide
  Antisense strand to SEQ ID NO: 1037980
uucuuccuguaagucgcag

SEQ ID NO: 1037982 - RNA, 19 nt, Artificial Sequence
  Description of Artificial Sequence: Synthetic oligonucleotide
  Sense strand starting at position 2576 of SEQ ID NO: 914885
auuguaaucgaacgcacaa

SEQ ID NO: 1037983 - RNA, 19 nt, Artificial Sequence
  Description of Artificial Sequence: Synthetic oligonucleotide
  Antisense strand to SEQ ID NO: 1037982
uugugcguucgauuacaau

SEQ ID NO: 1037984 - RNA, 19 nt, Artificial Sequence
  Description of Artificial Sequence: Synthetic oligonucleotide
  Sense strand starting at position 2663 of SEQ ID NO: 914885
aaguccguccaagauugua

SEQ ID NO: 1037985 - RNA, 19 nt, Artificial Sequence
  Description of Artificial Sequence: Synthetic oligonucleotide
  Antisense strand to SEQ ID NO: 1037984
uacaaucuuggacggacuu

SEQ ID NO: 1037986 - RNA, 19 nt, Artificial Sequence
  Description of Artificial Sequence: Synthetic oligonucleotide
  Sense strand starting at position 2767 of SEQ ID NO: 914885
acauuacccgucugacaua

SEQ ID NO: 1037987 - RNA, 19 nt, Artificial Sequence
  Description of Artificial Sequence: Synthetic oligonucleotide
  Antisense strand to SEQ ID NO: 1037986
uaugucagacggguaaugu

SEQ ID NO: 1037988 - RNA, 19 nt, Artificial Sequence
  Description of Artificial Sequence: Synthetic oligonucleotide
  Sense strand starting at position 2874 of SEQ ID NO: 914885
guaguuuccugauugaucu

SEQ ID NO: 1037989 - RNA, 19 nt, Artificial Sequence
  Description of Artificial Sequence: Synthetic oligonucleotide
  Antisense strand to SEQ ID NO: 1037988
agaucaaucaggaaacuac

SEQ ID NO: 1037990 - RNA, 19 nt, Artificial Sequence
  Description of Artificial Sequence: Synthetic oligonucleotide
  Sense strand starting at position 2939 of SEQ ID NO: 914885
cuucgagacucaguacaau

SEQ ID NO: 1037991 - RNA, 19 nt, Artificial Sequence
  Description of Artificial Sequence: Synthetic oligonucleotide
  Antisense strand to SEQ ID NO: 1037990
auuguacugagucucgaag

SEQ ID NO: 1037992 - RNA, 19 nt, Artificial Sequence
  Description of Artificial Sequence: Synthetic oligonucleotide
  Sense strand starting at position 3012 of SEQ ID NO: 914885
gcuuaauccucauccagug

SEQ ID NO: 1037993 - RNA, 19 nt, Artificial Sequence
  Description of Artificial Sequence: Synthetic oligonucleotide
  Antisense strand to SEQ ID NO: 1037992
cacuggaugaggauuaagc

SEQ ID NO: 1037994 - RNA, 19 nt, Artificial Sequence
  Description of Artificial Sequence: Synthetic oligonucleotide
  Sense strand starting at position 3017 of SEQ ID NO: 914885
auccucauccaguguuaau

SEQ ID NO: 1037995 - RNA, 19 nt, Artificial Sequence
  Description of Artificial Sequence: Synthetic oligonucleotide
  Antisense strand to SEQ ID NO: 1037994
auuaacacuggaugaggau

SEQ ID NO: 1037996 - RNA, 19 nt, Artificial Sequence
  Description of Artificial Sequence: Synthetic oligonucleotide
  Sense strand starting at position 3058 of SEQ ID NO: 914885
aauauuugcugagcgucua

SEQ ID NO: 1037997 - RNA, 19 nt, Artificial Sequence
  Description of Artificial Sequence: Synthetic oligonucleotide
  Antisense strand to SEQ ID NO: 1037996
uagacgcucagcaaauauu

SEQ ID NO: 1037998 - RNA, 19 nt, Artificial Sequence
  Description of Artificial Sequence: Synthetic oligonucleotide
  Sense strand starting at position 3093 of SEQ ID NO: 914885
guuauaucuggauaugcag

SEQ ID NO: 1037999 - RNA, 19 nt, Artificial Sequence
  Description of Artificial Sequence: Synthetic oligonucleotide
  Antisense strand to SEQ ID NO: 1037998
cugcauauccagauauaac

SEQ ID NO: 1038000 - RNA, 19 nt, Artificial Sequence
  Description of Artificial Sequence: Synthetic oligonucleotide
  Sense strand starting at position 3131 of SEQ ID NO: 914885
agucccuguagucauggaa

SEQ ID NO: 1038001 - RNA, 19 nt, Artificial Sequence
  Description of Artificial Sequence: Synthetic oligonucleotide
  Antisense strand to SEQ ID NO: 1038000
uuccaugacuacagggacu

SEQ ID NO: 1038002 - RNA, 19 nt, Artificial Sequence
  Description of Artificial Sequence: Synthetic oligonucleotide
  Sense strand starting at position 3134 of SEQ ID NO: 914885
cccuguagucauggaacau

SEQ ID NO: 1038003 - RNA, 19 nt, Artificial Sequence
  Description of Artificial Sequence: Synthetic oligonucleotide
  Antisense strand to SEQ ID NO: 1038002
auguuccaugacuacaggg

SEQ ID NO: 1038004 - RNA, 19 nt, Artificial Sequence
  Description of Artificial Sequence: Synthetic oligonucleotide
  Sense strand starting at position 3159 of SEQ ID NO: 914885
gugaucacacuauauugua

SEQ ID NO: 1038005 - RNA, 19 nt, Artificial Sequence
  Description of Artificial Sequence: Synthetic oligonucleotide
  Antisense strand to SEQ ID NO: 1038004
uacaauauagugugaucac

SEQ ID NO: 1038006 - RNA, 19 nt, Artificial Sequence
  Description of Artificial Sequence: Synthetic oligonucleotide
  Sense strand starting at position 3287 of SEQ ID NO: 914885
cuugcauaucaaugagcau

SEQ ID NO: 1038007 - RNA, 19 nt, Artificial Sequence
  Description of Artificial Sequence: Synthetic oligonucleotide
  Antisense strand to SEQ ID NO: 1038006
augcucauugauaugcaag

SEQ ID NO: 1038008 - RNA, 19 nt, Artificial Sequence
  Description of Artificial Sequence: Synthetic oligonucleotide
  Sense strand starting at position 3290 of SEQ ID NO: 914885
gcauaucaaugagcauguu

SEQ ID NO: 1038009 - RNA, 19 nt, Artificial Sequence
  Description of Artificial Sequence: Synthetic oligonucleotide
  Antisense strand to SEQ ID NO: 1038008
aacaugcucauugauaugc

SEQ ID NO: 1038010 - RNA, 19 nt, Artificial Sequence
  Description of Artificial Sequence: Synthetic oligonucleotide
  Sense strand starting at position 3403 of SEQ ID NO: 914885
aaaucaagacccugagguu

SEQ ID NO: 1038011 - RNA, 19 nt, Artificial Sequence
  Description of Artificial Sequence: Synthetic oligonucleotide
  Antisense strand to SEQ ID NO: 1038010
aaccucagggucuugauuu

SEQ ID NO: 1038012 - RNA, 19 nt, Artificial Sequence
  Description of Artificial Sequence: Synthetic oligonucleotide
  Sense strand starting at position 3412 of SEQ ID NO: 914885
cccugagguucuguaaauc

SEQ ID NO: 1038013 - RNA, 19 nt, Artificial Sequence
  Description of Artificial Sequence: Synthetic oligonucleotide
  Antisense strand to SEQ ID NO: 1038012
gauuuacagaaccucaggg

SEQ ID NO: 1038014 - RNA, 19 nt, Artificial Sequence
  Description of Artificial Sequence: Synthetic oligonucleotide
  Sense strand starting at position 3514 of SEQ ID NO: 914885
gcagccucagcaugaauaa

SEQ ID NO: 1038015 - RNA, 19 nt, Artificial Sequence
  Description of Artificial Sequence: Synthetic oligonucleotide
  Antisense strand to SEQ ID NO: 1038014
uuauucaugcugaggcugc

SEQ ID NO: 1038016 - RNA, 19 nt, Artificial Sequence
  Description of Artificial Sequence: Synthetic oligonucleotide
  Sense strand starting at position 3886 of SEQ ID NO: 914885
guacacauuugugaaggga

SEQ ID NO: 1038017 - RNA, 19 nt, Artificial Sequence
  Description of Artificial Sequence: Synthetic oligonucleotide
  Antisense strand to SEQ ID NO: 1038016
ucccuucacaaauguguac

SEQ ID NO: 1038018 - RNA, 19 nt, Artificial Sequence
  Description of Artificial Sequence: Synthetic oligonucleotide
  Sense strand starting at position 1 of SEQ ID NO: 914886
gaacuauaugauuagugcu

SEQ ID NO: 1038019 - RNA, 19 nt, Artificial Sequence
  Description of Artificial Sequence: Synthetic oligonucleotide
  Antisense strand to SEQ ID NO: 1038018
agcacuaaucauauaguuc

SEQ ID NO: 1038020 - RNA, 19 nt, Artificial Sequence
  Description of Artificial Sequence: Synthetic oligonucleotide
  Sense strand starting at position 3 of SEQ ID NO: 914886
acuauaugauuagugcuaa

SEQ ID NO: 1038021 - RNA, 19 nt, Artificial Sequence
  Description of Artificial Sequence: Synthetic oligonucleotide
  Antisense strand to SEQ ID NO: 1038020
uuagcacuaaucauauagu

SEQ ID NO: 1038022 - RNA, 19 nt, Artificial Sequence
  Description of Artificial Sequence: Synthetic oligonucleotide
  Sense strand starting at position 102 of SEQ ID NO: 914886
aggaauucucaaugagcaa

SEQ ID NO: 1038023 - RNA, 19 nt, Artificial Sequence
  Description of Artificial Sequence: Synthetic oligonucleotide
  Antisense strand to SEQ ID NO: 1038022
uugcucauugagaauuccu

SEQ ID NO: 1038024 - RNA, 19 nt, Artificial Sequence
  Description of Artificial Sequence: Synthetic oligonucleotide
  Sense strand starting at position 109 of SEQ ID NO: 914886
cucaaugagcaacaaguua

SEQ ID NO: 1038025 - RNA, 19 nt, Artificial Sequence
  Description of Artificial Sequence: Synthetic oligonucleotide
  Antisense strand to SEQ ID NO: 1038024
uaacuuguugcucauugag

SEQ ID NO: 1038026 - RNA, 19 nt, Artificial Sequence
  Description of Artificial Sequence: Synthetic oligonucleotide
  Sense strand starting at position 153 of SEQ ID NO: 914886
uccugucauuauuuggcua

SEQ ID NO: 1038027 - RNA, 19 nt, Artificial Sequence
  Description of Artificial Sequence: Synthetic oligonucleotide
  Antisense strand to SEQ ID NO: 1038026
uagccaaauaaugacagga

SEQ ID NO: 1038028 - RNA, 19 nt, Artificial Sequence
  Description of Artificial Sequence: Synthetic oligonucleotide
  Sense strand starting at position 165 of SEQ ID NO: 914886
uuggcuauugcugauaaua

SEQ ID NO: 1038029 - RNA, 19 nt, Artificial Sequence
  Description of Artificial Sequence: Synthetic oligonucleotide
  Antisense strand to SEQ ID NO: 1038028
uauuaucagcaauagccaa

SEQ ID NO: 1038030 - RNA, 19 nt, Artificial Sequence
  Description of Artificial Sequence: Synthetic oligonucleotide
  Sense strand starting at position 193 of SEQ ID NO: 914886
uaauuagacugguccagca

SEQ ID NO: 1038031 - RNA, 19 nt, Artificial Sequence
  Description of Artificial Sequence: Synthetic oligonucleotide
  Antisense strand to SEQ ID NO: 1038030
ugcuggaccagucuaauua

SEQ ID NO: 1038032 - RNA, 19 nt, Artificial Sequence
  Description of Artificial Sequence: Synthetic oligonucleotide
  Sense strand starting at position 212 of SEQ ID NO: 914886
gcacauuaggaggguucaa

SEQ ID NO: 1038033 - RNA, 19 nt, Artificial Sequence
  Description of Artificial Sequence: Synthetic oligonucleotide
  Antisense strand to SEQ ID NO: 1038032
uugaacccuccuaaugugc

SEQ ID NO: 1038034 - RNA, 19 nt, Artificial Sequence
  Description of Artificial Sequence: Synthetic oligonucleotide
  Sense strand starting at position 1024 of SEQ ID NO: 914886
gaguucuuucccgaucucu

SEQ ID NO: 1038035 - RNA, 19 nt, Artificial Sequence
  Description of Artificial Sequence: Synthetic oligonucleotide
  Antisense strand to SEQ ID NO: 1038034
agagaucgggaaagaacuc

SEQ ID NO: 1038036 - RNA, 19 nt, Artificial Sequence
  Description of Artificial Sequence: Synthetic oligonucleotide
  Sense strand starting at position 2224 of SEQ ID NO: 914886
gggaauggucgaugcagag

SEQ ID NO: 1038037 - RNA, 19 nt, Artificial Sequence
  Description of Artificial Sequence: Synthetic oligonucleotide
  Antisense strand to SEQ ID NO: 1038036
cucugcaucgaccauuccc

SEQ ID NO: 1038038 - RNA, 19 nt, Artificial Sequence
  Description of Artificial Sequence: Synthetic oligonucleotide
  Sense strand starting at position 2299 of SEQ ID NO: 914886
gcggauggcauccaaagaa

SEQ ID NO: 1038039 - RNA, 19 nt, Artificial Sequence
  Description of Artificial Sequence: Synthetic oligonucleotide
  Antisense strand to SEQ ID NO: 1038038
uucuuuggaugccauccgc

SEQ ID NO: 1038040 - RNA, 19 nt, Artificial Sequence
  Description of Artificial Sequence: Synthetic oligonucleotide
  Sense strand starting at position 2623 of SEQ ID NO: 914886
ugagccaucuguccaaaga

SEQ ID NO: 1038041 - RNA, 19 nt, Artificial Sequence
  Description of Artificial Sequence: Synthetic oligonucleotide
  Antisense strand to SEQ ID NO: 1038040
ucuuuggacagauggcuca

SEQ ID NO: 1038042 - RNA, 19 nt, Artificial Sequence
  Description of Artificial Sequence: Synthetic oligonucleotide
  Sense strand starting at position 2624 of SEQ ID NO: 914886
gagccaucuguccaaagau

SEQ ID NO: 1038043 - RNA, 19 nt, Artificial Sequence
  Description of Artificial Sequence: Synthetic oligonucleotide
  Antisense strand to SEQ ID NO: 1038042
aucuuuggacagauggcuc

SEQ ID NO: 1038044 - RNA, 19 nt, Artificial Sequence
  Description of Artificial Sequence: Synthetic oligonucleotide
  Sense strand starting at position 2662 of SEQ ID NO: 914886
aggugaaucugacuuucug

SEQ ID NO: 1038045 - RNA, 19 nt, Artificial Sequence
  Description of Artificial Sequence: Synthetic oligonucleotide
  Antisense strand to SEQ ID NO: 1038044
cagaaagucagauucaccu

SEQ ID NO: 1038046 - RNA, 19 nt, Artificial Sequence
  Description of Artificial Sequence: Synthetic oligonucleotide
  Sense strand starting at position 2701 of SEQ ID NO: 914886
ugcugugaagcauagcaga

SEQ ID NO: 1038047 - RNA, 19 nt, Artificial Sequence
  Description of Artificial Sequence: Synthetic oligonucleotide
  Antisense strand to SEQ ID NO: 1038046
ucugcuaugcuucacagca

SEQ ID NO: 1038048 - RNA, 19 nt, Artificial Sequence
  Description of Artificial Sequence: Synthetic oligonucleotide
  Sense strand starting at position 2799 of SEQ ID NO: 914886
ccaagaaagcagugaugcu

SEQ ID NO: 1038049 - RNA, 19 nt, Artificial Sequence
  Description of Artificial Sequence: Synthetic oligonucleotide
  Antisense strand to SEQ ID NO: 1038048
agcaucacugcuuucuugg

SEQ ID NO: 1038050 - RNA, 19 nt, Artificial Sequence
  Description of Artificial Sequence: Synthetic oligonucleotide
  Sense strand starting at position 2896 of SEQ ID NO: 914886
ucaguaucagcugagacua

SEQ ID NO: 1038051 - RNA, 19 nt, Artificial Sequence
  Description of Artificial Sequence: Synthetic oligonucleotide
  Antisense strand to SEQ ID NO: 1038050
uagucucagcugauacuga

SEQ ID NO: 1038052 - RNA, 19 nt, Artificial Sequence
  Description of Artificial Sequence: Synthetic oligonucleotide
  Sense strand starting at position 2975 of SEQ ID NO: 914886
ccuuuauggcaagaucauu

SEQ ID NO: 1038053 - RNA, 19 nt, Artificial Sequence
  Description of Artificial Sequence: Synthetic oligonucleotide
  Antisense strand to SEQ ID NO: 1038052
aaugaucuugccauaaagg

SEQ ID NO: 1038054 - RNA, 19 nt, Artificial Sequence
  Description of Artificial Sequence: Synthetic oligonucleotide
  Sense strand starting at position 3014 of SEQ ID NO: 914886
caguuagaauacgucaaug

SEQ ID NO: 1038055 - RNA, 19 nt, Artificial Sequence
  Description of Artificial Sequence: Synthetic oligonucleotide
  Antisense strand to SEQ ID NO: 1038054
cauugacguauucuaacug

SEQ ID NO: 1038056 - RNA, 19 nt, Artificial Sequence
  Description of Artificial Sequence: Synthetic oligonucleotide
  Sense strand starting at position 3016 of SEQ ID NO: 914886
guuagaauacgucaauguc

SEQ ID NO: 1038057 - RNA, 19 nt, Artificial Sequence
  Description of Artificial Sequence: Synthetic oligonucleotide
  Antisense strand to SEQ ID NO: 1038056
gacauugacguauucuaac

SEQ ID NO: 1038058 - RNA, 19 nt, Artificial Sequence
  Description of Artificial Sequence: Synthetic oligonucleotide
  Sense strand starting at position 3019 of SEQ ID NO: 914886
agaauacgucaaugucaca

SEQ ID NO: 1038059 - RNA, 19 nt, Artificial Sequence
  Description of Artificial Sequence: Synthetic oligonucleotide
  Antisense strand to SEQ ID NO: 1038058
ugugacauugacguauucu

SEQ ID NO: 1038060 - RNA, 19 nt, Artificial Sequence
  Description of Artificial Sequence: Synthetic oligonucleotide
  Sense strand starting at position 3055 of SEQ ID NO: 914886
uuagaaauucuugguuauc

SEQ ID NO: 1038061 - RNA, 19 nt, Artificial Sequence
  Description of Artificial Sequence: Synthetic oligonucleotide
  Antisense strand to SEQ ID NO: 1038060
gauaaccaagaauuucuaa

SEQ ID NO: 1038062 - RNA, 19 nt, Artificial Sequence
  Description of Artificial Sequence: Synthetic oligonucleotide
  Sense strand starting at position 3057 of SEQ ID NO: 914886
agaaauucuugguuaucaa

SEQ ID NO: 1038063 - RNA, 19 nt, Artificial Sequence
  Description of Artificial Sequence: Synthetic oligonucleotide
  Antisense strand to SEQ ID NO: 1038062
uugauaaccaagaauuucu

SEQ ID NO: 1038064 - RNA, 19 nt, Artificial Sequence
  Description of Artificial Sequence: Synthetic oligonucleotide
  Sense strand starting at position 3080 of SEQ ID NO: 914886
acuugagagaacuguuaug

SEQ ID NO: 1038065 - RNA, 19 nt, Artificial Sequence
  Description of Artificial Sequence: Synthetic oligonucleotide
  Antisense strand to SEQ ID NO: 1038064
cauaacaguucucucaagu

SEQ ID NO: 1038066 - RNA, 19 nt, Artificial Sequence
  Description of Artificial Sequence: Synthetic oligonucleotide
  Sense strand starting at position 3175 of SEQ ID NO: 914886
uggcaauuccguuugccua

SEQ ID NO: 1038067 - RNA, 19 nt, Artificial Sequence
  Description of Artificial Sequence: Synthetic oligonucleotide
  Antisense strand to SEQ ID NO: 1038066
uaggcaaacggaauugcca

SEQ ID NO: 1038068 - RNA, 19 nt, Artificial Sequence
  Description of Artificial Sequence: Synthetic oligonucleotide
  Sense strand starting at position 3200 of SEQ ID NO: 914886
acuuaacuguugguaacau

SEQ ID NO: 1038069 - RNA, 19 nt, Artificial Sequence
  Description of Artificial Sequence: Synthetic oligonucleotide
  Antisense strand to SEQ ID NO: 1038068
auguuaccaacaguuaagu

SEQ ID NO: 1038070 - RNA, 19 nt, Artificial Sequence
  Description of Artificial Sequence: Synthetic oligonucleotide
  Sense strand starting at position 3217 of SEQ ID NO: 914886
auuaacaguugccuuaaga

SEQ ID NO: 1038071 - RNA, 19 nt, Artificial Sequence
  Description of Artificial Sequence: Synthetic oligonucleotide
  Antisense strand to SEQ ID NO: 1038070
ucuuaaggcaacuguuaau

SEQ ID NO: 1038072 - RNA, 19 nt, Artificial Sequence
  Description of Artificial Sequence: Synthetic oligonucleotide
  Sense strand starting at position 3227 of SEQ ID NO: 914886
gccuuaagaguuuagugag

SEQ ID NO: 1038073 - RNA, 19 nt, Artificial Sequence
  Description of Artificial Sequence: Synthetic oligonucleotide
  Antisense strand to SEQ ID NO: 1038072
cucacuaaacucuuaaggc

SEQ ID NO: 1038074 - RNA, 19 nt, Artificial Sequence
  Description of Artificial Sequence: Synthetic oligonucleotide
  Sense strand starting at position 3237 of SEQ ID NO: 914886
uuuagugaguguuugauaa

SEQ ID NO: 1038075 - RNA, 19 nt, Artificial Sequence
  Description of Artificial Sequence: Synthetic oligonucleotide
  Antisense strand to SEQ ID NO: 1038074
uuaucaaacacucacuaaa

SEQ ID NO: 1038076 - RNA, 19 nt, Artificial Sequence
  Description of Artificial Sequence: Synthetic oligonucleotide
  Sense strand starting at position 3277 of SEQ ID NO: 914886
ucagauaucuaggcacuua

SEQ ID NO: 1038077 - RNA, 19 nt, Artificial Sequence
  Description of Artificial Sequence: Synthetic oligonucleotide
  Antisense strand to SEQ ID NO: 1038076
uaagugccuagauaucuga

SEQ ID NO: 1038078 - RNA, 19 nt, Artificial Sequence
  Description of Artificial Sequence: Synthetic oligonucleotide
  Sense strand starting at position 3388 of SEQ ID NO: 914886
cuuugauacccuggaccuu

SEQ ID NO: 1038079 - RNA, 19 nt, Artificial Sequence
  Description of Artificial Sequence: Synthetic oligonucleotide
  Antisense strand to SEQ ID NO: 1038078
aagguccaggguaucaaag

SEQ ID NO: 1038080 - RNA, 19 nt, Artificial Sequence
  Description of Artificial Sequence: Synthetic oligonucleotide
  Sense strand starting at position 3504 of SEQ ID NO: 914886
accauaugacuuuguaguu

SEQ ID NO: 1038081 - RNA, 19 nt, Artificial Sequence
  Description of Artificial Sequence: Synthetic oligonucleotide
  Antisense strand to SEQ ID NO: 1038080
aacuacaaagucauauggu

SEQ ID NO: 1038082 - RNA, 19 nt, Artificial Sequence
  Description of Artificial Sequence: Synthetic oligonucleotide
  Sense strand starting at position 3505 of SEQ ID NO: 914886
ccauaugacuuuguaguuu

SEQ ID NO: 1038083 - RNA, 19 nt, Artificial Sequence
  Description of Artificial Sequence: Synthetic oligonucleotide
  Antisense strand to SEQ ID NO: 1038082
aaacuacaaagucauaugg

SEQ ID NO: 1038084 - RNA, 19 nt, Artificial Sequence
  Description of Artificial Sequence: Synthetic oligonucleotide
  Sense strand starting at position 3582 of SEQ ID NO: 914886
gauugacuuguuuggcuaa

SEQ ID NO: 1038085 - RNA, 19 nt, Artificial Sequence
  Description of Artificial Sequence: Synthetic oligonucleotide
  Antisense strand to SEQ ID NO: 1038084
uuagccaaacaagucaauc

SEQ ID NO: 1038086 - RNA, 19 nt, Artificial Sequence
  Description of Artificial Sequence: Synthetic oligonucleotide
  Sense strand starting at position 3585 of SEQ ID NO: 914886
ugacuuguuuggcuaacag

SEQ ID NO: 1038087 - RNA, 19 nt, Artificial Sequence
  Description of Artificial Sequence: Synthetic oligonucleotide
  Antisense strand to SEQ ID NO: 1038086
cuguuagccaaacaaguca

SEQ ID NO: 1038088 - RNA, 19 nt, Artificial Sequence
  Description of Artificial Sequence: Synthetic oligonucleotide
  Sense strand starting at position 3601 of SEQ ID NO: 914886
cagaaugagucaguucuga

SEQ ID NO: 1038089 - RNA, 19 nt, Artificial Sequence
  Description of Artificial Sequence: Synthetic oligonucleotide
  Antisense strand to SEQ ID NO: 1038088
ucagaacugacucauucug

SEQ ID NO: 1038090 - RNA, 19 nt, Artificial Sequence
  Description of Artificial Sequence: Synthetic oligonucleotide
  Sense strand starting at position 3700 of SEQ ID NO: 914886
cuauguguaucccuaagag

SEQ ID NO: 1038091 - RNA, 19 nt, Artificial Sequence
  Description of Artificial Sequence: Synthetic oligonucleotide
  Antisense strand to SEQ ID NO: 1038090
cucuuagggauacacauag

SEQ ID NO: 1038092 - RNA, 19 nt, Artificial Sequence
  Description of Artificial Sequence: Synthetic oligonucleotide
  Sense strand starting at position 3857 of SEQ ID NO: 914886
augugugagcaguaauaaa

SEQ ID NO: 1038093 - RNA, 19 nt, Artificial Sequence
  Description of Artificial Sequence: Synthetic oligonucleotide
  Antisense strand to SEQ ID NO: 1038092
uuuauuacugcucacacau

SEQ ID NO: 1038094 - RNA, 19 nt, Artificial Sequence
  Description of Artificial Sequence: Synthetic oligonucleotide
  Sense strand starting at position 3891 of SEQ ID NO: 914886
cuuuguuaugcagcauugu

SEQ ID NO: 1038095 - RNA, 19 nt, Artificial Sequence
  Description of Artificial Sequence: Synthetic oligonucleotide
  Antisense strand to SEQ ID NO: 1038094
acaaugcugcauaacaaag

SEQ ID NO: 1038096 - RNA, 19 nt, Artificial Sequence
  Description of Artificial Sequence: Synthetic oligonucleotide
  Sense strand starting at position 3935 of SEQ ID NO: 914886
uggcaauguagggagguau

SEQ ID NO: 1038097 - RNA, 19 nt, Artificial Sequence
  Description of Artificial Sequence: Synthetic oligonucleotide
  Antisense strand to SEQ ID NO: 1038096
auaccucccuacauugcca

SEQ ID NO: 1038098 - RNA, 19 nt, Artificial Sequence
  Description of Artificial Sequence: Synthetic oligonucleotide
  Sense strand starting at position 263 of SEQ ID NO: 914887
gguggugauucuuagagug

SEQ ID NO: 1038099 - RNA, 19 nt, Artificial Sequence
  Description of Artificial Sequence: Synthetic oligonucleotide
  Antisense strand to SEQ ID NO: 1038098
cacucuaagaaucaccacc

SEQ ID NO: 1038100 - RNA, 19 nt, Artificial Sequence
  Description of Artificial Sequence: Synthetic oligonucleotide
  Sense strand starting at position 265 of SEQ ID NO: 914887
uggugauucuuagagugca

SEQ ID NO: 1038101 - RNA, 19 nt, Artificial Sequence
  Description of Artificial Sequence: Synthetic oligonucleotide
  Antisense strand to SEQ ID NO: 1038100
ugcacucuaagaaucacca

SEQ ID NO: 1038102 - RNA, 19 nt, Artificial Sequence
  Description of Artificial Sequence: Synthetic oligonucleotide
  Sense strand starting at position 268 of SEQ ID NO: 914887
ugauucuuagagugcaaga

SEQ ID NO: 1038103 - RNA, 19 nt, Artificial Sequence
  Description of Artificial Sequence: Synthetic oligonucleotide
  Antisense strand to SEQ ID NO: 1038102
ucuugcacucuaagaauca

SEQ ID NO: 1038104 - RNA, 19 nt, Artificial Sequence
  Description of Artificial Sequence: Synthetic oligonucleotide
  Sense strand starting at position 273 of SEQ ID NO: 914887
cuuagagugcaagaugauu

SEQ ID NO: 1038105 - RNA, 19 nt, Artificial Sequence
  Description of Artificial Sequence: Synthetic oligonucleotide
  Antisense strand to SEQ ID NO: 1038104
aaucaucuugcacucuaag

SEQ ID NO: 1038106 - RNA, 19 nt, Artificial Sequence
  Description of Artificial Sequence: Synthetic oligonucleotide
  Sense strand starting at position 278 of SEQ ID NO: 914887
agugcaagaugauugaacu

SEQ ID NO: 1038107 - RNA, 19 nt, Artificial Sequence
  Description of Artificial Sequence: Synthetic oligonucleotide
  Antisense strand to SEQ ID NO: 1038106
aguucaaucaucuugcacu

SEQ ID NO: 1038108 - RNA, 19 nt, Artificial Sequence
  Description of Artificial Sequence: Synthetic oligonucleotide
  Sense strand starting at position 279 of SEQ ID NO: 914887
gugcaagaugauugaacuc

SEQ ID NO: 1038109 - RNA, 19 nt, Artificial Sequence
  Description of Artificial Sequence: Synthetic oligonucleotide
  Antisense strand to SEQ ID NO: 1038108
gaguucaaucaucuugcac

SEQ ID NO: 1038110 - RNA, 19 nt, Artificial Sequence
  Description of Artificial Sequence: Synthetic oligonucleotide
  Sense strand starting at position 415 of SEQ ID NO: 914887
augcccaagaggugagaua

SEQ ID NO: 1038111 - RNA, 19 nt, Artificial Sequence
  Description of Artificial Sequence: Synthetic oligonucleotide
  Antisense strand to SEQ ID NO: 1038110
uaucucaccucuugggcau

SEQ ID NO: 1038112 - RNA, 19 nt, Artificial Sequence
  Description of Artificial Sequence: Synthetic oligonucleotide
  Sense strand starting at position 445 of SEQ ID NO: 914887
ucuacuuacucccuggaga

SEQ ID NO: 1038113 - RNA, 19 nt, Artificial Sequence
  Description of Artificial Sequence: Synthetic oligonucleotide
  Antisense strand to SEQ ID NO: 1038112
ucuccagggaguaaguaga

SEQ ID NO: 1038114 - RNA, 19 nt, Artificial Sequence
  Description of Artificial Sequence: Synthetic oligonucleotide
  Sense strand starting at position 516 of SEQ ID NO: 914887
ugggccaagaguugugaua

SEQ ID NO: 1038115 - RNA, 19 nt, Artificial Sequence
  Description of Artificial Sequence: Synthetic oligonucleotide
  Antisense strand to SEQ ID NO: 1038114
uaucacaacucuuggccca

SEQ ID NO: 1038116 - RNA, 19 nt, Artificial Sequence
  Description of Artificial Sequence: Synthetic oligonucleotide
  Sense strand starting at position 518 of SEQ ID NO: 914887
ggccaagaguugugauaac

SEQ ID NO: 1038117 - RNA, 19 nt, Artificial Sequence
  Description of Artificial Sequence: Synthetic oligonucleotide
  Antisense strand to SEQ ID NO: 1038116
guuaucacaacucuuggcc

SEQ ID NO: 1038118 - RNA, 19 nt, Artificial Sequence
  Description of Artificial Sequence: Synthetic oligonucleotide
  Sense strand starting at position 581 of SEQ ID NO: 914887
ccugguauguuuguauguu

SEQ ID NO: 1038119 - RNA, 19 nt, Artificial Sequence
  Description of Artificial Sequence: Synthetic oligonucleotide
  Antisense strand to SEQ ID NO: 1038118
aacauacaaacauaccagg

SEQ ID NO: 1038120 - RNA, 19 nt, Artificial Sequence
  Description of Artificial Sequence: Synthetic oligonucleotide
  Sense strand starting at position 582 of SEQ ID NO: 914887
cugguauguuuguauguua

SEQ ID NO: 1038121 - RNA, 19 nt, Artificial Sequence
  Description of Artificial Sequence: Synthetic oligonucleotide
  Antisense strand to SEQ ID NO: 1038120
uaacauacaaacauaccag

SEQ ID NO: 1038122 - RNA, 19 nt, Artificial Sequence
  Description of Artificial Sequence: Synthetic oligonucleotide
  Sense strand starting at position 619 of SEQ ID NO: 914887
gguguuuacucuuuggcag

SEQ ID NO: 1038123 - RNA, 19 nt, Artificial Sequence
  Description of Artificial Sequence: Synthetic oligonucleotide
  Antisense strand to SEQ ID NO: 1038122
cugccaaagaguaaacacc

SEQ ID NO: 1038124 - RNA, 19 nt, Artificial Sequence
  Description of Artificial Sequence: Synthetic oligonucleotide
  Sense strand starting at position 685 of SEQ ID NO: 914887
cugugagacaaguacuguu

SEQ ID NO: 1038125 - RNA, 19 nt, Artificial Sequence
  Description of Artificial Sequence: Synthetic oligonucleotide
  Antisense strand to SEQ ID NO: 1038124
aacaguacuugucucacag

SEQ ID NO: 1038126 - RNA, 19 nt, Artificial Sequence
  Description of Artificial Sequence: Synthetic oligonucleotide
  Sense strand starting at position 693 of SEQ ID NO: 914887
caaguacuguuguuauaag

SEQ ID NO: 1038127 - RNA, 19 nt, Artificial Sequence
  Description of Artificial Sequence: Synthetic oligonucleotide
  Antisense strand to SEQ ID NO: 1038126
cuuauaacaacaguacuug

SEQ ID NO: 1038128 - RNA, 19 nt, Artificial Sequence
  Description of Artificial Sequence: Synthetic oligonucleotide
  Sense strand starting at position 949 of SEQ ID NO: 914887
ugaccuacauagugaaacu

SEQ ID NO: 1038129 - RNA, 19 nt, Artificial Sequence
  Description of Artificial Sequence: Synthetic oligonucleotide
  Antisense strand to SEQ ID NO: 1038128
aguuucacuauguagguca

SEQ ID NO: 1038130 - RNA, 19 nt, Artificial Sequence
  Description of Artificial Sequence: Synthetic oligonucleotide
  Sense strand starting at position 1404 of SEQ ID NO: 914887
uguguaccaugacgagaaa

SEQ ID NO: 1038131 - RNA, 19 nt, Artificial Sequence
  Description of Artificial Sequence: Synthetic oligonucleotide
  Antisense strand to SEQ ID NO: 1038130
uuucucgucaugguacaca

SEQ ID NO: 1038132 - RNA, 19 nt, Artificial Sequence
  Description of Artificial Sequence: Synthetic oligonucleotide
  Sense strand starting at position 1421 of SEQ ID NO: 914887
aaaggaauagguuguuugu

SEQ ID NO: 1038133 - RNA, 19 nt, Artificial Sequence
  Description of Artificial Sequence: Synthetic oligonucleotide
  Antisense strand to SEQ ID NO: 1038132
acaaacaaccuauuccuuu

SEQ ID NO: 1038134 - RNA, 19 nt, Artificial Sequence
  Description of Artificial Sequence: Synthetic oligonucleotide
  Sense strand starting at position 1423 of SEQ ID NO: 914887
aggaauagguuguuuguaa

SEQ ID NO: 1038135 - RNA, 19 nt, Artificial Sequence
  Description of Artificial Sequence: Synthetic oligonucleotide
  Antisense strand to SEQ ID NO: 1038134
uuacaaacaaccuauuccu

SEQ ID NO: 1038136 - RNA, 19 nt, Artificial Sequence
  Description of Artificial Sequence: Synthetic oligonucleotide
  Sense strand starting at position 1424 of SEQ ID NO: 914887
ggaauagguuguuuguaaa

SEQ ID NO: 1038137 - RNA, 19 nt, Artificial Sequence
  Description of Artificial Sequence: Synthetic oligonucleotide
  Antisense strand to SEQ ID NO: 1038136
uuuacaaacaaccuauucc

SEQ ID NO: 1038138 - RNA, 19 nt, Artificial Sequence
  Description of Artificial Sequence: Synthetic oligonucleotide
  Sense strand starting at position 1488 of SEQ ID NO: 914887
auacuugacuuugaguguu

SEQ ID NO: 1038139 - RNA, 19 nt, Artificial Sequence
  Description of Artificial Sequence: Synthetic oligonucleotide
  Antisense strand to SEQ ID NO: 1038138
aacacucaaagucaaguau

SEQ ID NO: 1038140 - RNA, 19 nt, Artificial Sequence
  Description of Artificial Sequence: Synthetic oligonucleotide
  Sense strand starting at position 1491 of SEQ ID NO: 914887
cuugacuuugaguguuugu

SEQ ID NO: 1038141 - RNA, 19 nt, Artificial Sequence
  Description of Artificial Sequence: Synthetic oligonucleotide
  Antisense strand to SEQ ID NO: 1038140
acaaacacucaaagucaag

SEQ ID NO: 1038142 - RNA, 19 nt, Artificial Sequence
  Description of Artificial Sequence: Synthetic oligonucleotide
  Sense strand starting at position 1498 of SEQ ID NO: 914887
uugaguguuuguuccagag

SEQ ID NO: 1038143 - RNA, 19 nt, Artificial Sequence
  Description of Artificial Sequence: Synthetic oligonucleotide
  Antisense strand to SEQ ID NO: 1038142
cucuggaacaaacacucaa

SEQ ID NO: 1038144 - RNA, 19 nt, Artificial Sequence
  Description of Artificial Sequence: Synthetic oligonucleotide
  Sense strand starting at position 1500 of SEQ ID NO: 914887
gaguguuuguuccagaguu

SEQ ID NO: 1038145 - RNA, 19 nt, Artificial Sequence
  Description of Artificial Sequence: Synthetic oligonucleotide
  Antisense strand to SEQ ID NO: 1038144
aacucuggaacaaacacuc

SEQ ID NO: 1038146 - RNA, 19 nt, Artificial Sequence
  Description of Artificial Sequence: Synthetic oligonucleotide
  Sense strand starting at position 1502 of SEQ ID NO: 914887
guguuuguuccagaguuga

SEQ ID NO: 1038147 - RNA, 19 nt, Artificial Sequence
  Description of Artificial Sequence: Synthetic oligonucleotide
  Antisense strand to SEQ ID NO: 1038146
ucaacucuggaacaaacac

SEQ ID NO: 1038148 - RNA, 19 nt, Artificial Sequence
  Description of Artificial Sequence: Synthetic oligonucleotide
  Sense strand starting at position 1524 of SEQ ID NO: 914887
gauggagagggauguguau

SEQ ID NO: 1038149 - RNA, 19 nt, Artificial Sequence
  Description of Artificial Sequence: Synthetic oligonucleotide
  Antisense strand to SEQ ID NO: 1038148
auacacaucccucuccauc

SEQ ID NO: 1038150 - RNA, 19 nt, Artificial Sequence
  Description of Artificial Sequence: Synthetic oligonucleotide
  Sense strand starting at position 1531 of SEQ ID NO: 914887
agggauguguaugugugua

SEQ ID NO: 1038151 - RNA, 19 nt, Artificial Sequence
  Description of Artificial Sequence: Synthetic oligonucleotide
  Antisense strand to SEQ ID NO: 1038150
uacacacauacacaucccu

SEQ ID NO: 1038152 - RNA, 19 nt, Artificial Sequence
  Description of Artificial Sequence: Synthetic oligonucleotide
  Sense strand starting at position 1533 of SEQ ID NO: 914887
ggauguguauguguguaga

SEQ ID NO: 1038153 - RNA, 19 nt, Artificial Sequence
  Description of Artificial Sequence: Synthetic oligonucleotide
  Antisense strand to SEQ ID NO: 1038152
ucuacacacauacacaucc

SEQ ID NO: 1038154 - RNA, 19 nt, Artificial Sequence
  Description of Artificial Sequence: Synthetic oligonucleotide
  Sense strand starting at position 1556 of SEQ ID NO: 914887
cuccaugcgcuguguugaa

SEQ ID NO: 1038155 - RNA, 19 nt, Artificial Sequence
  Description of Artificial Sequence: Synthetic oligonucleotide
  Antisense strand to SEQ ID NO: 1038154
uucaacacagcgcauggag

SEQ ID NO: 1038156 - RNA, 19 nt, Artificial Sequence
  Description of Artificial Sequence: Synthetic oligonucleotide
  Sense strand starting at position 1615 of SEQ ID NO: 914887
ggccucuacugaucgggaa

SEQ ID NO: 1038157 - RNA, 19 nt, Artificial Sequence
  Description of Artificial Sequence: Synthetic oligonucleotide
  Antisense strand to SEQ ID NO: 1038156
uucccgaucaguagaggcc

SEQ ID NO: 1038158 - RNA, 19 nt, Artificial Sequence
  Description of Artificial Sequence: Synthetic oligonucleotide
  Sense strand starting at position 1616 of SEQ ID NO: 914887
gccucuacugaucgggaaa

SEQ ID NO: 1038159 - RNA, 19 nt, Artificial Sequence
  Description of Artificial Sequence: Synthetic oligonucleotide
  Antisense strand to SEQ ID NO: 1038158
uuucccgaucaguagaggc

SEQ ID NO: 1038160 - RNA, 19 nt, Artificial Sequence
  Description of Artificial Sequence: Synthetic oligonucleotide
  Sense strand starting at position 1617 of SEQ ID NO: 914887
ccucuacugaucgggaaac

SEQ ID NO: 1038161 - RNA, 19 nt, Artificial Sequence
  Description of Artificial Sequence: Synthetic oligonucleotide
  Antisense strand to SEQ ID NO: 1038160
guuucccgaucaguagagg

SEQ ID NO: 1038162 - RNA, 19 nt, Artificial Sequence
  Description of Artificial Sequence: Synthetic oligonucleotide
  Sense strand starting at position 1619 of SEQ ID NO: 914887
ucuacugaucgggaaacgu

SEQ ID NO: 1038163 - RNA, 19 nt, Artificial Sequence
  Description of Artificial Sequence: Synthetic oligonucleotide
  Antisense strand to SEQ ID NO: 1038162
acguuucccgaucaguaga

SEQ ID NO: 1038164 - RNA, 19 nt, Artificial Sequence
  Description of Artificial Sequence: Synthetic oligonucleotide
  Sense strand starting at position 1787 of SEQ ID NO: 914887
agcuaaaccugagauccaa

SEQ ID NO: 1038165 - RNA, 19 nt, Artificial Sequence
  Description of Artificial Sequence: Synthetic oligonucleotide
  Antisense strand to SEQ ID NO: 1038164
uuggaucucagguuuagcu

SEQ ID NO: 1038166 - RNA, 19 nt, Artificial Sequence
  Description of Artificial Sequence: Synthetic oligonucleotide
  Sense strand starting at position 1818 of SEQ ID NO: 914887
ccaaacguuuccucgagca

SEQ ID NO: 1038167 - RNA, 19 nt, Artificial Sequence
  Description of Artificial Sequence: Synthetic oligonucleotide
  Antisense strand to SEQ ID NO: 1038166
ugcucgaggaaacguuugg

SEQ ID NO: 1038168 - RNA, 19 nt, Artificial Sequence
  Description of Artificial Sequence: Synthetic oligonucleotide
  Sense strand starting at position 1859 of SEQ ID NO: 914887
aucuaugguuucugcuaua

SEQ ID NO: 1038169 - RNA, 19 nt, Artificial Sequence
  Description of Artificial Sequence: Synthetic oligonucleotide
  Antisense strand to SEQ ID NO: 1038168
uauagcagaaaccauagau

SEQ ID NO: 1038170 - RNA, 19 nt, Artificial Sequence
  Description of Artificial Sequence: Synthetic oligonucleotide
  Sense strand starting at position 3919 of SEQ ID NO: 914887
acagaauuucuguguuguu

SEQ ID NO: 1038171 - RNA, 19 nt, Artificial Sequence
  Description of Artificial Sequence: Synthetic oligonucleotide
  Antisense strand to SEQ ID NO: 1038170
aacaacacagaaauucugu

SEQ ID NO: 1038172 - RNA, 19 nt, Artificial Sequence
  Description of Artificial Sequence: Synthetic oligonucleotide
  Sense strand starting at position 3920 of SEQ ID NO: 914887
cagaauuucuguguuguug

SEQ ID NO: 1038173 - RNA, 19 nt, Artificial Sequence
  Description of Artificial Sequence: Synthetic oligonucleotide
  Antisense strand to SEQ ID NO: 1038172
caacaacacagaaauucug

SEQ ID NO: 1038174 - RNA, 19 nt, Artificial Sequence
  Description of Artificial Sequence: Synthetic oligonucleotide
  Sense strand starting at position 186 of SEQ ID NO: 914888
ggcgaagccgauuagucua

SEQ ID NO: 1038175 - RNA, 19 nt, Artificial Sequence
  Description of Artificial Sequence: Synthetic oligonucleotide
  Antisense strand to SEQ ID NO: 1038174
uagacuaaucggcuucgcc

SEQ ID NO: 1038176 - RNA, 19 nt, Artificial Sequence
  Description of Artificial Sequence: Synthetic oligonucleotide
  Sense strand starting at position 424 of SEQ ID NO: 914888
uuuaaaucgcaauacuaga

SEQ ID NO: 1038177 - RNA, 19 nt, Artificial Sequence
  Description of Artificial Sequence: Synthetic oligonucleotide
  Antisense strand to SEQ ID NO: 1038176
ucuaguauugcgauuuaaa

SEQ ID NO: 1038178 - RNA, 19 nt, Artificial Sequence
  Description of Artificial Sequence: Synthetic oligonucleotide
  Sense strand starting at position 493 of SEQ ID NO: 914888
ccgugauccuuguugcaaa

SEQ ID NO: 1038179 - RNA, 19 nt, Artificial Sequence
  Description of Artificial Sequence: Synthetic oligonucleotide
  Antisense strand to SEQ ID NO: 1038178
uuugcaacaaggaucacgg

SEQ ID NO: 1038180 - RNA, 19 nt, Artificial Sequence
  Description of Artificial Sequence: Synthetic oligonucleotide
  Sense strand starting at position 556 of SEQ ID NO: 914888
uguagaaauagcugcagaa

SEQ ID NO: 1038181 - RNA, 19 nt, Artificial Sequence
  Description of Artificial Sequence: Synthetic oligonucleotide
  Antisense strand to SEQ ID NO: 1038180
uucugcagcuauuucuaca

SEQ ID NO: 1038182 - RNA, 19 nt, Artificial Sequence
  Description of Artificial Sequence: Synthetic oligonucleotide
  Sense strand starting at position 584 of SEQ ID NO: 914888
ccugcagcccuagaguuaa

SEQ ID NO: 1038183 - RNA, 19 nt, Artificial Sequence
  Description of Artificial Sequence: Synthetic oligonucleotide
  Antisense strand to SEQ ID NO: 1038182
uuaacucuagggcugcagg

SEQ ID NO: 1038184 - RNA, 19 nt, Artificial Sequence
  Description of Artificial Sequence: Synthetic oligonucleotide
  Sense strand starting at position 612 of SEQ ID NO: 914888
gguggaacccucgaauucu

SEQ ID NO: 1038185 - RNA, 19 nt, Artificial Sequence
  Description of Artificial Sequence: Synthetic oligonucleotide
  Antisense strand to SEQ ID NO: 1038184
agaauucgaggguuccacc

SEQ ID NO: 1038186 - RNA, 19 nt, Artificial Sequence
  Description of Artificial Sequence: Synthetic oligonucleotide
  Sense strand starting at position 656 of SEQ ID NO: 914888
acugcauucgcuggaggaa

SEQ ID NO: 1038187 - RNA, 19 nt, Artificial Sequence
  Description of Artificial Sequence: Synthetic oligonucleotide
  Antisense strand to SEQ ID NO: 1038186
uuccuccagcgaaugcagu

SEQ ID NO: 1038188 - RNA, 19 nt, Artificial Sequence
  Description of Artificial Sequence: Synthetic oligonucleotide
  Sense strand starting at position 657 of SEQ ID NO: 914888
cugcauucgcuggaggaaa

SEQ ID NO: 1038189 - RNA, 19 nt, Artificial Sequence
  Description of Artificial Sequence: Synthetic oligonucleotide
  Antisense strand to SEQ ID NO: 1038188
uuuccuccagcgaaugcag

SEQ ID NO: 1038190 - RNA, 19 nt, Artificial Sequence
  Description of Artificial Sequence: Synthetic oligonucleotide
  Sense strand starting at position 659 of SEQ ID NO: 914888
gcauucgcuggaggaaaua

SEQ ID NO: 1038191 - RNA, 19 nt, Artificial Sequence
  Description of Artificial Sequence: Synthetic oligonucleotide
  Antisense strand to SEQ ID NO: 1038190
uauuuccuccagcgaaugc

SEQ ID NO: 1038192 - RNA, 19 nt, Artificial Sequence
  Description of Artificial Sequence: Synthetic oligonucleotide
  Sense strand starting at position 671 of SEQ ID NO: 914888
ggaaauaucacaggcugca

SEQ ID NO: 1038193 - RNA, 19 nt, Artificial Sequence
  Description of Artificial Sequence: Synthetic oligonucleotide
  Antisense strand to SEQ ID NO: 1038192
ugcagccugugauauuucc

SEQ ID NO: 1038194 - RNA, 19 nt, Artificial Sequence
  Description of Artificial Sequence: Synthetic oligonucleotide
  Sense strand starting at position 788 of SEQ ID NO: 914888
ccgggucucuccuuacaaa

SEQ ID NO: 1038195 - RNA, 19 nt, Artificial Sequence
  Description of Artificial Sequence: Synthetic oligonucleotide
  Antisense strand to SEQ ID NO: 1038194
uuuguaaggagagacccgg

SEQ ID NO: 1038196 - RNA, 19 nt, Artificial Sequence
  Description of Artificial Sequence: Synthetic oligonucleotide
  Sense strand starting at position 789 of SEQ ID NO: 914888
cgggucucuccuuacaaau

SEQ ID NO: 1038197 - RNA, 19 nt, Artificial Sequence
  Description of Artificial Sequence: Synthetic oligonucleotide
  Antisense strand to SEQ ID NO: 1038196
auuuguaaggagagacccg

SEQ ID NO: 1038198 - RNA, 19 nt, Artificial Sequence
  Description of Artificial Sequence: Synthetic oligonucleotide
  Sense strand starting at position 1030 of SEQ ID NO: 914888
cuuagagaucccugacugu

SEQ ID NO: 1038199 - RNA, 19 nt, Artificial Sequence
  Description of Artificial Sequence: Synthetic oligonucleotide
  Antisense strand to SEQ ID NO: 1038198
acagucagggaucucuaag

SEQ ID NO: 1038200 - RNA, 19 nt, Artificial Sequence
  Description of Artificial Sequence: Synthetic oligonucleotide
  Sense strand starting at position 1060 of SEQ ID NO: 914888
cggucucccuauuuguuaa

SEQ ID NO: 1038201 - RNA, 19 nt, Artificial Sequence
  Description of Artificial Sequence: Synthetic oligonucleotide
  Antisense strand to SEQ ID NO: 1038200
uuaacaaauagggagaccg

SEQ ID NO: 1038202 - RNA, 19 nt, Artificial Sequence
  Description of Artificial Sequence: Synthetic oligonucleotide
  Sense strand starting at position 1377 of SEQ ID NO: 914888
agaacuggaccucgaguuu

SEQ ID NO: 1038203 - RNA, 19 nt, Artificial Sequence
  Description of Artificial Sequence: Synthetic oligonucleotide
  Antisense strand to SEQ ID NO: 1038202
aaacucgagguccaguucu

SEQ ID NO: 1038204 - RNA, 19 nt, Artificial Sequence
  Description of Artificial Sequence: Synthetic oligonucleotide
  Sense strand starting at position 1442 of SEQ ID NO: 914888
ggccuaucauauccuuguu

SEQ ID NO: 1038205 - RNA, 19 nt, Artificial Sequence
  Description of Artificial Sequence: Synthetic oligonucleotide
  Antisense strand to SEQ ID NO: 1038204
aacaaggauaugauaggcc

SEQ ID NO: 1038206 - RNA, 19 nt, Artificial Sequence
  Description of Artificial Sequence: Synthetic oligonucleotide
  Sense strand starting at position 2064 of SEQ ID NO: 914888
gagccaugagccugaguca

SEQ ID NO: 1038207 - RNA, 19 nt, Artificial Sequence
  Description of Artificial Sequence: Synthetic oligonucleotide
  Antisense strand to SEQ ID NO: 1038206
ugacucaggcucauggcuc

SEQ ID NO: 1038208 - RNA, 19 nt, Artificial Sequence
  Description of Artificial Sequence: Synthetic oligonucleotide
  Sense strand starting at position 2118 of SEQ ID NO: 914888
ggagguuacucucaggaag

SEQ ID NO: 1038209 - RNA, 19 nt, Artificial Sequence
  Description of Artificial Sequence: Synthetic oligonucleotide
  Antisense strand to SEQ ID NO: 1038208
cuuccugagaguaaccucc

SEQ ID NO: 1038210 - RNA, 19 nt, Artificial Sequence
  Description of Artificial Sequence: Synthetic oligonucleotide
  Sense strand starting at position 2252 of SEQ ID NO: 914888
gucagucuguucuuaccua

SEQ ID NO: 1038211 - RNA, 19 nt, Artificial Sequence
  Description of Artificial Sequence: Synthetic oligonucleotide
  Antisense strand to SEQ ID NO: 1038210
uagguaagaacagacugac

SEQ ID NO: 1038212 - RNA, 19 nt, Artificial Sequence
  Description of Artificial Sequence: Synthetic oligonucleotide
  Sense strand starting at position 2453 of SEQ ID NO: 914888
caagaacugucaguggcuu

SEQ ID NO: 1038213 - RNA, 19 nt, Artificial Sequence
  Description of Artificial Sequence: Synthetic oligonucleotide
  Antisense strand to SEQ ID NO: 1038212
aagccacugacaguucuug

SEQ ID NO: 1038214 - RNA, 19 nt, Artificial Sequence
  Description of Artificial Sequence: Synthetic oligonucleotide
  Sense strand starting at position 3014 of SEQ ID NO: 914888
gggccuguauucuugcuga

SEQ ID NO: 1038215 - RNA, 19 nt, Artificial Sequence
  Description of Artificial Sequence: Synthetic oligonucleotide
  Antisense strand to SEQ ID NO: 1038214
ucagcaagaauacaggccc

SEQ ID NO: 1038216 - RNA, 19 nt, Artificial Sequence
  Description of Artificial Sequence: Synthetic oligonucleotide
  Sense strand starting at position 3017 of SEQ ID NO: 914888
ccuguauucuugcugauuc

SEQ ID NO: 1038217 - RNA, 19 nt, Artificial Sequence
  Description of Artificial Sequence: Synthetic oligonucleotide
  Antisense strand to SEQ ID NO: 1038216
gaaucagcaagaauacagg

SEQ ID NO: 1038218 - RNA, 19 nt, Artificial Sequence
  Description of Artificial Sequence: Synthetic oligonucleotide
  Sense strand starting at position 3019 of SEQ ID NO: 914888
uguauucuugcugauucca

SEQ ID NO: 1038219 - RNA, 19 nt, Artificial Sequence
  Description of Artificial Sequence: Synthetic oligonucleotide
  Antisense strand to SEQ ID NO: 1038218
uggaaucagcaagaauaca

SEQ ID NO: 1038220 - RNA, 19 nt, Artificial Sequence
  Description of Artificial Sequence: Synthetic oligonucleotide
  Sense strand starting at position 3117 of SEQ ID NO: 914888
uugguaagcccuugaguau

SEQ ID NO: 1038221 - RNA, 19 nt, Artificial Sequence
  Description of Artificial Sequence: Synthetic oligonucleotide
  Antisense strand to SEQ ID NO: 1038220
auacucaagggcuuaccaa

SEQ ID NO: 1038222 - RNA, 19 nt, Artificial Sequence
  Description of Artificial Sequence: Synthetic oligonucleotide
  Sense strand starting at position 3118 of SEQ ID NO: 914888
ugguaagcccuugaguaug

SEQ ID NO: 1038223 - RNA, 19 nt, Artificial Sequence
  Description of Artificial Sequence: Synthetic oligonucleotide
  Antisense strand to SEQ ID NO: 1038222
cauacucaagggcuuacca

SEQ ID NO: 1038224 - RNA, 19 nt, Artificial Sequence
  Description of Artificial Sequence: Synthetic oligonucleotide
  Sense strand starting at position 3123 of SEQ ID NO: 914888
agcccuugaguaugccaaa

SEQ ID NO: 1038225 - RNA, 19 nt, Artificial Sequence
  Description of Artificial Sequence: Synthetic oligonucleotide
  Antisense strand to SEQ ID NO: 1038224
uuuggcauacucaagggcu

SEQ ID NO: 1038226 - RNA, 19 nt, Artificial Sequence
  Description of Artificial Sequence: Synthetic oligonucleotide
  Sense strand starting at position 3154 of SEQ ID NO: 914888
uucugauaggaaugucuuu

SEQ ID NO: 1038227 - RNA, 19 nt, Artificial Sequence
  Description of Artificial Sequence: Synthetic oligonucleotide
  Antisense strand to SEQ ID NO: 1038226
aaagacauuccuaucagaa

SEQ ID NO: 1038228 - RNA, 19 nt, Artificial Sequence
  Description of Artificial Sequence: Synthetic oligonucleotide
  Sense strand starting at position 3198 of SEQ ID NO: 914888
cugacuuaauguuaaugaa

SEQ ID NO: 1038229 - RNA, 19 nt, Artificial Sequence
  Description of Artificial Sequence: Synthetic oligonucleotide
  Antisense strand to SEQ ID NO: 1038228
uucauuaacauuaagucag

SEQ ID NO: 1038230 - RNA, 19 nt, Artificial Sequence
  Description of Artificial Sequence: Synthetic oligonucleotide
  Sense strand starting at position 3244 of SEQ ID NO: 914888
gagccagucaugggaaaga

SEQ ID NO: 1038231 - RNA, 19 nt, Artificial Sequence
  Description of Artificial Sequence: Synthetic oligonucleotide
  Antisense strand to SEQ ID NO: 1038230
ucuuucccaugacuggcuc

SEQ ID NO: 1038232 - RNA, 19 nt, Artificial Sequence
  Description of Artificial Sequence: Synthetic oligonucleotide
  Sense strand starting at position 3262 of SEQ ID NO: 914888
accaaaugauuagggaauu

SEQ ID NO: 1038233 - RNA, 19 nt, Artificial Sequence
  Description of Artificial Sequence: Synthetic oligonucleotide
  Antisense strand to SEQ ID NO: 1038232
aauucccuaaucauuuggu

SEQ ID NO: 1038234 - RNA, 19 nt, Artificial Sequence
  Description of Artificial Sequence: Synthetic oligonucleotide
  Sense strand starting at position 3263 of SEQ ID NO: 914888
ccaaaugauuagggaauua

SEQ ID NO: 1038235 - RNA, 19 nt, Artificial Sequence
  Description of Artificial Sequence: Synthetic oligonucleotide
  Antisense strand to SEQ ID NO: 1038234
uaauucccuaaucauuugg

SEQ ID NO: 1038236 - RNA, 19 nt, Artificial Sequence
  Description of Artificial Sequence: Synthetic oligonucleotide
  Sense strand starting at position 3276 of SEQ ID NO: 914888
gaauuagagggcuggaacu

SEQ ID NO: 1038237 - RNA, 19 nt, Artificial Sequence
  Description of Artificial Sequence: Synthetic oligonucleotide
  Antisense strand to SEQ ID NO: 1038236
aguuccagcccucuaauuc

SEQ ID NO: 1038238 - RNA, 19 nt, Artificial Sequence
  Description of Artificial Sequence: Synthetic oligonucleotide
  Sense strand starting at position 3308 of SEQ ID NO: 914888
gguggauggcuuuacuuac

SEQ ID NO: 1038239 - RNA, 19 nt, Artificial Sequence
  Description of Artificial Sequence: Synthetic oligonucleotide
  Antisense strand to SEQ ID NO: 1038238
guaaguaaagccauccacc

SEQ ID NO: 1038240 - RNA, 19 nt, Artificial Sequence
  Description of Artificial Sequence: Synthetic oligonucleotide
  Sense strand starting at position 3365 of SEQ ID NO: 914888
auagauccauaacugaguu

SEQ ID NO: 1038241 - RNA, 19 nt, Artificial Sequence
  Description of Artificial Sequence: Synthetic oligonucleotide
  Antisense strand to SEQ ID NO: 1038240
aacucaguuauggaucuau

SEQ ID NO: 1038242 - RNA, 19 nt, Artificial Sequence
  Description of Artificial Sequence: Synthetic oligonucleotide
  Sense strand starting at position 3573 of SEQ ID NO: 914888
augcuugcauguucuaaca

SEQ ID NO: 1038243 - RNA, 19 nt, Artificial Sequence
  Description of Artificial Sequence: Synthetic oligonucleotide
  Antisense strand to SEQ ID NO: 1038242
uguuagaacaugcaagcau

SEQ ID NO: 1038244 - RNA, 19 nt, Artificial Sequence
  Description of Artificial Sequence: Synthetic oligonucleotide
  Sense strand starting at position 3613 of SEQ ID NO: 914888
cuaagaucacucuagguuc

SEQ ID NO: 1038245 - RNA, 19 nt, Artificial Sequence
  Description of Artificial Sequence: Synthetic oligonucleotide
  Antisense strand to SEQ ID NO: 1038244
gaaccuagagugaucuuag

SEQ ID NO: 1038246 - RNA, 19 nt, Artificial Sequence
  Description of Artificial Sequence: Synthetic oligonucleotide
  Sense strand starting at position 3712 of SEQ ID NO: 914888
ggcagauugccacaguguu

SEQ ID NO: 1038247 - RNA, 19 nt, Artificial Sequence
  Description of Artificial Sequence: Synthetic oligonucleotide
  Antisense strand to SEQ ID NO: 1038246
aacacuguggcaaucugcc

SEQ ID NO: 1038248 - RNA, 19 nt, Artificial Sequence
  Description of Artificial Sequence: Synthetic oligonucleotide
  Sense strand starting at position 3734 of SEQ ID NO: 914888
cgguuucucagucuuugca

SEQ ID NO: 1038249 - RNA, 19 nt, Artificial Sequence
  Description of Artificial Sequence: Synthetic oligonucleotide
  Antisense strand to SEQ ID NO: 1038248
ugcaaagacugagaaaccg

SEQ ID NO: 1038250 - RNA, 19 nt, Artificial Sequence
  Description of Artificial Sequence: Synthetic oligonucleotide
  Sense strand starting at position 3748 of SEQ ID NO: 914888
uugcaacaguguucucagu

SEQ ID NO: 1038251 - RNA, 19 nt, Artificial Sequence
  Description of Artificial Sequence: Synthetic oligonucleotide
  Antisense strand to SEQ ID NO: 1038250
acugagaacacuguugcaa

SEQ ID NO: 1038252 - RNA, 19 nt, Artificial Sequence
  Description of Artificial Sequence: Synthetic oligonucleotide
  Sense strand starting at position 3750 of SEQ ID NO: 914888
gcaacaguguucucaguca

SEQ ID NO: 1038253 - RNA, 19 nt, Artificial Sequence
  Description of Artificial Sequence: Synthetic oligonucleotide
  Antisense strand to SEQ ID NO: 1038252
ugacugagaacacuguugc

SEQ ID NO: 1038254 - RNA, 19 nt, Artificial Sequence
  Description of Artificial Sequence: Synthetic oligonucleotide
  Sense strand starting at position 81 of SEQ ID NO: 914889
cuggauguggucuaucguu

SEQ ID NO: 1038255 - RNA, 19 nt, Artificial Sequence
  Description of Artificial Sequence: Synthetic oligonucleotide
  Antisense strand to SEQ ID NO: 1038254
aacgauagaccacauccag

SEQ ID NO: 1038256 - RNA, 19 nt, Artificial Sequence
  Description of Artificial Sequence: Synthetic oligonucleotide
  Sense strand starting at position 86 of SEQ ID NO: 914889
uguggucuaucguuaccaa

SEQ ID NO: 1038257 - RNA, 19 nt, Artificial Sequence
  Description of Artificial Sequence: Synthetic oligonucleotide
  Antisense strand to SEQ ID NO: 1038256
uugguaacgauagaccaca

SEQ ID NO: 1038258 - RNA, 19 nt, Artificial Sequence
  Description of Artificial Sequence: Synthetic oligonucleotide
  Sense strand starting at position 87 of SEQ ID NO: 914889
guggucuaucguuaccaaa

SEQ ID NO: 1038259 - RNA, 19 nt, Artificial Sequence
  Description of Artificial Sequence: Synthetic oligonucleotide
  Antisense strand to SEQ ID NO: 1038258
uuugguaacgauagaccac

SEQ ID NO: 1038260 - RNA, 19 nt, Artificial Sequence
  Description of Artificial Sequence: Synthetic oligonucleotide
  Sense strand starting at position 143 of SEQ ID NO: 914889
caauauaaugagugucagu

SEQ ID NO: 1038261 - RNA, 19 nt, Artificial Sequence
  Description of Artificial Sequence: Synthetic oligonucleotide
  Antisense strand to SEQ ID NO: 1038260
acugacacucauuauauug

SEQ ID NO: 1038262 - RNA, 19 nt, Artificial Sequence
  Description of Artificial Sequence: Synthetic oligonucleotide
  Sense strand starting at position 148 of SEQ ID NO: 914889
uaaugagugucaguuacuc

SEQ ID NO: 1038263 - RNA, 19 nt, Artificial Sequence
  Description of Artificial Sequence: Synthetic oligonucleotide
  Antisense strand to SEQ ID NO: 1038262
gaguaacugacacucauua

SEQ ID NO: 1038264 - RNA, 19 nt, Artificial Sequence
  Description of Artificial Sequence: Synthetic oligonucleotide
  Sense strand starting at position 150 of SEQ ID NO: 914889
augagugucaguuacucuu

SEQ ID NO: 1038265 - RNA, 19 nt, Artificial Sequence
  Description of Artificial Sequence: Synthetic oligonucleotide
  Antisense strand to SEQ ID NO: 1038264
aagaguaacugacacucau

SEQ ID NO: 1038266 - RNA, 19 nt, Artificial Sequence
  Description of Artificial Sequence: Synthetic oligonucleotide
  Sense strand starting at position 297 of SEQ ID NO: 914889
cuaagaacauauguagagu

SEQ ID NO: 1038267 - RNA, 19 nt, Artificial Sequence
  Description of Artificial Sequence: Synthetic oligonucleotide
  Antisense strand to SEQ ID NO: 1038266
acucuacauauguucuuag

SEQ ID NO: 1038268 - RNA, 19 nt, Artificial Sequence
  Description of Artificial Sequence: Synthetic oligonucleotide
  Sense strand starting at position 308 of SEQ ID NO: 914889
uguagagucaccuguguug

SEQ ID NO: 1038269 - RNA, 19 nt, Artificial Sequence
  Description of Artificial Sequence: Synthetic oligonucleotide
  Antisense strand to SEQ ID NO: 1038268
caacacaggugacucuaca

SEQ ID NO: 1038270 - RNA, 19 nt, Artificial Sequence
  Description of Artificial Sequence: Synthetic oligonucleotide
  Sense strand starting at position 345 of SEQ ID NO: 914889
gcucauuucugucuuuagu

SEQ ID NO: 1038271 - RNA, 19 nt, Artificial Sequence
  Description of Artificial Sequence: Synthetic oligonucleotide
  Antisense strand to SEQ ID NO: 1038270
acuaaagacagaaaugagc

SEQ ID NO: 1038272 - RNA, 19 nt, Artificial Sequence
  Description of Artificial Sequence: Synthetic oligonucleotide
  Sense strand starting at position 354 of SEQ ID NO: 914889
ugucuuuagucccuucuca

SEQ ID NO: 1038273 - RNA, 19 nt, Artificial Sequence
  Description of Artificial Sequence: Synthetic oligonucleotide
  Antisense strand to SEQ ID NO: 1038272
ugagaagggacuaaagaca

SEQ ID NO: 1038274 - RNA, 19 nt, Artificial Sequence
  Description of Artificial Sequence: Synthetic oligonucleotide
  Sense strand starting at position 800 of SEQ ID NO: 914889
uguaauaaggagugcuuua

SEQ ID NO: 1038275 - RNA, 19 nt, Artificial Sequence
  Description of Artificial Sequence: Synthetic oligonucleotide
  Antisense strand to SEQ ID NO: 1038274
uaaagcacuccuuauuaca

SEQ ID NO: 1038276 - RNA, 19 nt, Artificial Sequence
  Description of Artificial Sequence: Synthetic oligonucleotide
  Sense strand starting at position 805 of SEQ ID NO: 914889
uaaggagugcuuuacucac

SEQ ID NO: 1038277 - RNA, 19 nt, Artificial Sequence
  Description of Artificial Sequence: Synthetic oligonucleotide
  Antisense strand to SEQ ID NO: 1038276
gugaguaaagcacuccuua

SEQ ID NO: 1038278 - RNA, 19 nt, Artificial Sequence
  Description of Artificial Sequence: Synthetic oligonucleotide
  Sense strand starting at position 807 of SEQ ID NO: 914889
aggagugcuuuacucacaa

SEQ ID NO: 1038279 - RNA, 19 nt, Artificial Sequence
  Description of Artificial Sequence: Synthetic oligonucleotide
  Antisense strand to SEQ ID NO: 1038278
uugugaguaaagcacuccu

SEQ ID NO: 1038280 - RNA, 19 nt, Artificial Sequence
  Description of Artificial Sequence: Synthetic oligonucleotide
  Sense strand starting at position 897 of SEQ ID NO: 914889
agauuugagugggagaacu

SEQ ID NO: 1038281 - RNA, 19 nt, Artificial Sequence
  Description of Artificial Sequence: Synthetic oligonucleotide
  Antisense strand to SEQ ID NO: 1038280
aguucucccacucaaaucu

SEQ ID NO: 1038282 - RNA, 19 nt, Artificial Sequence
  Description of Artificial Sequence: Synthetic oligonucleotide
  Sense strand starting at position 1035 of SEQ ID NO: 914889
guagucaauccaugcaugu

SEQ ID NO: 1038283 - RNA, 19 nt, Artificial Sequence
  Description of Artificial Sequence: Synthetic oligonucleotide
  Antisense strand to SEQ ID NO: 1038282
acaugcauggauugacuac

SEQ ID NO: 1038284 - RNA, 19 nt, Artificial Sequence
  Description of Artificial Sequence: Synthetic oligonucleotide
  Sense strand starting at position 1163 of SEQ ID NO: 914889
cacagaaaguuauccgaau

SEQ ID NO: 1038285 - RNA, 19 nt, Artificial Sequence
  Description of Artificial Sequence: Synthetic oligonucleotide
  Antisense strand to SEQ ID NO: 1038284
auucggauaacuuucugug

SEQ ID NO: 1038286 - RNA, 19 nt, Artificial Sequence
  Description of Artificial Sequence: Synthetic oligonucleotide
  Sense strand starting at position 1164 of SEQ ID NO: 914889
acagaaaguuauccgaaug

SEQ ID NO: 1038287 - RNA, 19 nt, Artificial Sequence
  Description of Artificial Sequence: Synthetic oligonucleotide
  Antisense strand to SEQ ID NO: 1038286
cauucggauaacuuucugu

SEQ ID NO: 1038288 - RNA, 19 nt, Artificial Sequence
  Description of Artificial Sequence: Synthetic oligonucleotide
  Sense strand starting at position 1169 of SEQ ID NO: 914889
aaguuauccgaaugagugc

SEQ ID NO: 1038289 - RNA, 19 nt, Artificial Sequence
  Description of Artificial Sequence: Synthetic oligonucleotide
  Antisense strand to SEQ ID NO: 1038288
gcacucauucggauaacuu

SEQ ID NO: 1038290 - RNA, 19 nt, Artificial Sequence
  Description of Artificial Sequence: Synthetic oligonucleotide
  Sense strand starting at position 1175 of SEQ ID NO: 914889
uccgaaugagugcauaaau

SEQ ID NO: 1038291 - RNA, 19 nt, Artificial Sequence
  Description of Artificial Sequence: Synthetic oligonucleotide
  Antisense strand to SEQ ID NO: 1038290
auuuaugcacucauucgga

SEQ ID NO: 1038292 - RNA, 19 nt, Artificial Sequence
  Description of Artificial Sequence: Synthetic oligonucleotide
  Sense strand starting at position 1267 of SEQ ID NO: 914889
augggcuuccaguguggua

SEQ ID NO: 1038293 - RNA, 19 nt, Artificial Sequence
  Description of Artificial Sequence: Synthetic oligonucleotide
  Antisense strand to SEQ ID NO: 1038292
uaccacacuggaagcccau

SEQ ID NO: 1038294 - RNA, 19 nt, Artificial Sequence
  Description of Artificial Sequence: Synthetic oligonucleotide
  Sense strand starting at position 1269 of SEQ ID NO: 914889
gggcuuccagugugguaga

SEQ ID NO: 1038295 - RNA, 19 nt, Artificial Sequence
  Description of Artificial Sequence: Synthetic oligonucleotide
  Antisense strand to SEQ ID NO: 1038294
ucuaccacacuggaagccc

SEQ ID NO: 1038296 - RNA, 19 nt, Artificial Sequence
  Description of Artificial Sequence: Synthetic oligonucleotide
  Sense strand starting at position 1443 of SEQ ID NO: 914889
aggaaucuauaggaggaaa

SEQ ID NO: 1038297 - RNA, 19 nt, Artificial Sequence
  Description of Artificial Sequence: Synthetic oligonucleotide
  Antisense strand to SEQ ID NO: 1038296
uuuccuccuauagauuccu

SEQ ID NO: 1038298 - RNA, 19 nt, Artificial Sequence
  Description of Artificial Sequence: Synthetic oligonucleotide
  Sense strand starting at position 1624 of SEQ ID NO: 914889
augacagggucugugaaga

SEQ ID NO: 1038299 - RNA, 19 nt, Artificial Sequence
  Description of Artificial Sequence: Synthetic oligonucleotide
  Antisense strand to SEQ ID NO: 1038298
ucuucacagacccugucau

SEQ ID NO: 1038300 - RNA, 19 nt, Artificial Sequence
  Description of Artificial Sequence: Synthetic oligonucleotide
  Sense strand starting at position 1642 of SEQ ID NO: 914889
agugaaggcccauaccuua

SEQ ID NO: 1038301 - RNA, 19 nt, Artificial Sequence
  Description of Artificial Sequence: Synthetic oligonucleotide
  Antisense strand to SEQ ID NO: 1038300
uaagguaugggccuucacu

SEQ ID NO: 1038302 - RNA, 19 nt, Artificial Sequence
  Description of Artificial Sequence: Synthetic oligonucleotide
  Sense strand starting at position 2063 of SEQ ID NO: 914889
ggcgaagccgauuagucua

SEQ ID NO: 1038303 - RNA, 19 nt, Artificial Sequence
  Description of Artificial Sequence: Synthetic oligonucleotide
  Antisense strand to SEQ ID NO: 1038302
uagacuaaucggcuucgcc

SEQ ID NO: 1038304 - RNA, 19 nt, Artificial Sequence
  Description of Artificial Sequence: Synthetic oligonucleotide
  Sense strand starting at position 2301 of SEQ ID NO: 914889
uuuaaaucgcaauacuaga

SEQ ID NO: 1038305 - RNA, 19 nt, Artificial Sequence
  Description of Artificial Sequence: Synthetic oligonucleotide
  Antisense strand to SEQ ID NO: 1038304
ucuaguauugcgauuuaaa

SEQ ID NO: 1038306 - RNA, 19 nt, Artificial Sequence
  Description of Artificial Sequence: Synthetic oligonucleotide
  Sense strand starting at position 2433 of SEQ ID NO: 914889
uguagaaauagcugcagaa

SEQ ID NO: 1038307 - RNA, 19 nt, Artificial Sequence
  Description of Artificial Sequence: Synthetic oligonucleotide
  Antisense strand to SEQ ID NO: 1038306
uucugcagcuauuucuaca

SEQ ID NO: 1038308 - RNA, 19 nt, Artificial Sequence
  Description of Artificial Sequence: Synthetic oligonucleotide
  Sense strand starting at position 2461 of SEQ ID NO: 914889
ccugcagcccuagaguuaa

SEQ ID NO: 1038309 - RNA, 19 nt, Artificial Sequence
  Description of Artificial Sequence: Synthetic oligonucleotide
  Antisense strand to SEQ ID NO: 1038308
uuaacucuagggcugcagg

SEQ ID NO: 1038310 - RNA, 19 nt, Artificial Sequence
  Description of Artificial Sequence: Synthetic oligonucleotide
  Sense strand starting at position 2489 of SEQ ID NO: 914889
gguggaacccucgaauucu

SEQ ID NO: 1038311 - RNA, 19 nt, Artificial Sequence
  Description of Artificial Sequence: Synthetic oligonucleotide
  Antisense strand to SEQ ID NO: 1038310
agaauucgaggguuccacc

SEQ ID NO: 1038312 - RNA, 19 nt, Artificial Sequence
  Description of Artificial Sequence: Synthetic oligonucleotide
  Sense strand starting at position 2533 of SEQ ID NO: 914889
acugcauucgcuggaggaa

SEQ ID NO: 1038313 - RNA, 19 nt, Artificial Sequence
  Description of Artificial Sequence: Synthetic oligonucleotide
  Antisense strand to SEQ ID NO: 1038312
uuccuccagcgaaugcagu

SEQ ID NO: 1038314 - RNA, 19 nt, Artificial Sequence
  Description of Artificial Sequence: Synthetic oligonucleotide
  Sense strand starting at position 2534 of SEQ ID NO: 914889
cugcauucgcuggaggaaa

SEQ ID NO: 1038315 - RNA, 19 nt, Artificial Sequence
  Description of Artificial Sequence: Synthetic oligonucleotide
  Antisense strand to SEQ ID NO: 1038314
uuuccuccagcgaaugcag

SEQ ID NO: 1038316 - RNA, 19 nt, Artificial Sequence
  Description of Artificial Sequence: Synthetic oligonucleotide
  Sense strand starting at position 2536 of SEQ ID NO: 914889
gcauucgcuggaggaaaua

SEQ ID NO: 1038317 - RNA, 19 nt, Artificial Sequence
  Description of Artificial Sequence: Synthetic oligonucleotide
  Antisense strand to SEQ ID NO: 1038316
uauuuccuccagcgaaugc

SEQ ID NO: 1038318 - RNA, 19 nt, Artificial Sequence
  Description of Artificial Sequence: Synthetic oligonucleotide
  Sense strand starting at position 2548 of SEQ ID NO: 914889
ggaaauaucacaggcugca

SEQ ID NO: 1038319 - RNA, 19 nt, Artificial Sequence
  Description of Artificial Sequence: Synthetic oligonucleotide
  Antisense strand to SEQ ID NO: 1038318
ugcagccugugauauuucc

SEQ ID NO: 1038320 - RNA, 19 nt, Artificial Sequence
  Description of Artificial Sequence: Synthetic oligonucleotide
  Sense strand starting at position 2665 of SEQ ID NO: 914889
ccgggucucuccuuacaaa

SEQ ID NO: 1038321 - RNA, 19 nt, Artificial Sequence
  Description of Artificial Sequence: Synthetic oligonucleotide
  Antisense strand to SEQ ID NO: 1038320
uuuguaaggagagacccgg

SEQ ID NO: 1038322 - RNA, 19 nt, Artificial Sequence
  Description of Artificial Sequence: Synthetic oligonucleotide
  Sense strand starting at position 2666 of SEQ ID NO: 914889
cgggucucuccuuacaaau

SEQ ID NO: 1038323 - RNA, 19 nt, Artificial Sequence
  Description of Artificial Sequence: Synthetic oligonucleotide
  Antisense strand to SEQ ID NO: 1038322
auuuguaaggagagacccg

SEQ ID NO: 1038324 - RNA, 19 nt, Artificial Sequence
  Description of Artificial Sequence: Synthetic oligonucleotide
  Sense strand starting at position 2907 of SEQ ID NO: 914889
cuuagagaucccugacugu

SEQ ID NO: 1038325 - RNA, 19 nt, Artificial Sequence
  Description of Artificial Sequence: Synthetic oligonucleotide
  Antisense strand to SEQ ID NO: 1038324
acagucagggaucucuaag

SEQ ID NO: 1038326 - RNA, 19 nt, Artificial Sequence
  Description of Artificial Sequence: Synthetic oligonucleotide
  Sense strand starting at position 2937 of SEQ ID NO: 914889
cggucucccuauuuguuaa

SEQ ID NO: 1038327 - RNA, 19 nt, Artificial Sequence
  Description of Artificial Sequence: Synthetic oligonucleotide
  Antisense strand to SEQ ID NO: 1038326
uuaacaaauagggagaccg

SEQ ID NO: 1038328 - RNA, 19 nt, Artificial Sequence
  Description of Artificial Sequence: Synthetic oligonucleotide
  Sense strand starting at position 3254 of SEQ ID NO: 914889
agaacuggaccucgaguuu

SEQ ID NO: 1038329 - RNA, 19 nt, Artificial Sequence
  Description of Artificial Sequence: Synthetic oligonucleotide
  Antisense strand to SEQ ID NO: 1038328
aaacucgagguccaguucu

SEQ ID NO: 1038330 - RNA, 19 nt, Artificial Sequence
  Description of Artificial Sequence: Synthetic oligonucleotide
  Sense strand starting at position 3319 of SEQ ID NO: 914889
ggccuaucauauccuuguu

SEQ ID NO: 1038331 - RNA, 19 nt, Artificial Sequence
  Description of Artificial Sequence: Synthetic oligonucleotide
  Antisense strand to SEQ ID NO: 1038330
aacaaggauaugauaggcc

SEQ ID NO: 1038332 - RNA, 19 nt, Artificial Sequence
  Description of Artificial Sequence: Synthetic oligonucleotide
  Sense strand starting at position 3941 of SEQ ID NO: 914889
gagccaugagccugaguca

SEQ ID NO: 1038333 - RNA, 19 nt, Artificial Sequence
  Description of Artificial Sequence: Synthetic oligonucleotide
  Antisense strand to SEQ ID NO: 1038332
ugacucaggcucauggcuc

SEQ ID NO: 1038334 - RNA, 19 nt, Artificial Sequence
  Description of Artificial Sequence: Synthetic oligonucleotide
  Sense strand starting at position 111 of SEQ ID NO: 914890
aucaaugagucacagaugu

SEQ ID NO: 1038335 - RNA, 19 nt, Artificial Sequence
  Description of Artificial Sequence: Synthetic oligonucleotide
  Antisense strand to SEQ ID NO: 1038334
acaucugugacucauugau

SEQ ID NO: 1038336 - RNA, 19 nt, Artificial Sequence
  Description of Artificial Sequence: Synthetic oligonucleotide
  Sense strand starting at position 272 of SEQ ID NO: 914890
ccauaaggucacuauguca

SEQ ID NO: 1038337 - RNA, 19 nt, Artificial Sequence
  Description of Artificial Sequence: Synthetic oligonucleotide
  Antisense strand to SEQ ID NO: 1038336
ugacauagugaccuuaugg

SEQ ID NO: 1038338 - RNA, 19 nt, Artificial Sequence
  Description of Artificial Sequence: Synthetic oligonucleotide
  Sense strand starting at position 279 of SEQ ID NO: 914890
gucacuaugucaucuagau

SEQ ID NO: 1038339 - RNA, 19 nt, Artificial Sequence
  Description of Artificial Sequence: Synthetic oligonucleotide
  Antisense strand to SEQ ID NO: 1038338
aucuagaugacauagugac

SEQ ID NO: 1038340 - RNA, 19 nt, Artificial Sequence
  Description of Artificial Sequence: Synthetic oligonucleotide
  Sense strand starting at position 329 of SEQ ID NO: 914890
ugacucaugccaggauuaa

SEQ ID NO: 1038341 - RNA, 19 nt, Artificial Sequence
  Description of Artificial Sequence: Synthetic oligonucleotide
  Antisense strand to SEQ ID NO: 1038340
uuaauccuggcaugaguca

SEQ ID NO: 1038342 - RNA, 19 nt, Artificial Sequence
  Description of Artificial Sequence: Synthetic oligonucleotide
  Sense strand starting at position 400 of SEQ ID NO: 914890
uauagcucagagugucuua

SEQ ID NO: 1038343 - RNA, 19 nt, Artificial Sequence
  Description of Artificial Sequence: Synthetic oligonucleotide
  Antisense strand to SEQ ID NO: 1038342
uaagacacucugagcuaua

SEQ ID NO: 1038344 - RNA, 19 nt, Artificial Sequence
  Description of Artificial Sequence: Synthetic oligonucleotide
  Sense strand starting at position 403 of SEQ ID NO: 914890
agcucagagugucuuauga

SEQ ID NO: 1038345 - RNA, 19 nt, Artificial Sequence
  Description of Artificial Sequence: Synthetic oligonucleotide
  Antisense strand to SEQ ID NO: 1038344
ucauaagacacucugagcu

SEQ ID NO: 1038346 - RNA, 19 nt, Artificial Sequence
  Description of Artificial Sequence: Synthetic oligonucleotide
  Sense strand starting at position 407 of SEQ ID NO: 914890
cagagugucuuaugauuua

SEQ ID NO: 1038347 - RNA, 19 nt, Artificial Sequence
  Description of Artificial Sequence: Synthetic oligonucleotide
  Antisense strand to SEQ ID NO: 1038346
uaaaucauaagacacucug

SEQ ID NO: 1038348 - RNA, 19 nt, Artificial Sequence
  Description of Artificial Sequence: Synthetic oligonucleotide
  Sense strand starting at position 457 of SEQ ID NO: 914890
ggguaauauucuuagaaag

SEQ ID NO: 1038349 - RNA, 19 nt, Artificial Sequence
  Description of Artificial Sequence: Synthetic oligonucleotide
  Antisense strand to SEQ ID NO: 1038348
cuuucuaagaauauuaccc

SEQ ID NO: 1038350 - RNA, 19 nt, Artificial Sequence
  Description of Artificial Sequence: Synthetic oligonucleotide
  Sense strand starting at position 459 of SEQ ID NO: 914890
guaauauucuuagaaaggg

SEQ ID NO: 1038351 - RNA, 19 nt, Artificial Sequence
  Description of Artificial Sequence: Synthetic oligonucleotide
  Antisense strand to SEQ ID NO: 1038350
cccuuucuaagaauauuac

SEQ ID NO: 1038352 - RNA, 19 nt, Artificial Sequence
  Description of Artificial Sequence: Synthetic oligonucleotide
  Sense strand starting at position 732 of SEQ ID NO: 914890
ugagcugaguuuccaaauc

SEQ ID NO: 1038353 - RNA, 19 nt, Artificial Sequence
  Description of Artificial Sequence: Synthetic oligonucleotide
  Antisense strand to SEQ ID NO: 1038352
gauuuggaaacucagcuca

SEQ ID NO: 1038354 - RNA, 19 nt, Artificial Sequence
  Description of Artificial Sequence: Synthetic oligonucleotide
  Sense strand starting at position 765 of SEQ ID NO: 914890
cucauauugucauuacgug

SEQ ID NO: 1038355 - RNA, 19 nt, Artificial Sequence
  Description of Artificial Sequence: Synthetic oligonucleotide
  Antisense strand to SEQ ID NO: 1038354
cacguaaugacaauaugag

SEQ ID NO: 1038356 - RNA, 19 nt, Artificial Sequence
  Description of Artificial Sequence: Synthetic oligonucleotide
  Sense strand starting at position 766 of SEQ ID NO: 914890
ucauauugucauuacguga

SEQ ID NO: 1038357 - RNA, 19 nt, Artificial Sequence
  Description of Artificial Sequence: Synthetic oligonucleotide
  Antisense strand to SEQ ID NO: 1038356
ucacguaaugacaauauga

SEQ ID NO: 1038358 - RNA, 19 nt, Artificial Sequence
  Description of Artificial Sequence: Synthetic oligonucleotide
  Sense strand starting at position 769 of SEQ ID NO: 914890
uauugucauuacgugaaag

SEQ ID NO: 1038359 - RNA, 19 nt, Artificial Sequence
  Description of Artificial Sequence: Synthetic oligonucleotide
  Antisense strand to SEQ ID NO: 1038358
cuuucacguaaugacaaua

SEQ ID NO: 1038360 - RNA, 19 nt, Artificial Sequence
  Description of Artificial Sequence: Synthetic oligonucleotide
  Sense strand starting at position 770 of SEQ ID NO: 914890
auugucauuacgugaaagu

SEQ ID NO: 1038361 - RNA, 19 nt, Artificial Sequence
  Description of Artificial Sequence: Synthetic oligonucleotide
  Antisense strand to SEQ ID NO: 1038360
acuuucacguaaugacaau

SEQ ID NO: 1038362 - RNA, 19 nt, Artificial Sequence
  Description of Artificial Sequence: Synthetic oligonucleotide
  Sense strand starting at position 771 of SEQ ID NO: 914890
uugucauuacgugaaagug

SEQ ID NO: 1038363 - RNA, 19 nt, Artificial Sequence
  Description of Artificial Sequence: Synthetic oligonucleotide
  Antisense strand to SEQ ID NO: 1038362
cacuuucacguaaugacaa

SEQ ID NO: 1038364 - RNA, 19 nt, Artificial Sequence
  Description of Artificial Sequence: Synthetic oligonucleotide
  Sense strand starting at position 781 of SEQ ID NO: 914890
gugaaagugaaaugucaac

SEQ ID NO: 1038365 - RNA, 19 nt, Artificial Sequence
  Description of Artificial Sequence: Synthetic oligonucleotide
  Antisense strand to SEQ ID NO: 1038364
guugacauuucacuuucac

SEQ ID NO: 1038366 - RNA, 19 nt, Artificial Sequence
  Description of Artificial Sequence: Synthetic oligonucleotide
  Sense strand starting at position 787 of SEQ ID NO: 914890
gugaaaugucaacauacuu

SEQ ID NO: 1038367 - RNA, 19 nt, Artificial Sequence
  Description of Artificial Sequence: Synthetic oligonucleotide
  Antisense strand to SEQ ID NO: 1038366
aaguauguugacauuucac

SEQ ID NO: 1038368 - RNA, 19 nt, Artificial Sequence
  Description of Artificial Sequence: Synthetic oligonucleotide
  Sense strand starting at position 2111 of SEQ ID NO: 914890
gcuguugggcggaguuguu

SEQ ID NO: 1038369 - RNA, 19 nt, Artificial Sequence
  Description of Artificial Sequence: Synthetic oligonucleotide
  Antisense strand to SEQ ID NO: 1038368
aacaacuccgcccaacagc

SEQ ID NO: 1038370 - RNA, 19 nt, Artificial Sequence
  Description of Artificial Sequence: Synthetic oligonucleotide
  Sense strand starting at position 2120 of SEQ ID NO: 914890
cggaguuguuugccuagaa

SEQ ID NO: 1038371 - RNA, 19 nt, Artificial Sequence
  Description of Artificial Sequence: Synthetic oligonucleotide
  Antisense strand to SEQ ID NO: 1038370
uucuaggcaaacaacuccg

SEQ ID NO: 1038372 - RNA, 19 nt, Artificial Sequence
  Description of Artificial Sequence: Synthetic oligonucleotide
  Sense strand starting at position 2121 of SEQ ID NO: 914890
ggaguuguuugccuagaac

SEQ ID NO: 1038373 - RNA, 19 nt, Artificial Sequence
  Description of Artificial Sequence: Synthetic oligonucleotide
  Antisense strand to SEQ ID NO: 1038372
guucuaggcaaacaacucc

SEQ ID NO: 1038374 - RNA, 19 nt, Artificial Sequence
  Description of Artificial Sequence: Synthetic oligonucleotide
  Sense strand starting at position 2124 of SEQ ID NO: 914890
guuguuugccuagaaccca

SEQ ID NO: 1038375 - RNA, 19 nt, Artificial Sequence
  Description of Artificial Sequence: Synthetic oligonucleotide
  Antisense strand to SEQ ID NO: 1038374
uggguucuaggcaaacaac

SEQ ID NO: 1038376 - RNA, 19 nt, Artificial Sequence
  Description of Artificial Sequence: Synthetic oligonucleotide
  Sense strand starting at position 2178 of SEQ ID NO: 914890
aaaccuugucuggauguau

SEQ ID NO: 1038377 - RNA, 19 nt, Artificial Sequence
  Description of Artificial Sequence: Synthetic oligonucleotide
  Antisense strand to SEQ ID NO: 1038376
auacauccagacaagguuu

SEQ ID NO: 1038378 - RNA, 19 nt, Artificial Sequence
  Description of Artificial Sequence: Synthetic oligonucleotide
  Sense strand starting at position 2279 of SEQ ID NO: 914890
ccucaaaugugagcuaaag

SEQ ID NO: 1038379 - RNA, 19 nt, Artificial Sequence
  Description of Artificial Sequence: Synthetic oligonucleotide
  Antisense strand to SEQ ID NO: 1038378
cuuuagcucacauuugagg

SEQ ID NO: 1038380 - RNA, 19 nt, Artificial Sequence
  Description of Artificial Sequence: Synthetic oligonucleotide
  Sense strand starting at position 2511 of SEQ ID NO: 914890
gcacaagaauuguuuguga

SEQ ID NO: 1038381 - RNA, 19 nt, Artificial Sequence
  Description of Artificial Sequence: Synthetic oligonucleotide
  Antisense strand to SEQ ID NO: 1038380
ucacaaacaauucuugugc

SEQ ID NO: 1038382 - RNA, 19 nt, Artificial Sequence
  Description of Artificial Sequence: Synthetic oligonucleotide
  Sense strand starting at position 2513 of SEQ ID NO: 914890
acaagaauuguuugugaac

SEQ ID NO: 1038383 - RNA, 19 nt, Artificial Sequence
  Description of Artificial Sequence: Synthetic oligonucleotide
  Antisense strand to SEQ ID NO: 1038382
guucacaaacaauucuugu

SEQ ID NO: 1038384 - RNA, 19 nt, Artificial Sequence
  Description of Artificial Sequence: Synthetic oligonucleotide
  Sense strand starting at position 2662 of SEQ ID NO: 914890
ccugaagaauuugaugaau

SEQ ID NO: 1038385 - RNA, 19 nt, Artificial Sequence
  Description of Artificial Sequence: Synthetic oligonucleotide
  Antisense strand to SEQ ID NO: 1038384
auucaucaaauucuucagg

SEQ ID NO: 1038386 - RNA, 19 nt, Artificial Sequence
  Description of Artificial Sequence: Synthetic oligonucleotide
  Sense strand starting at position 2664 of SEQ ID NO: 914890
ugaagaauuugaugaaugc

SEQ ID NO: 1038387 - RNA, 19 nt, Artificial Sequence
  Description of Artificial Sequence: Synthetic oligonucleotide
  Antisense strand to SEQ ID NO: 1038386
gcauucaucaaauucuuca

SEQ ID NO: 1038388 - RNA, 19 nt, Artificial Sequence
  Description of Artificial Sequence: Synthetic oligonucleotide
  Sense strand starting at position 2673 of SEQ ID NO: 914890
ugaugaaugcagugccaau

SEQ ID NO: 1038389 - RNA, 19 nt, Artificial Sequence
  Description of Artificial Sequence: Synthetic oligonucleotide
  Antisense strand to SEQ ID NO: 1038388
auuggcacugcauucauca

SEQ ID NO: 1038390 - RNA, 19 nt, Artificial Sequence
  Description of Artificial Sequence: Synthetic oligonucleotide
  Sense strand starting at position 2738 of SEQ ID NO: 914890
agugguuaaauguagaauc

SEQ ID NO: 1038391 - RNA, 19 nt, Artificial Sequence
  Description of Artificial Sequence: Synthetic oligonucleotide
  Antisense strand to SEQ ID NO: 1038390
gauucuacauuuaaccacu

SEQ ID NO: 1038392 - RNA, 19 nt, Artificial Sequence
  Description of Artificial Sequence: Synthetic oligonucleotide
  Sense strand starting at position 3046 of SEQ ID NO: 914890
ggaauaaaccaagguuucu

SEQ ID NO: 1038393 - RNA, 19 nt, Artificial Sequence
  Description of Artificial Sequence: Synthetic oligonucleotide
  Antisense strand to SEQ ID NO: 1038392
agaaaccuugguuuauucc

SEQ ID NO: 1038394 - RNA, 19 nt, Artificial Sequence
  Description of Artificial Sequence: Synthetic oligonucleotide
  Sense strand starting at position 3198 of SEQ ID NO: 914890
gguguugccacaggaaauu

SEQ ID NO: 1038395 - RNA, 19 nt, Artificial Sequence
  Description of Artificial Sequence: Synthetic oligonucleotide
  Antisense strand to SEQ ID NO: 1038394
aauuuccuguggcaacacc

SEQ ID NO: 1038396 - RNA, 19 nt, Artificial Sequence
  Description of Artificial Sequence: Synthetic oligonucleotide
  Sense strand starting at position 3222 of SEQ ID NO: 914890
uugagucaguaggcuagaa

SEQ ID NO: 1038397 - RNA, 19 nt, Artificial Sequence
  Description of Artificial Sequence: Synthetic oligonucleotide
  Antisense strand to SEQ ID NO: 1038396
uucuagccuacugacucaa

SEQ ID NO: 1038398 - RNA, 19 nt, Artificial Sequence
  Description of Artificial Sequence: Synthetic oligonucleotide
  Sense strand starting at position 3224 of SEQ ID NO: 914890
gagucaguaggcuagaaga

SEQ ID NO: 1038399 - RNA, 19 nt, Artificial Sequence
  Description of Artificial Sequence: Synthetic oligonucleotide
  Antisense strand to SEQ ID NO: 1038398
ucuucuagccuacugacuc

SEQ ID NO: 1038400 - RNA, 19 nt, Artificial Sequence
  Description of Artificial Sequence: Synthetic oligonucleotide
  Sense strand starting at position 3287 of SEQ ID NO: 914890
ccagcacgucuaggauaaa

SEQ ID NO: 1038401 - RNA, 19 nt, Artificial Sequence
  Description of Artificial Sequence: Synthetic oligonucleotide
  Antisense strand to SEQ ID NO: 1038400
uuuauccuagacgugcugg

SEQ ID NO: 1038402 - RNA, 19 nt, Artificial Sequence
  Description of Artificial Sequence: Synthetic oligonucleotide
  Sense strand starting at position 3642 of SEQ ID NO: 914890
ccucaagagucuuuguaga

SEQ ID NO: 1038403 - RNA, 19 nt, Artificial Sequence
  Description of Artificial Sequence: Synthetic oligonucleotide
  Antisense strand to SEQ ID NO: 1038402
ucuacaaagacucuugagg

SEQ ID NO: 1038404 - RNA, 19 nt, Artificial Sequence
  Description of Artificial Sequence: Synthetic oligonucleotide
  Sense strand starting at position 3644 of SEQ ID NO: 914890
ucaagagucuuuguagaua

SEQ ID NO: 1038405 - RNA, 19 nt, Artificial Sequence
  Description of Artificial Sequence: Synthetic oligonucleotide
  Antisense strand to SEQ ID NO: 1038404
uaucuacaaagacucuuga

SEQ ID NO: 1038406 - RNA, 19 nt, Artificial Sequence
  Description of Artificial Sequence: Synthetic oligonucleotide
  Sense strand starting at position 3647 of SEQ ID NO: 914890
agagucuuuguagauaugu

SEQ ID NO: 1038407 - RNA, 19 nt, Artificial Sequence
  Description of Artificial Sequence: Synthetic oligonucleotide
  Antisense strand to SEQ ID NO: 1038406
acauaucuacaaagacucu

SEQ ID NO: 1038408 - RNA, 19 nt, Artificial Sequence
  Description of Artificial Sequence: Synthetic oligonucleotide
  Sense strand starting at position 3649 of SEQ ID NO: 914890
agucuuuguagauauguuc

SEQ ID NO: 1038409 - RNA, 19 nt, Artificial Sequence
  Description of Artificial Sequence: Synthetic oligonucleotide
  Antisense strand to SEQ ID NO: 1038408
gaacauaucuacaaagacu

SEQ ID NO: 1038410 - RNA, 19 nt, Artificial Sequence
  Description of Artificial Sequence: Synthetic oligonucleotide
  Sense strand starting at position 3770 of SEQ ID NO: 914890
ggcggauugccugaucuua

SEQ ID NO: 1038411 - RNA, 19 nt, Artificial Sequence
  Description of Artificial Sequence: Synthetic oligonucleotide
  Antisense strand to SEQ ID NO: 1038410
uaagaucaggcaauccgcc

SEQ ID NO: 1038412 - RNA, 19 nt, Artificial Sequence
  Description of Artificial Sequence: Synthetic oligonucleotide
  Sense strand starting at position 3844 of SEQ ID NO: 914890
agaaauuagccaggcguca

SEQ ID NO: 1038413 - RNA, 19 nt, Artificial Sequence
  Description of Artificial Sequence: Synthetic oligonucleotide
  Antisense strand to SEQ ID NO: 1038412
ugacgccuggcuaauuucu

SEQ ID NO: 1038414 - RNA, 19 nt, Artificial Sequence
  Description of Artificial Sequence: Synthetic oligonucleotide
  Sense strand starting at position 27 of SEQ ID NO: 914891
cuuuccuucuggucacaga

SEQ ID NO: 1038415 - RNA, 19 nt, Artificial Sequence
  Description of Artificial Sequence: Synthetic oligonucleotide
  Antisense strand to SEQ ID NO: 1038414
ucugugaccagaaggaaag

SEQ ID NO: 1038416 - RNA, 19 nt, Artificial Sequence
  Description of Artificial Sequence: Synthetic oligonucleotide
  Sense strand starting at position 28 of SEQ ID NO: 914891
uuuccuucuggucacagaa

SEQ ID NO: 1038417 - RNA, 19 nt, Artificial Sequence
  Description of Artificial Sequence: Synthetic oligonucleotide
  Antisense strand to SEQ ID NO: 1038416
uucugugaccagaaggaaa

SEQ ID NO: 1038418 - RNA, 19 nt, Artificial Sequence
  Description of Artificial Sequence: Synthetic oligonucleotide
  Sense strand starting at position 30 of SEQ ID NO: 914891
uccuucuggucacagaaau

SEQ ID NO: 1038419 - RNA, 19 nt, Artificial Sequence
  Description of Artificial Sequence: Synthetic oligonucleotide
  Antisense strand to SEQ ID NO: 1038418
auuucugugaccagaagga

SEQ ID NO: 1038420 - RNA, 19 nt, Artificial Sequence
  Description of Artificial Sequence: Synthetic oligonucleotide
  Sense strand starting at position 61 of SEQ ID NO: 914891
ggacauauggcccagguau

SEQ ID NO: 1038421 - RNA, 19 nt, Artificial Sequence
  Description of Artificial Sequence: Synthetic oligonucleotide
  Antisense strand to SEQ ID NO: 1038420
auaccugggccauaugucc

SEQ ID NO: 1038422 - RNA, 19 nt, Artificial Sequence
  Description of Artificial Sequence: Synthetic oligonucleotide
  Sense strand starting at position 63 of SEQ ID NO: 914891
acauauggcccagguauaa

SEQ ID NO: 1038423 - RNA, 19 nt, Artificial Sequence
  Description of Artificial Sequence: Synthetic oligonucleotide
  Antisense strand to SEQ ID NO: 1038422
uuauaccugggccauaugu

SEQ ID NO: 1038424 - RNA, 19 nt, Artificial Sequence
  Description of Artificial Sequence: Synthetic oligonucleotide
  Sense strand starting at position 116 of SEQ ID NO: 914891
gacggaagauuacaucuca

SEQ ID NO: 1038425 - RNA, 19 nt, Artificial Sequence
  Description of Artificial Sequence: Synthetic oligonucleotide
  Antisense strand to SEQ ID NO: 1038424
ugagauguaaucuuccguc

SEQ ID NO: 1038426 - RNA, 19 nt, Artificial Sequence
  Description of Artificial Sequence: Synthetic oligonucleotide
  Sense strand starting at position 142 of SEQ ID NO: 914891
uuggaaucauaagcucuaa

SEQ ID NO: 1038427 - RNA, 19 nt, Artificial Sequence
  Description of Artificial Sequence: Synthetic oligonucleotide
  Antisense strand to SEQ ID NO: 1038426
uuagagcuuaugauuccaa

SEQ ID NO: 1038428 - RNA, 19 nt, Artificial Sequence
  Description of Artificial Sequence: Synthetic oligonucleotide
  Sense strand starting at position 186 of SEQ ID NO: 914891
uaguaaggacuguagaguu

SEQ ID NO: 1038429 - RNA, 19 nt, Artificial Sequence
  Description of Artificial Sequence: Synthetic oligonucleotide
  Antisense strand to SEQ ID NO: 1038428
aacucuacaguccuuacua

SEQ ID NO: 1038430 - RNA, 19 nt, Artificial Sequence
  Description of Artificial Sequence: Synthetic oligonucleotide
  Sense strand starting at position 193 of SEQ ID NO: 914891
gacuguagaguuggagaaa

SEQ ID NO: 1038431 - RNA, 19 nt, Artificial Sequence
  Description of Artificial Sequence: Synthetic oligonucleotide
  Antisense strand to SEQ ID NO: 1038430
uuucuccaacucuacaguc

SEQ ID NO: 1038432 - RNA, 19 nt, Artificial Sequence
  Description of Artificial Sequence: Synthetic oligonucleotide
  Sense strand starting at position 311 of SEQ ID NO: 914891
aagacuaugucuugauaug

SEQ ID NO: 1038433 - RNA, 19 nt, Artificial Sequence
  Description of Artificial Sequence: Synthetic oligonucleotide
  Antisense strand to SEQ ID NO: 1038432
cauaucaagacauagucuu

SEQ ID NO: 1038434 - RNA, 19 nt, Artificial Sequence
  Description of Artificial Sequence: Synthetic oligonucleotide
  Sense strand starting at position 312 of SEQ ID NO: 914891
agacuaugucuugauaugu

SEQ ID NO: 1038435 - RNA, 19 nt, Artificial Sequence
  Description of Artificial Sequence: Synthetic oligonucleotide
  Antisense strand to SEQ ID NO: 1038434
acauaucaagacauagucu

SEQ ID NO: 1038436 - RNA, 19 nt, Artificial Sequence
  Description of Artificial Sequence: Synthetic oligonucleotide
  Sense strand starting at position 317 of SEQ ID NO: 914891
augucuugauaugugugaa

SEQ ID NO: 1038437 - RNA, 19 nt, Artificial Sequence
  Description of Artificial Sequence: Synthetic oligonucleotide
  Antisense strand to SEQ ID NO: 1038436
uucacacauaucaagacau

SEQ ID NO: 1038438 - RNA, 19 nt, Artificial Sequence
  Description of Artificial Sequence: Synthetic oligonucleotide
  Sense strand starting at position 318 of SEQ ID NO: 914891
ugucuugauaugugugaac

SEQ ID NO: 1038439 - RNA, 19 nt, Artificial Sequence
  Description of Artificial Sequence: Synthetic oligonucleotide
  Antisense strand to SEQ ID NO: 1038438
guucacacauaucaagaca

SEQ ID NO: 1038440 - RNA, 19 nt, Artificial Sequence
  Description of Artificial Sequence: Synthetic oligonucleotide
  Sense strand starting at position 320 of SEQ ID NO: 914891
ucuugauaugugugaacuu

SEQ ID NO: 1038441 - RNA, 19 nt, Artificial Sequence
  Description of Artificial Sequence: Synthetic oligonucleotide
  Antisense strand to SEQ ID NO: 1038440
aaguucacacauaucaaga

SEQ ID NO: 1038442 - RNA, 19 nt, Artificial Sequence
  Description of Artificial Sequence: Synthetic oligonucleotide
  Sense strand starting at position 386 of SEQ ID NO: 914891
ugaacaauauuucgucuuu

SEQ ID NO: 1038443 - RNA, 19 nt, Artificial Sequence
  Description of Artificial Sequence: Synthetic oligonucleotide
  Antisense strand to SEQ ID NO: 1038442
aaagacgaaauauuguuca

SEQ ID NO: 1038444 - RNA, 19 nt, Artificial Sequence
  Description of Artificial Sequence: Synthetic oligonucleotide
  Sense strand starting at position 435 of SEQ ID NO: 914891
ugucacaugugacagagua

SEQ ID NO: 1038445 - RNA, 19 nt, Artificial Sequence
  Description of Artificial Sequence: Synthetic oligonucleotide
  Antisense strand to SEQ ID NO: 1038444
uacucugucacaugugaca

SEQ ID NO: 1038446 - RNA, 19 nt, Artificial Sequence
  Description of Artificial Sequence: Synthetic oligonucleotide
  Sense strand starting at position 1373 of SEQ ID NO: 914891
ggauuaaccuugcaacccu

SEQ ID NO: 1038447 - RNA, 19 nt, Artificial Sequence
  Description of Artificial Sequence: Synthetic oligonucleotide
  Antisense strand to SEQ ID NO: 1038446
aggguugcaagguuaaucc

SEQ ID NO: 1038448 - RNA, 19 nt, Artificial Sequence
  Description of Artificial Sequence: Synthetic oligonucleotide
  Sense strand starting at position 1388 of SEQ ID NO: 914891
cccugaauacaucgacaua

SEQ ID NO: 1038449 - RNA, 19 nt, Artificial Sequence
  Description of Artificial Sequence: Synthetic oligonucleotide
  Antisense strand to SEQ ID NO: 1038448
uaugucgauguauucaggg

SEQ ID NO: 1038450 - RNA, 19 nt, Artificial Sequence
  Description of Artificial Sequence: Synthetic oligonucleotide
  Sense strand starting at position 1414 of SEQ ID NO: 914891
cucugaagugcucacuuga

SEQ ID NO: 1038451 - RNA, 19 nt, Artificial Sequence
  Description of Artificial Sequence: Synthetic oligonucleotide
  Antisense strand to SEQ ID NO: 1038450
ucaagugagcacuucagag

SEQ ID NO: 1038452 - RNA, 19 nt, Artificial Sequence
  Description of Artificial Sequence: Synthetic oligonucleotide
  Sense strand starting at position 1591 of SEQ ID NO: 914891
uggagaaccugauagggau

SEQ ID NO: 1038453 - RNA, 19 nt, Artificial Sequence
  Description of Artificial Sequence: Synthetic oligonucleotide
  Antisense strand to SEQ ID NO: 1038452
aucccuaucagguucucca

SEQ ID NO: 1038454 - RNA, 19 nt, Artificial Sequence
  Description of Artificial Sequence: Synthetic oligonucleotide
  Sense strand starting at position 1594 of SEQ ID NO: 914891
agaaccugauagggauaau

SEQ ID NO: 1038455 - RNA, 19 nt, Artificial Sequence
  Description of Artificial Sequence: Synthetic oligonucleotide
  Antisense strand to SEQ ID NO: 1038454
auuaucccuaucagguucu

SEQ ID NO: 1038456 - RNA, 19 nt, Artificial Sequence
  Description of Artificial Sequence: Synthetic oligonucleotide
  Sense strand starting at position 2120 of SEQ ID NO: 914891
ccgaaaugcugaugggaag

SEQ ID NO: 1038457 - RNA, 19 nt, Artificial Sequence
  Description of Artificial Sequence: Synthetic oligonucleotide
  Antisense strand to SEQ ID NO: 1038456
cuucccaucagcauuucgg

SEQ ID NO: 1038458 - RNA, 19 nt, Artificial Sequence
  Description of Artificial Sequence: Synthetic oligonucleotide
  Sense strand starting at position 2121 of SEQ ID NO: 914891
cgaaaugcugaugggaaga

SEQ ID NO: 1038459 - RNA, 19 nt, Artificial Sequence
  Description of Artificial Sequence: Synthetic oligonucleotide
  Antisense strand to SEQ ID NO: 1038458
ucuucccaucagcauuucg

SEQ ID NO: 1038460 - RNA, 19 nt, Artificial Sequence
  Description of Artificial Sequence: Synthetic oligonucleotide
  Sense strand starting at position 2123 of SEQ ID NO: 914891
aaaugcugaugggaagaau

SEQ ID NO: 1038461 - RNA, 19 nt, Artificial Sequence
  Description of Artificial Sequence: Synthetic oligonucleotide
  Antisense strand to SEQ ID NO: 1038460
auucuucccaucagcauuu

SEQ ID NO: 1038462 - RNA, 19 nt, Artificial Sequence
  Description of Artificial Sequence: Synthetic oligonucleotide
  Sense strand starting at position 2172 of SEQ ID NO: 914891
gggauauccaugcauuguu

SEQ ID NO: 1038463 - RNA, 19 nt, Artificial Sequence
  Description of Artificial Sequence: Synthetic oligonucleotide
  Antisense strand to SEQ ID NO: 1038462
aacaaugcauggauauccc

SEQ ID NO: 1038464 - RNA, 19 nt, Artificial Sequence
  Description of Artificial Sequence: Synthetic oligonucleotide
  Sense strand starting at position 2228 of SEQ ID NO: 914891
aggacugagugcugaaaua

SEQ ID NO: 1038465 - RNA, 19 nt, Artificial Sequence
  Description of Artificial Sequence: Synthetic oligonucleotide
  Antisense strand to SEQ ID NO: 1038464
uauuucagcacucaguccu

SEQ ID NO: 1038466 - RNA, 19 nt, Artificial Sequence
  Description of Artificial Sequence: Synthetic oligonucleotide
  Sense strand starting at position 2297 of SEQ ID NO: 914891
cgcgaaggaugcuuucaau

SEQ ID NO: 1038467 - RNA, 19 nt, Artificial Sequence
  Description of Artificial Sequence: Synthetic oligonucleotide
  Antisense strand to SEQ ID NO: 1038466
auugaaagcauccuucgcg

SEQ ID NO: 1038468 - RNA, 19 nt, Artificial Sequence
  Description of Artificial Sequence: Synthetic oligonucleotide
  Sense strand starting at position 2711 of SEQ ID NO: 914891
uuuguagaguauuugcauu

SEQ ID NO: 1038469 - RNA, 19 nt, Artificial Sequence
  Description of Artificial Sequence: Synthetic oligonucleotide
  Antisense strand to SEQ ID NO: 1038468
aaugcaaauacucuacaaa

SEQ ID NO: 1038470 - RNA, 19 nt, Artificial Sequence
  Description of Artificial Sequence: Synthetic oligonucleotide
  Sense strand starting at position 2769 of SEQ ID NO: 914891
uauaauagccuguaguguu

SEQ ID NO: 1038471 - RNA, 19 nt, Artificial Sequence
  Description of Artificial Sequence: Synthetic oligonucleotide
  Antisense strand to SEQ ID NO: 1038470
aacacuacaggcuauuaua

SEQ ID NO: 1038472 - RNA, 19 nt, Artificial Sequence
  Description of Artificial Sequence: Synthetic oligonucleotide
  Sense strand starting at position 2777 of SEQ ID NO: 914891
ccuguaguguuguuauugu

SEQ ID NO: 1038473 - RNA, 19 nt, Artificial Sequence
  Description of Artificial Sequence: Synthetic oligonucleotide
  Antisense strand to SEQ ID NO: 1038472
acaauaacaacacuacagg

SEQ ID NO: 1038474 - RNA, 19 nt, Artificial Sequence
  Description of Artificial Sequence: Synthetic oligonucleotide
  Sense strand starting at position 3283 of SEQ ID NO: 914891
guggcuuuccauuacaggu

SEQ ID NO: 1038475 - RNA, 19 nt, Artificial Sequence
  Description of Artificial Sequence: Synthetic oligonucleotide
  Antisense strand to SEQ ID NO: 1038474
accuguaauggaaagccac

SEQ ID NO: 1038476 - RNA, 19 nt, Artificial Sequence
  Description of Artificial Sequence: Synthetic oligonucleotide
  Sense strand starting at position 3469 of SEQ ID NO: 914891
agcccuucucaagguuaau

SEQ ID NO: 1038477 - RNA, 19 nt, Artificial Sequence
  Description of Artificial Sequence: Synthetic oligonucleotide
  Antisense strand to SEQ ID NO: 1038476
auuaaccuugagaagggcu

SEQ ID NO: 1038478 - RNA, 19 nt, Artificial Sequence
  Description of Artificial Sequence: Synthetic oligonucleotide
  Sense strand starting at position 3517 of SEQ ID NO: 914891
ucuggcuuuccuugacaaa

SEQ ID NO: 1038479 - RNA, 19 nt, Artificial Sequence
  Description of Artificial Sequence: Synthetic oligonucleotide
  Antisense strand to SEQ ID NO: 1038478
uuugucaaggaaagccaga

SEQ ID NO: 1038480 - RNA, 19 nt, Artificial Sequence
  Description of Artificial Sequence: Synthetic oligonucleotide
  Sense strand starting at position 3518 of SEQ ID NO: 914891
cuggcuuuccuugacaaau

SEQ ID NO: 1038481 - RNA, 19 nt, Artificial Sequence
  Description of Artificial Sequence: Synthetic oligonucleotide
  Antisense strand to SEQ ID NO: 1038480
auuugucaaggaaagccag

SEQ ID NO: 1038482 - RNA, 19 nt, Artificial Sequence
  Description of Artificial Sequence: Synthetic oligonucleotide
  Sense strand starting at position 3635 of SEQ ID NO: 914891
gcaaccacuugguccuaua

SEQ ID NO: 1038483 - RNA, 19 nt, Artificial Sequence
  Description of Artificial Sequence: Synthetic oligonucleotide
  Antisense strand to SEQ ID NO: 1038482
uauaggaccaagugguugc

SEQ ID NO: 1038484 - RNA, 19 nt, Artificial Sequence
  Description of Artificial Sequence: Synthetic oligonucleotide
  Sense strand starting at position 3690 of SEQ ID NO: 914891
ggagauugcuggccuggau

SEQ ID NO: 1038485 - RNA, 19 nt, Artificial Sequence
  Description of Artificial Sequence: Synthetic oligonucleotide
  Antisense strand to SEQ ID NO: 1038484
auccaggccagcaaucucc

SEQ ID NO: 1038486 - RNA, 19 nt, Artificial Sequence
  Description of Artificial Sequence: Synthetic oligonucleotide
  Sense strand starting at position 3759 of SEQ ID NO: 914891
aagguaucagcuugguagu

SEQ ID NO: 1038487 - RNA, 19 nt, Artificial Sequence
  Description of Artificial Sequence: Synthetic oligonucleotide
  Antisense strand to SEQ ID NO: 1038486
acuaccaagcugauaccuu

SEQ ID NO: 1038488 - RNA, 19 nt, Artificial Sequence
  Description of Artificial Sequence: Synthetic oligonucleotide
  Sense strand starting at position 3780 of SEQ ID NO: 914891
ccaaacugaugcuagauga

SEQ ID NO: 1038489 - RNA, 19 nt, Artificial Sequence
  Description of Artificial Sequence: Synthetic oligonucleotide
  Antisense strand to SEQ ID NO: 1038488
ucaucuagcaucaguuugg

SEQ ID NO: 1038490 - RNA, 19 nt, Artificial Sequence
  Description of Artificial Sequence: Synthetic oligonucleotide
  Sense strand starting at position 3855 of SEQ ID NO: 914891
ugcuuacuugauugcagua

SEQ ID NO: 1038491 - RNA, 19 nt, Artificial Sequence
  Description of Artificial Sequence: Synthetic oligonucleotide
  Antisense strand to SEQ ID NO: 1038490
uacugcaaucaaguaagca

SEQ ID NO: 1038492 - RNA, 19 nt, Artificial Sequence
  Description of Artificial Sequence: Synthetic oligonucleotide
  Sense strand starting at position 3860 of SEQ ID NO: 914891
acuugauugcaguaacuuu

SEQ ID NO: 1038493 - RNA, 19 nt, Artificial Sequence
  Description of Artificial Sequence: Synthetic oligonucleotide
  Antisense strand to SEQ ID NO: 1038492
aaaguuacugcaaucaagu

SEQ ID NO: 1038494 - RNA, 19 nt, Artificial Sequence
  Description of Artificial Sequence: Synthetic oligonucleotide
  Sense strand starting at position 409 of SEQ ID NO: 914892
gauugaauuugugaaucca

SEQ ID NO: 1038495 - RNA, 19 nt, Artificial Sequence
  Description of Artificial Sequence: Synthetic oligonucleotide
  Antisense strand to SEQ ID NO: 1038494
uggauucacaaauucaauc

SEQ ID NO: 1038496 - RNA, 19 nt, Artificial Sequence
  Description of Artificial Sequence: Synthetic oligonucleotide
  Sense strand starting at position 509 of SEQ ID NO: 914892
cccaauguccugugagaac

SEQ ID NO: 1038497 - RNA, 19 nt, Artificial Sequence
  Description of Artificial Sequence: Synthetic oligonucleotide
  Antisense strand to SEQ ID NO: 1038496
guucucacaggacauuggg

SEQ ID NO: 1038498 - RNA, 19 nt, Artificial Sequence
  Description of Artificial Sequence: Synthetic oligonucleotide
  Sense strand starting at position 541 of SEQ ID NO: 914892
ggacuaauuuaagggcacu

SEQ ID NO: 1038499 - RNA, 19 nt, Artificial Sequence
  Description of Artificial Sequence: Synthetic oligonucleotide
  Antisense strand to SEQ ID NO: 1038498
agugcccuuaaauuagucc

SEQ ID NO: 1038500 - RNA, 19 nt, Artificial Sequence
  Description of Artificial Sequence: Synthetic oligonucleotide
  Sense strand starting at position 561 of SEQ ID NO: 914892
ucacccagaccugguuaaa

SEQ ID NO: 1038501 - RNA, 19 nt, Artificial Sequence
  Description of Artificial Sequence: Synthetic oligonucleotide
  Antisense strand to SEQ ID NO: 1038500
uuuaaccaggucuggguga

SEQ ID NO: 1038502 - RNA, 19 nt, Artificial Sequence
  Description of Artificial Sequence: Synthetic oligonucleotide
  Sense strand starting at position 651 of SEQ ID NO: 914892
guaucagaggaguggagau

SEQ ID NO: 1038503 - RNA, 19 nt, Artificial Sequence
  Description of Artificial Sequence: Synthetic oligonucleotide
  Antisense strand to SEQ ID NO: 1038502
aucuccacuccucugauac

SEQ ID NO: 1038504 - RNA, 19 nt, Artificial Sequence
  Description of Artificial Sequence: Synthetic oligonucleotide
  Sense strand starting at position 667 of SEQ ID NO: 914892
gaugaugucaugggucuga

SEQ ID NO: 1038505 - RNA, 19 nt, Artificial Sequence
  Description of Artificial Sequence: Synthetic oligonucleotide
  Antisense strand to SEQ ID NO: 1038504
ucagacccaugacaucauc

SEQ ID NO: 1038506 - RNA, 19 nt, Artificial Sequence
  Description of Artificial Sequence: Synthetic oligonucleotide
  Sense strand starting at position 796 of SEQ ID NO: 914892
ugaagugagccucaacuua

SEQ ID NO: 1038507 - RNA, 19 nt, Artificial Sequence
  Description of Artificial Sequence: Synthetic oligonucleotide
  Antisense strand to SEQ ID NO: 1038506
uaaguugaggcucacuuca

SEQ ID NO: 1038508 - RNA, 19 nt, Artificial Sequence
  Description of Artificial Sequence: Synthetic oligonucleotide
  Sense strand starting at position 882 of SEQ ID NO: 914892
agcuauuggacauguggau

SEQ ID NO: 1038509 - RNA, 19 nt, Artificial Sequence
  Description of Artificial Sequence: Synthetic oligonucleotide
  Antisense strand to SEQ ID NO: 1038508
auccacauguccaauagcu

SEQ ID NO: 1038510 - RNA, 19 nt, Artificial Sequence
  Description of Artificial Sequence: Synthetic oligonucleotide
  Sense strand starting at position 917 of SEQ ID NO: 914892
aggcaagauucugcugaag

SEQ ID NO: 1038511 - RNA, 19 nt, Artificial Sequence
  Description of Artificial Sequence: Synthetic oligonucleotide
  Antisense strand to SEQ ID NO: 1038510
cuucagcagaaucuugccu

SEQ ID NO: 1038512 - RNA, 19 nt, Artificial Sequence
  Description of Artificial Sequence: Synthetic oligonucleotide
  Sense strand starting at position 923 of SEQ ID NO: 914892
gauucugcugaagaaaguu

SEQ ID NO: 1038513 - RNA, 19 nt, Artificial Sequence
  Description of Artificial Sequence: Synthetic oligonucleotide
  Antisense strand to SEQ ID NO: 1038512
aacuuucuucagcagaauc

SEQ ID NO: 1038514 - RNA, 19 nt, Artificial Sequence
  Description of Artificial Sequence: Synthetic oligonucleotide
  Sense strand starting at position 969 of SEQ ID NO: 914892
gcaucagaugcccagaaau

SEQ ID NO: 1038515 - RNA, 19 nt, Artificial Sequence
  Description of Artificial Sequence: Synthetic oligonucleotide
  Antisense strand to SEQ ID NO: 1038514
auuucugggcaucugaugc

SEQ ID NO: 1038516 - RNA, 19 nt, Artificial Sequence
  Description of Artificial Sequence: Synthetic oligonucleotide
  Sense strand starting at position 2244 of SEQ ID NO: 914892
ccgcgaggaucuucuaaca

SEQ ID NO: 1038517 - RNA, 19 nt, Artificial Sequence
  Description of Artificial Sequence: Synthetic oligonucleotide
  Antisense strand to SEQ ID NO: 1038516
uguuagaagauccucgcgg

SEQ ID NO: 1038518 - RNA, 19 nt, Artificial Sequence
  Description of Artificial Sequence: Synthetic oligonucleotide
  Sense strand starting at position 2412 of SEQ ID NO: 914892
agggucaaaucuuaugaga

SEQ ID NO: 1038519 - RNA, 19 nt, Artificial Sequence
  Description of Artificial Sequence: Synthetic oligonucleotide
  Antisense strand to SEQ ID NO: 1038518
ucucauaagauuugacccu

SEQ ID NO: 1038520 - RNA, 19 nt, Artificial Sequence
  Description of Artificial Sequence: Synthetic oligonucleotide
  Sense strand starting at position 2446 of SEQ ID NO: 914892
uuuaguagcgaguguggaa

SEQ ID NO: 1038521 - RNA, 19 nt, Artificial Sequence
  Description of Artificial Sequence: Synthetic oligonucleotide
  Antisense strand to SEQ ID NO: 1038520
uuccacacucgcuacuaaa

SEQ ID NO: 1038522 - RNA, 19 nt, Artificial Sequence
  Description of Artificial Sequence: Synthetic oligonucleotide
  Sense strand starting at position 2459 of SEQ ID NO: 914892
guggaauaccagugcuucu

SEQ ID NO: 1038523 - RNA, 19 nt, Artificial Sequence
  Description of Artificial Sequence: Synthetic oligonucleotide
  Antisense strand to SEQ ID NO: 1038522
agaagcacugguauuccac

SEQ ID NO: 1038524 - RNA, 19 nt, Artificial Sequence
  Description of Artificial Sequence: Synthetic oligonucleotide
  Sense strand starting at position 2545 of SEQ ID NO: 914892
uggcguggagccugagauu

SEQ ID NO: 1038525 - RNA, 19 nt, Artificial Sequence
  Description of Artificial Sequence: Synthetic oligonucleotide
  Antisense strand to SEQ ID NO: 1038524
aaucucaggcuccacgcca

SEQ ID NO: 1038526 - RNA, 19 nt, Artificial Sequence
  Description of Artificial Sequence: Synthetic oligonucleotide
  Sense strand starting at position 2585 of SEQ ID NO: 914892
ggcugauuccaaggcugau

SEQ ID NO: 1038527 - RNA, 19 nt, Artificial Sequence
  Description of Artificial Sequence: Synthetic oligonucleotide
  Antisense strand to SEQ ID NO: 1038526
aucagccuuggaaucagcc

SEQ ID NO: 1038528 - RNA, 19 nt, Artificial Sequence
  Description of Artificial Sequence: Synthetic oligonucleotide
  Sense strand starting at position 2652 of SEQ ID NO: 914892
cguggaccacaugaguuau

SEQ ID NO: 1038529 - RNA, 19 nt, Artificial Sequence
  Description of Artificial Sequence: Synthetic oligonucleotide
  Antisense strand to SEQ ID NO: 1038528
auaacucaugugguccacg

SEQ ID NO: 1038530 - RNA, 19 nt, Artificial Sequence
  Description of Artificial Sequence: Synthetic oligonucleotide
  Sense strand starting at position 2836 of SEQ ID NO: 914892
agacuuagaugguggaaga

SEQ ID NO: 1038531 - RNA, 19 nt, Artificial Sequence
  Description of Artificial Sequence: Synthetic oligonucleotide
  Antisense strand to SEQ ID NO: 1038530
ucuuccaccaucuaagucu

SEQ ID NO: 1038532 - RNA, 19 nt, Artificial Sequence
  Description of Artificial Sequence: Synthetic oligonucleotide
  Sense strand starting at position 2948 of SEQ ID NO: 914892
ucaaguguccaucaauuga

SEQ ID NO: 1038533 - RNA, 19 nt, Artificial Sequence
  Description of Artificial Sequence: Synthetic oligonucleotide
  Antisense strand to SEQ ID NO: 1038532
ucaauugauggacacuuga

SEQ ID NO: 1038534 - RNA, 19 nt, Artificial Sequence
  Description of Artificial Sequence: Synthetic oligonucleotide
  Sense strand starting at position 3013 of SEQ ID NO: 914892
uaaucuugauuauagaggu

SEQ ID NO: 1038535 - RNA, 19 nt, Artificial Sequence
  Description of Artificial Sequence: Synthetic oligonucleotide
  Antisense strand to SEQ ID NO: 1038534
accucuauaaucaagauua

SEQ ID NO: 1038536 - RNA, 19 nt, Artificial Sequence
  Description of Artificial Sequence: Synthetic oligonucleotide
  Sense strand starting at position 3017 of SEQ ID NO: 914892
cuugauuauagagguaguu

SEQ ID NO: 1038537 - RNA, 19 nt, Artificial Sequence
  Description of Artificial Sequence: Synthetic oligonucleotide
  Antisense strand to SEQ ID NO: 1038536
aacuaccucuauaaucaag

SEQ ID NO: 1038538 - RNA, 19 nt, Artificial Sequence
  Description of Artificial Sequence: Synthetic oligonucleotide
  Sense strand starting at position 3170 of SEQ ID NO: 914892
aagggaugccugcgucaga

SEQ ID NO: 1038539 - RNA, 19 nt, Artificial Sequence
  Description of Artificial Sequence: Synthetic oligonucleotide
  Antisense strand to SEQ ID NO: 1038538
ucugacgcaggcaucccuu

SEQ ID NO: 1038540 - RNA, 19 nt, Artificial Sequence
  Description of Artificial Sequence: Synthetic oligonucleotide
  Sense strand starting at position 3171 of SEQ ID NO: 914892
agggaugccugcgucagau

SEQ ID NO: 1038541 - RNA, 19 nt, Artificial Sequence
  Description of Artificial Sequence: Synthetic oligonucleotide
  Antisense strand to SEQ ID NO: 1038540
aucugacgcaggcaucccu

SEQ ID NO: 1038542 - RNA, 19 nt, Artificial Sequence
  Description of Artificial Sequence: Synthetic oligonucleotide
  Sense strand starting at position 3173 of SEQ ID NO: 914892
ggaugccugcgucagauuu

SEQ ID NO: 1038543 - RNA, 19 nt, Artificial Sequence
  Description of Artificial Sequence: Synthetic oligonucleotide
  Antisense strand to SEQ ID NO: 1038542
aaaucugacgcaggcaucc

SEQ ID NO: 1038544 - RNA, 19 nt, Artificial Sequence
  Description of Artificial Sequence: Synthetic oligonucleotide
  Sense strand starting at position 3243 of SEQ ID NO: 914892
cuguaauugcgugcuguag

SEQ ID NO: 1038545 - RNA, 19 nt, Artificial Sequence
  Description of Artificial Sequence: Synthetic oligonucleotide
  Antisense strand to SEQ ID NO: 1038544
cuacagcacgcaauuacag

SEQ ID NO: 1038546 - RNA, 19 nt, Artificial Sequence
  Description of Artificial Sequence: Synthetic oligonucleotide
  Sense strand starting at position 3244 of SEQ ID NO: 914892
uguaauugcgugcuguagu

SEQ ID NO: 1038547 - RNA, 19 nt, Artificial Sequence
  Description of Artificial Sequence: Synthetic oligonucleotide
  Antisense strand to SEQ ID NO: 1038546
acuacagcacgcaauuaca

SEQ ID NO: 1038548 - RNA, 19 nt, Artificial Sequence
  Description of Artificial Sequence: Synthetic oligonucleotide
  Sense strand starting at position 3251 of SEQ ID NO: 914892
gcgugcuguagucuggaaa

SEQ ID NO: 1038549 - RNA, 19 nt, Artificial Sequence
  Description of Artificial Sequence: Synthetic oligonucleotide
  Antisense strand to SEQ ID NO: 1038548
uuuccagacuacagcacgc

SEQ ID NO: 1038550 - RNA, 19 nt, Artificial Sequence
  Description of Artificial Sequence: Synthetic oligonucleotide
  Sense strand starting at position 3252 of SEQ ID NO: 914892
cgugcuguagucuggaaac

SEQ ID NO: 1038551 - RNA, 19 nt, Artificial Sequence
  Description of Artificial Sequence: Synthetic oligonucleotide
  Antisense strand to SEQ ID NO: 1038550
guuuccagacuacagcacg

SEQ ID NO: 1038552 - RNA, 19 nt, Artificial Sequence
  Description of Artificial Sequence: Synthetic oligonucleotide
  Sense strand starting at position 3254 of SEQ ID NO: 914892
ugcuguagucuggaaacau

SEQ ID NO: 1038553 - RNA, 19 nt, Artificial Sequence
  Description of Artificial Sequence: Synthetic oligonucleotide
  Antisense strand to SEQ ID NO: 1038552
auguuuccagacuacagca

SEQ ID NO: 1038554 - RNA, 19 nt, Artificial Sequence
  Description of Artificial Sequence: Synthetic oligonucleotide
  Sense strand starting at position 3442 of SEQ ID NO: 914892
ugaugaauauuauggagau

SEQ ID NO: 1038555 - RNA, 19 nt, Artificial Sequence
  Description of Artificial Sequence: Synthetic oligonucleotide
  Antisense strand to SEQ ID NO: 1038554
aucuccauaauauucauca

SEQ ID NO: 1038556 - RNA, 19 nt, Artificial Sequence
  Description of Artificial Sequence: Synthetic oligonucleotide
  Sense strand starting at position 3443 of SEQ ID NO: 914892
gaugaauauuauggagauc

SEQ ID NO: 1038557 - RNA, 19 nt, Artificial Sequence
  Description of Artificial Sequence: Synthetic oligonucleotide
  Antisense strand to SEQ ID NO: 1038556
gaucuccauaauauucauc

SEQ ID NO: 1038558 - RNA, 19 nt, Artificial Sequence
  Description of Artificial Sequence: Synthetic oligonucleotide
  Sense strand starting at position 3532 of SEQ ID NO: 914892
ugcauuguuccgggaagcu

SEQ ID NO: 1038559 - RNA, 19 nt, Artificial Sequence
  Description of Artificial Sequence: Synthetic oligonucleotide
  Antisense strand to SEQ ID NO: 1038558
agcuucccggaacaaugca

SEQ ID NO: 1038560 - RNA, 19 nt, Artificial Sequence
  Description of Artificial Sequence: Synthetic oligonucleotide
  Sense strand starting at position 3541 of SEQ ID NO: 914892
ccgggaagcuuguugggaa

SEQ ID NO: 1038561 - RNA, 19 nt, Artificial Sequence
  Description of Artificial Sequence: Synthetic oligonucleotide
  Antisense strand to SEQ ID NO: 1038560
uucccaacaagcuucccgg

SEQ ID NO: 1038562 - RNA, 19 nt, Artificial Sequence
  Description of Artificial Sequence: Synthetic oligonucleotide
  Sense strand starting at position 3563 of SEQ ID NO: 914892
gccuccugccuuugauaau

SEQ ID NO: 1038563 - RNA, 19 nt, Artificial Sequence
  Description of Artificial Sequence: Synthetic oligonucleotide
  Antisense strand to SEQ ID NO: 1038562
auuaucaaaggcaggaggc

SEQ ID NO: 1038564 - RNA, 19 nt, Artificial Sequence
  Description of Artificial Sequence: Synthetic oligonucleotide
  Sense strand starting at position 3685 of SEQ ID NO: 914892
guucuuauuuccuuagguu

SEQ ID NO: 1038565 - RNA, 19 nt, Artificial Sequence
  Description of Artificial Sequence: Synthetic oligonucleotide
  Antisense strand to SEQ ID NO: 1038564
aaccuaaggaaauaagaac

SEQ ID NO: 1038566 - RNA, 19 nt, Artificial Sequence
  Description of Artificial Sequence: Synthetic oligonucleotide
  Sense strand starting at position 3700 of SEQ ID NO: 914892
gguuucuuuggacacauca

SEQ ID NO: 1038567 - RNA, 19 nt, Artificial Sequence
  Description of Artificial Sequence: Synthetic oligonucleotide
  Antisense strand to SEQ ID NO: 1038566
ugauguguccaaagaaacc

SEQ ID NO: 1038568 - RNA, 19 nt, Artificial Sequence
  Description of Artificial Sequence: Synthetic oligonucleotide
  Sense strand starting at position 3821 of SEQ ID NO: 914892
uugaaaucauuuggacuaa

SEQ ID NO: 1038569 - RNA, 19 nt, Artificial Sequence
  Description of Artificial Sequence: Synthetic oligonucleotide
  Antisense strand to SEQ ID NO: 1038568
uuaguccaaaugauuucaa

SEQ ID NO: 1038570 - RNA, 19 nt, Artificial Sequence
  Description of Artificial Sequence: Synthetic oligonucleotide
  Sense strand starting at position 3822 of SEQ ID NO: 914892
ugaaaucauuuggacuaau

SEQ ID NO: 1038571 - RNA, 19 nt, Artificial Sequence
  Description of Artificial Sequence: Synthetic oligonucleotide
  Antisense strand to SEQ ID NO: 1038570
auuaguccaaaugauuuca

SEQ ID NO: 1038572 - RNA, 19 nt, Artificial Sequence
  Description of Artificial Sequence: Synthetic oligonucleotide
  Sense strand starting at position 3857 of SEQ ID NO: 914892
ggucaacuguuguauuuau

SEQ ID NO: 1038573 - RNA, 19 nt, Artificial Sequence
  Description of Artificial Sequence: Synthetic oligonucleotide
  Antisense strand to SEQ ID NO: 1038572
auaaauacaacaguugacc

SEQ ID NO: 1038574 - RNA, 19 nt, Artificial Sequence
  Description of Artificial Sequence: Synthetic oligonucleotide
  Sense strand starting at position 614 of SEQ ID NO: 914893
gagggcucugcauagaugu

SEQ ID NO: 1038575 - RNA, 19 nt, Artificial Sequence
  Description of Artificial Sequence: Synthetic oligonucleotide
  Antisense strand to SEQ ID NO: 1038574
acaucuaugcagagcccuc

SEQ ID NO: 1038576 - RNA, 19 nt, Artificial Sequence
  Description of Artificial Sequence: Synthetic oligonucleotide
  Sense strand starting at position 621 of SEQ ID NO: 914893
cugcauagauguguuugga

SEQ ID NO: 1038577 - RNA, 19 nt, Artificial Sequence
  Description of Artificial Sequence: Synthetic oligonucleotide
  Antisense strand to SEQ ID NO: 1038576
uccaaacacaucuaugcag

SEQ ID NO: 1038578 - RNA, 19 nt, Artificial Sequence
  Description of Artificial Sequence: Synthetic oligonucleotide
  Sense strand starting at position 624 of SEQ ID NO: 914893
cauagauguguuuggaaug

SEQ ID NO: 1038579 - RNA, 19 nt, Artificial Sequence
  Description of Artificial Sequence: Synthetic oligonucleotide
  Antisense strand to SEQ ID NO: 1038578
cauuccaaacacaucuaug

SEQ ID NO: 1038580 - RNA, 19 nt, Artificial Sequence
  Description of Artificial Sequence: Synthetic oligonucleotide
  Sense strand starting at position 629 of SEQ ID NO: 914893
auguguuuggaaugaaugu

SEQ ID NO: 1038581 - RNA, 19 nt, Artificial Sequence
  Description of Artificial Sequence: Synthetic oligonucleotide
  Antisense strand to SEQ ID NO: 1038580
acauucauuccaaacacau

SEQ ID NO: 1038582 - RNA, 19 nt, Artificial Sequence
  Description of Artificial Sequence: Synthetic oligonucleotide
  Sense strand starting at position 638 of SEQ ID NO: 914893
gaaugaaugugagcaggau

SEQ ID NO: 1038583 - RNA, 19 nt, Artificial Sequence
  Description of Artificial Sequence: Synthetic oligonucleotide
  Antisense strand to SEQ ID NO: 1038582
auccugcucacauucauuc

SEQ ID NO: 1038584 - RNA, 19 nt, Artificial Sequence
  Description of Artificial Sequence: Synthetic oligonucleotide
  Sense strand starting at position 661 of SEQ ID NO: 914893
gguacauaccagugguauc

SEQ ID NO: 1038585 - RNA, 19 nt, Artificial Sequence
  Description of Artificial Sequence: Synthetic oligonucleotide
  Antisense strand to SEQ ID NO: 1038584
gauaccacugguauguacc

SEQ ID NO: 1038586 - RNA, 19 nt, Artificial Sequence
  Description of Artificial Sequence: Synthetic oligonucleotide
  Sense strand starting at position 662 of SEQ ID NO: 914893
guacauaccagugguauca

SEQ ID NO: 1038587 - RNA, 19 nt, Artificial Sequence
  Description of Artificial Sequence: Synthetic oligonucleotide
  Antisense strand to SEQ ID NO: 1038586
ugauaccacugguauguac

SEQ ID NO: 1038588 - RNA, 19 nt, Artificial Sequence
  Description of Artificial Sequence: Synthetic oligonucleotide
  Sense strand starting at position 940 of SEQ ID NO: 914893
ccuccaggccuguaauuaa

SEQ ID NO: 1038589 - RNA, 19 nt, Artificial Sequence
  Description of Artificial Sequence: Synthetic oligonucleotide
  Antisense strand to SEQ ID NO: 1038588
uuaauuacaggccuggagg

SEQ ID NO: 1038590 - RNA, 19 nt, Artificial Sequence
  Description of Artificial Sequence: Synthetic oligonucleotide
  Sense strand starting at position 951 of SEQ ID NO: 914893
guaauuaacugaguggaug

SEQ ID NO: 1038591 - RNA, 19 nt, Artificial Sequence
  Description of Artificial Sequence: Synthetic oligonucleotide
  Antisense strand to SEQ ID NO: 1038590
cauccacucaguuaauuac

SEQ ID NO: 1038592 - RNA, 19 nt, Artificial Sequence
  Description of Artificial Sequence: Synthetic oligonucleotide
  Sense strand starting at position 998 of SEQ ID NO: 914893
aagggaaagugauaauuaa

SEQ ID NO: 1038593 - RNA, 19 nt, Artificial Sequence
  Description of Artificial Sequence: Synthetic oligonucleotide
  Antisense strand to SEQ ID NO: 1038592
uuaauuaucacuuucccuu

SEQ ID NO: 1038594 - RNA, 19 nt, Artificial Sequence
  Description of Artificial Sequence: Synthetic oligonucleotide
  Sense strand starting at position 1031 of SEQ ID NO: 914893
gggugucugcugggaauuc

SEQ ID NO: 1038595 - RNA, 19 nt, Artificial Sequence
  Description of Artificial Sequence: Synthetic oligonucleotide
  Antisense strand to SEQ ID NO: 1038594
gaauucccagcagacaccc

SEQ ID NO: 1038596 - RNA, 19 nt, Artificial Sequence
  Description of Artificial Sequence: Synthetic oligonucleotide
  Sense strand starting at position 1134 of SEQ ID NO: 914893
cccuaucccugaguggaaa

SEQ ID NO: 1038597 - RNA, 19 nt, Artificial Sequence
  Description of Artificial Sequence: Synthetic oligonucleotide
  Antisense strand to SEQ ID NO: 1038596
uuuccacucagggauaggg

SEQ ID NO: 1038598 - RNA, 19 nt, Artificial Sequence
  Description of Artificial Sequence: Synthetic oligonucleotide
  Sense strand starting at position 1135 of SEQ ID NO: 914893
ccuaucccugaguggaaau

SEQ ID NO: 1038599 - RNA, 19 nt, Artificial Sequence
  Description of Artificial Sequence: Synthetic oligonucleotide
  Antisense strand to SEQ ID NO: 1038598
auuuccacucagggauagg

SEQ ID NO: 1038600 - RNA, 19 nt, Artificial Sequence
  Description of Artificial Sequence: Synthetic oligonucleotide
  Sense strand starting at position 1145 of SEQ ID NO: 914893
aguggaaauucccaccuga

SEQ ID NO: 1038601 - RNA, 19 nt, Artificial Sequence
  Description of Artificial Sequence: Synthetic oligonucleotide
  Antisense strand to SEQ ID NO: 1038600
ucaggugggaauuuccacu

SEQ ID NO: 1038602 - RNA, 19 nt, Artificial Sequence
  Description of Artificial Sequence: Synthetic oligonucleotide
  Sense strand starting at position 1182 of SEQ ID NO: 914893
ggaugagacuguccuuacu

SEQ ID NO: 1038603 - RNA, 19 nt, Artificial Sequence
  Description of Artificial Sequence: Synthetic oligonucleotide
  Antisense strand to SEQ ID NO: 1038602
aguaaggacagucucaucc

SEQ ID NO: 1038604 - RNA, 19 nt, Artificial Sequence
  Description of Artificial Sequence: Synthetic oligonucleotide
  Sense strand starting at position 1184 of SEQ ID NO: 914893
augagacuguccuuacuaa

SEQ ID NO: 1038605 - RNA, 19 nt, Artificial Sequence
  Description of Artificial Sequence: Synthetic oligonucleotide
  Antisense strand to SEQ ID NO: 1038604
uuaguaaggacagucucau

SEQ ID NO: 1038606 - RNA, 19 nt, Artificial Sequence
  Description of Artificial Sequence: Synthetic oligonucleotide
  Sense strand starting at position 1191 of SEQ ID NO: 914893
uguccuuacuaaguaauca

SEQ ID NO: 1038607 - RNA, 19 nt, Artificial Sequence
  Description of Artificial Sequence: Synthetic oligonucleotide
  Antisense strand to SEQ ID NO: 1038606
ugauuacuuaguaaggaca

SEQ ID NO: 1038608 - RNA, 19 nt, Artificial Sequence
  Description of Artificial Sequence: Synthetic oligonucleotide
  Sense strand starting at position 1248 of SEQ ID NO: 914893
ccuagcauccauuacagua

SEQ ID NO: 1038609 - RNA, 19 nt, Artificial Sequence
  Description of Artificial Sequence: Synthetic oligonucleotide
  Antisense strand to SEQ ID NO: 1038608
uacuguaauggaugcuagg

SEQ ID NO: 1038610 - RNA, 19 nt, Artificial Sequence
  Description of Artificial Sequence: Synthetic oligonucleotide
  Sense strand starting at position 1503 of SEQ ID NO: 914893
uccacauuagagugacaac

SEQ ID NO: 1038611 - RNA, 19 nt, Artificial Sequence
  Description of Artificial Sequence: Synthetic oligonucleotide
  Antisense strand to SEQ ID NO: 1038610
guugucacucuaaugugga

SEQ ID NO: 1038612 - RNA, 19 nt, Artificial Sequence
  Description of Artificial Sequence: Synthetic oligonucleotide
  Sense strand starting at position 1506 of SEQ ID NO: 914893
acauuagagugacaacuca

SEQ ID NO: 1038613 - RNA, 19 nt, Artificial Sequence
  Description of Artificial Sequence: Synthetic oligonucleotide
  Antisense strand to SEQ ID NO: 1038612
ugaguugucacucuaaugu

SEQ ID NO: 1038614 - RNA, 19 nt, Artificial Sequence
  Description of Artificial Sequence: Synthetic oligonucleotide
  Sense strand starting at position 2301 of SEQ ID NO: 914893
guuaguaaagacugaguuu

SEQ ID NO: 1038615 - RNA, 19 nt, Artificial Sequence
  Description of Artificial Sequence: Synthetic oligonucleotide
  Antisense strand to SEQ ID NO: 1038614
aaacucagucuuuacuaac

SEQ ID NO: 1038616 - RNA, 19 nt, Artificial Sequence
  Description of Artificial Sequence: Synthetic oligonucleotide
  Sense strand starting at position 2678 of SEQ ID NO: 914893
uugggaaagucacuuccua

SEQ ID NO: 1038617 - RNA, 19 nt, Artificial Sequence
  Description of Artificial Sequence: Synthetic oligonucleotide
  Antisense strand to SEQ ID NO: 1038616
uaggaagugacuuucccaa

SEQ ID NO: 1038618 - RNA, 19 nt, Artificial Sequence
  Description of Artificial Sequence: Synthetic oligonucleotide
  Sense strand starting at position 2716 of SEQ ID NO: 914893
ucaucuguacauggagaaa

SEQ ID NO: 1038619 - RNA, 19 nt, Artificial Sequence
  Description of Artificial Sequence: Synthetic oligonucleotide
  Antisense strand to SEQ ID NO: 1038618
uuucuccauguacagauga

SEQ ID NO: 1038620 - RNA, 19 nt, Artificial Sequence
  Description of Artificial Sequence: Synthetic oligonucleotide
  Sense strand starting at position 2871 of SEQ ID NO: 914893
acuuuauccugaguuagga

SEQ ID NO: 1038621 - RNA, 19 nt, Artificial Sequence
  Description of Artificial Sequence: Synthetic oligonucleotide
  Antisense strand to SEQ ID NO: 1038620
uccuaacucaggauaaagu

SEQ ID NO: 1038622 - RNA, 19 nt, Artificial Sequence
  Description of Artificial Sequence: Synthetic oligonucleotide
  Sense strand starting at position 3274 of SEQ ID NO: 914893
ggagcugaguuuguucaga

SEQ ID NO: 1038623 - RNA, 19 nt, Artificial Sequence
  Description of Artificial Sequence: Synthetic oligonucleotide
  Antisense strand to SEQ ID NO: 1038622
ucugaacaaacucagcucc

SEQ ID NO: 1038624 - RNA, 19 nt, Artificial Sequence
  Description of Artificial Sequence: Synthetic oligonucleotide
  Sense strand starting at position 3276 of SEQ ID NO: 914893
agcugaguuuguucagaug

SEQ ID NO: 1038625 - RNA, 19 nt, Artificial Sequence
  Description of Artificial Sequence: Synthetic oligonucleotide
  Antisense strand to SEQ ID NO: 1038624
caucugaacaaacucagcu

SEQ ID NO: 1038626 - RNA, 19 nt, Artificial Sequence
  Description of Artificial Sequence: Synthetic oligonucleotide
  Sense strand starting at position 3324 of SEQ ID NO: 914893
aggugcuuauuuggagaaa

SEQ ID NO: 1038627 - RNA, 19 nt, Artificial Sequence
  Description of Artificial Sequence: Synthetic oligonucleotide
  Antisense strand to SEQ ID NO: 1038626
uuucuccaaauaagcaccu

SEQ ID NO: 1038628 - RNA, 19 nt, Artificial Sequence
  Description of Artificial Sequence: Synthetic oligonucleotide
  Sense strand starting at position 3325 of SEQ ID NO: 914893
ggugcuuauuuggagaaau

SEQ ID NO: 1038629 - RNA, 19 nt, Artificial Sequence
  Description of Artificial Sequence: Synthetic oligonucleotide
  Antisense strand to SEQ ID NO: 1038628
auuucuccaaauaagcacc

SEQ ID NO: 1038630 - RNA, 19 nt, Artificial Sequence
  Description of Artificial Sequence: Synthetic oligonucleotide
  Sense strand starting at position 3359 of SEQ ID NO: 914893
caggaagggugcucuguau

SEQ ID NO: 1038631 - RNA, 19 nt, Artificial Sequence
  Description of Artificial Sequence: Synthetic oligonucleotide
  Antisense strand to SEQ ID NO: 1038630
auacagagcacccuuccug

SEQ ID NO: 1038632 - RNA, 19 nt, Artificial Sequence
  Description of Artificial Sequence: Synthetic oligonucleotide
  Sense strand starting at position 3427 of SEQ ID NO: 914893
gagucaaauucugaaauag

SEQ ID NO: 1038633 - RNA, 19 nt, Artificial Sequence
  Description of Artificial Sequence: Synthetic oligonucleotide
  Antisense strand to SEQ ID NO: 1038632
cuauuucagaauuugacuc

SEQ ID NO: 1038634 - RNA, 19 nt, Artificial Sequence
  Description of Artificial Sequence: Synthetic oligonucleotide
  Sense strand starting at position 3526 of SEQ ID NO: 914893
caagguuauugagcuagau

SEQ ID NO: 1038635 - RNA, 19 nt, Artificial Sequence
  Description of Artificial Sequence: Synthetic oligonucleotide
  Antisense strand to SEQ ID NO: 1038634
aucuagcucaauaaccuug

SEQ ID NO: 1038636 - RNA, 19 nt, Artificial Sequence
  Description of Artificial Sequence: Synthetic oligonucleotide
  Sense strand starting at position 3590 of SEQ ID NO: 914893
augugauauguacauuggu

SEQ ID NO: 1038637 - RNA, 19 nt, Artificial Sequence
  Description of Artificial Sequence: Synthetic oligonucleotide
  Antisense strand to SEQ ID NO: 1038636
accaauguacauaucacau

SEQ ID NO: 1038638 - RNA, 19 nt, Artificial Sequence
  Description of Artificial Sequence: Synthetic oligonucleotide
  Sense strand starting at position 3668 of SEQ ID NO: 914893
aagacuuccugauugguua

SEQ ID NO: 1038639 - RNA, 19 nt, Artificial Sequence
  Description of Artificial Sequence: Synthetic oligonucleotide
  Antisense strand to SEQ ID NO: 1038638
uaaccaaucaggaagucuu

SEQ ID NO: 1038640 - RNA, 19 nt, Artificial Sequence
  Description of Artificial Sequence: Synthetic oligonucleotide
  Sense strand starting at position 3669 of SEQ ID NO: 914893
agacuuccugauugguuau

SEQ ID NO: 1038641 - RNA, 19 nt, Artificial Sequence
  Description of Artificial Sequence: Synthetic oligonucleotide
  Antisense strand to SEQ ID NO: 1038640
auaaccaaucaggaagucu

SEQ ID NO: 1038642 - RNA, 19 nt, Artificial Sequence
  Description of Artificial Sequence: Synthetic oligonucleotide
  Sense strand starting at position 3679 of SEQ ID NO: 914893
auugguuauugguugaaag

SEQ ID NO: 1038643 - RNA, 19 nt, Artificial Sequence
  Description of Artificial Sequence: Synthetic oligonucleotide
  Antisense strand to SEQ ID NO: 1038642
cuuucaaccaauaaccaau

SEQ ID NO: 1038644 - RNA, 19 nt, Artificial Sequence
  Description of Artificial Sequence: Synthetic oligonucleotide
  Sense strand starting at position 3680 of SEQ ID NO: 914893
uugguuauugguugaaaga

SEQ ID NO: 1038645 - RNA, 19 nt, Artificial Sequence
  Description of Artificial Sequence: Synthetic oligonucleotide
  Antisense strand to SEQ ID NO: 1038644
ucuuucaaccaauaaccaa

SEQ ID NO: 1038646 - RNA, 19 nt, Artificial Sequence
  Description of Artificial Sequence: Synthetic oligonucleotide
  Sense strand starting at position 3696 of SEQ ID NO: 914893
agaguuaaguaaguaccua

SEQ ID NO: 1038647 - RNA, 19 nt, Artificial Sequence
  Description of Artificial Sequence: Synthetic oligonucleotide
  Antisense strand to SEQ ID NO: 1038646
uagguacuuacuuaacucu

SEQ ID NO: 1038648 - RNA, 19 nt, Artificial Sequence
  Description of Artificial Sequence: Synthetic oligonucleotide
  Sense strand starting at position 3700 of SEQ ID NO: 914893
uuaaguaaguaccuacaga

SEQ ID NO: 1038649 - RNA, 19 nt, Artificial Sequence
  Description of Artificial Sequence: Synthetic oligonucleotide
  Antisense strand to SEQ ID NO: 1038648
ucuguagguacuuacuuaa

SEQ ID NO: 1038650 - RNA, 19 nt, Artificial Sequence
  Description of Artificial Sequence: Synthetic oligonucleotide
  Sense strand starting at position 3735 of SEQ ID NO: 914893
gggagugucuggguuaagu

SEQ ID NO: 1038651 - RNA, 19 nt, Artificial Sequence
  Description of Artificial Sequence: Synthetic oligonucleotide
  Antisense strand to SEQ ID NO: 1038650
acuuaacccagacacuccc

SEQ ID NO: 1038652 - RNA, 19 nt, Artificial Sequence
  Description of Artificial Sequence: Synthetic oligonucleotide
  Sense strand starting at position 3873 of SEQ ID NO: 914893
ggaugcuuugcagagcaga

SEQ ID NO: 1038653 - RNA, 19 nt, Artificial Sequence
  Description of Artificial Sequence: Synthetic oligonucleotide
  Antisense strand to SEQ ID NO: 1038652
ucugcucugcaaagcaucc

SEQ ID NO: 1038654 - RNA, 19 nt, Artificial Sequence
  Description of Artificial Sequence: Synthetic oligonucleotide
  Sense strand starting at position 66 of SEQ ID NO: 914894
aggccuuggucccaaggaa

SEQ ID NO: 1038655 - RNA, 19 nt, Artificial Sequence
  Description of Artificial Sequence: Synthetic oligonucleotide
  Antisense strand to SEQ ID NO: 1038654
uuccuugggaccaaggccu

SEQ ID NO: 1038656 - RNA, 19 nt, Artificial Sequence
  Description of Artificial Sequence: Synthetic oligonucleotide
  Sense strand starting at position 81 of SEQ ID NO: 914894
ggaaacuuacauugauguu

SEQ ID NO: 1038657 - RNA, 19 nt, Artificial Sequence
  Description of Artificial Sequence: Synthetic oligonucleotide
  Antisense strand to SEQ ID NO: 1038656
aacaucaauguaaguuucc

SEQ ID NO: 1038658 - RNA, 19 nt, Artificial Sequence
  Description of Artificial Sequence: Synthetic oligonucleotide
  Sense strand starting at position 230 of SEQ ID NO: 914894
cuggcuuaucagcagcuaa

SEQ ID NO: 1038659 - RNA, 19 nt, Artificial Sequence
  Description of Artificial Sequence: Synthetic oligonucleotide
  Antisense strand to SEQ ID NO: 1038658
uuagcugcugauaagccag

SEQ ID NO: 1038660 - RNA, 19 nt, Artificial Sequence
  Description of Artificial Sequence: Synthetic oligonucleotide
  Sense strand starting at position 263 of SEQ ID NO: 914894
auaacaaugucccaggcau

SEQ ID NO: 1038661 - RNA, 19 nt, Artificial Sequence
  Description of Artificial Sequence: Synthetic oligonucleotide
  Antisense strand to SEQ ID NO: 1038660
augccugggacauuguuau

SEQ ID NO: 1038662 - RNA, 19 nt, Artificial Sequence
  Description of Artificial Sequence: Synthetic oligonucleotide
  Sense strand starting at position 322 of SEQ ID NO: 914894
acgucaucucuaugaggua

SEQ ID NO: 1038663 - RNA, 19 nt, Artificial Sequence
  Description of Artificial Sequence: Synthetic oligonucleotide
  Antisense strand to SEQ ID NO: 1038662
uaccucauagagaugacgu

SEQ ID NO: 1038664 - RNA, 19 nt, Artificial Sequence
  Description of Artificial Sequence: Synthetic oligonucleotide
  Sense strand starting at position 364 of SEQ ID NO: 914894
cggcuuaaguaaucuucca

SEQ ID NO: 1038665 - RNA, 19 nt, Artificial Sequence
  Description of Artificial Sequence: Synthetic oligonucleotide
  Antisense strand to SEQ ID NO: 1038664
uggaagauuacuuaagccg

SEQ ID NO: 1038666 - RNA, 19 nt, Artificial Sequence
  Description of Artificial Sequence: Synthetic oligonucleotide
  Sense strand starting at position 446 of SEQ ID NO: 914894
cccucauugugcuuucuca

SEQ ID NO: 1038667 - RNA, 19 nt, Artificial Sequence
  Description of Artificial Sequence: Synthetic oligonucleotide
  Antisense strand to SEQ ID NO: 1038666
ugagaaagcacaaugaggg

SEQ ID NO: 1038668 - RNA, 19 nt, Artificial Sequence
  Description of Artificial Sequence: Synthetic oligonucleotide
  Sense strand starting at position 489 of SEQ ID NO: 914894
ccauuuacgugaggaaacu

SEQ ID NO: 1038669 - RNA, 19 nt, Artificial Sequence
  Description of Artificial Sequence: Synthetic oligonucleotide
  Antisense strand to SEQ ID NO: 1038668
aguuuccucacguaaaugg

SEQ ID NO: 1038670 - RNA, 19 nt, Artificial Sequence
  Description of Artificial Sequence: Synthetic oligonucleotide
  Sense strand starting at position 539 of SEQ ID NO: 914894
cccugucuccuggagaugu

SEQ ID NO: 1038671 - RNA, 19 nt, Artificial Sequence
  Description of Artificial Sequence: Synthetic oligonucleotide
  Antisense strand to SEQ ID NO: 1038670
acaucuccaggagacaggg

SEQ ID NO: 1038672 - RNA, 19 nt, Artificial Sequence
  Description of Artificial Sequence: Synthetic oligonucleotide
  Sense strand starting at position 543 of SEQ ID NO: 914894
gucuccuggagaugucuga

SEQ ID NO: 1038673 - RNA, 19 nt, Artificial Sequence
  Description of Artificial Sequence: Synthetic oligonucleotide
  Antisense strand to SEQ ID NO: 1038672
ucagacaucuccaggagac

SEQ ID NO: 1038674 - RNA, 19 nt, Artificial Sequence
  Description of Artificial Sequence: Synthetic oligonucleotide
  Sense strand starting at position 547 of SEQ ID NO: 914894
ccuggagaugucugaagau

SEQ ID NO: 1038675 - RNA, 19 nt, Artificial Sequence
  Description of Artificial Sequence: Synthetic oligonucleotide
  Antisense strand to SEQ ID NO: 1038674
aucuucagacaucuccagg

SEQ ID NO: 1038676 - RNA, 19 nt, Artificial Sequence
  Description of Artificial Sequence: Synthetic oligonucleotide
  Sense strand starting at position 556 of SEQ ID NO: 914894
gucugaagaucccaucaug

SEQ ID NO: 1038677 - RNA, 19 nt, Artificial Sequence
  Description of Artificial Sequence: Synthetic oligonucleotide
  Antisense strand to SEQ ID NO: 1038676
caugaugggaucuucagac

SEQ ID NO: 1038678 - RNA, 19 nt, Artificial Sequence
  Description of Artificial Sequence: Synthetic oligonucleotide
  Sense strand starting at position 559 of SEQ ID NO: 914894
ugaagaucccaucauguuu

SEQ ID NO: 1038679 - RNA, 19 nt, Artificial Sequence
  Description of Artificial Sequence: Synthetic oligonucleotide
  Antisense strand to SEQ ID NO: 1038678
aaacaugaugggaucuuca

SEQ ID NO: 1038680 - RNA, 19 nt, Artificial Sequence
  Description of Artificial Sequence: Synthetic oligonucleotide
  Sense strand starting at position 598 of SEQ ID NO: 914894
gggucuaaaccuugagauc

SEQ ID NO: 1038681 - RNA, 19 nt, Artificial Sequence
  Description of Artificial Sequence: Synthetic oligonucleotide
  Antisense strand to SEQ ID NO: 1038680
gaucucaagguuuagaccc

SEQ ID NO: 1038682 - RNA, 19 nt, Artificial Sequence
  Description of Artificial Sequence: Synthetic oligonucleotide
  Sense strand starting at position 728 of SEQ ID NO: 914894
agaacaguuccugguauac

SEQ ID NO: 1038683 - RNA, 19 nt, Artificial Sequence
  Description of Artificial Sequence: Synthetic oligonucleotide
  Antisense strand to SEQ ID NO: 1038682
guauaccaggaacuguucu

SEQ ID NO: 1038684 - RNA, 19 nt, Artificial Sequence
  Description of Artificial Sequence: Synthetic oligonucleotide
  Sense strand starting at position 730 of SEQ ID NO: 914894
aacaguuccugguauacag

SEQ ID NO: 1038685 - RNA, 19 nt, Artificial Sequence
  Description of Artificial Sequence: Synthetic oligonucleotide
  Antisense strand to SEQ ID NO: 1038684
cuguauaccaggaacuguu

SEQ ID NO: 1038686 - RNA, 19 nt, Artificial Sequence
  Description of Artificial Sequence: Synthetic oligonucleotide
  Sense strand starting at position 745 of SEQ ID NO: 914894
acaguagguucucucuaag

SEQ ID NO: 1038687 - RNA, 19 nt, Artificial Sequence
  Description of Artificial Sequence: Synthetic oligonucleotide
  Antisense strand to SEQ ID NO: 1038686
cuuagagagaaccuacugu

SEQ ID NO: 1038688 - RNA, 19 nt, Artificial Sequence
  Description of Artificial Sequence: Synthetic oligonucleotide
  Sense strand starting at position 761 of SEQ ID NO: 914894
aagugcuugccaugacuau

SEQ ID NO: 1038689 - RNA, 19 nt, Artificial Sequence
  Description of Artificial Sequence: Synthetic oligonucleotide
  Antisense strand to SEQ ID NO: 1038688
auagucauggcaagcacuu

SEQ ID NO: 1038690 - RNA, 19 nt, Artificial Sequence
  Description of Artificial Sequence: Synthetic oligonucleotide
  Sense strand starting at position 813 of SEQ ID NO: 914894
agagcuuucuugcugccau

SEQ ID NO: 1038691 - RNA, 19 nt, Artificial Sequence
  Description of Artificial Sequence: Synthetic oligonucleotide
  Antisense strand to SEQ ID NO: 1038690
auggcagcaagaaagcucu

SEQ ID NO: 1038692 - RNA, 19 nt, Artificial Sequence
  Description of Artificial Sequence: Synthetic oligonucleotide
  Sense strand starting at position 2549 of SEQ ID NO: 914894
gagggcucugcauagaugu

SEQ ID NO: 1038693 - RNA, 19 nt, Artificial Sequence
  Description of Artificial Sequence: Synthetic oligonucleotide
  Antisense strand to SEQ ID NO: 1038692
acaucuaugcagagcccuc

SEQ ID NO: 1038694 - RNA, 19 nt, Artificial Sequence
  Description of Artificial Sequence: Synthetic oligonucleotide
  Sense strand starting at position 2556 of SEQ ID NO: 914894
cugcauagauguguuugga

SEQ ID NO: 1038695 - RNA, 19 nt, Artificial Sequence
  Description of Artificial Sequence: Synthetic oligonucleotide
  Antisense strand to SEQ ID NO: 1038694
uccaaacacaucuaugcag

SEQ ID NO: 1038696 - RNA, 19 nt, Artificial Sequence
  Description of Artificial Sequence: Synthetic oligonucleotide
  Sense strand starting at position 2559 of SEQ ID NO: 914894
cauagauguguuuggaaug

SEQ ID NO: 1038697 - RNA, 19 nt, Artificial Sequence
  Description of Artificial Sequence: Synthetic oligonucleotide
  Antisense strand to SEQ ID NO: 1038696
cauuccaaacacaucuaug

SEQ ID NO: 1038698 - RNA, 19 nt, Artificial Sequence
  Description of Artificial Sequence: Synthetic oligonucleotide
  Sense strand starting at position 2564 of SEQ ID NO: 914894
auguguuuggaaugaaugu

SEQ ID NO: 1038699 - RNA, 19 nt, Artificial Sequence
  Description of Artificial Sequence: Synthetic oligonucleotide
  Antisense strand to SEQ ID NO: 1038698
acauucauuccaaacacau

SEQ ID NO: 1038700 - RNA, 19 nt, Artificial Sequence
  Description of Artificial Sequence: Synthetic oligonucleotide
  Sense strand starting at position 2573 of SEQ ID NO: 914894
gaaugaaugugagcaggau

SEQ ID NO: 1038701 - RNA, 19 nt, Artificial Sequence
  Description of Artificial Sequence: Synthetic oligonucleotide
  Antisense strand to SEQ ID NO: 1038700
auccugcucacauucauuc

SEQ ID NO: 1038702 - RNA, 19 nt, Artificial Sequence
  Description of Artificial Sequence: Synthetic oligonucleotide
  Sense strand starting at position 2596 of SEQ ID NO: 914894
gguacauaccagugguauc

SEQ ID NO: 1038703 - RNA, 19 nt, Artificial Sequence
  Description of Artificial Sequence: Synthetic oligonucleotide
  Antisense strand to SEQ ID NO: 1038702
gauaccacugguauguacc

SEQ ID NO: 1038704 - RNA, 19 nt, Artificial Sequence
  Description of Artificial Sequence: Synthetic oligonucleotide
  Sense strand starting at position 2597 of SEQ ID NO: 914894
guacauaccagugguauca

SEQ ID NO: 1038705 - RNA, 19 nt, Artificial Sequence
  Description of Artificial Sequence: Synthetic oligonucleotide
  Antisense strand to SEQ ID NO: 1038704
ugauaccacugguauguac

SEQ ID NO: 1038706 - RNA, 19 nt, Artificial Sequence
  Description of Artificial Sequence: Synthetic oligonucleotide
  Sense strand starting at position 2599 of SEQ ID NO: 914894
acauaccagugguaucaca

SEQ ID NO: 1038707 - RNA, 19 nt, Artificial Sequence
  Description of Artificial Sequence: Synthetic oligonucleotide
  Antisense strand to SEQ ID NO: 1038706
ugugauaccacugguaugu

SEQ ID NO: 1038708 - RNA, 19 nt, Artificial Sequence
  Description of Artificial Sequence: Synthetic oligonucleotide
  Sense strand starting at position 2875 of SEQ ID NO: 914894
ccuccaggccuguaauuaa

SEQ ID NO: 1038709 - RNA, 19 nt, Artificial Sequence
  Description of Artificial Sequence: Synthetic oligonucleotide
  Antisense strand to SEQ ID NO: 1038708
uuaauuacaggccuggagg

SEQ ID NO: 1038710 - RNA, 19 nt, Artificial Sequence
  Description of Artificial Sequence: Synthetic oligonucleotide
  Sense strand starting at position 2886 of SEQ ID NO: 914894
guaauuaacugaguggaug

SEQ ID NO: 1038711 - RNA, 19 nt, Artificial Sequence
  Description of Artificial Sequence: Synthetic oligonucleotide
  Antisense strand to SEQ ID NO: 1038710
cauccacucaguuaauuac

SEQ ID NO: 1038712 - RNA, 19 nt, Artificial Sequence
  Description of Artificial Sequence: Synthetic oligonucleotide
  Sense strand starting at position 2933 of SEQ ID NO: 914894
aagggaaagugauaauuaa

SEQ ID NO: 1038713 - RNA, 19 nt, Artificial Sequence
  Description of Artificial Sequence: Synthetic oligonucleotide
  Antisense strand to SEQ ID NO: 1038712
uuaauuaucacuuucccuu

SEQ ID NO: 1038714 - RNA, 19 nt, Artificial Sequence
  Description of Artificial Sequence: Synthetic oligonucleotide
  Sense strand starting at position 2966 of SEQ ID NO: 914894
gggugucugcugggaauuc

SEQ ID NO: 1038715 - RNA, 19 nt, Artificial Sequence
  Description of Artificial Sequence: Synthetic oligonucleotide
  Antisense strand to SEQ ID NO: 1038714
gaauucccagcagacaccc

SEQ ID NO: 1038716 - RNA, 19 nt, Artificial Sequence
  Description of Artificial Sequence: Synthetic oligonucleotide
  Sense strand starting at position 3069 of SEQ ID NO: 914894
cccuaucccugaguggaaa

SEQ ID NO: 1038717 - RNA, 19 nt, Artificial Sequence
  Description of Artificial Sequence: Synthetic oligonucleotide
  Antisense strand to SEQ ID NO: 1038716
uuuccacucagggauaggg

SEQ ID NO: 1038718 - RNA, 19 nt, Artificial Sequence
  Description of Artificial Sequence: Synthetic oligonucleotide
  Sense strand starting at position 3070 of SEQ ID NO: 914894
ccuaucccugaguggaaau

SEQ ID NO: 1038719 - RNA, 19 nt, Artificial Sequence
  Description of Artificial Sequence: Synthetic oligonucleotide
  Antisense strand to SEQ ID NO: 1038718
auuuccacucagggauagg

SEQ ID NO: 1038720 - RNA, 19 nt, Artificial Sequence
  Description of Artificial Sequence: Synthetic oligonucleotide
  Sense strand starting at position 3080 of SEQ ID NO: 914894
aguggaaauucccaccuga

SEQ ID NO: 1038721 - RNA, 19 nt, Artificial Sequence
  Description of Artificial Sequence: Synthetic oligonucleotide
  Antisense strand to SEQ ID NO: 1038720
ucaggugggaauuuccacu

SEQ ID NO: 1038722 - RNA, 19 nt, Artificial Sequence
  Description of Artificial Sequence: Synthetic oligonucleotide
  Sense strand starting at position 3117 of SEQ ID NO: 914894
ggaugagacuguccuuacu

SEQ ID NO: 1038723 - RNA, 19 nt, Artificial Sequence
  Description of Artificial Sequence: Synthetic oligonucleotide
  Antisense strand to SEQ ID NO: 1038722
aguaaggacagucucaucc

SEQ ID NO: 1038724 - RNA, 19 nt, Artificial Sequence
  Description of Artificial Sequence: Synthetic oligonucleotide
  Sense strand starting at position 3119 of SEQ ID NO: 914894
augagacuguccuuacuaa

SEQ ID NO: 1038725 - RNA, 19 nt, Artificial Sequence
  Description of Artificial Sequence: Synthetic oligonucleotide
  Antisense strand to SEQ ID NO: 1038724
uuaguaaggacagucucau

SEQ ID NO: 1038726 - RNA, 19 nt, Artificial Sequence
  Description of Artificial Sequence: Synthetic oligonucleotide
  Sense strand starting at position 3126 of SEQ ID NO: 914894
uguccuuacuaaguaauca

SEQ ID NO: 1038727 - RNA, 19 nt, Artificial Sequence
  Description of Artificial Sequence: Synthetic oligonucleotide
  Antisense strand to SEQ ID NO: 1038726
ugauuacuuaguaaggaca

SEQ ID NO: 1038728 - RNA, 19 nt, Artificial Sequence
  Description of Artificial Sequence: Synthetic oligonucleotide
  Sense strand starting at position 3183 of SEQ ID NO: 914894
ccuagcauccauuacagua

SEQ ID NO: 1038729 - RNA, 19 nt, Artificial Sequence
  Description of Artificial Sequence: Synthetic oligonucleotide
  Antisense strand to SEQ ID NO: 1038728
uacuguaauggaugcuagg

SEQ ID NO: 1038730 - RNA, 19 nt, Artificial Sequence
  Description of Artificial Sequence: Synthetic oligonucleotide
  Sense strand starting at position 3438 of SEQ ID NO: 914894
uccacauuagagugacaac

SEQ ID NO: 1038731 - RNA, 19 nt, Artificial Sequence
  Description of Artificial Sequence: Synthetic oligonucleotide
  Antisense strand to SEQ ID NO: 1038730
guugucacucuaaugugga

SEQ ID NO: 1038732 - RNA, 19 nt, Artificial Sequence
  Description of Artificial Sequence: Synthetic oligonucleotide
  Sense strand starting at position 3441 of SEQ ID NO: 914894
acauuagagugacaacuca

SEQ ID NO: 1038733 - RNA, 19 nt, Artificial Sequence
  Description of Artificial Sequence: Synthetic oligonucleotide
  Antisense strand to SEQ ID NO: 1038732
ugaguugucacucuaaugu

SEQ ID NO: 1038734 - RNA, 19 nt, Artificial Sequence
  Description of Artificial Sequence: Synthetic oligonucleotide
  Sense strand starting at position 39 of SEQ ID NO: 914895
ggccucgaugcucacuaaa

SEQ ID NO: 1038735 - RNA, 19 nt, Artificial Sequence
  Description of Artificial Sequence: Synthetic oligonucleotide
  Antisense strand to SEQ ID NO: 1038734
uuuagugagcaucgaggcc

SEQ ID NO: 1038736 - RNA, 19 nt, Artificial Sequence
  Description of Artificial Sequence: Synthetic oligonucleotide
  Sense strand starting at position 509 of SEQ ID NO: 914895
gcgugaaggugcauuagaa

SEQ ID NO: 1038737 - RNA, 19 nt, Artificial Sequence
  Description of Artificial Sequence: Synthetic oligonucleotide
  Antisense strand to SEQ ID NO: 1038736
uucuaaugcaccuucacgc

SEQ ID NO: 1038738 - RNA, 19 nt, Artificial Sequence
  Description of Artificial Sequence: Synthetic oligonucleotide
  Sense strand starting at position 555 of SEQ ID NO: 914895
gagcauaugcuccggaacu

SEQ ID NO: 1038739 - RNA, 19 nt, Artificial Sequence
  Description of Artificial Sequence: Synthetic oligonucleotide
  Antisense strand to SEQ ID NO: 1038738
aguuccggagcauaugcuc

SEQ ID NO: 1038740 - RNA, 19 nt, Artificial Sequence
  Description of Artificial Sequence: Synthetic oligonucleotide
  Sense strand starting at position 639 of SEQ ID NO: 914895
gagcauguccaccaacaga

SEQ ID NO: 1038741 - RNA, 19 nt, Artificial Sequence
  Description of Artificial Sequence: Synthetic oligonucleotide
  Antisense strand to SEQ ID NO: 1038740
ucuguugguggacaugcuc

SEQ ID NO: 1038742 - RNA, 19 nt, Artificial Sequence
  Description of Artificial Sequence: Synthetic oligonucleotide
  Sense strand starting at position 661 of SEQ ID NO: 914895
cuguaauucucccuuguuu

SEQ ID NO: 1038743 - RNA, 19 nt, Artificial Sequence
  Description of Artificial Sequence: Synthetic oligonucleotide
  Antisense strand to SEQ ID NO: 1038742
aaacaagggagaauuacag

SEQ ID NO: 1038744 - RNA, 19 nt, Artificial Sequence
  Description of Artificial Sequence: Synthetic oligonucleotide
  Sense strand starting at position 723 of SEQ ID NO: 914895
gguagucccgaguggaacu

SEQ ID NO: 1038745 - RNA, 19 nt, Artificial Sequence
  Description of Artificial Sequence: Synthetic oligonucleotide
  Antisense strand to SEQ ID NO: 1038744
aguuccacucgggacuacc

SEQ ID NO: 1038746 - RNA, 19 nt, Artificial Sequence
  Description of Artificial Sequence: Synthetic oligonucleotide
  Sense strand starting at position 792 of SEQ ID NO: 914895
ggagauucgcccugacuga

SEQ ID NO: 1038747 - RNA, 19 nt, Artificial Sequence
  Description of Artificial Sequence: Synthetic oligonucleotide
  Antisense strand to SEQ ID NO: 1038746
ucagucagggcgaaucucc

SEQ ID NO: 1038748 - RNA, 19 nt, Artificial Sequence
  Description of Artificial Sequence: Synthetic oligonucleotide
  Sense strand starting at position 805 of SEQ ID NO: 914895
gacugagguacagguguuu

SEQ ID NO: 1038749 - RNA, 19 nt, Artificial Sequence
  Description of Artificial Sequence: Synthetic oligonucleotide
  Antisense strand to SEQ ID NO: 1038748
aaacaccuguaccucaguc

SEQ ID NO: 1038750 - RNA, 19 nt, Artificial Sequence
  Description of Artificial Sequence: Synthetic oligonucleotide
  Sense strand starting at position 870 of SEQ ID NO: 914895
cgagacaugccucgguaug

SEQ ID NO: 1038751 - RNA, 19 nt, Artificial Sequence
  Description of Artificial Sequence: Synthetic oligonucleotide
  Antisense strand to SEQ ID NO: 1038750
cauaccgaggcaugucucg

SEQ ID NO: 1038752 - RNA, 19 nt, Artificial Sequence
  Description of Artificial Sequence: Synthetic oligonucleotide
  Sense strand starting at position 872 of SEQ ID NO: 914895
agacaugccucgguaugca

SEQ ID NO: 1038753 - RNA, 19 nt, Artificial Sequence
  Description of Artificial Sequence: Synthetic oligonucleotide
  Antisense strand to SEQ ID NO: 1038752
ugcauaccgaggcaugucu

SEQ ID NO: 1038754 - RNA, 19 nt, Artificial Sequence
  Description of Artificial Sequence: Synthetic oligonucleotide
  Sense strand starting at position 1033 of SEQ ID NO: 914895
cccagaugcacuugugagu

SEQ ID NO: 1038755 - RNA, 19 nt, Artificial Sequence
  Description of Artificial Sequence: Synthetic oligonucleotide
  Antisense strand to SEQ ID NO: 1038754
acucacaagugcaucuggg

SEQ ID NO: 1038756 - RNA, 19 nt, Artificial Sequence
  Description of Artificial Sequence: Synthetic oligonucleotide
  Sense strand starting at position 2101 of SEQ ID NO: 914895
gcucauuacuaugcagaga

SEQ ID NO: 1038757 - RNA, 19 nt, Artificial Sequence
  Description of Artificial Sequence: Synthetic oligonucleotide
  Antisense strand to SEQ ID NO: 1038756
ucucugcauaguaaugagc

SEQ ID NO: 1038758 - RNA, 19 nt, Artificial Sequence
  Description of Artificial Sequence: Synthetic oligonucleotide
  Sense strand starting at position 2284 of SEQ ID NO: 914895
ggauuugucuggcagguug

SEQ ID NO: 1038759 - RNA, 19 nt, Artificial Sequence
  Description of Artificial Sequence: Synthetic oligonucleotide
  Antisense strand to SEQ ID NO: 1038758
caaccugccagacaaaucc

SEQ ID NO: 1038760 - RNA, 19 nt, Artificial Sequence
  Description of Artificial Sequence: Synthetic oligonucleotide
  Sense strand starting at position 2365 of SEQ ID NO: 914895
uuuguucccuccgcagaaa

SEQ ID NO: 1038761 - RNA, 19 nt, Artificial Sequence
  Description of Artificial Sequence: Synthetic oligonucleotide
  Antisense strand to SEQ ID NO: 1038760
uuucugcggagggaacaaa

SEQ ID NO: 1038762 - RNA, 19 nt, Artificial Sequence
  Description of Artificial Sequence: Synthetic oligonucleotide
  Sense strand starting at position 2366 of SEQ ID NO: 914895
uuguucccuccgcagaaau

SEQ ID NO: 1038763 - RNA, 19 nt, Artificial Sequence
  Description of Artificial Sequence: Synthetic oligonucleotide
  Antisense strand to SEQ ID NO: 1038762
auuucugcggagggaacaa

SEQ ID NO: 1038764 - RNA, 19 nt, Artificial Sequence
  Description of Artificial Sequence: Synthetic oligonucleotide
  Sense strand starting at position 2397 of SEQ ID NO: 914895
auuggaugaccugguaagu

SEQ ID NO: 1038765 - RNA, 19 nt, Artificial Sequence
  Description of Artificial Sequence: Synthetic oligonucleotide
  Antisense strand to SEQ ID NO: 1038764
acuuaccaggucauccaau

SEQ ID NO: 1038766 - RNA, 19 nt, Artificial Sequence
  Description of Artificial Sequence: Synthetic oligonucleotide
  Sense strand starting at position 2525 of SEQ ID NO: 914895
aaaguuucccucgaucuga

SEQ ID NO: 1038767 - RNA, 19 nt, Artificial Sequence
  Description of Artificial Sequence: Synthetic oligonucleotide
  Antisense strand to SEQ ID NO: 1038766
ucagaucgagggaaacuuu

SEQ ID NO: 1038768 - RNA, 19 nt, Artificial Sequence
  Description of Artificial Sequence: Synthetic oligonucleotide
  Sense strand starting at position 2542 of SEQ ID NO: 914895
gacacacaucuuuggguuu

SEQ ID NO: 1038769 - RNA, 19 nt, Artificial Sequence
  Description of Artificial Sequence: Synthetic oligonucleotide
  Antisense strand to SEQ ID NO: 1038768
aaacccaaagauguguguc

SEQ ID NO: 1038770 - RNA, 19 nt, Artificial Sequence
  Description of Artificial Sequence: Synthetic oligonucleotide
  Sense strand starting at position 2633 of SEQ ID NO: 914895
auacacauuugguagcuaa

SEQ ID NO: 1038771 - RNA, 19 nt, Artificial Sequence
  Description of Artificial Sequence: Synthetic oligonucleotide
  Antisense strand to SEQ ID NO: 1038770
uuagcuaccaaauguguau

SEQ ID NO: 1038772 - RNA, 19 nt, Artificial Sequence
  Description of Artificial Sequence: Synthetic oligonucleotide
  Sense strand starting at position 2646 of SEQ ID NO: 914895
agcuaagucuuagcaauuc

SEQ ID NO: 1038773 - RNA, 19 nt, Artificial Sequence
  Description of Artificial Sequence: Synthetic oligonucleotide
  Antisense strand to SEQ ID NO: 1038772
gaauugcuaagacuuagcu

SEQ ID NO: 1038774 - RNA, 19 nt, Artificial Sequence
  Description of Artificial Sequence: Synthetic oligonucleotide
  Sense strand starting at position 2768 of SEQ ID NO: 914895
gucagagaaagugauguuu

SEQ ID NO: 1038775 - RNA, 19 nt, Artificial Sequence
  Description of Artificial Sequence: Synthetic oligonucleotide
  Antisense strand to SEQ ID NO: 1038774
aaacaucacuuucucugac

SEQ ID NO: 1038776 - RNA, 19 nt, Artificial Sequence
  Description of Artificial Sequence: Synthetic oligonucleotide
  Sense strand starting at position 2783 of SEQ ID NO: 914895
guuucugaacacuggacaa

SEQ ID NO: 1038777 - RNA, 19 nt, Artificial Sequence
  Description of Artificial Sequence: Synthetic oligonucleotide
  Antisense strand to SEQ ID NO: 1038776
uuguccaguguucagaaac

SEQ ID NO: 1038778 - RNA, 19 nt, Artificial Sequence
  Description of Artificial Sequence: Synthetic oligonucleotide
  Sense strand starting at position 2854 of SEQ ID NO: 914895
guugguguuagguaauuau

SEQ ID NO: 1038779 - RNA, 19 nt, Artificial Sequence
  Description of Artificial Sequence: Synthetic oligonucleotide
  Antisense strand to SEQ ID NO: 1038778
auaauuaccuaacaccaac

SEQ ID NO: 1038780 - RNA, 19 nt, Artificial Sequence
  Description of Artificial Sequence: Synthetic oligonucleotide
  Sense strand starting at position 2857 of SEQ ID NO: 914895
gguguuagguaauuaucag

SEQ ID NO: 1038781 - RNA, 19 nt, Artificial Sequence
  Description of Artificial Sequence: Synthetic oligonucleotide
  Antisense strand to SEQ ID NO: 1038780
cugauaauuaccuaacacc

SEQ ID NO: 1038782 - RNA, 19 nt, Artificial Sequence
  Description of Artificial Sequence: Synthetic oligonucleotide
  Sense strand starting at position 2899 of SEQ ID NO: 914895
gagucccuguggccuaaua

SEQ ID NO: 1038783 - RNA, 19 nt, Artificial Sequence
  Description of Artificial Sequence: Synthetic oligonucleotide
  Antisense strand to SEQ ID NO: 1038782
uauuaggccacagggacuc

SEQ ID NO: 1038784 - RNA, 19 nt, Artificial Sequence
  Description of Artificial Sequence: Synthetic oligonucleotide
  Sense strand starting at position 2901 of SEQ ID NO: 914895
gucccuguggccuaauaga

SEQ ID NO: 1038785 - RNA, 19 nt, Artificial Sequence
  Description of Artificial Sequence: Synthetic oligonucleotide
  Antisense strand to SEQ ID NO: 1038784
ucuauuaggccacagggac

SEQ ID NO: 1038786 - RNA, 19 nt, Artificial Sequence
  Description of Artificial Sequence: Synthetic oligonucleotide
  Sense strand starting at position 3398 of SEQ ID NO: 914895
cuagccaucguauguaaau

SEQ ID NO: 1038787 - RNA, 19 nt, Artificial Sequence
  Description of Artificial Sequence: Synthetic oligonucleotide
  Antisense strand to SEQ ID NO: 1038786
auuuacauacgauggcuag

SEQ ID NO: 1038788 - RNA, 19 nt, Artificial Sequence
  Description of Artificial Sequence: Synthetic oligonucleotide
  Sense strand starting at position 3399 of SEQ ID NO: 914895
uagccaucguauguaaaua

SEQ ID NO: 1038789 - RNA, 19 nt, Artificial Sequence
  Description of Artificial Sequence: Synthetic oligonucleotide
  Antisense strand to SEQ ID NO: 1038788
uauuuacauacgauggcua

SEQ ID NO: 1038790 - RNA, 19 nt, Artificial Sequence
  Description of Artificial Sequence: Synthetic oligonucleotide
  Sense strand starting at position 3443 of SEQ ID NO: 914895
gaugcagaccuauaaguuu

SEQ ID NO: 1038791 - RNA, 19 nt, Artificial Sequence
  Description of Artificial Sequence: Synthetic oligonucleotide
  Antisense strand to SEQ ID NO: 1038790
aaacuuauaggucugcauc

SEQ ID NO: 1038792 - RNA, 19 nt, Artificial Sequence
  Description of Artificial Sequence: Synthetic oligonucleotide
  Sense strand starting at position 3446 of SEQ ID NO: 914895
gcagaccuauaaguuuaaa

SEQ ID NO: 1038793 - RNA, 19 nt, Artificial Sequence
  Description of Artificial Sequence: Synthetic oligonucleotide
  Antisense strand to SEQ ID NO: 1038792
uuuaaacuuauaggucugc

SEQ ID NO: 1038794 - RNA, 19 nt, Artificial Sequence
  Description of Artificial Sequence: Synthetic oligonucleotide
  Sense strand starting at position 3483 of SEQ ID NO: 914895
cuuuguauuugggaguuua

SEQ ID NO: 1038795 - RNA, 19 nt, Artificial Sequence
  Description of Artificial Sequence: Synthetic oligonucleotide
  Antisense strand to SEQ ID NO: 1038794
uaaacucccaaauacaaag

SEQ ID NO: 1038796 - RNA, 19 nt, Artificial Sequence
  Description of Artificial Sequence: Synthetic oligonucleotide
  Sense strand starting at position 3541 of SEQ ID NO: 914895
caguaaaucugucuagaag

SEQ ID NO: 1038797 - RNA, 19 nt, Artificial Sequence
  Description of Artificial Sequence: Synthetic oligonucleotide
  Antisense strand to SEQ ID NO: 1038796
cuucuagacagauuuacug

SEQ ID NO: 1038798 - RNA, 19 nt, Artificial Sequence
  Description of Artificial Sequence: Synthetic oligonucleotide
  Sense strand starting at position 3542 of SEQ ID NO: 914895
aguaaaucugucuagaagc

SEQ ID NO: 1038799 - RNA, 19 nt, Artificial Sequence
  Description of Artificial Sequence: Synthetic oligonucleotide
  Antisense strand to SEQ ID NO: 1038798
gcuucuagacagauuuacu

SEQ ID NO: 1038800 - RNA, 19 nt, Artificial Sequence
  Description of Artificial Sequence: Synthetic oligonucleotide
  Sense strand starting at position 3682 of SEQ ID NO: 914895
aaaucugaggcucgagaga

SEQ ID NO: 1038801 - RNA, 19 nt, Artificial Sequence
  Description of Artificial Sequence: Synthetic oligonucleotide
  Antisense strand to SEQ ID NO: 1038800
ucucucgagccucagauuu

SEQ ID NO: 1038802 - RNA, 19 nt, Artificial Sequence
  Description of Artificial Sequence: Synthetic oligonucleotide
  Sense strand starting at position 3703 of SEQ ID NO: 914895
guguguucugcccaacauc

SEQ ID NO: 1038803 - RNA, 19 nt, Artificial Sequence
  Description of Artificial Sequence: Synthetic oligonucleotide
  Antisense strand to SEQ ID NO: 1038802
gauguugggcagaacacac

SEQ ID NO: 1038804 - RNA, 19 nt, Artificial Sequence
  Description of Artificial Sequence: Synthetic oligonucleotide
  Sense strand starting at position 3752 of SEQ ID NO: 914895
cuaaucugguacucuuaga

SEQ ID NO: 1038805 - RNA, 19 nt, Artificial Sequence
  Description of Artificial Sequence: Synthetic oligonucleotide
  Antisense strand to SEQ ID NO: 1038804
ucuaagaguaccagauuag

SEQ ID NO: 1038806 - RNA, 19 nt, Artificial Sequence
  Description of Artificial Sequence: Synthetic oligonucleotide
  Sense strand starting at position 3861 of SEQ ID NO: 914895
guuucuguaaucguuucuu

SEQ ID NO: 1038807 - RNA, 19 nt, Artificial Sequence
  Description of Artificial Sequence: Synthetic oligonucleotide
  Antisense strand to SEQ ID NO: 1038806
aagaaacgauuacagaaac

SEQ ID NO: 1038808 - RNA, 19 nt, Artificial Sequence
  Description of Artificial Sequence: Synthetic oligonucleotide
  Sense strand starting at position 3865 of SEQ ID NO: 914895
cuguaaucguuucuuuaag

SEQ ID NO: 1038809 - RNA, 19 nt, Artificial Sequence
  Description of Artificial Sequence: Synthetic oligonucleotide
  Antisense strand to SEQ ID NO: 1038808
cuuaaagaaacgauuacag

SEQ ID NO: 1038810 - RNA, 19 nt, Artificial Sequence
  Description of Artificial Sequence: Synthetic oligonucleotide
  Sense strand starting at position 3866 of SEQ ID NO: 914895
uguaaucguuucuuuaaga

SEQ ID NO: 1038811 - RNA, 19 nt, Artificial Sequence
  Description of Artificial Sequence: Synthetic oligonucleotide
  Antisense strand to SEQ ID NO: 1038810
ucuuaaagaaacgauuaca

SEQ ID NO: 1038812 - RNA, 19 nt, Artificial Sequence
  Description of Artificial Sequence: Synthetic oligonucleotide
  Sense strand starting at position 3867 of SEQ ID NO: 914895
guaaucguuucuuuaagau

SEQ ID NO: 1038813 - RNA, 19 nt, Artificial Sequence
  Description of Artificial Sequence: Synthetic oligonucleotide
  Antisense strand to SEQ ID NO: 1038812
aucuuaaagaaacgauuac

SEQ ID NO: 1038814 - RNA, 19 nt, Artificial Sequence
  Description of Artificial Sequence: Synthetic oligonucleotide
  Sense strand starting at position 39 of SEQ ID NO: 914896
guacauguucuauacagac

SEQ ID NO: 1038815 - RNA, 19 nt, Artificial Sequence
  Description of Artificial Sequence: Synthetic oligonucleotide
  Antisense strand to SEQ ID NO: 1038814
gucuguauagaacauguac

SEQ ID NO: 1038816 - RNA, 19 nt, Artificial Sequence
  Description of Artificial Sequence: Synthetic oligonucleotide
  Sense strand starting at position 82 of SEQ ID NO: 914896
aucugcaguugguugaaau

SEQ ID NO: 1038817 - RNA, 19 nt, Artificial Sequence
  Description of Artificial Sequence: Synthetic oligonucleotide
  Antisense strand to SEQ ID NO: 1038816
auuucaaccaacugcagau

SEQ ID NO: 1038818 - RNA, 19 nt, Artificial Sequence
  Description of Artificial Sequence: Synthetic oligonucleotide
  Sense strand starting at position 83 of SEQ ID NO: 914896
ucugcaguugguugaaaua

SEQ ID NO: 1038819 - RNA, 19 nt, Artificial Sequence
  Description of Artificial Sequence: Synthetic oligonucleotide
  Antisense strand to SEQ ID NO: 1038818
uauuucaaccaacugcaga

SEQ ID NO: 1038820 - RNA, 19 nt, Artificial Sequence
  Description of Artificial Sequence: Synthetic oligonucleotide
  Sense strand starting at position 331 of SEQ ID NO: 914896
acuuccuaagcucaagagu

SEQ ID NO: 1038821 - RNA, 19 nt, Artificial Sequence
  Description of Artificial Sequence: Synthetic oligonucleotide
  Antisense strand to SEQ ID NO: 1038820
acucuugagcuuaggaagu

SEQ ID NO: 1038822 - RNA, 19 nt, Artificial Sequence
  Description of Artificial Sequence: Synthetic oligonucleotide
  Sense strand starting at position 754 of SEQ ID NO: 914896
cuuuaauaggcuuaacgga

SEQ ID NO: 1038823 - RNA, 19 nt, Artificial Sequence
  Description of Artificial Sequence: Synthetic oligonucleotide
  Antisense strand to SEQ ID NO: 1038822
uccguuaagccuauuaaag

SEQ ID NO: 1038824 - RNA, 19 nt, Artificial Sequence
  Description of Artificial Sequence: Synthetic oligonucleotide
  Sense strand starting at position 769 of SEQ ID NO: 914896
cggaaacaaucucauuuac

SEQ ID NO: 1038825 - RNA, 19 nt, Artificial Sequence
  Description of Artificial Sequence: Synthetic oligonucleotide
  Antisense strand to SEQ ID NO: 1038824
guaaaugagauuguuuccg

SEQ ID NO: 1038826 - RNA, 19 nt, Artificial Sequence
  Description of Artificial Sequence: Synthetic oligonucleotide
  Sense strand starting at position 1051 of SEQ ID NO: 914896
auuucuaaugcugguguau

SEQ ID NO: 1038827 - RNA, 19 nt, Artificial Sequence
  Description of Artificial Sequence: Synthetic oligonucleotide
  Antisense strand to SEQ ID NO: 1038826
auacaccagcauuagaaau

SEQ ID NO: 1038828 - RNA, 19 nt, Artificial Sequence
  Description of Artificial Sequence: Synthetic oligonucleotide
  Sense strand starting at position 1079 of SEQ ID NO: 914896
gcuugaaauuguuugaaau

SEQ ID NO: 1038829 - RNA, 19 nt, Artificial Sequence
  Description of Artificial Sequence: Synthetic oligonucleotide
  Antisense strand to SEQ ID NO: 1038828
auuucaaacaauuucaagc

SEQ ID NO: 1038830 - RNA, 19 nt, Artificial Sequence
  Description of Artificial Sequence: Synthetic oligonucleotide
  Sense strand starting at position 1151 of SEQ ID NO: 914896
gcuggaaugcuggaaauca

SEQ ID NO: 1038831 - RNA, 19 nt, Artificial Sequence
  Description of Artificial Sequence: Synthetic oligonucleotide
  Antisense strand to SEQ ID NO: 1038830
ugauuuccagcauuccagc

SEQ ID NO: 1038832 - RNA, 19 nt, Artificial Sequence
  Description of Artificial Sequence: Synthetic oligonucleotide
  Sense strand starting at position 1212 of SEQ ID NO: 914896
cuaauuacucagcagaggu

SEQ ID NO: 1038833 - RNA, 19 nt, Artificial Sequence
  Description of Artificial Sequence: Synthetic oligonucleotide
  Antisense strand to SEQ ID NO: 1038832
accucugcugaguaauuag

SEQ ID NO: 1038834 - RNA, 19 nt, Artificial Sequence
  Description of Artificial Sequence: Synthetic oligonucleotide
  Sense strand starting at position 1244 of SEQ ID NO: 914896
uugacagucugcucuagga

SEQ ID NO: 1038835 - RNA, 19 nt, Artificial Sequence
  Description of Artificial Sequence: Synthetic oligonucleotide
  Antisense strand to SEQ ID NO: 1038834
uccuagagcagacugucaa

SEQ ID NO: 1038836 - RNA, 19 nt, Artificial Sequence
  Description of Artificial Sequence: Synthetic oligonucleotide
  Sense strand starting at position 1246 of SEQ ID NO: 914896
gacagucugcucuaggaag

SEQ ID NO: 1038837 - RNA, 19 nt, Artificial Sequence
  Description of Artificial Sequence: Synthetic oligonucleotide
  Antisense strand to SEQ ID NO: 1038836
cuuccuagagcagacuguc

SEQ ID NO: 1038838 - RNA, 19 nt, Artificial Sequence
  Description of Artificial Sequence: Synthetic oligonucleotide
  Sense strand starting at position 1285 of SEQ ID NO: 914896
aauuguaggguuuguaaga

SEQ ID NO: 1038839 - RNA, 19 nt, Artificial Sequence
  Description of Artificial Sequence: Synthetic oligonucleotide
  Antisense strand to SEQ ID NO: 1038838
ucuuacaaacccuacaauu

SEQ ID NO: 1038840 - RNA, 19 nt, Artificial Sequence
  Description of Artificial Sequence: Synthetic oligonucleotide
  Sense strand starting at position 1286 of SEQ ID NO: 914896
auuguaggguuuguaagaa

SEQ ID NO: 1038841 - RNA, 19 nt, Artificial Sequence
  Description of Artificial Sequence: Synthetic oligonucleotide
  Antisense strand to SEQ ID NO: 1038840
uucuuacaaacccuacaau

SEQ ID NO: 1038842 - RNA, 19 nt, Artificial Sequence
  Description of Artificial Sequence: Synthetic oligonucleotide
  Sense strand starting at position 1466 of SEQ ID NO: 914896
cgagguuguggagaaagua

SEQ ID NO: 1038843 - RNA, 19 nt, Artificial Sequence
  Description of Artificial Sequence: Synthetic oligonucleotide
  Antisense strand to SEQ ID NO: 1038842
uacuuucuccacaaccucg

SEQ ID NO: 1038844 - RNA, 19 nt, Artificial Sequence
  Description of Artificial Sequence: Synthetic oligonucleotide
  Sense strand starting at position 1487 of SEQ ID NO: 914896
gaaggaguuugugugcaaa

SEQ ID NO: 1038845 - RNA, 19 nt, Artificial Sequence
  Description of Artificial Sequence: Synthetic oligonucleotide
  Antisense strand to SEQ ID NO: 1038844
uuugcacacaaacuccuuc

SEQ ID NO: 1038846 - RNA, 19 nt, Artificial Sequence
  Description of Artificial Sequence: Synthetic oligonucleotide
  Sense strand starting at position 1489 of SEQ ID NO: 914896
aggaguuugugugcaaaca

SEQ ID NO: 1038847 - RNA, 19 nt, Artificial Sequence
  Description of Artificial Sequence: Synthetic oligonucleotide
  Antisense strand to SEQ ID NO: 1038846
uguuugcacacaaacuccu

SEQ ID NO: 1038848 - RNA, 19 nt, Artificial Sequence
  Description of Artificial Sequence: Synthetic oligonucleotide
  Sense strand starting at position 1490 of SEQ ID NO: 914896
ggaguuugugugcaaacag

SEQ ID NO: 1038849 - RNA, 19 nt, Artificial Sequence
  Description of Artificial Sequence: Synthetic oligonucleotide
  Antisense strand to SEQ ID NO: 1038848
cuguuugcacacaaacucc

SEQ ID NO: 1038850 - RNA, 19 nt, Artificial Sequence
  Description of Artificial Sequence: Synthetic oligonucleotide
  Sense strand starting at position 1514 of SEQ ID NO: 914896
aaaggagguucuguugaau

SEQ ID NO: 1038851 - RNA, 19 nt, Artificial Sequence
  Description of Artificial Sequence: Synthetic oligonucleotide
  Antisense strand to SEQ ID NO: 1038850
auucaacagaaccuccuuu

SEQ ID NO: 1038852 - RNA, 19 nt, Artificial Sequence
  Description of Artificial Sequence: Synthetic oligonucleotide
  Sense strand starting at position 1517 of SEQ ID NO: 914896
ggagguucuguugaauugu

SEQ ID NO: 1038853 - RNA, 19 nt, Artificial Sequence
  Description of Artificial Sequence: Synthetic oligonucleotide
  Antisense strand to SEQ ID NO: 1038852
acaauucaacagaaccucc

SEQ ID NO: 1038854 - RNA, 19 nt, Artificial Sequence
  Description of Artificial Sequence: Synthetic oligonucleotide
  Sense strand starting at position 1589 of SEQ ID NO: 914896
gggugugugacguuugcuu

SEQ ID NO: 1038855 - RNA, 19 nt, Artificial Sequence
  Description of Artificial Sequence: Synthetic oligonucleotide
  Antisense strand to SEQ ID NO: 1038854
aagcaaacgucacacaccc

SEQ ID NO: 1038856 - RNA, 19 nt, Artificial Sequence
  Description of Artificial Sequence: Synthetic oligonucleotide
  Sense strand starting at position 1715 of SEQ ID NO: 914896
uuggaacaguccgugugaa

SEQ ID NO: 1038857 - RNA, 19 nt, Artificial Sequence
  Description of Artificial Sequence: Synthetic oligonucleotide
  Antisense strand to SEQ ID NO: 1038856
uucacacggacuguuccaa

SEQ ID NO: 1038858 - RNA, 19 nt, Artificial Sequence
  Description of Artificial Sequence: Synthetic oligonucleotide
  Sense strand starting at position 1740 of SEQ ID NO: 914896
agggcuuacgguuaacaga

SEQ ID NO: 1038859 - RNA, 19 nt, Artificial Sequence
  Description of Artificial Sequence: Synthetic oligonucleotide
  Antisense strand to SEQ ID NO: 1038858
ucuguuaaccguaagcccu

SEQ ID NO: 1038860 - RNA, 19 nt, Artificial Sequence
  Description of Artificial Sequence: Synthetic oligonucleotide
  Sense strand starting at position 2064 of SEQ ID NO: 914896
ccggcuaguaucgcgagau

SEQ ID NO: 1038861 - RNA, 19 nt, Artificial Sequence
  Description of Artificial Sequence: Synthetic oligonucleotide
  Antisense strand to SEQ ID NO: 1038860
aucucgcgauacuagccgg

SEQ ID NO: 1038862 - RNA, 19 nt, Artificial Sequence
  Description of Artificial Sequence: Synthetic oligonucleotide
  Sense strand starting at position 2067 of SEQ ID NO: 914896
gcuaguaucgcgagaucag

SEQ ID NO: 1038863 - RNA, 19 nt, Artificial Sequence
  Description of Artificial Sequence: Synthetic oligonucleotide
  Antisense strand to SEQ ID NO: 1038862
cugaucucgcgauacuagc

SEQ ID NO: 1038864 - RNA, 19 nt, Artificial Sequence
  Description of Artificial Sequence: Synthetic oligonucleotide
  Sense strand starting at position 2288 of SEQ ID NO: 914896
ggagucaagccuggauucu

SEQ ID NO: 1038865 - RNA, 19 nt, Artificial Sequence
  Description of Artificial Sequence: Synthetic oligonucleotide
  Antisense strand to SEQ ID NO: 1038864
agaauccaggcuugacucc

SEQ ID NO: 1038866 - RNA, 19 nt, Artificial Sequence
  Description of Artificial Sequence: Synthetic oligonucleotide
  Sense strand starting at position 2289 of SEQ ID NO: 914896
gagucaagccuggauucua

SEQ ID NO: 1038867 - RNA, 19 nt, Artificial Sequence
  Description of Artificial Sequence: Synthetic oligonucleotide
  Antisense strand to SEQ ID NO: 1038866
uagaauccaggcuugacuc

SEQ ID NO: 1038868 - RNA, 19 nt, Artificial Sequence
  Description of Artificial Sequence: Synthetic oligonucleotide
  Sense strand starting at position 2440 of SEQ ID NO: 914896
guggcaauuaaauguguaa

SEQ ID NO: 1038869 - RNA, 19 nt, Artificial Sequence
  Description of Artificial Sequence: Synthetic oligonucleotide
  Antisense strand to SEQ ID NO: 1038868
uuacacauuuaauugccac

SEQ ID NO: 1038870 - RNA, 19 nt, Artificial Sequence
  Description of Artificial Sequence: Synthetic oligonucleotide
  Sense strand starting at position 2442 of SEQ ID NO: 914896
ggcaauuaaauguguaaug

SEQ ID NO: 1038871 - RNA, 19 nt, Artificial Sequence
  Description of Artificial Sequence: Synthetic oligonucleotide
  Antisense strand to SEQ ID NO: 1038870
cauuacacauuuaauugcc

SEQ ID NO: 1038872 - RNA, 19 nt, Artificial Sequence
  Description of Artificial Sequence: Synthetic oligonucleotide
  Sense strand starting at position 2443 of SEQ ID NO: 914896
gcaauuaaauguguaauga

SEQ ID NO: 1038873 - RNA, 19 nt, Artificial Sequence
  Description of Artificial Sequence: Synthetic oligonucleotide
  Antisense strand to SEQ ID NO: 1038872
ucauuacacauuuaauugc

SEQ ID NO: 1038874 - RNA, 19 nt, Artificial Sequence
  Description of Artificial Sequence: Synthetic oligonucleotide
  Sense strand starting at position 2464 of SEQ ID NO: 914896
uguugucaguucucaauuu

SEQ ID NO: 1038875 - RNA, 19 nt, Artificial Sequence
  Description of Artificial Sequence: Synthetic oligonucleotide
  Antisense strand to SEQ ID NO: 1038874
aaauugagaacugacaaca

SEQ ID NO: 1038876 - RNA, 19 nt, Artificial Sequence
  Description of Artificial Sequence: Synthetic oligonucleotide
  Sense strand starting at position 2483 of SEQ ID NO: 914896
gugacagcauugcuuuaaa

SEQ ID NO: 1038877 - RNA, 19 nt, Artificial Sequence
  Description of Artificial Sequence: Synthetic oligonucleotide
  Antisense strand to SEQ ID NO: 1038876
uuuaaagcaaugcugucac

SEQ ID NO: 1038878 - RNA, 19 nt, Artificial Sequence
  Description of Artificial Sequence: Synthetic oligonucleotide
  Sense strand starting at position 2631 of SEQ ID NO: 914896
agcagcugauucuuauaaa

SEQ ID NO: 1038879 - RNA, 19 nt, Artificial Sequence
  Description of Artificial Sequence: Synthetic oligonucleotide
  Antisense strand to SEQ ID NO: 1038878
uuuauaagaaucagcugcu

SEQ ID NO: 1038880 - RNA, 19 nt, Artificial Sequence
  Description of Artificial Sequence: Synthetic oligonucleotide
  Sense strand starting at position 2708 of SEQ ID NO: 914896
ugagccacuucugaaauuu

SEQ ID NO: 1038881 - RNA, 19 nt, Artificial Sequence
  Description of Artificial Sequence: Synthetic oligonucleotide
  Antisense strand to SEQ ID NO: 1038880
aaauuucagaaguggcuca

SEQ ID NO: 1038882 - RNA, 19 nt, Artificial Sequence
  Description of Artificial Sequence: Synthetic oligonucleotide
  Sense strand starting at position 2778 of SEQ ID NO: 914896
gcccuuagucuguacugau

SEQ ID NO: 1038883 - RNA, 19 nt, Artificial Sequence
  Description of Artificial Sequence: Synthetic oligonucleotide
  Antisense strand to SEQ ID NO: 1038882
aucaguacagacuaagggc

SEQ ID NO: 1038884 - RNA, 19 nt, Artificial Sequence
  Description of Artificial Sequence: Synthetic oligonucleotide
  Sense strand starting at position 3205 of SEQ ID NO: 914896
gcaaucacagcucaagaga

SEQ ID NO: 1038885 - RNA, 19 nt, Artificial Sequence
  Description of Artificial Sequence: Synthetic oligonucleotide
  Antisense strand to SEQ ID NO: 1038884
ucucuugagcugugauugc

SEQ ID NO: 1038886 - RNA, 19 nt, Artificial Sequence
  Description of Artificial Sequence: Synthetic oligonucleotide
  Sense strand starting at position 3433 of SEQ ID NO: 914896
uguguuguucuugugugga

SEQ ID NO: 1038887 - RNA, 19 nt, Artificial Sequence
  Description of Artificial Sequence: Synthetic oligonucleotide
  Antisense strand to SEQ ID NO: 1038886
uccacacaagaacaacaca

SEQ ID NO: 1038888 - RNA, 19 nt, Artificial Sequence
  Description of Artificial Sequence: Synthetic oligonucleotide
  Sense strand starting at position 3577 of SEQ ID NO: 914896
guccucugauggccuaaau

SEQ ID NO: 1038889 - RNA, 19 nt, Artificial Sequence
  Description of Artificial Sequence: Synthetic oligonucleotide
  Antisense strand to SEQ ID NO: 1038888
auuuaggccaucagaggac

SEQ ID NO: 1038890 - RNA, 19 nt, Artificial Sequence
  Description of Artificial Sequence: Synthetic oligonucleotide
  Sense strand starting at position 3917 of SEQ ID NO: 914896
uuuggauaauugcuauguu

SEQ ID NO: 1038891 - RNA, 19 nt, Artificial Sequence
  Description of Artificial Sequence: Synthetic oligonucleotide
  Antisense strand to SEQ ID NO: 1038890
aacauagcaauuauccaaa

SEQ ID NO: 1038892 - RNA, 19 nt, Artificial Sequence
  Description of Artificial Sequence: Synthetic oligonucleotide
  Sense strand starting at position 3970 of SEQ ID NO: 914896
uugaaauccuguccaguuc

SEQ ID NO: 1038893 - RNA, 19 nt, Artificial Sequence
  Description of Artificial Sequence: Synthetic oligonucleotide
  Antisense strand to SEQ ID NO: 1038892
gaacuggacaggauuucaa

SEQ ID NO: 1038894 - RNA, 19 nt, Artificial Sequence
  Description of Artificial Sequence: Synthetic oligonucleotide
  Sense strand starting at position 48 of SEQ ID NO: 914897
cccagaauugcucaguuag

SEQ ID NO: 1038895 - RNA, 19 nt, Artificial Sequence
  Description of Artificial Sequence: Synthetic oligonucleotide
  Antisense strand to SEQ ID NO: 1038894
cuaacugagcaauucuggg

SEQ ID NO: 1038896 - RNA, 19 nt, Artificial Sequence
  Description of Artificial Sequence: Synthetic oligonucleotide
  Sense strand starting at position 50 of SEQ ID NO: 914897
cagaauugcucaguuagac

SEQ ID NO: 1038897 - RNA, 19 nt, Artificial Sequence
  Description of Artificial Sequence: Synthetic oligonucleotide
  Antisense strand to SEQ ID NO: 1038896
gucuaacugagcaauucug

SEQ ID NO: 1038898 - RNA, 19 nt, Artificial Sequence
  Description of Artificial Sequence: Synthetic oligonucleotide
  Sense strand starting at position 144 of SEQ ID NO: 914897
cugaauuucucugagacac

SEQ ID NO: 1038899 - RNA, 19 nt, Artificial Sequence
  Description of Artificial Sequence: Synthetic oligonucleotide
  Antisense strand to SEQ ID NO: 1038898
gugucucagagaaauucag

SEQ ID NO: 1038900 - RNA, 19 nt, Artificial Sequence
  Description of Artificial Sequence: Synthetic oligonucleotide
  Sense strand starting at position 223 of SEQ ID NO: 914897
caucuaguaucucugaggu

SEQ ID NO: 1038901 - RNA, 19 nt, Artificial Sequence
  Description of Artificial Sequence: Synthetic oligonucleotide
  Antisense strand to SEQ ID NO: 1038900
accucagagauacuagaug

SEQ ID NO: 1038902 - RNA, 19 nt, Artificial Sequence
  Description of Artificial Sequence: Synthetic oligonucleotide
  Sense strand starting at position 285 of SEQ ID NO: 914897
uggcucagagcucauggua

SEQ ID NO: 1038903 - RNA, 19 nt, Artificial Sequence
  Description of Artificial Sequence: Synthetic oligonucleotide
  Antisense strand to SEQ ID NO: 1038902
uaccaugagcucugagcca

SEQ ID NO: 1038904 - RNA, 19 nt, Artificial Sequence
  Description of Artificial Sequence: Synthetic oligonucleotide
  Sense strand starting at position 298 of SEQ ID NO: 914897
augguauguccuuaguuuc

SEQ ID NO: 1038905 - RNA, 19 nt, Artificial Sequence
  Description of Artificial Sequence: Synthetic oligonucleotide
  Antisense strand to SEQ ID NO: 1038904
gaaacuaaggacauaccau

SEQ ID NO: 1038906 - RNA, 19 nt, Artificial Sequence
  Description of Artificial Sequence: Synthetic oligonucleotide
  Sense strand starting at position 362 of SEQ ID NO: 914897
ggugacucaagucagacuu

SEQ ID NO: 1038907 - RNA, 19 nt, Artificial Sequence
  Description of Artificial Sequence: Synthetic oligonucleotide
  Antisense strand to SEQ ID NO: 1038906
aagucugacuugagucacc

SEQ ID NO: 1038908 - RNA, 19 nt, Artificial Sequence
  Description of Artificial Sequence: Synthetic oligonucleotide
  Sense strand starting at position 407 of SEQ ID NO: 914897
ggcuguuaugaguacucuu

SEQ ID NO: 1038909 - RNA, 19 nt, Artificial Sequence
  Description of Artificial Sequence: Synthetic oligonucleotide
  Antisense strand to SEQ ID NO: 1038908
aagaguacucauaacagcc

SEQ ID NO: 1038910 - RNA, 19 nt, Artificial Sequence
  Description of Artificial Sequence: Synthetic oligonucleotide
  Sense strand starting at position 520 of SEQ ID NO: 914897
ucuggagcuccuuacucaa

SEQ ID NO: 1038911 - RNA, 19 nt, Artificial Sequence
  Description of Artificial Sequence: Synthetic oligonucleotide
  Antisense strand to SEQ ID NO: 1038910
uugaguaaggagcuccaga

SEQ ID NO: 1038912 - RNA, 19 nt, Artificial Sequence
  Description of Artificial Sequence: Synthetic oligonucleotide
  Sense strand starting at position 523 of SEQ ID NO: 914897
ggagcuccuuacucaagga

SEQ ID NO: 1038913 - RNA, 19 nt, Artificial Sequence
  Description of Artificial Sequence: Synthetic oligonucleotide
  Antisense strand to SEQ ID NO: 1038912
uccuugaguaaggagcucc

SEQ ID NO: 1038914 - RNA, 19 nt, Artificial Sequence
  Description of Artificial Sequence: Synthetic oligonucleotide
  Sense strand starting at position 716 of SEQ ID NO: 914897
cucucagggcgaugagaaa

SEQ ID NO: 1038915 - RNA, 19 nt, Artificial Sequence
  Description of Artificial Sequence: Synthetic oligonucleotide
  Antisense strand to SEQ ID NO: 1038914
uuucucaucgcccugagag

SEQ ID NO: 1038916 - RNA, 19 nt, Artificial Sequence
  Description of Artificial Sequence: Synthetic oligonucleotide
  Sense strand starting at position 737 of SEQ ID NO: 914897
uggauuagaucaccgguuu

SEQ ID NO: 1038917 - RNA, 19 nt, Artificial Sequence
  Description of Artificial Sequence: Synthetic oligonucleotide
  Antisense strand to SEQ ID NO: 1038916
aaaccggugaucuaaucca

SEQ ID NO: 1038918 - RNA, 19 nt, Artificial Sequence
  Description of Artificial Sequence: Synthetic oligonucleotide
  Sense strand starting at position 844 of SEQ ID NO: 914897
ugcacucaucaugaggauu

SEQ ID NO: 1038919 - RNA, 19 nt, Artificial Sequence
  Description of Artificial Sequence: Synthetic oligonucleotide
  Antisense strand to SEQ ID NO: 1038918
aauccucaugaugagugca

SEQ ID NO: 1038920 - RNA, 19 nt, Artificial Sequence
  Description of Artificial Sequence: Synthetic oligonucleotide
  Sense strand starting at position 1298 of SEQ ID NO: 914897
aacagaaaugcguguugga

SEQ ID NO: 1038921 - RNA, 19 nt, Artificial Sequence
  Description of Artificial Sequence: Synthetic oligonucleotide
  Antisense strand to SEQ ID NO: 1038920
uccaacacgcauuucuguu

SEQ ID NO: 1038922 - RNA, 19 nt, Artificial Sequence
  Description of Artificial Sequence: Synthetic oligonucleotide
  Sense strand starting at position 1308 of SEQ ID NO: 914897
cguguuggacuagauguga

SEQ ID NO: 1038923 - RNA, 19 nt, Artificial Sequence
  Description of Artificial Sequence: Synthetic oligonucleotide
  Antisense strand to SEQ ID NO: 1038922
ucacaucuaguccaacacg

SEQ ID NO: 1038924 - RNA, 19 nt, Artificial Sequence
  Description of Artificial Sequence: Synthetic oligonucleotide
  Sense strand starting at position 1334 of SEQ ID NO: 914897
ucugcuucugaauauacga

SEQ ID NO: 1038925 - RNA, 19 nt, Artificial Sequence
  Description of Artificial Sequence: Synthetic oligonucleotide
  Antisense strand to SEQ ID NO: 1038924
ucguauauucagaagcaga

SEQ ID NO: 1038926 - RNA, 19 nt, Artificial Sequence
  Description of Artificial Sequence: Synthetic oligonucleotide
  Sense strand starting at position 2241 of SEQ ID NO: 914897
gcguaugagaaagaucugu

SEQ ID NO: 1038927 - RNA, 19 nt, Artificial Sequence
  Description of Artificial Sequence: Synthetic oligonucleotide
  Antisense strand to SEQ ID NO: 1038926
acagaucuuucucauacgc

SEQ ID NO: 1038928 - RNA, 19 nt, Artificial Sequence
  Description of Artificial Sequence: Synthetic oligonucleotide
  Sense strand starting at position 2274 of SEQ ID NO: 914897
auucuuacagcagacgaua

SEQ ID NO: 1038929 - RNA, 19 nt, Artificial Sequence
  Description of Artificial Sequence: Synthetic oligonucleotide
  Antisense strand to SEQ ID NO: 1038928
uaucgucugcuguaagaau

SEQ ID NO: 1038930 - RNA, 19 nt, Artificial Sequence
  Description of Artificial Sequence: Synthetic oligonucleotide
  Sense strand starting at position 2303 of SEQ ID NO: 914897
guguuaaguaaauaagguu

SEQ ID NO: 1038931 - RNA, 19 nt, Artificial Sequence
  Description of Artificial Sequence: Synthetic oligonucleotide
  Antisense strand to SEQ ID NO: 1038930
aaccuuauuuacuuaacac

SEQ ID NO: 1038932 - RNA, 19 nt, Artificial Sequence
  Description of Artificial Sequence: Synthetic oligonucleotide
  Sense strand starting at position 2375 of SEQ ID NO: 914897
gugguguguccuguguuga

SEQ ID NO: 1038933 - RNA, 19 nt, Artificial Sequence
  Description of Artificial Sequence: Synthetic oligonucleotide
  Antisense strand to SEQ ID NO: 1038932
ucaacacaggacacaccac

SEQ ID NO: 1038934 - RNA, 19 nt, Artificial Sequence
  Description of Artificial Sequence: Synthetic oligonucleotide
  Sense strand starting at position 2413 of SEQ ID NO: 914897
gggagauuagcuugccuac

SEQ ID NO: 1038935 - RNA, 19 nt, Artificial Sequence
  Description of Artificial Sequence: Synthetic oligonucleotide
  Antisense strand to SEQ ID NO: 1038934
guaggcaagcuaaucuccc

SEQ ID NO: 1038936 - RNA, 19 nt, Artificial Sequence
  Description of Artificial Sequence: Synthetic oligonucleotide
  Sense strand starting at position 2432 of SEQ ID NO: 914897
aagguuauugguggaggua

SEQ ID NO: 1038937 - RNA, 19 nt, Artificial Sequence
  Description of Artificial Sequence: Synthetic oligonucleotide
  Antisense strand to SEQ ID NO: 1038936
uaccuccaccaauaaccuu

SEQ ID NO: 1038938 - RNA, 19 nt, Artificial Sequence
  Description of Artificial Sequence: Synthetic oligonucleotide
  Sense strand starting at position 2511 of SEQ ID NO: 914897
ggaagaaguuggccugcaa

SEQ ID NO: 1038939 - RNA, 19 nt, Artificial Sequence
  Description of Artificial Sequence: Synthetic oligonucleotide
  Antisense strand to SEQ ID NO: 1038938
uugcaggccaacuucuucc

SEQ ID NO: 1038940 - RNA, 19 nt, Artificial Sequence
  Description of Artificial Sequence: Synthetic oligonucleotide
  Sense strand starting at position 2539 of SEQ ID NO: 914897
agcagaggccuugaccaau

SEQ ID NO: 1038941 - RNA, 19 nt, Artificial Sequence
  Description of Artificial Sequence: Synthetic oligonucleotide
  Antisense strand to SEQ ID NO: 1038940
auuggucaaggccucugcu

SEQ ID NO: 1038942 - RNA, 19 nt, Artificial Sequence
  Description of Artificial Sequence: Synthetic oligonucleotide
  Sense strand starting at position 2595 of SEQ ID NO: 914897
guaguuccacauuaaagca

SEQ ID NO: 1038943 - RNA, 19 nt, Artificial Sequence
  Description of Artificial Sequence: Synthetic oligonucleotide
  Antisense strand to SEQ ID NO: 1038942
ugcuuuaauguggaacuac

SEQ ID NO: 1038944 - RNA, 19 nt, Artificial Sequence
  Description of Artificial Sequence: Synthetic oligonucleotide
  Sense strand starting at position 2634 of SEQ ID NO: 914897
ccuugcauugaccagucau

SEQ ID NO: 1038945 - RNA, 19 nt, Artificial Sequence
  Description of Artificial Sequence: Synthetic oligonucleotide
  Antisense strand to SEQ ID NO: 1038944
augacuggucaaugcaagg

SEQ ID NO: 1038946 - RNA, 19 nt, Artificial Sequence
  Description of Artificial Sequence: Synthetic oligonucleotide
  Sense strand starting at position 2641 of SEQ ID NO: 914897
uugaccagucauggauaca

SEQ ID NO: 1038947 - RNA, 19 nt, Artificial Sequence
  Description of Artificial Sequence: Synthetic oligonucleotide
  Antisense strand to SEQ ID NO: 1038946
uguauccaugacuggucaa

SEQ ID NO: 1038948 - RNA, 19 nt, Artificial Sequence
  Description of Artificial Sequence: Synthetic oligonucleotide
  Sense strand starting at position 2745 of SEQ ID NO: 914897
gaaggacucaguuguguau

SEQ ID NO: 1038949 - RNA, 19 nt, Artificial Sequence
  Description of Artificial Sequence: Synthetic oligonucleotide
  Antisense strand to SEQ ID NO: 1038948
auacacaacugaguccuuc

SEQ ID NO: 1038950 - RNA, 19 nt, Artificial Sequence
  Description of Artificial Sequence: Synthetic oligonucleotide
  Sense strand starting at position 2749 of SEQ ID NO: 914897
gacucaguuguguaucauc

SEQ ID NO: 1038951 - RNA, 19 nt, Artificial Sequence
  Description of Artificial Sequence: Synthetic oligonucleotide
  Antisense strand to SEQ ID NO: 1038950
gaugauacacaacugaguc

SEQ ID NO: 1038952 - RNA, 19 nt, Artificial Sequence
  Description of Artificial Sequence: Synthetic oligonucleotide
  Sense strand starting at position 2757 of SEQ ID NO: 914897
uguguaucaucaguaacca

SEQ ID NO: 1038953 - RNA, 19 nt, Artificial Sequence
  Description of Artificial Sequence: Synthetic oligonucleotide
  Antisense strand to SEQ ID NO: 1038952
ugguuacugaugauacaca

SEQ ID NO: 1038954 - RNA, 19 nt, Artificial Sequence
  Description of Artificial Sequence: Synthetic oligonucleotide
  Sense strand starting at position 2758 of SEQ ID NO: 914897
guguaucaucaguaaccaa

SEQ ID NO: 1038955 - RNA, 19 nt, Artificial Sequence
  Description of Artificial Sequence: Synthetic oligonucleotide
  Antisense strand to SEQ ID NO: 1038954
uugguuacugaugauacac

SEQ ID NO: 1038956 - RNA, 19 nt, Artificial Sequence
  Description of Artificial Sequence: Synthetic oligonucleotide
  Sense strand starting at position 2838 of SEQ ID NO: 914897
cuauguugcaguuagagua

SEQ ID NO: 1038957 - RNA, 19 nt, Artificial Sequence
  Description of Artificial Sequence: Synthetic oligonucleotide
  Antisense strand to SEQ ID NO: 1038956
uacucuaacugcaacauag

SEQ ID NO: 1038958 - RNA, 19 nt, Artificial Sequence
  Description of Artificial Sequence: Synthetic oligonucleotide
  Sense strand starting at position 3018 of SEQ ID NO: 914897
aggguuuaucccgggaaug

SEQ ID NO: 1038959 - RNA, 19 nt, Artificial Sequence
  Description of Artificial Sequence: Synthetic oligonucleotide
  Antisense strand to SEQ ID NO: 1038958
cauucccgggauaaacccu

SEQ ID NO: 1038960 - RNA, 19 nt, Artificial Sequence
  Description of Artificial Sequence: Synthetic oligonucleotide
  Sense strand starting at position 3020 of SEQ ID NO: 914897
gguuuaucccgggaaugca

SEQ ID NO: 1038961 - RNA, 19 nt, Artificial Sequence
  Description of Artificial Sequence: Synthetic oligonucleotide
  Antisense strand to SEQ ID NO: 1038960
ugcauucccgggauaaacc

SEQ ID NO: 1038962 - RNA, 19 nt, Artificial Sequence
  Description of Artificial Sequence: Synthetic oligonucleotide
  Sense strand starting at position 3543 of SEQ ID NO: 914897
cuguguuguauagauggaa

SEQ ID NO: 1038963 - RNA, 19 nt, Artificial Sequence
  Description of Artificial Sequence: Synthetic oligonucleotide
  Antisense strand to SEQ ID NO: 1038962
uuccaucuauacaacacag

SEQ ID NO: 1038964 - RNA, 19 nt, Artificial Sequence
  Description of Artificial Sequence: Synthetic oligonucleotide
  Sense strand starting at position 3639 of SEQ ID NO: 914897
uaucaauagcgcguuucuu

SEQ ID NO: 1038965 - RNA, 19 nt, Artificial Sequence
  Description of Artificial Sequence: Synthetic oligonucleotide
  Antisense strand to SEQ ID NO: 1038964
aagaaacgcgcuauugaua

SEQ ID NO: 1038966 - RNA, 19 nt, Artificial Sequence
  Description of Artificial Sequence: Synthetic oligonucleotide
  Sense strand starting at position 3640 of SEQ ID NO: 914897
aucaauagcgcguuucuuu

SEQ ID NO: 1038967 - RNA, 19 nt, Artificial Sequence
  Description of Artificial Sequence: Synthetic oligonucleotide
  Antisense strand to SEQ ID NO: 1038966
aaagaaacgcgcuauugau

SEQ ID NO: 1038968 - RNA, 19 nt, Artificial Sequence
  Description of Artificial Sequence: Synthetic oligonucleotide
  Sense strand starting at position 3929 of SEQ ID NO: 914897
ccaccaccaguguaugaau

SEQ ID NO: 1038969 - RNA, 19 nt, Artificial Sequence
  Description of Artificial Sequence: Synthetic oligonucleotide
  Antisense strand to SEQ ID NO: 1038968
auucauacacugguggugg

SEQ ID NO: 1038970 - RNA, 19 nt, Artificial Sequence
  Description of Artificial Sequence: Synthetic oligonucleotide
  Sense strand starting at position 3938 of SEQ ID NO: 914897
guguaugaaugaucaaguu

SEQ ID NO: 1038971 - RNA, 19 nt, Artificial Sequence
  Description of Artificial Sequence: Synthetic oligonucleotide
  Antisense strand to SEQ ID NO: 1038970
aacuugaucauucauacac

SEQ ID NO: 1038972 - RNA, 19 nt, Artificial Sequence
  Description of Artificial Sequence: Synthetic oligonucleotide
  Sense strand starting at position 3960 of SEQ ID NO: 914897
cugcauccucaugagcauu

SEQ ID NO: 1038973 - RNA, 19 nt, Artificial Sequence
  Description of Artificial Sequence: Synthetic oligonucleotide
  Antisense strand to SEQ ID NO: 1038972
aaugcucaugaggaugcag

SEQ ID NO: 1038974 - RNA, 19 nt, Artificial Sequence
  Description of Artificial Sequence: Synthetic oligonucleotide
  Sense strand starting at position 259 of SEQ ID NO: 914898
ggccauucucaauguucuu

SEQ ID NO: 1038975 - RNA, 19 nt, Artificial Sequence
  Description of Artificial Sequence: Synthetic oligonucleotide
  Antisense strand to SEQ ID NO: 1038974
aagaacauugagaauggcc

SEQ ID NO: 1038976 - RNA, 19 nt, Artificial Sequence
  Description of Artificial Sequence: Synthetic oligonucleotide
  Sense strand starting at position 264 of SEQ ID NO: 914898
uucucaauguucuucggga

SEQ ID NO: 1038977 - RNA, 19 nt, Artificial Sequence
  Description of Artificial Sequence: Synthetic oligonucleotide
  Antisense strand to SEQ ID NO: 1038976
ucccgaagaacauugagaa

SEQ ID NO: 1038978 - RNA, 19 nt, Artificial Sequence
  Description of Artificial Sequence: Synthetic oligonucleotide
  Sense strand starting at position 414 of SEQ ID NO: 914898
guguguuucugaccaggcu

SEQ ID NO: 1038979 - RNA, 19 nt, Artificial Sequence
  Description of Artificial Sequence: Synthetic oligonucleotide
  Antisense strand to SEQ ID NO: 1038978
agccuggucagaaacacac

SEQ ID NO: 1038980 - RNA, 19 nt, Artificial Sequence
  Description of Artificial Sequence: Synthetic oligonucleotide
  Sense strand starting at position 604 of SEQ ID NO: 914898
ggcuguauaccguugccau

SEQ ID NO: 1038981 - RNA, 19 nt, Artificial Sequence
  Description of Artificial Sequence: Synthetic oligonucleotide
  Antisense strand to SEQ ID NO: 1038980
auggcaacgguauacagcc

SEQ ID NO: 1038982 - RNA, 19 nt, Artificial Sequence
  Description of Artificial Sequence: Synthetic oligonucleotide
  Sense strand starting at position 1027 of SEQ ID NO: 914898
cuggaaugcuucgguguga

SEQ ID NO: 1038983 - RNA, 19 nt, Artificial Sequence
  Description of Artificial Sequence: Synthetic oligonucleotide
  Antisense strand to SEQ ID NO: 1038982
ucacaccgaagcauuccag

SEQ ID NO: 1038984 - RNA, 19 nt, Artificial Sequence
  Description of Artificial Sequence: Synthetic oligonucleotide
  Sense strand starting at position 1028 of SEQ ID NO: 914898
uggaaugcuucggugugau

SEQ ID NO: 1038985 - RNA, 19 nt, Artificial Sequence
  Description of Artificial Sequence: Synthetic oligonucleotide
  Antisense strand to SEQ ID NO: 1038984
aucacaccgaagcauucca

SEQ ID NO: 1038986 - RNA, 19 nt, Artificial Sequence
  Description of Artificial Sequence: Synthetic oligonucleotide
  Sense strand starting at position 1029 of SEQ ID NO: 914898
ggaaugcuucggugugaug

SEQ ID NO: 1038987 - RNA, 19 nt, Artificial Sequence
  Description of Artificial Sequence: Synthetic oligonucleotide
  Antisense strand to SEQ ID NO: 1038986
caucacaccgaagcauucc

SEQ ID NO: 1038988 - RNA, 19 nt, Artificial Sequence
  Description of Artificial Sequence: Synthetic oligonucleotide
  Sense strand starting at position 1031 of SEQ ID NO: 914898
aaugcuucggugugaugac

SEQ ID NO: 1038989 - RNA, 19 nt, Artificial Sequence
  Description of Artificial Sequence: Synthetic oligonucleotide
  Antisense strand to SEQ ID NO: 1038988
gucaucacaccgaagcauu

SEQ ID NO: 1038990 - RNA, 19 nt, Artificial Sequence
  Description of Artificial Sequence: Synthetic oligonucleotide
  Sense strand starting at position 1032 of SEQ ID NO: 914898
augcuucggugugaugaca

SEQ ID NO: 1038991 - RNA, 19 nt, Artificial Sequence
  Description of Artificial Sequence: Synthetic oligonucleotide
  Antisense strand to SEQ ID NO: 1038990
ugucaucacaccgaagcau

SEQ ID NO: 1038992 - RNA, 19 nt, Artificial Sequence
  Description of Artificial Sequence: Synthetic oligonucleotide
  Sense strand starting at position 1053 of SEQ ID NO: 914898
gcacguuaaccucgaauuc

SEQ ID NO: 1038993 - RNA, 19 nt, Artificial Sequence
  Description of Artificial Sequence: Synthetic oligonucleotide
  Antisense strand to SEQ ID NO: 1038992
gaauucgagguuaacgugc

SEQ ID NO: 1038994 - RNA, 19 nt, Artificial Sequence
  Description of Artificial Sequence: Synthetic oligonucleotide
  Sense strand starting at position 1102 of SEQ ID NO: 914898
uccugacuugcugaaacua

SEQ ID NO: 1038995 - RNA, 19 nt, Artificial Sequence
  Description of Artificial Sequence: Synthetic oligonucleotide
  Antisense strand to SEQ ID NO: 1038994
uaguuucagcaagucagga

SEQ ID NO: 1038996 - RNA, 19 nt, Artificial Sequence
  Description of Artificial Sequence: Synthetic oligonucleotide
  Sense strand starting at position 1268 of SEQ ID NO: 914898
cccucugcuccaggagaaa

SEQ ID NO: 1038997 - RNA, 19 nt, Artificial Sequence
  Description of Artificial Sequence: Synthetic oligonucleotide
  Antisense strand to SEQ ID NO: 1038996
uuucuccuggagcagaggg

SEQ ID NO: 1038998 - RNA, 19 nt, Artificial Sequence
  Description of Artificial Sequence: Synthetic oligonucleotide
  Sense strand starting at position 1348 of SEQ ID NO: 914898
gcaacuuucggcuauguaa

SEQ ID NO: 1038999 - RNA, 19 nt, Artificial Sequence
  Description of Artificial Sequence: Synthetic oligonucleotide
  Antisense strand to SEQ ID NO: 1038998
uuacauagccgaaaguugc

SEQ ID NO: 1039000 - RNA, 19 nt, Artificial Sequence
  Description of Artificial Sequence: Synthetic oligonucleotide
  Sense strand starting at position 1568 of SEQ ID NO: 914898
gcaggaaggugucggagaa

SEQ ID NO: 1039001 - RNA, 19 nt, Artificial Sequence
  Description of Artificial Sequence: Synthetic oligonucleotide
  Antisense strand to SEQ ID NO: 1039000
uucuccgacaccuuccugc

SEQ ID NO: 1039002 - RNA, 19 nt, Artificial Sequence
  Description of Artificial Sequence: Synthetic oligonucleotide
  Sense strand starting at position 1570 of SEQ ID NO: 914898
aggaaggugucggagaaga

SEQ ID NO: 1039003 - RNA, 19 nt, Artificial Sequence
  Description of Artificial Sequence: Synthetic oligonucleotide
  Antisense strand to SEQ ID NO: 1039002
ucuucuccgacaccuuccu

SEQ ID NO: 1039004 - RNA, 19 nt, Artificial Sequence
  Description of Artificial Sequence: Synthetic oligonucleotide
  Sense strand starting at position 2714 of SEQ ID NO: 914898
aaugcuggaucugguuaau

SEQ ID NO: 1039005 - RNA, 19 nt, Artificial Sequence
  Description of Artificial Sequence: Synthetic oligonucleotide
  Antisense strand to SEQ ID NO: 1039004
auuaaccagauccagcauu

SEQ ID NO: 1039006 - RNA, 19 nt, Artificial Sequence
  Description of Artificial Sequence: Synthetic oligonucleotide
  Sense strand starting at position 2717 of SEQ ID NO: 914898
gcuggaucugguuaaugau

SEQ ID NO: 1039007 - RNA, 19 nt, Artificial Sequence
  Description of Artificial Sequence: Synthetic oligonucleotide
  Antisense strand to SEQ ID NO: 1039006
aucauuaaccagauccagc

SEQ ID NO: 1039008 - RNA, 19 nt, Artificial Sequence
  Description of Artificial Sequence: Synthetic oligonucleotide
  Sense strand starting at position 2726 of SEQ ID NO: 914898
gguuaaugauucgccuugu

SEQ ID NO: 1039009 - RNA, 19 nt, Artificial Sequence
  Description of Artificial Sequence: Synthetic oligonucleotide
  Antisense strand to SEQ ID NO: 1039008
acaaggcgaaucauuaacc

SEQ ID NO: 1039010 - RNA, 19 nt, Artificial Sequence
  Description of Artificial Sequence: Synthetic oligonucleotide
  Sense strand starting at position 2727 of SEQ ID NO: 914898
guuaaugauucgccuuguu

SEQ ID NO: 1039011 - RNA, 19 nt, Artificial Sequence
  Description of Artificial Sequence: Synthetic oligonucleotide
  Antisense strand to SEQ ID NO: 1039010
aacaaggcgaaucauuaac

SEQ ID NO: 1039012 - RNA, 19 nt, Artificial Sequence
  Description of Artificial Sequence: Synthetic oligonucleotide
  Sense strand starting at position 49 of SEQ ID NO: 914899
gaggaagaguuccugcauu

SEQ ID NO: 1039013 - RNA, 19 nt, Artificial Sequence
  Description of Artificial Sequence: Synthetic oligonucleotide
  Antisense strand to SEQ ID NO: 1039012
aaugcaggaacucuuccuc

SEQ ID NO: 1039014 - RNA, 19 nt, Artificial Sequence
  Description of Artificial Sequence: Synthetic oligonucleotide
  Sense strand starting at position 55 of SEQ ID NO: 914899
gaguuccugcauuaggagu

SEQ ID NO: 1039015 - RNA, 19 nt, Artificial Sequence
  Description of Artificial Sequence: Synthetic oligonucleotide
  Antisense strand to SEQ ID NO: 1039014
acuccuaaugcaggaacuc

SEQ ID NO: 1039016 - RNA, 19 nt, Artificial Sequence
  Description of Artificial Sequence: Synthetic oligonucleotide
  Sense strand starting at position 127 of SEQ ID NO: 914899
uacagaagucuuuggugga

SEQ ID NO: 1039017 - RNA, 19 nt, Artificial Sequence
  Description of Artificial Sequence: Synthetic oligonucleotide
  Antisense strand to SEQ ID NO: 1039016
uccaccaaagacuucugua

SEQ ID NO: 1039018 - RNA, 19 nt, Artificial Sequence
  Description of Artificial Sequence: Synthetic oligonucleotide
  Sense strand starting at position 131 of SEQ ID NO: 914899
gaagucuuugguggagacu

SEQ ID NO: 1039019 - RNA, 19 nt, Artificial Sequence
  Description of Artificial Sequence: Synthetic oligonucleotide
  Antisense strand to SEQ ID NO: 1039018
agucuccaccaaagacuuc

SEQ ID NO: 1039020 - RNA, 19 nt, Artificial Sequence
  Description of Artificial Sequence: Synthetic oligonucleotide
  Sense strand starting at position 484 of SEQ ID NO: 914899
gcaagcagcaguuauagau

SEQ ID NO: 1039021 - RNA, 19 nt, Artificial Sequence
  Description of Artificial Sequence: Synthetic oligonucleotide
  Antisense strand to SEQ ID NO: 1039020
aucuauaacugcugcuugc

SEQ ID NO: 1039022 - RNA, 19 nt, Artificial Sequence
  Description of Artificial Sequence: Synthetic oligonucleotide
  Sense strand starting at position 488 of SEQ ID NO: 914899
gcagcaguuauagauuguu

SEQ ID NO: 1039023 - RNA, 19 nt, Artificial Sequence
  Description of Artificial Sequence: Synthetic oligonucleotide
  Antisense strand to SEQ ID NO: 1039022
aacaaucuauaacugcugc

SEQ ID NO: 1039024 - RNA, 19 nt, Artificial Sequence
  Description of Artificial Sequence: Synthetic oligonucleotide
  Sense strand starting at position 631 of SEQ ID NO: 914899
aaggguuuccuaggauaca

SEQ ID NO: 1039025 - RNA, 19 nt, Artificial Sequence
  Description of Artificial Sequence: Synthetic oligonucleotide
  Antisense strand to SEQ ID NO: 1039024
uguauccuaggaaacccuu

SEQ ID NO: 1039026 - RNA, 19 nt, Artificial Sequence
  Description of Artificial Sequence: Synthetic oligonucleotide
  Sense strand starting at position 669 of SEQ ID NO: 914899
ugagaucguccugagcaaa

SEQ ID NO: 1039027 - RNA, 19 nt, Artificial Sequence
  Description of Artificial Sequence: Synthetic oligonucleotide
  Antisense strand to SEQ ID NO: 1039026
uuugcucaggacgaucuca

SEQ ID NO: 1039028 - RNA, 19 nt, Artificial Sequence
  Description of Artificial Sequence: Synthetic oligonucleotide
  Sense strand starting at position 672 of SEQ ID NO: 914899
gaucguccugagcaaacaa

SEQ ID NO: 1039029 - RNA, 19 nt, Artificial Sequence
  Description of Artificial Sequence: Synthetic oligonucleotide
  Antisense strand to SEQ ID NO: 1039028
uuguuugcucaggacgauc

SEQ ID NO: 1039030 - RNA, 19 nt, Artificial Sequence
  Description of Artificial Sequence: Synthetic oligonucleotide
  Sense strand starting at position 703 of SEQ ID NO: 914899
acuauagugagugguggua

SEQ ID NO: 1039031 - RNA, 19 nt, Artificial Sequence
  Description of Artificial Sequence: Synthetic oligonucleotide
  Antisense strand to SEQ ID NO: 1039030
uaccaccacucacuauagu

SEQ ID NO: 1039032 - RNA, 19 nt, Artificial Sequence
  Description of Artificial Sequence: Synthetic oligonucleotide
  Sense strand starting at position 786 of SEQ ID NO: 914899
cccagaaguugccucucaa

SEQ ID NO: 1039033 - RNA, 19 nt, Artificial Sequence
  Description of Artificial Sequence: Synthetic oligonucleotide
  Antisense strand to SEQ ID NO: 1039032
uugagaggcaacuucuggg

SEQ ID NO: 1039034 - RNA, 19 nt, Artificial Sequence
  Description of Artificial Sequence: Synthetic oligonucleotide
  Sense strand starting at position 848 of SEQ ID NO: 914899
gcacuaagggauuguccca

SEQ ID NO: 1039035 - RNA, 19 nt, Artificial Sequence
  Description of Artificial Sequence: Synthetic oligonucleotide
  Antisense strand to SEQ ID NO: 1039034
ugggacaaucccuuagugc

SEQ ID NO: 1039036 - RNA, 19 nt, Artificial Sequence
  Description of Artificial Sequence: Synthetic oligonucleotide
  Sense strand starting at position 897 of SEQ ID NO: 914899
agcugugaguucuuccaag

SEQ ID NO: 1039037 - RNA, 19 nt, Artificial Sequence
  Description of Artificial Sequence: Synthetic oligonucleotide
  Antisense strand to SEQ ID NO: 1039036
cuuggaagaacucacagcu

SEQ ID NO: 1039038 - RNA, 19 nt, Artificial Sequence
  Description of Artificial Sequence: Synthetic oligonucleotide
  Sense strand starting at position 1195 of SEQ ID NO: 914899
gggugaacugauggcaguu

SEQ ID NO: 1039039 - RNA, 19 nt, Artificial Sequence
  Description of Artificial Sequence: Synthetic oligonucleotide
  Antisense strand to SEQ ID NO: 1039038
aacugccaucaguucaccc

SEQ ID NO: 1039040 - RNA, 19 nt, Artificial Sequence
  Description of Artificial Sequence: Synthetic oligonucleotide
  Sense strand starting at position 1487 of SEQ ID NO: 914899
cggcaagaguccgugagaa

SEQ ID NO: 1039041 - RNA, 19 nt, Artificial Sequence
  Description of Artificial Sequence: Synthetic oligonucleotide
  Antisense strand to SEQ ID NO: 1039040
uucucacggacucuugccg

SEQ ID NO: 1039042 - RNA, 19 nt, Artificial Sequence
  Description of Artificial Sequence: Synthetic oligonucleotide
  Sense strand starting at position 1489 of SEQ ID NO: 914899
gcaagaguccgugagaaag

SEQ ID NO: 1039043 - RNA, 19 nt, Artificial Sequence
  Description of Artificial Sequence: Synthetic oligonucleotide
  Antisense strand to SEQ ID NO: 1039042
cuuucucacggacucuugc

SEQ ID NO: 1039044 - RNA, 19 nt, Artificial Sequence
  Description of Artificial Sequence: Synthetic oligonucleotide
  Sense strand starting at position 2293 of SEQ ID NO: 914899
ccgccauuagcuuauuuaa

SEQ ID NO: 1039045 - RNA, 19 nt, Artificial Sequence
  Description of Artificial Sequence: Synthetic oligonucleotide
  Antisense strand to SEQ ID NO: 1039044
uuaaauaagcuaauggcgg

SEQ ID NO: 1039046 - RNA, 19 nt, Artificial Sequence
  Description of Artificial Sequence: Synthetic oligonucleotide
  Sense strand starting at position 2638 of SEQ ID NO: 914899
caggaauguguaugagauc

SEQ ID NO: 1039047 - RNA, 19 nt, Artificial Sequence
  Description of Artificial Sequence: Synthetic oligonucleotide
  Antisense strand to SEQ ID NO: 1039046
gaucucauacacauuccug

SEQ ID NO: 1039048 - RNA, 19 nt, Artificial Sequence
  Description of Artificial Sequence: Synthetic oligonucleotide
  Sense strand starting at position 2647 of SEQ ID NO: 914899
guaugagaucgcgagagug

SEQ ID NO: 1039049 - RNA, 19 nt, Artificial Sequence
  Description of Artificial Sequence: Synthetic oligonucleotide
  Antisense strand to SEQ ID NO: 1039048
cacucucgcgaucucauac

SEQ ID NO: 1039050 - RNA, 19 nt, Artificial Sequence
  Description of Artificial Sequence: Synthetic oligonucleotide
  Sense strand starting at position 2650 of SEQ ID NO: 914899
ugagaucgcgagagugcuu

SEQ ID NO: 1039051 - RNA, 19 nt, Artificial Sequence
  Description of Artificial Sequence: Synthetic oligonucleotide
  Antisense strand to SEQ ID NO: 1039050
aagcacucucgcgaucuca

SEQ ID NO: 1039052 - RNA, 19 nt, Artificial Sequence
  Description of Artificial Sequence: Synthetic oligonucleotide
  Sense strand starting at position 2656 of SEQ ID NO: 914899
cgcgagagugcuucugugu

SEQ ID NO: 1039053 - RNA, 19 nt, Artificial Sequence
  Description of Artificial Sequence: Synthetic oligonucleotide
  Antisense strand to SEQ ID NO: 1039052
acacagaagcacucucgcg

SEQ ID NO: 1039054 - RNA, 19 nt, Artificial Sequence
  Description of Artificial Sequence: Synthetic oligonucleotide
  Sense strand starting at position 2676 of SEQ ID NO: 914899
ugacuuugugaaugugacu

SEQ ID NO: 1039055 - RNA, 19 nt, Artificial Sequence
  Description of Artificial Sequence: Synthetic oligonucleotide
  Antisense strand to SEQ ID NO: 1039054
agucacauucacaaaguca

SEQ ID NO: 1039056 - RNA, 19 nt, Artificial Sequence
  Description of Artificial Sequence: Synthetic oligonucleotide
  Sense strand starting at position 3097 of SEQ ID NO: 914899
gccugugguugaucaacuu

SEQ ID NO: 1039057 - RNA, 19 nt, Artificial Sequence
  Description of Artificial Sequence: Synthetic oligonucleotide
  Antisense strand to SEQ ID NO: 1039056
aaguugaucaaccacaggc

SEQ ID NO: 1039058 - RNA, 19 nt, Artificial Sequence
  Description of Artificial Sequence: Synthetic oligonucleotide
  Sense strand starting at position 3209 of SEQ ID NO: 914899
gguuucugcuuucuaaaga

SEQ ID NO: 1039059 - RNA, 19 nt, Artificial Sequence
  Description of Artificial Sequence: Synthetic oligonucleotide
  Antisense strand to SEQ ID NO: 1039058
ucuuuagaaagcagaaacc

SEQ ID NO: 1039060 - RNA, 19 nt, Artificial Sequence
  Description of Artificial Sequence: Synthetic oligonucleotide
  Sense strand starting at position 3250 of SEQ ID NO: 914899
ugugcacagagguauugaa

SEQ ID NO: 1039061 - RNA, 19 nt, Artificial Sequence
  Description of Artificial Sequence: Synthetic oligonucleotide
  Antisense strand to SEQ ID NO: 1039060
uucaauaccucugugcaca

SEQ ID NO: 1039062 - RNA, 19 nt, Artificial Sequence
  Description of Artificial Sequence: Synthetic oligonucleotide
  Sense strand starting at position 3280 of SEQ ID NO: 914899
uguuuccucgggcaaugaa

SEQ ID NO: 1039063 - RNA, 19 nt, Artificial Sequence
  Description of Artificial Sequence: Synthetic oligonucleotide
  Antisense strand to SEQ ID NO: 1039062
uucauugcccgaggaaaca

SEQ ID NO: 1039064 - RNA, 19 nt, Artificial Sequence
  Description of Artificial Sequence: Synthetic oligonucleotide
  Sense strand starting at position 3288 of SEQ ID NO: 914899
cgggcaaugaaugagcuua

SEQ ID NO: 1039065 - RNA, 19 nt, Artificial Sequence
  Description of Artificial Sequence: Synthetic oligonucleotide
  Antisense strand to SEQ ID NO: 1039064
uaagcucauucauugcccg

SEQ ID NO: 1039066 - RNA, 19 nt, Artificial Sequence
  Description of Artificial Sequence: Synthetic oligonucleotide
  Sense strand starting at position 3290 of SEQ ID NO: 914899
ggcaaugaaugagcuuaau

SEQ ID NO: 1039067 - RNA, 19 nt, Artificial Sequence
  Description of Artificial Sequence: Synthetic oligonucleotide
  Antisense strand to SEQ ID NO: 1039066
auuaagcucauucauugcc

SEQ ID NO: 1039068 - RNA, 19 nt, Artificial Sequence
  Description of Artificial Sequence: Synthetic oligonucleotide
  Sense strand starting at position 3368 of SEQ ID NO: 914899
aaauuuaauugguaaggga

SEQ ID NO: 1039069 - RNA, 19 nt, Artificial Sequence
  Description of Artificial Sequence: Synthetic oligonucleotide
  Antisense strand to SEQ ID NO: 1039068
ucccuuaccaauuaaauuu

SEQ ID NO: 1039070 - RNA, 19 nt, Artificial Sequence
  Description of Artificial Sequence: Synthetic oligonucleotide
  Sense strand starting at position 3393 of SEQ ID NO: 914899
guuagucaccuuuauacug

SEQ ID NO: 1039071 - RNA, 19 nt, Artificial Sequence
  Description of Artificial Sequence: Synthetic oligonucleotide
  Antisense strand to SEQ ID NO: 1039070
caguauaaaggugacuaac

SEQ ID NO: 1039072 - RNA, 19 nt, Artificial Sequence
  Description of Artificial Sequence: Synthetic oligonucleotide
  Sense strand starting at position 3515 of SEQ ID NO: 914899
cccacauaguaucugggaa

SEQ ID NO: 1039073 - RNA, 19 nt, Artificial Sequence
  Description of Artificial Sequence: Synthetic oligonucleotide
  Antisense strand to SEQ ID NO: 1039072
uucccagauacuauguggg

SEQ ID NO: 1039074 - RNA, 19 nt, Artificial Sequence
  Description of Artificial Sequence: Synthetic oligonucleotide
  Sense strand starting at position 3527 of SEQ ID NO: 914899
cugggaaaguuugugaaau

SEQ ID NO: 1039075 - RNA, 19 nt, Artificial Sequence
  Description of Artificial Sequence: Synthetic oligonucleotide
  Antisense strand to SEQ ID NO: 1039074
auuucacaaacuuucccag

SEQ ID NO: 1039076 - RNA, 19 nt, Artificial Sequence
  Description of Artificial Sequence: Synthetic oligonucleotide
  Sense strand starting at position 3537 of SEQ ID NO: 914899
uugugaaaugacugcauga

SEQ ID NO: 1039077 - RNA, 19 nt, Artificial Sequence
  Description of Artificial Sequence: Synthetic oligonucleotide
  Antisense strand to SEQ ID NO: 1039076
ucaugcagucauuucacaa

SEQ ID NO: 1039078 - RNA, 19 nt, Artificial Sequence
  Description of Artificial Sequence: Synthetic oligonucleotide
  Sense strand starting at position 3677 of SEQ ID NO: 914899
gugcuaaggcgucuuguca

SEQ ID NO: 1039079 - RNA, 19 nt, Artificial Sequence
  Description of Artificial Sequence: Synthetic oligonucleotide
  Antisense strand to SEQ ID NO: 1039078
ugacaagacgccuuagcac

SEQ ID NO: 1039080 - RNA, 19 nt, Artificial Sequence
  Description of Artificial Sequence: Synthetic oligonucleotide
  Sense strand starting at position 3678 of SEQ ID NO: 914899
ugcuaaggcgucuugucaa

SEQ ID NO: 1039081 - RNA, 19 nt, Artificial Sequence
  Description of Artificial Sequence: Synthetic oligonucleotide
  Antisense strand to SEQ ID NO: 1039080
uugacaagacgccuuagca

SEQ ID NO: 1039082 - RNA, 19 nt, Artificial Sequence
  Description of Artificial Sequence: Synthetic oligonucleotide
  Sense strand starting at position 3681 of SEQ ID NO: 914899
uaaggcgucuugucaaaga

SEQ ID NO: 1039083 - RNA, 19 nt, Artificial Sequence
  Description of Artificial Sequence: Synthetic oligonucleotide
  Antisense strand to SEQ ID NO: 1039082
ucuuugacaagacgccuua

SEQ ID NO: 1039084 - RNA, 19 nt, Artificial Sequence
  Description of Artificial Sequence: Synthetic oligonucleotide
  Sense strand starting at position 3686 of SEQ ID NO: 914899
cgucuugucaaagagcaag

SEQ ID NO: 1039085 - RNA, 19 nt, Artificial Sequence
  Description of Artificial Sequence: Synthetic oligonucleotide
  Antisense strand to SEQ ID NO: 1039084
cuugcucuuugacaagacg

SEQ ID NO: 1039086 - RNA, 19 nt, Artificial Sequence
  Description of Artificial Sequence: Synthetic oligonucleotide
  Sense strand starting at position 3700 of SEQ ID NO: 914899
gcaaguagggccugaaauu

SEQ ID NO: 1039087 - RNA, 19 nt, Artificial Sequence
  Description of Artificial Sequence: Synthetic oligonucleotide
  Antisense strand to SEQ ID NO: 1039086
aauuucaggcccuacuugc

SEQ ID NO: 1039088 - RNA, 19 nt, Artificial Sequence
  Description of Artificial Sequence: Synthetic oligonucleotide
  Sense strand starting at position 3709 of SEQ ID NO: 914899
gccugaaauucugcauccu

SEQ ID NO: 1039089 - RNA, 19 nt, Artificial Sequence
  Description of Artificial Sequence: Synthetic oligonucleotide
  Antisense strand to SEQ ID NO: 1039088
aggaugcagaauuucaggc

SEQ ID NO: 1039090 - RNA, 19 nt, Artificial Sequence
  Description of Artificial Sequence: Synthetic oligonucleotide
  Sense strand starting at position 3977 of SEQ ID NO: 914899
agagaaauuucagagagug

SEQ ID NO: 1039091 - RNA, 19 nt, Artificial Sequence
  Description of Artificial Sequence: Synthetic oligonucleotide
  Antisense strand to SEQ ID NO: 1039090
cacucucugaaauuucucu

SEQ ID NO: 1039092 - RNA, 19 nt, Artificial Sequence
  Description of Artificial Sequence: Synthetic oligonucleotide
  Sense strand starting at position 123 of SEQ ID NO: 914900
ccugcuggaugucucagaa

SEQ ID NO: 1039093 - RNA, 19 nt, Artificial Sequence
  Description of Artificial Sequence: Synthetic oligonucleotide
  Antisense strand to SEQ ID NO: 1039092
uucugagacauccagcagg

SEQ ID NO: 1039094 - RNA, 19 nt, Artificial Sequence
  Description of Artificial Sequence: Synthetic oligonucleotide
  Sense strand starting at position 211 of SEQ ID NO: 914900
gucacuuagcuuugcauuu

SEQ ID NO: 1039095 - RNA, 19 nt, Artificial Sequence
  Description of Artificial Sequence: Synthetic oligonucleotide
  Antisense strand to SEQ ID NO: 1039094
aaaugcaaagcuaagugac

SEQ ID NO: 1039096 - RNA, 19 nt, Artificial Sequence
  Description of Artificial Sequence: Synthetic oligonucleotide
  Sense strand starting at position 338 of SEQ ID NO: 914900
gaggauucccgcugacuca

SEQ ID NO: 1039097 - RNA, 19 nt, Artificial Sequence
  Description of Artificial Sequence: Synthetic oligonucleotide
  Antisense strand to SEQ ID NO: 1039096
ugagucagcgggaauccuc

SEQ ID NO: 1039098 - RNA, 19 nt, Artificial Sequence
  Description of Artificial Sequence: Synthetic oligonucleotide
  Sense strand starting at position 339 of SEQ ID NO: 914900
aggauucccgcugacucaa

SEQ ID NO: 1039099 - RNA, 19 nt, Artificial Sequence
  Description of Artificial Sequence: Synthetic oligonucleotide
  Antisense strand to SEQ ID NO: 1039098
uugagucagcgggaauccu

SEQ ID NO: 1039100 - RNA, 19 nt, Artificial Sequence
  Description of Artificial Sequence: Synthetic oligonucleotide
  Sense strand starting at position 574 of SEQ ID NO: 914900
agccuucuaggacacuuaa

SEQ ID NO: 1039101 - RNA, 19 nt, Artificial Sequence
  Description of Artificial Sequence: Synthetic oligonucleotide
  Antisense strand to SEQ ID NO: 1039100
uuaaguguccuagaaggcu

SEQ ID NO: 1039102 - RNA, 19 nt, Artificial Sequence
  Description of Artificial Sequence: Synthetic oligonucleotide
  Sense strand starting at position 868 of SEQ ID NO: 914900
ucucuuucucaccgaguca

SEQ ID NO: 1039103 - RNA, 19 nt, Artificial Sequence
  Description of Artificial Sequence: Synthetic oligonucleotide
  Antisense strand to SEQ ID NO: 1039102
ugacucggugagaaagaga

SEQ ID NO: 1039104 - RNA, 19 nt, Artificial Sequence
  Description of Artificial Sequence: Synthetic oligonucleotide
  Sense strand starting at position 1575 of SEQ ID NO: 914900
gcagcuagcgggcucuaau

SEQ ID NO: 1039105 - RNA, 19 nt, Artificial Sequence
  Description of Artificial Sequence: Synthetic oligonucleotide
  Antisense strand to SEQ ID NO: 1039104
auuagagcccgcuagcugc

SEQ ID NO: 1039106 - RNA, 19 nt, Artificial Sequence
  Description of Artificial Sequence: Synthetic oligonucleotide
  Sense strand starting at position 1597 of SEQ ID NO: 914900
ccgcuuguccggcucuuaa

SEQ ID NO: 1039107 - RNA, 19 nt, Artificial Sequence
  Description of Artificial Sequence: Synthetic oligonucleotide
  Antisense strand to SEQ ID NO: 1039106
uuaagagccggacaagcgg

SEQ ID NO: 1039108 - RNA, 19 nt, Artificial Sequence
  Description of Artificial Sequence: Synthetic oligonucleotide
  Sense strand starting at position 1608 of SEQ ID NO: 914900
gcucuuaaccuagauugca

SEQ ID NO: 1039109 - RNA, 19 nt, Artificial Sequence
  Description of Artificial Sequence: Synthetic oligonucleotide
  Antisense strand to SEQ ID NO: 1039108
ugcaaucuagguuaagagc

SEQ ID NO: 1039110 - RNA, 19 nt, Artificial Sequence
  Description of Artificial Sequence: Synthetic oligonucleotide
  Sense strand starting at position 1694 of SEQ ID NO: 914900
gccucagaauuggaaggaa

SEQ ID NO: 1039111 - RNA, 19 nt, Artificial Sequence
  Description of Artificial Sequence: Synthetic oligonucleotide
  Antisense strand to SEQ ID NO: 1039110
uuccuuccaauucugaggc

SEQ ID NO: 1039112 - RNA, 19 nt, Artificial Sequence
  Description of Artificial Sequence: Synthetic oligonucleotide
  Sense strand starting at position 1770 of SEQ ID NO: 914900
cagagccguuucuuugauu

SEQ ID NO: 1039113 - RNA, 19 nt, Artificial Sequence
  Description of Artificial Sequence: Synthetic oligonucleotide
  Antisense strand to SEQ ID NO: 1039112
aaucaaagaaacggcucug

SEQ ID NO: 1039114 - RNA, 19 nt, Artificial Sequence
  Description of Artificial Sequence: Synthetic oligonucleotide
  Sense strand starting at position 1803 of SEQ ID NO: 914900
ggcucaauuugcccaguau

SEQ ID NO: 1039115 - RNA, 19 nt, Artificial Sequence
  Description of Artificial Sequence: Synthetic oligonucleotide
  Antisense strand to SEQ ID NO: 1039114
auacugggcaaauugagcc

SEQ ID NO: 1039116 - RNA, 19 nt, Artificial Sequence
  Description of Artificial Sequence: Synthetic oligonucleotide
  Sense strand starting at position 1815 of SEQ ID NO: 914900
ccaguauaaucugucuuaa

SEQ ID NO: 1039117 - RNA, 19 nt, Artificial Sequence
  Description of Artificial Sequence: Synthetic oligonucleotide
  Antisense strand to SEQ ID NO: 1039116
uuaagacagauuauacugg

SEQ ID NO: 1039118 - RNA, 19 nt, Artificial Sequence
  Description of Artificial Sequence: Synthetic oligonucleotide
  Sense strand starting at position 1817 of SEQ ID NO: 914900
aguauaaucugucuuaaug

SEQ ID NO: 1039119 - RNA, 19 nt, Artificial Sequence
  Description of Artificial Sequence: Synthetic oligonucleotide
  Antisense strand to SEQ ID NO: 1039118
cauuaagacagauuauacu

SEQ ID NO: 1039120 - RNA, 19 nt, Artificial Sequence
  Description of Artificial Sequence: Synthetic oligonucleotide
  Sense strand starting at position 1827 of SEQ ID NO: 914900
gucuuaauguaauugcauu

SEQ ID NO: 1039121 - RNA, 19 nt, Artificial Sequence
  Description of Artificial Sequence: Synthetic oligonucleotide
  Antisense strand to SEQ ID NO: 1039120
aaugcaauuacauuaagac

SEQ ID NO: 1039122 - RNA, 19 nt, Artificial Sequence
  Description of Artificial Sequence: Synthetic oligonucleotide
  Sense strand starting at position 1910 of SEQ ID NO: 914900
cggauuuaaucugaaucuc

SEQ ID NO: 1039123 - RNA, 19 nt, Artificial Sequence
  Description of Artificial Sequence: Synthetic oligonucleotide
  Antisense strand to SEQ ID NO: 1039122
gagauucagauuaaauccg

SEQ ID NO: 1039124 - RNA, 19 nt, Artificial Sequence
  Description of Artificial Sequence: Synthetic oligonucleotide
  Sense strand starting at position 2159 of SEQ ID NO: 914900
ggucguggucuucaaugau

SEQ ID NO: 1039125 - RNA, 19 nt, Artificial Sequence
  Description of Artificial Sequence: Synthetic oligonucleotide
  Antisense strand to SEQ ID NO: 1039124
aucauugaagaccacgacc

SEQ ID NO: 1039126 - RNA, 19 nt, Artificial Sequence
  Description of Artificial Sequence: Synthetic oligonucleotide
  Sense strand starting at position 2310 of SEQ ID NO: 914900
ccggauuguuuggcaaagu

SEQ ID NO: 1039127 - RNA, 19 nt, Artificial Sequence
  Description of Artificial Sequence: Synthetic oligonucleotide
  Antisense strand to SEQ ID NO: 1039126
acuuugccaaacaauccgg

SEQ ID NO: 1039128 - RNA, 19 nt, Artificial Sequence
  Description of Artificial Sequence: Synthetic oligonucleotide
  Sense strand starting at position 2423 of SEQ ID NO: 914900
gggagagcuuaucucaacu

SEQ ID NO: 1039129 - RNA, 19 nt, Artificial Sequence
  Description of Artificial Sequence: Synthetic oligonucleotide
  Antisense strand to SEQ ID NO: 1039128
aguugagauaagcucuccc

SEQ ID NO: 1039130 - RNA, 19 nt, Artificial Sequence
  Description of Artificial Sequence: Synthetic oligonucleotide
  Sense strand starting at position 2436 of SEQ ID NO: 914900
ucaacuucucucgaagcaa

SEQ ID NO: 1039131 - RNA, 19 nt, Artificial Sequence
  Description of Artificial Sequence: Synthetic oligonucleotide
  Antisense strand to SEQ ID NO: 1039130
uugcuucgagagaaguuga

SEQ ID NO: 1039132 - RNA, 19 nt, Artificial Sequence
  Description of Artificial Sequence: Synthetic oligonucleotide
  Sense strand starting at position 2527 of SEQ ID NO: 914900
guucuaaggcacuagggau

SEQ ID NO: 1039133 - RNA, 19 nt, Artificial Sequence
  Description of Artificial Sequence: Synthetic oligonucleotide
  Antisense strand to SEQ ID NO: 1039132
aucccuagugccuuagaac

SEQ ID NO: 1039134 - RNA, 19 nt, Artificial Sequence
  Description of Artificial Sequence: Synthetic oligonucleotide
  Sense strand starting at position 2573 of SEQ ID NO: 914900
gcugcuauuauggaguuga

SEQ ID NO: 1039135 - RNA, 19 nt, Artificial Sequence
  Description of Artificial Sequence: Synthetic oligonucleotide
  Antisense strand to SEQ ID NO: 1039134
ucaacuccauaauagcagc

SEQ ID NO: 1039136 - RNA, 19 nt, Artificial Sequence
  Description of Artificial Sequence: Synthetic oligonucleotide
  Sense strand starting at position 2577 of SEQ ID NO: 914900
cuauuauggaguugacgau

SEQ ID NO: 1039137 - RNA, 19 nt, Artificial Sequence
  Description of Artificial Sequence: Synthetic oligonucleotide
  Antisense strand to SEQ ID NO: 1039136
aucgucaacuccauaauag

SEQ ID NO: 1039138 - RNA, 19 nt, Artificial Sequence
  Description of Artificial Sequence: Synthetic oligonucleotide
  Sense strand starting at position 2578 of SEQ ID NO: 914900
uauuauggaguugacgauu

SEQ ID NO: 1039139 - RNA, 19 nt, Artificial Sequence
  Description of Artificial Sequence: Synthetic oligonucleotide
  Antisense strand to SEQ ID NO: 1039138
aaucgucaacuccauaaua

SEQ ID NO: 1039140 - RNA, 19 nt, Artificial Sequence
  Description of Artificial Sequence: Synthetic oligonucleotide
  Sense strand starting at position 2581 of SEQ ID NO: 914900
uauggaguugacgauucuu

SEQ ID NO: 1039141 - RNA, 19 nt, Artificial Sequence
  Description of Artificial Sequence: Synthetic oligonucleotide
  Antisense strand to SEQ ID NO: 1039140
aagaaucgucaacuccaua

SEQ ID NO: 1039142 - RNA, 19 nt, Artificial Sequence
  Description of Artificial Sequence: Synthetic oligonucleotide
  Sense strand starting at position 2845 of SEQ ID NO: 914900
ccagguuccagcgaaucuu

SEQ ID NO: 1039143 - RNA, 19 nt, Artificial Sequence
  Description of Artificial Sequence: Synthetic oligonucleotide
  Antisense strand to SEQ ID NO: 1039142
aagauucgcuggaaccugg

SEQ ID NO: 1039144 - RNA, 19 nt, Artificial Sequence
  Description of Artificial Sequence: Synthetic oligonucleotide
  Sense strand starting at position 3086 of SEQ ID NO: 914900
uuucuuugccuagacagua

SEQ ID NO: 1039145 - RNA, 19 nt, Artificial Sequence
  Description of Artificial Sequence: Synthetic oligonucleotide
  Antisense strand to SEQ ID NO: 1039144
uacugucuaggcaaagaaa

SEQ ID NO: 1039146 - RNA, 19 nt, Artificial Sequence
  Description of Artificial Sequence: Synthetic oligonucleotide
  Sense strand starting at position 3106 of SEQ ID NO: 914900
agaguuccaaggugggaua

SEQ ID NO: 1039147 - RNA, 19 nt, Artificial Sequence
  Description of Artificial Sequence: Synthetic oligonucleotide
  Antisense strand to SEQ ID NO: 1039146
uaucccaccuuggaacucu

SEQ ID NO: 1039148 - RNA, 19 nt, Artificial Sequence
  Description of Artificial Sequence: Synthetic oligonucleotide
  Sense strand starting at position 3162 of SEQ ID NO: 914900
gacagauguguuggaggcu

SEQ ID NO: 1039149 - RNA, 19 nt, Artificial Sequence
  Description of Artificial Sequence: Synthetic oligonucleotide
  Antisense strand to SEQ ID NO: 1039148
agccuccaacacaucuguc

SEQ ID NO: 1039150 - RNA, 19 nt, Artificial Sequence
  Description of Artificial Sequence: Synthetic oligonucleotide
  Sense strand starting at position 3246 of SEQ ID NO: 914900
uugggauucuaucucaucu

SEQ ID NO: 1039151 - RNA, 19 nt, Artificial Sequence
  Description of Artificial Sequence: Synthetic oligonucleotide
  Antisense strand to SEQ ID NO: 1039150
agaugagauagaaucccaa

SEQ ID NO: 1039152 - RNA, 19 nt, Artificial Sequence
  Description of Artificial Sequence: Synthetic oligonucleotide
  Sense strand starting at position 3383 of SEQ ID NO: 914900
ugagcuaaugcauguuaau

SEQ ID NO: 1039153 - RNA, 19 nt, Artificial Sequence
  Description of Artificial Sequence: Synthetic oligonucleotide
  Antisense strand to SEQ ID NO: 1039152
auuaacaugcauuagcuca

SEQ ID NO: 1039154 - RNA, 19 nt, Artificial Sequence
  Description of Artificial Sequence: Synthetic oligonucleotide
  Sense strand starting at position 3394 of SEQ ID NO: 914900
auguuaaugugcuuuguaa

SEQ ID NO: 1039155 - RNA, 19 nt, Artificial Sequence
  Description of Artificial Sequence: Synthetic oligonucleotide
  Antisense strand to SEQ ID NO: 1039154
uuacaaagcacauuaacau

SEQ ID NO: 1039156 - RNA, 19 nt, Artificial Sequence
  Description of Artificial Sequence: Synthetic oligonucleotide
  Sense strand starting at position 3448 of SEQ ID NO: 914900
gagauuaucugguuugaag

SEQ ID NO: 1039157 - RNA, 19 nt, Artificial Sequence
  Description of Artificial Sequence: Synthetic oligonucleotide
  Antisense strand to SEQ ID NO: 1039156
cuucaaaccagauaaucuc

SEQ ID NO: 1039158 - RNA, 19 nt, Artificial Sequence
  Description of Artificial Sequence: Synthetic oligonucleotide
  Sense strand starting at position 3450 of SEQ ID NO: 914900
gauuaucugguuugaagga

SEQ ID NO: 1039159 - RNA, 19 nt, Artificial Sequence
  Description of Artificial Sequence: Synthetic oligonucleotide
  Antisense strand to SEQ ID NO: 1039158
uccuucaaaccagauaauc

SEQ ID NO: 1039160 - RNA, 19 nt, Artificial Sequence
  Description of Artificial Sequence: Synthetic oligonucleotide
  Sense strand starting at position 3571 of SEQ ID NO: 914900
gaagucaggcuuugagaaa

SEQ ID NO: 1039161 - RNA, 19 nt, Artificial Sequence
  Description of Artificial Sequence: Synthetic oligonucleotide
  Antisense strand to SEQ ID NO: 1039160
uuucucaaagccugacuuc

SEQ ID NO: 1039162 - RNA, 19 nt, Artificial Sequence
  Description of Artificial Sequence: Synthetic oligonucleotide
  Sense strand starting at position 3670 of SEQ ID NO: 914900
uccuaauaguccuugagua

SEQ ID NO: 1039163 - RNA, 19 nt, Artificial Sequence
  Description of Artificial Sequence: Synthetic oligonucleotide
  Antisense strand to SEQ ID NO: 1039162
uacucaaggacuauuagga

SEQ ID NO: 1039164 - RNA, 19 nt, Artificial Sequence
  Description of Artificial Sequence: Synthetic oligonucleotide
  Sense strand starting at position 3671 of SEQ ID NO: 914900
ccuaauaguccuugaguau

SEQ ID NO: 1039165 - RNA, 19 nt, Artificial Sequence
  Description of Artificial Sequence: Synthetic oligonucleotide
  Antisense strand to SEQ ID NO: 1039164
auacucaaggacuauuagg

SEQ ID NO: 1039166 - RNA, 19 nt, Artificial Sequence
  Description of Artificial Sequence: Synthetic oligonucleotide
  Sense strand starting at position 3672 of SEQ ID NO: 914900
cuaauaguccuugaguaua

SEQ ID NO: 1039167 - RNA, 19 nt, Artificial Sequence
  Description of Artificial Sequence: Synthetic oligonucleotide
  Antisense strand to SEQ ID NO: 1039166
uauacucaaggacuauuag

SEQ ID NO: 1039168 - RNA, 19 nt, Artificial Sequence
  Description of Artificial Sequence: Synthetic oligonucleotide
  Sense strand starting at position 3907 of SEQ ID NO: 914900
aacuucuugccguagaaac

SEQ ID NO: 1039169 - RNA, 19 nt, Artificial Sequence
  Description of Artificial Sequence: Synthetic oligonucleotide
  Antisense strand to SEQ ID NO: 1039168
guuucuacggcaagaaguu

SEQ ID NO: 1039170 - RNA, 19 nt, Artificial Sequence
  Description of Artificial Sequence: Synthetic oligonucleotide
  Sense strand starting at position 3918 of SEQ ID NO: 914900
guagaaaccucugugcuac

SEQ ID NO: 1039171 - RNA, 19 nt, Artificial Sequence
  Description of Artificial Sequence: Synthetic oligonucleotide
  Antisense strand to SEQ ID NO: 1039170
guagcacagagguuucuac

SEQ ID NO: 1039172 - RNA, 19 nt, Artificial Sequence
  Description of Artificial Sequence: Synthetic oligonucleotide
  Sense strand starting at position 75 of SEQ ID NO: 914901
cugagaauuuguugaagga

SEQ ID NO: 1039173 - RNA, 19 nt, Artificial Sequence
  Description of Artificial Sequence: Synthetic oligonucleotide
  Antisense strand to SEQ ID NO: 1039172
uccuucaacaaauucucag

SEQ ID NO: 1039174 - RNA, 19 nt, Artificial Sequence
  Description of Artificial Sequence: Synthetic oligonucleotide
  Sense strand starting at position 169 of SEQ ID NO: 914901
uuuauauucucauuggaug

SEQ ID NO: 1039175 - RNA, 19 nt, Artificial Sequence
  Description of Artificial Sequence: Synthetic oligonucleotide
  Antisense strand to SEQ ID NO: 1039174
cauccaaugagaauauaaa

SEQ ID NO: 1039176 - RNA, 19 nt, Artificial Sequence
  Description of Artificial Sequence: Synthetic oligonucleotide
  Sense strand starting at position 208 of SEQ ID NO: 914901
ugagaauauguugagcuuu

SEQ ID NO: 1039177 - RNA, 19 nt, Artificial Sequence
  Description of Artificial Sequence: Synthetic oligonucleotide
  Antisense strand to SEQ ID NO: 1039176
aaagcucaacauauucuca

SEQ ID NO: 1039178 - RNA, 19 nt, Artificial Sequence
  Description of Artificial Sequence: Synthetic oligonucleotide
  Sense strand starting at position 275 of SEQ ID NO: 914901
gccgaaauugaagggugua

SEQ ID NO: 1039179 - RNA, 19 nt, Artificial Sequence
  Description of Artificial Sequence: Synthetic oligonucleotide
  Antisense strand to SEQ ID NO: 1039178
uacacccuucaauuucggc

SEQ ID NO: 1039180 - RNA, 19 nt, Artificial Sequence
  Description of Artificial Sequence: Synthetic oligonucleotide
  Sense strand starting at position 276 of SEQ ID NO: 914901
ccgaaauugaaggguguau

SEQ ID NO: 1039181 - RNA, 19 nt, Artificial Sequence
  Description of Artificial Sequence: Synthetic oligonucleotide
  Antisense strand to SEQ ID NO: 1039180
auacacccuucaauuucgg

SEQ ID NO: 1039182 - RNA, 19 nt, Artificial Sequence
  Description of Artificial Sequence: Synthetic oligonucleotide
  Sense strand starting at position 278 of SEQ ID NO: 914901
gaaauugaaggguguaugu

SEQ ID NO: 1039183 - RNA, 19 nt, Artificial Sequence
  Description of Artificial Sequence: Synthetic oligonucleotide
  Antisense strand to SEQ ID NO: 1039182
acauacacccuucaauuuc

SEQ ID NO: 1039184 - RNA, 19 nt, Artificial Sequence
  Description of Artificial Sequence: Synthetic oligonucleotide
  Sense strand starting at position 403 of SEQ ID NO: 914901
gcuccuuuggucuugugua

SEQ ID NO: 1039185 - RNA, 19 nt, Artificial Sequence
  Description of Artificial Sequence: Synthetic oligonucleotide
  Antisense strand to SEQ ID NO: 1039184
uacacaagaccaaaggagc

SEQ ID NO: 1039186 - RNA, 19 nt, Artificial Sequence
  Description of Artificial Sequence: Synthetic oligonucleotide
  Sense strand starting at position 408 of SEQ ID NO: 914901
uuuggucuuguguaacaaa

SEQ ID NO: 1039187 - RNA, 19 nt, Artificial Sequence
  Description of Artificial Sequence: Synthetic oligonucleotide
  Antisense strand to SEQ ID NO: 1039186
uuuguuacacaagaccaaa

SEQ ID NO: 1039188 - RNA, 19 nt, Artificial Sequence
  Description of Artificial Sequence: Synthetic oligonucleotide
  Sense strand starting at position 549 of SEQ ID NO: 914901
ccauguuaacgcugaagaa

SEQ ID NO: 1039189 - RNA, 19 nt, Artificial Sequence
  Description of Artificial Sequence: Synthetic oligonucleotide
  Antisense strand to SEQ ID NO: 1039188
uucuucagcguuaacaugg

SEQ ID NO: 1039190 - RNA, 19 nt, Artificial Sequence
  Description of Artificial Sequence: Synthetic oligonucleotide
  Sense strand starting at position 550 of SEQ ID NO: 914901
cauguuaacgcugaagaau

SEQ ID NO: 1039191 - RNA, 19 nt, Artificial Sequence
  Description of Artificial Sequence: Synthetic oligonucleotide
  Antisense strand to SEQ ID NO: 1039190
auucuucagcguuaacaug

SEQ ID NO: 1039192 - RNA, 19 nt, Artificial Sequence
  Description of Artificial Sequence: Synthetic oligonucleotide
  Sense strand starting at position 624 of SEQ ID NO: 914901
gccaaugcucauuagagcu

SEQ ID NO: 1039193 - RNA, 19 nt, Artificial Sequence
  Description of Artificial Sequence: Synthetic oligonucleotide
  Antisense strand to SEQ ID NO: 1039192
agcucuaaugagcauuggc

SEQ ID NO: 1039194 - RNA, 19 nt, Artificial Sequence
  Description of Artificial Sequence: Synthetic oligonucleotide
  Sense strand starting at position 780 of SEQ ID NO: 914901
ggguacaccuacucagauu

SEQ ID NO: 1039195 - RNA, 19 nt, Artificial Sequence
  Description of Artificial Sequence: Synthetic oligonucleotide
  Antisense strand to SEQ ID NO: 1039194
aaucugaguagguguaccc

SEQ ID NO: 1039196 - RNA, 19 nt, Artificial Sequence
  Description of Artificial Sequence: Synthetic oligonucleotide
  Sense strand starting at position 793 of SEQ ID NO: 914901
cagauuuacuccggauuuc

SEQ ID NO: 1039197 - RNA, 19 nt, Artificial Sequence
  Description of Artificial Sequence: Synthetic oligonucleotide
  Antisense strand to SEQ ID NO: 1039196
gaaauccggaguaaaucug

SEQ ID NO: 1039198 - RNA, 19 nt, Artificial Sequence
  Description of Artificial Sequence: Synthetic oligonucleotide
  Sense strand starting at position 802 of SEQ ID NO: 914901
uccggauuucgcugcucua

SEQ ID NO: 1039199 - RNA, 19 nt, Artificial Sequence
  Description of Artificial Sequence: Synthetic oligonucleotide
  Antisense strand to SEQ ID NO: 1039198
uagagcagcgaaauccgga

SEQ ID NO: 1039200 - RNA, 19 nt, Artificial Sequence
  Description of Artificial Sequence: Synthetic oligonucleotide
  Sense strand starting at position 805 of SEQ ID NO: 914901
ggauuucgcugcucuagaa

SEQ ID NO: 1039201 - RNA, 19 nt, Artificial Sequence
  Description of Artificial Sequence: Synthetic oligonucleotide
  Antisense strand to SEQ ID NO: 1039200
uucuagagcagcgaaaucc

SEQ ID NO: 1039202 - RNA, 19 nt, Artificial Sequence
  Description of Artificial Sequence: Synthetic oligonucleotide
  Sense strand starting at position 1081 of SEQ ID NO: 914901
gugccugcucccgugcaaa

SEQ ID NO: 1039203 - RNA, 19 nt, Artificial Sequence
  Description of Artificial Sequence: Synthetic oligonucleotide
  Antisense strand to SEQ ID NO: 1039202
uuugcacgggagcaggcac

SEQ ID NO: 1039204 - RNA, 19 nt, Artificial Sequence
  Description of Artificial Sequence: Synthetic oligonucleotide
  Sense strand starting at position 1215 of SEQ ID NO: 914901
cggaaucacccgggaggaa

SEQ ID NO: 1039205 - RNA, 19 nt, Artificial Sequence
  Description of Artificial Sequence: Synthetic oligonucleotide
  Antisense strand to SEQ ID NO: 1039204
uuccucccgggugauuccg

SEQ ID NO: 1039206 - RNA, 19 nt, Artificial Sequence
  Description of Artificial Sequence: Synthetic oligonucleotide
  Sense strand starting at position 1727 of SEQ ID NO: 914901
gcugcugcucaggacuuaa

SEQ ID NO: 1039207 - RNA, 19 nt, Artificial Sequence
  Description of Artificial Sequence: Synthetic oligonucleotide
  Antisense strand to SEQ ID NO: 1039206
uuaaguccugagcagcagc

SEQ ID NO: 1039208 - RNA, 19 nt, Artificial Sequence
  Description of Artificial Sequence: Synthetic oligonucleotide
  Sense strand starting at position 2355 of SEQ ID NO: 914901
agacaagaaugugaaauaa

SEQ ID NO: 1039209 - RNA, 19 nt, Artificial Sequence
  Description of Artificial Sequence: Synthetic oligonucleotide
  Antisense strand to SEQ ID NO: 1039208
uuauuucacauucuugucu

SEQ ID NO: 1039210 - RNA, 19 nt, Artificial Sequence
  Description of Artificial Sequence: Synthetic oligonucleotide
  Sense strand starting at position 2986 of SEQ ID NO: 914901
gccucagaguuccuugaaa

SEQ ID NO: 1039211 - RNA, 19 nt, Artificial Sequence
  Description of Artificial Sequence: Synthetic oligonucleotide
  Antisense strand to SEQ ID NO: 1039210
uuucaaggaacucugaggc

SEQ ID NO: 1039212 - RNA, 19 nt, Artificial Sequence
  Description of Artificial Sequence: Synthetic oligonucleotide
  Sense strand starting at position 3027 of SEQ ID NO: 914901
aggccuauuugugcgugau

SEQ ID NO: 1039213 - RNA, 19 nt, Artificial Sequence
  Description of Artificial Sequence: Synthetic oligonucleotide
  Antisense strand to SEQ ID NO: 1039212
aucacgcacaaauaggccu

SEQ ID NO: 1039214 - RNA, 19 nt, Artificial Sequence
  Description of Artificial Sequence: Synthetic oligonucleotide
  Sense strand starting at position 3028 of SEQ ID NO: 914901
ggccuauuugugcgugaug

SEQ ID NO: 1039215 - RNA, 19 nt, Artificial Sequence
  Description of Artificial Sequence: Synthetic oligonucleotide
  Antisense strand to SEQ ID NO: 1039214
caucacgcacaaauaggcc

SEQ ID NO: 1039216 - RNA, 19 nt, Artificial Sequence
  Description of Artificial Sequence: Synthetic oligonucleotide
  Sense strand starting at position 3031 of SEQ ID NO: 914901
cuauuugugcgugaugcca

SEQ ID NO: 1039217 - RNA, 19 nt, Artificial Sequence
  Description of Artificial Sequence: Synthetic oligonucleotide
  Antisense strand to SEQ ID NO: 1039216
uggcaucacgcacaaauag

SEQ ID NO: 1039218 - RNA, 19 nt, Artificial Sequence
  Description of Artificial Sequence: Synthetic oligonucleotide
  Sense strand starting at position 3040 of SEQ ID NO: 914901
cgugaugccagucauuaag

SEQ ID NO: 1039219 - RNA, 19 nt, Artificial Sequence
  Description of Artificial Sequence: Synthetic oligonucleotide
  Antisense strand to SEQ ID NO: 1039218
cuuaaugacuggcaucacg

SEQ ID NO: 1039220 - RNA, 19 nt, Artificial Sequence
  Description of Artificial Sequence: Synthetic oligonucleotide
  Sense strand starting at position 3050 of SEQ ID NO: 914901
gucauuaaggcuuguaaag

SEQ ID NO: 1039221 - RNA, 19 nt, Artificial Sequence
  Description of Artificial Sequence: Synthetic oligonucleotide
  Antisense strand to SEQ ID NO: 1039220
cuuuacaagccuuaaugac

SEQ ID NO: 1039222 - RNA, 19 nt, Artificial Sequence
  Description of Artificial Sequence: Synthetic oligonucleotide
  Sense strand starting at position 3096 of SEQ ID NO: 914901
uuuauaugaucagucugga

SEQ ID NO: 1039223 - RNA, 19 nt, Artificial Sequence
  Description of Artificial Sequence: Synthetic oligonucleotide
  Antisense strand to SEQ ID NO: 1039222
uccagacugaucauauaaa

SEQ ID NO: 1039224 - RNA, 19 nt, Artificial Sequence
  Description of Artificial Sequence: Synthetic oligonucleotide
  Sense strand starting at position 3099 of SEQ ID NO: 914901
auaugaucagucuggauca

SEQ ID NO: 1039225 - RNA, 19 nt, Artificial Sequence
  Description of Artificial Sequence: Synthetic oligonucleotide
  Antisense strand to SEQ ID NO: 1039224
ugauccagacugaucauau

SEQ ID NO: 1039226 - RNA, 19 nt, Artificial Sequence
  Description of Artificial Sequence: Synthetic oligonucleotide
  Sense strand starting at position 3109 of SEQ ID NO: 914901
ucuggaucauaggcauaca

SEQ ID NO: 1039227 - RNA, 19 nt, Artificial Sequence
  Description of Artificial Sequence: Synthetic oligonucleotide
  Antisense strand to SEQ ID NO: 1039226
uguaugccuaugauccaga

SEQ ID NO: 1039228 - RNA, 19 nt, Artificial Sequence
  Description of Artificial Sequence: Synthetic oligonucleotide
  Sense strand starting at position 3121 of SEQ ID NO: 914901
gcauacauuucuguuccca

SEQ ID NO: 1039229 - RNA, 19 nt, Artificial Sequence
  Description of Artificial Sequence: Synthetic oligonucleotide
  Antisense strand to SEQ ID NO: 1039228
ugggaacagaaauguaugc

SEQ ID NO: 1039230 - RNA, 19 nt, Artificial Sequence
  Description of Artificial Sequence: Synthetic oligonucleotide
  Sense strand starting at position 3167 of SEQ ID NO: 914901
gccugcaugcucuugucau

SEQ ID NO: 1039231 - RNA, 19 nt, Artificial Sequence
  Description of Artificial Sequence: Synthetic oligonucleotide
  Antisense strand to SEQ ID NO: 1039230
augacaagagcaugcaggc

SEQ ID NO: 1039232 - RNA, 19 nt, Artificial Sequence
  Description of Artificial Sequence: Synthetic oligonucleotide
  Sense strand starting at position 3213 of SEQ ID NO: 914901
ggucccuaauggguauaau

SEQ ID NO: 1039233 - RNA, 19 nt, Artificial Sequence
  Description of Artificial Sequence: Synthetic oligonucleotide
  Antisense strand to SEQ ID NO: 1039232
auuauacccauuagggacc

SEQ ID NO: 1039234 - RNA, 19 nt, Artificial Sequence
  Description of Artificial Sequence: Synthetic oligonucleotide
  Sense strand starting at position 3214 of SEQ ID NO: 914901
gucccuaauggguauaauc

SEQ ID NO: 1039235 - RNA, 19 nt, Artificial Sequence
  Description of Artificial Sequence: Synthetic oligonucleotide
  Antisense strand to SEQ ID NO: 1039234
gauuauacccauuagggac

SEQ ID NO: 1039236 - RNA, 19 nt, Artificial Sequence
  Description of Artificial Sequence: Synthetic oligonucleotide
  Sense strand starting at position 3696 of SEQ ID NO: 914901
agccuaaacuaugugauaa

SEQ ID NO: 1039237 - RNA, 19 nt, Artificial Sequence
  Description of Artificial Sequence: Synthetic oligonucleotide
  Antisense strand to SEQ ID NO: 1039236
uuaucacauaguuuaggcu

SEQ ID NO: 1039238 - RNA, 19 nt, Artificial Sequence
  Description of Artificial Sequence: Synthetic oligonucleotide
  Sense strand starting at position 3767 of SEQ ID NO: 914901
auagguugugaugaacagu

SEQ ID NO: 1039239 - RNA, 19 nt, Artificial Sequence
  Description of Artificial Sequence: Synthetic oligonucleotide
  Antisense strand to SEQ ID NO: 1039238
acuguucaucacaaccuau

SEQ ID NO: 1039240 - RNA, 19 nt, Artificial Sequence
  Description of Artificial Sequence: Synthetic oligonucleotide
  Sense strand starting at position 3770 of SEQ ID NO: 914901
gguugugaugaacaguuua

SEQ ID NO: 1039241 - RNA, 19 nt, Artificial Sequence
  Description of Artificial Sequence: Synthetic oligonucleotide
  Antisense strand to SEQ ID NO: 1039240
uaaacuguucaucacaacc

SEQ ID NO: 1039242 - RNA, 19 nt, Artificial Sequence
  Description of Artificial Sequence: Synthetic oligonucleotide
  Sense strand starting at position 3802 of SEQ ID NO: 914901
agucaauguggugguuaaa

SEQ ID NO: 1039243 - RNA, 19 nt, Artificial Sequence
  Description of Artificial Sequence: Synthetic oligonucleotide
  Antisense strand to SEQ ID NO: 1039242
uuuaaccaccacauugacu

SEQ ID NO: 1039244 - RNA, 19 nt, Artificial Sequence
  Description of Artificial Sequence: Synthetic oligonucleotide
  Sense strand starting at position 3848 of SEQ ID NO: 914901
ggguuugauuuagacucuu

SEQ ID NO: 1039245 - RNA, 19 nt, Artificial Sequence
  Description of Artificial Sequence: Synthetic oligonucleotide
  Antisense strand to SEQ ID NO: 1039244
aagagucuaaaucaaaccc

SEQ ID NO: 1039246 - RNA, 19 nt, Artificial Sequence
  Description of Artificial Sequence: Synthetic oligonucleotide
  Sense strand starting at position 3863 of SEQ ID NO: 914901
ucuuacuuaucaguuagca

SEQ ID NO: 1039247 - RNA, 19 nt, Artificial Sequence
  Description of Artificial Sequence: Synthetic oligonucleotide
  Antisense strand to SEQ ID NO: 1039246
ugcuaacugauaaguaaga

SEQ ID NO: 1039248 - RNA, 19 nt, Artificial Sequence
  Description of Artificial Sequence: Synthetic oligonucleotide
  Sense strand starting at position 3919 of SEQ ID NO: 914901
gcgguaguagcucuggagu

SEQ ID NO: 1039249 - RNA, 19 nt, Artificial Sequence
  Description of Artificial Sequence: Synthetic oligonucleotide
  Antisense strand to SEQ ID NO: 1039248
acuccagagcuacuaccgc

SEQ ID NO: 1039250 - RNA, 19 nt, Artificial Sequence
  Description of Artificial Sequence: Synthetic oligonucleotide
  Sense strand starting at position 3936 of SEQ ID NO: 914901
gucagacuaccuggauucu

SEQ ID NO: 1039251 - RNA, 19 nt, Artificial Sequence
  Description of Artificial Sequence: Synthetic oligonucleotide
  Antisense strand to SEQ ID NO: 1039250
agaauccagguagucugac

SEQ ID NO: 1039252 - RNA, 19 nt, Artificial Sequence
  Description of Artificial Sequence: Synthetic oligonucleotide
  Sense strand starting at position 18 of SEQ ID NO: 914902
ugacuaaauucugcugauc

SEQ ID NO: 1039253 - RNA, 19 nt, Artificial Sequence
  Description of Artificial Sequence: Synthetic oligonucleotide
  Antisense strand to SEQ ID NO: 1039252
gaucagcagaauuuaguca

SEQ ID NO: 1039254 - RNA, 19 nt, Artificial Sequence
  Description of Artificial Sequence: Synthetic oligonucleotide
  Sense strand starting at position 74 of SEQ ID NO: 914902
cuuauuguguuacuaugau

SEQ ID NO: 1039255 - RNA, 19 nt, Artificial Sequence
  Description of Artificial Sequence: Synthetic oligonucleotide
  Antisense strand to SEQ ID NO: 1039254
aucauaguaacacaauaag

SEQ ID NO: 1039256 - RNA, 19 nt, Artificial Sequence
  Description of Artificial Sequence: Synthetic oligonucleotide
  Sense strand starting at position 213 of SEQ ID NO: 914902
cugagaauuuguugaagga

SEQ ID NO: 1039257 - RNA, 19 nt, Artificial Sequence
  Description of Artificial Sequence: Synthetic oligonucleotide
  Antisense strand to SEQ ID NO: 1039256
uccuucaacaaauucucag

SEQ ID NO: 1039258 - RNA, 19 nt, Artificial Sequence
  Description of Artificial Sequence: Synthetic oligonucleotide
  Sense strand starting at position 307 of SEQ ID NO: 914902
uuuauauucucauuggaug

SEQ ID NO: 1039259 - RNA, 19 nt, Artificial Sequence
  Description of Artificial Sequence: Synthetic oligonucleotide
  Antisense strand to SEQ ID NO: 1039258
cauccaaugagaauauaaa

SEQ ID NO: 1039260 - RNA, 19 nt, Artificial Sequence
  Description of Artificial Sequence: Synthetic oligonucleotide
  Sense strand starting at position 346 of SEQ ID NO: 914902
ugagaauauguugagcuuu

SEQ ID NO: 1039261 - RNA, 19 nt, Artificial Sequence
  Description of Artificial Sequence: Synthetic oligonucleotide
  Antisense strand to SEQ ID NO: 1039260
aaagcucaacauauucuca

SEQ ID NO: 1039262 - RNA, 19 nt, Artificial Sequence
  Description of Artificial Sequence: Synthetic oligonucleotide
  Sense strand starting at position 413 of SEQ ID NO: 914902
gccgaaauugaagggugua

SEQ ID NO: 1039263 - RNA, 19 nt, Artificial Sequence
  Description of Artificial Sequence: Synthetic oligonucleotide
  Antisense strand to SEQ ID NO: 1039262
uacacccuucaauuucggc

SEQ ID NO: 1039264 - RNA, 19 nt, Artificial Sequence
  Description of Artificial Sequence: Synthetic oligonucleotide
  Sense strand starting at position 414 of SEQ ID NO: 914902
ccgaaauugaaggguguau

SEQ ID NO: 1039265 - RNA, 19 nt, Artificial Sequence
  Description of Artificial Sequence: Synthetic oligonucleotide
  Antisense strand to SEQ ID NO: 1039264
auacacccuucaauuucgg

SEQ ID NO: 1039266 - RNA, 19 nt, Artificial Sequence
  Description of Artificial Sequence: Synthetic oligonucleotide
  Sense strand starting at position 416 of SEQ ID NO: 914902
gaaauugaaggguguaugu

SEQ ID NO: 1039267 - RNA, 19 nt, Artificial Sequence
  Description of Artificial Sequence: Synthetic oligonucleotide
  Antisense strand to SEQ ID NO: 1039266
acauacacccuucaauuuc

SEQ ID NO: 1039268 - RNA, 19 nt, Artificial Sequence
  Description of Artificial Sequence: Synthetic oligonucleotide
  Sense strand starting at position 541 of SEQ ID NO: 914902
gcuccuuuggucuugugua

SEQ ID NO: 1039269 - RNA, 19 nt, Artificial Sequence
  Description of Artificial Sequence: Synthetic oligonucleotide
  Antisense strand to SEQ ID NO: 1039268
uacacaagaccaaaggagc

SEQ ID NO: 1039270 - RNA, 19 nt, Artificial Sequence
  Description of Artificial Sequence: Synthetic oligonucleotide
  Sense strand starting at position 546 of SEQ ID NO: 914902
uuuggucuuguguaacaaa

SEQ ID NO: 1039271 - RNA, 19 nt, Artificial Sequence
  Description of Artificial Sequence: Synthetic oligonucleotide
  Antisense strand to SEQ ID NO: 1039270
uuuguuacacaagaccaaa

SEQ ID NO: 1039272 - RNA, 19 nt, Artificial Sequence
  Description of Artificial Sequence: Synthetic oligonucleotide
  Sense strand starting at position 687 of SEQ ID NO: 914902
ccauguuaacgcugaagaa

SEQ ID NO: 1039273 - RNA, 19 nt, Artificial Sequence
  Description of Artificial Sequence: Synthetic oligonucleotide
  Antisense strand to SEQ ID NO: 1039272
uucuucagcguuaacaugg

SEQ ID NO: 1039274 - RNA, 19 nt, Artificial Sequence
  Description of Artificial Sequence: Synthetic oligonucleotide
  Sense strand starting at position 688 of SEQ ID NO: 914902
cauguuaacgcugaagaau

SEQ ID NO: 1039275 - RNA, 19 nt, Artificial Sequence
  Description of Artificial Sequence: Synthetic oligonucleotide
  Antisense strand to SEQ ID NO: 1039274
auucuucagcguuaacaug

SEQ ID NO: 1039276 - RNA, 19 nt, Artificial Sequence
  Description of Artificial Sequence: Synthetic oligonucleotide
  Sense strand starting at position 759 of SEQ ID NO: 914902
gcggccaaugcucauuaga

SEQ ID NO: 1039277 - RNA, 19 nt, Artificial Sequence
  Description of Artificial Sequence: Synthetic oligonucleotide
  Antisense strand to SEQ ID NO: 1039276
ucuaaugagcauuggccgc

SEQ ID NO: 1039278 - RNA, 19 nt, Artificial Sequence
  Description of Artificial Sequence: Synthetic oligonucleotide
  Sense strand starting at position 762 of SEQ ID NO: 914902
gccaaugcucauuagagcu

SEQ ID NO: 1039279 - RNA, 19 nt, Artificial Sequence
  Description of Artificial Sequence: Synthetic oligonucleotide
  Antisense strand to SEQ ID NO: 1039278
agcucuaaugagcauuggc

SEQ ID NO: 1039280 - RNA, 19 nt, Artificial Sequence
  Description of Artificial Sequence: Synthetic oligonucleotide
  Sense strand starting at position 918 of SEQ ID NO: 914902
ggguacaccuacucagauu

SEQ ID NO: 1039281 - RNA, 19 nt, Artificial Sequence
  Description of Artificial Sequence: Synthetic oligonucleotide
  Antisense strand to SEQ ID NO: 1039280
aaucugaguagguguaccc

SEQ ID NO: 1039282 - RNA, 19 nt, Artificial Sequence
  Description of Artificial Sequence: Synthetic oligonucleotide
  Sense strand starting at position 931 of SEQ ID NO: 914902
cagauuuacuccggauuuc

SEQ ID NO: 1039283 - RNA, 19 nt, Artificial Sequence
  Description of Artificial Sequence: Synthetic oligonucleotide
  Antisense strand to SEQ ID NO: 1039282
gaaauccggaguaaaucug

SEQ ID NO: 1039284 - RNA, 19 nt, Artificial Sequence
  Description of Artificial Sequence: Synthetic oligonucleotide
  Sense strand starting at position 940 of SEQ ID NO: 914902
uccggauuucgcugcucua

SEQ ID NO: 1039285 - RNA, 19 nt, Artificial Sequence
  Description of Artificial Sequence: Synthetic oligonucleotide
  Antisense strand to SEQ ID NO: 1039284
uagagcagcgaaauccgga

SEQ ID NO: 1039286 - RNA, 19 nt, Artificial Sequence
  Description of Artificial Sequence: Synthetic oligonucleotide
  Sense strand starting at position 943 of SEQ ID NO: 914902
ggauuucgcugcucuagaa

SEQ ID NO: 1039287 - RNA, 19 nt, Artificial Sequence
  Description of Artificial Sequence: Synthetic oligonucleotide
  Antisense strand to SEQ ID NO: 1039286
uucuagagcagcgaaaucc

SEQ ID NO: 1039288 - RNA, 19 nt, Artificial Sequence
  Description of Artificial Sequence: Synthetic oligonucleotide
  Sense strand starting at position 1219 of SEQ ID NO: 914902
gugccugcucccgugcaaa

SEQ ID NO: 1039289 - RNA, 19 nt, Artificial Sequence
  Description of Artificial Sequence: Synthetic oligonucleotide
  Antisense strand to SEQ ID NO: 1039288
uuugcacgggagcaggcac

SEQ ID NO: 1039290 - RNA, 19 nt, Artificial Sequence
  Description of Artificial Sequence: Synthetic oligonucleotide
  Sense strand starting at position 1353 of SEQ ID NO: 914902
cggaaucacccgggaggaa

SEQ ID NO: 1039291 - RNA, 19 nt, Artificial Sequence
  Description of Artificial Sequence: Synthetic oligonucleotide
  Antisense strand to SEQ ID NO: 1039290
uuccucccgggugauuccg

SEQ ID NO: 1039292 - RNA, 19 nt, Artificial Sequence
  Description of Artificial Sequence: Synthetic oligonucleotide
  Sense strand starting at position 1865 of SEQ ID NO: 914902
gcugcugcucaggacuuaa

SEQ ID NO: 1039293 - RNA, 19 nt, Artificial Sequence
  Description of Artificial Sequence: Synthetic oligonucleotide
  Antisense strand to SEQ ID NO: 1039292
uuaaguccugagcagcagc

SEQ ID NO: 1039294 - RNA, 19 nt, Artificial Sequence
  Description of Artificial Sequence: Synthetic oligonucleotide
  Sense strand starting at position 2493 of SEQ ID NO: 914902
agacaagaaugugaaauaa

SEQ ID NO: 1039295 - RNA, 19 nt, Artificial Sequence
  Description of Artificial Sequence: Synthetic oligonucleotide
  Antisense strand to SEQ ID NO: 1039294
uuauuucacauucuugucu

SEQ ID NO: 1039296 - RNA, 19 nt, Artificial Sequence
  Description of Artificial Sequence: Synthetic oligonucleotide
  Sense strand starting at position 3088 of SEQ ID NO: 914902
uugcccuuccguggagaaa

SEQ ID NO: 1039297 - RNA, 19 nt, Artificial Sequence
  Description of Artificial Sequence: Synthetic oligonucleotide
  Antisense strand to SEQ ID NO: 1039296
uuucuccacggaagggcaa

SEQ ID NO: 1039298 - RNA, 19 nt, Artificial Sequence
  Description of Artificial Sequence: Synthetic oligonucleotide
  Sense strand starting at position 3124 of SEQ ID NO: 914902
gccucagaguuccuugaaa

SEQ ID NO: 1039299 - RNA, 19 nt, Artificial Sequence
  Description of Artificial Sequence: Synthetic oligonucleotide
  Antisense strand to SEQ ID NO: 1039298
uuucaaggaacucugaggc

SEQ ID NO: 1039300 - RNA, 19 nt, Artificial Sequence
  Description of Artificial Sequence: Synthetic oligonucleotide
  Sense strand starting at position 3165 of SEQ ID NO: 914902
aggccuauuugugcgugau

SEQ ID NO: 1039301 - RNA, 19 nt, Artificial Sequence
  Description of Artificial Sequence: Synthetic oligonucleotide
  Antisense strand to SEQ ID NO: 1039300
aucacgcacaaauaggccu

SEQ ID NO: 1039302 - RNA, 19 nt, Artificial Sequence
  Description of Artificial Sequence: Synthetic oligonucleotide
  Sense strand starting at position 3166 of SEQ ID NO: 914902
ggccuauuugugcgugaug

SEQ ID NO: 1039303 - RNA, 19 nt, Artificial Sequence
  Description of Artificial Sequence: Synthetic oligonucleotide
  Antisense strand to SEQ ID NO: 1039302
caucacgcacaaauaggcc

SEQ ID NO: 1039304 - RNA, 19 nt, Artificial Sequence
  Description of Artificial Sequence: Synthetic oligonucleotide
  Sense strand starting at position 3169 of SEQ ID NO: 914902
cuauuugugcgugaugcca

SEQ ID NO: 1039305 - RNA, 19 nt, Artificial Sequence
  Description of Artificial Sequence: Synthetic oligonucleotide
  Antisense strand to SEQ ID NO: 1039304
uggcaucacgcacaaauag

SEQ ID NO: 1039306 - RNA, 19 nt, Artificial Sequence
  Description of Artificial Sequence: Synthetic oligonucleotide
  Sense strand starting at position 3178 of SEQ ID NO: 914902
cgugaugccagucauuaag

SEQ ID NO: 1039307 - RNA, 19 nt, Artificial Sequence
  Description of Artificial Sequence: Synthetic oligonucleotide
  Antisense strand to SEQ ID NO: 1039306
cuuaaugacuggcaucacg

SEQ ID NO: 1039308 - RNA, 19 nt, Artificial Sequence
  Description of Artificial Sequence: Synthetic oligonucleotide
  Sense strand starting at position 3188 of SEQ ID NO: 914902
gucauuaaggcuuguaaag

SEQ ID NO: 1039309 - RNA, 19 nt, Artificial Sequence
  Description of Artificial Sequence: Synthetic oligonucleotide
  Antisense strand to SEQ ID NO: 1039308
cuuuacaagccuuaaugac

SEQ ID NO: 1039310 - RNA, 19 nt, Artificial Sequence
  Description of Artificial Sequence: Synthetic oligonucleotide
  Sense strand starting at position 3234 of SEQ ID NO: 914902
uuuauaugaucagucugga

SEQ ID NO: 1039311 - RNA, 19 nt, Artificial Sequence
  Description of Artificial Sequence: Synthetic oligonucleotide
  Antisense strand to SEQ ID NO: 1039310
uccagacugaucauauaaa

SEQ ID NO: 1039312 - RNA, 19 nt, Artificial Sequence
  Description of Artificial Sequence: Synthetic oligonucleotide
  Sense strand starting at position 3237 of SEQ ID NO: 914902
auaugaucagucuggauca

SEQ ID NO: 1039313 - RNA, 19 nt, Artificial Sequence
  Description of Artificial Sequence: Synthetic oligonucleotide
  Antisense strand to SEQ ID NO: 1039312
ugauccagacugaucauau

SEQ ID NO: 1039314 - RNA, 19 nt, Artificial Sequence
  Description of Artificial Sequence: Synthetic oligonucleotide
  Sense strand starting at position 3247 of SEQ ID NO: 914902
ucuggaucauaggcauaca

SEQ ID NO: 1039315 - RNA, 19 nt, Artificial Sequence
  Description of Artificial Sequence: Synthetic oligonucleotide
  Antisense strand to SEQ ID NO: 1039314
uguaugccuaugauccaga

SEQ ID NO: 1039316 - RNA, 19 nt, Artificial Sequence
  Description of Artificial Sequence: Synthetic oligonucleotide
  Sense strand starting at position 3259 of SEQ ID NO: 914902
gcauacauuucuguuccca

SEQ ID NO: 1039317 - RNA, 19 nt, Artificial Sequence
  Description of Artificial Sequence: Synthetic oligonucleotide
  Antisense strand to SEQ ID NO: 1039316
ugggaacagaaauguaugc

SEQ ID NO: 1039318 - RNA, 19 nt, Artificial Sequence
  Description of Artificial Sequence: Synthetic oligonucleotide
  Sense strand starting at position 3305 of SEQ ID NO: 914902
gccugcaugcucuugucau

SEQ ID NO: 1039319 - RNA, 19 nt, Artificial Sequence
  Description of Artificial Sequence: Synthetic oligonucleotide
  Antisense strand to SEQ ID NO: 1039318
augacaagagcaugcaggc

SEQ ID NO: 1039320 - RNA, 19 nt, Artificial Sequence
  Description of Artificial Sequence: Synthetic oligonucleotide
  Sense strand starting at position 3351 of SEQ ID NO: 914902
ggucccuaauggguauaau

SEQ ID NO: 1039321 - RNA, 19 nt, Artificial Sequence
  Description of Artificial Sequence: Synthetic oligonucleotide
  Antisense strand to SEQ ID NO: 1039320
auuauacccauuagggacc

SEQ ID NO: 1039322 - RNA, 19 nt, Artificial Sequence
  Description of Artificial Sequence: Synthetic oligonucleotide
  Sense strand starting at position 3352 of SEQ ID NO: 914902
gucccuaauggguauaauc

SEQ ID NO: 1039323 - RNA, 19 nt, Artificial Sequence
  Description of Artificial Sequence: Synthetic oligonucleotide
  Antisense strand to SEQ ID NO: 1039322
gauuauacccauuagggac

SEQ ID NO: 1039324 - RNA, 19 nt, Artificial Sequence
  Description of Artificial Sequence: Synthetic oligonucleotide
  Sense strand starting at position 3834 of SEQ ID NO: 914902
agccuaaacuaugugauaa

SEQ ID NO: 1039325 - RNA, 19 nt, Artificial Sequence
  Description of Artificial Sequence: Synthetic oligonucleotide
  Antisense strand to SEQ ID NO: 1039324
uuaucacauaguuuaggcu

SEQ ID NO: 1039326 - RNA, 19 nt, Artificial Sequence
  Description of Artificial Sequence: Synthetic oligonucleotide
  Sense strand starting at position 3905 of SEQ ID NO: 914902
auagguugugaugaacagu

SEQ ID NO: 1039327 - RNA, 19 nt, Artificial Sequence
  Description of Artificial Sequence: Synthetic oligonucleotide
  Antisense strand to SEQ ID NO: 1039326
acuguucaucacaaccuau

SEQ ID NO: 1039328 - RNA, 19 nt, Artificial Sequence
  Description of Artificial Sequence: Synthetic oligonucleotide
  Sense strand starting at position 3908 of SEQ ID NO: 914902
gguugugaugaacaguuua

SEQ ID NO: 1039329 - RNA, 19 nt, Artificial Sequence
  Description of Artificial Sequence: Synthetic oligonucleotide
  Antisense strand to SEQ ID NO: 1039328
uaaacuguucaucacaacc

SEQ ID NO: 1039330 - RNA, 19 nt, Artificial Sequence
  Description of Artificial Sequence: Synthetic oligonucleotide
  Sense strand starting at position 3940 of SEQ ID NO: 914902
agucaauguggugguuaaa

SEQ ID NO: 1039331 - RNA, 19 nt, Artificial Sequence
  Description of Artificial Sequence: Synthetic oligonucleotide
  Antisense strand to SEQ ID NO: 1039330
uuuaaccaccacauugacu

SEQ ID NO: 1039332 - RNA, 19 nt, Artificial Sequence
  Description of Artificial Sequence: Synthetic oligonucleotide
  Sense strand starting at position 5 of SEQ ID NO: 914903
gcaauuuacgcuugucaca

SEQ ID NO: 1039333 - RNA, 19 nt, Artificial Sequence
  Description of Artificial Sequence: Synthetic oligonucleotide
  Antisense strand to SEQ ID NO: 1039332
ugugacaagcguaaauugc

SEQ ID NO: 1039334 - RNA, 19 nt, Artificial Sequence
  Description of Artificial Sequence: Synthetic oligonucleotide
  Sense strand starting at position 383 of SEQ ID NO: 914903
agaggugaguaauuauaau

SEQ ID NO: 1039335 - RNA, 19 nt, Artificial Sequence
  Description of Artificial Sequence: Synthetic oligonucleotide
  Antisense strand to SEQ ID NO: 1039334
auuauaauuacucaccucu

SEQ ID NO: 1039336 - RNA, 19 nt, Artificial Sequence
  Description of Artificial Sequence: Synthetic oligonucleotide
  Sense strand starting at position 916 of SEQ ID NO: 914903
guuauaaccuccuugggag

SEQ ID NO: 1039337 - RNA, 19 nt, Artificial Sequence
  Description of Artificial Sequence: Synthetic oligonucleotide
  Antisense strand to SEQ ID NO: 1039336
cucccaaggagguuauaac

SEQ ID NO: 1039338 - RNA, 19 nt, Artificial Sequence
  Description of Artificial Sequence: Synthetic oligonucleotide
  Sense strand starting at position 979 of SEQ ID NO: 914903
ucagaacuggaauguguuu

SEQ ID NO: 1039339 - RNA, 19 nt, Artificial Sequence
  Description of Artificial Sequence: Synthetic oligonucleotide
  Antisense strand to SEQ ID NO: 1039338
aaacacauuccaguucuga

SEQ ID NO: 1039340 - RNA, 19 nt, Artificial Sequence
  Description of Artificial Sequence: Synthetic oligonucleotide
  Sense strand starting at position 1042 of SEQ ID NO: 914903
uaagguuguuaggcaaaca

SEQ ID NO: 1039341 - RNA, 19 nt, Artificial Sequence
  Description of Artificial Sequence: Synthetic oligonucleotide
  Antisense strand to SEQ ID NO: 1039340
uguuugccuaacaaccuua

SEQ ID NO: 1039342 - RNA, 19 nt, Artificial Sequence
  Description of Artificial Sequence: Synthetic oligonucleotide
  Sense strand starting at position 1162 of SEQ ID NO: 914903
cagaauaauugaguggucu

SEQ ID NO: 1039343 - RNA, 19 nt, Artificial Sequence
  Description of Artificial Sequence: Synthetic oligonucleotide
  Antisense strand to SEQ ID NO: 1039342
agaccacucaauuauucug

SEQ ID NO: 1039344 - RNA, 19 nt, Artificial Sequence
  Description of Artificial Sequence: Synthetic oligonucleotide
  Sense strand starting at position 1163 of SEQ ID NO: 914903
agaauaauugaguggucuc

SEQ ID NO: 1039345 - RNA, 19 nt, Artificial Sequence
  Description of Artificial Sequence: Synthetic oligonucleotide
  Antisense strand to SEQ ID NO: 1039344
gagaccacucaauuauucu

SEQ ID NO: 1039346 - RNA, 19 nt, Artificial Sequence
  Description of Artificial Sequence: Synthetic oligonucleotide
  Sense strand starting at position 1190 of SEQ ID NO: 914903
gccaguguacaggaacaaa

SEQ ID NO: 1039347 - RNA, 19 nt, Artificial Sequence
  Description of Artificial Sequence: Synthetic oligonucleotide
  Antisense strand to SEQ ID NO: 1039346
uuuguuccuguacacuggc

SEQ ID NO: 1039348 - RNA, 19 nt, Artificial Sequence
  Description of Artificial Sequence: Synthetic oligonucleotide
  Sense strand starting at position 1222 of SEQ ID NO: 914903
uuagcaguucccgaagaca

SEQ ID NO: 1039349 - RNA, 19 nt, Artificial Sequence
  Description of Artificial Sequence: Synthetic oligonucleotide
  Antisense strand to SEQ ID NO: 1039348
ugucuucgggaacugcuaa

SEQ ID NO: 1039350 - RNA, 19 nt, Artificial Sequence
  Description of Artificial Sequence: Synthetic oligonucleotide
  Sense strand starting at position 1225 of SEQ ID NO: 914903
gcaguucccgaagacauua

SEQ ID NO: 1039351 - RNA, 19 nt, Artificial Sequence
  Description of Artificial Sequence: Synthetic oligonucleotide
  Antisense strand to SEQ ID NO: 1039350
uaaugucuucgggaacugc

SEQ ID NO: 1039352 - RNA, 19 nt, Artificial Sequence
  Description of Artificial Sequence: Synthetic oligonucleotide
  Sense strand starting at position 1563 of SEQ ID NO: 914903
ggauaccuucugggcuaau

SEQ ID NO: 1039353 - RNA, 19 nt, Artificial Sequence
  Description of Artificial Sequence: Synthetic oligonucleotide
  Antisense strand to SEQ ID NO: 1039352
auuagcccagaagguaucc

SEQ ID NO: 1039354 - RNA, 19 nt, Artificial Sequence
  Description of Artificial Sequence: Synthetic oligonucleotide
  Sense strand starting at position 1576 of SEQ ID NO: 914903
gcuaauugccugcuuugca

SEQ ID NO: 1039355 - RNA, 19 nt, Artificial Sequence
  Description of Artificial Sequence: Synthetic oligonucleotide
  Antisense strand to SEQ ID NO: 1039354
ugcaaagcaggcaauuagc

SEQ ID NO: 1039356 - RNA, 19 nt, Artificial Sequence
  Description of Artificial Sequence: Synthetic oligonucleotide
  Sense strand starting at position 1673 of SEQ ID NO: 914903
ggcccuugugaauagcaaa

SEQ ID NO: 1039357 - RNA, 19 nt, Artificial Sequence
  Description of Artificial Sequence: Synthetic oligonucleotide
  Antisense strand to SEQ ID NO: 1039356
uuugcuauucacaagggcc

SEQ ID NO: 1039358 - RNA, 19 nt, Artificial Sequence
  Description of Artificial Sequence: Synthetic oligonucleotide
  Sense strand starting at position 1881 of SEQ ID NO: 914903
guggaauccuaggccauca

SEQ ID NO: 1039359 - RNA, 19 nt, Artificial Sequence
  Description of Artificial Sequence: Synthetic oligonucleotide
  Antisense strand to SEQ ID NO: 1039358
ugauggccuaggauuccac

SEQ ID NO: 1039360 - RNA, 19 nt, Artificial Sequence
  Description of Artificial Sequence: Synthetic oligonucleotide
  Sense strand starting at position 1973 of SEQ ID NO: 914903
acuugugauccucaguuug

SEQ ID NO: 1039361 - RNA, 19 nt, Artificial Sequence
  Description of Artificial Sequence: Synthetic oligonucleotide
  Antisense strand to SEQ ID NO: 1039360
caaacugaggaucacaagu

SEQ ID NO: 1039362 - RNA, 19 nt, Artificial Sequence
  Description of Artificial Sequence: Synthetic oligonucleotide
  Sense strand starting at position 2126 of SEQ ID NO: 914903
ugcuuaaugcaugacuaua

SEQ ID NO: 1039363 - RNA, 19 nt, Artificial Sequence
  Description of Artificial Sequence: Synthetic oligonucleotide
  Antisense strand to SEQ ID NO: 1039362
uauagucaugcauuaagca

SEQ ID NO: 1039364 - RNA, 19 nt, Artificial Sequence
  Description of Artificial Sequence: Synthetic oligonucleotide
  Sense strand starting at position 2137 of SEQ ID NO: 914903
ugacuauauuaucccaguu

SEQ ID NO: 1039365 - RNA, 19 nt, Artificial Sequence
  Description of Artificial Sequence: Synthetic oligonucleotide
  Antisense strand to SEQ ID NO: 1039364
aacugggauaauauaguca

SEQ ID NO: 1039366 - RNA, 19 nt, Artificial Sequence
  Description of Artificial Sequence: Synthetic oligonucleotide
  Sense strand starting at position 2298 of SEQ ID NO: 914903
ggacaaugguacccacuuu

SEQ ID NO: 1039367 - RNA, 19 nt, Artificial Sequence
  Description of Artificial Sequence: Synthetic oligonucleotide
  Antisense strand to SEQ ID NO: 1039366
aaaguggguaccauugucc

SEQ ID NO: 1039368 - RNA, 19 nt, Artificial Sequence
  Description of Artificial Sequence: Synthetic oligonucleotide
  Sense strand starting at position 2354 of SEQ ID NO: 914903
gaaagagcuuuccuaaguu

SEQ ID NO: 1039369 - RNA, 19 nt, Artificial Sequence
  Description of Artificial Sequence: Synthetic oligonucleotide
  Antisense strand to SEQ ID NO: 1039368
aacuuaggaaagcucuuuc

SEQ ID NO: 1039370 - RNA, 19 nt, Artificial Sequence
  Description of Artificial Sequence: Synthetic oligonucleotide
  Sense strand starting at position 2427 of SEQ ID NO: 914903
cggaucugaucaucucuua

SEQ ID NO: 1039371 - RNA, 19 nt, Artificial Sequence
  Description of Artificial Sequence: Synthetic oligonucleotide
  Antisense strand to SEQ ID NO: 1039370
uaagagaugaucagauccg

SEQ ID NO: 1039372 - RNA, 19 nt, Artificial Sequence
  Description of Artificial Sequence: Synthetic oligonucleotide
  Sense strand starting at position 2502 of SEQ ID NO: 914903
caguuauaagugcacagaa

SEQ ID NO: 1039373 - RNA, 19 nt, Artificial Sequence
  Description of Artificial Sequence: Synthetic oligonucleotide
  Antisense strand to SEQ ID NO: 1039372
uucugugcacuuauaacug

SEQ ID NO: 1039374 - RNA, 19 nt, Artificial Sequence
  Description of Artificial Sequence: Synthetic oligonucleotide
  Sense strand starting at position 2504 of SEQ ID NO: 914903
guuauaagugcacagaagu

SEQ ID NO: 1039375 - RNA, 19 nt, Artificial Sequence
  Description of Artificial Sequence: Synthetic oligonucleotide
  Antisense strand to SEQ ID NO: 1039374
acuucugugcacuuauaac

SEQ ID NO: 1039376 - RNA, 19 nt, Artificial Sequence
  Description of Artificial Sequence: Synthetic oligonucleotide
  Sense strand starting at position 2514 of SEQ ID NO: 914903
cacagaaguugggucuuua

SEQ ID NO: 1039377 - RNA, 19 nt, Artificial Sequence
  Description of Artificial Sequence: Synthetic oligonucleotide
  Antisense strand to SEQ ID NO: 1039376
uaaagacccaacuucugug

SEQ ID NO: 1039378 - RNA, 19 nt, Artificial Sequence
  Description of Artificial Sequence: Synthetic oligonucleotide
  Sense strand starting at position 2518 of SEQ ID NO: 914903
gaaguugggucuuuaugag

SEQ ID NO: 1039379 - RNA, 19 nt, Artificial Sequence
  Description of Artificial Sequence: Synthetic oligonucleotide
  Antisense strand to SEQ ID NO: 1039378
cucauaaagacccaacuuc

SEQ ID NO: 1039380 - RNA, 19 nt, Artificial Sequence
  Description of Artificial Sequence: Synthetic oligonucleotide
  Sense strand starting at position 2524 of SEQ ID NO: 914903
gggucuuuaugagcugaau

SEQ ID NO: 1039381 - RNA, 19 nt, Artificial Sequence
  Description of Artificial Sequence: Synthetic oligonucleotide
  Antisense strand to SEQ ID NO: 1039380
auucagcucauaaagaccc

SEQ ID NO: 1039382 - RNA, 19 nt, Artificial Sequence
  Description of Artificial Sequence: Synthetic oligonucleotide
  Sense strand starting at position 2905 of SEQ ID NO: 914903
caauuaggagccugucaac

SEQ ID NO: 1039383 - RNA, 19 nt, Artificial Sequence
  Description of Artificial Sequence: Synthetic oligonucleotide
  Antisense strand to SEQ ID NO: 1039382
guugacaggcuccuaauug

SEQ ID NO: 1039384 - RNA, 19 nt, Artificial Sequence
  Description of Artificial Sequence: Synthetic oligonucleotide
  Sense strand starting at position 3037 of SEQ ID NO: 914903
aguugaaaucuaggugaau

SEQ ID NO: 1039385 - RNA, 19 nt, Artificial Sequence
  Description of Artificial Sequence: Synthetic oligonucleotide
  Antisense strand to SEQ ID NO: 1039384
auucaccuagauuucaacu

SEQ ID NO: 1039386 - RNA, 19 nt, Artificial Sequence
  Description of Artificial Sequence: Synthetic oligonucleotide
  Sense strand starting at position 3038 of SEQ ID NO: 914903
guugaaaucuaggugaauc

SEQ ID NO: 1039387 - RNA, 19 nt, Artificial Sequence
  Description of Artificial Sequence: Synthetic oligonucleotide
  Antisense strand to SEQ ID NO: 1039386
gauucaccuagauuucaac

SEQ ID NO: 1039388 - RNA, 19 nt, Artificial Sequence
  Description of Artificial Sequence: Synthetic oligonucleotide
  Sense strand starting at position 3263 of SEQ ID NO: 914903
aucagaaaguuagcucaua

SEQ ID NO: 1039389 - RNA, 19 nt, Artificial Sequence
  Description of Artificial Sequence: Synthetic oligonucleotide
  Antisense strand to SEQ ID NO: 1039388
uaugagcuaacuuucugau

SEQ ID NO: 1039390 - RNA, 19 nt, Artificial Sequence
  Description of Artificial Sequence: Synthetic oligonucleotide
  Sense strand starting at position 3264 of SEQ ID NO: 914903
ucagaaaguuagcucauaa

SEQ ID NO: 1039391 - RNA, 19 nt, Artificial Sequence
  Description of Artificial Sequence: Synthetic oligonucleotide
  Antisense strand to SEQ ID NO: 1039390
uuaugagcuaacuuucuga

SEQ ID NO: 1039392 - RNA, 19 nt, Artificial Sequence
  Description of Artificial Sequence: Synthetic oligonucleotide
  Sense strand starting at position 3392 of SEQ ID NO: 914903
ucucuaaaucccuggguca

SEQ ID NO: 1039393 - RNA, 19 nt, Artificial Sequence
  Description of Artificial Sequence: Synthetic oligonucleotide
  Antisense strand to SEQ ID NO: 1039392
ugacccagggauuuagaga

SEQ ID NO: 1039394 - RNA, 19 nt, Artificial Sequence
  Description of Artificial Sequence: Synthetic oligonucleotide
  Sense strand starting at position 3393 of SEQ ID NO: 914903
cucuaaaucccugggucau

SEQ ID NO: 1039395 - RNA, 19 nt, Artificial Sequence
  Description of Artificial Sequence: Synthetic oligonucleotide
  Antisense strand to SEQ ID NO: 1039394
augacccagggauuuagag

SEQ ID NO: 1039396 - RNA, 19 nt, Artificial Sequence
  Description of Artificial Sequence: Synthetic oligonucleotide
  Sense strand starting at position 3394 of SEQ ID NO: 914903
ucuaaaucccugggucaug

SEQ ID NO: 1039397 - RNA, 19 nt, Artificial Sequence
  Description of Artificial Sequence: Synthetic oligonucleotide
  Antisense strand to SEQ ID NO: 1039396
caugacccagggauuuaga

SEQ ID NO: 1039398 - RNA, 19 nt, Artificial Sequence
  Description of Artificial Sequence: Synthetic oligonucleotide
  Sense strand starting at position 3411 of SEQ ID NO: 914903
ugguaagacucucugaaau

SEQ ID NO: 1039399 - RNA, 19 nt, Artificial Sequence
  Description of Artificial Sequence: Synthetic oligonucleotide
  Antisense strand to SEQ ID NO: 1039398
auuucagagagucuuacca

SEQ ID NO: 1039400 - RNA, 19 nt, Artificial Sequence
  Description of Artificial Sequence: Synthetic oligonucleotide
  Sense strand starting at position 3745 of SEQ ID NO: 914903
ugguaagccgaugaaagau

SEQ ID NO: 1039401 - RNA, 19 nt, Artificial Sequence
  Description of Artificial Sequence: Synthetic oligonucleotide
  Antisense strand to SEQ ID NO: 1039400
aucuuucaucggcuuacca

SEQ ID NO: 1039402 - RNA, 19 nt, Artificial Sequence
  Description of Artificial Sequence: Synthetic oligonucleotide
  Sense strand starting at position 3822 of SEQ ID NO: 914903
cgaagaugccaugaugacu

SEQ ID NO: 1039403 - RNA, 19 nt, Artificial Sequence
  Description of Artificial Sequence: Synthetic oligonucleotide
  Antisense strand to SEQ ID NO: 1039402
agucaucauggcaucuucg

SEQ ID NO: 1039404 - RNA, 19 nt, Artificial Sequence
  Description of Artificial Sequence: Synthetic oligonucleotide
  Sense strand starting at position 3828 of SEQ ID NO: 914903
ugccaugaugacugacuua

SEQ ID NO: 1039405 - RNA, 19 nt, Artificial Sequence
  Description of Artificial Sequence: Synthetic oligonucleotide
  Antisense strand to SEQ ID NO: 1039404
uaagucagucaucauggca

SEQ ID NO: 1039406 - RNA, 19 nt, Artificial Sequence
  Description of Artificial Sequence: Synthetic oligonucleotide
  Sense strand starting at position 3885 of SEQ ID NO: 914903
ccagccugaaauugugaga

SEQ ID NO: 1039407 - RNA, 19 nt, Artificial Sequence
  Description of Artificial Sequence: Synthetic oligonucleotide
  Antisense strand to SEQ ID NO: 1039406
ucucacaauuucaggcugg

SEQ ID NO: 1039408 - RNA, 19 nt, Artificial Sequence
  Description of Artificial Sequence: Synthetic oligonucleotide
  Sense strand starting at position 3916 of SEQ ID NO: 914903
cggagauuucgcuggcuaa

SEQ ID NO: 1039409 - RNA, 19 nt, Artificial Sequence
  Description of Artificial Sequence: Synthetic oligonucleotide
  Antisense strand to SEQ ID NO: 1039408
uuagccagcgaaaucuccg

SEQ ID NO: 1039410 - RNA, 19 nt, Artificial Sequence
  Description of Artificial Sequence: Synthetic oligonucleotide
  Sense strand starting at position 3917 of SEQ ID NO: 914903
ggagauuucgcuggcuaag

SEQ ID NO: 1039411 - RNA, 19 nt, Artificial Sequence
  Description of Artificial Sequence: Synthetic oligonucleotide
  Antisense strand to SEQ ID NO: 1039410
cuuagccagcgaaaucucc

SEQ ID NO: 1039412 - RNA, 19 nt, Artificial Sequence
  Description of Artificial Sequence: Synthetic oligonucleotide
  Sense strand starting at position 114 of SEQ ID NO: 914904
cacaauggaucauuagagu

SEQ ID NO: 1039413 - RNA, 19 nt, Artificial Sequence
  Description of Artificial Sequence: Synthetic oligonucleotide
  Antisense strand to SEQ ID NO: 1039412
acucuaaugauccauugug

SEQ ID NO: 1039414 - RNA, 19 nt, Artificial Sequence
  Description of Artificial Sequence: Synthetic oligonucleotide
  Sense strand starting at position 122 of SEQ ID NO: 914904
aucauuagagucuguuaua

SEQ ID NO: 1039415 - RNA, 19 nt, Artificial Sequence
  Description of Artificial Sequence: Synthetic oligonucleotide
  Antisense strand to SEQ ID NO: 1039414
uauaacagacucuaaugau

SEQ ID NO: 1039416 - RNA, 19 nt, Artificial Sequence
  Description of Artificial Sequence: Synthetic oligonucleotide
  Sense strand starting at position 123 of SEQ ID NO: 914904
ucauuagagucuguuauaa

SEQ ID NO: 1039417 - RNA, 19 nt, Artificial Sequence
  Description of Artificial Sequence: Synthetic oligonucleotide
  Antisense strand to SEQ ID NO: 1039416
uuauaacagacucuaauga

SEQ ID NO: 1039418 - RNA, 19 nt, Artificial Sequence
  Description of Artificial Sequence: Synthetic oligonucleotide
  Sense strand starting at position 125 of SEQ ID NO: 914904
auuagagucuguuauaaac

SEQ ID NO: 1039419 - RNA, 19 nt, Artificial Sequence
  Description of Artificial Sequence: Synthetic oligonucleotide
  Antisense strand to SEQ ID NO: 1039418
guuuauaacagacucuaau

SEQ ID NO: 1039420 - RNA, 19 nt, Artificial Sequence
  Description of Artificial Sequence: Synthetic oligonucleotide
  Sense strand starting at position 481 of SEQ ID NO: 914904
aucaguggauucuuaaagu

SEQ ID NO: 1039421 - RNA, 19 nt, Artificial Sequence
  Description of Artificial Sequence: Synthetic oligonucleotide
  Antisense strand to SEQ ID NO: 1039420
acuuuaagaauccacugau

SEQ ID NO: 1039422 - RNA, 19 nt, Artificial Sequence
  Description of Artificial Sequence: Synthetic oligonucleotide
  Sense strand starting at position 489 of SEQ ID NO: 914904
auucuuaaagugggauaua

SEQ ID NO: 1039423 - RNA, 19 nt, Artificial Sequence
  Description of Artificial Sequence: Synthetic oligonucleotide
  Antisense strand to SEQ ID NO: 1039422
uauaucccacuuuaagaau

SEQ ID NO: 1039424 - RNA, 19 nt, Artificial Sequence
  Description of Artificial Sequence: Synthetic oligonucleotide
  Sense strand starting at position 704 of SEQ ID NO: 914904
agagauuucuucuugcgcu

SEQ ID NO: 1039425 - RNA, 19 nt, Artificial Sequence
  Description of Artificial Sequence: Synthetic oligonucleotide
  Antisense strand to SEQ ID NO: 1039424
agcgcaagaagaaaucucu

SEQ ID NO: 1039426 - RNA, 19 nt, Artificial Sequence
  Description of Artificial Sequence: Synthetic oligonucleotide
  Sense strand starting at position 708 of SEQ ID NO: 914904
auuucuucuugcgcugaua

SEQ ID NO: 1039427 - RNA, 19 nt, Artificial Sequence
  Description of Artificial Sequence: Synthetic oligonucleotide
  Antisense strand to SEQ ID NO: 1039426
uaucagcgcaagaagaaau

SEQ ID NO: 1039428 - RNA, 19 nt, Artificial Sequence
  Description of Artificial Sequence: Synthetic oligonucleotide
  Sense strand starting at position 710 of SEQ ID NO: 914904
uucuucuugcgcugauaaa

SEQ ID NO: 1039429 - RNA, 19 nt, Artificial Sequence
  Description of Artificial Sequence: Synthetic oligonucleotide
  Antisense strand to SEQ ID NO: 1039428
uuuaucagcgcaagaagaa

SEQ ID NO: 1039430 - RNA, 19 nt, Artificial Sequence
  Description of Artificial Sequence: Synthetic oligonucleotide
  Sense strand starting at position 711 of SEQ ID NO: 914904
ucuucuugcgcugauaaac

SEQ ID NO: 1039431 - RNA, 19 nt, Artificial Sequence
  Description of Artificial Sequence: Synthetic oligonucleotide
  Antisense strand to SEQ ID NO: 1039430
guuuaucagcgcaagaaga

SEQ ID NO: 1039432 - RNA, 19 nt, Artificial Sequence
  Description of Artificial Sequence: Synthetic oligonucleotide
  Sense strand starting at position 801 of SEQ ID NO: 914904
acuuuaaggcaaugaauau

SEQ ID NO: 1039433 - RNA, 19 nt, Artificial Sequence
  Description of Artificial Sequence: Synthetic oligonucleotide
  Antisense strand to SEQ ID NO: 1039432
auauucauugccuuaaagu

SEQ ID NO: 1039434 - RNA, 19 nt, Artificial Sequence
  Description of Artificial Sequence: Synthetic oligonucleotide
  Sense strand starting at position 808 of SEQ ID NO: 914904
ggcaaugaauauuauggua

SEQ ID NO: 1039435 - RNA, 19 nt, Artificial Sequence
  Description of Artificial Sequence: Synthetic oligonucleotide
  Antisense strand to SEQ ID NO: 1039434
uaccauaauauucauugcc

SEQ ID NO: 1039436 - RNA, 19 nt, Artificial Sequence
  Description of Artificial Sequence: Synthetic oligonucleotide
  Sense strand starting at position 1075 of SEQ ID NO: 914904
uugggaaagucauauugau

SEQ ID NO: 1039437 - RNA, 19 nt, Artificial Sequence
  Description of Artificial Sequence: Synthetic oligonucleotide
  Antisense strand to SEQ ID NO: 1039436
aucaauaugacuuucccaa

SEQ ID NO: 1039438 - RNA, 19 nt, Artificial Sequence
  Description of Artificial Sequence: Synthetic oligonucleotide
  Sense strand starting at position 1284 of SEQ ID NO: 914904
aaggauuaugguggagcau

SEQ ID NO: 1039439 - RNA, 19 nt, Artificial Sequence
  Description of Artificial Sequence: Synthetic oligonucleotide
  Antisense strand to SEQ ID NO: 1039438
augcuccaccauaauccuu

SEQ ID NO: 1039440 - RNA, 19 nt, Artificial Sequence
  Description of Artificial Sequence: Synthetic oligonucleotide
  Sense strand starting at position 2021 of SEQ ID NO: 914904
guuagagagaaucaguagu

SEQ ID NO: 1039441 - RNA, 19 nt, Artificial Sequence
  Description of Artificial Sequence: Synthetic oligonucleotide
  Antisense strand to SEQ ID NO: 1039440
acuacugauucucucuaac

SEQ ID NO: 1039442 - RNA, 19 nt, Artificial Sequence
  Description of Artificial Sequence: Synthetic oligonucleotide
  Sense strand starting at position 2027 of SEQ ID NO: 914904
gagaaucaguaguugagau

SEQ ID NO: 1039443 - RNA, 19 nt, Artificial Sequence
  Description of Artificial Sequence: Synthetic oligonucleotide
  Antisense strand to SEQ ID NO: 1039442
aucucaacuacugauucuc

SEQ ID NO: 1039444 - RNA, 19 nt, Artificial Sequence
  Description of Artificial Sequence: Synthetic oligonucleotide
  Sense strand starting at position 2031 of SEQ ID NO: 914904
aucaguaguugagaugaag

SEQ ID NO: 1039445 - RNA, 19 nt, Artificial Sequence
  Description of Artificial Sequence: Synthetic oligonucleotide
  Antisense strand to SEQ ID NO: 1039444
cuucaucucaacuacugau

SEQ ID NO: 1039446 - RNA, 19 nt, Artificial Sequence
  Description of Artificial Sequence: Synthetic oligonucleotide
  Sense strand starting at position 2083 of SEQ ID NO: 914904
gugaguugcugagugauua

SEQ ID NO: 1039447 - RNA, 19 nt, Artificial Sequence
  Description of Artificial Sequence: Synthetic oligonucleotide
  Antisense strand to SEQ ID NO: 1039446
uaaucacucagcaacucac

SEQ ID NO: 1039448 - RNA, 19 nt, Artificial Sequence
  Description of Artificial Sequence: Synthetic oligonucleotide
  Sense strand starting at position 2084 of SEQ ID NO: 914904
ugaguugcugagugauuau

SEQ ID NO: 1039449 - RNA, 19 nt, Artificial Sequence
  Description of Artificial Sequence: Synthetic oligonucleotide
  Antisense strand to SEQ ID NO: 1039448
auaaucacucagcaacuca

SEQ ID NO: 1039450 - RNA, 19 nt, Artificial Sequence
  Description of Artificial Sequence: Synthetic oligonucleotide
  Sense strand starting at position 2087 of SEQ ID NO: 914904
guugcugagugauuauuga

SEQ ID NO: 1039451 - RNA, 19 nt, Artificial Sequence
  Description of Artificial Sequence: Synthetic oligonucleotide
  Antisense strand to SEQ ID NO: 1039450
ucaauaaucacucagcaac

SEQ ID NO: 1039452 - RNA, 19 nt, Artificial Sequence
  Description of Artificial Sequence: Synthetic oligonucleotide
  Sense strand starting at position 2117 of SEQ ID NO: 914904
gcaauaacauuucuguguu

SEQ ID NO: 1039453 - RNA, 19 nt, Artificial Sequence
  Description of Artificial Sequence: Synthetic oligonucleotide
  Antisense strand to SEQ ID NO: 1039452
aacacagaaauguuauugc

SEQ ID NO: 1039454 - RNA, 19 nt, Artificial Sequence
  Description of Artificial Sequence: Synthetic oligonucleotide
  Sense strand starting at position 2155 of SEQ ID NO: 914904
ggagacagcaugcaaucau

SEQ ID NO: 1039455 - RNA, 19 nt, Artificial Sequence
  Description of Artificial Sequence: Synthetic oligonucleotide
  Antisense strand to SEQ ID NO: 1039454
augauugcaugcugucucc

SEQ ID NO: 1039456 - RNA, 19 nt, Artificial Sequence
  Description of Artificial Sequence: Synthetic oligonucleotide
  Sense strand starting at position 2162 of SEQ ID NO: 914904
gcaugcaaucaucaugacu

SEQ ID NO: 1039457 - RNA, 19 nt, Artificial Sequence
  Description of Artificial Sequence: Synthetic oligonucleotide
  Antisense strand to SEQ ID NO: 1039456
agucaugaugauugcaugc

SEQ ID NO: 1039458 - RNA, 19 nt, Artificial Sequence
  Description of Artificial Sequence: Synthetic oligonucleotide
  Sense strand starting at position 2366 of SEQ ID NO: 914904
ugggaagaaccacguaaua

SEQ ID NO: 1039459 - RNA, 19 nt, Artificial Sequence
  Description of Artificial Sequence: Synthetic oligonucleotide
  Antisense strand to SEQ ID NO: 1039458
uauuacgugguucuuccca

SEQ ID NO: 1039460 - RNA, 19 nt, Artificial Sequence
  Description of Artificial Sequence: Synthetic oligonucleotide
  Sense strand starting at position 2449 of SEQ ID NO: 914904
uaaacagacuagugagaua

SEQ ID NO: 1039461 - RNA, 19 nt, Artificial Sequence
  Description of Artificial Sequence: Synthetic oligonucleotide
  Antisense strand to SEQ ID NO: 1039460
uaucucacuagucuguuua

SEQ ID NO: 1039462 - RNA, 19 nt, Artificial Sequence
  Description of Artificial Sequence: Synthetic oligonucleotide
  Sense strand starting at position 2496 of SEQ ID NO: 914904
uguccaaucgaucgaauga

SEQ ID NO: 1039463 - RNA, 19 nt, Artificial Sequence
  Description of Artificial Sequence: Synthetic oligonucleotide
  Antisense strand to SEQ ID NO: 1039462
ucauucgaucgauuggaca

SEQ ID NO: 1039464 - RNA, 19 nt, Artificial Sequence
  Description of Artificial Sequence: Synthetic oligonucleotide
  Sense strand starting at position 2561 of SEQ ID NO: 914904
ucacaucaguuauauguaa

SEQ ID NO: 1039465 - RNA, 19 nt, Artificial Sequence
  Description of Artificial Sequence: Synthetic oligonucleotide
  Antisense strand to SEQ ID NO: 1039464
uuacauauaacugauguga

SEQ ID NO: 1039466 - RNA, 19 nt, Artificial Sequence
  Description of Artificial Sequence: Synthetic oligonucleotide
  Sense strand starting at position 2573 of SEQ ID NO: 914904
uauguaauaugagaggaau

SEQ ID NO: 1039467 - RNA, 19 nt, Artificial Sequence
  Description of Artificial Sequence: Synthetic oligonucleotide
  Antisense strand to SEQ ID NO: 1039466
auuccucucauauuacaua

SEQ ID NO: 1039468 - RNA, 19 nt, Artificial Sequence
  Description of Artificial Sequence: Synthetic oligonucleotide
  Sense strand starting at position 2675 of SEQ ID NO: 914904
cgagcauauuucugacaga

SEQ ID NO: 1039469 - RNA, 19 nt, Artificial Sequence
  Description of Artificial Sequence: Synthetic oligonucleotide
  Antisense strand to SEQ ID NO: 1039468
ucugucagaaauaugcucg

SEQ ID NO: 1039470 - RNA, 19 nt, Artificial Sequence
  Description of Artificial Sequence: Synthetic oligonucleotide
  Sense strand starting at position 2676 of SEQ ID NO: 914904
gagcauauuucugacagag

SEQ ID NO: 1039471 - RNA, 19 nt, Artificial Sequence
  Description of Artificial Sequence: Synthetic oligonucleotide
  Antisense strand to SEQ ID NO: 1039470
cucugucagaaauaugcuc

SEQ ID NO: 1039472 - RNA, 19 nt, Artificial Sequence
  Description of Artificial Sequence: Synthetic oligonucleotide
  Sense strand starting at position 2819 of SEQ ID NO: 914904
gacagagucucacacaguu

SEQ ID NO: 1039473 - RNA, 19 nt, Artificial Sequence
  Description of Artificial Sequence: Synthetic oligonucleotide
  Antisense strand to SEQ ID NO: 1039472
aacugugugagacucuguc

SEQ ID NO: 1039474 - RNA, 19 nt, Artificial Sequence
  Description of Artificial Sequence: Synthetic oligonucleotide
  Sense strand starting at position 2981 of SEQ ID NO: 914904
uagcaauagugucuugcca

SEQ ID NO: 1039475 - RNA, 19 nt, Artificial Sequence
  Description of Artificial Sequence: Synthetic oligonucleotide
  Antisense strand to SEQ ID NO: 1039474
uggcaagacacuauugcua

SEQ ID NO: 1039476 - RNA, 19 nt, Artificial Sequence
  Description of Artificial Sequence: Synthetic oligonucleotide
  Sense strand starting at position 2985 of SEQ ID NO: 914904
aauagugucuugccauguu

SEQ ID NO: 1039477 - RNA, 19 nt, Artificial Sequence
  Description of Artificial Sequence: Synthetic oligonucleotide
  Antisense strand to SEQ ID NO: 1039476
aacauggcaagacacuauu

SEQ ID NO: 1039478 - RNA, 19 nt, Artificial Sequence
  Description of Artificial Sequence: Synthetic oligonucleotide
  Sense strand starting at position 3129 of SEQ ID NO: 914904
augcacauuccuggucuua

SEQ ID NO: 1039479 - RNA, 19 nt, Artificial Sequence
  Description of Artificial Sequence: Synthetic oligonucleotide
  Antisense strand to SEQ ID NO: 1039478
uaagaccaggaaugugcau

SEQ ID NO: 1039480 - RNA, 19 nt, Artificial Sequence
  Description of Artificial Sequence: Synthetic oligonucleotide
  Sense strand starting at position 3210 of SEQ ID NO: 914904
gaaggaaguucucuuucug

SEQ ID NO: 1039481 - RNA, 19 nt, Artificial Sequence
  Description of Artificial Sequence: Synthetic oligonucleotide
  Antisense strand to SEQ ID NO: 1039480
cagaaagagaacuuccuuc

SEQ ID NO: 1039482 - RNA, 19 nt, Artificial Sequence
  Description of Artificial Sequence: Synthetic oligonucleotide
  Sense strand starting at position 3280 of SEQ ID NO: 914904
uggaacacgugguuacauu

SEQ ID NO: 1039483 - RNA, 19 nt, Artificial Sequence
  Description of Artificial Sequence: Synthetic oligonucleotide
  Antisense strand to SEQ ID NO: 1039482
aauguaaccacguguucca

SEQ ID NO: 1039484 - RNA, 19 nt, Artificial Sequence
  Description of Artificial Sequence: Synthetic oligonucleotide
  Sense strand starting at position 3281 of SEQ ID NO: 914904
ggaacacgugguuacauua

SEQ ID NO: 1039485 - RNA, 19 nt, Artificial Sequence
  Description of Artificial Sequence: Synthetic oligonucleotide
  Antisense strand to SEQ ID NO: 1039484
uaauguaaccacguguucc

SEQ ID NO: 1039486 - RNA, 19 nt, Artificial Sequence
  Description of Artificial Sequence: Synthetic oligonucleotide
  Sense strand starting at position 3421 of SEQ ID NO: 914904
gaaagcucuggagauguuu

SEQ ID NO: 1039487 - RNA, 19 nt, Artificial Sequence
  Description of Artificial Sequence: Synthetic oligonucleotide
  Antisense strand to SEQ ID NO: 1039486
aaacaucuccagagcuuuc

SEQ ID NO: 1039488 - RNA, 19 nt, Artificial Sequence
  Description of Artificial Sequence: Synthetic oligonucleotide
  Sense strand starting at position 3543 of SEQ ID NO: 914904
ggucauugugcugguuauu

SEQ ID NO: 1039489 - RNA, 19 nt, Artificial Sequence
  Description of Artificial Sequence: Synthetic oligonucleotide
  Antisense strand to SEQ ID NO: 1039488
aauaaccagcacaaugacc

SEQ ID NO: 1039490 - RNA, 19 nt, Artificial Sequence
  Description of Artificial Sequence: Synthetic oligonucleotide
  Sense strand starting at position 3820 of SEQ ID NO: 914904
guaggcugguguaaaugua

SEQ ID NO: 1039491 - RNA, 19 nt, Artificial Sequence
  Description of Artificial Sequence: Synthetic oligonucleotide
  Antisense strand to SEQ ID NO: 1039490
uacauuuacaccagccuac

SEQ ID NO: 1039492 - RNA, 19 nt, Artificial Sequence
  Description of Artificial Sequence: Synthetic oligonucleotide
  Sense strand starting at position 93 of SEQ ID NO: 914905
gcagcaggcucccuuaauu

SEQ ID NO: 1039493 - RNA, 19 nt, Artificial Sequence
  Description of Artificial Sequence: Synthetic oligonucleotide
  Antisense strand to SEQ ID NO: 1039492
aauuaagggagccugcugc

SEQ ID NO: 1039494 - RNA, 19 nt, Artificial Sequence
  Description of Artificial Sequence: Synthetic oligonucleotide
  Sense strand starting at position 282 of SEQ ID NO: 914905
gguguaggccugugagaag

SEQ ID NO: 1039495 - RNA, 19 nt, Artificial Sequence
  Description of Artificial Sequence: Synthetic oligonucleotide
  Antisense strand to SEQ ID NO: 1039494
cuucucacaggccuacacc

SEQ ID NO: 1039496 - RNA, 19 nt, Artificial Sequence
  Description of Artificial Sequence: Synthetic oligonucleotide
  Sense strand starting at position 342 of SEQ ID NO: 914905
cugagucaucugggccaga

SEQ ID NO: 1039497 - RNA, 19 nt, Artificial Sequence
  Description of Artificial Sequence: Synthetic oligonucleotide
  Antisense strand to SEQ ID NO: 1039496
ucuggcccagaugacucag

SEQ ID NO: 1039498 - RNA, 19 nt, Artificial Sequence
  Description of Artificial Sequence: Synthetic oligonucleotide
  Sense strand starting at position 343 of SEQ ID NO: 914905
ugagucaucugggccagau

SEQ ID NO: 1039499 - RNA, 19 nt, Artificial Sequence
  Description of Artificial Sequence: Synthetic oligonucleotide
  Antisense strand to SEQ ID NO: 1039498
aucuggcccagaugacuca

SEQ ID NO: 1039500 - RNA, 19 nt, Artificial Sequence
  Description of Artificial Sequence: Synthetic oligonucleotide
  Sense strand starting at position 345 of SEQ ID NO: 914905
agucaucugggccagauca

SEQ ID NO: 1039501 - RNA, 19 nt, Artificial Sequence
  Description of Artificial Sequence: Synthetic oligonucleotide
  Antisense strand to SEQ ID NO: 1039500
ugaucuggcccagaugacu

SEQ ID NO: 1039502 - RNA, 19 nt, Artificial Sequence
  Description of Artificial Sequence: Synthetic oligonucleotide
  Sense strand starting at position 485 of SEQ ID NO: 914905
gcaugcuucccugggcaca

SEQ ID NO: 1039503 - RNA, 19 nt, Artificial Sequence
  Description of Artificial Sequence: Synthetic oligonucleotide
  Antisense strand to SEQ ID NO: 1039502
ugugcccagggaagcaugc

SEQ ID NO: 1039504 - RNA, 19 nt, Artificial Sequence
  Description of Artificial Sequence: Synthetic oligonucleotide
  Sense strand starting at position 561 of SEQ ID NO: 914905
gcagaagguugagaacaaa

SEQ ID NO: 1039505 - RNA, 19 nt, Artificial Sequence
  Description of Artificial Sequence: Synthetic oligonucleotide
  Antisense strand to SEQ ID NO: 1039504
uuuguucucaaccuucugc

SEQ ID NO: 1039506 - RNA, 19 nt, Artificial Sequence
  Description of Artificial Sequence: Synthetic oligonucleotide
  Sense strand starting at position 625 of SEQ ID NO: 914905
uccaaacuuguugagcaaa

SEQ ID NO: 1039507 - RNA, 19 nt, Artificial Sequence
  Description of Artificial Sequence: Synthetic oligonucleotide
  Antisense strand to SEQ ID NO: 1039506
uuugcucaacaaguuugga

SEQ ID NO: 1039508 - RNA, 19 nt, Artificial Sequence
  Description of Artificial Sequence: Synthetic oligonucleotide
  Sense strand starting at position 720 of SEQ ID NO: 914905
gguccaagaguccagcaaa

SEQ ID NO: 1039509 - RNA, 19 nt, Artificial Sequence
  Description of Artificial Sequence: Synthetic oligonucleotide
  Antisense strand to SEQ ID NO: 1039508
uuugcuggacucuuggacc

SEQ ID NO: 1039510 - RNA, 19 nt, Artificial Sequence
  Description of Artificial Sequence: Synthetic oligonucleotide
  Sense strand starting at position 804 of SEQ ID NO: 914905
aaagaaggugccuaacagu

SEQ ID NO: 1039511 - RNA, 19 nt, Artificial Sequence
  Description of Artificial Sequence: Synthetic oligonucleotide
  Antisense strand to SEQ ID NO: 1039510
acuguuaggcaccuucuuu

SEQ ID NO: 1039512 - RNA, 19 nt, Artificial Sequence
  Description of Artificial Sequence: Synthetic oligonucleotide
  Sense strand starting at position 914 of SEQ ID NO: 914905
gaagaugacgccugcagaa

SEQ ID NO: 1039513 - RNA, 19 nt, Artificial Sequence
  Description of Artificial Sequence: Synthetic oligonucleotide
  Antisense strand to SEQ ID NO: 1039512
uucugcaggcgucaucuuc

SEQ ID NO: 1039514 - RNA, 19 nt, Artificial Sequence
  Description of Artificial Sequence: Synthetic oligonucleotide
  Sense strand starting at position 1060 of SEQ ID NO: 914905
ccuaguuuccuuugaaaga

SEQ ID NO: 1039515 - RNA, 19 nt, Artificial Sequence
  Description of Artificial Sequence: Synthetic oligonucleotide
  Antisense strand to SEQ ID NO: 1039514
ucuuucaaaggaaacuagg

SEQ ID NO: 1039516 - RNA, 19 nt, Artificial Sequence
  Description of Artificial Sequence: Synthetic oligonucleotide
  Sense strand starting at position 1061 of SEQ ID NO: 914905
cuaguuuccuuugaaagau

SEQ ID NO: 1039517 - RNA, 19 nt, Artificial Sequence
  Description of Artificial Sequence: Synthetic oligonucleotide
  Antisense strand to SEQ ID NO: 1039516
aucuuucaaaggaaacuag

SEQ ID NO: 1039518 - RNA, 19 nt, Artificial Sequence
  Description of Artificial Sequence: Synthetic oligonucleotide
  Sense strand starting at position 1069 of SEQ ID NO: 914905
cuuugaaagaucggaccga

SEQ ID NO: 1039519 - RNA, 19 nt, Artificial Sequence
  Description of Artificial Sequence: Synthetic oligonucleotide
  Antisense strand to SEQ ID NO: 1039518
ucgguccgaucuuucaaag

SEQ ID NO: 1039520 - RNA, 19 nt, Artificial Sequence
  Description of Artificial Sequence: Synthetic oligonucleotide
  Sense strand starting at position 1070 of SEQ ID NO: 914905
uuugaaagaucggaccgaa

SEQ ID NO: 1039521 - RNA, 19 nt, Artificial Sequence
  Description of Artificial Sequence: Synthetic oligonucleotide
  Antisense strand to SEQ ID NO: 1039520
uucgguccgaucuuucaaa

SEQ ID NO: 1039522 - RNA, 19 nt, Artificial Sequence
  Description of Artificial Sequence: Synthetic oligonucleotide
  Sense strand starting at position 1073 of SEQ ID NO: 914905
gaaagaucggaccgaaagu

SEQ ID NO: 1039523 - RNA, 19 nt, Artificial Sequence
  Description of Artificial Sequence: Synthetic oligonucleotide
  Antisense strand to SEQ ID NO: 1039522
acuuucgguccgaucuuuc

SEQ ID NO: 1039524 - RNA, 19 nt, Artificial Sequence
  Description of Artificial Sequence: Synthetic oligonucleotide
  Sense strand starting at position 2024 of SEQ ID NO: 914905
ggauuagacugugcgcagu

SEQ ID NO: 1039525 - RNA, 19 nt, Artificial Sequence
  Description of Artificial Sequence: Synthetic oligonucleotide
  Antisense strand to SEQ ID NO: 1039524
acugcgcacagucuaaucc

SEQ ID NO: 1039526 - RNA, 19 nt, Artificial Sequence
  Description of Artificial Sequence: Synthetic oligonucleotide
  Sense strand starting at position 3106 of SEQ ID NO: 914905
ggcugucaccguuacucau

SEQ ID NO: 1039527 - RNA, 19 nt, Artificial Sequence
  Description of Artificial Sequence: Synthetic oligonucleotide
  Antisense strand to SEQ ID NO: 1039526
augaguaacggugacagcc

SEQ ID NO: 1039528 - RNA, 19 nt, Artificial Sequence
  Description of Artificial Sequence: Synthetic oligonucleotide
  Sense strand starting at position 3133 of SEQ ID NO: 914905
uuggguauuguagggauaa

SEQ ID NO: 1039529 - RNA, 19 nt, Artificial Sequence
  Description of Artificial Sequence: Synthetic oligonucleotide
  Antisense strand to SEQ ID NO: 1039528
uuaucccuacaauacccaa

SEQ ID NO: 1039530 - RNA, 19 nt, Artificial Sequence
  Description of Artificial Sequence: Synthetic oligonucleotide
  Sense strand starting at position 3164 of SEQ ID NO: 914905
gcgugagggcguggaaauu

SEQ ID NO: 1039531 - RNA, 19 nt, Artificial Sequence
  Description of Artificial Sequence: Synthetic oligonucleotide
  Antisense strand to SEQ ID NO: 1039530
aauuuccacgcccucacgc

SEQ ID NO: 1039532 - RNA, 19 nt, Artificial Sequence
  Description of Artificial Sequence: Synthetic oligonucleotide
  Sense strand starting at position 3170 of SEQ ID NO: 914905
gggcguggaaauugguauu

SEQ ID NO: 1039533 - RNA, 19 nt, Artificial Sequence
  Description of Artificial Sequence: Synthetic oligonucleotide
  Antisense strand to SEQ ID NO: 1039532
aauaccaauuuccacgccc

SEQ ID NO: 1039534 - RNA, 19 nt, Artificial Sequence
  Description of Artificial Sequence: Synthetic oligonucleotide
  Sense strand starting at position 3220 of SEQ ID NO: 914905
cugacauauuuagggaaug

SEQ ID NO: 1039535 - RNA, 19 nt, Artificial Sequence
  Description of Artificial Sequence: Synthetic oligonucleotide
  Antisense strand to SEQ ID NO: 1039534
cauucccuaaauaugucag

SEQ ID NO: 1039536 - RNA, 19 nt, Artificial Sequence
  Description of Artificial Sequence: Synthetic oligonucleotide
  Sense strand starting at position 3245 of SEQ ID NO: 914905
uagggacuguguuugaaag

SEQ ID NO: 1039537 - RNA, 19 nt, Artificial Sequence
  Description of Artificial Sequence: Synthetic oligonucleotide
  Antisense strand to SEQ ID NO: 1039536
cuuucaaacacagucccua

SEQ ID NO: 1039538 - RNA, 19 nt, Artificial Sequence
  Description of Artificial Sequence: Synthetic oligonucleotide
  Sense strand starting at position 3255 of SEQ ID NO: 914905
guuugaaaggcugagaugu

SEQ ID NO: 1039539 - RNA, 19 nt, Artificial Sequence
  Description of Artificial Sequence: Synthetic oligonucleotide
  Antisense strand to SEQ ID NO: 1039538
acaucucagccuuucaaac

SEQ ID NO: 1039540 - RNA, 19 nt, Artificial Sequence
  Description of Artificial Sequence: Synthetic oligonucleotide
  Sense strand starting at position 3257 of SEQ ID NO: 914905
uugaaaggcugagauguuu

SEQ ID NO: 1039541 - RNA, 19 nt, Artificial Sequence
  Description of Artificial Sequence: Synthetic oligonucleotide
  Antisense strand to SEQ ID NO: 1039540
aaacaucucagccuuucaa

SEQ ID NO: 1039542 - RNA, 19 nt, Artificial Sequence
  Description of Artificial Sequence: Synthetic oligonucleotide
  Sense strand starting at position 3347 of SEQ ID NO: 914905
cugggaguucaugggugaa

SEQ ID NO: 1039543 - RNA, 19 nt, Artificial Sequence
  Description of Artificial Sequence: Synthetic oligonucleotide
  Antisense strand to SEQ ID NO: 1039542
uucacccaugaacucccag

SEQ ID NO: 1039544 - RNA, 19 nt, Artificial Sequence
  Description of Artificial Sequence: Synthetic oligonucleotide
  Sense strand starting at position 3349 of SEQ ID NO: 914905
gggaguucaugggugaaua

SEQ ID NO: 1039545 - RNA, 19 nt, Artificial Sequence
  Description of Artificial Sequence: Synthetic oligonucleotide
  Antisense strand to SEQ ID NO: 1039544
uauucacccaugaacuccc

SEQ ID NO: 1039546 - RNA, 19 nt, Artificial Sequence
  Description of Artificial Sequence: Synthetic oligonucleotide
  Sense strand starting at position 3350 of SEQ ID NO: 914905
ggaguucaugggugaauaa

SEQ ID NO: 1039547 - RNA, 19 nt, Artificial Sequence
  Description of Artificial Sequence: Synthetic oligonucleotide
  Antisense strand to SEQ ID NO: 1039546
uuauucacccaugaacucc

SEQ ID NO: 1039548 - RNA, 19 nt, Artificial Sequence
  Description of Artificial Sequence: Synthetic oligonucleotide
  Sense strand starting at position 3360 of SEQ ID NO: 914905
ggugaauaagggugucacu

SEQ ID NO: 1039549 - RNA, 19 nt, Artificial Sequence
  Description of Artificial Sequence: Synthetic oligonucleotide
  Antisense strand to SEQ ID NO: 1039548
agugacacccuuauucacc

SEQ ID NO: 1039550 - RNA, 19 nt, Artificial Sequence
  Description of Artificial Sequence: Synthetic oligonucleotide
  Sense strand starting at position 3370 of SEQ ID NO: 914905
ggugucacugcuugcagaa

SEQ ID NO: 1039551 - RNA, 19 nt, Artificial Sequence
  Description of Artificial Sequence: Synthetic oligonucleotide
  Antisense strand to SEQ ID NO: 1039550
uucugcaagcagugacacc

SEQ ID NO: 1039552 - RNA, 19 nt, Artificial Sequence
  Description of Artificial Sequence: Synthetic oligonucleotide
  Sense strand starting at position 3391 of SEQ ID NO: 914905
cucucaguccaguaaggga

SEQ ID NO: 1039553 - RNA, 19 nt, Artificial Sequence
  Description of Artificial Sequence: Synthetic oligonucleotide
  Antisense strand to SEQ ID NO: 1039552
ucccuuacuggacugagag

SEQ ID NO: 1039554 - RNA, 19 nt, Artificial Sequence
  Description of Artificial Sequence: Synthetic oligonucleotide
  Sense strand starting at position 3488 of SEQ ID NO: 914905
ggcauuguugugagcagug

SEQ ID NO: 1039555 - RNA, 19 nt, Artificial Sequence
  Description of Artificial Sequence: Synthetic oligonucleotide
  Antisense strand to SEQ ID NO: 1039554
cacugcucacaacaaugcc

SEQ ID NO: 1039556 - RNA, 19 nt, Artificial Sequence
  Description of Artificial Sequence: Synthetic oligonucleotide
  Sense strand starting at position 3586 of SEQ ID NO: 914905
acguagugugucggaugau

SEQ ID NO: 1039557 - RNA, 19 nt, Artificial Sequence
  Description of Artificial Sequence: Synthetic oligonucleotide
  Antisense strand to SEQ ID NO: 1039556
aucauccgacacacuacgu

SEQ ID NO: 1039558 - RNA, 19 nt, Artificial Sequence
  Description of Artificial Sequence: Synthetic oligonucleotide
  Sense strand starting at position 3589 of SEQ ID NO: 914905
uagugugucggaugaugau

SEQ ID NO: 1039559 - RNA, 19 nt, Artificial Sequence
  Description of Artificial Sequence: Synthetic oligonucleotide
  Antisense strand to SEQ ID NO: 1039558
aucaucauccgacacacua

SEQ ID NO: 1039560 - RNA, 19 nt, Artificial Sequence
  Description of Artificial Sequence: Synthetic oligonucleotide
  Sense strand starting at position 3595 of SEQ ID NO: 914905
gucggaugaugauaaauac

SEQ ID NO: 1039561 - RNA, 19 nt, Artificial Sequence
  Description of Artificial Sequence: Synthetic oligonucleotide
  Antisense strand to SEQ ID NO: 1039560
guauuuaucaucauccgac

SEQ ID NO: 1039562 - RNA, 19 nt, Artificial Sequence
  Description of Artificial Sequence: Synthetic oligonucleotide
  Sense strand starting at position 3647 of SEQ ID NO: 914905
gggaauaaguaguaucaag

SEQ ID NO: 1039563 - RNA, 19 nt, Artificial Sequence
  Description of Artificial Sequence: Synthetic oligonucleotide
  Antisense strand to SEQ ID NO: 1039562
cuugauacuacuuauuccc

SEQ ID NO: 1039564 - RNA, 19 nt, Artificial Sequence
  Description of Artificial Sequence: Synthetic oligonucleotide
  Sense strand starting at position 3716 of SEQ ID NO: 914905
gaaggugaauuugagcaaa

SEQ ID NO: 1039565 - RNA, 19 nt, Artificial Sequence
  Description of Artificial Sequence: Synthetic oligonucleotide
  Antisense strand to SEQ ID NO: 1039564
uuugcucaaauucaccuuc

SEQ ID NO: 1039566 - RNA, 19 nt, Artificial Sequence
  Description of Artificial Sequence: Synthetic oligonucleotide
  Sense strand starting at position 3872 of SEQ ID NO: 914905
gggcaaauucuuuagguag

SEQ ID NO: 1039567 - RNA, 19 nt, Artificial Sequence
  Description of Artificial Sequence: Synthetic oligonucleotide
  Antisense strand to SEQ ID NO: 1039566
cuaccuaaagaauuugccc

SEQ ID NO: 1039568 - RNA, 19 nt, Artificial Sequence
  Description of Artificial Sequence: Synthetic oligonucleotide
  Sense strand starting at position 3941 of SEQ ID NO: 914905
gaagucauugaaggguuua

SEQ ID NO: 1039569 - RNA, 19 nt, Artificial Sequence
  Description of Artificial Sequence: Synthetic oligonucleotide
  Antisense strand to SEQ ID NO: 1039568
uaaacccuucaaugacuuc

SEQ ID NO: 1039570 - RNA, 19 nt, Artificial Sequence
  Description of Artificial Sequence: Synthetic oligonucleotide
  Sense strand starting at position 3953 of SEQ ID NO: 914905
ggguuuagagcagagacuu

SEQ ID NO: 1039571 - RNA, 19 nt, Artificial Sequence
  Description of Artificial Sequence: Synthetic oligonucleotide
  Antisense strand to SEQ ID NO: 1039570
aagucucugcucuaaaccc

SEQ ID NO: 1039572 - RNA, 19 nt, Artificial Sequence
  Description of Artificial Sequence: Synthetic oligonucleotide
  Sense strand starting at position 46 of SEQ ID NO: 914906
agaugcuuagcacagugau

SEQ ID NO: 1039573 - RNA, 19 nt, Artificial Sequence
  Description of Artificial Sequence: Synthetic oligonucleotide
  Antisense strand to SEQ ID NO: 1039572
aucacugugcuaagcaucu

SEQ ID NO: 1039574 - RNA, 19 nt, Artificial Sequence
  Description of Artificial Sequence: Synthetic oligonucleotide
  Sense strand starting at position 321 of SEQ ID NO: 914906
gguacuuugcuguauuaug

SEQ ID NO: 1039575 - RNA, 19 nt, Artificial Sequence
  Description of Artificial Sequence: Synthetic oligonucleotide
  Antisense strand to SEQ ID NO: 1039574
cauaauacagcaaaguacc

SEQ ID NO: 1039576 - RNA, 19 nt, Artificial Sequence
  Description of Artificial Sequence: Synthetic oligonucleotide
  Sense strand starting at position 353 of SEQ ID NO: 914906
cuaacaauccuguagguag

SEQ ID NO: 1039577 - RNA, 19 nt, Artificial Sequence
  Description of Artificial Sequence: Synthetic oligonucleotide
  Antisense strand to SEQ ID NO: 1039576
cuaccuacaggauuguuag

SEQ ID NO: 1039578 - RNA, 19 nt, Artificial Sequence
  Description of Artificial Sequence: Synthetic oligonucleotide
  Sense strand starting at position 497 of SEQ ID NO: 914906
agccacagucagcaaauau

SEQ ID NO: 1039579 - RNA, 19 nt, Artificial Sequence
  Description of Artificial Sequence: Synthetic oligonucleotide
  Antisense strand to SEQ ID NO: 1039578
auauuugcugacuguggcu

SEQ ID NO: 1039580 - RNA, 19 nt, Artificial Sequence
  Description of Artificial Sequence: Synthetic oligonucleotide
  Sense strand starting at position 504 of SEQ ID NO: 914906
gucagcaaauauccugauu

SEQ ID NO: 1039581 - RNA, 19 nt, Artificial Sequence
  Description of Artificial Sequence: Synthetic oligonucleotide
  Antisense strand to SEQ ID NO: 1039580
aaucaggauauuugcugac

SEQ ID NO: 1039582 - RNA, 19 nt, Artificial Sequence
  Description of Artificial Sequence: Synthetic oligonucleotide
  Sense strand starting at position 507 of SEQ ID NO: 914906
agcaaauauccugauugca

SEQ ID NO: 1039583 - RNA, 19 nt, Artificial Sequence
  Description of Artificial Sequence: Synthetic oligonucleotide
  Antisense strand to SEQ ID NO: 1039582
ugcaaucaggauauuugcu

SEQ ID NO: 1039584 - RNA, 19 nt, Artificial Sequence
  Description of Artificial Sequence: Synthetic oligonucleotide
  Sense strand starting at position 586 of SEQ ID NO: 914906
augaguaccucccucauga

SEQ ID NO: 1039585 - RNA, 19 nt, Artificial Sequence
  Description of Artificial Sequence: Synthetic oligonucleotide
  Antisense strand to SEQ ID NO: 1039584
ucaugagggagguacucau

SEQ ID NO: 1039586 - RNA, 19 nt, Artificial Sequence
  Description of Artificial Sequence: Synthetic oligonucleotide
  Sense strand starting at position 679 of SEQ ID NO: 914906
aucuguaccugagcaugaa

SEQ ID NO: 1039587 - RNA, 19 nt, Artificial Sequence
  Description of Artificial Sequence: Synthetic oligonucleotide
  Antisense strand to SEQ ID NO: 1039586
uucaugcucagguacagau

SEQ ID NO: 1039588 - RNA, 19 nt, Artificial Sequence
  Description of Artificial Sequence: Synthetic oligonucleotide
  Sense strand starting at position 680 of SEQ ID NO: 914906
ucuguaccugagcaugaau

SEQ ID NO: 1039589 - RNA, 19 nt, Artificial Sequence
  Description of Artificial Sequence: Synthetic oligonucleotide
  Antisense strand to SEQ ID NO: 1039588
auucaugcucagguacaga

SEQ ID NO: 1039590 - RNA, 19 nt, Artificial Sequence
  Description of Artificial Sequence: Synthetic oligonucleotide
  Sense strand starting at position 682 of SEQ ID NO: 914906
uguaccugagcaugaauaa

SEQ ID NO: 1039591 - RNA, 19 nt, Artificial Sequence
  Description of Artificial Sequence: Synthetic oligonucleotide
  Antisense strand to SEQ ID NO: 1039590
uuauucaugcucagguaca

SEQ ID NO: 1039592 - RNA, 19 nt, Artificial Sequence
  Description of Artificial Sequence: Synthetic oligonucleotide
  Sense strand starting at position 912 of SEQ ID NO: 914906
cgaagacccuggucuacuu

SEQ ID NO: 1039593 - RNA, 19 nt, Artificial Sequence
  Description of Artificial Sequence: Synthetic oligonucleotide
  Antisense strand to SEQ ID NO: 1039592
aaguagaccagggucuucg

SEQ ID NO: 1039594 - RNA, 19 nt, Artificial Sequence
  Description of Artificial Sequence: Synthetic oligonucleotide
  Sense strand starting at position 979 of SEQ ID NO: 914906
cugcuucugcuggaauaca

SEQ ID NO: 1039595 - RNA, 19 nt, Artificial Sequence
  Description of Artificial Sequence: Synthetic oligonucleotide
  Antisense strand to SEQ ID NO: 1039594
uguauuccagcagaagcag

SEQ ID NO: 1039596 - RNA, 19 nt, Artificial Sequence
  Description of Artificial Sequence: Synthetic oligonucleotide
  Sense strand starting at position 1050 of SEQ ID NO: 914906
caagaaggccucugugauu

SEQ ID NO: 1039597 - RNA, 19 nt, Artificial Sequence
  Description of Artificial Sequence: Synthetic oligonucleotide
  Antisense strand to SEQ ID NO: 1039596
aaucacagaggccuucuug

SEQ ID NO: 1039598 - RNA, 19 nt, Artificial Sequence
  Description of Artificial Sequence: Synthetic oligonucleotide
  Sense strand starting at position 1115 of SEQ ID NO: 914906
gguucucaacuuugaauau

SEQ ID NO: 1039599 - RNA, 19 nt, Artificial Sequence
  Description of Artificial Sequence: Synthetic oligonucleotide
  Antisense strand to SEQ ID NO: 1039598
auauucaaaguugagaacc

SEQ ID NO: 1039600 - RNA, 19 nt, Artificial Sequence
  Description of Artificial Sequence: Synthetic oligonucleotide
  Sense strand starting at position 1260 of SEQ ID NO: 914906
uggucugugaguuauccau

SEQ ID NO: 1039601 - RNA, 19 nt, Artificial Sequence
  Description of Artificial Sequence: Synthetic oligonucleotide
  Antisense strand to SEQ ID NO: 1039600
auggauaacucacagacca

SEQ ID NO: 1039602 - RNA, 19 nt, Artificial Sequence
  Description of Artificial Sequence: Synthetic oligonucleotide
  Sense strand starting at position 1264 of SEQ ID NO: 914906
cugugaguuauccauugag

SEQ ID NO: 1039603 - RNA, 19 nt, Artificial Sequence
  Description of Artificial Sequence: Synthetic oligonucleotide
  Antisense strand to SEQ ID NO: 1039602
cucaauggauaacucacag

SEQ ID NO: 1039604 - RNA, 19 nt, Artificial Sequence
  Description of Artificial Sequence: Synthetic oligonucleotide
  Sense strand starting at position 1267 of SEQ ID NO: 914906
ugaguuauccauugaguag

SEQ ID NO: 1039605 - RNA, 19 nt, Artificial Sequence
  Description of Artificial Sequence: Synthetic oligonucleotide
  Antisense strand to SEQ ID NO: 1039604
cuacucaauggauaacuca

SEQ ID NO: 1039606 - RNA, 19 nt, Artificial Sequence
  Description of Artificial Sequence: Synthetic oligonucleotide
  Sense strand starting at position 1310 of SEQ ID NO: 914906
guaucagaaucacuugaca

SEQ ID NO: 1039607 - RNA, 19 nt, Artificial Sequence
  Description of Artificial Sequence: Synthetic oligonucleotide
  Antisense strand to SEQ ID NO: 1039606
ugucaagugauucugauac

SEQ ID NO: 1039608 - RNA, 19 nt, Artificial Sequence
  Description of Artificial Sequence: Synthetic oligonucleotide
  Sense strand starting at position 1323 of SEQ ID NO: 914906
uugacaagcuuauugaaac

SEQ ID NO: 1039609 - RNA, 19 nt, Artificial Sequence
  Description of Artificial Sequence: Synthetic oligonucleotide
  Antisense strand to SEQ ID NO: 1039608
guuucaauaagcuugucaa

SEQ ID NO: 1039610 - RNA, 19 nt, Artificial Sequence
  Description of Artificial Sequence: Synthetic oligonucleotide
  Sense strand starting at position 1330 of SEQ ID NO: 914906
gcuuauugaaacuguggau

SEQ ID NO: 1039611 - RNA, 19 nt, Artificial Sequence
  Description of Artificial Sequence: Synthetic oligonucleotide
  Antisense strand to SEQ ID NO: 1039610
auccacaguuucaauaagc

SEQ ID NO: 1039612 - RNA, 19 nt, Artificial Sequence
  Description of Artificial Sequence: Synthetic oligonucleotide
  Sense strand starting at position 1386 of SEQ ID NO: 914906
gaacucguuccauauagag

SEQ ID NO: 1039613 - RNA, 19 nt, Artificial Sequence
  Description of Artificial Sequence: Synthetic oligonucleotide
  Antisense strand to SEQ ID NO: 1039612
cucuauauggaacgaguuc

SEQ ID NO: 1039614 - RNA, 19 nt, Artificial Sequence
  Description of Artificial Sequence: Synthetic oligonucleotide
  Sense strand starting at position 1388 of SEQ ID NO: 914906
acucguuccauauagagag

SEQ ID NO: 1039615 - RNA, 19 nt, Artificial Sequence
  Description of Artificial Sequence: Synthetic oligonucleotide
  Antisense strand to SEQ ID NO: 1039614
cucucuauauggaacgagu

SEQ ID NO: 1039616 - RNA, 19 nt, Artificial Sequence
  Description of Artificial Sequence: Synthetic oligonucleotide
  Sense strand starting at position 1720 of SEQ ID NO: 914906
aggaacuauauguguguuu

SEQ ID NO: 1039617 - RNA, 19 nt, Artificial Sequence
  Description of Artificial Sequence: Synthetic oligonucleotide
  Antisense strand to SEQ ID NO: 1039616
aaacacacauauaguuccu

SEQ ID NO: 1039618 - RNA, 19 nt, Artificial Sequence
  Description of Artificial Sequence: Synthetic oligonucleotide
  Sense strand starting at position 2172 of SEQ ID NO: 914906
gagagaauauguucucuuc

SEQ ID NO: 1039619 - RNA, 19 nt, Artificial Sequence
  Description of Artificial Sequence: Synthetic oligonucleotide
  Antisense strand to SEQ ID NO: 1039618
gaagagaacauauucucuc

SEQ ID NO: 1039620 - RNA, 19 nt, Artificial Sequence
  Description of Artificial Sequence: Synthetic oligonucleotide
  Sense strand starting at position 2219 of SEQ ID NO: 914906
gcagaagagcaggguauau

SEQ ID NO: 1039621 - RNA, 19 nt, Artificial Sequence
  Description of Artificial Sequence: Synthetic oligonucleotide
  Antisense strand to SEQ ID NO: 1039620
auauacccugcucuucugc

SEQ ID NO: 1039622 - RNA, 19 nt, Artificial Sequence
  Description of Artificial Sequence: Synthetic oligonucleotide
  Sense strand starting at position 2422 of SEQ ID NO: 914906
aguucuuuccaugacauca

SEQ ID NO: 1039623 - RNA, 19 nt, Artificial Sequence
  Description of Artificial Sequence: Synthetic oligonucleotide
  Antisense strand to SEQ ID NO: 1039622
ugaugucauggaaagaacu

SEQ ID NO: 1039624 - RNA, 19 nt, Artificial Sequence
  Description of Artificial Sequence: Synthetic oligonucleotide
  Sense strand starting at position 2528 of SEQ ID NO: 914906
ucagauagccugugaagua

SEQ ID NO: 1039625 - RNA, 19 nt, Artificial Sequence
  Description of Artificial Sequence: Synthetic oligonucleotide
  Antisense strand to SEQ ID NO: 1039624
uacuucacaggcuaucuga

SEQ ID NO: 1039626 - RNA, 19 nt, Artificial Sequence
  Description of Artificial Sequence: Synthetic oligonucleotide
  Sense strand starting at position 2571 of SEQ ID NO: 914906
caaacucugggaggcauaa

SEQ ID NO: 1039627 - RNA, 19 nt, Artificial Sequence
  Description of Artificial Sequence: Synthetic oligonucleotide
  Antisense strand to SEQ ID NO: 1039626
uuaugccucccagaguuug

SEQ ID NO: 1039628 - RNA, 19 nt, Artificial Sequence
  Description of Artificial Sequence: Synthetic oligonucleotide
  Sense strand starting at position 2849 of SEQ ID NO: 914906
cuagaaauucuagguucuu

SEQ ID NO: 1039629 - RNA, 19 nt, Artificial Sequence
  Description of Artificial Sequence: Synthetic oligonucleotide
  Antisense strand to SEQ ID NO: 1039628
aagaaccuagaauuucuag

SEQ ID NO: 1039630 - RNA, 19 nt, Artificial Sequence
  Description of Artificial Sequence: Synthetic oligonucleotide
  Sense strand starting at position 2850 of SEQ ID NO: 914906
uagaaauucuagguucuug

SEQ ID NO: 1039631 - RNA, 19 nt, Artificial Sequence
  Description of Artificial Sequence: Synthetic oligonucleotide
  Antisense strand to SEQ ID NO: 1039630
caagaaccuagaauuucua

SEQ ID NO: 1039632 - RNA, 19 nt, Artificial Sequence
  Description of Artificial Sequence: Synthetic oligonucleotide
  Sense strand starting at position 3209 of SEQ ID NO: 914906
gcaaacaggaguugaacuu

SEQ ID NO: 1039633 - RNA, 19 nt, Artificial Sequence
  Description of Artificial Sequence: Synthetic oligonucleotide
  Antisense strand to SEQ ID NO: 1039632
aaguucaacuccuguuugc

SEQ ID NO: 1039634 - RNA, 19 nt, Artificial Sequence
  Description of Artificial Sequence: Synthetic oligonucleotide
  Sense strand starting at position 3441 of SEQ ID NO: 914906
gaaguuagaucauuaugau

SEQ ID NO: 1039635 - RNA, 19 nt, Artificial Sequence
  Description of Artificial Sequence: Synthetic oligonucleotide
  Antisense strand to SEQ ID NO: 1039634
aucauaaugaucuaacuuc

SEQ ID NO: 1039636 - RNA, 19 nt, Artificial Sequence
  Description of Artificial Sequence: Synthetic oligonucleotide
  Sense strand starting at position 3602 of SEQ ID NO: 914906
auuaacaucucugugauga

SEQ ID NO: 1039637 - RNA, 19 nt, Artificial Sequence
  Description of Artificial Sequence: Synthetic oligonucleotide
  Antisense strand to SEQ ID NO: 1039636
ucaucacagagauguuaau

SEQ ID NO: 1039638 - RNA, 19 nt, Artificial Sequence
  Description of Artificial Sequence: Synthetic oligonucleotide
  Sense strand starting at position 3603 of SEQ ID NO: 914906
uuaacaucucugugaugac

SEQ ID NO: 1039639 - RNA, 19 nt, Artificial Sequence
  Description of Artificial Sequence: Synthetic oligonucleotide
  Antisense strand to SEQ ID NO: 1039638
gucaucacagagauguuaa

SEQ ID NO: 1039640 - RNA, 19 nt, Artificial Sequence
  Description of Artificial Sequence: Synthetic oligonucleotide
  Sense strand starting at position 3730 of SEQ ID NO: 914906
ugccaaacacugugagaua

SEQ ID NO: 1039641 - RNA, 19 nt, Artificial Sequence
  Description of Artificial Sequence: Synthetic oligonucleotide
  Antisense strand to SEQ ID NO: 1039640
uaucucacaguguuuggca

SEQ ID NO: 1039642 - RNA, 19 nt, Artificial Sequence
  Description of Artificial Sequence: Synthetic oligonucleotide
  Sense strand starting at position 3806 of SEQ ID NO: 914906
gaggguguaucaucuaacu

SEQ ID NO: 1039643 - RNA, 19 nt, Artificial Sequence
  Description of Artificial Sequence: Synthetic oligonucleotide
  Antisense strand to SEQ ID NO: 1039642
aguuagaugauacacccuc

SEQ ID NO: 1039644 - RNA, 19 nt, Artificial Sequence
  Description of Artificial Sequence: Synthetic oligonucleotide
  Sense strand starting at position 3808 of SEQ ID NO: 914906
ggguguaucaucuaacuga

SEQ ID NO: 1039645 - RNA, 19 nt, Artificial Sequence
  Description of Artificial Sequence: Synthetic oligonucleotide
  Antisense strand to SEQ ID NO: 1039644
ucaguuagaugauacaccc

SEQ ID NO: 1039646 - RNA, 19 nt, Artificial Sequence
  Description of Artificial Sequence: Synthetic oligonucleotide
  Sense strand starting at position 3885 of SEQ ID NO: 914906
cuuuacagaugaguacauu

SEQ ID NO: 1039647 - RNA, 19 nt, Artificial Sequence
  Description of Artificial Sequence: Synthetic oligonucleotide
  Antisense strand to SEQ ID NO: 1039646
aauguacucaucuguaaag

SEQ ID NO: 1039648 - RNA, 19 nt, Artificial Sequence
  Description of Artificial Sequence: Synthetic oligonucleotide
  Sense strand starting at position 3920 of SEQ ID NO: 914906
ccaggaacuugucuagaag

SEQ ID NO: 1039649 - RNA, 19 nt, Artificial Sequence
  Description of Artificial Sequence: Synthetic oligonucleotide
  Antisense strand to SEQ ID NO: 1039648
cuucuagacaaguuccugg

SEQ ID NO: 1039650 - RNA, 19 nt, Artificial Sequence
  Description of Artificial Sequence: Synthetic oligonucleotide
  Sense strand starting at position 3946 of SEQ ID NO: 914906
cugggauucccauggauug

SEQ ID NO: 1039651 - RNA, 19 nt, Artificial Sequence
  Description of Artificial Sequence: Synthetic oligonucleotide
  Antisense strand to SEQ ID NO: 1039650
caauccaugggaaucccag

SEQ ID NO: 1039652 - RNA, 19 nt, Artificial Sequence
  Description of Artificial Sequence: Synthetic oligonucleotide
  Sense strand starting at position 4 of SEQ ID NO: 914907
uucucaucucauugggaca

SEQ ID NO: 1039653 - RNA, 19 nt, Artificial Sequence
  Description of Artificial Sequence: Synthetic oligonucleotide
  Antisense strand to SEQ ID NO: 1039652
ugucccaaugagaugagaa

SEQ ID NO: 1039654 - RNA, 19 nt, Artificial Sequence
  Description of Artificial Sequence: Synthetic oligonucleotide
  Sense strand starting at position 38 of SEQ ID NO: 914907
uccuucucaugguugaaau

SEQ ID NO: 1039655 - RNA, 19 nt, Artificial Sequence
  Description of Artificial Sequence: Synthetic oligonucleotide
  Antisense strand to SEQ ID NO: 1039654
auuucaaccaugagaagga

SEQ ID NO: 1039656 - RNA, 19 nt, Artificial Sequence
  Description of Artificial Sequence: Synthetic oligonucleotide
  Sense strand starting at position 39 of SEQ ID NO: 914907
ccuucucaugguugaaaug

SEQ ID NO: 1039657 - RNA, 19 nt, Artificial Sequence
  Description of Artificial Sequence: Synthetic oligonucleotide
  Antisense strand to SEQ ID NO: 1039656
cauuucaaccaugagaagg

SEQ ID NO: 1039658 - RNA, 19 nt, Artificial Sequence
  Description of Artificial Sequence: Synthetic oligonucleotide
  Sense strand starting at position 40 of SEQ ID NO: 914907
cuucucaugguugaaaugu

SEQ ID NO: 1039659 - RNA, 19 nt, Artificial Sequence
  Description of Artificial Sequence: Synthetic oligonucleotide
  Antisense strand to SEQ ID NO: 1039658
acauuucaaccaugagaag

SEQ ID NO: 1039660 - RNA, 19 nt, Artificial Sequence
  Description of Artificial Sequence: Synthetic oligonucleotide
  Sense strand starting at position 48 of SEQ ID NO: 914907
gguugaaaugucuguggaa

SEQ ID NO: 1039661 - RNA, 19 nt, Artificial Sequence
  Description of Artificial Sequence: Synthetic oligonucleotide
  Antisense strand to SEQ ID NO: 1039660
uuccacagacauuucaacc

SEQ ID NO: 1039662 - RNA, 19 nt, Artificial Sequence
  Description of Artificial Sequence: Synthetic oligonucleotide
  Sense strand starting at position 49 of SEQ ID NO: 914907
guugaaaugucuguggaau

SEQ ID NO: 1039663 - RNA, 19 nt, Artificial Sequence
  Description of Artificial Sequence: Synthetic oligonucleotide
  Antisense strand to SEQ ID NO: 1039662
auuccacagacauuucaac

SEQ ID NO: 1039664 - RNA, 19 nt, Artificial Sequence
  Description of Artificial Sequence: Synthetic oligonucleotide
  Sense strand starting at position 50 of SEQ ID NO: 914907
uugaaaugucuguggaaug

SEQ ID NO: 1039665 - RNA, 19 nt, Artificial Sequence
  Description of Artificial Sequence: Synthetic oligonucleotide
  Antisense strand to SEQ ID NO: 1039664
cauuccacagacauuucaa

SEQ ID NO: 1039666 - RNA, 19 nt, Artificial Sequence
  Description of Artificial Sequence: Synthetic oligonucleotide
  Sense strand starting at position 136 of SEQ ID NO: 914907
guacuuugccaucagacaa

SEQ ID NO: 1039667 - RNA, 19 nt, Artificial Sequence
  Description of Artificial Sequence: Synthetic oligonucleotide
  Antisense strand to SEQ ID NO: 1039666
uugucugauggcaaaguac

SEQ ID NO: 1039668 - RNA, 19 nt, Artificial Sequence
  Description of Artificial Sequence: Synthetic oligonucleotide
  Sense strand starting at position 195 of SEQ ID NO: 914907
gccuuccuucgauaauuac

SEQ ID NO: 1039669 - RNA, 19 nt, Artificial Sequence
  Description of Artificial Sequence: Synthetic oligonucleotide
  Antisense strand to SEQ ID NO: 1039668
guaauuaucgaaggaaggc

SEQ ID NO: 1039670 - RNA, 19 nt, Artificial Sequence
  Description of Artificial Sequence: Synthetic oligonucleotide
  Sense strand starting at position 214 of SEQ ID NO: 914907
aguucuugugcucuuaguu

SEQ ID NO: 1039671 - RNA, 19 nt, Artificial Sequence
  Description of Artificial Sequence: Synthetic oligonucleotide
  Antisense strand to SEQ ID NO: 1039670
aacuaagagcacaagaacu

SEQ ID NO: 1039672 - RNA, 19 nt, Artificial Sequence
  Description of Artificial Sequence: Synthetic oligonucleotide
  Sense strand starting at position 221 of SEQ ID NO: 914907
gugcucuuaguugugugua

SEQ ID NO: 1039673 - RNA, 19 nt, Artificial Sequence
  Description of Artificial Sequence: Synthetic oligonucleotide
  Antisense strand to SEQ ID NO: 1039672
uacacacaacuaagagcac

SEQ ID NO: 1039674 - RNA, 19 nt, Artificial Sequence
  Description of Artificial Sequence: Synthetic oligonucleotide
  Sense strand starting at position 237 of SEQ ID NO: 914907
guauucgugaauuauuaga

SEQ ID NO: 1039675 - RNA, 19 nt, Artificial Sequence
  Description of Artificial Sequence: Synthetic oligonucleotide
  Antisense strand to SEQ ID NO: 1039674
ucuaauaauucacgaauac

SEQ ID NO: 1039676 - RNA, 19 nt, Artificial Sequence
  Description of Artificial Sequence: Synthetic oligonucleotide
  Sense strand starting at position 440 of SEQ ID NO: 914907
agcaucuuugggcgagaaa

SEQ ID NO: 1039677 - RNA, 19 nt, Artificial Sequence
  Description of Artificial Sequence: Synthetic oligonucleotide
  Antisense strand to SEQ ID NO: 1039676
uuucucgcccaaagaugcu

SEQ ID NO: 1039678 - RNA, 19 nt, Artificial Sequence
  Description of Artificial Sequence: Synthetic oligonucleotide
  Sense strand starting at position 658 of SEQ ID NO: 914907
uugcgagguauccauauug

SEQ ID NO: 1039679 - RNA, 19 nt, Artificial Sequence
  Description of Artificial Sequence: Synthetic oligonucleotide
  Antisense strand to SEQ ID NO: 1039678
caauauggauaccucgcaa

SEQ ID NO: 1039680 - RNA, 19 nt, Artificial Sequence
  Description of Artificial Sequence: Synthetic oligonucleotide
  Sense strand starting at position 665 of SEQ ID NO: 914907
guauccauauugguaguua

SEQ ID NO: 1039681 - RNA, 19 nt, Artificial Sequence
  Description of Artificial Sequence: Synthetic oligonucleotide
  Antisense strand to SEQ ID NO: 1039680
uaacuaccaauauggauac

SEQ ID NO: 1039682 - RNA, 19 nt, Artificial Sequence
  Description of Artificial Sequence: Synthetic oligonucleotide
  Sense strand starting at position 799 of SEQ ID NO: 914907
ggaggaaggcuaugaaugu

SEQ ID NO: 1039683 - RNA, 19 nt, Artificial Sequence
  Description of Artificial Sequence: Synthetic oligonucleotide
  Antisense strand to SEQ ID NO: 1039682
acauucauagccuuccucc

SEQ ID NO: 1039684 - RNA, 19 nt, Artificial Sequence
  Description of Artificial Sequence: Synthetic oligonucleotide
  Sense strand starting at position 1108 of SEQ ID NO: 914907
gguugacuuuaguuaggac

SEQ ID NO: 1039685 - RNA, 19 nt, Artificial Sequence
  Description of Artificial Sequence: Synthetic oligonucleotide
  Antisense strand to SEQ ID NO: 1039684
guccuaacuaaagucaacc

SEQ ID NO: 1039686 - RNA, 19 nt, Artificial Sequence
  Description of Artificial Sequence: Synthetic oligonucleotide
  Sense strand starting at position 1315 of SEQ ID NO: 914907
ccuggagaugugggaugau

SEQ ID NO: 1039687 - RNA, 19 nt, Artificial Sequence
  Description of Artificial Sequence: Synthetic oligonucleotide
  Antisense strand to SEQ ID NO: 1039686
aucaucccacaucuccagg

SEQ ID NO: 1039688 - RNA, 19 nt, Artificial Sequence
  Description of Artificial Sequence: Synthetic oligonucleotide
  Sense strand starting at position 1334 of SEQ ID NO: 914907
gggcacuuccaguaucauc

SEQ ID NO: 1039689 - RNA, 19 nt, Artificial Sequence
  Description of Artificial Sequence: Synthetic oligonucleotide
  Antisense strand to SEQ ID NO: 1039688
gaugauacuggaagugccc

SEQ ID NO: 1039690 - RNA, 19 nt, Artificial Sequence
  Description of Artificial Sequence: Synthetic oligonucleotide
  Sense strand starting at position 2115 of SEQ ID NO: 914907
guugcugauccauaugcaa

SEQ ID NO: 1039691 - RNA, 19 nt, Artificial Sequence
  Description of Artificial Sequence: Synthetic oligonucleotide
  Antisense strand to SEQ ID NO: 1039690
uugcauauggaucagcaac

SEQ ID NO: 1039692 - RNA, 19 nt, Artificial Sequence
  Description of Artificial Sequence: Synthetic oligonucleotide
  Sense strand starting at position 2122 of SEQ ID NO: 914907
auccauaugcaacgaaaua

SEQ ID NO: 1039693 - RNA, 19 nt, Artificial Sequence
  Description of Artificial Sequence: Synthetic oligonucleotide
  Antisense strand to SEQ ID NO: 1039692
uauuucguugcauauggau

SEQ ID NO: 1039694 - RNA, 19 nt, Artificial Sequence
  Description of Artificial Sequence: Synthetic oligonucleotide
  Sense strand starting at position 2261 of SEQ ID NO: 914907
acggaaucaguugaucuau

SEQ ID NO: 1039695 - RNA, 19 nt, Artificial Sequence
  Description of Artificial Sequence: Synthetic oligonucleotide
  Antisense strand to SEQ ID NO: 1039694
auagaucaacugauuccgu

SEQ ID NO: 1039696 - RNA, 19 nt, Artificial Sequence
  Description of Artificial Sequence: Synthetic oligonucleotide
  Sense strand starting at position 2267 of SEQ ID NO: 914907
ucaguugaucuauggacca

SEQ ID NO: 1039697 - RNA, 19 nt, Artificial Sequence
  Description of Artificial Sequence: Synthetic oligonucleotide
  Antisense strand to SEQ ID NO: 1039696
ugguccauagaucaacuga

SEQ ID NO: 1039698 - RNA, 19 nt, Artificial Sequence
  Description of Artificial Sequence: Synthetic oligonucleotide
  Sense strand starting at position 2351 of SEQ ID NO: 914907
uggugaaaucuccaccgcu

SEQ ID NO: 1039699 - RNA, 19 nt, Artificial Sequence
  Description of Artificial Sequence: Synthetic oligonucleotide
  Antisense strand to SEQ ID NO: 1039698
agcgguggagauuucacca

SEQ ID NO: 1039700 - RNA, 19 nt, Artificial Sequence
  Description of Artificial Sequence: Synthetic oligonucleotide
  Sense strand starting at position 2461 of SEQ ID NO: 914907
gacguuuaugcguuuccua

SEQ ID NO: 1039701 - RNA, 19 nt, Artificial Sequence
  Description of Artificial Sequence: Synthetic oligonucleotide
  Antisense strand to SEQ ID NO: 1039700
uaggaaacgcauaaacguc

SEQ ID NO: 1039702 - RNA, 19 nt, Artificial Sequence
  Description of Artificial Sequence: Synthetic oligonucleotide
  Sense strand starting at position 2463 of SEQ ID NO: 914907
cguuuaugcguuuccuacu

SEQ ID NO: 1039703 - RNA, 19 nt, Artificial Sequence
  Description of Artificial Sequence: Synthetic oligonucleotide
  Antisense strand to SEQ ID NO: 1039702
aguaggaaacgcauaaacg

SEQ ID NO: 1039704 - RNA, 19 nt, Artificial Sequence
  Description of Artificial Sequence: Synthetic oligonucleotide
  Sense strand starting at position 2655 of SEQ ID NO: 914907
ucauguauguacguauuua

SEQ ID NO: 1039705 - RNA, 19 nt, Artificial Sequence
  Description of Artificial Sequence: Synthetic oligonucleotide
  Antisense strand to SEQ ID NO: 1039704
uaaauacguacauacauga

SEQ ID NO: 1039706 - RNA, 19 nt, Artificial Sequence
  Description of Artificial Sequence: Synthetic oligonucleotide
  Sense strand starting at position 2746 of SEQ ID NO: 914907
ccagaugagcuaugaauga

SEQ ID NO: 1039707 - RNA, 19 nt, Artificial Sequence
  Description of Artificial Sequence: Synthetic oligonucleotide
  Antisense strand to SEQ ID NO: 1039706
ucauucauagcucaucugg

SEQ ID NO: 1039708 - RNA, 19 nt, Artificial Sequence
  Description of Artificial Sequence: Synthetic oligonucleotide
  Sense strand starting at position 2827 of SEQ ID NO: 914907
aaagcacuccgugaagaga

SEQ ID NO: 1039709 - RNA, 19 nt, Artificial Sequence
  Description of Artificial Sequence: Synthetic oligonucleotide
  Antisense strand to SEQ ID NO: 1039708
ucucuucacggagugcuuu

SEQ ID NO: 1039710 - RNA, 19 nt, Artificial Sequence
  Description of Artificial Sequence: Synthetic oligonucleotide
  Sense strand starting at position 3008 of SEQ ID NO: 914907
gauucaguuuggguguuga

SEQ ID NO: 1039711 - RNA, 19 nt, Artificial Sequence
  Description of Artificial Sequence: Synthetic oligonucleotide
  Antisense strand to SEQ ID NO: 1039710
ucaacacccaaacugaauc

SEQ ID NO: 1039712 - RNA, 19 nt, Artificial Sequence
  Description of Artificial Sequence: Synthetic oligonucleotide
  Sense strand starting at position 3023 of SEQ ID NO: 914907
uugagugacuaguuuccca

SEQ ID NO: 1039713 - RNA, 19 nt, Artificial Sequence
  Description of Artificial Sequence: Synthetic oligonucleotide
  Antisense strand to SEQ ID NO: 1039712
ugggaaacuagucacucaa

SEQ ID NO: 1039714 - RNA, 19 nt, Artificial Sequence
  Description of Artificial Sequence: Synthetic oligonucleotide
  Sense strand starting at position 3152 of SEQ ID NO: 914907
aaaugagcaugugucugaa

SEQ ID NO: 1039715 - RNA, 19 nt, Artificial Sequence
  Description of Artificial Sequence: Synthetic oligonucleotide
  Antisense strand to SEQ ID NO: 1039714
uucagacacaugcucauuu

SEQ ID NO: 1039716 - RNA, 19 nt, Artificial Sequence
  Description of Artificial Sequence: Synthetic oligonucleotide
  Sense strand starting at position 3170 of SEQ ID NO: 914907
acccuagagcugugauauu

SEQ ID NO: 1039717 - RNA, 19 nt, Artificial Sequence
  Description of Artificial Sequence: Synthetic oligonucleotide
  Antisense strand to SEQ ID NO: 1039716
aauaucacagcucuagggu

SEQ ID NO: 1039718 - RNA, 19 nt, Artificial Sequence
  Description of Artificial Sequence: Synthetic oligonucleotide
  Sense strand starting at position 3292 of SEQ ID NO: 914907
gucuuaguccuagauucug

SEQ ID NO: 1039719 - RNA, 19 nt, Artificial Sequence
  Description of Artificial Sequence: Synthetic oligonucleotide
  Antisense strand to SEQ ID NO: 1039718
cagaaucuaggacuaagac

SEQ ID NO: 1039720 - RNA, 19 nt, Artificial Sequence
  Description of Artificial Sequence: Synthetic oligonucleotide
  Sense strand starting at position 3300 of SEQ ID NO: 914907
ccuagauucugguuggauu

SEQ ID NO: 1039721 - RNA, 19 nt, Artificial Sequence
  Description of Artificial Sequence: Synthetic oligonucleotide
  Antisense strand to SEQ ID NO: 1039720
aauccaaccagaaucuagg

SEQ ID NO: 1039722 - RNA, 19 nt, Artificial Sequence
  Description of Artificial Sequence: Synthetic oligonucleotide
  Sense strand starting at position 3567 of SEQ ID NO: 914907
auaguucucuuguuugaua

SEQ ID NO: 1039723 - RNA, 19 nt, Artificial Sequence
  Description of Artificial Sequence: Synthetic oligonucleotide
  Antisense strand to SEQ ID NO: 1039722
uaucaaacaagagaacuau

SEQ ID NO: 1039724 - RNA, 19 nt, Artificial Sequence
  Description of Artificial Sequence: Synthetic oligonucleotide
  Sense strand starting at position 3569 of SEQ ID NO: 914907
aguucucuuguuugauaag

SEQ ID NO: 1039725 - RNA, 19 nt, Artificial Sequence
  Description of Artificial Sequence: Synthetic oligonucleotide
  Antisense strand to SEQ ID NO: 1039724
cuuaucaaacaagagaacu

SEQ ID NO: 1039726 - RNA, 19 nt, Artificial Sequence
  Description of Artificial Sequence: Synthetic oligonucleotide
  Sense strand starting at position 3575 of SEQ ID NO: 914907
cuuguuugauaagcauauu

SEQ ID NO: 1039727 - RNA, 19 nt, Artificial Sequence
  Description of Artificial Sequence: Synthetic oligonucleotide
  Antisense strand to SEQ ID NO: 1039726
aauaugcuuaucaaacaag

SEQ ID NO: 1039728 - RNA, 19 nt, Artificial Sequence
  Description of Artificial Sequence: Synthetic oligonucleotide
  Sense strand starting at position 3578 of SEQ ID NO: 914907
guuugauaagcauauugaa

SEQ ID NO: 1039729 - RNA, 19 nt, Artificial Sequence
  Description of Artificial Sequence: Synthetic oligonucleotide
  Antisense strand to SEQ ID NO: 1039728
uucaauaugcuuaucaaac

SEQ ID NO: 1039730 - RNA, 19 nt, Artificial Sequence
  Description of Artificial Sequence: Synthetic oligonucleotide
  Sense strand starting at position 3611 of SEQ ID NO: 914907
auaucauggcagggauaau

SEQ ID NO: 1039731 - RNA, 19 nt, Artificial Sequence
  Description of Artificial Sequence: Synthetic oligonucleotide
  Antisense strand to SEQ ID NO: 1039730
auuaucccugccaugauau

SEQ ID NO: 1039732 - RNA, 19 nt, Artificial Sequence
  Description of Artificial Sequence: Synthetic oligonucleotide
  Sense strand starting at position 65 of SEQ ID NO: 914908
aaauuugcaucagaguuga

SEQ ID NO: 1039733 - RNA, 19 nt, Artificial Sequence
  Description of Artificial Sequence: Synthetic oligonucleotide
  Antisense strand to SEQ ID NO: 1039732
ucaacucugaugcaaauuu

SEQ ID NO: 1039734 - RNA, 19 nt, Artificial Sequence
  Description of Artificial Sequence: Synthetic oligonucleotide
  Sense strand starting at position 76 of SEQ ID NO: 914908
agaguugaccagcauccau

SEQ ID NO: 1039735 - RNA, 19 nt, Artificial Sequence
  Description of Artificial Sequence: Synthetic oligonucleotide
  Antisense strand to SEQ ID NO: 1039734
auggaugcuggucaacucu

SEQ ID NO: 1039736 - RNA, 19 nt, Artificial Sequence
  Description of Artificial Sequence: Synthetic oligonucleotide
  Sense strand starting at position 118 of SEQ ID NO: 914908
cagaaauuaugguuaucug

SEQ ID NO: 1039737 - RNA, 19 nt, Artificial Sequence
  Description of Artificial Sequence: Synthetic oligonucleotide
  Antisense strand to SEQ ID NO: 1039736
cagauaaccauaauuucug

SEQ ID NO: 1039738 - RNA, 19 nt, Artificial Sequence
  Description of Artificial Sequence: Synthetic oligonucleotide
  Sense strand starting at position 133 of SEQ ID NO: 914908
ucugcuuuccugcauggaa

SEQ ID NO: 1039739 - RNA, 19 nt, Artificial Sequence
  Description of Artificial Sequence: Synthetic oligonucleotide
  Antisense strand to SEQ ID NO: 1039738
uuccaugcaggaaagcaga

SEQ ID NO: 1039740 - RNA, 19 nt, Artificial Sequence
  Description of Artificial Sequence: Synthetic oligonucleotide
  Sense strand starting at position 178 of SEQ ID NO: 914908
guggauucaugcuuggauu

SEQ ID NO: 1039741 - RNA, 19 nt, Artificial Sequence
  Description of Artificial Sequence: Synthetic oligonucleotide
  Antisense strand to SEQ ID NO: 1039740
aauccaagcaugaauccac

SEQ ID NO: 1039742 - RNA, 19 nt, Artificial Sequence
  Description of Artificial Sequence: Synthetic oligonucleotide
  Sense strand starting at position 209 of SEQ ID NO: 914908
uuuacucaguggucccaaa

SEQ ID NO: 1039743 - RNA, 19 nt, Artificial Sequence
  Description of Artificial Sequence: Synthetic oligonucleotide
  Antisense strand to SEQ ID NO: 1039742
uuugggaccacugaguaaa

SEQ ID NO: 1039744 - RNA, 19 nt, Artificial Sequence
  Description of Artificial Sequence: Synthetic oligonucleotide
  Sense strand starting at position 234 of SEQ ID NO: 914908
caucuauaggguggucaca

SEQ ID NO: 1039745 - RNA, 19 nt, Artificial Sequence
  Description of Artificial Sequence: Synthetic oligonucleotide
  Antisense strand to SEQ ID NO: 1039744
ugugaccacccuauagaug

SEQ ID NO: 1039746 - RNA, 19 nt, Artificial Sequence
  Description of Artificial Sequence: Synthetic oligonucleotide
  Sense strand starting at position 236 of SEQ ID NO: 914908
ucuauaggguggucacaaa

SEQ ID NO: 1039747 - RNA, 19 nt, Artificial Sequence
  Description of Artificial Sequence: Synthetic oligonucleotide
  Antisense strand to SEQ ID NO: 1039746
uuugugaccacccuauaga

SEQ ID NO: 1039748 - RNA, 19 nt, Artificial Sequence
  Description of Artificial Sequence: Synthetic oligonucleotide
  Sense strand starting at position 442 of SEQ ID NO: 914908
gcaauacguaaggaacuau

SEQ ID NO: 1039749 - RNA, 19 nt, Artificial Sequence
  Description of Artificial Sequence: Synthetic oligonucleotide
  Antisense strand to SEQ ID NO: 1039748
auaguuccuuacguauugc

SEQ ID NO: 1039750 - RNA, 19 nt, Artificial Sequence
  Description of Artificial Sequence: Synthetic oligonucleotide
  Sense strand starting at position 460 of SEQ ID NO: 914908
uaauuauggcccugugaaa

SEQ ID NO: 1039751 - RNA, 19 nt, Artificial Sequence
  Description of Artificial Sequence: Synthetic oligonucleotide
  Antisense strand to SEQ ID NO: 1039750
uuucacagggccauaauua

SEQ ID NO: 1039752 - RNA, 19 nt, Artificial Sequence
  Description of Artificial Sequence: Synthetic oligonucleotide
  Sense strand starting at position 573 of SEQ ID NO: 914908
uugcaaagucugggaucuu

SEQ ID NO: 1039753 - RNA, 19 nt, Artificial Sequence
  Description of Artificial Sequence: Synthetic oligonucleotide
  Antisense strand to SEQ ID NO: 1039752
aagaucccagacuuugcaa

SEQ ID NO: 1039754 - RNA, 19 nt, Artificial Sequence
  Description of Artificial Sequence: Synthetic oligonucleotide
  Sense strand starting at position 582 of SEQ ID NO: 914908
cugggaucuuuccucuaca

SEQ ID NO: 1039755 - RNA, 19 nt, Artificial Sequence
  Description of Artificial Sequence: Synthetic oligonucleotide
  Antisense strand to SEQ ID NO: 1039754
uguagaggaaagaucccag

SEQ ID NO: 1039756 - RNA, 19 nt, Artificial Sequence
  Description of Artificial Sequence: Synthetic oligonucleotide
  Sense strand starting at position 583 of SEQ ID NO: 914908
ugggaucuuuccucuacaa

SEQ ID NO: 1039757 - RNA, 19 nt, Artificial Sequence
  Description of Artificial Sequence: Synthetic oligonucleotide
  Antisense strand to SEQ ID NO: 1039756
uuguagaggaaagauccca

SEQ ID NO: 1039758 - RNA, 19 nt, Artificial Sequence
  Description of Artificial Sequence: Synthetic oligonucleotide
  Sense strand starting at position 843 of SEQ ID NO: 914908
cuggaaguucugggcucaa

SEQ ID NO: 1039759 - RNA, 19 nt, Artificial Sequence
  Description of Artificial Sequence: Synthetic oligonucleotide
  Antisense strand to SEQ ID NO: 1039758
uugagcccagaacuuccag

SEQ ID NO: 1039760 - RNA, 19 nt, Artificial Sequence
  Description of Artificial Sequence: Synthetic oligonucleotide
  Sense strand starting at position 995 of SEQ ID NO: 914908
ggagauuccuccucuguau

SEQ ID NO: 1039761 - RNA, 19 nt, Artificial Sequence
  Description of Artificial Sequence: Synthetic oligonucleotide
  Antisense strand to SEQ ID NO: 1039760
auacagaggaggaaucucc

SEQ ID NO: 1039762 - RNA, 19 nt, Artificial Sequence
  Description of Artificial Sequence: Synthetic oligonucleotide
  Sense strand starting at position 997 of SEQ ID NO: 914908
agauuccuccucuguauua

SEQ ID NO: 1039763 - RNA, 19 nt, Artificial Sequence
  Description of Artificial Sequence: Synthetic oligonucleotide
  Antisense strand to SEQ ID NO: 1039762
uaauacagaggaggaaucu

SEQ ID NO: 1039764 - RNA, 19 nt, Artificial Sequence
  Description of Artificial Sequence: Synthetic oligonucleotide
  Sense strand starting at position 1010 of SEQ ID NO: 914908
guauuacuuugagcaucca

SEQ ID NO: 1039765 - RNA, 19 nt, Artificial Sequence
  Description of Artificial Sequence: Synthetic oligonucleotide
  Antisense strand to SEQ ID NO: 1039764
uggaugcucaaaguaauac

SEQ ID NO: 1039766 - RNA, 19 nt, Artificial Sequence
  Description of Artificial Sequence: Synthetic oligonucleotide
  Sense strand starting at position 1028 of SEQ ID NO: 914908
auuggaugucagcacuguu

SEQ ID NO: 1039767 - RNA, 19 nt, Artificial Sequence
  Description of Artificial Sequence: Synthetic oligonucleotide
  Antisense strand to SEQ ID NO: 1039766
aacagugcugacauccaau

SEQ ID NO: 1039768 - RNA, 19 nt, Artificial Sequence
  Description of Artificial Sequence: Synthetic oligonucleotide
  Sense strand starting at position 1102 of SEQ ID NO: 914908
augccaaucgauuauuaca

SEQ ID NO: 1039769 - RNA, 19 nt, Artificial Sequence
  Description of Artificial Sequence: Synthetic oligonucleotide
  Antisense strand to SEQ ID NO: 1039768
uguaauaaucgauuggcau

SEQ ID NO: 1039770 - RNA, 19 nt, Artificial Sequence
  Description of Artificial Sequence: Synthetic oligonucleotide
  Sense strand starting at position 1176 of SEQ ID NO: 914908
acauuugucuaauaugaag

SEQ ID NO: 1039771 - RNA, 19 nt, Artificial Sequence
  Description of Artificial Sequence: Synthetic oligonucleotide
  Antisense strand to SEQ ID NO: 1039770
cuucauauuagacaaaugu

SEQ ID NO: 1039772 - RNA, 19 nt, Artificial Sequence
  Description of Artificial Sequence: Synthetic oligonucleotide
  Sense strand starting at position 1190 of SEQ ID NO: 914908
ugaagugguaucugaguca

SEQ ID NO: 1039773 - RNA, 19 nt, Artificial Sequence
  Description of Artificial Sequence: Synthetic oligonucleotide
  Antisense strand to SEQ ID NO: 1039772
ugacucagauaccacuuca

SEQ ID NO: 1039774 - RNA, 19 nt, Artificial Sequence
  Description of Artificial Sequence: Synthetic oligonucleotide
  Sense strand starting at position 1193 of SEQ ID NO: 914908
agugguaucugagucaaag

SEQ ID NO: 1039775 - RNA, 19 nt, Artificial Sequence
  Description of Artificial Sequence: Synthetic oligonucleotide
  Antisense strand to SEQ ID NO: 1039774
cuuugacucagauaccacu

SEQ ID NO: 1039776 - RNA, 19 nt, Artificial Sequence
  Description of Artificial Sequence: Synthetic oligonucleotide
  Sense strand starting at position 1195 of SEQ ID NO: 914908
ugguaucugagucaaagua

SEQ ID NO: 1039777 - RNA, 19 nt, Artificial Sequence
  Description of Artificial Sequence: Synthetic oligonucleotide
  Antisense strand to SEQ ID NO: 1039776
uacuuugacucagauacca

SEQ ID NO: 1039778 - RNA, 19 nt, Artificial Sequence
  Description of Artificial Sequence: Synthetic oligonucleotide
  Sense strand starting at position 1235 of SEQ ID NO: 914908
agcacuugucuacaguuua

SEQ ID NO: 1039779 - RNA, 19 nt, Artificial Sequence
  Description of Artificial Sequence: Synthetic oligonucleotide
  Antisense strand to SEQ ID NO: 1039778
uaaacuguagacaagugcu

SEQ ID NO: 1039780 - RNA, 19 nt, Artificial Sequence
  Description of Artificial Sequence: Synthetic oligonucleotide
  Sense strand starting at position 1352 of SEQ ID NO: 914908
gguaaaggauguucuugca

SEQ ID NO: 1039781 - RNA, 19 nt, Artificial Sequence
  Description of Artificial Sequence: Synthetic oligonucleotide
  Antisense strand to SEQ ID NO: 1039780
ugcaagaacauccuuuacc

SEQ ID NO: 1039782 - RNA, 19 nt, Artificial Sequence
  Description of Artificial Sequence: Synthetic oligonucleotide
  Sense strand starting at position 1379 of SEQ ID NO: 914908
cuugauuguaauggaugaa

SEQ ID NO: 1039783 - RNA, 19 nt, Artificial Sequence
  Description of Artificial Sequence: Synthetic oligonucleotide
  Antisense strand to SEQ ID NO: 1039782
uucauccauuacaaucaag

SEQ ID NO: 1039784 - RNA, 19 nt, Artificial Sequence
  Description of Artificial Sequence: Synthetic oligonucleotide
  Sense strand starting at position 1555 of SEQ ID NO: 914908
ggccgcagagcuuaagaga

SEQ ID NO: 1039785 - RNA, 19 nt, Artificial Sequence
  Description of Artificial Sequence: Synthetic oligonucleotide
  Antisense strand to SEQ ID NO: 1039784
ucucuuaagcucugcggcc

SEQ ID NO: 1039786 - RNA, 19 nt, Artificial Sequence
  Description of Artificial Sequence: Synthetic oligonucleotide
  Sense strand starting at position 1588 of SEQ ID NO: 914908
gguguaggucaccagucau

SEQ ID NO: 1039787 - RNA, 19 nt, Artificial Sequence
  Description of Artificial Sequence: Synthetic oligonucleotide
  Antisense strand to SEQ ID NO: 1039786
augacuggugaccuacacc

SEQ ID NO: 1039788 - RNA, 19 nt, Artificial Sequence
  Description of Artificial Sequence: Synthetic oligonucleotide
  Sense strand starting at position 1731 of SEQ ID NO: 914908
agauuugauuaagagccaa

SEQ ID NO: 1039789 - RNA, 19 nt, Artificial Sequence
  Description of Artificial Sequence: Synthetic oligonucleotide
  Antisense strand to SEQ ID NO: 1039788
uuggcucuuaaucaaaucu

SEQ ID NO: 1039790 - RNA, 19 nt, Artificial Sequence
  Description of Artificial Sequence: Synthetic oligonucleotide
  Sense strand starting at position 1803 of SEQ ID NO: 914908
cagauuuagucgcugaccu

SEQ ID NO: 1039791 - RNA, 19 nt, Artificial Sequence
  Description of Artificial Sequence: Synthetic oligonucleotide
  Antisense strand to SEQ ID NO: 1039790
aggucagcgacuaaaucug

SEQ ID NO: 1039792 - RNA, 19 nt, Artificial Sequence
  Description of Artificial Sequence: Synthetic oligonucleotide
  Sense strand starting at position 1905 of SEQ ID NO: 914908
ggaggugucaucugaccaa

SEQ ID NO: 1039793 - RNA, 19 nt, Artificial Sequence
  Description of Artificial Sequence: Synthetic oligonucleotide
  Antisense strand to SEQ ID NO: 1039792
uuggucagaugacaccucc

SEQ ID NO: 1039794 - RNA, 19 nt, Artificial Sequence
  Description of Artificial Sequence: Synthetic oligonucleotide
  Sense strand starting at position 1909 of SEQ ID NO: 914908
gugucaucugaccaaacca

SEQ ID NO: 1039795 - RNA, 19 nt, Artificial Sequence
  Description of Artificial Sequence: Synthetic oligonucleotide
  Antisense strand to SEQ ID NO: 1039794
ugguuuggucagaugacac

SEQ ID NO: 1039796 - RNA, 19 nt, Artificial Sequence
  Description of Artificial Sequence: Synthetic oligonucleotide
  Sense strand starting at position 2137 of SEQ ID NO: 914908
ucccgucgugacucaguua

SEQ ID NO: 1039797 - RNA, 19 nt, Artificial Sequence
  Description of Artificial Sequence: Synthetic oligonucleotide
  Antisense strand to SEQ ID NO: 1039796
uaacugagucacgacggga

SEQ ID NO: 1039798 - RNA, 19 nt, Artificial Sequence
  Description of Artificial Sequence: Synthetic oligonucleotide
  Sense strand starting at position 2201 of SEQ ID NO: 914908
ccuaaagccuaggcgaaau

SEQ ID NO: 1039799 - RNA, 19 nt, Artificial Sequence
  Description of Artificial Sequence: Synthetic oligonucleotide
  Antisense strand to SEQ ID NO: 1039798
auuucgccuaggcuuuagg

SEQ ID NO: 1039800 - RNA, 19 nt, Artificial Sequence
  Description of Artificial Sequence: Synthetic oligonucleotide
  Sense strand starting at position 2233 of SEQ ID NO: 914908
ccagaaugcccuugguuaa

SEQ ID NO: 1039801 - RNA, 19 nt, Artificial Sequence
  Description of Artificial Sequence: Synthetic oligonucleotide
  Antisense strand to SEQ ID NO: 1039800
uuaaccaagggcauucugg

SEQ ID NO: 1039802 - RNA, 19 nt, Artificial Sequence
  Description of Artificial Sequence: Synthetic oligonucleotide
  Sense strand starting at position 2234 of SEQ ID NO: 914908
cagaaugcccuugguuaag

SEQ ID NO: 1039803 - RNA, 19 nt, Artificial Sequence
  Description of Artificial Sequence: Synthetic oligonucleotide
  Antisense strand to SEQ ID NO: 1039802
cuuaaccaagggcauucug

SEQ ID NO: 1039804 - RNA, 19 nt, Artificial Sequence
  Description of Artificial Sequence: Synthetic oligonucleotide
  Sense strand starting at position 2492 of SEQ ID NO: 914908
acuucugcggccuaaagaa

SEQ ID NO: 1039805 - RNA, 19 nt, Artificial Sequence
  Description of Artificial Sequence: Synthetic oligonucleotide
  Antisense strand to SEQ ID NO: 1039804
uucuuuaggccgcagaagu

SEQ ID NO: 1039806 - RNA, 19 nt, Artificial Sequence
  Description of Artificial Sequence: Synthetic oligonucleotide
  Sense strand starting at position 2696 of SEQ ID NO: 914908
ugggauugucgcgagacac

SEQ ID NO: 1039807 - RNA, 19 nt, Artificial Sequence
  Description of Artificial Sequence: Synthetic oligonucleotide
  Antisense strand to SEQ ID NO: 1039806
gugucucgcgacaauccca

SEQ ID NO: 1039808 - RNA, 19 nt, Artificial Sequence
  Description of Artificial Sequence: Synthetic oligonucleotide
  Sense strand starting at position 3450 of SEQ ID NO: 914908
gacuccugugaguaacagu

SEQ ID NO: 1039809 - RNA, 19 nt, Artificial Sequence
  Description of Artificial Sequence: Synthetic oligonucleotide
  Antisense strand to SEQ ID NO: 1039808
acuguuacucacaggaguc

SEQ ID NO: 1039810 - RNA, 19 nt, Artificial Sequence
  Description of Artificial Sequence: Synthetic oligonucleotide
  Sense strand starting at position 3978 of SEQ ID NO: 914908
ugagaaauuugccacuuau

SEQ ID NO: 1039811 - RNA, 19 nt, Artificial Sequence
  Description of Artificial Sequence: Synthetic oligonucleotide
  Antisense strand to SEQ ID NO: 1039810
auaaguggcaaauuucuca

SEQ ID NO: 1039812 - RNA, 19 nt, Artificial Sequence
  Description of Artificial Sequence: Synthetic oligonucleotide
  Sense strand starting at position 186 of SEQ ID NO: 914909
gaagaaacuguugaagugu

SEQ ID NO: 1039813 - RNA, 19 nt, Artificial Sequence
  Description of Artificial Sequence: Synthetic oligonucleotide
  Antisense strand to SEQ ID NO: 1039812
acacuucaacaguuucuuc

SEQ ID NO: 1039814 - RNA, 19 nt, Artificial Sequence
  Description of Artificial Sequence: Synthetic oligonucleotide
  Sense strand starting at position 235 of SEQ ID NO: 914909
acuggauaaucugcacaaa

SEQ ID NO: 1039815 - RNA, 19 nt, Artificial Sequence
  Description of Artificial Sequence: Synthetic oligonucleotide
  Antisense strand to SEQ ID NO: 1039814
uuugugcagauuauccagu

SEQ ID NO: 1039816 - RNA, 19 nt, Artificial Sequence
  Description of Artificial Sequence: Synthetic oligonucleotide
  Sense strand starting at position 359 of SEQ ID NO: 914909
ggguuacuucauuggacag

SEQ ID NO: 1039817 - RNA, 19 nt, Artificial Sequence
  Description of Artificial Sequence: Synthetic oligonucleotide
  Antisense strand to SEQ ID NO: 1039816
cuguccaaugaaguaaccc

SEQ ID NO: 1039818 - RNA, 19 nt, Artificial Sequence
  Description of Artificial Sequence: Synthetic oligonucleotide
  Sense strand starting at position 610 of SEQ ID NO: 914909
ugaauuauuugccaugaaa

SEQ ID NO: 1039819 - RNA, 19 nt, Artificial Sequence
  Description of Artificial Sequence: Synthetic oligonucleotide
  Antisense strand to SEQ ID NO: 1039818
uuucauggcaaauaauuca

SEQ ID NO: 1039820 - RNA, 19 nt, Artificial Sequence
  Description of Artificial Sequence: Synthetic oligonucleotide
  Sense strand starting at position 726 of SEQ ID NO: 914909
ccagcacucacguaggaua

SEQ ID NO: 1039821 - RNA, 19 nt, Artificial Sequence
  Description of Artificial Sequence: Synthetic oligonucleotide
  Antisense strand to SEQ ID NO: 1039820
uauccuacgugagugcugg

SEQ ID NO: 1039822 - RNA, 19 nt, Artificial Sequence
  Description of Artificial Sequence: Synthetic oligonucleotide
  Sense strand starting at position 774 of SEQ ID NO: 914909
aagagucuggcccaauauc

SEQ ID NO: 1039823 - RNA, 19 nt, Artificial Sequence
  Description of Artificial Sequence: Synthetic oligonucleotide
  Antisense strand to SEQ ID NO: 1039822
gauauugggccagacucuu

SEQ ID NO: 1039824 - RNA, 19 nt, Artificial Sequence
  Description of Artificial Sequence: Synthetic oligonucleotide
  Sense strand starting at position 869 of SEQ ID NO: 914909
ccugguaauuugcccuuua

SEQ ID NO: 1039825 - RNA, 19 nt, Artificial Sequence
  Description of Artificial Sequence: Synthetic oligonucleotide
  Antisense strand to SEQ ID NO: 1039824
uaaagggcaaauuaccagg

SEQ ID NO: 1039826 - RNA, 19 nt, Artificial Sequence
  Description of Artificial Sequence: Synthetic oligonucleotide
  Sense strand starting at position 940 of SEQ ID NO: 914909
auguaacaaugugcaagau

SEQ ID NO: 1039827 - RNA, 19 nt, Artificial Sequence
  Description of Artificial Sequence: Synthetic oligonucleotide
  Antisense strand to SEQ ID NO: 1039826
aucuugcacauuguuacau

SEQ ID NO: 1039828 - RNA, 19 nt, Artificial Sequence
  Description of Artificial Sequence: Synthetic oligonucleotide
  Sense strand starting at position 941 of SEQ ID NO: 914909
uguaacaaugugcaagaua

SEQ ID NO: 1039829 - RNA, 19 nt, Artificial Sequence
  Description of Artificial Sequence: Synthetic oligonucleotide
  Antisense strand to SEQ ID NO: 1039828
uaucuugcacauuguuaca

SEQ ID NO: 1039830 - RNA, 19 nt, Artificial Sequence
  Description of Artificial Sequence: Synthetic oligonucleotide
  Sense strand starting at position 1042 of SEQ ID NO: 914909
uuuggaaauuggguauagu

SEQ ID NO: 1039831 - RNA, 19 nt, Artificial Sequence
  Description of Artificial Sequence: Synthetic oligonucleotide
  Antisense strand to SEQ ID NO: 1039830
acuauacccaauuuccaaa

SEQ ID NO: 1039832 - RNA, 19 nt, Artificial Sequence
  Description of Artificial Sequence: Synthetic oligonucleotide
  Sense strand starting at position 1043 of SEQ ID NO: 914909
uuggaaauuggguauaguu

SEQ ID NO: 1039833 - RNA, 19 nt, Artificial Sequence
  Description of Artificial Sequence: Synthetic oligonucleotide
  Antisense strand to SEQ ID NO: 1039832
aacuauacccaauuuccaa

SEQ ID NO: 1039834 - RNA, 19 nt, Artificial Sequence
  Description of Artificial Sequence: Synthetic oligonucleotide
  Sense strand starting at position 1066 of SEQ ID NO: 914909
gacucaguguuaguuaaga

SEQ ID NO: 1039835 - RNA, 19 nt, Artificial Sequence
  Description of Artificial Sequence: Synthetic oligonucleotide
  Antisense strand to SEQ ID NO: 1039834
ucuuaacuaacacugaguc

SEQ ID NO: 1039836 - RNA, 19 nt, Artificial Sequence
  Description of Artificial Sequence: Synthetic oligonucleotide
  Sense strand starting at position 1068 of SEQ ID NO: 914909
cucaguguuaguuaagaug

SEQ ID NO: 1039837 - RNA, 19 nt, Artificial Sequence
  Description of Artificial Sequence: Synthetic oligonucleotide
  Antisense strand to SEQ ID NO: 1039836
caucuuaacuaacacugag

SEQ ID NO: 1039838 - RNA, 19 nt, Artificial Sequence
  Description of Artificial Sequence: Synthetic oligonucleotide
  Sense strand starting at position 1147 of SEQ ID NO: 914909
acuccaaagguuugaaauc

SEQ ID NO: 1039839 - RNA, 19 nt, Artificial Sequence
  Description of Artificial Sequence: Synthetic oligonucleotide
  Antisense strand to SEQ ID NO: 1039838
gauuucaaaccuuuggagu

SEQ ID NO: 1039840 - RNA, 19 nt, Artificial Sequence
  Description of Artificial Sequence: Synthetic oligonucleotide
  Sense strand starting at position 1177 of SEQ ID NO: 914909
ugguuaauaugguuaauag

SEQ ID NO: 1039841 - RNA, 19 nt, Artificial Sequence
  Description of Artificial Sequence: Synthetic oligonucleotide
  Antisense strand to SEQ ID NO: 1039840
cuauuaaccauauuaacca

SEQ ID NO: 1039842 - RNA, 19 nt, Artificial Sequence
  Description of Artificial Sequence: Synthetic oligonucleotide
  Sense strand starting at position 1178 of SEQ ID NO: 914909
gguuaauaugguuaauagu

SEQ ID NO: 1039843 - RNA, 19 nt, Artificial Sequence
  Description of Artificial Sequence: Synthetic oligonucleotide
  Antisense strand to SEQ ID NO: 1039842
acuauuaaccauauuaacc

SEQ ID NO: 1039844 - RNA, 19 nt, Artificial Sequence
  Description of Artificial Sequence: Synthetic oligonucleotide
  Sense strand starting at position 1214 of SEQ ID NO: 914909
uugucuuagaguggaagga

SEQ ID NO: 1039845 - RNA, 19 nt, Artificial Sequence
  Description of Artificial Sequence: Synthetic oligonucleotide
  Antisense strand to SEQ ID NO: 1039844
uccuuccacucuaagacaa

SEQ ID NO: 1039846 - RNA, 19 nt, Artificial Sequence
  Description of Artificial Sequence: Synthetic oligonucleotide
  Sense strand starting at position 1223 of SEQ ID NO: 914909
aguggaaggaggugucaua

SEQ ID NO: 1039847 - RNA, 19 nt, Artificial Sequence
  Description of Artificial Sequence: Synthetic oligonucleotide
  Antisense strand to SEQ ID NO: 1039846
uaugacaccuccuuccacu

SEQ ID NO: 1039848 - RNA, 19 nt, Artificial Sequence
  Description of Artificial Sequence: Synthetic oligonucleotide
  Sense strand starting at position 1319 of SEQ ID NO: 914909
ugcuaugccuucuugauuu

SEQ ID NO: 1039849 - RNA, 19 nt, Artificial Sequence
  Description of Artificial Sequence: Synthetic oligonucleotide
  Antisense strand to SEQ ID NO: 1039848
aaaucaagaaggcauagca

SEQ ID NO: 1039850 - RNA, 19 nt, Artificial Sequence
  Description of Artificial Sequence: Synthetic oligonucleotide
  Sense strand starting at position 1599 of SEQ ID NO: 914909
guuuauuccgcgguuagca

SEQ ID NO: 1039851 - RNA, 19 nt, Artificial Sequence
  Description of Artificial Sequence: Synthetic oligonucleotide
  Antisense strand to SEQ ID NO: 1039850
ugcuaaccgcggaauaaac

SEQ ID NO: 1039852 - RNA, 19 nt, Artificial Sequence
  Description of Artificial Sequence: Synthetic oligonucleotide
  Sense strand starting at position 1753 of SEQ ID NO: 914909
ucagucuagccagaaguau

SEQ ID NO: 1039853 - RNA, 19 nt, Artificial Sequence
  Description of Artificial Sequence: Synthetic oligonucleotide
  Antisense strand to SEQ ID NO: 1039852
auacuucuggcuagacuga

SEQ ID NO: 1039854 - RNA, 19 nt, Artificial Sequence
  Description of Artificial Sequence: Synthetic oligonucleotide
  Sense strand starting at position 1982 of SEQ ID NO: 914909
ccuguauuugcuuagcacu

SEQ ID NO: 1039855 - RNA, 19 nt, Artificial Sequence
  Description of Artificial Sequence: Synthetic oligonucleotide
  Antisense strand to SEQ ID NO: 1039854
agugcuaagcaaauacagg

SEQ ID NO: 1039856 - RNA, 19 nt, Artificial Sequence
  Description of Artificial Sequence: Synthetic oligonucleotide
  Sense strand starting at position 2325 of SEQ ID NO: 914909
agaguugaccagcauccau

SEQ ID NO: 1039857 - RNA, 19 nt, Artificial Sequence
  Description of Artificial Sequence: Synthetic oligonucleotide
  Antisense strand to SEQ ID NO: 1039856
auggaugcuggucaacucu

SEQ ID NO: 1039858 - RNA, 19 nt, Artificial Sequence
  Description of Artificial Sequence: Synthetic oligonucleotide
  Sense strand starting at position 2367 of SEQ ID NO: 914909
cagaaauuaugguuaucug

SEQ ID NO: 1039859 - RNA, 19 nt, Artificial Sequence
  Description of Artificial Sequence: Synthetic oligonucleotide
  Antisense strand to SEQ ID NO: 1039858
cagauaaccauaauuucug

SEQ ID NO: 1039860 - RNA, 19 nt, Artificial Sequence
  Description of Artificial Sequence: Synthetic oligonucleotide
  Sense strand starting at position 2458 of SEQ ID NO: 914909
uuuacucaguggucccaaa

SEQ ID NO: 1039861 - RNA, 19 nt, Artificial Sequence
  Description of Artificial Sequence: Synthetic oligonucleotide
  Antisense strand to SEQ ID NO: 1039860
uuugggaccacugaguaaa

SEQ ID NO: 1039862 - RNA, 19 nt, Artificial Sequence
  Description of Artificial Sequence: Synthetic oligonucleotide
  Sense strand starting at position 2483 of SEQ ID NO: 914909
caucuauaggguggucaca

SEQ ID NO: 1039863 - RNA, 19 nt, Artificial Sequence
  Description of Artificial Sequence: Synthetic oligonucleotide
  Antisense strand to SEQ ID NO: 1039862
ugugaccacccuauagaug

SEQ ID NO: 1039864 - RNA, 19 nt, Artificial Sequence
  Description of Artificial Sequence: Synthetic oligonucleotide
  Sense strand starting at position 2485 of SEQ ID NO: 914909
ucuauaggguggucacaaa

SEQ ID NO: 1039865 - RNA, 19 nt, Artificial Sequence
  Description of Artificial Sequence: Synthetic oligonucleotide
  Antisense strand to SEQ ID NO: 1039864
uuugugaccacccuauaga

SEQ ID NO: 1039866 - RNA, 19 nt, Artificial Sequence
  Description of Artificial Sequence: Synthetic oligonucleotide
  Sense strand starting at position 2691 of SEQ ID NO: 914909
gcaauacguaaggaacuau

SEQ ID NO: 1039867 - RNA, 19 nt, Artificial Sequence
  Description of Artificial Sequence: Synthetic oligonucleotide
  Antisense strand to SEQ ID NO: 1039866
auaguuccuuacguauugc

SEQ ID NO: 1039868 - RNA, 19 nt, Artificial Sequence
  Description of Artificial Sequence: Synthetic oligonucleotide
  Sense strand starting at position 2709 of SEQ ID NO: 914909
uaauuauggcccugugaaa

SEQ ID NO: 1039869 - RNA, 19 nt, Artificial Sequence
  Description of Artificial Sequence: Synthetic oligonucleotide
  Antisense strand to SEQ ID NO: 1039868
uuucacagggccauaauua

SEQ ID NO: 1039870 - RNA, 19 nt, Artificial Sequence
  Description of Artificial Sequence: Synthetic oligonucleotide
  Sense strand starting at position 2831 of SEQ ID NO: 914909
cugggaucuuuccucuaca

SEQ ID NO: 1039871 - RNA, 19 nt, Artificial Sequence
  Description of Artificial Sequence: Synthetic oligonucleotide
  Antisense strand to SEQ ID NO: 1039870
uguagaggaaagaucccag

SEQ ID NO: 1039872 - RNA, 19 nt, Artificial Sequence
  Description of Artificial Sequence: Synthetic oligonucleotide
  Sense strand starting at position 2832 of SEQ ID NO: 914909
ugggaucuuuccucuacaa

SEQ ID NO: 1039873 - RNA, 19 nt, Artificial Sequence
  Description of Artificial Sequence: Synthetic oligonucleotide
  Antisense strand to SEQ ID NO: 1039872
uuguagaggaaagauccca

SEQ ID NO: 1039874 - RNA, 19 nt, Artificial Sequence
  Description of Artificial Sequence: Synthetic oligonucleotide
  Sense strand starting at position 3244 of SEQ ID NO: 914909
ggagauuccuccucuguau

SEQ ID NO: 1039875 - RNA, 19 nt, Artificial Sequence
  Description of Artificial Sequence: Synthetic oligonucleotide
  Antisense strand to SEQ ID NO: 1039874
auacagaggaggaaucucc

SEQ ID NO: 1039876 - RNA, 19 nt, Artificial Sequence
  Description of Artificial Sequence: Synthetic oligonucleotide
  Sense strand starting at position 3246 of SEQ ID NO: 914909
agauuccuccucuguauua

SEQ ID NO: 1039877 - RNA, 19 nt, Artificial Sequence
  Description of Artificial Sequence: Synthetic oligonucleotide
  Antisense strand to SEQ ID NO: 1039876
uaauacagaggaggaaucu

SEQ ID NO: 1039878 - RNA, 19 nt, Artificial Sequence
  Description of Artificial Sequence: Synthetic oligonucleotide
  Sense strand starting at position 3277 of SEQ ID NO: 914909
auuggaugucagcacuguu

SEQ ID NO: 1039879 - RNA, 19 nt, Artificial Sequence
  Description of Artificial Sequence: Synthetic oligonucleotide
  Antisense strand to SEQ ID NO: 1039878
aacagugcugacauccaau

SEQ ID NO: 1039880 - RNA, 19 nt, Artificial Sequence
  Description of Artificial Sequence: Synthetic oligonucleotide
  Sense strand starting at position 3351 of SEQ ID NO: 914909
augccaaucgauuauuaca

SEQ ID NO: 1039881 - RNA, 19 nt, Artificial Sequence
  Description of Artificial Sequence: Synthetic oligonucleotide
  Antisense strand to SEQ ID NO: 1039880
uguaauaaucgauuggcau

SEQ ID NO: 1039882 - RNA, 19 nt, Artificial Sequence
  Description of Artificial Sequence: Synthetic oligonucleotide
  Sense strand starting at position 3425 of SEQ ID NO: 914909
acauuugucuaauaugaag

SEQ ID NO: 1039883 - RNA, 19 nt, Artificial Sequence
  Description of Artificial Sequence: Synthetic oligonucleotide
  Antisense strand to SEQ ID NO: 1039882
cuucauauuagacaaaugu

SEQ ID NO: 1039884 - RNA, 19 nt, Artificial Sequence
  Description of Artificial Sequence: Synthetic oligonucleotide
  Sense strand starting at position 3442 of SEQ ID NO: 914909
agugguaucugagucaaag

SEQ ID NO: 1039885 - RNA, 19 nt, Artificial Sequence
  Description of Artificial Sequence: Synthetic oligonucleotide
  Antisense strand to SEQ ID NO: 1039884
cuuugacucagauaccacu

SEQ ID NO: 1039886 - RNA, 19 nt, Artificial Sequence
  Description of Artificial Sequence: Synthetic oligonucleotide
  Sense strand starting at position 3444 of SEQ ID NO: 914909
ugguaucugagucaaagua

SEQ ID NO: 1039887 - RNA, 19 nt, Artificial Sequence
  Description of Artificial Sequence: Synthetic oligonucleotide
  Antisense strand to SEQ ID NO: 1039886
uacuuugacucagauacca

SEQ ID NO: 1039888 - RNA, 19 nt, Artificial Sequence
  Description of Artificial Sequence: Synthetic oligonucleotide
  Sense strand starting at position 3628 of SEQ ID NO: 914909
cuugauuguaauggaugaa

SEQ ID NO: 1039889 - RNA, 19 nt, Artificial Sequence
  Description of Artificial Sequence: Synthetic oligonucleotide
  Antisense strand to SEQ ID NO: 1039888
uucauccauuacaaucaag

SEQ ID NO: 1039890 - RNA, 19 nt, Artificial Sequence
  Description of Artificial Sequence: Synthetic oligonucleotide
  Sense strand starting at position 3980 of SEQ ID NO: 914909
agauuugauuaagagccaa

SEQ ID NO: 1039891 - RNA, 19 nt, Artificial Sequence
  Description of Artificial Sequence: Synthetic oligonucleotide
  Antisense strand to SEQ ID NO: 1039890
uuggcucuuaaucaaaucu

SEQ ID NO: 1039892 - RNA, 19 nt, Artificial Sequence
  Description of Artificial Sequence: Synthetic oligonucleotide
  Sense strand starting at position 302 of SEQ ID NO: 914910
cgcauccucaccgguagau

SEQ ID NO: 1039893 - RNA, 19 nt, Artificial Sequence
  Description of Artificial Sequence: Synthetic oligonucleotide
  Antisense strand to SEQ ID NO: 1039892
aucuaccggugaggaugcg

SEQ ID NO: 1039894 - RNA, 19 nt, Artificial Sequence
  Description of Artificial Sequence: Synthetic oligonucleotide
  Sense strand starting at position 304 of SEQ ID NO: 914910
cauccucaccgguagauga

SEQ ID NO: 1039895 - RNA, 19 nt, Artificial Sequence
  Description of Artificial Sequence: Synthetic oligonucleotide
  Antisense strand to SEQ ID NO: 1039894
ucaucuaccggugaggaug

SEQ ID NO: 1039896 - RNA, 19 nt, Artificial Sequence
  Description of Artificial Sequence: Synthetic oligonucleotide
  Sense strand starting at position 2688 of SEQ ID NO: 914910
gggcgucuuugucacaugu

SEQ ID NO: 1039897 - RNA, 19 nt, Artificial Sequence
  Description of Artificial Sequence: Synthetic oligonucleotide
  Antisense strand to SEQ ID NO: 1039896
acaugugacaaagacgccc

SEQ ID NO: 1039898 - RNA, 19 nt, Artificial Sequence
  Description of Artificial Sequence: Synthetic oligonucleotide
  Sense strand starting at position 3225 of SEQ ID NO: 914910
accagcuccucucagagaa

SEQ ID NO: 1039899 - RNA, 19 nt, Artificial Sequence
  Description of Artificial Sequence: Synthetic oligonucleotide
  Antisense strand to SEQ ID NO: 1039898
uucucugagaggagcuggu

SEQ ID NO: 1039900 - RNA, 19 nt, Artificial Sequence
  Description of Artificial Sequence: Synthetic oligonucleotide
  Sense strand starting at position 3274 of SEQ ID NO: 914910
uuugcuuccugguugagaa

SEQ ID NO: 1039901 - RNA, 19 nt, Artificial Sequence
  Description of Artificial Sequence: Synthetic oligonucleotide
  Antisense strand to SEQ ID NO: 1039900
uucucaaccaggaagcaaa

SEQ ID NO: 1039902 - RNA, 19 nt, Artificial Sequence
  Description of Artificial Sequence: Synthetic oligonucleotide
  Sense strand starting at position 3275 of SEQ ID NO: 914910
uugcuuccugguugagaaa

SEQ ID NO: 1039903 - RNA, 19 nt, Artificial Sequence
  Description of Artificial Sequence: Synthetic oligonucleotide
  Antisense strand to SEQ ID NO: 1039902
uuucucaaccaggaagcaa

SEQ ID NO: 1039904 - RNA, 19 nt, Artificial Sequence
  Description of Artificial Sequence: Synthetic oligonucleotide
  Sense strand starting at position 3393 of SEQ ID NO: 914910
cgugucuccugguccuuaa

SEQ ID NO: 1039905 - RNA, 19 nt, Artificial Sequence
  Description of Artificial Sequence: Synthetic oligonucleotide
  Antisense strand to SEQ ID NO: 1039904
uuaaggaccaggagacacg

SEQ ID NO: 1039906 - RNA, 19 nt, Artificial Sequence
  Description of Artificial Sequence: Synthetic oligonucleotide
  Sense strand starting at position 3577 of SEQ ID NO: 914910
ccaggagaguuggauggua

SEQ ID NO: 1039907 - RNA, 19 nt, Artificial Sequence
  Description of Artificial Sequence: Synthetic oligonucleotide
  Antisense strand to SEQ ID NO: 1039906
uaccauccaacucuccugg

SEQ ID NO: 1039908 - RNA, 19 nt, Artificial Sequence
  Description of Artificial Sequence: Synthetic oligonucleotide
  Sense strand starting at position 3579 of SEQ ID NO: 914910
aggagaguuggaugguaca

SEQ ID NO: 1039909 - RNA, 19 nt, Artificial Sequence
  Description of Artificial Sequence: Synthetic oligonucleotide
  Antisense strand to SEQ ID NO: 1039908
uguaccauccaacucuccu

SEQ ID NO: 1039910 - RNA, 19 nt, Artificial Sequence
  Description of Artificial Sequence: Synthetic oligonucleotide
  Sense strand starting at position 3695 of SEQ ID NO: 914910
ucagcuguggcguuuguaa

SEQ ID NO: 1039911 - RNA, 19 nt, Artificial Sequence
  Description of Artificial Sequence: Synthetic oligonucleotide
  Antisense strand to SEQ ID NO: 1039910
uuacaaacgccacagcuga

SEQ ID NO: 1039912 - RNA, 19 nt, Artificial Sequence
  Description of Artificial Sequence: Synthetic oligonucleotide
  Sense strand starting at position 3721 of SEQ ID NO: 914910
gggauucaguccuggugca

SEQ ID NO: 1039913 - RNA, 19 nt, Artificial Sequence
  Description of Artificial Sequence: Synthetic oligonucleotide
  Antisense strand to SEQ ID NO: 1039912
ugcaccaggacugaauccc

SEQ ID NO: 1039914 - RNA, 19 nt, Artificial Sequence
  Description of Artificial Sequence: Synthetic oligonucleotide
  Sense strand starting at position 3957 of SEQ ID NO: 914910
ccgcaugucuguugggaug

SEQ ID NO: 1039915 - RNA, 19 nt, Artificial Sequence
  Description of Artificial Sequence: Synthetic oligonucleotide
  Antisense strand to SEQ ID NO: 1039914
caucccaacagacaugcgg

SEQ ID NO: 1039916 - RNA, 19 nt, Artificial Sequence
  Description of Artificial Sequence: Synthetic oligonucleotide
  Sense strand starting at position 3959 of SEQ ID NO: 914910
gcaugucuguugggaugag

SEQ ID NO: 1039917 - RNA, 19 nt, Artificial Sequence
  Description of Artificial Sequence: Synthetic oligonucleotide
  Antisense strand to SEQ ID NO: 1039916
cucaucccaacagacaugc

SEQ ID NO: 1039918 - RNA, 19 nt, Artificial Sequence
  Description of Artificial Sequence: Synthetic oligonucleotide
  Sense strand starting at position 3969 of SEQ ID NO: 914910
ugggaugaggcacgagaau

SEQ ID NO: 1039919 - RNA, 19 nt, Artificial Sequence
  Description of Artificial Sequence: Synthetic oligonucleotide
  Antisense strand to SEQ ID NO: 1039918
auucucgugccucauccca

SEQ ID NO: 1039920 - RNA, 19 nt, Artificial Sequence
  Description of Artificial Sequence: Synthetic oligonucleotide
  Sense strand starting at position 3978 of SEQ ID NO: 914910
gcacgagaaucgcauuaac

SEQ ID NO: 1039921 - RNA, 19 nt, Artificial Sequence
  Description of Artificial Sequence: Synthetic oligonucleotide
  Antisense strand to SEQ ID NO: 1039920
guuaaugcgauucucgugc

SEQ ID NO: 1039922 - RNA, 19 nt, Artificial Sequence
  Description of Artificial Sequence: Synthetic oligonucleotide
  Sense strand starting at position 3981 of SEQ ID NO: 914910
cgagaaucgcauuaaccag

SEQ ID NO: 1039923 - RNA, 19 nt, Artificial Sequence
  Description of Artificial Sequence: Synthetic oligonucleotide
  Antisense strand to SEQ ID NO: 1039922
cugguuaaugcgauucucg

SEQ ID NO: 1039924 - RNA, 19 nt, Artificial Sequence
  Description of Artificial Sequence: Synthetic oligonucleotide
  Sense strand starting at position 431 of SEQ ID NO: 914911
acccacagguaguuuaaau

SEQ ID NO: 1039925 - RNA, 19 nt, Artificial Sequence
  Description of Artificial Sequence: Synthetic oligonucleotide
  Antisense strand to SEQ ID NO: 1039924
auuuaaacuaccugugggu

SEQ ID NO: 1039926 - RNA, 19 nt, Artificial Sequence
  Description of Artificial Sequence: Synthetic oligonucleotide
  Sense strand starting at position 541 of SEQ ID NO: 914911
ggaaaucugcacugacuuu

SEQ ID NO: 1039927 - RNA, 19 nt, Artificial Sequence
  Description of Artificial Sequence: Synthetic oligonucleotide
  Antisense strand to SEQ ID NO: 1039926
aaagucagugcagauuucc

SEQ ID NO: 1039928 - RNA, 19 nt, Artificial Sequence
  Description of Artificial Sequence: Synthetic oligonucleotide
  Sense strand starting at position 569 of SEQ ID NO: 914911
agcuguccuacgugaaaga

SEQ ID NO: 1039929 - RNA, 19 nt, Artificial Sequence
  Description of Artificial Sequence: Synthetic oligonucleotide
  Antisense strand to SEQ ID NO: 1039928
ucuuucacguaggacagcu

SEQ ID NO: 1039930 - RNA, 19 nt, Artificial Sequence
  Description of Artificial Sequence: Synthetic oligonucleotide
  Sense strand starting at position 570 of SEQ ID NO: 914911
gcuguccuacgugaaagaa

SEQ ID NO: 1039931 - RNA, 19 nt, Artificial Sequence
  Description of Artificial Sequence: Synthetic oligonucleotide
  Antisense strand to SEQ ID NO: 1039930
uucuuucacguaggacagc

SEQ ID NO: 1039932 - RNA, 19 nt, Artificial Sequence
  Description of Artificial Sequence: Synthetic oligonucleotide
  Sense strand starting at position 695 of SEQ ID NO: 914911
gaugaauagcgauggguga

SEQ ID NO: 1039933 - RNA, 19 nt, Artificial Sequence
  Description of Artificial Sequence: Synthetic oligonucleotide
  Antisense strand to SEQ ID NO: 1039932
ucacccaucgcuauucauc

SEQ ID NO: 1039934 - RNA, 19 nt, Artificial Sequence
  Description of Artificial Sequence: Synthetic oligonucleotide
  Sense strand starting at position 696 of SEQ ID NO: 914911
augaauagcgaugggugaa

SEQ ID NO: 1039935 - RNA, 19 nt, Artificial Sequence
  Description of Artificial Sequence: Synthetic oligonucleotide
  Antisense strand to SEQ ID NO: 1039934
uucacccaucgcuauucau

SEQ ID NO: 1039936 - RNA, 19 nt, Artificial Sequence
  Description of Artificial Sequence: Synthetic oligonucleotide
  Sense strand starting at position 697 of SEQ ID NO: 914911
ugaauagcgaugggugaau

SEQ ID NO: 1039937 - RNA, 19 nt, Artificial Sequence
  Description of Artificial Sequence: Synthetic oligonucleotide
  Antisense strand to SEQ ID NO: 1039936
auucacccaucgcuauuca

SEQ ID NO: 1039938 - RNA, 19 nt, Artificial Sequence
  Description of Artificial Sequence: Synthetic oligonucleotide
  Sense strand starting at position 731 of SEQ ID NO: 914911
agaucaaaguucuuugauc

SEQ ID NO: 1039939 - RNA, 19 nt, Artificial Sequence
  Description of Artificial Sequence: Synthetic oligonucleotide
  Antisense strand to SEQ ID NO: 1039938
gaucaaagaacuuugaucu

SEQ ID NO: 1039940 - RNA, 19 nt, Artificial Sequence
  Description of Artificial Sequence: Synthetic oligonucleotide
  Sense strand starting at position 739 of SEQ ID NO: 914911
guucuuugaucucugggca

SEQ ID NO: 1039941 - RNA, 19 nt, Artificial Sequence
  Description of Artificial Sequence: Synthetic oligonucleotide
  Antisense strand to SEQ ID NO: 1039940
ugcccagagaucaaagaac

SEQ ID NO: 1039942 - RNA, 19 nt, Artificial Sequence
  Description of Artificial Sequence: Synthetic oligonucleotide
  Sense strand starting at position 742 of SEQ ID NO: 914911
cuuugaucucugggcacaa

SEQ ID NO: 1039943 - RNA, 19 nt, Artificial Sequence
  Description of Artificial Sequence: Synthetic oligonucleotide
  Antisense strand to SEQ ID NO: 1039942
uugugcccagagaucaaag

SEQ ID NO: 1039944 - RNA, 19 nt, Artificial Sequence
  Description of Artificial Sequence: Synthetic oligonucleotide
  Sense strand starting at position 743 of SEQ ID NO: 914911
uuugaucucugggcacaaa

SEQ ID NO: 1039945 - RNA, 19 nt, Artificial Sequence
  Description of Artificial Sequence: Synthetic oligonucleotide
  Antisense strand to SEQ ID NO: 1039944
uuugugcccagagaucaaa

SEQ ID NO: 1039946 - RNA, 19 nt, Artificial Sequence
  Description of Artificial Sequence: Synthetic oligonucleotide
  Sense strand starting at position 764 of SEQ ID NO: 914911
agggaaagcugcucaauca

SEQ ID NO: 1039947 - RNA, 19 nt, Artificial Sequence
  Description of Artificial Sequence: Synthetic oligonucleotide
  Antisense strand to SEQ ID NO: 1039946
ugauugagcagcuuucccu

SEQ ID NO: 1039948 - RNA, 19 nt, Artificial Sequence
  Description of Artificial Sequence: Synthetic oligonucleotide
  Sense strand starting at position 765 of SEQ ID NO: 914911
gggaaagcugcucaaucac

SEQ ID NO: 1039949 - RNA, 19 nt, Artificial Sequence
  Description of Artificial Sequence: Synthetic oligonucleotide
  Antisense strand to SEQ ID NO: 1039948
gugauugagcagcuuuccc

SEQ ID NO: 1039950 - RNA, 19 nt, Artificial Sequence
  Description of Artificial Sequence: Synthetic oligonucleotide
  Sense strand starting at position 1008 of SEQ ID NO: 914911
agcaguuucuucccuauau

SEQ ID NO: 1039951 - RNA, 19 nt, Artificial Sequence
  Description of Artificial Sequence: Synthetic oligonucleotide
  Antisense strand to SEQ ID NO: 1039950
auauagggaagaaacugcu

SEQ ID NO: 1039952 - RNA, 19 nt, Artificial Sequence
  Description of Artificial Sequence: Synthetic oligonucleotide
  Sense strand starting at position 1192 of SEQ ID NO: 914911
ucguucuccgaguagagga

SEQ ID NO: 1039953 - RNA, 19 nt, Artificial Sequence
  Description of Artificial Sequence: Synthetic oligonucleotide
  Antisense strand to SEQ ID NO: 1039952
uccucuacucggagaacga

SEQ ID NO: 1039954 - RNA, 19 nt, Artificial Sequence
  Description of Artificial Sequence: Synthetic oligonucleotide
  Sense strand starting at position 1206 of SEQ ID NO: 914911
gaggaaucccggugcccaa

SEQ ID NO: 1039955 - RNA, 19 nt, Artificial Sequence
  Description of Artificial Sequence: Synthetic oligonucleotide
  Antisense strand to SEQ ID NO: 1039954
uugggcaccgggauuccuc

SEQ ID NO: 1039956 - RNA, 19 nt, Artificial Sequence
  Description of Artificial Sequence: Synthetic oligonucleotide
  Sense strand starting at position 1219 of SEQ ID NO: 914911
gcccaaguaccagauucua

SEQ ID NO: 1039957 - RNA, 19 nt, Artificial Sequence
  Description of Artificial Sequence: Synthetic oligonucleotide
  Antisense strand to SEQ ID NO: 1039956
uagaaucugguacuugggc

SEQ ID NO: 1039958 - RNA, 19 nt, Artificial Sequence
  Description of Artificial Sequence: Synthetic oligonucleotide
  Sense strand starting at position 2130 of SEQ ID NO: 914911
ccacauuccuggcccgaga

SEQ ID NO: 1039959 - RNA, 19 nt, Artificial Sequence
  Description of Artificial Sequence: Synthetic oligonucleotide
  Antisense strand to SEQ ID NO: 1039958
ucucgggccaggaaugugg

SEQ ID NO: 1039960 - RNA, 19 nt, Artificial Sequence
  Description of Artificial Sequence: Synthetic oligonucleotide
  Sense strand starting at position 2353 of SEQ ID NO: 914911
aaggcuuguggaugcauaa

SEQ ID NO: 1039961 - RNA, 19 nt, Artificial Sequence
  Description of Artificial Sequence: Synthetic oligonucleotide
  Antisense strand to SEQ ID NO: 1039960
uuaugcauccacaagccuu

SEQ ID NO: 1039962 - RNA, 19 nt, Artificial Sequence
  Description of Artificial Sequence: Synthetic oligonucleotide
  Sense strand starting at position 2373 of SEQ ID NO: 914911
ccucuugggucuuuauuga

SEQ ID NO: 1039963 - RNA, 19 nt, Artificial Sequence
  Description of Artificial Sequence: Synthetic oligonucleotide
  Antisense strand to SEQ ID NO: 1039962
ucaauaaagacccaagagg

SEQ ID NO: 1039964 - RNA, 19 nt, Artificial Sequence
  Description of Artificial Sequence: Synthetic oligonucleotide
  Sense strand starting at position 2416 of SEQ ID NO: 914911
ccuggagugcuguaucuua

SEQ ID NO: 1039965 - RNA, 19 nt, Artificial Sequence
  Description of Artificial Sequence: Synthetic oligonucleotide
  Antisense strand to SEQ ID NO: 1039964
uaagauacagcacuccagg

SEQ ID NO: 1039966 - RNA, 19 nt, Artificial Sequence
  Description of Artificial Sequence: Synthetic oligonucleotide
  Sense strand starting at position 2507 of SEQ ID NO: 914911
uuguucuagggcuaaauaa

SEQ ID NO: 1039967 - RNA, 19 nt, Artificial Sequence
  Description of Artificial Sequence: Synthetic oligonucleotide
  Antisense strand to SEQ ID NO: 1039966
uuauuuagcccuagaacaa

SEQ ID NO: 1039968 - RNA, 19 nt, Artificial Sequence
  Description of Artificial Sequence: Synthetic oligonucleotide
  Sense strand starting at position 2553 of SEQ ID NO: 914911
ucacucauuuccugagaug

SEQ ID NO: 1039969 - RNA, 19 nt, Artificial Sequence
  Description of Artificial Sequence: Synthetic oligonucleotide
  Antisense strand to SEQ ID NO: 1039968
caucucaggaaaugaguga

SEQ ID NO: 1039970 - RNA, 19 nt, Artificial Sequence
  Description of Artificial Sequence: Synthetic oligonucleotide
  Sense strand starting at position 2556 of SEQ ID NO: 914911
cucauuuccugagaugguu

SEQ ID NO: 1039971 - RNA, 19 nt, Artificial Sequence
  Description of Artificial Sequence: Synthetic oligonucleotide
  Antisense strand to SEQ ID NO: 1039970
aaccaucucaggaaaugag

SEQ ID NO: 1039972 - RNA, 19 nt, Artificial Sequence
  Description of Artificial Sequence: Synthetic oligonucleotide
  Sense strand starting at position 2564 of SEQ ID NO: 914911
cugagaugguugucugggu

SEQ ID NO: 1039973 - RNA, 19 nt, Artificial Sequence
  Description of Artificial Sequence: Synthetic oligonucleotide
  Antisense strand to SEQ ID NO: 1039972
acccagacaaccaucucag

SEQ ID NO: 1039974 - RNA, 19 nt, Artificial Sequence
  Description of Artificial Sequence: Synthetic oligonucleotide
  Sense strand starting at position 2782 of SEQ ID NO: 914911
guagguccuucccucagau

SEQ ID NO: 1039975 - RNA, 19 nt, Artificial Sequence
  Description of Artificial Sequence: Synthetic oligonucleotide
  Antisense strand to SEQ ID NO: 1039974
aucugagggaaggaccuac

SEQ ID NO: 1039976 - RNA, 19 nt, Artificial Sequence
  Description of Artificial Sequence: Synthetic oligonucleotide
  Sense strand starting at position 2826 of SEQ ID NO: 914911
ucauaaacuugucucuagu

SEQ ID NO: 1039977 - RNA, 19 nt, Artificial Sequence
  Description of Artificial Sequence: Synthetic oligonucleotide
  Antisense strand to SEQ ID NO: 1039976
acuagagacaaguuuauga

SEQ ID NO: 1039978 - RNA, 19 nt, Artificial Sequence
  Description of Artificial Sequence: Synthetic oligonucleotide
  Sense strand starting at position 2858 of SEQ ID NO: 914911
guggucuacucucccuaau

SEQ ID NO: 1039979 - RNA, 19 nt, Artificial Sequence
  Description of Artificial Sequence: Synthetic oligonucleotide
  Antisense strand to SEQ ID NO: 1039978
auuagggagaguagaccac

SEQ ID NO: 1039980 - RNA, 19 nt, Artificial Sequence
  Description of Artificial Sequence: Synthetic oligonucleotide
  Sense strand starting at position 3111 of SEQ ID NO: 914911
aaaguaauuuggcauagug

SEQ ID NO: 1039981 - RNA, 19 nt, Artificial Sequence
  Description of Artificial Sequence: Synthetic oligonucleotide
  Antisense strand to SEQ ID NO: 1039980
cacuaugccaaauuacuuu

SEQ ID NO: 1039982 - RNA, 19 nt, Artificial Sequence
  Description of Artificial Sequence: Synthetic oligonucleotide
  Sense strand starting at position 3127 of SEQ ID NO: 914911
gugcaaagugguuauuaga

SEQ ID NO: 1039983 - RNA, 19 nt, Artificial Sequence
  Description of Artificial Sequence: Synthetic oligonucleotide
  Antisense strand to SEQ ID NO: 1039982
ucuaauaaccacuuugcac

SEQ ID NO: 1039984 - RNA, 19 nt, Artificial Sequence
  Description of Artificial Sequence: Synthetic oligonucleotide
  Sense strand starting at position 3130 of SEQ ID NO: 914911
caaagugguuauuagauuu

SEQ ID NO: 1039985 - RNA, 19 nt, Artificial Sequence
  Description of Artificial Sequence: Synthetic oligonucleotide
  Antisense strand to SEQ ID NO: 1039984
aaaucuaauaaccacuuug

SEQ ID NO: 1039986 - RNA, 19 nt, Artificial Sequence
  Description of Artificial Sequence: Synthetic oligonucleotide
  Sense strand starting at position 3235 of SEQ ID NO: 914911
ugaaccauacuuugcgaca

SEQ ID NO: 1039987 - RNA, 19 nt, Artificial Sequence
  Description of Artificial Sequence: Synthetic oligonucleotide
  Antisense strand to SEQ ID NO: 1039986
ugucgcaaaguaugguuca

SEQ ID NO: 1039988 - RNA, 19 nt, Artificial Sequence
  Description of Artificial Sequence: Synthetic oligonucleotide
  Sense strand starting at position 3281 of SEQ ID NO: 914911
gguguuaacuccuuguuag

SEQ ID NO: 1039989 - RNA, 19 nt, Artificial Sequence
  Description of Artificial Sequence: Synthetic oligonucleotide
  Antisense strand to SEQ ID NO: 1039988
cuaacaaggaguuaacacc

SEQ ID NO: 1039990 - RNA, 19 nt, Artificial Sequence
  Description of Artificial Sequence: Synthetic oligonucleotide
  Sense strand starting at position 3341 of SEQ ID NO: 914911
gaugcaaugugguugaacu

SEQ ID NO: 1039991 - RNA, 19 nt, Artificial Sequence
  Description of Artificial Sequence: Synthetic oligonucleotide
  Antisense strand to SEQ ID NO: 1039990
aguucaaccacauugcauc

SEQ ID NO: 1039992 - RNA, 19 nt, Artificial Sequence
  Description of Artificial Sequence: Synthetic oligonucleotide
  Sense strand starting at position 3342 of SEQ ID NO: 914911
augcaaugugguugaacua

SEQ ID NO: 1039993 - RNA, 19 nt, Artificial Sequence
  Description of Artificial Sequence: Synthetic oligonucleotide
  Antisense strand to SEQ ID NO: 1039992
uaguucaaccacauugcau

SEQ ID NO: 1039994 - RNA, 19 nt, Artificial Sequence
  Description of Artificial Sequence: Synthetic oligonucleotide
  Sense strand starting at position 3405 of SEQ ID NO: 914911
guucuucuugcugacugaa

SEQ ID NO: 1039995 - RNA, 19 nt, Artificial Sequence
  Description of Artificial Sequence: Synthetic oligonucleotide
  Antisense strand to SEQ ID NO: 1039994
uucagucagcaagaagaac

SEQ ID NO: 1039996 - RNA, 19 nt, Artificial Sequence
  Description of Artificial Sequence: Synthetic oligonucleotide
  Sense strand starting at position 3437 of SEQ ID NO: 914911
ucaggucaggcuuacauga

SEQ ID NO: 1039997 - RNA, 19 nt, Artificial Sequence
  Description of Artificial Sequence: Synthetic oligonucleotide
  Antisense strand to SEQ ID NO: 1039996
ucauguaagccugaccuga

SEQ ID NO: 1039998 - RNA, 19 nt, Artificial Sequence
  Description of Artificial Sequence: Synthetic oligonucleotide
  Sense strand starting at position 3613 of SEQ ID NO: 914911
ucauauauguugcuuauga

SEQ ID NO: 1039999 - RNA, 19 nt, Artificial Sequence
  Description of Artificial Sequence: Synthetic oligonucleotide
  Antisense strand to SEQ ID NO: 1039998
ucauaagcaacauauauga

SEQ ID NO: 1040000 - RNA, 19 nt, Artificial Sequence
  Description of Artificial Sequence: Synthetic oligonucleotide
  Sense strand starting at position 3615 of SEQ ID NO: 914911
auauauguugcuuaugaag

SEQ ID NO: 1040001 - RNA, 19 nt, Artificial Sequence
  Description of Artificial Sequence: Synthetic oligonucleotide
  Antisense strand to SEQ ID NO: 1040000
cuucauaagcaacauauau

SEQ ID NO: 1040002 - RNA, 19 nt, Artificial Sequence
  Description of Artificial Sequence: Synthetic oligonucleotide
  Sense strand starting at position 3951 of SEQ ID NO: 914911
uuuaaaucuguugggaaug

SEQ ID NO: 1040003 - RNA, 19 nt, Artificial Sequence
  Description of Artificial Sequence: Synthetic oligonucleotide
  Antisense strand to SEQ ID NO: 1040002
cauucccaacagauuuaaa

SEQ ID NO: 1040004 - RNA, 19 nt, Artificial Sequence
  Description of Artificial Sequence: Synthetic oligonucleotide
  Sense strand starting at position 139 of SEQ ID NO: 914912
aaccguucugcagaaagau

SEQ ID NO: 1040005 - RNA, 19 nt, Artificial Sequence
  Description of Artificial Sequence: Synthetic oligonucleotide
  Antisense strand to SEQ ID NO: 1040004
aucuuucugcagaacgguu

SEQ ID NO: 1040006 - RNA, 19 nt, Artificial Sequence
  Description of Artificial Sequence: Synthetic oligonucleotide
  Sense strand starting at position 148 of SEQ ID NO: 914912
gcagaaagauuccucccuu

SEQ ID NO: 1040007 - RNA, 19 nt, Artificial Sequence
  Description of Artificial Sequence: Synthetic oligonucleotide
  Antisense strand to SEQ ID NO: 1040006
aagggaggaaucuuucugc

SEQ ID NO: 1040008 - RNA, 19 nt, Artificial Sequence
  Description of Artificial Sequence: Synthetic oligonucleotide
  Sense strand starting at position 212 of SEQ ID NO: 914912
ggccuugcugccuaauguu

SEQ ID NO: 1040009 - RNA, 19 nt, Artificial Sequence
  Description of Artificial Sequence: Synthetic oligonucleotide
  Antisense strand to SEQ ID NO: 1040008
aacauuaggcagcaaggcc

SEQ ID NO: 1040010 - RNA, 19 nt, Artificial Sequence
  Description of Artificial Sequence: Synthetic oligonucleotide
  Sense strand starting at position 215 of SEQ ID NO: 914912
cuugcugccuaauguuaaa

SEQ ID NO: 1040011 - RNA, 19 nt, Artificial Sequence
  Description of Artificial Sequence: Synthetic oligonucleotide
  Antisense strand to SEQ ID NO: 1040010
uuuaacauuaggcagcaag

SEQ ID NO: 1040012 - RNA, 19 nt, Artificial Sequence
  Description of Artificial Sequence: Synthetic oligonucleotide
  Sense strand starting at position 593 of SEQ ID NO: 914912
gggugaaacuguccauaga

SEQ ID NO: 1040013 - RNA, 19 nt, Artificial Sequence
  Description of Artificial Sequence: Synthetic oligonucleotide
  Antisense strand to SEQ ID NO: 1040012
ucuauggacaguuucaccc

SEQ ID NO: 1040014 - RNA, 19 nt, Artificial Sequence
  Description of Artificial Sequence: Synthetic oligonucleotide
  Sense strand starting at position 767 of SEQ ID NO: 914912
gagacagcuguuugccuua

SEQ ID NO: 1040015 - RNA, 19 nt, Artificial Sequence
  Description of Artificial Sequence: Synthetic oligonucleotide
  Antisense strand to SEQ ID NO: 1040014
uaaggcaaacagcugucuc

SEQ ID NO: 1040016 - RNA, 19 nt, Artificial Sequence
  Description of Artificial Sequence: Synthetic oligonucleotide
  Sense strand starting at position 772 of SEQ ID NO: 914912
agcuguuugccuuaaggag

SEQ ID NO: 1040017 - RNA, 19 nt, Artificial Sequence
  Description of Artificial Sequence: Synthetic oligonucleotide
  Antisense strand to SEQ ID NO: 1040016
cuccuuaaggcaaacagcu

SEQ ID NO: 1040018 - RNA, 19 nt, Artificial Sequence
  Description of Artificial Sequence: Synthetic oligonucleotide
  Sense strand starting at position 925 of SEQ ID NO: 914912
gagaaugauuuagguagca

SEQ ID NO: 1040019 - RNA, 19 nt, Artificial Sequence
  Description of Artificial Sequence: Synthetic oligonucleotide
  Antisense strand to SEQ ID NO: 1040018
ugcuaccuaaaucauucuc

SEQ ID NO: 1040020 - RNA, 19 nt, Artificial Sequence
  Description of Artificial Sequence: Synthetic oligonucleotide
  Sense strand starting at position 941 of SEQ ID NO: 914912
gcaagaggcuugcuugaaa

SEQ ID NO: 1040021 - RNA, 19 nt, Artificial Sequence
  Description of Artificial Sequence: Synthetic oligonucleotide
  Antisense strand to SEQ ID NO: 1040020
uuucaagcaagccucuugc

SEQ ID NO: 1040022 - RNA, 19 nt, Artificial Sequence
  Description of Artificial Sequence: Synthetic oligonucleotide
  Sense strand starting at position 997 of SEQ ID NO: 914912
agcguuucacgacugcuua

SEQ ID NO: 1040023 - RNA, 19 nt, Artificial Sequence
  Description of Artificial Sequence: Synthetic oligonucleotide
  Antisense strand to SEQ ID NO: 1040022
uaagcagucgugaaacgcu

SEQ ID NO: 1040024 - RNA, 19 nt, Artificial Sequence
  Description of Artificial Sequence: Synthetic oligonucleotide
  Sense strand starting at position 998 of SEQ ID NO: 914912
gcguuucacgacugcuuaa

SEQ ID NO: 1040025 - RNA, 19 nt, Artificial Sequence
  Description of Artificial Sequence: Synthetic oligonucleotide
  Antisense strand to SEQ ID NO: 1040024
uuaagcagucgugaaacgc

SEQ ID NO: 1040026 - RNA, 19 nt, Artificial Sequence
  Description of Artificial Sequence: Synthetic oligonucleotide
  Sense strand starting at position 1009 of SEQ ID NO: 914912
cugcuuaaguuuccugagu

SEQ ID NO: 1040027 - RNA, 19 nt, Artificial Sequence
  Description of Artificial Sequence: Synthetic oligonucleotide
  Antisense strand to SEQ ID NO: 1040026
acucaggaaacuuaagcag

SEQ ID NO: 1040028 - RNA, 19 nt, Artificial Sequence
  Description of Artificial Sequence: Synthetic oligonucleotide
  Sense strand starting at position 1332 of SEQ ID NO: 914912
agaacuuucucgcugcaac

SEQ ID NO: 1040029 - RNA, 19 nt, Artificial Sequence
  Description of Artificial Sequence: Synthetic oligonucleotide
  Antisense strand to SEQ ID NO: 1040028
guugcagcgagaaaguucu

SEQ ID NO: 1040030 - RNA, 19 nt, Artificial Sequence
  Description of Artificial Sequence: Synthetic oligonucleotide
  Sense strand starting at position 1754 of SEQ ID NO: 914912
gggccauuguccgagcaac

SEQ ID NO: 1040031 - RNA, 19 nt, Artificial Sequence
  Description of Artificial Sequence: Synthetic oligonucleotide
  Antisense strand to SEQ ID NO: 1040030
guugcucggacaauggccc

SEQ ID NO: 1040032 - RNA, 19 nt, Artificial Sequence
  Description of Artificial Sequence: Synthetic oligonucleotide
  Sense strand starting at position 2500 of SEQ ID NO: 914912
auguguacccucuaccuua

SEQ ID NO: 1040033 - RNA, 19 nt, Artificial Sequence
  Description of Artificial Sequence: Synthetic oligonucleotide
  Antisense strand to SEQ ID NO: 1040032
uaagguagaggguacacau

SEQ ID NO: 1040034 - RNA, 19 nt, Artificial Sequence
  Description of Artificial Sequence: Synthetic oligonucleotide
  Sense strand starting at position 2507 of SEQ ID NO: 914912
cccucuaccuuaguuauga

SEQ ID NO: 1040035 - RNA, 19 nt, Artificial Sequence
  Description of Artificial Sequence: Synthetic oligonucleotide
  Antisense strand to SEQ ID NO: 1040034
ucauaacuaagguagaggg

SEQ ID NO: 1040036 - RNA, 19 nt, Artificial Sequence
  Description of Artificial Sequence: Synthetic oligonucleotide
  Sense strand starting at position 2518 of SEQ ID NO: 914912
aguuaugaauuaugagaca

SEQ ID NO: 1040037 - RNA, 19 nt, Artificial Sequence
  Description of Artificial Sequence: Synthetic oligonucleotide
  Antisense strand to SEQ ID NO: 1040036
ugucucauaauucauaacu

SEQ ID NO: 1040038 - RNA, 19 nt, Artificial Sequence
  Description of Artificial Sequence: Synthetic oligonucleotide
  Sense strand starting at position 2521 of SEQ ID NO: 914912
uaugaauuaugagacacga

SEQ ID NO: 1040039 - RNA, 19 nt, Artificial Sequence
  Description of Artificial Sequence: Synthetic oligonucleotide
  Antisense strand to SEQ ID NO: 1040038
ucgugucucauaauucaua

SEQ ID NO: 1040040 - RNA, 19 nt, Artificial Sequence
  Description of Artificial Sequence: Synthetic oligonucleotide
  Sense strand starting at position 2790 of SEQ ID NO: 914912
gucugcuacuuucuagaac

SEQ ID NO: 1040041 - RNA, 19 nt, Artificial Sequence
  Description of Artificial Sequence: Synthetic oligonucleotide
  Antisense strand to SEQ ID NO: 1040040
guucuagaaaguagcagac

SEQ ID NO: 1040042 - RNA, 19 nt, Artificial Sequence
  Description of Artificial Sequence: Synthetic oligonucleotide
  Sense strand starting at position 2852 of SEQ ID NO: 914912
cuuuccuccuuuguaaagu

SEQ ID NO: 1040043 - RNA, 19 nt, Artificial Sequence
  Description of Artificial Sequence: Synthetic oligonucleotide
  Antisense strand to SEQ ID NO: 1040042
acuuuacaaaggaggaaag

SEQ ID NO: 1040044 - RNA, 19 nt, Artificial Sequence
  Description of Artificial Sequence: Synthetic oligonucleotide
  Sense strand starting at position 2910 of SEQ ID NO: 914912
ugcaguaccucacagaacu

SEQ ID NO: 1040045 - RNA, 19 nt, Artificial Sequence
  Description of Artificial Sequence: Synthetic oligonucleotide
  Antisense strand to SEQ ID NO: 1040044
aguucugugagguacugca

SEQ ID NO: 1040046 - RNA, 19 nt, Artificial Sequence
  Description of Artificial Sequence: Synthetic oligonucleotide
  Sense strand starting at position 2946 of SEQ ID NO: 914912
uguguuccuccagauuugu

SEQ ID NO: 1040047 - RNA, 19 nt, Artificial Sequence
  Description of Artificial Sequence: Synthetic oligonucleotide
  Antisense strand to SEQ ID NO: 1040046
acaaaucuggaggaacaca

SEQ ID NO: 1040048 - RNA, 19 nt, Artificial Sequence
  Description of Artificial Sequence: Synthetic oligonucleotide
  Sense strand starting at position 2955 of SEQ ID NO: 914912
ccagauuugugacagcuuu

SEQ ID NO: 1040049 - RNA, 19 nt, Artificial Sequence
  Description of Artificial Sequence: Synthetic oligonucleotide
  Antisense strand to SEQ ID NO: 1040048
aaagcugucacaaaucugg

SEQ ID NO: 1040050 - RNA, 19 nt, Artificial Sequence
  Description of Artificial Sequence: Synthetic oligonucleotide
  Sense strand starting at position 3012 of SEQ ID NO: 914912
ggguuuauauucuaggaag

SEQ ID NO: 1040051 - RNA, 19 nt, Artificial Sequence
  Description of Artificial Sequence: Synthetic oligonucleotide
  Antisense strand to SEQ ID NO: 1040050
cuuccuagaauauaaaccc

SEQ ID NO: 1040052 - RNA, 19 nt, Artificial Sequence
  Description of Artificial Sequence: Synthetic oligonucleotide
  Sense strand starting at position 3014 of SEQ ID NO: 914912
guuuauauucuaggaagac

SEQ ID NO: 1040053 - RNA, 19 nt, Artificial Sequence
  Description of Artificial Sequence: Synthetic oligonucleotide
  Antisense strand to SEQ ID NO: 1040052
gucuuccuagaauauaaac

SEQ ID NO: 1040054 - RNA, 19 nt, Artificial Sequence
  Description of Artificial Sequence: Synthetic oligonucleotide
  Sense strand starting at position 3086 of SEQ ID NO: 914912
caugaagaaugccaugaga

SEQ ID NO: 1040055 - RNA, 19 nt, Artificial Sequence
  Description of Artificial Sequence: Synthetic oligonucleotide
  Antisense strand to SEQ ID NO: 1040054
ucucauggcauucuucaug

SEQ ID NO: 1040056 - RNA, 19 nt, Artificial Sequence
  Description of Artificial Sequence: Synthetic oligonucleotide
  Sense strand starting at position 3628 of SEQ ID NO: 914912
gcugccaucucaggaaaga

SEQ ID NO: 1040057 - RNA, 19 nt, Artificial Sequence
  Description of Artificial Sequence: Synthetic oligonucleotide
  Antisense strand to SEQ ID NO: 1040056
ucuuuccugagauggcagc

SEQ ID NO: 1040058 - RNA, 19 nt, Artificial Sequence
  Description of Artificial Sequence: Synthetic oligonucleotide
  Sense strand starting at position 3761 of SEQ ID NO: 914912
cucuguggguucucaaaca

SEQ ID NO: 1040059 - RNA, 19 nt, Artificial Sequence
  Description of Artificial Sequence: Synthetic oligonucleotide
  Antisense strand to SEQ ID NO: 1040058
uguuugagaacccacagag

SEQ ID NO: 1040060 - RNA, 19 nt, Artificial Sequence
  Description of Artificial Sequence: Synthetic oligonucleotide
  Sense strand starting at position 2407 of SEQ ID NO: 914913
gcggucacugcgagccauu

SEQ ID NO: 1040061 - RNA, 19 nt, Artificial Sequence
  Description of Artificial Sequence: Synthetic oligonucleotide
  Antisense strand to SEQ ID NO: 1040060
aauggcucgcagugaccgc

SEQ ID NO: 1040062 - RNA, 19 nt, Artificial Sequence
  Description of Artificial Sequence: Synthetic oligonucleotide
  Sense strand starting at position 2459 of SEQ ID NO: 914913
gggaucacuucaguguagu

SEQ ID NO: 1040063 - RNA, 19 nt, Artificial Sequence
  Description of Artificial Sequence: Synthetic oligonucleotide
  Antisense strand to SEQ ID NO: 1040062
acuacacugaagugauccc

SEQ ID NO: 1040064 - RNA, 19 nt, Artificial Sequence
  Description of Artificial Sequence: Synthetic oligonucleotide
  Sense strand starting at position 2470 of SEQ ID NO: 914913
aguguaguaacucgaaaca

SEQ ID NO: 1040065 - RNA, 19 nt, Artificial Sequence
  Description of Artificial Sequence: Synthetic oligonucleotide
  Antisense strand to SEQ ID NO: 1040064
uguuucgaguuacuacacu

SEQ ID NO: 1040066 - RNA, 19 nt, Artificial Sequence
  Description of Artificial Sequence: Synthetic oligonucleotide
  Sense strand starting at position 2554 of SEQ ID NO: 914913
gccuaauugcccuacagcu

SEQ ID NO: 1040067 - RNA, 19 nt, Artificial Sequence
  Description of Artificial Sequence: Synthetic oligonucleotide
  Antisense strand to SEQ ID NO: 1040066
agcuguagggcaauuaggc

SEQ ID NO: 1040068 - RNA, 19 nt, Artificial Sequence
  Description of Artificial Sequence: Synthetic oligonucleotide
  Sense strand starting at position 2793 of SEQ ID NO: 914913
gcgggagcuccuggcagaa

SEQ ID NO: 1040069 - RNA, 19 nt, Artificial Sequence
  Description of Artificial Sequence: Synthetic oligonucleotide
  Antisense strand to SEQ ID NO: 1040068
uucugccaggagcucccgc

SEQ ID NO: 1040070 - RNA, 19 nt, Artificial Sequence
  Description of Artificial Sequence: Synthetic oligonucleotide
  Sense strand starting at position 2967 of SEQ ID NO: 914913
gggucagucugagcugagu

SEQ ID NO: 1040071 - RNA, 19 nt, Artificial Sequence
  Description of Artificial Sequence: Synthetic oligonucleotide
  Antisense strand to SEQ ID NO: 1040070
acucagcucagacugaccc

SEQ ID NO: 1040072 - RNA, 19 nt, Artificial Sequence
  Description of Artificial Sequence: Synthetic oligonucleotide
  Sense strand starting at position 2969 of SEQ ID NO: 914913
gucagucugagcugaguga

SEQ ID NO: 1040073 - RNA, 19 nt, Artificial Sequence
  Description of Artificial Sequence: Synthetic oligonucleotide
  Antisense strand to SEQ ID NO: 1040072
ucacucagcucagacugac

SEQ ID NO: 1040074 - RNA, 19 nt, Artificial Sequence
  Description of Artificial Sequence: Synthetic oligonucleotide
  Sense strand starting at position 3052 of SEQ ID NO: 914913
cuguguuccuaaccauaaa

SEQ ID NO: 1040075 - RNA, 19 nt, Artificial Sequence
  Description of Artificial Sequence: Synthetic oligonucleotide
  Antisense strand to SEQ ID NO: 1040074
uuuaugguuaggaacacag

SEQ ID NO: 1040076 - RNA, 19 nt, Artificial Sequence
  Description of Artificial Sequence: Synthetic oligonucleotide
  Sense strand starting at position 3135 of SEQ ID NO: 914913
cucugauucucuggacaaa

SEQ ID NO: 1040077 - RNA, 19 nt, Artificial Sequence
  Description of Artificial Sequence: Synthetic oligonucleotide
  Antisense strand to SEQ ID NO: 1040076
uuuguccagagaaucagag

SEQ ID NO: 1040078 - RNA, 19 nt, Artificial Sequence
  Description of Artificial Sequence: Synthetic oligonucleotide
  Sense strand starting at position 3313 of SEQ ID NO: 914913
gcuggugugacccauguaa

SEQ ID NO: 1040079 - RNA, 19 nt, Artificial Sequence
  Description of Artificial Sequence: Synthetic oligonucleotide
  Antisense strand to SEQ ID NO: 1040078
uuacaugggucacaccagc

SEQ ID NO: 1040080 - RNA, 19 nt, Artificial Sequence
  Description of Artificial Sequence: Synthetic oligonucleotide
  Sense strand starting at position 3315 of SEQ ID NO: 914913
uggugugacccauguaacu

SEQ ID NO: 1040081 - RNA, 19 nt, Artificial Sequence
  Description of Artificial Sequence: Synthetic oligonucleotide
  Antisense strand to SEQ ID NO: 1040080
aguuacaugggucacacca

SEQ ID NO: 1040082 - RNA, 19 nt, Artificial Sequence
  Description of Artificial Sequence: Synthetic oligonucleotide
  Sense strand starting at position 3944 of SEQ ID NO: 914913
gugaaaugcauagaucgua

SEQ ID NO: 1040083 - RNA, 19 nt, Artificial Sequence
  Description of Artificial Sequence: Synthetic oligonucleotide
  Antisense strand to SEQ ID NO: 1040082
uacgaucuaugcauuucac

SEQ ID NO: 1040084 - RNA, 19 nt, Artificial Sequence
  Description of Artificial Sequence: Synthetic oligonucleotide
  Sense strand starting at position 3947 of SEQ ID NO: 914913
aaaugcauagaucguaagu

SEQ ID NO: 1040085 - RNA, 19 nt, Artificial Sequence
  Description of Artificial Sequence: Synthetic oligonucleotide
  Antisense strand to SEQ ID NO: 1040084
acuuacgaucuaugcauuu

SEQ ID NO: 1040086 - RNA, 19 nt, Artificial Sequence
  Description of Artificial Sequence: Synthetic oligonucleotide
  Sense strand starting at position 3949 of SEQ ID NO: 914913
augcauagaucguaagugu

SEQ ID NO: 1040087 - RNA, 19 nt, Artificial Sequence
  Description of Artificial Sequence: Synthetic oligonucleotide
  Antisense strand to SEQ ID NO: 1040086
acacuuacgaucuaugcau

SEQ ID NO: 1040088 - RNA, 19 nt, Artificial Sequence
  Description of Artificial Sequence: Synthetic oligonucleotide
  Sense strand starting at position 3952 of SEQ ID NO: 914913
cauagaucguaagugucuu

SEQ ID NO: 1040089 - RNA, 19 nt, Artificial Sequence
  Description of Artificial Sequence: Synthetic oligonucleotide
  Antisense strand to SEQ ID NO: 1040088
aagacacuuacgaucuaug

SEQ ID NO: 1040090 - RNA, 19 nt, Artificial Sequence
  Description of Artificial Sequence: Synthetic oligonucleotide
  Sense strand starting at position 3958 of SEQ ID NO: 914913
ucguaagugucuucuugga

SEQ ID NO: 1040091 - RNA, 19 nt, Artificial Sequence
  Description of Artificial Sequence: Synthetic oligonucleotide
  Antisense strand to SEQ ID NO: 1040090
uccaagaagacacuuacga

SEQ ID NO: 1040092 - RNA, 19 nt, Artificial Sequence
  Description of Artificial Sequence: Synthetic oligonucleotide
  Sense strand starting at position 3960 of SEQ ID NO: 914913
guaagugucuucuuggaug

SEQ ID NO: 1040093 - RNA, 19 nt, Artificial Sequence
  Description of Artificial Sequence: Synthetic oligonucleotide
  Antisense strand to SEQ ID NO: 1040092
cauccaagaagacacuuac

SEQ ID NO: 1040094 - RNA, 19 nt, Artificial Sequence
  Description of Artificial Sequence: Synthetic oligonucleotide
  Sense strand starting at position 289 of SEQ ID NO: 914914
agcucugcucccuaaggua

SEQ ID NO: 1040095 - RNA, 19 nt, Artificial Sequence
  Description of Artificial Sequence: Synthetic oligonucleotide
  Antisense strand to SEQ ID NO: 1040094
uaccuuagggagcagagcu

SEQ ID NO: 1040096 - RNA, 19 nt, Artificial Sequence
  Description of Artificial Sequence: Synthetic oligonucleotide
  Sense strand starting at position 391 of SEQ ID NO: 914914
uauugugaugaucaggcaa

SEQ ID NO: 1040097 - RNA, 19 nt, Artificial Sequence
  Description of Artificial Sequence: Synthetic oligonucleotide
  Antisense strand to SEQ ID NO: 1040096
uugccugaucaucacaaua

SEQ ID NO: 1040098 - RNA, 19 nt, Artificial Sequence
  Description of Artificial Sequence: Synthetic oligonucleotide
  Sense strand starting at position 722 of SEQ ID NO: 914914
uaaggauguuagucuucua

SEQ ID NO: 1040099 - RNA, 19 nt, Artificial Sequence
  Description of Artificial Sequence: Synthetic oligonucleotide
  Antisense strand to SEQ ID NO: 1040098
uagaagacuaacauccuua

SEQ ID NO: 1040100 - RNA, 19 nt, Artificial Sequence
  Description of Artificial Sequence: Synthetic oligonucleotide
  Sense strand starting at position 725 of SEQ ID NO: 914914
ggauguuagucuucuaagc

SEQ ID NO: 1040101 - RNA, 19 nt, Artificial Sequence
  Description of Artificial Sequence: Synthetic oligonucleotide
  Antisense strand to SEQ ID NO: 1040100
gcuuagaagacuaacaucc

SEQ ID NO: 1040102 - RNA, 19 nt, Artificial Sequence
  Description of Artificial Sequence: Synthetic oligonucleotide
  Sense strand starting at position 774 of SEQ ID NO: 914914
acaaucaccuauugaggaa

SEQ ID NO: 1040103 - RNA, 19 nt, Artificial Sequence
  Description of Artificial Sequence: Synthetic oligonucleotide
  Antisense strand to SEQ ID NO: 1040102
uuccucaauaggugauugu

SEQ ID NO: 1040104 - RNA, 19 nt, Artificial Sequence
  Description of Artificial Sequence: Synthetic oligonucleotide
  Sense strand starting at position 833 of SEQ ID NO: 914914
cggaaagugaagugacuua

SEQ ID NO: 1040105 - RNA, 19 nt, Artificial Sequence
  Description of Artificial Sequence: Synthetic oligonucleotide
  Antisense strand to SEQ ID NO: 1040104
uaagucacuucacuuuccg

SEQ ID NO: 1040106 - RNA, 19 nt, Artificial Sequence
  Description of Artificial Sequence: Synthetic oligonucleotide
  Sense strand starting at position 876 of SEQ ID NO: 914914
gggcuuuggagcugggauu

SEQ ID NO: 1040107 - RNA, 19 nt, Artificial Sequence
  Description of Artificial Sequence: Synthetic oligonucleotide
  Antisense strand to SEQ ID NO: 1040106
aaucccagcuccaaagccc

SEQ ID NO: 1040108 - RNA, 19 nt, Artificial Sequence
  Description of Artificial Sequence: Synthetic oligonucleotide
  Sense strand starting at position 900 of SEQ ID NO: 914914
aguucuacaugaccugaau

SEQ ID NO: 1040109 - RNA, 19 nt, Artificial Sequence
  Description of Artificial Sequence: Synthetic oligonucleotide
  Antisense strand to SEQ ID NO: 1040108
auucaggucauguagaacu

SEQ ID NO: 1040110 - RNA, 19 nt, Artificial Sequence
  Description of Artificial Sequence: Synthetic oligonucleotide
  Sense strand starting at position 1254 of SEQ ID NO: 914914
guuccugucaagcagugaa

SEQ ID NO: 1040111 - RNA, 19 nt, Artificial Sequence
  Description of Artificial Sequence: Synthetic oligonucleotide
  Antisense strand to SEQ ID NO: 1040110
uucacugcuugacaggaac

SEQ ID NO: 1040112 - RNA, 19 nt, Artificial Sequence
  Description of Artificial Sequence: Synthetic oligonucleotide
  Sense strand starting at position 1257 of SEQ ID NO: 914914
ccugucaagcagugaauca

SEQ ID NO: 1040113 - RNA, 19 nt, Artificial Sequence
  Description of Artificial Sequence: Synthetic oligonucleotide
  Antisense strand to SEQ ID NO: 1040112
ugauucacugcuugacagg

SEQ ID NO: 1040114 - RNA, 19 nt, Artificial Sequence
  Description of Artificial Sequence: Synthetic oligonucleotide
  Sense strand starting at position 1285 of SEQ ID NO: 914914
agccucguucuggagacau

SEQ ID NO: 1040115 - RNA, 19 nt, Artificial Sequence
  Description of Artificial Sequence: Synthetic oligonucleotide
  Antisense strand to SEQ ID NO: 1040114
augucuccagaacgaggcu

SEQ ID NO: 1040116 - RNA, 19 nt, Artificial Sequence
  Description of Artificial Sequence: Synthetic oligonucleotide
  Sense strand starting at position 1287 of SEQ ID NO: 914914
ccucguucuggagacaugu

SEQ ID NO: 1040117 - RNA, 19 nt, Artificial Sequence
  Description of Artificial Sequence: Synthetic oligonucleotide
  Antisense strand to SEQ ID NO: 1040116
acaugucuccagaacgagg

SEQ ID NO: 1040118 - RNA, 19 nt, Artificial Sequence
  Description of Artificial Sequence: Synthetic oligonucleotide
  Sense strand starting at position 1336 of SEQ ID NO: 914914
aaaggaauguggcugugau

SEQ ID NO: 1040119 - RNA, 19 nt, Artificial Sequence
  Description of Artificial Sequence: Synthetic oligonucleotide
  Antisense strand to SEQ ID NO: 1040118
aucacagccacauuccuuu

SEQ ID NO: 1040120 - RNA, 19 nt, Artificial Sequence
  Description of Artificial Sequence: Synthetic oligonucleotide
  Sense strand starting at position 1337 of SEQ ID NO: 914914
aaggaauguggcugugaug

SEQ ID NO: 1040121 - RNA, 19 nt, Artificial Sequence
  Description of Artificial Sequence: Synthetic oligonucleotide
  Antisense strand to SEQ ID NO: 1040120
caucacagccacauuccuu

SEQ ID NO: 1040122 - RNA, 19 nt, Artificial Sequence
  Description of Artificial Sequence: Synthetic oligonucleotide
  Sense strand starting at position 1346 of SEQ ID NO: 914914
ggcugugauggcggaauuu

SEQ ID NO: 1040123 - RNA, 19 nt, Artificial Sequence
  Description of Artificial Sequence: Synthetic oligonucleotide
  Antisense strand to SEQ ID NO: 1040122
aaauuccgccaucacagcc

SEQ ID NO: 1040124 - RNA, 19 nt, Artificial Sequence
  Description of Artificial Sequence: Synthetic oligonucleotide
  Sense strand starting at position 1413 of SEQ ID NO: 914914
gaagaaggcuggguucaga

SEQ ID NO: 1040125 - RNA, 19 nt, Artificial Sequence
  Description of Artificial Sequence: Synthetic oligonucleotide
  Antisense strand to SEQ ID NO: 1040124
ucugaacccagccuucuuc

SEQ ID NO: 1040126 - RNA, 19 nt, Artificial Sequence
  Description of Artificial Sequence: Synthetic oligonucleotide
  Sense strand starting at position 1659 of SEQ ID NO: 914914
cgggaaagauccgccaaga

SEQ ID NO: 1040127 - RNA, 19 nt, Artificial Sequence
  Description of Artificial Sequence: Synthetic oligonucleotide
  Antisense strand to SEQ ID NO: 1040126
ucuuggcggaucuuucccg

SEQ ID NO: 1040128 - RNA, 19 nt, Artificial Sequence
  Description of Artificial Sequence: Synthetic oligonucleotide
  Sense strand starting at position 2542 of SEQ ID NO: 914914
ccggauugugcucuagugu

SEQ ID NO: 1040129 - RNA, 19 nt, Artificial Sequence
  Description of Artificial Sequence: Synthetic oligonucleotide
  Antisense strand to SEQ ID NO: 1040128
acacuagagcacaauccgg

SEQ ID NO: 1040130 - RNA, 19 nt, Artificial Sequence
  Description of Artificial Sequence: Synthetic oligonucleotide
  Sense strand starting at position 2745 of SEQ ID NO: 914914
gguuaaauggcguguccaa

SEQ ID NO: 1040131 - RNA, 19 nt, Artificial Sequence
  Description of Artificial Sequence: Synthetic oligonucleotide
  Antisense strand to SEQ ID NO: 1040130
uuggacacgccauuuaacc

SEQ ID NO: 1040132 - RNA, 19 nt, Artificial Sequence
  Description of Artificial Sequence: Synthetic oligonucleotide
  Sense strand starting at position 2808 of SEQ ID NO: 914914
ucauaaagcuaagucugau

SEQ ID NO: 1040133 - RNA, 19 nt, Artificial Sequence
  Description of Artificial Sequence: Synthetic oligonucleotide
  Antisense strand to SEQ ID NO: 1040132
aucagacuuagcuuuauga

SEQ ID NO: 1040134 - RNA, 19 nt, Artificial Sequence
  Description of Artificial Sequence: Synthetic oligonucleotide
  Sense strand starting at position 2835 of SEQ ID NO: 914914
ggcauuaucuugcccgaau

SEQ ID NO: 1040135 - RNA, 19 nt, Artificial Sequence
  Description of Artificial Sequence: Synthetic oligonucleotide
  Antisense strand to SEQ ID NO: 1040134
auucgggcaagauaaugcc

SEQ ID NO: 1040136 - RNA, 19 nt, Artificial Sequence
  Description of Artificial Sequence: Synthetic oligonucleotide
  Sense strand starting at position 2836 of SEQ ID NO: 914914
gcauuaucuugcccgaauu

SEQ ID NO: 1040137 - RNA, 19 nt, Artificial Sequence
  Description of Artificial Sequence: Synthetic oligonucleotide
  Antisense strand to SEQ ID NO: 1040136
aauucgggcaagauaaugc

SEQ ID NO: 1040138 - RNA, 19 nt, Artificial Sequence
  Description of Artificial Sequence: Synthetic oligonucleotide
  Sense strand starting at position 2882 of SEQ ID NO: 914914
gcgguauugucauuuagau

SEQ ID NO: 1040139 - RNA, 19 nt, Artificial Sequence
  Description of Artificial Sequence: Synthetic oligonucleotide
  Antisense strand to SEQ ID NO: 1040138
aucuaaaugacaauaccgc

SEQ ID NO: 1040140 - RNA, 19 nt, Artificial Sequence
  Description of Artificial Sequence: Synthetic oligonucleotide
  Sense strand starting at position 2886 of SEQ ID NO: 914914
uauugucauuuagauugga

SEQ ID NO: 1040141 - RNA, 19 nt, Artificial Sequence
  Description of Artificial Sequence: Synthetic oligonucleotide
  Antisense strand to SEQ ID NO: 1040140
uccaaucuaaaugacaaua

SEQ ID NO: 1040142 - RNA, 19 nt, Artificial Sequence
  Description of Artificial Sequence: Synthetic oligonucleotide
  Sense strand starting at position 2903 of SEQ ID NO: 914914
gagguugaagcagaucuuu

SEQ ID NO: 1040143 - RNA, 19 nt, Artificial Sequence
  Description of Artificial Sequence: Synthetic oligonucleotide
  Antisense strand to SEQ ID NO: 1040142
aaagaucugcuucaaccuc

SEQ ID NO: 1040144 - RNA, 19 nt, Artificial Sequence
  Description of Artificial Sequence: Synthetic oligonucleotide
  Sense strand starting at position 2908 of SEQ ID NO: 914914
ugaagcagaucuuucccaa

SEQ ID NO: 1040145 - RNA, 19 nt, Artificial Sequence
  Description of Artificial Sequence: Synthetic oligonucleotide
  Antisense strand to SEQ ID NO: 1040144
uugggaaagaucugcuuca

SEQ ID NO: 1040146 - RNA, 19 nt, Artificial Sequence
  Description of Artificial Sequence: Synthetic oligonucleotide
  Sense strand starting at position 2939 of SEQ ID NO: 914914
ucuagaugccuugacccua

SEQ ID NO: 1040147 - RNA, 19 nt, Artificial Sequence
  Description of Artificial Sequence: Synthetic oligonucleotide
  Antisense strand to SEQ ID NO: 1040146
uagggucaaggcaucuaga

SEQ ID NO: 1040148 - RNA, 19 nt, Artificial Sequence
  Description of Artificial Sequence: Synthetic oligonucleotide
  Sense strand starting at position 3043 of SEQ ID NO: 914914
ccugguuccaaguguagaa

SEQ ID NO: 1040149 - RNA, 19 nt, Artificial Sequence
  Description of Artificial Sequence: Synthetic oligonucleotide
  Antisense strand to SEQ ID NO: 1040148
uucuacacuuggaaccagg

SEQ ID NO: 1040150 - RNA, 19 nt, Artificial Sequence
  Description of Artificial Sequence: Synthetic oligonucleotide
  Sense strand starting at position 3063 of SEQ ID NO: 914914
gggccucuuccacaguguu

SEQ ID NO: 1040151 - RNA, 19 nt, Artificial Sequence
  Description of Artificial Sequence: Synthetic oligonucleotide
  Antisense strand to SEQ ID NO: 1040150
aacacuguggaagaggccc

SEQ ID NO: 1040152 - RNA, 19 nt, Artificial Sequence
  Description of Artificial Sequence: Synthetic oligonucleotide
  Sense strand starting at position 3077 of SEQ ID NO: 914914
guguuucucuucccugauc

SEQ ID NO: 1040153 - RNA, 19 nt, Artificial Sequence
  Description of Artificial Sequence: Synthetic oligonucleotide
  Antisense strand to SEQ ID NO: 1040152
gaucagggaagagaaacac

SEQ ID NO: 1040154 - RNA, 19 nt, Artificial Sequence
  Description of Artificial Sequence: Synthetic oligonucleotide
  Sense strand starting at position 3195 of SEQ ID NO: 914914
gcgggauucccugaagucu

SEQ ID NO: 1040155 - RNA, 19 nt, Artificial Sequence
  Description of Artificial Sequence: Synthetic oligonucleotide
  Antisense strand to SEQ ID NO: 1040154
agacuucagggaaucccgc

SEQ ID NO: 1040156 - RNA, 19 nt, Artificial Sequence
  Description of Artificial Sequence: Synthetic oligonucleotide
  Sense strand starting at position 3532 of SEQ ID NO: 914914
ggucucuagugcuccauuu

SEQ ID NO: 1040157 - RNA, 19 nt, Artificial Sequence
  Description of Artificial Sequence: Synthetic oligonucleotide
  Antisense strand to SEQ ID NO: 1040156
aaauggagcacuagagacc

SEQ ID NO: 1040158 - RNA, 19 nt, Artificial Sequence
  Description of Artificial Sequence: Synthetic oligonucleotide
  Sense strand starting at position 3574 of SEQ ID NO: 914914
cuaucuguaaagugggaaa

SEQ ID NO: 1040159 - RNA, 19 nt, Artificial Sequence
  Description of Artificial Sequence: Synthetic oligonucleotide
  Antisense strand to SEQ ID NO: 1040158
uuucccacuuuacagauag

SEQ ID NO: 1040160 - RNA, 19 nt, Artificial Sequence
  Description of Artificial Sequence: Synthetic oligonucleotide
  Sense strand starting at position 3597 of SEQ ID NO: 914914
guagcuacuacuuggaguu

SEQ ID NO: 1040161 - RNA, 19 nt, Artificial Sequence
  Description of Artificial Sequence: Synthetic oligonucleotide
  Antisense strand to SEQ ID NO: 1040160
aacuccaaguaguagcuac

SEQ ID NO: 1040162 - RNA, 19 nt, Artificial Sequence
  Description of Artificial Sequence: Synthetic oligonucleotide
  Sense strand starting at position 3712 of SEQ ID NO: 914914
uccuauauccugugggcuu

SEQ ID NO: 1040163 - RNA, 19 nt, Artificial Sequence
  Description of Artificial Sequence: Synthetic oligonucleotide
  Antisense strand to SEQ ID NO: 1040162
aagcccacaggauauagga

SEQ ID NO: 1040164 - RNA, 19 nt, Artificial Sequence
  Description of Artificial Sequence: Synthetic oligonucleotide
  Sense strand starting at position 3765 of SEQ ID NO: 914914
ucaggaaagugcuuugaag

SEQ ID NO: 1040165 - RNA, 19 nt, Artificial Sequence
  Description of Artificial Sequence: Synthetic oligonucleotide
  Antisense strand to SEQ ID NO: 1040164
cuucaaagcacuuuccuga

SEQ ID NO: 1040166 - RNA, 19 nt, Artificial Sequence
  Description of Artificial Sequence: Synthetic oligonucleotide
  Sense strand starting at position 3799 of SEQ ID NO: 914914
agcagagugacuggaucau

SEQ ID NO: 1040167 - RNA, 19 nt, Artificial Sequence
  Description of Artificial Sequence: Synthetic oligonucleotide
  Antisense strand to SEQ ID NO: 1040166
augauccagucacucugcu

SEQ ID NO: 1040168 - RNA, 19 nt, Artificial Sequence
  Description of Artificial Sequence: Synthetic oligonucleotide
  Sense strand starting at position 3828 of SEQ ID NO: 914914
ccuggccuuguguaucaga

SEQ ID NO: 1040169 - RNA, 19 nt, Artificial Sequence
  Description of Artificial Sequence: Synthetic oligonucleotide
  Antisense strand to SEQ ID NO: 1040168
ucugauacacaaggccagg

SEQ ID NO: 1040170 - RNA, 19 nt, Artificial Sequence
  Description of Artificial Sequence: Synthetic oligonucleotide
  Sense strand starting at position 3913 of SEQ ID NO: 914914
agcagaaaucacugggcca

SEQ ID NO: 1040171 - RNA, 19 nt, Artificial Sequence
  Description of Artificial Sequence: Synthetic oligonucleotide
  Antisense strand to SEQ ID NO: 1040170
uggcccagugauuucugcu

SEQ ID NO: 1040172 - RNA, 19 nt, Artificial Sequence
  Description of Artificial Sequence: Synthetic oligonucleotide
  Sense strand starting at position 3914 of SEQ ID NO: 914914
gcagaaaucacugggccau

SEQ ID NO: 1040173 - RNA, 19 nt, Artificial Sequence
  Description of Artificial Sequence: Synthetic oligonucleotide
  Antisense strand to SEQ ID NO: 1040172
auggcccagugauuucugc

SEQ ID NO: 1040174 - RNA, 19 nt, Artificial Sequence
  Description of Artificial Sequence: Synthetic oligonucleotide
  Sense strand starting at position 74 of SEQ ID NO: 914915
ggcucaccauccuuuaaga

SEQ ID NO: 1040175 - RNA, 19 nt, Artificial Sequence
  Description of Artificial Sequence: Synthetic oligonucleotide
  Antisense strand to SEQ ID NO: 1040174
ucuuaaaggauggugagcc

SEQ ID NO: 1040176 - RNA, 19 nt, Artificial Sequence
  Description of Artificial Sequence: Synthetic oligonucleotide
  Sense strand starting at position 140 of SEQ ID NO: 914915
cuaggagucucggugacau

SEQ ID NO: 1040177 - RNA, 19 nt, Artificial Sequence
  Description of Artificial Sequence: Synthetic oligonucleotide
  Antisense strand to SEQ ID NO: 1040176
augucaccgagacuccuag

SEQ ID NO: 1040178 - RNA, 19 nt, Artificial Sequence
  Description of Artificial Sequence: Synthetic oligonucleotide
  Sense strand starting at position 248 of SEQ ID NO: 914915
acugcucucccugaaagag

SEQ ID NO: 1040179 - RNA, 19 nt, Artificial Sequence
  Description of Artificial Sequence: Synthetic oligonucleotide
  Antisense strand to SEQ ID NO: 1040178
cucuuucagggagagcagu

SEQ ID NO: 1040180 - RNA, 19 nt, Artificial Sequence
  Description of Artificial Sequence: Synthetic oligonucleotide
  Sense strand starting at position 353 of SEQ ID NO: 914915
cuuauaaucuguccuguac

SEQ ID NO: 1040181 - RNA, 19 nt, Artificial Sequence
  Description of Artificial Sequence: Synthetic oligonucleotide
  Antisense strand to SEQ ID NO: 1040180
guacaggacagauuauaag

SEQ ID NO: 1040182 - RNA, 19 nt, Artificial Sequence
  Description of Artificial Sequence: Synthetic oligonucleotide
  Sense strand starting at position 374 of SEQ ID NO: 914915
agcagccagagugauaaua

SEQ ID NO: 1040183 - RNA, 19 nt, Artificial Sequence
  Description of Artificial Sequence: Synthetic oligonucleotide
  Antisense strand to SEQ ID NO: 1040182
uauuaucacucuggcugcu

SEQ ID NO: 1040184 - RNA, 19 nt, Artificial Sequence
  Description of Artificial Sequence: Synthetic oligonucleotide
  Sense strand starting at position 649 of SEQ ID NO: 914915
uauuucuuaucauguggga

SEQ ID NO: 1040185 - RNA, 19 nt, Artificial Sequence
  Description of Artificial Sequence: Synthetic oligonucleotide
  Antisense strand to SEQ ID NO: 1040184
ucccacaugauaagaaaua

SEQ ID NO: 1040186 - RNA, 19 nt, Artificial Sequence
  Description of Artificial Sequence: Synthetic oligonucleotide
  Sense strand starting at position 679 of SEQ ID NO: 914915
cuaaguagguacucacuaa

SEQ ID NO: 1040187 - RNA, 19 nt, Artificial Sequence
  Description of Artificial Sequence: Synthetic oligonucleotide
  Antisense strand to SEQ ID NO: 1040186
uuagugaguaccuacuuag

SEQ ID NO: 1040188 - RNA, 19 nt, Artificial Sequence
  Description of Artificial Sequence: Synthetic oligonucleotide
  Sense strand starting at position 693 of SEQ ID NO: 914915
acuaaagacuagugaacaa

SEQ ID NO: 1040189 - RNA, 19 nt, Artificial Sequence
  Description of Artificial Sequence: Synthetic oligonucleotide
  Antisense strand to SEQ ID NO: 1040188
uuguucacuagucuuuagu

SEQ ID NO: 1040190 - RNA, 19 nt, Artificial Sequence
  Description of Artificial Sequence: Synthetic oligonucleotide
  Sense strand starting at position 1036 of SEQ ID NO: 914915
agcucugcucccuaaggua

SEQ ID NO: 1040191 - RNA, 19 nt, Artificial Sequence
  Description of Artificial Sequence: Synthetic oligonucleotide
  Antisense strand to SEQ ID NO: 1040190
uaccuuagggagcagagcu

SEQ ID NO: 1040192 - RNA, 19 nt, Artificial Sequence
  Description of Artificial Sequence: Synthetic oligonucleotide
  Sense strand starting at position 1138 of SEQ ID NO: 914915
uauugugaugaucaggcaa

SEQ ID NO: 1040193 - RNA, 19 nt, Artificial Sequence
  Description of Artificial Sequence: Synthetic oligonucleotide
  Antisense strand to SEQ ID NO: 1040192
uugccugaucaucacaaua

SEQ ID NO: 1040194 - RNA, 19 nt, Artificial Sequence
  Description of Artificial Sequence: Synthetic oligonucleotide
  Sense strand starting at position 1469 of SEQ ID NO: 914915
uaaggauguuagucuucua

SEQ ID NO: 1040195 - RNA, 19 nt, Artificial Sequence
  Description of Artificial Sequence: Synthetic oligonucleotide
  Antisense strand to SEQ ID NO: 1040194
uagaagacuaacauccuua

SEQ ID NO: 1040196 - RNA, 19 nt, Artificial Sequence
  Description of Artificial Sequence: Synthetic oligonucleotide
  Sense strand starting at position 1472 of SEQ ID NO: 914915
ggauguuagucuucuaagc

SEQ ID NO: 1040197 - RNA, 19 nt, Artificial Sequence
  Description of Artificial Sequence: Synthetic oligonucleotide
  Antisense strand to SEQ ID NO: 1040196
gcuuagaagacuaacaucc

SEQ ID NO: 1040198 - RNA, 19 nt, Artificial Sequence
  Description of Artificial Sequence: Synthetic oligonucleotide
  Sense strand starting at position 1521 of SEQ ID NO: 914915
acaaucaccuauugaggaa

SEQ ID NO: 1040199 - RNA, 19 nt, Artificial Sequence
  Description of Artificial Sequence: Synthetic oligonucleotide
  Antisense strand to SEQ ID NO: 1040198
uuccucaauaggugauugu

SEQ ID NO: 1040200 - RNA, 19 nt, Artificial Sequence
  Description of Artificial Sequence: Synthetic oligonucleotide
  Sense strand starting at position 1580 of SEQ ID NO: 914915
cggaaagugaagugacuua

SEQ ID NO: 1040201 - RNA, 19 nt, Artificial Sequence
  Description of Artificial Sequence: Synthetic oligonucleotide
  Antisense strand to SEQ ID NO: 1040200
uaagucacuucacuuuccg

SEQ ID NO: 1040202 - RNA, 19 nt, Artificial Sequence
  Description of Artificial Sequence: Synthetic oligonucleotide
  Sense strand starting at position 1623 of SEQ ID NO: 914915
gggcuuuggagcugggauu

SEQ ID NO: 1040203 - RNA, 19 nt, Artificial Sequence
  Description of Artificial Sequence: Synthetic oligonucleotide
  Antisense strand to SEQ ID NO: 1040202
aaucccagcuccaaagccc

SEQ ID NO: 1040204 - RNA, 19 nt, Artificial Sequence
  Description of Artificial Sequence: Synthetic oligonucleotide
  Sense strand starting at position 1647 of SEQ ID NO: 914915
aguucuacaugaccugaau

SEQ ID NO: 1040205 - RNA, 19 nt, Artificial Sequence
  Description of Artificial Sequence: Synthetic oligonucleotide
  Antisense strand to SEQ ID NO: 1040204
auucaggucauguagaacu

SEQ ID NO: 1040206 - RNA, 19 nt, Artificial Sequence
  Description of Artificial Sequence: Synthetic oligonucleotide
  Sense strand starting at position 2001 of SEQ ID NO: 914915
guuccugucaagcagugaa

SEQ ID NO: 1040207 - RNA, 19 nt, Artificial Sequence
  Description of Artificial Sequence: Synthetic oligonucleotide
  Antisense strand to SEQ ID NO: 1040206
uucacugcuugacaggaac

SEQ ID NO: 1040208 - RNA, 19 nt, Artificial Sequence
  Description of Artificial Sequence: Synthetic oligonucleotide
  Sense strand starting at position 2004 of SEQ ID NO: 914915
ccugucaagcagugaauca

SEQ ID NO: 1040209 - RNA, 19 nt, Artificial Sequence
  Description of Artificial Sequence: Synthetic oligonucleotide
  Antisense strand to SEQ ID NO: 1040208
ugauucacugcuugacagg

SEQ ID NO: 1040210 - RNA, 19 nt, Artificial Sequence
  Description of Artificial Sequence: Synthetic oligonucleotide
  Sense strand starting at position 2032 of SEQ ID NO: 914915
agccucguucuggagacau

SEQ ID NO: 1040211 - RNA, 19 nt, Artificial Sequence
  Description of Artificial Sequence: Synthetic oligonucleotide
  Antisense strand to SEQ ID NO: 1040210
augucuccagaacgaggcu

SEQ ID NO: 1040212 - RNA, 19 nt, Artificial Sequence
  Description of Artificial Sequence: Synthetic oligonucleotide
  Sense strand starting at position 2034 of SEQ ID NO: 914915
ccucguucuggagacaugu

SEQ ID NO: 1040213 - RNA, 19 nt, Artificial Sequence
  Description of Artificial Sequence: Synthetic oligonucleotide
  Antisense strand to SEQ ID NO: 1040212
acaugucuccagaacgagg

SEQ ID NO: 1040214 - RNA, 19 nt, Artificial Sequence
  Description of Artificial Sequence: Synthetic oligonucleotide
  Sense strand starting at position 2083 of SEQ ID NO: 914915
aaaggaauguggcugugau

SEQ ID NO: 1040215 - RNA, 19 nt, Artificial Sequence
  Description of Artificial Sequence: Synthetic oligonucleotide
  Antisense strand to SEQ ID NO: 1040214
aucacagccacauuccuuu

SEQ ID NO: 1040216 - RNA, 19 nt, Artificial Sequence
  Description of Artificial Sequence: Synthetic oligonucleotide
  Sense strand starting at position 2084 of SEQ ID NO: 914915
aaggaauguggcugugaug

SEQ ID NO: 1040217 - RNA, 19 nt, Artificial Sequence
  Description of Artificial Sequence: Synthetic oligonucleotide
  Antisense strand to SEQ ID NO: 1040216
caucacagccacauuccuu

SEQ ID NO: 1040218 - RNA, 19 nt, Artificial Sequence
  Description of Artificial Sequence: Synthetic oligonucleotide
  Sense strand starting at position 2093 of SEQ ID NO: 914915
ggcugugauggcggaauuu

SEQ ID NO: 1040219 - RNA, 19 nt, Artificial Sequence
  Description of Artificial Sequence: Synthetic oligonucleotide
  Antisense strand to SEQ ID NO: 1040218
aaauuccgccaucacagcc

SEQ ID NO: 1040220 - RNA, 19 nt, Artificial Sequence
  Description of Artificial Sequence: Synthetic oligonucleotide
  Sense strand starting at position 2160 of SEQ ID NO: 914915
gaagaaggcuggguucaga

SEQ ID NO: 1040221 - RNA, 19 nt, Artificial Sequence
  Description of Artificial Sequence: Synthetic oligonucleotide
  Antisense strand to SEQ ID NO: 1040220
ucugaacccagccuucuuc

SEQ ID NO: 1040222 - RNA, 19 nt, Artificial Sequence
  Description of Artificial Sequence: Synthetic oligonucleotide
  Sense strand starting at position 2406 of SEQ ID NO: 914915
cgggaaagauccgccaaga

SEQ ID NO: 1040223 - RNA, 19 nt, Artificial Sequence
  Description of Artificial Sequence: Synthetic oligonucleotide
  Antisense strand to SEQ ID NO: 1040222
ucuuggcggaucuuucccg

SEQ ID NO: 1040224 - RNA, 19 nt, Artificial Sequence
  Description of Artificial Sequence: Synthetic oligonucleotide
  Sense strand starting at position 3288 of SEQ ID NO: 914915
uccggauugugcucuagug

SEQ ID NO: 1040225 - RNA, 19 nt, Artificial Sequence
  Description of Artificial Sequence: Synthetic oligonucleotide
  Antisense strand to SEQ ID NO: 1040224
cacuagagcacaauccgga

SEQ ID NO: 1040226 - RNA, 19 nt, Artificial Sequence
  Description of Artificial Sequence: Synthetic oligonucleotide
  Sense strand starting at position 3289 of SEQ ID NO: 914915
ccggauugugcucuagugu

SEQ ID NO: 1040227 - RNA, 19 nt, Artificial Sequence
  Description of Artificial Sequence: Synthetic oligonucleotide
  Antisense strand to SEQ ID NO: 1040226
acacuagagcacaauccgg

SEQ ID NO: 1040228 - RNA, 19 nt, Artificial Sequence
  Description of Artificial Sequence: Synthetic oligonucleotide
  Sense strand starting at position 3492 of SEQ ID NO: 914915
gguuaaauggcguguccaa

SEQ ID NO: 1040229 - RNA, 19 nt, Artificial Sequence
  Description of Artificial Sequence: Synthetic oligonucleotide
  Antisense strand to SEQ ID NO: 1040228
uuggacacgccauuuaacc

SEQ ID NO: 1040230 - RNA, 19 nt, Artificial Sequence
  Description of Artificial Sequence: Synthetic oligonucleotide
  Sense strand starting at position 3555 of SEQ ID NO: 914915
ucauaaagcuaagucugau

SEQ ID NO: 1040231 - RNA, 19 nt, Artificial Sequence
  Description of Artificial Sequence: Synthetic oligonucleotide
  Antisense strand to SEQ ID NO: 1040230
aucagacuuagcuuuauga

SEQ ID NO: 1040232 - RNA, 19 nt, Artificial Sequence
  Description of Artificial Sequence: Synthetic oligonucleotide
  Sense strand starting at position 3582 of SEQ ID NO: 914915
ggcauuaucuugcccgaau

SEQ ID NO: 1040233 - RNA, 19 nt, Artificial Sequence
  Description of Artificial Sequence: Synthetic oligonucleotide
  Antisense strand to SEQ ID NO: 1040232
auucgggcaagauaaugcc

SEQ ID NO: 1040234 - RNA, 19 nt, Artificial Sequence
  Description of Artificial Sequence: Synthetic oligonucleotide
  Sense strand starting at position 3583 of SEQ ID NO: 914915
gcauuaucuugcccgaauu

SEQ ID NO: 1040235 - RNA, 19 nt, Artificial Sequence
  Description of Artificial Sequence: Synthetic oligonucleotide
  Antisense strand to SEQ ID NO: 1040234
aauucgggcaagauaaugc

SEQ ID NO: 1040236 - RNA, 19 nt, Artificial Sequence
  Description of Artificial Sequence: Synthetic oligonucleotide
  Sense strand starting at position 3629 of SEQ ID NO: 914915
gcgguauugucauuuagau

SEQ ID NO: 1040237 - RNA, 19 nt, Artificial Sequence
  Description of Artificial Sequence: Synthetic oligonucleotide
  Antisense strand to SEQ ID NO: 1040236
aucuaaaugacaauaccgc

SEQ ID NO: 1040238 - RNA, 19 nt, Artificial Sequence
  Description of Artificial Sequence: Synthetic oligonucleotide
  Sense strand starting at position 3633 of SEQ ID NO: 914915
uauugucauuuagauugga

SEQ ID NO: 1040239 - RNA, 19 nt, Artificial Sequence
  Description of Artificial Sequence: Synthetic oligonucleotide
  Antisense strand to SEQ ID NO: 1040238
uccaaucuaaaugacaaua

SEQ ID NO: 1040240 - RNA, 19 nt, Artificial Sequence
  Description of Artificial Sequence: Synthetic oligonucleotide
  Sense strand starting at position 3650 of SEQ ID NO: 914915
gagguugaagcagaucuuu

SEQ ID NO: 1040241 - RNA, 19 nt, Artificial Sequence
  Description of Artificial Sequence: Synthetic oligonucleotide
  Antisense strand to SEQ ID NO: 1040240
aaagaucugcuucaaccuc

SEQ ID NO: 1040242 - RNA, 19 nt, Artificial Sequence
  Description of Artificial Sequence: Synthetic oligonucleotide
  Sense strand starting at position 3655 of SEQ ID NO: 914915
ugaagcagaucuuucccaa

SEQ ID NO: 1040243 - RNA, 19 nt, Artificial Sequence
  Description of Artificial Sequence: Synthetic oligonucleotide
  Antisense strand to SEQ ID NO: 1040242
uugggaaagaucugcuuca

SEQ ID NO: 1040244 - RNA, 19 nt, Artificial Sequence
  Description of Artificial Sequence: Synthetic oligonucleotide
  Sense strand starting at position 3686 of SEQ ID NO: 914915
ucuagaugccuugacccua

SEQ ID NO: 1040245 - RNA, 19 nt, Artificial Sequence
  Description of Artificial Sequence: Synthetic oligonucleotide
  Antisense strand to SEQ ID NO: 1040244
uagggucaaggcaucuaga

SEQ ID NO: 1040246 - RNA, 19 nt, Artificial Sequence
  Description of Artificial Sequence: Synthetic oligonucleotide
  Sense strand starting at position 3790 of SEQ ID NO: 914915
ccugguuccaaguguagaa

SEQ ID NO: 1040247 - RNA, 19 nt, Artificial Sequence
  Description of Artificial Sequence: Synthetic oligonucleotide
  Antisense strand to SEQ ID NO: 1040246
uucuacacuuggaaccagg

SEQ ID NO: 1040248 - RNA, 19 nt, Artificial Sequence
  Description of Artificial Sequence: Synthetic oligonucleotide
  Sense strand starting at position 3810 of SEQ ID NO: 914915
gggccucuuccacaguguu

SEQ ID NO: 1040249 - RNA, 19 nt, Artificial Sequence
  Description of Artificial Sequence: Synthetic oligonucleotide
  Antisense strand to SEQ ID NO: 1040248
aacacuguggaagaggccc

SEQ ID NO: 1040250 - RNA, 19 nt, Artificial Sequence
  Description of Artificial Sequence: Synthetic oligonucleotide
  Sense strand starting at position 3824 of SEQ ID NO: 914915
guguuucucuucccugauc

SEQ ID NO: 1040251 - RNA, 19 nt, Artificial Sequence
  Description of Artificial Sequence: Synthetic oligonucleotide
  Antisense strand to SEQ ID NO: 1040250
gaucagggaagagaaacac

SEQ ID NO: 1040252 - RNA, 19 nt, Artificial Sequence
  Description of Artificial Sequence: Synthetic oligonucleotide
  Sense strand starting at position 3942 of SEQ ID NO: 914915
gcgggauucccugaagucu

SEQ ID NO: 1040253 - RNA, 19 nt, Artificial Sequence
  Description of Artificial Sequence: Synthetic oligonucleotide
  Antisense strand to SEQ ID NO: 1040252
agacuucagggaaucccgc

SEQ ID NO: 1040254 - RNA, 19 nt, Artificial Sequence
  Description of Artificial Sequence: Synthetic oligonucleotide
  Sense strand starting at position 31 of SEQ ID NO: 914916
cuggacauuacggguaaca

SEQ ID NO: 1040255 - RNA, 19 nt, Artificial Sequence
  Description of Artificial Sequence: Synthetic oligonucleotide
  Antisense strand to SEQ ID NO: 1040254
uguuacccguaauguccag

SEQ ID NO: 1040256 - RNA, 19 nt, Artificial Sequence
  Description of Artificial Sequence: Synthetic oligonucleotide
  Sense strand starting at position 266 of SEQ ID NO: 914916
uaggauagccuaggguaau

SEQ ID NO: 1040257 - RNA, 19 nt, Artificial Sequence
  Description of Artificial Sequence: Synthetic oligonucleotide
  Antisense strand to SEQ ID NO: 1040256
auuacccuaggcuauccua

SEQ ID NO: 1040258 - RNA, 19 nt, Artificial Sequence
  Description of Artificial Sequence: Synthetic oligonucleotide
  Sense strand starting at position 393 of SEQ ID NO: 914916
ugaguaugaugccugacau

SEQ ID NO: 1040259 - RNA, 19 nt, Artificial Sequence
  Description of Artificial Sequence: Synthetic oligonucleotide
  Antisense strand to SEQ ID NO: 1040258
augucaggcaucauacuca

SEQ ID NO: 1040260 - RNA, 19 nt, Artificial Sequence
  Description of Artificial Sequence: Synthetic oligonucleotide
  Sense strand starting at position 454 of SEQ ID NO: 914916
guagccucugaauaaaucu

SEQ ID NO: 1040261 - RNA, 19 nt, Artificial Sequence
  Description of Artificial Sequence: Synthetic oligonucleotide
  Antisense strand to SEQ ID NO: 1040260
agauuuauucagaggcuac

SEQ ID NO: 1040262 - RNA, 19 nt, Artificial Sequence
  Description of Artificial Sequence: Synthetic oligonucleotide
  Sense strand starting at position 611 of SEQ ID NO: 914916
gcuaacaguccaugaacua

SEQ ID NO: 1040263 - RNA, 19 nt, Artificial Sequence
  Description of Artificial Sequence: Synthetic oligonucleotide
  Antisense strand to SEQ ID NO: 1040262
uaguucauggacuguuagc

SEQ ID NO: 1040264 - RNA, 19 nt, Artificial Sequence
  Description of Artificial Sequence: Synthetic oligonucleotide
  Sense strand starting at position 809 of SEQ ID NO: 914916
acguuaucacaaugaaaug

SEQ ID NO: 1040265 - RNA, 19 nt, Artificial Sequence
  Description of Artificial Sequence: Synthetic oligonucleotide
  Antisense strand to SEQ ID NO: 1040264
cauuucauugugauaacgu

SEQ ID NO: 1040266 - RNA, 19 nt, Artificial Sequence
  Description of Artificial Sequence: Synthetic oligonucleotide
  Sense strand starting at position 967 of SEQ ID NO: 914916
ugaguuaggcaagauguuu

SEQ ID NO: 1040267 - RNA, 19 nt, Artificial Sequence
  Description of Artificial Sequence: Synthetic oligonucleotide
  Antisense strand to SEQ ID NO: 1040266
aaacaucuugccuaacuca

SEQ ID NO: 1040268 - RNA, 19 nt, Artificial Sequence
  Description of Artificial Sequence: Synthetic oligonucleotide
  Sense strand starting at position 972 of SEQ ID NO: 914916
uaggcaagauguuugacua

SEQ ID NO: 1040269 - RNA, 19 nt, Artificial Sequence
  Description of Artificial Sequence: Synthetic oligonucleotide
  Antisense strand to SEQ ID NO: 1040268
uagucaaacaucuugccua

SEQ ID NO: 1040270 - RNA, 19 nt, Artificial Sequence
  Description of Artificial Sequence: Synthetic oligonucleotide
  Sense strand starting at position 973 of SEQ ID NO: 914916
aggcaagauguuugacuaa

SEQ ID NO: 1040271 - RNA, 19 nt, Artificial Sequence
  Description of Artificial Sequence: Synthetic oligonucleotide
  Antisense strand to SEQ ID NO: 1040270
uuagucaaacaucuugccu

SEQ ID NO: 1040272 - RNA, 19 nt, Artificial Sequence
  Description of Artificial Sequence: Synthetic oligonucleotide
  Sense strand starting at position 976 of SEQ ID NO: 914916
caagauguuugacuaaagu

SEQ ID NO: 1040273 - RNA, 19 nt, Artificial Sequence
  Description of Artificial Sequence: Synthetic oligonucleotide
  Antisense strand to SEQ ID NO: 1040272
acuuuagucaaacaucuug

SEQ ID NO: 1040274 - RNA, 19 nt, Artificial Sequence
  Description of Artificial Sequence: Synthetic oligonucleotide
  Sense strand starting at position 985 of SEQ ID NO: 914916
ugacuaaagucaccugaau

SEQ ID NO: 1040275 - RNA, 19 nt, Artificial Sequence
  Description of Artificial Sequence: Synthetic oligonucleotide
  Antisense strand to SEQ ID NO: 1040274
auucaggugacuuuaguca

SEQ ID NO: 1040276 - RNA, 19 nt, Artificial Sequence
  Description of Artificial Sequence: Synthetic oligonucleotide
  Sense strand starting at position 1149 of SEQ ID NO: 914916
agguuaaugagaugcaaua

SEQ ID NO: 1040277 - RNA, 19 nt, Artificial Sequence
  Description of Artificial Sequence: Synthetic oligonucleotide
  Antisense strand to SEQ ID NO: 1040276
uauugcaucucauuaaccu

SEQ ID NO: 1040278 - RNA, 19 nt, Artificial Sequence
  Description of Artificial Sequence: Synthetic oligonucleotide
  Sense strand starting at position 1160 of SEQ ID NO: 914916
augcaauagcgagagaauc

SEQ ID NO: 1040279 - RNA, 19 nt, Artificial Sequence
  Description of Artificial Sequence: Synthetic oligonucleotide
  Antisense strand to SEQ ID NO: 1040278
gauucucucgcuauugcau

SEQ ID NO: 1040280 - RNA, 19 nt, Artificial Sequence
  Description of Artificial Sequence: Synthetic oligonucleotide
  Sense strand starting at position 1237 of SEQ ID NO: 914916
ccaauuaagagcuggugaa

SEQ ID NO: 1040281 - RNA, 19 nt, Artificial Sequence
  Description of Artificial Sequence: Synthetic oligonucleotide
  Antisense strand to SEQ ID NO: 1040280
uucaccagcucuuaauugg

SEQ ID NO: 1040282 - RNA, 19 nt, Artificial Sequence
  Description of Artificial Sequence: Synthetic oligonucleotide
  Sense strand starting at position 1238 of SEQ ID NO: 914916
caauuaagagcuggugaag

SEQ ID NO: 1040283 - RNA, 19 nt, Artificial Sequence
  Description of Artificial Sequence: Synthetic oligonucleotide
  Antisense strand to SEQ ID NO: 1040282
cuucaccagcucuuaauug

SEQ ID NO: 1040284 - RNA, 19 nt, Artificial Sequence
  Description of Artificial Sequence: Synthetic oligonucleotide
  Sense strand starting at position 1362 of SEQ ID NO: 914916
cgugaaaguccggauuaca

SEQ ID NO: 1040285 - RNA, 19 nt, Artificial Sequence
  Description of Artificial Sequence: Synthetic oligonucleotide
  Antisense strand to SEQ ID NO: 1040284
uguaauccggacuuucacg

SEQ ID NO: 1040286 - RNA, 19 nt, Artificial Sequence
  Description of Artificial Sequence: Synthetic oligonucleotide
  Sense strand starting at position 1470 of SEQ ID NO: 914916
uccucaaauuuagagagua

SEQ ID NO: 1040287 - RNA, 19 nt, Artificial Sequence
  Description of Artificial Sequence: Synthetic oligonucleotide
  Antisense strand to SEQ ID NO: 1040286
uacucucuaaauuugagga

SEQ ID NO: 1040288 - RNA, 19 nt, Artificial Sequence
  Description of Artificial Sequence: Synthetic oligonucleotide
  Sense strand starting at position 1483 of SEQ ID NO: 914916
agaguauugcaaggcagga

SEQ ID NO: 1040289 - RNA, 19 nt, Artificial Sequence
  Description of Artificial Sequence: Synthetic oligonucleotide
  Antisense strand to SEQ ID NO: 1040288
uccugccuugcaauacucu

SEQ ID NO: 1040290 - RNA, 19 nt, Artificial Sequence
  Description of Artificial Sequence: Synthetic oligonucleotide
  Sense strand starting at position 1667 of SEQ ID NO: 914916
aguucuucugagcauucca

SEQ ID NO: 1040291 - RNA, 19 nt, Artificial Sequence
  Description of Artificial Sequence: Synthetic oligonucleotide
  Antisense strand to SEQ ID NO: 1040290
uggaaugcucagaagaacu

SEQ ID NO: 1040292 - RNA, 19 nt, Artificial Sequence
  Description of Artificial Sequence: Synthetic oligonucleotide
  Sense strand starting at position 1890 of SEQ ID NO: 914916
uuaagucauaucggagaaa

SEQ ID NO: 1040293 - RNA, 19 nt, Artificial Sequence
  Description of Artificial Sequence: Synthetic oligonucleotide
  Antisense strand to SEQ ID NO: 1040292
uuucuccgauaugacuuaa

SEQ ID NO: 1040294 - RNA, 19 nt, Artificial Sequence
  Description of Artificial Sequence: Synthetic oligonucleotide
  Sense strand starting at position 2326 of SEQ ID NO: 914916
uucccagaucugugaagga

SEQ ID NO: 1040295 - RNA, 19 nt, Artificial Sequence
  Description of Artificial Sequence: Synthetic oligonucleotide
  Antisense strand to SEQ ID NO: 1040294
uccuucacagaucugggaa

SEQ ID NO: 1040296 - RNA, 19 nt, Artificial Sequence
  Description of Artificial Sequence: Synthetic oligonucleotide
  Sense strand starting at position 2433 of SEQ ID NO: 914916
ggucaaucagcagaggugu

SEQ ID NO: 1040297 - RNA, 19 nt, Artificial Sequence
  Description of Artificial Sequence: Synthetic oligonucleotide
  Antisense strand to SEQ ID NO: 1040296
acaccucugcugauugacc

SEQ ID NO: 1040298 - RNA, 19 nt, Artificial Sequence
  Description of Artificial Sequence: Synthetic oligonucleotide
  Sense strand starting at position 2470 of SEQ ID NO: 914916
ggauuauggcaagguuauu

SEQ ID NO: 1040299 - RNA, 19 nt, Artificial Sequence
  Description of Artificial Sequence: Synthetic oligonucleotide
  Antisense strand to SEQ ID NO: 1040298
aauaaccuugccauaaucc

SEQ ID NO: 1040300 - RNA, 19 nt, Artificial Sequence
  Description of Artificial Sequence: Synthetic oligonucleotide
  Sense strand starting at position 2535 of SEQ ID NO: 914916
cauugagaugauugccaga

SEQ ID NO: 1040301 - RNA, 19 nt, Artificial Sequence
  Description of Artificial Sequence: Synthetic oligonucleotide
  Antisense strand to SEQ ID NO: 1040300
ucuggcaaucaucucaaug

SEQ ID NO: 1040302 - RNA, 19 nt, Artificial Sequence
  Description of Artificial Sequence: Synthetic oligonucleotide
  Sense strand starting at position 2540 of SEQ ID NO: 914916
agaugauugccagagcugu

SEQ ID NO: 1040303 - RNA, 19 nt, Artificial Sequence
  Description of Artificial Sequence: Synthetic oligonucleotide
  Antisense strand to SEQ ID NO: 1040302
acagcucuggcaaucaucu

SEQ ID NO: 1040304 - RNA, 19 nt, Artificial Sequence
  Description of Artificial Sequence: Synthetic oligonucleotide
  Sense strand starting at position 2790 of SEQ ID NO: 914916
acuauaucaucaucggaau

SEQ ID NO: 1040305 - RNA, 19 nt, Artificial Sequence
  Description of Artificial Sequence: Synthetic oligonucleotide
  Antisense strand to SEQ ID NO: 1040304
auuccgaugaugauauagu

SEQ ID NO: 1040306 - RNA, 19 nt, Artificial Sequence
  Description of Artificial Sequence: Synthetic oligonucleotide
  Sense strand starting at position 2791 of SEQ ID NO: 914916
cuauaucaucaucggaauc

SEQ ID NO: 1040307 - RNA, 19 nt, Artificial Sequence
  Description of Artificial Sequence: Synthetic oligonucleotide
  Antisense strand to SEQ ID NO: 1040306
gauuccgaugaugauauag

SEQ ID NO: 1040308 - RNA, 19 nt, Artificial Sequence
  Description of Artificial Sequence: Synthetic oligonucleotide
  Sense strand starting at position 2875 of SEQ ID NO: 914916
gguuuagaagccuagaacu

SEQ ID NO: 1040309 - RNA, 19 nt, Artificial Sequence
  Description of Artificial Sequence: Synthetic oligonucleotide
  Antisense strand to SEQ ID NO: 1040308
aguucuaggcuucuaaacc

SEQ ID NO: 1040310 - RNA, 19 nt, Artificial Sequence
  Description of Artificial Sequence: Synthetic oligonucleotide
  Sense strand starting at position 2927 of SEQ ID NO: 914916
ggagacaaauuagcuuuau

SEQ ID NO: 1040311 - RNA, 19 nt, Artificial Sequence
  Description of Artificial Sequence: Synthetic oligonucleotide
  Antisense strand to SEQ ID NO: 1040310
auaaagcuaauuugucucc

SEQ ID NO: 1040312 - RNA, 19 nt, Artificial Sequence
  Description of Artificial Sequence: Synthetic oligonucleotide
  Sense strand starting at position 2992 of SEQ ID NO: 914916
cuggcuguuaaauggaaau

SEQ ID NO: 1040313 - RNA, 19 nt, Artificial Sequence
  Description of Artificial Sequence: Synthetic oligonucleotide
  Antisense strand to SEQ ID NO: 1040312
auuuccauuuaacagccag

SEQ ID NO: 1040314 - RNA, 19 nt, Artificial Sequence
  Description of Artificial Sequence: Synthetic oligonucleotide
  Sense strand starting at position 3057 of SEQ ID NO: 914916
ggcaacaaguaucugaauu

SEQ ID NO: 1040315 - RNA, 19 nt, Artificial Sequence
  Description of Artificial Sequence: Synthetic oligonucleotide
  Antisense strand to SEQ ID NO: 1040314
aauucagauacuuguugcc

SEQ ID NO: 1040316 - RNA, 19 nt, Artificial Sequence
  Description of Artificial Sequence: Synthetic oligonucleotide
  Sense strand starting at position 3094 of SEQ ID NO: 914916
auaaauggauuccugguaa

SEQ ID NO: 1040317 - RNA, 19 nt, Artificial Sequence
  Description of Artificial Sequence: Synthetic oligonucleotide
  Antisense strand to SEQ ID NO: 1040316
uuaccaggaauccauuuau

SEQ ID NO: 1040318 - RNA, 19 nt, Artificial Sequence
  Description of Artificial Sequence: Synthetic oligonucleotide
  Sense strand starting at position 3271 of SEQ ID NO: 914916
agagaacaucuguguggga

SEQ ID NO: 1040319 - RNA, 19 nt, Artificial Sequence
  Description of Artificial Sequence: Synthetic oligonucleotide
  Antisense strand to SEQ ID NO: 1040318
ucccacacagauguucucu

SEQ ID NO: 1040320 - RNA, 19 nt, Artificial Sequence
  Description of Artificial Sequence: Synthetic oligonucleotide
  Sense strand starting at position 3273 of SEQ ID NO: 914916
agaacaucugugugggaca

SEQ ID NO: 1040321 - RNA, 19 nt, Artificial Sequence
  Description of Artificial Sequence: Synthetic oligonucleotide
  Antisense strand to SEQ ID NO: 1040320
ugucccacacagauguucu

SEQ ID NO: 1040322 - RNA, 19 nt, Artificial Sequence
  Description of Artificial Sequence: Synthetic oligonucleotide
  Sense strand starting at position 3311 of SEQ ID NO: 914916
uugacaauuguccaucgua

SEQ ID NO: 1040323 - RNA, 19 nt, Artificial Sequence
  Description of Artificial Sequence: Synthetic oligonucleotide
  Antisense strand to SEQ ID NO: 1040322
uacgauggacaauugucaa

SEQ ID NO: 1040324 - RNA, 19 nt, Artificial Sequence
  Description of Artificial Sequence: Synthetic oligonucleotide
  Sense strand starting at position 3356 of SEQ ID NO: 914916
cugaaacgagcuuaaaguu

SEQ ID NO: 1040325 - RNA, 19 nt, Artificial Sequence
  Description of Artificial Sequence: Synthetic oligonucleotide
  Antisense strand to SEQ ID NO: 1040324
aacuuuaagcucguuucag

SEQ ID NO: 1040326 - RNA, 19 nt, Artificial Sequence
  Description of Artificial Sequence: Synthetic oligonucleotide
  Sense strand starting at position 3402 of SEQ ID NO: 914916
aguaccaagcaaugaaauu

SEQ ID NO: 1040327 - RNA, 19 nt, Artificial Sequence
  Description of Artificial Sequence: Synthetic oligonucleotide
  Antisense strand to SEQ ID NO: 1040326
aauuucauugcuugguacu

SEQ ID NO: 1040328 - RNA, 19 nt, Artificial Sequence
  Description of Artificial Sequence: Synthetic oligonucleotide
  Sense strand starting at position 3594 of SEQ ID NO: 914916
gguagauaaaggugaguua

SEQ ID NO: 1040329 - RNA, 19 nt, Artificial Sequence
  Description of Artificial Sequence: Synthetic oligonucleotide
  Antisense strand to SEQ ID NO: 1040328
uaacucaccuuuaucuacc

SEQ ID NO: 1040330 - RNA, 19 nt, Artificial Sequence
  Description of Artificial Sequence: Synthetic oligonucleotide
  Sense strand starting at position 3595 of SEQ ID NO: 914916
guagauaaaggugaguuau

SEQ ID NO: 1040331 - RNA, 19 nt, Artificial Sequence
  Description of Artificial Sequence: Synthetic oligonucleotide
  Antisense strand to SEQ ID NO: 1040330
auaacucaccuuuaucuac

SEQ ID NO: 1040332 - RNA, 19 nt, Artificial Sequence
  Description of Artificial Sequence: Synthetic oligonucleotide
  Sense strand starting at position 3605 of SEQ ID NO: 914916
gugaguuauagugcagugu

SEQ ID NO: 1040333 - RNA, 19 nt, Artificial Sequence
  Description of Artificial Sequence: Synthetic oligonucleotide
  Antisense strand to SEQ ID NO: 1040332
acacugcacuauaacucac

SEQ ID NO: 1040334 - RNA, 19 nt, Artificial Sequence
  Description of Artificial Sequence: Synthetic oligonucleotide
  Sense strand starting at position 50 of SEQ ID NO: 914917
gggccuugaguuugaggaa

SEQ ID NO: 1040335 - RNA, 19 nt, Artificial Sequence
  Description of Artificial Sequence: Synthetic oligonucleotide
  Antisense strand to SEQ ID NO: 1040334
uuccucaaacucaaggccc

SEQ ID NO: 1040336 - RNA, 19 nt, Artificial Sequence
  Description of Artificial Sequence: Synthetic oligonucleotide
  Sense strand starting at position 73 of SEQ ID NO: 914917
agguucucguagcugagau

SEQ ID NO: 1040337 - RNA, 19 nt, Artificial Sequence
  Description of Artificial Sequence: Synthetic oligonucleotide
  Antisense strand to SEQ ID NO: 1040336
aucucagcuacgagaaccu

SEQ ID NO: 1040338 - RNA, 19 nt, Artificial Sequence
  Description of Artificial Sequence: Synthetic oligonucleotide
  Sense strand starting at position 207 of SEQ ID NO: 914917
gggagauugccaggacuca

SEQ ID NO: 1040339 - RNA, 19 nt, Artificial Sequence
  Description of Artificial Sequence: Synthetic oligonucleotide
  Antisense strand to SEQ ID NO: 1040338
ugaguccuggcaaucuccc

SEQ ID NO: 1040340 - RNA, 19 nt, Artificial Sequence
  Description of Artificial Sequence: Synthetic oligonucleotide
  Sense strand starting at position 309 of SEQ ID NO: 914917
guggcaaucucauuagugu

SEQ ID NO: 1040341 - RNA, 19 nt, Artificial Sequence
  Description of Artificial Sequence: Synthetic oligonucleotide
  Antisense strand to SEQ ID NO: 1040340
acacuaaugagauugccac

SEQ ID NO: 1040342 - RNA, 19 nt, Artificial Sequence
  Description of Artificial Sequence: Synthetic oligonucleotide
  Sense strand starting at position 310 of SEQ ID NO: 914917
uggcaaucucauuaguguu

SEQ ID NO: 1040343 - RNA, 19 nt, Artificial Sequence
  Description of Artificial Sequence: Synthetic oligonucleotide
  Antisense strand to SEQ ID NO: 1040342
aacacuaaugagauugcca

SEQ ID NO: 1040344 - RNA, 19 nt, Artificial Sequence
  Description of Artificial Sequence: Synthetic oligonucleotide
  Sense strand starting at position 350 of SEQ ID NO: 914917
agguaaagcugcuuaagag

SEQ ID NO: 1040345 - RNA, 19 nt, Artificial Sequence
  Description of Artificial Sequence: Synthetic oligonucleotide
  Antisense strand to SEQ ID NO: 1040344
cucuuaagcagcuuuaccu

SEQ ID NO: 1040346 - RNA, 19 nt, Artificial Sequence
  Description of Artificial Sequence: Synthetic oligonucleotide
  Sense strand starting at position 351 of SEQ ID NO: 914917
gguaaagcugcuuaagaga

SEQ ID NO: 1040347 - RNA, 19 nt, Artificial Sequence
  Description of Artificial Sequence: Synthetic oligonucleotide
  Antisense strand to SEQ ID NO: 1040346
ucucuuaagcagcuuuacc

SEQ ID NO: 1040348 - RNA, 19 nt, Artificial Sequence
  Description of Artificial Sequence: Synthetic oligonucleotide
  Sense strand starting at position 364 of SEQ ID NO: 914917
aagagagggccugguaaau

SEQ ID NO: 1040349 - RNA, 19 nt, Artificial Sequence
  Description of Artificial Sequence: Synthetic oligonucleotide
  Antisense strand to SEQ ID NO: 1040348
auuuaccaggcccucucuu

SEQ ID NO: 1040350 - RNA, 19 nt, Artificial Sequence
  Description of Artificial Sequence: Synthetic oligonucleotide
  Sense strand starting at position 420 of SEQ ID NO: 914917
uuggcugucacgcaacuua

SEQ ID NO: 1040351 - RNA, 19 nt, Artificial Sequence
  Description of Artificial Sequence: Synthetic oligonucleotide
  Antisense strand to SEQ ID NO: 1040350
uaaguugcgugacagccaa

SEQ ID NO: 1040352 - RNA, 19 nt, Artificial Sequence
  Description of Artificial Sequence: Synthetic oligonucleotide
  Sense strand starting at position 442 of SEQ ID NO: 914917
uauugcagcucuguugaga

SEQ ID NO: 1040353 - RNA, 19 nt, Artificial Sequence
  Description of Artificial Sequence: Synthetic oligonucleotide
  Antisense strand to SEQ ID NO: 1040352
ucucaacagagcugcaaua

SEQ ID NO: 1040354 - RNA, 19 nt, Artificial Sequence
  Description of Artificial Sequence: Synthetic oligonucleotide
  Sense strand starting at position 450 of SEQ ID NO: 914917
cucuguugagauuguguua

SEQ ID NO: 1040355 - RNA, 19 nt, Artificial Sequence
  Description of Artificial Sequence: Synthetic oligonucleotide
  Antisense strand to SEQ ID NO: 1040354
uaacacaaucucaacagag

SEQ ID NO: 1040356 - RNA, 19 nt, Artificial Sequence
  Description of Artificial Sequence: Synthetic oligonucleotide
  Sense strand starting at position 453 of SEQ ID NO: 914917
uguugagauuguguuaguc

SEQ ID NO: 1040357 - RNA, 19 nt, Artificial Sequence
  Description of Artificial Sequence: Synthetic oligonucleotide
  Antisense strand to SEQ ID NO: 1040356
gacuaacacaaucucaaca

SEQ ID NO: 1040358 - RNA, 19 nt, Artificial Sequence
  Description of Artificial Sequence: Synthetic oligonucleotide
  Sense strand starting at position 457 of SEQ ID NO: 914917
gagauuguguuagucauua

SEQ ID NO: 1040359 - RNA, 19 nt, Artificial Sequence
  Description of Artificial Sequence: Synthetic oligonucleotide
  Antisense strand to SEQ ID NO: 1040358
uaaugacuaacacaaucuc

SEQ ID NO: 1040360 - RNA, 19 nt, Artificial Sequence
  Description of Artificial Sequence: Synthetic oligonucleotide
  Sense strand starting at position 516 of SEQ ID NO: 914917
agcauucugguagauuaga

SEQ ID NO: 1040361 - RNA, 19 nt, Artificial Sequence
  Description of Artificial Sequence: Synthetic oligonucleotide
  Antisense strand to SEQ ID NO: 1040360
ucuaaucuaccagaaugcu

SEQ ID NO: 1040362 - RNA, 19 nt, Artificial Sequence
  Description of Artificial Sequence: Synthetic oligonucleotide
  Sense strand starting at position 623 of SEQ ID NO: 914917
ccacuuucuaaguguguga

SEQ ID NO: 1040363 - RNA, 19 nt, Artificial Sequence
  Description of Artificial Sequence: Synthetic oligonucleotide
  Antisense strand to SEQ ID NO: 1040362
ucacacacuuagaaagugg

SEQ ID NO: 1040364 - RNA, 19 nt, Artificial Sequence
  Description of Artificial Sequence: Synthetic oligonucleotide
  Sense strand starting at position 625 of SEQ ID NO: 914917
acuuucuaagugugugauu

SEQ ID NO: 1040365 - RNA, 19 nt, Artificial Sequence
  Description of Artificial Sequence: Synthetic oligonucleotide
  Antisense strand to SEQ ID NO: 1040364
aaucacacacuuagaaagu

SEQ ID NO: 1040366 - RNA, 19 nt, Artificial Sequence
  Description of Artificial Sequence: Synthetic oligonucleotide
  Sense strand starting at position 630 of SEQ ID NO: 914917
cuaagugugugauuccugu

SEQ ID NO: 1040367 - RNA, 19 nt, Artificial Sequence
  Description of Artificial Sequence: Synthetic oligonucleotide
  Antisense strand to SEQ ID NO: 1040366
acaggaaucacacacuuag

SEQ ID NO: 1040368 - RNA, 19 nt, Artificial Sequence
  Description of Artificial Sequence: Synthetic oligonucleotide
  Sense strand starting at position 739 of SEQ ID NO: 914917
aucuuaggucauggugaaa

SEQ ID NO: 1040369 - RNA, 19 nt, Artificial Sequence
  Description of Artificial Sequence: Synthetic oligonucleotide
  Antisense strand to SEQ ID NO: 1040368
uuucaccaugaccuaagau

SEQ ID NO: 1040370 - RNA, 19 nt, Artificial Sequence
  Description of Artificial Sequence: Synthetic oligonucleotide
  Sense strand starting at position 781 of SEQ ID NO: 914917
aggcuauucucacuugucu

SEQ ID NO: 1040371 - RNA, 19 nt, Artificial Sequence
  Description of Artificial Sequence: Synthetic oligonucleotide
  Antisense strand to SEQ ID NO: 1040370
agacaagugagaauagccu

SEQ ID NO: 1040372 - RNA, 19 nt, Artificial Sequence
  Description of Artificial Sequence: Synthetic oligonucleotide
  Sense strand starting at position 966 of SEQ ID NO: 914917
gugcuuucuggcucuaagu

SEQ ID NO: 1040373 - RNA, 19 nt, Artificial Sequence
  Description of Artificial Sequence: Synthetic oligonucleotide
  Antisense strand to SEQ ID NO: 1040372
acuuagagccagaaagcac

SEQ ID NO: 1040374 - RNA, 19 nt, Artificial Sequence
  Description of Artificial Sequence: Synthetic oligonucleotide
  Sense strand starting at position 1002 of SEQ ID NO: 914917
agccuuugcuucccauuga

SEQ ID NO: 1040375 - RNA, 19 nt, Artificial Sequence
  Description of Artificial Sequence: Synthetic oligonucleotide
  Antisense strand to SEQ ID NO: 1040374
ucaaugggaagcaaaggcu

SEQ ID NO: 1040376 - RNA, 19 nt, Artificial Sequence
  Description of Artificial Sequence: Synthetic oligonucleotide
  Sense strand starting at position 2036 of SEQ ID NO: 914917
cagcaaguccuggaagagu

SEQ ID NO: 1040377 - RNA, 19 nt, Artificial Sequence
  Description of Artificial Sequence: Synthetic oligonucleotide
  Antisense strand to SEQ ID NO: 1040376
acucuuccaggacuugcug

SEQ ID NO: 1040378 - RNA, 19 nt, Artificial Sequence
  Description of Artificial Sequence: Synthetic oligonucleotide
  Sense strand starting at position 2045 of SEQ ID NO: 914917
cuggaagaguuccugcaga

SEQ ID NO: 1040379 - RNA, 19 nt, Artificial Sequence
  Description of Artificial Sequence: Synthetic oligonucleotide
  Antisense strand to SEQ ID NO: 1040378
ucugcaggaacucuuccag

SEQ ID NO: 1040380 - RNA, 19 nt, Artificial Sequence
  Description of Artificial Sequence: Synthetic oligonucleotide
  Sense strand starting at position 2050 of SEQ ID NO: 914917
agaguuccugcagaucuuu

SEQ ID NO: 1040381 - RNA, 19 nt, Artificial Sequence
  Description of Artificial Sequence: Synthetic oligonucleotide
  Antisense strand to SEQ ID NO: 1040380
aaagaucugcaggaacucu

SEQ ID NO: 1040382 - RNA, 19 nt, Artificial Sequence
  Description of Artificial Sequence: Synthetic oligonucleotide
  Sense strand starting at position 2140 of SEQ ID NO: 914917
gaugaaacgugcccuuuaa

SEQ ID NO: 1040383 - RNA, 19 nt, Artificial Sequence
  Description of Artificial Sequence: Synthetic oligonucleotide
  Antisense strand to SEQ ID NO: 1040382
uuaaagggcacguuucauc

SEQ ID NO: 1040384 - RNA, 19 nt, Artificial Sequence
  Description of Artificial Sequence: Synthetic oligonucleotide
  Sense strand starting at position 2144 of SEQ ID NO: 914917
aaacgugcccuuuaaagau

SEQ ID NO: 1040385 - RNA, 19 nt, Artificial Sequence
  Description of Artificial Sequence: Synthetic oligonucleotide
  Antisense strand to SEQ ID NO: 1040384
aucuuuaaagggcacguuu

SEQ ID NO: 1040386 - RNA, 19 nt, Artificial Sequence
  Description of Artificial Sequence: Synthetic oligonucleotide
  Sense strand starting at position 2154 of SEQ ID NO: 914917
uuuaaagauccuuggcacu

SEQ ID NO: 1040387 - RNA, 19 nt, Artificial Sequence
  Description of Artificial Sequence: Synthetic oligonucleotide
  Antisense strand to SEQ ID NO: 1040386
agugccaaggaucuuuaaa

SEQ ID NO: 1040388 - RNA, 19 nt, Artificial Sequence
  Description of Artificial Sequence: Synthetic oligonucleotide
  Sense strand starting at position 2235 of SEQ ID NO: 914917
cugggucuucaguguugaa

SEQ ID NO: 1040389 - RNA, 19 nt, Artificial Sequence
  Description of Artificial Sequence: Synthetic oligonucleotide
  Antisense strand to SEQ ID NO: 1040388
uucaacacugaagacccag

SEQ ID NO: 1040390 - RNA, 19 nt, Artificial Sequence
  Description of Artificial Sequence: Synthetic oligonucleotide
  Sense strand starting at position 2370 of SEQ ID NO: 914917
gccugagaguccucagccu

SEQ ID NO: 1040391 - RNA, 19 nt, Artificial Sequence
  Description of Artificial Sequence: Synthetic oligonucleotide
  Antisense strand to SEQ ID NO: 1040390
aggcugaggacucucaggc

SEQ ID NO: 1040392 - RNA, 19 nt, Artificial Sequence
  Description of Artificial Sequence: Synthetic oligonucleotide
  Sense strand starting at position 2475 of SEQ ID NO: 914917
gccagaagaagucaugagu

SEQ ID NO: 1040393 - RNA, 19 nt, Artificial Sequence
  Description of Artificial Sequence: Synthetic oligonucleotide
  Antisense strand to SEQ ID NO: 1040392
acucaugacuucuucuggc

SEQ ID NO: 1040394 - RNA, 19 nt, Artificial Sequence
  Description of Artificial Sequence: Synthetic oligonucleotide
  Sense strand starting at position 2508 of SEQ ID NO: 914917
cugagugucagcuggcaga

SEQ ID NO: 1040395 - RNA, 19 nt, Artificial Sequence
  Description of Artificial Sequence: Synthetic oligonucleotide
  Antisense strand to SEQ ID NO: 1040394
ucugccagcugacacucag

SEQ ID NO: 1040396 - RNA, 19 nt, Artificial Sequence
  Description of Artificial Sequence: Synthetic oligonucleotide
  Sense strand starting at position 2563 of SEQ ID NO: 914917
cgcaguucuguguucagca

SEQ ID NO: 1040397 - RNA, 19 nt, Artificial Sequence
  Description of Artificial Sequence: Synthetic oligonucleotide
  Antisense strand to SEQ ID NO: 1040396
ugcugaacacagaacugcg

SEQ ID NO: 1040398 - RNA, 19 nt, Artificial Sequence
  Description of Artificial Sequence: Synthetic oligonucleotide
  Sense strand starting at position 2626 of SEQ ID NO: 914917
agagaaauccugugcccuu

SEQ ID NO: 1040399 - RNA, 19 nt, Artificial Sequence
  Description of Artificial Sequence: Synthetic oligonucleotide
  Antisense strand to SEQ ID NO: 1040398
aagggcacaggauuucucu

SEQ ID NO: 1040400 - RNA, 19 nt, Artificial Sequence
  Description of Artificial Sequence: Synthetic oligonucleotide
  Sense strand starting at position 2627 of SEQ ID NO: 914917
gagaaauccugugcccuug

SEQ ID NO: 1040401 - RNA, 19 nt, Artificial Sequence
  Description of Artificial Sequence: Synthetic oligonucleotide
  Antisense strand to SEQ ID NO: 1040400
caagggcacaggauuucuc

SEQ ID NO: 1040402 - RNA, 19 nt, Artificial Sequence
  Description of Artificial Sequence: Synthetic oligonucleotide
  Sense strand starting at position 2669 of SEQ ID NO: 914917
ggacgcuuggcuuaucuuu

SEQ ID NO: 1040403 - RNA, 19 nt, Artificial Sequence
  Description of Artificial Sequence: Synthetic oligonucleotide
  Antisense strand to SEQ ID NO: 1040402
aaagauaagccaagcgucc

SEQ ID NO: 1040404 - RNA, 19 nt, Artificial Sequence
  Description of Artificial Sequence: Synthetic oligonucleotide
  Sense strand starting at position 3696 of SEQ ID NO: 914917
ggaugcucggaagaaaguu

SEQ ID NO: 1040405 - RNA, 19 nt, Artificial Sequence
  Description of Artificial Sequence: Synthetic oligonucleotide
  Antisense strand to SEQ ID NO: 1040404
aacuuucuuccgagcaucc

SEQ ID NO: 1040406 - RNA, 19 nt, Artificial Sequence
  Description of Artificial Sequence: Synthetic oligonucleotide
  Sense strand starting at position 3722 of SEQ ID NO: 914917
ucugaaugcuucuuucuga

SEQ ID NO: 1040407 - RNA, 19 nt, Artificial Sequence
  Description of Artificial Sequence: Synthetic oligonucleotide
  Antisense strand to SEQ ID NO: 1040406
ucagaaagaagcauucaga

SEQ ID NO: 1040408 - RNA, 19 nt, Artificial Sequence
  Description of Artificial Sequence: Synthetic oligonucleotide
  Sense strand starting at position 3723 of SEQ ID NO: 914917
cugaaugcuucuuucugaa

SEQ ID NO: 1040409 - RNA, 19 nt, Artificial Sequence
  Description of Artificial Sequence: Synthetic oligonucleotide
  Antisense strand to SEQ ID NO: 1040408
uucagaaagaagcauucag

SEQ ID NO: 1040410 - RNA, 19 nt, Artificial Sequence
  Description of Artificial Sequence: Synthetic oligonucleotide
  Sense strand starting at position 3902 of SEQ ID NO: 914917
gacguuucgcugucucuua

SEQ ID NO: 1040411 - RNA, 19 nt, Artificial Sequence
  Description of Artificial Sequence: Synthetic oligonucleotide
  Antisense strand to SEQ ID NO: 1040410
uaagagacagcgaaacguc

SEQ ID NO: 1040412 - RNA, 19 nt, Artificial Sequence
  Description of Artificial Sequence: Synthetic oligonucleotide
  Sense strand starting at position 3906 of SEQ ID NO: 914917
uuucgcugucucuuagcaa

SEQ ID NO: 1040413 - RNA, 19 nt, Artificial Sequence
  Description of Artificial Sequence: Synthetic oligonucleotide
  Antisense strand to SEQ ID NO: 1040412
uugcuaagagacagcgaaa

SEQ ID NO: 1040414 - RNA, 19 nt, Artificial Sequence
  Description of Artificial Sequence: Synthetic oligonucleotide
  Sense strand starting at position 612 of SEQ ID NO: 914918
gauuuaucuuccugaugag

SEQ ID NO: 1040415 - RNA, 19 nt, Artificial Sequence
  Description of Artificial Sequence: Synthetic oligonucleotide
  Antisense strand to SEQ ID NO: 1040414
cucaucaggaagauaaauc

SEQ ID NO: 1040416 - RNA, 19 nt, Artificial Sequence
  Description of Artificial Sequence: Synthetic oligonucleotide
  Sense strand starting at position 615 of SEQ ID NO: 914918
uuaucuuccugaugagacg

SEQ ID NO: 1040417 - RNA, 19 nt, Artificial Sequence
  Description of Artificial Sequence: Synthetic oligonucleotide
  Antisense strand to SEQ ID NO: 1040416
cgucucaucaggaagauaa

SEQ ID NO: 1040418 - RNA, 19 nt, Artificial Sequence
  Description of Artificial Sequence: Synthetic oligonucleotide
  Sense strand starting at position 646 of SEQ ID NO: 914918
agcccugugugucuuacua

SEQ ID NO: 1040419 - RNA, 19 nt, Artificial Sequence
  Description of Artificial Sequence: Synthetic oligonucleotide
  Antisense strand to SEQ ID NO: 1040418
uaguaagacacacagggcu

SEQ ID NO: 1040420 - RNA, 19 nt, Artificial Sequence
  Description of Artificial Sequence: Synthetic oligonucleotide
  Sense strand starting at position 1045 of SEQ ID NO: 914918
agcagaaucucauggaguu

SEQ ID NO: 1040421 - RNA, 19 nt, Artificial Sequence
  Description of Artificial Sequence: Synthetic oligonucleotide
  Antisense strand to SEQ ID NO: 1040420
aacuccaugagauucugcu

SEQ ID NO: 1040422 - RNA, 19 nt, Artificial Sequence
  Description of Artificial Sequence: Synthetic oligonucleotide
  Sense strand starting at position 1046 of SEQ ID NO: 914918
gcagaaucucauggaguuu

SEQ ID NO: 1040423 - RNA, 19 nt, Artificial Sequence
  Description of Artificial Sequence: Synthetic oligonucleotide
  Antisense strand to SEQ ID NO: 1040422
aaacuccaugagauucugc

SEQ ID NO: 1040424 - RNA, 19 nt, Artificial Sequence
  Description of Artificial Sequence: Synthetic oligonucleotide
  Sense strand starting at position 1260 of SEQ ID NO: 914918
ggcugagucagcuacccuu

SEQ ID NO: 1040425 - RNA, 19 nt, Artificial Sequence
  Description of Artificial Sequence: Synthetic oligonucleotide
  Antisense strand to SEQ ID NO: 1040424
aaggguagcugacucagcc

SEQ ID NO: 1040426 - RNA, 19 nt, Artificial Sequence
  Description of Artificial Sequence: Synthetic oligonucleotide
  Sense strand starting at position 1656 of SEQ ID NO: 914918
ggucauugccucugagucu

SEQ ID NO: 1040427 - RNA, 19 nt, Artificial Sequence
  Description of Artificial Sequence: Synthetic oligonucleotide
  Antisense strand to SEQ ID NO: 1040426
agacucagaggcaaugacc

SEQ ID NO: 1040428 - RNA, 19 nt, Artificial Sequence
  Description of Artificial Sequence: Synthetic oligonucleotide
  Sense strand starting at position 2723 of SEQ ID NO: 914918
caggguuugccugacugua

SEQ ID NO: 1040429 - RNA, 19 nt, Artificial Sequence
  Description of Artificial Sequence: Synthetic oligonucleotide
  Antisense strand to SEQ ID NO: 1040428
uacagucaggcaaacccug

SEQ ID NO: 1040430 - RNA, 19 nt, Artificial Sequence
  Description of Artificial Sequence: Synthetic oligonucleotide
  Sense strand starting at position 2725 of SEQ ID NO: 914918
ggguuugccugacuguaaa

SEQ ID NO: 1040431 - RNA, 19 nt, Artificial Sequence
  Description of Artificial Sequence: Synthetic oligonucleotide
  Antisense strand to SEQ ID NO: 1040430
uuuacagucaggcaaaccc

SEQ ID NO: 1040432 - RNA, 19 nt, Artificial Sequence
  Description of Artificial Sequence: Synthetic oligonucleotide
  Sense strand starting at position 3054 of SEQ ID NO: 914918
ggauguauuucugauuccu

SEQ ID NO: 1040433 - RNA, 19 nt, Artificial Sequence
  Description of Artificial Sequence: Synthetic oligonucleotide
  Antisense strand to SEQ ID NO: 1040432
aggaaucagaaauacaucc

SEQ ID NO: 1040434 - RNA, 19 nt, Artificial Sequence
  Description of Artificial Sequence: Synthetic oligonucleotide
  Sense strand starting at position 150 of SEQ ID NO: 914919
cuacgcaaacgacauaaau

SEQ ID NO: 1040435 - RNA, 19 nt, Artificial Sequence
  Description of Artificial Sequence: Synthetic oligonucleotide
  Antisense strand to SEQ ID NO: 1040434
auuuaugucguuugcguag

SEQ ID NO: 1040436 - RNA, 19 nt, Artificial Sequence
  Description of Artificial Sequence: Synthetic oligonucleotide
  Sense strand starting at position 840 of SEQ ID NO: 914919
augaucagcauguguuaag

SEQ ID NO: 1040437 - RNA, 19 nt, Artificial Sequence
  Description of Artificial Sequence: Synthetic oligonucleotide
  Antisense strand to SEQ ID NO: 1040436
cuuaacacaugcugaucau

SEQ ID NO: 1040438 - RNA, 19 nt, Artificial Sequence
  Description of Artificial Sequence: Synthetic oligonucleotide
  Sense strand starting at position 841 of SEQ ID NO: 914919
ugaucagcauguguuaagu

SEQ ID NO: 1040439 - RNA, 19 nt, Artificial Sequence
  Description of Artificial Sequence: Synthetic oligonucleotide
  Antisense strand to SEQ ID NO: 1040438
acuuaacacaugcugauca

SEQ ID NO: 1040440 - RNA, 19 nt, Artificial Sequence
  Description of Artificial Sequence: Synthetic oligonucleotide
  Sense strand starting at position 847 of SEQ ID NO: 914919
gcauguguuaaguauuaga

SEQ ID NO: 1040441 - RNA, 19 nt, Artificial Sequence
  Description of Artificial Sequence: Synthetic oligonucleotide
  Antisense strand to SEQ ID NO: 1040440
ucuaauacuuaacacaugc

SEQ ID NO: 1040442 - RNA, 19 nt, Artificial Sequence
  Description of Artificial Sequence: Synthetic oligonucleotide
  Sense strand starting at position 917 of SEQ ID NO: 914919
uuacuuagcccagggaaga

SEQ ID NO: 1040443 - RNA, 19 nt, Artificial Sequence
  Description of Artificial Sequence: Synthetic oligonucleotide
  Antisense strand to SEQ ID NO: 1040442
ucuucccugggcuaaguaa

SEQ ID NO: 1040444 - RNA, 19 nt, Artificial Sequence
  Description of Artificial Sequence: Synthetic oligonucleotide
  Sense strand starting at position 918 of SEQ ID NO: 914919
uacuuagcccagggaagaa

SEQ ID NO: 1040445 - RNA, 19 nt, Artificial Sequence
  Description of Artificial Sequence: Synthetic oligonucleotide
  Antisense strand to SEQ ID NO: 1040444
uucuucccugggcuaagua

SEQ ID NO: 1040446 - RNA, 19 nt, Artificial Sequence
  Description of Artificial Sequence: Synthetic oligonucleotide
  Sense strand starting at position 930 of SEQ ID NO: 914919
ggaagaacgguaggauauu

SEQ ID NO: 1040447 - RNA, 19 nt, Artificial Sequence
  Description of Artificial Sequence: Synthetic oligonucleotide
  Antisense strand to SEQ ID NO: 1040446
aauauccuaccguucuucc

SEQ ID NO: 1040448 - RNA, 19 nt, Artificial Sequence
  Description of Artificial Sequence: Synthetic oligonucleotide
  Sense strand starting at position 931 of SEQ ID NO: 914919
gaagaacgguaggauauuu

SEQ ID NO: 1040449 - RNA, 19 nt, Artificial Sequence
  Description of Artificial Sequence: Synthetic oligonucleotide
  Antisense strand to SEQ ID NO: 1040448
aaauauccuaccguucuuc

SEQ ID NO: 1040450 - RNA, 19 nt, Artificial Sequence
  Description of Artificial Sequence: Synthetic oligonucleotide
  Sense strand starting at position 1005 of SEQ ID NO: 914919
cuaggcugaugccuauaau

SEQ ID NO: 1040451 - RNA, 19 nt, Artificial Sequence
  Description of Artificial Sequence: Synthetic oligonucleotide
  Antisense strand to SEQ ID NO: 1040450
auuauaggcaucagccuag

SEQ ID NO: 1040452 - RNA, 19 nt, Artificial Sequence
  Description of Artificial Sequence: Synthetic oligonucleotide
  Sense strand starting at position 1299 of SEQ ID NO: 914919
acauguauccgucagugac

SEQ ID NO: 1040453 - RNA, 19 nt, Artificial Sequence
  Description of Artificial Sequence: Synthetic oligonucleotide
  Antisense strand to SEQ ID NO: 1040452
gucacugacggauacaugu

SEQ ID NO: 1040454 - RNA, 19 nt, Artificial Sequence
  Description of Artificial Sequence: Synthetic oligonucleotide
  Sense strand starting at position 1302 of SEQ ID NO: 914919
uguauccgucagugacaca

SEQ ID NO: 1040455 - RNA, 19 nt, Artificial Sequence
  Description of Artificial Sequence: Synthetic oligonucleotide
  Antisense strand to SEQ ID NO: 1040454
ugugucacugacggauaca

SEQ ID NO: 1040456 - RNA, 19 nt, Artificial Sequence
  Description of Artificial Sequence: Synthetic oligonucleotide
  Sense strand starting at position 1443 of SEQ ID NO: 914919
accugcuaucugugcaaau

SEQ ID NO: 1040457 - RNA, 19 nt, Artificial Sequence
  Description of Artificial Sequence: Synthetic oligonucleotide
  Antisense strand to SEQ ID NO: 1040456
auuugcacagauagcaggu

SEQ ID NO: 1040458 - RNA, 19 nt, Artificial Sequence
  Description of Artificial Sequence: Synthetic oligonucleotide
  Sense strand starting at position 1455 of SEQ ID NO: 914919
ugcaaauccuguccaagga

SEQ ID NO: 1040459 - RNA, 19 nt, Artificial Sequence
  Description of Artificial Sequence: Synthetic oligonucleotide
  Antisense strand to SEQ ID NO: 1040458
uccuuggacaggauuugca

SEQ ID NO: 1040460 - RNA, 19 nt, Artificial Sequence
  Description of Artificial Sequence: Synthetic oligonucleotide
  Sense strand starting at position 1530 of SEQ ID NO: 914919
guggguaggccuugaugca

SEQ ID NO: 1040461 - RNA, 19 nt, Artificial Sequence
  Description of Artificial Sequence: Synthetic oligonucleotide
  Antisense strand to SEQ ID NO: 1040460
ugcaucaaggccuacccac

SEQ ID NO: 1040462 - RNA, 19 nt, Artificial Sequence
  Description of Artificial Sequence: Synthetic oligonucleotide
  Sense strand starting at position 1609 of SEQ ID NO: 914919
cugugcugucagguuguau

SEQ ID NO: 1040463 - RNA, 19 nt, Artificial Sequence
  Description of Artificial Sequence: Synthetic oligonucleotide
  Antisense strand to SEQ ID NO: 1040462
auacaaccugacagcacag

SEQ ID NO: 1040464 - RNA, 19 nt, Artificial Sequence
  Description of Artificial Sequence: Synthetic oligonucleotide
  Sense strand starting at position 1713 of SEQ ID NO: 914919
cucccuggugauugccaaa

SEQ ID NO: 1040465 - RNA, 19 nt, Artificial Sequence
  Description of Artificial Sequence: Synthetic oligonucleotide
  Antisense strand to SEQ ID NO: 1040464
uuuggcaaucaccagggag

SEQ ID NO: 1040466 - RNA, 19 nt, Artificial Sequence
  Description of Artificial Sequence: Synthetic oligonucleotide
  Sense strand starting at position 1921 of SEQ ID NO: 914919
ggccaccuggcugauauua

SEQ ID NO: 1040467 - RNA, 19 nt, Artificial Sequence
  Description of Artificial Sequence: Synthetic oligonucleotide
  Antisense strand to SEQ ID NO: 1040466
uaauaucagccagguggcc

SEQ ID NO: 1040468 - RNA, 19 nt, Artificial Sequence
  Description of Artificial Sequence: Synthetic oligonucleotide
  Sense strand starting at position 2013 of SEQ ID NO: 914919
ggcagucauuuccugucuu

SEQ ID NO: 1040469 - RNA, 19 nt, Artificial Sequence
  Description of Artificial Sequence: Synthetic oligonucleotide
  Antisense strand to SEQ ID NO: 1040468
aagacaggaaaugacugcc

SEQ ID NO: 1040470 - RNA, 19 nt, Artificial Sequence
  Description of Artificial Sequence: Synthetic oligonucleotide
  Sense strand starting at position 2215 of SEQ ID NO: 914919
acuuccuaggcuuaugaau

SEQ ID NO: 1040471 - RNA, 19 nt, Artificial Sequence
  Description of Artificial Sequence: Synthetic oligonucleotide
  Antisense strand to SEQ ID NO: 1040470
auucauaagccuaggaagu

SEQ ID NO: 1040472 - RNA, 19 nt, Artificial Sequence
  Description of Artificial Sequence: Synthetic oligonucleotide
  Sense strand starting at position 2221 of SEQ ID NO: 914919
uaggcuuaugaauggaaac

SEQ ID NO: 1040473 - RNA, 19 nt, Artificial Sequence
  Description of Artificial Sequence: Synthetic oligonucleotide
  Antisense strand to SEQ ID NO: 1040472
guuuccauucauaagccua

SEQ ID NO: 1040474 - RNA, 19 nt, Artificial Sequence
  Description of Artificial Sequence: Synthetic oligonucleotide
  Sense strand starting at position 2233 of SEQ ID NO: 914919
uggaaacaucugugcuuaa

SEQ ID NO: 1040475 - RNA, 19 nt, Artificial Sequence
  Description of Artificial Sequence: Synthetic oligonucleotide
  Antisense strand to SEQ ID NO: 1040474
uuaagcacagauguuucca

SEQ ID NO: 1040476 - RNA, 19 nt, Artificial Sequence
  Description of Artificial Sequence: Synthetic oligonucleotide
  Sense strand starting at position 2234 of SEQ ID NO: 914919
ggaaacaucugugcuuaaa

SEQ ID NO: 1040477 - RNA, 19 nt, Artificial Sequence
  Description of Artificial Sequence: Synthetic oligonucleotide
  Antisense strand to SEQ ID NO: 1040476
uuuaagcacagauguuucc

SEQ ID NO: 1040478 - RNA, 19 nt, Artificial Sequence
  Description of Artificial Sequence: Synthetic oligonucleotide
  Sense strand starting at position 2295 of SEQ ID NO: 914919
cccucuaauggcggaaagu

SEQ ID NO: 1040479 - RNA, 19 nt, Artificial Sequence
  Description of Artificial Sequence: Synthetic oligonucleotide
  Antisense strand to SEQ ID NO: 1040478
acuuuccgccauuagaggg

SEQ ID NO: 1040480 - RNA, 19 nt, Artificial Sequence
  Description of Artificial Sequence: Synthetic oligonucleotide
  Sense strand starting at position 2306 of SEQ ID NO: 914919
cggaaagugagagaugcau

SEQ ID NO: 1040481 - RNA, 19 nt, Artificial Sequence
  Description of Artificial Sequence: Synthetic oligonucleotide
  Antisense strand to SEQ ID NO: 1040480
augcaucucucacuuuccg

SEQ ID NO: 1040482 - RNA, 19 nt, Artificial Sequence
  Description of Artificial Sequence: Synthetic oligonucleotide
  Sense strand starting at position 2766 of SEQ ID NO: 914919
gguuucuccuccucggaca

SEQ ID NO: 1040483 - RNA, 19 nt, Artificial Sequence
  Description of Artificial Sequence: Synthetic oligonucleotide
  Antisense strand to SEQ ID NO: 1040482
uguccgaggaggagaaacc

SEQ ID NO: 1040484 - RNA, 19 nt, Artificial Sequence
  Description of Artificial Sequence: Synthetic oligonucleotide
  Sense strand starting at position 2883 of SEQ ID NO: 914919
cauaccugucccugaggga

SEQ ID NO: 1040485 - RNA, 19 nt, Artificial Sequence
  Description of Artificial Sequence: Synthetic oligonucleotide
  Antisense strand to SEQ ID NO: 1040484
ucccucagggacagguaug

SEQ ID NO: 1040486 - RNA, 19 nt, Artificial Sequence
  Description of Artificial Sequence: Synthetic oligonucleotide
  Sense strand starting at position 2925 of SEQ ID NO: 914919
uguaacaucugauugcgga

SEQ ID NO: 1040487 - RNA, 19 nt, Artificial Sequence
  Description of Artificial Sequence: Synthetic oligonucleotide
  Antisense strand to SEQ ID NO: 1040486
uccgcaaucagauguuaca

SEQ ID NO: 1040488 - RNA, 19 nt, Artificial Sequence
  Description of Artificial Sequence: Synthetic oligonucleotide
  Sense strand starting at position 3168 of SEQ ID NO: 914919
accuuuaccuggcugauga

SEQ ID NO: 1040489 - RNA, 19 nt, Artificial Sequence
  Description of Artificial Sequence: Synthetic oligonucleotide
  Antisense strand to SEQ ID NO: 1040488
ucaucagccagguaaaggu

SEQ ID NO: 1040490 - RNA, 19 nt, Artificial Sequence
  Description of Artificial Sequence: Synthetic oligonucleotide
  Sense strand starting at position 3188 of SEQ ID NO: 914919
cagagauccuucguuggac

SEQ ID NO: 1040491 - RNA, 19 nt, Artificial Sequence
  Description of Artificial Sequence: Synthetic oligonucleotide
  Antisense strand to SEQ ID NO: 1040490
guccaacgaaggaucucug

SEQ ID NO: 1040492 - RNA, 19 nt, Artificial Sequence
  Description of Artificial Sequence: Synthetic oligonucleotide
  Sense strand starting at position 3189 of SEQ ID NO: 914919
agagauccuucguuggacu

SEQ ID NO: 1040493 - RNA, 19 nt, Artificial Sequence
  Description of Artificial Sequence: Synthetic oligonucleotide
  Antisense strand to SEQ ID NO: 1040492
aguccaacgaaggaucucu

SEQ ID NO: 1040494 - RNA, 19 nt, Artificial Sequence
  Description of Artificial Sequence: Synthetic oligonucleotide
  Sense strand starting at position 3190 of SEQ ID NO: 914919
gagauccuucguuggacuu

SEQ ID NO: 1040495 - RNA, 19 nt, Artificial Sequence
  Description of Artificial Sequence: Synthetic oligonucleotide
  Antisense strand to SEQ ID NO: 1040494
aaguccaacgaaggaucuc

SEQ ID NO: 1040496 - RNA, 19 nt, Artificial Sequence
  Description of Artificial Sequence: Synthetic oligonucleotide
  Sense strand starting at position 3205 of SEQ ID NO: 914919
acuuccuuccgggaauugu

SEQ ID NO: 1040497 - RNA, 19 nt, Artificial Sequence
  Description of Artificial Sequence: Synthetic oligonucleotide
  Antisense strand to SEQ ID NO: 1040496
acaauucccggaaggaagu

SEQ ID NO: 1040498 - RNA, 19 nt, Artificial Sequence
  Description of Artificial Sequence: Synthetic oligonucleotide
  Sense strand starting at position 3234 of SEQ ID NO: 914919
gauguuaaccuguggagga

SEQ ID NO: 1040499 - RNA, 19 nt, Artificial Sequence
  Description of Artificial Sequence: Synthetic oligonucleotide
  Antisense strand to SEQ ID NO: 1040498
uccuccacagguuaacauc

SEQ ID NO: 1040500 - RNA, 19 nt, Artificial Sequence
  Description of Artificial Sequence: Synthetic oligonucleotide
  Sense strand starting at position 3443 of SEQ ID NO: 914919
gcacgaugacgcugaggaa

SEQ ID NO: 1040501 - RNA, 19 nt, Artificial Sequence
  Description of Artificial Sequence: Synthetic oligonucleotide
  Antisense strand to SEQ ID NO: 1040500
uuccucagcgucaucgugc

SEQ ID NO: 1040502 - RNA, 19 nt, Artificial Sequence
  Description of Artificial Sequence: Synthetic oligonucleotide
  Sense strand starting at position 3462 of SEQ ID NO: 914919
ggugaaguugcuggcaaca

SEQ ID NO: 1040503 - RNA, 19 nt, Artificial Sequence
  Description of Artificial Sequence: Synthetic oligonucleotide
  Antisense strand to SEQ ID NO: 1040502
uguugccagcaacuucacc

SEQ ID NO: 1040504 - RNA, 19 nt, Artificial Sequence
  Description of Artificial Sequence: Synthetic oligonucleotide
  Sense strand starting at position 3508 of SEQ ID NO: 914919
uuguauagcagguaucuga

SEQ ID NO: 1040505 - RNA, 19 nt, Artificial Sequence
  Description of Artificial Sequence: Synthetic oligonucleotide
  Antisense strand to SEQ ID NO: 1040504
ucagauaccugcuauacaa

SEQ ID NO: 1040506 - RNA, 19 nt, Artificial Sequence
  Description of Artificial Sequence: Synthetic oligonucleotide
  Sense strand starting at position 3548 of SEQ ID NO: 914919
gguaguagcaguuaccaga

SEQ ID NO: 1040507 - RNA, 19 nt, Artificial Sequence
  Description of Artificial Sequence: Synthetic oligonucleotide
  Antisense strand to SEQ ID NO: 1040506
ucugguaacugcuacuacc

SEQ ID NO: 1040508 - RNA, 19 nt, Artificial Sequence
  Description of Artificial Sequence: Synthetic oligonucleotide
  Sense strand starting at position 3575 of SEQ ID NO: 914919
gccuucucaugucccagaa

SEQ ID NO: 1040509 - RNA, 19 nt, Artificial Sequence
  Description of Artificial Sequence: Synthetic oligonucleotide
  Antisense strand to SEQ ID NO: 1040508
uucugggacaugagaaggc

SEQ ID NO: 1040510 - RNA, 19 nt, Artificial Sequence
  Description of Artificial Sequence: Synthetic oligonucleotide
  Sense strand starting at position 3590 of SEQ ID NO: 914919
agaaauaauuucuagggca

SEQ ID NO: 1040511 - RNA, 19 nt, Artificial Sequence
  Description of Artificial Sequence: Synthetic oligonucleotide
  Antisense strand to SEQ ID NO: 1040510
ugcccuagaaauuauuucu

SEQ ID NO: 1040512 - RNA, 19 nt, Artificial Sequence
  Description of Artificial Sequence: Synthetic oligonucleotide
  Sense strand starting at position 3751 of SEQ ID NO: 914919
uguugucugucucucaaga

SEQ ID NO: 1040513 - RNA, 19 nt, Artificial Sequence
  Description of Artificial Sequence: Synthetic oligonucleotide
  Antisense strand to SEQ ID NO: 1040512
ucuugagagacagacaaca

SEQ ID NO: 1040514 - RNA, 19 nt, Artificial Sequence
  Description of Artificial Sequence: Synthetic oligonucleotide
  Sense strand starting at position 193 of SEQ ID NO: 914920
ccagcugaaguguaaauaa

SEQ ID NO: 1040515 - RNA, 19 nt, Artificial Sequence
  Description of Artificial Sequence: Synthetic oligonucleotide
  Antisense strand to SEQ ID NO: 1040514
uuauuuacacuucagcugg

SEQ ID NO: 1040516 - RNA, 19 nt, Artificial Sequence
  Description of Artificial Sequence: Synthetic oligonucleotide
  Sense strand starting at position 252 of SEQ ID NO: 914920
uuaacuuguuccuuggaac

SEQ ID NO: 1040517 - RNA, 19 nt, Artificial Sequence
  Description of Artificial Sequence: Synthetic oligonucleotide
  Antisense strand to SEQ ID NO: 1040516
guuccaaggaacaaguuaa

SEQ ID NO: 1040518 - RNA, 19 nt, Artificial Sequence
  Description of Artificial Sequence: Synthetic oligonucleotide
  Sense strand starting at position 324 of SEQ ID NO: 914920
gucggagaacuggagucua

SEQ ID NO: 1040519 - RNA, 19 nt, Artificial Sequence
  Description of Artificial Sequence: Synthetic oligonucleotide
  Antisense strand to SEQ ID NO: 1040518
uagacuccaguucuccgac

SEQ ID NO: 1040520 - RNA, 19 nt, Artificial Sequence
  Description of Artificial Sequence: Synthetic oligonucleotide
  Sense strand starting at position 449 of SEQ ID NO: 914920
agcuguuaagaguaucaaa

SEQ ID NO: 1040521 - RNA, 19 nt, Artificial Sequence
  Description of Artificial Sequence: Synthetic oligonucleotide
  Antisense strand to SEQ ID NO: 1040520
uuugauacucuuaacagcu

SEQ ID NO: 1040522 - RNA, 19 nt, Artificial Sequence
  Description of Artificial Sequence: Synthetic oligonucleotide
  Sense strand starting at position 511 of SEQ ID NO: 914920
aucugucgugaguacuaaa

SEQ ID NO: 1040523 - RNA, 19 nt, Artificial Sequence
  Description of Artificial Sequence: Synthetic oligonucleotide
  Antisense strand to SEQ ID NO: 1040522
uuuaguacucacgacagau

SEQ ID NO: 1040524 - RNA, 19 nt, Artificial Sequence
  Description of Artificial Sequence: Synthetic oligonucleotide
  Sense strand starting at position 662 of SEQ ID NO: 914920
ccaggaaguuuccuacauc

SEQ ID NO: 1040525 - RNA, 19 nt, Artificial Sequence
  Description of Artificial Sequence: Synthetic oligonucleotide
  Antisense strand to SEQ ID NO: 1040524
gauguaggaaacuuccugg

SEQ ID NO: 1040526 - RNA, 19 nt, Artificial Sequence
  Description of Artificial Sequence: Synthetic oligonucleotide
  Sense strand starting at position 665 of SEQ ID NO: 914920
ggaaguuuccuacaucucu

SEQ ID NO: 1040527 - RNA, 19 nt, Artificial Sequence
  Description of Artificial Sequence: Synthetic oligonucleotide
  Antisense strand to SEQ ID NO: 1040526
agagauguaggaaacuucc

SEQ ID NO: 1040528 - RNA, 19 nt, Artificial Sequence
  Description of Artificial Sequence: Synthetic oligonucleotide
  Sense strand starting at position 696 of SEQ ID NO: 914920
gcgacugcgauuuacucaa

SEQ ID NO: 1040529 - RNA, 19 nt, Artificial Sequence
  Description of Artificial Sequence: Synthetic oligonucleotide
  Antisense strand to SEQ ID NO: 1040528
uugaguaaaucgcagucgc

SEQ ID NO: 1040530 - RNA, 19 nt, Artificial Sequence
  Description of Artificial Sequence: Synthetic oligonucleotide
  Sense strand starting at position 745 of SEQ ID NO: 914920
gucucaguuccucagagga

SEQ ID NO: 1040531 - RNA, 19 nt, Artificial Sequence
  Description of Artificial Sequence: Synthetic oligonucleotide
  Antisense strand to SEQ ID NO: 1040530
uccucugaggaacugagac

SEQ ID NO: 1040532 - RNA, 19 nt, Artificial Sequence
  Description of Artificial Sequence: Synthetic oligonucleotide
  Sense strand starting at position 790 of SEQ ID NO: 914920
ucugaucucccagguuaug

SEQ ID NO: 1040533 - RNA, 19 nt, Artificial Sequence
  Description of Artificial Sequence: Synthetic oligonucleotide
  Antisense strand to SEQ ID NO: 1040532
cauaaccugggagaucaga

SEQ ID NO: 1040534 - RNA, 19 nt, Artificial Sequence
  Description of Artificial Sequence: Synthetic oligonucleotide
  Sense strand starting at position 800 of SEQ ID NO: 914920
cagguuaugccuggaacuu

SEQ ID NO: 1040535 - RNA, 19 nt, Artificial Sequence
  Description of Artificial Sequence: Synthetic oligonucleotide
  Antisense strand to SEQ ID NO: 1040534
aaguuccaggcauaaccug

SEQ ID NO: 1040536 - RNA, 19 nt, Artificial Sequence
  Description of Artificial Sequence: Synthetic oligonucleotide
  Sense strand starting at position 801 of SEQ ID NO: 914920
agguuaugccuggaacuug

SEQ ID NO: 1040537 - RNA, 19 nt, Artificial Sequence
  Description of Artificial Sequence: Synthetic oligonucleotide
  Antisense strand to SEQ ID NO: 1040536
caaguuccaggcauaaccu

SEQ ID NO: 1040538 - RNA, 19 nt, Artificial Sequence
  Description of Artificial Sequence: Synthetic oligonucleotide
  Sense strand starting at position 834 of SEQ ID NO: 914920
gggagcuuuauguuugcgu

SEQ ID NO: 1040539 - RNA, 19 nt, Artificial Sequence
  Description of Artificial Sequence: Synthetic oligonucleotide
  Antisense strand to SEQ ID NO: 1040538
acgcaaacauaaagcuccc

SEQ ID NO: 1040540 - RNA, 19 nt, Artificial Sequence
  Description of Artificial Sequence: Synthetic oligonucleotide
  Sense strand starting at position 1214 of SEQ ID NO: 914920
cccaaaucuguauggauau

SEQ ID NO: 1040541 - RNA, 19 nt, Artificial Sequence
  Description of Artificial Sequence: Synthetic oligonucleotide
  Antisense strand to SEQ ID NO: 1040540
auauccauacagauuuggg

SEQ ID NO: 1040542 - RNA, 19 nt, Artificial Sequence
  Description of Artificial Sequence: Synthetic oligonucleotide
  Sense strand starting at position 1285 of SEQ ID NO: 914920
gugaguguuguaucuuguu

SEQ ID NO: 1040543 - RNA, 19 nt, Artificial Sequence
  Description of Artificial Sequence: Synthetic oligonucleotide
  Antisense strand to SEQ ID NO: 1040542
aacaagauacaacacucac

SEQ ID NO: 1040544 - RNA, 19 nt, Artificial Sequence
  Description of Artificial Sequence: Synthetic oligonucleotide
  Sense strand starting at position 1301 of SEQ ID NO: 914920
guucgcugugaaaggugau

SEQ ID NO: 1040545 - RNA, 19 nt, Artificial Sequence
  Description of Artificial Sequence: Synthetic oligonucleotide
  Antisense strand to SEQ ID NO: 1040544
aucaccuuucacagcgaac

SEQ ID NO: 1040546 - RNA, 19 nt, Artificial Sequence
  Description of Artificial Sequence: Synthetic oligonucleotide
  Sense strand starting at position 1360 of SEQ ID NO: 914920
guucuuagucguucuguga

SEQ ID NO: 1040547 - RNA, 19 nt, Artificial Sequence
  Description of Artificial Sequence: Synthetic oligonucleotide
  Antisense strand to SEQ ID NO: 1040546
ucacagaacgacuaagaac

SEQ ID NO: 1040548 - RNA, 19 nt, Artificial Sequence
  Description of Artificial Sequence: Synthetic oligonucleotide
  Sense strand starting at position 2107 of SEQ ID NO: 914920
auuaaaucugaaggugacu

SEQ ID NO: 1040549 - RNA, 19 nt, Artificial Sequence
  Description of Artificial Sequence: Synthetic oligonucleotide
  Antisense strand to SEQ ID NO: 1040548
agucaccuucagauuuaau

SEQ ID NO: 1040550 - RNA, 19 nt, Artificial Sequence
  Description of Artificial Sequence: Synthetic oligonucleotide
  Sense strand starting at position 2217 of SEQ ID NO: 914920
guaguuaugguagugcagu

SEQ ID NO: 1040551 - RNA, 19 nt, Artificial Sequence
  Description of Artificial Sequence: Synthetic oligonucleotide
  Antisense strand to SEQ ID NO: 1040550
acugcacuaccauaacuac

SEQ ID NO: 1040552 - RNA, 19 nt, Artificial Sequence
  Description of Artificial Sequence: Synthetic oligonucleotide
  Sense strand starting at position 2328 of SEQ ID NO: 914920
gagccugagguuuauaaug

SEQ ID NO: 1040553 - RNA, 19 nt, Artificial Sequence
  Description of Artificial Sequence: Synthetic oligonucleotide
  Antisense strand to SEQ ID NO: 1040552
cauuauaaaccucaggcuc

SEQ ID NO: 1040554 - RNA, 19 nt, Artificial Sequence
  Description of Artificial Sequence: Synthetic oligonucleotide
  Sense strand starting at position 2457 of SEQ ID NO: 914920
uggacuggucaguguauuu

SEQ ID NO: 1040555 - RNA, 19 nt, Artificial Sequence
  Description of Artificial Sequence: Synthetic oligonucleotide
  Antisense strand to SEQ ID NO: 1040554
aaauacacugaccagucca

SEQ ID NO: 1040556 - RNA, 19 nt, Artificial Sequence
  Description of Artificial Sequence: Synthetic oligonucleotide
  Sense strand starting at position 2665 of SEQ ID NO: 914920
augacuauaagugguguga

SEQ ID NO: 1040557 - RNA, 19 nt, Artificial Sequence
  Description of Artificial Sequence: Synthetic oligonucleotide
  Antisense strand to SEQ ID NO: 1040556
ucacaccacuuauagucau

SEQ ID NO: 1040558 - RNA, 19 nt, Artificial Sequence
  Description of Artificial Sequence: Synthetic oligonucleotide
  Sense strand starting at position 3168 of SEQ ID NO: 914920
gcgacauguaaugggaaua

SEQ ID NO: 1040559 - RNA, 19 nt, Artificial Sequence
  Description of Artificial Sequence: Synthetic oligonucleotide
  Antisense strand to SEQ ID NO: 1040558
uauucccauuacaugucgc

SEQ ID NO: 1040560 - RNA, 19 nt, Artificial Sequence
  Description of Artificial Sequence: Synthetic oligonucleotide
  Sense strand starting at position 3169 of SEQ ID NO: 914920
cgacauguaaugggaauaa

SEQ ID NO: 1040561 - RNA, 19 nt, Artificial Sequence
  Description of Artificial Sequence: Synthetic oligonucleotide
  Antisense strand to SEQ ID NO: 1040560
uuauucccauuacaugucg

SEQ ID NO: 1040562 - RNA, 19 nt, Artificial Sequence
  Description of Artificial Sequence: Synthetic oligonucleotide
  Sense strand starting at position 3179 of SEQ ID NO: 914920
ugggaauaaauguaugcuu

SEQ ID NO: 1040563 - RNA, 19 nt, Artificial Sequence
  Description of Artificial Sequence: Synthetic oligonucleotide
  Antisense strand to SEQ ID NO: 1040562
aagcauacauuuauuccca

SEQ ID NO: 1040564 - RNA, 19 nt, Artificial Sequence
  Description of Artificial Sequence: Synthetic oligonucleotide
  Sense strand starting at position 3181 of SEQ ID NO: 914920
ggaauaaauguaugcuuug

SEQ ID NO: 1040565 - RNA, 19 nt, Artificial Sequence
  Description of Artificial Sequence: Synthetic oligonucleotide
  Antisense strand to SEQ ID NO: 1040564
caaagcauacauuuauucc

SEQ ID NO: 1040566 - RNA, 19 nt, Artificial Sequence
  Description of Artificial Sequence: Synthetic oligonucleotide
  Sense strand starting at position 3184 of SEQ ID NO: 914920
auaaauguaugcuuuggaa

SEQ ID NO: 1040567 - RNA, 19 nt, Artificial Sequence
  Description of Artificial Sequence: Synthetic oligonucleotide
  Antisense strand to SEQ ID NO: 1040566
uuccaaagcauacauuuau

SEQ ID NO: 1040568 - RNA, 19 nt, Artificial Sequence
  Description of Artificial Sequence: Synthetic oligonucleotide
  Sense strand starting at position 3186 of SEQ ID NO: 914920
aaauguaugcuuuggaaua

SEQ ID NO: 1040569 - RNA, 19 nt, Artificial Sequence
  Description of Artificial Sequence: Synthetic oligonucleotide
  Antisense strand to SEQ ID NO: 1040568
uauuccaaagcauacauuu

SEQ ID NO: 1040570 - RNA, 19 nt, Artificial Sequence
  Description of Artificial Sequence: Synthetic oligonucleotide
  Sense strand starting at position 3394 of SEQ ID NO: 914920
cuggguugucuggucguua

SEQ ID NO: 1040571 - RNA, 19 nt, Artificial Sequence
  Description of Artificial Sequence: Synthetic oligonucleotide
  Antisense strand to SEQ ID NO: 1040570
uaacgaccagacaacccag

SEQ ID NO: 1040572 - RNA, 19 nt, Artificial Sequence
  Description of Artificial Sequence: Synthetic oligonucleotide
  Sense strand starting at position 3443 of SEQ ID NO: 914920
cugcuuuguggagaucuuu

SEQ ID NO: 1040573 - RNA, 19 nt, Artificial Sequence
  Description of Artificial Sequence: Synthetic oligonucleotide
  Antisense strand to SEQ ID NO: 1040572
aaagaucuccacaaagcag

SEQ ID NO: 1040574 - RNA, 19 nt, Artificial Sequence
  Description of Artificial Sequence: Synthetic oligonucleotide
  Sense strand starting at position 3449 of SEQ ID NO: 914920
uguggagaucuuuacugcu

SEQ ID NO: 1040575 - RNA, 19 nt, Artificial Sequence
  Description of Artificial Sequence: Synthetic oligonucleotide
  Antisense strand to SEQ ID NO: 1040574
agcaguaaagaucuccaca

SEQ ID NO: 1040576 - RNA, 19 nt, Artificial Sequence
  Description of Artificial Sequence: Synthetic oligonucleotide
  Sense strand starting at position 3526 of SEQ ID NO: 914920
cacagauggguuuauguuu

SEQ ID NO: 1040577 - RNA, 19 nt, Artificial Sequence
  Description of Artificial Sequence: Synthetic oligonucleotide
  Antisense strand to SEQ ID NO: 1040576
aaacauaaacccaucugug

SEQ ID NO: 1040578 - RNA, 19 nt, Artificial Sequence
  Description of Artificial Sequence: Synthetic oligonucleotide
  Sense strand starting at position 3638 of SEQ ID NO: 914920
aaguucuagcaagggauga

SEQ ID NO: 1040579 - RNA, 19 nt, Artificial Sequence
  Description of Artificial Sequence: Synthetic oligonucleotide
  Antisense strand to SEQ ID NO: 1040578
ucaucccuugcuagaacuu

SEQ ID NO: 1040580 - RNA, 19 nt, Artificial Sequence
  Description of Artificial Sequence: Synthetic oligonucleotide
  Sense strand starting at position 3725 of SEQ ID NO: 914920
ccugaaagcucguuaagaa

SEQ ID NO: 1040581 - RNA, 19 nt, Artificial Sequence
  Description of Artificial Sequence: Synthetic oligonucleotide
  Antisense strand to SEQ ID NO: 1040580
uucuuaacgagcuuucagg

SEQ ID NO: 1040582 - RNA, 19 nt, Artificial Sequence
  Description of Artificial Sequence: Synthetic oligonucleotide
  Sense strand starting at position 3726 of SEQ ID NO: 914920
cugaaagcucguuaagaaa

SEQ ID NO: 1040583 - RNA, 19 nt, Artificial Sequence
  Description of Artificial Sequence: Synthetic oligonucleotide
  Antisense strand to SEQ ID NO: 1040582
uuucuuaacgagcuuucag

SEQ ID NO: 1040584 - RNA, 19 nt, Artificial Sequence
  Description of Artificial Sequence: Synthetic oligonucleotide
  Sense strand starting at position 3733 of SEQ ID NO: 914920
cucguuaagaaacguagaa

SEQ ID NO: 1040585 - RNA, 19 nt, Artificial Sequence
  Description of Artificial Sequence: Synthetic oligonucleotide
  Antisense strand to SEQ ID NO: 1040584
uucuacguuucuuaacgag

SEQ ID NO: 1040586 - RNA, 19 nt, Artificial Sequence
  Description of Artificial Sequence: Synthetic oligonucleotide
  Sense strand starting at position 3735 of SEQ ID NO: 914920
cguuaagaaacguagaauu

SEQ ID NO: 1040587 - RNA, 19 nt, Artificial Sequence
  Description of Artificial Sequence: Synthetic oligonucleotide
  Antisense strand to SEQ ID NO: 1040586
aauucuacguuucuuaacg

SEQ ID NO: 1040588 - RNA, 19 nt, Artificial Sequence
  Description of Artificial Sequence: Synthetic oligonucleotide
  Sense strand starting at position 3879 of SEQ ID NO: 914920
gacagcugugucuaauuga

SEQ ID NO: 1040589 - RNA, 19 nt, Artificial Sequence
  Description of Artificial Sequence: Synthetic oligonucleotide
  Antisense strand to SEQ ID NO: 1040588
ucaauuagacacagcuguc

SEQ ID NO: 1040590 - RNA, 19 nt, Artificial Sequence
  Description of Artificial Sequence: Synthetic oligonucleotide
  Sense strand starting at position 3914 of SEQ ID NO: 914920
agauauuagguuugugcaa

SEQ ID NO: 1040591 - RNA, 19 nt, Artificial Sequence
  Description of Artificial Sequence: Synthetic oligonucleotide
  Antisense strand to SEQ ID NO: 1040590
uugcacaaaccuaauaucu

SEQ ID NO: 1040592 - RNA, 19 nt, Artificial Sequence
  Description of Artificial Sequence: Synthetic oligonucleotide
  Sense strand starting at position 3915 of SEQ ID NO: 914920
gauauuagguuugugcaaa

SEQ ID NO: 1040593 - RNA, 19 nt, Artificial Sequence
  Description of Artificial Sequence: Synthetic oligonucleotide
  Antisense strand to SEQ ID NO: 1040592
uuugcacaaaccuaauauc

SEQ ID NO: 1040594 - RNA, 19 nt, Artificial Sequence
  Description of Artificial Sequence: Synthetic oligonucleotide
  Sense strand starting at position 472 of SEQ ID NO: 914921
uugggauguccucauggcu

SEQ ID NO: 1040595 - RNA, 19 nt, Artificial Sequence
  Description of Artificial Sequence: Synthetic oligonucleotide
  Antisense strand to SEQ ID NO: 1040594
agccaugaggacaucccaa

SEQ ID NO: 1040596 - RNA, 19 nt, Artificial Sequence
  Description of Artificial Sequence: Synthetic oligonucleotide
  Sense strand starting at position 1020 of SEQ ID NO: 914921
caagaagcugugugagaca

SEQ ID NO: 1040597 - RNA, 19 nt, Artificial Sequence
  Description of Artificial Sequence: Synthetic oligonucleotide
  Antisense strand to SEQ ID NO: 1040596
ugucucacacagcuucuug

SEQ ID NO: 1040598 - RNA, 19 nt, Artificial Sequence
  Description of Artificial Sequence: Synthetic oligonucleotide
  Sense strand starting at position 1348 of SEQ ID NO: 914921
uaggguuuguucucgucaa

SEQ ID NO: 1040599 - RNA, 19 nt, Artificial Sequence
  Description of Artificial Sequence: Synthetic oligonucleotide
  Antisense strand to SEQ ID NO: 1040598
uugacgagaacaaacccua

SEQ ID NO: 1040600 - RNA, 19 nt, Artificial Sequence
  Description of Artificial Sequence: Synthetic oligonucleotide
  Sense strand starting at position 1349 of SEQ ID NO: 914921
aggguuuguucucgucaag

SEQ ID NO: 1040601 - RNA, 19 nt, Artificial Sequence
  Description of Artificial Sequence: Synthetic oligonucleotide
  Antisense strand to SEQ ID NO: 1040600
cuugacgagaacaaacccu

SEQ ID NO: 1040602 - RNA, 19 nt, Artificial Sequence
  Description of Artificial Sequence: Synthetic oligonucleotide
  Sense strand starting at position 1352 of SEQ ID NO: 914921
guuuguucucgucaagaga

SEQ ID NO: 1040603 - RNA, 19 nt, Artificial Sequence
  Description of Artificial Sequence: Synthetic oligonucleotide
  Antisense strand to SEQ ID NO: 1040602
ucucuugacgagaacaaac

SEQ ID NO: 1040604 - RNA, 19 nt, Artificial Sequence
  Description of Artificial Sequence: Synthetic oligonucleotide
  Sense strand starting at position 1654 of SEQ ID NO: 914921
cagagaccucugugguuaa

SEQ ID NO: 1040605 - RNA, 19 nt, Artificial Sequence
  Description of Artificial Sequence: Synthetic oligonucleotide
  Antisense strand to SEQ ID NO: 1040604
uuaaccacagaggucucug

SEQ ID NO: 1040606 - RNA, 19 nt, Artificial Sequence
  Description of Artificial Sequence: Synthetic oligonucleotide
  Sense strand starting at position 2255 of SEQ ID NO: 914921
gccacaucuguauaugugu

SEQ ID NO: 1040607 - RNA, 19 nt, Artificial Sequence
  Description of Artificial Sequence: Synthetic oligonucleotide
  Antisense strand to SEQ ID NO: 1040606
acacauauacagauguggc

SEQ ID NO: 1040608 - RNA, 19 nt, Artificial Sequence
  Description of Artificial Sequence: Synthetic oligonucleotide
  Sense strand starting at position 2262 of SEQ ID NO: 914921
cuguauaugugugggcaga

SEQ ID NO: 1040609 - RNA, 19 nt, Artificial Sequence
  Description of Artificial Sequence: Synthetic oligonucleotide
  Antisense strand to SEQ ID NO: 1040608
ucugcccacacauauacag

SEQ ID NO: 1040610 - RNA, 19 nt, Artificial Sequence
  Description of Artificial Sequence: Synthetic oligonucleotide
  Sense strand starting at position 2263 of SEQ ID NO: 914921
uguauaugugugggcagau

SEQ ID NO: 1040611 - RNA, 19 nt, Artificial Sequence
  Description of Artificial Sequence: Synthetic oligonucleotide
  Antisense strand to SEQ ID NO: 1040610
aucugcccacacauauaca

SEQ ID NO: 1040612 - RNA, 19 nt, Artificial Sequence
  Description of Artificial Sequence: Synthetic oligonucleotide
  Sense strand starting at position 2264 of SEQ ID NO: 914921
guauaugugugggcagaug

SEQ ID NO: 1040613 - RNA, 19 nt, Artificial Sequence
  Description of Artificial Sequence: Synthetic oligonucleotide
  Antisense strand to SEQ ID NO: 1040612
caucugcccacacauauac

SEQ ID NO: 1040614 - RNA, 19 nt, Artificial Sequence
  Description of Artificial Sequence: Synthetic oligonucleotide
  Sense strand starting at position 2276 of SEQ ID NO: 914921
gcagaugugugcccgagau

SEQ ID NO: 1040615 - RNA, 19 nt, Artificial Sequence
  Description of Artificial Sequence: Synthetic oligonucleotide
  Antisense strand to SEQ ID NO: 1040614
aucucgggcacacaucugc

SEQ ID NO: 1040616 - RNA, 19 nt, Artificial Sequence
  Description of Artificial Sequence: Synthetic oligonucleotide
  Sense strand starting at position 2320 of SEQ ID NO: 914921
cccaaagagccauggcuaa

SEQ ID NO: 1040617 - RNA, 19 nt, Artificial Sequence
  Description of Artificial Sequence: Synthetic oligonucleotide
  Antisense strand to SEQ ID NO: 1040616
uuagccauggcucuuuggg

SEQ ID NO: 1040618 - RNA, 19 nt, Artificial Sequence
  Description of Artificial Sequence: Synthetic oligonucleotide
  Sense strand starting at position 2359 of SEQ ID NO: 914921
ggaccucaaugcuugauaa

SEQ ID NO: 1040619 - RNA, 19 nt, Artificial Sequence
  Description of Artificial Sequence: Synthetic oligonucleotide
  Antisense strand to SEQ ID NO: 1040618
uuaucaagcauugaggucc

SEQ ID NO: 1040620 - RNA, 19 nt, Artificial Sequence
  Description of Artificial Sequence: Synthetic oligonucleotide
  Sense strand starting at position 2363 of SEQ ID NO: 914921
cucaaugcuugauaagaac

SEQ ID NO: 1040621 - RNA, 19 nt, Artificial Sequence
  Description of Artificial Sequence: Synthetic oligonucleotide
  Antisense strand to SEQ ID NO: 1040620
guucuuaucaagcauugag

SEQ ID NO: 1040622 - RNA, 19 nt, Artificial Sequence
  Description of Artificial Sequence: Synthetic oligonucleotide
  Sense strand starting at position 2509 of SEQ ID NO: 914921
ccgggugacgucuggaguu

SEQ ID NO: 1040623 - RNA, 19 nt, Artificial Sequence
  Description of Artificial Sequence: Synthetic oligonucleotide
  Antisense strand to SEQ ID NO: 1040622
aacuccagacgucacccgg

SEQ ID NO: 1040624 - RNA, 19 nt, Artificial Sequence
  Description of Artificial Sequence: Synthetic oligonucleotide
  Sense strand starting at position 2511 of SEQ ID NO: 914921
gggugacgucuggaguuga

SEQ ID NO: 1040625 - RNA, 19 nt, Artificial Sequence
  Description of Artificial Sequence: Synthetic oligonucleotide
  Antisense strand to SEQ ID NO: 1040624
ucaacuccagacgucaccc

SEQ ID NO: 1040626 - RNA, 19 nt, Artificial Sequence
  Description of Artificial Sequence: Synthetic oligonucleotide
  Sense strand starting at position 29 of SEQ ID NO: 914922
uggugaugccaggacuagu

SEQ ID NO: 1040627 - RNA, 19 nt, Artificial Sequence
  Description of Artificial Sequence: Synthetic oligonucleotide
  Antisense strand to SEQ ID NO: 1040626
acuaguccuggcaucacca

SEQ ID NO: 1040628 - RNA, 19 nt, Artificial Sequence
  Description of Artificial Sequence: Synthetic oligonucleotide
  Sense strand starting at position 2121 of SEQ ID NO: 914922
ugaagucucugcccacaga

SEQ ID NO: 1040629 - RNA, 19 nt, Artificial Sequence
  Description of Artificial Sequence: Synthetic oligonucleotide
  Antisense strand to SEQ ID NO: 1040628
ucugugggcagagacuuca

SEQ ID NO: 1040630 - RNA, 19 nt, Artificial Sequence
  Description of Artificial Sequence: Synthetic oligonucleotide
  Sense strand starting at position 2122 of SEQ ID NO: 914922
gaagucucugcccacagau

SEQ ID NO: 1040631 - RNA, 19 nt, Artificial Sequence
  Description of Artificial Sequence: Synthetic oligonucleotide
  Antisense strand to SEQ ID NO: 1040630
aucugugggcagagacuuc

SEQ ID NO: 1040632 - RNA, 19 nt, Artificial Sequence
  Description of Artificial Sequence: Synthetic oligonucleotide
  Sense strand starting at position 2668 of SEQ ID NO: 914922
uugggauguccucauggcu

SEQ ID NO: 1040633 - RNA, 19 nt, Artificial Sequence
  Description of Artificial Sequence: Synthetic oligonucleotide
  Antisense strand to SEQ ID NO: 1040632
agccaugaggacaucccaa

SEQ ID NO: 1040634 - RNA, 19 nt, Artificial Sequence
  Description of Artificial Sequence: Synthetic oligonucleotide
  Sense strand starting at position 3216 of SEQ ID NO: 914922
caagaagcugugugagaca

SEQ ID NO: 1040635 - RNA, 19 nt, Artificial Sequence
  Description of Artificial Sequence: Synthetic oligonucleotide
  Antisense strand to SEQ ID NO: 1040634
ugucucacacagcuucuug

SEQ ID NO: 1040636 - RNA, 19 nt, Artificial Sequence
  Description of Artificial Sequence: Synthetic oligonucleotide
  Sense strand starting at position 3544 of SEQ ID NO: 914922
uaggguuuguucucgucaa

SEQ ID NO: 1040637 - RNA, 19 nt, Artificial Sequence
  Description of Artificial Sequence: Synthetic oligonucleotide
  Antisense strand to SEQ ID NO: 1040636
uugacgagaacaaacccua

SEQ ID NO: 1040638 - RNA, 19 nt, Artificial Sequence
  Description of Artificial Sequence: Synthetic oligonucleotide
  Sense strand starting at position 3545 of SEQ ID NO: 914922
aggguuuguucucgucaag

SEQ ID NO: 1040639 - RNA, 19 nt, Artificial Sequence
  Description of Artificial Sequence: Synthetic oligonucleotide
  Antisense strand to SEQ ID NO: 1040638
cuugacgagaacaaacccu

SEQ ID NO: 1040640 - RNA, 19 nt, Artificial Sequence
  Description of Artificial Sequence: Synthetic oligonucleotide
  Sense strand starting at position 3548 of SEQ ID NO: 914922
guuuguucucgucaagaga

SEQ ID NO: 1040641 - RNA, 19 nt, Artificial Sequence
  Description of Artificial Sequence: Synthetic oligonucleotide
  Antisense strand to SEQ ID NO: 1040640
ucucuugacgagaacaaac

SEQ ID NO: 1040642 - RNA, 19 nt, Artificial Sequence
  Description of Artificial Sequence: Synthetic oligonucleotide
  Sense strand starting at position 3850 of SEQ ID NO: 914922
cagagaccucugugguuaa

SEQ ID NO: 1040643 - RNA, 19 nt, Artificial Sequence
  Description of Artificial Sequence: Synthetic oligonucleotide
  Antisense strand to SEQ ID NO: 1040642
uuaaccacagaggucucug

SEQ ID NO: 1040644 - RNA, 19 nt, Artificial Sequence
  Description of Artificial Sequence: Synthetic oligonucleotide
  Sense strand starting at position 84 of SEQ ID NO: 914923
uggugaugccaggacuagu

SEQ ID NO: 1040645 - RNA, 19 nt, Artificial Sequence
  Description of Artificial Sequence: Synthetic oligonucleotide
  Antisense strand to SEQ ID NO: 1040644
acuaguccuggcaucacca

SEQ ID NO: 1040646 - RNA, 19 nt, Artificial Sequence
  Description of Artificial Sequence: Synthetic oligonucleotide
  Sense strand starting at position 2176 of SEQ ID NO: 914923
ugaagucucugcccacaga

SEQ ID NO: 1040647 - RNA, 19 nt, Artificial Sequence
  Description of Artificial Sequence: Synthetic oligonucleotide
  Antisense strand to SEQ ID NO: 1040646
ucugugggcagagacuuca

SEQ ID NO: 1040648 - RNA, 19 nt, Artificial Sequence
  Description of Artificial Sequence: Synthetic oligonucleotide
  Sense strand starting at position 2177 of SEQ ID NO: 914923
gaagucucugcccacagau

SEQ ID NO: 1040649 - RNA, 19 nt, Artificial Sequence
  Description of Artificial Sequence: Synthetic oligonucleotide
  Antisense strand to SEQ ID NO: 1040648
aucugugggcagagacuuc

SEQ ID NO: 1040650 - RNA, 19 nt, Artificial Sequence
  Description of Artificial Sequence: Synthetic oligonucleotide
  Sense strand starting at position 2723 of SEQ ID NO: 914923
uugggauguccucauggcu

SEQ ID NO: 1040651 - RNA, 19 nt, Artificial Sequence
  Description of Artificial Sequence: Synthetic oligonucleotide
  Antisense strand to SEQ ID NO: 1040650
agccaugaggacaucccaa

SEQ ID NO: 1040652 - RNA, 19 nt, Artificial Sequence
  Description of Artificial Sequence: Synthetic oligonucleotide
  Sense strand starting at position 3271 of SEQ ID NO: 914923
caagaagcugugugagaca

SEQ ID NO: 1040653 - RNA, 19 nt, Artificial Sequence
  Description of Artificial Sequence: Synthetic oligonucleotide
  Antisense strand to SEQ ID NO: 1040652
ugucucacacagcuucuug

SEQ ID NO: 1040654 - RNA, 19 nt, Artificial Sequence
  Description of Artificial Sequence: Synthetic oligonucleotide
  Sense strand starting at position 3599 of SEQ ID NO: 914923
uaggguuuguucucgucaa

SEQ ID NO: 1040655 - RNA, 19 nt, Artificial Sequence
  Description of Artificial Sequence: Synthetic oligonucleotide
  Antisense strand to SEQ ID NO: 1040654
uugacgagaacaaacccua

SEQ ID NO: 1040656 - RNA, 19 nt, Artificial Sequence
  Description of Artificial Sequence: Synthetic oligonucleotide
  Sense strand starting at position 3600 of SEQ ID NO: 914923
aggguuuguucucgucaag

SEQ ID NO: 1040657 - RNA, 19 nt, Artificial Sequence
  Description of Artificial Sequence: Synthetic oligonucleotide
  Antisense strand to SEQ ID NO: 1040656
cuugacgagaacaaacccu

SEQ ID NO: 1040658 - RNA, 19 nt, Artificial Sequence
  Description of Artificial Sequence: Synthetic oligonucleotide
  Sense strand starting at position 3603 of SEQ ID NO: 914923
guuuguucucgucaagaga

SEQ ID NO: 1040659 - RNA, 19 nt, Artificial Sequence
  Description of Artificial Sequence: Synthetic oligonucleotide
  Antisense strand to SEQ ID NO: 1040658
ucucuugacgagaacaaac

SEQ ID NO: 1040660 - RNA, 19 nt, Artificial Sequence
  Description of Artificial Sequence: Synthetic oligonucleotide
  Sense strand starting at position 3905 of SEQ ID NO: 914923
cagagaccucugugguuaa

SEQ ID NO: 1040661 - RNA, 19 nt, Artificial Sequence
  Description of Artificial Sequence: Synthetic oligonucleotide
  Antisense strand to SEQ ID NO: 1040660
uuaaccacagaggucucug

SEQ ID NO: 1040662 - RNA, 19 nt, Artificial Sequence
  Description of Artificial Sequence: Synthetic oligonucleotide
  Sense strand starting at position 908 of SEQ ID NO: 914924
gcuccaugccaucaaagga

SEQ ID NO: 1040663 - RNA, 19 nt, Artificial Sequence
  Description of Artificial Sequence: Synthetic oligonucleotide
  Antisense strand to SEQ ID NO: 1040662
uccuuugauggcauggagc

SEQ ID NO: 1040664 - RNA, 19 nt, Artificial Sequence
  Description of Artificial Sequence: Synthetic oligonucleotide
  Sense strand starting at position 987 of SEQ ID NO: 914924
gguguuucaguuuggcuua

SEQ ID NO: 1040665 - RNA, 19 nt, Artificial Sequence
  Description of Artificial Sequence: Synthetic oligonucleotide
  Antisense strand to SEQ ID NO: 1040664
uaagccaaacugaaacacc

SEQ ID NO: 1040666 - RNA, 19 nt, Artificial Sequence
  Description of Artificial Sequence: Synthetic oligonucleotide
  Sense strand starting at position 1071 of SEQ ID NO: 914924
agggauaucucugagacug

SEQ ID NO: 1040667 - RNA, 19 nt, Artificial Sequence
  Description of Artificial Sequence: Synthetic oligonucleotide
  Antisense strand to SEQ ID NO: 1040666
cagucucagagauaucccu

SEQ ID NO: 1040668 - RNA, 19 nt, Artificial Sequence
  Description of Artificial Sequence: Synthetic oligonucleotide
  Sense strand starting at position 1299 of SEQ ID NO: 914924
guaagcucagcccaaaguu

SEQ ID NO: 1040669 - RNA, 19 nt, Artificial Sequence
  Description of Artificial Sequence: Synthetic oligonucleotide
  Antisense strand to SEQ ID NO: 1040668
aacuuugggcugagcuuac

SEQ ID NO: 1040670 - RNA, 19 nt, Artificial Sequence
  Description of Artificial Sequence: Synthetic oligonucleotide
  Sense strand starting at position 1546 of SEQ ID NO: 914924
ggugugaaugggugacagu

SEQ ID NO: 1040671 - RNA, 19 nt, Artificial Sequence
  Description of Artificial Sequence: Synthetic oligonucleotide
  Antisense strand to SEQ ID NO: 1040670
acugucacccauucacacc

SEQ ID NO: 1040672 - RNA, 19 nt, Artificial Sequence
  Description of Artificial Sequence: Synthetic oligonucleotide
  Sense strand starting at position 2558 of SEQ ID NO: 914924
ccuccuccuuccgagaaga

SEQ ID NO: 1040673 - RNA, 19 nt, Artificial Sequence
  Description of Artificial Sequence: Synthetic oligonucleotide
  Antisense strand to SEQ ID NO: 1040672
ucuucucggaaggaggagg

SEQ ID NO: 1040674 - RNA, 19 nt, Artificial Sequence
  Description of Artificial Sequence: Synthetic oligonucleotide
  Sense strand starting at position 2560 of SEQ ID NO: 914924
uccuccuuccgagaagagu

SEQ ID NO: 1040675 - RNA, 19 nt, Artificial Sequence
  Description of Artificial Sequence: Synthetic oligonucleotide
  Antisense strand to SEQ ID NO: 1040674
acucuucucggaaggagga

SEQ ID NO: 1040676 - RNA, 19 nt, Artificial Sequence
  Description of Artificial Sequence: Synthetic oligonucleotide
  Sense strand starting at position 3170 of SEQ ID NO: 914924
uguugucaccuccagagaa

SEQ ID NO: 1040677 - RNA, 19 nt, Artificial Sequence
  Description of Artificial Sequence: Synthetic oligonucleotide
  Antisense strand to SEQ ID NO: 1040676
uucucuggaggugacaaca

SEQ ID NO: 1040678 - RNA, 19 nt, Artificial Sequence
  Description of Artificial Sequence: Synthetic oligonucleotide
  Sense strand starting at position 3311 of SEQ ID NO: 914924
gcaucuucgguuugguauu

SEQ ID NO: 1040679 - RNA, 19 nt, Artificial Sequence
  Description of Artificial Sequence: Synthetic oligonucleotide
  Antisense strand to SEQ ID NO: 1040678
aauaccaaaccgaagaugc

SEQ ID NO: 1040680 - RNA, 19 nt, Artificial Sequence
  Description of Artificial Sequence: Synthetic oligonucleotide
  Sense strand starting at position 3472 of SEQ ID NO: 914924
ugcugugacucacuggaga

SEQ ID NO: 1040681 - RNA, 19 nt, Artificial Sequence
  Description of Artificial Sequence: Synthetic oligonucleotide
  Antisense strand to SEQ ID NO: 1040680
ucuccagugagucacagca

SEQ ID NO: 1040682 - RNA, 19 nt, Artificial Sequence
  Description of Artificial Sequence: Synthetic oligonucleotide
  Sense strand starting at position 3474 of SEQ ID NO: 914924
cugugacucacuggagaac

SEQ ID NO: 1040683 - RNA, 19 nt, Artificial Sequence
  Description of Artificial Sequence: Synthetic oligonucleotide
  Antisense strand to SEQ ID NO: 1040682
guucuccagugagucacag

SEQ ID NO: 1040684 - RNA, 19 nt, Artificial Sequence
  Description of Artificial Sequence: Synthetic oligonucleotide
  Sense strand starting at position 3740 of SEQ ID NO: 914924
cccaauuaguccugggcca

SEQ ID NO: 1040685 - RNA, 19 nt, Artificial Sequence
  Description of Artificial Sequence: Synthetic oligonucleotide
  Antisense strand to SEQ ID NO: 1040684
uggcccaggacuaauuggg

SEQ ID NO: 1040686 - RNA, 19 nt, Artificial Sequence
  Description of Artificial Sequence: Synthetic oligonucleotide
  Sense strand starting at position 1504 of SEQ ID NO: 914925
ugaagucucugcccacaga

SEQ ID NO: 1040687 - RNA, 19 nt, Artificial Sequence
  Description of Artificial Sequence: Synthetic oligonucleotide
  Antisense strand to SEQ ID NO: 1040686
ucugugggcagagacuuca

SEQ ID NO: 1040688 - RNA, 19 nt, Artificial Sequence
  Description of Artificial Sequence: Synthetic oligonucleotide
  Sense strand starting at position 1505 of SEQ ID NO: 914925
gaagucucugcccacagau

SEQ ID NO: 1040689 - RNA, 19 nt, Artificial Sequence
  Description of Artificial Sequence: Synthetic oligonucleotide
  Antisense strand to SEQ ID NO: 1040688
aucugugggcagagacuuc

SEQ ID NO: 1040690 - RNA, 19 nt, Artificial Sequence
  Description of Artificial Sequence: Synthetic oligonucleotide
  Sense strand starting at position 2051 of SEQ ID NO: 914925
uugggauguccucauggcu

SEQ ID NO: 1040691 - RNA, 19 nt, Artificial Sequence
  Description of Artificial Sequence: Synthetic oligonucleotide
  Antisense strand to SEQ ID NO: 1040690
agccaugaggacaucccaa

SEQ ID NO: 1040692 - RNA, 19 nt, Artificial Sequence
  Description of Artificial Sequence: Synthetic oligonucleotide
  Sense strand starting at position 2599 of SEQ ID NO: 914925
caagaagcugugugagaca

SEQ ID NO: 1040693 - RNA, 19 nt, Artificial Sequence
  Description of Artificial Sequence: Synthetic oligonucleotide
  Antisense strand to SEQ ID NO: 1040692
ugucucacacagcuucuug

SEQ ID NO: 1040694 - RNA, 19 nt, Artificial Sequence
  Description of Artificial Sequence: Synthetic oligonucleotide
  Sense strand starting at position 2927 of SEQ ID NO: 914925
uaggguuuguucucgucaa

SEQ ID NO: 1040695 - RNA, 19 nt, Artificial Sequence
  Description of Artificial Sequence: Synthetic oligonucleotide
  Antisense strand to SEQ ID NO: 1040694
uugacgagaacaaacccua

SEQ ID NO: 1040696 - RNA, 19 nt, Artificial Sequence
  Description of Artificial Sequence: Synthetic oligonucleotide
  Sense strand starting at position 2928 of SEQ ID NO: 914925
aggguuuguucucgucaag

SEQ ID NO: 1040697 - RNA, 19 nt, Artificial Sequence
  Description of Artificial Sequence: Synthetic oligonucleotide
  Antisense strand to SEQ ID NO: 1040696
cuugacgagaacaaacccu

SEQ ID NO: 1040698 - RNA, 19 nt, Artificial Sequence
  Description of Artificial Sequence: Synthetic oligonucleotide
  Sense strand starting at position 2931 of SEQ ID NO: 914925
guuuguucucgucaagaga

SEQ ID NO: 1040699 - RNA, 19 nt, Artificial Sequence
  Description of Artificial Sequence: Synthetic oligonucleotide
  Antisense strand to SEQ ID NO: 1040698
ucucuugacgagaacaaac

SEQ ID NO: 1040700 - RNA, 19 nt, Artificial Sequence
  Description of Artificial Sequence: Synthetic oligonucleotide
  Sense strand starting at position 3233 of SEQ ID NO: 914925
cagagaccucugugguuaa

SEQ ID NO: 1040701 - RNA, 19 nt, Artificial Sequence
  Description of Artificial Sequence: Synthetic oligonucleotide
  Antisense strand to SEQ ID NO: 1040700
uuaaccacagaggucucug

SEQ ID NO: 1040702 - RNA, 19 nt, Artificial Sequence
  Description of Artificial Sequence: Synthetic oligonucleotide
  Sense strand starting at position 3834 of SEQ ID NO: 914925
gccacaucuguauaugugu

SEQ ID NO: 1040703 - RNA, 19 nt, Artificial Sequence
  Description of Artificial Sequence: Synthetic oligonucleotide
  Antisense strand to SEQ ID NO: 1040702
acacauauacagauguggc

SEQ ID NO: 1040704 - RNA, 19 nt, Artificial Sequence
  Description of Artificial Sequence: Synthetic oligonucleotide
  Sense strand starting at position 3841 of SEQ ID NO: 914925
cuguauaugugugggcaga

SEQ ID NO: 1040705 - RNA, 19 nt, Artificial Sequence
  Description of Artificial Sequence: Synthetic oligonucleotide
  Antisense strand to SEQ ID NO: 1040704
ucugcccacacauauacag

SEQ ID NO: 1040706 - RNA, 19 nt, Artificial Sequence
  Description of Artificial Sequence: Synthetic oligonucleotide
  Sense strand starting at position 3842 of SEQ ID NO: 914925
uguauaugugugggcagau

SEQ ID NO: 1040707 - RNA, 19 nt, Artificial Sequence
  Description of Artificial Sequence: Synthetic oligonucleotide
  Antisense strand to SEQ ID NO: 1040706
aucugcccacacauauaca

SEQ ID NO: 1040708 - RNA, 19 nt, Artificial Sequence
  Description of Artificial Sequence: Synthetic oligonucleotide
  Sense strand starting at position 3843 of SEQ ID NO: 914925
guauaugugugggcagaug

SEQ ID NO: 1040709 - RNA, 19 nt, Artificial Sequence
  Description of Artificial Sequence: Synthetic oligonucleotide
  Antisense strand to SEQ ID NO: 1040708
caucugcccacacauauac

SEQ ID NO: 1040710 - RNA, 19 nt, Artificial Sequence
  Description of Artificial Sequence: Synthetic oligonucleotide
  Sense strand starting at position 3855 of SEQ ID NO: 914925
gcagaugugugcccgagau

SEQ ID NO: 1040711 - RNA, 19 nt, Artificial Sequence
  Description of Artificial Sequence: Synthetic oligonucleotide
  Antisense strand to SEQ ID NO: 1040710
aucucgggcacacaucugc

SEQ ID NO: 1040712 - RNA, 19 nt, Artificial Sequence
  Description of Artificial Sequence: Synthetic oligonucleotide
  Sense strand starting at position 3899 of SEQ ID NO: 914925
cccaaagagccauggcuaa

SEQ ID NO: 1040713 - RNA, 19 nt, Artificial Sequence
  Description of Artificial Sequence: Synthetic oligonucleotide
  Antisense strand to SEQ ID NO: 1040712
uuagccauggcucuuuggg

SEQ ID NO: 1040714 - RNA, 19 nt, Artificial Sequence
  Description of Artificial Sequence: Synthetic oligonucleotide
  Sense strand starting at position 3938 of SEQ ID NO: 914925
ggaccucaaugcuugauaa

SEQ ID NO: 1040715 - RNA, 19 nt, Artificial Sequence
  Description of Artificial Sequence: Synthetic oligonucleotide
  Antisense strand to SEQ ID NO: 1040714
uuaucaagcauugaggucc

SEQ ID NO: 1040716 - RNA, 19 nt, Artificial Sequence
  Description of Artificial Sequence: Synthetic oligonucleotide
  Sense strand starting at position 3942 of SEQ ID NO: 914925
cucaaugcuugauaagaac

SEQ ID NO: 1040717 - RNA, 19 nt, Artificial Sequence
  Description of Artificial Sequence: Synthetic oligonucleotide
  Antisense strand to SEQ ID NO: 1040716
guucuuaucaagcauugag

SEQ ID NO: 1040718 - RNA, 19 nt, Artificial Sequence
  Description of Artificial Sequence: Synthetic oligonucleotide
  Sense strand starting at position 406 of SEQ ID NO: 914926
ccuguacccaagugggauu

SEQ ID NO: 1040719 - RNA, 19 nt, Artificial Sequence
  Description of Artificial Sequence: Synthetic oligonucleotide
  Antisense strand to SEQ ID NO: 1040718
aaucccacuuggguacagg

SEQ ID NO: 1040720 - RNA, 19 nt, Artificial Sequence
  Description of Artificial Sequence: Synthetic oligonucleotide
  Sense strand starting at position 427 of SEQ ID NO: 914926
gcagcaagaagucagagau

SEQ ID NO: 1040721 - RNA, 19 nt, Artificial Sequence
  Description of Artificial Sequence: Synthetic oligonucleotide
  Antisense strand to SEQ ID NO: 1040720
aucucugacuucuugcugc

SEQ ID NO: 1040722 - RNA, 19 nt, Artificial Sequence
  Description of Artificial Sequence: Synthetic oligonucleotide
  Sense strand starting at position 533 of SEQ ID NO: 914926
acaggagcuuugugugaag

SEQ ID NO: 1040723 - RNA, 19 nt, Artificial Sequence
  Description of Artificial Sequence: Synthetic oligonucleotide
  Antisense strand to SEQ ID NO: 1040722
cuucacacaaagcuccugu

SEQ ID NO: 1040724 - RNA, 19 nt, Artificial Sequence
  Description of Artificial Sequence: Synthetic oligonucleotide
  Sense strand starting at position 1210 of SEQ ID NO: 914926
gccagaauccuuggccuug

SEQ ID NO: 1040725 - RNA, 19 nt, Artificial Sequence
  Description of Artificial Sequence: Synthetic oligonucleotide
  Antisense strand to SEQ ID NO: 1040724
caaggccaaggauucuggc

SEQ ID NO: 1040726 - RNA, 19 nt, Artificial Sequence
  Description of Artificial Sequence: Synthetic oligonucleotide
  Sense strand starting at position 1211 of SEQ ID NO: 914926
ccagaauccuuggccuugu

SEQ ID NO: 1040727 - RNA, 19 nt, Artificial Sequence
  Description of Artificial Sequence: Synthetic oligonucleotide
  Antisense strand to SEQ ID NO: 1040726
acaaggccaaggauucugg

SEQ ID NO: 1040728 - RNA, 19 nt, Artificial Sequence
  Description of Artificial Sequence: Synthetic oligonucleotide
  Sense strand starting at position 2008 of SEQ ID NO: 914926
uuaaucuguugcuacaaga

SEQ ID NO: 1040729 - RNA, 19 nt, Artificial Sequence
  Description of Artificial Sequence: Synthetic oligonucleotide
  Antisense strand to SEQ ID NO: 1040728
ucuuguagcaacagauuaa

SEQ ID NO: 1040730 - RNA, 19 nt, Artificial Sequence
  Description of Artificial Sequence: Synthetic oligonucleotide
  Sense strand starting at position 2066 of SEQ ID NO: 914926
ggaagcguuaagcaaguua

SEQ ID NO: 1040731 - RNA, 19 nt, Artificial Sequence
  Description of Artificial Sequence: Synthetic oligonucleotide
  Antisense strand to SEQ ID NO: 1040730
uaacuugcuuaacgcuucc

SEQ ID NO: 1040732 - RNA, 19 nt, Artificial Sequence
  Description of Artificial Sequence: Synthetic oligonucleotide
  Sense strand starting at position 2220 of SEQ ID NO: 914926
gccaguucuccugcagcau

SEQ ID NO: 1040733 - RNA, 19 nt, Artificial Sequence
  Description of Artificial Sequence: Synthetic oligonucleotide
  Antisense strand to SEQ ID NO: 1040732
augcugcaggagaacuggc

SEQ ID NO: 1040734 - RNA, 19 nt, Artificial Sequence
  Description of Artificial Sequence: Synthetic oligonucleotide
  Sense strand starting at position 2243 of SEQ ID NO: 914926
gacaaacacgucugugauc

SEQ ID NO: 1040735 - RNA, 19 nt, Artificial Sequence
  Description of Artificial Sequence: Synthetic oligonucleotide
  Antisense strand to SEQ ID NO: 1040734
gaucacagacguguuuguc

SEQ ID NO: 1040736 - RNA, 19 nt, Artificial Sequence
  Description of Artificial Sequence: Synthetic oligonucleotide
  Sense strand starting at position 2248 of SEQ ID NO: 914926
acacgucugugaucccaua

SEQ ID NO: 1040737 - RNA, 19 nt, Artificial Sequence
  Description of Artificial Sequence: Synthetic oligonucleotide
  Antisense strand to SEQ ID NO: 1040736
uaugggaucacagacgugu

SEQ ID NO: 1040738 - RNA, 19 nt, Artificial Sequence
  Description of Artificial Sequence: Synthetic oligonucleotide
  Sense strand starting at position 2283 of SEQ ID NO: 914926
uuuagcuucuuugggugaa

SEQ ID NO: 1040739 - RNA, 19 nt, Artificial Sequence
  Description of Artificial Sequence: Synthetic oligonucleotide
  Antisense strand to SEQ ID NO: 1040738
uucacccaaagaagcuaaa

SEQ ID NO: 1040740 - RNA, 19 nt, Artificial Sequence
  Description of Artificial Sequence: Synthetic oligonucleotide
  Sense strand starting at position 2284 of SEQ ID NO: 914926
uuagcuucuuugggugaaa

SEQ ID NO: 1040741 - RNA, 19 nt, Artificial Sequence
  Description of Artificial Sequence: Synthetic oligonucleotide
  Antisense strand to SEQ ID NO: 1040740
uuucacccaaagaagcuaa

SEQ ID NO: 1040742 - RNA, 19 nt, Artificial Sequence
  Description of Artificial Sequence: Synthetic oligonucleotide
  Sense strand starting at position 2285 of SEQ ID NO: 914926
uagcuucuuugggugaaau

SEQ ID NO: 1040743 - RNA, 19 nt, Artificial Sequence
  Description of Artificial Sequence: Synthetic oligonucleotide
  Antisense strand to SEQ ID NO: 1040742
auuucacccaaagaagcua

SEQ ID NO: 1040744 - RNA, 19 nt, Artificial Sequence
  Description of Artificial Sequence: Synthetic oligonucleotide
  Sense strand starting at position 2286 of SEQ ID NO: 914926
agcuucuuugggugaaauc

SEQ ID NO: 1040745 - RNA, 19 nt, Artificial Sequence
  Description of Artificial Sequence: Synthetic oligonucleotide
  Antisense strand to SEQ ID NO: 1040744
gauuucacccaaagaagcu

SEQ ID NO: 1040746 - RNA, 19 nt, Artificial Sequence
  Description of Artificial Sequence: Synthetic oligonucleotide
  Sense strand starting at position 2287 of SEQ ID NO: 914926
gcuucuuugggugaaaucu

SEQ ID NO: 1040747 - RNA, 19 nt, Artificial Sequence
  Description of Artificial Sequence: Synthetic oligonucleotide
  Antisense strand to SEQ ID NO: 1040746
agauuucacccaaagaagc

SEQ ID NO: 1040748 - RNA, 19 nt, Artificial Sequence
  Description of Artificial Sequence: Synthetic oligonucleotide
  Sense strand starting at position 2369 of SEQ ID NO: 914926
gggucauagccuugagcac

SEQ ID NO: 1040749 - RNA, 19 nt, Artificial Sequence
  Description of Artificial Sequence: Synthetic oligonucleotide
  Antisense strand to SEQ ID NO: 1040748
gugcucaaggcuaugaccc

SEQ ID NO: 1040750 - RNA, 19 nt, Artificial Sequence
  Description of Artificial Sequence: Synthetic oligonucleotide
  Sense strand starting at position 2370 of SEQ ID NO: 914926
ggucauagccuugagcaca

SEQ ID NO: 1040751 - RNA, 19 nt, Artificial Sequence
  Description of Artificial Sequence: Synthetic oligonucleotide
  Antisense strand to SEQ ID NO: 1040750
ugugcucaaggcuaugacc

SEQ ID NO: 1040752 - RNA, 19 nt, Artificial Sequence
  Description of Artificial Sequence: Synthetic oligonucleotide
  Sense strand starting at position 2865 of SEQ ID NO: 914926
agcggcugggccugagaaa

SEQ ID NO: 1040753 - RNA, 19 nt, Artificial Sequence
  Description of Artificial Sequence: Synthetic oligonucleotide
  Antisense strand to SEQ ID NO: 1040752
uuucucaggcccagccgcu

SEQ ID NO: 1040754 - RNA, 19 nt, Artificial Sequence
  Description of Artificial Sequence: Synthetic oligonucleotide
  Sense strand starting at position 2866 of SEQ ID NO: 914926
gcggcugggccugagaaau

SEQ ID NO: 1040755 - RNA, 19 nt, Artificial Sequence
  Description of Artificial Sequence: Synthetic oligonucleotide
  Antisense strand to SEQ ID NO: 1040754
auuucucaggcccagccgc

SEQ ID NO: 1040756 - RNA, 19 nt, Artificial Sequence
  Description of Artificial Sequence: Synthetic oligonucleotide
  Sense strand starting at position 497 of SEQ ID NO: 914927
guuccuuagcucugugagu

SEQ ID NO: 1040757 - RNA, 19 nt, Artificial Sequence
  Description of Artificial Sequence: Synthetic oligonucleotide
  Antisense strand to SEQ ID NO: 1040756
acucacagagcuaaggaac

SEQ ID NO: 1040758 - RNA, 19 nt, Artificial Sequence
  Description of Artificial Sequence: Synthetic oligonucleotide
  Sense strand starting at position 523 of SEQ ID NO: 914927
ugaauauaggaauguguaa

SEQ ID NO: 1040759 - RNA, 19 nt, Artificial Sequence
  Description of Artificial Sequence: Synthetic oligonucleotide
  Antisense strand to SEQ ID NO: 1040758
uuacacauuccuauauuca

SEQ ID NO: 1040760 - RNA, 19 nt, Artificial Sequence
  Description of Artificial Sequence: Synthetic oligonucleotide
  Sense strand starting at position 598 of SEQ ID NO: 914927
gguaauuacugcugggaca

SEQ ID NO: 1040761 - RNA, 19 nt, Artificial Sequence
  Description of Artificial Sequence: Synthetic oligonucleotide
  Antisense strand to SEQ ID NO: 1040760
ugucccagcaguaauuacc

SEQ ID NO: 1040762 - RNA, 19 nt, Artificial Sequence
  Description of Artificial Sequence: Synthetic oligonucleotide
  Sense strand starting at position 775 of SEQ ID NO: 914927
gcaggauguuaggagcuua

SEQ ID NO: 1040763 - RNA, 19 nt, Artificial Sequence
  Description of Artificial Sequence: Synthetic oligonucleotide
  Antisense strand to SEQ ID NO: 1040762
uaagcuccuaacauccugc

SEQ ID NO: 1040764 - RNA, 19 nt, Artificial Sequence
  Description of Artificial Sequence: Synthetic oligonucleotide
  Sense strand starting at position 971 of SEQ ID NO: 914927
ggcccuacuuuagacauuu

SEQ ID NO: 1040765 - RNA, 19 nt, Artificial Sequence
  Description of Artificial Sequence: Synthetic oligonucleotide
  Antisense strand to SEQ ID NO: 1040764
aaaugucuaaaguagggcc

SEQ ID NO: 1040766 - RNA, 19 nt, Artificial Sequence
  Description of Artificial Sequence: Synthetic oligonucleotide
  Sense strand starting at position 1002 of SEQ ID NO: 914927
ucuuguuucuuccagcaag

SEQ ID NO: 1040767 - RNA, 19 nt, Artificial Sequence
  Description of Artificial Sequence: Synthetic oligonucleotide
  Antisense strand to SEQ ID NO: 1040766
cuugcuggaagaaacaaga

SEQ ID NO: 1040768 - RNA, 19 nt, Artificial Sequence
  Description of Artificial Sequence: Synthetic oligonucleotide
  Sense strand starting at position 1005 of SEQ ID NO: 914927
uguuucuuccagcaagucu

SEQ ID NO: 1040769 - RNA, 19 nt, Artificial Sequence
  Description of Artificial Sequence: Synthetic oligonucleotide
  Antisense strand to SEQ ID NO: 1040768
agacuugcuggaagaaaca

SEQ ID NO: 1040770 - RNA, 19 nt, Artificial Sequence
  Description of Artificial Sequence: Synthetic oligonucleotide
  Sense strand starting at position 1020 of SEQ ID NO: 914927
gucugcuucuugcgggaau

SEQ ID NO: 1040771 - RNA, 19 nt, Artificial Sequence
  Description of Artificial Sequence: Synthetic oligonucleotide
  Antisense strand to SEQ ID NO: 1040770
auucccgcaagaagcagac

SEQ ID NO: 1040772 - RNA, 19 nt, Artificial Sequence
  Description of Artificial Sequence: Synthetic oligonucleotide
  Sense strand starting at position 1021 of SEQ ID NO: 914927
ucugcuucuugcgggaaua

SEQ ID NO: 1040773 - RNA, 19 nt, Artificial Sequence
  Description of Artificial Sequence: Synthetic oligonucleotide
  Antisense strand to SEQ ID NO: 1040772
uauucccgcaagaagcaga

SEQ ID NO: 1040774 - RNA, 19 nt, Artificial Sequence
  Description of Artificial Sequence: Synthetic oligonucleotide
  Sense strand starting at position 1022 of SEQ ID NO: 914927
cugcuucuugcgggaauau

SEQ ID NO: 1040775 - RNA, 19 nt, Artificial Sequence
  Description of Artificial Sequence: Synthetic oligonucleotide
  Antisense strand to SEQ ID NO: 1040774
auauucccgcaagaagcag

SEQ ID NO: 1040776 - RNA, 19 nt, Artificial Sequence
  Description of Artificial Sequence: Synthetic oligonucleotide
  Sense strand starting at position 1023 of SEQ ID NO: 914927
ugcuucuugcgggaauauu

SEQ ID NO: 1040777 - RNA, 19 nt, Artificial Sequence
  Description of Artificial Sequence: Synthetic oligonucleotide
  Antisense strand to SEQ ID NO: 1040776
aauauucccgcaagaagca

SEQ ID NO: 1040778 - RNA, 19 nt, Artificial Sequence
  Description of Artificial Sequence: Synthetic oligonucleotide
  Sense strand starting at position 1091 of SEQ ID NO: 914927
cugugugcuccugcucaga

SEQ ID NO: 1040779 - RNA, 19 nt, Artificial Sequence
  Description of Artificial Sequence: Synthetic oligonucleotide
  Antisense strand to SEQ ID NO: 1040778
ucugagcaggagcacacag

SEQ ID NO: 1040780 - RNA, 19 nt, Artificial Sequence
  Description of Artificial Sequence: Synthetic oligonucleotide
  Sense strand starting at position 1093 of SEQ ID NO: 914927
gugugcuccugcucagaac

SEQ ID NO: 1040781 - RNA, 19 nt, Artificial Sequence
  Description of Artificial Sequence: Synthetic oligonucleotide
  Antisense strand to SEQ ID NO: 1040780
guucugagcaggagcacac

SEQ ID NO: 1040782 - RNA, 19 nt, Artificial Sequence
  Description of Artificial Sequence: Synthetic oligonucleotide
  Sense strand starting at position 1122 of SEQ ID NO: 914927
cugggaagccagugucauc

SEQ ID NO: 1040783 - RNA, 19 nt, Artificial Sequence
  Description of Artificial Sequence: Synthetic oligonucleotide
  Antisense strand to SEQ ID NO: 1040782
gaugacacuggcuucccag

SEQ ID NO: 1040784 - RNA, 19 nt, Artificial Sequence
  Description of Artificial Sequence: Synthetic oligonucleotide
  Sense strand starting at position 1449 of SEQ ID NO: 914927
cuccgaugagcgucauguu

SEQ ID NO: 1040785 - RNA, 19 nt, Artificial Sequence
  Description of Artificial Sequence: Synthetic oligonucleotide
  Antisense strand to SEQ ID NO: 1040784
aacaugacgcucaucggag

SEQ ID NO: 1040786 - RNA, 19 nt, Artificial Sequence
  Description of Artificial Sequence: Synthetic oligonucleotide
  Sense strand starting at position 1452 of SEQ ID NO: 914927
cgaugagcgucauguugga

SEQ ID NO: 1040787 - RNA, 19 nt, Artificial Sequence
  Description of Artificial Sequence: Synthetic oligonucleotide
  Antisense strand to SEQ ID NO: 1040786
uccaacaugacgcucaucg

SEQ ID NO: 1040788 - RNA, 19 nt, Artificial Sequence
  Description of Artificial Sequence: Synthetic oligonucleotide
  Sense strand starting at position 1478 of SEQ ID NO: 914927
ugacaacugucccgacacu

SEQ ID NO: 1040789 - RNA, 19 nt, Artificial Sequence
  Description of Artificial Sequence: Synthetic oligonucleotide
  Antisense strand to SEQ ID NO: 1040788
agugucgggacaguuguca

SEQ ID NO: 1040790 - RNA, 19 nt, Artificial Sequence
  Description of Artificial Sequence: Synthetic oligonucleotide
  Sense strand starting at position 1491 of SEQ ID NO: 914927
gacacuggcccuugagaca

SEQ ID NO: 1040791 - RNA, 19 nt, Artificial Sequence
  Description of Artificial Sequence: Synthetic oligonucleotide
  Antisense strand to SEQ ID NO: 1040790
ugucucaagggccaguguc

SEQ ID NO: 1040792 - RNA, 19 nt, Artificial Sequence
  Description of Artificial Sequence: Synthetic oligonucleotide
  Sense strand starting at position 2571 of SEQ ID NO: 914927
caaaguaacuucucguuag

SEQ ID NO: 1040793 - RNA, 19 nt, Artificial Sequence
  Description of Artificial Sequence: Synthetic oligonucleotide
  Antisense strand to SEQ ID NO: 1040792
cuaacgagaaguuacuuug

SEQ ID NO: 1040794 - RNA, 19 nt, Artificial Sequence
  Description of Artificial Sequence: Synthetic oligonucleotide
  Sense strand starting at position 2572 of SEQ ID NO: 914927
aaaguaacuucucguuagu

SEQ ID NO: 1040795 - RNA, 19 nt, Artificial Sequence
  Description of Artificial Sequence: Synthetic oligonucleotide
  Antisense strand to SEQ ID NO: 1040794
acuaacgagaaguuacuuu

SEQ ID NO: 1040796 - RNA, 19 nt, Artificial Sequence
  Description of Artificial Sequence: Synthetic oligonucleotide
  Sense strand starting at position 2575 of SEQ ID NO: 914927
guaacuucucguuagugcu

SEQ ID NO: 1040797 - RNA, 19 nt, Artificial Sequence
  Description of Artificial Sequence: Synthetic oligonucleotide
  Antisense strand to SEQ ID NO: 1040796
agcacuaacgagaaguuac

SEQ ID NO: 1040798 - RNA, 19 nt, Artificial Sequence
  Description of Artificial Sequence: Synthetic oligonucleotide
  Sense strand starting at position 2582 of SEQ ID NO: 914927
cucguuagugcugguccaa

SEQ ID NO: 1040799 - RNA, 19 nt, Artificial Sequence
  Description of Artificial Sequence: Synthetic oligonucleotide
  Antisense strand to SEQ ID NO: 1040798
uuggaccagcacuaacgag

SEQ ID NO: 1040800 - RNA, 19 nt, Artificial Sequence
  Description of Artificial Sequence: Synthetic oligonucleotide
  Sense strand starting at position 2583 of SEQ ID NO: 914927
ucguuagugcugguccaau

SEQ ID NO: 1040801 - RNA, 19 nt, Artificial Sequence
  Description of Artificial Sequence: Synthetic oligonucleotide
  Antisense strand to SEQ ID NO: 1040800
auuggaccagcacuaacga

SEQ ID NO: 1040802 - RNA, 19 nt, Artificial Sequence
  Description of Artificial Sequence: Synthetic oligonucleotide
  Sense strand starting at position 2999 of SEQ ID NO: 914927
ggagcauaguuccagacca

SEQ ID NO: 1040803 - RNA, 19 nt, Artificial Sequence
  Description of Artificial Sequence: Synthetic oligonucleotide
  Antisense strand to SEQ ID NO: 1040802
uggucuggaacuaugcucc

SEQ ID NO: 1040804 - RNA, 19 nt, Artificial Sequence
  Description of Artificial Sequence: Synthetic oligonucleotide
  Sense strand starting at position 3105 of SEQ ID NO: 914927
gucucugacucacagaacu

SEQ ID NO: 1040805 - RNA, 19 nt, Artificial Sequence
  Description of Artificial Sequence: Synthetic oligonucleotide
  Antisense strand to SEQ ID NO: 1040804
aguucugugagucagagac

SEQ ID NO: 1040806 - RNA, 19 nt, Artificial Sequence
  Description of Artificial Sequence: Synthetic oligonucleotide
  Sense strand starting at position 3505 of SEQ ID NO: 914927
cugagcauuguauacucau

SEQ ID NO: 1040807 - RNA, 19 nt, Artificial Sequence
  Description of Artificial Sequence: Synthetic oligonucleotide
  Antisense strand to SEQ ID NO: 1040806
augaguauacaaugcucag

SEQ ID NO: 1040808 - RNA, 19 nt, Artificial Sequence
  Description of Artificial Sequence: Synthetic oligonucleotide
  Sense strand starting at position 3641 of SEQ ID NO: 914927
aguuuccuugcuugugaga

SEQ ID NO: 1040809 - RNA, 19 nt, Artificial Sequence
  Description of Artificial Sequence: Synthetic oligonucleotide
  Antisense strand to SEQ ID NO: 1040808
ucucacaagcaaggaaacu

SEQ ID NO: 1040810 - RNA, 19 nt, Artificial Sequence
  Description of Artificial Sequence: Synthetic oligonucleotide
  Sense strand starting at position 3643 of SEQ ID NO: 914927
uuuccuugcuugugagaug

SEQ ID NO: 1040811 - RNA, 19 nt, Artificial Sequence
  Description of Artificial Sequence: Synthetic oligonucleotide
  Antisense strand to SEQ ID NO: 1040810
caucucacaagcaaggaaa

SEQ ID NO: 1040812 - RNA, 19 nt, Artificial Sequence
  Description of Artificial Sequence: Synthetic oligonucleotide
  Sense strand starting at position 3648 of SEQ ID NO: 914927
uugcuugugagauggguau

SEQ ID NO: 1040813 - RNA, 19 nt, Artificial Sequence
  Description of Artificial Sequence: Synthetic oligonucleotide
  Antisense strand to SEQ ID NO: 1040812
auacccaucucacaagcaa

SEQ ID NO: 1040814 - RNA, 19 nt, Artificial Sequence
  Description of Artificial Sequence: Synthetic oligonucleotide
  Sense strand starting at position 3650 of SEQ ID NO: 914927
gcuugugagauggguaucu

SEQ ID NO: 1040815 - RNA, 19 nt, Artificial Sequence
  Description of Artificial Sequence: Synthetic oligonucleotide
  Antisense strand to SEQ ID NO: 1040814
agauacccaucucacaagc

SEQ ID NO: 1040816 - RNA, 19 nt, Artificial Sequence
  Description of Artificial Sequence: Synthetic oligonucleotide
  Sense strand starting at position 3652 of SEQ ID NO: 914927
uugugagauggguaucuau

SEQ ID NO: 1040817 - RNA, 19 nt, Artificial Sequence
  Description of Artificial Sequence: Synthetic oligonucleotide
  Antisense strand to SEQ ID NO: 1040816
auagauacccaucucacaa

SEQ ID NO: 1040818 - RNA, 19 nt, Artificial Sequence
  Description of Artificial Sequence: Synthetic oligonucleotide
  Sense strand starting at position 3768 of SEQ ID NO: 914927
cuaagcucuuggccacaaa

SEQ ID NO: 1040819 - RNA, 19 nt, Artificial Sequence
  Description of Artificial Sequence: Synthetic oligonucleotide
  Antisense strand to SEQ ID NO: 1040818
uuuguggccaagagcuuag

SEQ ID NO: 1040820 - RNA, 19 nt, Artificial Sequence
  Description of Artificial Sequence: Synthetic oligonucleotide
  Sense strand starting at position 3829 of SEQ ID NO: 914927
cuggauaugugccagauca

SEQ ID NO: 1040821 - RNA, 19 nt, Artificial Sequence
  Description of Artificial Sequence: Synthetic oligonucleotide
  Antisense strand to SEQ ID NO: 1040820
ugaucuggcacauauccag

SEQ ID NO: 1040822 - RNA, 19 nt, Artificial Sequence
  Description of Artificial Sequence: Synthetic oligonucleotide
  Sense strand starting at position 3831 of SEQ ID NO: 914927
ggauaugugccagaucaau

SEQ ID NO: 1040823 - RNA, 19 nt, Artificial Sequence
  Description of Artificial Sequence: Synthetic oligonucleotide
  Antisense strand to SEQ ID NO: 1040822
auugaucuggcacauaucc

SEQ ID NO: 1040824 - RNA, 19 nt, Artificial Sequence
  Description of Artificial Sequence: Synthetic oligonucleotide
  Sense strand starting at position 3940 of SEQ ID NO: 914927
aagagagucuuccaucgga

SEQ ID NO: 1040825 - RNA, 19 nt, Artificial Sequence
  Description of Artificial Sequence: Synthetic oligonucleotide
  Antisense strand to SEQ ID NO: 1040824
uccgauggaagacucucuu

SEQ ID NO: 1040826 - RNA, 19 nt, Artificial Sequence
  Description of Artificial Sequence: Synthetic oligonucleotide
  Sense strand starting at position 243 of SEQ ID NO: 914928
ugugaugcauaauuuguau

SEQ ID NO: 1040827 - RNA, 19 nt, Artificial Sequence
  Description of Artificial Sequence: Synthetic oligonucleotide
  Antisense strand to SEQ ID NO: 1040826
auacaaauuaugcaucaca

SEQ ID NO: 1040828 - RNA, 19 nt, Artificial Sequence
  Description of Artificial Sequence: Synthetic oligonucleotide
  Sense strand starting at position 319 of SEQ ID NO: 914928
auuauaauacugggaagca

SEQ ID NO: 1040829 - RNA, 19 nt, Artificial Sequence
  Description of Artificial Sequence: Synthetic oligonucleotide
  Antisense strand to SEQ ID NO: 1040828
ugcuucccaguauuauaau

SEQ ID NO: 1040830 - RNA, 19 nt, Artificial Sequence
  Description of Artificial Sequence: Synthetic oligonucleotide
  Sense strand starting at position 364 of SEQ ID NO: 914928
acuuuaugagcugaaguga

SEQ ID NO: 1040831 - RNA, 19 nt, Artificial Sequence
  Description of Artificial Sequence: Synthetic oligonucleotide
  Antisense strand to SEQ ID NO: 1040830
ucacuucagcucauaaagu

SEQ ID NO: 1040832 - RNA, 19 nt, Artificial Sequence
  Description of Artificial Sequence: Synthetic oligonucleotide
  Sense strand starting at position 451 of SEQ ID NO: 914928
cuuuguuugcaaggaaaga

SEQ ID NO: 1040833 - RNA, 19 nt, Artificial Sequence
  Description of Artificial Sequence: Synthetic oligonucleotide
  Antisense strand to SEQ ID NO: 1040832
ucuuuccuugcaaacaaag

SEQ ID NO: 1040834 - RNA, 19 nt, Artificial Sequence
  Description of Artificial Sequence: Synthetic oligonucleotide
  Sense strand starting at position 479 of SEQ ID NO: 914928
ucaauuauugaggguaaau

SEQ ID NO: 1040835 - RNA, 19 nt, Artificial Sequence
  Description of Artificial Sequence: Synthetic oligonucleotide
  Antisense strand to SEQ ID NO: 1040834
auuuacccucaauaauuga

SEQ ID NO: 1040836 - RNA, 19 nt, Artificial Sequence
  Description of Artificial Sequence: Synthetic oligonucleotide
  Sense strand starting at position 518 of SEQ ID NO: 914928
aggaaaguuugguuacaca

SEQ ID NO: 1040837 - RNA, 19 nt, Artificial Sequence
  Description of Artificial Sequence: Synthetic oligonucleotide
  Antisense strand to SEQ ID NO: 1040836
uguguaaccaaacuuuccu

SEQ ID NO: 1040838 - RNA, 19 nt, Artificial Sequence
  Description of Artificial Sequence: Synthetic oligonucleotide
  Sense strand starting at position 529 of SEQ ID NO: 914928
guuacacaggccugaaaga

SEQ ID NO: 1040839 - RNA, 19 nt, Artificial Sequence
  Description of Artificial Sequence: Synthetic oligonucleotide
  Antisense strand to SEQ ID NO: 1040838
ucuuucaggccuguguaac

SEQ ID NO: 1040840 - RNA, 19 nt, Artificial Sequence
  Description of Artificial Sequence: Synthetic oligonucleotide
  Sense strand starting at position 542 of SEQ ID NO: 914928
gaaagaagguguguagauu

SEQ ID NO: 1040841 - RNA, 19 nt, Artificial Sequence
  Description of Artificial Sequence: Synthetic oligonucleotide
  Antisense strand to SEQ ID NO: 1040840
aaucuacacaccuucuuuc

SEQ ID NO: 1040842 - RNA, 19 nt, Artificial Sequence
  Description of Artificial Sequence: Synthetic oligonucleotide
  Sense strand starting at position 587 of SEQ ID NO: 914928
cuugauuuguaagacagag

SEQ ID NO: 1040843 - RNA, 19 nt, Artificial Sequence
  Description of Artificial Sequence: Synthetic oligonucleotide
  Antisense strand to SEQ ID NO: 1040842
cucugucuuacaaaucaag

SEQ ID NO: 1040844 - RNA, 19 nt, Artificial Sequence
  Description of Artificial Sequence: Synthetic oligonucleotide
  Sense strand starting at position 705 of SEQ ID NO: 914928
guagacuugaaaggaucuu

SEQ ID NO: 1040845 - RNA, 19 nt, Artificial Sequence
  Description of Artificial Sequence: Synthetic oligonucleotide
  Antisense strand to SEQ ID NO: 1040844
aagauccuuucaagucuac

SEQ ID NO: 1040846 - RNA, 19 nt, Artificial Sequence
  Description of Artificial Sequence: Synthetic oligonucleotide
  Sense strand starting at position 724 of SEQ ID NO: 914928
cauccuguguggguuauuu

SEQ ID NO: 1040847 - RNA, 19 nt, Artificial Sequence
  Description of Artificial Sequence: Synthetic oligonucleotide
  Antisense strand to SEQ ID NO: 1040846
aaauaacccacacaggaug

SEQ ID NO: 1040848 - RNA, 19 nt, Artificial Sequence
  Description of Artificial Sequence: Synthetic oligonucleotide
  Sense strand starting at position 807 of SEQ ID NO: 914928
gacaguccugggcaacuaa

SEQ ID NO: 1040849 - RNA, 19 nt, Artificial Sequence
  Description of Artificial Sequence: Synthetic oligonucleotide
  Antisense strand to SEQ ID NO: 1040848
uuaguugcccaggacuguc

SEQ ID NO: 1040850 - RNA, 19 nt, Artificial Sequence
  Description of Artificial Sequence: Synthetic oligonucleotide
  Sense strand starting at position 997 of SEQ ID NO: 914928
ggaguacaguacuuaauug

SEQ ID NO: 1040851 - RNA, 19 nt, Artificial Sequence
  Description of Artificial Sequence: Synthetic oligonucleotide
  Antisense strand to SEQ ID NO: 1040850
caauuaaguacuguacucc

SEQ ID NO: 1040852 - RNA, 19 nt, Artificial Sequence
  Description of Artificial Sequence: Synthetic oligonucleotide
  Sense strand starting at position 1137 of SEQ ID NO: 914928
uauccaagacguugaaaca

SEQ ID NO: 1040853 - RNA, 19 nt, Artificial Sequence
  Description of Artificial Sequence: Synthetic oligonucleotide
  Antisense strand to SEQ ID NO: 1040852
uguuucaacgucuuggaua

SEQ ID NO: 1040854 - RNA, 19 nt, Artificial Sequence
  Description of Artificial Sequence: Synthetic oligonucleotide
  Sense strand starting at position 1194 of SEQ ID NO: 914928
agcaucuuccaggauuaau

SEQ ID NO: 1040855 - RNA, 19 nt, Artificial Sequence
  Description of Artificial Sequence: Synthetic oligonucleotide
  Antisense strand to SEQ ID NO: 1040854
auuaauccuggaagaugcu

SEQ ID NO: 1040856 - RNA, 19 nt, Artificial Sequence
  Description of Artificial Sequence: Synthetic oligonucleotide
  Sense strand starting at position 1266 of SEQ ID NO: 914928
aagcucuaugguuauuaag

SEQ ID NO: 1040857 - RNA, 19 nt, Artificial Sequence
  Description of Artificial Sequence: Synthetic oligonucleotide
  Antisense strand to SEQ ID NO: 1040856
cuuaauaaccauagagcuu

SEQ ID NO: 1040858 - RNA, 19 nt, Artificial Sequence
  Description of Artificial Sequence: Synthetic oligonucleotide
  Sense strand starting at position 2161 of SEQ ID NO: 914928
accuaaucugccgauaauu

SEQ ID NO: 1040859 - RNA, 19 nt, Artificial Sequence
  Description of Artificial Sequence: Synthetic oligonucleotide
  Antisense strand to SEQ ID NO: 1040858
aauuaucggcagauuaggu

SEQ ID NO: 1040860 - RNA, 19 nt, Artificial Sequence
  Description of Artificial Sequence: Synthetic oligonucleotide
  Sense strand starting at position 2163 of SEQ ID NO: 914928
cuaaucugccgauaauuga

SEQ ID NO: 1040861 - RNA, 19 nt, Artificial Sequence
  Description of Artificial Sequence: Synthetic oligonucleotide
  Antisense strand to SEQ ID NO: 1040860
ucaauuaucggcagauuag

SEQ ID NO: 1040862 - RNA, 19 nt, Artificial Sequence
  Description of Artificial Sequence: Synthetic oligonucleotide
  Sense strand starting at position 2185 of SEQ ID NO: 914928
ugcguacucggcaggagau

SEQ ID NO: 1040863 - RNA, 19 nt, Artificial Sequence
  Description of Artificial Sequence: Synthetic oligonucleotide
  Antisense strand to SEQ ID NO: 1040862
aucuccugccgaguacgca

SEQ ID NO: 1040864 - RNA, 19 nt, Artificial Sequence
  Description of Artificial Sequence: Synthetic oligonucleotide
  Sense strand starting at position 2296 of SEQ ID NO: 914928
uggagagaguguuuagaag

SEQ ID NO: 1040865 - RNA, 19 nt, Artificial Sequence
  Description of Artificial Sequence: Synthetic oligonucleotide
  Antisense strand to SEQ ID NO: 1040864
cuucuaaacacucucucca

SEQ ID NO: 1040866 - RNA, 19 nt, Artificial Sequence
  Description of Artificial Sequence: Synthetic oligonucleotide
  Sense strand starting at position 2302 of SEQ ID NO: 914928
gaguguuuagaagauuguu

SEQ ID NO: 1040867 - RNA, 19 nt, Artificial Sequence
  Description of Artificial Sequence: Synthetic oligonucleotide
  Antisense strand to SEQ ID NO: 1040866
aacaaucuucuaaacacuc

SEQ ID NO: 1040868 - RNA, 19 nt, Artificial Sequence
  Description of Artificial Sequence: Synthetic oligonucleotide
  Sense strand starting at position 2519 of SEQ ID NO: 914928
ugauuucagucgucuguac

SEQ ID NO: 1040869 - RNA, 19 nt, Artificial Sequence
  Description of Artificial Sequence: Synthetic oligonucleotide
  Antisense strand to SEQ ID NO: 1040868
guacagacgacugaaauca

SEQ ID NO: 1040870 - RNA, 19 nt, Artificial Sequence
  Description of Artificial Sequence: Synthetic oligonucleotide
  Sense strand starting at position 2878 of SEQ ID NO: 914928
cuaggauauuuauaagaug

SEQ ID NO: 1040871 - RNA, 19 nt, Artificial Sequence
  Description of Artificial Sequence: Synthetic oligonucleotide
  Antisense strand to SEQ ID NO: 1040870
caucuuauaaauauccuag

SEQ ID NO: 1040872 - RNA, 19 nt, Artificial Sequence
  Description of Artificial Sequence: Synthetic oligonucleotide
  Sense strand starting at position 2989 of SEQ ID NO: 914928
ggauauuauccugguuaua

SEQ ID NO: 1040873 - RNA, 19 nt, Artificial Sequence
  Description of Artificial Sequence: Synthetic oligonucleotide
  Antisense strand to SEQ ID NO: 1040872
uauaaccaggauaauaucc

SEQ ID NO: 1040874 - RNA, 19 nt, Artificial Sequence
  Description of Artificial Sequence: Synthetic oligonucleotide
  Sense strand starting at position 3066 of SEQ ID NO: 914928
ccuagugaaauagacguua

SEQ ID NO: 1040875 - RNA, 19 nt, Artificial Sequence
  Description of Artificial Sequence: Synthetic oligonucleotide
  Antisense strand to SEQ ID NO: 1040874
uaacgucuauuucacuagg

SEQ ID NO: 1040876 - RNA, 19 nt, Artificial Sequence
  Description of Artificial Sequence: Synthetic oligonucleotide
  Sense strand starting at position 3100 of SEQ ID NO: 914928
auaugagcagacugaauau

SEQ ID NO: 1040877 - RNA, 19 nt, Artificial Sequence
  Description of Artificial Sequence: Synthetic oligonucleotide
  Antisense strand to SEQ ID NO: 1040876
auauucagucugcucauau

SEQ ID NO: 1040878 - RNA, 19 nt, Artificial Sequence
  Description of Artificial Sequence: Synthetic oligonucleotide
  Sense strand starting at position 3285 of SEQ ID NO: 914928
gacagcuguguccaggaau

SEQ ID NO: 1040879 - RNA, 19 nt, Artificial Sequence
  Description of Artificial Sequence: Synthetic oligonucleotide
  Antisense strand to SEQ ID NO: 1040878
auuccuggacacagcuguc

SEQ ID NO: 1040880 - RNA, 19 nt, Artificial Sequence
  Description of Artificial Sequence: Synthetic oligonucleotide
  Sense strand starting at position 3344 of SEQ ID NO: 914928
gggcaagcucuuuacagaa

SEQ ID NO: 1040881 - RNA, 19 nt, Artificial Sequence
  Description of Artificial Sequence: Synthetic oligonucleotide
  Antisense strand to SEQ ID NO: 1040880
uucuguaaagagcuugccc

SEQ ID NO: 1040882 - RNA, 19 nt, Artificial Sequence
  Description of Artificial Sequence: Synthetic oligonucleotide
  Sense strand starting at position 3398 of SEQ ID NO: 914928
cgaagacauuuguaggaaa

SEQ ID NO: 1040883 - RNA, 19 nt, Artificial Sequence
  Description of Artificial Sequence: Synthetic oligonucleotide
  Antisense strand to SEQ ID NO: 1040882
uuuccuacaaaugucuucg

SEQ ID NO: 1040884 - RNA, 19 nt, Artificial Sequence
  Description of Artificial Sequence: Synthetic oligonucleotide
  Sense strand starting at position 3418 of SEQ ID NO: 914928
augcauuugcuguaaagcu

SEQ ID NO: 1040885 - RNA, 19 nt, Artificial Sequence
  Description of Artificial Sequence: Synthetic oligonucleotide
  Antisense strand to SEQ ID NO: 1040884
agcuuuacagcaaaugcau

SEQ ID NO: 1040886 - RNA, 19 nt, Artificial Sequence
  Description of Artificial Sequence: Synthetic oligonucleotide
  Sense strand starting at position 3507 of SEQ ID NO: 914928
gguuaagacauguauguaa

SEQ ID NO: 1040887 - RNA, 19 nt, Artificial Sequence
  Description of Artificial Sequence: Synthetic oligonucleotide
  Antisense strand to SEQ ID NO: 1040886
uuacauacaugucuuaacc

SEQ ID NO: 1040888 - RNA, 19 nt, Artificial Sequence
  Description of Artificial Sequence: Synthetic oligonucleotide
  Sense strand starting at position 3552 of SEQ ID NO: 914928
ugcugaacuagaugaguaa

SEQ ID NO: 1040889 - RNA, 19 nt, Artificial Sequence
  Description of Artificial Sequence: Synthetic oligonucleotide
  Antisense strand to SEQ ID NO: 1040888
uuacucaucuaguucagca

SEQ ID NO: 1040890 - RNA, 19 nt, Artificial Sequence
  Description of Artificial Sequence: Synthetic oligonucleotide
  Sense strand starting at position 3635 of SEQ ID NO: 914928
cuuguauaugccuaauaag

SEQ ID NO: 1040891 - RNA, 19 nt, Artificial Sequence
  Description of Artificial Sequence: Synthetic oligonucleotide
  Antisense strand to SEQ ID NO: 1040890
cuuauuaggcauauacaag

SEQ ID NO: 1040892 - RNA, 19 nt, Artificial Sequence
  Description of Artificial Sequence: Synthetic oligonucleotide
  Sense strand starting at position 3645 of SEQ ID NO: 914928
ccuaauaaguaggcauaua

SEQ ID NO: 1040893 - RNA, 19 nt, Artificial Sequence
  Description of Artificial Sequence: Synthetic oligonucleotide
  Antisense strand to SEQ ID NO: 1040892
uauaugccuacuuauuagg

SEQ ID NO: 1040894 - RNA, 19 nt, Artificial Sequence
  Description of Artificial Sequence: Synthetic oligonucleotide
  Sense strand starting at position 3677 of SEQ ID NO: 914928
augugaauugcauaucauu

SEQ ID NO: 1040895 - RNA, 19 nt, Artificial Sequence
  Description of Artificial Sequence: Synthetic oligonucleotide
  Antisense strand to SEQ ID NO: 1040894
aaugauaugcaauucacau

SEQ ID NO: 1040896 - RNA, 19 nt, Artificial Sequence
  Description of Artificial Sequence: Synthetic oligonucleotide
  Sense strand starting at position 3801 of SEQ ID NO: 914928
gcucacuuugaaggagauu

SEQ ID NO: 1040897 - RNA, 19 nt, Artificial Sequence
  Description of Artificial Sequence: Synthetic oligonucleotide
  Antisense strand to SEQ ID NO: 1040896
aaucuccuucaaagugagc

SEQ ID NO: 1040898 - RNA, 19 nt, Artificial Sequence
  Description of Artificial Sequence: Synthetic oligonucleotide
  Sense strand starting at position 3812 of SEQ ID NO: 914928
aggagauuacuugaguugu

SEQ ID NO: 1040899 - RNA, 19 nt, Artificial Sequence
  Description of Artificial Sequence: Synthetic oligonucleotide
  Antisense strand to SEQ ID NO: 1040898
acaacucaaguaaucuccu

SEQ ID NO: 1040900 - RNA, 19 nt, Artificial Sequence
  Description of Artificial Sequence: Synthetic oligonucleotide
  Sense strand starting at position 3814 of SEQ ID NO: 914928
gagauuacuugaguuguau

SEQ ID NO: 1040901 - RNA, 19 nt, Artificial Sequence
  Description of Artificial Sequence: Synthetic oligonucleotide
  Antisense strand to SEQ ID NO: 1040900
auacaacucaaguaaucuc

SEQ ID NO: 1040902 - RNA, 19 nt, Artificial Sequence
  Description of Artificial Sequence: Synthetic oligonucleotide
  Sense strand starting at position 3820 of SEQ ID NO: 914928
acuugaguuguauacucaa

SEQ ID NO: 1040903 - RNA, 19 nt, Artificial Sequence
  Description of Artificial Sequence: Synthetic oligonucleotide
  Antisense strand to SEQ ID NO: 1040902
uugaguauacaacucaagu

SEQ ID NO: 1040904 - RNA, 19 nt, Artificial Sequence
  Description of Artificial Sequence: Synthetic oligonucleotide
  Sense strand starting at position 3823 of SEQ ID NO: 914928
ugaguuguauacucaacaa

SEQ ID NO: 1040905 - RNA, 19 nt, Artificial Sequence
  Description of Artificial Sequence: Synthetic oligonucleotide
  Antisense strand to SEQ ID NO: 1040904
uuguugaguauacaacuca

SEQ ID NO: 1040906 - RNA, 19 nt, Artificial Sequence
  Description of Artificial Sequence: Synthetic oligonucleotide
  Sense strand starting at position 178 of SEQ ID NO: 914929
guagaaauaguguaugcuu

SEQ ID NO: 1040907 - RNA, 19 nt, Artificial Sequence
  Description of Artificial Sequence: Synthetic oligonucleotide
  Antisense strand to SEQ ID NO: 1040906
aagcauacacuauuucuac

SEQ ID NO: 1040908 - RNA, 19 nt, Artificial Sequence
  Description of Artificial Sequence: Synthetic oligonucleotide
  Sense strand starting at position 191 of SEQ ID NO: 914929
augcuuaggaguuagauau

SEQ ID NO: 1040909 - RNA, 19 nt, Artificial Sequence
  Description of Artificial Sequence: Synthetic oligonucleotide
  Antisense strand to SEQ ID NO: 1040908
auaucuaacuccuaagcau

SEQ ID NO: 1040910 - RNA, 19 nt, Artificial Sequence
  Description of Artificial Sequence: Synthetic oligonucleotide
  Sense strand starting at position 229 of SEQ ID NO: 914929
auagcauaugcuuaggaau

SEQ ID NO: 1040911 - RNA, 19 nt, Artificial Sequence
  Description of Artificial Sequence: Synthetic oligonucleotide
  Antisense strand to SEQ ID NO: 1040910
auuccuaagcauaugcuau

SEQ ID NO: 1040912 - RNA, 19 nt, Artificial Sequence
  Description of Artificial Sequence: Synthetic oligonucleotide
  Sense strand starting at position 246 of SEQ ID NO: 914929
aucagauagggcugaauuc

SEQ ID NO: 1040913 - RNA, 19 nt, Artificial Sequence
  Description of Artificial Sequence: Synthetic oligonucleotide
  Antisense strand to SEQ ID NO: 1040912
gaauucagcccuaucugau

SEQ ID NO: 1040914 - RNA, 19 nt, Artificial Sequence
  Description of Artificial Sequence: Synthetic oligonucleotide
  Sense strand starting at position 366 of SEQ ID NO: 914929
cuagcucuggaucacuaua

SEQ ID NO: 1040915 - RNA, 19 nt, Artificial Sequence
  Description of Artificial Sequence: Synthetic oligonucleotide
  Antisense strand to SEQ ID NO: 1040914
uauagugauccagagcuag

SEQ ID NO: 1040916 - RNA, 19 nt, Artificial Sequence
  Description of Artificial Sequence: Synthetic oligonucleotide
  Sense strand starting at position 368 of SEQ ID NO: 914929
agcucuggaucacuauaua

SEQ ID NO: 1040917 - RNA, 19 nt, Artificial Sequence
  Description of Artificial Sequence: Synthetic oligonucleotide
  Antisense strand to SEQ ID NO: 1040916
uauauagugauccagagcu

SEQ ID NO: 1040918 - RNA, 19 nt, Artificial Sequence
  Description of Artificial Sequence: Synthetic oligonucleotide
  Sense strand starting at position 529 of SEQ ID NO: 914929
cagagugugauggagucau

SEQ ID NO: 1040919 - RNA, 19 nt, Artificial Sequence
  Description of Artificial Sequence: Synthetic oligonucleotide
  Antisense strand to SEQ ID NO: 1040918
augacuccaucacacucug

SEQ ID NO: 1040920 - RNA, 19 nt, Artificial Sequence
  Description of Artificial Sequence: Synthetic oligonucleotide
  Sense strand starting at position 559 of SEQ ID NO: 914929
aguguccaauaguuugaau

SEQ ID NO: 1040921 - RNA, 19 nt, Artificial Sequence
  Description of Artificial Sequence: Synthetic oligonucleotide
  Antisense strand to SEQ ID NO: 1040920
auucaaacuauuggacacu

SEQ ID NO: 1040922 - RNA, 19 nt, Artificial Sequence
  Description of Artificial Sequence: Synthetic oligonucleotide
  Sense strand starting at position 561 of SEQ ID NO: 914929
uguccaauaguuugaauaa

SEQ ID NO: 1040923 - RNA, 19 nt, Artificial Sequence
  Description of Artificial Sequence: Synthetic oligonucleotide
  Antisense strand to SEQ ID NO: 1040922
uuauucaaacuauuggaca

SEQ ID NO: 1040924 - RNA, 19 nt, Artificial Sequence
  Description of Artificial Sequence: Synthetic oligonucleotide
  Sense strand starting at position 758 of SEQ ID NO: 914929
gucaucuuccagcauagga

SEQ ID NO: 1040925 - RNA, 19 nt, Artificial Sequence
  Description of Artificial Sequence: Synthetic oligonucleotide
  Antisense strand to SEQ ID NO: 1040924
uccuaugcuggaagaugac

SEQ ID NO: 1040926 - RNA, 19 nt, Artificial Sequence
  Description of Artificial Sequence: Synthetic oligonucleotide
  Sense strand starting at position 789 of SEQ ID NO: 914929
cuauuaaagugcucagauu

SEQ ID NO: 1040927 - RNA, 19 nt, Artificial Sequence
  Description of Artificial Sequence: Synthetic oligonucleotide
  Antisense strand to SEQ ID NO: 1040926
aaucugagcacuuuaauag

SEQ ID NO: 1040928 - RNA, 19 nt, Artificial Sequence
  Description of Artificial Sequence: Synthetic oligonucleotide
  Sense strand starting at position 822 of SEQ ID NO: 914929
gcugcaaugagugauuugu

SEQ ID NO: 1040929 - RNA, 19 nt, Artificial Sequence
  Description of Artificial Sequence: Synthetic oligonucleotide
  Antisense strand to SEQ ID NO: 1040928
acaaaucacucauugcagc

SEQ ID NO: 1040930 - RNA, 19 nt, Artificial Sequence
  Description of Artificial Sequence: Synthetic oligonucleotide
  Sense strand starting at position 868 of SEQ ID NO: 914929
aaaugagguuuccauuuag

SEQ ID NO: 1040931 - RNA, 19 nt, Artificial Sequence
  Description of Artificial Sequence: Synthetic oligonucleotide
  Antisense strand to SEQ ID NO: 1040930
cuaaauggaaaccucauuu

SEQ ID NO: 1040932 - RNA, 19 nt, Artificial Sequence
  Description of Artificial Sequence: Synthetic oligonucleotide
  Sense strand starting at position 901 of SEQ ID NO: 914929
cagcgaucacuuuaaguca

SEQ ID NO: 1040933 - RNA, 19 nt, Artificial Sequence
  Description of Artificial Sequence: Synthetic oligonucleotide
  Antisense strand to SEQ ID NO: 1040932
ugacuuaaagugaucgcug

SEQ ID NO: 1040934 - RNA, 19 nt, Artificial Sequence
  Description of Artificial Sequence: Synthetic oligonucleotide
  Sense strand starting at position 916 of SEQ ID NO: 914929
gucauuccuuuaguagaca

SEQ ID NO: 1040935 - RNA, 19 nt, Artificial Sequence
  Description of Artificial Sequence: Synthetic oligonucleotide
  Antisense strand to SEQ ID NO: 1040934
ugucuacuaaaggaaugac

SEQ ID NO: 1040936 - RNA, 19 nt, Artificial Sequence
  Description of Artificial Sequence: Synthetic oligonucleotide
  Sense strand starting at position 1101 of SEQ ID NO: 914929
agugaaaguuacccauuau

SEQ ID NO: 1040937 - RNA, 19 nt, Artificial Sequence
  Description of Artificial Sequence: Synthetic oligonucleotide
  Antisense strand to SEQ ID NO: 1040936
auaauggguaacuuucacu

SEQ ID NO: 1040938 - RNA, 19 nt, Artificial Sequence
  Description of Artificial Sequence: Synthetic oligonucleotide
  Sense strand starting at position 1472 of SEQ ID NO: 914929
ugacaauauggugguacau

SEQ ID NO: 1040939 - RNA, 19 nt, Artificial Sequence
  Description of Artificial Sequence: Synthetic oligonucleotide
  Antisense strand to SEQ ID NO: 1040938
auguaccaccauauuguca

SEQ ID NO: 1040940 - RNA, 19 nt, Artificial Sequence
  Description of Artificial Sequence: Synthetic oligonucleotide
  Sense strand starting at position 1661 of SEQ ID NO: 914929
ccucgugguccagauggaa

SEQ ID NO: 1040941 - RNA, 19 nt, Artificial Sequence
  Description of Artificial Sequence: Synthetic oligonucleotide
  Antisense strand to SEQ ID NO: 1040940
uuccaucuggaccacgagg

SEQ ID NO: 1040942 - RNA, 19 nt, Artificial Sequence
  Description of Artificial Sequence: Synthetic oligonucleotide
  Sense strand starting at position 1760 of SEQ ID NO: 914929
ggugauaugagaggcagau

SEQ ID NO: 1040943 - RNA, 19 nt, Artificial Sequence
  Description of Artificial Sequence: Synthetic oligonucleotide
  Antisense strand to SEQ ID NO: 1040942
aucugccucucauaucacc

SEQ ID NO: 1040944 - RNA, 19 nt, Artificial Sequence
  Description of Artificial Sequence: Synthetic oligonucleotide
  Sense strand starting at position 1769 of SEQ ID NO: 914929
agaggcagaugcucaauaa

SEQ ID NO: 1040945 - RNA, 19 nt, Artificial Sequence
  Description of Artificial Sequence: Synthetic oligonucleotide
  Antisense strand to SEQ ID NO: 1040944
uuauugagcaucugccucu

SEQ ID NO: 1040946 - RNA, 19 nt, Artificial Sequence
  Description of Artificial Sequence: Synthetic oligonucleotide
  Sense strand starting at position 1770 of SEQ ID NO: 914929
gaggcagaugcucaauaac

SEQ ID NO: 1040947 - RNA, 19 nt, Artificial Sequence
  Description of Artificial Sequence: Synthetic oligonucleotide
  Antisense strand to SEQ ID NO: 1040946
guuauugagcaucugccuc

SEQ ID NO: 1040948 - RNA, 19 nt, Artificial Sequence
  Description of Artificial Sequence: Synthetic oligonucleotide
  Sense strand starting at position 1780 of SEQ ID NO: 914929
cucaauaacuaguccggau

SEQ ID NO: 1040949 - RNA, 19 nt, Artificial Sequence
  Description of Artificial Sequence: Synthetic oligonucleotide
  Antisense strand to SEQ ID NO: 1040948
auccggacuaguuauugag

SEQ ID NO: 1040950 - RNA, 19 nt, Artificial Sequence
  Description of Artificial Sequence: Synthetic oligonucleotide
  Sense strand starting at position 1968 of SEQ ID NO: 914929
agcuaaugcugacucagaa

SEQ ID NO: 1040951 - RNA, 19 nt, Artificial Sequence
  Description of Artificial Sequence: Synthetic oligonucleotide
  Antisense strand to SEQ ID NO: 1040950
uucugagucagcauuagcu

SEQ ID NO: 1040952 - RNA, 19 nt, Artificial Sequence
  Description of Artificial Sequence: Synthetic oligonucleotide
  Sense strand starting at position 2215 of SEQ ID NO: 914929
agcuguucggccuugugau

SEQ ID NO: 1040953 - RNA, 19 nt, Artificial Sequence
  Description of Artificial Sequence: Synthetic oligonucleotide
  Antisense strand to SEQ ID NO: 1040952
aucacaaggccgaacagcu

SEQ ID NO: 1040954 - RNA, 19 nt, Artificial Sequence
  Description of Artificial Sequence: Synthetic oligonucleotide
  Sense strand starting at position 2225 of SEQ ID NO: 914929
ccuugugaucugcagggua

SEQ ID NO: 1040955 - RNA, 19 nt, Artificial Sequence
  Description of Artificial Sequence: Synthetic oligonucleotide
  Antisense strand to SEQ ID NO: 1040954
uacccugcagaucacaagg

SEQ ID NO: 1040956 - RNA, 19 nt, Artificial Sequence
  Description of Artificial Sequence: Synthetic oligonucleotide
  Sense strand starting at position 2245 of SEQ ID NO: 914929
gaugcugaagcucaugaaa

SEQ ID NO: 1040957 - RNA, 19 nt, Artificial Sequence
  Description of Artificial Sequence: Synthetic oligonucleotide
  Antisense strand to SEQ ID NO: 1040956
uuucaugagcuucagcauc

SEQ ID NO: 1040958 - RNA, 19 nt, Artificial Sequence
  Description of Artificial Sequence: Synthetic oligonucleotide
  Sense strand starting at position 2275 of SEQ ID NO: 914929
cuuaaauacugagucuaga

SEQ ID NO: 1040959 - RNA, 19 nt, Artificial Sequence
  Description of Artificial Sequence: Synthetic oligonucleotide
  Antisense strand to SEQ ID NO: 1040958
ucuagacucaguauuuaag

SEQ ID NO: 1040960 - RNA, 19 nt, Artificial Sequence
  Description of Artificial Sequence: Synthetic oligonucleotide
  Sense strand starting at position 2571 of SEQ ID NO: 914929
guucgaugaacaugagguu

SEQ ID NO: 1040961 - RNA, 19 nt, Artificial Sequence
  Description of Artificial Sequence: Synthetic oligonucleotide
  Antisense strand to SEQ ID NO: 1040960
aaccucauguucaucgaac

SEQ ID NO: 1040962 - RNA, 19 nt, Artificial Sequence
  Description of Artificial Sequence: Synthetic oligonucleotide
  Sense strand starting at position 2578 of SEQ ID NO: 914929
gaacaugagguuuaucugu

SEQ ID NO: 1040963 - RNA, 19 nt, Artificial Sequence
  Description of Artificial Sequence: Synthetic oligonucleotide
  Antisense strand to SEQ ID NO: 1040962
acagauaaaccucauguuc

SEQ ID NO: 1040964 - RNA, 19 nt, Artificial Sequence
  Description of Artificial Sequence: Synthetic oligonucleotide
  Sense strand starting at position 2586 of SEQ ID NO: 914929
gguuuaucugugcugugua

SEQ ID NO: 1040965 - RNA, 19 nt, Artificial Sequence
  Description of Artificial Sequence: Synthetic oligonucleotide
  Antisense strand to SEQ ID NO: 1040964
uacacagcacagauaaacc

SEQ ID NO: 1040966 - RNA, 19 nt, Artificial Sequence
  Description of Artificial Sequence: Synthetic oligonucleotide
  Sense strand starting at position 2685 of SEQ ID NO: 914929
aagcaaugucuugggcaaa

SEQ ID NO: 1040967 - RNA, 19 nt, Artificial Sequence
  Description of Artificial Sequence: Synthetic oligonucleotide
  Antisense strand to SEQ ID NO: 1040966
uuugcccaagacauugcuu

SEQ ID NO: 1040968 - RNA, 19 nt, Artificial Sequence
  Description of Artificial Sequence: Synthetic oligonucleotide
  Sense strand starting at position 2688 of SEQ ID NO: 914929
caaugucuugggcaaaggu

SEQ ID NO: 1040969 - RNA, 19 nt, Artificial Sequence
  Description of Artificial Sequence: Synthetic oligonucleotide
  Antisense strand to SEQ ID NO: 1040968
accuuugcccaagacauug

SEQ ID NO: 1040970 - RNA, 19 nt, Artificial Sequence
  Description of Artificial Sequence: Synthetic oligonucleotide
  Sense strand starting at position 2774 of SEQ ID NO: 914929
auaagugguacuggucaua

SEQ ID NO: 1040971 - RNA, 19 nt, Artificial Sequence
  Description of Artificial Sequence: Synthetic oligonucleotide
  Antisense strand to SEQ ID NO: 1040970
uaugaccaguaccacuuau

SEQ ID NO: 1040972 - RNA, 19 nt, Artificial Sequence
  Description of Artificial Sequence: Synthetic oligonucleotide
  Sense strand starting at position 2777 of SEQ ID NO: 914929
agugguacuggucauaaag

SEQ ID NO: 1040973 - RNA, 19 nt, Artificial Sequence
  Description of Artificial Sequence: Synthetic oligonucleotide
  Antisense strand to SEQ ID NO: 1040972
cuuuaugaccaguaccacu

SEQ ID NO: 1040974 - RNA, 19 nt, Artificial Sequence
  Description of Artificial Sequence: Synthetic oligonucleotide
  Sense strand starting at position 2875 of SEQ ID NO: 914929
gguaacagcccuuacacau

SEQ ID NO: 1040975 - RNA, 19 nt, Artificial Sequence
  Description of Artificial Sequence: Synthetic oligonucleotide
  Antisense strand to SEQ ID NO: 1040974
auguguaagggcuguuacc

SEQ ID NO: 1040976 - RNA, 19 nt, Artificial Sequence
  Description of Artificial Sequence: Synthetic oligonucleotide
  Sense strand starting at position 3036 of SEQ ID NO: 914929
ccgaaagagagcuagcuuu

SEQ ID NO: 1040977 - RNA, 19 nt, Artificial Sequence
  Description of Artificial Sequence: Synthetic oligonucleotide
  Antisense strand to SEQ ID NO: 1040976
aaagcuagcucucuuucgg

SEQ ID NO: 1040978 - RNA, 19 nt, Artificial Sequence
  Description of Artificial Sequence: Synthetic oligonucleotide
  Sense strand starting at position 3214 of SEQ ID NO: 914929
cgcugugccagcuuucuau

SEQ ID NO: 1040979 - RNA, 19 nt, Artificial Sequence
  Description of Artificial Sequence: Synthetic oligonucleotide
  Antisense strand to SEQ ID NO: 1040978
auagaaagcuggcacagcg

SEQ ID NO: 1040980 - RNA, 19 nt, Artificial Sequence
  Description of Artificial Sequence: Synthetic oligonucleotide
  Sense strand starting at position 3262 of SEQ ID NO: 914929
cggcuuaaacaguacucau

SEQ ID NO: 1040981 - RNA, 19 nt, Artificial Sequence
  Description of Artificial Sequence: Synthetic oligonucleotide
  Antisense strand to SEQ ID NO: 1040980
augaguacuguuuaagccg

SEQ ID NO: 1040982 - RNA, 19 nt, Artificial Sequence
  Description of Artificial Sequence: Synthetic oligonucleotide
  Sense strand starting at position 3298 of SEQ ID NO: 914929
cuauaugucagaggucuga

SEQ ID NO: 1040983 - RNA, 19 nt, Artificial Sequence
  Description of Artificial Sequence: Synthetic oligonucleotide
  Antisense strand to SEQ ID NO: 1040982
ucagaccucugacauauag

SEQ ID NO: 1040984 - RNA, 19 nt, Artificial Sequence
  Description of Artificial Sequence: Synthetic oligonucleotide
  Sense strand starting at position 3604 of SEQ ID NO: 914929
agagaaaguucucugcucu

SEQ ID NO: 1040985 - RNA, 19 nt, Artificial Sequence
  Description of Artificial Sequence: Synthetic oligonucleotide
  Antisense strand to SEQ ID NO: 1040984
agagcagagaacuuucucu

SEQ ID NO: 1040986 - RNA, 19 nt, Artificial Sequence
  Description of Artificial Sequence: Synthetic oligonucleotide
  Sense strand starting at position 315 of SEQ ID NO: 914930
guuguuguccucugagaga

SEQ ID NO: 1040987 - RNA, 19 nt, Artificial Sequence
  Description of Artificial Sequence: Synthetic oligonucleotide
  Antisense strand to SEQ ID NO: 1040986
ucucucagaggacaacaac

SEQ ID NO: 1040988 - RNA, 19 nt, Artificial Sequence
  Description of Artificial Sequence: Synthetic oligonucleotide
  Sense strand starting at position 427 of SEQ ID NO: 914930
ggccaagugccugacaagu

SEQ ID NO: 1040989 - RNA, 19 nt, Artificial Sequence
  Description of Artificial Sequence: Synthetic oligonucleotide
  Antisense strand to SEQ ID NO: 1040988
acuugucaggcacuuggcc

SEQ ID NO: 1040990 - RNA, 19 nt, Artificial Sequence
  Description of Artificial Sequence: Synthetic oligonucleotide
  Sense strand starting at position 461 of SEQ ID NO: 914930
gggcuaaagucggugcuuu

SEQ ID NO: 1040991 - RNA, 19 nt, Artificial Sequence
  Description of Artificial Sequence: Synthetic oligonucleotide
  Antisense strand to SEQ ID NO: 1040990
aaagcaccgacuuuagccc

SEQ ID NO: 1040992 - RNA, 19 nt, Artificial Sequence
  Description of Artificial Sequence: Synthetic oligonucleotide
  Sense strand starting at position 473 of SEQ ID NO: 914930
gugcuuucugccgucacuu

SEQ ID NO: 1040993 - RNA, 19 nt, Artificial Sequence
  Description of Artificial Sequence: Synthetic oligonucleotide
  Antisense strand to SEQ ID NO: 1040992
aagugacggcagaaagcac

SEQ ID NO: 1040994 - RNA, 19 nt, Artificial Sequence
  Description of Artificial Sequence: Synthetic oligonucleotide
  Sense strand starting at position 547 of SEQ ID NO: 914930
caccucuggucccgagaaa

SEQ ID NO: 1040995 - RNA, 19 nt, Artificial Sequence
  Description of Artificial Sequence: Synthetic oligonucleotide
  Antisense strand to SEQ ID NO: 1040994
uuucucgggaccagaggug

SEQ ID NO: 1040996 - RNA, 19 nt, Artificial Sequence
  Description of Artificial Sequence: Synthetic oligonucleotide
  Sense strand starting at position 840 of SEQ ID NO: 914930
gaggaaguggugugauucu

SEQ ID NO: 1040997 - RNA, 19 nt, Artificial Sequence
  Description of Artificial Sequence: Synthetic oligonucleotide
  Antisense strand to SEQ ID NO: 1040996
agaaucacaccacuuccuc

SEQ ID NO: 1040998 - RNA, 19 nt, Artificial Sequence
  Description of Artificial Sequence: Synthetic oligonucleotide
  Sense strand starting at position 849 of SEQ ID NO: 914930
gugugauucuugaagggug

SEQ ID NO: 1040999 - RNA, 19 nt, Artificial Sequence
  Description of Artificial Sequence: Synthetic oligonucleotide
  Antisense strand to SEQ ID NO: 1040998
cacccuucaagaaucacac

SEQ ID NO: 1041000 - RNA, 19 nt, Artificial Sequence
  Description of Artificial Sequence: Synthetic oligonucleotide
  Sense strand starting at position 852 of SEQ ID NO: 914930
ugauucuugaaggguguca

SEQ ID NO: 1041001 - RNA, 19 nt, Artificial Sequence
  Description of Artificial Sequence: Synthetic oligonucleotide
  Antisense strand to SEQ ID NO: 1041000
ugacacccuucaagaauca

SEQ ID NO: 1041002 - RNA, 19 nt, Artificial Sequence
  Description of Artificial Sequence: Synthetic oligonucleotide
  Sense strand starting at position 857 of SEQ ID NO: 914930
cuugaagggugucaucagu

SEQ ID NO: 1041003 - RNA, 19 nt, Artificial Sequence
  Description of Artificial Sequence: Synthetic oligonucleotide
  Antisense strand to SEQ ID NO: 1041002
acugaugacacccuucaag

SEQ ID NO: 1041004 - RNA, 19 nt, Artificial Sequence
  Description of Artificial Sequence: Synthetic oligonucleotide
  Sense strand starting at position 864 of SEQ ID NO: 914930
ggugucaucaguugucaca

SEQ ID NO: 1041005 - RNA, 19 nt, Artificial Sequence
  Description of Artificial Sequence: Synthetic oligonucleotide
  Antisense strand to SEQ ID NO: 1041004
ugugacaacugaugacacc

SEQ ID NO: 1041006 - RNA, 19 nt, Artificial Sequence
  Description of Artificial Sequence: Synthetic oligonucleotide
  Sense strand starting at position 871 of SEQ ID NO: 914930
ucaguugucacagggacaa

SEQ ID NO: 1041007 - RNA, 19 nt, Artificial Sequence
  Description of Artificial Sequence: Synthetic oligonucleotide
  Antisense strand to SEQ ID NO: 1041006
uugucccugugacaacuga

SEQ ID NO: 1041008 - RNA, 19 nt, Artificial Sequence
  Description of Artificial Sequence: Synthetic oligonucleotide
  Sense strand starting at position 933 of SEQ ID NO: 914930
gagcaaacugcucacaagu

SEQ ID NO: 1041009 - RNA, 19 nt, Artificial Sequence
  Description of Artificial Sequence: Synthetic oligonucleotide
  Antisense strand to SEQ ID NO: 1041008
acuugugagcaguuugcuc

SEQ ID NO: 1041010 - RNA, 19 nt, Artificial Sequence
  Description of Artificial Sequence: Synthetic oligonucleotide
  Sense strand starting at position 1057 of SEQ ID NO: 914930
aaggucacucugugagguu

SEQ ID NO: 1041011 - RNA, 19 nt, Artificial Sequence
  Description of Artificial Sequence: Synthetic oligonucleotide
  Antisense strand to SEQ ID NO: 1041010
aaccucacagagugaccuu

SEQ ID NO: 1041012 - RNA, 19 nt, Artificial Sequence
  Description of Artificial Sequence: Synthetic oligonucleotide
  Sense strand starting at position 1058 of SEQ ID NO: 914930
aggucacucugugagguua

SEQ ID NO: 1041013 - RNA, 19 nt, Artificial Sequence
  Description of Artificial Sequence: Synthetic oligonucleotide
  Antisense strand to SEQ ID NO: 1041012
uaaccucacagagugaccu

SEQ ID NO: 1041014 - RNA, 19 nt, Artificial Sequence
  Description of Artificial Sequence: Synthetic oligonucleotide
  Sense strand starting at position 1151 of SEQ ID NO: 914930
ugugcaaaguuuggagagu

SEQ ID NO: 1041015 - RNA, 19 nt, Artificial Sequence
  Description of Artificial Sequence: Synthetic oligonucleotide
  Antisense strand to SEQ ID NO: 1041014
acucuccaaacuuugcaca

SEQ ID NO: 1041016 - RNA, 19 nt, Artificial Sequence
  Description of Artificial Sequence: Synthetic oligonucleotide
  Sense strand starting at position 1268 of SEQ ID NO: 914930
guugguagguccugcacaa

SEQ ID NO: 1041017 - RNA, 19 nt, Artificial Sequence
  Description of Artificial Sequence: Synthetic oligonucleotide
  Antisense strand to SEQ ID NO: 1041016
uugugcaggaccuaccaac

SEQ ID NO: 1041018 - RNA, 19 nt, Artificial Sequence
  Description of Artificial Sequence: Synthetic oligonucleotide
  Sense strand starting at position 1477 of SEQ ID NO: 914930
ccaggucucucggguggaa

SEQ ID NO: 1041019 - RNA, 19 nt, Artificial Sequence
  Description of Artificial Sequence: Synthetic oligonucleotide
  Antisense strand to SEQ ID NO: 1041018
uuccacccgagagaccugg

SEQ ID NO: 1041020 - RNA, 19 nt, Artificial Sequence
  Description of Artificial Sequence: Synthetic oligonucleotide
  Sense strand starting at position 1863 of SEQ ID NO: 914930
gucggcucuguagagacau

SEQ ID NO: 1041021 - RNA, 19 nt, Artificial Sequence
  Description of Artificial Sequence: Synthetic oligonucleotide
  Antisense strand to SEQ ID NO: 1041020
augucucuacagagccgac

SEQ ID NO: 1041022 - RNA, 19 nt, Artificial Sequence
  Description of Artificial Sequence: Synthetic oligonucleotide
  Sense strand starting at position 1936 of SEQ ID NO: 914930
gggagugucucucccuuau

SEQ ID NO: 1041023 - RNA, 19 nt, Artificial Sequence
  Description of Artificial Sequence: Synthetic oligonucleotide
  Antisense strand to SEQ ID NO: 1041022
auaagggagagacacuccc

SEQ ID NO: 1041024 - RNA, 19 nt, Artificial Sequence
  Description of Artificial Sequence: Synthetic oligonucleotide
  Sense strand starting at position 2211 of SEQ ID NO: 914930
uaacuuucugguuggcuga

SEQ ID NO: 1041025 - RNA, 19 nt, Artificial Sequence
  Description of Artificial Sequence: Synthetic oligonucleotide
  Antisense strand to SEQ ID NO: 1041024
ucagccaaccagaaaguua

SEQ ID NO: 1041026 - RNA, 19 nt, Artificial Sequence
  Description of Artificial Sequence: Synthetic oligonucleotide
  Sense strand starting at position 2330 of SEQ ID NO: 914930
ugcguaucgagcugggaga

SEQ ID NO: 1041027 - RNA, 19 nt, Artificial Sequence
  Description of Artificial Sequence: Synthetic oligonucleotide
  Antisense strand to SEQ ID NO: 1041026
ucucccagcucgauacgca

SEQ ID NO: 1041028 - RNA, 19 nt, Artificial Sequence
  Description of Artificial Sequence: Synthetic oligonucleotide
  Sense strand starting at position 2464 of SEQ ID NO: 914930
gugcgacgaacggguaaau

SEQ ID NO: 1041029 - RNA, 19 nt, Artificial Sequence
  Description of Artificial Sequence: Synthetic oligonucleotide
  Antisense strand to SEQ ID NO: 1041028
auuuacccguucgucgcac

SEQ ID NO: 1041030 - RNA, 19 nt, Artificial Sequence
  Description of Artificial Sequence: Synthetic oligonucleotide
  Sense strand starting at position 2573 of SEQ ID NO: 914930
gagagucgaggguggaaau

SEQ ID NO: 1041031 - RNA, 19 nt, Artificial Sequence
  Description of Artificial Sequence: Synthetic oligonucleotide
  Antisense strand to SEQ ID NO: 1041030
auuuccacccucgacucuc

SEQ ID NO: 1041032 - RNA, 19 nt, Artificial Sequence
  Description of Artificial Sequence: Synthetic oligonucleotide
  Sense strand starting at position 2864 of SEQ ID NO: 914930
gugcaugccuguuaauuac

SEQ ID NO: 1041033 - RNA, 19 nt, Artificial Sequence
  Description of Artificial Sequence: Synthetic oligonucleotide
  Antisense strand to SEQ ID NO: 1041032
guaauuaacaggcaugcac

SEQ ID NO: 1041034 - RNA, 19 nt, Artificial Sequence
  Description of Artificial Sequence: Synthetic oligonucleotide
  Sense strand starting at position 3101 of SEQ ID NO: 914930
gggccauuauaauaauaua

SEQ ID NO: 1041035 - RNA, 19 nt, Artificial Sequence
  Description of Artificial Sequence: Synthetic oligonucleotide
  Antisense strand to SEQ ID NO: 1041034
uauauuauuauaauggccc

SEQ ID NO: 1041036 - RNA, 19 nt, Artificial Sequence
  Description of Artificial Sequence: Synthetic oligonucleotide
  Sense strand starting at position 3140 of SEQ ID NO: 914930
ugaauaagugcucacaccu

SEQ ID NO: 1041037 - RNA, 19 nt, Artificial Sequence
  Description of Artificial Sequence: Synthetic oligonucleotide
  Antisense strand to SEQ ID NO: 1041036
aggugugagcacuuauuca

SEQ ID NO: 1041038 - RNA, 19 nt, Artificial Sequence
  Description of Artificial Sequence: Synthetic oligonucleotide
  Sense strand starting at position 3480 of SEQ ID NO: 914930
gguuucagagaagguucua

SEQ ID NO: 1041039 - RNA, 19 nt, Artificial Sequence
  Description of Artificial Sequence: Synthetic oligonucleotide
  Antisense strand to SEQ ID NO: 1041038
uagaaccuucucugaaacc

SEQ ID NO: 1041040 - RNA, 19 nt, Artificial Sequence
  Description of Artificial Sequence: Synthetic oligonucleotide
  Sense strand starting at position 3485 of SEQ ID NO: 914930
cagagaagguucuaguacu

SEQ ID NO: 1041041 - RNA, 19 nt, Artificial Sequence
  Description of Artificial Sequence: Synthetic oligonucleotide
  Antisense strand to SEQ ID NO: 1041040
aguacuagaaccuucucug

SEQ ID NO: 1041042 - RNA, 19 nt, Artificial Sequence
  Description of Artificial Sequence: Synthetic oligonucleotide
  Sense strand starting at position 3551 of SEQ ID NO: 914930
ugagcugucagcuaggaau

SEQ ID NO: 1041043 - RNA, 19 nt, Artificial Sequence
  Description of Artificial Sequence: Synthetic oligonucleotide
  Antisense strand to SEQ ID NO: 1041042
auuccuagcugacagcuca

SEQ ID NO: 1041044 - RNA, 19 nt, Artificial Sequence
  Description of Artificial Sequence: Synthetic oligonucleotide
  Sense strand starting at position 3553 of SEQ ID NO: 914930
agcugucagcuaggaauaa

SEQ ID NO: 1041045 - RNA, 19 nt, Artificial Sequence
  Description of Artificial Sequence: Synthetic oligonucleotide
  Antisense strand to SEQ ID NO: 1041044
uuauuccuagcugacagcu

SEQ ID NO: 1041046 - RNA, 19 nt, Artificial Sequence
  Description of Artificial Sequence: Synthetic oligonucleotide
  Sense strand starting at position 3554 of SEQ ID NO: 914930
gcugucagcuaggaauaag

SEQ ID NO: 1041047 - RNA, 19 nt, Artificial Sequence
  Description of Artificial Sequence: Synthetic oligonucleotide
  Antisense strand to SEQ ID NO: 1041046
cuuauuccuagcugacagc

SEQ ID NO: 1041048 - RNA, 19 nt, Artificial Sequence
  Description of Artificial Sequence: Synthetic oligonucleotide
  Sense strand starting at position 3574 of SEQ ID NO: 914930
gagucuggcugguugcaaa

SEQ ID NO: 1041049 - RNA, 19 nt, Artificial Sequence
  Description of Artificial Sequence: Synthetic oligonucleotide
  Antisense strand to SEQ ID NO: 1041048
uuugcaaccagccagacuc

SEQ ID NO: 1041050 - RNA, 19 nt, Artificial Sequence
  Description of Artificial Sequence: Synthetic oligonucleotide
  Sense strand starting at position 3616 of SEQ ID NO: 914930
ugacucugaguguggcaau

SEQ ID NO: 1041051 - RNA, 19 nt, Artificial Sequence
  Description of Artificial Sequence: Synthetic oligonucleotide
  Antisense strand to SEQ ID NO: 1041050
auugccacacucagaguca

SEQ ID NO: 1041052 - RNA, 19 nt, Artificial Sequence
  Description of Artificial Sequence: Synthetic oligonucleotide
  Sense strand starting at position 3617 of SEQ ID NO: 914930
gacucugaguguggcaaua

SEQ ID NO: 1041053 - RNA, 19 nt, Artificial Sequence
  Description of Artificial Sequence: Synthetic oligonucleotide
  Antisense strand to SEQ ID NO: 1041052
uauugccacacucagaguc

SEQ ID NO: 1041054 - RNA, 19 nt, Artificial Sequence
  Description of Artificial Sequence: Synthetic oligonucleotide
  Sense strand starting at position 3619 of SEQ ID NO: 914930
cucugaguguggcaauaac

SEQ ID NO: 1041055 - RNA, 19 nt, Artificial Sequence
  Description of Artificial Sequence: Synthetic oligonucleotide
  Antisense strand to SEQ ID NO: 1041054
guuauugccacacucagag

SEQ ID NO: 1041056 - RNA, 19 nt, Artificial Sequence
  Description of Artificial Sequence: Synthetic oligonucleotide
  Sense strand starting at position 3781 of SEQ ID NO: 914930
agucaucaguacugggagu

SEQ ID NO: 1041057 - RNA, 19 nt, Artificial Sequence
  Description of Artificial Sequence: Synthetic oligonucleotide
  Antisense strand to SEQ ID NO: 1041056
acucccaguacugaugacu

SEQ ID NO: 1041058 - RNA, 19 nt, Artificial Sequence
  Description of Artificial Sequence: Synthetic oligonucleotide
  Sense strand starting at position 3783 of SEQ ID NO: 914930
ucaucaguacugggaguga

SEQ ID NO: 1041059 - RNA, 19 nt, Artificial Sequence
  Description of Artificial Sequence: Synthetic oligonucleotide
  Antisense strand to SEQ ID NO: 1041058
ucacucccaguacugauga

SEQ ID NO: 1041060 - RNA, 19 nt, Artificial Sequence
  Description of Artificial Sequence: Synthetic oligonucleotide
  Sense strand starting at position 3957 of SEQ ID NO: 914930
uccaguaacucagaguaaa

SEQ ID NO: 1041061 - RNA, 19 nt, Artificial Sequence
  Description of Artificial Sequence: Synthetic oligonucleotide
  Antisense strand to SEQ ID NO: 1041060
uuuacucugaguuacugga

SEQ ID NO: 1041062 - RNA, 19 nt, Artificial Sequence
  Description of Artificial Sequence: Synthetic oligonucleotide
  Sense strand starting at position 24 of SEQ ID NO: 914931
gacaguaccugcuaagaau

SEQ ID NO: 1041063 - RNA, 19 nt, Artificial Sequence
  Description of Artificial Sequence: Synthetic oligonucleotide
  Antisense strand to SEQ ID NO: 1041062
auucuuagcagguacuguc

SEQ ID NO: 1041064 - RNA, 19 nt, Artificial Sequence
  Description of Artificial Sequence: Synthetic oligonucleotide
  Sense strand starting at position 36 of SEQ ID NO: 914931
uaagaauuagguugucuuc

SEQ ID NO: 1041065 - RNA, 19 nt, Artificial Sequence
  Description of Artificial Sequence: Synthetic oligonucleotide
  Antisense strand to SEQ ID NO: 1041064
gaagacaaccuaauucuua

SEQ ID NO: 1041066 - RNA, 19 nt, Artificial Sequence
  Description of Artificial Sequence: Synthetic oligonucleotide
  Sense strand starting at position 56 of SEQ ID NO: 914931
cccucaucugucuguaguu

SEQ ID NO: 1041067 - RNA, 19 nt, Artificial Sequence
  Description of Artificial Sequence: Synthetic oligonucleotide
  Antisense strand to SEQ ID NO: 1041066
aacuacagacagaugaggg

SEQ ID NO: 1041068 - RNA, 19 nt, Artificial Sequence
  Description of Artificial Sequence: Synthetic oligonucleotide
  Sense strand starting at position 57 of SEQ ID NO: 914931
ccucaucugucuguaguuu

SEQ ID NO: 1041069 - RNA, 19 nt, Artificial Sequence
  Description of Artificial Sequence: Synthetic oligonucleotide
  Antisense strand to SEQ ID NO: 1041068
aaacuacagacagaugagg

SEQ ID NO: 1041070 - RNA, 19 nt, Artificial Sequence
  Description of Artificial Sequence: Synthetic oligonucleotide
  Sense strand starting at position 72 of SEQ ID NO: 914931
guuuguacuucguccuaau

SEQ ID NO: 1041071 - RNA, 19 nt, Artificial Sequence
  Description of Artificial Sequence: Synthetic oligonucleotide
  Antisense strand to SEQ ID NO: 1041070
auuaggacgaaguacaaac

SEQ ID NO: 1041072 - RNA, 19 nt, Artificial Sequence
  Description of Artificial Sequence: Synthetic oligonucleotide
  Sense strand starting at position 128 of SEQ ID NO: 914931
gguuucugagcacgccaua

SEQ ID NO: 1041073 - RNA, 19 nt, Artificial Sequence
  Description of Artificial Sequence: Synthetic oligonucleotide
  Antisense strand to SEQ ID NO: 1041072
uauggcgugcucagaaacc

SEQ ID NO: 1041074 - RNA, 19 nt, Artificial Sequence
  Description of Artificial Sequence: Synthetic oligonucleotide
  Sense strand starting at position 131 of SEQ ID NO: 914931
uucugagcacgccauauau

SEQ ID NO: 1041075 - RNA, 19 nt, Artificial Sequence
  Description of Artificial Sequence: Synthetic oligonucleotide
  Antisense strand to SEQ ID NO: 1041074
auauauggcgugcucagaa

SEQ ID NO: 1041076 - RNA, 19 nt, Artificial Sequence
  Description of Artificial Sequence: Synthetic oligonucleotide
  Sense strand starting at position 158 of SEQ ID NO: 914931
agguaucaccacugcuuaa

SEQ ID NO: 1041077 - RNA, 19 nt, Artificial Sequence
  Description of Artificial Sequence: Synthetic oligonucleotide
  Antisense strand to SEQ ID NO: 1041076
uuaagcaguggugauaccu

SEQ ID NO: 1041078 - RNA, 19 nt, Artificial Sequence
  Description of Artificial Sequence: Synthetic oligonucleotide
  Sense strand starting at position 181 of SEQ ID NO: 914931
cccaaauagucccuugguu

SEQ ID NO: 1041079 - RNA, 19 nt, Artificial Sequence
  Description of Artificial Sequence: Synthetic oligonucleotide
  Antisense strand to SEQ ID NO: 1041078
aaccaagggacuauuuggg

SEQ ID NO: 1041080 - RNA, 19 nt, Artificial Sequence
  Description of Artificial Sequence: Synthetic oligonucleotide
  Sense strand starting at position 209 of SEQ ID NO: 914931
gcaauagagucaugagcaa

SEQ ID NO: 1041081 - RNA, 19 nt, Artificial Sequence
  Description of Artificial Sequence: Synthetic oligonucleotide
  Antisense strand to SEQ ID NO: 1041080
uugcucaugacucuauugc

SEQ ID NO: 1041082 - RNA, 19 nt, Artificial Sequence
  Description of Artificial Sequence: Synthetic oligonucleotide
  Sense strand starting at position 265 of SEQ ID NO: 914931
agcuccuccugagcagaau

SEQ ID NO: 1041083 - RNA, 19 nt, Artificial Sequence
  Description of Artificial Sequence: Synthetic oligonucleotide
  Antisense strand to SEQ ID NO: 1041082
auucugcucaggaggagcu

SEQ ID NO: 1041084 - RNA, 19 nt, Artificial Sequence
  Description of Artificial Sequence: Synthetic oligonucleotide
  Sense strand starting at position 349 of SEQ ID NO: 914931
agaauuauguaguuaaccu

SEQ ID NO: 1041085 - RNA, 19 nt, Artificial Sequence
  Description of Artificial Sequence: Synthetic oligonucleotide
  Antisense strand to SEQ ID NO: 1041084
agguuaacuacauaauucu

SEQ ID NO: 1041086 - RNA, 19 nt, Artificial Sequence
  Description of Artificial Sequence: Synthetic oligonucleotide
  Sense strand starting at position 353 of SEQ ID NO: 914931
uuauguaguuaaccuguca

SEQ ID NO: 1041087 - RNA, 19 nt, Artificial Sequence
  Description of Artificial Sequence: Synthetic oligonucleotide
  Antisense strand to SEQ ID NO: 1041086
ugacagguuaacuacauaa

SEQ ID NO: 1041088 - RNA, 19 nt, Artificial Sequence
  Description of Artificial Sequence: Synthetic oligonucleotide
  Sense strand starting at position 358 of SEQ ID NO: 914931
uaguuaaccugucauggga

SEQ ID NO: 1041089 - RNA, 19 nt, Artificial Sequence
  Description of Artificial Sequence: Synthetic oligonucleotide
  Antisense strand to SEQ ID NO: 1041088
ucccaugacagguuaacua

SEQ ID NO: 1041090 - RNA, 19 nt, Artificial Sequence
  Description of Artificial Sequence: Synthetic oligonucleotide
  Sense strand starting at position 360 of SEQ ID NO: 914931
guuaaccugucaugggauu

SEQ ID NO: 1041091 - RNA, 19 nt, Artificial Sequence
  Description of Artificial Sequence: Synthetic oligonucleotide
  Antisense strand to SEQ ID NO: 1041090
aaucccaugacagguuaac

SEQ ID NO: 1041092 - RNA, 19 nt, Artificial Sequence
  Description of Artificial Sequence: Synthetic oligonucleotide
  Sense strand starting at position 419 of SEQ ID NO: 914931
gagccaaaguaucuuaaag

SEQ ID NO: 1041093 - RNA, 19 nt, Artificial Sequence
  Description of Artificial Sequence: Synthetic oligonucleotide
  Antisense strand to SEQ ID NO: 1041092
cuuuaagauacuuuggcuc

SEQ ID NO: 1041094 - RNA, 19 nt, Artificial Sequence
  Description of Artificial Sequence: Synthetic oligonucleotide
  Sense strand starting at position 421 of SEQ ID NO: 914931
gccaaaguaucuuaaagua

SEQ ID NO: 1041095 - RNA, 19 nt, Artificial Sequence
  Description of Artificial Sequence: Synthetic oligonucleotide
  Antisense strand to SEQ ID NO: 1041094
uacuuuaagauacuuuggc

SEQ ID NO: 1041096 - RNA, 19 nt, Artificial Sequence
  Description of Artificial Sequence: Synthetic oligonucleotide
  Sense strand starting at position 529 of SEQ ID NO: 914931
aaagaucaggccugaagca

SEQ ID NO: 1041097 - RNA, 19 nt, Artificial Sequence
  Description of Artificial Sequence: Synthetic oligonucleotide
  Antisense strand to SEQ ID NO: 1041096
ugcuucaggccugaucuuu

SEQ ID NO: 1041098 - RNA, 19 nt, Artificial Sequence
  Description of Artificial Sequence: Synthetic oligonucleotide
  Sense strand starting at position 608 of SEQ ID NO: 914931
ugacaacuaucugacgaaa

SEQ ID NO: 1041099 - RNA, 19 nt, Artificial Sequence
  Description of Artificial Sequence: Synthetic oligonucleotide
  Antisense strand to SEQ ID NO: 1041098
uuucgucagauaguuguca

SEQ ID NO: 1041100 - RNA, 19 nt, Artificial Sequence
  Description of Artificial Sequence: Synthetic oligonucleotide
  Sense strand starting at position 610 of SEQ ID NO: 914931
acaacuaucugacgaaacu

SEQ ID NO: 1041101 - RNA, 19 nt, Artificial Sequence
  Description of Artificial Sequence: Synthetic oligonucleotide
  Antisense strand to SEQ ID NO: 1041100
aguuucgucagauaguugu

SEQ ID NO: 1041102 - RNA, 19 nt, Artificial Sequence
  Description of Artificial Sequence: Synthetic oligonucleotide
  Sense strand starting at position 670 of SEQ ID NO: 914931
cugagaucuuguuauuauu

SEQ ID NO: 1041103 - RNA, 19 nt, Artificial Sequence
  Description of Artificial Sequence: Synthetic oligonucleotide
  Antisense strand to SEQ ID NO: 1041102
aauaauaacaagaucucag

SEQ ID NO: 1041104 - RNA, 19 nt, Artificial Sequence
  Description of Artificial Sequence: Synthetic oligonucleotide
  Sense strand starting at position 954 of SEQ ID NO: 914931
guuccuaucuuccuguauu

SEQ ID NO: 1041105 - RNA, 19 nt, Artificial Sequence
  Description of Artificial Sequence: Synthetic oligonucleotide
  Antisense strand to SEQ ID NO: 1041104
aauacaggaagauaggaac

SEQ ID NO: 1041106 - RNA, 19 nt, Artificial Sequence
  Description of Artificial Sequence: Synthetic oligonucleotide
  Sense strand starting at position 995 of SEQ ID NO: 914931
gcauaucuaucugcugaag

SEQ ID NO: 1041107 - RNA, 19 nt, Artificial Sequence
  Description of Artificial Sequence: Synthetic oligonucleotide
  Antisense strand to SEQ ID NO: 1041106
cuucagcagauagauaugc

SEQ ID NO: 1041108 - RNA, 19 nt, Artificial Sequence
  Description of Artificial Sequence: Synthetic oligonucleotide
  Sense strand starting at position 997 of SEQ ID NO: 914931
auaucuaucugcugaaguc

SEQ ID NO: 1041109 - RNA, 19 nt, Artificial Sequence
  Description of Artificial Sequence: Synthetic oligonucleotide
  Antisense strand to SEQ ID NO: 1041108
gacuucagcagauagauau

SEQ ID NO: 1041110 - RNA, 19 nt, Artificial Sequence
  Description of Artificial Sequence: Synthetic oligonucleotide
  Sense strand starting at position 1115 of SEQ ID NO: 914931
uuggauucgucccucauuu

SEQ ID NO: 1041111 - RNA, 19 nt, Artificial Sequence
  Description of Artificial Sequence: Synthetic oligonucleotide
  Antisense strand to SEQ ID NO: 1041110
aaaugagggacgaauccaa

SEQ ID NO: 1041112 - RNA, 19 nt, Artificial Sequence
  Description of Artificial Sequence: Synthetic oligonucleotide
  Sense strand starting at position 1396 of SEQ ID NO: 914931
augaaaugguguucucucu

SEQ ID NO: 1041113 - RNA, 19 nt, Artificial Sequence
  Description of Artificial Sequence: Synthetic oligonucleotide
  Antisense strand to SEQ ID NO: 1041112
agagagaacaccauuucau

SEQ ID NO: 1041114 - RNA, 19 nt, Artificial Sequence
  Description of Artificial Sequence: Synthetic oligonucleotide
  Sense strand starting at position 1458 of SEQ ID NO: 914931
uugagaaccaaacguguuu

SEQ ID NO: 1041115 - RNA, 19 nt, Artificial Sequence
  Description of Artificial Sequence: Synthetic oligonucleotide
  Antisense strand to SEQ ID NO: 1041114
aaacacguuugguucucaa

SEQ ID NO: 1041116 - RNA, 19 nt, Artificial Sequence
  Description of Artificial Sequence: Synthetic oligonucleotide
  Sense strand starting at position 1465 of SEQ ID NO: 914931
ccaaacguguuucuccaaa

SEQ ID NO: 1041117 - RNA, 19 nt, Artificial Sequence
  Description of Artificial Sequence: Synthetic oligonucleotide
  Antisense strand to SEQ ID NO: 1041116
uuuggagaaacacguuugg

SEQ ID NO: 1041118 - RNA, 19 nt, Artificial Sequence
  Description of Artificial Sequence: Synthetic oligonucleotide
  Sense strand starting at position 2811 of SEQ ID NO: 914931
gcgccuaagccucagcauu

SEQ ID NO: 1041119 - RNA, 19 nt, Artificial Sequence
  Description of Artificial Sequence: Synthetic oligonucleotide
  Antisense strand to SEQ ID NO: 1041118
aaugcugaggcuuaggcgc

SEQ ID NO: 1041120 - RNA, 19 nt, Artificial Sequence
  Description of Artificial Sequence: Synthetic oligonucleotide
  Sense strand starting at position 2888 of SEQ ID NO: 914931
ggcugucauuugugacucu

SEQ ID NO: 1041121 - RNA, 19 nt, Artificial Sequence
  Description of Artificial Sequence: Synthetic oligonucleotide
  Antisense strand to SEQ ID NO: 1041120
agagucacaaaugacagcc

SEQ ID NO: 1041122 - RNA, 19 nt, Artificial Sequence
  Description of Artificial Sequence: Synthetic oligonucleotide
  Sense strand starting at position 2922 of SEQ ID NO: 914931
ggaggcggauccuaaagau

SEQ ID NO: 1041123 - RNA, 19 nt, Artificial Sequence
  Description of Artificial Sequence: Synthetic oligonucleotide
  Antisense strand to SEQ ID NO: 1041122
aucuuuaggauccgccucc

SEQ ID NO: 1041124 - RNA, 19 nt, Artificial Sequence
  Description of Artificial Sequence: Synthetic oligonucleotide
  Sense strand starting at position 2980 of SEQ ID NO: 914931
uccagaaauugguuucucu

SEQ ID NO: 1041125 - RNA, 19 nt, Artificial Sequence
  Description of Artificial Sequence: Synthetic oligonucleotide
  Antisense strand to SEQ ID NO: 1041124
agagaaaccaauuucugga

SEQ ID NO: 1041126 - RNA, 19 nt, Artificial Sequence
  Description of Artificial Sequence: Synthetic oligonucleotide
  Sense strand starting at position 3061 of SEQ ID NO: 914931
ugaggcauuuauggccaua

SEQ ID NO: 1041127 - RNA, 19 nt, Artificial Sequence
  Description of Artificial Sequence: Synthetic oligonucleotide
  Antisense strand to SEQ ID NO: 1041126
uauggccauaaaugccuca

SEQ ID NO: 1041128 - RNA, 19 nt, Artificial Sequence
  Description of Artificial Sequence: Synthetic oligonucleotide
  Sense strand starting at position 3083 of SEQ ID NO: 914931
cagagugacaguggagaau

SEQ ID NO: 1041129 - RNA, 19 nt, Artificial Sequence
  Description of Artificial Sequence: Synthetic oligonucleotide
  Antisense strand to SEQ ID NO: 1041128
auucuccacugucacucug

SEQ ID NO: 1041130 - RNA, 19 nt, Artificial Sequence
  Description of Artificial Sequence: Synthetic oligonucleotide
  Sense strand starting at position 3638 of SEQ ID NO: 914931
aguugugggagaggugaau

SEQ ID NO: 1041131 - RNA, 19 nt, Artificial Sequence
  Description of Artificial Sequence: Synthetic oligonucleotide
  Antisense strand to SEQ ID NO: 1041130
auucaccucucccacaacu

SEQ ID NO: 1041132 - RNA, 19 nt, Artificial Sequence
  Description of Artificial Sequence: Synthetic oligonucleotide
  Sense strand starting at position 3649 of SEQ ID NO: 914931
aggugaauugucugcacag

SEQ ID NO: 1041133 - RNA, 19 nt, Artificial Sequence
  Description of Artificial Sequence: Synthetic oligonucleotide
  Antisense strand to SEQ ID NO: 1041132
cugugcagacaauucaccu

SEQ ID NO: 1041134 - RNA, 19 nt, Artificial Sequence
  Description of Artificial Sequence: Synthetic oligonucleotide
  Sense strand starting at position 3650 of SEQ ID NO: 914931
ggugaauugucugcacagc

SEQ ID NO: 1041135 - RNA, 19 nt, Artificial Sequence
  Description of Artificial Sequence: Synthetic oligonucleotide
  Antisense strand to SEQ ID NO: 1041134
gcugugcagacaauucacc

SEQ ID NO: 1041136 - RNA, 19 nt, Artificial Sequence
  Description of Artificial Sequence: Synthetic oligonucleotide
  Sense strand starting at position 3651 of SEQ ID NO: 914931
gugaauugucugcacagca

SEQ ID NO: 1041137 - RNA, 19 nt, Artificial Sequence
  Description of Artificial Sequence: Synthetic oligonucleotide
  Antisense strand to SEQ ID NO: 1041136
ugcugugcagacaauucac

SEQ ID NO: 1041138 - RNA, 19 nt, Artificial Sequence
  Description of Artificial Sequence: Synthetic oligonucleotide
  Sense strand starting at position 3678 of SEQ ID NO: 914931
gagagaaauucuugaaggg

SEQ ID NO: 1041139 - RNA, 19 nt, Artificial Sequence
  Description of Artificial Sequence: Synthetic oligonucleotide
  Antisense strand to SEQ ID NO: 1041138
cccuucaagaauuucucuc

SEQ ID NO: 1041140 - RNA, 19 nt, Artificial Sequence
  Description of Artificial Sequence: Synthetic oligonucleotide
  Sense strand starting at position 3700 of SEQ ID NO: 914931
guagguaugucagggaaug

SEQ ID NO: 1041141 - RNA, 19 nt, Artificial Sequence
  Description of Artificial Sequence: Synthetic oligonucleotide
  Antisense strand to SEQ ID NO: 1041140
cauucccugacauaccuac

SEQ ID NO: 1041142 - RNA, 19 nt, Artificial Sequence
  Description of Artificial Sequence: Synthetic oligonucleotide
  Sense strand starting at position 57 of SEQ ID NO: 914932
aaagaucaggccugaagca

SEQ ID NO: 1041143 - RNA, 19 nt, Artificial Sequence
  Description of Artificial Sequence: Synthetic oligonucleotide
  Antisense strand to SEQ ID NO: 1041142
ugcuucaggccugaucuuu

SEQ ID NO: 1041144 - RNA, 19 nt, Artificial Sequence
  Description of Artificial Sequence: Synthetic oligonucleotide
  Sense strand starting at position 136 of SEQ ID NO: 914932
ugacaacuaucugacgaaa

SEQ ID NO: 1041145 - RNA, 19 nt, Artificial Sequence
  Description of Artificial Sequence: Synthetic oligonucleotide
  Antisense strand to SEQ ID NO: 1041144
uuucgucagauaguuguca

SEQ ID NO: 1041146 - RNA, 19 nt, Artificial Sequence
  Description of Artificial Sequence: Synthetic oligonucleotide
  Sense strand starting at position 138 of SEQ ID NO: 914932
acaacuaucugacgaaacu

SEQ ID NO: 1041147 - RNA, 19 nt, Artificial Sequence
  Description of Artificial Sequence: Synthetic oligonucleotide
  Antisense strand to SEQ ID NO: 1041146
aguuucgucagauaguugu

SEQ ID NO: 1041148 - RNA, 19 nt, Artificial Sequence
  Description of Artificial Sequence: Synthetic oligonucleotide
  Sense strand starting at position 198 of SEQ ID NO: 914932
cugagaucuuguuauuauu

SEQ ID NO: 1041149 - RNA, 19 nt, Artificial Sequence
  Description of Artificial Sequence: Synthetic oligonucleotide
  Antisense strand to SEQ ID NO: 1041148
aauaauaacaagaucucag

SEQ ID NO: 1041150 - RNA, 19 nt, Artificial Sequence
  Description of Artificial Sequence: Synthetic oligonucleotide
  Sense strand starting at position 482 of SEQ ID NO: 914932
guuccuaucuuccuguauu

SEQ ID NO: 1041151 - RNA, 19 nt, Artificial Sequence
  Description of Artificial Sequence: Synthetic oligonucleotide
  Antisense strand to SEQ ID NO: 1041150
aauacaggaagauaggaac

SEQ ID NO: 1041152 - RNA, 19 nt, Artificial Sequence
  Description of Artificial Sequence: Synthetic oligonucleotide
  Sense strand starting at position 523 of SEQ ID NO: 914932
gcauaucuaucugcugaag

SEQ ID NO: 1041153 - RNA, 19 nt, Artificial Sequence
  Description of Artificial Sequence: Synthetic oligonucleotide
  Antisense strand to SEQ ID NO: 1041152
cuucagcagauagauaugc

SEQ ID NO: 1041154 - RNA, 19 nt, Artificial Sequence
  Description of Artificial Sequence: Synthetic oligonucleotide
  Sense strand starting at position 525 of SEQ ID NO: 914932
auaucuaucugcugaaguc

SEQ ID NO: 1041155 - RNA, 19 nt, Artificial Sequence
  Description of Artificial Sequence: Synthetic oligonucleotide
  Antisense strand to SEQ ID NO: 1041154
gacuucagcagauagauau

SEQ ID NO: 1041156 - RNA, 19 nt, Artificial Sequence
  Description of Artificial Sequence: Synthetic oligonucleotide
  Sense strand starting at position 643 of SEQ ID NO: 914932
uuggauucgucccucauuu

SEQ ID NO: 1041157 - RNA, 19 nt, Artificial Sequence
  Description of Artificial Sequence: Synthetic oligonucleotide
  Antisense strand to SEQ ID NO: 1041156
aaaugagggacgaauccaa

SEQ ID NO: 1041158 - RNA, 19 nt, Artificial Sequence
  Description of Artificial Sequence: Synthetic oligonucleotide
  Sense strand starting at position 924 of SEQ ID NO: 914932
augaaaugguguucucucu

SEQ ID NO: 1041159 - RNA, 19 nt, Artificial Sequence
  Description of Artificial Sequence: Synthetic oligonucleotide
  Antisense strand to SEQ ID NO: 1041158
agagagaacaccauuucau

SEQ ID NO: 1041160 - RNA, 19 nt, Artificial Sequence
  Description of Artificial Sequence: Synthetic oligonucleotide
  Sense strand starting at position 986 of SEQ ID NO: 914932
uugagaaccaaacguguuu

SEQ ID NO: 1041161 - RNA, 19 nt, Artificial Sequence
  Description of Artificial Sequence: Synthetic oligonucleotide
  Antisense strand to SEQ ID NO: 1041160
aaacacguuugguucucaa

SEQ ID NO: 1041162 - RNA, 19 nt, Artificial Sequence
  Description of Artificial Sequence: Synthetic oligonucleotide
  Sense strand starting at position 993 of SEQ ID NO: 914932
ccaaacguguuucuccaaa

SEQ ID NO: 1041163 - RNA, 19 nt, Artificial Sequence
  Description of Artificial Sequence: Synthetic oligonucleotide
  Antisense strand to SEQ ID NO: 1041162
uuuggagaaacacguuugg

SEQ ID NO: 1041164 - RNA, 19 nt, Artificial Sequence
  Description of Artificial Sequence: Synthetic oligonucleotide
  Sense strand starting at position 2339 of SEQ ID NO: 914932
gcgccuaagccucagcauu

SEQ ID NO: 1041165 - RNA, 19 nt, Artificial Sequence
  Description of Artificial Sequence: Synthetic oligonucleotide
  Antisense strand to SEQ ID NO: 1041164
aaugcugaggcuuaggcgc

SEQ ID NO: 1041166 - RNA, 19 nt, Artificial Sequence
  Description of Artificial Sequence: Synthetic oligonucleotide
  Sense strand starting at position 2416 of SEQ ID NO: 914932
ggcugucauuugugacucu

SEQ ID NO: 1041167 - RNA, 19 nt, Artificial Sequence
  Description of Artificial Sequence: Synthetic oligonucleotide
  Antisense strand to SEQ ID NO: 1041166
agagucacaaaugacagcc

SEQ ID NO: 1041168 - RNA, 19 nt, Artificial Sequence
  Description of Artificial Sequence: Synthetic oligonucleotide
  Sense strand starting at position 2450 of SEQ ID NO: 914932
ggaggcggauccuaaagau

SEQ ID NO: 1041169 - RNA, 19 nt, Artificial Sequence
  Description of Artificial Sequence: Synthetic oligonucleotide
  Antisense strand to SEQ ID NO: 1041168
aucuuuaggauccgccucc

SEQ ID NO: 1041170 - RNA, 19 nt, Artificial Sequence
  Description of Artificial Sequence: Synthetic oligonucleotide
  Sense strand starting at position 2508 of SEQ ID NO: 914932
uccagaaauugguuucucu

SEQ ID NO: 1041171 - RNA, 19 nt, Artificial Sequence
  Description of Artificial Sequence: Synthetic oligonucleotide
  Antisense strand to SEQ ID NO: 1041170
agagaaaccaauuucugga

SEQ ID NO: 1041172 - RNA, 19 nt, Artificial Sequence
  Description of Artificial Sequence: Synthetic oligonucleotide
  Sense strand starting at position 2589 of SEQ ID NO: 914932
ugaggcauuuauggccaua

SEQ ID NO: 1041173 - RNA, 19 nt, Artificial Sequence
  Description of Artificial Sequence: Synthetic oligonucleotide
  Antisense strand to SEQ ID NO: 1041172
uauggccauaaaugccuca

SEQ ID NO: 1041174 - RNA, 19 nt, Artificial Sequence
  Description of Artificial Sequence: Synthetic oligonucleotide
  Sense strand starting at position 2611 of SEQ ID NO: 914932
cagagugacaguggagaau

SEQ ID NO: 1041175 - RNA, 19 nt, Artificial Sequence
  Description of Artificial Sequence: Synthetic oligonucleotide
  Antisense strand to SEQ ID NO: 1041174
auucuccacugucacucug

SEQ ID NO: 1041176 - RNA, 19 nt, Artificial Sequence
  Description of Artificial Sequence: Synthetic oligonucleotide
  Sense strand starting at position 3166 of SEQ ID NO: 914932
aguugugggagaggugaau

SEQ ID NO: 1041177 - RNA, 19 nt, Artificial Sequence
  Description of Artificial Sequence: Synthetic oligonucleotide
  Antisense strand to SEQ ID NO: 1041176
auucaccucucccacaacu

SEQ ID NO: 1041178 - RNA, 19 nt, Artificial Sequence
  Description of Artificial Sequence: Synthetic oligonucleotide
  Sense strand starting at position 3177 of SEQ ID NO: 914932
aggugaauugucugcacag

SEQ ID NO: 1041179 - RNA, 19 nt, Artificial Sequence
  Description of Artificial Sequence: Synthetic oligonucleotide
  Antisense strand to SEQ ID NO: 1041178
cugugcagacaauucaccu

SEQ ID NO: 1041180 - RNA, 19 nt, Artificial Sequence
  Description of Artificial Sequence: Synthetic oligonucleotide
  Sense strand starting at position 3178 of SEQ ID NO: 914932
ggugaauugucugcacagc

SEQ ID NO: 1041181 - RNA, 19 nt, Artificial Sequence
  Description of Artificial Sequence: Synthetic oligonucleotide
  Antisense strand to SEQ ID NO: 1041180
gcugugcagacaauucacc

SEQ ID NO: 1041182 - RNA, 19 nt, Artificial Sequence
  Description of Artificial Sequence: Synthetic oligonucleotide
  Sense strand starting at position 3179 of SEQ ID NO: 914932
gugaauugucugcacagca

SEQ ID NO: 1041183 - RNA, 19 nt, Artificial Sequence
  Description of Artificial Sequence: Synthetic oligonucleotide
  Antisense strand to SEQ ID NO: 1041182
ugcugugcagacaauucac

SEQ ID NO: 1041184 - RNA, 19 nt, Artificial Sequence
  Description of Artificial Sequence: Synthetic oligonucleotide
  Sense strand starting at position 3206 of SEQ ID NO: 914932
gagagaaauucuugaaggg

SEQ ID NO: 1041185 - RNA, 19 nt, Artificial Sequence
  Description of Artificial Sequence: Synthetic oligonucleotide
  Antisense strand to SEQ ID NO: 1041184
cccuucaagaauuucucuc

SEQ ID NO: 1041186 - RNA, 19 nt, Artificial Sequence
  Description of Artificial Sequence: Synthetic oligonucleotide
  Sense strand starting at position 3228 of SEQ ID NO: 914932
guagguaugucagggaaug

SEQ ID NO: 1041187 - RNA, 19 nt, Artificial Sequence
  Description of Artificial Sequence: Synthetic oligonucleotide
  Antisense strand to SEQ ID NO: 1041186
cauucccugacauaccuac

SEQ ID NO: 1041188 - RNA, 19 nt, Artificial Sequence
  Description of Artificial Sequence: Synthetic oligonucleotide
  Sense strand starting at position 3581 of SEQ ID NO: 914932
gguguaagucucuugcugu

SEQ ID NO: 1041189 - RNA, 19 nt, Artificial Sequence
  Description of Artificial Sequence: Synthetic oligonucleotide
  Antisense strand to SEQ ID NO: 1041188
acagcaagagacuuacacc

SEQ ID NO: 1041190 - RNA, 19 nt, Artificial Sequence
  Description of Artificial Sequence: Synthetic oligonucleotide
  Sense strand starting at position 3582 of SEQ ID NO: 914932
guguaagucucuugcuguu

SEQ ID NO: 1041191 - RNA, 19 nt, Artificial Sequence
  Description of Artificial Sequence: Synthetic oligonucleotide
  Antisense strand to SEQ ID NO: 1041190
aacagcaagagacuuacac

SEQ ID NO: 1041192 - RNA, 19 nt, Artificial Sequence
  Description of Artificial Sequence: Synthetic oligonucleotide
  Sense strand starting at position 3806 of SEQ ID NO: 914932
gggaacuauuaggaacuca

SEQ ID NO: 1041193 - RNA, 19 nt, Artificial Sequence
  Description of Artificial Sequence: Synthetic oligonucleotide
  Antisense strand to SEQ ID NO: 1041192
ugaguuccuaauaguuccc

SEQ ID NO: 1041194 - RNA, 19 nt, Artificial Sequence
  Description of Artificial Sequence: Synthetic oligonucleotide
  Sense strand starting at position 210 of SEQ ID NO: 914933
guuccuaucuuccuguauu

SEQ ID NO: 1041195 - RNA, 19 nt, Artificial Sequence
  Description of Artificial Sequence: Synthetic oligonucleotide
  Antisense strand to SEQ ID NO: 1041194
aauacaggaagauaggaac

SEQ ID NO: 1041196 - RNA, 19 nt, Artificial Sequence
  Description of Artificial Sequence: Synthetic oligonucleotide
  Sense strand starting at position 251 of SEQ ID NO: 914933
gcauaucuaucugcugaag

SEQ ID NO: 1041197 - RNA, 19 nt, Artificial Sequence
  Description of Artificial Sequence: Synthetic oligonucleotide
  Antisense strand to SEQ ID NO: 1041196
cuucagcagauagauaugc

SEQ ID NO: 1041198 - RNA, 19 nt, Artificial Sequence
  Description of Artificial Sequence: Synthetic oligonucleotide
  Sense strand starting at position 253 of SEQ ID NO: 914933
auaucuaucugcugaaguc

SEQ ID NO: 1041199 - RNA, 19 nt, Artificial Sequence
  Description of Artificial Sequence: Synthetic oligonucleotide
  Antisense strand to SEQ ID NO: 1041198
gacuucagcagauagauau

SEQ ID NO: 1041200 - RNA, 19 nt, Artificial Sequence
  Description of Artificial Sequence: Synthetic oligonucleotide
  Sense strand starting at position 371 of SEQ ID NO: 914933
uuggauucgucccucauuu

SEQ ID NO: 1041201 - RNA, 19 nt, Artificial Sequence
  Description of Artificial Sequence: Synthetic oligonucleotide
  Antisense strand to SEQ ID NO: 1041200
aaaugagggacgaauccaa

SEQ ID NO: 1041202 - RNA, 19 nt, Artificial Sequence
  Description of Artificial Sequence: Synthetic oligonucleotide
  Sense strand starting at position 652 of SEQ ID NO: 914933
augaaaugguguucucucu

SEQ ID NO: 1041203 - RNA, 19 nt, Artificial Sequence
  Description of Artificial Sequence: Synthetic oligonucleotide
  Antisense strand to SEQ ID NO: 1041202
agagagaacaccauuucau

SEQ ID NO: 1041204 - RNA, 19 nt, Artificial Sequence
  Description of Artificial Sequence: Synthetic oligonucleotide
  Sense strand starting at position 714 of SEQ ID NO: 914933
uugagaaccaaacguguuu

SEQ ID NO: 1041205 - RNA, 19 nt, Artificial Sequence
  Description of Artificial Sequence: Synthetic oligonucleotide
  Antisense strand to SEQ ID NO: 1041204
aaacacguuugguucucaa

SEQ ID NO: 1041206 - RNA, 19 nt, Artificial Sequence
  Description of Artificial Sequence: Synthetic oligonucleotide
  Sense strand starting at position 721 of SEQ ID NO: 914933
ccaaacguguuucuccaaa

SEQ ID NO: 1041207 - RNA, 19 nt, Artificial Sequence
  Description of Artificial Sequence: Synthetic oligonucleotide
  Antisense strand to SEQ ID NO: 1041206
uuuggagaaacacguuugg

SEQ ID NO: 1041208 - RNA, 19 nt, Artificial Sequence
  Description of Artificial Sequence: Synthetic oligonucleotide
  Sense strand starting at position 2067 of SEQ ID NO: 914933
gcgccuaagccucagcauu

SEQ ID NO: 1041209 - RNA, 19 nt, Artificial Sequence
  Description of Artificial Sequence: Synthetic oligonucleotide
  Antisense strand to SEQ ID NO: 1041208
aaugcugaggcuuaggcgc

SEQ ID NO: 1041210 - RNA, 19 nt, Artificial Sequence
  Description of Artificial Sequence: Synthetic oligonucleotide
  Sense strand starting at position 2144 of SEQ ID NO: 914933
ggcugucauuugugacucu

SEQ ID NO: 1041211 - RNA, 19 nt, Artificial Sequence
  Description of Artificial Sequence: Synthetic oligonucleotide
  Antisense strand to SEQ ID NO: 1041210
agagucacaaaugacagcc

SEQ ID NO: 1041212 - RNA, 19 nt, Artificial Sequence
  Description of Artificial Sequence: Synthetic oligonucleotide
  Sense strand starting at position 2178 of SEQ ID NO: 914933
ggaggcggauccuaaagau

SEQ ID NO: 1041213 - RNA, 19 nt, Artificial Sequence
  Description of Artificial Sequence: Synthetic oligonucleotide
  Antisense strand to SEQ ID NO: 1041212
aucuuuaggauccgccucc

SEQ ID NO: 1041214 - RNA, 19 nt, Artificial Sequence
  Description of Artificial Sequence: Synthetic oligonucleotide
  Sense strand starting at position 2236 of SEQ ID NO: 914933
uccagaaauugguuucucu

SEQ ID NO: 1041215 - RNA, 19 nt, Artificial Sequence
  Description of Artificial Sequence: Synthetic oligonucleotide
  Antisense strand to SEQ ID NO: 1041214
agagaaaccaauuucugga

SEQ ID NO: 1041216 - RNA, 19 nt, Artificial Sequence
  Description of Artificial Sequence: Synthetic oligonucleotide
  Sense strand starting at position 2317 of SEQ ID NO: 914933
ugaggcauuuauggccaua

SEQ ID NO: 1041217 - RNA, 19 nt, Artificial Sequence
  Description of Artificial Sequence: Synthetic oligonucleotide
  Antisense strand to SEQ ID NO: 1041216
uauggccauaaaugccuca

SEQ ID NO: 1041218 - RNA, 19 nt, Artificial Sequence
  Description of Artificial Sequence: Synthetic oligonucleotide
  Sense strand starting at position 2339 of SEQ ID NO: 914933
cagagugacaguggagaau

SEQ ID NO: 1041219 - RNA, 19 nt, Artificial Sequence
  Description of Artificial Sequence: Synthetic oligonucleotide
  Antisense strand to SEQ ID NO: 1041218
auucuccacugucacucug

SEQ ID NO: 1041220 - RNA, 19 nt, Artificial Sequence
  Description of Artificial Sequence: Synthetic oligonucleotide
  Sense strand starting at position 2894 of SEQ ID NO: 914933
aguugugggagaggugaau

SEQ ID NO: 1041221 - RNA, 19 nt, Artificial Sequence
  Description of Artificial Sequence: Synthetic oligonucleotide
  Antisense strand to SEQ ID NO: 1041220
auucaccucucccacaacu

SEQ ID NO: 1041222 - RNA, 19 nt, Artificial Sequence
  Description of Artificial Sequence: Synthetic oligonucleotide
  Sense strand starting at position 2905 of SEQ ID NO: 914933
aggugaauugucugcacag

SEQ ID NO: 1041223 - RNA, 19 nt, Artificial Sequence
  Description of Artificial Sequence: Synthetic oligonucleotide
  Antisense strand to SEQ ID NO: 1041222
cugugcagacaauucaccu

SEQ ID NO: 1041224 - RNA, 19 nt, Artificial Sequence
  Description of Artificial Sequence: Synthetic oligonucleotide
  Sense strand starting at position 2906 of SEQ ID NO: 914933
ggugaauugucugcacagc

SEQ ID NO: 1041225 - RNA, 19 nt, Artificial Sequence
  Description of Artificial Sequence: Synthetic oligonucleotide
  Antisense strand to SEQ ID NO: 1041224
gcugugcagacaauucacc

SEQ ID NO: 1041226 - RNA, 19 nt, Artificial Sequence
  Description of Artificial Sequence: Synthetic oligonucleotide
  Sense strand starting at position 2907 of SEQ ID NO: 914933
gugaauugucugcacagca

SEQ ID NO: 1041227 - RNA, 19 nt, Artificial Sequence
  Description of Artificial Sequence: Synthetic oligonucleotide
  Antisense strand to SEQ ID NO: 1041226
ugcugugcagacaauucac

SEQ ID NO: 1041228 - RNA, 19 nt, Artificial Sequence
  Description of Artificial Sequence: Synthetic oligonucleotide
  Sense strand starting at position 2934 of SEQ ID NO: 914933
gagagaaauucuugaaggg

SEQ ID NO: 1041229 - RNA, 19 nt, Artificial Sequence
  Description of Artificial Sequence: Synthetic oligonucleotide
  Antisense strand to SEQ ID NO: 1041228
cccuucaagaauuucucuc

SEQ ID NO: 1041230 - RNA, 19 nt, Artificial Sequence
  Description of Artificial Sequence: Synthetic oligonucleotide
  Sense strand starting at position 2956 of SEQ ID NO: 914933
guagguaugucagggaaug

SEQ ID NO: 1041231 - RNA, 19 nt, Artificial Sequence
  Description of Artificial Sequence: Synthetic oligonucleotide
  Antisense strand to SEQ ID NO: 1041230
cauucccugacauaccuac

SEQ ID NO: 1041232 - RNA, 19 nt, Artificial Sequence
  Description of Artificial Sequence: Synthetic oligonucleotide
  Sense strand starting at position 3309 of SEQ ID NO: 914933
gguguaagucucuugcugu

SEQ ID NO: 1041233 - RNA, 19 nt, Artificial Sequence
  Description of Artificial Sequence: Synthetic oligonucleotide
  Antisense strand to SEQ ID NO: 1041232
acagcaagagacuuacacc

SEQ ID NO: 1041234 - RNA, 19 nt, Artificial Sequence
  Description of Artificial Sequence: Synthetic oligonucleotide
  Sense strand starting at position 3310 of SEQ ID NO: 914933
guguaagucucuugcuguu

SEQ ID NO: 1041235 - RNA, 19 nt, Artificial Sequence
  Description of Artificial Sequence: Synthetic oligonucleotide
  Antisense strand to SEQ ID NO: 1041234
aacagcaagagacuuacac

SEQ ID NO: 1041236 - RNA, 19 nt, Artificial Sequence
  Description of Artificial Sequence: Synthetic oligonucleotide
  Sense strand starting at position 3534 of SEQ ID NO: 914933
gggaacuauuaggaacuca

SEQ ID NO: 1041237 - RNA, 19 nt, Artificial Sequence
  Description of Artificial Sequence: Synthetic oligonucleotide
  Antisense strand to SEQ ID NO: 1041236
ugaguuccuaauaguuccc

SEQ ID NO: 1041238 - RNA, 19 nt, Artificial Sequence
  Description of Artificial Sequence: Synthetic oligonucleotide
  Sense strand starting at position 3872 of SEQ ID NO: 914933
ggcuuugcuguguaaccuu

SEQ ID NO: 1041239 - RNA, 19 nt, Artificial Sequence
  Description of Artificial Sequence: Synthetic oligonucleotide
  Antisense strand to SEQ ID NO: 1041238
aagguuacacagcaaagcc

SEQ ID NO: 1041240 - RNA, 19 nt, Artificial Sequence
  Description of Artificial Sequence: Synthetic oligonucleotide
  Sense strand starting at position 3911 of SEQ ID NO: 914933
cuauaagccucaucuguga

SEQ ID NO: 1041241 - RNA, 19 nt, Artificial Sequence
  Description of Artificial Sequence: Synthetic oligonucleotide
  Antisense strand to SEQ ID NO: 1041240
ucacagaugaggcuuauag

SEQ ID NO: 1041242 - RNA, 19 nt, Artificial Sequence
  Description of Artificial Sequence: Synthetic oligonucleotide
  Sense strand starting at position 3934 of SEQ ID NO: 914933
ggaaucauaucugaacccu

SEQ ID NO: 1041243 - RNA, 19 nt, Artificial Sequence
  Description of Artificial Sequence: Synthetic oligonucleotide
  Antisense strand to SEQ ID NO: 1041242
aggguucagauaugauucc

SEQ ID NO: 1041244 - RNA, 19 nt, Artificial Sequence
  Description of Artificial Sequence: Synthetic oligonucleotide
  Sense strand starting at position 65 of SEQ ID NO: 914934
cccaauggccuuuaaggua

SEQ ID NO: 1041245 - RNA, 19 nt, Artificial Sequence
  Description of Artificial Sequence: Synthetic oligonucleotide
  Antisense strand to SEQ ID NO: 1041244
uaccuuaaaggccauuggg

SEQ ID NO: 1041246 - RNA, 19 nt, Artificial Sequence
  Description of Artificial Sequence: Synthetic oligonucleotide
  Sense strand starting at position 78 of SEQ ID NO: 914934
aagguagucaggugacauc

SEQ ID NO: 1041247 - RNA, 19 nt, Artificial Sequence
  Description of Artificial Sequence: Synthetic oligonucleotide
  Antisense strand to SEQ ID NO: 1041246
gaugucaccugacuaccuu

SEQ ID NO: 1041248 - RNA, 19 nt, Artificial Sequence
  Description of Artificial Sequence: Synthetic oligonucleotide
  Sense strand starting at position 87 of SEQ ID NO: 914934
aggugacaucuuggccuuu

SEQ ID NO: 1041249 - RNA, 19 nt, Artificial Sequence
  Description of Artificial Sequence: Synthetic oligonucleotide
  Antisense strand to SEQ ID NO: 1041248
aaaggccaagaugucaccu

SEQ ID NO: 1041250 - RNA, 19 nt, Artificial Sequence
  Description of Artificial Sequence: Synthetic oligonucleotide
  Sense strand starting at position 182 of SEQ ID NO: 914934
augagaaagccaggugcuu

SEQ ID NO: 1041251 - RNA, 19 nt, Artificial Sequence
  Description of Artificial Sequence: Synthetic oligonucleotide
  Antisense strand to SEQ ID NO: 1041250
aagcaccuggcuuucucau

SEQ ID NO: 1041252 - RNA, 19 nt, Artificial Sequence
  Description of Artificial Sequence: Synthetic oligonucleotide
  Sense strand starting at position 932 of SEQ ID NO: 914934
gaggauaaguuggaaacaa

SEQ ID NO: 1041253 - RNA, 19 nt, Artificial Sequence
  Description of Artificial Sequence: Synthetic oligonucleotide
  Antisense strand to SEQ ID NO: 1041252
uuguuuccaacuuauccuc

SEQ ID NO: 1041254 - RNA, 19 nt, Artificial Sequence
  Description of Artificial Sequence: Synthetic oligonucleotide
  Sense strand starting at position 978 of SEQ ID NO: 914934
uugacagcucuggagaagu

SEQ ID NO: 1041255 - RNA, 19 nt, Artificial Sequence
  Description of Artificial Sequence: Synthetic oligonucleotide
  Antisense strand to SEQ ID NO: 1041254
acuucuccagagcugucaa

SEQ ID NO: 1041256 - RNA, 19 nt, Artificial Sequence
  Description of Artificial Sequence: Synthetic oligonucleotide
  Sense strand starting at position 997 of SEQ ID NO: 914934
uggacagaguugguggauu

SEQ ID NO: 1041257 - RNA, 19 nt, Artificial Sequence
  Description of Artificial Sequence: Synthetic oligonucleotide
  Antisense strand to SEQ ID NO: 1041256
aauccaccaacucugucca

SEQ ID NO: 1041258 - RNA, 19 nt, Artificial Sequence
  Description of Artificial Sequence: Synthetic oligonucleotide
  Sense strand starting at position 1042 of SEQ ID NO: 914934
gccacuagguacuuuguaa

SEQ ID NO: 1041259 - RNA, 19 nt, Artificial Sequence
  Description of Artificial Sequence: Synthetic oligonucleotide
  Antisense strand to SEQ ID NO: 1041258
uuacaaaguaccuaguggc

SEQ ID NO: 1041260 - RNA, 19 nt, Artificial Sequence
  Description of Artificial Sequence: Synthetic oligonucleotide
  Sense strand starting at position 1130 of SEQ ID NO: 914934
gguauugagagagguauua

SEQ ID NO: 1041261 - RNA, 19 nt, Artificial Sequence
  Description of Artificial Sequence: Synthetic oligonucleotide
  Antisense strand to SEQ ID NO: 1041260
uaauaccucucucaauacc

SEQ ID NO: 1041262 - RNA, 19 nt, Artificial Sequence
  Description of Artificial Sequence: Synthetic oligonucleotide
  Sense strand starting at position 1172 of SEQ ID NO: 914934
aguuguuuccgacaauucu

SEQ ID NO: 1041263 - RNA, 19 nt, Artificial Sequence
  Description of Artificial Sequence: Synthetic oligonucleotide
  Antisense strand to SEQ ID NO: 1041262
agaauugucggaaacaacu

SEQ ID NO: 1041264 - RNA, 19 nt, Artificial Sequence
  Description of Artificial Sequence: Synthetic oligonucleotide
  Sense strand starting at position 1221 of SEQ ID NO: 914934
uucuaccaugucuauguaa

SEQ ID NO: 1041265 - RNA, 19 nt, Artificial Sequence
  Description of Artificial Sequence: Synthetic oligonucleotide
  Antisense strand to SEQ ID NO: 1041264
uuacauagacaugguagaa

SEQ ID NO: 1041266 - RNA, 19 nt, Artificial Sequence
  Description of Artificial Sequence: Synthetic oligonucleotide
  Sense strand starting at position 1308 of SEQ ID NO: 914934
agauguuuaagucacuguu

SEQ ID NO: 1041267 - RNA, 19 nt, Artificial Sequence
  Description of Artificial Sequence: Synthetic oligonucleotide
  Antisense strand to SEQ ID NO: 1041266
aacagugacuuaaacaucu

SEQ ID NO: 1041268 - RNA, 19 nt, Artificial Sequence
  Description of Artificial Sequence: Synthetic oligonucleotide
  Sense strand starting at position 1466 of SEQ ID NO: 914934
uuaacaaugucaguaauug

SEQ ID NO: 1041269 - RNA, 19 nt, Artificial Sequence
  Description of Artificial Sequence: Synthetic oligonucleotide
  Antisense strand to SEQ ID NO: 1041268
caauuacugacauuguuaa

SEQ ID NO: 1041270 - RNA, 19 nt, Artificial Sequence
  Description of Artificial Sequence: Synthetic oligonucleotide
  Sense strand starting at position 1470 of SEQ ID NO: 914934
caaugucaguaauuggacu

SEQ ID NO: 1041271 - RNA, 19 nt, Artificial Sequence
  Description of Artificial Sequence: Synthetic oligonucleotide
  Antisense strand to SEQ ID NO: 1041270
aguccaauuacugacauug

SEQ ID NO: 1041272 - RNA, 19 nt, Artificial Sequence
  Description of Artificial Sequence: Synthetic oligonucleotide
  Sense strand starting at position 1551 of SEQ ID NO: 914934
guuuccuagccuuaaauga

SEQ ID NO: 1041273 - RNA, 19 nt, Artificial Sequence
  Description of Artificial Sequence: Synthetic oligonucleotide
  Antisense strand to SEQ ID NO: 1041272
ucauuuaaggcuaggaaac

SEQ ID NO: 1041274 - RNA, 19 nt, Artificial Sequence
  Description of Artificial Sequence: Synthetic oligonucleotide
  Sense strand starting at position 1681 of SEQ ID NO: 914934
gagacaaacucuuccgaga

SEQ ID NO: 1041275 - RNA, 19 nt, Artificial Sequence
  Description of Artificial Sequence: Synthetic oligonucleotide
  Antisense strand to SEQ ID NO: 1041274
ucucggaagaguuugucuc

SEQ ID NO: 1041276 - RNA, 19 nt, Artificial Sequence
  Description of Artificial Sequence: Synthetic oligonucleotide
  Sense strand starting at position 1686 of SEQ ID NO: 914934
aaacucuuccgagaguaau

SEQ ID NO: 1041277 - RNA, 19 nt, Artificial Sequence
  Description of Artificial Sequence: Synthetic oligonucleotide
  Antisense strand to SEQ ID NO: 1041276
auuacucucggaagaguuu

SEQ ID NO: 1041278 - RNA, 19 nt, Artificial Sequence
  Description of Artificial Sequence: Synthetic oligonucleotide
  Sense strand starting at position 1696 of SEQ ID NO: 914934
gagaguaauuuacaaacga

SEQ ID NO: 1041279 - RNA, 19 nt, Artificial Sequence
  Description of Artificial Sequence: Synthetic oligonucleotide
  Antisense strand to SEQ ID NO: 1041278
ucguuuguaaauuacucuc

SEQ ID NO: 1041280 - RNA, 19 nt, Artificial Sequence
  Description of Artificial Sequence: Synthetic oligonucleotide
  Sense strand starting at position 1704 of SEQ ID NO: 914934
uuuacaaacgauggucaaa

SEQ ID NO: 1041281 - RNA, 19 nt, Artificial Sequence
  Description of Artificial Sequence: Synthetic oligonucleotide
  Antisense strand to SEQ ID NO: 1041280
uuugaccaucguuuguaaa

SEQ ID NO: 1041282 - RNA, 19 nt, Artificial Sequence
  Description of Artificial Sequence: Synthetic oligonucleotide
  Sense strand starting at position 1737 of SEQ ID NO: 914934
gcaaauugcaccgagucau

SEQ ID NO: 1041283 - RNA, 19 nt, Artificial Sequence
  Description of Artificial Sequence: Synthetic oligonucleotide
  Antisense strand to SEQ ID NO: 1041282
augacucggugcaauuugc

SEQ ID NO: 1041284 - RNA, 19 nt, Artificial Sequence
  Description of Artificial Sequence: Synthetic oligonucleotide
  Sense strand starting at position 1811 of SEQ ID NO: 914934
agggucuggacucgcaaua

SEQ ID NO: 1041285 - RNA, 19 nt, Artificial Sequence
  Description of Artificial Sequence: Synthetic oligonucleotide
  Antisense strand to SEQ ID NO: 1041284
uauugcgaguccagacccu

SEQ ID NO: 1041286 - RNA, 19 nt, Artificial Sequence
  Description of Artificial Sequence: Synthetic oligonucleotide
  Sense strand starting at position 1850 of SEQ ID NO: 914934
uguauuugcuccgcuuuau

SEQ ID NO: 1041287 - RNA, 19 nt, Artificial Sequence
  Description of Artificial Sequence: Synthetic oligonucleotide
  Antisense strand to SEQ ID NO: 1041286
auaaagcggagcaaauaca

SEQ ID NO: 1041288 - RNA, 19 nt, Artificial Sequence
  Description of Artificial Sequence: Synthetic oligonucleotide
  Sense strand starting at position 1858 of SEQ ID NO: 914934
cuccgcuuuauagauggaa

SEQ ID NO: 1041289 - RNA, 19 nt, Artificial Sequence
  Description of Artificial Sequence: Synthetic oligonucleotide
  Antisense strand to SEQ ID NO: 1041288
uuccaucuauaaagcggag

SEQ ID NO: 1041290 - RNA, 19 nt, Artificial Sequence
  Description of Artificial Sequence: Synthetic oligonucleotide
  Sense strand starting at position 2306 of SEQ ID NO: 914934
agcucuaaauguuuaagaa

SEQ ID NO: 1041291 - RNA, 19 nt, Artificial Sequence
  Description of Artificial Sequence: Synthetic oligonucleotide
  Antisense strand to SEQ ID NO: 1041290
uucuuaaacauuuagagcu

SEQ ID NO: 1041292 - RNA, 19 nt, Artificial Sequence
  Description of Artificial Sequence: Synthetic oligonucleotide
  Sense strand starting at position 2307 of SEQ ID NO: 914934
gcucuaaauguuuaagaaa

SEQ ID NO: 1041293 - RNA, 19 nt, Artificial Sequence
  Description of Artificial Sequence: Synthetic oligonucleotide
  Antisense strand to SEQ ID NO: 1041292
uuucuuaaacauuuagagc

SEQ ID NO: 1041294 - RNA, 19 nt, Artificial Sequence
  Description of Artificial Sequence: Synthetic oligonucleotide
  Sense strand starting at position 2590 of SEQ ID NO: 914934
ccauuugugugucucugga

SEQ ID NO: 1041295 - RNA, 19 nt, Artificial Sequence
  Description of Artificial Sequence: Synthetic oligonucleotide
  Antisense strand to SEQ ID NO: 1041294
uccagagacacacaaaugg

SEQ ID NO: 1041296 - RNA, 19 nt, Artificial Sequence
  Description of Artificial Sequence: Synthetic oligonucleotide
  Sense strand starting at position 2592 of SEQ ID NO: 914934
auuugugugucucuggaua

SEQ ID NO: 1041297 - RNA, 19 nt, Artificial Sequence
  Description of Artificial Sequence: Synthetic oligonucleotide
  Antisense strand to SEQ ID NO: 1041296
uauccagagacacacaaau

SEQ ID NO: 1041298 - RNA, 19 nt, Artificial Sequence
  Description of Artificial Sequence: Synthetic oligonucleotide
  Sense strand starting at position 2597 of SEQ ID NO: 914934
ugugucucuggauaaguga

SEQ ID NO: 1041299 - RNA, 19 nt, Artificial Sequence
  Description of Artificial Sequence: Synthetic oligonucleotide
  Antisense strand to SEQ ID NO: 1041298
ucacuuauccagagacaca

SEQ ID NO: 1041300 - RNA, 19 nt, Artificial Sequence
  Description of Artificial Sequence: Synthetic oligonucleotide
  Sense strand starting at position 2610 of SEQ ID NO: 914934
aagugagucugggugauca

SEQ ID NO: 1041301 - RNA, 19 nt, Artificial Sequence
  Description of Artificial Sequence: Synthetic oligonucleotide
  Antisense strand to SEQ ID NO: 1041300
ugaucacccagacucacuu

SEQ ID NO: 1041302 - RNA, 19 nt, Artificial Sequence
  Description of Artificial Sequence: Synthetic oligonucleotide
  Sense strand starting at position 2612 of SEQ ID NO: 914934
gugagucugggugaucaca

SEQ ID NO: 1041303 - RNA, 19 nt, Artificial Sequence
  Description of Artificial Sequence: Synthetic oligonucleotide
  Antisense strand to SEQ ID NO: 1041302
ugugaucacccagacucac

SEQ ID NO: 1041304 - RNA, 19 nt, Artificial Sequence
  Description of Artificial Sequence: Synthetic oligonucleotide
  Sense strand starting at position 2630 of SEQ ID NO: 914934
aggcaaaucaguugggaua

SEQ ID NO: 1041305 - RNA, 19 nt, Artificial Sequence
  Description of Artificial Sequence: Synthetic oligonucleotide
  Antisense strand to SEQ ID NO: 1041304
uaucccaacugauuugccu

SEQ ID NO: 1041306 - RNA, 19 nt, Artificial Sequence
  Description of Artificial Sequence: Synthetic oligonucleotide
  Sense strand starting at position 2631 of SEQ ID NO: 914934
ggcaaaucaguugggauaa

SEQ ID NO: 1041307 - RNA, 19 nt, Artificial Sequence
  Description of Artificial Sequence: Synthetic oligonucleotide
  Antisense strand to SEQ ID NO: 1041306
uuaucccaacugauuugcc

SEQ ID NO: 1041308 - RNA, 19 nt, Artificial Sequence
  Description of Artificial Sequence: Synthetic oligonucleotide
  Sense strand starting at position 2715 of SEQ ID NO: 914934
gggaaugcaugauugccua

SEQ ID NO: 1041309 - RNA, 19 nt, Artificial Sequence
  Description of Artificial Sequence: Synthetic oligonucleotide
  Antisense strand to SEQ ID NO: 1041308
uaggcaaucaugcauuccc

SEQ ID NO: 1041310 - RNA, 19 nt, Artificial Sequence
  Description of Artificial Sequence: Synthetic oligonucleotide
  Sense strand starting at position 2753 of SEQ ID NO: 914934
ccugaaguauccuuagcua

SEQ ID NO: 1041311 - RNA, 19 nt, Artificial Sequence
  Description of Artificial Sequence: Synthetic oligonucleotide
  Antisense strand to SEQ ID NO: 1041310
uagcuaaggauacuucagg

SEQ ID NO: 1041312 - RNA, 19 nt, Artificial Sequence
  Description of Artificial Sequence: Synthetic oligonucleotide
  Sense strand starting at position 2791 of SEQ ID NO: 914934
gaggaaagucaauguguag

SEQ ID NO: 1041313 - RNA, 19 nt, Artificial Sequence
  Description of Artificial Sequence: Synthetic oligonucleotide
  Antisense strand to SEQ ID NO: 1041312
cuacacauugacuuuccuc

SEQ ID NO: 1041314 - RNA, 19 nt, Artificial Sequence
  Description of Artificial Sequence: Synthetic oligonucleotide
  Sense strand starting at position 3118 of SEQ ID NO: 914934
agguguauuaccugaguuc

SEQ ID NO: 1041315 - RNA, 19 nt, Artificial Sequence
  Description of Artificial Sequence: Synthetic oligonucleotide
  Antisense strand to SEQ ID NO: 1041314
gaacucagguaauacaccu

SEQ ID NO: 1041316 - RNA, 19 nt, Artificial Sequence
  Description of Artificial Sequence: Synthetic oligonucleotide
  Sense strand starting at position 3413 of SEQ ID NO: 914934
agcauaauacugcaacagu

SEQ ID NO: 1041317 - RNA, 19 nt, Artificial Sequence
  Description of Artificial Sequence: Synthetic oligonucleotide
  Antisense strand to SEQ ID NO: 1041316
acuguugcaguauuaugcu

SEQ ID NO: 1041318 - RNA, 19 nt, Artificial Sequence
  Description of Artificial Sequence: Synthetic oligonucleotide
  Sense strand starting at position 3614 of SEQ ID NO: 914934
uuuaguucccuauaggaua

SEQ ID NO: 1041319 - RNA, 19 nt, Artificial Sequence
  Description of Artificial Sequence: Synthetic oligonucleotide
  Antisense strand to SEQ ID NO: 1041318
uauccuauagggaacuaaa

SEQ ID NO: 1041320 - RNA, 19 nt, Artificial Sequence
  Description of Artificial Sequence: Synthetic oligonucleotide
  Sense strand starting at position 3663 of SEQ ID NO: 914934
uccuguuagcuuggaaaug

SEQ ID NO: 1041321 - RNA, 19 nt, Artificial Sequence
  Description of Artificial Sequence: Synthetic oligonucleotide
  Antisense strand to SEQ ID NO: 1041320
cauuuccaagcuaacagga

SEQ ID NO: 1041322 - RNA, 19 nt, Artificial Sequence
  Description of Artificial Sequence: Synthetic oligonucleotide
  Sense strand starting at position 3839 of SEQ ID NO: 914934
ugaacucguuauuuagcau

SEQ ID NO: 1041323 - RNA, 19 nt, Artificial Sequence
  Description of Artificial Sequence: Synthetic oligonucleotide
  Antisense strand to SEQ ID NO: 1041322
augcuaaauaacgaguuca

SEQ ID NO: 1041324 - RNA, 19 nt, Artificial Sequence
  Description of Artificial Sequence: Synthetic oligonucleotide
  Sense strand starting at position 34 of SEQ ID NO: 914935
gcuugaaaugaugggagau

SEQ ID NO: 1041325 - RNA, 19 nt, Artificial Sequence
  Description of Artificial Sequence: Synthetic oligonucleotide
  Antisense strand to SEQ ID NO: 1041324
aucucccaucauuucaagc

SEQ ID NO: 1041326 - RNA, 19 nt, Artificial Sequence
  Description of Artificial Sequence: Synthetic oligonucleotide
  Sense strand starting at position 248 of SEQ ID NO: 914935
ggaguaaccagcuagaggu

SEQ ID NO: 1041327 - RNA, 19 nt, Artificial Sequence
  Description of Artificial Sequence: Synthetic oligonucleotide
  Antisense strand to SEQ ID NO: 1041326
accucuagcugguuacucc

SEQ ID NO: 1041328 - RNA, 19 nt, Artificial Sequence
  Description of Artificial Sequence: Synthetic oligonucleotide
  Sense strand starting at position 329 of SEQ ID NO: 914935
gggcuucccucucugagau

SEQ ID NO: 1041329 - RNA, 19 nt, Artificial Sequence
  Description of Artificial Sequence: Synthetic oligonucleotide
  Antisense strand to SEQ ID NO: 1041328
aucucagagagggaagccc

SEQ ID NO: 1041330 - RNA, 19 nt, Artificial Sequence
  Description of Artificial Sequence: Synthetic oligonucleotide
  Sense strand starting at position 451 of SEQ ID NO: 914935
agaggacuuccuugaggug

SEQ ID NO: 1041331 - RNA, 19 nt, Artificial Sequence
  Description of Artificial Sequence: Synthetic oligonucleotide
  Antisense strand to SEQ ID NO: 1041330
caccucaaggaaguccucu

SEQ ID NO: 1041332 - RNA, 19 nt, Artificial Sequence
  Description of Artificial Sequence: Synthetic oligonucleotide
  Sense strand starting at position 678 of SEQ ID NO: 914935
ugcaguagacccuaagcua

SEQ ID NO: 1041333 - RNA, 19 nt, Artificial Sequence
  Description of Artificial Sequence: Synthetic oligonucleotide
  Antisense strand to SEQ ID NO: 1041332
uagcuuagggucuacugca

SEQ ID NO: 1041334 - RNA, 19 nt, Artificial Sequence
  Description of Artificial Sequence: Synthetic oligonucleotide
  Sense strand starting at position 719 of SEQ ID NO: 914935
agguguguaccagagccau

SEQ ID NO: 1041335 - RNA, 19 nt, Artificial Sequence
  Description of Artificial Sequence: Synthetic oligonucleotide
  Antisense strand to SEQ ID NO: 1041334
auggcucugguacacaccu

SEQ ID NO: 1041336 - RNA, 19 nt, Artificial Sequence
  Description of Artificial Sequence: Synthetic oligonucleotide
  Sense strand starting at position 756 of SEQ ID NO: 914935
cccagaaacucacuguugu

SEQ ID NO: 1041337 - RNA, 19 nt, Artificial Sequence
  Description of Artificial Sequence: Synthetic oligonucleotide
  Antisense strand to SEQ ID NO: 1041336
acaacagugaguuucuggg

SEQ ID NO: 1041338 - RNA, 19 nt, Artificial Sequence
  Description of Artificial Sequence: Synthetic oligonucleotide
  Sense strand starting at position 757 of SEQ ID NO: 914935
ccagaaacucacuguuguu

SEQ ID NO: 1041339 - RNA, 19 nt, Artificial Sequence
  Description of Artificial Sequence: Synthetic oligonucleotide
  Antisense strand to SEQ ID NO: 1041338
aacaacagugaguuucugg

SEQ ID NO: 1041340 - RNA, 19 nt, Artificial Sequence
  Description of Artificial Sequence: Synthetic oligonucleotide
  Sense strand starting at position 769 of SEQ ID NO: 914935
uguuguuggacuugagauc

SEQ ID NO: 1041341 - RNA, 19 nt, Artificial Sequence
  Description of Artificial Sequence: Synthetic oligonucleotide
  Antisense strand to SEQ ID NO: 1041340
gaucucaaguccaacaaca

SEQ ID NO: 1041342 - RNA, 19 nt, Artificial Sequence
  Description of Artificial Sequence: Synthetic oligonucleotide
  Sense strand starting at position 770 of SEQ ID NO: 914935
guuguuggacuugagauca

SEQ ID NO: 1041343 - RNA, 19 nt, Artificial Sequence
  Description of Artificial Sequence: Synthetic oligonucleotide
  Antisense strand to SEQ ID NO: 1041342
ugaucucaaguccaacaac

SEQ ID NO: 1041344 - RNA, 19 nt, Artificial Sequence
  Description of Artificial Sequence: Synthetic oligonucleotide
  Sense strand starting at position 778 of SEQ ID NO: 914935
acuugagaucacgguggau

SEQ ID NO: 1041345 - RNA, 19 nt, Artificial Sequence
  Description of Artificial Sequence: Synthetic oligonucleotide
  Antisense strand to SEQ ID NO: 1041344
auccaccgugaucucaagu

SEQ ID NO: 1041346 - RNA, 19 nt, Artificial Sequence
  Description of Artificial Sequence: Synthetic oligonucleotide
  Sense strand starting at position 780 of SEQ ID NO: 914935
uugagaucacgguggauga

SEQ ID NO: 1041347 - RNA, 19 nt, Artificial Sequence
  Description of Artificial Sequence: Synthetic oligonucleotide
  Antisense strand to SEQ ID NO: 1041346
ucauccaccgugaucucaa

SEQ ID NO: 1041348 - RNA, 19 nt, Artificial Sequence
  Description of Artificial Sequence: Synthetic oligonucleotide
  Sense strand starting at position 967 of SEQ ID NO: 914935
ccuugagggcaaugauguu

SEQ ID NO: 1041349 - RNA, 19 nt, Artificial Sequence
  Description of Artificial Sequence: Synthetic oligonucleotide
  Antisense strand to SEQ ID NO: 1041348
aacaucauugcccucaagg

SEQ ID NO: 1041350 - RNA, 19 nt, Artificial Sequence
  Description of Artificial Sequence: Synthetic oligonucleotide
  Sense strand starting at position 1210 of SEQ ID NO: 914935
cauaguuggacgggaagau

SEQ ID NO: 1041351 - RNA, 19 nt, Artificial Sequence
  Description of Artificial Sequence: Synthetic oligonucleotide
  Antisense strand to SEQ ID NO: 1041350
aucuucccguccaacuaug

SEQ ID NO: 1041352 - RNA, 19 nt, Artificial Sequence
  Description of Artificial Sequence: Synthetic oligonucleotide
  Sense strand starting at position 2260 of SEQ ID NO: 914935
ggagguuggucucugcuaa

SEQ ID NO: 1041353 - RNA, 19 nt, Artificial Sequence
  Description of Artificial Sequence: Synthetic oligonucleotide
  Antisense strand to SEQ ID NO: 1041352
uuagcagagaccaaccucc

SEQ ID NO: 1041354 - RNA, 19 nt, Artificial Sequence
  Description of Artificial Sequence: Synthetic oligonucleotide
  Sense strand starting at position 2261 of SEQ ID NO: 914935
gagguuggucucugcuaag

SEQ ID NO: 1041355 - RNA, 19 nt, Artificial Sequence
  Description of Artificial Sequence: Synthetic oligonucleotide
  Antisense strand to SEQ ID NO: 1041354
cuuagcagagaccaaccuc

SEQ ID NO: 1041356 - RNA, 19 nt, Artificial Sequence
  Description of Artificial Sequence: Synthetic oligonucleotide
  Sense strand starting at position 2391 of SEQ ID NO: 914935
gacugugcgauccaucgau

SEQ ID NO: 1041357 - RNA, 19 nt, Artificial Sequence
  Description of Artificial Sequence: Synthetic oligonucleotide
  Antisense strand to SEQ ID NO: 1041356
aucgauggaucgcacaguc

SEQ ID NO: 1041358 - RNA, 19 nt, Artificial Sequence
  Description of Artificial Sequence: Synthetic oligonucleotide
  Sense strand starting at position 2395 of SEQ ID NO: 914935
gugcgauccaucgauucug

SEQ ID NO: 1041359 - RNA, 19 nt, Artificial Sequence
  Description of Artificial Sequence: Synthetic oligonucleotide
  Antisense strand to SEQ ID NO: 1041358
cagaaucgauggaucgcac

SEQ ID NO: 1041360 - RNA, 19 nt, Artificial Sequence
  Description of Artificial Sequence: Synthetic oligonucleotide
  Sense strand starting at position 2403 of SEQ ID NO: 914935
caucgauucugagccucau

SEQ ID NO: 1041361 - RNA, 19 nt, Artificial Sequence
  Description of Artificial Sequence: Synthetic oligonucleotide
  Antisense strand to SEQ ID NO: 1041360
augaggcucagaaucgaug

SEQ ID NO: 1041362 - RNA, 19 nt, Artificial Sequence
  Description of Artificial Sequence: Synthetic oligonucleotide
  Sense strand starting at position 2873 of SEQ ID NO: 914935
gggaaacaauccgcuucuu

SEQ ID NO: 1041363 - RNA, 19 nt, Artificial Sequence
  Description of Artificial Sequence: Synthetic oligonucleotide
  Antisense strand to SEQ ID NO: 1041362
aagaagcggauuguuuccc

SEQ ID NO: 1041364 - RNA, 19 nt, Artificial Sequence
  Description of Artificial Sequence: Synthetic oligonucleotide
  Sense strand starting at position 2916 of SEQ ID NO: 914935
accugagacuuguccagaa

SEQ ID NO: 1041365 - RNA, 19 nt, Artificial Sequence
  Description of Artificial Sequence: Synthetic oligonucleotide
  Antisense strand to SEQ ID NO: 1041364
uucuggacaagucucaggu

SEQ ID NO: 1041366 - RNA, 19 nt, Artificial Sequence
  Description of Artificial Sequence: Synthetic oligonucleotide
  Sense strand starting at position 2929 of SEQ ID NO: 914935
ccagaacuuugcccaggau

SEQ ID NO: 1041367 - RNA, 19 nt, Artificial Sequence
  Description of Artificial Sequence: Synthetic oligonucleotide
  Antisense strand to SEQ ID NO: 1041366
auccugggcaaaguucugg

SEQ ID NO: 1041368 - RNA, 19 nt, Artificial Sequence
  Description of Artificial Sequence: Synthetic oligonucleotide
  Sense strand starting at position 3024 of SEQ ID NO: 914935
gaaagacgacgcuauccua

SEQ ID NO: 1041369 - RNA, 19 nt, Artificial Sequence
  Description of Artificial Sequence: Synthetic oligonucleotide
  Antisense strand to SEQ ID NO: 1041368
uaggauagcgucgucuuuc

SEQ ID NO: 1041370 - RNA, 19 nt, Artificial Sequence
  Description of Artificial Sequence: Synthetic oligonucleotide
  Sense strand starting at position 3027 of SEQ ID NO: 914935
agacgacgcuauccuauuu

SEQ ID NO: 1041371 - RNA, 19 nt, Artificial Sequence
  Description of Artificial Sequence: Synthetic oligonucleotide
  Antisense strand to SEQ ID NO: 1041370
aaauaggauagcgucgucu

SEQ ID NO: 1041372 - RNA, 19 nt, Artificial Sequence
  Description of Artificial Sequence: Synthetic oligonucleotide
  Sense strand starting at position 3032 of SEQ ID NO: 914935
acgcuauccuauuucgacu

SEQ ID NO: 1041373 - RNA, 19 nt, Artificial Sequence
  Description of Artificial Sequence: Synthetic oligonucleotide
  Antisense strand to SEQ ID NO: 1041372
agucgaaauaggauagcgu

SEQ ID NO: 1041374 - RNA, 19 nt, Artificial Sequence
  Description of Artificial Sequence: Synthetic oligonucleotide
  Sense strand starting at position 3055 of SEQ ID NO: 914935
cugccuguuacggaagguu

SEQ ID NO: 1041375 - RNA, 19 nt, Artificial Sequence
  Description of Artificial Sequence: Synthetic oligonucleotide
  Antisense strand to SEQ ID NO: 1041374
aaccuuccguaacaggcag

SEQ ID NO: 1041376 - RNA, 19 nt, Artificial Sequence
  Description of Artificial Sequence: Synthetic oligonucleotide
  Sense strand starting at position 3057 of SEQ ID NO: 914935
gccuguuacggaagguugu

SEQ ID NO: 1041377 - RNA, 19 nt, Artificial Sequence
  Description of Artificial Sequence: Synthetic oligonucleotide
  Antisense strand to SEQ ID NO: 1041376
acaaccuuccguaacaggc

SEQ ID NO: 1041378 - RNA, 19 nt, Artificial Sequence
  Description of Artificial Sequence: Synthetic oligonucleotide
  Sense strand starting at position 3063 of SEQ ID NO: 914935
uacggaagguuguucucua

SEQ ID NO: 1041379 - RNA, 19 nt, Artificial Sequence
  Description of Artificial Sequence: Synthetic oligonucleotide
  Antisense strand to SEQ ID NO: 1041378
uagagaacaaccuuccgua

SEQ ID NO: 1041380 - RNA, 19 nt, Artificial Sequence
  Description of Artificial Sequence: Synthetic oligonucleotide
  Sense strand starting at position 3070 of SEQ ID NO: 914935
gguuguucucuacacccua

SEQ ID NO: 1041381 - RNA, 19 nt, Artificial Sequence
  Description of Artificial Sequence: Synthetic oligonucleotide
  Antisense strand to SEQ ID NO: 1041380
uaggguguagagaacaacc

SEQ ID NO: 1041382 - RNA, 19 nt, Artificial Sequence
  Description of Artificial Sequence: Synthetic oligonucleotide
  Sense strand starting at position 3094 of SEQ ID NO: 914935
gagcucugacccggaagua

SEQ ID NO: 1041383 - RNA, 19 nt, Artificial Sequence
  Description of Artificial Sequence: Synthetic oligonucleotide
  Antisense strand to SEQ ID NO: 1041382
uacuuccgggucagagcuc

SEQ ID NO: 1041384 - RNA, 19 nt, Artificial Sequence
  Description of Artificial Sequence: Synthetic oligonucleotide
  Sense strand starting at position 3126 of SEQ ID NO: 914935
gcgaaaucggucgugacgu

SEQ ID NO: 1041385 - RNA, 19 nt, Artificial Sequence
  Description of Artificial Sequence: Synthetic oligonucleotide
  Antisense strand to SEQ ID NO: 1041384
acgucacgaccgauuucgc

SEQ ID NO: 1041386 - RNA, 19 nt, Artificial Sequence
  Description of Artificial Sequence: Synthetic oligonucleotide
  Sense strand starting at position 3248 of SEQ ID NO: 914935
uccuguaacucauuggaag

SEQ ID NO: 1041387 - RNA, 19 nt, Artificial Sequence
  Description of Artificial Sequence: Synthetic oligonucleotide
  Antisense strand to SEQ ID NO: 1041386
cuuccaaugaguuacagga

SEQ ID NO: 1041388 - RNA, 19 nt, Artificial Sequence
  Description of Artificial Sequence: Synthetic oligonucleotide
  Sense strand starting at position 3249 of SEQ ID NO: 914935
ccuguaacucauuggaaga

SEQ ID NO: 1041389 - RNA, 19 nt, Artificial Sequence
  Description of Artificial Sequence: Synthetic oligonucleotide
  Antisense strand to SEQ ID NO: 1041388
ucuuccaaugaguuacagg

SEQ ID NO: 1041390 - RNA, 19 nt, Artificial Sequence
  Description of Artificial Sequence: Synthetic oligonucleotide
  Sense strand starting at position 3250 of SEQ ID NO: 914935
cuguaacucauuggaagag

SEQ ID NO: 1041391 - RNA, 19 nt, Artificial Sequence
  Description of Artificial Sequence: Synthetic oligonucleotide
  Antisense strand to SEQ ID NO: 1041390
cucuuccaaugaguuacag

SEQ ID NO: 1041392 - RNA, 19 nt, Artificial Sequence
  Description of Artificial Sequence: Synthetic oligonucleotide
  Sense strand starting at position 3262 of SEQ ID NO: 914935
ggaagagcugugcgccaau

SEQ ID NO: 1041393 - RNA, 19 nt, Artificial Sequence
  Description of Artificial Sequence: Synthetic oligonucleotide
  Antisense strand to SEQ ID NO: 1041392
auuggcgcacagcucuucc

SEQ ID NO: 1041394 - RNA, 19 nt, Artificial Sequence
  Description of Artificial Sequence: Synthetic oligonucleotide
  Sense strand starting at position 3397 of SEQ ID NO: 914935
ugcuuuaguccuggagucu

SEQ ID NO: 1041395 - RNA, 19 nt, Artificial Sequence
  Description of Artificial Sequence: Synthetic oligonucleotide
  Antisense strand to SEQ ID NO: 1041394
agacuccaggacuaaagca

SEQ ID NO: 1041396 - RNA, 19 nt, Artificial Sequence
  Description of Artificial Sequence: Synthetic oligonucleotide
  Sense strand starting at position 3398 of SEQ ID NO: 914935
gcuuuaguccuggagucug

SEQ ID NO: 1041397 - RNA, 19 nt, Artificial Sequence
  Description of Artificial Sequence: Synthetic oligonucleotide
  Antisense strand to SEQ ID NO: 1041396
cagacuccaggacuaaagc

SEQ ID NO: 1041398 - RNA, 19 nt, Artificial Sequence
  Description of Artificial Sequence: Synthetic oligonucleotide
  Sense strand starting at position 3473 of SEQ ID NO: 914935
cgcauucaugccgucaagu

SEQ ID NO: 1041399 - RNA, 19 nt, Artificial Sequence
  Description of Artificial Sequence: Synthetic oligonucleotide
  Antisense strand to SEQ ID NO: 1041398
acuugacggcaugaaugcg

SEQ ID NO: 1041400 - RNA, 19 nt, Artificial Sequence
  Description of Artificial Sequence: Synthetic oligonucleotide
  Sense strand starting at position 3794 of SEQ ID NO: 914935
gagcaauucugggccagga

SEQ ID NO: 1041401 - RNA, 19 nt, Artificial Sequence
  Description of Artificial Sequence: Synthetic oligonucleotide
  Antisense strand to SEQ ID NO: 1041400
uccuggcccagaauugcuc

SEQ ID NO: 1041402 - RNA, 19 nt, Artificial Sequence
  Description of Artificial Sequence: Synthetic oligonucleotide
  Sense strand starting at position 3796 of SEQ ID NO: 914935
gcaauucugggccaggagu

SEQ ID NO: 1041403 - RNA, 19 nt, Artificial Sequence
  Description of Artificial Sequence: Synthetic oligonucleotide
  Antisense strand to SEQ ID NO: 1041402
acuccuggcccagaauugc

SEQ ID NO: 1041404 - RNA, 19 nt, Artificial Sequence
  Description of Artificial Sequence: Synthetic oligonucleotide
  Sense strand starting at position 342 of SEQ ID NO: 914936
uuugacaucucccuggaga

SEQ ID NO: 1041405 - RNA, 19 nt, Artificial Sequence
  Description of Artificial Sequence: Synthetic oligonucleotide
  Antisense strand to SEQ ID NO: 1041404
ucuccagggagaugucaaa

SEQ ID NO: 1041406 - RNA, 19 nt, Artificial Sequence
  Description of Artificial Sequence: Synthetic oligonucleotide
  Sense strand starting at position 343 of SEQ ID NO: 914936
uugacaucucccuggagag

SEQ ID NO: 1041407 - RNA, 19 nt, Artificial Sequence
  Description of Artificial Sequence: Synthetic oligonucleotide
  Antisense strand to SEQ ID NO: 1041406
cucuccagggagaugucaa

SEQ ID NO: 1041408 - RNA, 19 nt, Artificial Sequence
  Description of Artificial Sequence: Synthetic oligonucleotide
  Sense strand starting at position 344 of SEQ ID NO: 914936
ugacaucucccuggagagu

SEQ ID NO: 1041409 - RNA, 19 nt, Artificial Sequence
  Description of Artificial Sequence: Synthetic oligonucleotide
  Antisense strand to SEQ ID NO: 1041408
acucuccagggagauguca

SEQ ID NO: 1041410 - RNA, 19 nt, Artificial Sequence
  Description of Artificial Sequence: Synthetic oligonucleotide
  Sense strand starting at position 468 of SEQ ID NO: 914936
ccuugaugucucuguggau

SEQ ID NO: 1041411 - RNA, 19 nt, Artificial Sequence
  Description of Artificial Sequence: Synthetic oligonucleotide
  Antisense strand to SEQ ID NO: 1041410
auccacagagacaucaagg

SEQ ID NO: 1041412 - RNA, 19 nt, Artificial Sequence
  Description of Artificial Sequence: Synthetic oligonucleotide
  Sense strand starting at position 830 of SEQ ID NO: 914936
gugccucucggcagacgua

SEQ ID NO: 1041413 - RNA, 19 nt, Artificial Sequence
  Description of Artificial Sequence: Synthetic oligonucleotide
  Antisense strand to SEQ ID NO: 1041412
uacgucugccgagaggcac

SEQ ID NO: 1041414 - RNA, 19 nt, Artificial Sequence
  Description of Artificial Sequence: Synthetic oligonucleotide
  Sense strand starting at position 970 of SEQ ID NO: 914936
guuaaaugaaagcgguguu

SEQ ID NO: 1041415 - RNA, 19 nt, Artificial Sequence
  Description of Artificial Sequence: Synthetic oligonucleotide
  Antisense strand to SEQ ID NO: 1041414
aacaccgcuuucauuuaac

SEQ ID NO: 1041416 - RNA, 19 nt, Artificial Sequence
  Description of Artificial Sequence: Synthetic oligonucleotide
  Sense strand starting at position 1002 of SEQ ID NO: 914936
cccaguuuagucuaggaua

SEQ ID NO: 1041417 - RNA, 19 nt, Artificial Sequence
  Description of Artificial Sequence: Synthetic oligonucleotide
  Antisense strand to SEQ ID NO: 1041416
uauccuagacuaaacuggg

SEQ ID NO: 1041418 - RNA, 19 nt, Artificial Sequence
  Description of Artificial Sequence: Synthetic oligonucleotide
  Sense strand starting at position 1004 of SEQ ID NO: 914936
caguuuagucuaggauacu

SEQ ID NO: 1041419 - RNA, 19 nt, Artificial Sequence
  Description of Artificial Sequence: Synthetic oligonucleotide
  Antisense strand to SEQ ID NO: 1041418
aguauccuagacuaaacug

SEQ ID NO: 1041420 - RNA, 19 nt, Artificial Sequence
  Description of Artificial Sequence: Synthetic oligonucleotide
  Sense strand starting at position 1005 of SEQ ID NO: 914936
aguuuagucuaggauacug

SEQ ID NO: 1041421 - RNA, 19 nt, Artificial Sequence
  Description of Artificial Sequence: Synthetic oligonucleotide
  Antisense strand to SEQ ID NO: 1041420
caguauccuagacuaaacu

SEQ ID NO: 1041422 - RNA, 19 nt, Artificial Sequence
  Description of Artificial Sequence: Synthetic oligonucleotide
  Sense strand starting at position 1168 of SEQ ID NO: 914936
cuggccucaccaugguaaa

SEQ ID NO: 1041423 - RNA, 19 nt, Artificial Sequence
  Description of Artificial Sequence: Synthetic oligonucleotide
  Antisense strand to SEQ ID NO: 1041422
uuuaccauggugaggccag

SEQ ID NO: 1041424 - RNA, 19 nt, Artificial Sequence
  Description of Artificial Sequence: Synthetic oligonucleotide
  Sense strand starting at position 1169 of SEQ ID NO: 914936
uggccucaccaugguaaau

SEQ ID NO: 1041425 - RNA, 19 nt, Artificial Sequence
  Description of Artificial Sequence: Synthetic oligonucleotide
  Antisense strand to SEQ ID NO: 1041424
auuuaccauggugaggcca

SEQ ID NO: 1041426 - RNA, 19 nt, Artificial Sequence
  Description of Artificial Sequence: Synthetic oligonucleotide
  Sense strand starting at position 1171 of SEQ ID NO: 914936
gccucaccaugguaaaucu

SEQ ID NO: 1041427 - RNA, 19 nt, Artificial Sequence
  Description of Artificial Sequence: Synthetic oligonucleotide
  Antisense strand to SEQ ID NO: 1041426
agauuuaccauggugaggc

SEQ ID NO: 1041428 - RNA, 19 nt, Artificial Sequence
  Description of Artificial Sequence: Synthetic oligonucleotide
  Sense strand starting at position 1208 of SEQ ID NO: 914936
cgcagaacuccaugcagau

SEQ ID NO: 1041429 - RNA, 19 nt, Artificial Sequence
  Description of Artificial Sequence: Synthetic oligonucleotide
  Antisense strand to SEQ ID NO: 1041428
aucugcauggaguucugcg

SEQ ID NO: 1041430 - RNA, 19 nt, Artificial Sequence
  Description of Artificial Sequence: Synthetic oligonucleotide
  Sense strand starting at position 1234 of SEQ ID NO: 914936
cggucauuccuagggacaa

SEQ ID NO: 1041431 - RNA, 19 nt, Artificial Sequence
  Description of Artificial Sequence: Synthetic oligonucleotide
  Antisense strand to SEQ ID NO: 1041430
uugucccuaggaaugaccg

SEQ ID NO: 1041432 - RNA, 19 nt, Artificial Sequence
  Description of Artificial Sequence: Synthetic oligonucleotide
  Sense strand starting at position 1235 of SEQ ID NO: 914936
ggucauuccuagggacaaa

SEQ ID NO: 1041433 - RNA, 19 nt, Artificial Sequence
  Description of Artificial Sequence: Synthetic oligonucleotide
  Antisense strand to SEQ ID NO: 1041432
uuugucccuaggaaugacc

SEQ ID NO: 1041434 - RNA, 19 nt, Artificial Sequence
  Description of Artificial Sequence: Synthetic oligonucleotide
  Sense strand starting at position 1644 of SEQ ID NO: 914936
cugggucuagcuugacuau

SEQ ID NO: 1041435 - RNA, 19 nt, Artificial Sequence
  Description of Artificial Sequence: Synthetic oligonucleotide
  Antisense strand to SEQ ID NO: 1041434
auagucaagcuagacccag

SEQ ID NO: 1041436 - RNA, 19 nt, Artificial Sequence
  Description of Artificial Sequence: Synthetic oligonucleotide
  Sense strand starting at position 1647 of SEQ ID NO: 914936
ggucuagcuugacuaucuu

SEQ ID NO: 1041437 - RNA, 19 nt, Artificial Sequence
  Description of Artificial Sequence: Synthetic oligonucleotide
  Antisense strand to SEQ ID NO: 1041436
aagauagucaagcuagacc

SEQ ID NO: 1041438 - RNA, 19 nt, Artificial Sequence
  Description of Artificial Sequence: Synthetic oligonucleotide
  Sense strand starting at position 1812 of SEQ ID NO: 914936
ccuuguagacgucgccaua

SEQ ID NO: 1041439 - RNA, 19 nt, Artificial Sequence
  Description of Artificial Sequence: Synthetic oligonucleotide
  Antisense strand to SEQ ID NO: 1041438
uauggcgacgucuacaagg

SEQ ID NO: 1041440 - RNA, 19 nt, Artificial Sequence
  Description of Artificial Sequence: Synthetic oligonucleotide
  Sense strand starting at position 2259 of SEQ ID NO: 914936
ggacuugcgcuuuauauuu

SEQ ID NO: 1041441 - RNA, 19 nt, Artificial Sequence
  Description of Artificial Sequence: Synthetic oligonucleotide
  Antisense strand to SEQ ID NO: 1041440
aaauauaaagcgcaagucc

SEQ ID NO: 1041442 - RNA, 19 nt, Artificial Sequence
  Description of Artificial Sequence: Synthetic oligonucleotide
  Sense strand starting at position 2295 of SEQ ID NO: 914936
ucaucuuucuuggaacuga

SEQ ID NO: 1041443 - RNA, 19 nt, Artificial Sequence
  Description of Artificial Sequence: Synthetic oligonucleotide
  Antisense strand to SEQ ID NO: 1041442
ucaguuccaagaaagauga

SEQ ID NO: 1041444 - RNA, 19 nt, Artificial Sequence
  Description of Artificial Sequence: Synthetic oligonucleotide
  Sense strand starting at position 2461 of SEQ ID NO: 914936
gggccaguuucgucaggaa

SEQ ID NO: 1041445 - RNA, 19 nt, Artificial Sequence
  Description of Artificial Sequence: Synthetic oligonucleotide
  Antisense strand to SEQ ID NO: 1041444
uuccugacgaaacuggccc

SEQ ID NO: 1041446 - RNA, 19 nt, Artificial Sequence
  Description of Artificial Sequence: Synthetic oligonucleotide
  Sense strand starting at position 2602 of SEQ ID NO: 914936
ggagcuuggauucgcaaga

SEQ ID NO: 1041447 - RNA, 19 nt, Artificial Sequence
  Description of Artificial Sequence: Synthetic oligonucleotide
  Antisense strand to SEQ ID NO: 1041446
ucuugcgaauccaagcucc

SEQ ID NO: 1041448 - RNA, 19 nt, Artificial Sequence
  Description of Artificial Sequence: Synthetic oligonucleotide
  Sense strand starting at position 2603 of SEQ ID NO: 914936
gagcuuggauucgcaagau

SEQ ID NO: 1041449 - RNA, 19 nt, Artificial Sequence
  Description of Artificial Sequence: Synthetic oligonucleotide
  Antisense strand to SEQ ID NO: 1041448
aucuugcgaauccaagcuc

SEQ ID NO: 1041450 - RNA, 19 nt, Artificial Sequence
  Description of Artificial Sequence: Synthetic oligonucleotide
  Sense strand starting at position 2624 of SEQ ID NO: 914936
ggaauucugaagugcggaa

SEQ ID NO: 1041451 - RNA, 19 nt, Artificial Sequence
  Description of Artificial Sequence: Synthetic oligonucleotide
  Antisense strand to SEQ ID NO: 1041450
uuccgcacuucagaauucc

SEQ ID NO: 1041452 - RNA, 19 nt, Artificial Sequence
  Description of Artificial Sequence: Synthetic oligonucleotide
  Sense strand starting at position 2626 of SEQ ID NO: 914936
aauucugaagugcggaaau

SEQ ID NO: 1041453 - RNA, 19 nt, Artificial Sequence
  Description of Artificial Sequence: Synthetic oligonucleotide
  Antisense strand to SEQ ID NO: 1041452
auuuccgcacuucagaauu

SEQ ID NO: 1041454 - RNA, 19 nt, Artificial Sequence
  Description of Artificial Sequence: Synthetic oligonucleotide
  Sense strand starting at position 2628 of SEQ ID NO: 914936
uucugaagugcggaaauau

SEQ ID NO: 1041455 - RNA, 19 nt, Artificial Sequence
  Description of Artificial Sequence: Synthetic oligonucleotide
  Antisense strand to SEQ ID NO: 1041454
auauuuccgcacuucagaa

SEQ ID NO: 1041456 - RNA, 19 nt, Artificial Sequence
  Description of Artificial Sequence: Synthetic oligonucleotide
  Sense strand starting at position 2692 of SEQ ID NO: 914936
accugugcuccuuggguua

SEQ ID NO: 1041457 - RNA, 19 nt, Artificial Sequence
  Description of Artificial Sequence: Synthetic oligonucleotide
  Antisense strand to SEQ ID NO: 1041456
uaacccaaggagcacaggu

SEQ ID NO: 1041458 - RNA, 19 nt, Artificial Sequence
  Description of Artificial Sequence: Synthetic oligonucleotide
  Sense strand starting at position 2713 of SEQ ID NO: 914936
ggugaaaccucagcuccua

SEQ ID NO: 1041459 - RNA, 19 nt, Artificial Sequence
  Description of Artificial Sequence: Synthetic oligonucleotide
  Antisense strand to SEQ ID NO: 1041458
uaggagcugagguuucacc

SEQ ID NO: 1041460 - RNA, 19 nt, Artificial Sequence
  Description of Artificial Sequence: Synthetic oligonucleotide
  Sense strand starting at position 2787 of SEQ ID NO: 914936
ggaggagcuuggguuucua

SEQ ID NO: 1041461 - RNA, 19 nt, Artificial Sequence
  Description of Artificial Sequence: Synthetic oligonucleotide
  Antisense strand to SEQ ID NO: 1041460
uagaaacccaagcuccucc

SEQ ID NO: 1041462 - RNA, 19 nt, Artificial Sequence
  Description of Artificial Sequence: Synthetic oligonucleotide
  Sense strand starting at position 2814 of SEQ ID NO: 914936
gccuuuaaagacugguaau

SEQ ID NO: 1041463 - RNA, 19 nt, Artificial Sequence
  Description of Artificial Sequence: Synthetic oligonucleotide
  Antisense strand to SEQ ID NO: 1041462
auuaccagucuuuaaaggc

SEQ ID NO: 1041464 - RNA, 19 nt, Artificial Sequence
  Description of Artificial Sequence: Synthetic oligonucleotide
  Sense strand starting at position 2817 of SEQ ID NO: 914936
uuuaaagacugguaauuag

SEQ ID NO: 1041465 - RNA, 19 nt, Artificial Sequence
  Description of Artificial Sequence: Synthetic oligonucleotide
  Antisense strand to SEQ ID NO: 1041464
cuaauuaccagucuuuaaa

SEQ ID NO: 1041466 - RNA, 19 nt, Artificial Sequence
  Description of Artificial Sequence: Synthetic oligonucleotide
  Sense strand starting at position 2864 of SEQ ID NO: 914936
cugggauucugggagaaga

SEQ ID NO: 1041467 - RNA, 19 nt, Artificial Sequence
  Description of Artificial Sequence: Synthetic oligonucleotide
  Antisense strand to SEQ ID NO: 1041466
ucuucucccagaaucccag

SEQ ID NO: 1041468 - RNA, 19 nt, Artificial Sequence
  Description of Artificial Sequence: Synthetic oligonucleotide
  Sense strand starting at position 2914 of SEQ ID NO: 914936
uggguucugagcuggagaa

SEQ ID NO: 1041469 - RNA, 19 nt, Artificial Sequence
  Description of Artificial Sequence: Synthetic oligonucleotide
  Antisense strand to SEQ ID NO: 1041468
uucuccagcucagaaccca

SEQ ID NO: 1041470 - RNA, 19 nt, Artificial Sequence
  Description of Artificial Sequence: Synthetic oligonucleotide
  Sense strand starting at position 2915 of SEQ ID NO: 914936
ggguucugagcuggagaaa

SEQ ID NO: 1041471 - RNA, 19 nt, Artificial Sequence
  Description of Artificial Sequence: Synthetic oligonucleotide
  Antisense strand to SEQ ID NO: 1041470
uuucuccagcucagaaccc

SEQ ID NO: 1041472 - RNA, 19 nt, Artificial Sequence
  Description of Artificial Sequence: Synthetic oligonucleotide
  Sense strand starting at position 2939 of SEQ ID NO: 914936
ggguuugauacagacugua

SEQ ID NO: 1041473 - RNA, 19 nt, Artificial Sequence
  Description of Artificial Sequence: Synthetic oligonucleotide
  Antisense strand to SEQ ID NO: 1041472
uacagucuguaucaaaccc

SEQ ID NO: 1041474 - RNA, 19 nt, Artificial Sequence
  Description of Artificial Sequence: Synthetic oligonucleotide
  Sense strand starting at position 3124 of SEQ ID NO: 914936
gacagaguguagucacuag

SEQ ID NO: 1041475 - RNA, 19 nt, Artificial Sequence
  Description of Artificial Sequence: Synthetic oligonucleotide
  Antisense strand to SEQ ID NO: 1041474
cuagugacuacacucuguc

SEQ ID NO: 1041476 - RNA, 19 nt, Artificial Sequence
  Description of Artificial Sequence: Synthetic oligonucleotide
  Sense strand starting at position 3185 of SEQ ID NO: 914936
ccgugaguugcagcuugau

SEQ ID NO: 1041477 - RNA, 19 nt, Artificial Sequence
  Description of Artificial Sequence: Synthetic oligonucleotide
  Antisense strand to SEQ ID NO: 1041476
aucaagcugcaacucacgg

SEQ ID NO: 1041478 - RNA, 19 nt, Artificial Sequence
  Description of Artificial Sequence: Synthetic oligonucleotide
  Sense strand starting at position 3197 of SEQ ID NO: 914936
gcuugauggcgcucgaguu

SEQ ID NO: 1041479 - RNA, 19 nt, Artificial Sequence
  Description of Artificial Sequence: Synthetic oligonucleotide
  Antisense strand to SEQ ID NO: 1041478
aacucgagcgccaucaagc

SEQ ID NO: 1041480 - RNA, 19 nt, Artificial Sequence
  Description of Artificial Sequence: Synthetic oligonucleotide
  Sense strand starting at position 3879 of SEQ ID NO: 914936
ugcagaugccgucguagaa

SEQ ID NO: 1041481 - RNA, 19 nt, Artificial Sequence
  Description of Artificial Sequence: Synthetic oligonucleotide
  Antisense strand to SEQ ID NO: 1041480
uucuacgacggcaucugca

SEQ ID NO: 1041482 - RNA, 19 nt, Artificial Sequence
  Description of Artificial Sequence: Synthetic oligonucleotide
  Sense strand starting at position 3880 of SEQ ID NO: 914936
gcagaugccgucguagaau

SEQ ID NO: 1041483 - RNA, 19 nt, Artificial Sequence
  Description of Artificial Sequence: Synthetic oligonucleotide
  Antisense strand to SEQ ID NO: 1041482
auucuacgacggcaucugc

SEQ ID NO: 1041484 - RNA, 19 nt, Artificial Sequence
  Description of Artificial Sequence: Synthetic oligonucleotide
  Sense strand starting at position 32 of SEQ ID NO: 914937
gcaagagaaugagagacau

SEQ ID NO: 1041485 - RNA, 19 nt, Artificial Sequence
  Description of Artificial Sequence: Synthetic oligonucleotide
  Antisense strand to SEQ ID NO: 1041484
augucucucauucucuugc

SEQ ID NO: 1041486 - RNA, 19 nt, Artificial Sequence
  Description of Artificial Sequence: Synthetic oligonucleotide
  Sense strand starting at position 121 of SEQ ID NO: 914937
gaaguaggaucauaaggua

SEQ ID NO: 1041487 - RNA, 19 nt, Artificial Sequence
  Description of Artificial Sequence: Synthetic oligonucleotide
  Antisense strand to SEQ ID NO: 1041486
uaccuuaugauccuacuuc

SEQ ID NO: 1041488 - RNA, 19 nt, Artificial Sequence
  Description of Artificial Sequence: Synthetic oligonucleotide
  Sense strand starting at position 135 of SEQ ID NO: 914937
agguaucauguggaaggua

SEQ ID NO: 1041489 - RNA, 19 nt, Artificial Sequence
  Description of Artificial Sequence: Synthetic oligonucleotide
  Antisense strand to SEQ ID NO: 1041488
uaccuuccacaugauaccu

SEQ ID NO: 1041490 - RNA, 19 nt, Artificial Sequence
  Description of Artificial Sequence: Synthetic oligonucleotide
  Sense strand starting at position 196 of SEQ ID NO: 914937
acgagcuguucuccugauu

SEQ ID NO: 1041491 - RNA, 19 nt, Artificial Sequence
  Description of Artificial Sequence: Synthetic oligonucleotide
  Antisense strand to SEQ ID NO: 1041490
aaucaggagaacagcucgu

SEQ ID NO: 1041492 - RNA, 19 nt, Artificial Sequence
  Description of Artificial Sequence: Synthetic oligonucleotide
  Sense strand starting at position 199 of SEQ ID NO: 914937
agcuguucuccugauuauc

SEQ ID NO: 1041493 - RNA, 19 nt, Artificial Sequence
  Description of Artificial Sequence: Synthetic oligonucleotide
  Antisense strand to SEQ ID NO: 1041492
gauaaucaggagaacagcu

SEQ ID NO: 1041494 - RNA, 19 nt, Artificial Sequence
  Description of Artificial Sequence: Synthetic oligonucleotide
  Sense strand starting at position 337 of SEQ ID NO: 914937
ugugaacaauccuaagaga

SEQ ID NO: 1041495 - RNA, 19 nt, Artificial Sequence
  Description of Artificial Sequence: Synthetic oligonucleotide
  Antisense strand to SEQ ID NO: 1041494
ucucuuaggauuguucaca

SEQ ID NO: 1041496 - RNA, 19 nt, Artificial Sequence
  Description of Artificial Sequence: Synthetic oligonucleotide
  Sense strand starting at position 461 of SEQ ID NO: 914937
caaaguuccagcgguggaa

SEQ ID NO: 1041497 - RNA, 19 nt, Artificial Sequence
  Description of Artificial Sequence: Synthetic oligonucleotide
  Antisense strand to SEQ ID NO: 1041496
uuccaccgcuggaacuuug

SEQ ID NO: 1041498 - RNA, 19 nt, Artificial Sequence
  Description of Artificial Sequence: Synthetic oligonucleotide
  Sense strand starting at position 497 of SEQ ID NO: 914937
aaagauccuguggguaauc

SEQ ID NO: 1041499 - RNA, 19 nt, Artificial Sequence
  Description of Artificial Sequence: Synthetic oligonucleotide
  Antisense strand to SEQ ID NO: 1041498
gauuacccacaggaucuuu

SEQ ID NO: 1041500 - RNA, 19 nt, Artificial Sequence
  Description of Artificial Sequence: Synthetic oligonucleotide
  Sense strand starting at position 499 of SEQ ID NO: 914937
agauccuguggguaaucua

SEQ ID NO: 1041501 - RNA, 19 nt, Artificial Sequence
  Description of Artificial Sequence: Synthetic oligonucleotide
  Antisense strand to SEQ ID NO: 1041500
uagauuacccacaggaucu

SEQ ID NO: 1041502 - RNA, 19 nt, Artificial Sequence
  Description of Artificial Sequence: Synthetic oligonucleotide
  Sense strand starting at position 502 of SEQ ID NO: 914937
uccuguggguaaucuagaa

SEQ ID NO: 1041503 - RNA, 19 nt, Artificial Sequence
  Description of Artificial Sequence: Synthetic oligonucleotide
  Antisense strand to SEQ ID NO: 1041502
uucuagauuacccacagga

SEQ ID NO: 1041504 - RNA, 19 nt, Artificial Sequence
  Description of Artificial Sequence: Synthetic oligonucleotide
  Sense strand starting at position 618 of SEQ ID NO: 914937
uggaaagaauucuucuucu

SEQ ID NO: 1041505 - RNA, 19 nt, Artificial Sequence
  Description of Artificial Sequence: Synthetic oligonucleotide
  Antisense strand to SEQ ID NO: 1041504
agaagaagaauucuuucca

SEQ ID NO: 1041506 - RNA, 19 nt, Artificial Sequence
  Description of Artificial Sequence: Synthetic oligonucleotide
  Sense strand starting at position 1392 of SEQ ID NO: 914937
cagagaucugcacgggcuu

SEQ ID NO: 1041507 - RNA, 19 nt, Artificial Sequence
  Description of Artificial Sequence: Synthetic oligonucleotide
  Antisense strand to SEQ ID NO: 1041506
aagcccgugcagaucucug

SEQ ID NO: 1041508 - RNA, 19 nt, Artificial Sequence
  Description of Artificial Sequence: Synthetic oligonucleotide
  Sense strand starting at position 1557 of SEQ ID NO: 914937
cucgguaauccugccgcau

SEQ ID NO: 1041509 - RNA, 19 nt, Artificial Sequence
  Description of Artificial Sequence: Synthetic oligonucleotide
  Antisense strand to SEQ ID NO: 1041508
augcggcaggauuaccgag

SEQ ID NO: 1041510 - RNA, 19 nt, Artificial Sequence
  Description of Artificial Sequence: Synthetic oligonucleotide
  Sense strand starting at position 1831 of SEQ ID NO: 914937
cuccgaguacuuggugaaa

SEQ ID NO: 1041511 - RNA, 19 nt, Artificial Sequence
  Description of Artificial Sequence: Synthetic oligonucleotide
  Antisense strand to SEQ ID NO: 1041510
uuucaccaaguacucggag

SEQ ID NO: 1041512 - RNA, 19 nt, Artificial Sequence
  Description of Artificial Sequence: Synthetic oligonucleotide
  Sense strand starting at position 1964 of SEQ ID NO: 914937
uucuucuugugguucuaaa

SEQ ID NO: 1041513 - RNA, 19 nt, Artificial Sequence
  Description of Artificial Sequence: Synthetic oligonucleotide
  Antisense strand to SEQ ID NO: 1041512
uuuagaaccacaagaagaa

SEQ ID NO: 1041514 - RNA, 19 nt, Artificial Sequence
  Description of Artificial Sequence: Synthetic oligonucleotide
  Sense strand starting at position 2102 of SEQ ID NO: 914937
agagcuguccuaggagagu

SEQ ID NO: 1041515 - RNA, 19 nt, Artificial Sequence
  Description of Artificial Sequence: Synthetic oligonucleotide
  Antisense strand to SEQ ID NO: 1041514
acucuccuaggacagcucu

SEQ ID NO: 1041516 - RNA, 19 nt, Artificial Sequence
  Description of Artificial Sequence: Synthetic oligonucleotide
  Sense strand starting at position 2111 of SEQ ID NO: 914937
cuaggagagucuguagagu

SEQ ID NO: 1041517 - RNA, 19 nt, Artificial Sequence
  Description of Artificial Sequence: Synthetic oligonucleotide
  Antisense strand to SEQ ID NO: 1041516
acucuacagacucuccuag

SEQ ID NO: 1041518 - RNA, 19 nt, Artificial Sequence
  Description of Artificial Sequence: Synthetic oligonucleotide
  Sense strand starting at position 2120 of SEQ ID NO: 914937
ucuguagagucccucgauu

SEQ ID NO: 1041519 - RNA, 19 nt, Artificial Sequence
  Description of Artificial Sequence: Synthetic oligonucleotide
  Antisense strand to SEQ ID NO: 1041518
aaucgagggacucuacaga

SEQ ID NO: 1041520 - RNA, 19 nt, Artificial Sequence
  Description of Artificial Sequence: Synthetic oligonucleotide
  Sense strand starting at position 2122 of SEQ ID NO: 914937
uguagagucccucgauuac

SEQ ID NO: 1041521 - RNA, 19 nt, Artificial Sequence
  Description of Artificial Sequence: Synthetic oligonucleotide
  Antisense strand to SEQ ID NO: 1041520
guaaucgagggacucuaca

SEQ ID NO: 1041522 - RNA, 19 nt, Artificial Sequence
  Description of Artificial Sequence: Synthetic oligonucleotide
  Sense strand starting at position 2131 of SEQ ID NO: 914937
ccucgauuaccggucgcaa

SEQ ID NO: 1041523 - RNA, 19 nt, Artificial Sequence
  Description of Artificial Sequence: Synthetic oligonucleotide
  Antisense strand to SEQ ID NO: 1041522
uugcgaccgguaaucgagg

SEQ ID NO: 1041524 - RNA, 19 nt, Artificial Sequence
  Description of Artificial Sequence: Synthetic oligonucleotide
  Sense strand starting at position 2634 of SEQ ID NO: 914937
gcugcucagcagugagaaa

SEQ ID NO: 1041525 - RNA, 19 nt, Artificial Sequence
  Description of Artificial Sequence: Synthetic oligonucleotide
  Antisense strand to SEQ ID NO: 1041524
uuucucacugcugagcagc

SEQ ID NO: 1041526 - RNA, 19 nt, Artificial Sequence
  Description of Artificial Sequence: Synthetic oligonucleotide
  Sense strand starting at position 2662 of SEQ ID NO: 914937
gaacgaugcugacugaaag

SEQ ID NO: 1041527 - RNA, 19 nt, Artificial Sequence
  Description of Artificial Sequence: Synthetic oligonucleotide
  Antisense strand to SEQ ID NO: 1041526
cuuucagucagcaucguuc

SEQ ID NO: 1041528 - RNA, 19 nt, Artificial Sequence
  Description of Artificial Sequence: Synthetic oligonucleotide
  Sense strand starting at position 2663 of SEQ ID NO: 914937
aacgaugcugacugaaaga

SEQ ID NO: 1041529 - RNA, 19 nt, Artificial Sequence
  Description of Artificial Sequence: Synthetic oligonucleotide
  Antisense strand to SEQ ID NO: 1041528
ucuuucagucagcaucguu

SEQ ID NO: 1041530 - RNA, 19 nt, Artificial Sequence
  Description of Artificial Sequence: Synthetic oligonucleotide
  Sense strand starting at position 2959 of SEQ ID NO: 914937
ggaggaaacuccuagugaa

SEQ ID NO: 1041531 - RNA, 19 nt, Artificial Sequence
  Description of Artificial Sequence: Synthetic oligonucleotide
  Antisense strand to SEQ ID NO: 1041530
uucacuaggaguuuccucc

SEQ ID NO: 1041532 - RNA, 19 nt, Artificial Sequence
  Description of Artificial Sequence: Synthetic oligonucleotide
  Sense strand starting at position 2971 of SEQ ID NO: 914937
uagugaaaugucuguccca

SEQ ID NO: 1041533 - RNA, 19 nt, Artificial Sequence
  Description of Artificial Sequence: Synthetic oligonucleotide
  Antisense strand to SEQ ID NO: 1041532
ugggacagacauuucacua

SEQ ID NO: 1041534 - RNA, 19 nt, Artificial Sequence
  Description of Artificial Sequence: Synthetic oligonucleotide
  Sense strand starting at position 2972 of SEQ ID NO: 914937
agugaaaugucugucccag

SEQ ID NO: 1041535 - RNA, 19 nt, Artificial Sequence
  Description of Artificial Sequence: Synthetic oligonucleotide
  Antisense strand to SEQ ID NO: 1041534
cugggacagacauuucacu

SEQ ID NO: 1041536 - RNA, 19 nt, Artificial Sequence
  Description of Artificial Sequence: Synthetic oligonucleotide
  Sense strand starting at position 2974 of SEQ ID NO: 914937
ugaaaugucugucccagaa

SEQ ID NO: 1041537 - RNA, 19 nt, Artificial Sequence
  Description of Artificial Sequence: Synthetic oligonucleotide
  Antisense strand to SEQ ID NO: 1041536
uucugggacagacauuuca

SEQ ID NO: 1041538 - RNA, 19 nt, Artificial Sequence
  Description of Artificial Sequence: Synthetic oligonucleotide
  Sense strand starting at position 2978 of SEQ ID NO: 914937
augucugucccagaauaga

SEQ ID NO: 1041539 - RNA, 19 nt, Artificial Sequence
  Description of Artificial Sequence: Synthetic oligonucleotide
  Antisense strand to SEQ ID NO: 1041538
ucuauucugggacagacau

SEQ ID NO: 1041540 - RNA, 19 nt, Artificial Sequence
  Description of Artificial Sequence: Synthetic oligonucleotide
  Sense strand starting at position 3013 of SEQ ID NO: 914937
gcugcuggaauuggucaaa

SEQ ID NO: 1041541 - RNA, 19 nt, Artificial Sequence
  Description of Artificial Sequence: Synthetic oligonucleotide
  Antisense strand to SEQ ID NO: 1041540
uuugaccaauuccagcagc

SEQ ID NO: 1041542 - RNA, 19 nt, Artificial Sequence
  Description of Artificial Sequence: Synthetic oligonucleotide
  Sense strand starting at position 3147 of SEQ ID NO: 914937
ccuggauguuccuuuccua

SEQ ID NO: 1041543 - RNA, 19 nt, Artificial Sequence
  Description of Artificial Sequence: Synthetic oligonucleotide
  Antisense strand to SEQ ID NO: 1041542
uaggaaaggaacauccagg

SEQ ID NO: 1041544 - RNA, 19 nt, Artificial Sequence
  Description of Artificial Sequence: Synthetic oligonucleotide
  Sense strand starting at position 3154 of SEQ ID NO: 914937
guuccuuuccuagggaauc

SEQ ID NO: 1041545 - RNA, 19 nt, Artificial Sequence
  Description of Artificial Sequence: Synthetic oligonucleotide
  Antisense strand to SEQ ID NO: 1041544
gauucccuaggaaaggaac

SEQ ID NO: 1041546 - RNA, 19 nt, Artificial Sequence
  Description of Artificial Sequence: Synthetic oligonucleotide
  Sense strand starting at position 3169 of SEQ ID NO: 914937
aaucuuugcgaagguaugu

SEQ ID NO: 1041547 - RNA, 19 nt, Artificial Sequence
  Description of Artificial Sequence: Synthetic oligonucleotide
  Antisense strand to SEQ ID NO: 1041546
acauaccuucgcaaagauu

SEQ ID NO: 1041548 - RNA, 19 nt, Artificial Sequence
  Description of Artificial Sequence: Synthetic oligonucleotide
  Sense strand starting at position 3265 of SEQ ID NO: 914937
ucuggaaaguggcuuaauu

SEQ ID NO: 1041549 - RNA, 19 nt, Artificial Sequence
  Description of Artificial Sequence: Synthetic oligonucleotide
  Antisense strand to SEQ ID NO: 1041548
aauuaagccacuuuccaga

SEQ ID NO: 1041550 - RNA, 19 nt, Artificial Sequence
  Description of Artificial Sequence: Synthetic oligonucleotide
  Sense strand starting at position 3267 of SEQ ID NO: 914937
uggaaaguggcuuaauugu

SEQ ID NO: 1041551 - RNA, 19 nt, Artificial Sequence
  Description of Artificial Sequence: Synthetic oligonucleotide
  Antisense strand to SEQ ID NO: 1041550
acaauuaagccacuuucca

SEQ ID NO: 1041552 - RNA, 19 nt, Artificial Sequence
  Description of Artificial Sequence: Synthetic oligonucleotide
  Sense strand starting at position 3304 of SEQ ID NO: 914937
ggaccugugcccuaggaaa

SEQ ID NO: 1041553 - RNA, 19 nt, Artificial Sequence
  Description of Artificial Sequence: Synthetic oligonucleotide
  Antisense strand to SEQ ID NO: 1041552
uuuccuagggcacaggucc

SEQ ID NO: 1041554 - RNA, 19 nt, Artificial Sequence
  Description of Artificial Sequence: Synthetic oligonucleotide
  Sense strand starting at position 3459 of SEQ ID NO: 914937
caaguugagucaucccugu

SEQ ID NO: 1041555 - RNA, 19 nt, Artificial Sequence
  Description of Artificial Sequence: Synthetic oligonucleotide
  Antisense strand to SEQ ID NO: 1041554
acagggaugacucaacuug

SEQ ID NO: 1041556 - RNA, 19 nt, Artificial Sequence
  Description of Artificial Sequence: Synthetic oligonucleotide
  Sense strand starting at position 3886 of SEQ ID NO: 914937
aucuaaucugcagagauuc

SEQ ID NO: 1041557 - RNA, 19 nt, Artificial Sequence
  Description of Artificial Sequence: Synthetic oligonucleotide
  Antisense strand to SEQ ID NO: 1041556
gaaucucugcagauuagau

SEQ ID NO: 1041558 - RNA, 19 nt, Artificial Sequence
  Description of Artificial Sequence: Synthetic oligonucleotide
  Sense strand starting at position 3921 of SEQ ID NO: 914937
agcucuuaacuguauggca

SEQ ID NO: 1041559 - RNA, 19 nt, Artificial Sequence
  Description of Artificial Sequence: Synthetic oligonucleotide
  Antisense strand to SEQ ID NO: 1041558
ugccauacaguuaagagcu

SEQ ID NO: 1041560 - RNA, 19 nt, Artificial Sequence
  Description of Artificial Sequence: Synthetic oligonucleotide
  Sense strand starting at position 3940 of SEQ ID NO: 914937
gugggcaaaucacugcaau

SEQ ID NO: 1041561 - RNA, 19 nt, Artificial Sequence
  Description of Artificial Sequence: Synthetic oligonucleotide
  Antisense strand to SEQ ID NO: 1041560
auugcagugauuugcccac

SEQ ID NO: 1041562 - RNA, 19 nt, Artificial Sequence
  Description of Artificial Sequence: Synthetic oligonucleotide
  Sense strand starting at position 3943 of SEQ ID NO: 914937
ggcaaaucacugcaaucuu

SEQ ID NO: 1041563 - RNA, 19 nt, Artificial Sequence
  Description of Artificial Sequence: Synthetic oligonucleotide
  Antisense strand to SEQ ID NO: 1041562
aagauugcagugauuugcc

SEQ ID NO: 1041564 - RNA, 19 nt, Artificial Sequence
  Description of Artificial Sequence: Synthetic oligonucleotide
  Sense strand starting at position 65 of SEQ ID NO: 914938
ggcaguuaugaggguuaaa

SEQ ID NO: 1041565 - RNA, 19 nt, Artificial Sequence
  Description of Artificial Sequence: Synthetic oligonucleotide
  Antisense strand to SEQ ID NO: 1041564
uuuaacccucauaacugcc

SEQ ID NO: 1041566 - RNA, 19 nt, Artificial Sequence
  Description of Artificial Sequence: Synthetic oligonucleotide
  Sense strand starting at position 124 of SEQ ID NO: 914938
uaguguugucugcuagugu

SEQ ID NO: 1041567 - RNA, 19 nt, Artificial Sequence
  Description of Artificial Sequence: Synthetic oligonucleotide
  Antisense strand to SEQ ID NO: 1041566
acacuagcagacaacacua

SEQ ID NO: 1041568 - RNA, 19 nt, Artificial Sequence
  Description of Artificial Sequence: Synthetic oligonucleotide
  Sense strand starting at position 146 of SEQ ID NO: 914938
ggcugacacuuguugaaca

SEQ ID NO: 1041569 - RNA, 19 nt, Artificial Sequence
  Description of Artificial Sequence: Synthetic oligonucleotide
  Antisense strand to SEQ ID NO: 1041568
uguucaacaagugucagcc

SEQ ID NO: 1041570 - RNA, 19 nt, Artificial Sequence
  Description of Artificial Sequence: Synthetic oligonucleotide
  Sense strand starting at position 265 of SEQ ID NO: 914938
gcaguuagaaaguagugga

SEQ ID NO: 1041571 - RNA, 19 nt, Artificial Sequence
  Description of Artificial Sequence: Synthetic oligonucleotide
  Antisense strand to SEQ ID NO: 1041570
uccacuacuuucuaacugc

SEQ ID NO: 1041572 - RNA, 19 nt, Artificial Sequence
  Description of Artificial Sequence: Synthetic oligonucleotide
  Sense strand starting at position 405 of SEQ ID NO: 914938
agucuaaggcauuaucaga

SEQ ID NO: 1041573 - RNA, 19 nt, Artificial Sequence
  Description of Artificial Sequence: Synthetic oligonucleotide
  Antisense strand to SEQ ID NO: 1041572
ucugauaaugccuuagacu

SEQ ID NO: 1041574 - RNA, 19 nt, Artificial Sequence
  Description of Artificial Sequence: Synthetic oligonucleotide
  Sense strand starting at position 509 of SEQ ID NO: 914938
gguuucugaguuugaugau

SEQ ID NO: 1041575 - RNA, 19 nt, Artificial Sequence
  Description of Artificial Sequence: Synthetic oligonucleotide
  Antisense strand to SEQ ID NO: 1041574
aucaucaaacucagaaacc

SEQ ID NO: 1041576 - RNA, 19 nt, Artificial Sequence
  Description of Artificial Sequence: Synthetic oligonucleotide
  Sense strand starting at position 1430 of SEQ ID NO: 914938
gggcucugucccgggaaga

SEQ ID NO: 1041577 - RNA, 19 nt, Artificial Sequence
  Description of Artificial Sequence: Synthetic oligonucleotide
  Antisense strand to SEQ ID NO: 1041576
ucuucccgggacagagccc

SEQ ID NO: 1041578 - RNA, 19 nt, Artificial Sequence
  Description of Artificial Sequence: Synthetic oligonucleotide
  Sense strand starting at position 2076 of SEQ ID NO: 914938
ccggguaucagaugacuaa

SEQ ID NO: 1041579 - RNA, 19 nt, Artificial Sequence
  Description of Artificial Sequence: Synthetic oligonucleotide
  Antisense strand to SEQ ID NO: 1041578
uuagucaucugauacccgg

SEQ ID NO: 1041580 - RNA, 19 nt, Artificial Sequence
  Description of Artificial Sequence: Synthetic oligonucleotide
  Sense strand starting at position 2088 of SEQ ID NO: 914938
ugacuaauggcaggacacu

SEQ ID NO: 1041581 - RNA, 19 nt, Artificial Sequence
  Description of Artificial Sequence: Synthetic oligonucleotide
  Antisense strand to SEQ ID NO: 1041580
aguguccugccauuaguca

SEQ ID NO: 1041582 - RNA, 19 nt, Artificial Sequence
  Description of Artificial Sequence: Synthetic oligonucleotide
  Sense strand starting at position 2196 of SEQ ID NO: 914938
ggaugucagugggcucuua

SEQ ID NO: 1041583 - RNA, 19 nt, Artificial Sequence
  Description of Artificial Sequence: Synthetic oligonucleotide
  Antisense strand to SEQ ID NO: 1041582
uaagagcccacugacaucc

SEQ ID NO: 1041584 - RNA, 19 nt, Artificial Sequence
  Description of Artificial Sequence: Synthetic oligonucleotide
  Sense strand starting at position 2306 of SEQ ID NO: 914938
aagguuuggucuucuuauc

SEQ ID NO: 1041585 - RNA, 19 nt, Artificial Sequence
  Description of Artificial Sequence: Synthetic oligonucleotide
  Antisense strand to SEQ ID NO: 1041584
gauaagaagaccaaaccuu

SEQ ID NO: 1041586 - RNA, 19 nt, Artificial Sequence
  Description of Artificial Sequence: Synthetic oligonucleotide
  Sense strand starting at position 2311 of SEQ ID NO: 914938
uuggucuucuuaucuguga

SEQ ID NO: 1041587 - RNA, 19 nt, Artificial Sequence
  Description of Artificial Sequence: Synthetic oligonucleotide
  Antisense strand to SEQ ID NO: 1041586
ucacagauaagaagaccaa

SEQ ID NO: 1041588 - RNA, 19 nt, Artificial Sequence
  Description of Artificial Sequence: Synthetic oligonucleotide
  Sense strand starting at position 2312 of SEQ ID NO: 914938
uggucuucuuaucugugaa

SEQ ID NO: 1041589 - RNA, 19 nt, Artificial Sequence
  Description of Artificial Sequence: Synthetic oligonucleotide
  Antisense strand to SEQ ID NO: 1041588
uucacagauaagaagacca

SEQ ID NO: 1041590 - RNA, 19 nt, Artificial Sequence
  Description of Artificial Sequence: Synthetic oligonucleotide
  Sense strand starting at position 2315 of SEQ ID NO: 914938
ucuucuuaucugugaaaug

SEQ ID NO: 1041591 - RNA, 19 nt, Artificial Sequence
  Description of Artificial Sequence: Synthetic oligonucleotide
  Antisense strand to SEQ ID NO: 1041590
cauuucacagauaagaaga

SEQ ID NO: 1041592 - RNA, 19 nt, Artificial Sequence
  Description of Artificial Sequence: Synthetic oligonucleotide
  Sense strand starting at position 2381 of SEQ ID NO: 914938
acaaauguguugccugaga

SEQ ID NO: 1041593 - RNA, 19 nt, Artificial Sequence
  Description of Artificial Sequence: Synthetic oligonucleotide
  Antisense strand to SEQ ID NO: 1041592
ucucaggcaacacauuugu

SEQ ID NO: 1041594 - RNA, 19 nt, Artificial Sequence
  Description of Artificial Sequence: Synthetic oligonucleotide
  Sense strand starting at position 2492 of SEQ ID NO: 914938
gaggcugucuucucuaaag

SEQ ID NO: 1041595 - RNA, 19 nt, Artificial Sequence
  Description of Artificial Sequence: Synthetic oligonucleotide
  Antisense strand to SEQ ID NO: 1041594
cuuuagagaagacagccuc

SEQ ID NO: 1041596 - RNA, 19 nt, Artificial Sequence
  Description of Artificial Sequence: Synthetic oligonucleotide
  Sense strand starting at position 2494 of SEQ ID NO: 914938
ggcugucuucucuaaagau

SEQ ID NO: 1041597 - RNA, 19 nt, Artificial Sequence
  Description of Artificial Sequence: Synthetic oligonucleotide
  Antisense strand to SEQ ID NO: 1041596
aucuuuagagaagacagcc

SEQ ID NO: 1041598 - RNA, 19 nt, Artificial Sequence
  Description of Artificial Sequence: Synthetic oligonucleotide
  Sense strand starting at position 2539 of SEQ ID NO: 914938
acagcuacucguggugaau

SEQ ID NO: 1041599 - RNA, 19 nt, Artificial Sequence
  Description of Artificial Sequence: Synthetic oligonucleotide
  Antisense strand to SEQ ID NO: 1041598
auucaccacgaguagcugu

SEQ ID NO: 1041600 - RNA, 19 nt, Artificial Sequence
  Description of Artificial Sequence: Synthetic oligonucleotide
  Sense strand starting at position 2542 of SEQ ID NO: 914938
gcuacucguggugaauuga

SEQ ID NO: 1041601 - RNA, 19 nt, Artificial Sequence
  Description of Artificial Sequence: Synthetic oligonucleotide
  Antisense strand to SEQ ID NO: 1041600
ucaauucaccacgaguagc

SEQ ID NO: 1041602 - RNA, 19 nt, Artificial Sequence
  Description of Artificial Sequence: Synthetic oligonucleotide
  Sense strand starting at position 2624 of SEQ ID NO: 914938
cugcauuuccugcagagca

SEQ ID NO: 1041603 - RNA, 19 nt, Artificial Sequence
  Description of Artificial Sequence: Synthetic oligonucleotide
  Antisense strand to SEQ ID NO: 1041602
ugcucugcaggaaaugcag

SEQ ID NO: 1041604 - RNA, 19 nt, Artificial Sequence
  Description of Artificial Sequence: Synthetic oligonucleotide
  Sense strand starting at position 2702 of SEQ ID NO: 914938
acuguugacuucuugggau

SEQ ID NO: 1041605 - RNA, 19 nt, Artificial Sequence
  Description of Artificial Sequence: Synthetic oligonucleotide
  Antisense strand to SEQ ID NO: 1041604
aucccaagaagucaacagu

SEQ ID NO: 1041606 - RNA, 19 nt, Artificial Sequence
  Description of Artificial Sequence: Synthetic oligonucleotide
  Sense strand starting at position 2704 of SEQ ID NO: 914938
uguugacuucuugggauca

SEQ ID NO: 1041607 - RNA, 19 nt, Artificial Sequence
  Description of Artificial Sequence: Synthetic oligonucleotide
  Antisense strand to SEQ ID NO: 1041606
ugaucccaagaagucaaca

SEQ ID NO: 1041608 - RNA, 19 nt, Artificial Sequence
  Description of Artificial Sequence: Synthetic oligonucleotide
  Sense strand starting at position 2788 of SEQ ID NO: 914938
cauugucucucccucgaga

SEQ ID NO: 1041609 - RNA, 19 nt, Artificial Sequence
  Description of Artificial Sequence: Synthetic oligonucleotide
  Antisense strand to SEQ ID NO: 1041608
ucucgagggagagacaaug

SEQ ID NO: 1041610 - RNA, 19 nt, Artificial Sequence
  Description of Artificial Sequence: Synthetic oligonucleotide
  Sense strand starting at position 2838 of SEQ ID NO: 914938
gucccugaguuucccgauu

SEQ ID NO: 1041611 - RNA, 19 nt, Artificial Sequence
  Description of Artificial Sequence: Synthetic oligonucleotide
  Antisense strand to SEQ ID NO: 1041610
aaucgggaaacucagggac

SEQ ID NO: 1041612 - RNA, 19 nt, Artificial Sequence
  Description of Artificial Sequence: Synthetic oligonucleotide
  Sense strand starting at position 2844 of SEQ ID NO: 914938
gaguuucccgauugaguua

SEQ ID NO: 1041613 - RNA, 19 nt, Artificial Sequence
  Description of Artificial Sequence: Synthetic oligonucleotide
  Antisense strand to SEQ ID NO: 1041612
uaacucaaucgggaaacuc

SEQ ID NO: 1041614 - RNA, 19 nt, Artificial Sequence
  Description of Artificial Sequence: Synthetic oligonucleotide
  Sense strand starting at position 2845 of SEQ ID NO: 914938
aguuucccgauugaguuau

SEQ ID NO: 1041615 - RNA, 19 nt, Artificial Sequence
  Description of Artificial Sequence: Synthetic oligonucleotide
  Antisense strand to SEQ ID NO: 1041614
auaacucaaucgggaaacu

SEQ ID NO: 1041616 - RNA, 19 nt, Artificial Sequence
  Description of Artificial Sequence: Synthetic oligonucleotide
  Sense strand starting at position 2847 of SEQ ID NO: 914938
uuucccgauugaguuauuu

SEQ ID NO: 1041617 - RNA, 19 nt, Artificial Sequence
  Description of Artificial Sequence: Synthetic oligonucleotide
  Antisense strand to SEQ ID NO: 1041616
aaauaacucaaucgggaaa

SEQ ID NO: 1041618 - RNA, 19 nt, Artificial Sequence
  Description of Artificial Sequence: Synthetic oligonucleotide
  Sense strand starting at position 2921 of SEQ ID NO: 914938
ggucaaaccucauuggcuu

SEQ ID NO: 1041619 - RNA, 19 nt, Artificial Sequence
  Description of Artificial Sequence: Synthetic oligonucleotide
  Antisense strand to SEQ ID NO: 1041618
aagccaaugagguuugacc

SEQ ID NO: 1041620 - RNA, 19 nt, Artificial Sequence
  Description of Artificial Sequence: Synthetic oligonucleotide
  Sense strand starting at position 3255 of SEQ ID NO: 914938
gggcccucacgguaaucau

SEQ ID NO: 1041621 - RNA, 19 nt, Artificial Sequence
  Description of Artificial Sequence: Synthetic oligonucleotide
  Antisense strand to SEQ ID NO: 1041620
augauuaccgugagggccc

SEQ ID NO: 1041622 - RNA, 19 nt, Artificial Sequence
  Description of Artificial Sequence: Synthetic oligonucleotide
  Sense strand starting at position 3316 of SEQ ID NO: 914938
uugccaucauggcuacuaa

SEQ ID NO: 1041623 - RNA, 19 nt, Artificial Sequence
  Description of Artificial Sequence: Synthetic oligonucleotide
  Antisense strand to SEQ ID NO: 1041622
uuaguagccaugauggcaa

SEQ ID NO: 1041624 - RNA, 19 nt, Artificial Sequence
  Description of Artificial Sequence: Synthetic oligonucleotide
  Sense strand starting at position 3317 of SEQ ID NO: 914938
ugccaucauggcuacuaau

SEQ ID NO: 1041625 - RNA, 19 nt, Artificial Sequence
  Description of Artificial Sequence: Synthetic oligonucleotide
  Antisense strand to SEQ ID NO: 1041624
auuaguagccaugauggca

SEQ ID NO: 1041626 - RNA, 19 nt, Artificial Sequence
  Description of Artificial Sequence: Synthetic oligonucleotide
  Sense strand starting at position 3326 of SEQ ID NO: 914938
ggcuacuaaucguuccuua

SEQ ID NO: 1041627 - RNA, 19 nt, Artificial Sequence
  Description of Artificial Sequence: Synthetic oligonucleotide
  Antisense strand to SEQ ID NO: 1041626
uaaggaacgauuaguagcc

SEQ ID NO: 1041628 - RNA, 19 nt, Artificial Sequence
  Description of Artificial Sequence: Synthetic oligonucleotide
  Sense strand starting at position 3330 of SEQ ID NO: 914938
acuaaucguuccuuagaau

SEQ ID NO: 1041629 - RNA, 19 nt, Artificial Sequence
  Description of Artificial Sequence: Synthetic oligonucleotide
  Antisense strand to SEQ ID NO: 1041628
auucuaaggaacgauuagu

SEQ ID NO: 1041630 - RNA, 19 nt, Artificial Sequence
  Description of Artificial Sequence: Synthetic oligonucleotide
  Sense strand starting at position 3331 of SEQ ID NO: 914938
cuaaucguuccuuagaaug

SEQ ID NO: 1041631 - RNA, 19 nt, Artificial Sequence
  Description of Artificial Sequence: Synthetic oligonucleotide
  Antisense strand to SEQ ID NO: 1041630
cauucuaaggaacgauuag

SEQ ID NO: 1041632 - RNA, 19 nt, Artificial Sequence
  Description of Artificial Sequence: Synthetic oligonucleotide
  Sense strand starting at position 3435 of SEQ ID NO: 914938
gagcaaaguuaucuuagcu

SEQ ID NO: 1041633 - RNA, 19 nt, Artificial Sequence
  Description of Artificial Sequence: Synthetic oligonucleotide
  Antisense strand to SEQ ID NO: 1041632
agcuaagauaacuuugcuc

SEQ ID NO: 1041634 - RNA, 19 nt, Artificial Sequence
  Description of Artificial Sequence: Synthetic oligonucleotide
  Sense strand starting at position 3513 of SEQ ID NO: 914938
ggcccaggucuugguauga

SEQ ID NO: 1041635 - RNA, 19 nt, Artificial Sequence
  Description of Artificial Sequence: Synthetic oligonucleotide
  Antisense strand to SEQ ID NO: 1041634
ucauaccaagaccugggcc

SEQ ID NO: 1041636 - RNA, 19 nt, Artificial Sequence
  Description of Artificial Sequence: Synthetic oligonucleotide
  Sense strand starting at position 3621 of SEQ ID NO: 914938
caggccagacugugauauu

SEQ ID NO: 1041637 - RNA, 19 nt, Artificial Sequence
  Description of Artificial Sequence: Synthetic oligonucleotide
  Antisense strand to SEQ ID NO: 1041636
aauaucacagucuggccug

SEQ ID NO: 1041638 - RNA, 19 nt, Artificial Sequence
  Description of Artificial Sequence: Synthetic oligonucleotide
  Sense strand starting at position 3631 of SEQ ID NO: 914938
ugugauauucuugggccuu

SEQ ID NO: 1041639 - RNA, 19 nt, Artificial Sequence
  Description of Artificial Sequence: Synthetic oligonucleotide
  Antisense strand to SEQ ID NO: 1041638
aaggcccaagaauaucaca

SEQ ID NO: 1041640 - RNA, 19 nt, Artificial Sequence
  Description of Artificial Sequence: Synthetic oligonucleotide
  Sense strand starting at position 3753 of SEQ ID NO: 914938
ccauucucuggccaggaga

SEQ ID NO: 1041641 - RNA, 19 nt, Artificial Sequence
  Description of Artificial Sequence: Synthetic oligonucleotide
  Antisense strand to SEQ ID NO: 1041640
ucuccuggccagagaaugg

SEQ ID NO: 1041642 - RNA, 19 nt, Artificial Sequence
  Description of Artificial Sequence: Synthetic oligonucleotide
  Sense strand starting at position 3876 of SEQ ID NO: 914938
aguggcugcauugaauuaa

SEQ ID NO: 1041643 - RNA, 19 nt, Artificial Sequence
  Description of Artificial Sequence: Synthetic oligonucleotide
  Antisense strand to SEQ ID NO: 1041642
uuaauucaaugcagccacu

SEQ ID NO: 1041644 - RNA, 19 nt, Artificial Sequence
  Description of Artificial Sequence: Synthetic oligonucleotide
  Sense strand starting at position 30 of SEQ ID NO: 914939
aaggcuaagacuuggguga

SEQ ID NO: 1041645 - RNA, 19 nt, Artificial Sequence
  Description of Artificial Sequence: Synthetic oligonucleotide
  Antisense strand to SEQ ID NO: 1041644
ucacccaagucuuagccuu

SEQ ID NO: 1041646 - RNA, 19 nt, Artificial Sequence
  Description of Artificial Sequence: Synthetic oligonucleotide
  Sense strand starting at position 31 of SEQ ID NO: 914939
aggcuaagacuugggugaa

SEQ ID NO: 1041647 - RNA, 19 nt, Artificial Sequence
  Description of Artificial Sequence: Synthetic oligonucleotide
  Antisense strand to SEQ ID NO: 1041646
uucacccaagucuuagccu

SEQ ID NO: 1041648 - RNA, 19 nt, Artificial Sequence
  Description of Artificial Sequence: Synthetic oligonucleotide
  Sense strand starting at position 85 of SEQ ID NO: 914939
uguagagucgugaggcuga

SEQ ID NO: 1041649 - RNA, 19 nt, Artificial Sequence
  Description of Artificial Sequence: Synthetic oligonucleotide
  Antisense strand to SEQ ID NO: 1041648
ucagccucacgacucuaca

SEQ ID NO: 1041650 - RNA, 19 nt, Artificial Sequence
  Description of Artificial Sequence: Synthetic oligonucleotide
  Sense strand starting at position 101 of SEQ ID NO: 914939
ugagguguagcucaagaaa

SEQ ID NO: 1041651 - RNA, 19 nt, Artificial Sequence
  Description of Artificial Sequence: Synthetic oligonucleotide
  Antisense strand to SEQ ID NO: 1041650
uuucuugagcuacaccuca

SEQ ID NO: 1041652 - RNA, 19 nt, Artificial Sequence
  Description of Artificial Sequence: Synthetic oligonucleotide
  Sense strand starting at position 104 of SEQ ID NO: 914939
gguguagcucaagaaacua

SEQ ID NO: 1041653 - RNA, 19 nt, Artificial Sequence
  Description of Artificial Sequence: Synthetic oligonucleotide
  Antisense strand to SEQ ID NO: 1041652
uaguuucuugagcuacacc

SEQ ID NO: 1041654 - RNA, 19 nt, Artificial Sequence
  Description of Artificial Sequence: Synthetic oligonucleotide
  Sense strand starting at position 136 of SEQ ID NO: 914939
cuggacuuccugggcauua

SEQ ID NO: 1041655 - RNA, 19 nt, Artificial Sequence
  Description of Artificial Sequence: Synthetic oligonucleotide
  Antisense strand to SEQ ID NO: 1041654
uaaugcccaggaaguccag

SEQ ID NO: 1041656 - RNA, 19 nt, Artificial Sequence
  Description of Artificial Sequence: Synthetic oligonucleotide
  Sense strand starting at position 138 of SEQ ID NO: 914939
ggacuuccugggcauuaca

SEQ ID NO: 1041657 - RNA, 19 nt, Artificial Sequence
  Description of Artificial Sequence: Synthetic oligonucleotide
  Antisense strand to SEQ ID NO: 1041656
uguaaugcccaggaagucc

SEQ ID NO: 1041658 - RNA, 19 nt, Artificial Sequence
  Description of Artificial Sequence: Synthetic oligonucleotide
  Sense strand starting at position 245 of SEQ ID NO: 914939
aaaggcaacgcugauuaaa

SEQ ID NO: 1041659 - RNA, 19 nt, Artificial Sequence
  Description of Artificial Sequence: Synthetic oligonucleotide
  Antisense strand to SEQ ID NO: 1041658
uuuaaucagcguugccuuu

SEQ ID NO: 1041660 - RNA, 19 nt, Artificial Sequence
  Description of Artificial Sequence: Synthetic oligonucleotide
  Sense strand starting at position 357 of SEQ ID NO: 914939
cacagaaagucaucauggu

SEQ ID NO: 1041661 - RNA, 19 nt, Artificial Sequence
  Description of Artificial Sequence: Synthetic oligonucleotide
  Antisense strand to SEQ ID NO: 1041660
accaugaugacuuucugug

SEQ ID NO: 1041662 - RNA, 19 nt, Artificial Sequence
  Description of Artificial Sequence: Synthetic oligonucleotide
  Sense strand starting at position 361 of SEQ ID NO: 914939
gaaagucaucaugguuugu

SEQ ID NO: 1041663 - RNA, 19 nt, Artificial Sequence
  Description of Artificial Sequence: Synthetic oligonucleotide
  Antisense strand to SEQ ID NO: 1041662
acaaaccaugaugacuuuc

SEQ ID NO: 1041664 - RNA, 19 nt, Artificial Sequence
  Description of Artificial Sequence: Synthetic oligonucleotide
  Sense strand starting at position 363 of SEQ ID NO: 914939
aagucaucaugguuugugu

SEQ ID NO: 1041665 - RNA, 19 nt, Artificial Sequence
  Description of Artificial Sequence: Synthetic oligonucleotide
  Antisense strand to SEQ ID NO: 1041664
acacaaaccaugaugacuu

SEQ ID NO: 1041666 - RNA, 19 nt, Artificial Sequence
  Description of Artificial Sequence: Synthetic oligonucleotide
  Sense strand starting at position 376 of SEQ ID NO: 914939
uuguguuccagcguacgaa

SEQ ID NO: 1041667 - RNA, 19 nt, Artificial Sequence
  Description of Artificial Sequence: Synthetic oligonucleotide
  Antisense strand to SEQ ID NO: 1041666
uucguacgcuggaacacaa

SEQ ID NO: 1041668 - RNA, 19 nt, Artificial Sequence
  Description of Artificial Sequence: Synthetic oligonucleotide
  Sense strand starting at position 440 of SEQ ID NO: 914939
ugagcaacagguuguguua

SEQ ID NO: 1041669 - RNA, 19 nt, Artificial Sequence
  Description of Artificial Sequence: Synthetic oligonucleotide
  Antisense strand to SEQ ID NO: 1041668
uaacacaaccuguugcuca

SEQ ID NO: 1041670 - RNA, 19 nt, Artificial Sequence
  Description of Artificial Sequence: Synthetic oligonucleotide
  Sense strand starting at position 443 of SEQ ID NO: 914939
gcaacagguuguguuaaua

SEQ ID NO: 1041671 - RNA, 19 nt, Artificial Sequence
  Description of Artificial Sequence: Synthetic oligonucleotide
  Antisense strand to SEQ ID NO: 1041670
uauuaacacaaccuguugc

SEQ ID NO: 1041672 - RNA, 19 nt, Artificial Sequence
  Description of Artificial Sequence: Synthetic oligonucleotide
  Sense strand starting at position 468 of SEQ ID NO: 914939
ggccaagugucuuuggguu

SEQ ID NO: 1041673 - RNA, 19 nt, Artificial Sequence
  Description of Artificial Sequence: Synthetic oligonucleotide
  Antisense strand to SEQ ID NO: 1041672
aacccaaagacacuuggcc

SEQ ID NO: 1041674 - RNA, 19 nt, Artificial Sequence
  Description of Artificial Sequence: Synthetic oligonucleotide
  Sense strand starting at position 472 of SEQ ID NO: 914939
aagugucuuuggguuggga

SEQ ID NO: 1041675 - RNA, 19 nt, Artificial Sequence
  Description of Artificial Sequence: Synthetic oligonucleotide
  Antisense strand to SEQ ID NO: 1041674
ucccaacccaaagacacuu

SEQ ID NO: 1041676 - RNA, 19 nt, Artificial Sequence
  Description of Artificial Sequence: Synthetic oligonucleotide
  Sense strand starting at position 474 of SEQ ID NO: 914939
gugucuuuggguugggaga

SEQ ID NO: 1041677 - RNA, 19 nt, Artificial Sequence
  Description of Artificial Sequence: Synthetic oligonucleotide
  Antisense strand to SEQ ID NO: 1041676
ucucccaacccaaagacac

SEQ ID NO: 1041678 - RNA, 19 nt, Artificial Sequence
  Description of Artificial Sequence: Synthetic oligonucleotide
  Sense strand starting at position 475 of SEQ ID NO: 914939
ugucuuuggguugggagaa

SEQ ID NO: 1041679 - RNA, 19 nt, Artificial Sequence
  Description of Artificial Sequence: Synthetic oligonucleotide
  Antisense strand to SEQ ID NO: 1041678
uucucccaacccaaagaca

SEQ ID NO: 1041680 - RNA, 19 nt, Artificial Sequence
  Description of Artificial Sequence: Synthetic oligonucleotide
  Sense strand starting at position 596 of SEQ ID NO: 914939
cucugaagggagugaugau

SEQ ID NO: 1041681 - RNA, 19 nt, Artificial Sequence
  Description of Artificial Sequence: Synthetic oligonucleotide
  Antisense strand to SEQ ID NO: 1041680
aucaucacucccuucagag

SEQ ID NO: 1041682 - RNA, 19 nt, Artificial Sequence
  Description of Artificial Sequence: Synthetic oligonucleotide
  Sense strand starting at position 722 of SEQ ID NO: 914939
aagggaaagugaugagcaa

SEQ ID NO: 1041683 - RNA, 19 nt, Artificial Sequence
  Description of Artificial Sequence: Synthetic oligonucleotide
  Antisense strand to SEQ ID NO: 1041682
uugcucaucacuuucccuu

SEQ ID NO: 1041684 - RNA, 19 nt, Artificial Sequence
  Description of Artificial Sequence: Synthetic oligonucleotide
  Sense strand starting at position 975 of SEQ ID NO: 914939
gacaacgaucuguggcaaa

SEQ ID NO: 1041685 - RNA, 19 nt, Artificial Sequence
  Description of Artificial Sequence: Synthetic oligonucleotide
  Antisense strand to SEQ ID NO: 1041684
uuugccacagaucguuguc

SEQ ID NO: 1041686 - RNA, 19 nt, Artificial Sequence
  Description of Artificial Sequence: Synthetic oligonucleotide
  Sense strand starting at position 2252 of SEQ ID NO: 914939
gucugauucgcuucguguc

SEQ ID NO: 1041687 - RNA, 19 nt, Artificial Sequence
  Description of Artificial Sequence: Synthetic oligonucleotide
  Antisense strand to SEQ ID NO: 1041686
gacacgaagcgaaucagac

SEQ ID NO: 1041688 - RNA, 19 nt, Artificial Sequence
  Description of Artificial Sequence: Synthetic oligonucleotide
  Sense strand starting at position 2265 of SEQ ID NO: 914939
cgugucuuuccgucaguuu

SEQ ID NO: 1041689 - RNA, 19 nt, Artificial Sequence
  Description of Artificial Sequence: Synthetic oligonucleotide
  Antisense strand to SEQ ID NO: 1041688
aaacugacggaaagacacg

SEQ ID NO: 1041690 - RNA, 19 nt, Artificial Sequence
  Description of Artificial Sequence: Synthetic oligonucleotide
  Sense strand starting at position 2327 of SEQ ID NO: 914939
cugugcuugugauuugacu

SEQ ID NO: 1041691 - RNA, 19 nt, Artificial Sequence
  Description of Artificial Sequence: Synthetic oligonucleotide
  Antisense strand to SEQ ID NO: 1041690
agucaaaucacaagcacag

SEQ ID NO: 1041692 - RNA, 19 nt, Artificial Sequence
  Description of Artificial Sequence: Synthetic oligonucleotide
  Sense strand starting at position 2329 of SEQ ID NO: 914939
gugcuugugauuugacuaa

SEQ ID NO: 1041693 - RNA, 19 nt, Artificial Sequence
  Description of Artificial Sequence: Synthetic oligonucleotide
  Antisense strand to SEQ ID NO: 1041692
uuagucaaaucacaagcac

SEQ ID NO: 1041694 - RNA, 19 nt, Artificial Sequence
  Description of Artificial Sequence: Synthetic oligonucleotide
  Sense strand starting at position 2359 of SEQ ID NO: 914939
gauuguuagccgucccugu

SEQ ID NO: 1041695 - RNA, 19 nt, Artificial Sequence
  Description of Artificial Sequence: Synthetic oligonucleotide
  Antisense strand to SEQ ID NO: 1041694
acagggacggcuaacaauc

SEQ ID NO: 1041696 - RNA, 19 nt, Artificial Sequence
  Description of Artificial Sequence: Synthetic oligonucleotide
  Sense strand starting at position 2382 of SEQ ID NO: 914939
ggcauccucugguucuaua

SEQ ID NO: 1041697 - RNA, 19 nt, Artificial Sequence
  Description of Artificial Sequence: Synthetic oligonucleotide
  Antisense strand to SEQ ID NO: 1041696
uauagaaccagaggaugcc

SEQ ID NO: 1041698 - RNA, 19 nt, Artificial Sequence
  Description of Artificial Sequence: Synthetic oligonucleotide
  Sense strand starting at position 2486 of SEQ ID NO: 914939
ugucaaaugcagcaucagu

SEQ ID NO: 1041699 - RNA, 19 nt, Artificial Sequence
  Description of Artificial Sequence: Synthetic oligonucleotide
  Antisense strand to SEQ ID NO: 1041698
acugaugcugcauuugaca

SEQ ID NO: 1041700 - RNA, 19 nt, Artificial Sequence
  Description of Artificial Sequence: Synthetic oligonucleotide
  Sense strand starting at position 2540 of SEQ ID NO: 914939
guggauucauccgugcauu

SEQ ID NO: 1041701 - RNA, 19 nt, Artificial Sequence
  Description of Artificial Sequence: Synthetic oligonucleotide
  Antisense strand to SEQ ID NO: 1041700
aaugcacggaugaauccac

SEQ ID NO: 1041702 - RNA, 19 nt, Artificial Sequence
  Description of Artificial Sequence: Synthetic oligonucleotide
  Sense strand starting at position 2550 of SEQ ID NO: 914939
ccgugcauucccgcaucua

SEQ ID NO: 1041703 - RNA, 19 nt, Artificial Sequence
  Description of Artificial Sequence: Synthetic oligonucleotide
  Antisense strand to SEQ ID NO: 1041702
uagaugcgggaaugcacgg

SEQ ID NO: 1041704 - RNA, 19 nt, Artificial Sequence
  Description of Artificial Sequence: Synthetic oligonucleotide
  Sense strand starting at position 2996 of SEQ ID NO: 914939
ggaguauccugggcugauu

SEQ ID NO: 1041705 - RNA, 19 nt, Artificial Sequence
  Description of Artificial Sequence: Synthetic oligonucleotide
  Antisense strand to SEQ ID NO: 1041704
aaucagcccaggauacucc

SEQ ID NO: 1041706 - RNA, 19 nt, Artificial Sequence
  Description of Artificial Sequence: Synthetic oligonucleotide
  Sense strand starting at position 3276 of SEQ ID NO: 914939
ggcaucugagcagauguaa

SEQ ID NO: 1041707 - RNA, 19 nt, Artificial Sequence
  Description of Artificial Sequence: Synthetic oligonucleotide
  Antisense strand to SEQ ID NO: 1041706
uuacaucugcucagaugcc

SEQ ID NO: 1041708 - RNA, 19 nt, Artificial Sequence
  Description of Artificial Sequence: Synthetic oligonucleotide
  Sense strand starting at position 3287 of SEQ ID NO: 914939
agauguaauuaccagggua

SEQ ID NO: 1041709 - RNA, 19 nt, Artificial Sequence
  Description of Artificial Sequence: Synthetic oligonucleotide
  Antisense strand to SEQ ID NO: 1041708
uacccugguaauuacaucu

SEQ ID NO: 1041710 - RNA, 19 nt, Artificial Sequence
  Description of Artificial Sequence: Synthetic oligonucleotide
  Sense strand starting at position 3289 of SEQ ID NO: 914939
auguaauuaccaggguaug

SEQ ID NO: 1041711 - RNA, 19 nt, Artificial Sequence
  Description of Artificial Sequence: Synthetic oligonucleotide
  Antisense strand to SEQ ID NO: 1041710
cauacccugguaauuacau

SEQ ID NO: 1041712 - RNA, 19 nt, Artificial Sequence
  Description of Artificial Sequence: Synthetic oligonucleotide
  Sense strand starting at position 3290 of SEQ ID NO: 914939
uguaauuaccaggguauga

SEQ ID NO: 1041713 - RNA, 19 nt, Artificial Sequence
  Description of Artificial Sequence: Synthetic oligonucleotide
  Antisense strand to SEQ ID NO: 1041712
ucauacccugguaauuaca

SEQ ID NO: 1041714 - RNA, 19 nt, Artificial Sequence
  Description of Artificial Sequence: Synthetic oligonucleotide
  Sense strand starting at position 3303 of SEQ ID NO: 914939
guaugaaaguacuuccuaa

SEQ ID NO: 1041715 - RNA, 19 nt, Artificial Sequence
  Description of Artificial Sequence: Synthetic oligonucleotide
  Antisense strand to SEQ ID NO: 1041714
uuaggaaguacuuucauac

SEQ ID NO: 1041716 - RNA, 19 nt, Artificial Sequence
  Description of Artificial Sequence: Synthetic oligonucleotide
  Sense strand starting at position 3344 of SEQ ID NO: 914939
uuaguaaauccugggacuu

SEQ ID NO: 1041717 - RNA, 19 nt, Artificial Sequence
  Description of Artificial Sequence: Synthetic oligonucleotide
  Antisense strand to SEQ ID NO: 1041716
aagucccaggauuuacuaa

SEQ ID NO: 1041718 - RNA, 19 nt, Artificial Sequence
  Description of Artificial Sequence: Synthetic oligonucleotide
  Sense strand starting at position 3345 of SEQ ID NO: 914939
uaguaaauccugggacuuc

SEQ ID NO: 1041719 - RNA, 19 nt, Artificial Sequence
  Description of Artificial Sequence: Synthetic oligonucleotide
  Antisense strand to SEQ ID NO: 1041718
gaagucccaggauuuacua

SEQ ID NO: 1041720 - RNA, 19 nt, Artificial Sequence
  Description of Artificial Sequence: Synthetic oligonucleotide
  Sense strand starting at position 3837 of SEQ ID NO: 914939
ccagacaugucagaauaau

SEQ ID NO: 1041721 - RNA, 19 nt, Artificial Sequence
  Description of Artificial Sequence: Synthetic oligonucleotide
  Antisense strand to SEQ ID NO: 1041720
auuauucugacaugucugg

SEQ ID NO: 1041722 - RNA, 19 nt, Artificial Sequence
  Description of Artificial Sequence: Synthetic oligonucleotide
  Sense strand starting at position 3879 of SEQ ID NO: 914939
acaucucugcucugcuaga

SEQ ID NO: 1041723 - RNA, 19 nt, Artificial Sequence
  Description of Artificial Sequence: Synthetic oligonucleotide
  Antisense strand to SEQ ID NO: 1041722
ucuagcagagcagagaugu

SEQ ID NO: 1041724 - RNA, 19 nt, Artificial Sequence
  Description of Artificial Sequence: Synthetic oligonucleotide
  Sense strand starting at position 233 of SEQ ID NO: 914940
ucuucuaugcuguaagaug

SEQ ID NO: 1041725 - RNA, 19 nt, Artificial Sequence
  Description of Artificial Sequence: Synthetic oligonucleotide
  Antisense strand to SEQ ID NO: 1041724
caucuuacagcauagaaga

SEQ ID NO: 1041726 - RNA, 19 nt, Artificial Sequence
  Description of Artificial Sequence: Synthetic oligonucleotide
  Sense strand starting at position 396 of SEQ ID NO: 914940
agcuucuucccugaaggau

SEQ ID NO: 1041727 - RNA, 19 nt, Artificial Sequence
  Description of Artificial Sequence: Synthetic oligonucleotide
  Antisense strand to SEQ ID NO: 1041726
auccuucagggaagaagcu

SEQ ID NO: 1041728 - RNA, 19 nt, Artificial Sequence
  Description of Artificial Sequence: Synthetic oligonucleotide
  Sense strand starting at position 423 of SEQ ID NO: 914940
aagaguaugcaguggcuaa

SEQ ID NO: 1041729 - RNA, 19 nt, Artificial Sequence
  Description of Artificial Sequence: Synthetic oligonucleotide
  Antisense strand to SEQ ID NO: 1041728
uuagccacugcauacucuu

SEQ ID NO: 1041730 - RNA, 19 nt, Artificial Sequence
  Description of Artificial Sequence: Synthetic oligonucleotide
  Sense strand starting at position 604 of SEQ ID NO: 914940
uauaguaagacguggcaca

SEQ ID NO: 1041731 - RNA, 19 nt, Artificial Sequence
  Description of Artificial Sequence: Synthetic oligonucleotide
  Antisense strand to SEQ ID NO: 1041730
ugugccacgucuuacuaua

SEQ ID NO: 1041732 - RNA, 19 nt, Artificial Sequence
  Description of Artificial Sequence: Synthetic oligonucleotide
  Sense strand starting at position 682 of SEQ ID NO: 914940
gaggucugucaagaguaga

SEQ ID NO: 1041733 - RNA, 19 nt, Artificial Sequence
  Description of Artificial Sequence: Synthetic oligonucleotide
  Antisense strand to SEQ ID NO: 1041732
ucuacucuugacagaccuc

SEQ ID NO: 1041734 - RNA, 19 nt, Artificial Sequence
  Description of Artificial Sequence: Synthetic oligonucleotide
  Sense strand starting at position 751 of SEQ ID NO: 914940
ggcaguuauuuggaaccaa

SEQ ID NO: 1041735 - RNA, 19 nt, Artificial Sequence
  Description of Artificial Sequence: Synthetic oligonucleotide
  Antisense strand to SEQ ID NO: 1041734
uugguuccaaauaacugcc

SEQ ID NO: 1041736 - RNA, 19 nt, Artificial Sequence
  Description of Artificial Sequence: Synthetic oligonucleotide
  Sense strand starting at position 830 of SEQ ID NO: 914940
gggucugcuacugagagga

SEQ ID NO: 1041737 - RNA, 19 nt, Artificial Sequence
  Description of Artificial Sequence: Synthetic oligonucleotide
  Antisense strand to SEQ ID NO: 1041736
uccucucaguagcagaccc

SEQ ID NO: 1041738 - RNA, 19 nt, Artificial Sequence
  Description of Artificial Sequence: Synthetic oligonucleotide
  Sense strand starting at position 956 of SEQ ID NO: 914940
caggcuugcccggaagaca

SEQ ID NO: 1041739 - RNA, 19 nt, Artificial Sequence
  Description of Artificial Sequence: Synthetic oligonucleotide
  Antisense strand to SEQ ID NO: 1041738
ugucuuccgggcaagccug

SEQ ID NO: 1041740 - RNA, 19 nt, Artificial Sequence
  Description of Artificial Sequence: Synthetic oligonucleotide
  Sense strand starting at position 1048 of SEQ ID NO: 914940
acaguugucccauggagaa

SEQ ID NO: 1041741 - RNA, 19 nt, Artificial Sequence
  Description of Artificial Sequence: Synthetic oligonucleotide
  Antisense strand to SEQ ID NO: 1041740
uucuccaugggacaacugu

SEQ ID NO: 1041742 - RNA, 19 nt, Artificial Sequence
  Description of Artificial Sequence: Synthetic oligonucleotide
  Sense strand starting at position 1151 of SEQ ID NO: 914940
gggugauauucccuggcca

SEQ ID NO: 1041743 - RNA, 19 nt, Artificial Sequence
  Description of Artificial Sequence: Synthetic oligonucleotide
  Antisense strand to SEQ ID NO: 1041742
uggccagggaauaucaccc

SEQ ID NO: 1041744 - RNA, 19 nt, Artificial Sequence
  Description of Artificial Sequence: Synthetic oligonucleotide
  Sense strand starting at position 1152 of SEQ ID NO: 914940
ggugauauucccuggccag

SEQ ID NO: 1041745 - RNA, 19 nt, Artificial Sequence
  Description of Artificial Sequence: Synthetic oligonucleotide
  Antisense strand to SEQ ID NO: 1041744
cuggccagggaauaucacc

SEQ ID NO: 1041746 - RNA, 19 nt, Artificial Sequence
  Description of Artificial Sequence: Synthetic oligonucleotide
  Sense strand starting at position 1153 of SEQ ID NO: 914940
gugauauucccuggccaga

SEQ ID NO: 1041747 - RNA, 19 nt, Artificial Sequence
  Description of Artificial Sequence: Synthetic oligonucleotide
  Antisense strand to SEQ ID NO: 1041746
ucuggccagggaauaucac

SEQ ID NO: 1041748 - RNA, 19 nt, Artificial Sequence
  Description of Artificial Sequence: Synthetic oligonucleotide
  Sense strand starting at position 1155 of SEQ ID NO: 914940
gauauucccuggccagaag

SEQ ID NO: 1041749 - RNA, 19 nt, Artificial Sequence
  Description of Artificial Sequence: Synthetic oligonucleotide
  Antisense strand to SEQ ID NO: 1041748
cuucuggccagggaauauc

SEQ ID NO: 1041750 - RNA, 19 nt, Artificial Sequence
  Description of Artificial Sequence: Synthetic oligonucleotide
  Sense strand starting at position 1174 of SEQ ID NO: 914940
cagaguaagccaggcacua

SEQ ID NO: 1041751 - RNA, 19 nt, Artificial Sequence
  Description of Artificial Sequence: Synthetic oligonucleotide
  Antisense strand to SEQ ID NO: 1041750
uagugccuggcuuacucug

SEQ ID NO: 1041752 - RNA, 19 nt, Artificial Sequence
  Description of Artificial Sequence: Synthetic oligonucleotide
  Sense strand starting at position 1429 of SEQ ID NO: 914940
ugaauauuacuaugcugga

SEQ ID NO: 1041753 - RNA, 19 nt, Artificial Sequence
  Description of Artificial Sequence: Synthetic oligonucleotide
  Antisense strand to SEQ ID NO: 1041752
uccagcauaguaauauuca

SEQ ID NO: 1041754 - RNA, 19 nt, Artificial Sequence
  Description of Artificial Sequence: Synthetic oligonucleotide
  Sense strand starting at position 1477 of SEQ ID NO: 914940
uaaagauccuauguuugag

SEQ ID NO: 1041755 - RNA, 19 nt, Artificial Sequence
  Description of Artificial Sequence: Synthetic oligonucleotide
  Antisense strand to SEQ ID NO: 1041754
cucaaacauaggaucuuua

SEQ ID NO: 1041756 - RNA, 19 nt, Artificial Sequence
  Description of Artificial Sequence: Synthetic oligonucleotide
  Sense strand starting at position 1479 of SEQ ID NO: 914940
aagauccuauguuugagau

SEQ ID NO: 1041757 - RNA, 19 nt, Artificial Sequence
  Description of Artificial Sequence: Synthetic oligonucleotide
  Antisense strand to SEQ ID NO: 1041756
aucucaaacauaggaucuu

SEQ ID NO: 1041758 - RNA, 19 nt, Artificial Sequence
  Description of Artificial Sequence: Synthetic oligonucleotide
  Sense strand starting at position 1480 of SEQ ID NO: 914940
agauccuauguuugagaug

SEQ ID NO: 1041759 - RNA, 19 nt, Artificial Sequence
  Description of Artificial Sequence: Synthetic oligonucleotide
  Antisense strand to SEQ ID NO: 1041758
caucucaaacauaggaucu

SEQ ID NO: 1041760 - RNA, 19 nt, Artificial Sequence
  Description of Artificial Sequence: Synthetic oligonucleotide
  Sense strand starting at position 1485 of SEQ ID NO: 914940
cuauguuugagaugagagg

SEQ ID NO: 1041761 - RNA, 19 nt, Artificial Sequence
  Description of Artificial Sequence: Synthetic oligonucleotide
  Antisense strand to SEQ ID NO: 1041760
ccucucaucucaaacauag

SEQ ID NO: 1041762 - RNA, 19 nt, Artificial Sequence
  Description of Artificial Sequence: Synthetic oligonucleotide
  Sense strand starting at position 2200 of SEQ ID NO: 914940
gaggaacaugugugacuca

SEQ ID NO: 1041763 - RNA, 19 nt, Artificial Sequence
  Description of Artificial Sequence: Synthetic oligonucleotide
  Antisense strand to SEQ ID NO: 1041762
ugagucacacauguuccuc

SEQ ID NO: 1041764 - RNA, 19 nt, Artificial Sequence
  Description of Artificial Sequence: Synthetic oligonucleotide
  Sense strand starting at position 2203 of SEQ ID NO: 914940
gaacaugugugacucagau

SEQ ID NO: 1041765 - RNA, 19 nt, Artificial Sequence
  Description of Artificial Sequence: Synthetic oligonucleotide
  Antisense strand to SEQ ID NO: 1041764
aucugagucacacauguuc

SEQ ID NO: 1041766 - RNA, 19 nt, Artificial Sequence
  Description of Artificial Sequence: Synthetic oligonucleotide
  Sense strand starting at position 2205 of SEQ ID NO: 914940
acaugugugacucagaugu

SEQ ID NO: 1041767 - RNA, 19 nt, Artificial Sequence
  Description of Artificial Sequence: Synthetic oligonucleotide
  Antisense strand to SEQ ID NO: 1041766
acaucugagucacacaugu

SEQ ID NO: 1041768 - RNA, 19 nt, Artificial Sequence
  Description of Artificial Sequence: Synthetic oligonucleotide
  Sense strand starting at position 2351 of SEQ ID NO: 914940
agugcuuaaccuuggaaac

SEQ ID NO: 1041769 - RNA, 19 nt, Artificial Sequence
  Description of Artificial Sequence: Synthetic oligonucleotide
  Antisense strand to SEQ ID NO: 1041768
guuuccaagguuaagcacu

SEQ ID NO: 1041770 - RNA, 19 nt, Artificial Sequence
  Description of Artificial Sequence: Synthetic oligonucleotide
  Sense strand starting at position 2352 of SEQ ID NO: 914940
gugcuuaaccuuggaaaca

SEQ ID NO: 1041771 - RNA, 19 nt, Artificial Sequence
  Description of Artificial Sequence: Synthetic oligonucleotide
  Antisense strand to SEQ ID NO: 1041770
uguuuccaagguuaagcac

SEQ ID NO: 1041772 - RNA, 19 nt, Artificial Sequence
  Description of Artificial Sequence: Synthetic oligonucleotide
  Sense strand starting at position 2439 of SEQ ID NO: 914940
cccuaugagguguauguuu

SEQ ID NO: 1041773 - RNA, 19 nt, Artificial Sequence
  Description of Artificial Sequence: Synthetic oligonucleotide
  Antisense strand to SEQ ID NO: 1041772
aaacauacaccucauaggg

SEQ ID NO: 1041774 - RNA, 19 nt, Artificial Sequence
  Description of Artificial Sequence: Synthetic oligonucleotide
  Sense strand starting at position 2468 of SEQ ID NO: 914940
gagccuuuaucacugauag

SEQ ID NO: 1041775 - RNA, 19 nt, Artificial Sequence
  Description of Artificial Sequence: Synthetic oligonucleotide
  Antisense strand to SEQ ID NO: 1041774
cuaucagugauaaaggcuc

SEQ ID NO: 1041776 - RNA, 19 nt, Artificial Sequence
  Description of Artificial Sequence: Synthetic oligonucleotide
  Sense strand starting at position 2469 of SEQ ID NO: 914940
agccuuuaucacugauaga

SEQ ID NO: 1041777 - RNA, 19 nt, Artificial Sequence
  Description of Artificial Sequence: Synthetic oligonucleotide
  Antisense strand to SEQ ID NO: 1041776
ucuaucagugauaaaggcu

SEQ ID NO: 1041778 - RNA, 19 nt, Artificial Sequence
  Description of Artificial Sequence: Synthetic oligonucleotide
  Sense strand starting at position 2662 of SEQ ID NO: 914940
cugcuuucucaaggaauuc

SEQ ID NO: 1041779 - RNA, 19 nt, Artificial Sequence
  Description of Artificial Sequence: Synthetic oligonucleotide
  Antisense strand to SEQ ID NO: 1041778
gaauuccuugagaaagcag

SEQ ID NO: 1041780 - RNA, 19 nt, Artificial Sequence
  Description of Artificial Sequence: Synthetic oligonucleotide
  Sense strand starting at position 2677 of SEQ ID NO: 914940
auuccaaaggccugggauu

SEQ ID NO: 1041781 - RNA, 19 nt, Artificial Sequence
  Description of Artificial Sequence: Synthetic oligonucleotide
  Antisense strand to SEQ ID NO: 1041780
aaucccaggccuuuggaau

SEQ ID NO: 1041782 - RNA, 19 nt, Artificial Sequence
  Description of Artificial Sequence: Synthetic oligonucleotide
  Sense strand starting at position 2877 of SEQ ID NO: 914940
ggcucccucucauuaagga

SEQ ID NO: 1041783 - RNA, 19 nt, Artificial Sequence
  Description of Artificial Sequence: Synthetic oligonucleotide
  Antisense strand to SEQ ID NO: 1041782
uccuuaaugagagggagcc

SEQ ID NO: 1041784 - RNA, 19 nt, Artificial Sequence
  Description of Artificial Sequence: Synthetic oligonucleotide
  Sense strand starting at position 2878 of SEQ ID NO: 914940
gcucccucucauuaaggaa

SEQ ID NO: 1041785 - RNA, 19 nt, Artificial Sequence
  Description of Artificial Sequence: Synthetic oligonucleotide
  Antisense strand to SEQ ID NO: 1041784
uuccuuaaugagagggagc

SEQ ID NO: 1041786 - RNA, 19 nt, Artificial Sequence
  Description of Artificial Sequence: Synthetic oligonucleotide
  Sense strand starting at position 2890 of SEQ ID NO: 914940
uaaggaacuccgugaccuu

SEQ ID NO: 1041787 - RNA, 19 nt, Artificial Sequence
  Description of Artificial Sequence: Synthetic oligonucleotide
  Antisense strand to SEQ ID NO: 1041786
aaggucacggaguuccuua

SEQ ID NO: 1041788 - RNA, 19 nt, Artificial Sequence
  Description of Artificial Sequence: Synthetic oligonucleotide
  Sense strand starting at position 2957 of SEQ ID NO: 914940
gugcucucacagcacuuaa

SEQ ID NO: 1041789 - RNA, 19 nt, Artificial Sequence
  Description of Artificial Sequence: Synthetic oligonucleotide
  Antisense strand to SEQ ID NO: 1041788
uuaagugcugugagagcac

SEQ ID NO: 1041790 - RNA, 19 nt, Artificial Sequence
  Description of Artificial Sequence: Synthetic oligonucleotide
  Sense strand starting at position 3013 of SEQ ID NO: 914940
ccaagaaauguuugccuua

SEQ ID NO: 1041791 - RNA, 19 nt, Artificial Sequence
  Description of Artificial Sequence: Synthetic oligonucleotide
  Antisense strand to SEQ ID NO: 1041790
uaaggcaaacauuucuugg

SEQ ID NO: 1041792 - RNA, 19 nt, Artificial Sequence
  Description of Artificial Sequence: Synthetic oligonucleotide
  Sense strand starting at position 3016 of SEQ ID NO: 914940
agaaauguuugccuuacac

SEQ ID NO: 1041793 - RNA, 19 nt, Artificial Sequence
  Description of Artificial Sequence: Synthetic oligonucleotide
  Antisense strand to SEQ ID NO: 1041792
guguaaggcaaacauuucu

SEQ ID NO: 1041794 - RNA, 19 nt, Artificial Sequence
  Description of Artificial Sequence: Synthetic oligonucleotide
  Sense strand starting at position 3072 of SEQ ID NO: 914940
acuguauguccagcgcuua

SEQ ID NO: 1041795 - RNA, 19 nt, Artificial Sequence
  Description of Artificial Sequence: Synthetic oligonucleotide
  Antisense strand to SEQ ID NO: 1041794
uaagcgcuggacauacagu

SEQ ID NO: 1041796 - RNA, 19 nt, Artificial Sequence
  Description of Artificial Sequence: Synthetic oligonucleotide
  Sense strand starting at position 3301 of SEQ ID NO: 914940
ugccuaaucgugcucucau

SEQ ID NO: 1041797 - RNA, 19 nt, Artificial Sequence
  Description of Artificial Sequence: Synthetic oligonucleotide
  Antisense strand to SEQ ID NO: 1041796
augagagcacgauuaggca

SEQ ID NO: 1041798 - RNA, 19 nt, Artificial Sequence
  Description of Artificial Sequence: Synthetic oligonucleotide
  Sense strand starting at position 3408 of SEQ ID NO: 914940
gaaugacaauguuugauuc

SEQ ID NO: 1041799 - RNA, 19 nt, Artificial Sequence
  Description of Artificial Sequence: Synthetic oligonucleotide
  Antisense strand to SEQ ID NO: 1041798
gaaucaaacauugucauuc

SEQ ID NO: 1041800 - RNA, 19 nt, Artificial Sequence
  Description of Artificial Sequence: Synthetic oligonucleotide
  Sense strand starting at position 3640 of SEQ ID NO: 914940
agggcuuugcaaugugaca

SEQ ID NO: 1041801 - RNA, 19 nt, Artificial Sequence
  Description of Artificial Sequence: Synthetic oligonucleotide
  Antisense strand to SEQ ID NO: 1041800
ugucacauugcaaagcccu

SEQ ID NO: 1041802 - RNA, 19 nt, Artificial Sequence
  Description of Artificial Sequence: Synthetic oligonucleotide
  Sense strand starting at position 3659 of SEQ ID NO: 914940
gaaggacuguuuccucaau

SEQ ID NO: 1041803 - RNA, 19 nt, Artificial Sequence
  Description of Artificial Sequence: Synthetic oligonucleotide
  Antisense strand to SEQ ID NO: 1041802
auugaggaaacaguccuuc

SEQ ID NO: 1041804 - RNA, 19 nt, Artificial Sequence
  Description of Artificial Sequence: Synthetic oligonucleotide
  Sense strand starting at position 544 of SEQ ID NO: 914941
ggaagacaccacugcucua

SEQ ID NO: 1041805 - RNA, 19 nt, Artificial Sequence
  Description of Artificial Sequence: Synthetic oligonucleotide
  Antisense strand to SEQ ID NO: 1041804
uagagcaguggugucuucc

SEQ ID NO: 1041806 - RNA, 19 nt, Artificial Sequence
  Description of Artificial Sequence: Synthetic oligonucleotide
  Sense strand starting at position 602 of SEQ ID NO: 914941
ggcuaacucuggcggaagu

SEQ ID NO: 1041807 - RNA, 19 nt, Artificial Sequence
  Description of Artificial Sequence: Synthetic oligonucleotide
  Antisense strand to SEQ ID NO: 1041806
acuuccgccagaguuagcc

SEQ ID NO: 1041808 - RNA, 19 nt, Artificial Sequence
  Description of Artificial Sequence: Synthetic oligonucleotide
  Sense strand starting at position 685 of SEQ ID NO: 914941
cuagguagcugguaaggau

SEQ ID NO: 1041809 - RNA, 19 nt, Artificial Sequence
  Description of Artificial Sequence: Synthetic oligonucleotide
  Antisense strand to SEQ ID NO: 1041808
auccuuaccagcuaccuag

SEQ ID NO: 1041810 - RNA, 19 nt, Artificial Sequence
  Description of Artificial Sequence: Synthetic oligonucleotide
  Sense strand starting at position 833 of SEQ ID NO: 914941
ugggaugccuggguuguua

SEQ ID NO: 1041811 - RNA, 19 nt, Artificial Sequence
  Description of Artificial Sequence: Synthetic oligonucleotide
  Antisense strand to SEQ ID NO: 1041810
uaacaacccaggcauccca

SEQ ID NO: 1041812 - RNA, 19 nt, Artificial Sequence
  Description of Artificial Sequence: Synthetic oligonucleotide
  Sense strand starting at position 1017 of SEQ ID NO: 914941
gaggcaguagccuggaaua

SEQ ID NO: 1041813 - RNA, 19 nt, Artificial Sequence
  Description of Artificial Sequence: Synthetic oligonucleotide
  Antisense strand to SEQ ID NO: 1041812
uauuccaggcuacugccuc

SEQ ID NO: 1041814 - RNA, 19 nt, Artificial Sequence
  Description of Artificial Sequence: Synthetic oligonucleotide
  Sense strand starting at position 1282 of SEQ ID NO: 914941
gggcgcuuccaguauggga

SEQ ID NO: 1041815 - RNA, 19 nt, Artificial Sequence
  Description of Artificial Sequence: Synthetic oligonucleotide
  Antisense strand to SEQ ID NO: 1041814
ucccauacuggaagcgccc

SEQ ID NO: 1041816 - RNA, 19 nt, Artificial Sequence
  Description of Artificial Sequence: Synthetic oligonucleotide
  Sense strand starting at position 1284 of SEQ ID NO: 914941
gcgcuuccaguaugggaau

SEQ ID NO: 1041817 - RNA, 19 nt, Artificial Sequence
  Description of Artificial Sequence: Synthetic oligonucleotide
  Antisense strand to SEQ ID NO: 1041816
auucccauacuggaagcgc

SEQ ID NO: 1041818 - RNA, 19 nt, Artificial Sequence
  Description of Artificial Sequence: Synthetic oligonucleotide
  Sense strand starting at position 1442 of SEQ ID NO: 914941
gcgugaugcccaggcagaa

SEQ ID NO: 1041819 - RNA, 19 nt, Artificial Sequence
  Description of Artificial Sequence: Synthetic oligonucleotide
  Antisense strand to SEQ ID NO: 1041818
uucugccugggcaucacgc

SEQ ID NO: 1041820 - RNA, 19 nt, Artificial Sequence
  Description of Artificial Sequence: Synthetic oligonucleotide
  Sense strand starting at position 1690 of SEQ ID NO: 914941
gagugcugcucccgggaua

SEQ ID NO: 1041821 - RNA, 19 nt, Artificial Sequence
  Description of Artificial Sequence: Synthetic oligonucleotide
  Antisense strand to SEQ ID NO: 1041820
uaucccgggagcagcacuc

SEQ ID NO: 1041822 - RNA, 19 nt, Artificial Sequence
  Description of Artificial Sequence: Synthetic oligonucleotide
  Sense strand starting at position 1742 of SEQ ID NO: 914941
aagaguugcucgcgcgcaa

SEQ ID NO: 1041823 - RNA, 19 nt, Artificial Sequence
  Description of Artificial Sequence: Synthetic oligonucleotide
  Antisense strand to SEQ ID NO: 1041822
uugcgcgcgagcaacucuu

SEQ ID NO: 1041824 - RNA, 19 nt, Artificial Sequence
  Description of Artificial Sequence: Synthetic oligonucleotide
  Sense strand starting at position 2465 of SEQ ID NO: 914941
uaucgcuucccagaacgau

SEQ ID NO: 1041825 - RNA, 19 nt, Artificial Sequence
  Description of Artificial Sequence: Synthetic oligonucleotide
  Antisense strand to SEQ ID NO: 1041824
aucguucugggaagcgaua

SEQ ID NO: 1041826 - RNA, 19 nt, Artificial Sequence
  Description of Artificial Sequence: Synthetic oligonucleotide
  Sense strand starting at position 2676 of SEQ ID NO: 914941
gcugaauucgcaggcccaa

SEQ ID NO: 1041827 - RNA, 19 nt, Artificial Sequence
  Description of Artificial Sequence: Synthetic oligonucleotide
  Antisense strand to SEQ ID NO: 1041826
uugggccugcgaauucagc

SEQ ID NO: 1041828 - RNA, 19 nt, Artificial Sequence
  Description of Artificial Sequence: Synthetic oligonucleotide
  Sense strand starting at position 2712 of SEQ ID NO: 914941
agaccugggccuugagaau

SEQ ID NO: 1041829 - RNA, 19 nt, Artificial Sequence
  Description of Artificial Sequence: Synthetic oligonucleotide
  Antisense strand to SEQ ID NO: 1041828
auucucaaggcccaggucu

SEQ ID NO: 1041830 - RNA, 19 nt, Artificial Sequence
  Description of Artificial Sequence: Synthetic oligonucleotide
  Sense strand starting at position 2719 of SEQ ID NO: 914941
ggccuugagaaucauguuu

SEQ ID NO: 1041831 - RNA, 19 nt, Artificial Sequence
  Description of Artificial Sequence: Synthetic oligonucleotide
  Antisense strand to SEQ ID NO: 1041830
aaacaugauucucaaggcc

SEQ ID NO: 1041832 - RNA, 19 nt, Artificial Sequence
  Description of Artificial Sequence: Synthetic oligonucleotide
  Sense strand starting at position 2854 of SEQ ID NO: 914941
guugcuguuccugaugauu

SEQ ID NO: 1041833 - RNA, 19 nt, Artificial Sequence
  Description of Artificial Sequence: Synthetic oligonucleotide
  Antisense strand to SEQ ID NO: 1041832
aaucaucaggaacagcaac

SEQ ID NO: 1041834 - RNA, 19 nt, Artificial Sequence
  Description of Artificial Sequence: Synthetic oligonucleotide
  Sense strand starting at position 2856 of SEQ ID NO: 914941
ugcuguuccugaugauuga

SEQ ID NO: 1041835 - RNA, 19 nt, Artificial Sequence
  Description of Artificial Sequence: Synthetic oligonucleotide
  Antisense strand to SEQ ID NO: 1041834
ucaaucaucaggaacagca

SEQ ID NO: 1041836 - RNA, 19 nt, Artificial Sequence
  Description of Artificial Sequence: Synthetic oligonucleotide
  Sense strand starting at position 2857 of SEQ ID NO: 914941
gcuguuccugaugauugaa

SEQ ID NO: 1041837 - RNA, 19 nt, Artificial Sequence
  Description of Artificial Sequence: Synthetic oligonucleotide
  Antisense strand to SEQ ID NO: 1041836
uucaaucaucaggaacagc

SEQ ID NO: 1041838 - RNA, 19 nt, Artificial Sequence
  Description of Artificial Sequence: Synthetic oligonucleotide
  Sense strand starting at position 2859 of SEQ ID NO: 914941
uguuccugaugauugaaag

SEQ ID NO: 1041839 - RNA, 19 nt, Artificial Sequence
  Description of Artificial Sequence: Synthetic oligonucleotide
  Antisense strand to SEQ ID NO: 1041838
cuuucaaucaucaggaaca

SEQ ID NO: 1041840 - RNA, 19 nt, Artificial Sequence
  Description of Artificial Sequence: Synthetic oligonucleotide
  Sense strand starting at position 2925 of SEQ ID NO: 914941
uauugauuguggguccaua

SEQ ID NO: 1041841 - RNA, 19 nt, Artificial Sequence
  Description of Artificial Sequence: Synthetic oligonucleotide
  Antisense strand to SEQ ID NO: 1041840
uauggacccacaaucaaua

SEQ ID NO: 1041842 - RNA, 19 nt, Artificial Sequence
  Description of Artificial Sequence: Synthetic oligonucleotide
  Sense strand starting at position 2937 of SEQ ID NO: 914941
guccauagcugagggaaga

SEQ ID NO: 1041843 - RNA, 19 nt, Artificial Sequence
  Description of Artificial Sequence: Synthetic oligonucleotide
  Antisense strand to SEQ ID NO: 1041842
ucuucccucagcuauggac

SEQ ID NO: 1041844 - RNA, 19 nt, Artificial Sequence
  Description of Artificial Sequence: Synthetic oligonucleotide
  Sense strand starting at position 3499 of SEQ ID NO: 914941
cugacuagaugagaauguu

SEQ ID NO: 1041845 - RNA, 19 nt, Artificial Sequence
  Description of Artificial Sequence: Synthetic oligonucleotide
  Antisense strand to SEQ ID NO: 1041844
aacauucucaucuagucag

SEQ ID NO: 1041846 - RNA, 19 nt, Artificial Sequence
  Description of Artificial Sequence: Synthetic oligonucleotide
  Sense strand starting at position 3641 of SEQ ID NO: 914941
ucgccucucuggccugaaa

SEQ ID NO: 1041847 - RNA, 19 nt, Artificial Sequence
  Description of Artificial Sequence: Synthetic oligonucleotide
  Antisense strand to SEQ ID NO: 1041846
uuucaggccagagaggcga

SEQ ID NO: 1041848 - RNA, 19 nt, Artificial Sequence
  Description of Artificial Sequence: Synthetic oligonucleotide
  Sense strand starting at position 3682 of SEQ ID NO: 914941
gacagucaguucugaauuc

SEQ ID NO: 1041849 - RNA, 19 nt, Artificial Sequence
  Description of Artificial Sequence: Synthetic oligonucleotide
  Antisense strand to SEQ ID NO: 1041848
gaauucagaacugacuguc

SEQ ID NO: 1041850 - RNA, 19 nt, Artificial Sequence
  Description of Artificial Sequence: Synthetic oligonucleotide
  Sense strand starting at position 3683 of SEQ ID NO: 914941
acagucaguucugaauucu

SEQ ID NO: 1041851 - RNA, 19 nt, Artificial Sequence
  Description of Artificial Sequence: Synthetic oligonucleotide
  Antisense strand to SEQ ID NO: 1041850
agaauucagaacugacugu

SEQ ID NO: 1041852 - RNA, 19 nt, Artificial Sequence
  Description of Artificial Sequence: Synthetic oligonucleotide
  Sense strand starting at position 3695 of SEQ ID NO: 914941
gaauucuucuuccgcugga

SEQ ID NO: 1041853 - RNA, 19 nt, Artificial Sequence
  Description of Artificial Sequence: Synthetic oligonucleotide
  Antisense strand to SEQ ID NO: 1041852
uccagcggaagaagaauuc

SEQ ID NO: 1041854 - RNA, 19 nt, Artificial Sequence
  Description of Artificial Sequence: Synthetic oligonucleotide
  Sense strand starting at position 3738 of SEQ ID NO: 914941
gaggauuugucucugcggu

SEQ ID NO: 1041855 - RNA, 19 nt, Artificial Sequence
  Description of Artificial Sequence: Synthetic oligonucleotide
  Antisense strand to SEQ ID NO: 1041854
accgcagagacaaauccuc

SEQ ID NO: 1041856 - RNA, 19 nt, Artificial Sequence
  Description of Artificial Sequence: Synthetic oligonucleotide
  Sense strand starting at position 3740 of SEQ ID NO: 914941
ggauuugucucugcgguga

SEQ ID NO: 1041857 - RNA, 19 nt, Artificial Sequence
  Description of Artificial Sequence: Synthetic oligonucleotide
  Antisense strand to SEQ ID NO: 1041856
ucaccgcagagacaaaucc

SEQ ID NO: 1041858 - RNA, 19 nt, Artificial Sequence
  Description of Artificial Sequence: Synthetic oligonucleotide
  Sense strand starting at position 3742 of SEQ ID NO: 914941
auuugucucugcggugaaa

SEQ ID NO: 1041859 - RNA, 19 nt, Artificial Sequence
  Description of Artificial Sequence: Synthetic oligonucleotide
  Antisense strand to SEQ ID NO: 1041858
uuucaccgcagagacaaau

SEQ ID NO: 1041860 - RNA, 19 nt, Artificial Sequence
  Description of Artificial Sequence: Synthetic oligonucleotide
  Sense strand starting at position 3789 of SEQ ID NO: 914941
gggugacgucccuucgcau

SEQ ID NO: 1041861 - RNA, 19 nt, Artificial Sequence
  Description of Artificial Sequence: Synthetic oligonucleotide
  Antisense strand to SEQ ID NO: 1041860
augcgaagggacgucaccc

SEQ ID NO: 1041862 - RNA, 19 nt, Artificial Sequence
  Description of Artificial Sequence: Synthetic oligonucleotide
  Sense strand starting at position 3790 of SEQ ID NO: 914941
ggugacgucccuucgcauu

SEQ ID NO: 1041863 - RNA, 19 nt, Artificial Sequence
  Description of Artificial Sequence: Synthetic oligonucleotide
  Antisense strand to SEQ ID NO: 1041862
aaugcgaagggacgucacc

SEQ ID NO: 1041864 - RNA, 19 nt, Artificial Sequence
  Description of Artificial Sequence: Synthetic oligonucleotide
  Sense strand starting at position 3825 of SEQ ID NO: 914941
acagaagacuguccuuuaa

SEQ ID NO: 1041865 - RNA, 19 nt, Artificial Sequence
  Description of Artificial Sequence: Synthetic oligonucleotide
  Antisense strand to SEQ ID NO: 1041864
uuaaaggacagucuucugu

SEQ ID NO: 1041866 - RNA, 19 nt, Artificial Sequence
  Description of Artificial Sequence: Synthetic oligonucleotide
  Sense strand starting at position 3827 of SEQ ID NO: 914941
agaagacuguccuuuaagg

SEQ ID NO: 1041867 - RNA, 19 nt, Artificial Sequence
  Description of Artificial Sequence: Synthetic oligonucleotide
  Antisense strand to SEQ ID NO: 1041866
ccuuaaaggacagucuucu

SEQ ID NO: 1041868 - RNA, 19 nt, Artificial Sequence
  Description of Artificial Sequence: Synthetic oligonucleotide
  Sense strand starting at position 3901 of SEQ ID NO: 914941
gacagauagcuuugggaug

SEQ ID NO: 1041869 - RNA, 19 nt, Artificial Sequence
  Description of Artificial Sequence: Synthetic oligonucleotide
  Antisense strand to SEQ ID NO: 1041868
caucccaaagcuaucuguc

SEQ ID NO: 1041870 - RNA, 19 nt, Artificial Sequence
  Description of Artificial Sequence: Synthetic oligonucleotide
  Sense strand starting at position 231 of SEQ ID NO: 914942
uucccuuucuuggcuguaa

SEQ ID NO: 1041871 - RNA, 19 nt, Artificial Sequence
  Description of Artificial Sequence: Synthetic oligonucleotide
  Antisense strand to SEQ ID NO: 1041870
uuacagccaagaaagggaa

SEQ ID NO: 1041872 - RNA, 19 nt, Artificial Sequence
  Description of Artificial Sequence: Synthetic oligonucleotide
  Sense strand starting at position 232 of SEQ ID NO: 914942
ucccuuucuuggcuguaaa

SEQ ID NO: 1041873 - RNA, 19 nt, Artificial Sequence
  Description of Artificial Sequence: Synthetic oligonucleotide
  Antisense strand to SEQ ID NO: 1041872
uuuacagccaagaaaggga

SEQ ID NO: 1041874 - RNA, 19 nt, Artificial Sequence
  Description of Artificial Sequence: Synthetic oligonucleotide
  Sense strand starting at position 357 of SEQ ID NO: 914942
gugguuuccaaucagcuga

SEQ ID NO: 1041875 - RNA, 19 nt, Artificial Sequence
  Description of Artificial Sequence: Synthetic oligonucleotide
  Antisense strand to SEQ ID NO: 1041874
ucagcugauuggaaaccac

SEQ ID NO: 1041876 - RNA, 19 nt, Artificial Sequence
  Description of Artificial Sequence: Synthetic oligonucleotide
  Sense strand starting at position 398 of SEQ ID NO: 914942
gccauugugauguggacau

SEQ ID NO: 1041877 - RNA, 19 nt, Artificial Sequence
  Description of Artificial Sequence: Synthetic oligonucleotide
  Antisense strand to SEQ ID NO: 1041876
auguccacaucacaauggc

SEQ ID NO: 1041878 - RNA, 19 nt, Artificial Sequence
  Description of Artificial Sequence: Synthetic oligonucleotide
  Sense strand starting at position 471 of SEQ ID NO: 914942
aguccuaguccuggucaca

SEQ ID NO: 1041879 - RNA, 19 nt, Artificial Sequence
  Description of Artificial Sequence: Synthetic oligonucleotide
  Antisense strand to SEQ ID NO: 1041878
ugugaccaggacuaggacu

SEQ ID NO: 1041880 - RNA, 19 nt, Artificial Sequence
  Description of Artificial Sequence: Synthetic oligonucleotide
  Sense strand starting at position 720 of SEQ ID NO: 914942
uggaguaguuugaguuggu

SEQ ID NO: 1041881 - RNA, 19 nt, Artificial Sequence
  Description of Artificial Sequence: Synthetic oligonucleotide
  Antisense strand to SEQ ID NO: 1041880
accaacucaaacuacucca

SEQ ID NO: 1041882 - RNA, 19 nt, Artificial Sequence
  Description of Artificial Sequence: Synthetic oligonucleotide
  Sense strand starting at position 721 of SEQ ID NO: 914942
ggaguaguuugaguugguc

SEQ ID NO: 1041883 - RNA, 19 nt, Artificial Sequence
  Description of Artificial Sequence: Synthetic oligonucleotide
  Antisense strand to SEQ ID NO: 1041882
gaccaacucaaacuacucc

SEQ ID NO: 1041884 - RNA, 19 nt, Artificial Sequence
  Description of Artificial Sequence: Synthetic oligonucleotide
  Sense strand starting at position 725 of SEQ ID NO: 914942
uaguuugaguuggucccua

SEQ ID NO: 1041885 - RNA, 19 nt, Artificial Sequence
  Description of Artificial Sequence: Synthetic oligonucleotide
  Antisense strand to SEQ ID NO: 1041884
uagggaccaacucaaacua

SEQ ID NO: 1041886 - RNA, 19 nt, Artificial Sequence
  Description of Artificial Sequence: Synthetic oligonucleotide
  Sense strand starting at position 876 of SEQ ID NO: 914942
agguuuaacuuggaauugu

SEQ ID NO: 1041887 - RNA, 19 nt, Artificial Sequence
  Description of Artificial Sequence: Synthetic oligonucleotide
  Antisense strand to SEQ ID NO: 1041886
acaauuccaaguuaaaccu

SEQ ID NO: 1041888 - RNA, 19 nt, Artificial Sequence
  Description of Artificial Sequence: Synthetic oligonucleotide
  Sense strand starting at position 2928 of SEQ ID NO: 914942
uguuguucuccgcgggaag

SEQ ID NO: 1041889 - RNA, 19 nt, Artificial Sequence
  Description of Artificial Sequence: Synthetic oligonucleotide
  Antisense strand to SEQ ID NO: 1041888
cuucccgcggagaacaaca

SEQ ID NO: 1041890 - RNA, 19 nt, Artificial Sequence
  Description of Artificial Sequence: Synthetic oligonucleotide
  Sense strand starting at position 77 of SEQ ID NO: 914943
uggaguaguuugaguuggu

SEQ ID NO: 1041891 - RNA, 19 nt, Artificial Sequence
  Description of Artificial Sequence: Synthetic oligonucleotide
  Antisense strand to SEQ ID NO: 1041890
accaacucaaacuacucca

SEQ ID NO: 1041892 - RNA, 19 nt, Artificial Sequence
  Description of Artificial Sequence: Synthetic oligonucleotide
  Sense strand starting at position 78 of SEQ ID NO: 914943
ggaguaguuugaguugguc

SEQ ID NO: 1041893 - RNA, 19 nt, Artificial Sequence
  Description of Artificial Sequence: Synthetic oligonucleotide
  Antisense strand to SEQ ID NO: 1041892
gaccaacucaaacuacucc

SEQ ID NO: 1041894 - RNA, 19 nt, Artificial Sequence
  Description of Artificial Sequence: Synthetic oligonucleotide
  Sense strand starting at position 82 of SEQ ID NO: 914943
uaguuugaguuggucccua

SEQ ID NO: 1041895 - RNA, 19 nt, Artificial Sequence
  Description of Artificial Sequence: Synthetic oligonucleotide
  Antisense strand to SEQ ID NO: 1041894
uagggaccaacucaaacua

SEQ ID NO: 1041896 - RNA, 19 nt, Artificial Sequence
  Description of Artificial Sequence: Synthetic oligonucleotide
  Sense strand starting at position 233 of SEQ ID NO: 914943
agguuuaacuuggaauugu

SEQ ID NO: 1041897 - RNA, 19 nt, Artificial Sequence
  Description of Artificial Sequence: Synthetic oligonucleotide
  Antisense strand to SEQ ID NO: 1041896
acaauuccaaguuaaaccu

SEQ ID NO: 1041898 - RNA, 19 nt, Artificial Sequence
  Description of Artificial Sequence: Synthetic oligonucleotide
  Sense strand starting at position 2285 of SEQ ID NO: 914943
uguuguucuccgcgggaag

SEQ ID NO: 1041899 - RNA, 19 nt, Artificial Sequence
  Description of Artificial Sequence: Synthetic oligonucleotide
  Antisense strand to SEQ ID NO: 1041898
cuucccgcggagaacaaca

SEQ ID NO: 1041900 - RNA, 19 nt, Artificial Sequence
  Description of Artificial Sequence: Synthetic oligonucleotide
  Sense strand starting at position 3397 of SEQ ID NO: 914943
gacugugucuucccaggga

SEQ ID NO: 1041901 - RNA, 19 nt, Artificial Sequence
  Description of Artificial Sequence: Synthetic oligonucleotide
  Antisense strand to SEQ ID NO: 1041900
ucccugggaagacacaguc

SEQ ID NO: 1041902 - RNA, 19 nt, Artificial Sequence
  Description of Artificial Sequence: Synthetic oligonucleotide
  Sense strand starting at position 3436 of SEQ ID NO: 914943
cgccuaggaccuugggaaa

SEQ ID NO: 1041903 - RNA, 19 nt, Artificial Sequence
  Description of Artificial Sequence: Synthetic oligonucleotide
  Antisense strand to SEQ ID NO: 1041902
uuucccaagguccuaggcg

SEQ ID NO: 1041904 - RNA, 19 nt, Artificial Sequence
  Description of Artificial Sequence: Synthetic oligonucleotide
  Sense strand starting at position 3739 of SEQ ID NO: 914943
ggaaguuuaugggcucuga

SEQ ID NO: 1041905 - RNA, 19 nt, Artificial Sequence
  Description of Artificial Sequence: Synthetic oligonucleotide
  Antisense strand to SEQ ID NO: 1041904
ucagagcccauaaacuucc

SEQ ID NO: 1041906 - RNA, 19 nt, Artificial Sequence
  Description of Artificial Sequence: Synthetic oligonucleotide
  Sense strand starting at position 3748 of SEQ ID NO: 914943
ugggcucugaccugacaaa

SEQ ID NO: 1041907 - RNA, 19 nt, Artificial Sequence
  Description of Artificial Sequence: Synthetic oligonucleotide
  Antisense strand to SEQ ID NO: 1041906
uuugucaggucagagccca

SEQ ID NO: 1041908 - RNA, 19 nt, Artificial Sequence
  Description of Artificial Sequence: Synthetic oligonucleotide
  Sense strand starting at position 2001 of SEQ ID NO: 914944
uguuguucuccgcgggaag

SEQ ID NO: 1041909 - RNA, 19 nt, Artificial Sequence
  Description of Artificial Sequence: Synthetic oligonucleotide
  Antisense strand to SEQ ID NO: 1041908
cuucccgcggagaacaaca

SEQ ID NO: 1041910 - RNA, 19 nt, Artificial Sequence
  Description of Artificial Sequence: Synthetic oligonucleotide
  Sense strand starting at position 3113 of SEQ ID NO: 914944
gacugugucuucccaggga

SEQ ID NO: 1041911 - RNA, 19 nt, Artificial Sequence
  Description of Artificial Sequence: Synthetic oligonucleotide
  Antisense strand to SEQ ID NO: 1041910
ucccugggaagacacaguc

SEQ ID NO: 1041912 - RNA, 19 nt, Artificial Sequence
  Description of Artificial Sequence: Synthetic oligonucleotide
  Sense strand starting at position 3152 of SEQ ID NO: 914944
cgccuaggaccuugggaaa

SEQ ID NO: 1041913 - RNA, 19 nt, Artificial Sequence
  Description of Artificial Sequence: Synthetic oligonucleotide
  Antisense strand to SEQ ID NO: 1041912
uuucccaagguccuaggcg

SEQ ID NO: 1041914 - RNA, 19 nt, Artificial Sequence
  Description of Artificial Sequence: Synthetic oligonucleotide
  Sense strand starting at position 3455 of SEQ ID NO: 914944
ggaaguuuaugggcucuga

SEQ ID NO: 1041915 - RNA, 19 nt, Artificial Sequence
  Description of Artificial Sequence: Synthetic oligonucleotide
  Antisense strand to SEQ ID NO: 1041914
ucagagcccauaaacuucc

SEQ ID NO: 1041916 - RNA, 19 nt, Artificial Sequence
  Description of Artificial Sequence: Synthetic oligonucleotide
  Sense strand starting at position 3464 of SEQ ID NO: 914944
ugggcucugaccugacaaa

SEQ ID NO: 1041917 - RNA, 19 nt, Artificial Sequence
  Description of Artificial Sequence: Synthetic oligonucleotide
  Antisense strand to SEQ ID NO: 1041916
uuugucaggucagagccca

SEQ ID NO: 1041918 - RNA, 19 nt, Artificial Sequence
  Description of Artificial Sequence: Synthetic oligonucleotide
  Sense strand starting at position 3911 of SEQ ID NO: 914944
acaucuuacuccugaguug

SEQ ID NO: 1041919 - RNA, 19 nt, Artificial Sequence
  Description of Artificial Sequence: Synthetic oligonucleotide
  Antisense strand to SEQ ID NO: 1041918
caacucaggaguaagaugu

SEQ ID NO: 1041920 - RNA, 19 nt, Artificial Sequence
  Description of Artificial Sequence: Synthetic oligonucleotide
  Sense strand starting at position 175 of SEQ ID NO: 914945
uucccuuucuuggcuguaa

SEQ ID NO: 1041921 - RNA, 19 nt, Artificial Sequence
  Description of Artificial Sequence: Synthetic oligonucleotide
  Antisense strand to SEQ ID NO: 1041920
uuacagccaagaaagggaa

SEQ ID NO: 1041922 - RNA, 19 nt, Artificial Sequence
  Description of Artificial Sequence: Synthetic oligonucleotide
  Sense strand starting at position 176 of SEQ ID NO: 914945
ucccuuucuuggcuguaaa

SEQ ID NO: 1041923 - RNA, 19 nt, Artificial Sequence
  Description of Artificial Sequence: Synthetic oligonucleotide
  Antisense strand to SEQ ID NO: 1041922
uuuacagccaagaaaggga

SEQ ID NO: 1041924 - RNA, 19 nt, Artificial Sequence
  Description of Artificial Sequence: Synthetic oligonucleotide
  Sense strand starting at position 301 of SEQ ID NO: 914945
gugguuuccaaucagcuga

SEQ ID NO: 1041925 - RNA, 19 nt, Artificial Sequence
  Description of Artificial Sequence: Synthetic oligonucleotide
  Antisense strand to SEQ ID NO: 1041924
ucagcugauuggaaaccac

SEQ ID NO: 1041926 - RNA, 19 nt, Artificial Sequence
  Description of Artificial Sequence: Synthetic oligonucleotide
  Sense strand starting at position 342 of SEQ ID NO: 914945
gccauugugauguggacau

SEQ ID NO: 1041927 - RNA, 19 nt, Artificial Sequence
  Description of Artificial Sequence: Synthetic oligonucleotide
  Antisense strand to SEQ ID NO: 1041926
auguccacaucacaauggc

SEQ ID NO: 1041928 - RNA, 19 nt, Artificial Sequence
  Description of Artificial Sequence: Synthetic oligonucleotide
  Sense strand starting at position 415 of SEQ ID NO: 914945
aguccuaguccuggucaca

SEQ ID NO: 1041929 - RNA, 19 nt, Artificial Sequence
  Description of Artificial Sequence: Synthetic oligonucleotide
  Antisense strand to SEQ ID NO: 1041928
ugugaccaggacuaggacu

SEQ ID NO: 1041930 - RNA, 19 nt, Artificial Sequence
  Description of Artificial Sequence: Synthetic oligonucleotide
  Sense strand starting at position 664 of SEQ ID NO: 914945
uggaguaguuugaguuggu

SEQ ID NO: 1041931 - RNA, 19 nt, Artificial Sequence
  Description of Artificial Sequence: Synthetic oligonucleotide
  Antisense strand to SEQ ID NO: 1041930
accaacucaaacuacucca

SEQ ID NO: 1041932 - RNA, 19 nt, Artificial Sequence
  Description of Artificial Sequence: Synthetic oligonucleotide
  Sense strand starting at position 665 of SEQ ID NO: 914945
ggaguaguuugaguugguc

SEQ ID NO: 1041933 - RNA, 19 nt, Artificial Sequence
  Description of Artificial Sequence: Synthetic oligonucleotide
  Antisense strand to SEQ ID NO: 1041932
gaccaacucaaacuacucc

SEQ ID NO: 1041934 - RNA, 19 nt, Artificial Sequence
  Description of Artificial Sequence: Synthetic oligonucleotide
  Sense strand starting at position 669 of SEQ ID NO: 914945
uaguuugaguuggucccua

SEQ ID NO: 1041935 - RNA, 19 nt, Artificial Sequence
  Description of Artificial Sequence: Synthetic oligonucleotide
  Antisense strand to SEQ ID NO: 1041934
uagggaccaacucaaacua

SEQ ID NO: 1041936 - RNA, 19 nt, Artificial Sequence
  Description of Artificial Sequence: Synthetic oligonucleotide
  Sense strand starting at position 820 of SEQ ID NO: 914945
agguuuaacuuggaauugu

SEQ ID NO: 1041937 - RNA, 19 nt, Artificial Sequence
  Description of Artificial Sequence: Synthetic oligonucleotide
  Antisense strand to SEQ ID NO: 1041936
acaauuccaaguuaaaccu

SEQ ID NO: 1041938 - RNA, 19 nt, Artificial Sequence
  Description of Artificial Sequence: Synthetic oligonucleotide
  Sense strand starting at position 2872 of SEQ ID NO: 914945
uguuguucuccgcgggaag

SEQ ID NO: 1041939 - RNA, 19 nt, Artificial Sequence
  Description of Artificial Sequence: Synthetic oligonucleotide
  Antisense strand to SEQ ID NO: 1041938
cuucccgcggagaacaaca

SEQ ID NO: 1041940 - RNA, 19 nt, Artificial Sequence
  Description of Artificial Sequence: Synthetic oligonucleotide
  Sense strand starting at position 33 of SEQ ID NO: 914946
guaucuuucuauuccugga

SEQ ID NO: 1041941 - RNA, 19 nt, Artificial Sequence
  Description of Artificial Sequence: Synthetic oligonucleotide
  Antisense strand to SEQ ID NO: 1041940
uccaggaauagaaagauac

SEQ ID NO: 1041942 - RNA, 19 nt, Artificial Sequence
  Description of Artificial Sequence: Synthetic oligonucleotide
  Sense strand starting at position 37 of SEQ ID NO: 914946
cuuucuauuccuggaugau

SEQ ID NO: 1041943 - RNA, 19 nt, Artificial Sequence
  Description of Artificial Sequence: Synthetic oligonucleotide
  Antisense strand to SEQ ID NO: 1041942
aucauccaggaauagaaag

SEQ ID NO: 1041944 - RNA, 19 nt, Artificial Sequence
  Description of Artificial Sequence: Synthetic oligonucleotide
  Sense strand starting at position 50 of SEQ ID NO: 914946
gaugauguggugugagaac

SEQ ID NO: 1041945 - RNA, 19 nt, Artificial Sequence
  Description of Artificial Sequence: Synthetic oligonucleotide
  Antisense strand to SEQ ID NO: 1041944
guucucacaccacaucauc

SEQ ID NO: 1041946 - RNA, 19 nt, Artificial Sequence
  Description of Artificial Sequence: Synthetic oligonucleotide
  Sense strand starting at position 73 of SEQ ID NO: 914946
gauggaggacuguggcaau

SEQ ID NO: 1041947 - RNA, 19 nt, Artificial Sequence
  Description of Artificial Sequence: Synthetic oligonucleotide
  Antisense strand to SEQ ID NO: 1041946
auugccacaguccuccauc

SEQ ID NO: 1041948 - RNA, 19 nt, Artificial Sequence
  Description of Artificial Sequence: Synthetic oligonucleotide
  Sense strand starting at position 87 of SEQ ID NO: 914946
gcaauaacgaagugagaga

SEQ ID NO: 1041949 - RNA, 19 nt, Artificial Sequence
  Description of Artificial Sequence: Synthetic oligonucleotide
  Antisense strand to SEQ ID NO: 1041948
ucucucacuucguuauugc

SEQ ID NO: 1041950 - RNA, 19 nt, Artificial Sequence
  Description of Artificial Sequence: Synthetic oligonucleotide
  Sense strand starting at position 111 of SEQ ID NO: 914946
cugaauagagcuugaggau

SEQ ID NO: 1041951 - RNA, 19 nt, Artificial Sequence
  Description of Artificial Sequence: Synthetic oligonucleotide
  Antisense strand to SEQ ID NO: 1041950
auccucaagcucuauucag

SEQ ID NO: 1041952 - RNA, 19 nt, Artificial Sequence
  Description of Artificial Sequence: Synthetic oligonucleotide
  Sense strand starting at position 126 of SEQ ID NO: 914946
ggaugaaacugaccuugca

SEQ ID NO: 1041953 - RNA, 19 nt, Artificial Sequence
  Description of Artificial Sequence: Synthetic oligonucleotide
  Antisense strand to SEQ ID NO: 1041952
ugcaaggucaguuucaucc

SEQ ID NO: 1041954 - RNA, 19 nt, Artificial Sequence
  Description of Artificial Sequence: Synthetic oligonucleotide
  Sense strand starting at position 262 of SEQ ID NO: 914946
gugcuuaagccaguuugua

SEQ ID NO: 1041955 - RNA, 19 nt, Artificial Sequence
  Description of Artificial Sequence: Synthetic oligonucleotide
  Antisense strand to SEQ ID NO: 1041954
uacaaacuggcuuaagcac

SEQ ID NO: 1041956 - RNA, 19 nt, Artificial Sequence
  Description of Artificial Sequence: Synthetic oligonucleotide
  Sense strand starting at position 384 of SEQ ID NO: 914946
gcaggacuccaaugugaua

SEQ ID NO: 1041957 - RNA, 19 nt, Artificial Sequence
  Description of Artificial Sequence: Synthetic oligonucleotide
  Antisense strand to SEQ ID NO: 1041956
uaucacauuggaguccugc

SEQ ID NO: 1041958 - RNA, 19 nt, Artificial Sequence
  Description of Artificial Sequence: Synthetic oligonucleotide
  Sense strand starting at position 393 of SEQ ID NO: 914946
caaugugauagagguugau

SEQ ID NO: 1041959 - RNA, 19 nt, Artificial Sequence
  Description of Artificial Sequence: Synthetic oligonucleotide
  Antisense strand to SEQ ID NO: 1041958
aucaaccucuaucacauug

SEQ ID NO: 1041960 - RNA, 19 nt, Artificial Sequence
  Description of Artificial Sequence: Synthetic oligonucleotide
  Sense strand starting at position 437 of SEQ ID NO: 914946
ucuauuaguucuguaggaa

SEQ ID NO: 1041961 - RNA, 19 nt, Artificial Sequence
  Description of Artificial Sequence: Synthetic oligonucleotide
  Antisense strand to SEQ ID NO: 1041960
uuccuacagaacuaauaga

SEQ ID NO: 1041962 - RNA, 19 nt, Artificial Sequence
  Description of Artificial Sequence: Synthetic oligonucleotide
  Sense strand starting at position 438 of SEQ ID NO: 914946
cuauuaguucuguaggaaa

SEQ ID NO: 1041963 - RNA, 19 nt, Artificial Sequence
  Description of Artificial Sequence: Synthetic oligonucleotide
  Antisense strand to SEQ ID NO: 1041962
uuuccuacagaacuaauag

SEQ ID NO: 1041964 - RNA, 19 nt, Artificial Sequence
  Description of Artificial Sequence: Synthetic oligonucleotide
  Sense strand starting at position 440 of SEQ ID NO: 914946
auuaguucuguaggaaaca

SEQ ID NO: 1041965 - RNA, 19 nt, Artificial Sequence
  Description of Artificial Sequence: Synthetic oligonucleotide
  Antisense strand to SEQ ID NO: 1041964
uguuuccuacagaacuaau

SEQ ID NO: 1041966 - RNA, 19 nt, Artificial Sequence
  Description of Artificial Sequence: Synthetic oligonucleotide
  Sense strand starting at position 666 of SEQ ID NO: 914946
gauagaaauggugggucua

SEQ ID NO: 1041967 - RNA, 19 nt, Artificial Sequence
  Description of Artificial Sequence: Synthetic oligonucleotide
  Antisense strand to SEQ ID NO: 1041966
uagacccaccauuucuauc

SEQ ID NO: 1041968 - RNA, 19 nt, Artificial Sequence
  Description of Artificial Sequence: Synthetic oligonucleotide
  Sense strand starting at position 667 of SEQ ID NO: 914946
auagaaauggugggucuau

SEQ ID NO: 1041969 - RNA, 19 nt, Artificial Sequence
  Description of Artificial Sequence: Synthetic oligonucleotide
  Antisense strand to SEQ ID NO: 1041968
auagacccaccauuucuau

SEQ ID NO: 1041970 - RNA, 19 nt, Artificial Sequence
  Description of Artificial Sequence: Synthetic oligonucleotide
  Sense strand starting at position 668 of SEQ ID NO: 914946
uagaaauggugggucuauc

SEQ ID NO: 1041971 - RNA, 19 nt, Artificial Sequence
  Description of Artificial Sequence: Synthetic oligonucleotide
  Antisense strand to SEQ ID NO: 1041970
gauagacccaccauuucua

SEQ ID NO: 1041972 - RNA, 19 nt, Artificial Sequence
  Description of Artificial Sequence: Synthetic oligonucleotide
  Sense strand starting at position 714 of SEQ ID NO: 914946
uugggccucagauaaguua

SEQ ID NO: 1041973 - RNA, 19 nt, Artificial Sequence
  Description of Artificial Sequence: Synthetic oligonucleotide
  Antisense strand to SEQ ID NO: 1041972
uaacuuaucugaggcccaa

SEQ ID NO: 1041974 - RNA, 19 nt, Artificial Sequence
  Description of Artificial Sequence: Synthetic oligonucleotide
  Sense strand starting at position 717 of SEQ ID NO: 914946
ggccucagauaaguuaaau

SEQ ID NO: 1041975 - RNA, 19 nt, Artificial Sequence
  Description of Artificial Sequence: Synthetic oligonucleotide
  Antisense strand to SEQ ID NO: 1041974
auuuaacuuaucugaggcc

SEQ ID NO: 1041976 - RNA, 19 nt, Artificial Sequence
  Description of Artificial Sequence: Synthetic oligonucleotide
  Sense strand starting at position 730 of SEQ ID NO: 914946
uuaaaugagauaugugagu

SEQ ID NO: 1041977 - RNA, 19 nt, Artificial Sequence
  Description of Artificial Sequence: Synthetic oligonucleotide
  Antisense strand to SEQ ID NO: 1041976
acucacauaucucauuuaa

SEQ ID NO: 1041978 - RNA, 19 nt, Artificial Sequence
  Description of Artificial Sequence: Synthetic oligonucleotide
  Sense strand starting at position 735 of SEQ ID NO: 914946
ugagauaugugaguuaauu

SEQ ID NO: 1041979 - RNA, 19 nt, Artificial Sequence
  Description of Artificial Sequence: Synthetic oligonucleotide
  Antisense strand to SEQ ID NO: 1041978
aauuaacucacauaucuca

SEQ ID NO: 1041980 - RNA, 19 nt, Artificial Sequence
  Description of Artificial Sequence: Synthetic oligonucleotide
  Sense strand starting at position 882 of SEQ ID NO: 914946
cgaccaaagcauuggagau

SEQ ID NO: 1041981 - RNA, 19 nt, Artificial Sequence
  Description of Artificial Sequence: Synthetic oligonucleotide
  Antisense strand to SEQ ID NO: 1041980
aucuccaaugcuuuggucg

SEQ ID NO: 1041982 - RNA, 19 nt, Artificial Sequence
  Description of Artificial Sequence: Synthetic oligonucleotide
  Sense strand starting at position 900 of SEQ ID NO: 914946
ucuggauuccaguggcaga

SEQ ID NO: 1041983 - RNA, 19 nt, Artificial Sequence
  Description of Artificial Sequence: Synthetic oligonucleotide
  Antisense strand to SEQ ID NO: 1041982
ucugccacuggaauccaga

SEQ ID NO: 1041984 - RNA, 19 nt, Artificial Sequence
  Description of Artificial Sequence: Synthetic oligonucleotide
  Sense strand starting at position 1162 of SEQ ID NO: 914946
uuuagaucucacgacauuc

SEQ ID NO: 1041985 - RNA, 19 nt, Artificial Sequence
  Description of Artificial Sequence: Synthetic oligonucleotide
  Antisense strand to SEQ ID NO: 1041984
gaaugucgugagaucuaaa

SEQ ID NO: 1041986 - RNA, 19 nt, Artificial Sequence
  Description of Artificial Sequence: Synthetic oligonucleotide
  Sense strand starting at position 1327 of SEQ ID NO: 914946
guuguuacugcagaagaaa

SEQ ID NO: 1041987 - RNA, 19 nt, Artificial Sequence
  Description of Artificial Sequence: Synthetic oligonucleotide
  Antisense strand to SEQ ID NO: 1041986
uuucuucugcaguaacaac

SEQ ID NO: 1041988 - RNA, 19 nt, Artificial Sequence
  Description of Artificial Sequence: Synthetic oligonucleotide
  Sense strand starting at position 1556 of SEQ ID NO: 914946
cccauuaccuuguugagau

SEQ ID NO: 1041989 - RNA, 19 nt, Artificial Sequence
  Description of Artificial Sequence: Synthetic oligonucleotide
  Antisense strand to SEQ ID NO: 1041988
aucucaacaagguaauggg

SEQ ID NO: 1041990 - RNA, 19 nt, Artificial Sequence
  Description of Artificial Sequence: Synthetic oligonucleotide
  Sense strand starting at position 1874 of SEQ ID NO: 914946
cucccaaaggguuaaaugu

SEQ ID NO: 1041991 - RNA, 19 nt, Artificial Sequence
  Description of Artificial Sequence: Synthetic oligonucleotide
  Antisense strand to SEQ ID NO: 1041990
acauuuaacccuuugggag

SEQ ID NO: 1041992 - RNA, 19 nt, Artificial Sequence
  Description of Artificial Sequence: Synthetic oligonucleotide
  Sense strand starting at position 2252 of SEQ ID NO: 914946
uggugaguuccucaaagag

SEQ ID NO: 1041993 - RNA, 19 nt, Artificial Sequence
  Description of Artificial Sequence: Synthetic oligonucleotide
  Antisense strand to SEQ ID NO: 1041992
cucuuugaggaacucacca

SEQ ID NO: 1041994 - RNA, 19 nt, Artificial Sequence
  Description of Artificial Sequence: Synthetic oligonucleotide
  Sense strand starting at position 2534 of SEQ ID NO: 914946
ugccuugugcuguccaaua

SEQ ID NO: 1041995 - RNA, 19 nt, Artificial Sequence
  Description of Artificial Sequence: Synthetic oligonucleotide
  Antisense strand to SEQ ID NO: 1041994
uauuggacagcacaaggca

SEQ ID NO: 1041996 - RNA, 19 nt, Artificial Sequence
  Description of Artificial Sequence: Synthetic oligonucleotide
  Sense strand starting at position 2990 of SEQ ID NO: 914946
acugaucucuggccauacu

SEQ ID NO: 1041997 - RNA, 19 nt, Artificial Sequence
  Description of Artificial Sequence: Synthetic oligonucleotide
  Antisense strand to SEQ ID NO: 1041996
aguauggccagagaucagu

SEQ ID NO: 1041998 - RNA, 19 nt, Artificial Sequence
  Description of Artificial Sequence: Synthetic oligonucleotide
  Sense strand starting at position 2993 of SEQ ID NO: 914946
gaucucuggccauacuuga

SEQ ID NO: 1041999 - RNA, 19 nt, Artificial Sequence
  Description of Artificial Sequence: Synthetic oligonucleotide
  Antisense strand to SEQ ID NO: 1041998
ucaaguauggccagagauc

SEQ ID NO: 1042000 - RNA, 19 nt, Artificial Sequence
  Description of Artificial Sequence: Synthetic oligonucleotide
  Sense strand starting at position 3132 of SEQ ID NO: 914946
ucaguucuccacuaaguug

SEQ ID NO: 1042001 - RNA, 19 nt, Artificial Sequence
  Description of Artificial Sequence: Synthetic oligonucleotide
  Antisense strand to SEQ ID NO: 1042000
caacuuaguggagaacuga

SEQ ID NO: 1042002 - RNA, 19 nt, Artificial Sequence
  Description of Artificial Sequence: Synthetic oligonucleotide
  Sense strand starting at position 3265 of SEQ ID NO: 914946
ucugauuguuuacugacua

SEQ ID NO: 1042003 - RNA, 19 nt, Artificial Sequence
  Description of Artificial Sequence: Synthetic oligonucleotide
  Antisense strand to SEQ ID NO: 1042002
uagucaguaaacaaucaga

SEQ ID NO: 1042004 - RNA, 19 nt, Artificial Sequence
  Description of Artificial Sequence: Synthetic oligonucleotide
  Sense strand starting at position 3281 of SEQ ID NO: 914946
cuaucuccugucuagaaug

SEQ ID NO: 1042005 - RNA, 19 nt, Artificial Sequence
  Description of Artificial Sequence: Synthetic oligonucleotide
  Antisense strand to SEQ ID NO: 1042004
cauucuagacaggagauag

SEQ ID NO: 1042006 - RNA, 19 nt, Artificial Sequence
  Description of Artificial Sequence: Synthetic oligonucleotide
  Sense strand starting at position 3283 of SEQ ID NO: 914946
aucuccugucuagaaugua

SEQ ID NO: 1042007 - RNA, 19 nt, Artificial Sequence
  Description of Artificial Sequence: Synthetic oligonucleotide
  Antisense strand to SEQ ID NO: 1042006
uacauucuagacaggagau

SEQ ID NO: 1042008 - RNA, 19 nt, Artificial Sequence
  Description of Artificial Sequence: Synthetic oligonucleotide
  Sense strand starting at position 3371 of SEQ ID NO: 914946
guaguugcacaauaaauag

SEQ ID NO: 1042009 - RNA, 19 nt, Artificial Sequence
  Description of Artificial Sequence: Synthetic oligonucleotide
  Antisense strand to SEQ ID NO: 1042008
cuauuuauugugcaacuac

SEQ ID NO: 1042010 - RNA, 19 nt, Artificial Sequence
  Description of Artificial Sequence: Synthetic oligonucleotide
  Sense strand starting at position 3695 of SEQ ID NO: 914946
uuacaauuaccugguagga

SEQ ID NO: 1042011 - RNA, 19 nt, Artificial Sequence
  Description of Artificial Sequence: Synthetic oligonucleotide
  Antisense strand to SEQ ID NO: 1042010
uccuaccagguaauuguaa

SEQ ID NO: 1042012 - RNA, 19 nt, Artificial Sequence
  Description of Artificial Sequence: Synthetic oligonucleotide
  Sense strand starting at position 3756 of SEQ ID NO: 914946
ugaagauucucauccagua

SEQ ID NO: 1042013 - RNA, 19 nt, Artificial Sequence
  Description of Artificial Sequence: Synthetic oligonucleotide
  Antisense strand to SEQ ID NO: 1042012
uacuggaugagaaucuuca

SEQ ID NO: 1042014 - RNA, 19 nt, Artificial Sequence
  Description of Artificial Sequence: Synthetic oligonucleotide
  Sense strand starting at position 3761 of SEQ ID NO: 914946
auucucauccaguaggguu

SEQ ID NO: 1042015 - RNA, 19 nt, Artificial Sequence
  Description of Artificial Sequence: Synthetic oligonucleotide
  Antisense strand to SEQ ID NO: 1042014
aacccuacuggaugagaau

SEQ ID NO: 1042016 - RNA, 19 nt, Artificial Sequence
  Description of Artificial Sequence: Synthetic oligonucleotide
  Sense strand starting at position 3775 of SEQ ID NO: 914946
ggguuuacaucccugaagu

SEQ ID NO: 1042017 - RNA, 19 nt, Artificial Sequence
  Description of Artificial Sequence: Synthetic oligonucleotide
  Antisense strand to SEQ ID NO: 1042016
acuucagggauguaaaccc

SEQ ID NO: 1042018 - RNA, 19 nt, Artificial Sequence
  Description of Artificial Sequence: Synthetic oligonucleotide
  Sense strand starting at position 3777 of SEQ ID NO: 914946
guuuacaucccugaaguca

SEQ ID NO: 1042019 - RNA, 19 nt, Artificial Sequence
  Description of Artificial Sequence: Synthetic oligonucleotide
  Antisense strand to SEQ ID NO: 1042018
ugacuucagggauguaaac

SEQ ID NO: 1042020 - RNA, 19 nt, Artificial Sequence
  Description of Artificial Sequence: Synthetic oligonucleotide
  Sense strand starting at position 2 of SEQ ID NO: 914947
auuaguucuguaggaaaca

SEQ ID NO: 1042021 - RNA, 19 nt, Artificial Sequence
  Description of Artificial Sequence: Synthetic oligonucleotide
  Antisense strand to SEQ ID NO: 1042020
uguuuccuacagaacuaau

SEQ ID NO: 1042022 - RNA, 19 nt, Artificial Sequence
  Description of Artificial Sequence: Synthetic oligonucleotide
  Sense strand starting at position 228 of SEQ ID NO: 914947
gauagaaauggugggucua

SEQ ID NO: 1042023 - RNA, 19 nt, Artificial Sequence
  Description of Artificial Sequence: Synthetic oligonucleotide
  Antisense strand to SEQ ID NO: 1042022
uagacccaccauuucuauc

SEQ ID NO: 1042024 - RNA, 19 nt, Artificial Sequence
  Description of Artificial Sequence: Synthetic oligonucleotide
  Sense strand starting at position 229 of SEQ ID NO: 914947
auagaaauggugggucuau

SEQ ID NO: 1042025 - RNA, 19 nt, Artificial Sequence
  Description of Artificial Sequence: Synthetic oligonucleotide
  Antisense strand to SEQ ID NO: 1042024
auagacccaccauuucuau

SEQ ID NO: 1042026 - RNA, 19 nt, Artificial Sequence
  Description of Artificial Sequence: Synthetic oligonucleotide
  Sense strand starting at position 230 of SEQ ID NO: 914947
uagaaauggugggucuauc

SEQ ID NO: 1042027 - RNA, 19 nt, Artificial Sequence
  Description of Artificial Sequence: Synthetic oligonucleotide
  Antisense strand to SEQ ID NO: 1042026
gauagacccaccauuucua

SEQ ID NO: 1042028 - RNA, 19 nt, Artificial Sequence
  Description of Artificial Sequence: Synthetic oligonucleotide
  Sense strand starting at position 276 of SEQ ID NO: 914947
uugggccucagauaaguua

SEQ ID NO: 1042029 - RNA, 19 nt, Artificial Sequence
  Description of Artificial Sequence: Synthetic oligonucleotide
  Antisense strand to SEQ ID NO: 1042028
uaacuuaucugaggcccaa

SEQ ID NO: 1042030 - RNA, 19 nt, Artificial Sequence
  Description of Artificial Sequence: Synthetic oligonucleotide
  Sense strand starting at position 279 of SEQ ID NO: 914947
ggccucagauaaguuaaau

SEQ ID NO: 1042031 - RNA, 19 nt, Artificial Sequence
  Description of Artificial Sequence: Synthetic oligonucleotide
  Antisense strand to SEQ ID NO: 1042030
auuuaacuuaucugaggcc

SEQ ID NO: 1042032 - RNA, 19 nt, Artificial Sequence
  Description of Artificial Sequence: Synthetic oligonucleotide
  Sense strand starting at position 292 of SEQ ID NO: 914947
uuaaaugagauaugugagu

SEQ ID NO: 1042033 - RNA, 19 nt, Artificial Sequence
  Description of Artificial Sequence: Synthetic oligonucleotide
  Antisense strand to SEQ ID NO: 1042032
acucacauaucucauuuaa

SEQ ID NO: 1042034 - RNA, 19 nt, Artificial Sequence
  Description of Artificial Sequence: Synthetic oligonucleotide
  Sense strand starting at position 297 of SEQ ID NO: 914947
ugagauaugugaguuaauu

SEQ ID NO: 1042035 - RNA, 19 nt, Artificial Sequence
  Description of Artificial Sequence: Synthetic oligonucleotide
  Antisense strand to SEQ ID NO: 1042034
aauuaacucacauaucuca

SEQ ID NO: 1042036 - RNA, 19 nt, Artificial Sequence
  Description of Artificial Sequence: Synthetic oligonucleotide
  Sense strand starting at position 432 of SEQ ID NO: 914947
guggguugaacucgaccaa

SEQ ID NO: 1042037 - RNA, 19 nt, Artificial Sequence
  Description of Artificial Sequence: Synthetic oligonucleotide
  Antisense strand to SEQ ID NO: 1042036
uuggucgaguucaacccac

SEQ ID NO: 1042038 - RNA, 19 nt, Artificial Sequence
  Description of Artificial Sequence: Synthetic oligonucleotide
  Sense strand starting at position 444 of SEQ ID NO: 914947
cgaccaaagcauuggagau

SEQ ID NO: 1042039 - RNA, 19 nt, Artificial Sequence
  Description of Artificial Sequence: Synthetic oligonucleotide
  Antisense strand to SEQ ID NO: 1042038
aucuccaaugcuuuggucg

SEQ ID NO: 1042040 - RNA, 19 nt, Artificial Sequence
  Description of Artificial Sequence: Synthetic oligonucleotide
  Sense strand starting at position 462 of SEQ ID NO: 914947
ucuggauuccaguggcaga

SEQ ID NO: 1042041 - RNA, 19 nt, Artificial Sequence
  Description of Artificial Sequence: Synthetic oligonucleotide
  Antisense strand to SEQ ID NO: 1042040
ucugccacuggaauccaga

SEQ ID NO: 1042042 - RNA, 19 nt, Artificial Sequence
  Description of Artificial Sequence: Synthetic oligonucleotide
  Sense strand starting at position 724 of SEQ ID NO: 914947
uuuagaucucacgacauuc

SEQ ID NO: 1042043 - RNA, 19 nt, Artificial Sequence
  Description of Artificial Sequence: Synthetic oligonucleotide
  Antisense strand to SEQ ID NO: 1042042
gaaugucgugagaucuaaa

SEQ ID NO: 1042044 - RNA, 19 nt, Artificial Sequence
  Description of Artificial Sequence: Synthetic oligonucleotide
  Sense strand starting at position 780 of SEQ ID NO: 914947
uaggcucauguagguuaaa

SEQ ID NO: 1042045 - RNA, 19 nt, Artificial Sequence
  Description of Artificial Sequence: Synthetic oligonucleotide
  Antisense strand to SEQ ID NO: 1042044
uuuaaccuacaugagccua

SEQ ID NO: 1042046 - RNA, 19 nt, Artificial Sequence
  Description of Artificial Sequence: Synthetic oligonucleotide
  Sense strand starting at position 781 of SEQ ID NO: 914947
aggcucauguagguuaaau

SEQ ID NO: 1042047 - RNA, 19 nt, Artificial Sequence
  Description of Artificial Sequence: Synthetic oligonucleotide
  Antisense strand to SEQ ID NO: 1042046
auuuaaccuacaugagccu

SEQ ID NO: 1042048 - RNA, 19 nt, Artificial Sequence
  Description of Artificial Sequence: Synthetic oligonucleotide
  Sense strand starting at position 889 of SEQ ID NO: 914947
guuguuacugcagaagaaa

SEQ ID NO: 1042049 - RNA, 19 nt, Artificial Sequence
  Description of Artificial Sequence: Synthetic oligonucleotide
  Antisense strand to SEQ ID NO: 1042048
uuucuucugcaguaacaac

SEQ ID NO: 1042050 - RNA, 19 nt, Artificial Sequence
  Description of Artificial Sequence: Synthetic oligonucleotide
  Sense strand starting at position 1118 of SEQ ID NO: 914947
cccauuaccuuguugagau

SEQ ID NO: 1042051 - RNA, 19 nt, Artificial Sequence
  Description of Artificial Sequence: Synthetic oligonucleotide
  Antisense strand to SEQ ID NO: 1042050
aucucaacaagguaauggg

SEQ ID NO: 1042052 - RNA, 19 nt, Artificial Sequence
  Description of Artificial Sequence: Synthetic oligonucleotide
  Sense strand starting at position 1436 of SEQ ID NO: 914947
cucccaaaggguuaaaugu

SEQ ID NO: 1042053 - RNA, 19 nt, Artificial Sequence
  Description of Artificial Sequence: Synthetic oligonucleotide
  Antisense strand to SEQ ID NO: 1042052
acauuuaacccuuugggag

SEQ ID NO: 1042054 - RNA, 19 nt, Artificial Sequence
  Description of Artificial Sequence: Synthetic oligonucleotide
  Sense strand starting at position 1814 of SEQ ID NO: 914947
uggugaguuccucaaagag

SEQ ID NO: 1042055 - RNA, 19 nt, Artificial Sequence
  Description of Artificial Sequence: Synthetic oligonucleotide
  Antisense strand to SEQ ID NO: 1042054
cucuuugaggaacucacca

SEQ ID NO: 1042056 - RNA, 19 nt, Artificial Sequence
  Description of Artificial Sequence: Synthetic oligonucleotide
  Sense strand starting at position 2096 of SEQ ID NO: 914947
ugccuugugcuguccaaua

SEQ ID NO: 1042057 - RNA, 19 nt, Artificial Sequence
  Description of Artificial Sequence: Synthetic oligonucleotide
  Antisense strand to SEQ ID NO: 1042056
uauuggacagcacaaggca

SEQ ID NO: 1042058 - RNA, 19 nt, Artificial Sequence
  Description of Artificial Sequence: Synthetic oligonucleotide
  Sense strand starting at position 2552 of SEQ ID NO: 914947
acugaucucuggccauacu

SEQ ID NO: 1042059 - RNA, 19 nt, Artificial Sequence
  Description of Artificial Sequence: Synthetic oligonucleotide
  Antisense strand to SEQ ID NO: 1042058
aguauggccagagaucagu

SEQ ID NO: 1042060 - RNA, 19 nt, Artificial Sequence
  Description of Artificial Sequence: Synthetic oligonucleotide
  Sense strand starting at position 2555 of SEQ ID NO: 914947
gaucucuggccauacuuga

SEQ ID NO: 1042061 - RNA, 19 nt, Artificial Sequence
  Description of Artificial Sequence: Synthetic oligonucleotide
  Antisense strand to SEQ ID NO: 1042060
ucaaguauggccagagauc

SEQ ID NO: 1042062 - RNA, 19 nt, Artificial Sequence
  Description of Artificial Sequence: Synthetic oligonucleotide
  Sense strand starting at position 2694 of SEQ ID NO: 914947
ucaguucuccacuaaguug

SEQ ID NO: 1042063 - RNA, 19 nt, Artificial Sequence
  Description of Artificial Sequence: Synthetic oligonucleotide
  Antisense strand to SEQ ID NO: 1042062
caacuuaguggagaacuga

SEQ ID NO: 1042064 - RNA, 19 nt, Artificial Sequence
  Description of Artificial Sequence: Synthetic oligonucleotide
  Sense strand starting at position 2827 of SEQ ID NO: 914947
ucugauuguuuacugacua

SEQ ID NO: 1042065 - RNA, 19 nt, Artificial Sequence
  Description of Artificial Sequence: Synthetic oligonucleotide
  Antisense strand to SEQ ID NO: 1042064
uagucaguaaacaaucaga

SEQ ID NO: 1042066 - RNA, 19 nt, Artificial Sequence
  Description of Artificial Sequence: Synthetic oligonucleotide
  Sense strand starting at position 2843 of SEQ ID NO: 914947
cuaucuccugucuagaaug

SEQ ID NO: 1042067 - RNA, 19 nt, Artificial Sequence
  Description of Artificial Sequence: Synthetic oligonucleotide
  Antisense strand to SEQ ID NO: 1042066
cauucuagacaggagauag

SEQ ID NO: 1042068 - RNA, 19 nt, Artificial Sequence
  Description of Artificial Sequence: Synthetic oligonucleotide
  Sense strand starting at position 2845 of SEQ ID NO: 914947
aucuccugucuagaaugua

SEQ ID NO: 1042069 - RNA, 19 nt, Artificial Sequence
  Description of Artificial Sequence: Synthetic oligonucleotide
  Antisense strand to SEQ ID NO: 1042068
uacauucuagacaggagau

SEQ ID NO: 1042070 - RNA, 19 nt, Artificial Sequence
  Description of Artificial Sequence: Synthetic oligonucleotide
  Sense strand starting at position 2933 of SEQ ID NO: 914947
guaguugcacaauaaauag

SEQ ID NO: 1042071 - RNA, 19 nt, Artificial Sequence
  Description of Artificial Sequence: Synthetic oligonucleotide
  Antisense strand to SEQ ID NO: 1042070
cuauuuauugugcaacuac

SEQ ID NO: 1042072 - RNA, 19 nt, Artificial Sequence
  Description of Artificial Sequence: Synthetic oligonucleotide
  Sense strand starting at position 3257 of SEQ ID NO: 914947
uuacaauuaccugguagga

SEQ ID NO: 1042073 - RNA, 19 nt, Artificial Sequence
  Description of Artificial Sequence: Synthetic oligonucleotide
  Antisense strand to SEQ ID NO: 1042072
uccuaccagguaauuguaa

SEQ ID NO: 1042074 - RNA, 19 nt, Artificial Sequence
  Description of Artificial Sequence: Synthetic oligonucleotide
  Sense strand starting at position 3318 of SEQ ID NO: 914947
ugaagauucucauccagua

SEQ ID NO: 1042075 - RNA, 19 nt, Artificial Sequence
  Description of Artificial Sequence: Synthetic oligonucleotide
  Antisense strand to SEQ ID NO: 1042074
uacuggaugagaaucuuca

SEQ ID NO: 1042076 - RNA, 19 nt, Artificial Sequence
  Description of Artificial Sequence: Synthetic oligonucleotide
  Sense strand starting at position 3323 of SEQ ID NO: 914947
auucucauccaguaggguu

SEQ ID NO: 1042077 - RNA, 19 nt, Artificial Sequence
  Description of Artificial Sequence: Synthetic oligonucleotide
  Antisense strand to SEQ ID NO: 1042076
aacccuacuggaugagaau

SEQ ID NO: 1042078 - RNA, 19 nt, Artificial Sequence
  Description of Artificial Sequence: Synthetic oligonucleotide
  Sense strand starting at position 3337 of SEQ ID NO: 914947
ggguuuacaucccugaagu

SEQ ID NO: 1042079 - RNA, 19 nt, Artificial Sequence
  Description of Artificial Sequence: Synthetic oligonucleotide
  Antisense strand to SEQ ID NO: 1042078
acuucagggauguaaaccc

SEQ ID NO: 1042080 - RNA, 19 nt, Artificial Sequence
  Description of Artificial Sequence: Synthetic oligonucleotide
  Sense strand starting at position 3338 of SEQ ID NO: 914947
gguuuacaucccugaaguc

SEQ ID NO: 1042081 - RNA, 19 nt, Artificial Sequence
  Description of Artificial Sequence: Synthetic oligonucleotide
  Antisense strand to SEQ ID NO: 1042080
gacuucagggauguaaacc

SEQ ID NO: 1042082 - RNA, 19 nt, Artificial Sequence
  Description of Artificial Sequence: Synthetic oligonucleotide
  Sense strand starting at position 3339 of SEQ ID NO: 914947
guuuacaucccugaaguca

SEQ ID NO: 1042083 - RNA, 19 nt, Artificial Sequence
  Description of Artificial Sequence: Synthetic oligonucleotide
  Antisense strand to SEQ ID NO: 1042082
ugacuucagggauguaaac

SEQ ID NO: 1042084 - RNA, 19 nt, Artificial Sequence
  Description of Artificial Sequence: Synthetic oligonucleotide
  Sense strand starting at position 3416 of SEQ ID NO: 914947
aaaccaguuugugucagau

SEQ ID NO: 1042085 - RNA, 19 nt, Artificial Sequence
  Description of Artificial Sequence: Synthetic oligonucleotide
  Antisense strand to SEQ ID NO: 1042084
aucugacacaaacugguuu

SEQ ID NO: 1042086 - RNA, 19 nt, Artificial Sequence
  Description of Artificial Sequence: Synthetic oligonucleotide
  Sense strand starting at position 3443 of SEQ ID NO: 914947
gugugcaaccaauaguauu

SEQ ID NO: 1042087 - RNA, 19 nt, Artificial Sequence
  Description of Artificial Sequence: Synthetic oligonucleotide
  Antisense strand to SEQ ID NO: 1042086
aauacuauugguugcacac

SEQ ID NO: 1042088 - RNA, 19 nt, Artificial Sequence
  Description of Artificial Sequence: Synthetic oligonucleotide
  Sense strand starting at position 3567 of SEQ ID NO: 914947
ugcaaauauuuggaaauug

SEQ ID NO: 1042089 - RNA, 19 nt, Artificial Sequence
  Description of Artificial Sequence: Synthetic oligonucleotide
  Antisense strand to SEQ ID NO: 1042088
caauuuccaaauauuugca

SEQ ID NO: 1042090 - RNA, 19 nt, Artificial Sequence
  Description of Artificial Sequence: Synthetic oligonucleotide
  Sense strand starting at position 3575 of SEQ ID NO: 914947
uuuggaaauugauuguuga

SEQ ID NO: 1042091 - RNA, 19 nt, Artificial Sequence
  Description of Artificial Sequence: Synthetic oligonucleotide
  Antisense strand to SEQ ID NO: 1042090
ucaacaaucaauuuccaaa

SEQ ID NO: 1042092 - RNA, 19 nt, Artificial Sequence
  Description of Artificial Sequence: Synthetic oligonucleotide
  Sense strand starting at position 3576 of SEQ ID NO: 914947
uuggaaauugauuguugaa

SEQ ID NO: 1042093 - RNA, 19 nt, Artificial Sequence
  Description of Artificial Sequence: Synthetic oligonucleotide
  Antisense strand to SEQ ID NO: 1042092
uucaacaaucaauuuccaa

SEQ ID NO: 1042094 - RNA, 19 nt, Artificial Sequence
  Description of Artificial Sequence: Synthetic oligonucleotide
  Sense strand starting at position 3738 of SEQ ID NO: 914947
gcuuguacaguuuacauau

SEQ ID NO: 1042095 - RNA, 19 nt, Artificial Sequence
  Description of Artificial Sequence: Synthetic oligonucleotide
  Antisense strand to SEQ ID NO: 1042094
auauguaaacuguacaagc

SEQ ID NO: 1042096 - RNA, 19 nt, Artificial Sequence
  Description of Artificial Sequence: Synthetic oligonucleotide
  Sense strand starting at position 3805 of SEQ ID NO: 914947
ggcauaauucuacaauguu

SEQ ID NO: 1042097 - RNA, 19 nt, Artificial Sequence
  Description of Artificial Sequence: Synthetic oligonucleotide
  Antisense strand to SEQ ID NO: 1042096
aacauuguagaauuaugcc

SEQ ID NO: 1042098 - RNA, 19 nt, Artificial Sequence
  Description of Artificial Sequence: Synthetic oligonucleotide
  Sense strand starting at position 3925 of SEQ ID NO: 914947
uucucaguuccauacaguu

SEQ ID NO: 1042099 - RNA, 19 nt, Artificial Sequence
  Description of Artificial Sequence: Synthetic oligonucleotide
  Antisense strand to SEQ ID NO: 1042098
aacuguauggaacugagaa

SEQ ID NO: 1042100 - RNA, 19 nt, Artificial Sequence
  Description of Artificial Sequence: Synthetic oligonucleotide
  Sense strand starting at position 75 of SEQ ID NO: 914948
gugcuuaagccaguuugua

SEQ ID NO: 1042101 - RNA, 19 nt, Artificial Sequence
  Description of Artificial Sequence: Synthetic oligonucleotide
  Antisense strand to SEQ ID NO: 1042100
uacaaacuggcuuaagcac

SEQ ID NO: 1042102 - RNA, 19 nt, Artificial Sequence
  Description of Artificial Sequence: Synthetic oligonucleotide
  Sense strand starting at position 197 of SEQ ID NO: 914948
gcaggacuccaaugugaua

SEQ ID NO: 1042103 - RNA, 19 nt, Artificial Sequence
  Description of Artificial Sequence: Synthetic oligonucleotide
  Antisense strand to SEQ ID NO: 1042102
uaucacauuggaguccugc

SEQ ID NO: 1042104 - RNA, 19 nt, Artificial Sequence
  Description of Artificial Sequence: Synthetic oligonucleotide
  Sense strand starting at position 206 of SEQ ID NO: 914948
caaugugauagagguugau

SEQ ID NO: 1042105 - RNA, 19 nt, Artificial Sequence
  Description of Artificial Sequence: Synthetic oligonucleotide
  Antisense strand to SEQ ID NO: 1042104
aucaaccucuaucacauug

SEQ ID NO: 1042106 - RNA, 19 nt, Artificial Sequence
  Description of Artificial Sequence: Synthetic oligonucleotide
  Sense strand starting at position 250 of SEQ ID NO: 914948
ucuauuaguucuguaggaa

SEQ ID NO: 1042107 - RNA, 19 nt, Artificial Sequence
  Description of Artificial Sequence: Synthetic oligonucleotide
  Antisense strand to SEQ ID NO: 1042106
uuccuacagaacuaauaga

SEQ ID NO: 1042108 - RNA, 19 nt, Artificial Sequence
  Description of Artificial Sequence: Synthetic oligonucleotide
  Sense strand starting at position 251 of SEQ ID NO: 914948
cuauuaguucuguaggaaa

SEQ ID NO: 1042109 - RNA, 19 nt, Artificial Sequence
  Description of Artificial Sequence: Synthetic oligonucleotide
  Antisense strand to SEQ ID NO: 1042108
uuuccuacagaacuaauag

SEQ ID NO: 1042110 - RNA, 19 nt, Artificial Sequence
  Description of Artificial Sequence: Synthetic oligonucleotide
  Sense strand starting at position 253 of SEQ ID NO: 914948
auuaguucuguaggaaaca

SEQ ID NO: 1042111 - RNA, 19 nt, Artificial Sequence
  Description of Artificial Sequence: Synthetic oligonucleotide
  Antisense strand to SEQ ID NO: 1042110
uguuuccuacagaacuaau

SEQ ID NO: 1042112 - RNA, 19 nt, Artificial Sequence
  Description of Artificial Sequence: Synthetic oligonucleotide
  Sense strand starting at position 479 of SEQ ID NO: 914948
gauagaaauggugggucua

SEQ ID NO: 1042113 - RNA, 19 nt, Artificial Sequence
  Description of Artificial Sequence: Synthetic oligonucleotide
  Antisense strand to SEQ ID NO: 1042112
uagacccaccauuucuauc

SEQ ID NO: 1042114 - RNA, 19 nt, Artificial Sequence
  Description of Artificial Sequence: Synthetic oligonucleotide
  Sense strand starting at position 480 of SEQ ID NO: 914948
auagaaauggugggucuau

SEQ ID NO: 1042115 - RNA, 19 nt, Artificial Sequence
  Description of Artificial Sequence: Synthetic oligonucleotide
  Antisense strand to SEQ ID NO: 1042114
auagacccaccauuucuau

SEQ ID NO: 1042116 - RNA, 19 nt, Artificial Sequence
  Description of Artificial Sequence: Synthetic oligonucleotide
  Sense strand starting at position 481 of SEQ ID NO: 914948
uagaaauggugggucuauc

SEQ ID NO: 1042117 - RNA, 19 nt, Artificial Sequence
  Description of Artificial Sequence: Synthetic oligonucleotide
  Antisense strand to SEQ ID NO: 1042116
gauagacccaccauuucua

SEQ ID NO: 1042118 - RNA, 19 nt, Artificial Sequence
  Description of Artificial Sequence: Synthetic oligonucleotide
  Sense strand starting at position 527 of SEQ ID NO: 914948
uugggccucagauaaguua

SEQ ID NO: 1042119 - RNA, 19 nt, Artificial Sequence
  Description of Artificial Sequence: Synthetic oligonucleotide
  Antisense strand to SEQ ID NO: 1042118
uaacuuaucugaggcccaa

SEQ ID NO: 1042120 - RNA, 19 nt, Artificial Sequence
  Description of Artificial Sequence: Synthetic oligonucleotide
  Sense strand starting at position 530 of SEQ ID NO: 914948
ggccucagauaaguuaaau

SEQ ID NO: 1042121 - RNA, 19 nt, Artificial Sequence
  Description of Artificial Sequence: Synthetic oligonucleotide
  Antisense strand to SEQ ID NO: 1042120
auuuaacuuaucugaggcc

SEQ ID NO: 1042122 - RNA, 19 nt, Artificial Sequence
  Description of Artificial Sequence: Synthetic oligonucleotide
  Sense strand starting at position 543 of SEQ ID NO: 914948
uuaaaugagauaugugagu

SEQ ID NO: 1042123 - RNA, 19 nt, Artificial Sequence
  Description of Artificial Sequence: Synthetic oligonucleotide
  Antisense strand to SEQ ID NO: 1042122
acucacauaucucauuuaa

SEQ ID NO: 1042124 - RNA, 19 nt, Artificial Sequence
  Description of Artificial Sequence: Synthetic oligonucleotide
  Sense strand starting at position 548 of SEQ ID NO: 914948
ugagauaugugaguuaauu

SEQ ID NO: 1042125 - RNA, 19 nt, Artificial Sequence
  Description of Artificial Sequence: Synthetic oligonucleotide
  Antisense strand to SEQ ID NO: 1042124
aauuaacucacauaucuca

SEQ ID NO: 1042126 - RNA, 19 nt, Artificial Sequence
  Description of Artificial Sequence: Synthetic oligonucleotide
  Sense strand starting at position 683 of SEQ ID NO: 914948
guggguugaacucgaccaa

SEQ ID NO: 1042127 - RNA, 19 nt, Artificial Sequence
  Description of Artificial Sequence: Synthetic oligonucleotide
  Antisense strand to SEQ ID NO: 1042126
uuggucgaguucaacccac

SEQ ID NO: 1042128 - RNA, 19 nt, Artificial Sequence
  Description of Artificial Sequence: Synthetic oligonucleotide
  Sense strand starting at position 695 of SEQ ID NO: 914948
cgaccaaagcauuggagau

SEQ ID NO: 1042129 - RNA, 19 nt, Artificial Sequence
  Description of Artificial Sequence: Synthetic oligonucleotide
  Antisense strand to SEQ ID NO: 1042128
aucuccaaugcuuuggucg

SEQ ID NO: 1042130 - RNA, 19 nt, Artificial Sequence
  Description of Artificial Sequence: Synthetic oligonucleotide
  Sense strand starting at position 713 of SEQ ID NO: 914948
ucuggauuccaguggcaga

SEQ ID NO: 1042131 - RNA, 19 nt, Artificial Sequence
  Description of Artificial Sequence: Synthetic oligonucleotide
  Antisense strand to SEQ ID NO: 1042130
ucugccacuggaauccaga

SEQ ID NO: 1042132 - RNA, 19 nt, Artificial Sequence
  Description of Artificial Sequence: Synthetic oligonucleotide
  Sense strand starting at position 975 of SEQ ID NO: 914948
uuuagaucucacgacauuc

SEQ ID NO: 1042133 - RNA, 19 nt, Artificial Sequence
  Description of Artificial Sequence: Synthetic oligonucleotide
  Antisense strand to SEQ ID NO: 1042132
gaaugucgugagaucuaaa

SEQ ID NO: 1042134 - RNA, 19 nt, Artificial Sequence
  Description of Artificial Sequence: Synthetic oligonucleotide
  Sense strand starting at position 1032 of SEQ ID NO: 914948
aggcucauguagguuaaau

SEQ ID NO: 1042135 - RNA, 19 nt, Artificial Sequence
  Description of Artificial Sequence: Synthetic oligonucleotide
  Antisense strand to SEQ ID NO: 1042134
auuuaaccuacaugagccu

SEQ ID NO: 1042136 - RNA, 19 nt, Artificial Sequence
  Description of Artificial Sequence: Synthetic oligonucleotide
  Sense strand starting at position 1140 of SEQ ID NO: 914948
guuguuacugcagaagaaa

SEQ ID NO: 1042137 - RNA, 19 nt, Artificial Sequence
  Description of Artificial Sequence: Synthetic oligonucleotide
  Antisense strand to SEQ ID NO: 1042136
uuucuucugcaguaacaac

SEQ ID NO: 1042138 - RNA, 19 nt, Artificial Sequence
  Description of Artificial Sequence: Synthetic oligonucleotide
  Sense strand starting at position 1369 of SEQ ID NO: 914948
cccauuaccuuguugagau

SEQ ID NO: 1042139 - RNA, 19 nt, Artificial Sequence
  Description of Artificial Sequence: Synthetic oligonucleotide
  Antisense strand to SEQ ID NO: 1042138
aucucaacaagguaauggg

SEQ ID NO: 1042140 - RNA, 19 nt, Artificial Sequence
  Description of Artificial Sequence: Synthetic oligonucleotide
  Sense strand starting at position 1687 of SEQ ID NO: 914948
cucccaaaggguuaaaugu

SEQ ID NO: 1042141 - RNA, 19 nt, Artificial Sequence
  Description of Artificial Sequence: Synthetic oligonucleotide
  Antisense strand to SEQ ID NO: 1042140
acauuuaacccuuugggag

SEQ ID NO: 1042142 - RNA, 19 nt, Artificial Sequence
  Description of Artificial Sequence: Synthetic oligonucleotide
  Sense strand starting at position 2065 of SEQ ID NO: 914948
uggugaguuccucaaagag

SEQ ID NO: 1042143 - RNA, 19 nt, Artificial Sequence
  Description of Artificial Sequence: Synthetic oligonucleotide
  Antisense strand to SEQ ID NO: 1042142
cucuuugaggaacucacca

SEQ ID NO: 1042144 - RNA, 19 nt, Artificial Sequence
  Description of Artificial Sequence: Synthetic oligonucleotide
  Sense strand starting at position 2347 of SEQ ID NO: 914948
ugccuugugcuguccaaua

SEQ ID NO: 1042145 - RNA, 19 nt, Artificial Sequence
  Description of Artificial Sequence: Synthetic oligonucleotide
  Antisense strand to SEQ ID NO: 1042144
uauuggacagcacaaggca

SEQ ID NO: 1042146 - RNA, 19 nt, Artificial Sequence
  Description of Artificial Sequence: Synthetic oligonucleotide
  Sense strand starting at position 2803 of SEQ ID NO: 914948
acugaucucuggccauacu

SEQ ID NO: 1042147 - RNA, 19 nt, Artificial Sequence
  Description of Artificial Sequence: Synthetic oligonucleotide
  Antisense strand to SEQ ID NO: 1042146
aguauggccagagaucagu

SEQ ID NO: 1042148 - RNA, 19 nt, Artificial Sequence
  Description of Artificial Sequence: Synthetic oligonucleotide
  Sense strand starting at position 2806 of SEQ ID NO: 914948
gaucucuggccauacuuga

SEQ ID NO: 1042149 - RNA, 19 nt, Artificial Sequence
  Description of Artificial Sequence: Synthetic oligonucleotide
  Antisense strand to SEQ ID NO: 1042148
ucaaguauggccagagauc

SEQ ID NO: 1042150 - RNA, 19 nt, Artificial Sequence
  Description of Artificial Sequence: Synthetic oligonucleotide
  Sense strand starting at position 2945 of SEQ ID NO: 914948
ucaguucuccacuaaguug

SEQ ID NO: 1042151 - RNA, 19 nt, Artificial Sequence
  Description of Artificial Sequence: Synthetic oligonucleotide
  Antisense strand to SEQ ID NO: 1042150
caacuuaguggagaacuga

SEQ ID NO: 1042152 - RNA, 19 nt, Artificial Sequence
  Description of Artificial Sequence: Synthetic oligonucleotide
  Sense strand starting at position 3078 of SEQ ID NO: 914948
ucugauuguuuacugacua

SEQ ID NO: 1042153 - RNA, 19 nt, Artificial Sequence
  Description of Artificial Sequence: Synthetic oligonucleotide
  Antisense strand to SEQ ID NO: 1042152
uagucaguaaacaaucaga

SEQ ID NO: 1042154 - RNA, 19 nt, Artificial Sequence
  Description of Artificial Sequence: Synthetic oligonucleotide
  Sense strand starting at position 3094 of SEQ ID NO: 914948
cuaucuccugucuagaaug

SEQ ID NO: 1042155 - RNA, 19 nt, Artificial Sequence
  Description of Artificial Sequence: Synthetic oligonucleotide
  Antisense strand to SEQ ID NO: 1042154
cauucuagacaggagauag

SEQ ID NO: 1042156 - RNA, 19 nt, Artificial Sequence
  Description of Artificial Sequence: Synthetic oligonucleotide
  Sense strand starting at position 3096 of SEQ ID NO: 914948
aucuccugucuagaaugua

SEQ ID NO: 1042157 - RNA, 19 nt, Artificial Sequence
  Description of Artificial Sequence: Synthetic oligonucleotide
  Antisense strand to SEQ ID NO: 1042156
uacauucuagacaggagau

SEQ ID NO: 1042158 - RNA, 19 nt, Artificial Sequence
  Description of Artificial Sequence: Synthetic oligonucleotide
  Sense strand starting at position 3184 of SEQ ID NO: 914948
guaguugcacaauaaauag

SEQ ID NO: 1042159 - RNA, 19 nt, Artificial Sequence
  Description of Artificial Sequence: Synthetic oligonucleotide
  Antisense strand to SEQ ID NO: 1042158
cuauuuauugugcaacuac

SEQ ID NO: 1042160 - RNA, 19 nt, Artificial Sequence
  Description of Artificial Sequence: Synthetic oligonucleotide
  Sense strand starting at position 3508 of SEQ ID NO: 914948
uuacaauuaccugguagga

SEQ ID NO: 1042161 - RNA, 19 nt, Artificial Sequence
  Description of Artificial Sequence: Synthetic oligonucleotide
  Antisense strand to SEQ ID NO: 1042160
uccuaccagguaauuguaa

SEQ ID NO: 1042162 - RNA, 19 nt, Artificial Sequence
  Description of Artificial Sequence: Synthetic oligonucleotide
  Sense strand starting at position 3569 of SEQ ID NO: 914948
ugaagauucucauccagua

SEQ ID NO: 1042163 - RNA, 19 nt, Artificial Sequence
  Description of Artificial Sequence: Synthetic oligonucleotide
  Antisense strand to SEQ ID NO: 1042162
uacuggaugagaaucuuca

SEQ ID NO: 1042164 - RNA, 19 nt, Artificial Sequence
  Description of Artificial Sequence: Synthetic oligonucleotide
  Sense strand starting at position 3574 of SEQ ID NO: 914948
auucucauccaguaggguu

SEQ ID NO: 1042165 - RNA, 19 nt, Artificial Sequence
  Description of Artificial Sequence: Synthetic oligonucleotide
  Antisense strand to SEQ ID NO: 1042164
aacccuacuggaugagaau

SEQ ID NO: 1042166 - RNA, 19 nt, Artificial Sequence
  Description of Artificial Sequence: Synthetic oligonucleotide
  Sense strand starting at position 3588 of SEQ ID NO: 914948
ggguuuacaucccugaagu

SEQ ID NO: 1042167 - RNA, 19 nt, Artificial Sequence
  Description of Artificial Sequence: Synthetic oligonucleotide
  Antisense strand to SEQ ID NO: 1042166
acuucagggauguaaaccc

SEQ ID NO: 1042168 - RNA, 19 nt, Artificial Sequence
  Description of Artificial Sequence: Synthetic oligonucleotide
  Sense strand starting at position 3590 of SEQ ID NO: 914948
guuuacaucccugaaguca

SEQ ID NO: 1042169 - RNA, 19 nt, Artificial Sequence
  Description of Artificial Sequence: Synthetic oligonucleotide
  Antisense strand to SEQ ID NO: 1042168
ugacuucagggauguaaac

SEQ ID NO: 1042170 - RNA, 19 nt, Artificial Sequence
  Description of Artificial Sequence: Synthetic oligonucleotide
  Sense strand starting at position 3667 of SEQ ID NO: 914948
aaaccaguuugugucagau

SEQ ID NO: 1042171 - RNA, 19 nt, Artificial Sequence
  Description of Artificial Sequence: Synthetic oligonucleotide
  Antisense strand to SEQ ID NO: 1042170
aucugacacaaacugguuu

SEQ ID NO: 1042172 - RNA, 19 nt, Artificial Sequence
  Description of Artificial Sequence: Synthetic oligonucleotide
  Sense strand starting at position 3694 of SEQ ID NO: 914948
gugugcaaccaauaguauu

SEQ ID NO: 1042173 - RNA, 19 nt, Artificial Sequence
  Description of Artificial Sequence: Synthetic oligonucleotide
  Antisense strand to SEQ ID NO: 1042172
aauacuauugguugcacac

SEQ ID NO: 1042174 - RNA, 19 nt, Artificial Sequence
  Description of Artificial Sequence: Synthetic oligonucleotide
  Sense strand starting at position 3818 of SEQ ID NO: 914948
ugcaaauauuuggaaauug

SEQ ID NO: 1042175 - RNA, 19 nt, Artificial Sequence
  Description of Artificial Sequence: Synthetic oligonucleotide
  Antisense strand to SEQ ID NO: 1042174
caauuuccaaauauuugca

SEQ ID NO: 1042176 - RNA, 19 nt, Artificial Sequence
  Description of Artificial Sequence: Synthetic oligonucleotide
  Sense strand starting at position 3826 of SEQ ID NO: 914948
uuuggaaauugauuguuga

SEQ ID NO: 1042177 - RNA, 19 nt, Artificial Sequence
  Description of Artificial Sequence: Synthetic oligonucleotide
  Antisense strand to SEQ ID NO: 1042176
ucaacaaucaauuuccaaa

SEQ ID NO: 1042178 - RNA, 19 nt, Artificial Sequence
  Description of Artificial Sequence: Synthetic oligonucleotide
  Sense strand starting at position 3827 of SEQ ID NO: 914948
uuggaaauugauuguugaa

SEQ ID NO: 1042179 - RNA, 19 nt, Artificial Sequence
  Description of Artificial Sequence: Synthetic oligonucleotide
  Antisense strand to SEQ ID NO: 1042178
uucaacaaucaauuuccaa

SEQ ID NO: 1042180 - RNA, 19 nt, Artificial Sequence
  Description of Artificial Sequence: Synthetic oligonucleotide
  Sense strand starting at position 97 of SEQ ID NO: 914949
guuauauguguagaacuuc

SEQ ID NO: 1042181 - RNA, 19 nt, Artificial Sequence
  Description of Artificial Sequence: Synthetic oligonucleotide
  Antisense strand to SEQ ID NO: 1042180
gaaguucuacacauauaac

SEQ ID NO: 1042182 - RNA, 19 nt, Artificial Sequence
  Description of Artificial Sequence: Synthetic oligonucleotide
  Sense strand starting at position 437 of SEQ ID NO: 914949
gaagucugggcucaaguga

SEQ ID NO: 1042183 - RNA, 19 nt, Artificial Sequence
  Description of Artificial Sequence: Synthetic oligonucleotide
  Antisense strand to SEQ ID NO: 1042182
ucacuugagcccagacuuc

SEQ ID NO: 1042184 - RNA, 19 nt, Artificial Sequence
  Description of Artificial Sequence: Synthetic oligonucleotide
  Sense strand starting at position 510 of SEQ ID NO: 914949
cuguccuguuauuuccgaa

SEQ ID NO: 1042185 - RNA, 19 nt, Artificial Sequence
  Description of Artificial Sequence: Synthetic oligonucleotide
  Antisense strand to SEQ ID NO: 1042184
uucggaaauaacaggacag

SEQ ID NO: 1042186 - RNA, 19 nt, Artificial Sequence
  Description of Artificial Sequence: Synthetic oligonucleotide
  Sense strand starting at position 651 of SEQ ID NO: 914949
uugugugagguauaaagua

SEQ ID NO: 1042187 - RNA, 19 nt, Artificial Sequence
  Description of Artificial Sequence: Synthetic oligonucleotide
  Antisense strand to SEQ ID NO: 1042186
uacuuuauaccucacacaa

SEQ ID NO: 1042188 - RNA, 19 nt, Artificial Sequence
  Description of Artificial Sequence: Synthetic oligonucleotide
  Sense strand starting at position 656 of SEQ ID NO: 914949
ugagguauaaaguaguauu

SEQ ID NO: 1042189 - RNA, 19 nt, Artificial Sequence
  Description of Artificial Sequence: Synthetic oligonucleotide
  Antisense strand to SEQ ID NO: 1042188
aauacuacuuuauaccuca

SEQ ID NO: 1042190 - RNA, 19 nt, Artificial Sequence
  Description of Artificial Sequence: Synthetic oligonucleotide
  Sense strand starting at position 962 of SEQ ID NO: 914949
uggucuuaacacuagucaa

SEQ ID NO: 1042191 - RNA, 19 nt, Artificial Sequence
  Description of Artificial Sequence: Synthetic oligonucleotide
  Antisense strand to SEQ ID NO: 1042190
uugacuaguguuaagacca

SEQ ID NO: 1042192 - RNA, 19 nt, Artificial Sequence
  Description of Artificial Sequence: Synthetic oligonucleotide
  Sense strand starting at position 1180 of SEQ ID NO: 914949
cuaagugugcuacauuaaa

SEQ ID NO: 1042193 - RNA, 19 nt, Artificial Sequence
  Description of Artificial Sequence: Synthetic oligonucleotide
  Antisense strand to SEQ ID NO: 1042192
uuuaauguagcacacuuag

SEQ ID NO: 1042194 - RNA, 19 nt, Artificial Sequence
  Description of Artificial Sequence: Synthetic oligonucleotide
  Sense strand starting at position 1279 of SEQ ID NO: 914949
aggaguauuacguaaaguc

SEQ ID NO: 1042195 - RNA, 19 nt, Artificial Sequence
  Description of Artificial Sequence: Synthetic oligonucleotide
  Antisense strand to SEQ ID NO: 1042194
gacuuuacguaauacuccu

SEQ ID NO: 1042196 - RNA, 19 nt, Artificial Sequence
  Description of Artificial Sequence: Synthetic oligonucleotide
  Sense strand starting at position 2201 of SEQ ID NO: 914949
ggaucuuagcaaugagagu

SEQ ID NO: 1042197 - RNA, 19 nt, Artificial Sequence
  Description of Artificial Sequence: Synthetic oligonucleotide
  Antisense strand to SEQ ID NO: 1042196
acucucauugcuaagaucc

SEQ ID NO: 1042198 - RNA, 19 nt, Artificial Sequence
  Description of Artificial Sequence: Synthetic oligonucleotide
  Sense strand starting at position 2496 of SEQ ID NO: 914949
cuacguaauuauuugguuu

SEQ ID NO: 1042199 - RNA, 19 nt, Artificial Sequence
  Description of Artificial Sequence: Synthetic oligonucleotide
  Antisense strand to SEQ ID NO: 1042198
aaaccaaauaauuacguag

SEQ ID NO: 1042200 - RNA, 19 nt, Artificial Sequence
  Description of Artificial Sequence: Synthetic oligonucleotide
  Sense strand starting at position 2503 of SEQ ID NO: 914949
auuauuugguuuccuguua

SEQ ID NO: 1042201 - RNA, 19 nt, Artificial Sequence
  Description of Artificial Sequence: Synthetic oligonucleotide
  Antisense strand to SEQ ID NO: 1042200
uaacaggaaaccaaauaau

SEQ ID NO: 1042202 - RNA, 19 nt, Artificial Sequence
  Description of Artificial Sequence: Synthetic oligonucleotide
  Sense strand starting at position 2538 of SEQ ID NO: 914949
agccaauaucugcagcaga

SEQ ID NO: 1042203 - RNA, 19 nt, Artificial Sequence
  Description of Artificial Sequence: Synthetic oligonucleotide
  Antisense strand to SEQ ID NO: 1042202
ucugcugcagauauuggcu

SEQ ID NO: 1042204 - RNA, 19 nt, Artificial Sequence
  Description of Artificial Sequence: Synthetic oligonucleotide
  Sense strand starting at position 2602 of SEQ ID NO: 914949
gcccgaguaacagaauaaa

SEQ ID NO: 1042205 - RNA, 19 nt, Artificial Sequence
  Description of Artificial Sequence: Synthetic oligonucleotide
  Antisense strand to SEQ ID NO: 1042204
uuuauucuguuacucgggc

SEQ ID NO: 1042206 - RNA, 19 nt, Artificial Sequence
  Description of Artificial Sequence: Synthetic oligonucleotide
  Sense strand starting at position 2672 of SEQ ID NO: 914949
ggcugagugcagagguuau

SEQ ID NO: 1042207 - RNA, 19 nt, Artificial Sequence
  Description of Artificial Sequence: Synthetic oligonucleotide
  Antisense strand to SEQ ID NO: 1042206
auaaccucugcacucagcc

SEQ ID NO: 1042208 - RNA, 19 nt, Artificial Sequence
  Description of Artificial Sequence: Synthetic oligonucleotide
  Sense strand starting at position 2849 of SEQ ID NO: 914949
uugggucuccaagaacgua

SEQ ID NO: 1042209 - RNA, 19 nt, Artificial Sequence
  Description of Artificial Sequence: Synthetic oligonucleotide
  Antisense strand to SEQ ID NO: 1042208
uacguucuuggagacccaa

SEQ ID NO: 1042210 - RNA, 19 nt, Artificial Sequence
  Description of Artificial Sequence: Synthetic oligonucleotide
  Sense strand starting at position 2943 of SEQ ID NO: 914949
auauauaccguuuaucaug

SEQ ID NO: 1042211 - RNA, 19 nt, Artificial Sequence
  Description of Artificial Sequence: Synthetic oligonucleotide
  Antisense strand to SEQ ID NO: 1042210
caugauaaacgguauauau

SEQ ID NO: 1042212 - RNA, 19 nt, Artificial Sequence
  Description of Artificial Sequence: Synthetic oligonucleotide
  Sense strand starting at position 3005 of SEQ ID NO: 914949
ugaacuacuuuccuaaggu

SEQ ID NO: 1042213 - RNA, 19 nt, Artificial Sequence
  Description of Artificial Sequence: Synthetic oligonucleotide
  Antisense strand to SEQ ID NO: 1042212
accuuaggaaaguaguuca

SEQ ID NO: 1042214 - RNA, 19 nt, Artificial Sequence
  Description of Artificial Sequence: Synthetic oligonucleotide
  Sense strand starting at position 3147 of SEQ ID NO: 914949
cccaaucauguucgagaac

SEQ ID NO: 1042215 - RNA, 19 nt, Artificial Sequence
  Description of Artificial Sequence: Synthetic oligonucleotide
  Antisense strand to SEQ ID NO: 1042214
guucucgaacaugauuggg

SEQ ID NO: 1042216 - RNA, 19 nt, Artificial Sequence
  Description of Artificial Sequence: Synthetic oligonucleotide
  Sense strand starting at position 3240 of SEQ ID NO: 914949
ggcgcaguggcagucuaau

SEQ ID NO: 1042217 - RNA, 19 nt, Artificial Sequence
  Description of Artificial Sequence: Synthetic oligonucleotide
  Antisense strand to SEQ ID NO: 1042216
auuagacugccacugcgcc

SEQ ID NO: 1042218 - RNA, 19 nt, Artificial Sequence
  Description of Artificial Sequence: Synthetic oligonucleotide
  Sense strand starting at position 3251 of SEQ ID NO: 914949
agucuaauagugcagacaa

SEQ ID NO: 1042219 - RNA, 19 nt, Artificial Sequence
  Description of Artificial Sequence: Synthetic oligonucleotide
  Antisense strand to SEQ ID NO: 1042218
uugucugcacuauuagacu

SEQ ID NO: 1042220 - RNA, 19 nt, Artificial Sequence
  Description of Artificial Sequence: Synthetic oligonucleotide
  Sense strand starting at position 3347 of SEQ ID NO: 914949
gcugcuuagccaguuguuu

SEQ ID NO: 1042221 - RNA, 19 nt, Artificial Sequence
  Description of Artificial Sequence: Synthetic oligonucleotide
  Antisense strand to SEQ ID NO: 1042220
aaacaacuggcuaagcagc

SEQ ID NO: 1042222 - RNA, 19 nt, Artificial Sequence
  Description of Artificial Sequence: Synthetic oligonucleotide
  Sense strand starting at position 3348 of SEQ ID NO: 914949
cugcuuagccaguuguuua

SEQ ID NO: 1042223 - RNA, 19 nt, Artificial Sequence
  Description of Artificial Sequence: Synthetic oligonucleotide
  Antisense strand to SEQ ID NO: 1042222
uaaacaacuggcuaagcag

SEQ ID NO: 1042224 - RNA, 19 nt, Artificial Sequence
  Description of Artificial Sequence: Synthetic oligonucleotide
  Sense strand starting at position 3353 of SEQ ID NO: 914949
uagccaguuguuuaaagau

SEQ ID NO: 1042225 - RNA, 19 nt, Artificial Sequence
  Description of Artificial Sequence: Synthetic oligonucleotide
  Antisense strand to SEQ ID NO: 1042224
aucuuuaaacaacuggcua

SEQ ID NO: 1042226 - RNA, 19 nt, Artificial Sequence
  Description of Artificial Sequence: Synthetic oligonucleotide
  Sense strand starting at position 3365 of SEQ ID NO: 914949
uaaagauguguuggaucug

SEQ ID NO: 1042227 - RNA, 19 nt, Artificial Sequence
  Description of Artificial Sequence: Synthetic oligonucleotide
  Antisense strand to SEQ ID NO: 1042226
cagauccaacacaucuuua

SEQ ID NO: 1042228 - RNA, 19 nt, Artificial Sequence
  Description of Artificial Sequence: Synthetic oligonucleotide
  Sense strand starting at position 3370 of SEQ ID NO: 914949
auguguuggaucugaaagg

SEQ ID NO: 1042229 - RNA, 19 nt, Artificial Sequence
  Description of Artificial Sequence: Synthetic oligonucleotide
  Antisense strand to SEQ ID NO: 1042228
ccuuucagauccaacacau

SEQ ID NO: 1042230 - RNA, 19 nt, Artificial Sequence
  Description of Artificial Sequence: Synthetic oligonucleotide
  Sense strand starting at position 3381 of SEQ ID NO: 914949
cugaaagguuaguuguuaa

SEQ ID NO: 1042231 - RNA, 19 nt, Artificial Sequence
  Description of Artificial Sequence: Synthetic oligonucleotide
  Antisense strand to SEQ ID NO: 1042230
uuaacaacuaaccuuucag

SEQ ID NO: 1042232 - RNA, 19 nt, Artificial Sequence
  Description of Artificial Sequence: Synthetic oligonucleotide
  Sense strand starting at position 3573 of SEQ ID NO: 914949
uggaauacuuauguagcua

SEQ ID NO: 1042233 - RNA, 19 nt, Artificial Sequence
  Description of Artificial Sequence: Synthetic oligonucleotide
  Antisense strand to SEQ ID NO: 1042232
uagcuacauaaguauucca

SEQ ID NO: 1042234 - RNA, 19 nt, Artificial Sequence
  Description of Artificial Sequence: Synthetic oligonucleotide
  Sense strand starting at position 3597 of SEQ ID NO: 914949
uggguauaauugguuagga

SEQ ID NO: 1042235 - RNA, 19 nt, Artificial Sequence
  Description of Artificial Sequence: Synthetic oligonucleotide
  Antisense strand to SEQ ID NO: 1042234
uccuaaccaauuauaccca

SEQ ID NO: 1042236 - RNA, 19 nt, Artificial Sequence
  Description of Artificial Sequence: Synthetic oligonucleotide
  Sense strand starting at position 3598 of SEQ ID NO: 914949
ggguauaauugguuaggac

SEQ ID NO: 1042237 - RNA, 19 nt, Artificial Sequence
  Description of Artificial Sequence: Synthetic oligonucleotide
  Antisense strand to SEQ ID NO: 1042236
guccuaaccaauuauaccc

SEQ ID NO: 1042238 - RNA, 19 nt, Artificial Sequence
  Description of Artificial Sequence: Synthetic oligonucleotide
  Sense strand starting at position 3613 of SEQ ID NO: 914949
ggaccucuauaugccaaau

SEQ ID NO: 1042239 - RNA, 19 nt, Artificial Sequence
  Description of Artificial Sequence: Synthetic oligonucleotide
  Antisense strand to SEQ ID NO: 1042238
auuuggcauauagaggucc

SEQ ID NO: 1042240 - RNA, 19 nt, Artificial Sequence
  Description of Artificial Sequence: Synthetic oligonucleotide
  Sense strand starting at position 3662 of SEQ ID NO: 914949
gauggaagcuaagugauca

SEQ ID NO: 1042241 - RNA, 19 nt, Artificial Sequence
  Description of Artificial Sequence: Synthetic oligonucleotide
  Antisense strand to SEQ ID NO: 1042240
ugaucacuuagcuuccauc

SEQ ID NO: 1042242 - RNA, 19 nt, Artificial Sequence
  Description of Artificial Sequence: Synthetic oligonucleotide
  Sense strand starting at position 3663 of SEQ ID NO: 914949
auggaagcuaagugaucau

SEQ ID NO: 1042243 - RNA, 19 nt, Artificial Sequence
  Description of Artificial Sequence: Synthetic oligonucleotide
  Antisense strand to SEQ ID NO: 1042242
augaucacuuagcuuccau

SEQ ID NO: 1042244 - RNA, 19 nt, Artificial Sequence
  Description of Artificial Sequence: Synthetic oligonucleotide
  Sense strand starting at position 3795 of SEQ ID NO: 914949
ccuaacuauccuggaagua

SEQ ID NO: 1042245 - RNA, 19 nt, Artificial Sequence
  Description of Artificial Sequence: Synthetic oligonucleotide
  Antisense strand to SEQ ID NO: 1042244
uacuuccaggauaguuagg

SEQ ID NO: 1042246 - RNA, 19 nt, Artificial Sequence
  Description of Artificial Sequence: Synthetic oligonucleotide
  Sense strand starting at position 3807 of SEQ ID NO: 914949
ggaaguaaccauggucaua

SEQ ID NO: 1042247 - RNA, 19 nt, Artificial Sequence
  Description of Artificial Sequence: Synthetic oligonucleotide
  Antisense strand to SEQ ID NO: 1042246
uaugaccaugguuacuucc

SEQ ID NO: 1042248 - RNA, 19 nt, Artificial Sequence
  Description of Artificial Sequence: Synthetic oligonucleotide
  Sense strand starting at position 3906 of SEQ ID NO: 914949
aauauaauggugugaauac

SEQ ID NO: 1042249 - RNA, 19 nt, Artificial Sequence
  Description of Artificial Sequence: Synthetic oligonucleotide
  Antisense strand to SEQ ID NO: 1042248
guauucacaccauuauauu

SEQ ID NO: 1042250 - RNA, 19 nt, Artificial Sequence
  Description of Artificial Sequence: Synthetic oligonucleotide
  Sense strand starting at position 3921 of SEQ ID NO: 914949
auacacaguucuuugggua

SEQ ID NO: 1042251 - RNA, 19 nt, Artificial Sequence
  Description of Artificial Sequence: Synthetic oligonucleotide
  Antisense strand to SEQ ID NO: 1042250
uacccaaagaacuguguau

SEQ ID NO: 1042252 - RNA, 19 nt, Artificial Sequence
  Description of Artificial Sequence: Synthetic oligonucleotide
  Sense strand starting at position 3926 of SEQ ID NO: 914949
caguucuuuggguauccau

SEQ ID NO: 1042253 - RNA, 19 nt, Artificial Sequence
  Description of Artificial Sequence: Synthetic oligonucleotide
  Antisense strand to SEQ ID NO: 1042252
auggauacccaaagaacug

SEQ ID NO: 1042254 - RNA, 19 nt, Artificial Sequence
  Description of Artificial Sequence: Synthetic oligonucleotide
  Sense strand starting at position 3969 of SEQ ID NO: 914949
cagauaucuuugguaugau

SEQ ID NO: 1042255 - RNA, 19 nt, Artificial Sequence
  Description of Artificial Sequence: Synthetic oligonucleotide
  Antisense strand to SEQ ID NO: 1042254
aucauaccaaagauaucug

SEQ ID NO: 1042256 - RNA, 19 nt, Artificial Sequence
  Description of Artificial Sequence: Synthetic oligonucleotide
  Sense strand starting at position 3978 of SEQ ID NO: 914949
uugguaugauuucuuuguu

SEQ ID NO: 1042257 - RNA, 19 nt, Artificial Sequence
  Description of Artificial Sequence: Synthetic oligonucleotide
  Antisense strand to SEQ ID NO: 1042256
aacaaagaaaucauaccaa

SEQ ID NO: 1042258 - RNA, 19 nt, Artificial Sequence
  Description of Artificial Sequence: Synthetic oligonucleotide
  Sense strand starting at position 3979 of SEQ ID NO: 914949
ugguaugauuucuuuguuc

SEQ ID NO: 1042259 - RNA, 19 nt, Artificial Sequence
  Description of Artificial Sequence: Synthetic oligonucleotide
  Antisense strand to SEQ ID NO: 1042258
gaacaaagaaaucauacca

SEQ ID NO: 1042260 - RNA, 19 nt, Artificial Sequence
  Description of Artificial Sequence: Synthetic oligonucleotide
  Sense strand starting at position 345 of SEQ ID NO: 914950
caggguuucugaccucauu

SEQ ID NO: 1042261 - RNA, 19 nt, Artificial Sequence
  Description of Artificial Sequence: Synthetic oligonucleotide
  Antisense strand to SEQ ID NO: 1042260
aaugaggucagaaacccug

SEQ ID NO: 1042262 - RNA, 19 nt, Artificial Sequence
  Description of Artificial Sequence: Synthetic oligonucleotide
  Sense strand starting at position 437 of SEQ ID NO: 914950
aaauguuagcuaugugaag

SEQ ID NO: 1042263 - RNA, 19 nt, Artificial Sequence
  Description of Artificial Sequence: Synthetic oligonucleotide
  Antisense strand to SEQ ID NO: 1042262
cuucacauagcuaacauuu

SEQ ID NO: 1042264 - RNA, 19 nt, Artificial Sequence
  Description of Artificial Sequence: Synthetic oligonucleotide
  Sense strand starting at position 438 of SEQ ID NO: 914950
aauguuagcuaugugaaga

SEQ ID NO: 1042265 - RNA, 19 nt, Artificial Sequence
  Description of Artificial Sequence: Synthetic oligonucleotide
  Antisense strand to SEQ ID NO: 1042264
ucuucacauagcuaacauu

SEQ ID NO: 1042266 - RNA, 19 nt, Artificial Sequence
  Description of Artificial Sequence: Synthetic oligonucleotide
  Sense strand starting at position 439 of SEQ ID NO: 914950
auguuagcuaugugaagag

SEQ ID NO: 1042267 - RNA, 19 nt, Artificial Sequence
  Description of Artificial Sequence: Synthetic oligonucleotide
  Antisense strand to SEQ ID NO: 1042266
cucuucacauagcuaacau

SEQ ID NO: 1042268 - RNA, 19 nt, Artificial Sequence
  Description of Artificial Sequence: Synthetic oligonucleotide
  Sense strand starting at position 895 of SEQ ID NO: 914950
gcaucuugucagucuuguu

SEQ ID NO: 1042269 - RNA, 19 nt, Artificial Sequence
  Description of Artificial Sequence: Synthetic oligonucleotide
  Antisense strand to SEQ ID NO: 1042268
aacaagacugacaagaugc

SEQ ID NO: 1042270 - RNA, 19 nt, Artificial Sequence
  Description of Artificial Sequence: Synthetic oligonucleotide
  Sense strand starting at position 947 of SEQ ID NO: 914950
guacauagguacucaacaa

SEQ ID NO: 1042271 - RNA, 19 nt, Artificial Sequence
  Description of Artificial Sequence: Synthetic oligonucleotide
  Antisense strand to SEQ ID NO: 1042270
uuguugaguaccuauguac

SEQ ID NO: 1042272 - RNA, 19 nt, Artificial Sequence
  Description of Artificial Sequence: Synthetic oligonucleotide
  Sense strand starting at position 980 of SEQ ID NO: 914950
ugaagaguuugguucgauu

SEQ ID NO: 1042273 - RNA, 19 nt, Artificial Sequence
  Description of Artificial Sequence: Synthetic oligonucleotide
  Antisense strand to SEQ ID NO: 1042272
aaucgaaccaaacucuuca

SEQ ID NO: 1042274 - RNA, 19 nt, Artificial Sequence
  Description of Artificial Sequence: Synthetic oligonucleotide
  Sense strand starting at position 982 of SEQ ID NO: 914950
aagaguuugguucgauucu

SEQ ID NO: 1042275 - RNA, 19 nt, Artificial Sequence
  Description of Artificial Sequence: Synthetic oligonucleotide
  Antisense strand to SEQ ID NO: 1042274
agaaucgaaccaaacucuu

SEQ ID NO: 1042276 - RNA, 19 nt, Artificial Sequence
  Description of Artificial Sequence: Synthetic oligonucleotide
  Sense strand starting at position 1021 of SEQ ID NO: 914950
caggaaaugccggaaccuu

SEQ ID NO: 1042277 - RNA, 19 nt, Artificial Sequence
  Description of Artificial Sequence: Synthetic oligonucleotide
  Antisense strand to SEQ ID NO: 1042276
aagguuccggcauuuccug

SEQ ID NO: 1042278 - RNA, 19 nt, Artificial Sequence
  Description of Artificial Sequence: Synthetic oligonucleotide
  Sense strand starting at position 1071 of SEQ ID NO: 914950
auagcaagucugugggaga

SEQ ID NO: 1042279 - RNA, 19 nt, Artificial Sequence
  Description of Artificial Sequence: Synthetic oligonucleotide
  Antisense strand to SEQ ID NO: 1042278
ucucccacagacuugcuau

SEQ ID NO: 1042280 - RNA, 19 nt, Artificial Sequence
  Description of Artificial Sequence: Synthetic oligonucleotide
  Sense strand starting at position 1553 of SEQ ID NO: 914950
ucaucccuuugguugaauu

SEQ ID NO: 1042281 - RNA, 19 nt, Artificial Sequence
  Description of Artificial Sequence: Synthetic oligonucleotide
  Antisense strand to SEQ ID NO: 1042280
aauucaaccaaagggauga

SEQ ID NO: 1042282 - RNA, 19 nt, Artificial Sequence
  Description of Artificial Sequence: Synthetic oligonucleotide
  Sense strand starting at position 1571 of SEQ ID NO: 914950
ucaacucauccugguugaa

SEQ ID NO: 1042283 - RNA, 19 nt, Artificial Sequence
  Description of Artificial Sequence: Synthetic oligonucleotide
  Antisense strand to SEQ ID NO: 1042282
uucaaccaggaugaguuga

SEQ ID NO: 1042284 - RNA, 19 nt, Artificial Sequence
  Description of Artificial Sequence: Synthetic oligonucleotide
  Sense strand starting at position 1805 of SEQ ID NO: 914950
ugacuuguccgcgccagga

SEQ ID NO: 1042285 - RNA, 19 nt, Artificial Sequence
  Description of Artificial Sequence: Synthetic oligonucleotide
  Antisense strand to SEQ ID NO: 1042284
uccuggcgcggacaaguca

SEQ ID NO: 1042286 - RNA, 19 nt, Artificial Sequence
  Description of Artificial Sequence: Synthetic oligonucleotide
  Sense strand starting at position 1964 of SEQ ID NO: 914950
cgugaaauucuccaucgua

SEQ ID NO: 1042287 - RNA, 19 nt, Artificial Sequence
  Description of Artificial Sequence: Synthetic oligonucleotide
  Antisense strand to SEQ ID NO: 1042286
uacgauggagaauuucacg

SEQ ID NO: 1042288 - RNA, 19 nt, Artificial Sequence
  Description of Artificial Sequence: Synthetic oligonucleotide
  Sense strand starting at position 2004 of SEQ ID NO: 914950
ccgugucugccguugguaa

SEQ ID NO: 1042289 - RNA, 19 nt, Artificial Sequence
  Description of Artificial Sequence: Synthetic oligonucleotide
  Antisense strand to SEQ ID NO: 1042288
uuaccaacggcagacacgg

SEQ ID NO: 1042290 - RNA, 19 nt, Artificial Sequence
  Description of Artificial Sequence: Synthetic oligonucleotide
  Sense strand starting at position 2133 of SEQ ID NO: 914950
gccuuaugagaacguucag

SEQ ID NO: 1042291 - RNA, 19 nt, Artificial Sequence
  Description of Artificial Sequence: Synthetic oligonucleotide
  Antisense strand to SEQ ID NO: 1042290
cugaacguucucauaaggc

SEQ ID NO: 1042292 - RNA, 19 nt, Artificial Sequence
  Description of Artificial Sequence: Synthetic oligonucleotide
  Sense strand starting at position 2168 of SEQ ID NO: 914950
uuauuagagucuucugcua

SEQ ID NO: 1042293 - RNA, 19 nt, Artificial Sequence
  Description of Artificial Sequence: Synthetic oligonucleotide
  Antisense strand to SEQ ID NO: 1042292
uagcagaagacucuaauaa

SEQ ID NO: 1042294 - RNA, 19 nt, Artificial Sequence
  Description of Artificial Sequence: Synthetic oligonucleotide
  Sense strand starting at position 2211 of SEQ ID NO: 914950
aaugacuuaggcggauaaa

SEQ ID NO: 1042295 - RNA, 19 nt, Artificial Sequence
  Description of Artificial Sequence: Synthetic oligonucleotide
  Antisense strand to SEQ ID NO: 1042294
uuuauccgccuaagucauu

SEQ ID NO: 1042296 - RNA, 19 nt, Artificial Sequence
  Description of Artificial Sequence: Synthetic oligonucleotide
  Sense strand starting at position 2679 of SEQ ID NO: 914950
ggguuuaccucucugagga

SEQ ID NO: 1042297 - RNA, 19 nt, Artificial Sequence
  Description of Artificial Sequence: Synthetic oligonucleotide
  Antisense strand to SEQ ID NO: 1042296
uccucagagagguaaaccc

SEQ ID NO: 1042298 - RNA, 19 nt, Artificial Sequence
  Description of Artificial Sequence: Synthetic oligonucleotide
  Sense strand starting at position 2719 of SEQ ID NO: 914950
agcggacuuagagacuauu

SEQ ID NO: 1042299 - RNA, 19 nt, Artificial Sequence
  Description of Artificial Sequence: Synthetic oligonucleotide
  Antisense strand to SEQ ID NO: 1042298
aauagucucuaaguccgcu

SEQ ID NO: 1042300 - RNA, 19 nt, Artificial Sequence
  Description of Artificial Sequence: Synthetic oligonucleotide
  Sense strand starting at position 2750 of SEQ ID NO: 914950
cgaaccaucaucgagucua

SEQ ID NO: 1042301 - RNA, 19 nt, Artificial Sequence
  Description of Artificial Sequence: Synthetic oligonucleotide
  Antisense strand to SEQ ID NO: 1042300
uagacucgaugaugguucg

SEQ ID NO: 1042302 - RNA, 19 nt, Artificial Sequence
  Description of Artificial Sequence: Synthetic oligonucleotide
  Sense strand starting at position 2763 of SEQ ID NO: 914950
agucuaaacuuuguguuua

SEQ ID NO: 1042303 - RNA, 19 nt, Artificial Sequence
  Description of Artificial Sequence: Synthetic oligonucleotide
  Antisense strand to SEQ ID NO: 1042302
uaaacacaaaguuuagacu

SEQ ID NO: 1042304 - RNA, 19 nt, Artificial Sequence
  Description of Artificial Sequence: Synthetic oligonucleotide
  Sense strand starting at position 2765 of SEQ ID NO: 914950
ucuaaacuuuguguuuaag

SEQ ID NO: 1042305 - RNA, 19 nt, Artificial Sequence
  Description of Artificial Sequence: Synthetic oligonucleotide
  Antisense strand to SEQ ID NO: 1042304
cuuaaacacaaaguuuaga

SEQ ID NO: 1042306 - RNA, 19 nt, Artificial Sequence
  Description of Artificial Sequence: Synthetic oligonucleotide
  Sense strand starting at position 2768 of SEQ ID NO: 914950
aaacuuuguguuuaagaug

SEQ ID NO: 1042307 - RNA, 19 nt, Artificial Sequence
  Description of Artificial Sequence: Synthetic oligonucleotide
  Antisense strand to SEQ ID NO: 1042306
caucuuaaacacaaaguuu

SEQ ID NO: 1042308 - RNA, 19 nt, Artificial Sequence
  Description of Artificial Sequence: Synthetic oligonucleotide
  Sense strand starting at position 2773 of SEQ ID NO: 914950
uuguguuuaagaugggaaa

SEQ ID NO: 1042309 - RNA, 19 nt, Artificial Sequence
  Description of Artificial Sequence: Synthetic oligonucleotide
  Antisense strand to SEQ ID NO: 1042308
uuucccaucuuaaacacaa

SEQ ID NO: 1042310 - RNA, 19 nt, Artificial Sequence
  Description of Artificial Sequence: Synthetic oligonucleotide
  Sense strand starting at position 3058 of SEQ ID NO: 914950
uaaugagugccugggacuu

SEQ ID NO: 1042311 - RNA, 19 nt, Artificial Sequence
  Description of Artificial Sequence: Synthetic oligonucleotide
  Antisense strand to SEQ ID NO: 1042310
aagucccaggcacucauua

SEQ ID NO: 1042312 - RNA, 19 nt, Artificial Sequence
  Description of Artificial Sequence: Synthetic oligonucleotide
  Sense strand starting at position 3064 of SEQ ID NO: 914950
gugccugggacuugaaacu

SEQ ID NO: 1042313 - RNA, 19 nt, Artificial Sequence
  Description of Artificial Sequence: Synthetic oligonucleotide
  Antisense strand to SEQ ID NO: 1042312
aguuucaagucccaggcac

SEQ ID NO: 1042314 - RNA, 19 nt, Artificial Sequence
  Description of Artificial Sequence: Synthetic oligonucleotide
  Sense strand starting at position 3112 of SEQ ID NO: 914950
cugucagccgcuucuuaau

SEQ ID NO: 1042315 - RNA, 19 nt, Artificial Sequence
  Description of Artificial Sequence: Synthetic oligonucleotide
  Antisense strand to SEQ ID NO: 1042314
auuaagaagcggcugacag

SEQ ID NO: 1042316 - RNA, 19 nt, Artificial Sequence
  Description of Artificial Sequence: Synthetic oligonucleotide
  Sense strand starting at position 3243 of SEQ ID NO: 914950
agaaaucuuugggauuucu

SEQ ID NO: 1042317 - RNA, 19 nt, Artificial Sequence
  Description of Artificial Sequence: Synthetic oligonucleotide
  Antisense strand to SEQ ID NO: 1042316
agaaaucccaaagauuucu

SEQ ID NO: 1042318 - RNA, 19 nt, Artificial Sequence
  Description of Artificial Sequence: Synthetic oligonucleotide
  Sense strand starting at position 3253 of SEQ ID NO: 914950
gggauuucuuugggaagug

SEQ ID NO: 1042319 - RNA, 19 nt, Artificial Sequence
  Description of Artificial Sequence: Synthetic oligonucleotide
  Antisense strand to SEQ ID NO: 1042318
cacuucccaaagaaauccc

SEQ ID NO: 1042320 - RNA, 19 nt, Artificial Sequence
  Description of Artificial Sequence: Synthetic oligonucleotide
  Sense strand starting at position 3254 of SEQ ID NO: 914950
ggauuucuuugggaagugu

SEQ ID NO: 1042321 - RNA, 19 nt, Artificial Sequence
  Description of Artificial Sequence: Synthetic oligonucleotide
  Antisense strand to SEQ ID NO: 1042320
acacuucccaaagaaaucc

SEQ ID NO: 1042322 - RNA, 19 nt, Artificial Sequence
  Description of Artificial Sequence: Synthetic oligonucleotide
  Sense strand starting at position 3308 of SEQ ID NO: 914950
gagggacugcucggaacau

SEQ ID NO: 1042323 - RNA, 19 nt, Artificial Sequence
  Description of Artificial Sequence: Synthetic oligonucleotide
  Antisense strand to SEQ ID NO: 1042322
auguuccgagcagucccuc

SEQ ID NO: 1042324 - RNA, 19 nt, Artificial Sequence
  Description of Artificial Sequence: Synthetic oligonucleotide
  Sense strand starting at position 3393 of SEQ ID NO: 914950
cucugaggguuuguugaaa

SEQ ID NO: 1042325 - RNA, 19 nt, Artificial Sequence
  Description of Artificial Sequence: Synthetic oligonucleotide
  Antisense strand to SEQ ID NO: 1042324
uuucaacaaacccucagag

SEQ ID NO: 1042326 - RNA, 19 nt, Artificial Sequence
  Description of Artificial Sequence: Synthetic oligonucleotide
  Sense strand starting at position 3766 of SEQ ID NO: 914950
auuguugucuucuuugaca

SEQ ID NO: 1042327 - RNA, 19 nt, Artificial Sequence
  Description of Artificial Sequence: Synthetic oligonucleotide
  Antisense strand to SEQ ID NO: 1042326
ugucaaagaagacaacaau

SEQ ID NO: 1042328 - RNA, 19 nt, Artificial Sequence
  Description of Artificial Sequence: Synthetic oligonucleotide
  Sense strand starting at position 3777 of SEQ ID NO: 914950
cuuugacaggucuggacuu

SEQ ID NO: 1042329 - RNA, 19 nt, Artificial Sequence
  Description of Artificial Sequence: Synthetic oligonucleotide
  Antisense strand to SEQ ID NO: 1042328
aaguccagaccugucaaag

SEQ ID NO: 1042330 - RNA, 19 nt, Artificial Sequence
  Description of Artificial Sequence: Synthetic oligonucleotide
  Sense strand starting at position 3800 of SEQ ID NO: 914950
cagauaagguaguuaucag

SEQ ID NO: 1042331 - RNA, 19 nt, Artificial Sequence
  Description of Artificial Sequence: Synthetic oligonucleotide
  Antisense strand to SEQ ID NO: 1042330
cugauaacuaccuuaucug

SEQ ID NO: 1042332 - RNA, 19 nt, Artificial Sequence
  Description of Artificial Sequence: Synthetic oligonucleotide
  Sense strand starting at position 3809 of SEQ ID NO: 914950
uaguuaucagaguaaagcu

SEQ ID NO: 1042333 - RNA, 19 nt, Artificial Sequence
  Description of Artificial Sequence: Synthetic oligonucleotide
  Antisense strand to SEQ ID NO: 1042332
agcuuuacucugauaacua

SEQ ID NO: 1042334 - RNA, 19 nt, Artificial Sequence
  Description of Artificial Sequence: Synthetic oligonucleotide
  Sense strand starting at position 3841 of SEQ ID NO: 914950
gcugguuuccagggaccuu

SEQ ID NO: 1042335 - RNA, 19 nt, Artificial Sequence
  Description of Artificial Sequence: Synthetic oligonucleotide
  Antisense strand to SEQ ID NO: 1042334
aaggucccuggaaaccagc

SEQ ID NO: 1042336 - RNA, 19 nt, Artificial Sequence
  Description of Artificial Sequence: Synthetic oligonucleotide
  Sense strand starting at position 3918 of SEQ ID NO: 914950
cuuuauuuccuuugucuga

SEQ ID NO: 1042337 - RNA, 19 nt, Artificial Sequence
  Description of Artificial Sequence: Synthetic oligonucleotide
  Antisense strand to SEQ ID NO: 1042336
ucagacaaaggaaauaaag

SEQ ID NO: 1042338 - RNA, 19 nt, Artificial Sequence
  Description of Artificial Sequence: Synthetic oligonucleotide
  Sense strand starting at position 3931 of SEQ ID NO: 914950
gucugaaacuuccuuagaa

SEQ ID NO: 1042339 - RNA, 19 nt, Artificial Sequence
  Description of Artificial Sequence: Synthetic oligonucleotide
  Antisense strand to SEQ ID NO: 1042338
uucuaaggaaguuucagac

SEQ ID NO: 1042340 - RNA, 19 nt, Artificial Sequence
  Description of Artificial Sequence: Synthetic oligonucleotide
  Sense strand starting at position 650 of SEQ ID NO: 914951
ugugucucaugcuuagaac

SEQ ID NO: 1042341 - RNA, 19 nt, Artificial Sequence
  Description of Artificial Sequence: Synthetic oligonucleotide
  Antisense strand to SEQ ID NO: 1042340
guucuaagcaugagacaca

SEQ ID NO: 1042342 - RNA, 19 nt, Artificial Sequence
  Description of Artificial Sequence: Synthetic oligonucleotide
  Sense strand starting at position 651 of SEQ ID NO: 914951
gugucucaugcuuagaacu

SEQ ID NO: 1042343 - RNA, 19 nt, Artificial Sequence
  Description of Artificial Sequence: Synthetic oligonucleotide
  Antisense strand to SEQ ID NO: 1042342
aguucuaagcaugagacac

SEQ ID NO: 1042344 - RNA, 19 nt, Artificial Sequence
  Description of Artificial Sequence: Synthetic oligonucleotide
  Sense strand starting at position 720 of SEQ ID NO: 914951
gguugaugauuuggagcca

SEQ ID NO: 1042345 - RNA, 19 nt, Artificial Sequence
  Description of Artificial Sequence: Synthetic oligonucleotide
  Antisense strand to SEQ ID NO: 1042344
uggcuccaaaucaucaacc

SEQ ID NO: 1042346 - RNA, 19 nt, Artificial Sequence
  Description of Artificial Sequence: Synthetic oligonucleotide
  Sense strand starting at position 721 of SEQ ID NO: 914951
guugaugauuuggagccaa

SEQ ID NO: 1042347 - RNA, 19 nt, Artificial Sequence
  Description of Artificial Sequence: Synthetic oligonucleotide
  Antisense strand to SEQ ID NO: 1042346
uuggcuccaaaucaucaac

SEQ ID NO: 1042348 - RNA, 19 nt, Artificial Sequence
  Description of Artificial Sequence: Synthetic oligonucleotide
  Sense strand starting at position 733 of SEQ ID NO: 914951
gagccaagugaucaggcuu

SEQ ID NO: 1042349 - RNA, 19 nt, Artificial Sequence
  Description of Artificial Sequence: Synthetic oligonucleotide
  Antisense strand to SEQ ID NO: 1042348
aagccugaucacuuggcuc

SEQ ID NO: 1042350 - RNA, 19 nt, Artificial Sequence
  Description of Artificial Sequence: Synthetic oligonucleotide
  Sense strand starting at position 771 of SEQ ID NO: 914951
ccgugugugacuuuggcau

SEQ ID NO: 1042351 - RNA, 19 nt, Artificial Sequence
  Description of Artificial Sequence: Synthetic oligonucleotide
  Antisense strand to SEQ ID NO: 1042350
augccaaagucacacacgg

SEQ ID NO: 1042352 - RNA, 19 nt, Artificial Sequence
  Description of Artificial Sequence: Synthetic oligonucleotide
  Sense strand starting at position 775 of SEQ ID NO: 914951
gugugacuuuggcauauca

SEQ ID NO: 1042353 - RNA, 19 nt, Artificial Sequence
  Description of Artificial Sequence: Synthetic oligonucleotide
  Antisense strand to SEQ ID NO: 1042352
ugauaugccaaagucacac

SEQ ID NO: 1042354 - RNA, 19 nt, Artificial Sequence
  Description of Artificial Sequence: Synthetic oligonucleotide
  Sense strand starting at position 777 of SEQ ID NO: 914951
gugacuuuggcauaucauu

SEQ ID NO: 1042355 - RNA, 19 nt, Artificial Sequence
  Description of Artificial Sequence: Synthetic oligonucleotide
  Antisense strand to SEQ ID NO: 1042354
aaugauaugccaaagucac

SEQ ID NO: 1042356 - RNA, 19 nt, Artificial Sequence
  Description of Artificial Sequence: Synthetic oligonucleotide
  Sense strand starting at position 906 of SEQ ID NO: 914951
agaagugggucauggauaa

SEQ ID NO: 1042357 - RNA, 19 nt, Artificial Sequence
  Description of Artificial Sequence: Synthetic oligonucleotide
  Antisense strand to SEQ ID NO: 1042356
uuauccaugacccacuucu

SEQ ID NO: 1042358 - RNA, 19 nt, Artificial Sequence
  Description of Artificial Sequence: Synthetic oligonucleotide
  Sense strand starting at position 919 of SEQ ID NO: 914951
ggauaagauucccaccuac

SEQ ID NO: 1042359 - RNA, 19 nt, Artificial Sequence
  Description of Artificial Sequence: Synthetic oligonucleotide
  Antisense strand to SEQ ID NO: 1042358
guaggugggaaucuuaucc

SEQ ID NO: 1042360 - RNA, 19 nt, Artificial Sequence
  Description of Artificial Sequence: Synthetic oligonucleotide
  Sense strand starting at position 940 of SEQ ID NO: 914951
ggcuccaaccugugaugaa

SEQ ID NO: 1042361 - RNA, 19 nt, Artificial Sequence
  Description of Artificial Sequence: Synthetic oligonucleotide
  Antisense strand to SEQ ID NO: 1042360
uucaucacagguuggagcc

SEQ ID NO: 1042362 - RNA, 19 nt, Artificial Sequence
  Description of Artificial Sequence: Synthetic oligonucleotide
  Sense strand starting at position 941 of SEQ ID NO: 914951
gcuccaaccugugaugaag

SEQ ID NO: 1042363 - RNA, 19 nt, Artificial Sequence
  Description of Artificial Sequence: Synthetic oligonucleotide
  Antisense strand to SEQ ID NO: 1042362
cuucaucacagguuggagc

SEQ ID NO: 1042364 - RNA, 19 nt, Artificial Sequence
  Description of Artificial Sequence: Synthetic oligonucleotide
  Sense strand starting at position 979 of SEQ ID NO: 914951
gggcccgauccuugaagua

SEQ ID NO: 1042365 - RNA, 19 nt, Artificial Sequence
  Description of Artificial Sequence: Synthetic oligonucleotide
  Antisense strand to SEQ ID NO: 1042364
uacuucaaggaucgggccc

SEQ ID NO: 1042366 - RNA, 19 nt, Artificial Sequence
  Description of Artificial Sequence: Synthetic oligonucleotide
  Sense strand starting at position 1003 of SEQ ID NO: 914951
ggcugaggcuguuccauau

SEQ ID NO: 1042367 - RNA, 19 nt, Artificial Sequence
  Description of Artificial Sequence: Synthetic oligonucleotide
  Antisense strand to SEQ ID NO: 1042366
auauggaacagccucagcc

SEQ ID NO: 1042368 - RNA, 19 nt, Artificial Sequence
  Description of Artificial Sequence: Synthetic oligonucleotide
  Sense strand starting at position 1007 of SEQ ID NO: 914951
gaggcuguuccauaugaca

SEQ ID NO: 1042369 - RNA, 19 nt, Artificial Sequence
  Description of Artificial Sequence: Synthetic oligonucleotide
  Antisense strand to SEQ ID NO: 1042368
ugucauauggaacagccuc

SEQ ID NO: 1042370 - RNA, 19 nt, Artificial Sequence
  Description of Artificial Sequence: Synthetic oligonucleotide
  Sense strand starting at position 1207 of SEQ ID NO: 914951
aggugagcucgggaacguu

SEQ ID NO: 1042371 - RNA, 19 nt, Artificial Sequence
  Description of Artificial Sequence: Synthetic oligonucleotide
  Antisense strand to SEQ ID NO: 1042370
aacguucccgagcucaccu

SEQ ID NO: 1042372 - RNA, 19 nt, Artificial Sequence
  Description of Artificial Sequence: Synthetic oligonucleotide
  Sense strand starting at position 1715 of SEQ ID NO: 914951
gcuguaaagucuguccaga

SEQ ID NO: 1042373 - RNA, 19 nt, Artificial Sequence
  Description of Artificial Sequence: Synthetic oligonucleotide
  Antisense strand to SEQ ID NO: 1042372
ucuggacagacuuuacagc

SEQ ID NO: 1042374 - RNA, 19 nt, Artificial Sequence
  Description of Artificial Sequence: Synthetic oligonucleotide
  Sense strand starting at position 1717 of SEQ ID NO: 914951
uguaaagucuguccagaaa

SEQ ID NO: 1042375 - RNA, 19 nt, Artificial Sequence
  Description of Artificial Sequence: Synthetic oligonucleotide
  Antisense strand to SEQ ID NO: 1042374
uuucuggacagacuuuaca

SEQ ID NO: 1042376 - RNA, 19 nt, Artificial Sequence
  Description of Artificial Sequence: Synthetic oligonucleotide
  Sense strand starting at position 1920 of SEQ ID NO: 914951
cccgcugagccuggaaaua

SEQ ID NO: 1042377 - RNA, 19 nt, Artificial Sequence
  Description of Artificial Sequence: Synthetic oligonucleotide
  Antisense strand to SEQ ID NO: 1042376
uauuuccaggcucagcggg

SEQ ID NO: 1042378 - RNA, 19 nt, Artificial Sequence
  Description of Artificial Sequence: Synthetic oligonucleotide
  Sense strand starting at position 1996 of SEQ ID NO: 914951
acaccuccuucccgagaua

SEQ ID NO: 1042379 - RNA, 19 nt, Artificial Sequence
  Description of Artificial Sequence: Synthetic oligonucleotide
  Antisense strand to SEQ ID NO: 1042378
uaucucgggaaggaggugu

SEQ ID NO: 1042380 - RNA, 19 nt, Artificial Sequence
  Description of Artificial Sequence: Synthetic oligonucleotide
  Sense strand starting at position 2007 of SEQ ID NO: 914951
ccgagauacucagggauug

SEQ ID NO: 1042381 - RNA, 19 nt, Artificial Sequence
  Description of Artificial Sequence: Synthetic oligonucleotide
  Antisense strand to SEQ ID NO: 1042380
caaucccugaguaucucgg

SEQ ID NO: 1042382 - RNA, 19 nt, Artificial Sequence
  Description of Artificial Sequence: Synthetic oligonucleotide
  Sense strand starting at position 2159 of SEQ ID NO: 914951
ucggcaaguuaugaggaaa

SEQ ID NO: 1042383 - RNA, 19 nt, Artificial Sequence
  Description of Artificial Sequence: Synthetic oligonucleotide
  Antisense strand to SEQ ID NO: 1042382
uuuccucauaacuugccga

SEQ ID NO: 1042384 - RNA, 19 nt, Artificial Sequence
  Description of Artificial Sequence: Synthetic oligonucleotide
  Sense strand starting at position 2183 of SEQ ID NO: 914951
cagguugcuugauccagaa

SEQ ID NO: 1042385 - RNA, 19 nt, Artificial Sequence
  Description of Artificial Sequence: Synthetic oligonucleotide
  Antisense strand to SEQ ID NO: 1042384
uucuggaucaagcaaccug

SEQ ID NO: 1042386 - RNA, 19 nt, Artificial Sequence
  Description of Artificial Sequence: Synthetic oligonucleotide
  Sense strand starting at position 2271 of SEQ ID NO: 914951
ccgcuuuagcuggguauca

SEQ ID NO: 1042387 - RNA, 19 nt, Artificial Sequence
  Description of Artificial Sequence: Synthetic oligonucleotide
  Antisense strand to SEQ ID NO: 1042386
ugauacccagcuaaagcgg

SEQ ID NO: 1042388 - RNA, 19 nt, Artificial Sequence
  Description of Artificial Sequence: Synthetic oligonucleotide
  Sense strand starting at position 2273 of SEQ ID NO: 914951
gcuuuagcuggguaucagu

SEQ ID NO: 1042389 - RNA, 19 nt, Artificial Sequence
  Description of Artificial Sequence: Synthetic oligonucleotide
  Antisense strand to SEQ ID NO: 1042388
acugauacccagcuaaagc

SEQ ID NO: 1042390 - RNA, 19 nt, Artificial Sequence
  Description of Artificial Sequence: Synthetic oligonucleotide
  Sense strand starting at position 2282 of SEQ ID NO: 914951
ggguaucagugucuguuaa

SEQ ID NO: 1042391 - RNA, 19 nt, Artificial Sequence
  Description of Artificial Sequence: Synthetic oligonucleotide
  Antisense strand to SEQ ID NO: 1042390
uuaacagacacugauaccc

SEQ ID NO: 1042392 - RNA, 19 nt, Artificial Sequence
  Description of Artificial Sequence: Synthetic oligonucleotide
  Sense strand starting at position 2283 of SEQ ID NO: 914951
gguaucagugucuguuaac

SEQ ID NO: 1042393 - RNA, 19 nt, Artificial Sequence
  Description of Artificial Sequence: Synthetic oligonucleotide
  Antisense strand to SEQ ID NO: 1042392
guuaacagacacugauacc

SEQ ID NO: 1042394 - RNA, 19 nt, Artificial Sequence
  Description of Artificial Sequence: Synthetic oligonucleotide
  Sense strand starting at position 2284 of SEQ ID NO: 914951
guaucagugucuguuaaca

SEQ ID NO: 1042395 - RNA, 19 nt, Artificial Sequence
  Description of Artificial Sequence: Synthetic oligonucleotide
  Antisense strand to SEQ ID NO: 1042394
uguuaacagacacugauac

SEQ ID NO: 1042396 - RNA, 19 nt, Artificial Sequence
  Description of Artificial Sequence: Synthetic oligonucleotide
  Sense strand starting at position 2286 of SEQ ID NO: 914951
aucagugucuguuaacaua

SEQ ID NO: 1042397 - RNA, 19 nt, Artificial Sequence
  Description of Artificial Sequence: Synthetic oligonucleotide
  Antisense strand to SEQ ID NO: 1042396
uauguuaacagacacugau

SEQ ID NO: 1042398 - RNA, 19 nt, Artificial Sequence
  Description of Artificial Sequence: Synthetic oligonucleotide
  Sense strand starting at position 2289 of SEQ ID NO: 914951
agugucuguuaacauauaa

SEQ ID NO: 1042399 - RNA, 19 nt, Artificial Sequence
  Description of Artificial Sequence: Synthetic oligonucleotide
  Antisense strand to SEQ ID NO: 1042398
uuauauguuaacagacacu

SEQ ID NO: 1042400 - RNA, 19 nt, Artificial Sequence
  Description of Artificial Sequence: Synthetic oligonucleotide
  Sense strand starting at position 2360 of SEQ ID NO: 914951
ucuaacacgugcuaagagu

SEQ ID NO: 1042401 - RNA, 19 nt, Artificial Sequence
  Description of Artificial Sequence: Synthetic oligonucleotide
  Antisense strand to SEQ ID NO: 1042400
acucuuagcacguguuaga

SEQ ID NO: 1042402 - RNA, 19 nt, Artificial Sequence
  Description of Artificial Sequence: Synthetic oligonucleotide
  Sense strand starting at position 3314 of SEQ ID NO: 914951
ucaacaacgcuuugaaacu

SEQ ID NO: 1042403 - RNA, 19 nt, Artificial Sequence
  Description of Artificial Sequence: Synthetic oligonucleotide
  Antisense strand to SEQ ID NO: 1042402
aguuucaaagcguuguuga

SEQ ID NO: 1042404 - RNA, 19 nt, Artificial Sequence
  Description of Artificial Sequence: Synthetic oligonucleotide
  Sense strand starting at position 3420 of SEQ ID NO: 914951
guuccagacacucgguaua

SEQ ID NO: 1042405 - RNA, 19 nt, Artificial Sequence
  Description of Artificial Sequence: Synthetic oligonucleotide
  Antisense strand to SEQ ID NO: 1042404
uauaccgagugucuggaac

SEQ ID NO: 1042406 - RNA, 19 nt, Artificial Sequence
  Description of Artificial Sequence: Synthetic oligonucleotide
  Sense strand starting at position 3422 of SEQ ID NO: 914951
uccagacacucgguauaua

SEQ ID NO: 1042407 - RNA, 19 nt, Artificial Sequence
  Description of Artificial Sequence: Synthetic oligonucleotide
  Antisense strand to SEQ ID NO: 1042406
uauauaccgagugucugga

SEQ ID NO: 1042408 - RNA, 19 nt, Artificial Sequence
  Description of Artificial Sequence: Synthetic oligonucleotide
  Sense strand starting at position 3430 of SEQ ID NO: 914951
cucgguauauagcaguaaa

SEQ ID NO: 1042409 - RNA, 19 nt, Artificial Sequence
  Description of Artificial Sequence: Synthetic oligonucleotide
  Antisense strand to SEQ ID NO: 1042408
uuuacugcuauauaccgag

SEQ ID NO: 1042410 - RNA, 19 nt, Artificial Sequence
  Description of Artificial Sequence: Synthetic oligonucleotide
  Sense strand starting at position 3433 of SEQ ID NO: 914951
gguauauagcaguaaauaa

SEQ ID NO: 1042411 - RNA, 19 nt, Artificial Sequence
  Description of Artificial Sequence: Synthetic oligonucleotide
  Antisense strand to SEQ ID NO: 1042410
uuauuuacugcuauauacc

SEQ ID NO: 1042412 - RNA, 19 nt, Artificial Sequence
  Description of Artificial Sequence: Synthetic oligonucleotide
  Sense strand starting at position 3581 of SEQ ID NO: 914951
accaguauaucucaauagu

SEQ ID NO: 1042413 - RNA, 19 nt, Artificial Sequence
  Description of Artificial Sequence: Synthetic oligonucleotide
  Antisense strand to SEQ ID NO: 1042412
acuauugagauauacuggu

SEQ ID NO: 1042414 - RNA, 19 nt, Artificial Sequence
  Description of Artificial Sequence: Synthetic oligonucleotide
  Sense strand starting at position 3584 of SEQ ID NO: 914951
aguauaucucaauaguguc

SEQ ID NO: 1042415 - RNA, 19 nt, Artificial Sequence
  Description of Artificial Sequence: Synthetic oligonucleotide
  Antisense strand to SEQ ID NO: 1042414
gacacuauugagauauacu

SEQ ID NO: 1042416 - RNA, 19 nt, Artificial Sequence
  Description of Artificial Sequence: Synthetic oligonucleotide
  Sense strand starting at position 3590 of SEQ ID NO: 914951
ucucaauagugucaaguuc

SEQ ID NO: 1042417 - RNA, 19 nt, Artificial Sequence
  Description of Artificial Sequence: Synthetic oligonucleotide
  Antisense strand to SEQ ID NO: 1042416
gaacuugacacuauugaga

SEQ ID NO: 1042418 - RNA, 19 nt, Artificial Sequence
  Description of Artificial Sequence: Synthetic oligonucleotide
  Sense strand starting at position 3906 of SEQ ID NO: 914951
gagccaaggucaugaaaga

SEQ ID NO: 1042419 - RNA, 19 nt, Artificial Sequence
  Description of Artificial Sequence: Synthetic oligonucleotide
  Antisense strand to SEQ ID NO: 1042418
ucuuucaugaccuuggcuc

SEQ ID NO: 1042420 - RNA, 19 nt, Artificial Sequence
  Description of Artificial Sequence: Synthetic oligonucleotide
  Sense strand starting at position 28 of SEQ ID NO: 914952
gugcaaagcucuuugcaag

SEQ ID NO: 1042421 - RNA, 19 nt, Artificial Sequence
  Description of Artificial Sequence: Synthetic oligonucleotide
  Antisense strand to SEQ ID NO: 1042420
cuugcaaagagcuuugcac

SEQ ID NO: 1042422 - RNA, 19 nt, Artificial Sequence
  Description of Artificial Sequence: Synthetic oligonucleotide
  Sense strand starting at position 803 of SEQ ID NO: 914952
ugugucucaugcuuagaac

SEQ ID NO: 1042423 - RNA, 19 nt, Artificial Sequence
  Description of Artificial Sequence: Synthetic oligonucleotide
  Antisense strand to SEQ ID NO: 1042422
guucuaagcaugagacaca

SEQ ID NO: 1042424 - RNA, 19 nt, Artificial Sequence
  Description of Artificial Sequence: Synthetic oligonucleotide
  Sense strand starting at position 804 of SEQ ID NO: 914952
gugucucaugcuuagaacu

SEQ ID NO: 1042425 - RNA, 19 nt, Artificial Sequence
  Description of Artificial Sequence: Synthetic oligonucleotide
  Antisense strand to SEQ ID NO: 1042424
aguucuaagcaugagacac

SEQ ID NO: 1042426 - RNA, 19 nt, Artificial Sequence
  Description of Artificial Sequence: Synthetic oligonucleotide
  Sense strand starting at position 873 of SEQ ID NO: 914952
gguugaugauuuggagcca

SEQ ID NO: 1042427 - RNA, 19 nt, Artificial Sequence
  Description of Artificial Sequence: Synthetic oligonucleotide
  Antisense strand to SEQ ID NO: 1042426
uggcuccaaaucaucaacc

SEQ ID NO: 1042428 - RNA, 19 nt, Artificial Sequence
  Description of Artificial Sequence: Synthetic oligonucleotide
  Sense strand starting at position 874 of SEQ ID NO: 914952
guugaugauuuggagccaa

SEQ ID NO: 1042429 - RNA, 19 nt, Artificial Sequence
  Description of Artificial Sequence: Synthetic oligonucleotide
  Antisense strand to SEQ ID NO: 1042428
uuggcuccaaaucaucaac

SEQ ID NO: 1042430 - RNA, 19 nt, Artificial Sequence
  Description of Artificial Sequence: Synthetic oligonucleotide
  Sense strand starting at position 886 of SEQ ID NO: 914952
gagccaagugaucaggcuu

SEQ ID NO: 1042431 - RNA, 19 nt, Artificial Sequence
  Description of Artificial Sequence: Synthetic oligonucleotide
  Antisense strand to SEQ ID NO: 1042430
aagccugaucacuuggcuc

SEQ ID NO: 1042432 - RNA, 19 nt, Artificial Sequence
  Description of Artificial Sequence: Synthetic oligonucleotide
  Sense strand starting at position 924 of SEQ ID NO: 914952
ccgugugugacuuuggcau

SEQ ID NO: 1042433 - RNA, 19 nt, Artificial Sequence
  Description of Artificial Sequence: Synthetic oligonucleotide
  Antisense strand to SEQ ID NO: 1042432
augccaaagucacacacgg

SEQ ID NO: 1042434 - RNA, 19 nt, Artificial Sequence
  Description of Artificial Sequence: Synthetic oligonucleotide
  Sense strand starting at position 928 of SEQ ID NO: 914952
gugugacuuuggcauauca

SEQ ID NO: 1042435 - RNA, 19 nt, Artificial Sequence
  Description of Artificial Sequence: Synthetic oligonucleotide
  Antisense strand to SEQ ID NO: 1042434
ugauaugccaaagucacac

SEQ ID NO: 1042436 - RNA, 19 nt, Artificial Sequence
  Description of Artificial Sequence: Synthetic oligonucleotide
  Sense strand starting at position 930 of SEQ ID NO: 914952
gugacuuuggcauaucauu

SEQ ID NO: 1042437 - RNA, 19 nt, Artificial Sequence
  Description of Artificial Sequence: Synthetic oligonucleotide
  Antisense strand to SEQ ID NO: 1042436
aaugauaugccaaagucac

SEQ ID NO: 1042438 - RNA, 19 nt, Artificial Sequence
  Description of Artificial Sequence: Synthetic oligonucleotide
  Sense strand starting at position 1059 of SEQ ID NO: 914952
agaagugggucauggauaa

SEQ ID NO: 1042439 - RNA, 19 nt, Artificial Sequence
  Description of Artificial Sequence: Synthetic oligonucleotide
  Antisense strand to SEQ ID NO: 1042438
uuauccaugacccacuucu

SEQ ID NO: 1042440 - RNA, 19 nt, Artificial Sequence
  Description of Artificial Sequence: Synthetic oligonucleotide
  Sense strand starting at position 1072 of SEQ ID NO: 914952
ggauaagauucccaccuac

SEQ ID NO: 1042441 - RNA, 19 nt, Artificial Sequence
  Description of Artificial Sequence: Synthetic oligonucleotide
  Antisense strand to SEQ ID NO: 1042440
guaggugggaaucuuaucc

SEQ ID NO: 1042442 - RNA, 19 nt, Artificial Sequence
  Description of Artificial Sequence: Synthetic oligonucleotide
  Sense strand starting at position 1093 of SEQ ID NO: 914952
ggcuccaaccugugaugaa

SEQ ID NO: 1042443 - RNA, 19 nt, Artificial Sequence
  Description of Artificial Sequence: Synthetic oligonucleotide
  Antisense strand to SEQ ID NO: 1042442
uucaucacagguuggagcc

SEQ ID NO: 1042444 - RNA, 19 nt, Artificial Sequence
  Description of Artificial Sequence: Synthetic oligonucleotide
  Sense strand starting at position 1094 of SEQ ID NO: 914952
gcuccaaccugugaugaag

SEQ ID NO: 1042445 - RNA, 19 nt, Artificial Sequence
  Description of Artificial Sequence: Synthetic oligonucleotide
  Antisense strand to SEQ ID NO: 1042444
cuucaucacagguuggagc

SEQ ID NO: 1042446 - RNA, 19 nt, Artificial Sequence
  Description of Artificial Sequence: Synthetic oligonucleotide
  Sense strand starting at position 1132 of SEQ ID NO: 914952
gggcccgauccuugaagua

SEQ ID NO: 1042447 - RNA, 19 nt, Artificial Sequence
  Description of Artificial Sequence: Synthetic oligonucleotide
  Antisense strand to SEQ ID NO: 1042446
uacuucaaggaucgggccc

SEQ ID NO: 1042448 - RNA, 19 nt, Artificial Sequence
  Description of Artificial Sequence: Synthetic oligonucleotide
  Sense strand starting at position 1156 of SEQ ID NO: 914952
ggcugaggcuguuccauau

SEQ ID NO: 1042449 - RNA, 19 nt, Artificial Sequence
  Description of Artificial Sequence: Synthetic oligonucleotide
  Antisense strand to SEQ ID NO: 1042448
auauggaacagccucagcc

SEQ ID NO: 1042450 - RNA, 19 nt, Artificial Sequence
  Description of Artificial Sequence: Synthetic oligonucleotide
  Sense strand starting at position 1160 of SEQ ID NO: 914952
gaggcuguuccauaugaca

SEQ ID NO: 1042451 - RNA, 19 nt, Artificial Sequence
  Description of Artificial Sequence: Synthetic oligonucleotide
  Antisense strand to SEQ ID NO: 1042450
ugucauauggaacagccuc

SEQ ID NO: 1042452 - RNA, 19 nt, Artificial Sequence
  Description of Artificial Sequence: Synthetic oligonucleotide
  Sense strand starting at position 1360 of SEQ ID NO: 914952
aggugagcucgggaacguu

SEQ ID NO: 1042453 - RNA, 19 nt, Artificial Sequence
  Description of Artificial Sequence: Synthetic oligonucleotide
  Antisense strand to SEQ ID NO: 1042452
aacguucccgagcucaccu

SEQ ID NO: 1042454 - RNA, 19 nt, Artificial Sequence
  Description of Artificial Sequence: Synthetic oligonucleotide
  Sense strand starting at position 1868 of SEQ ID NO: 914952
gcuguaaagucuguccaga

SEQ ID NO: 1042455 - RNA, 19 nt, Artificial Sequence
  Description of Artificial Sequence: Synthetic oligonucleotide
  Antisense strand to SEQ ID NO: 1042454
ucuggacagacuuuacagc

SEQ ID NO: 1042456 - RNA, 19 nt, Artificial Sequence
  Description of Artificial Sequence: Synthetic oligonucleotide
  Sense strand starting at position 1870 of SEQ ID NO: 914952
uguaaagucuguccagaaa

SEQ ID NO: 1042457 - RNA, 19 nt, Artificial Sequence
  Description of Artificial Sequence: Synthetic oligonucleotide
  Antisense strand to SEQ ID NO: 1042456
uuucuggacagacuuuaca

SEQ ID NO: 1042458 - RNA, 19 nt, Artificial Sequence
  Description of Artificial Sequence: Synthetic oligonucleotide
  Sense strand starting at position 2073 of SEQ ID NO: 914952
cccgcugagccuggaaaua

SEQ ID NO: 1042459 - RNA, 19 nt, Artificial Sequence
  Description of Artificial Sequence: Synthetic oligonucleotide
  Antisense strand to SEQ ID NO: 1042458
uauuuccaggcucagcggg

SEQ ID NO: 1042460 - RNA, 19 nt, Artificial Sequence
  Description of Artificial Sequence: Synthetic oligonucleotide
  Sense strand starting at position 2149 of SEQ ID NO: 914952
acaccuccuucccgagaua

SEQ ID NO: 1042461 - RNA, 19 nt, Artificial Sequence
  Description of Artificial Sequence: Synthetic oligonucleotide
  Antisense strand to SEQ ID NO: 1042460
uaucucgggaaggaggugu

SEQ ID NO: 1042462 - RNA, 19 nt, Artificial Sequence
  Description of Artificial Sequence: Synthetic oligonucleotide
  Sense strand starting at position 2160 of SEQ ID NO: 914952
ccgagauacucagggauug

SEQ ID NO: 1042463 - RNA, 19 nt, Artificial Sequence
  Description of Artificial Sequence: Synthetic oligonucleotide
  Antisense strand to SEQ ID NO: 1042462
caaucccugaguaucucgg

SEQ ID NO: 1042464 - RNA, 19 nt, Artificial Sequence
  Description of Artificial Sequence: Synthetic oligonucleotide
  Sense strand starting at position 2312 of SEQ ID NO: 914952
ucggcaaguuaugaggaaa

SEQ ID NO: 1042465 - RNA, 19 nt, Artificial Sequence
  Description of Artificial Sequence: Synthetic oligonucleotide
  Antisense strand to SEQ ID NO: 1042464
uuuccucauaacuugccga

SEQ ID NO: 1042466 - RNA, 19 nt, Artificial Sequence
  Description of Artificial Sequence: Synthetic oligonucleotide
  Sense strand starting at position 2336 of SEQ ID NO: 914952
cagguugcuugauccagaa

SEQ ID NO: 1042467 - RNA, 19 nt, Artificial Sequence
  Description of Artificial Sequence: Synthetic oligonucleotide
  Antisense strand to SEQ ID NO: 1042466
uucuggaucaagcaaccug

SEQ ID NO: 1042468 - RNA, 19 nt, Artificial Sequence
  Description of Artificial Sequence: Synthetic oligonucleotide
  Sense strand starting at position 2424 of SEQ ID NO: 914952
ccgcuuuagcuggguauca

SEQ ID NO: 1042469 - RNA, 19 nt, Artificial Sequence
  Description of Artificial Sequence: Synthetic oligonucleotide
  Antisense strand to SEQ ID NO: 1042468
ugauacccagcuaaagcgg

SEQ ID NO: 1042470 - RNA, 19 nt, Artificial Sequence
  Description of Artificial Sequence: Synthetic oligonucleotide
  Sense strand starting at position 2426 of SEQ ID NO: 914952
gcuuuagcuggguaucagu

SEQ ID NO: 1042471 - RNA, 19 nt, Artificial Sequence
  Description of Artificial Sequence: Synthetic oligonucleotide
  Antisense strand to SEQ ID NO: 1042470
acugauacccagcuaaagc

SEQ ID NO: 1042472 - RNA, 19 nt, Artificial Sequence
  Description of Artificial Sequence: Synthetic oligonucleotide
  Sense strand starting at position 2435 of SEQ ID NO: 914952
ggguaucagugucuguuaa

SEQ ID NO: 1042473 - RNA, 19 nt, Artificial Sequence
  Description of Artificial Sequence: Synthetic oligonucleotide
  Antisense strand to SEQ ID NO: 1042472
uuaacagacacugauaccc

SEQ ID NO: 1042474 - RNA, 19 nt, Artificial Sequence
  Description of Artificial Sequence: Synthetic oligonucleotide
  Sense strand starting at position 2436 of SEQ ID NO: 914952
gguaucagugucuguuaac

SEQ ID NO: 1042475 - RNA, 19 nt, Artificial Sequence
  Description of Artificial Sequence: Synthetic oligonucleotide
  Antisense strand to SEQ ID NO: 1042474
guuaacagacacugauacc

SEQ ID NO: 1042476 - RNA, 19 nt, Artificial Sequence
  Description of Artificial Sequence: Synthetic oligonucleotide
  Sense strand starting at position 2437 of SEQ ID NO: 914952
guaucagugucuguuaaca

SEQ ID NO: 1042477 - RNA, 19 nt, Artificial Sequence
  Description of Artificial Sequence: Synthetic oligonucleotide
  Antisense strand to SEQ ID NO: 1042476
uguuaacagacacugauac

SEQ ID NO: 1042478 - RNA, 19 nt, Artificial Sequence
  Description of Artificial Sequence: Synthetic oligonucleotide
  Sense strand starting at position 2439 of SEQ ID NO: 914952
aucagugucuguuaacaua

SEQ ID NO: 1042479 - RNA, 19 nt, Artificial Sequence
  Description of Artificial Sequence: Synthetic oligonucleotide
  Antisense strand to SEQ ID NO: 1042478
uauguuaacagacacugau

SEQ ID NO: 1042480 - RNA, 19 nt, Artificial Sequence
  Description of Artificial Sequence: Synthetic oligonucleotide
  Sense strand starting at position 2442 of SEQ ID NO: 914952
agugucuguuaacauauaa

SEQ ID NO: 1042481 - RNA, 19 nt, Artificial Sequence
  Description of Artificial Sequence: Synthetic oligonucleotide
  Antisense strand to SEQ ID NO: 1042480
uuauauguuaacagacacu

SEQ ID NO: 1042482 - RNA, 19 nt, Artificial Sequence
  Description of Artificial Sequence: Synthetic oligonucleotide
  Sense strand starting at position 2513 of SEQ ID NO: 914952
ucuaacacgugcuaagagu

SEQ ID NO: 1042483 - RNA, 19 nt, Artificial Sequence
  Description of Artificial Sequence: Synthetic oligonucleotide
  Antisense strand to SEQ ID NO: 1042482
acucuuagcacguguuaga

SEQ ID NO: 1042484 - RNA, 19 nt, Artificial Sequence
  Description of Artificial Sequence: Synthetic oligonucleotide
  Sense strand starting at position 3467 of SEQ ID NO: 914952
ucaacaacgcuuugaaacu

SEQ ID NO: 1042485 - RNA, 19 nt, Artificial Sequence
  Description of Artificial Sequence: Synthetic oligonucleotide
  Antisense strand to SEQ ID NO: 1042484
aguuucaaagcguuguuga

SEQ ID NO: 1042486 - RNA, 19 nt, Artificial Sequence
  Description of Artificial Sequence: Synthetic oligonucleotide
  Sense strand starting at position 3573 of SEQ ID NO: 914952
guuccagacacucgguaua

SEQ ID NO: 1042487 - RNA, 19 nt, Artificial Sequence
  Description of Artificial Sequence: Synthetic oligonucleotide
  Antisense strand to SEQ ID NO: 1042486
uauaccgagugucuggaac

SEQ ID NO: 1042488 - RNA, 19 nt, Artificial Sequence
  Description of Artificial Sequence: Synthetic oligonucleotide
  Sense strand starting at position 3575 of SEQ ID NO: 914952
uccagacacucgguauaua

SEQ ID NO: 1042489 - RNA, 19 nt, Artificial Sequence
  Description of Artificial Sequence: Synthetic oligonucleotide
  Antisense strand to SEQ ID NO: 1042488
uauauaccgagugucugga

SEQ ID NO: 1042490 - RNA, 19 nt, Artificial Sequence
  Description of Artificial Sequence: Synthetic oligonucleotide
  Sense strand starting at position 3583 of SEQ ID NO: 914952
cucgguauauagcaguaaa

SEQ ID NO: 1042491 - RNA, 19 nt, Artificial Sequence
  Description of Artificial Sequence: Synthetic oligonucleotide
  Antisense strand to SEQ ID NO: 1042490
uuuacugcuauauaccgag

SEQ ID NO: 1042492 - RNA, 19 nt, Artificial Sequence
  Description of Artificial Sequence: Synthetic oligonucleotide
  Sense strand starting at position 3586 of SEQ ID NO: 914952
gguauauagcaguaaauaa

SEQ ID NO: 1042493 - RNA, 19 nt, Artificial Sequence
  Description of Artificial Sequence: Synthetic oligonucleotide
  Antisense strand to SEQ ID NO: 1042492
uuauuuacugcuauauacc

SEQ ID NO: 1042494 - RNA, 19 nt, Artificial Sequence
  Description of Artificial Sequence: Synthetic oligonucleotide
  Sense strand starting at position 3734 of SEQ ID NO: 914952
accaguauaucucaauagu

SEQ ID NO: 1042495 - RNA, 19 nt, Artificial Sequence
  Description of Artificial Sequence: Synthetic oligonucleotide
  Antisense strand to SEQ ID NO: 1042494
acuauugagauauacuggu

SEQ ID NO: 1042496 - RNA, 19 nt, Artificial Sequence
  Description of Artificial Sequence: Synthetic oligonucleotide
  Sense strand starting at position 3737 of SEQ ID NO: 914952
aguauaucucaauaguguc

SEQ ID NO: 1042497 - RNA, 19 nt, Artificial Sequence
  Description of Artificial Sequence: Synthetic oligonucleotide
  Antisense strand to SEQ ID NO: 1042496
gacacuauugagauauacu

SEQ ID NO: 1042498 - RNA, 19 nt, Artificial Sequence
  Description of Artificial Sequence: Synthetic oligonucleotide
  Sense strand starting at position 3743 of SEQ ID NO: 914952
ucucaauagugucaaguuc

SEQ ID NO: 1042499 - RNA, 19 nt, Artificial Sequence
  Description of Artificial Sequence: Synthetic oligonucleotide
  Antisense strand to SEQ ID NO: 1042498
gaacuugacacuauugaga

SEQ ID NO: 1042500 - RNA, 19 nt, Artificial Sequence
  Description of Artificial Sequence: Synthetic oligonucleotide
  Sense strand starting at position 625 of SEQ ID NO: 914953
ugugucucaugcuuagaac

SEQ ID NO: 1042501 - RNA, 19 nt, Artificial Sequence
  Description of Artificial Sequence: Synthetic oligonucleotide
  Antisense strand to SEQ ID NO: 1042500
guucuaagcaugagacaca

SEQ ID NO: 1042502 - RNA, 19 nt, Artificial Sequence
  Description of Artificial Sequence: Synthetic oligonucleotide
  Sense strand starting at position 626 of SEQ ID NO: 914953
gugucucaugcuuagaacu

SEQ ID NO: 1042503 - RNA, 19 nt, Artificial Sequence
  Description of Artificial Sequence: Synthetic oligonucleotide
  Antisense strand to SEQ ID NO: 1042502
aguucuaagcaugagacac

SEQ ID NO: 1042504 - RNA, 19 nt, Artificial Sequence
  Description of Artificial Sequence: Synthetic oligonucleotide
  Sense strand starting at position 695 of SEQ ID NO: 914953
gguugaugauuuggagcca

SEQ ID NO: 1042505 - RNA, 19 nt, Artificial Sequence
  Description of Artificial Sequence: Synthetic oligonucleotide
  Antisense strand to SEQ ID NO: 1042504
uggcuccaaaucaucaacc

SEQ ID NO: 1042506 - RNA, 19 nt, Artificial Sequence
  Description of Artificial Sequence: Synthetic oligonucleotide
  Sense strand starting at position 696 of SEQ ID NO: 914953
guugaugauuuggagccaa

SEQ ID NO: 1042507 - RNA, 19 nt, Artificial Sequence
  Description of Artificial Sequence: Synthetic oligonucleotide
  Antisense strand to SEQ ID NO: 1042506
uuggcuccaaaucaucaac

SEQ ID NO: 1042508 - RNA, 19 nt, Artificial Sequence
  Description of Artificial Sequence: Synthetic oligonucleotide
  Sense strand starting at position 708 of SEQ ID NO: 914953
gagccaagugaucaggcuu

SEQ ID NO: 1042509 - RNA, 19 nt, Artificial Sequence
  Description of Artificial Sequence: Synthetic oligonucleotide
  Antisense strand to SEQ ID NO: 1042508
aagccugaucacuuggcuc

SEQ ID NO: 1042510 - RNA, 19 nt, Artificial Sequence
  Description of Artificial Sequence: Synthetic oligonucleotide
  Sense strand starting at position 746 of SEQ ID NO: 914953
ccgugugugacuuuggcau

SEQ ID NO: 1042511 - RNA, 19 nt, Artificial Sequence
  Description of Artificial Sequence: Synthetic oligonucleotide
  Antisense strand to SEQ ID NO: 1042510
augccaaagucacacacgg

SEQ ID NO: 1042512 - RNA, 19 nt, Artificial Sequence
  Description of Artificial Sequence: Synthetic oligonucleotide
  Sense strand starting at position 750 of SEQ ID NO: 914953
gugugacuuuggcauauca

SEQ ID NO: 1042513 - RNA, 19 nt, Artificial Sequence
  Description of Artificial Sequence: Synthetic oligonucleotide
  Antisense strand to SEQ ID NO: 1042512
ugauaugccaaagucacac

SEQ ID NO: 1042514 - RNA, 19 nt, Artificial Sequence
  Description of Artificial Sequence: Synthetic oligonucleotide
  Sense strand starting at position 752 of SEQ ID NO: 914953
gugacuuuggcauaucauu

SEQ ID NO: 1042515 - RNA, 19 nt, Artificial Sequence
  Description of Artificial Sequence: Synthetic oligonucleotide
  Antisense strand to SEQ ID NO: 1042514
aaugauaugccaaagucac

SEQ ID NO: 1042516 - RNA, 19 nt, Artificial Sequence
  Description of Artificial Sequence: Synthetic oligonucleotide
  Sense strand starting at position 881 of SEQ ID NO: 914953
agaagugggucauggauaa

SEQ ID NO: 1042517 - RNA, 19 nt, Artificial Sequence
  Description of Artificial Sequence: Synthetic oligonucleotide
  Antisense strand to SEQ ID NO: 1042516
uuauccaugacccacuucu

SEQ ID NO: 1042518 - RNA, 19 nt, Artificial Sequence
  Description of Artificial Sequence: Synthetic oligonucleotide
  Sense strand starting at position 894 of SEQ ID NO: 914953
ggauaagauucccaccuac

SEQ ID NO: 1042519 - RNA, 19 nt, Artificial Sequence
  Description of Artificial Sequence: Synthetic oligonucleotide
  Antisense strand to SEQ ID NO: 1042518
guaggugggaaucuuaucc

SEQ ID NO: 1042520 - RNA, 19 nt, Artificial Sequence
  Description of Artificial Sequence: Synthetic oligonucleotide
  Sense strand starting at position 915 of SEQ ID NO: 914953
ggcuccaaccugugaugaa

SEQ ID NO: 1042521 - RNA, 19 nt, Artificial Sequence
  Description of Artificial Sequence: Synthetic oligonucleotide
  Antisense strand to SEQ ID NO: 1042520
uucaucacagguuggagcc

SEQ ID NO: 1042522 - RNA, 19 nt, Artificial Sequence
  Description of Artificial Sequence: Synthetic oligonucleotide
  Sense strand starting at position 916 of SEQ ID NO: 914953
gcuccaaccugugaugaag

SEQ ID NO: 1042523 - RNA, 19 nt, Artificial Sequence
  Description of Artificial Sequence: Synthetic oligonucleotide
  Antisense strand to SEQ ID NO: 1042522
cuucaucacagguuggagc

SEQ ID NO: 1042524 - RNA, 19 nt, Artificial Sequence
  Description of Artificial Sequence: Synthetic oligonucleotide
  Sense strand starting at position 954 of SEQ ID NO: 914953
gggcccgauccuugaagua

SEQ ID NO: 1042525 - RNA, 19 nt, Artificial Sequence
  Description of Artificial Sequence: Synthetic oligonucleotide
  Antisense strand to SEQ ID NO: 1042524
uacuucaaggaucgggccc

SEQ ID NO: 1042526 - RNA, 19 nt, Artificial Sequence
  Description of Artificial Sequence: Synthetic oligonucleotide
  Sense strand starting at position 978 of SEQ ID NO: 914953
ggcugaggcuguuccauau

SEQ ID NO: 1042527 - RNA, 19 nt, Artificial Sequence
  Description of Artificial Sequence: Synthetic oligonucleotide
  Antisense strand to SEQ ID NO: 1042526
auauggaacagccucagcc

SEQ ID NO: 1042528 - RNA, 19 nt, Artificial Sequence
  Description of Artificial Sequence: Synthetic oligonucleotide
  Sense strand starting at position 982 of SEQ ID NO: 914953
gaggcuguuccauaugaca

SEQ ID NO: 1042529 - RNA, 19 nt, Artificial Sequence
  Description of Artificial Sequence: Synthetic oligonucleotide
  Antisense strand to SEQ ID NO: 1042528
ugucauauggaacagccuc

SEQ ID NO: 1042530 - RNA, 19 nt, Artificial Sequence
  Description of Artificial Sequence: Synthetic oligonucleotide
  Sense strand starting at position 1182 of SEQ ID NO: 914953
aggugagcucgggaacguu

SEQ ID NO: 1042531 - RNA, 19 nt, Artificial Sequence
  Description of Artificial Sequence: Synthetic oligonucleotide
  Antisense strand to SEQ ID NO: 1042530
aacguucccgagcucaccu

SEQ ID NO: 1042532 - RNA, 19 nt, Artificial Sequence
  Description of Artificial Sequence: Synthetic oligonucleotide
  Sense strand starting at position 1690 of SEQ ID NO: 914953
gcuguaaagucuguccaga

SEQ ID NO: 1042533 - RNA, 19 nt, Artificial Sequence
  Description of Artificial Sequence: Synthetic oligonucleotide
  Antisense strand to SEQ ID NO: 1042532
ucuggacagacuuuacagc

SEQ ID NO: 1042534 - RNA, 19 nt, Artificial Sequence
  Description of Artificial Sequence: Synthetic oligonucleotide
  Sense strand starting at position 1692 of SEQ ID NO: 914953
uguaaagucuguccagaaa

SEQ ID NO: 1042535 - RNA, 19 nt, Artificial Sequence
  Description of Artificial Sequence: Synthetic oligonucleotide
  Antisense strand to SEQ ID NO: 1042534
uuucuggacagacuuuaca

SEQ ID NO: 1042536 - RNA, 19 nt, Artificial Sequence
  Description of Artificial Sequence: Synthetic oligonucleotide
  Sense strand starting at position 1895 of SEQ ID NO: 914953
cccgcugagccuggaaaua

SEQ ID NO: 1042537 - RNA, 19 nt, Artificial Sequence
  Description of Artificial Sequence: Synthetic oligonucleotide
  Antisense strand to SEQ ID NO: 1042536
uauuuccaggcucagcggg

SEQ ID NO: 1042538 - RNA, 19 nt, Artificial Sequence
  Description of Artificial Sequence: Synthetic oligonucleotide
  Sense strand starting at position 1971 of SEQ ID NO: 914953
acaccuccuucccgagaua

SEQ ID NO: 1042539 - RNA, 19 nt, Artificial Sequence
  Description of Artificial Sequence: Synthetic oligonucleotide
  Antisense strand to SEQ ID NO: 1042538
uaucucgggaaggaggugu

SEQ ID NO: 1042540 - RNA, 19 nt, Artificial Sequence
  Description of Artificial Sequence: Synthetic oligonucleotide
  Sense strand starting at position 1982 of SEQ ID NO: 914953
ccgagauacucagggauug

SEQ ID NO: 1042541 - RNA, 19 nt, Artificial Sequence
  Description of Artificial Sequence: Synthetic oligonucleotide
  Antisense strand to SEQ ID NO: 1042540
caaucccugaguaucucgg

SEQ ID NO: 1042542 - RNA, 19 nt, Artificial Sequence
  Description of Artificial Sequence: Synthetic oligonucleotide
  Sense strand starting at position 2134 of SEQ ID NO: 914953
ucggcaaguuaugaggaaa

SEQ ID NO: 1042543 - RNA, 19 nt, Artificial Sequence
  Description of Artificial Sequence: Synthetic oligonucleotide
  Antisense strand to SEQ ID NO: 1042542
uuuccucauaacuugccga

SEQ ID NO: 1042544 - RNA, 19 nt, Artificial Sequence
  Description of Artificial Sequence: Synthetic oligonucleotide
  Sense strand starting at position 2158 of SEQ ID NO: 914953
cagguugcuugauccagaa

SEQ ID NO: 1042545 - RNA, 19 nt, Artificial Sequence
  Description of Artificial Sequence: Synthetic oligonucleotide
  Antisense strand to SEQ ID NO: 1042544
uucuggaucaagcaaccug

SEQ ID NO: 1042546 - RNA, 19 nt, Artificial Sequence
  Description of Artificial Sequence: Synthetic oligonucleotide
  Sense strand starting at position 2246 of SEQ ID NO: 914953
ccgcuuuagcuggguauca

SEQ ID NO: 1042547 - RNA, 19 nt, Artificial Sequence
  Description of Artificial Sequence: Synthetic oligonucleotide
  Antisense strand to SEQ ID NO: 1042546
ugauacccagcuaaagcgg

SEQ ID NO: 1042548 - RNA, 19 nt, Artificial Sequence
  Description of Artificial Sequence: Synthetic oligonucleotide
  Sense strand starting at position 2248 of SEQ ID NO: 914953
gcuuuagcuggguaucagu

SEQ ID NO: 1042549 - RNA, 19 nt, Artificial Sequence
  Description of Artificial Sequence: Synthetic oligonucleotide
  Antisense strand to SEQ ID NO: 1042548
acugauacccagcuaaagc

SEQ ID NO: 1042550 - RNA, 19 nt, Artificial Sequence
  Description of Artificial Sequence: Synthetic oligonucleotide
  Sense strand starting at position 2257 of SEQ ID NO: 914953
ggguaucagugucuguuaa

SEQ ID NO: 1042551 - RNA, 19 nt, Artificial Sequence
  Description of Artificial Sequence: Synthetic oligonucleotide
  Antisense strand to SEQ ID NO: 1042550
uuaacagacacugauaccc

SEQ ID NO: 1042552 - RNA, 19 nt, Artificial Sequence
  Description of Artificial Sequence: Synthetic oligonucleotide
  Sense strand starting at position 2258 of SEQ ID NO: 914953
gguaucagugucuguuaac

SEQ ID NO: 1042553 - RNA, 19 nt, Artificial Sequence
  Description of Artificial Sequence: Synthetic oligonucleotide
  Antisense strand to SEQ ID NO: 1042552
guuaacagacacugauacc

SEQ ID NO: 1042554 - RNA, 19 nt, Artificial Sequence
  Description of Artificial Sequence: Synthetic oligonucleotide
  Sense strand starting at position 2259 of SEQ ID NO: 914953
guaucagugucuguuaaca

SEQ ID NO: 1042555 - RNA, 19 nt, Artificial Sequence
  Description of Artificial Sequence: Synthetic oligonucleotide
  Antisense strand to SEQ ID NO: 1042554
uguuaacagacacugauac

SEQ ID NO: 1042556 - RNA, 19 nt, Artificial Sequence
  Description of Artificial Sequence: Synthetic oligonucleotide
  Sense strand starting at position 2261 of SEQ ID NO: 914953
aucagugucuguuaacaua

SEQ ID NO: 1042557 - RNA, 19 nt, Artificial Sequence
  Description of Artificial Sequence: Synthetic oligonucleotide
  Antisense strand to SEQ ID NO: 1042556
uauguuaacagacacugau

SEQ ID NO: 1042558 - RNA, 19 nt, Artificial Sequence
  Description of Artificial Sequence: Synthetic oligonucleotide
  Sense strand starting at position 2264 of SEQ ID NO: 914953
agugucuguuaacauauaa

SEQ ID NO: 1042559 - RNA, 19 nt, Artificial Sequence
  Description of Artificial Sequence: Synthetic oligonucleotide
  Antisense strand to SEQ ID NO: 1042558
uuauauguuaacagacacu

SEQ ID NO: 1042560 - RNA, 19 nt, Artificial Sequence
  Description of Artificial Sequence: Synthetic oligonucleotide
  Sense strand starting at position 3289 of SEQ ID NO: 914953
ucaacaacgcuuugaaacu

SEQ ID NO: 1042561 - RNA, 19 nt, Artificial Sequence
  Description of Artificial Sequence: Synthetic oligonucleotide
  Antisense strand to SEQ ID NO: 1042560
aguuucaaagcguuguuga

SEQ ID NO: 1042562 - RNA, 19 nt, Artificial Sequence
  Description of Artificial Sequence: Synthetic oligonucleotide
  Sense strand starting at position 3395 of SEQ ID NO: 914953
guuccagacacucgguaua

SEQ ID NO: 1042563 - RNA, 19 nt, Artificial Sequence
  Description of Artificial Sequence: Synthetic oligonucleotide
  Antisense strand to SEQ ID NO: 1042562
uauaccgagugucuggaac

SEQ ID NO: 1042564 - RNA, 19 nt, Artificial Sequence
  Description of Artificial Sequence: Synthetic oligonucleotide
  Sense strand starting at position 3397 of SEQ ID NO: 914953
uccagacacucgguauaua

SEQ ID NO: 1042565 - RNA, 19 nt, Artificial Sequence
  Description of Artificial Sequence: Synthetic oligonucleotide
  Antisense strand to SEQ ID NO: 1042564
uauauaccgagugucugga

SEQ ID NO: 1042566 - RNA, 19 nt, Artificial Sequence
  Description of Artificial Sequence: Synthetic oligonucleotide
  Sense strand starting at position 3405 of SEQ ID NO: 914953
cucgguauauagcaguaaa

SEQ ID NO: 1042567 - RNA, 19 nt, Artificial Sequence
  Description of Artificial Sequence: Synthetic oligonucleotide
  Antisense strand to SEQ ID NO: 1042566
uuuacugcuauauaccgag

SEQ ID NO: 1042568 - RNA, 19 nt, Artificial Sequence
  Description of Artificial Sequence: Synthetic oligonucleotide
  Sense strand starting at position 3408 of SEQ ID NO: 914953
gguauauagcaguaaauaa

SEQ ID NO: 1042569 - RNA, 19 nt, Artificial Sequence
  Description of Artificial Sequence: Synthetic oligonucleotide
  Antisense strand to SEQ ID NO: 1042568
uuauuuacugcuauauacc

SEQ ID NO: 1042570 - RNA, 19 nt, Artificial Sequence
  Description of Artificial Sequence: Synthetic oligonucleotide
  Sense strand starting at position 3556 of SEQ ID NO: 914953
accaguauaucucaauagu

SEQ ID NO: 1042571 - RNA, 19 nt, Artificial Sequence
  Description of Artificial Sequence: Synthetic oligonucleotide
  Antisense strand to SEQ ID NO: 1042570
acuauugagauauacuggu

SEQ ID NO: 1042572 - RNA, 19 nt, Artificial Sequence
  Description of Artificial Sequence: Synthetic oligonucleotide
  Sense strand starting at position 3559 of SEQ ID NO: 914953
aguauaucucaauaguguc

SEQ ID NO: 1042573 - RNA, 19 nt, Artificial Sequence
  Description of Artificial Sequence: Synthetic oligonucleotide
  Antisense strand to SEQ ID NO: 1042572
gacacuauugagauauacu

SEQ ID NO: 1042574 - RNA, 19 nt, Artificial Sequence
  Description of Artificial Sequence: Synthetic oligonucleotide
  Sense strand starting at position 3565 of SEQ ID NO: 914953
ucucaauagugucaaguuc

SEQ ID NO: 1042575 - RNA, 19 nt, Artificial Sequence
  Description of Artificial Sequence: Synthetic oligonucleotide
  Antisense strand to SEQ ID NO: 1042574
gaacuugacacuauugaga

SEQ ID NO: 1042576 - RNA, 19 nt, Artificial Sequence
  Description of Artificial Sequence: Synthetic oligonucleotide
  Sense strand starting at position 3881 of SEQ ID NO: 914953
gagccaaggucaugaaaga

SEQ ID NO: 1042577 - RNA, 19 nt, Artificial Sequence
  Description of Artificial Sequence: Synthetic oligonucleotide
  Antisense strand to SEQ ID NO: 1042576
ucuuucaugaccuuggcuc

SEQ ID NO: 1042578 - RNA, 19 nt, Artificial Sequence
  Description of Artificial Sequence: Synthetic oligonucleotide
  Sense strand starting at position 3962 of SEQ ID NO: 914953
ugugguguucuggaucaaa

SEQ ID NO: 1042579 - RNA, 19 nt, Artificial Sequence
  Description of Artificial Sequence: Synthetic oligonucleotide
  Antisense strand to SEQ ID NO: 1042578
uuugauccagaacaccaca

SEQ ID NO: 1042580 - RNA, 19 nt, Artificial Sequence
  Description of Artificial Sequence: Synthetic oligonucleotide
  Sense strand starting at position 72 of SEQ ID NO: 914954
ugugucucaugcuuagaac

SEQ ID NO: 1042581 - RNA, 19 nt, Artificial Sequence
  Description of Artificial Sequence: Synthetic oligonucleotide
  Antisense strand to SEQ ID NO: 1042580
guucuaagcaugagacaca

SEQ ID NO: 1042582 - RNA, 19 nt, Artificial Sequence
  Description of Artificial Sequence: Synthetic oligonucleotide
  Sense strand starting at position 73 of SEQ ID NO: 914954
gugucucaugcuuagaacu

SEQ ID NO: 1042583 - RNA, 19 nt, Artificial Sequence
  Description of Artificial Sequence: Synthetic oligonucleotide
  Antisense strand to SEQ ID NO: 1042582
aguucuaagcaugagacac

SEQ ID NO: 1042584 - RNA, 19 nt, Artificial Sequence
  Description of Artificial Sequence: Synthetic oligonucleotide
  Sense strand starting at position 142 of SEQ ID NO: 914954
gguugaugauuuggagcca

SEQ ID NO: 1042585 - RNA, 19 nt, Artificial Sequence
  Description of Artificial Sequence: Synthetic oligonucleotide
  Antisense strand to SEQ ID NO: 1042584
uggcuccaaaucaucaacc

SEQ ID NO: 1042586 - RNA, 19 nt, Artificial Sequence
  Description of Artificial Sequence: Synthetic oligonucleotide
  Sense strand starting at position 143 of SEQ ID NO: 914954
guugaugauuuggagccaa

SEQ ID NO: 1042587 - RNA, 19 nt, Artificial Sequence
  Description of Artificial Sequence: Synthetic oligonucleotide
  Antisense strand to SEQ ID NO: 1042586
uuggcuccaaaucaucaac

SEQ ID NO: 1042588 - RNA, 19 nt, Artificial Sequence
  Description of Artificial Sequence: Synthetic oligonucleotide
  Sense strand starting at position 155 of SEQ ID NO: 914954
gagccaagugaucaggcuu

SEQ ID NO: 1042589 - RNA, 19 nt, Artificial Sequence
  Description of Artificial Sequence: Synthetic oligonucleotide
  Antisense strand to SEQ ID NO: 1042588
aagccugaucacuuggcuc

SEQ ID NO: 1042590 - RNA, 19 nt, Artificial Sequence
  Description of Artificial Sequence: Synthetic oligonucleotide
  Sense strand starting at position 193 of SEQ ID NO: 914954
ccgugugugacuuuggcau

SEQ ID NO: 1042591 - RNA, 19 nt, Artificial Sequence
  Description of Artificial Sequence: Synthetic oligonucleotide
  Antisense strand to SEQ ID NO: 1042590
augccaaagucacacacgg

SEQ ID NO: 1042592 - RNA, 19 nt, Artificial Sequence
  Description of Artificial Sequence: Synthetic oligonucleotide
  Sense strand starting at position 199 of SEQ ID NO: 914954
gugacuuuggcauaucauu

SEQ ID NO: 1042593 - RNA, 19 nt, Artificial Sequence
  Description of Artificial Sequence: Synthetic oligonucleotide
  Antisense strand to SEQ ID NO: 1042592
aaugauaugccaaagucac

SEQ ID NO: 1042594 - RNA, 19 nt, Artificial Sequence
  Description of Artificial Sequence: Synthetic oligonucleotide
  Sense strand starting at position 328 of SEQ ID NO: 914954
agaagugggucauggauaa

SEQ ID NO: 1042595 - RNA, 19 nt, Artificial Sequence
  Description of Artificial Sequence: Synthetic oligonucleotide
  Antisense strand to SEQ ID NO: 1042594
uuauccaugacccacuucu

SEQ ID NO: 1042596 - RNA, 19 nt, Artificial Sequence
  Description of Artificial Sequence: Synthetic oligonucleotide
  Sense strand starting at position 341 of SEQ ID NO: 914954
ggauaagauucccaccuac

SEQ ID NO: 1042597 - RNA, 19 nt, Artificial Sequence
  Description of Artificial Sequence: Synthetic oligonucleotide
  Antisense strand to SEQ ID NO: 1042596
guaggugggaaucuuaucc

SEQ ID NO: 1042598 - RNA, 19 nt, Artificial Sequence
  Description of Artificial Sequence: Synthetic oligonucleotide
  Sense strand starting at position 362 of SEQ ID NO: 914954
ggcuccaaccugugaugaa

SEQ ID NO: 1042599 - RNA, 19 nt, Artificial Sequence
  Description of Artificial Sequence: Synthetic oligonucleotide
  Antisense strand to SEQ ID NO: 1042598
uucaucacagguuggagcc

SEQ ID NO: 1042600 - RNA, 19 nt, Artificial Sequence
  Description of Artificial Sequence: Synthetic oligonucleotide
  Sense strand starting at position 363 of SEQ ID NO: 914954
gcuccaaccugugaugaag

SEQ ID NO: 1042601 - RNA, 19 nt, Artificial Sequence
  Description of Artificial Sequence: Synthetic oligonucleotide
  Antisense strand to SEQ ID NO: 1042600
cuucaucacagguuggagc

SEQ ID NO: 1042602 - RNA, 19 nt, Artificial Sequence
  Description of Artificial Sequence: Synthetic oligonucleotide
  Sense strand starting at position 401 of SEQ ID NO: 914954
gggcccgauccuugaagua

SEQ ID NO: 1042603 - RNA, 19 nt, Artificial Sequence
  Description of Artificial Sequence: Synthetic oligonucleotide
  Antisense strand to SEQ ID NO: 1042602
uacuucaaggaucgggccc

SEQ ID NO: 1042604 - RNA, 19 nt, Artificial Sequence
  Description of Artificial Sequence: Synthetic oligonucleotide
  Sense strand starting at position 425 of SEQ ID NO: 914954
ggcugaggcuguuccauau

SEQ ID NO: 1042605 - RNA, 19 nt, Artificial Sequence
  Description of Artificial Sequence: Synthetic oligonucleotide
  Antisense strand to SEQ ID NO: 1042604
auauggaacagccucagcc

SEQ ID NO: 1042606 - RNA, 19 nt, Artificial Sequence
  Description of Artificial Sequence: Synthetic oligonucleotide
  Sense strand starting at position 429 of SEQ ID NO: 914954
gaggcuguuccauaugaca

SEQ ID NO: 1042607 - RNA, 19 nt, Artificial Sequence
  Description of Artificial Sequence: Synthetic oligonucleotide
  Antisense strand to SEQ ID NO: 1042606
ugucauauggaacagccuc

SEQ ID NO: 1042608 - RNA, 19 nt, Artificial Sequence
  Description of Artificial Sequence: Synthetic oligonucleotide
  Sense strand starting at position 629 of SEQ ID NO: 914954
aggugagcucgggaacguu

SEQ ID NO: 1042609 - RNA, 19 nt, Artificial Sequence
  Description of Artificial Sequence: Synthetic oligonucleotide
  Antisense strand to SEQ ID NO: 1042608
aacguucccgagcucaccu

SEQ ID NO: 1042610 - RNA, 19 nt, Artificial Sequence
  Description of Artificial Sequence: Synthetic oligonucleotide
  Sense strand starting at position 1137 of SEQ ID NO: 914954
gcuguaaagucuguccaga

SEQ ID NO: 1042611 - RNA, 19 nt, Artificial Sequence
  Description of Artificial Sequence: Synthetic oligonucleotide
  Antisense strand to SEQ ID NO: 1042610
ucuggacagacuuuacagc

SEQ ID NO: 1042612 - RNA, 19 nt, Artificial Sequence
  Description of Artificial Sequence: Synthetic oligonucleotide
  Sense strand starting at position 1139 of SEQ ID NO: 914954
uguaaagucuguccagaaa

SEQ ID NO: 1042613 - RNA, 19 nt, Artificial Sequence
  Description of Artificial Sequence: Synthetic oligonucleotide
  Antisense strand to SEQ ID NO: 1042612
uuucuggacagacuuuaca

SEQ ID NO: 1042614 - RNA, 19 nt, Artificial Sequence
  Description of Artificial Sequence: Synthetic oligonucleotide
  Sense strand starting at position 1342 of SEQ ID NO: 914954
cccgcugagccuggaaaua

SEQ ID NO: 1042615 - RNA, 19 nt, Artificial Sequence
  Description of Artificial Sequence: Synthetic oligonucleotide
  Antisense strand to SEQ ID NO: 1042614
uauuuccaggcucagcggg

SEQ ID NO: 1042616 - RNA, 19 nt, Artificial Sequence
  Description of Artificial Sequence: Synthetic oligonucleotide
  Sense strand starting at position 1418 of SEQ ID NO: 914954
acaccuccuucccgagaua

SEQ ID NO: 1042617 - RNA, 19 nt, Artificial Sequence
  Description of Artificial Sequence: Synthetic oligonucleotide
  Antisense strand to SEQ ID NO: 1042616
uaucucgggaaggaggugu

SEQ ID NO: 1042618 - RNA, 19 nt, Artificial Sequence
  Description of Artificial Sequence: Synthetic oligonucleotide
  Sense strand starting at position 1429 of SEQ ID NO: 914954
ccgagauacucagggauug

SEQ ID NO: 1042619 - RNA, 19 nt, Artificial Sequence
  Description of Artificial Sequence: Synthetic oligonucleotide
  Antisense strand to SEQ ID NO: 1042618
caaucccugaguaucucgg

SEQ ID NO: 1042620 - RNA, 19 nt, Artificial Sequence
  Description of Artificial Sequence: Synthetic oligonucleotide
  Sense strand starting at position 1581 of SEQ ID NO: 914954
ucggcaaguuaugaggaaa

SEQ ID NO: 1042621 - RNA, 19 nt, Artificial Sequence
  Description of Artificial Sequence: Synthetic oligonucleotide
  Antisense strand to SEQ ID NO: 1042620
uuuccucauaacuugccga

SEQ ID NO: 1042622 - RNA, 19 nt, Artificial Sequence
  Description of Artificial Sequence: Synthetic oligonucleotide
  Sense strand starting at position 1605 of SEQ ID NO: 914954
cagguugcuugauccagaa

SEQ ID NO: 1042623 - RNA, 19 nt, Artificial Sequence
  Description of Artificial Sequence: Synthetic oligonucleotide
  Antisense strand to SEQ ID NO: 1042622
uucuggaucaagcaaccug

SEQ ID NO: 1042624 - RNA, 19 nt, Artificial Sequence
  Description of Artificial Sequence: Synthetic oligonucleotide
  Sense strand starting at position 1693 of SEQ ID NO: 914954
ccgcuuuagcuggguauca

SEQ ID NO: 1042625 - RNA, 19 nt, Artificial Sequence
  Description of Artificial Sequence: Synthetic oligonucleotide
  Antisense strand to SEQ ID NO: 1042624
ugauacccagcuaaagcgg

SEQ ID NO: 1042626 - RNA, 19 nt, Artificial Sequence
  Description of Artificial Sequence: Synthetic oligonucleotide
  Sense strand starting at position 1695 of SEQ ID NO: 914954
gcuuuagcuggguaucagu

SEQ ID NO: 1042627 - RNA, 19 nt, Artificial Sequence
  Description of Artificial Sequence: Synthetic oligonucleotide
  Antisense strand to SEQ ID NO: 1042626
acugauacccagcuaaagc

SEQ ID NO: 1042628 - RNA, 19 nt, Artificial Sequence
  Description of Artificial Sequence: Synthetic oligonucleotide
  Sense strand starting at position 1704 of SEQ ID NO: 914954
ggguaucagugucuguuaa

SEQ ID NO: 1042629 - RNA, 19 nt, Artificial Sequence
  Description of Artificial Sequence: Synthetic oligonucleotide
  Antisense strand to SEQ ID NO: 1042628
uuaacagacacugauaccc

SEQ ID NO: 1042630 - RNA, 19 nt, Artificial Sequence
  Description of Artificial Sequence: Synthetic oligonucleotide
  Sense strand starting at position 1705 of SEQ ID NO: 914954
gguaucagugucuguuaac

SEQ ID NO: 1042631 - RNA, 19 nt, Artificial Sequence
  Description of Artificial Sequence: Synthetic oligonucleotide
  Antisense strand to SEQ ID NO: 1042630
guuaacagacacugauacc

SEQ ID NO: 1042632 - RNA, 19 nt, Artificial Sequence
  Description of Artificial Sequence: Synthetic oligonucleotide
  Sense strand starting at position 1706 of SEQ ID NO: 914954
guaucagugucuguuaaca

SEQ ID NO: 1042633 - RNA, 19 nt, Artificial Sequence
  Description of Artificial Sequence: Synthetic oligonucleotide
  Antisense strand to SEQ ID NO: 1042632
uguuaacagacacugauac

SEQ ID NO: 1042634 - RNA, 19 nt, Artificial Sequence
  Description of Artificial Sequence: Synthetic oligonucleotide
  Sense strand starting at position 1708 of SEQ ID NO: 914954
aucagugucuguuaacaua

SEQ ID NO: 1042635 - RNA, 19 nt, Artificial Sequence
  Description of Artificial Sequence: Synthetic oligonucleotide
  Antisense strand to SEQ ID NO: 1042634
uauguuaacagacacugau

SEQ ID NO: 1042636 - RNA, 19 nt, Artificial Sequence
  Description of Artificial Sequence: Synthetic oligonucleotide
  Sense strand starting at position 1711 of SEQ ID NO: 914954
agugucuguuaacauauaa

SEQ ID NO: 1042637 - RNA, 19 nt, Artificial Sequence
  Description of Artificial Sequence: Synthetic oligonucleotide
  Antisense strand to SEQ ID NO: 1042636
uuauauguuaacagacacu

SEQ ID NO: 1042638 - RNA, 19 nt, Artificial Sequence
  Description of Artificial Sequence: Synthetic oligonucleotide
  Sense strand starting at position 2736 of SEQ ID NO: 914954
ucaacaacgcuuugaaacu

SEQ ID NO: 1042639 - RNA, 19 nt, Artificial Sequence
  Description of Artificial Sequence: Synthetic oligonucleotide
  Antisense strand to SEQ ID NO: 1042638
aguuucaaagcguuguuga

SEQ ID NO: 1042640 - RNA, 19 nt, Artificial Sequence
  Description of Artificial Sequence: Synthetic oligonucleotide
  Sense strand starting at position 2842 of SEQ ID NO: 914954
guuccagacacucgguaua

SEQ ID NO: 1042641 - RNA, 19 nt, Artificial Sequence
  Description of Artificial Sequence: Synthetic oligonucleotide
  Antisense strand to SEQ ID NO: 1042640
uauaccgagugucuggaac

SEQ ID NO: 1042642 - RNA, 19 nt, Artificial Sequence
  Description of Artificial Sequence: Synthetic oligonucleotide
  Sense strand starting at position 2844 of SEQ ID NO: 914954
uccagacacucgguauaua

SEQ ID NO: 1042643 - RNA, 19 nt, Artificial Sequence
  Description of Artificial Sequence: Synthetic oligonucleotide
  Antisense strand to SEQ ID NO: 1042642
uauauaccgagugucugga

SEQ ID NO: 1042644 - RNA, 19 nt, Artificial Sequence
  Description of Artificial Sequence: Synthetic oligonucleotide
  Sense strand starting at position 2855 of SEQ ID NO: 914954
gguauauagcaguaaauaa

SEQ ID NO: 1042645 - RNA, 19 nt, Artificial Sequence
  Description of Artificial Sequence: Synthetic oligonucleotide
  Antisense strand to SEQ ID NO: 1042644
uuauuuacugcuauauacc

SEQ ID NO: 1042646 - RNA, 19 nt, Artificial Sequence
  Description of Artificial Sequence: Synthetic oligonucleotide
  Sense strand starting at position 3003 of SEQ ID NO: 914954
accaguauaucucaauagu

SEQ ID NO: 1042647 - RNA, 19 nt, Artificial Sequence
  Description of Artificial Sequence: Synthetic oligonucleotide
  Antisense strand to SEQ ID NO: 1042646
acuauugagauauacuggu

SEQ ID NO: 1042648 - RNA, 19 nt, Artificial Sequence
  Description of Artificial Sequence: Synthetic oligonucleotide
  Sense strand starting at position 3006 of SEQ ID NO: 914954
aguauaucucaauaguguc

SEQ ID NO: 1042649 - RNA, 19 nt, Artificial Sequence
  Description of Artificial Sequence: Synthetic oligonucleotide
  Antisense strand to SEQ ID NO: 1042648
gacacuauugagauauacu

SEQ ID NO: 1042650 - RNA, 19 nt, Artificial Sequence
  Description of Artificial Sequence: Synthetic oligonucleotide
  Sense strand starting at position 3012 of SEQ ID NO: 914954
ucucaauagugucaaguuc

SEQ ID NO: 1042651 - RNA, 19 nt, Artificial Sequence
  Description of Artificial Sequence: Synthetic oligonucleotide
  Antisense strand to SEQ ID NO: 1042650
gaacuugacacuauugaga

SEQ ID NO: 1042652 - RNA, 19 nt, Artificial Sequence
  Description of Artificial Sequence: Synthetic oligonucleotide
  Sense strand starting at position 3328 of SEQ ID NO: 914954
gagccaaggucaugaaaga

SEQ ID NO: 1042653 - RNA, 19 nt, Artificial Sequence
  Description of Artificial Sequence: Synthetic oligonucleotide
  Antisense strand to SEQ ID NO: 1042652
ucuuucaugaccuuggcuc

SEQ ID NO: 1042654 - RNA, 19 nt, Artificial Sequence
  Description of Artificial Sequence: Synthetic oligonucleotide
  Sense strand starting at position 3409 of SEQ ID NO: 914954
ugugguguucuggaucaaa

SEQ ID NO: 1042655 - RNA, 19 nt, Artificial Sequence
  Description of Artificial Sequence: Synthetic oligonucleotide
  Antisense strand to SEQ ID NO: 1042654
uuugauccagaacaccaca

SEQ ID NO: 1042656 - RNA, 19 nt, Artificial Sequence
  Description of Artificial Sequence: Synthetic oligonucleotide
  Sense strand starting at position 3519 of SEQ ID NO: 914954
augcgacuuugaguuuaau

SEQ ID NO: 1042657 - RNA, 19 nt, Artificial Sequence
  Description of Artificial Sequence: Synthetic oligonucleotide
  Antisense strand to SEQ ID NO: 1042656
auuaaacucaaagucgcau

SEQ ID NO: 1042658 - RNA, 19 nt, Artificial Sequence
  Description of Artificial Sequence: Synthetic oligonucleotide
  Sense strand starting at position 3821 of SEQ ID NO: 914954
uccagaagugguggcauua

SEQ ID NO: 1042659 - RNA, 19 nt, Artificial Sequence
  Description of Artificial Sequence: Synthetic oligonucleotide
  Antisense strand to SEQ ID NO: 1042658
uaaugccaccacuucugga

SEQ ID NO: 1042660 - RNA, 19 nt, Artificial Sequence
  Description of Artificial Sequence: Synthetic oligonucleotide
  Sense strand starting at position 928 of SEQ ID NO: 914955
gagggugucacuuggucua

SEQ ID NO: 1042661 - RNA, 19 nt, Artificial Sequence
  Description of Artificial Sequence: Synthetic oligonucleotide
  Antisense strand to SEQ ID NO: 1042660
uagaccaagugacacccuc

SEQ ID NO: 1042662 - RNA, 19 nt, Artificial Sequence
  Description of Artificial Sequence: Synthetic oligonucleotide
  Sense strand starting at position 930 of SEQ ID NO: 914955
gggugucacuuggucuaug

SEQ ID NO: 1042663 - RNA, 19 nt, Artificial Sequence
  Description of Artificial Sequence: Synthetic oligonucleotide
  Antisense strand to SEQ ID NO: 1042662
cauagaccaagugacaccc

SEQ ID NO: 1042664 - RNA, 19 nt, Artificial Sequence
  Description of Artificial Sequence: Synthetic oligonucleotide
  Sense strand starting at position 931 of SEQ ID NO: 914955
ggugucacuuggucuaugu

SEQ ID NO: 1042665 - RNA, 19 nt, Artificial Sequence
  Description of Artificial Sequence: Synthetic oligonucleotide
  Antisense strand to SEQ ID NO: 1042664
acauagaccaagugacacc

SEQ ID NO: 1042666 - RNA, 19 nt, Artificial Sequence
  Description of Artificial Sequence: Synthetic oligonucleotide
  Sense strand starting at position 1100 of SEQ ID NO: 914955
gccaucgugcccgguuaau

SEQ ID NO: 1042667 - RNA, 19 nt, Artificial Sequence
  Description of Artificial Sequence: Synthetic oligonucleotide
  Antisense strand to SEQ ID NO: 1042666
auuaaccgggcacgauggc

SEQ ID NO: 1042668 - RNA, 19 nt, Artificial Sequence
  Description of Artificial Sequence: Synthetic oligonucleotide
  Sense strand starting at position 1198 of SEQ ID NO: 914955
cuggcaaaguguuagcauu

SEQ ID NO: 1042669 - RNA, 19 nt, Artificial Sequence
  Description of Artificial Sequence: Synthetic oligonucleotide
  Antisense strand to SEQ ID NO: 1042668
aaugcuaacacuuugccag

SEQ ID NO: 1042670 - RNA, 19 nt, Artificial Sequence
  Description of Artificial Sequence: Synthetic oligonucleotide
  Sense strand starting at position 1200 of SEQ ID NO: 914955
ggcaaaguguuagcauuac

SEQ ID NO: 1042671 - RNA, 19 nt, Artificial Sequence
  Description of Artificial Sequence: Synthetic oligonucleotide
  Antisense strand to SEQ ID NO: 1042670
guaaugcuaacacuuugcc

SEQ ID NO: 1042672 - RNA, 19 nt, Artificial Sequence
  Description of Artificial Sequence: Synthetic oligonucleotide
  Sense strand starting at position 1243 of SEQ ID NO: 914955
caccguaggguuugagaau

SEQ ID NO: 1042673 - RNA, 19 nt, Artificial Sequence
  Description of Artificial Sequence: Synthetic oligonucleotide
  Antisense strand to SEQ ID NO: 1042672
auucucaaacccuacggug

SEQ ID NO: 1042674 - RNA, 19 nt, Artificial Sequence
  Description of Artificial Sequence: Synthetic oligonucleotide
  Sense strand starting at position 1252 of SEQ ID NO: 914955
guuugagaaucacaauuuc

SEQ ID NO: 1042675 - RNA, 19 nt, Artificial Sequence
  Description of Artificial Sequence: Synthetic oligonucleotide
  Antisense strand to SEQ ID NO: 1042674
gaaauugugauucucaaac

SEQ ID NO: 1042676 - RNA, 19 nt, Artificial Sequence
  Description of Artificial Sequence: Synthetic oligonucleotide
  Sense strand starting at position 1280 of SEQ ID NO: 914955
acuccugacucacgaggaa

SEQ ID NO: 1042677 - RNA, 19 nt, Artificial Sequence
  Description of Artificial Sequence: Synthetic oligonucleotide
  Antisense strand to SEQ ID NO: 1042676
uuccucgugagucaggagu

SEQ ID NO: 1042678 - RNA, 19 nt, Artificial Sequence
  Description of Artificial Sequence: Synthetic oligonucleotide
  Sense strand starting at position 1716 of SEQ ID NO: 914955
gguuguccuucuccgagau

SEQ ID NO: 1042679 - RNA, 19 nt, Artificial Sequence
  Description of Artificial Sequence: Synthetic oligonucleotide
  Antisense strand to SEQ ID NO: 1042678
aucucggagaaggacaacc

SEQ ID NO: 1042680 - RNA, 19 nt, Artificial Sequence
  Description of Artificial Sequence: Synthetic oligonucleotide
  Sense strand starting at position 1717 of SEQ ID NO: 914955
guuguccuucuccgagauu

SEQ ID NO: 1042681 - RNA, 19 nt, Artificial Sequence
  Description of Artificial Sequence: Synthetic oligonucleotide
  Antisense strand to SEQ ID NO: 1042680
aaucucggagaaggacaac

SEQ ID NO: 1042682 - RNA, 19 nt, Artificial Sequence
  Description of Artificial Sequence: Synthetic oligonucleotide
  Sense strand starting at position 1940 of SEQ ID NO: 914955
gcccaaucuggcuacuaca

SEQ ID NO: 1042683 - RNA, 19 nt, Artificial Sequence
  Description of Artificial Sequence: Synthetic oligonucleotide
  Antisense strand to SEQ ID NO: 1042682
uguaguagccagauugggc

SEQ ID NO: 1042684 - RNA, 19 nt, Artificial Sequence
  Description of Artificial Sequence: Synthetic oligonucleotide
  Sense strand starting at position 2195 of SEQ ID NO: 914955
gcgacuuuguuuccucaag

SEQ ID NO: 1042685 - RNA, 19 nt, Artificial Sequence
  Description of Artificial Sequence: Synthetic oligonucleotide
  Antisense strand to SEQ ID NO: 1042684
cuugaggaaacaaagucgc

SEQ ID NO: 1042686 - RNA, 19 nt, Artificial Sequence
  Description of Artificial Sequence: Synthetic oligonucleotide
  Sense strand starting at position 2305 of SEQ ID NO: 914955
ccaucugauucgcaucuuu

SEQ ID NO: 1042687 - RNA, 19 nt, Artificial Sequence
  Description of Artificial Sequence: Synthetic oligonucleotide
  Antisense strand to SEQ ID NO: 1042686
aaagaugcgaaucagaugg

SEQ ID NO: 1042688 - RNA, 19 nt, Artificial Sequence
  Description of Artificial Sequence: Synthetic oligonucleotide
  Sense strand starting at position 2575 of SEQ ID NO: 914955
gaaugucugucggcuguua

SEQ ID NO: 1042689 - RNA, 19 nt, Artificial Sequence
  Description of Artificial Sequence: Synthetic oligonucleotide
  Antisense strand to SEQ ID NO: 1042688
uaacagccgacagacauuc

SEQ ID NO: 1042690 - RNA, 19 nt, Artificial Sequence
  Description of Artificial Sequence: Synthetic oligonucleotide
  Sense strand starting at position 2583 of SEQ ID NO: 914955
gucggcuguuaguuccuaa

SEQ ID NO: 1042691 - RNA, 19 nt, Artificial Sequence
  Description of Artificial Sequence: Synthetic oligonucleotide
  Antisense strand to SEQ ID NO: 1042690
uuaggaacuaacagccgac

SEQ ID NO: 1042692 - RNA, 19 nt, Artificial Sequence
  Description of Artificial Sequence: Synthetic oligonucleotide
  Sense strand starting at position 2586 of SEQ ID NO: 914955
ggcuguuaguuccuaagcu

SEQ ID NO: 1042693 - RNA, 19 nt, Artificial Sequence
  Description of Artificial Sequence: Synthetic oligonucleotide
  Antisense strand to SEQ ID NO: 1042692
agcuuaggaacuaacagcc

SEQ ID NO: 1042694 - RNA, 19 nt, Artificial Sequence
  Description of Artificial Sequence: Synthetic oligonucleotide
  Sense strand starting at position 2590 of SEQ ID NO: 914955
guuaguuccuaagcucuga

SEQ ID NO: 1042695 - RNA, 19 nt, Artificial Sequence
  Description of Artificial Sequence: Synthetic oligonucleotide
  Antisense strand to SEQ ID NO: 1042694
ucagagcuuaggaacuaac

SEQ ID NO: 1042696 - RNA, 19 nt, Artificial Sequence
  Description of Artificial Sequence: Synthetic oligonucleotide
  Sense strand starting at position 2616 of SEQ ID NO: 914955
ucacaauaccuguagcaga

SEQ ID NO: 1042697 - RNA, 19 nt, Artificial Sequence
  Description of Artificial Sequence: Synthetic oligonucleotide
  Antisense strand to SEQ ID NO: 1042696
ucugcuacagguauuguga

SEQ ID NO: 1042698 - RNA, 19 nt, Artificial Sequence
  Description of Artificial Sequence: Synthetic oligonucleotide
  Sense strand starting at position 2651 of SEQ ID NO: 914955
uuuggauucuguuaagaau

SEQ ID NO: 1042699 - RNA, 19 nt, Artificial Sequence
  Description of Artificial Sequence: Synthetic oligonucleotide
  Antisense strand to SEQ ID NO: 1042698
auucuuaacagaauccaaa

SEQ ID NO: 1042700 - RNA, 19 nt, Artificial Sequence
  Description of Artificial Sequence: Synthetic oligonucleotide
  Sense strand starting at position 2660 of SEQ ID NO: 914955
uguuaagaaucucaggaaa

SEQ ID NO: 1042701 - RNA, 19 nt, Artificial Sequence
  Description of Artificial Sequence: Synthetic oligonucleotide
  Antisense strand to SEQ ID NO: 1042700
uuuccugagauucuuaaca

SEQ ID NO: 1042702 - RNA, 19 nt, Artificial Sequence
  Description of Artificial Sequence: Synthetic oligonucleotide
  Sense strand starting at position 2662 of SEQ ID NO: 914955
uuaagaaucucaggaaagc

SEQ ID NO: 1042703 - RNA, 19 nt, Artificial Sequence
  Description of Artificial Sequence: Synthetic oligonucleotide
  Antisense strand to SEQ ID NO: 1042702
gcuuuccugagauucuuaa

SEQ ID NO: 1042704 - RNA, 19 nt, Artificial Sequence
  Description of Artificial Sequence: Synthetic oligonucleotide
  Sense strand starting at position 3010 of SEQ ID NO: 914955
uucuccaaguaauguuaua

SEQ ID NO: 1042705 - RNA, 19 nt, Artificial Sequence
  Description of Artificial Sequence: Synthetic oligonucleotide
  Antisense strand to SEQ ID NO: 1042704
uauaacauuacuuggagaa

SEQ ID NO: 1042706 - RNA, 19 nt, Artificial Sequence
  Description of Artificial Sequence: Synthetic oligonucleotide
  Sense strand starting at position 3151 of SEQ ID NO: 914955
ccuccugugucuugaggaa

SEQ ID NO: 1042707 - RNA, 19 nt, Artificial Sequence
  Description of Artificial Sequence: Synthetic oligonucleotide
  Antisense strand to SEQ ID NO: 1042706
uuccucaagacacaggagg

SEQ ID NO: 1042708 - RNA, 19 nt, Artificial Sequence
  Description of Artificial Sequence: Synthetic oligonucleotide
  Sense strand starting at position 3155 of SEQ ID NO: 914955
cugugucuugaggaagagu

SEQ ID NO: 1042709 - RNA, 19 nt, Artificial Sequence
  Description of Artificial Sequence: Synthetic oligonucleotide
  Antisense strand to SEQ ID NO: 1042708
acucuuccucaagacacag

SEQ ID NO: 1042710 - RNA, 19 nt, Artificial Sequence
  Description of Artificial Sequence: Synthetic oligonucleotide
  Sense strand starting at position 3544 of SEQ ID NO: 914955
guaaauauuuaggguuucu

SEQ ID NO: 1042711 - RNA, 19 nt, Artificial Sequence
  Description of Artificial Sequence: Synthetic oligonucleotide
  Antisense strand to SEQ ID NO: 1042710
agaaacccuaaauauuuac

SEQ ID NO: 1042712 - RNA, 19 nt, Artificial Sequence
  Description of Artificial Sequence: Synthetic oligonucleotide
  Sense strand starting at position 3911 of SEQ ID NO: 914955
cuauuugugugaccucagu

SEQ ID NO: 1042713 - RNA, 19 nt, Artificial Sequence
  Description of Artificial Sequence: Synthetic oligonucleotide
  Antisense strand to SEQ ID NO: 1042712
acugaggucacacaaauag

SEQ ID NO: 1042714 - RNA, 19 nt, Artificial Sequence
  Description of Artificial Sequence: Synthetic oligonucleotide
  Sense strand starting at position 209 of SEQ ID NO: 914956
uuugguuuacaaugaaagu

SEQ ID NO: 1042715 - RNA, 19 nt, Artificial Sequence
  Description of Artificial Sequence: Synthetic oligonucleotide
  Antisense strand to SEQ ID NO: 1042714
acuuucauuguaaaccaaa

SEQ ID NO: 1042716 - RNA, 19 nt, Artificial Sequence
  Description of Artificial Sequence: Synthetic oligonucleotide
  Sense strand starting at position 244 of SEQ ID NO: 914956
cugauaacacagcaguuau

SEQ ID NO: 1042717 - RNA, 19 nt, Artificial Sequence
  Description of Artificial Sequence: Synthetic oligonucleotide
  Antisense strand to SEQ ID NO: 1042716
auaacugcuguguuaucag

SEQ ID NO: 1042718 - RNA, 19 nt, Artificial Sequence
  Description of Artificial Sequence: Synthetic oligonucleotide
  Sense strand starting at position 301 of SEQ ID NO: 914956
uuagcucuauguuuagaaa

SEQ ID NO: 1042719 - RNA, 19 nt, Artificial Sequence
  Description of Artificial Sequence: Synthetic oligonucleotide
  Antisense strand to SEQ ID NO: 1042718
uuucuaaacauagagcuaa

SEQ ID NO: 1042720 - RNA, 19 nt, Artificial Sequence
  Description of Artificial Sequence: Synthetic oligonucleotide
  Sense strand starting at position 341 of SEQ ID NO: 914956
aguagugggauugauugua

SEQ ID NO: 1042721 - RNA, 19 nt, Artificial Sequence
  Description of Artificial Sequence: Synthetic oligonucleotide
  Antisense strand to SEQ ID NO: 1042720
uacaaucaaucccacuacu

SEQ ID NO: 1042722 - RNA, 19 nt, Artificial Sequence
  Description of Artificial Sequence: Synthetic oligonucleotide
  Sense strand starting at position 513 of SEQ ID NO: 914956
auacaaugugggugucaaa

SEQ ID NO: 1042723 - RNA, 19 nt, Artificial Sequence
  Description of Artificial Sequence: Synthetic oligonucleotide
  Antisense strand to SEQ ID NO: 1042722
uuugacacccacauuguau

SEQ ID NO: 1042724 - RNA, 19 nt, Artificial Sequence
  Description of Artificial Sequence: Synthetic oligonucleotide
  Sense strand starting at position 858 of SEQ ID NO: 914956
cguaaaguacuauacaaug

SEQ ID NO: 1042725 - RNA, 19 nt, Artificial Sequence
  Description of Artificial Sequence: Synthetic oligonucleotide
  Antisense strand to SEQ ID NO: 1042724
cauuguauaguacuuuacg

SEQ ID NO: 1042726 - RNA, 19 nt, Artificial Sequence
  Description of Artificial Sequence: Synthetic oligonucleotide
  Sense strand starting at position 993 of SEQ ID NO: 914956
ugauccucugucuagugau

SEQ ID NO: 1042727 - RNA, 19 nt, Artificial Sequence
  Description of Artificial Sequence: Synthetic oligonucleotide
  Antisense strand to SEQ ID NO: 1042726
aucacuagacagaggauca

SEQ ID NO: 1042728 - RNA, 19 nt, Artificial Sequence
  Description of Artificial Sequence: Synthetic oligonucleotide
  Sense strand starting at position 999 of SEQ ID NO: 914956
ucugucuagugaucagaaa

SEQ ID NO: 1042729 - RNA, 19 nt, Artificial Sequence
  Description of Artificial Sequence: Synthetic oligonucleotide
  Antisense strand to SEQ ID NO: 1042728
uuucugaucacuagacaga

SEQ ID NO: 1042730 - RNA, 19 nt, Artificial Sequence
  Description of Artificial Sequence: Synthetic oligonucleotide
  Sense strand starting at position 1000 of SEQ ID NO: 914956
cugucuagugaucagaaac

SEQ ID NO: 1042731 - RNA, 19 nt, Artificial Sequence
  Description of Artificial Sequence: Synthetic oligonucleotide
  Antisense strand to SEQ ID NO: 1042730
guuucugaucacuagacag

SEQ ID NO: 1042732 - RNA, 19 nt, Artificial Sequence
  Description of Artificial Sequence: Synthetic oligonucleotide
  Sense strand starting at position 1132 of SEQ ID NO: 914956
auggguaugagucauccua

SEQ ID NO: 1042733 - RNA, 19 nt, Artificial Sequence
  Description of Artificial Sequence: Synthetic oligonucleotide
  Antisense strand to SEQ ID NO: 1042732
uaggaugacucauacccau

SEQ ID NO: 1042734 - RNA, 19 nt, Artificial Sequence
  Description of Artificial Sequence: Synthetic oligonucleotide
  Sense strand starting at position 1134 of SEQ ID NO: 914956
ggguaugagucauccuauu

SEQ ID NO: 1042735 - RNA, 19 nt, Artificial Sequence
  Description of Artificial Sequence: Synthetic oligonucleotide
  Antisense strand to SEQ ID NO: 1042734
aauaggaugacucauaccc

SEQ ID NO: 1042736 - RNA, 19 nt, Artificial Sequence
  Description of Artificial Sequence: Synthetic oligonucleotide
  Sense strand starting at position 1194 of SEQ ID NO: 914956
ggaagaguuugauuccauu

SEQ ID NO: 1042737 - RNA, 19 nt, Artificial Sequence
  Description of Artificial Sequence: Synthetic oligonucleotide
  Antisense strand to SEQ ID NO: 1042736
aauggaaucaaacucuucc

SEQ ID NO: 1042738 - RNA, 19 nt, Artificial Sequence
  Description of Artificial Sequence: Synthetic oligonucleotide
  Sense strand starting at position 1333 of SEQ ID NO: 914956
aaacguauuuccgauuugu

SEQ ID NO: 1042739 - RNA, 19 nt, Artificial Sequence
  Description of Artificial Sequence: Synthetic oligonucleotide
  Antisense strand to SEQ ID NO: 1042738
acaaaucggaaauacguuu

SEQ ID NO: 1042740 - RNA, 19 nt, Artificial Sequence
  Description of Artificial Sequence: Synthetic oligonucleotide
  Sense strand starting at position 1376 of SEQ ID NO: 914956
agugucuaugcugaaauaa

SEQ ID NO: 1042741 - RNA, 19 nt, Artificial Sequence
  Description of Artificial Sequence: Synthetic oligonucleotide
  Antisense strand to SEQ ID NO: 1042740
uuauuucagcauagacacu

SEQ ID NO: 1042742 - RNA, 19 nt, Artificial Sequence
  Description of Artificial Sequence: Synthetic oligonucleotide
  Sense strand starting at position 1396 of SEQ ID NO: 914956
aucuauaaccugggacuua

SEQ ID NO: 1042743 - RNA, 19 nt, Artificial Sequence
  Description of Artificial Sequence: Synthetic oligonucleotide
  Antisense strand to SEQ ID NO: 1042742
uaagucccagguuauagau

SEQ ID NO: 1042744 - RNA, 19 nt, Artificial Sequence
  Description of Artificial Sequence: Synthetic oligonucleotide
  Sense strand starting at position 1467 of SEQ ID NO: 914956
uuguuaugccaucauuaga

SEQ ID NO: 1042745 - RNA, 19 nt, Artificial Sequence
  Description of Artificial Sequence: Synthetic oligonucleotide
  Antisense strand to SEQ ID NO: 1042744
ucuaaugauggcauaacaa

SEQ ID NO: 1042746 - RNA, 19 nt, Artificial Sequence
  Description of Artificial Sequence: Synthetic oligonucleotide
  Sense strand starting at position 1527 of SEQ ID NO: 914956
gucaguacuaaugggagua

SEQ ID NO: 1042747 - RNA, 19 nt, Artificial Sequence
  Description of Artificial Sequence: Synthetic oligonucleotide
  Antisense strand to SEQ ID NO: 1042746
uacucccauuaguacugac

SEQ ID NO: 1042748 - RNA, 19 nt, Artificial Sequence
  Description of Artificial Sequence: Synthetic oligonucleotide
  Sense strand starting at position 1632 of SEQ ID NO: 914956
ccauauuaaugugucugga

SEQ ID NO: 1042749 - RNA, 19 nt, Artificial Sequence
  Description of Artificial Sequence: Synthetic oligonucleotide
  Antisense strand to SEQ ID NO: 1042748
uccagacacauuaauaugg

SEQ ID NO: 1042750 - RNA, 19 nt, Artificial Sequence
  Description of Artificial Sequence: Synthetic oligonucleotide
  Sense strand starting at position 1634 of SEQ ID NO: 914956
auauuaaugugucuggaag

SEQ ID NO: 1042751 - RNA, 19 nt, Artificial Sequence
  Description of Artificial Sequence: Synthetic oligonucleotide
  Antisense strand to SEQ ID NO: 1042750
cuuccagacacauuaauau

SEQ ID NO: 1042752 - RNA, 19 nt, Artificial Sequence
  Description of Artificial Sequence: Synthetic oligonucleotide
  Sense strand starting at position 1635 of SEQ ID NO: 914956
uauuaaugugucuggaaga

SEQ ID NO: 1042753 - RNA, 19 nt, Artificial Sequence
  Description of Artificial Sequence: Synthetic oligonucleotide
  Antisense strand to SEQ ID NO: 1042752
ucuuccagacacauuaaua

SEQ ID NO: 1042754 - RNA, 19 nt, Artificial Sequence
  Description of Artificial Sequence: Synthetic oligonucleotide
  Sense strand starting at position 1677 of SEQ ID NO: 914956
aggccucacuacucagaga

SEQ ID NO: 1042755 - RNA, 19 nt, Artificial Sequence
  Description of Artificial Sequence: Synthetic oligonucleotide
  Antisense strand to SEQ ID NO: 1042754
ucucugaguagugaggccu

SEQ ID NO: 1042756 - RNA, 19 nt, Artificial Sequence
  Description of Artificial Sequence: Synthetic oligonucleotide
  Sense strand starting at position 2220 of SEQ ID NO: 914956
ugacuuguauuauugggaa

SEQ ID NO: 1042757 - RNA, 19 nt, Artificial Sequence
  Description of Artificial Sequence: Synthetic oligonucleotide
  Antisense strand to SEQ ID NO: 1042756
uucccaauaauacaaguca

SEQ ID NO: 1042758 - RNA, 19 nt, Artificial Sequence
  Description of Artificial Sequence: Synthetic oligonucleotide
  Sense strand starting at position 2251 of SEQ ID NO: 914956
ccgcuucaggucuagaaga

SEQ ID NO: 1042759 - RNA, 19 nt, Artificial Sequence
  Description of Artificial Sequence: Synthetic oligonucleotide
  Antisense strand to SEQ ID NO: 1042758
ucuucuagaccugaagcgg

SEQ ID NO: 1042760 - RNA, 19 nt, Artificial Sequence
  Description of Artificial Sequence: Synthetic oligonucleotide
  Sense strand starting at position 2638 of SEQ ID NO: 914956
ucugaagagcuuuaacugu

SEQ ID NO: 1042761 - RNA, 19 nt, Artificial Sequence
  Description of Artificial Sequence: Synthetic oligonucleotide
  Antisense strand to SEQ ID NO: 1042760
acaguuaaagcucuucaga

SEQ ID NO: 1042762 - RNA, 19 nt, Artificial Sequence
  Description of Artificial Sequence: Synthetic oligonucleotide
  Sense strand starting at position 2701 of SEQ ID NO: 914956
guagguagcaucgagauaa

SEQ ID NO: 1042763 - RNA, 19 nt, Artificial Sequence
  Description of Artificial Sequence: Synthetic oligonucleotide
  Antisense strand to SEQ ID NO: 1042762
uuaucucgaugcuaccuac

SEQ ID NO: 1042764 - RNA, 19 nt, Artificial Sequence
  Description of Artificial Sequence: Synthetic oligonucleotide
  Sense strand starting at position 2770 of SEQ ID NO: 914956
aagagauacuguuuggcaa

SEQ ID NO: 1042765 - RNA, 19 nt, Artificial Sequence
  Description of Artificial Sequence: Synthetic oligonucleotide
  Antisense strand to SEQ ID NO: 1042764
uugccaaacaguaucucuu

SEQ ID NO: 1042766 - RNA, 19 nt, Artificial Sequence
  Description of Artificial Sequence: Synthetic oligonucleotide
  Sense strand starting at position 2771 of SEQ ID NO: 914956
agagauacuguuuggcaaa

SEQ ID NO: 1042767 - RNA, 19 nt, Artificial Sequence
  Description of Artificial Sequence: Synthetic oligonucleotide
  Antisense strand to SEQ ID NO: 1042766
uuugccaaacaguaucucu

SEQ ID NO: 1042768 - RNA, 19 nt, Artificial Sequence
  Description of Artificial Sequence: Synthetic oligonucleotide
  Sense strand starting at position 2785 of SEQ ID NO: 914956
gcaaaugcucugcagauga

SEQ ID NO: 1042769 - RNA, 19 nt, Artificial Sequence
  Description of Artificial Sequence: Synthetic oligonucleotide
  Antisense strand to SEQ ID NO: 1042768
ucaucugcagagcauuugc

SEQ ID NO: 1042770 - RNA, 19 nt, Artificial Sequence
  Description of Artificial Sequence: Synthetic oligonucleotide
  Sense strand starting at position 2790 of SEQ ID NO: 914956
ugcucugcagaugaaauua

SEQ ID NO: 1042771 - RNA, 19 nt, Artificial Sequence
  Description of Artificial Sequence: Synthetic oligonucleotide
  Antisense strand to SEQ ID NO: 1042770
uaauuucaucugcagagca

SEQ ID NO: 1042772 - RNA, 19 nt, Artificial Sequence
  Description of Artificial Sequence: Synthetic oligonucleotide
  Sense strand starting at position 2824 of SEQ ID NO: 914956
gaaucaguccuauagucug

SEQ ID NO: 1042773 - RNA, 19 nt, Artificial Sequence
  Description of Artificial Sequence: Synthetic oligonucleotide
  Antisense strand to SEQ ID NO: 1042772
cagacuauaggacugauuc

SEQ ID NO: 1042774 - RNA, 19 nt, Artificial Sequence
  Description of Artificial Sequence: Synthetic oligonucleotide
  Sense strand starting at position 2914 of SEQ ID NO: 914956
cugacugcuguuuauuaua

SEQ ID NO: 1042775 - RNA, 19 nt, Artificial Sequence
  Description of Artificial Sequence: Synthetic oligonucleotide
  Antisense strand to SEQ ID NO: 1042774
uauaauaaacagcagucag

SEQ ID NO: 1042776 - RNA, 19 nt, Artificial Sequence
  Description of Artificial Sequence: Synthetic oligonucleotide
  Sense strand starting at position 2937 of SEQ ID NO: 914956
aagagaguauuugaccaga

SEQ ID NO: 1042777 - RNA, 19 nt, Artificial Sequence
  Description of Artificial Sequence: Synthetic oligonucleotide
  Antisense strand to SEQ ID NO: 1042776
ucuggucaaauacucucuu

SEQ ID NO: 1042778 - RNA, 19 nt, Artificial Sequence
  Description of Artificial Sequence: Synthetic oligonucleotide
  Sense strand starting at position 3099 of SEQ ID NO: 914956
gaugcuagagaaugugaua

SEQ ID NO: 1042779 - RNA, 19 nt, Artificial Sequence
  Description of Artificial Sequence: Synthetic oligonucleotide
  Antisense strand to SEQ ID NO: 1042778
uaucacauucucuagcauc

SEQ ID NO: 1042780 - RNA, 19 nt, Artificial Sequence
  Description of Artificial Sequence: Synthetic oligonucleotide
  Sense strand starting at position 3111 of SEQ ID NO: 914956
ugugauauccaaugacuag

SEQ ID NO: 1042781 - RNA, 19 nt, Artificial Sequence
  Description of Artificial Sequence: Synthetic oligonucleotide
  Antisense strand to SEQ ID NO: 1042780
cuagucauuggauaucaca

SEQ ID NO: 1042782 - RNA, 19 nt, Artificial Sequence
  Description of Artificial Sequence: Synthetic oligonucleotide
  Sense strand starting at position 3240 of SEQ ID NO: 914956
aguaguaauuaaucuccuu

SEQ ID NO: 1042783 - RNA, 19 nt, Artificial Sequence
  Description of Artificial Sequence: Synthetic oligonucleotide
  Antisense strand to SEQ ID NO: 1042782
aaggagauuaauuacuacu

SEQ ID NO: 1042784 - RNA, 19 nt, Artificial Sequence
  Description of Artificial Sequence: Synthetic oligonucleotide
  Sense strand starting at position 3776 of SEQ ID NO: 914956
uuauucuucccugaugguu

SEQ ID NO: 1042785 - RNA, 19 nt, Artificial Sequence
  Description of Artificial Sequence: Synthetic oligonucleotide
  Antisense strand to SEQ ID NO: 1042784
aaccaucagggaagaauaa

SEQ ID NO: 1042786 - RNA, 19 nt, Artificial Sequence
  Description of Artificial Sequence: Synthetic oligonucleotide
  Sense strand starting at position 3840 of SEQ ID NO: 914956
agcuuuaagauggacugua

SEQ ID NO: 1042787 - RNA, 19 nt, Artificial Sequence
  Description of Artificial Sequence: Synthetic oligonucleotide
  Antisense strand to SEQ ID NO: 1042786
uacaguccaucuuaaagcu

SEQ ID NO: 1042788 - RNA, 19 nt, Artificial Sequence
  Description of Artificial Sequence: Synthetic oligonucleotide
  Sense strand starting at position 3859 of SEQ ID NO: 914956
gaugauaguguugaguauc

SEQ ID NO: 1042789 - RNA, 19 nt, Artificial Sequence
  Description of Artificial Sequence: Synthetic oligonucleotide
  Antisense strand to SEQ ID NO: 1042788
gauacucaacacuaucauc

SEQ ID NO: 1042790 - RNA, 19 nt, Artificial Sequence
  Description of Artificial Sequence: Synthetic oligonucleotide
  Sense strand starting at position 3920 of SEQ ID NO: 914956
cagguuugaguuuguauuu

SEQ ID NO: 1042791 - RNA, 19 nt, Artificial Sequence
  Description of Artificial Sequence: Synthetic oligonucleotide
  Antisense strand to SEQ ID NO: 1042790
aaauacaaacucaaaccug

SEQ ID NO: 1042792 - RNA, 19 nt, Artificial Sequence
  Description of Artificial Sequence: Synthetic oligonucleotide
  Sense strand starting at position 3965 of SEQ ID NO: 914956
cuguaucauuguuuggaag

SEQ ID NO: 1042793 - RNA, 19 nt, Artificial Sequence
  Description of Artificial Sequence: Synthetic oligonucleotide
  Antisense strand to SEQ ID NO: 1042792
cuuccaaacaaugauacag

SEQ ID NO: 1042794 - RNA, 19 nt, Artificial Sequence
  Description of Artificial Sequence: Synthetic oligonucleotide
  Sense strand starting at position 40 of SEQ ID NO: 914957
ggcagaugagcuggucaca

SEQ ID NO: 1042795 - RNA, 19 nt, Artificial Sequence
  Description of Artificial Sequence: Synthetic oligonucleotide
  Antisense strand to SEQ ID NO: 1042794
ugugaccagcucaucugcc

SEQ ID NO: 1042796 - RNA, 19 nt, Artificial Sequence
  Description of Artificial Sequence: Synthetic oligonucleotide
  Sense strand starting at position 495 of SEQ ID NO: 914957
cugcacauuuauccuugua

SEQ ID NO: 1042797 - RNA, 19 nt, Artificial Sequence
  Description of Artificial Sequence: Synthetic oligonucleotide
  Antisense strand to SEQ ID NO: 1042796
uacaaggauaaaugugcag

SEQ ID NO: 1042798 - RNA, 19 nt, Artificial Sequence
  Description of Artificial Sequence: Synthetic oligonucleotide
  Sense strand starting at position 536 of SEQ ID NO: 914957
gcaggagauccauguuaca

SEQ ID NO: 1042799 - RNA, 19 nt, Artificial Sequence
  Description of Artificial Sequence: Synthetic oligonucleotide
  Antisense strand to SEQ ID NO: 1042798
uguaacauggaucuccugc

SEQ ID NO: 1042800 - RNA, 19 nt, Artificial Sequence
  Description of Artificial Sequence: Synthetic oligonucleotide
  Sense strand starting at position 630 of SEQ ID NO: 914957
gaggucuagucucucaauu

SEQ ID NO: 1042801 - RNA, 19 nt, Artificial Sequence
  Description of Artificial Sequence: Synthetic oligonucleotide
  Antisense strand to SEQ ID NO: 1042800
aauugagagacuagaccuc

SEQ ID NO: 1042802 - RNA, 19 nt, Artificial Sequence
  Description of Artificial Sequence: Synthetic oligonucleotide
  Sense strand starting at position 643 of SEQ ID NO: 914957
ucaauuucuuccucgguua

SEQ ID NO: 1042803 - RNA, 19 nt, Artificial Sequence
  Description of Artificial Sequence: Synthetic oligonucleotide
  Antisense strand to SEQ ID NO: 1042802
uaaccgaggaagaaauuga

SEQ ID NO: 1042804 - RNA, 19 nt, Artificial Sequence
  Description of Artificial Sequence: Synthetic oligonucleotide
  Sense strand starting at position 683 of SEQ ID NO: 914957
ugauucugcucuuuagaua

SEQ ID NO: 1042805 - RNA, 19 nt, Artificial Sequence
  Description of Artificial Sequence: Synthetic oligonucleotide
  Antisense strand to SEQ ID NO: 1042804
uaucuaaagagcagaauca

SEQ ID NO: 1042806 - RNA, 19 nt, Artificial Sequence
  Description of Artificial Sequence: Synthetic oligonucleotide
  Sense strand starting at position 684 of SEQ ID NO: 914957
gauucugcucuuuagauag

SEQ ID NO: 1042807 - RNA, 19 nt, Artificial Sequence
  Description of Artificial Sequence: Synthetic oligonucleotide
  Antisense strand to SEQ ID NO: 1042806
cuaucuaaagagcagaauc

SEQ ID NO: 1042808 - RNA, 19 nt, Artificial Sequence
  Description of Artificial Sequence: Synthetic oligonucleotide
  Sense strand starting at position 694 of SEQ ID NO: 914957
uuuagauagugguucagga

SEQ ID NO: 1042809 - RNA, 19 nt, Artificial Sequence
  Description of Artificial Sequence: Synthetic oligonucleotide
  Antisense strand to SEQ ID NO: 1042808
uccugaaccacuaucuaaa

SEQ ID NO: 1042810 - RNA, 19 nt, Artificial Sequence
  Description of Artificial Sequence: Synthetic oligonucleotide
  Sense strand starting at position 775 of SEQ ID NO: 914957
agaguuccaagcgaucaaa

SEQ ID NO: 1042811 - RNA, 19 nt, Artificial Sequence
  Description of Artificial Sequence: Synthetic oligonucleotide
  Antisense strand to SEQ ID NO: 1042810
uuugaucgcuuggaacucu

SEQ ID NO: 1042812 - RNA, 19 nt, Artificial Sequence
  Description of Artificial Sequence: Synthetic oligonucleotide
  Sense strand starting at position 830 of SEQ ID NO: 914957
gaucuugagcuguauugca

SEQ ID NO: 1042813 - RNA, 19 nt, Artificial Sequence
  Description of Artificial Sequence: Synthetic oligonucleotide
  Antisense strand to SEQ ID NO: 1042812
ugcaauacagcucaagauc

SEQ ID NO: 1042814 - RNA, 19 nt, Artificial Sequence
  Description of Artificial Sequence: Synthetic oligonucleotide
  Sense strand starting at position 962 of SEQ ID NO: 914957
ugcagagauggagguuaga

SEQ ID NO: 1042815 - RNA, 19 nt, Artificial Sequence
  Description of Artificial Sequence: Synthetic oligonucleotide
  Antisense strand to SEQ ID NO: 1042814
ucuaaccuccaucucugca

SEQ ID NO: 1042816 - RNA, 19 nt, Artificial Sequence
  Description of Artificial Sequence: Synthetic oligonucleotide
  Sense strand starting at position 1000 of SEQ ID NO: 914957
ugagguccuuuauucucaa

SEQ ID NO: 1042817 - RNA, 19 nt, Artificial Sequence
  Description of Artificial Sequence: Synthetic oligonucleotide
  Antisense strand to SEQ ID NO: 1042816
uugagaauaaaggaccuca

SEQ ID NO: 1042818 - RNA, 19 nt, Artificial Sequence
  Description of Artificial Sequence: Synthetic oligonucleotide
  Sense strand starting at position 1003 of SEQ ID NO: 914957
gguccuuuauucucaaggu

SEQ ID NO: 1042819 - RNA, 19 nt, Artificial Sequence
  Description of Artificial Sequence: Synthetic oligonucleotide
  Antisense strand to SEQ ID NO: 1042818
accuugagaauaaaggacc

SEQ ID NO: 1042820 - RNA, 19 nt, Artificial Sequence
  Description of Artificial Sequence: Synthetic oligonucleotide
  Sense strand starting at position 1064 of SEQ ID NO: 914957
ggcccuucucccggaagau

SEQ ID NO: 1042821 - RNA, 19 nt, Artificial Sequence
  Description of Artificial Sequence: Synthetic oligonucleotide
  Antisense strand to SEQ ID NO: 1042820
aucuuccgggagaagggcc

SEQ ID NO: 1042822 - RNA, 19 nt, Artificial Sequence
  Description of Artificial Sequence: Synthetic oligonucleotide
  Sense strand starting at position 1065 of SEQ ID NO: 914957
gcccuucucccggaagauc

SEQ ID NO: 1042823 - RNA, 19 nt, Artificial Sequence
  Description of Artificial Sequence: Synthetic oligonucleotide
  Antisense strand to SEQ ID NO: 1042822
gaucuuccgggagaagggc

SEQ ID NO: 1042824 - RNA, 19 nt, Artificial Sequence
  Description of Artificial Sequence: Synthetic oligonucleotide
  Sense strand starting at position 1624 of SEQ ID NO: 914957
gcuggcauccucugggaaa

SEQ ID NO: 1042825 - RNA, 19 nt, Artificial Sequence
  Description of Artificial Sequence: Synthetic oligonucleotide
  Antisense strand to SEQ ID NO: 1042824
uuucccagaggaugccagc

SEQ ID NO: 1042826 - RNA, 19 nt, Artificial Sequence
  Description of Artificial Sequence: Synthetic oligonucleotide
  Sense strand starting at position 1753 of SEQ ID NO: 914957
gggucuuaggagcacgauu

SEQ ID NO: 1042827 - RNA, 19 nt, Artificial Sequence
  Description of Artificial Sequence: Synthetic oligonucleotide
  Antisense strand to SEQ ID NO: 1042826
aaucgugcuccuaagaccc

SEQ ID NO: 1042828 - RNA, 19 nt, Artificial Sequence
  Description of Artificial Sequence: Synthetic oligonucleotide
  Sense strand starting at position 2071 of SEQ ID NO: 914957
acgaaauggucccuuaauc

SEQ ID NO: 1042829 - RNA, 19 nt, Artificial Sequence
  Description of Artificial Sequence: Synthetic oligonucleotide
  Antisense strand to SEQ ID NO: 1042828
gauuaagggaccauuucgu

SEQ ID NO: 1042830 - RNA, 19 nt, Artificial Sequence
  Description of Artificial Sequence: Synthetic oligonucleotide
  Sense strand starting at position 2274 of SEQ ID NO: 914957
agagaaguugcaggcagaa

SEQ ID NO: 1042831 - RNA, 19 nt, Artificial Sequence
  Description of Artificial Sequence: Synthetic oligonucleotide
  Antisense strand to SEQ ID NO: 1042830
uucugccugcaacuucucu

SEQ ID NO: 1042832 - RNA, 19 nt, Artificial Sequence
  Description of Artificial Sequence: Synthetic oligonucleotide
  Sense strand starting at position 2296 of SEQ ID NO: 914957
agccuuagguggucugaga

SEQ ID NO: 1042833 - RNA, 19 nt, Artificial Sequence
  Description of Artificial Sequence: Synthetic oligonucleotide
  Antisense strand to SEQ ID NO: 1042832
ucucagaccaccuaaggcu

SEQ ID NO: 1042834 - RNA, 19 nt, Artificial Sequence
  Description of Artificial Sequence: Synthetic oligonucleotide
  Sense strand starting at position 2425 of SEQ ID NO: 914957
cggugugaccaggacaaga

SEQ ID NO: 1042835 - RNA, 19 nt, Artificial Sequence
  Description of Artificial Sequence: Synthetic oligonucleotide
  Antisense strand to SEQ ID NO: 1042834
ucuuguccuggucacaccg

SEQ ID NO: 1042836 - RNA, 19 nt, Artificial Sequence
  Description of Artificial Sequence: Synthetic oligonucleotide
  Sense strand starting at position 2579 of SEQ ID NO: 914957
gcuguugcacaguaggaaa

SEQ ID NO: 1042837 - RNA, 19 nt, Artificial Sequence
  Description of Artificial Sequence: Synthetic oligonucleotide
  Antisense strand to SEQ ID NO: 1042836
uuuccuacugugcaacagc

SEQ ID NO: 1042838 - RNA, 19 nt, Artificial Sequence
  Description of Artificial Sequence: Synthetic oligonucleotide
  Sense strand starting at position 2676 of SEQ ID NO: 914957
ugcuguccucagggagaaa

SEQ ID NO: 1042839 - RNA, 19 nt, Artificial Sequence
  Description of Artificial Sequence: Synthetic oligonucleotide
  Antisense strand to SEQ ID NO: 1042838
uuucucccugaggacagca

SEQ ID NO: 1042840 - RNA, 19 nt, Artificial Sequence
  Description of Artificial Sequence: Synthetic oligonucleotide
  Sense strand starting at position 2699 of SEQ ID NO: 914957
agggauugguaaucuguuu

SEQ ID NO: 1042841 - RNA, 19 nt, Artificial Sequence
  Description of Artificial Sequence: Synthetic oligonucleotide
  Antisense strand to SEQ ID NO: 1042840
aaacagauuaccaaucccu

SEQ ID NO: 1042842 - RNA, 19 nt, Artificial Sequence
  Description of Artificial Sequence: Synthetic oligonucleotide
  Sense strand starting at position 2727 of SEQ ID NO: 914957
caugcuuaggcugagaguu

SEQ ID NO: 1042843 - RNA, 19 nt, Artificial Sequence
  Description of Artificial Sequence: Synthetic oligonucleotide
  Antisense strand to SEQ ID NO: 1042842
aacucucagccuaagcaug

SEQ ID NO: 1042844 - RNA, 19 nt, Artificial Sequence
  Description of Artificial Sequence: Synthetic oligonucleotide
  Sense strand starting at position 2765 of SEQ ID NO: 914957
gagagagccucauauuucu

SEQ ID NO: 1042845 - RNA, 19 nt, Artificial Sequence
  Description of Artificial Sequence: Synthetic oligonucleotide
  Antisense strand to SEQ ID NO: 1042844
agaaauaugaggcucucuc

SEQ ID NO: 1042846 - RNA, 19 nt, Artificial Sequence
  Description of Artificial Sequence: Synthetic oligonucleotide
  Sense strand starting at position 2795 of SEQ ID NO: 914957
guagaaugucugggcaaga

SEQ ID NO: 1042847 - RNA, 19 nt, Artificial Sequence
  Description of Artificial Sequence: Synthetic oligonucleotide
  Antisense strand to SEQ ID NO: 1042846
ucuugcccagacauucuac

SEQ ID NO: 1042848 - RNA, 19 nt, Artificial Sequence
  Description of Artificial Sequence: Synthetic oligonucleotide
  Sense strand starting at position 2796 of SEQ ID NO: 914957
uagaaugucugggcaagag

SEQ ID NO: 1042849 - RNA, 19 nt, Artificial Sequence
  Description of Artificial Sequence: Synthetic oligonucleotide
  Antisense strand to SEQ ID NO: 1042848
cucuugcccagacauucua

SEQ ID NO: 1042850 - RNA, 19 nt, Artificial Sequence
  Description of Artificial Sequence: Synthetic oligonucleotide
  Sense strand starting at position 3198 of SEQ ID NO: 914957
agcuguuuccuagacccuu

SEQ ID NO: 1042851 - RNA, 19 nt, Artificial Sequence
  Description of Artificial Sequence: Synthetic oligonucleotide
  Antisense strand to SEQ ID NO: 1042850
aagggucuaggaaacagcu

SEQ ID NO: 1042852 - RNA, 19 nt, Artificial Sequence
  Description of Artificial Sequence: Synthetic oligonucleotide
  Sense strand starting at position 3204 of SEQ ID NO: 914957
uuccuagacccuuggaagu

SEQ ID NO: 1042853 - RNA, 19 nt, Artificial Sequence
  Description of Artificial Sequence: Synthetic oligonucleotide
  Antisense strand to SEQ ID NO: 1042852
acuuccaagggucuaggaa

SEQ ID NO: 1042854 - RNA, 19 nt, Artificial Sequence
  Description of Artificial Sequence: Synthetic oligonucleotide
  Sense strand starting at position 3228 of SEQ ID NO: 914957
gguacauggucuuuaggga

SEQ ID NO: 1042855 - RNA, 19 nt, Artificial Sequence
  Description of Artificial Sequence: Synthetic oligonucleotide
  Antisense strand to SEQ ID NO: 1042854
ucccuaaagaccauguacc

SEQ ID NO: 1042856 - RNA, 19 nt, Artificial Sequence
  Description of Artificial Sequence: Synthetic oligonucleotide
  Sense strand starting at position 3229 of SEQ ID NO: 914957
guacauggucuuuagggaa

SEQ ID NO: 1042857 - RNA, 19 nt, Artificial Sequence
  Description of Artificial Sequence: Synthetic oligonucleotide
  Antisense strand to SEQ ID NO: 1042856
uucccuaaagaccauguac

SEQ ID NO: 1042858 - RNA, 19 nt, Artificial Sequence
  Description of Artificial Sequence: Synthetic oligonucleotide
  Sense strand starting at position 3316 of SEQ ID NO: 914957
cuucucauucuggguggau

SEQ ID NO: 1042859 - RNA, 19 nt, Artificial Sequence
  Description of Artificial Sequence: Synthetic oligonucleotide
  Antisense strand to SEQ ID NO: 1042858
auccacccagaaugagaag

SEQ ID NO: 1042860 - RNA, 19 nt, Artificial Sequence
  Description of Artificial Sequence: Synthetic oligonucleotide
  Sense strand starting at position 3318 of SEQ ID NO: 914957
ucucauucuggguggauca

SEQ ID NO: 1042861 - RNA, 19 nt, Artificial Sequence
  Description of Artificial Sequence: Synthetic oligonucleotide
  Antisense strand to SEQ ID NO: 1042860
ugauccacccagaaugaga

SEQ ID NO: 1042862 - RNA, 19 nt, Artificial Sequence
  Description of Artificial Sequence: Synthetic oligonucleotide
  Sense strand starting at position 3319 of SEQ ID NO: 914957
cucauucuggguggaucaa

SEQ ID NO: 1042863 - RNA, 19 nt, Artificial Sequence
  Description of Artificial Sequence: Synthetic oligonucleotide
  Antisense strand to SEQ ID NO: 1042862
uugauccacccagaaugag

SEQ ID NO: 1042864 - RNA, 19 nt, Artificial Sequence
  Description of Artificial Sequence: Synthetic oligonucleotide
  Sense strand starting at position 3418 of SEQ ID NO: 914957
gagcuuugagaaugaugag

SEQ ID NO: 1042865 - RNA, 19 nt, Artificial Sequence
  Description of Artificial Sequence: Synthetic oligonucleotide
  Antisense strand to SEQ ID NO: 1042864
cucaucauucucaaagcuc

SEQ ID NO: 1042866 - RNA, 19 nt, Artificial Sequence
  Description of Artificial Sequence: Synthetic oligonucleotide
  Sense strand starting at position 3483 of SEQ ID NO: 914957
cgcugugaucauugagaga

SEQ ID NO: 1042867 - RNA, 19 nt, Artificial Sequence
  Description of Artificial Sequence: Synthetic oligonucleotide
  Antisense strand to SEQ ID NO: 1042866
ucucucaaugaucacagcg

SEQ ID NO: 1042868 - RNA, 19 nt, Artificial Sequence
  Description of Artificial Sequence: Synthetic oligonucleotide
  Sense strand starting at position 3714 of SEQ ID NO: 914957
cuccgugacaugugauaug

SEQ ID NO: 1042869 - RNA, 19 nt, Artificial Sequence
  Description of Artificial Sequence: Synthetic oligonucleotide
  Antisense strand to SEQ ID NO: 1042868
cauaucacaugucacggag

SEQ ID NO: 1042870 - RNA, 19 nt, Artificial Sequence
  Description of Artificial Sequence: Synthetic oligonucleotide
  Sense strand starting at position 3771 of SEQ ID NO: 914957
gccuucuauuaagccagau

SEQ ID NO: 1042871 - RNA, 19 nt, Artificial Sequence
  Description of Artificial Sequence: Synthetic oligonucleotide
  Antisense strand to SEQ ID NO: 1042870
aucuggcuuaauagaaggc

SEQ ID NO: 1042872 - RNA, 19 nt, Artificial Sequence
  Description of Artificial Sequence: Synthetic oligonucleotide
  Sense strand starting at position 3775 of SEQ ID NO: 914957
ucuauuaagccagaugcua

SEQ ID NO: 1042873 - RNA, 19 nt, Artificial Sequence
  Description of Artificial Sequence: Synthetic oligonucleotide
  Antisense strand to SEQ ID NO: 1042872
uagcaucuggcuuaauaga

SEQ ID NO: 1042874 - RNA, 19 nt, Artificial Sequence
  Description of Artificial Sequence: Synthetic oligonucleotide
  Sense strand starting at position 56 of SEQ ID NO: 914958
uccuaagguagagguuauu

SEQ ID NO: 1042875 - RNA, 19 nt, Artificial Sequence
  Description of Artificial Sequence: Synthetic oligonucleotide
  Antisense strand to SEQ ID NO: 1042874
aauaaccucuaccuuagga

SEQ ID NO: 1042876 - RNA, 19 nt, Artificial Sequence
  Description of Artificial Sequence: Synthetic oligonucleotide
  Sense strand starting at position 127 of SEQ ID NO: 914958
aggccaggucaaugguaga

SEQ ID NO: 1042877 - RNA, 19 nt, Artificial Sequence
  Description of Artificial Sequence: Synthetic oligonucleotide
  Antisense strand to SEQ ID NO: 1042876
ucuaccauugaccuggccu

SEQ ID NO: 1042878 - RNA, 19 nt, Artificial Sequence
  Description of Artificial Sequence: Synthetic oligonucleotide
  Sense strand starting at position 235 of SEQ ID NO: 914958
ggguuugcagguugaacaa

SEQ ID NO: 1042879 - RNA, 19 nt, Artificial Sequence
  Description of Artificial Sequence: Synthetic oligonucleotide
  Antisense strand to SEQ ID NO: 1042878
uuguucaaccugcaaaccc

SEQ ID NO: 1042880 - RNA, 19 nt, Artificial Sequence
  Description of Artificial Sequence: Synthetic oligonucleotide
  Sense strand starting at position 244 of SEQ ID NO: 914958
gguugaacaacuuggcuaa

SEQ ID NO: 1042881 - RNA, 19 nt, Artificial Sequence
  Description of Artificial Sequence: Synthetic oligonucleotide
  Antisense strand to SEQ ID NO: 1042880
uuagccaaguuguucaacc

SEQ ID NO: 1042882 - RNA, 19 nt, Artificial Sequence
  Description of Artificial Sequence: Synthetic oligonucleotide
  Sense strand starting at position 299 of SEQ ID NO: 914958
cccugaaauccugguggag

SEQ ID NO: 1042883 - RNA, 19 nt, Artificial Sequence
  Description of Artificial Sequence: Synthetic oligonucleotide
  Antisense strand to SEQ ID NO: 1042882
cuccaccaggauuucaggg

SEQ ID NO: 1042884 - RNA, 19 nt, Artificial Sequence
  Description of Artificial Sequence: Synthetic oligonucleotide
  Sense strand starting at position 546 of SEQ ID NO: 914958
ccaugaaauuggcugcaaa

SEQ ID NO: 1042885 - RNA, 19 nt, Artificial Sequence
  Description of Artificial Sequence: Synthetic oligonucleotide
  Antisense strand to SEQ ID NO: 1042884
uuugcagccaauuucaugg

SEQ ID NO: 1042886 - RNA, 19 nt, Artificial Sequence
  Description of Artificial Sequence: Synthetic oligonucleotide
  Sense strand starting at position 614 of SEQ ID NO: 914958
cuucucucugcaugaagaa

SEQ ID NO: 1042887 - RNA, 19 nt, Artificial Sequence
  Description of Artificial Sequence: Synthetic oligonucleotide
  Antisense strand to SEQ ID NO: 1042886
uucuucaugcagagagaag

SEQ ID NO: 1042888 - RNA, 19 nt, Artificial Sequence
  Description of Artificial Sequence: Synthetic oligonucleotide
  Sense strand starting at position 615 of SEQ ID NO: 914958
uucucucugcaugaagaaa

SEQ ID NO: 1042889 - RNA, 19 nt, Artificial Sequence
  Description of Artificial Sequence: Synthetic oligonucleotide
  Antisense strand to SEQ ID NO: 1042888
uuucuucaugcagagagaa

SEQ ID NO: 1042890 - RNA, 19 nt, Artificial Sequence
  Description of Artificial Sequence: Synthetic oligonucleotide
  Sense strand starting at position 626 of SEQ ID NO: 914958
ugaagaaagugaguucuua

SEQ ID NO: 1042891 - RNA, 19 nt, Artificial Sequence
  Description of Artificial Sequence: Synthetic oligonucleotide
  Antisense strand to SEQ ID NO: 1042890
uaagaacucacuuucuuca

SEQ ID NO: 1042892 - RNA, 19 nt, Artificial Sequence
  Description of Artificial Sequence: Synthetic oligonucleotide
  Sense strand starting at position 630 of SEQ ID NO: 914958
gaaagugaguucuuacggu

SEQ ID NO: 1042893 - RNA, 19 nt, Artificial Sequence
  Description of Artificial Sequence: Synthetic oligonucleotide
  Antisense strand to SEQ ID NO: 1042892
accguaagaacucacuuuc

SEQ ID NO: 1042894 - RNA, 19 nt, Artificial Sequence
  Description of Artificial Sequence: Synthetic oligonucleotide
  Sense strand starting at position 636 of SEQ ID NO: 914958
gaguucuuacgguauuaga

SEQ ID NO: 1042895 - RNA, 19 nt, Artificial Sequence
  Description of Artificial Sequence: Synthetic oligonucleotide
  Antisense strand to SEQ ID NO: 1042894
ucuaauaccguaagaacuc

SEQ ID NO: 1042896 - RNA, 19 nt, Artificial Sequence
  Description of Artificial Sequence: Synthetic oligonucleotide
  Sense strand starting at position 861 of SEQ ID NO: 914958
cauuguagacuguaguuaa

SEQ ID NO: 1042897 - RNA, 19 nt, Artificial Sequence
  Description of Artificial Sequence: Synthetic oligonucleotide
  Antisense strand to SEQ ID NO: 1042896
uuaacuacagucuacaaug

SEQ ID NO: 1042898 - RNA, 19 nt, Artificial Sequence
  Description of Artificial Sequence: Synthetic oligonucleotide
  Sense strand starting at position 872 of SEQ ID NO: 914958
guaguuaacaggcgacaau

SEQ ID NO: 1042899 - RNA, 19 nt, Artificial Sequence
  Description of Artificial Sequence: Synthetic oligonucleotide
  Antisense strand to SEQ ID NO: 1042898
auugucgccuguuaacuac

SEQ ID NO: 1042900 - RNA, 19 nt, Artificial Sequence
  Description of Artificial Sequence: Synthetic oligonucleotide
  Sense strand starting at position 955 of SEQ ID NO: 914958
cucuuuccgcuuuaagaac

SEQ ID NO: 1042901 - RNA, 19 nt, Artificial Sequence
  Description of Artificial Sequence: Synthetic oligonucleotide
  Antisense strand to SEQ ID NO: 1042900
guucuuaaagcggaaagag

SEQ ID NO: 1042902 - RNA, 19 nt, Artificial Sequence
  Description of Artificial Sequence: Synthetic oligonucleotide
  Sense strand starting at position 1627 of SEQ ID NO: 914958
cguucuaauugguucagag

SEQ ID NO: 1042903 - RNA, 19 nt, Artificial Sequence
  Description of Artificial Sequence: Synthetic oligonucleotide
  Antisense strand to SEQ ID NO: 1042902
cucugaaccaauuagaacg

SEQ ID NO: 1042904 - RNA, 19 nt, Artificial Sequence
  Description of Artificial Sequence: Synthetic oligonucleotide
  Sense strand starting at position 2525 of SEQ ID NO: 914958
uguguuaccuuggucagau

SEQ ID NO: 1042905 - RNA, 19 nt, Artificial Sequence
  Description of Artificial Sequence: Synthetic oligonucleotide
  Antisense strand to SEQ ID NO: 1042904
aucugaccaagguaacaca

SEQ ID NO: 1042906 - RNA, 19 nt, Artificial Sequence
  Description of Artificial Sequence: Synthetic oligonucleotide
  Sense strand starting at position 2526 of SEQ ID NO: 914958
guguuaccuuggucagauc

SEQ ID NO: 1042907 - RNA, 19 nt, Artificial Sequence
  Description of Artificial Sequence: Synthetic oligonucleotide
  Antisense strand to SEQ ID NO: 1042906
gaucugaccaagguaacac

SEQ ID NO: 1042908 - RNA, 19 nt, Artificial Sequence
  Description of Artificial Sequence: Synthetic oligonucleotide
  Sense strand starting at position 2651 of SEQ ID NO: 914958
cagacaacacagugugaau

SEQ ID NO: 1042909 - RNA, 19 nt, Artificial Sequence
  Description of Artificial Sequence: Synthetic oligonucleotide
  Antisense strand to SEQ ID NO: 1042908
auucacacuguguugucug

SEQ ID NO: 1042910 - RNA, 19 nt, Artificial Sequence
  Description of Artificial Sequence: Synthetic oligonucleotide
  Sense strand starting at position 2693 of SEQ ID NO: 914958
agaagcacucuguagacua

SEQ ID NO: 1042911 - RNA, 19 nt, Artificial Sequence
  Description of Artificial Sequence: Synthetic oligonucleotide
  Antisense strand to SEQ ID NO: 1042910
uagucuacagagugcuucu

SEQ ID NO: 1042912 - RNA, 19 nt, Artificial Sequence
  Description of Artificial Sequence: Synthetic oligonucleotide
  Sense strand starting at position 2838 of SEQ ID NO: 914958
cgguguaagcaucaauaag

SEQ ID NO: 1042913 - RNA, 19 nt, Artificial Sequence
  Description of Artificial Sequence: Synthetic oligonucleotide
  Antisense strand to SEQ ID NO: 1042912
cuuauugaugcuuacaccg

SEQ ID NO: 1042914 - RNA, 19 nt, Artificial Sequence
  Description of Artificial Sequence: Synthetic oligonucleotide
  Sense strand starting at position 2848 of SEQ ID NO: 914958
aucaauaaguguucuugga

SEQ ID NO: 1042915 - RNA, 19 nt, Artificial Sequence
  Description of Artificial Sequence: Synthetic oligonucleotide
  Antisense strand to SEQ ID NO: 1042914
uccaagaacacuuauugau

SEQ ID NO: 1042916 - RNA, 19 nt, Artificial Sequence
  Description of Artificial Sequence: Synthetic oligonucleotide
  Sense strand starting at position 2850 of SEQ ID NO: 914958
caauaaguguucuuggaac

SEQ ID NO: 1042917 - RNA, 19 nt, Artificial Sequence
  Description of Artificial Sequence: Synthetic oligonucleotide
  Antisense strand to SEQ ID NO: 1042916
guuccaagaacacuuauug

SEQ ID NO: 1042918 - RNA, 19 nt, Artificial Sequence
  Description of Artificial Sequence: Synthetic oligonucleotide
  Sense strand starting at position 2852 of SEQ ID NO: 914958
auaaguguucuuggaacug

SEQ ID NO: 1042919 - RNA, 19 nt, Artificial Sequence
  Description of Artificial Sequence: Synthetic oligonucleotide
  Antisense strand to SEQ ID NO: 1042918
caguuccaagaacacuuau

SEQ ID NO: 1042920 - RNA, 19 nt, Artificial Sequence
  Description of Artificial Sequence: Synthetic oligonucleotide
  Sense strand starting at position 2857 of SEQ ID NO: 914958
uguucuuggaacugagcua

SEQ ID NO: 1042921 - RNA, 19 nt, Artificial Sequence
  Description of Artificial Sequence: Synthetic oligonucleotide
  Antisense strand to SEQ ID NO: 1042920
uagcucaguuccaagaaca

SEQ ID NO: 1042922 - RNA, 19 nt, Artificial Sequence
  Description of Artificial Sequence: Synthetic oligonucleotide
  Sense strand starting at position 2897 of SEQ ID NO: 914958
aggcuugagcagugagaaa

SEQ ID NO: 1042923 - RNA, 19 nt, Artificial Sequence
  Description of Artificial Sequence: Synthetic oligonucleotide
  Antisense strand to SEQ ID NO: 1042922
uuucucacugcucaagccu

SEQ ID NO: 1042924 - RNA, 19 nt, Artificial Sequence
  Description of Artificial Sequence: Synthetic oligonucleotide
  Sense strand starting at position 2904 of SEQ ID NO: 914958
agcagugagaaacaguauu

SEQ ID NO: 1042925 - RNA, 19 nt, Artificial Sequence
  Description of Artificial Sequence: Synthetic oligonucleotide
  Antisense strand to SEQ ID NO: 1042924
aauacuguuucucacugcu

SEQ ID NO: 1042926 - RNA, 19 nt, Artificial Sequence
  Description of Artificial Sequence: Synthetic oligonucleotide
  Sense strand starting at position 2979 of SEQ ID NO: 914958
guucccuugccagacaagu

SEQ ID NO: 1042927 - RNA, 19 nt, Artificial Sequence
  Description of Artificial Sequence: Synthetic oligonucleotide
  Antisense strand to SEQ ID NO: 1042926
acuugucuggcaagggaac

SEQ ID NO: 1042928 - RNA, 19 nt, Artificial Sequence
  Description of Artificial Sequence: Synthetic oligonucleotide
  Sense strand starting at position 3090 of SEQ ID NO: 914958
ugguguuuaccagguauug

SEQ ID NO: 1042929 - RNA, 19 nt, Artificial Sequence
  Description of Artificial Sequence: Synthetic oligonucleotide
  Antisense strand to SEQ ID NO: 1042928
caauaccugguaaacacca

SEQ ID NO: 1042930 - RNA, 19 nt, Artificial Sequence
  Description of Artificial Sequence: Synthetic oligonucleotide
  Sense strand starting at position 3092 of SEQ ID NO: 914958
guguuuaccagguauuguc

SEQ ID NO: 1042931 - RNA, 19 nt, Artificial Sequence
  Description of Artificial Sequence: Synthetic oligonucleotide
  Antisense strand to SEQ ID NO: 1042930
gacaauaccugguaaacac

SEQ ID NO: 1042932 - RNA, 19 nt, Artificial Sequence
  Description of Artificial Sequence: Synthetic oligonucleotide
  Sense strand starting at position 3248 of SEQ ID NO: 914958
auggaaaucugccugugau

SEQ ID NO: 1042933 - RNA, 19 nt, Artificial Sequence
  Description of Artificial Sequence: Synthetic oligonucleotide
  Antisense strand to SEQ ID NO: 1042932
aucacaggcagauuuccau

SEQ ID NO: 1042934 - RNA, 19 nt, Artificial Sequence
  Description of Artificial Sequence: Synthetic oligonucleotide
  Sense strand starting at position 3310 of SEQ ID NO: 914958
uggcuugacagguauguau

SEQ ID NO: 1042935 - RNA, 19 nt, Artificial Sequence
  Description of Artificial Sequence: Synthetic oligonucleotide
  Antisense strand to SEQ ID NO: 1042934
auacauaccugucaagcca

SEQ ID NO: 1042936 - RNA, 19 nt, Artificial Sequence
  Description of Artificial Sequence: Synthetic oligonucleotide
  Sense strand starting at position 3314 of SEQ ID NO: 914958
uugacagguauguauugua

SEQ ID NO: 1042937 - RNA, 19 nt, Artificial Sequence
  Description of Artificial Sequence: Synthetic oligonucleotide
  Antisense strand to SEQ ID NO: 1042936
uacaauacauaccugucaa

SEQ ID NO: 1042938 - RNA, 19 nt, Artificial Sequence
  Description of Artificial Sequence: Synthetic oligonucleotide
  Sense strand starting at position 3359 of SEQ ID NO: 914958
aacugagaccagugaggua

SEQ ID NO: 1042939 - RNA, 19 nt, Artificial Sequence
  Description of Artificial Sequence: Synthetic oligonucleotide
  Antisense strand to SEQ ID NO: 1042938
uaccucacuggucucaguu

SEQ ID NO: 1042940 - RNA, 19 nt, Artificial Sequence
  Description of Artificial Sequence: Synthetic oligonucleotide
  Sense strand starting at position 3380 of SEQ ID NO: 914958
gcaacuggucaacaucaca

SEQ ID NO: 1042941 - RNA, 19 nt, Artificial Sequence
  Description of Artificial Sequence: Synthetic oligonucleotide
  Antisense strand to SEQ ID NO: 1042940
ugugauguugaccaguugc

SEQ ID NO: 1042942 - RNA, 19 nt, Artificial Sequence
  Description of Artificial Sequence: Synthetic oligonucleotide
  Sense strand starting at position 3388 of SEQ ID NO: 914958
ucaacaucacaugguuagu

SEQ ID NO: 1042943 - RNA, 19 nt, Artificial Sequence
  Description of Artificial Sequence: Synthetic oligonucleotide
  Antisense strand to SEQ ID NO: 1042942
acuaaccaugugauguuga

SEQ ID NO: 1042944 - RNA, 19 nt, Artificial Sequence
  Description of Artificial Sequence: Synthetic oligonucleotide
  Sense strand starting at position 3393 of SEQ ID NO: 914958
aucacaugguuaguaagua

SEQ ID NO: 1042945 - RNA, 19 nt, Artificial Sequence
  Description of Artificial Sequence: Synthetic oligonucleotide
  Antisense strand to SEQ ID NO: 1042944
uacuuacuaaccaugugau

SEQ ID NO: 1042946 - RNA, 19 nt, Artificial Sequence
  Description of Artificial Sequence: Synthetic oligonucleotide
  Sense strand starting at position 3398 of SEQ ID NO: 914958
augguuaguaaguaucaga

SEQ ID NO: 1042947 - RNA, 19 nt, Artificial Sequence
  Description of Artificial Sequence: Synthetic oligonucleotide
  Antisense strand to SEQ ID NO: 1042946
ucugauacuuacuaaccau

SEQ ID NO: 1042948 - RNA, 19 nt, Artificial Sequence
  Description of Artificial Sequence: Synthetic oligonucleotide
  Sense strand starting at position 3515 of SEQ ID NO: 914958
ggucaagucuaacccugaa

SEQ ID NO: 1042949 - RNA, 19 nt, Artificial Sequence
  Description of Artificial Sequence: Synthetic oligonucleotide
  Antisense strand to SEQ ID NO: 1042948
uucaggguuagacuugacc

SEQ ID NO: 1042950 - RNA, 19 nt, Artificial Sequence
  Description of Artificial Sequence: Synthetic oligonucleotide
  Sense strand starting at position 3633 of SEQ ID NO: 914958
cuaccuuauuuagaagagu

SEQ ID NO: 1042951 - RNA, 19 nt, Artificial Sequence
  Description of Artificial Sequence: Synthetic oligonucleotide
  Antisense strand to SEQ ID NO: 1042950
acucuucuaaauaagguag

SEQ ID NO: 1042952 - RNA, 19 nt, Artificial Sequence
  Description of Artificial Sequence: Synthetic oligonucleotide
  Sense strand starting at position 3882 of SEQ ID NO: 914958
acacaaugcuguccagaca

SEQ ID NO: 1042953 - RNA, 19 nt, Artificial Sequence
  Description of Artificial Sequence: Synthetic oligonucleotide
  Antisense strand to SEQ ID NO: 1042952
ugucuggacagcauugugu

SEQ ID NO: 1042954 - RNA, 19 nt, Artificial Sequence
  Description of Artificial Sequence: Synthetic oligonucleotide
  Sense strand starting at position 112 of SEQ ID NO: 914959
ccaccugcuugaucaugaa

SEQ ID NO: 1042955 - RNA, 19 nt, Artificial Sequence
  Description of Artificial Sequence: Synthetic oligonucleotide
  Antisense strand to SEQ ID NO: 1042954
uucaugaucaagcaggugg

SEQ ID NO: 1042956 - RNA, 19 nt, Artificial Sequence
  Description of Artificial Sequence: Synthetic oligonucleotide
  Sense strand starting at position 424 of SEQ ID NO: 914959
gggucaagccuggauugaa

SEQ ID NO: 1042957 - RNA, 19 nt, Artificial Sequence
  Description of Artificial Sequence: Synthetic oligonucleotide
  Antisense strand to SEQ ID NO: 1042956
uucaauccaggcuugaccc

SEQ ID NO: 1042958 - RNA, 19 nt, Artificial Sequence
  Description of Artificial Sequence: Synthetic oligonucleotide
  Sense strand starting at position 556 of SEQ ID NO: 914959
gccagaauugcucacacuc

SEQ ID NO: 1042959 - RNA, 19 nt, Artificial Sequence
  Description of Artificial Sequence: Synthetic oligonucleotide
  Antisense strand to SEQ ID NO: 1042958
gagugugagcaauucuggc

SEQ ID NO: 1042960 - RNA, 19 nt, Artificial Sequence
  Description of Artificial Sequence: Synthetic oligonucleotide
  Sense strand starting at position 635 of SEQ ID NO: 914959
uggacaaacucuguauucu

SEQ ID NO: 1042961 - RNA, 19 nt, Artificial Sequence
  Description of Artificial Sequence: Synthetic oligonucleotide
  Antisense strand to SEQ ID NO: 1042960
agaauacagaguuugucca

SEQ ID NO: 1042962 - RNA, 19 nt, Artificial Sequence
  Description of Artificial Sequence: Synthetic oligonucleotide
  Sense strand starting at position 1010 of SEQ ID NO: 914959
ggcucacauguccaggaaa

SEQ ID NO: 1042963 - RNA, 19 nt, Artificial Sequence
  Description of Artificial Sequence: Synthetic oligonucleotide
  Antisense strand to SEQ ID NO: 1042962
uuuccuggacaugugagcc

SEQ ID NO: 1042964 - RNA, 19 nt, Artificial Sequence
  Description of Artificial Sequence: Synthetic oligonucleotide
  Sense strand starting at position 1023 of SEQ ID NO: 914959
aggaaagcucccggagaga

SEQ ID NO: 1042965 - RNA, 19 nt, Artificial Sequence
  Description of Artificial Sequence: Synthetic oligonucleotide
  Antisense strand to SEQ ID NO: 1042964
ucucuccgggagcuuuccu

SEQ ID NO: 1042966 - RNA, 19 nt, Artificial Sequence
  Description of Artificial Sequence: Synthetic oligonucleotide
  Sense strand starting at position 1062 of SEQ ID NO: 914959
cuauguucccucugacuca

SEQ ID NO: 1042967 - RNA, 19 nt, Artificial Sequence
  Description of Artificial Sequence: Synthetic oligonucleotide
  Antisense strand to SEQ ID NO: 1042966
ugagucagagggaacauag

SEQ ID NO: 1042968 - RNA, 19 nt, Artificial Sequence
  Description of Artificial Sequence: Synthetic oligonucleotide
  Sense strand starting at position 1133 of SEQ ID NO: 914959
aauguucucugauugcuga

SEQ ID NO: 1042969 - RNA, 19 nt, Artificial Sequence
  Description of Artificial Sequence: Synthetic oligonucleotide
  Antisense strand to SEQ ID NO: 1042968
ucagcaaucagagaacauu

SEQ ID NO: 1042970 - RNA, 19 nt, Artificial Sequence
  Description of Artificial Sequence: Synthetic oligonucleotide
  Sense strand starting at position 1136 of SEQ ID NO: 914959
guucucugauugcugaaua

SEQ ID NO: 1042971 - RNA, 19 nt, Artificial Sequence
  Description of Artificial Sequence: Synthetic oligonucleotide
  Antisense strand to SEQ ID NO: 1042970
uauucagcaaucagagaac

SEQ ID NO: 1042972 - RNA, 19 nt, Artificial Sequence
  Description of Artificial Sequence: Synthetic oligonucleotide
  Sense strand starting at position 1379 of SEQ ID NO: 914959
gugaguccugggcacuuau

SEQ ID NO: 1042973 - RNA, 19 nt, Artificial Sequence
  Description of Artificial Sequence: Synthetic oligonucleotide
  Antisense strand to SEQ ID NO: 1042972
auaagugcccaggacucac

SEQ ID NO: 1042974 - RNA, 19 nt, Artificial Sequence
  Description of Artificial Sequence: Synthetic oligonucleotide
  Sense strand starting at position 1508 of SEQ ID NO: 914959
auaggacacuguuugugau

SEQ ID NO: 1042975 - RNA, 19 nt, Artificial Sequence
  Description of Artificial Sequence: Synthetic oligonucleotide
  Antisense strand to SEQ ID NO: 1042974
aucacaaacaguguccuau

SEQ ID NO: 1042976 - RNA, 19 nt, Artificial Sequence
  Description of Artificial Sequence: Synthetic oligonucleotide
  Sense strand starting at position 1515 of SEQ ID NO: 914959
acuguuugugaugaagcuu

SEQ ID NO: 1042977 - RNA, 19 nt, Artificial Sequence
  Description of Artificial Sequence: Synthetic oligonucleotide
  Antisense strand to SEQ ID NO: 1042976
aagcuucaucacaaacagu

SEQ ID NO: 1042978 - RNA, 19 nt, Artificial Sequence
  Description of Artificial Sequence: Synthetic oligonucleotide
  Sense strand starting at position 1526 of SEQ ID NO: 914959
ugaagcuuuguggaccaua

SEQ ID NO: 1042979 - RNA, 19 nt, Artificial Sequence
  Description of Artificial Sequence: Synthetic oligonucleotide
  Antisense strand to SEQ ID NO: 1042978
uaugguccacaaagcuuca

SEQ ID NO: 1042980 - RNA, 19 nt, Artificial Sequence
  Description of Artificial Sequence: Synthetic oligonucleotide
  Sense strand starting at position 1566 of SEQ ID NO: 914959
ggaugagacuccuugaguc

SEQ ID NO: 1042981 - RNA, 19 nt, Artificial Sequence
  Description of Artificial Sequence: Synthetic oligonucleotide
  Antisense strand to SEQ ID NO: 1042980
gacucaaggagucucaucc

SEQ ID NO: 1042982 - RNA, 19 nt, Artificial Sequence
  Description of Artificial Sequence: Synthetic oligonucleotide
  Sense strand starting at position 1741 of SEQ ID NO: 914959
guguaucugaggcaagaac

SEQ ID NO: 1042983 - RNA, 19 nt, Artificial Sequence
  Description of Artificial Sequence: Synthetic oligonucleotide
  Antisense strand to SEQ ID NO: 1042982
guucuugccucagauacac

SEQ ID NO: 1042984 - RNA, 19 nt, Artificial Sequence
  Description of Artificial Sequence: Synthetic oligonucleotide
  Sense strand starting at position 1885 of SEQ ID NO: 914959
ggagcuacuccacgguaaa

SEQ ID NO: 1042985 - RNA, 19 nt, Artificial Sequence
  Description of Artificial Sequence: Synthetic oligonucleotide
  Antisense strand to SEQ ID NO: 1042984
uuuaccguggaguagcucc

SEQ ID NO: 1042986 - RNA, 19 nt, Artificial Sequence
  Description of Artificial Sequence: Synthetic oligonucleotide
  Sense strand starting at position 1888 of SEQ ID NO: 914959
gcuacuccacgguaaacaa

SEQ ID NO: 1042987 - RNA, 19 nt, Artificial Sequence
  Description of Artificial Sequence: Synthetic oligonucleotide
  Antisense strand to SEQ ID NO: 1042986
uuguuuaccguggaguagc

SEQ ID NO: 1042988 - RNA, 19 nt, Artificial Sequence
  Description of Artificial Sequence: Synthetic oligonucleotide
  Sense strand starting at position 1918 of SEQ ID NO: 914959
gugacuuacucacuggauu

SEQ ID NO: 1042989 - RNA, 19 nt, Artificial Sequence
  Description of Artificial Sequence: Synthetic oligonucleotide
  Antisense strand to SEQ ID NO: 1042988
aauccagugaguaagucac

SEQ ID NO: 1042990 - RNA, 19 nt, Artificial Sequence
  Description of Artificial Sequence: Synthetic oligonucleotide
  Sense strand starting at position 2185 of SEQ ID NO: 914959
ggaauagcaagauggcuaa

SEQ ID NO: 1042991 - RNA, 19 nt, Artificial Sequence
  Description of Artificial Sequence: Synthetic oligonucleotide
  Antisense strand to SEQ ID NO: 1042990
uuagccaucuugcuauucc

SEQ ID NO: 1042992 - RNA, 19 nt, Artificial Sequence
  Description of Artificial Sequence: Synthetic oligonucleotide
  Sense strand starting at position 2302 of SEQ ID NO: 914959
gcuuuauucgcugcuuuag

SEQ ID NO: 1042993 - RNA, 19 nt, Artificial Sequence
  Description of Artificial Sequence: Synthetic oligonucleotide
  Antisense strand to SEQ ID NO: 1042992
cuaaagcagcgaauaaagc

SEQ ID NO: 1042994 - RNA, 19 nt, Artificial Sequence
  Description of Artificial Sequence: Synthetic oligonucleotide
  Sense strand starting at position 2303 of SEQ ID NO: 914959
cuuuauucgcugcuuuagu

SEQ ID NO: 1042995 - RNA, 19 nt, Artificial Sequence
  Description of Artificial Sequence: Synthetic oligonucleotide
  Antisense strand to SEQ ID NO: 1042994
acuaaagcagcgaauaaag

SEQ ID NO: 1042996 - RNA, 19 nt, Artificial Sequence
  Description of Artificial Sequence: Synthetic oligonucleotide
  Sense strand starting at position 2367 of SEQ ID NO: 914959
guaaaucaagcagguguaa

SEQ ID NO: 1042997 - RNA, 19 nt, Artificial Sequence
  Description of Artificial Sequence: Synthetic oligonucleotide
  Antisense strand to SEQ ID NO: 1042996
uuacaccugcuugauuuac

SEQ ID NO: 1042998 - RNA, 19 nt, Artificial Sequence
  Description of Artificial Sequence: Synthetic oligonucleotide
  Sense strand starting at position 2433 of SEQ ID NO: 914959
cugaguaaacuagggaguu

SEQ ID NO: 1042999 - RNA, 19 nt, Artificial Sequence
  Description of Artificial Sequence: Synthetic oligonucleotide
  Antisense strand to SEQ ID NO: 1042998
aacucccuaguuuacucag

SEQ ID NO: 1043000 - RNA, 19 nt, Artificial Sequence
  Description of Artificial Sequence: Synthetic oligonucleotide
  Sense strand starting at position 2473 of SEQ ID NO: 914959
auggcugaguuuccuaaac

SEQ ID NO: 1043001 - RNA, 19 nt, Artificial Sequence
  Description of Artificial Sequence: Synthetic oligonucleotide
  Antisense strand to SEQ ID NO: 1043000
guuuaggaaacucagccau

SEQ ID NO: 1043002 - RNA, 19 nt, Artificial Sequence
  Description of Artificial Sequence: Synthetic oligonucleotide
  Sense strand starting at position 2512 of SEQ ID NO: 914959
agugacgacccacauuauu

SEQ ID NO: 1043003 - RNA, 19 nt, Artificial Sequence
  Description of Artificial Sequence: Synthetic oligonucleotide
  Antisense strand to SEQ ID NO: 1043002
aauaaugugggucgucacu

SEQ ID NO: 1043004 - RNA, 19 nt, Artificial Sequence
  Description of Artificial Sequence: Synthetic oligonucleotide
  Sense strand starting at position 2563 of SEQ ID NO: 914959
cucuacaccuguuuggaaa

SEQ ID NO: 1043005 - RNA, 19 nt, Artificial Sequence
  Description of Artificial Sequence: Synthetic oligonucleotide
  Antisense strand to SEQ ID NO: 1043004
uuuccaaacagguguagag

SEQ ID NO: 1043006 - RNA, 19 nt, Artificial Sequence
  Description of Artificial Sequence: Synthetic oligonucleotide
  Sense strand starting at position 2676 of SEQ ID NO: 914959
cuaacacaggugugaaauu

SEQ ID NO: 1043007 - RNA, 19 nt, Artificial Sequence
  Description of Artificial Sequence: Synthetic oligonucleotide
  Antisense strand to SEQ ID NO: 1043006
aauuucacaccuguguuag

SEQ ID NO: 1043008 - RNA, 19 nt, Artificial Sequence
  Description of Artificial Sequence: Synthetic oligonucleotide
  Sense strand starting at position 2677 of SEQ ID NO: 914959
uaacacaggugugaaauuu

SEQ ID NO: 1043009 - RNA, 19 nt, Artificial Sequence
  Description of Artificial Sequence: Synthetic oligonucleotide
  Antisense strand to SEQ ID NO: 1043008
aaauuucacaccuguguua

SEQ ID NO: 1043010 - RNA, 19 nt, Artificial Sequence
  Description of Artificial Sequence: Synthetic oligonucleotide
  Sense strand starting at position 2686 of SEQ ID NO: 914959
ugugaaauuugacaucuau

SEQ ID NO: 1043011 - RNA, 19 nt, Artificial Sequence
  Description of Artificial Sequence: Synthetic oligonucleotide
  Antisense strand to SEQ ID NO: 1043010
auagaugucaaauuucaca

SEQ ID NO: 1043012 - RNA, 19 nt, Artificial Sequence
  Description of Artificial Sequence: Synthetic oligonucleotide
  Sense strand starting at position 2814 of SEQ ID NO: 914959
aagagcacacauuguuaga

SEQ ID NO: 1043013 - RNA, 19 nt, Artificial Sequence
  Description of Artificial Sequence: Synthetic oligonucleotide
  Antisense strand to SEQ ID NO: 1043012
ucuaacaaugugugcucuu

SEQ ID NO: 1043014 - RNA, 19 nt, Artificial Sequence
  Description of Artificial Sequence: Synthetic oligonucleotide
  Sense strand starting at position 2816 of SEQ ID NO: 914959
gagcacacauuguuagagu

SEQ ID NO: 1043015 - RNA, 19 nt, Artificial Sequence
  Description of Artificial Sequence: Synthetic oligonucleotide
  Antisense strand to SEQ ID NO: 1043014
acucuaacaaugugugcuc

SEQ ID NO: 1043016 - RNA, 19 nt, Artificial Sequence
  Description of Artificial Sequence: Synthetic oligonucleotide
  Sense strand starting at position 2827 of SEQ ID NO: 914959
guuagagugcugggagaug

SEQ ID NO: 1043017 - RNA, 19 nt, Artificial Sequence
  Description of Artificial Sequence: Synthetic oligonucleotide
  Antisense strand to SEQ ID NO: 1043016
caucucccagcacucuaac

SEQ ID NO: 1043018 - RNA, 19 nt, Artificial Sequence
  Description of Artificial Sequence: Synthetic oligonucleotide
  Sense strand starting at position 2906 of SEQ ID NO: 914959
cugucauggguggagacua

SEQ ID NO: 1043019 - RNA, 19 nt, Artificial Sequence
  Description of Artificial Sequence: Synthetic oligonucleotide
  Antisense strand to SEQ ID NO: 1043018
uagucuccacccaugacag

SEQ ID NO: 1043020 - RNA, 19 nt, Artificial Sequence
  Description of Artificial Sequence: Synthetic oligonucleotide
  Sense strand starting at position 2917 of SEQ ID NO: 914959
ggagacuagaccugcuuga

SEQ ID NO: 1043021 - RNA, 19 nt, Artificial Sequence
  Description of Artificial Sequence: Synthetic oligonucleotide
  Antisense strand to SEQ ID NO: 1043020
ucaagcaggucuagucucc

SEQ ID NO: 1043022 - RNA, 19 nt, Artificial Sequence
  Description of Artificial Sequence: Synthetic oligonucleotide
  Sense strand starting at position 3694 of SEQ ID NO: 914959
acuugagcucccuguaaca

SEQ ID NO: 1043023 - RNA, 19 nt, Artificial Sequence
  Description of Artificial Sequence: Synthetic oligonucleotide
  Antisense strand to SEQ ID NO: 1043022
uguuacagggagcucaagu

SEQ ID NO: 1043024 - RNA, 19 nt, Artificial Sequence
  Description of Artificial Sequence: Synthetic oligonucleotide
  Sense strand starting at position 3797 of SEQ ID NO: 914959
gcuugauacaauuggugau

SEQ ID NO: 1043025 - RNA, 19 nt, Artificial Sequence
  Description of Artificial Sequence: Synthetic oligonucleotide
  Antisense strand to SEQ ID NO: 1043024
aucaccaauuguaucaagc

SEQ ID NO: 1043026 - RNA, 19 nt, Artificial Sequence
  Description of Artificial Sequence: Synthetic oligonucleotide
  Sense strand starting at position 3883 of SEQ ID NO: 914959
acuacuuaguuguuauaag

SEQ ID NO: 1043027 - RNA, 19 nt, Artificial Sequence
  Description of Artificial Sequence: Synthetic oligonucleotide
  Antisense strand to SEQ ID NO: 1043026
cuuauaacaacuaaguagu

SEQ ID NO: 1043028 - RNA, 19 nt, Artificial Sequence
  Description of Artificial Sequence: Synthetic oligonucleotide
  Sense strand starting at position 3905 of SEQ ID NO: 914959
gagggauuaaccuguguac

SEQ ID NO: 1043029 - RNA, 19 nt, Artificial Sequence
  Description of Artificial Sequence: Synthetic oligonucleotide
  Antisense strand to SEQ ID NO: 1043028
guacacagguuaaucccuc

SEQ ID NO: 1043030 - RNA, 19 nt, Artificial Sequence
  Description of Artificial Sequence: Synthetic oligonucleotide
  Sense strand starting at position 3907 of SEQ ID NO: 914959
gggauuaaccuguguacag

SEQ ID NO: 1043031 - RNA, 19 nt, Artificial Sequence
  Description of Artificial Sequence: Synthetic oligonucleotide
  Antisense strand to SEQ ID NO: 1043030
cuguacacagguuaauccc

SEQ ID NO: 1043032 - RNA, 19 nt, Artificial Sequence
  Description of Artificial Sequence: Synthetic oligonucleotide
  Sense strand starting at position 3976 of SEQ ID NO: 914959
cccuguaagacagguagua

SEQ ID NO: 1043033 - RNA, 19 nt, Artificial Sequence
  Description of Artificial Sequence: Synthetic oligonucleotide
  Antisense strand to SEQ ID NO: 1043032
uacuaccugucuuacaggg

SEQ ID NO: 1043034 - RNA, 19 nt, Artificial Sequence
  Description of Artificial Sequence: Synthetic oligonucleotide
  Sense strand starting at position 27 of SEQ ID NO: 914960
gcugacucccugugacaau

SEQ ID NO: 1043035 - RNA, 19 nt, Artificial Sequence
  Description of Artificial Sequence: Synthetic oligonucleotide
  Antisense strand to SEQ ID NO: 1043034
auugucacagggagucagc

SEQ ID NO: 1043036 - RNA, 19 nt, Artificial Sequence
  Description of Artificial Sequence: Synthetic oligonucleotide
  Sense strand starting at position 260 of SEQ ID NO: 914960
cuccuuuaacucugaagag

SEQ ID NO: 1043037 - RNA, 19 nt, Artificial Sequence
  Description of Artificial Sequence: Synthetic oligonucleotide
  Antisense strand to SEQ ID NO: 1043036
cucuucagaguuaaaggag

SEQ ID NO: 1043038 - RNA, 19 nt, Artificial Sequence
  Description of Artificial Sequence: Synthetic oligonucleotide
  Sense strand starting at position 415 of SEQ ID NO: 914960
uggagcaugguagguuaua

SEQ ID NO: 1043039 - RNA, 19 nt, Artificial Sequence
  Description of Artificial Sequence: Synthetic oligonucleotide
  Antisense strand to SEQ ID NO: 1043038
uauaaccuaccaugcucca

SEQ ID NO: 1043040 - RNA, 19 nt, Artificial Sequence
  Description of Artificial Sequence: Synthetic oligonucleotide
  Sense strand starting at position 416 of SEQ ID NO: 914960
ggagcaugguagguuauaa

SEQ ID NO: 1043041 - RNA, 19 nt, Artificial Sequence
  Description of Artificial Sequence: Synthetic oligonucleotide
  Antisense strand to SEQ ID NO: 1043040
uuauaaccuaccaugcucc

SEQ ID NO: 1043042 - RNA, 19 nt, Artificial Sequence
  Description of Artificial Sequence: Synthetic oligonucleotide
  Sense strand starting at position 583 of SEQ ID NO: 914960
cagcauaucccauggugga

SEQ ID NO: 1043043 - RNA, 19 nt, Artificial Sequence
  Description of Artificial Sequence: Synthetic oligonucleotide
  Antisense strand to SEQ ID NO: 1043042
uccaccaugggauaugcug

SEQ ID NO: 1043044 - RNA, 19 nt, Artificial Sequence
  Description of Artificial Sequence: Synthetic oligonucleotide
  Sense strand starting at position 690 of SEQ ID NO: 914960
cuggaauuccuaggguucu

SEQ ID NO: 1043045 - RNA, 19 nt, Artificial Sequence
  Description of Artificial Sequence: Synthetic oligonucleotide
  Antisense strand to SEQ ID NO: 1043044
agaacccuaggaauuccag

SEQ ID NO: 1043046 - RNA, 19 nt, Artificial Sequence
  Description of Artificial Sequence: Synthetic oligonucleotide
  Sense strand starting at position 721 of SEQ ID NO: 914960
uccugugaggucuaaauac

SEQ ID NO: 1043047 - RNA, 19 nt, Artificial Sequence
  Description of Artificial Sequence: Synthetic oligonucleotide
  Antisense strand to SEQ ID NO: 1043046
guauuuagaccucacagga

SEQ ID NO: 1043048 - RNA, 19 nt, Artificial Sequence
  Description of Artificial Sequence: Synthetic oligonucleotide
  Sense strand starting at position 866 of SEQ ID NO: 914960
ucagaaaugucagagaaag

SEQ ID NO: 1043049 - RNA, 19 nt, Artificial Sequence
  Description of Artificial Sequence: Synthetic oligonucleotide
  Antisense strand to SEQ ID NO: 1043048
cuuucucugacauuucuga

SEQ ID NO: 1043050 - RNA, 19 nt, Artificial Sequence
  Description of Artificial Sequence: Synthetic oligonucleotide
  Sense strand starting at position 914 of SEQ ID NO: 914960
gcugucuauggccaaauga

SEQ ID NO: 1043051 - RNA, 19 nt, Artificial Sequence
  Description of Artificial Sequence: Synthetic oligonucleotide
  Antisense strand to SEQ ID NO: 1043050
ucauuuggccauagacagc

SEQ ID NO: 1043052 - RNA, 19 nt, Artificial Sequence
  Description of Artificial Sequence: Synthetic oligonucleotide
  Sense strand starting at position 955 of SEQ ID NO: 914960
uaggcuuaacuaugagugu

SEQ ID NO: 1043053 - RNA, 19 nt, Artificial Sequence
  Description of Artificial Sequence: Synthetic oligonucleotide
  Antisense strand to SEQ ID NO: 1043052
acacucauaguuaagccua

SEQ ID NO: 1043054 - RNA, 19 nt, Artificial Sequence
  Description of Artificial Sequence: Synthetic oligonucleotide
  Sense strand starting at position 971 of SEQ ID NO: 914960
ugugguccuagguagagaa

SEQ ID NO: 1043055 - RNA, 19 nt, Artificial Sequence
  Description of Artificial Sequence: Synthetic oligonucleotide
  Antisense strand to SEQ ID NO: 1043054
uucucuaccuaggaccaca

SEQ ID NO: 1043056 - RNA, 19 nt, Artificial Sequence
  Description of Artificial Sequence: Synthetic oligonucleotide
  Sense strand starting at position 1144 of SEQ ID NO: 914960
cgaacacaacucuguaacu

SEQ ID NO: 1043057 - RNA, 19 nt, Artificial Sequence
  Description of Artificial Sequence: Synthetic oligonucleotide
  Antisense strand to SEQ ID NO: 1043056
aguuacagaguuguguucg

SEQ ID NO: 1043058 - RNA, 19 nt, Artificial Sequence
  Description of Artificial Sequence: Synthetic oligonucleotide
  Sense strand starting at position 1161 of SEQ ID NO: 914960
cuaugccucucccugagau

SEQ ID NO: 1043059 - RNA, 19 nt, Artificial Sequence
  Description of Artificial Sequence: Synthetic oligonucleotide
  Antisense strand to SEQ ID NO: 1043058
aucucagggagaggcauag

SEQ ID NO: 1043060 - RNA, 19 nt, Artificial Sequence
  Description of Artificial Sequence: Synthetic oligonucleotide
  Sense strand starting at position 1165 of SEQ ID NO: 914960
gccucucccugagauuuag

SEQ ID NO: 1043061 - RNA, 19 nt, Artificial Sequence
  Description of Artificial Sequence: Synthetic oligonucleotide
  Antisense strand to SEQ ID NO: 1043060
cuaaaucucagggagaggc

SEQ ID NO: 1043062 - RNA, 19 nt, Artificial Sequence
  Description of Artificial Sequence: Synthetic oligonucleotide
  Sense strand starting at position 1171 of SEQ ID NO: 914960
cccugagauuuaggucuua

SEQ ID NO: 1043063 - RNA, 19 nt, Artificial Sequence
  Description of Artificial Sequence: Synthetic oligonucleotide
  Antisense strand to SEQ ID NO: 1043062
uaagaccuaaaucucaggg

SEQ ID NO: 1043064 - RNA, 19 nt, Artificial Sequence
  Description of Artificial Sequence: Synthetic oligonucleotide
  Sense strand starting at position 1183 of SEQ ID NO: 914960
ggucuuaggcccuagaauc

SEQ ID NO: 1043065 - RNA, 19 nt, Artificial Sequence
  Description of Artificial Sequence: Synthetic oligonucleotide
  Antisense strand to SEQ ID NO: 1043064
gauucuagggccuaagacc

SEQ ID NO: 1043066 - RNA, 19 nt, Artificial Sequence
  Description of Artificial Sequence: Synthetic oligonucleotide
  Sense strand starting at position 1206 of SEQ ID NO: 914960
ggacuaagguugcccucua

SEQ ID NO: 1043067 - RNA, 19 nt, Artificial Sequence
  Description of Artificial Sequence: Synthetic oligonucleotide
  Antisense strand to SEQ ID NO: 1043066
uagagggcaaccuuagucc

SEQ ID NO: 1043068 - RNA, 19 nt, Artificial Sequence
  Description of Artificial Sequence: Synthetic oligonucleotide
  Sense strand starting at position 1219 of SEQ ID NO: 914960
ccucuaguugugugaccuu

SEQ ID NO: 1043069 - RNA, 19 nt, Artificial Sequence
  Description of Artificial Sequence: Synthetic oligonucleotide
  Antisense strand to SEQ ID NO: 1043068
aaggucacacaacuagagg

SEQ ID NO: 1043070 - RNA, 19 nt, Artificial Sequence
  Description of Artificial Sequence: Synthetic oligonucleotide
  Sense strand starting at position 1332 of SEQ ID NO: 914960
ccuagaagcugcucaacaa

SEQ ID NO: 1043071 - RNA, 19 nt, Artificial Sequence
  Description of Artificial Sequence: Synthetic oligonucleotide
  Antisense strand to SEQ ID NO: 1043070
uuguugagcagcuucuagg

SEQ ID NO: 1043072 - RNA, 19 nt, Artificial Sequence
  Description of Artificial Sequence: Synthetic oligonucleotide
  Sense strand starting at position 1333 of SEQ ID NO: 914960
cuagaagcugcucaacaaa

SEQ ID NO: 1043073 - RNA, 19 nt, Artificial Sequence
  Description of Artificial Sequence: Synthetic oligonucleotide
  Antisense strand to SEQ ID NO: 1043072
uuuguugagcagcuucuag

SEQ ID NO: 1043074 - RNA, 19 nt, Artificial Sequence
  Description of Artificial Sequence: Synthetic oligonucleotide
  Sense strand starting at position 1993 of SEQ ID NO: 914960
acgucacaccugugaaagu

SEQ ID NO: 1043075 - RNA, 19 nt, Artificial Sequence
  Description of Artificial Sequence: Synthetic oligonucleotide
  Antisense strand to SEQ ID NO: 1043074
acuuucacaggugugacgu

SEQ ID NO: 1043076 - RNA, 19 nt, Artificial Sequence
  Description of Artificial Sequence: Synthetic oligonucleotide
  Sense strand starting at position 2255 of SEQ ID NO: 914960
agggcuaugcccuggcuaa

SEQ ID NO: 1043077 - RNA, 19 nt, Artificial Sequence
  Description of Artificial Sequence: Synthetic oligonucleotide
  Antisense strand to SEQ ID NO: 1043076
uuagccagggcauagcccu

SEQ ID NO: 1043078 - RNA, 19 nt, Artificial Sequence
  Description of Artificial Sequence: Synthetic oligonucleotide
  Sense strand starting at position 2317 of SEQ ID NO: 914960
ugcaaauagugacuaggaa

SEQ ID NO: 1043079 - RNA, 19 nt, Artificial Sequence
  Description of Artificial Sequence: Synthetic oligonucleotide
  Antisense strand to SEQ ID NO: 1043078
uuccuagucacuauuugca

SEQ ID NO: 1043080 - RNA, 19 nt, Artificial Sequence
  Description of Artificial Sequence: Synthetic oligonucleotide
  Sense strand starting at position 2400 of SEQ ID NO: 914960
cugcaaauugguuggcuga

SEQ ID NO: 1043081 - RNA, 19 nt, Artificial Sequence
  Description of Artificial Sequence: Synthetic oligonucleotide
  Antisense strand to SEQ ID NO: 1043080
ucagccaaccaauuugcag

SEQ ID NO: 1043082 - RNA, 19 nt, Artificial Sequence
  Description of Artificial Sequence: Synthetic oligonucleotide
  Sense strand starting at position 2401 of SEQ ID NO: 914960
ugcaaauugguuggcugau

SEQ ID NO: 1043083 - RNA, 19 nt, Artificial Sequence
  Description of Artificial Sequence: Synthetic oligonucleotide
  Antisense strand to SEQ ID NO: 1043082
aucagccaaccaauuugca

SEQ ID NO: 1043084 - RNA, 19 nt, Artificial Sequence
  Description of Artificial Sequence: Synthetic oligonucleotide
  Sense strand starting at position 2845 of SEQ ID NO: 914960
ucagacauuucuuaggaaa

SEQ ID NO: 1043085 - RNA, 19 nt, Artificial Sequence
  Description of Artificial Sequence: Synthetic oligonucleotide
  Antisense strand to SEQ ID NO: 1043084
uuuccuaagaaaugucuga

SEQ ID NO: 1043086 - RNA, 19 nt, Artificial Sequence
  Description of Artificial Sequence: Synthetic oligonucleotide
  Sense strand starting at position 2847 of SEQ ID NO: 914960
agacauuucuuaggaaagu

SEQ ID NO: 1043087 - RNA, 19 nt, Artificial Sequence
  Description of Artificial Sequence: Synthetic oligonucleotide
  Antisense strand to SEQ ID NO: 1043086
acuuuccuaagaaaugucu

SEQ ID NO: 1043088 - RNA, 19 nt, Artificial Sequence
  Description of Artificial Sequence: Synthetic oligonucleotide
  Sense strand starting at position 2848 of SEQ ID NO: 914960
gacauuucuuaggaaaguc

SEQ ID NO: 1043089 - RNA, 19 nt, Artificial Sequence
  Description of Artificial Sequence: Synthetic oligonucleotide
  Antisense strand to SEQ ID NO: 1043088
gacuuuccuaagaaauguc

SEQ ID NO: 1043090 - RNA, 19 nt, Artificial Sequence
  Description of Artificial Sequence: Synthetic oligonucleotide
  Sense strand starting at position 3119 of SEQ ID NO: 914960
aguguucaucguggacaag

SEQ ID NO: 1043091 - RNA, 19 nt, Artificial Sequence
  Description of Artificial Sequence: Synthetic oligonucleotide
  Antisense strand to SEQ ID NO: 1043090
cuuguccacgaugaacacu

SEQ ID NO: 1043092 - RNA, 19 nt, Artificial Sequence
  Description of Artificial Sequence: Synthetic oligonucleotide
  Sense strand starting at position 3120 of SEQ ID NO: 914960
guguucaucguggacaagu

SEQ ID NO: 1043093 - RNA, 19 nt, Artificial Sequence
  Description of Artificial Sequence: Synthetic oligonucleotide
  Antisense strand to SEQ ID NO: 1043092
acuuguccacgaugaacac

SEQ ID NO: 1043094 - RNA, 19 nt, Artificial Sequence
  Description of Artificial Sequence: Synthetic oligonucleotide
  Sense strand starting at position 3137 of SEQ ID NO: 914960
guuggaauugugggacggu

SEQ ID NO: 1043095 - RNA, 19 nt, Artificial Sequence
  Description of Artificial Sequence: Synthetic oligonucleotide
  Antisense strand to SEQ ID NO: 1043094
accgucccacaauuccaac

SEQ ID NO: 1043096 - RNA, 19 nt, Artificial Sequence
  Description of Artificial Sequence: Synthetic oligonucleotide
  Sense strand starting at position 3173 of SEQ ID NO: 914960
agagaaugguguuuaucuu

SEQ ID NO: 1043097 - RNA, 19 nt, Artificial Sequence
  Description of Artificial Sequence: Synthetic oligonucleotide
  Antisense strand to SEQ ID NO: 1043096
aagauaaacaccauucucu

SEQ ID NO: 1043098 - RNA, 19 nt, Artificial Sequence
  Description of Artificial Sequence: Synthetic oligonucleotide
  Sense strand starting at position 3174 of SEQ ID NO: 914960
gagaaugguguuuaucuuc

SEQ ID NO: 1043099 - RNA, 19 nt, Artificial Sequence
  Description of Artificial Sequence: Synthetic oligonucleotide
  Antisense strand to SEQ ID NO: 1043098
gaagauaaacaccauucuc

SEQ ID NO: 1043100 - RNA, 19 nt, Artificial Sequence
  Description of Artificial Sequence: Synthetic oligonucleotide
  Sense strand starting at position 3322 of SEQ ID NO: 914960
caggcaagugcuuguggaa

SEQ ID NO: 1043101 - RNA, 19 nt, Artificial Sequence
  Description of Artificial Sequence: Synthetic oligonucleotide
  Antisense strand to SEQ ID NO: 1043100
uuccacaagcacuugccug

SEQ ID NO: 1043102 - RNA, 19 nt, Artificial Sequence
  Description of Artificial Sequence: Synthetic oligonucleotide
  Sense strand starting at position 3329 of SEQ ID NO: 914960
gugcuuguggaauaugaac

SEQ ID NO: 1043103 - RNA, 19 nt, Artificial Sequence
  Description of Artificial Sequence: Synthetic oligonucleotide
  Antisense strand to SEQ ID NO: 1043102
guucauauuccacaagcac

SEQ ID NO: 1043104 - RNA, 19 nt, Artificial Sequence
  Description of Artificial Sequence: Synthetic oligonucleotide
  Sense strand starting at position 3483 of SEQ ID NO: 914960
auuccaggccauggaaaua

SEQ ID NO: 1043105 - RNA, 19 nt, Artificial Sequence
  Description of Artificial Sequence: Synthetic oligonucleotide
  Antisense strand to SEQ ID NO: 1043104
uauuuccauggccuggaau

SEQ ID NO: 1043106 - RNA, 19 nt, Artificial Sequence
  Description of Artificial Sequence: Synthetic oligonucleotide
  Sense strand starting at position 3508 of SEQ ID NO: 914960
cagggaugugaguguggaa

SEQ ID NO: 1043107 - RNA, 19 nt, Artificial Sequence
  Description of Artificial Sequence: Synthetic oligonucleotide
  Antisense strand to SEQ ID NO: 1043106
uuccacacucacaucccug

SEQ ID NO: 1043108 - RNA, 19 nt, Artificial Sequence
  Description of Artificial Sequence: Synthetic oligonucleotide
  Sense strand starting at position 3562 of SEQ ID NO: 914960
gguucaggauucgugagga

SEQ ID NO: 1043109 - RNA, 19 nt, Artificial Sequence
  Description of Artificial Sequence: Synthetic oligonucleotide
  Antisense strand to SEQ ID NO: 1043108
uccucacgaauccugaacc

SEQ ID NO: 1043110 - RNA, 19 nt, Artificial Sequence
  Description of Artificial Sequence: Synthetic oligonucleotide
  Sense strand starting at position 3694 of SEQ ID NO: 914960
acaagucuuugggaagaug

SEQ ID NO: 1043111 - RNA, 19 nt, Artificial Sequence
  Description of Artificial Sequence: Synthetic oligonucleotide
  Antisense strand to SEQ ID NO: 1043110
caucuucccaaagacuugu

SEQ ID NO: 1043112 - RNA, 19 nt, Artificial Sequence
  Description of Artificial Sequence: Synthetic oligonucleotide
  Sense strand starting at position 3917 of SEQ ID NO: 914960
acaggaucccugcaacuuu

SEQ ID NO: 1043113 - RNA, 19 nt, Artificial Sequence
  Description of Artificial Sequence: Synthetic oligonucleotide
  Antisense strand to SEQ ID NO: 1043112
aaaguugcagggauccugu

SEQ ID NO: 1043114 - RNA, 19 nt, Artificial Sequence
  Description of Artificial Sequence: Synthetic oligonucleotide
  Sense strand starting at position 265 of SEQ ID NO: 914961
acacuaggcugauugaaau

SEQ ID NO: 1043115 - RNA, 19 nt, Artificial Sequence
  Description of Artificial Sequence: Synthetic oligonucleotide
  Antisense strand to SEQ ID NO: 1043114
auuucaaucagccuagugu

SEQ ID NO: 1043116 - RNA, 19 nt, Artificial Sequence
  Description of Artificial Sequence: Synthetic oligonucleotide
  Sense strand starting at position 318 of SEQ ID NO: 914961
uuguauacucucgagaaac

SEQ ID NO: 1043117 - RNA, 19 nt, Artificial Sequence
  Description of Artificial Sequence: Synthetic oligonucleotide
  Antisense strand to SEQ ID NO: 1043116
guuucucgagaguauacaa

SEQ ID NO: 1043118 - RNA, 19 nt, Artificial Sequence
  Description of Artificial Sequence: Synthetic oligonucleotide
  Sense strand starting at position 340 of SEQ ID NO: 914961
gugcaauacuccuugauaa

SEQ ID NO: 1043119 - RNA, 19 nt, Artificial Sequence
  Description of Artificial Sequence: Synthetic oligonucleotide
  Antisense strand to SEQ ID NO: 1043118
uuaucaaggaguauugcac

SEQ ID NO: 1043120 - RNA, 19 nt, Artificial Sequence
  Description of Artificial Sequence: Synthetic oligonucleotide
  Sense strand starting at position 355 of SEQ ID NO: 914961
auaacuaaaggcugaguuu

SEQ ID NO: 1043121 - RNA, 19 nt, Artificial Sequence
  Description of Artificial Sequence: Synthetic oligonucleotide
  Antisense strand to SEQ ID NO: 1043120
aaacucagccuuuaguuau

SEQ ID NO: 1043122 - RNA, 19 nt, Artificial Sequence
  Description of Artificial Sequence: Synthetic oligonucleotide
  Sense strand starting at position 726 of SEQ ID NO: 914961
cuaggcuguccucagauga

SEQ ID NO: 1043123 - RNA, 19 nt, Artificial Sequence
  Description of Artificial Sequence: Synthetic oligonucleotide
  Antisense strand to SEQ ID NO: 1043122
ucaucugaggacagccuag

SEQ ID NO: 1043124 - RNA, 19 nt, Artificial Sequence
  Description of Artificial Sequence: Synthetic oligonucleotide
  Sense strand starting at position 910 of SEQ ID NO: 914961
caacguuucuugguagaaa

SEQ ID NO: 1043125 - RNA, 19 nt, Artificial Sequence
  Description of Artificial Sequence: Synthetic oligonucleotide
  Antisense strand to SEQ ID NO: 1043124
uuucuaccaagaaacguug

SEQ ID NO: 1043126 - RNA, 19 nt, Artificial Sequence
  Description of Artificial Sequence: Synthetic oligonucleotide
  Sense strand starting at position 1013 of SEQ ID NO: 914961
cagcgaugagccuggaacu

SEQ ID NO: 1043127 - RNA, 19 nt, Artificial Sequence
  Description of Artificial Sequence: Synthetic oligonucleotide
  Antisense strand to SEQ ID NO: 1043126
aguuccaggcucaucgcug

SEQ ID NO: 1043128 - RNA, 19 nt, Artificial Sequence
  Description of Artificial Sequence: Synthetic oligonucleotide
  Sense strand starting at position 1067 of SEQ ID NO: 914961
ggagguaacucugcucagu

SEQ ID NO: 1043129 - RNA, 19 nt, Artificial Sequence
  Description of Artificial Sequence: Synthetic oligonucleotide
  Antisense strand to SEQ ID NO: 1043128
acugagcagaguuaccucc

SEQ ID NO: 1043130 - RNA, 19 nt, Artificial Sequence
  Description of Artificial Sequence: Synthetic oligonucleotide
  Sense strand starting at position 1069 of SEQ ID NO: 914961
agguaacucugcucaguga

SEQ ID NO: 1043131 - RNA, 19 nt, Artificial Sequence
  Description of Artificial Sequence: Synthetic oligonucleotide
  Antisense strand to SEQ ID NO: 1043130
ucacugagcagaguuaccu

SEQ ID NO: 1043132 - RNA, 19 nt, Artificial Sequence
  Description of Artificial Sequence: Synthetic oligonucleotide
  Sense strand starting at position 1398 of SEQ ID NO: 914961
guuccugaaccucaguuua

SEQ ID NO: 1043133 - RNA, 19 nt, Artificial Sequence
  Description of Artificial Sequence: Synthetic oligonucleotide
  Antisense strand to SEQ ID NO: 1043132
uaaacugagguucaggaac

SEQ ID NO: 1043134 - RNA, 19 nt, Artificial Sequence
  Description of Artificial Sequence: Synthetic oligonucleotide
  Sense strand starting at position 1457 of SEQ ID NO: 914961
aggcccugucugggugaaa

SEQ ID NO: 1043135 - RNA, 19 nt, Artificial Sequence
  Description of Artificial Sequence: Synthetic oligonucleotide
  Antisense strand to SEQ ID NO: 1043134
uuucacccagacagggccu

SEQ ID NO: 1043136 - RNA, 19 nt, Artificial Sequence
  Description of Artificial Sequence: Synthetic oligonucleotide
  Sense strand starting at position 1532 of SEQ ID NO: 914961
ggaagaucuugagucccuu

SEQ ID NO: 1043137 - RNA, 19 nt, Artificial Sequence
  Description of Artificial Sequence: Synthetic oligonucleotide
  Antisense strand to SEQ ID NO: 1043136
aagggacucaagaucuucc

SEQ ID NO: 1043138 - RNA, 19 nt, Artificial Sequence
  Description of Artificial Sequence: Synthetic oligonucleotide
  Sense strand starting at position 1536 of SEQ ID NO: 914961
gaucuugagucccuuggaa

SEQ ID NO: 1043139 - RNA, 19 nt, Artificial Sequence
  Description of Artificial Sequence: Synthetic oligonucleotide
  Antisense strand to SEQ ID NO: 1043138
uuccaagggacucaagauc

SEQ ID NO: 1043140 - RNA, 19 nt, Artificial Sequence
  Description of Artificial Sequence: Synthetic oligonucleotide
  Sense strand starting at position 1564 of SEQ ID NO: 914961
ucuagucagcaguggaaau

SEQ ID NO: 1043141 - RNA, 19 nt, Artificial Sequence
  Description of Artificial Sequence: Synthetic oligonucleotide
  Antisense strand to SEQ ID NO: 1043140
auuuccacugcugacuaga

SEQ ID NO: 1043142 - RNA, 19 nt, Artificial Sequence
  Description of Artificial Sequence: Synthetic oligonucleotide
  Sense strand starting at position 1565 of SEQ ID NO: 914961
cuagucagcaguggaaaua

SEQ ID NO: 1043143 - RNA, 19 nt, Artificial Sequence
  Description of Artificial Sequence: Synthetic oligonucleotide
  Antisense strand to SEQ ID NO: 1043142
uauuuccacugcugacuag

SEQ ID NO: 1043144 - RNA, 19 nt, Artificial Sequence
  Description of Artificial Sequence: Synthetic oligonucleotide
  Sense strand starting at position 1624 of SEQ ID NO: 914961
gaggccaugccagagagau

SEQ ID NO: 1043145 - RNA, 19 nt, Artificial Sequence
  Description of Artificial Sequence: Synthetic oligonucleotide
  Antisense strand to SEQ ID NO: 1043144
aucucucuggcauggccuc

SEQ ID NO: 1043146 - RNA, 19 nt, Artificial Sequence
  Description of Artificial Sequence: Synthetic oligonucleotide
  Sense strand starting at position 2159 of SEQ ID NO: 914961
ccacgacacgcagauaauu

SEQ ID NO: 1043147 - RNA, 19 nt, Artificial Sequence
  Description of Artificial Sequence: Synthetic oligonucleotide
  Antisense strand to SEQ ID NO: 1043146
aauuaucugcgugucgugg

SEQ ID NO: 1043148 - RNA, 19 nt, Artificial Sequence
  Description of Artificial Sequence: Synthetic oligonucleotide
  Sense strand starting at position 2353 of SEQ ID NO: 914961
cucagagaaugccucaaau

SEQ ID NO: 1043149 - RNA, 19 nt, Artificial Sequence
  Description of Artificial Sequence: Synthetic oligonucleotide
  Antisense strand to SEQ ID NO: 1043148
auuugaggcauucucugag

SEQ ID NO: 1043150 - RNA, 19 nt, Artificial Sequence
  Description of Artificial Sequence: Synthetic oligonucleotide
  Sense strand starting at position 2387 of SEQ ID NO: 914961
cuaagaucaucagugagca

SEQ ID NO: 1043151 - RNA, 19 nt, Artificial Sequence
  Description of Artificial Sequence: Synthetic oligonucleotide
  Antisense strand to SEQ ID NO: 1043150
ugcucacugaugaucuuag

SEQ ID NO: 1043152 - RNA, 19 nt, Artificial Sequence
  Description of Artificial Sequence: Synthetic oligonucleotide
  Sense strand starting at position 2388 of SEQ ID NO: 914961
uaagaucaucagugagcau

SEQ ID NO: 1043153 - RNA, 19 nt, Artificial Sequence
  Description of Artificial Sequence: Synthetic oligonucleotide
  Antisense strand to SEQ ID NO: 1043152
augcucacugaugaucuua

SEQ ID NO: 1043154 - RNA, 19 nt, Artificial Sequence
  Description of Artificial Sequence: Synthetic oligonucleotide
  Sense strand starting at position 2391 of SEQ ID NO: 914961
gaucaucagugagcaucua

SEQ ID NO: 1043155 - RNA, 19 nt, Artificial Sequence
  Description of Artificial Sequence: Synthetic oligonucleotide
  Antisense strand to SEQ ID NO: 1043154
uagaugcucacugaugauc

SEQ ID NO: 1043156 - RNA, 19 nt, Artificial Sequence
  Description of Artificial Sequence: Synthetic oligonucleotide
  Sense strand starting at position 2428 of SEQ ID NO: 914961
ugcauauguguagacauau

SEQ ID NO: 1043157 - RNA, 19 nt, Artificial Sequence
  Description of Artificial Sequence: Synthetic oligonucleotide
  Antisense strand to SEQ ID NO: 1043156
auaugucuacacauaugca

SEQ ID NO: 1043158 - RNA, 19 nt, Artificial Sequence
  Description of Artificial Sequence: Synthetic oligonucleotide
  Sense strand starting at position 2516 of SEQ ID NO: 914961
gucaucacgggccaucaau

SEQ ID NO: 1043159 - RNA, 19 nt, Artificial Sequence
  Description of Artificial Sequence: Synthetic oligonucleotide
  Antisense strand to SEQ ID NO: 1043158
auugauggcccgugaugac

SEQ ID NO: 1043160 - RNA, 19 nt, Artificial Sequence
  Description of Artificial Sequence: Synthetic oligonucleotide
  Sense strand starting at position 2525 of SEQ ID NO: 914961
ggccaucaauguuccauau

SEQ ID NO: 1043161 - RNA, 19 nt, Artificial Sequence
  Description of Artificial Sequence: Synthetic oligonucleotide
  Antisense strand to SEQ ID NO: 1043160
auauggaacauugauggcc

SEQ ID NO: 1043162 - RNA, 19 nt, Artificial Sequence
  Description of Artificial Sequence: Synthetic oligonucleotide
  Sense strand starting at position 2529 of SEQ ID NO: 914961
aucaauguuccauauaugu

SEQ ID NO: 1043163 - RNA, 19 nt, Artificial Sequence
  Description of Artificial Sequence: Synthetic oligonucleotide
  Antisense strand to SEQ ID NO: 1043162
acauauauggaacauugau

SEQ ID NO: 1043164 - RNA, 19 nt, Artificial Sequence
  Description of Artificial Sequence: Synthetic oligonucleotide
  Sense strand starting at position 2664 of SEQ ID NO: 914961
gaggcuguggaccaucauu

SEQ ID NO: 1043165 - RNA, 19 nt, Artificial Sequence
  Description of Artificial Sequence: Synthetic oligonucleotide
  Antisense strand to SEQ ID NO: 1043164
aaugaugguccacagccuc

SEQ ID NO: 1043166 - RNA, 19 nt, Artificial Sequence
  Description of Artificial Sequence: Synthetic oligonucleotide
  Sense strand starting at position 2701 of SEQ ID NO: 914961
ccugguuccaagggaaaca

SEQ ID NO: 1043167 - RNA, 19 nt, Artificial Sequence
  Description of Artificial Sequence: Synthetic oligonucleotide
  Antisense strand to SEQ ID NO: 1043166
uguuucccuuggaaccagg

SEQ ID NO: 1043168 - RNA, 19 nt, Artificial Sequence
  Description of Artificial Sequence: Synthetic oligonucleotide
  Sense strand starting at position 2733 of SEQ ID NO: 914961
cuguacuuccuguggaaga

SEQ ID NO: 1043169 - RNA, 19 nt, Artificial Sequence
  Description of Artificial Sequence: Synthetic oligonucleotide
  Antisense strand to SEQ ID NO: 1043168
ucuuccacaggaaguacag

SEQ ID NO: 1043170 - RNA, 19 nt, Artificial Sequence
  Description of Artificial Sequence: Synthetic oligonucleotide
  Sense strand starting at position 2824 of SEQ ID NO: 914961
ggucacuuagggugugaga

SEQ ID NO: 1043171 - RNA, 19 nt, Artificial Sequence
  Description of Artificial Sequence: Synthetic oligonucleotide
  Antisense strand to SEQ ID NO: 1043170
ucucacacccuaagugacc

SEQ ID NO: 1043172 - RNA, 19 nt, Artificial Sequence
  Description of Artificial Sequence: Synthetic oligonucleotide
  Sense strand starting at position 2826 of SEQ ID NO: 914961
ucacuuagggugugagagu

SEQ ID NO: 1043173 - RNA, 19 nt, Artificial Sequence
  Description of Artificial Sequence: Synthetic oligonucleotide
  Antisense strand to SEQ ID NO: 1043172
acucucacacccuaaguga

SEQ ID NO: 1043174 - RNA, 19 nt, Artificial Sequence
  Description of Artificial Sequence: Synthetic oligonucleotide
  Sense strand starting at position 3155 of SEQ ID NO: 914961
guggaacucuuucuuagca

SEQ ID NO: 1043175 - RNA, 19 nt, Artificial Sequence
  Description of Artificial Sequence: Synthetic oligonucleotide
  Antisense strand to SEQ ID NO: 1043174
ugcuaagaaagaguuccac

SEQ ID NO: 1043176 - RNA, 19 nt, Artificial Sequence
  Description of Artificial Sequence: Synthetic oligonucleotide
  Sense strand starting at position 3211 of SEQ ID NO: 914961
gggcuuuccuuccucaaga

SEQ ID NO: 1043177 - RNA, 19 nt, Artificial Sequence
  Description of Artificial Sequence: Synthetic oligonucleotide
  Antisense strand to SEQ ID NO: 1043176
ucuugaggaaggaaagccc

SEQ ID NO: 1043178 - RNA, 19 nt, Artificial Sequence
  Description of Artificial Sequence: Synthetic oligonucleotide
  Sense strand starting at position 3212 of SEQ ID NO: 914961
ggcuuuccuuccucaagac

SEQ ID NO: 1043179 - RNA, 19 nt, Artificial Sequence
  Description of Artificial Sequence: Synthetic oligonucleotide
  Antisense strand to SEQ ID NO: 1043178
gucuugaggaaggaaagcc

SEQ ID NO: 1043180 - RNA, 19 nt, Artificial Sequence
  Description of Artificial Sequence: Synthetic oligonucleotide
  Sense strand starting at position 3312 of SEQ ID NO: 914961
gugacagagaucugacuua

SEQ ID NO: 1043181 - RNA, 19 nt, Artificial Sequence
  Description of Artificial Sequence: Synthetic oligonucleotide
  Antisense strand to SEQ ID NO: 1043180
uaagucagaucucugucac

SEQ ID NO: 1043182 - RNA, 19 nt, Artificial Sequence
  Description of Artificial Sequence: Synthetic oligonucleotide
  Sense strand starting at position 3415 of SEQ ID NO: 914961
uauaguuuaguuuggaaac

SEQ ID NO: 1043183 - RNA, 19 nt, Artificial Sequence
  Description of Artificial Sequence: Synthetic oligonucleotide
  Antisense strand to SEQ ID NO: 1043182
guuuccaaacuaaacuaua

SEQ ID NO: 1043184 - RNA, 19 nt, Artificial Sequence
  Description of Artificial Sequence: Synthetic oligonucleotide
  Sense strand starting at position 3524 of SEQ ID NO: 914961
uagaaauugugguuuaaga

SEQ ID NO: 1043185 - RNA, 19 nt, Artificial Sequence
  Description of Artificial Sequence: Synthetic oligonucleotide
  Antisense strand to SEQ ID NO: 1043184
ucuuaaaccacaauuucua

SEQ ID NO: 1043186 - RNA, 19 nt, Artificial Sequence
  Description of Artificial Sequence: Synthetic oligonucleotide
  Sense strand starting at position 3526 of SEQ ID NO: 914961
gaaauugugguuuaagagu

SEQ ID NO: 1043187 - RNA, 19 nt, Artificial Sequence
  Description of Artificial Sequence: Synthetic oligonucleotide
  Antisense strand to SEQ ID NO: 1043186
acucuuaaaccacaauuuc

SEQ ID NO: 1043188 - RNA, 19 nt, Artificial Sequence
  Description of Artificial Sequence: Synthetic oligonucleotide
  Sense strand starting at position 3586 of SEQ ID NO: 914961
gcaucuugaggcuaacauc

SEQ ID NO: 1043189 - RNA, 19 nt, Artificial Sequence
  Description of Artificial Sequence: Synthetic oligonucleotide
  Antisense strand to SEQ ID NO: 1043188
gauguuagccucaagaugc

SEQ ID NO: 1043190 - RNA, 19 nt, Artificial Sequence
  Description of Artificial Sequence: Synthetic oligonucleotide
  Sense strand starting at position 3592 of SEQ ID NO: 914961
ugaggcuaacaucacuauu

SEQ ID NO: 1043191 - RNA, 19 nt, Artificial Sequence
  Description of Artificial Sequence: Synthetic oligonucleotide
  Antisense strand to SEQ ID NO: 1043190
aauagugauguuagccuca

SEQ ID NO: 1043192 - RNA, 19 nt, Artificial Sequence
  Description of Artificial Sequence: Synthetic oligonucleotide
  Sense strand starting at position 3949 of SEQ ID NO: 914961
gagaaaucagcucagucua

SEQ ID NO: 1043193 - RNA, 19 nt, Artificial Sequence
  Description of Artificial Sequence: Synthetic oligonucleotide
  Antisense strand to SEQ ID NO: 1043192
uagacugagcugauuucuc

SEQ ID NO: 1043194 - RNA, 19 nt, Artificial Sequence
  Description of Artificial Sequence: Synthetic oligonucleotide
  Sense strand starting at position 166 of SEQ ID NO: 914962
uguugaugcccacaauuaa

SEQ ID NO: 1043195 - RNA, 19 nt, Artificial Sequence
  Description of Artificial Sequence: Synthetic oligonucleotide
  Antisense strand to SEQ ID NO: 1043194
uuaauugugggcaucaaca

SEQ ID NO: 1043196 - RNA, 19 nt, Artificial Sequence
  Description of Artificial Sequence: Synthetic oligonucleotide
  Sense strand starting at position 816 of SEQ ID NO: 914962
cucagagaccuuggugaau

SEQ ID NO: 1043197 - RNA, 19 nt, Artificial Sequence
  Description of Artificial Sequence: Synthetic oligonucleotide
  Antisense strand to SEQ ID NO: 1043196
auucaccaaggucucugag

SEQ ID NO: 1043198 - RNA, 19 nt, Artificial Sequence
  Description of Artificial Sequence: Synthetic oligonucleotide
  Sense strand starting at position 844 of SEQ ID NO: 914962
gugacauuacuccagaguu

SEQ ID NO: 1043199 - RNA, 19 nt, Artificial Sequence
  Description of Artificial Sequence: Synthetic oligonucleotide
  Antisense strand to SEQ ID NO: 1043198
aacucuggaguaaugucac

SEQ ID NO: 1043200 - RNA, 19 nt, Artificial Sequence
  Description of Artificial Sequence: Synthetic oligonucleotide
  Sense strand starting at position 957 of SEQ ID NO: 914962
ggacaugacuucuuaccac

SEQ ID NO: 1043201 - RNA, 19 nt, Artificial Sequence
  Description of Artificial Sequence: Synthetic oligonucleotide
  Antisense strand to SEQ ID NO: 1043200
gugguaagaagucaugucc

SEQ ID NO: 1043202 - RNA, 19 nt, Artificial Sequence
  Description of Artificial Sequence: Synthetic oligonucleotide
  Sense strand starting at position 970 of SEQ ID NO: 914962
uaccacugucaugggaaau

SEQ ID NO: 1043203 - RNA, 19 nt, Artificial Sequence
  Description of Artificial Sequence: Synthetic oligonucleotide
  Antisense strand to SEQ ID NO: 1043202
auuucccaugacaguggua

SEQ ID NO: 1043204 - RNA, 19 nt, Artificial Sequence
  Description of Artificial Sequence: Synthetic oligonucleotide
  Sense strand starting at position 1032 of SEQ ID NO: 914962
auguguuugcucccagcga

SEQ ID NO: 1043205 - RNA, 19 nt, Artificial Sequence
  Description of Artificial Sequence: Synthetic oligonucleotide
  Antisense strand to SEQ ID NO: 1043204
ucgcugggagcaaacacau

SEQ ID NO: 1043206 - RNA, 19 nt, Artificial Sequence
  Description of Artificial Sequence: Synthetic oligonucleotide
  Sense strand starting at position 1296 of SEQ ID NO: 914962
ugggaaaucuuucucauua

SEQ ID NO: 1043207 - RNA, 19 nt, Artificial Sequence
  Description of Artificial Sequence: Synthetic oligonucleotide
  Antisense strand to SEQ ID NO: 1043206
uaaugagaaagauuuccca

SEQ ID NO: 1043208 - RNA, 19 nt, Artificial Sequence
  Description of Artificial Sequence: Synthetic oligonucleotide
  Sense strand starting at position 1297 of SEQ ID NO: 914962
gggaaaucuuucucauuau

SEQ ID NO: 1043209 - RNA, 19 nt, Artificial Sequence
  Description of Artificial Sequence: Synthetic oligonucleotide
  Antisense strand to SEQ ID NO: 1043208
auaaugagaaagauuuccc

SEQ ID NO: 1043210 - RNA, 19 nt, Artificial Sequence
  Description of Artificial Sequence: Synthetic oligonucleotide
  Sense strand starting at position 1322 of SEQ ID NO: 914962
aauugauggcauuaaguuu

SEQ ID NO: 1043211 - RNA, 19 nt, Artificial Sequence
  Description of Artificial Sequence: Synthetic oligonucleotide
  Antisense strand to SEQ ID NO: 1043210
aaacuuaaugccaucaauu

SEQ ID NO: 1043212 - RNA, 19 nt, Artificial Sequence
  Description of Artificial Sequence: Synthetic oligonucleotide
  Sense strand starting at position 1451 of SEQ ID NO: 914962
guuauugugaaguaagaac

SEQ ID NO: 1043213 - RNA, 19 nt, Artificial Sequence
  Description of Artificial Sequence: Synthetic oligonucleotide
  Antisense strand to SEQ ID NO: 1043212
guucuuacuucacaauaac

SEQ ID NO: 1043214 - RNA, 19 nt, Artificial Sequence
  Description of Artificial Sequence: Synthetic oligonucleotide
  Sense strand starting at position 1509 of SEQ ID NO: 914962
cuguuacaagucuacaauu

SEQ ID NO: 1043215 - RNA, 19 nt, Artificial Sequence
  Description of Artificial Sequence: Synthetic oligonucleotide
  Antisense strand to SEQ ID NO: 1043214
aauuguagacuuguaacag

SEQ ID NO: 1043216 - RNA, 19 nt, Artificial Sequence
  Description of Artificial Sequence: Synthetic oligonucleotide
  Sense strand starting at position 1593 of SEQ ID NO: 914962
uaugcauggcuagauacau

SEQ ID NO: 1043217 - RNA, 19 nt, Artificial Sequence
  Description of Artificial Sequence: Synthetic oligonucleotide
  Antisense strand to SEQ ID NO: 1043216
auguaucuagccaugcaua

SEQ ID NO: 1043218 - RNA, 19 nt, Artificial Sequence
  Description of Artificial Sequence: Synthetic oligonucleotide
  Sense strand starting at position 2013 of SEQ ID NO: 914962
cuugauuagcuaugaauag

SEQ ID NO: 1043219 - RNA, 19 nt, Artificial Sequence
  Description of Artificial Sequence: Synthetic oligonucleotide
  Antisense strand to SEQ ID NO: 1043218
cuauucauagcuaaucaag

SEQ ID NO: 1043220 - RNA, 19 nt, Artificial Sequence
  Description of Artificial Sequence: Synthetic oligonucleotide
  Sense strand starting at position 2054 of SEQ ID NO: 914962
ugacuccuagcagauuauu

SEQ ID NO: 1043221 - RNA, 19 nt, Artificial Sequence
  Description of Artificial Sequence: Synthetic oligonucleotide
  Antisense strand to SEQ ID NO: 1043220
aauaaucugcuaggaguca

SEQ ID NO: 1043222 - RNA, 19 nt, Artificial Sequence
  Description of Artificial Sequence: Synthetic oligonucleotide
  Sense strand starting at position 2088 of SEQ ID NO: 914962
uugcaaugucaugauuaac

SEQ ID NO: 1043223 - RNA, 19 nt, Artificial Sequence
  Description of Artificial Sequence: Synthetic oligonucleotide
  Antisense strand to SEQ ID NO: 1043222
guuaaucaugacauugcaa

SEQ ID NO: 1043224 - RNA, 19 nt, Artificial Sequence
  Description of Artificial Sequence: Synthetic oligonucleotide
  Sense strand starting at position 2247 of SEQ ID NO: 914962
gguucugauggucauaaag

SEQ ID NO: 1043225 - RNA, 19 nt, Artificial Sequence
  Description of Artificial Sequence: Synthetic oligonucleotide
  Antisense strand to SEQ ID NO: 1043224
cuuuaugaccaucagaacc

SEQ ID NO: 1043226 - RNA, 19 nt, Artificial Sequence
  Description of Artificial Sequence: Synthetic oligonucleotide
  Sense strand starting at position 2669 of SEQ ID NO: 914962
aguccuagucacugaagag

SEQ ID NO: 1043227 - RNA, 19 nt, Artificial Sequence
  Description of Artificial Sequence: Synthetic oligonucleotide
  Antisense strand to SEQ ID NO: 1043226
cucuucagugacuaggacu

SEQ ID NO: 1043228 - RNA, 19 nt, Artificial Sequence
  Description of Artificial Sequence: Synthetic oligonucleotide
  Sense strand starting at position 2808 of SEQ ID NO: 914962
uuuacucaggccuaggauu

SEQ ID NO: 1043229 - RNA, 19 nt, Artificial Sequence
  Description of Artificial Sequence: Synthetic oligonucleotide
  Antisense strand to SEQ ID NO: 1043228
aauccuaggccugaguaaa

SEQ ID NO: 1043230 - RNA, 19 nt, Artificial Sequence
  Description of Artificial Sequence: Synthetic oligonucleotide
  Sense strand starting at position 2826 of SEQ ID NO: 914962
uuaagagccuuaccugaga

SEQ ID NO: 1043231 - RNA, 19 nt, Artificial Sequence
  Description of Artificial Sequence: Synthetic oligonucleotide
  Antisense strand to SEQ ID NO: 1043230
ucucagguaaggcucuuaa

SEQ ID NO: 1043232 - RNA, 19 nt, Artificial Sequence
  Description of Artificial Sequence: Synthetic oligonucleotide
  Sense strand starting at position 2915 of SEQ ID NO: 914962
aggauccuucccugaaacu

SEQ ID NO: 1043233 - RNA, 19 nt, Artificial Sequence
  Description of Artificial Sequence: Synthetic oligonucleotide
  Antisense strand to SEQ ID NO: 1043232
aguuucagggaaggauccu

SEQ ID NO: 1043234 - RNA, 19 nt, Artificial Sequence
  Description of Artificial Sequence: Synthetic oligonucleotide
  Sense strand starting at position 2925 of SEQ ID NO: 914962
ccugaaacuugucugaaug

SEQ ID NO: 1043235 - RNA, 19 nt, Artificial Sequence
  Description of Artificial Sequence: Synthetic oligonucleotide
  Antisense strand to SEQ ID NO: 1043234
cauucagacaaguuucagg

SEQ ID NO: 1043236 - RNA, 19 nt, Artificial Sequence
  Description of Artificial Sequence: Synthetic oligonucleotide
  Sense strand starting at position 2937 of SEQ ID NO: 914962
cugaauguaccggaugaug

SEQ ID NO: 1043237 - RNA, 19 nt, Artificial Sequence
  Description of Artificial Sequence: Synthetic oligonucleotide
  Antisense strand to SEQ ID NO: 1043236
caucauccgguacauucag

SEQ ID NO: 1043238 - RNA, 19 nt, Artificial Sequence
  Description of Artificial Sequence: Synthetic oligonucleotide
  Sense strand starting at position 2939 of SEQ ID NO: 914962
gaauguaccggaugaugaa

SEQ ID NO: 1043239 - RNA, 19 nt, Artificial Sequence
  Description of Artificial Sequence: Synthetic oligonucleotide
  Antisense strand to SEQ ID NO: 1043238
uucaucauccgguacauuc

SEQ ID NO: 1043240 - RNA, 19 nt, Artificial Sequence
  Description of Artificial Sequence: Synthetic oligonucleotide
  Sense strand starting at position 3008 of SEQ ID NO: 914962
cuuguuucccuugauauga

SEQ ID NO: 1043241 - RNA, 19 nt, Artificial Sequence
  Description of Artificial Sequence: Synthetic oligonucleotide
  Antisense strand to SEQ ID NO: 1043240
ucauaucaagggaaacaag

SEQ ID NO: 1043242 - RNA, 19 nt, Artificial Sequence
  Description of Artificial Sequence: Synthetic oligonucleotide
  Sense strand starting at position 3018 of SEQ ID NO: 914962
uugauaugagucuaucuuc

SEQ ID NO: 1043243 - RNA, 19 nt, Artificial Sequence
  Description of Artificial Sequence: Synthetic oligonucleotide
  Antisense strand to SEQ ID NO: 1043242
gaagauagacucauaucaa

SEQ ID NO: 1043244 - RNA, 19 nt, Artificial Sequence
  Description of Artificial Sequence: Synthetic oligonucleotide
  Sense strand starting at position 3044 of SEQ ID NO: 914962
ggugcuaggcagcauuuau

SEQ ID NO: 1043245 - RNA, 19 nt, Artificial Sequence
  Description of Artificial Sequence: Synthetic oligonucleotide
  Antisense strand to SEQ ID NO: 1043244
auaaaugcugccuagcacc

SEQ ID NO: 1043246 - RNA, 19 nt, Artificial Sequence
  Description of Artificial Sequence: Synthetic oligonucleotide
  Sense strand starting at position 3156 of SEQ ID NO: 914962
uggcucuguaaugaaagau

SEQ ID NO: 1043247 - RNA, 19 nt, Artificial Sequence
  Description of Artificial Sequence: Synthetic oligonucleotide
  Antisense strand to SEQ ID NO: 1043246
aucuuucauuacagagcca

SEQ ID NO: 1043248 - RNA, 19 nt, Artificial Sequence
  Description of Artificial Sequence: Synthetic oligonucleotide
  Sense strand starting at position 3160 of SEQ ID NO: 914962
ucuguaaugaaagaugugu

SEQ ID NO: 1043249 - RNA, 19 nt, Artificial Sequence
  Description of Artificial Sequence: Synthetic oligonucleotide
  Antisense strand to SEQ ID NO: 1043248
acacaucuuucauuacaga

SEQ ID NO: 1043250 - RNA, 19 nt, Artificial Sequence
  Description of Artificial Sequence: Synthetic oligonucleotide
  Sense strand starting at position 3166 of SEQ ID NO: 914962
augaaagauguguauuccu

SEQ ID NO: 1043251 - RNA, 19 nt, Artificial Sequence
  Description of Artificial Sequence: Synthetic oligonucleotide
  Antisense strand to SEQ ID NO: 1043250
aggaauacacaucuuucau

SEQ ID NO: 1043252 - RNA, 19 nt, Artificial Sequence
  Description of Artificial Sequence: Synthetic oligonucleotide
  Sense strand starting at position 3494 of SEQ ID NO: 914962
ucaguauaucuuggauuga

SEQ ID NO: 1043253 - RNA, 19 nt, Artificial Sequence
  Description of Artificial Sequence: Synthetic oligonucleotide
  Antisense strand to SEQ ID NO: 1043252
ucaauccaagauauacuga

SEQ ID NO: 1043254 - RNA, 19 nt, Artificial Sequence
  Description of Artificial Sequence: Synthetic oligonucleotide
  Sense strand starting at position 3504 of SEQ ID NO: 914962
uuggauugauuugagauaa

SEQ ID NO: 1043255 - RNA, 19 nt, Artificial Sequence
  Description of Artificial Sequence: Synthetic oligonucleotide
  Antisense strand to SEQ ID NO: 1043254
uuaucucaaaucaauccaa

SEQ ID NO: 1043256 - RNA, 19 nt, Artificial Sequence
  Description of Artificial Sequence: Synthetic oligonucleotide
  Sense strand starting at position 3576 of SEQ ID NO: 914962
augugaguucaagagggua

SEQ ID NO: 1043257 - RNA, 19 nt, Artificial Sequence
  Description of Artificial Sequence: Synthetic oligonucleotide
  Antisense strand to SEQ ID NO: 1043256
uacccucuugaacucacau

SEQ ID NO: 1043258 - RNA, 19 nt, Artificial Sequence
  Description of Artificial Sequence: Synthetic oligonucleotide
  Sense strand starting at position 3579 of SEQ ID NO: 914962
ugaguucaagaggguaaga

SEQ ID NO: 1043259 - RNA, 19 nt, Artificial Sequence
  Description of Artificial Sequence: Synthetic oligonucleotide
  Antisense strand to SEQ ID NO: 1043258
ucuuacccucuugaacuca

SEQ ID NO: 1043260 - RNA, 19 nt, Artificial Sequence
  Description of Artificial Sequence: Synthetic oligonucleotide
  Sense strand starting at position 3744 of SEQ ID NO: 914962
gugaacauagacuauguuu

SEQ ID NO: 1043261 - RNA, 19 nt, Artificial Sequence
  Description of Artificial Sequence: Synthetic oligonucleotide
  Antisense strand to SEQ ID NO: 1043260
aaacauagucuauguucac

SEQ ID NO: 1043262 - RNA, 19 nt, Artificial Sequence
  Description of Artificial Sequence: Synthetic oligonucleotide
  Sense strand starting at position 3797 of SEQ ID NO: 914962
gagggaaucuagucacugu

SEQ ID NO: 1043263 - RNA, 19 nt, Artificial Sequence
  Description of Artificial Sequence: Synthetic oligonucleotide
  Antisense strand to SEQ ID NO: 1043262
acagugacuagauucccuc

SEQ ID NO: 1043264 - RNA, 19 nt, Artificial Sequence
  Description of Artificial Sequence: Synthetic oligonucleotide
  Sense strand starting at position 3800 of SEQ ID NO: 914962
ggaaucuagucacugugaa

SEQ ID NO: 1043265 - RNA, 19 nt, Artificial Sequence
  Description of Artificial Sequence: Synthetic oligonucleotide
  Antisense strand to SEQ ID NO: 1043264
uucacagugacuagauucc

SEQ ID NO: 1043266 - RNA, 19 nt, Artificial Sequence
  Description of Artificial Sequence: Synthetic oligonucleotide
  Sense strand starting at position 3801 of SEQ ID NO: 914962
gaaucuagucacugugaag

SEQ ID NO: 1043267 - RNA, 19 nt, Artificial Sequence
  Description of Artificial Sequence: Synthetic oligonucleotide
  Antisense strand to SEQ ID NO: 1043266
cuucacagugacuagauuc

SEQ ID NO: 1043268 - RNA, 19 nt, Artificial Sequence
  Description of Artificial Sequence: Synthetic oligonucleotide
  Sense strand starting at position 3836 of SEQ ID NO: 914962
uccacugaggccugggaaa

SEQ ID NO: 1043269 - RNA, 19 nt, Artificial Sequence
  Description of Artificial Sequence: Synthetic oligonucleotide
  Antisense strand to SEQ ID NO: 1043268
uuucccaggccucagugga

SEQ ID NO: 1043270 - RNA, 19 nt, Artificial Sequence
  Description of Artificial Sequence: Synthetic oligonucleotide
  Sense strand starting at position 3895 of SEQ ID NO: 914962
gaccaucugugauuggaca

SEQ ID NO: 1043271 - RNA, 19 nt, Artificial Sequence
  Description of Artificial Sequence: Synthetic oligonucleotide
  Antisense strand to SEQ ID NO: 1043270
uguccaaucacagaugguc

SEQ ID NO: 1043272 - RNA, 19 nt, Artificial Sequence
  Description of Artificial Sequence: Synthetic oligonucleotide
  Sense strand starting at position 3927 of SEQ ID NO: 914962
gacgucacccuggaagagu

SEQ ID NO: 1043273 - RNA, 19 nt, Artificial Sequence
  Description of Artificial Sequence: Synthetic oligonucleotide
  Antisense strand to SEQ ID NO: 1043272
acucuuccagggugacguc

SEQ ID NO: 1043274 - RNA, 19 nt, Artificial Sequence
  Description of Artificial Sequence: Synthetic oligonucleotide
  Sense strand starting at position 238 of SEQ ID NO: 914963
guugaaacucaaugcccaa

SEQ ID NO: 1043275 - RNA, 19 nt, Artificial Sequence
  Description of Artificial Sequence: Synthetic oligonucleotide
  Antisense strand to SEQ ID NO: 1043274
uugggcauugaguuucaac

SEQ ID NO: 1043276 - RNA, 19 nt, Artificial Sequence
  Description of Artificial Sequence: Synthetic oligonucleotide
  Sense strand starting at position 266 of SEQ ID NO: 914963
guauuaagagguuaggucu

SEQ ID NO: 1043277 - RNA, 19 nt, Artificial Sequence
  Description of Artificial Sequence: Synthetic oligonucleotide
  Antisense strand to SEQ ID NO: 1043276
agaccuaaccucuuaauac

SEQ ID NO: 1043278 - RNA, 19 nt, Artificial Sequence
  Description of Artificial Sequence: Synthetic oligonucleotide
  Sense strand starting at position 269 of SEQ ID NO: 914963
uuaagagguuaggucuuua

SEQ ID NO: 1043279 - RNA, 19 nt, Artificial Sequence
  Description of Artificial Sequence: Synthetic oligonucleotide
  Antisense strand to SEQ ID NO: 1043278
uaaagaccuaaccucuuaa

SEQ ID NO: 1043280 - RNA, 19 nt, Artificial Sequence
  Description of Artificial Sequence: Synthetic oligonucleotide
  Sense strand starting at position 273 of SEQ ID NO: 914963
gagguuaggucuuuaggaa

SEQ ID NO: 1043281 - RNA, 19 nt, Artificial Sequence
  Description of Artificial Sequence: Synthetic oligonucleotide
  Antisense strand to SEQ ID NO: 1043280
uuccuaaagaccuaaccuc

SEQ ID NO: 1043282 - RNA, 19 nt, Artificial Sequence
  Description of Artificial Sequence: Synthetic oligonucleotide
  Sense strand starting at position 281 of SEQ ID NO: 914963
gucuuuaggaagugauuau

SEQ ID NO: 1043283 - RNA, 19 nt, Artificial Sequence
  Description of Artificial Sequence: Synthetic oligonucleotide
  Antisense strand to SEQ ID NO: 1043282
auaaucacuuccuaaagac

SEQ ID NO: 1043284 - RNA, 19 nt, Artificial Sequence
  Description of Artificial Sequence: Synthetic oligonucleotide
  Sense strand starting at position 303 of SEQ ID NO: 914963
guaagugcucugcccucau

SEQ ID NO: 1043285 - RNA, 19 nt, Artificial Sequence
  Description of Artificial Sequence: Synthetic oligonucleotide
  Antisense strand to SEQ ID NO: 1043284
augagggcagagcacuuac

SEQ ID NO: 1043286 - RNA, 19 nt, Artificial Sequence
  Description of Artificial Sequence: Synthetic oligonucleotide
  Sense strand starting at position 819 of SEQ ID NO: 914963
uaugacgaguaacuuauaa

SEQ ID NO: 1043287 - RNA, 19 nt, Artificial Sequence
  Description of Artificial Sequence: Synthetic oligonucleotide
  Antisense strand to SEQ ID NO: 1043286
uuauaaguuacucgucaua

SEQ ID NO: 1043288 - RNA, 19 nt, Artificial Sequence
  Description of Artificial Sequence: Synthetic oligonucleotide
  Sense strand starting at position 1020 of SEQ ID NO: 914963
uucugcauuccuuggauuu

SEQ ID NO: 1043289 - RNA, 19 nt, Artificial Sequence
  Description of Artificial Sequence: Synthetic oligonucleotide
  Antisense strand to SEQ ID NO: 1043288
aaauccaaggaaugcagaa

SEQ ID NO: 1043290 - RNA, 19 nt, Artificial Sequence
  Description of Artificial Sequence: Synthetic oligonucleotide
  Sense strand starting at position 1297 of SEQ ID NO: 914963
uugcuagucaaguaaggaa

SEQ ID NO: 1043291 - RNA, 19 nt, Artificial Sequence
  Description of Artificial Sequence: Synthetic oligonucleotide
  Antisense strand to SEQ ID NO: 1043290
uuccuuacuugacuagcaa

SEQ ID NO: 1043292 - RNA, 19 nt, Artificial Sequence
  Description of Artificial Sequence: Synthetic oligonucleotide
  Sense strand starting at position 1438 of SEQ ID NO: 914963
ugguuuaagacugaagugu

SEQ ID NO: 1043293 - RNA, 19 nt, Artificial Sequence
  Description of Artificial Sequence: Synthetic oligonucleotide
  Antisense strand to SEQ ID NO: 1043292
acacuucagucuuaaacca

SEQ ID NO: 1043294 - RNA, 19 nt, Artificial Sequence
  Description of Artificial Sequence: Synthetic oligonucleotide
  Sense strand starting at position 1444 of SEQ ID NO: 914963
aagacugaagugugguaaa

SEQ ID NO: 1043295 - RNA, 19 nt, Artificial Sequence
  Description of Artificial Sequence: Synthetic oligonucleotide
  Antisense strand to SEQ ID NO: 1043294
uuuaccacacuucagucuu

SEQ ID NO: 1043296 - RNA, 19 nt, Artificial Sequence
  Description of Artificial Sequence: Synthetic oligonucleotide
  Sense strand starting at position 1570 of SEQ ID NO: 914963
ucuaaagccagaggaguuu

SEQ ID NO: 1043297 - RNA, 19 nt, Artificial Sequence
  Description of Artificial Sequence: Synthetic oligonucleotide
  Antisense strand to SEQ ID NO: 1043296
aaacuccucuggcuuuaga

SEQ ID NO: 1043298 - RNA, 19 nt, Artificial Sequence
  Description of Artificial Sequence: Synthetic oligonucleotide
  Sense strand starting at position 1727 of SEQ ID NO: 914963
uguuaauuauucucugaug

SEQ ID NO: 1043299 - RNA, 19 nt, Artificial Sequence
  Description of Artificial Sequence: Synthetic oligonucleotide
  Antisense strand to SEQ ID NO: 1043298
caucagagaauaauuaaca

SEQ ID NO: 1043300 - RNA, 19 nt, Artificial Sequence
  Description of Artificial Sequence: Synthetic oligonucleotide
  Sense strand starting at position 1850 of SEQ ID NO: 914963
guuaauuaccugggcaaga

SEQ ID NO: 1043301 - RNA, 19 nt, Artificial Sequence
  Description of Artificial Sequence: Synthetic oligonucleotide
  Antisense strand to SEQ ID NO: 1043300
ucuugcccagguaauuaac

SEQ ID NO: 1043302 - RNA, 19 nt, Artificial Sequence
  Description of Artificial Sequence: Synthetic oligonucleotide
  Sense strand starting at position 1851 of SEQ ID NO: 914963
uuaauuaccugggcaagau

SEQ ID NO: 1043303 - RNA, 19 nt, Artificial Sequence
  Description of Artificial Sequence: Synthetic oligonucleotide
  Antisense strand to SEQ ID NO: 1043302
aucuugcccagguaauuaa

SEQ ID NO: 1043304 - RNA, 19 nt, Artificial Sequence
  Description of Artificial Sequence: Synthetic oligonucleotide
  Sense strand starting at position 2041 of SEQ ID NO: 914963
ugcugagaucaccaacagu

SEQ ID NO: 1043305 - RNA, 19 nt, Artificial Sequence
  Description of Artificial Sequence: Synthetic oligonucleotide
  Antisense strand to SEQ ID NO: 1043304
acuguuggugaucucagca

SEQ ID NO: 1043306 - RNA, 19 nt, Artificial Sequence
  Description of Artificial Sequence: Synthetic oligonucleotide
  Sense strand starting at position 2114 of SEQ ID NO: 914963
ggugauacagccuacauca

SEQ ID NO: 1043307 - RNA, 19 nt, Artificial Sequence
  Description of Artificial Sequence: Synthetic oligonucleotide
  Antisense strand to SEQ ID NO: 1043306
ugauguaggcuguaucacc

SEQ ID NO: 1043308 - RNA, 19 nt, Artificial Sequence
  Description of Artificial Sequence: Synthetic oligonucleotide
  Sense strand starting at position 2181 of SEQ ID NO: 914963
aaaugauuucuguguuugu

SEQ ID NO: 1043309 - RNA, 19 nt, Artificial Sequence
  Description of Artificial Sequence: Synthetic oligonucleotide
  Antisense strand to SEQ ID NO: 1043308
acaaacacagaaaucauuu

SEQ ID NO: 1043310 - RNA, 19 nt, Artificial Sequence
  Description of Artificial Sequence: Synthetic oligonucleotide
  Sense strand starting at position 2182 of SEQ ID NO: 914963
aaugauuucuguguuugua

SEQ ID NO: 1043311 - RNA, 19 nt, Artificial Sequence
  Description of Artificial Sequence: Synthetic oligonucleotide
  Antisense strand to SEQ ID NO: 1043310
uacaaacacagaaaucauu

SEQ ID NO: 1043312 - RNA, 19 nt, Artificial Sequence
  Description of Artificial Sequence: Synthetic oligonucleotide
  Sense strand starting at position 2184 of SEQ ID NO: 914963
ugauuucuguguuuguaaa

SEQ ID NO: 1043313 - RNA, 19 nt, Artificial Sequence
  Description of Artificial Sequence: Synthetic oligonucleotide
  Antisense strand to SEQ ID NO: 1043312
uuuacaaacacagaaauca

SEQ ID NO: 1043314 - RNA, 19 nt, Artificial Sequence
  Description of Artificial Sequence: Synthetic oligonucleotide
  Sense strand starting at position 2185 of SEQ ID NO: 914963
gauuucuguguuuguaaag

SEQ ID NO: 1043315 - RNA, 19 nt, Artificial Sequence
  Description of Artificial Sequence: Synthetic oligonucleotide
  Antisense strand to SEQ ID NO: 1043314
cuuuacaaacacagaaauc

SEQ ID NO: 1043316 - RNA, 19 nt, Artificial Sequence
  Description of Artificial Sequence: Synthetic oligonucleotide
  Sense strand starting at position 2191 of SEQ ID NO: 914963
uguguuuguaaagacgaaa

SEQ ID NO: 1043317 - RNA, 19 nt, Artificial Sequence
  Description of Artificial Sequence: Synthetic oligonucleotide
  Antisense strand to SEQ ID NO: 1043316
uuucgucuuuacaaacaca

SEQ ID NO: 1043318 - RNA, 19 nt, Artificial Sequence
  Description of Artificial Sequence: Synthetic oligonucleotide
  Sense strand starting at position 2230 of SEQ ID NO: 914963
acgucucuguauuuacuua

SEQ ID NO: 1043319 - RNA, 19 nt, Artificial Sequence
  Description of Artificial Sequence: Synthetic oligonucleotide
  Antisense strand to SEQ ID NO: 1043318
uaaguaaauacagagacgu

SEQ ID NO: 1043320 - RNA, 19 nt, Artificial Sequence
  Description of Artificial Sequence: Synthetic oligonucleotide
  Sense strand starting at position 2359 of SEQ ID NO: 914963
uaaguaggucaacggaaau

SEQ ID NO: 1043321 - RNA, 19 nt, Artificial Sequence
  Description of Artificial Sequence: Synthetic oligonucleotide
  Antisense strand to SEQ ID NO: 1043320
auuuccguugaccuacuua

SEQ ID NO: 1043322 - RNA, 19 nt, Artificial Sequence
  Description of Artificial Sequence: Synthetic oligonucleotide
  Sense strand starting at position 2453 of SEQ ID NO: 914963
ugaguccuuguuuacaaua

SEQ ID NO: 1043323 - RNA, 19 nt, Artificial Sequence
  Description of Artificial Sequence: Synthetic oligonucleotide
  Antisense strand to SEQ ID NO: 1043322
uauuguaaacaaggacuca

SEQ ID NO: 1043324 - RNA, 19 nt, Artificial Sequence
  Description of Artificial Sequence: Synthetic oligonucleotide
  Sense strand starting at position 2494 of SEQ ID NO: 914963
auuuacuggccguggagua

SEQ ID NO: 1043325 - RNA, 19 nt, Artificial Sequence
  Description of Artificial Sequence: Synthetic oligonucleotide
  Antisense strand to SEQ ID NO: 1043324
uacuccacggccaguaaau

SEQ ID NO: 1043326 - RNA, 19 nt, Artificial Sequence
  Description of Artificial Sequence: Synthetic oligonucleotide
  Sense strand starting at position 2759 of SEQ ID NO: 914963
uggauugagaucuguaaug

SEQ ID NO: 1043327 - RNA, 19 nt, Artificial Sequence
  Description of Artificial Sequence: Synthetic oligonucleotide
  Antisense strand to SEQ ID NO: 1043326
cauuacagaucucaaucca

SEQ ID NO: 1043328 - RNA, 19 nt, Artificial Sequence
  Description of Artificial Sequence: Synthetic oligonucleotide
  Sense strand starting at position 2893 of SEQ ID NO: 914963
acaguaagucugcaauaac

SEQ ID NO: 1043329 - RNA, 19 nt, Artificial Sequence
  Description of Artificial Sequence: Synthetic oligonucleotide
  Antisense strand to SEQ ID NO: 1043328
guuauugcagacuuacugu

SEQ ID NO: 1043330 - RNA, 19 nt, Artificial Sequence
  Description of Artificial Sequence: Synthetic oligonucleotide
  Sense strand starting at position 3007 of SEQ ID NO: 914963
augucugaaguacauaauu

SEQ ID NO: 1043331 - RNA, 19 nt, Artificial Sequence
  Description of Artificial Sequence: Synthetic oligonucleotide
  Antisense strand to SEQ ID NO: 1043330
aauuauguacuucagacau

SEQ ID NO: 1043332 - RNA, 19 nt, Artificial Sequence
  Description of Artificial Sequence: Synthetic oligonucleotide
  Sense strand starting at position 3012 of SEQ ID NO: 914963
ugaaguacauaauugcaaa

SEQ ID NO: 1043333 - RNA, 19 nt, Artificial Sequence
  Description of Artificial Sequence: Synthetic oligonucleotide
  Antisense strand to SEQ ID NO: 1043332
uuugcaauuauguacuuca

SEQ ID NO: 1043334 - RNA, 19 nt, Artificial Sequence
  Description of Artificial Sequence: Synthetic oligonucleotide
  Sense strand starting at position 3045 of SEQ ID NO: 914963
aaauaauaaguguguagga

SEQ ID NO: 1043335 - RNA, 19 nt, Artificial Sequence
  Description of Artificial Sequence: Synthetic oligonucleotide
  Antisense strand to SEQ ID NO: 1043334
uccuacacacuuauuauuu

SEQ ID NO: 1043336 - RNA, 19 nt, Artificial Sequence
  Description of Artificial Sequence: Synthetic oligonucleotide
  Sense strand starting at position 3046 of SEQ ID NO: 914963
aauaauaaguguguaggaa

SEQ ID NO: 1043337 - RNA, 19 nt, Artificial Sequence
  Description of Artificial Sequence: Synthetic oligonucleotide
  Antisense strand to SEQ ID NO: 1043336
uuccuacacacuuauuauu

SEQ ID NO: 1043338 - RNA, 19 nt, Artificial Sequence
  Description of Artificial Sequence: Synthetic oligonucleotide
  Sense strand starting at position 3054 of SEQ ID NO: 914963
guguguaggaaugaucuuu

SEQ ID NO: 1043339 - RNA, 19 nt, Artificial Sequence
  Description of Artificial Sequence: Synthetic oligonucleotide
  Antisense strand to SEQ ID NO: 1043338
aaagaucauuccuacacac

SEQ ID NO: 1043340 - RNA, 19 nt, Artificial Sequence
  Description of Artificial Sequence: Synthetic oligonucleotide
  Sense strand starting at position 3119 of SEQ ID NO: 914963
gugagacuuccaggaacca

SEQ ID NO: 1043341 - RNA, 19 nt, Artificial Sequence
  Description of Artificial Sequence: Synthetic oligonucleotide
  Antisense strand to SEQ ID NO: 1043340
ugguuccuggaagucucac

SEQ ID NO: 1043342 - RNA, 19 nt, Artificial Sequence
  Description of Artificial Sequence: Synthetic oligonucleotide
  Sense strand starting at position 3211 of SEQ ID NO: 914963
gacuuacuguugccaaaga

SEQ ID NO: 1043343 - RNA, 19 nt, Artificial Sequence
  Description of Artificial Sequence: Synthetic oligonucleotide
  Antisense strand to SEQ ID NO: 1043342
ucuuuggcaacaguaaguc

SEQ ID NO: 1043344 - RNA, 19 nt, Artificial Sequence
  Description of Artificial Sequence: Synthetic oligonucleotide
  Sense strand starting at position 3226 of SEQ ID NO: 914963
aagaguuugcucuacagug

SEQ ID NO: 1043345 - RNA, 19 nt, Artificial Sequence
  Description of Artificial Sequence: Synthetic oligonucleotide
  Antisense strand to SEQ ID NO: 1043344
cacuguagagcaaacucuu

SEQ ID NO: 1043346 - RNA, 19 nt, Artificial Sequence
  Description of Artificial Sequence: Synthetic oligonucleotide
  Sense strand starting at position 3248 of SEQ ID NO: 914963
ugacaucagcuugaauauc

SEQ ID NO: 1043347 - RNA, 19 nt, Artificial Sequence
  Description of Artificial Sequence: Synthetic oligonucleotide
  Antisense strand to SEQ ID NO: 1043346
gauauucaagcugauguca

SEQ ID NO: 1043348 - RNA, 19 nt, Artificial Sequence
  Description of Artificial Sequence: Synthetic oligonucleotide
  Sense strand starting at position 3391 of SEQ ID NO: 914963
uauaauggagcuugauaug

SEQ ID NO: 1043349 - RNA, 19 nt, Artificial Sequence
  Description of Artificial Sequence: Synthetic oligonucleotide
  Antisense strand to SEQ ID NO: 1043348
cauaucaagcuccauuaua

SEQ ID NO: 1043350 - RNA, 19 nt, Artificial Sequence
  Description of Artificial Sequence: Synthetic oligonucleotide
  Sense strand starting at position 3939 of SEQ ID NO: 914963
gaaagucuagcacaugcaa

SEQ ID NO: 1043351 - RNA, 19 nt, Artificial Sequence
  Description of Artificial Sequence: Synthetic oligonucleotide
  Antisense strand to SEQ ID NO: 1043350
uugcaugugcuagacuuuc

SEQ ID NO: 1043352 - RNA, 19 nt, Artificial Sequence
  Description of Artificial Sequence: Synthetic oligonucleotide
  Sense strand starting at position 3958 of SEQ ID NO: 914963
uuguguacaguacauaauu

SEQ ID NO: 1043353 - RNA, 19 nt, Artificial Sequence
  Description of Artificial Sequence: Synthetic oligonucleotide
  Antisense strand to SEQ ID NO: 1043352
aauuauguacuguacacaa

SEQ ID NO: 1043354 - RNA, 19 nt, Artificial Sequence
  Description of Artificial Sequence: Synthetic oligonucleotide
  Sense strand starting at position 32 of SEQ ID NO: 914964
acuggaaguuuguuuaucu

SEQ ID NO: 1043355 - RNA, 19 nt, Artificial Sequence
  Description of Artificial Sequence: Synthetic oligonucleotide
  Antisense strand to SEQ ID NO: 1043354
agauaaacaaacuuccagu

SEQ ID NO: 1043356 - RNA, 19 nt, Artificial Sequence
  Description of Artificial Sequence: Synthetic oligonucleotide
  Sense strand starting at position 36 of SEQ ID NO: 914964
gaaguuuguuuaucucaag

SEQ ID NO: 1043357 - RNA, 19 nt, Artificial Sequence
  Description of Artificial Sequence: Synthetic oligonucleotide
  Antisense strand to SEQ ID NO: 1043356
cuugagauaaacaaacuuc

SEQ ID NO: 1043358 - RNA, 19 nt, Artificial Sequence
  Description of Artificial Sequence: Synthetic oligonucleotide
  Sense strand starting at position 131 of SEQ ID NO: 914964
uugggagcuccacauauau

SEQ ID NO: 1043359 - RNA, 19 nt, Artificial Sequence
  Description of Artificial Sequence: Synthetic oligonucleotide
  Antisense strand to SEQ ID NO: 1043358
auauauguggagcucccaa

SEQ ID NO: 1043360 - RNA, 19 nt, Artificial Sequence
  Description of Artificial Sequence: Synthetic oligonucleotide
  Sense strand starting at position 386 of SEQ ID NO: 914964
cgaaaccuccucuguacaa

SEQ ID NO: 1043361 - RNA, 19 nt, Artificial Sequence
  Description of Artificial Sequence: Synthetic oligonucleotide
  Antisense strand to SEQ ID NO: 1043360
uuguacagaggagguuucg

SEQ ID NO: 1043362 - RNA, 19 nt, Artificial Sequence
  Description of Artificial Sequence: Synthetic oligonucleotide
  Sense strand starting at position 634 of SEQ ID NO: 914964
ccggaaucccaguggaagu

SEQ ID NO: 1043363 - RNA, 19 nt, Artificial Sequence
  Description of Artificial Sequence: Synthetic oligonucleotide
  Antisense strand to SEQ ID NO: 1043362
acuuccacugggauuccgg

SEQ ID NO: 1043364 - RNA, 19 nt, Artificial Sequence
  Description of Artificial Sequence: Synthetic oligonucleotide
  Sense strand starting at position 635 of SEQ ID NO: 914964
cggaaucccaguggaagua

SEQ ID NO: 1043365 - RNA, 19 nt, Artificial Sequence
  Description of Artificial Sequence: Synthetic oligonucleotide
  Antisense strand to SEQ ID NO: 1043364
uacuuccacugggauuccg

SEQ ID NO: 1043366 - RNA, 19 nt, Artificial Sequence
  Description of Artificial Sequence: Synthetic oligonucleotide
  Sense strand starting at position 689 of SEQ ID NO: 914964
agaggaguuucucuugguc

SEQ ID NO: 1043367 - RNA, 19 nt, Artificial Sequence
  Description of Artificial Sequence: Synthetic oligonucleotide
  Antisense strand to SEQ ID NO: 1043366
gaccaagagaaacuccucu

SEQ ID NO: 1043368 - RNA, 19 nt, Artificial Sequence
  Description of Artificial Sequence: Synthetic oligonucleotide
  Sense strand starting at position 886 of SEQ ID NO: 914964
uugggaagaugagucagua

SEQ ID NO: 1043369 - RNA, 19 nt, Artificial Sequence
  Description of Artificial Sequence: Synthetic oligonucleotide
  Antisense strand to SEQ ID NO: 1043368
uacugacucaucuucccaa

SEQ ID NO: 1043370 - RNA, 19 nt, Artificial Sequence
  Description of Artificial Sequence: Synthetic oligonucleotide
  Sense strand starting at position 1427 of SEQ ID NO: 914964
gccugaagugguuauauua

SEQ ID NO: 1043371 - RNA, 19 nt, Artificial Sequence
  Description of Artificial Sequence: Synthetic oligonucleotide
  Antisense strand to SEQ ID NO: 1043370
uaauauaaccacuucaggc

SEQ ID NO: 1043372 - RNA, 19 nt, Artificial Sequence
  Description of Artificial Sequence: Synthetic oligonucleotide
  Sense strand starting at position 1466 of SEQ ID NO: 914964
ucagauuauuaacuggcau

SEQ ID NO: 1043373 - RNA, 19 nt, Artificial Sequence
  Description of Artificial Sequence: Synthetic oligonucleotide
  Antisense strand to SEQ ID NO: 1043372
augccaguuaauaaucuga

SEQ ID NO: 1043374 - RNA, 19 nt, Artificial Sequence
  Description of Artificial Sequence: Synthetic oligonucleotide
  Sense strand starting at position 1774 of SEQ ID NO: 914964
cgauaaauacuguaguguc

SEQ ID NO: 1043375 - RNA, 19 nt, Artificial Sequence
  Description of Artificial Sequence: Synthetic oligonucleotide
  Antisense strand to SEQ ID NO: 1043374
gacacuacaguauuuaucg

SEQ ID NO: 1043376 - RNA, 19 nt, Artificial Sequence
  Description of Artificial Sequence: Synthetic oligonucleotide
  Sense strand starting at position 1993 of SEQ ID NO: 914964
ggguucugugaauaugaau

SEQ ID NO: 1043377 - RNA, 19 nt, Artificial Sequence
  Description of Artificial Sequence: Synthetic oligonucleotide
  Antisense strand to SEQ ID NO: 1043376
auucauauucacagaaccc

SEQ ID NO: 1043378 - RNA, 19 nt, Artificial Sequence
  Description of Artificial Sequence: Synthetic oligonucleotide
  Sense strand starting at position 2004 of SEQ ID NO: 914964
auaugaauccuaugaguga

SEQ ID NO: 1043379 - RNA, 19 nt, Artificial Sequence
  Description of Artificial Sequence: Synthetic oligonucleotide
  Antisense strand to SEQ ID NO: 1043378
ucacucauaggauucauau

SEQ ID NO: 1043380 - RNA, 19 nt, Artificial Sequence
  Description of Artificial Sequence: Synthetic oligonucleotide
  Sense strand starting at position 2008 of SEQ ID NO: 914964
gaauccuaugagugacuca

SEQ ID NO: 1043381 - RNA, 19 nt, Artificial Sequence
  Description of Artificial Sequence: Synthetic oligonucleotide
  Antisense strand to SEQ ID NO: 1043380
ugagucacucauaggauuc

SEQ ID NO: 1043382 - RNA, 19 nt, Artificial Sequence
  Description of Artificial Sequence: Synthetic oligonucleotide
  Sense strand starting at position 2018 of SEQ ID NO: 914964
agugacucauaguugauau

SEQ ID NO: 1043383 - RNA, 19 nt, Artificial Sequence
  Description of Artificial Sequence: Synthetic oligonucleotide
  Antisense strand to SEQ ID NO: 1043382
auaucaacuaugagucacu

SEQ ID NO: 1043384 - RNA, 19 nt, Artificial Sequence
  Description of Artificial Sequence: Synthetic oligonucleotide
  Sense strand starting at position 2389 of SEQ ID NO: 914964
uccagcucccuagagaaau

SEQ ID NO: 1043385 - RNA, 19 nt, Artificial Sequence
  Description of Artificial Sequence: Synthetic oligonucleotide
  Antisense strand to SEQ ID NO: 1043384
auuucucuagggagcugga

SEQ ID NO: 1043386 - RNA, 19 nt, Artificial Sequence
  Description of Artificial Sequence: Synthetic oligonucleotide
  Sense strand starting at position 2461 of SEQ ID NO: 914964
uguuuauuccacguguugu

SEQ ID NO: 1043387 - RNA, 19 nt, Artificial Sequence
  Description of Artificial Sequence: Synthetic oligonucleotide
  Antisense strand to SEQ ID NO: 1043386
acaacacguggaauaaaca

SEQ ID NO: 1043388 - RNA, 19 nt, Artificial Sequence
  Description of Artificial Sequence: Synthetic oligonucleotide
  Sense strand starting at position 2472 of SEQ ID NO: 914964
cguguuguaccggcucaga

SEQ ID NO: 1043389 - RNA, 19 nt, Artificial Sequence
  Description of Artificial Sequence: Synthetic oligonucleotide
  Antisense strand to SEQ ID NO: 1043388
ucugagccgguacaacacg

SEQ ID NO: 1043390 - RNA, 19 nt, Artificial Sequence
  Description of Artificial Sequence: Synthetic oligonucleotide
  Sense strand starting at position 2483 of SEQ ID NO: 914964
ggcucagauccugauucua

SEQ ID NO: 1043391 - RNA, 19 nt, Artificial Sequence
  Description of Artificial Sequence: Synthetic oligonucleotide
  Antisense strand to SEQ ID NO: 1043390
uagaaucaggaucugagcc

SEQ ID NO: 1043392 - RNA, 19 nt, Artificial Sequence
  Description of Artificial Sequence: Synthetic oligonucleotide
  Sense strand starting at position 2657 of SEQ ID NO: 914964
ucuggaaucuaucugccua

SEQ ID NO: 1043393 - RNA, 19 nt, Artificial Sequence
  Description of Artificial Sequence: Synthetic oligonucleotide
  Antisense strand to SEQ ID NO: 1043392
uaggcagauagauuccaga

SEQ ID NO: 1043394 - RNA, 19 nt, Artificial Sequence
  Description of Artificial Sequence: Synthetic oligonucleotide
  Sense strand starting at position 2816 of SEQ ID NO: 914964
cugcggugugaggauagau

SEQ ID NO: 1043395 - RNA, 19 nt, Artificial Sequence
  Description of Artificial Sequence: Synthetic oligonucleotide
  Antisense strand to SEQ ID NO: 1043394
aucuauccucacaccgcag

SEQ ID NO: 1043396 - RNA, 19 nt, Artificial Sequence
  Description of Artificial Sequence: Synthetic oligonucleotide
  Sense strand starting at position 2935 of SEQ ID NO: 914964
agauuuagccauugcucuu

SEQ ID NO: 1043397 - RNA, 19 nt, Artificial Sequence
  Description of Artificial Sequence: Synthetic oligonucleotide
  Antisense strand to SEQ ID NO: 1043396
aagagcaauggcuaaaucu

SEQ ID NO: 1043398 - RNA, 19 nt, Artificial Sequence
  Description of Artificial Sequence: Synthetic oligonucleotide
  Sense strand starting at position 2958 of SEQ ID NO: 914964
accucaguggccugggaaa

SEQ ID NO: 1043399 - RNA, 19 nt, Artificial Sequence
  Description of Artificial Sequence: Synthetic oligonucleotide
  Antisense strand to SEQ ID NO: 1043398
uuucccaggccacugaggu

SEQ ID NO: 1043400 - RNA, 19 nt, Artificial Sequence
  Description of Artificial Sequence: Synthetic oligonucleotide
  Sense strand starting at position 3062 of SEQ ID NO: 914964
cucacucuugcagagaacu

SEQ ID NO: 1043401 - RNA, 19 nt, Artificial Sequence
  Description of Artificial Sequence: Synthetic oligonucleotide
  Antisense strand to SEQ ID NO: 1043400
aguucucugcaagagugag

SEQ ID NO: 1043402 - RNA, 19 nt, Artificial Sequence
  Description of Artificial Sequence: Synthetic oligonucleotide
  Sense strand starting at position 3129 of SEQ ID NO: 914964
uuucucugugucuaucuaa

SEQ ID NO: 1043403 - RNA, 19 nt, Artificial Sequence
  Description of Artificial Sequence: Synthetic oligonucleotide
  Antisense strand to SEQ ID NO: 1043402
uuagauagacacagagaaa

SEQ ID NO: 1043404 - RNA, 19 nt, Artificial Sequence
  Description of Artificial Sequence: Synthetic oligonucleotide
  Sense strand starting at position 3136 of SEQ ID NO: 914964
gugucuaucuaaccuacaa

SEQ ID NO: 1043405 - RNA, 19 nt, Artificial Sequence
  Description of Artificial Sequence: Synthetic oligonucleotide
  Antisense strand to SEQ ID NO: 1043404
uuguagguuagauagacac

SEQ ID NO: 1043406 - RNA, 19 nt, Artificial Sequence
  Description of Artificial Sequence: Synthetic oligonucleotide
  Sense strand starting at position 3151 of SEQ ID NO: 914964
acaaauacagcugguuauu

SEQ ID NO: 1043407 - RNA, 19 nt, Artificial Sequence
  Description of Artificial Sequence: Synthetic oligonucleotide
  Antisense strand to SEQ ID NO: 1043406
aauaaccagcuguauuugu

SEQ ID NO: 1043408 - RNA, 19 nt, Artificial Sequence
  Description of Artificial Sequence: Synthetic oligonucleotide
  Sense strand starting at position 3247 of SEQ ID NO: 914964
uccagaucacuuggcuuua

SEQ ID NO: 1043409 - RNA, 19 nt, Artificial Sequence
  Description of Artificial Sequence: Synthetic oligonucleotide
  Antisense strand to SEQ ID NO: 1043408
uaaagccaagugaucugga

SEQ ID NO: 1043410 - RNA, 19 nt, Artificial Sequence
  Description of Artificial Sequence: Synthetic oligonucleotide
  Sense strand starting at position 3248 of SEQ ID NO: 914964
ccagaucacuuggcuuuau

SEQ ID NO: 1043411 - RNA, 19 nt, Artificial Sequence
  Description of Artificial Sequence: Synthetic oligonucleotide
  Antisense strand to SEQ ID NO: 1043410
auaaagccaagugaucugg

SEQ ID NO: 1043412 - RNA, 19 nt, Artificial Sequence
  Description of Artificial Sequence: Synthetic oligonucleotide
  Sense strand starting at position 3287 of SEQ ID NO: 914964
uuaucaauccucuggugag

SEQ ID NO: 1043413 - RNA, 19 nt, Artificial Sequence
  Description of Artificial Sequence: Synthetic oligonucleotide
  Antisense strand to SEQ ID NO: 1043412
cucaccagaggauugauaa

SEQ ID NO: 1043414 - RNA, 19 nt, Artificial Sequence
  Description of Artificial Sequence: Synthetic oligonucleotide
  Sense strand starting at position 3351 of SEQ ID NO: 914964
gaucuugugguguagauua

SEQ ID NO: 1043415 - RNA, 19 nt, Artificial Sequence
  Description of Artificial Sequence: Synthetic oligonucleotide
  Antisense strand to SEQ ID NO: 1043414
uaaucuacaccacaagauc

SEQ ID NO: 1043416 - RNA, 19 nt, Artificial Sequence
  Description of Artificial Sequence: Synthetic oligonucleotide
  Sense strand starting at position 3353 of SEQ ID NO: 914964
ucuugugguguagauuaca

SEQ ID NO: 1043417 - RNA, 19 nt, Artificial Sequence
  Description of Artificial Sequence: Synthetic oligonucleotide
  Antisense strand to SEQ ID NO: 1043416
uguaaucuacaccacaaga

SEQ ID NO: 1043418 - RNA, 19 nt, Artificial Sequence
  Description of Artificial Sequence: Synthetic oligonucleotide
  Sense strand starting at position 3475 of SEQ ID NO: 914964
gacagauaugcauacagca

SEQ ID NO: 1043419 - RNA, 19 nt, Artificial Sequence
  Description of Artificial Sequence: Synthetic oligonucleotide
  Antisense strand to SEQ ID NO: 1043418
ugcuguaugcauaucuguc

SEQ ID NO: 1043420 - RNA, 19 nt, Artificial Sequence
  Description of Artificial Sequence: Synthetic oligonucleotide
  Sense strand starting at position 3546 of SEQ ID NO: 914964
cuuuaaagugucuacaaag

SEQ ID NO: 1043421 - RNA, 19 nt, Artificial Sequence
  Description of Artificial Sequence: Synthetic oligonucleotide
  Antisense strand to SEQ ID NO: 1043420
cuuuguagacacuuuaaag

SEQ ID NO: 1043422 - RNA, 19 nt, Artificial Sequence
  Description of Artificial Sequence: Synthetic oligonucleotide
  Sense strand starting at position 3565 of SEQ ID NO: 914964
ccucuuuaucaggaauagu

SEQ ID NO: 1043423 - RNA, 19 nt, Artificial Sequence
  Description of Artificial Sequence: Synthetic oligonucleotide
  Antisense strand to SEQ ID NO: 1043422
acuauuccugauaaagagg

SEQ ID NO: 1043424 - RNA, 19 nt, Artificial Sequence
  Description of Artificial Sequence: Synthetic oligonucleotide
  Sense strand starting at position 3594 of SEQ ID NO: 914964
gagaaacccugaucuaugu

SEQ ID NO: 1043425 - RNA, 19 nt, Artificial Sequence
  Description of Artificial Sequence: Synthetic oligonucleotide
  Antisense strand to SEQ ID NO: 1043424
acauagaucaggguuucuc

SEQ ID NO: 1043426 - RNA, 19 nt, Artificial Sequence
  Description of Artificial Sequence: Synthetic oligonucleotide
  Sense strand starting at position 3934 of SEQ ID NO: 914964
auguauaugucaucacauu

SEQ ID NO: 1043427 - RNA, 19 nt, Artificial Sequence
  Description of Artificial Sequence: Synthetic oligonucleotide
  Antisense strand to SEQ ID NO: 1043426
aaugugaugacauauacau

SEQ ID NO: 1043428 - RNA, 19 nt, Artificial Sequence
  Description of Artificial Sequence: Synthetic oligonucleotide
  Sense strand starting at position 3935 of SEQ ID NO: 914964
uguauaugucaucacauug

SEQ ID NO: 1043429 - RNA, 19 nt, Artificial Sequence
  Description of Artificial Sequence: Synthetic oligonucleotide
  Antisense strand to SEQ ID NO: 1043428
caaugugaugacauauaca

SEQ ID NO: 1043430 - RNA, 19 nt, Artificial Sequence
  Description of Artificial Sequence: Synthetic oligonucleotide
  Sense strand starting at position 3951 of SEQ ID NO: 914964
uugucucuaccuuaugaug

SEQ ID NO: 1043431 - RNA, 19 nt, Artificial Sequence
  Description of Artificial Sequence: Synthetic oligonucleotide
  Antisense strand to SEQ ID NO: 1043430
caucauaagguagagacaa

SEQ ID NO: 1043432 - RNA, 19 nt, Artificial Sequence
  Description of Artificial Sequence: Synthetic oligonucleotide
  Sense strand starting at position 3962 of SEQ ID NO: 914964
uuaugauguacacguagga

SEQ ID NO: 1043433 - RNA, 19 nt, Artificial Sequence
  Description of Artificial Sequence: Synthetic oligonucleotide
  Antisense strand to SEQ ID NO: 1043432
uccuacguguacaucauaa

SEQ ID NO: 1043434 - RNA, 19 nt, Artificial Sequence
  Description of Artificial Sequence: Synthetic oligonucleotide
  Sense strand starting at position 206 of SEQ ID NO: 914965
gugacagauuaaguagauu

SEQ ID NO: 1043435 - RNA, 19 nt, Artificial Sequence
  Description of Artificial Sequence: Synthetic oligonucleotide
  Antisense strand to SEQ ID NO: 1043434
aaucuacuuaaucugucac

SEQ ID NO: 1043436 - RNA, 19 nt, Artificial Sequence
  Description of Artificial Sequence: Synthetic oligonucleotide
  Sense strand starting at position 257 of SEQ ID NO: 914965
agaaaugucacuuguagag

SEQ ID NO: 1043437 - RNA, 19 nt, Artificial Sequence
  Description of Artificial Sequence: Synthetic oligonucleotide
  Antisense strand to SEQ ID NO: 1043436
cucuacaagugacauuucu

SEQ ID NO: 1043438 - RNA, 19 nt, Artificial Sequence
  Description of Artificial Sequence: Synthetic oligonucleotide
  Sense strand starting at position 427 of SEQ ID NO: 914965
gaacuacuuguccagguuu

SEQ ID NO: 1043439 - RNA, 19 nt, Artificial Sequence
  Description of Artificial Sequence: Synthetic oligonucleotide
  Antisense strand to SEQ ID NO: 1043438
aaaccuggacaaguaguuc

SEQ ID NO: 1043440 - RNA, 19 nt, Artificial Sequence
  Description of Artificial Sequence: Synthetic oligonucleotide
  Sense strand starting at position 461 of SEQ ID NO: 914965
gggcaucuccuccauaauu

SEQ ID NO: 1043441 - RNA, 19 nt, Artificial Sequence
  Description of Artificial Sequence: Synthetic oligonucleotide
  Antisense strand to SEQ ID NO: 1043440
aauuauggaggagaugccc

SEQ ID NO: 1043442 - RNA, 19 nt, Artificial Sequence
  Description of Artificial Sequence: Synthetic oligonucleotide
  Sense strand starting at position 567 of SEQ ID NO: 914965
uuaggagucuuaucacauc

SEQ ID NO: 1043443 - RNA, 19 nt, Artificial Sequence
  Description of Artificial Sequence: Synthetic oligonucleotide
  Antisense strand to SEQ ID NO: 1043442
gaugugauaagacuccuaa

SEQ ID NO: 1043444 - RNA, 19 nt, Artificial Sequence
  Description of Artificial Sequence: Synthetic oligonucleotide
  Sense strand starting at position 785 of SEQ ID NO: 914965
aggaguuacaucggaccaa

SEQ ID NO: 1043445 - RNA, 19 nt, Artificial Sequence
  Description of Artificial Sequence: Synthetic oligonucleotide
  Antisense strand to SEQ ID NO: 1043444
uugguccgauguaacuccu

SEQ ID NO: 1043446 - RNA, 19 nt, Artificial Sequence
  Description of Artificial Sequence: Synthetic oligonucleotide
  Sense strand starting at position 789 of SEQ ID NO: 914965
guuacaucggaccaaacuu

SEQ ID NO: 1043447 - RNA, 19 nt, Artificial Sequence
  Description of Artificial Sequence: Synthetic oligonucleotide
  Antisense strand to SEQ ID NO: 1043446
aaguuugguccgauguaac

SEQ ID NO: 1043448 - RNA, 19 nt, Artificial Sequence
  Description of Artificial Sequence: Synthetic oligonucleotide
  Sense strand starting at position 980 of SEQ ID NO: 914965
aaaguucuacuagagguuu

SEQ ID NO: 1043449 - RNA, 19 nt, Artificial Sequence
  Description of Artificial Sequence: Synthetic oligonucleotide
  Antisense strand to SEQ ID NO: 1043448
aaaccucuaguagaacuuu

SEQ ID NO: 1043450 - RNA, 19 nt, Artificial Sequence
  Description of Artificial Sequence: Synthetic oligonucleotide
  Sense strand starting at position 986 of SEQ ID NO: 914965
cuacuagagguuuauuguu

SEQ ID NO: 1043451 - RNA, 19 nt, Artificial Sequence
  Description of Artificial Sequence: Synthetic oligonucleotide
  Antisense strand to SEQ ID NO: 1043450
aacaauaaaccucuaguag

SEQ ID NO: 1043452 - RNA, 19 nt, Artificial Sequence
  Description of Artificial Sequence: Synthetic oligonucleotide
  Sense strand starting at position 1180 of SEQ ID NO: 914965
augaaauagcucuguaaag

SEQ ID NO: 1043453 - RNA, 19 nt, Artificial Sequence
  Description of Artificial Sequence: Synthetic oligonucleotide
  Antisense strand to SEQ ID NO: 1043452
cuuuacagagcuauuucau

SEQ ID NO: 1043454 - RNA, 19 nt, Artificial Sequence
  Description of Artificial Sequence: Synthetic oligonucleotide
  Sense strand starting at position 1182 of SEQ ID NO: 914965
gaaauagcucuguaaaguu

SEQ ID NO: 1043455 - RNA, 19 nt, Artificial Sequence
  Description of Artificial Sequence: Synthetic oligonucleotide
  Antisense strand to SEQ ID NO: 1043454
aacuuuacagagcuauuuc

SEQ ID NO: 1043456 - RNA, 19 nt, Artificial Sequence
  Description of Artificial Sequence: Synthetic oligonucleotide
  Sense strand starting at position 1190 of SEQ ID NO: 914965
ucuguaaaguuucuagaaa

SEQ ID NO: 1043457 - RNA, 19 nt, Artificial Sequence
  Description of Artificial Sequence: Synthetic oligonucleotide
  Antisense strand to SEQ ID NO: 1043456
uuucuagaaacuuuacaga

SEQ ID NO: 1043458 - RNA, 19 nt, Artificial Sequence
  Description of Artificial Sequence: Synthetic oligonucleotide
  Sense strand starting at position 1324 of SEQ ID NO: 914965
cuuugagaugcccacuaaa

SEQ ID NO: 1043459 - RNA, 19 nt, Artificial Sequence
  Description of Artificial Sequence: Synthetic oligonucleotide
  Antisense strand to SEQ ID NO: 1043458
uuuagugggcaucucaaag

SEQ ID NO: 1043460 - RNA, 19 nt, Artificial Sequence
  Description of Artificial Sequence: Synthetic oligonucleotide
  Sense strand starting at position 1543 of SEQ ID NO: 914965
auuuaagaguucgagggaa

SEQ ID NO: 1043461 - RNA, 19 nt, Artificial Sequence
  Description of Artificial Sequence: Synthetic oligonucleotide
  Antisense strand to SEQ ID NO: 1043460
uucccucgaacucuuaaau

SEQ ID NO: 1043462 - RNA, 19 nt, Artificial Sequence
  Description of Artificial Sequence: Synthetic oligonucleotide
  Sense strand starting at position 1619 of SEQ ID NO: 914965
gguguuaucgucaaguuug

SEQ ID NO: 1043463 - RNA, 19 nt, Artificial Sequence
  Description of Artificial Sequence: Synthetic oligonucleotide
  Antisense strand to SEQ ID NO: 1043462
caaacuugacgauaacacc

SEQ ID NO: 1043464 - RNA, 19 nt, Artificial Sequence
  Description of Artificial Sequence: Synthetic oligonucleotide
  Sense strand starting at position 1714 of SEQ ID NO: 914965
ggauucccgcgagauuugu

SEQ ID NO: 1043465 - RNA, 19 nt, Artificial Sequence
  Description of Artificial Sequence: Synthetic oligonucleotide
  Antisense strand to SEQ ID NO: 1043464
acaaaucucgcgggaaucc

SEQ ID NO: 1043466 - RNA, 19 nt, Artificial Sequence
  Description of Artificial Sequence: Synthetic oligonucleotide
  Sense strand starting at position 1722 of SEQ ID NO: 914965
gcgagauuuguaggauggu

SEQ ID NO: 1043467 - RNA, 19 nt, Artificial Sequence
  Description of Artificial Sequence: Synthetic oligonucleotide
  Antisense strand to SEQ ID NO: 1043466
accauccuacaaaucucgc

SEQ ID NO: 1043468 - RNA, 19 nt, Artificial Sequence
  Description of Artificial Sequence: Synthetic oligonucleotide
  Sense strand starting at position 1796 of SEQ ID NO: 914965
gaaggacauuucugagaug

SEQ ID NO: 1043469 - RNA, 19 nt, Artificial Sequence
  Description of Artificial Sequence: Synthetic oligonucleotide
  Antisense strand to SEQ ID NO: 1043468
caucucagaaauguccuuc

SEQ ID NO: 1043470 - RNA, 19 nt, Artificial Sequence
  Description of Artificial Sequence: Synthetic oligonucleotide
  Sense strand starting at position 1797 of SEQ ID NO: 914965
aaggacauuucugagaugu

SEQ ID NO: 1043471 - RNA, 19 nt, Artificial Sequence
  Description of Artificial Sequence: Synthetic oligonucleotide
  Antisense strand to SEQ ID NO: 1043470
acaucucagaaauguccuu

SEQ ID NO: 1043472 - RNA, 19 nt, Artificial Sequence
  Description of Artificial Sequence: Synthetic oligonucleotide
  Sense strand starting at position 2038 of SEQ ID NO: 914965
aauggugagucaucacuua

SEQ ID NO: 1043473 - RNA, 19 nt, Artificial Sequence
  Description of Artificial Sequence: Synthetic oligonucleotide
  Antisense strand to SEQ ID NO: 1043472
uaagugaugacucaccauu

SEQ ID NO: 1043474 - RNA, 19 nt, Artificial Sequence
  Description of Artificial Sequence: Synthetic oligonucleotide
  Sense strand starting at position 2139 of SEQ ID NO: 914965
gugguagaauuugagggaa

SEQ ID NO: 1043475 - RNA, 19 nt, Artificial Sequence
  Description of Artificial Sequence: Synthetic oligonucleotide
  Antisense strand to SEQ ID NO: 1043474
uucccucaaauucuaccac

SEQ ID NO: 1043476 - RNA, 19 nt, Artificial Sequence
  Description of Artificial Sequence: Synthetic oligonucleotide
  Sense strand starting at position 2328 of SEQ ID NO: 914965
ugcuucuucgaauaauaag

SEQ ID NO: 1043477 - RNA, 19 nt, Artificial Sequence
  Description of Artificial Sequence: Synthetic oligonucleotide
  Antisense strand to SEQ ID NO: 1043476
cuuauuauucgaagaagca

SEQ ID NO: 1043478 - RNA, 19 nt, Artificial Sequence
  Description of Artificial Sequence: Synthetic oligonucleotide
  Sense strand starting at position 2391 of SEQ ID NO: 914965
cugauucuagaauguuuac

SEQ ID NO: 1043479 - RNA, 19 nt, Artificial Sequence
  Description of Artificial Sequence: Synthetic oligonucleotide
  Antisense strand to SEQ ID NO: 1043478
guaaacauucuagaaucag

SEQ ID NO: 1043480 - RNA, 19 nt, Artificial Sequence
  Description of Artificial Sequence: Synthetic oligonucleotide
  Sense strand starting at position 2576 of SEQ ID NO: 914965
gcaugaccucucgacaaau

SEQ ID NO: 1043481 - RNA, 19 nt, Artificial Sequence
  Description of Artificial Sequence: Synthetic oligonucleotide
  Antisense strand to SEQ ID NO: 1043480
auuugucgagaggucaugc

SEQ ID NO: 1043482 - RNA, 19 nt, Artificial Sequence
  Description of Artificial Sequence: Synthetic oligonucleotide
  Sense strand starting at position 2594 of SEQ ID NO: 914965
uauggaguccugcauaaau

SEQ ID NO: 1043483 - RNA, 19 nt, Artificial Sequence
  Description of Artificial Sequence: Synthetic oligonucleotide
  Antisense strand to SEQ ID NO: 1043482
auuuaugcaggacuccaua

SEQ ID NO: 1043484 - RNA, 19 nt, Artificial Sequence
  Description of Artificial Sequence: Synthetic oligonucleotide
  Sense strand starting at position 2596 of SEQ ID NO: 914965
uggaguccugcauaaauuc

SEQ ID NO: 1043485 - RNA, 19 nt, Artificial Sequence
  Description of Artificial Sequence: Synthetic oligonucleotide
  Antisense strand to SEQ ID NO: 1043484
gaauuuaugcaggacucca

SEQ ID NO: 1043486 - RNA, 19 nt, Artificial Sequence
  Description of Artificial Sequence: Synthetic oligonucleotide
  Sense strand starting at position 2660 of SEQ ID NO: 914965
aacuguaauggcuagcaca

SEQ ID NO: 1043487 - RNA, 19 nt, Artificial Sequence
  Description of Artificial Sequence: Synthetic oligonucleotide
  Antisense strand to SEQ ID NO: 1043486
ugugcuagccauuacaguu

SEQ ID NO: 1043488 - RNA, 19 nt, Artificial Sequence
  Description of Artificial Sequence: Synthetic oligonucleotide
  Sense strand starting at position 2681 of SEQ ID NO: 914965
cagggauuacugcauucua

SEQ ID NO: 1043489 - RNA, 19 nt, Artificial Sequence
  Description of Artificial Sequence: Synthetic oligonucleotide
  Antisense strand to SEQ ID NO: 1043488
uagaaugcaguaaucccug

SEQ ID NO: 1043490 - RNA, 19 nt, Artificial Sequence
  Description of Artificial Sequence: Synthetic oligonucleotide
  Sense strand starting at position 3045 of SEQ ID NO: 914965
agaaguaaucuugguccaa

SEQ ID NO: 1043491 - RNA, 19 nt, Artificial Sequence
  Description of Artificial Sequence: Synthetic oligonucleotide
  Antisense strand to SEQ ID NO: 1043490
uuggaccaagauuacuucu

SEQ ID NO: 1043492 - RNA, 19 nt, Artificial Sequence
  Description of Artificial Sequence: Synthetic oligonucleotide
  Sense strand starting at position 3046 of SEQ ID NO: 914965
gaaguaaucuugguccaac

SEQ ID NO: 1043493 - RNA, 19 nt, Artificial Sequence
  Description of Artificial Sequence: Synthetic oligonucleotide
  Antisense strand to SEQ ID NO: 1043492
guuggaccaagauuacuuc

SEQ ID NO: 1043494 - RNA, 19 nt, Artificial Sequence
  Description of Artificial Sequence: Synthetic oligonucleotide
  Sense strand starting at position 3049 of SEQ ID NO: 914965
guaaucuugguccaaccau

SEQ ID NO: 1043495 - RNA, 19 nt, Artificial Sequence
  Description of Artificial Sequence: Synthetic oligonucleotide
  Antisense strand to SEQ ID NO: 1043494
augguuggaccaagauuac

SEQ ID NO: 1043496 - RNA, 19 nt, Artificial Sequence
  Description of Artificial Sequence: Synthetic oligonucleotide
  Sense strand starting at position 3085 of SEQ ID NO: 914965
gggccucuacccuauuauu

SEQ ID NO: 1043497 - RNA, 19 nt, Artificial Sequence
  Description of Artificial Sequence: Synthetic oligonucleotide
  Antisense strand to SEQ ID NO: 1043496
aauaauaggguagaggccc

SEQ ID NO: 1043498 - RNA, 19 nt, Artificial Sequence
  Description of Artificial Sequence: Synthetic oligonucleotide
  Sense strand starting at position 3230 of SEQ ID NO: 914965
auuggaaaugcagguuaau

SEQ ID NO: 1043499 - RNA, 19 nt, Artificial Sequence
  Description of Artificial Sequence: Synthetic oligonucleotide
  Antisense strand to SEQ ID NO: 1043498
auuaaccugcauuuccaau

SEQ ID NO: 1043500 - RNA, 19 nt, Artificial Sequence
  Description of Artificial Sequence: Synthetic oligonucleotide
  Sense strand starting at position 3279 of SEQ ID NO: 914965
ugcucaggucaggaacaua

SEQ ID NO: 1043501 - RNA, 19 nt, Artificial Sequence
  Description of Artificial Sequence: Synthetic oligonucleotide
  Antisense strand to SEQ ID NO: 1043500
uauguuccugaccugagca

SEQ ID NO: 1043502 - RNA, 19 nt, Artificial Sequence
  Description of Artificial Sequence: Synthetic oligonucleotide
  Sense strand starting at position 3339 of SEQ ID NO: 914965
guacgaaauggguauccua

SEQ ID NO: 1043503 - RNA, 19 nt, Artificial Sequence
  Description of Artificial Sequence: Synthetic oligonucleotide
  Antisense strand to SEQ ID NO: 1043502
uaggauacccauuucguac

SEQ ID NO: 1043504 - RNA, 19 nt, Artificial Sequence
  Description of Artificial Sequence: Synthetic oligonucleotide
  Sense strand starting at position 3342 of SEQ ID NO: 914965
cgaaauggguauccuaaca

SEQ ID NO: 1043505 - RNA, 19 nt, Artificial Sequence
  Description of Artificial Sequence: Synthetic oligonucleotide
  Antisense strand to SEQ ID NO: 1043504
uguuaggauacccauuucg

SEQ ID NO: 1043506 - RNA, 19 nt, Artificial Sequence
  Description of Artificial Sequence: Synthetic oligonucleotide
  Sense strand starting at position 3430 of SEQ ID NO: 914965
augugaucauuugagggaa

SEQ ID NO: 1043507 - RNA, 19 nt, Artificial Sequence
  Description of Artificial Sequence: Synthetic oligonucleotide
  Antisense strand to SEQ ID NO: 1043506
uucccucaaaugaucacau

SEQ ID NO: 1043508 - RNA, 19 nt, Artificial Sequence
  Description of Artificial Sequence: Synthetic oligonucleotide
  Sense strand starting at position 3500 of SEQ ID NO: 914965
aauagauuguuuccaguga

SEQ ID NO: 1043509 - RNA, 19 nt, Artificial Sequence
  Description of Artificial Sequence: Synthetic oligonucleotide
  Antisense strand to SEQ ID NO: 1043508
ucacuggaaacaaucuauu

SEQ ID NO: 1043510 - RNA, 19 nt, Artificial Sequence
  Description of Artificial Sequence: Synthetic oligonucleotide
  Sense strand starting at position 3523 of SEQ ID NO: 914965
aagauuagauuggugcuca

SEQ ID NO: 1043511 - RNA, 19 nt, Artificial Sequence
  Description of Artificial Sequence: Synthetic oligonucleotide
  Antisense strand to SEQ ID NO: 1043510
ugagcaccaaucuaaucuu

SEQ ID NO: 1043512 - RNA, 19 nt, Artificial Sequence
  Description of Artificial Sequence: Synthetic oligonucleotide
  Sense strand starting at position 3528 of SEQ ID NO: 914965
uagauuggugcucaaucag

SEQ ID NO: 1043513 - RNA, 19 nt, Artificial Sequence
  Description of Artificial Sequence: Synthetic oligonucleotide
  Antisense strand to SEQ ID NO: 1043512
cugauugagcaccaaucua

SEQ ID NO: 1043514 - RNA, 19 nt, Artificial Sequence
  Description of Artificial Sequence: Synthetic oligonucleotide
  Sense strand starting at position 40 of SEQ ID NO: 914966
gucagaucagcagagucau

SEQ ID NO: 1043515 - RNA, 19 nt, Artificial Sequence
  Description of Artificial Sequence: Synthetic oligonucleotide
  Antisense strand to SEQ ID NO: 1043514
augacucugcugaucugac

SEQ ID NO: 1043516 - RNA, 19 nt, Artificial Sequence
  Description of Artificial Sequence: Synthetic oligonucleotide
  Sense strand starting at position 46 of SEQ ID NO: 914966
ucagcagagucaucagauu

SEQ ID NO: 1043517 - RNA, 19 nt, Artificial Sequence
  Description of Artificial Sequence: Synthetic oligonucleotide
  Antisense strand to SEQ ID NO: 1043516
aaucugaugacucugcuga

SEQ ID NO: 1043518 - RNA, 19 nt, Artificial Sequence
  Description of Artificial Sequence: Synthetic oligonucleotide
  Sense strand starting at position 404 of SEQ ID NO: 914966
uuuccugaacuguggauua

SEQ ID NO: 1043519 - RNA, 19 nt, Artificial Sequence
  Description of Artificial Sequence: Synthetic oligonucleotide
  Antisense strand to SEQ ID NO: 1043518
uaauccacaguucaggaaa

SEQ ID NO: 1043520 - RNA, 19 nt, Artificial Sequence
  Description of Artificial Sequence: Synthetic oligonucleotide
  Sense strand starting at position 715 of SEQ ID NO: 914966
gcugauauuuaaguguuua

SEQ ID NO: 1043521 - RNA, 19 nt, Artificial Sequence
  Description of Artificial Sequence: Synthetic oligonucleotide
  Antisense strand to SEQ ID NO: 1043520
uaaacacuuaaauaucagc

SEQ ID NO: 1043522 - RNA, 19 nt, Artificial Sequence
  Description of Artificial Sequence: Synthetic oligonucleotide
  Sense strand starting at position 818 of SEQ ID NO: 914966
gcaaaucagcucuacgaug

SEQ ID NO: 1043523 - RNA, 19 nt, Artificial Sequence
  Description of Artificial Sequence: Synthetic oligonucleotide
  Antisense strand to SEQ ID NO: 1043522
caucguagagcugauuugc

SEQ ID NO: 1043524 - RNA, 19 nt, Artificial Sequence
  Description of Artificial Sequence: Synthetic oligonucleotide
  Sense strand starting at position 893 of SEQ ID NO: 914966
cggagcuggugaucacaga

SEQ ID NO: 1043525 - RNA, 19 nt, Artificial Sequence
  Description of Artificial Sequence: Synthetic oligonucleotide
  Antisense strand to SEQ ID NO: 1043524
ucugugaucaccagcuccg

SEQ ID NO: 1043526 - RNA, 19 nt, Artificial Sequence
  Description of Artificial Sequence: Synthetic oligonucleotide
  Sense strand starting at position 894 of SEQ ID NO: 914966
ggagcuggugaucacagau

SEQ ID NO: 1043527 - RNA, 19 nt, Artificial Sequence
  Description of Artificial Sequence: Synthetic oligonucleotide
  Antisense strand to SEQ ID NO: 1043526
aucugugaucaccagcucc

SEQ ID NO: 1043528 - RNA, 19 nt, Artificial Sequence
  Description of Artificial Sequence: Synthetic oligonucleotide
  Sense strand starting at position 991 of SEQ ID NO: 914966
ggaaauuccauccguagac

SEQ ID NO: 1043529 - RNA, 19 nt, Artificial Sequence
  Description of Artificial Sequence: Synthetic oligonucleotide
  Antisense strand to SEQ ID NO: 1043528
gucuacggauggaauuucc

SEQ ID NO: 1043530 - RNA, 19 nt, Artificial Sequence
  Description of Artificial Sequence: Synthetic oligonucleotide
  Sense strand starting at position 992 of SEQ ID NO: 914966
gaaauuccauccguagaca

SEQ ID NO: 1043531 - RNA, 19 nt, Artificial Sequence
  Description of Artificial Sequence: Synthetic oligonucleotide
  Antisense strand to SEQ ID NO: 1043530
ugucuacggauggaauuuc

SEQ ID NO: 1043532 - RNA, 19 nt, Artificial Sequence
  Description of Artificial Sequence: Synthetic oligonucleotide
  Sense strand starting at position 1161 of SEQ ID NO: 914966
auggaucauuucuaucaga

SEQ ID NO: 1043533 - RNA, 19 nt, Artificial Sequence
  Description of Artificial Sequence: Synthetic oligonucleotide
  Antisense strand to SEQ ID NO: 1043532
ucugauagaaaugauccau

SEQ ID NO: 1043534 - RNA, 19 nt, Artificial Sequence
  Description of Artificial Sequence: Synthetic oligonucleotide
  Sense strand starting at position 1366 of SEQ ID NO: 914966
ggaagaacuuaguccacuu

SEQ ID NO: 1043535 - RNA, 19 nt, Artificial Sequence
  Description of Artificial Sequence: Synthetic oligonucleotide
  Antisense strand to SEQ ID NO: 1043534
aaguggacuaaguucuucc

SEQ ID NO: 1043536 - RNA, 19 nt, Artificial Sequence
  Description of Artificial Sequence: Synthetic oligonucleotide
  Sense strand starting at position 1392 of SEQ ID NO: 914966
ugaucaggguuaccuugaa

SEQ ID NO: 1043537 - RNA, 19 nt, Artificial Sequence
  Description of Artificial Sequence: Synthetic oligonucleotide
  Antisense strand to SEQ ID NO: 1043536
uucaagguaacccugauca

SEQ ID NO: 1043538 - RNA, 19 nt, Artificial Sequence
  Description of Artificial Sequence: Synthetic oligonucleotide
  Sense strand starting at position 1440 of SEQ ID NO: 914966
aggaaaucuccuuguugug

SEQ ID NO: 1043539 - RNA, 19 nt, Artificial Sequence
  Description of Artificial Sequence: Synthetic oligonucleotide
  Antisense strand to SEQ ID NO: 1043538
cacaacaaggagauuuccu

SEQ ID NO: 1043540 - RNA, 19 nt, Artificial Sequence
  Description of Artificial Sequence: Synthetic oligonucleotide
  Sense strand starting at position 1548 of SEQ ID NO: 914966
uacaucauucccgggaagu

SEQ ID NO: 1043541 - RNA, 19 nt, Artificial Sequence
  Description of Artificial Sequence: Synthetic oligonucleotide
  Antisense strand to SEQ ID NO: 1043540
acuucccgggaaugaugua

SEQ ID NO: 1043542 - RNA, 19 nt, Artificial Sequence
  Description of Artificial Sequence: Synthetic oligonucleotide
  Sense strand starting at position 1549 of SEQ ID NO: 914966
acaucauucccgggaagua

SEQ ID NO: 1043543 - RNA, 19 nt, Artificial Sequence
  Description of Artificial Sequence: Synthetic oligonucleotide
  Antisense strand to SEQ ID NO: 1043542
uacuucccgggaaugaugu

SEQ ID NO: 1043544 - RNA, 19 nt, Artificial Sequence
  Description of Artificial Sequence: Synthetic oligonucleotide
  Sense strand starting at position 1550 of SEQ ID NO: 914966
caucauucccgggaaguac

SEQ ID NO: 1043545 - RNA, 19 nt, Artificial Sequence
  Description of Artificial Sequence: Synthetic oligonucleotide
  Antisense strand to SEQ ID NO: 1043544
guacuucccgggaaugaug

SEQ ID NO: 1043546 - RNA, 19 nt, Artificial Sequence
  Description of Artificial Sequence: Synthetic oligonucleotide
  Sense strand starting at position 1626 of SEQ ID NO: 914966
gcaagauagcuagguagau

SEQ ID NO: 1043547 - RNA, 19 nt, Artificial Sequence
  Description of Artificial Sequence: Synthetic oligonucleotide
  Antisense strand to SEQ ID NO: 1043546
aucuaccuagcuaucuugc

SEQ ID NO: 1043548 - RNA, 19 nt, Artificial Sequence
  Description of Artificial Sequence: Synthetic oligonucleotide
  Sense strand starting at position 1627 of SEQ ID NO: 914966
caagauagcuagguagaua

SEQ ID NO: 1043549 - RNA, 19 nt, Artificial Sequence
  Description of Artificial Sequence: Synthetic oligonucleotide
  Antisense strand to SEQ ID NO: 1043548
uaucuaccuagcuaucuug

SEQ ID NO: 1043550 - RNA, 19 nt, Artificial Sequence
  Description of Artificial Sequence: Synthetic oligonucleotide
  Sense strand starting at position 1639 of SEQ ID NO: 914966
guagauauauccucaugua

SEQ ID NO: 1043551 - RNA, 19 nt, Artificial Sequence
  Description of Artificial Sequence: Synthetic oligonucleotide
  Antisense strand to SEQ ID NO: 1043550
uacaugaggauauaucuac

SEQ ID NO: 1043552 - RNA, 19 nt, Artificial Sequence
  Description of Artificial Sequence: Synthetic oligonucleotide
  Sense strand starting at position 1665 of SEQ ID NO: 914966
agucauguaacaugguaca

SEQ ID NO: 1043553 - RNA, 19 nt, Artificial Sequence
  Description of Artificial Sequence: Synthetic oligonucleotide
  Antisense strand to SEQ ID NO: 1043552
uguaccauguuacaugacu

SEQ ID NO: 1043554 - RNA, 19 nt, Artificial Sequence
  Description of Artificial Sequence: Synthetic oligonucleotide
  Sense strand starting at position 2113 of SEQ ID NO: 914966
ugucucaaacaguaauuau

SEQ ID NO: 1043555 - RNA, 19 nt, Artificial Sequence
  Description of Artificial Sequence: Synthetic oligonucleotide
  Antisense strand to SEQ ID NO: 1043554
auaauuacuguuugagaca

SEQ ID NO: 1043556 - RNA, 19 nt, Artificial Sequence
  Description of Artificial Sequence: Synthetic oligonucleotide
  Sense strand starting at position 2310 of SEQ ID NO: 914966
acugaaacauuugauuagu

SEQ ID NO: 1043557 - RNA, 19 nt, Artificial Sequence
  Description of Artificial Sequence: Synthetic oligonucleotide
  Antisense strand to SEQ ID NO: 1043556
acuaaucaaauguuucagu

SEQ ID NO: 1043558 - RNA, 19 nt, Artificial Sequence
  Description of Artificial Sequence: Synthetic oligonucleotide
  Sense strand starting at position 2365 of SEQ ID NO: 914966
aaaguuagaugauuacagu

SEQ ID NO: 1043559 - RNA, 19 nt, Artificial Sequence
  Description of Artificial Sequence: Synthetic oligonucleotide
  Antisense strand to SEQ ID NO: 1043558
acuguaaucaucuaacuuu

SEQ ID NO: 1043560 - RNA, 19 nt, Artificial Sequence
  Description of Artificial Sequence: Synthetic oligonucleotide
  Sense strand starting at position 2491 of SEQ ID NO: 914966
uaaugauggcucugagaca

SEQ ID NO: 1043561 - RNA, 19 nt, Artificial Sequence
  Description of Artificial Sequence: Synthetic oligonucleotide
  Antisense strand to SEQ ID NO: 1043560
ugucucagagccaucauua

SEQ ID NO: 1043562 - RNA, 19 nt, Artificial Sequence
  Description of Artificial Sequence: Synthetic oligonucleotide
  Sense strand starting at position 2519 of SEQ ID NO: 914966
cugaaucaucaaggcaaga

SEQ ID NO: 1043563 - RNA, 19 nt, Artificial Sequence
  Description of Artificial Sequence: Synthetic oligonucleotide
  Antisense strand to SEQ ID NO: 1043562
ucuugccuugaugauucag

SEQ ID NO: 1043564 - RNA, 19 nt, Artificial Sequence
  Description of Artificial Sequence: Synthetic oligonucleotide
  Sense strand starting at position 2553 of SEQ ID NO: 914966
cugacuuaggguggaaagu

SEQ ID NO: 1043565 - RNA, 19 nt, Artificial Sequence
  Description of Artificial Sequence: Synthetic oligonucleotide
  Antisense strand to SEQ ID NO: 1043564
acuuuccacccuaagucag

SEQ ID NO: 1043566 - RNA, 19 nt, Artificial Sequence
  Description of Artificial Sequence: Synthetic oligonucleotide
  Sense strand starting at position 2571 of SEQ ID NO: 914966
ugaacugguaacuguuaga

SEQ ID NO: 1043567 - RNA, 19 nt, Artificial Sequence
  Description of Artificial Sequence: Synthetic oligonucleotide
  Antisense strand to SEQ ID NO: 1043566
ucuaacaguuaccaguuca

SEQ ID NO: 1043568 - RNA, 19 nt, Artificial Sequence
  Description of Artificial Sequence: Synthetic oligonucleotide
  Sense strand starting at position 2610 of SEQ ID NO: 914966
gcaagaguuacgucuucgu

SEQ ID NO: 1043569 - RNA, 19 nt, Artificial Sequence
  Description of Artificial Sequence: Synthetic oligonucleotide
  Antisense strand to SEQ ID NO: 1043568
acgaagacguaacucuugc

SEQ ID NO: 1043570 - RNA, 19 nt, Artificial Sequence
  Description of Artificial Sequence: Synthetic oligonucleotide
  Sense strand starting at position 2673 of SEQ ID NO: 914966
guuaauuggagucauauug

SEQ ID NO: 1043571 - RNA, 19 nt, Artificial Sequence
  Description of Artificial Sequence: Synthetic oligonucleotide
  Antisense strand to SEQ ID NO: 1043570
caauaugacuccaauuaac

SEQ ID NO: 1043572 - RNA, 19 nt, Artificial Sequence
  Description of Artificial Sequence: Synthetic oligonucleotide
  Sense strand starting at position 2824 of SEQ ID NO: 914966
gauguuggguaugucauuu

SEQ ID NO: 1043573 - RNA, 19 nt, Artificial Sequence
  Description of Artificial Sequence: Synthetic oligonucleotide
  Antisense strand to SEQ ID NO: 1043572
aaaugacauacccaacauc

SEQ ID NO: 1043574 - RNA, 19 nt, Artificial Sequence
  Description of Artificial Sequence: Synthetic oligonucleotide
  Sense strand starting at position 2913 of SEQ ID NO: 914966
aguguuauggaguaacaca

SEQ ID NO: 1043575 - RNA, 19 nt, Artificial Sequence
  Description of Artificial Sequence: Synthetic oligonucleotide
  Antisense strand to SEQ ID NO: 1043574
uguguuacuccauaacacu

SEQ ID NO: 1043576 - RNA, 19 nt, Artificial Sequence
  Description of Artificial Sequence: Synthetic oligonucleotide
  Sense strand starting at position 2961 of SEQ ID NO: 914966
gcauccacuagauguggau

SEQ ID NO: 1043577 - RNA, 19 nt, Artificial Sequence
  Description of Artificial Sequence: Synthetic oligonucleotide
  Antisense strand to SEQ ID NO: 1043576
auccacaucuaguggaugc

SEQ ID NO: 1043578 - RNA, 19 nt, Artificial Sequence
  Description of Artificial Sequence: Synthetic oligonucleotide
  Sense strand starting at position 3013 of SEQ ID NO: 914966
agguuauuccuauagugaa

SEQ ID NO: 1043579 - RNA, 19 nt, Artificial Sequence
  Description of Artificial Sequence: Synthetic oligonucleotide
  Antisense strand to SEQ ID NO: 1043578
uucacuauaggaauaaccu

SEQ ID NO: 1043580 - RNA, 19 nt, Artificial Sequence
  Description of Artificial Sequence: Synthetic oligonucleotide
  Sense strand starting at position 3025 of SEQ ID NO: 914966
uagugaauacagugaauuc

SEQ ID NO: 1043581 - RNA, 19 nt, Artificial Sequence
  Description of Artificial Sequence: Synthetic oligonucleotide
  Antisense strand to SEQ ID NO: 1043580
gaauucacuguauucacua

SEQ ID NO: 1043582 - RNA, 19 nt, Artificial Sequence
  Description of Artificial Sequence: Synthetic oligonucleotide
  Sense strand starting at position 3035 of SEQ ID NO: 914966
agugaauuccuauagucuu

SEQ ID NO: 1043583 - RNA, 19 nt, Artificial Sequence
  Description of Artificial Sequence: Synthetic oligonucleotide
  Antisense strand to SEQ ID NO: 1043582
aagacuauaggaauucacu

SEQ ID NO: 1043584 - RNA, 19 nt, Artificial Sequence
  Description of Artificial Sequence: Synthetic oligonucleotide
  Sense strand starting at position 3105 of SEQ ID NO: 914966
uggaguuacagccaauguu

SEQ ID NO: 1043585 - RNA, 19 nt, Artificial Sequence
  Description of Artificial Sequence: Synthetic oligonucleotide
  Antisense strand to SEQ ID NO: 1043584
aacauuggcuguaacucca

SEQ ID NO: 1043586 - RNA, 19 nt, Artificial Sequence
  Description of Artificial Sequence: Synthetic oligonucleotide
  Sense strand starting at position 3151 of SEQ ID NO: 914966
ugaacaagaguuugucaca

SEQ ID NO: 1043587 - RNA, 19 nt, Artificial Sequence
  Description of Artificial Sequence: Synthetic oligonucleotide
  Antisense strand to SEQ ID NO: 1043586
ugugacaaacucuuguuca

SEQ ID NO: 1043588 - RNA, 19 nt, Artificial Sequence
  Description of Artificial Sequence: Synthetic oligonucleotide
  Sense strand starting at position 3152 of SEQ ID NO: 914966
gaacaagaguuugucacac

SEQ ID NO: 1043589 - RNA, 19 nt, Artificial Sequence
  Description of Artificial Sequence: Synthetic oligonucleotide
  Antisense strand to SEQ ID NO: 1043588
gugugacaaacucuuguuc

SEQ ID NO: 1043590 - RNA, 19 nt, Artificial Sequence
  Description of Artificial Sequence: Synthetic oligonucleotide
  Sense strand starting at position 3330 of SEQ ID NO: 914966
uuugaaaguuccuccauug

SEQ ID NO: 1043591 - RNA, 19 nt, Artificial Sequence
  Description of Artificial Sequence: Synthetic oligonucleotide
  Antisense strand to SEQ ID NO: 1043590
caauggaggaacuuucaaa

SEQ ID NO: 1043592 - RNA, 19 nt, Artificial Sequence
  Description of Artificial Sequence: Synthetic oligonucleotide
  Sense strand starting at position 3640 of SEQ ID NO: 914966
guuugaagacuguauucua

SEQ ID NO: 1043593 - RNA, 19 nt, Artificial Sequence
  Description of Artificial Sequence: Synthetic oligonucleotide
  Antisense strand to SEQ ID NO: 1043592
uagaauacagucuucaaac

SEQ ID NO: 1043594 - RNA, 19 nt, Artificial Sequence
  Description of Artificial Sequence: Synthetic oligonucleotide
  Sense strand starting at position 12 of SEQ ID NO: 914967
aagaguaaccuaggcagaa

SEQ ID NO: 1043595 - RNA, 19 nt, Artificial Sequence
  Description of Artificial Sequence: Synthetic oligonucleotide
  Antisense strand to SEQ ID NO: 1043594
uucugccuagguuacucuu

SEQ ID NO: 1043596 - RNA, 19 nt, Artificial Sequence
  Description of Artificial Sequence: Synthetic oligonucleotide
  Sense strand starting at position 13 of SEQ ID NO: 914967
agaguaaccuaggcagaaa

SEQ ID NO: 1043597 - RNA, 19 nt, Artificial Sequence
  Description of Artificial Sequence: Synthetic oligonucleotide
  Antisense strand to SEQ ID NO: 1043596
uuucugccuagguuacucu

SEQ ID NO: 1043598 - RNA, 19 nt, Artificial Sequence
  Description of Artificial Sequence: Synthetic oligonucleotide
  Sense strand starting at position 110 of SEQ ID NO: 914967
aaaggauagugguuaugcu

SEQ ID NO: 1043599 - RNA, 19 nt, Artificial Sequence
  Description of Artificial Sequence: Synthetic oligonucleotide
  Antisense strand to SEQ ID NO: 1043598
agcauaaccacuauccuuu

SEQ ID NO: 1043600 - RNA, 19 nt, Artificial Sequence
  Description of Artificial Sequence: Synthetic oligonucleotide
  Sense strand starting at position 135 of SEQ ID NO: 914967
uuucuaaagagaugguuag

SEQ ID NO: 1043601 - RNA, 19 nt, Artificial Sequence
  Description of Artificial Sequence: Synthetic oligonucleotide
  Antisense strand to SEQ ID NO: 1043600
cuaaccaucucuuuagaaa

SEQ ID NO: 1043602 - RNA, 19 nt, Artificial Sequence
  Description of Artificial Sequence: Synthetic oligonucleotide
  Sense strand starting at position 183 of SEQ ID NO: 914967
accuucucugagggagauu

SEQ ID NO: 1043603 - RNA, 19 nt, Artificial Sequence
  Description of Artificial Sequence: Synthetic oligonucleotide
  Antisense strand to SEQ ID NO: 1043602
aaucucccucagagaaggu

SEQ ID NO: 1043604 - RNA, 19 nt, Artificial Sequence
  Description of Artificial Sequence: Synthetic oligonucleotide
  Sense strand starting at position 537 of SEQ ID NO: 914967
uggaaauagcccugaauca

SEQ ID NO: 1043605 - RNA, 19 nt, Artificial Sequence
  Description of Artificial Sequence: Synthetic oligonucleotide
  Antisense strand to SEQ ID NO: 1043604
ugauucagggcuauuucca

SEQ ID NO: 1043606 - RNA, 19 nt, Artificial Sequence
  Description of Artificial Sequence: Synthetic oligonucleotide
  Sense strand starting at position 601 of SEQ ID NO: 914967
aucaguuacccugggcaua

SEQ ID NO: 1043607 - RNA, 19 nt, Artificial Sequence
  Description of Artificial Sequence: Synthetic oligonucleotide
  Antisense strand to SEQ ID NO: 1043606
uaugcccaggguaacugau

SEQ ID NO: 1043608 - RNA, 19 nt, Artificial Sequence
  Description of Artificial Sequence: Synthetic oligonucleotide
  Sense strand starting at position 708 of SEQ ID NO: 914967
uucuuuaugccacagugaa

SEQ ID NO: 1043609 - RNA, 19 nt, Artificial Sequence
  Description of Artificial Sequence: Synthetic oligonucleotide
  Antisense strand to SEQ ID NO: 1043608
uucacuguggcauaaagaa

SEQ ID NO: 1043610 - RNA, 19 nt, Artificial Sequence
  Description of Artificial Sequence: Synthetic oligonucleotide
  Sense strand starting at position 716 of SEQ ID NO: 914967
gccacagugaaaugauaug

SEQ ID NO: 1043611 - RNA, 19 nt, Artificial Sequence
  Description of Artificial Sequence: Synthetic oligonucleotide
  Antisense strand to SEQ ID NO: 1043610
cauaucauuucacuguggc

SEQ ID NO: 1043612 - RNA, 19 nt, Artificial Sequence
  Description of Artificial Sequence: Synthetic oligonucleotide
  Sense strand starting at position 879 of SEQ ID NO: 914967
ggucuuucugacugaugga

SEQ ID NO: 1043613 - RNA, 19 nt, Artificial Sequence
  Description of Artificial Sequence: Synthetic oligonucleotide
  Antisense strand to SEQ ID NO: 1043612
uccaucagucagaaagacc

SEQ ID NO: 1043614 - RNA, 19 nt, Artificial Sequence
  Description of Artificial Sequence: Synthetic oligonucleotide
  Sense strand starting at position 1024 of SEQ ID NO: 914967
auuccuugucuccacugau

SEQ ID NO: 1043615 - RNA, 19 nt, Artificial Sequence
  Description of Artificial Sequence: Synthetic oligonucleotide
  Antisense strand to SEQ ID NO: 1043614
aucaguggagacaaggaau

SEQ ID NO: 1043616 - RNA, 19 nt, Artificial Sequence
  Description of Artificial Sequence: Synthetic oligonucleotide
  Sense strand starting at position 1049 of SEQ ID NO: 914967
gccagucuaguguauuaaa

SEQ ID NO: 1043617 - RNA, 19 nt, Artificial Sequence
  Description of Artificial Sequence: Synthetic oligonucleotide
  Antisense strand to SEQ ID NO: 1043616
uuuaauacacuagacuggc

SEQ ID NO: 1043618 - RNA, 19 nt, Artificial Sequence
  Description of Artificial Sequence: Synthetic oligonucleotide
  Sense strand starting at position 1112 of SEQ ID NO: 914967
gcuuucucugucuguauuu

SEQ ID NO: 1043619 - RNA, 19 nt, Artificial Sequence
  Description of Artificial Sequence: Synthetic oligonucleotide
  Antisense strand to SEQ ID NO: 1043618
aaauacagacagagaaagc

SEQ ID NO: 1043620 - RNA, 19 nt, Artificial Sequence
  Description of Artificial Sequence: Synthetic oligonucleotide
  Sense strand starting at position 1131 of SEQ ID NO: 914967
gaaugcuagcuggacucaa

SEQ ID NO: 1043621 - RNA, 19 nt, Artificial Sequence
  Description of Artificial Sequence: Synthetic oligonucleotide
  Antisense strand to SEQ ID NO: 1043620
uugaguccagcuagcauuc

SEQ ID NO: 1043622 - RNA, 19 nt, Artificial Sequence
  Description of Artificial Sequence: Synthetic oligonucleotide
  Sense strand starting at position 1174 of SEQ ID NO: 914967
ucugauacagcuugaucua

SEQ ID NO: 1043623 - RNA, 19 nt, Artificial Sequence
  Description of Artificial Sequence: Synthetic oligonucleotide
  Antisense strand to SEQ ID NO: 1043622
uagaucaagcuguaucaga

SEQ ID NO: 1043624 - RNA, 19 nt, Artificial Sequence
  Description of Artificial Sequence: Synthetic oligonucleotide
  Sense strand starting at position 1175 of SEQ ID NO: 914967
cugauacagcuugaucuau

SEQ ID NO: 1043625 - RNA, 19 nt, Artificial Sequence
  Description of Artificial Sequence: Synthetic oligonucleotide
  Antisense strand to SEQ ID NO: 1043624
auagaucaagcuguaucag

SEQ ID NO: 1043626 - RNA, 19 nt, Artificial Sequence
  Description of Artificial Sequence: Synthetic oligonucleotide
  Sense strand starting at position 1202 of SEQ ID NO: 914967
aguucuuaugaguacuuga

SEQ ID NO: 1043627 - RNA, 19 nt, Artificial Sequence
  Description of Artificial Sequence: Synthetic oligonucleotide
  Antisense strand to SEQ ID NO: 1043626
ucaaguacucauaagaacu

SEQ ID NO: 1043628 - RNA, 19 nt, Artificial Sequence
  Description of Artificial Sequence: Synthetic oligonucleotide
  Sense strand starting at position 1207 of SEQ ID NO: 914967
uuaugaguacuugacguaa

SEQ ID NO: 1043629 - RNA, 19 nt, Artificial Sequence
  Description of Artificial Sequence: Synthetic oligonucleotide
  Antisense strand to SEQ ID NO: 1043628
uuacgucaaguacucauaa

SEQ ID NO: 1043630 - RNA, 19 nt, Artificial Sequence
  Description of Artificial Sequence: Synthetic oligonucleotide
  Sense strand starting at position 1307 of SEQ ID NO: 914967
gcaaaugacuuauuguauu

SEQ ID NO: 1043631 - RNA, 19 nt, Artificial Sequence
  Description of Artificial Sequence: Synthetic oligonucleotide
  Antisense strand to SEQ ID NO: 1043630
aauacaauaagucauuugc

SEQ ID NO: 1043632 - RNA, 19 nt, Artificial Sequence
  Description of Artificial Sequence: Synthetic oligonucleotide
  Sense strand starting at position 1320 of SEQ ID NO: 914967
uguauuguucuggacuaaa

SEQ ID NO: 1043633 - RNA, 19 nt, Artificial Sequence
  Description of Artificial Sequence: Synthetic oligonucleotide
  Antisense strand to SEQ ID NO: 1043632
uuuaguccagaacaauaca

SEQ ID NO: 1043634 - RNA, 19 nt, Artificial Sequence
  Description of Artificial Sequence: Synthetic oligonucleotide
  Sense strand starting at position 1353 of SEQ ID NO: 914967
uugacuagguuccuauaca

SEQ ID NO: 1043635 - RNA, 19 nt, Artificial Sequence
  Description of Artificial Sequence: Synthetic oligonucleotide
  Antisense strand to SEQ ID NO: 1043634
uguauaggaaccuagucaa

SEQ ID NO: 1043636 - RNA, 19 nt, Artificial Sequence
  Description of Artificial Sequence: Synthetic oligonucleotide
  Sense strand starting at position 1463 of SEQ ID NO: 914967
auugaaagugugugguaga

SEQ ID NO: 1043637 - RNA, 19 nt, Artificial Sequence
  Description of Artificial Sequence: Synthetic oligonucleotide
  Antisense strand to SEQ ID NO: 1043636
ucuaccacacacuuucaau

SEQ ID NO: 1043638 - RNA, 19 nt, Artificial Sequence
  Description of Artificial Sequence: Synthetic oligonucleotide
  Sense strand starting at position 1486 of SEQ ID NO: 914967
cugggagauuacucaguca

SEQ ID NO: 1043639 - RNA, 19 nt, Artificial Sequence
  Description of Artificial Sequence: Synthetic oligonucleotide
  Antisense strand to SEQ ID NO: 1043638
ugacugaguaaucucccag

SEQ ID NO: 1043640 - RNA, 19 nt, Artificial Sequence
  Description of Artificial Sequence: Synthetic oligonucleotide
  Sense strand starting at position 1489 of SEQ ID NO: 914967
ggagauuacucagucaaug

SEQ ID NO: 1043641 - RNA, 19 nt, Artificial Sequence
  Description of Artificial Sequence: Synthetic oligonucleotide
  Antisense strand to SEQ ID NO: 1043640
cauugacugaguaaucucc

SEQ ID NO: 1043642 - RNA, 19 nt, Artificial Sequence
  Description of Artificial Sequence: Synthetic oligonucleotide
  Sense strand starting at position 1573 of SEQ ID NO: 914967
accuauauacuggaguguu

SEQ ID NO: 1043643 - RNA, 19 nt, Artificial Sequence
  Description of Artificial Sequence: Synthetic oligonucleotide
  Antisense strand to SEQ ID NO: 1043642
aacacuccaguauauaggu

SEQ ID NO: 1043644 - RNA, 19 nt, Artificial Sequence
  Description of Artificial Sequence: Synthetic oligonucleotide
  Sense strand starting at position 1838 of SEQ ID NO: 914967
ccacaauggucaccaugua

SEQ ID NO: 1043645 - RNA, 19 nt, Artificial Sequence
  Description of Artificial Sequence: Synthetic oligonucleotide
  Antisense strand to SEQ ID NO: 1043644
uacauggugaccauugugg

SEQ ID NO: 1043646 - RNA, 19 nt, Artificial Sequence
  Description of Artificial Sequence: Synthetic oligonucleotide
  Sense strand starting at position 1854 of SEQ ID NO: 914967
guaauaaugugguccugag

SEQ ID NO: 1043647 - RNA, 19 nt, Artificial Sequence
  Description of Artificial Sequence: Synthetic oligonucleotide
  Antisense strand to SEQ ID NO: 1043646
cucaggaccacauuauuac

SEQ ID NO: 1043648 - RNA, 19 nt, Artificial Sequence
  Description of Artificial Sequence: Synthetic oligonucleotide
  Sense strand starting at position 2080 of SEQ ID NO: 914967
gccaguuugcccuuucuuu

SEQ ID NO: 1043649 - RNA, 19 nt, Artificial Sequence
  Description of Artificial Sequence: Synthetic oligonucleotide
  Antisense strand to SEQ ID NO: 1043648
aaagaaagggcaaacuggc

SEQ ID NO: 1043650 - RNA, 19 nt, Artificial Sequence
  Description of Artificial Sequence: Synthetic oligonucleotide
  Sense strand starting at position 2319 of SEQ ID NO: 914967
gucgaaacucauuacagcu

SEQ ID NO: 1043651 - RNA, 19 nt, Artificial Sequence
  Description of Artificial Sequence: Synthetic oligonucleotide
  Antisense strand to SEQ ID NO: 1043650
agcuguaaugaguuucgac

SEQ ID NO: 1043652 - RNA, 19 nt, Artificial Sequence
  Description of Artificial Sequence: Synthetic oligonucleotide
  Sense strand starting at position 2856 of SEQ ID NO: 914967
gguaguuaauagcuauaug

SEQ ID NO: 1043653 - RNA, 19 nt, Artificial Sequence
  Description of Artificial Sequence: Synthetic oligonucleotide
  Antisense strand to SEQ ID NO: 1043652
cauauagcuauuaacuacc

SEQ ID NO: 1043654 - RNA, 19 nt, Artificial Sequence
  Description of Artificial Sequence: Synthetic oligonucleotide
  Sense strand starting at position 2857 of SEQ ID NO: 914967
guaguuaauagcuauaugu

SEQ ID NO: 1043655 - RNA, 19 nt, Artificial Sequence
  Description of Artificial Sequence: Synthetic oligonucleotide
  Antisense strand to SEQ ID NO: 1043654
acauauagcuauuaacuac

SEQ ID NO: 1043656 - RNA, 19 nt, Artificial Sequence
  Description of Artificial Sequence: Synthetic oligonucleotide
  Sense strand starting at position 2859 of SEQ ID NO: 914967
aguuaauagcuauauguug

SEQ ID NO: 1043657 - RNA, 19 nt, Artificial Sequence
  Description of Artificial Sequence: Synthetic oligonucleotide
  Antisense strand to SEQ ID NO: 1043656
caacauauagcuauuaacu

SEQ ID NO: 1043658 - RNA, 19 nt, Artificial Sequence
  Description of Artificial Sequence: Synthetic oligonucleotide
  Sense strand starting at position 2915 of SEQ ID NO: 914967
cgucuauagauguacaugu

SEQ ID NO: 1043659 - RNA, 19 nt, Artificial Sequence
  Description of Artificial Sequence: Synthetic oligonucleotide
  Antisense strand to SEQ ID NO: 1043658
acauguacaucuauagacg

SEQ ID NO: 1043660 - RNA, 19 nt, Artificial Sequence
  Description of Artificial Sequence: Synthetic oligonucleotide
  Sense strand starting at position 2917 of SEQ ID NO: 914967
ucuauagauguacauguuu

SEQ ID NO: 1043661 - RNA, 19 nt, Artificial Sequence
  Description of Artificial Sequence: Synthetic oligonucleotide
  Antisense strand to SEQ ID NO: 1043660
aaacauguacaucuauaga

SEQ ID NO: 1043662 - RNA, 19 nt, Artificial Sequence
  Description of Artificial Sequence: Synthetic oligonucleotide
  Sense strand starting at position 2922 of SEQ ID NO: 914967
agauguacauguuuaugua

SEQ ID NO: 1043663 - RNA, 19 nt, Artificial Sequence
  Description of Artificial Sequence: Synthetic oligonucleotide
  Antisense strand to SEQ ID NO: 1043662
uacauaaacauguacaucu

SEQ ID NO: 1043664 - RNA, 19 nt, Artificial Sequence
  Description of Artificial Sequence: Synthetic oligonucleotide
  Sense strand starting at position 2923 of SEQ ID NO: 914967
gauguacauguuuauguau

SEQ ID NO: 1043665 - RNA, 19 nt, Artificial Sequence
  Description of Artificial Sequence: Synthetic oligonucleotide
  Antisense strand to SEQ ID NO: 1043664
auacauaaacauguacauc

SEQ ID NO: 1043666 - RNA, 19 nt, Artificial Sequence
  Description of Artificial Sequence: Synthetic oligonucleotide
  Sense strand starting at position 3308 of SEQ ID NO: 914967
gucacagaacucuggaaau

SEQ ID NO: 1043667 - RNA, 19 nt, Artificial Sequence
  Description of Artificial Sequence: Synthetic oligonucleotide
  Antisense strand to SEQ ID NO: 1043666
auuuccagaguucugugac

SEQ ID NO: 1043668 - RNA, 19 nt, Artificial Sequence
  Description of Artificial Sequence: Synthetic oligonucleotide
  Sense strand starting at position 3768 of SEQ ID NO: 914967
uguagugauccaugaucau

SEQ ID NO: 1043669 - RNA, 19 nt, Artificial Sequence
  Description of Artificial Sequence: Synthetic oligonucleotide
  Antisense strand to SEQ ID NO: 1043668
augaucauggaucacuaca

SEQ ID NO: 1043670 - RNA, 19 nt, Artificial Sequence
  Description of Artificial Sequence: Synthetic oligonucleotide
  Sense strand starting at position 3900 of SEQ ID NO: 914967
acaauuauugagggcuuau

SEQ ID NO: 1043671 - RNA, 19 nt, Artificial Sequence
  Description of Artificial Sequence: Synthetic oligonucleotide
  Antisense strand to SEQ ID NO: 1043670
auaagcccucaauaauugu

SEQ ID NO: 1043672 - RNA, 19 nt, Artificial Sequence
  Description of Artificial Sequence: Synthetic oligonucleotide
  Sense strand starting at position 3937 of SEQ ID NO: 914967
uuuaaaccuuugguauaga

SEQ ID NO: 1043673 - RNA, 19 nt, Artificial Sequence
  Description of Artificial Sequence: Synthetic oligonucleotide
  Antisense strand to SEQ ID NO: 1043672
ucuauaccaaagguuuaaa

SEQ ID NO: 1043674 - RNA, 19 nt, Artificial Sequence
  Description of Artificial Sequence: Synthetic oligonucleotide
  Sense strand starting at position 318 of SEQ ID NO: 914968
ccuugagaugucugaggga

SEQ ID NO: 1043675 - RNA, 19 nt, Artificial Sequence
  Description of Artificial Sequence: Synthetic oligonucleotide
  Antisense strand to SEQ ID NO: 1043674
ucccucagacaucucaagg

SEQ ID NO: 1043676 - RNA, 19 nt, Artificial Sequence
  Description of Artificial Sequence: Synthetic oligonucleotide
  Sense strand starting at position 393 of SEQ ID NO: 914968
acacacaugucucugacau

SEQ ID NO: 1043677 - RNA, 19 nt, Artificial Sequence
  Description of Artificial Sequence: Synthetic oligonucleotide
  Antisense strand to SEQ ID NO: 1043676
augucagagacaugugugu

SEQ ID NO: 1043678 - RNA, 19 nt, Artificial Sequence
  Description of Artificial Sequence: Synthetic oligonucleotide
  Sense strand starting at position 473 of SEQ ID NO: 914968
aguaucugcagucagauga

SEQ ID NO: 1043679 - RNA, 19 nt, Artificial Sequence
  Description of Artificial Sequence: Synthetic oligonucleotide
  Antisense strand to SEQ ID NO: 1043678
ucaucugacugcagauacu

SEQ ID NO: 1043680 - RNA, 19 nt, Artificial Sequence
  Description of Artificial Sequence: Synthetic oligonucleotide
  Sense strand starting at position 699 of SEQ ID NO: 914968
acaggaagugcucagucaa

SEQ ID NO: 1043681 - RNA, 19 nt, Artificial Sequence
  Description of Artificial Sequence: Synthetic oligonucleotide
  Antisense strand to SEQ ID NO: 1043680
uugacugagcacuuccugu

SEQ ID NO: 1043682 - RNA, 19 nt, Artificial Sequence
  Description of Artificial Sequence: Synthetic oligonucleotide
  Sense strand starting at position 740 of SEQ ID NO: 914968
cuuggaaauuaucuuuaug

SEQ ID NO: 1043683 - RNA, 19 nt, Artificial Sequence
  Description of Artificial Sequence: Synthetic oligonucleotide
  Antisense strand to SEQ ID NO: 1043682
cauaaagauaauuuccaag

SEQ ID NO: 1043684 - RNA, 19 nt, Artificial Sequence
  Description of Artificial Sequence: Synthetic oligonucleotide
  Sense strand starting at position 743 of SEQ ID NO: 914968
ggaaauuaucuuuauguuc

SEQ ID NO: 1043685 - RNA, 19 nt, Artificial Sequence
  Description of Artificial Sequence: Synthetic oligonucleotide
  Antisense strand to SEQ ID NO: 1043684
gaacauaaagauaauuucc

SEQ ID NO: 1043686 - RNA, 19 nt, Artificial Sequence
  Description of Artificial Sequence: Synthetic oligonucleotide
  Sense strand starting at position 763 of SEQ ID NO: 914968
uuuggauuaggcggaaaua

SEQ ID NO: 1043687 - RNA, 19 nt, Artificial Sequence
  Description of Artificial Sequence: Synthetic oligonucleotide
  Antisense strand to SEQ ID NO: 1043686
uauuuccgccuaauccaaa

SEQ ID NO: 1043688 - RNA, 19 nt, Artificial Sequence
  Description of Artificial Sequence: Synthetic oligonucleotide
  Sense strand starting at position 774 of SEQ ID NO: 914968
cggaaauaagcuggcagaa

SEQ ID NO: 1043689 - RNA, 19 nt, Artificial Sequence
  Description of Artificial Sequence: Synthetic oligonucleotide
  Antisense strand to SEQ ID NO: 1043688
uucugccagcuuauuuccg

SEQ ID NO: 1043690 - RNA, 19 nt, Artificial Sequence
  Description of Artificial Sequence: Synthetic oligonucleotide
  Sense strand starting at position 791 of SEQ ID NO: 914968
aagcauuaccuguagguga

SEQ ID NO: 1043691 - RNA, 19 nt, Artificial Sequence
  Description of Artificial Sequence: Synthetic oligonucleotide
  Antisense strand to SEQ ID NO: 1043690
ucaccuacagguaaugcuu

SEQ ID NO: 1043692 - RNA, 19 nt, Artificial Sequence
  Description of Artificial Sequence: Synthetic oligonucleotide
  Sense strand starting at position 1017 of SEQ ID NO: 914968
aguagaacugguugagaua

SEQ ID NO: 1043693 - RNA, 19 nt, Artificial Sequence
  Description of Artificial Sequence: Synthetic oligonucleotide
  Antisense strand to SEQ ID NO: 1043692
uaucucaaccaguucuacu

SEQ ID NO: 1043694 - RNA, 19 nt, Artificial Sequence
  Description of Artificial Sequence: Synthetic oligonucleotide
  Sense strand starting at position 1028 of SEQ ID NO: 914968
uugagauaugccugaccaa

SEQ ID NO: 1043695 - RNA, 19 nt, Artificial Sequence
  Description of Artificial Sequence: Synthetic oligonucleotide
  Antisense strand to SEQ ID NO: 1043694
uuggucaggcauaucucaa

SEQ ID NO: 1043696 - RNA, 19 nt, Artificial Sequence
  Description of Artificial Sequence: Synthetic oligonucleotide
  Sense strand starting at position 1253 of SEQ ID NO: 914968
agacuugguugacuuauga

SEQ ID NO: 1043697 - RNA, 19 nt, Artificial Sequence
  Description of Artificial Sequence: Synthetic oligonucleotide
  Antisense strand to SEQ ID NO: 1043696
ucauaagucaaccaagucu

SEQ ID NO: 1043698 - RNA, 19 nt, Artificial Sequence
  Description of Artificial Sequence: Synthetic oligonucleotide
  Sense strand starting at position 1264 of SEQ ID NO: 914968
acuuaugagugaccagaau

SEQ ID NO: 1043699 - RNA, 19 nt, Artificial Sequence
  Description of Artificial Sequence: Synthetic oligonucleotide
  Antisense strand to SEQ ID NO: 1043698
auucuggucacucauaagu

SEQ ID NO: 1043700 - RNA, 19 nt, Artificial Sequence
  Description of Artificial Sequence: Synthetic oligonucleotide
  Sense strand starting at position 1340 of SEQ ID NO: 914968
guugaaugaugaccuaucu

SEQ ID NO: 1043701 - RNA, 19 nt, Artificial Sequence
  Description of Artificial Sequence: Synthetic oligonucleotide
  Antisense strand to SEQ ID NO: 1043700
agauaggucaucauucaac

SEQ ID NO: 1043702 - RNA, 19 nt, Artificial Sequence
  Description of Artificial Sequence: Synthetic oligonucleotide
  Sense strand starting at position 1436 of SEQ ID NO: 914968
gcacauguauuugcuuuaa

SEQ ID NO: 1043703 - RNA, 19 nt, Artificial Sequence
  Description of Artificial Sequence: Synthetic oligonucleotide
  Antisense strand to SEQ ID NO: 1043702
uuaaagcaaauacaugugc

SEQ ID NO: 1043704 - RNA, 19 nt, Artificial Sequence
  Description of Artificial Sequence: Synthetic oligonucleotide
  Sense strand starting at position 1495 of SEQ ID NO: 914968
ucuguaaagcaauguauuu

SEQ ID NO: 1043705 - RNA, 19 nt, Artificial Sequence
  Description of Artificial Sequence: Synthetic oligonucleotide
  Antisense strand to SEQ ID NO: 1043704
aaauacauugcuuuacaga

SEQ ID NO: 1043706 - RNA, 19 nt, Artificial Sequence
  Description of Artificial Sequence: Synthetic oligonucleotide
  Sense strand starting at position 1718 of SEQ ID NO: 914968
uccugauaucgucagagau

SEQ ID NO: 1043707 - RNA, 19 nt, Artificial Sequence
  Description of Artificial Sequence: Synthetic oligonucleotide
  Antisense strand to SEQ ID NO: 1043706
aucucugacgauaucagga

SEQ ID NO: 1043708 - RNA, 19 nt, Artificial Sequence
  Description of Artificial Sequence: Synthetic oligonucleotide
  Sense strand starting at position 1993 of SEQ ID NO: 914968
gcugaagccgguucuguua

SEQ ID NO: 1043709 - RNA, 19 nt, Artificial Sequence
  Description of Artificial Sequence: Synthetic oligonucleotide
  Antisense strand to SEQ ID NO: 1043708
uaacagaaccggcuucagc

SEQ ID NO: 1043710 - RNA, 19 nt, Artificial Sequence
  Description of Artificial Sequence: Synthetic oligonucleotide
  Sense strand starting at position 2052 of SEQ ID NO: 914968
uggcuuguaucaucauuua

SEQ ID NO: 1043711 - RNA, 19 nt, Artificial Sequence
  Description of Artificial Sequence: Synthetic oligonucleotide
  Antisense strand to SEQ ID NO: 1043710
uaaaugaugauacaagcca

SEQ ID NO: 1043712 - RNA, 19 nt, Artificial Sequence
  Description of Artificial Sequence: Synthetic oligonucleotide
  Sense strand starting at position 2086 of SEQ ID NO: 914968
ggacacuugccauaaagug

SEQ ID NO: 1043713 - RNA, 19 nt, Artificial Sequence
  Description of Artificial Sequence: Synthetic oligonucleotide
  Antisense strand to SEQ ID NO: 1043712
cacuuuauggcaagugucc

SEQ ID NO: 1043714 - RNA, 19 nt, Artificial Sequence
  Description of Artificial Sequence: Synthetic oligonucleotide
  Sense strand starting at position 2272 of SEQ ID NO: 914968
aucucagaauaucuuggua

SEQ ID NO: 1043715 - RNA, 19 nt, Artificial Sequence
  Description of Artificial Sequence: Synthetic oligonucleotide
  Antisense strand to SEQ ID NO: 1043714
uaccaagauauucugagau

SEQ ID NO: 1043716 - RNA, 19 nt, Artificial Sequence
  Description of Artificial Sequence: Synthetic oligonucleotide
  Sense strand starting at position 2275 of SEQ ID NO: 914968
ucagaauaucuugguagga

SEQ ID NO: 1043717 - RNA, 19 nt, Artificial Sequence
  Description of Artificial Sequence: Synthetic oligonucleotide
  Antisense strand to SEQ ID NO: 1043716
uccuaccaagauauucuga

SEQ ID NO: 1043718 - RNA, 19 nt, Artificial Sequence
  Description of Artificial Sequence: Synthetic oligonucleotide
  Sense strand starting at position 2276 of SEQ ID NO: 914968
cagaauaucuugguaggau

SEQ ID NO: 1043719 - RNA, 19 nt, Artificial Sequence
  Description of Artificial Sequence: Synthetic oligonucleotide
  Antisense strand to SEQ ID NO: 1043718
auccuaccaagauauucug

SEQ ID NO: 1043720 - RNA, 19 nt, Artificial Sequence
  Description of Artificial Sequence: Synthetic oligonucleotide
  Sense strand starting at position 2321 of SEQ ID NO: 914968
ggagucagauuacccuuau

SEQ ID NO: 1043721 - RNA, 19 nt, Artificial Sequence
  Description of Artificial Sequence: Synthetic oligonucleotide
  Antisense strand to SEQ ID NO: 1043720
auaaggguaaucugacucc

SEQ ID NO: 1043722 - RNA, 19 nt, Artificial Sequence
  Description of Artificial Sequence: Synthetic oligonucleotide
  Sense strand starting at position 2396 of SEQ ID NO: 914968
aaugcaaucuuguuggaga

SEQ ID NO: 1043723 - RNA, 19 nt, Artificial Sequence
  Description of Artificial Sequence: Synthetic oligonucleotide
  Antisense strand to SEQ ID NO: 1043722
ucuccaacaagauugcauu

SEQ ID NO: 1043724 - RNA, 19 nt, Artificial Sequence
  Description of Artificial Sequence: Synthetic oligonucleotide
  Sense strand starting at position 2497 of SEQ ID NO: 914968
gggccaaaggcagaucauu

SEQ ID NO: 1043725 - RNA, 19 nt, Artificial Sequence
  Description of Artificial Sequence: Synthetic oligonucleotide
  Antisense strand to SEQ ID NO: 1043724
aaugaucugccuuuggccc

SEQ ID NO: 1043726 - RNA, 19 nt, Artificial Sequence
  Description of Artificial Sequence: Synthetic oligonucleotide
  Sense strand starting at position 2507 of SEQ ID NO: 914968
cagaucauugcuuaugagu

SEQ ID NO: 1043727 - RNA, 19 nt, Artificial Sequence
  Description of Artificial Sequence: Synthetic oligonucleotide
  Antisense strand to SEQ ID NO: 1043726
acucauaagcaaugaucug

SEQ ID NO: 1043728 - RNA, 19 nt, Artificial Sequence
  Description of Artificial Sequence: Synthetic oligonucleotide
  Sense strand starting at position 2595 of SEQ ID NO: 914968
uuuggagaauguguagaau

SEQ ID NO: 1043729 - RNA, 19 nt, Artificial Sequence
  Description of Artificial Sequence: Synthetic oligonucleotide
  Antisense strand to SEQ ID NO: 1043728
auucuacacauucuccaaa

SEQ ID NO: 1043730 - RNA, 19 nt, Artificial Sequence
  Description of Artificial Sequence: Synthetic oligonucleotide
  Sense strand starting at position 2604 of SEQ ID NO: 914968
uguguagaauuuggauuua

SEQ ID NO: 1043731 - RNA, 19 nt, Artificial Sequence
  Description of Artificial Sequence: Synthetic oligonucleotide
  Antisense strand to SEQ ID NO: 1043730
uaaauccaaauucuacaca

SEQ ID NO: 1043732 - RNA, 19 nt, Artificial Sequence
  Description of Artificial Sequence: Synthetic oligonucleotide
  Sense strand starting at position 2635 of SEQ ID NO: 914968
gaagaaguaugagugcaaa

SEQ ID NO: 1043733 - RNA, 19 nt, Artificial Sequence
  Description of Artificial Sequence: Synthetic oligonucleotide
  Antisense strand to SEQ ID NO: 1043732
uuugcacucauacuucuuc

SEQ ID NO: 1043734 - RNA, 19 nt, Artificial Sequence
  Description of Artificial Sequence: Synthetic oligonucleotide
  Sense strand starting at position 2693 of SEQ ID NO: 914968
caggaaaucuggccugacu

SEQ ID NO: 1043735 - RNA, 19 nt, Artificial Sequence
  Description of Artificial Sequence: Synthetic oligonucleotide
  Antisense strand to SEQ ID NO: 1043734
agucaggccagauuuccug

SEQ ID NO: 1043736 - RNA, 19 nt, Artificial Sequence
  Description of Artificial Sequence: Synthetic oligonucleotide
  Sense strand starting at position 2727 of SEQ ID NO: 914968
uguagacagcuauggaaga

SEQ ID NO: 1043737 - RNA, 19 nt, Artificial Sequence
  Description of Artificial Sequence: Synthetic oligonucleotide
  Antisense strand to SEQ ID NO: 1043736
ucuuccauagcugucuaca

SEQ ID NO: 1043738 - RNA, 19 nt, Artificial Sequence
  Description of Artificial Sequence: Synthetic oligonucleotide
  Sense strand starting at position 2838 of SEQ ID NO: 914968
gugagaauauaguuaguga

SEQ ID NO: 1043739 - RNA, 19 nt, Artificial Sequence
  Description of Artificial Sequence: Synthetic oligonucleotide
  Antisense strand to SEQ ID NO: 1043738
ucacuaacuauauucucac

SEQ ID NO: 1043740 - RNA, 19 nt, Artificial Sequence
  Description of Artificial Sequence: Synthetic oligonucleotide
  Sense strand starting at position 2914 of SEQ ID NO: 914968
ggaacagucuuaguuacag

SEQ ID NO: 1043741 - RNA, 19 nt, Artificial Sequence
  Description of Artificial Sequence: Synthetic oligonucleotide
  Antisense strand to SEQ ID NO: 1043740
cuguaacuaagacuguucc

SEQ ID NO: 1043742 - RNA, 19 nt, Artificial Sequence
  Description of Artificial Sequence: Synthetic oligonucleotide
  Sense strand starting at position 3004 of SEQ ID NO: 914968
auguuaacuccucaaucga

SEQ ID NO: 1043743 - RNA, 19 nt, Artificial Sequence
  Description of Artificial Sequence: Synthetic oligonucleotide
  Antisense strand to SEQ ID NO: 1043742
ucgauugaggaguuaacau

SEQ ID NO: 1043744 - RNA, 19 nt, Artificial Sequence
  Description of Artificial Sequence: Synthetic oligonucleotide
  Sense strand starting at position 3071 of SEQ ID NO: 914968
ggcauagcugaggaacuua

SEQ ID NO: 1043745 - RNA, 19 nt, Artificial Sequence
  Description of Artificial Sequence: Synthetic oligonucleotide
  Antisense strand to SEQ ID NO: 1043744
uaaguuccucagcuaugcc

SEQ ID NO: 1043746 - RNA, 19 nt, Artificial Sequence
  Description of Artificial Sequence: Synthetic oligonucleotide
  Sense strand starting at position 3270 of SEQ ID NO: 914968
ugguauuaaguacaaguau

SEQ ID NO: 1043747 - RNA, 19 nt, Artificial Sequence
  Description of Artificial Sequence: Synthetic oligonucleotide
  Antisense strand to SEQ ID NO: 1043746
auacuuguacuuaauacca

SEQ ID NO: 1043748 - RNA, 19 nt, Artificial Sequence
  Description of Artificial Sequence: Synthetic oligonucleotide
  Sense strand starting at position 3546 of SEQ ID NO: 914968
ugcuacuauuucucgaguu

SEQ ID NO: 1043749 - RNA, 19 nt, Artificial Sequence
  Description of Artificial Sequence: Synthetic oligonucleotide
  Antisense strand to SEQ ID NO: 1043748
aacucgagaaauaguagca

SEQ ID NO: 1043750 - RNA, 19 nt, Artificial Sequence
  Description of Artificial Sequence: Synthetic oligonucleotide
  Sense strand starting at position 3633 of SEQ ID NO: 914968
cuaauuugguuauaggaau

SEQ ID NO: 1043751 - RNA, 19 nt, Artificial Sequence
  Description of Artificial Sequence: Synthetic oligonucleotide
  Antisense strand to SEQ ID NO: 1043750
auuccuauaaccaaauuag

SEQ ID NO: 1043752 - RNA, 19 nt, Artificial Sequence
  Description of Artificial Sequence: Synthetic oligonucleotide
  Sense strand starting at position 3639 of SEQ ID NO: 914968
ugguuauaggaauguuuaa

SEQ ID NO: 1043753 - RNA, 19 nt, Artificial Sequence
  Description of Artificial Sequence: Synthetic oligonucleotide
  Antisense strand to SEQ ID NO: 1043752
uuaaacauuccuauaacca

SEQ ID NO: 1043754 - RNA, 19 nt, Artificial Sequence
  Description of Artificial Sequence: Synthetic oligonucleotide
  Sense strand starting at position 11 of SEQ ID NO: 914969
gaacguuguauuugggagu

SEQ ID NO: 1043755 - RNA, 19 nt, Artificial Sequence
  Description of Artificial Sequence: Synthetic oligonucleotide
  Antisense strand to SEQ ID NO: 1043754
acucccaaauacaacguuc

SEQ ID NO: 1043756 - RNA, 19 nt, Artificial Sequence
  Description of Artificial Sequence: Synthetic oligonucleotide
  Sense strand starting at position 114 of SEQ ID NO: 914969
aagagaaucucaguuucug

SEQ ID NO: 1043757 - RNA, 19 nt, Artificial Sequence
  Description of Artificial Sequence: Synthetic oligonucleotide
  Antisense strand to SEQ ID NO: 1043756
cagaaacugagauucucuu

SEQ ID NO: 1043758 - RNA, 19 nt, Artificial Sequence
  Description of Artificial Sequence: Synthetic oligonucleotide
  Sense strand starting at position 345 of SEQ ID NO: 914969
ugugcuuaccaauauagga

SEQ ID NO: 1043759 - RNA, 19 nt, Artificial Sequence
  Description of Artificial Sequence: Synthetic oligonucleotide
  Antisense strand to SEQ ID NO: 1043758
uccuauauugguaagcaca

SEQ ID NO: 1043760 - RNA, 19 nt, Artificial Sequence
  Description of Artificial Sequence: Synthetic oligonucleotide
  Sense strand starting at position 466 of SEQ ID NO: 914969
agcauucuugguuauuaac

SEQ ID NO: 1043761 - RNA, 19 nt, Artificial Sequence
  Description of Artificial Sequence: Synthetic oligonucleotide
  Antisense strand to SEQ ID NO: 1043760
guuaauaaccaagaaugcu

SEQ ID NO: 1043762 - RNA, 19 nt, Artificial Sequence
  Description of Artificial Sequence: Synthetic oligonucleotide
  Sense strand starting at position 517 of SEQ ID NO: 914969
aucauucugagagaugugu

SEQ ID NO: 1043763 - RNA, 19 nt, Artificial Sequence
  Description of Artificial Sequence: Synthetic oligonucleotide
  Antisense strand to SEQ ID NO: 1043762
acacaucucucagaaugau

SEQ ID NO: 1043764 - RNA, 19 nt, Artificial Sequence
  Description of Artificial Sequence: Synthetic oligonucleotide
  Sense strand starting at position 521 of SEQ ID NO: 914969
uucugagagauguguaacu

SEQ ID NO: 1043765 - RNA, 19 nt, Artificial Sequence
  Description of Artificial Sequence: Synthetic oligonucleotide
  Antisense strand to SEQ ID NO: 1043764
aguuacacaucucucagaa

SEQ ID NO: 1043766 - RNA, 19 nt, Artificial Sequence
  Description of Artificial Sequence: Synthetic oligonucleotide
  Sense strand starting at position 526 of SEQ ID NO: 914969
agagauguguaacuaaccu

SEQ ID NO: 1043767 - RNA, 19 nt, Artificial Sequence
  Description of Artificial Sequence: Synthetic oligonucleotide
  Antisense strand to SEQ ID NO: 1043766
agguuaguuacacaucucu

SEQ ID NO: 1043768 - RNA, 19 nt, Artificial Sequence
  Description of Artificial Sequence: Synthetic oligonucleotide
  Sense strand starting at position 1404 of SEQ ID NO: 914969
uggaguauuucucuagcuu

SEQ ID NO: 1043769 - RNA, 19 nt, Artificial Sequence
  Description of Artificial Sequence: Synthetic oligonucleotide
  Antisense strand to SEQ ID NO: 1043768
aagcuagagaaauacucca

SEQ ID NO: 1043770 - RNA, 19 nt, Artificial Sequence
  Description of Artificial Sequence: Synthetic oligonucleotide
  Sense strand starting at position 1410 of SEQ ID NO: 914969
auuucucuagcuugcugaa

SEQ ID NO: 1043771 - RNA, 19 nt, Artificial Sequence
  Description of Artificial Sequence: Synthetic oligonucleotide
  Antisense strand to SEQ ID NO: 1043770
uucagcaagcuagagaaau

SEQ ID NO: 1043772 - RNA, 19 nt, Artificial Sequence
  Description of Artificial Sequence: Synthetic oligonucleotide
  Sense strand starting at position 1424 of SEQ ID NO: 914969
cugaaauaauggcaaauuu

SEQ ID NO: 1043773 - RNA, 19 nt, Artificial Sequence
  Description of Artificial Sequence: Synthetic oligonucleotide
  Antisense strand to SEQ ID NO: 1043772
aaauuugccauuauuucag

SEQ ID NO: 1043774 - RNA, 19 nt, Artificial Sequence
  Description of Artificial Sequence: Synthetic oligonucleotide
  Sense strand starting at position 1816 of SEQ ID NO: 914969
guuaguguuaauuaccuga

SEQ ID NO: 1043775 - RNA, 19 nt, Artificial Sequence
  Description of Artificial Sequence: Synthetic oligonucleotide
  Antisense strand to SEQ ID NO: 1043774
ucagguaauuaacacuaac

SEQ ID NO: 1043776 - RNA, 19 nt, Artificial Sequence
  Description of Artificial Sequence: Synthetic oligonucleotide
  Sense strand starting at position 1819 of SEQ ID NO: 914969
aguguuaauuaccugaaca

SEQ ID NO: 1043777 - RNA, 19 nt, Artificial Sequence
  Description of Artificial Sequence: Synthetic oligonucleotide
  Antisense strand to SEQ ID NO: 1043776
uguucagguaauuaacacu

SEQ ID NO: 1043778 - RNA, 19 nt, Artificial Sequence
  Description of Artificial Sequence: Synthetic oligonucleotide
  Sense strand starting at position 2179 of SEQ ID NO: 914969
gcaacacagugauuaaucu

SEQ ID NO: 1043779 - RNA, 19 nt, Artificial Sequence
  Description of Artificial Sequence: Synthetic oligonucleotide
  Antisense strand to SEQ ID NO: 1043778
agauuaaucacuguguugc

SEQ ID NO: 1043780 - RNA, 19 nt, Artificial Sequence
  Description of Artificial Sequence: Synthetic oligonucleotide
  Sense strand starting at position 2186 of SEQ ID NO: 914969
agugauuaaucuccaggaa

SEQ ID NO: 1043781 - RNA, 19 nt, Artificial Sequence
  Description of Artificial Sequence: Synthetic oligonucleotide
  Antisense strand to SEQ ID NO: 1043780
uuccuggagauuaaucacu

SEQ ID NO: 1043782 - RNA, 19 nt, Artificial Sequence
  Description of Artificial Sequence: Synthetic oligonucleotide
  Sense strand starting at position 2189 of SEQ ID NO: 914969
gauuaaucuccaggaagug

SEQ ID NO: 1043783 - RNA, 19 nt, Artificial Sequence
  Description of Artificial Sequence: Synthetic oligonucleotide
  Antisense strand to SEQ ID NO: 1043782
cacuuccuggagauuaauc

SEQ ID NO: 1043784 - RNA, 19 nt, Artificial Sequence
  Description of Artificial Sequence: Synthetic oligonucleotide
  Sense strand starting at position 2213 of SEQ ID NO: 914969
ugucuugguagaggagaaa

SEQ ID NO: 1043785 - RNA, 19 nt, Artificial Sequence
  Description of Artificial Sequence: Synthetic oligonucleotide
  Antisense strand to SEQ ID NO: 1043784
uuucuccucuaccaagaca

SEQ ID NO: 1043786 - RNA, 19 nt, Artificial Sequence
  Description of Artificial Sequence: Synthetic oligonucleotide
  Sense strand starting at position 2279 of SEQ ID NO: 914969
acaauuuauguuuguccuu

SEQ ID NO: 1043787 - RNA, 19 nt, Artificial Sequence
  Description of Artificial Sequence: Synthetic oligonucleotide
  Antisense strand to SEQ ID NO: 1043786
aaggacaaacauaaauugu

SEQ ID NO: 1043788 - RNA, 19 nt, Artificial Sequence
  Description of Artificial Sequence: Synthetic oligonucleotide
  Sense strand starting at position 2307 of SEQ ID NO: 914969
gaaguagguugacuuggua

SEQ ID NO: 1043789 - RNA, 19 nt, Artificial Sequence
  Description of Artificial Sequence: Synthetic oligonucleotide
  Antisense strand to SEQ ID NO: 1043788
uaccaagucaaccuacuuc

SEQ ID NO: 1043790 - RNA, 19 nt, Artificial Sequence
  Description of Artificial Sequence: Synthetic oligonucleotide
  Sense strand starting at position 2329 of SEQ ID NO: 914969
aucagaauugugcagaacu

SEQ ID NO: 1043791 - RNA, 19 nt, Artificial Sequence
  Description of Artificial Sequence: Synthetic oligonucleotide
  Antisense strand to SEQ ID NO: 1043790
aguucugcacaauucugau

SEQ ID NO: 1043792 - RNA, 19 nt, Artificial Sequence
  Description of Artificial Sequence: Synthetic oligonucleotide
  Sense strand starting at position 2403 of SEQ ID NO: 914969
guggaaaguguacauacau

SEQ ID NO: 1043793 - RNA, 19 nt, Artificial Sequence
  Description of Artificial Sequence: Synthetic oligonucleotide
  Antisense strand to SEQ ID NO: 1043792
auguauguacacuuuccac

SEQ ID NO: 1043794 - RNA, 19 nt, Artificial Sequence
  Description of Artificial Sequence: Synthetic oligonucleotide
  Sense strand starting at position 2420 of SEQ ID NO: 914969
auagcuauagucuauacua

SEQ ID NO: 1043795 - RNA, 19 nt, Artificial Sequence
  Description of Artificial Sequence: Synthetic oligonucleotide
  Antisense strand to SEQ ID NO: 1043794
uaguauagacuauagcuau

SEQ ID NO: 1043796 - RNA, 19 nt, Artificial Sequence
  Description of Artificial Sequence: Synthetic oligonucleotide
  Sense strand starting at position 2422 of SEQ ID NO: 914969
agcuauagucuauacuaua

SEQ ID NO: 1043797 - RNA, 19 nt, Artificial Sequence
  Description of Artificial Sequence: Synthetic oligonucleotide
  Antisense strand to SEQ ID NO: 1043796
uauaguauagacuauagcu

SEQ ID NO: 1043798 - RNA, 19 nt, Artificial Sequence
  Description of Artificial Sequence: Synthetic oligonucleotide
  Sense strand starting at position 2515 of SEQ ID NO: 914969
auuuguaaugccugcuauu

SEQ ID NO: 1043799 - RNA, 19 nt, Artificial Sequence
  Description of Artificial Sequence: Synthetic oligonucleotide
  Antisense strand to SEQ ID NO: 1043798
aauagcaggcauuacaaau

SEQ ID NO: 1043800 - RNA, 19 nt, Artificial Sequence
  Description of Artificial Sequence: Synthetic oligonucleotide
  Sense strand starting at position 2531 of SEQ ID NO: 914969
auugacugucguuggauuu

SEQ ID NO: 1043801 - RNA, 19 nt, Artificial Sequence
  Description of Artificial Sequence: Synthetic oligonucleotide
  Antisense strand to SEQ ID NO: 1043800
aaauccaacgacagucaau

SEQ ID NO: 1043802 - RNA, 19 nt, Artificial Sequence
  Description of Artificial Sequence: Synthetic oligonucleotide
  Sense strand starting at position 2541 of SEQ ID NO: 914969
guuggauuugcugguucuu

SEQ ID NO: 1043803 - RNA, 19 nt, Artificial Sequence
  Description of Artificial Sequence: Synthetic oligonucleotide
  Antisense strand to SEQ ID NO: 1043802
aagaaccagcaaauccaac

SEQ ID NO: 1043804 - RNA, 19 nt, Artificial Sequence
  Description of Artificial Sequence: Synthetic oligonucleotide
  Sense strand starting at position 2719 of SEQ ID NO: 914969
cauugcuuaccggacugaa

SEQ ID NO: 1043805 - RNA, 19 nt, Artificial Sequence
  Description of Artificial Sequence: Synthetic oligonucleotide
  Antisense strand to SEQ ID NO: 1043804
uucaguccgguaagcaaug

SEQ ID NO: 1043806 - RNA, 19 nt, Artificial Sequence
  Description of Artificial Sequence: Synthetic oligonucleotide
  Sense strand starting at position 2817 of SEQ ID NO: 914969
augcuuugaaguugaagaa

SEQ ID NO: 1043807 - RNA, 19 nt, Artificial Sequence
  Description of Artificial Sequence: Synthetic oligonucleotide
  Antisense strand to SEQ ID NO: 1043806
uucuucaacuucaaagcau

SEQ ID NO: 1043808 - RNA, 19 nt, Artificial Sequence
  Description of Artificial Sequence: Synthetic oligonucleotide
  Sense strand starting at position 2946 of SEQ ID NO: 914969
gcuugaaugcaagacucua

SEQ ID NO: 1043809 - RNA, 19 nt, Artificial Sequence
  Description of Artificial Sequence: Synthetic oligonucleotide
  Antisense strand to SEQ ID NO: 1043808
uagagucuugcauucaagc

SEQ ID NO: 1043810 - RNA, 19 nt, Artificial Sequence
  Description of Artificial Sequence: Synthetic oligonucleotide
  Sense strand starting at position 3087 of SEQ ID NO: 914969
ugcuuauuuguuugcuaaa

SEQ ID NO: 1043811 - RNA, 19 nt, Artificial Sequence
  Description of Artificial Sequence: Synthetic oligonucleotide
  Antisense strand to SEQ ID NO: 1043810
uuuagcaaacaaauaagca

SEQ ID NO: 1043812 - RNA, 19 nt, Artificial Sequence
  Description of Artificial Sequence: Synthetic oligonucleotide
  Sense strand starting at position 3088 of SEQ ID NO: 914969
gcuuauuuguuugcuaaag

SEQ ID NO: 1043813 - RNA, 19 nt, Artificial Sequence
  Description of Artificial Sequence: Synthetic oligonucleotide
  Antisense strand to SEQ ID NO: 1043812
cuuuagcaaacaaauaagc

SEQ ID NO: 1043814 - RNA, 19 nt, Artificial Sequence
  Description of Artificial Sequence: Synthetic oligonucleotide
  Sense strand starting at position 3094 of SEQ ID NO: 914969
uuguuugcuaaagggaaga

SEQ ID NO: 1043815 - RNA, 19 nt, Artificial Sequence
  Description of Artificial Sequence: Synthetic oligonucleotide
  Antisense strand to SEQ ID NO: 1043814
ucuucccuuuagcaaacaa

SEQ ID NO: 1043816 - RNA, 19 nt, Artificial Sequence
  Description of Artificial Sequence: Synthetic oligonucleotide
  Sense strand starting at position 3303 of SEQ ID NO: 914969
gcaauaagaucccuaugac

SEQ ID NO: 1043817 - RNA, 19 nt, Artificial Sequence
  Description of Artificial Sequence: Synthetic oligonucleotide
  Antisense strand to SEQ ID NO: 1043816
gucauagggaucuuauugc

SEQ ID NO: 1043818 - RNA, 19 nt, Artificial Sequence
  Description of Artificial Sequence: Synthetic oligonucleotide
  Sense strand starting at position 3322 of SEQ ID NO: 914969
ugaagaugcccacacaguu

SEQ ID NO: 1043819 - RNA, 19 nt, Artificial Sequence
  Description of Artificial Sequence: Synthetic oligonucleotide
  Antisense strand to SEQ ID NO: 1043818
aacugugugggcaucuuca

SEQ ID NO: 1043820 - RNA, 19 nt, Artificial Sequence
  Description of Artificial Sequence: Synthetic oligonucleotide
  Sense strand starting at position 3613 of SEQ ID NO: 914969
augucuuguccugauugaa

SEQ ID NO: 1043821 - RNA, 19 nt, Artificial Sequence
  Description of Artificial Sequence: Synthetic oligonucleotide
  Antisense strand to SEQ ID NO: 1043820
uucaaucaggacaagacau

SEQ ID NO: 1043822 - RNA, 19 nt, Artificial Sequence
  Description of Artificial Sequence: Synthetic oligonucleotide
  Sense strand starting at position 3616 of SEQ ID NO: 914969
ucuuguccugauugaaaua

SEQ ID NO: 1043823 - RNA, 19 nt, Artificial Sequence
  Description of Artificial Sequence: Synthetic oligonucleotide
  Antisense strand to SEQ ID NO: 1043822
uauuucaaucaggacaaga

SEQ ID NO: 1043824 - RNA, 19 nt, Artificial Sequence
  Description of Artificial Sequence: Synthetic oligonucleotide
  Sense strand starting at position 3650 of SEQ ID NO: 914969
gccacauugauaugaggac

SEQ ID NO: 1043825 - RNA, 19 nt, Artificial Sequence
  Description of Artificial Sequence: Synthetic oligonucleotide
  Antisense strand to SEQ ID NO: 1043824
guccucauaucaauguggc

SEQ ID NO: 1043826 - RNA, 19 nt, Artificial Sequence
  Description of Artificial Sequence: Synthetic oligonucleotide
  Sense strand starting at position 3889 of SEQ ID NO: 914969
uuaagaugugauuggcaaa

SEQ ID NO: 1043827 - RNA, 19 nt, Artificial Sequence
  Description of Artificial Sequence: Synthetic oligonucleotide
  Antisense strand to SEQ ID NO: 1043826
uuugccaaucacaucuuaa

SEQ ID NO: 1043828 - RNA, 19 nt, Artificial Sequence
  Description of Artificial Sequence: Synthetic oligonucleotide
  Sense strand starting at position 3965 of SEQ ID NO: 914969
cgacgacuucccugaaaga

SEQ ID NO: 1043829 - RNA, 19 nt, Artificial Sequence
  Description of Artificial Sequence: Synthetic oligonucleotide
  Antisense strand to SEQ ID NO: 1043828
ucuuucagggaagucgucg

SEQ ID NO: 1043830 - RNA, 19 nt, Artificial Sequence
  Description of Artificial Sequence: Synthetic oligonucleotide
  Sense strand starting at position 3975 of SEQ ID NO: 914969
ccugaaagauguuucccaa

SEQ ID NO: 1043831 - RNA, 19 nt, Artificial Sequence
  Description of Artificial Sequence: Synthetic oligonucleotide
  Antisense strand to SEQ ID NO: 1043830
uugggaaacaucuuucagg

SEQ ID NO: 1043832 - RNA, 19 nt, Artificial Sequence
  Description of Artificial Sequence: Synthetic oligonucleotide
  Sense strand starting at position 3978 of SEQ ID NO: 914969
gaaagauguuucccaaguc

SEQ ID NO: 1043833 - RNA, 19 nt, Artificial Sequence
  Description of Artificial Sequence: Synthetic oligonucleotide
  Antisense strand to SEQ ID NO: 1043832
gacuugggaaacaucuuuc

SEQ ID NO: 1043834 - RNA, 19 nt, Artificial Sequence
  Description of Artificial Sequence: Synthetic oligonucleotide
  Sense strand starting at position 237 of SEQ ID NO: 914970
acaagaucaccuugugagu

SEQ ID NO: 1043835 - RNA, 19 nt, Artificial Sequence
  Description of Artificial Sequence: Synthetic oligonucleotide
  Antisense strand to SEQ ID NO: 1043834
acucacaaggugaucuugu

SEQ ID NO: 1043836 - RNA, 19 nt, Artificial Sequence
  Description of Artificial Sequence: Synthetic oligonucleotide
  Sense strand starting at position 243 of SEQ ID NO: 914970
ucaccuugugaguaacuga

SEQ ID NO: 1043837 - RNA, 19 nt, Artificial Sequence
  Description of Artificial Sequence: Synthetic oligonucleotide
  Antisense strand to SEQ ID NO: 1043836
ucaguuacucacaagguga

SEQ ID NO: 1043838 - RNA, 19 nt, Artificial Sequence
  Description of Artificial Sequence: Synthetic oligonucleotide
  Sense strand starting at position 276 of SEQ ID NO: 914970
gaacucaaguguucugacu

SEQ ID NO: 1043839 - RNA, 19 nt, Artificial Sequence
  Description of Artificial Sequence: Synthetic oligonucleotide
  Antisense strand to SEQ ID NO: 1043838
agucagaacacuugaguuc

SEQ ID NO: 1043840 - RNA, 19 nt, Artificial Sequence
  Description of Artificial Sequence: Synthetic oligonucleotide
  Sense strand starting at position 306 of SEQ ID NO: 914970
gaaacauguguaggguuau

SEQ ID NO: 1043841 - RNA, 19 nt, Artificial Sequence
  Description of Artificial Sequence: Synthetic oligonucleotide
  Antisense strand to SEQ ID NO: 1043840
auaacccuacacauguuuc

SEQ ID NO: 1043842 - RNA, 19 nt, Artificial Sequence
  Description of Artificial Sequence: Synthetic oligonucleotide
  Sense strand starting at position 320 of SEQ ID NO: 914970
guuauaugaugccugauaa

SEQ ID NO: 1043843 - RNA, 19 nt, Artificial Sequence
  Description of Artificial Sequence: Synthetic oligonucleotide
  Antisense strand to SEQ ID NO: 1043842
uuaucaggcaucauauaac

SEQ ID NO: 1043844 - RNA, 19 nt, Artificial Sequence
  Description of Artificial Sequence: Synthetic oligonucleotide
  Sense strand starting at position 321 of SEQ ID NO: 914970
uuauaugaugccugauaau

SEQ ID NO: 1043845 - RNA, 19 nt, Artificial Sequence
  Description of Artificial Sequence: Synthetic oligonucleotide
  Antisense strand to SEQ ID NO: 1043844
auuaucaggcaucauauaa

SEQ ID NO: 1043846 - RNA, 19 nt, Artificial Sequence
  Description of Artificial Sequence: Synthetic oligonucleotide
  Sense strand starting at position 403 of SEQ ID NO: 914970
augguuaccugucuuagga

SEQ ID NO: 1043847 - RNA, 19 nt, Artificial Sequence
  Description of Artificial Sequence: Synthetic oligonucleotide
  Antisense strand to SEQ ID NO: 1043846
uccuaagacagguaaccau

SEQ ID NO: 1043848 - RNA, 19 nt, Artificial Sequence
  Description of Artificial Sequence: Synthetic oligonucleotide
  Sense strand starting at position 477 of SEQ ID NO: 914970
uccuguuaccaacaauugu

SEQ ID NO: 1043849 - RNA, 19 nt, Artificial Sequence
  Description of Artificial Sequence: Synthetic oligonucleotide
  Antisense strand to SEQ ID NO: 1043848
acaauuguugguaacagga

SEQ ID NO: 1043850 - RNA, 19 nt, Artificial Sequence
  Description of Artificial Sequence: Synthetic oligonucleotide
  Sense strand starting at position 628 of SEQ ID NO: 914970
cucugcuuuguugagauga

SEQ ID NO: 1043851 - RNA, 19 nt, Artificial Sequence
  Description of Artificial Sequence: Synthetic oligonucleotide
  Antisense strand to SEQ ID NO: 1043850
ucaucucaacaaagcagag

SEQ ID NO: 1043852 - RNA, 19 nt, Artificial Sequence
  Description of Artificial Sequence: Synthetic oligonucleotide
  Sense strand starting at position 740 of SEQ ID NO: 914970
agaguacucuuucuggaga

SEQ ID NO: 1043853 - RNA, 19 nt, Artificial Sequence
  Description of Artificial Sequence: Synthetic oligonucleotide
  Antisense strand to SEQ ID NO: 1043852
ucuccagaaagaguacucu

SEQ ID NO: 1043854 - RNA, 19 nt, Artificial Sequence
  Description of Artificial Sequence: Synthetic oligonucleotide
  Sense strand starting at position 743 of SEQ ID NO: 914970
guacucuuucuggagaauu

SEQ ID NO: 1043855 - RNA, 19 nt, Artificial Sequence
  Description of Artificial Sequence: Synthetic oligonucleotide
  Antisense strand to SEQ ID NO: 1043854
aauucuccagaaagaguac

SEQ ID NO: 1043856 - RNA, 19 nt, Artificial Sequence
  Description of Artificial Sequence: Synthetic oligonucleotide
  Sense strand starting at position 992 of SEQ ID NO: 914970
uuagacugcuuauuaagaa

SEQ ID NO: 1043857 - RNA, 19 nt, Artificial Sequence
  Description of Artificial Sequence: Synthetic oligonucleotide
  Antisense strand to SEQ ID NO: 1043856
uucuuaauaagcagucuaa

SEQ ID NO: 1043858 - RNA, 19 nt, Artificial Sequence
  Description of Artificial Sequence: Synthetic oligonucleotide
  Sense strand starting at position 1010 of SEQ ID NO: 914970
agcauauugcaaggaacau

SEQ ID NO: 1043859 - RNA, 19 nt, Artificial Sequence
  Description of Artificial Sequence: Synthetic oligonucleotide
  Antisense strand to SEQ ID NO: 1043858
auguuccuugcaauaugcu

SEQ ID NO: 1043860 - RNA, 19 nt, Artificial Sequence
  Description of Artificial Sequence: Synthetic oligonucleotide
  Sense strand starting at position 1044 of SEQ ID NO: 914970
agcacuuguccuugauuuc

SEQ ID NO: 1043861 - RNA, 19 nt, Artificial Sequence
  Description of Artificial Sequence: Synthetic oligonucleotide
  Antisense strand to SEQ ID NO: 1043860
gaaaucaaggacaagugcu

SEQ ID NO: 1043862 - RNA, 19 nt, Artificial Sequence
  Description of Artificial Sequence: Synthetic oligonucleotide
  Sense strand starting at position 1081 of SEQ ID NO: 914970
guacacuaaucaguuuaac

SEQ ID NO: 1043863 - RNA, 19 nt, Artificial Sequence
  Description of Artificial Sequence: Synthetic oligonucleotide
  Antisense strand to SEQ ID NO: 1043862
guuaaacugauuaguguac

SEQ ID NO: 1043864 - RNA, 19 nt, Artificial Sequence
  Description of Artificial Sequence: Synthetic oligonucleotide
  Sense strand starting at position 1310 of SEQ ID NO: 914970
gucauugacuuguuggaga

SEQ ID NO: 1043865 - RNA, 19 nt, Artificial Sequence
  Description of Artificial Sequence: Synthetic oligonucleotide
  Antisense strand to SEQ ID NO: 1043864
ucuccaacaagucaaugac

SEQ ID NO: 1043866 - RNA, 19 nt, Artificial Sequence
  Description of Artificial Sequence: Synthetic oligonucleotide
  Sense strand starting at position 1312 of SEQ ID NO: 914970
cauugacuuguuggagagu

SEQ ID NO: 1043867 - RNA, 19 nt, Artificial Sequence
  Description of Artificial Sequence: Synthetic oligonucleotide
  Antisense strand to SEQ ID NO: 1043866
acucuccaacaagucaaug

SEQ ID NO: 1043868 - RNA, 19 nt, Artificial Sequence
  Description of Artificial Sequence: Synthetic oligonucleotide
  Sense strand starting at position 1315 of SEQ ID NO: 914970
ugacuuguuggagaguugu

SEQ ID NO: 1043869 - RNA, 19 nt, Artificial Sequence
  Description of Artificial Sequence: Synthetic oligonucleotide
  Antisense strand to SEQ ID NO: 1043868
acaacucuccaacaaguca

SEQ ID NO: 1043870 - RNA, 19 nt, Artificial Sequence
  Description of Artificial Sequence: Synthetic oligonucleotide
  Sense strand starting at position 1426 of SEQ ID NO: 914970
ggcaauauucuguauacua

SEQ ID NO: 1043871 - RNA, 19 nt, Artificial Sequence
  Description of Artificial Sequence: Synthetic oligonucleotide
  Antisense strand to SEQ ID NO: 1043870
uaguauacagaauauugcc

SEQ ID NO: 1043872 - RNA, 19 nt, Artificial Sequence
  Description of Artificial Sequence: Synthetic oligonucleotide
  Sense strand starting at position 1600 of SEQ ID NO: 914970
gaugaccuuccugagucua

SEQ ID NO: 1043873 - RNA, 19 nt, Artificial Sequence
  Description of Artificial Sequence: Synthetic oligonucleotide
  Antisense strand to SEQ ID NO: 1043872
uagacucaggaaggucauc

SEQ ID NO: 1043874 - RNA, 19 nt, Artificial Sequence
  Description of Artificial Sequence: Synthetic oligonucleotide
  Sense strand starting at position 1608 of SEQ ID NO: 914970
uccugagucuaucuacaua

SEQ ID NO: 1043875 - RNA, 19 nt, Artificial Sequence
  Description of Artificial Sequence: Synthetic oligonucleotide
  Antisense strand to SEQ ID NO: 1043874
uauguagauagacucagga

SEQ ID NO: 1043876 - RNA, 19 nt, Artificial Sequence
  Description of Artificial Sequence: Synthetic oligonucleotide
  Sense strand starting at position 1680 of SEQ ID NO: 914970
uuuaauggcuacuugauga

SEQ ID NO: 1043877 - RNA, 19 nt, Artificial Sequence
  Description of Artificial Sequence: Synthetic oligonucleotide
  Antisense strand to SEQ ID NO: 1043876
ucaucaaguagccauuaaa

SEQ ID NO: 1043878 - RNA, 19 nt, Artificial Sequence
  Description of Artificial Sequence: Synthetic oligonucleotide
  Sense strand starting at position 1965 of SEQ ID NO: 914970
agagacaauuguucuugga

SEQ ID NO: 1043879 - RNA, 19 nt, Artificial Sequence
  Description of Artificial Sequence: Synthetic oligonucleotide
  Antisense strand to SEQ ID NO: 1043878
uccaagaacaauugucucu

SEQ ID NO: 1043880 - RNA, 19 nt, Artificial Sequence
  Description of Artificial Sequence: Synthetic oligonucleotide
  Sense strand starting at position 1969 of SEQ ID NO: 914970
acaauuguucuuggaccua

SEQ ID NO: 1043881 - RNA, 19 nt, Artificial Sequence
  Description of Artificial Sequence: Synthetic oligonucleotide
  Antisense strand to SEQ ID NO: 1043880
uagguccaagaacaauugu

SEQ ID NO: 1043882 - RNA, 19 nt, Artificial Sequence
  Description of Artificial Sequence: Synthetic oligonucleotide
  Sense strand starting at position 2049 of SEQ ID NO: 914970
uguggaaauaggugacuca

SEQ ID NO: 1043883 - RNA, 19 nt, Artificial Sequence
  Description of Artificial Sequence: Synthetic oligonucleotide
  Antisense strand to SEQ ID NO: 1043882
ugagucaccuauuuccaca

SEQ ID NO: 1043884 - RNA, 19 nt, Artificial Sequence
  Description of Artificial Sequence: Synthetic oligonucleotide
  Sense strand starting at position 2094 of SEQ ID NO: 914970
ucuacagaacuuugaaagu

SEQ ID NO: 1043885 - RNA, 19 nt, Artificial Sequence
  Description of Artificial Sequence: Synthetic oligonucleotide
  Antisense strand to SEQ ID NO: 1043884
acuuucaaaguucuguaga

SEQ ID NO: 1043886 - RNA, 19 nt, Artificial Sequence
  Description of Artificial Sequence: Synthetic oligonucleotide
  Sense strand starting at position 2353 of SEQ ID NO: 914970
gguaccauguauucuuaaa

SEQ ID NO: 1043887 - RNA, 19 nt, Artificial Sequence
  Description of Artificial Sequence: Synthetic oligonucleotide
  Antisense strand to SEQ ID NO: 1043886
uuuaagaauacaugguacc

SEQ ID NO: 1043888 - RNA, 19 nt, Artificial Sequence
  Description of Artificial Sequence: Synthetic oligonucleotide
  Sense strand starting at position 2562 of SEQ ID NO: 914970
uggauuaguggccacucua

SEQ ID NO: 1043889 - RNA, 19 nt, Artificial Sequence
  Description of Artificial Sequence: Synthetic oligonucleotide
  Antisense strand to SEQ ID NO: 1043888
uagaguggccacuaaucca

SEQ ID NO: 1043890 - RNA, 19 nt, Artificial Sequence
  Description of Artificial Sequence: Synthetic oligonucleotide
  Sense strand starting at position 2569 of SEQ ID NO: 914970
guggccacucuauauacaa

SEQ ID NO: 1043891 - RNA, 19 nt, Artificial Sequence
  Description of Artificial Sequence: Synthetic oligonucleotide
  Antisense strand to SEQ ID NO: 1043890
uuguauauagaguggccac

SEQ ID NO: 1043892 - RNA, 19 nt, Artificial Sequence
  Description of Artificial Sequence: Synthetic oligonucleotide
  Sense strand starting at position 2808 of SEQ ID NO: 914970
agauucuuccaaggcuaga

SEQ ID NO: 1043893 - RNA, 19 nt, Artificial Sequence
  Description of Artificial Sequence: Synthetic oligonucleotide
  Antisense strand to SEQ ID NO: 1043892
ucuagccuuggaagaaucu

SEQ ID NO: 1043894 - RNA, 19 nt, Artificial Sequence
  Description of Artificial Sequence: Synthetic oligonucleotide
  Sense strand starting at position 2933 of SEQ ID NO: 914970
uacguauagcaguaagaau

SEQ ID NO: 1043895 - RNA, 19 nt, Artificial Sequence
  Description of Artificial Sequence: Synthetic oligonucleotide
  Antisense strand to SEQ ID NO: 1043894
auucuuacugcuauacgua

SEQ ID NO: 1043896 - RNA, 19 nt, Artificial Sequence
  Description of Artificial Sequence: Synthetic oligonucleotide
  Sense strand starting at position 3006 of SEQ ID NO: 914970
aggccaagaugauaauuua

SEQ ID NO: 1043897 - RNA, 19 nt, Artificial Sequence
  Description of Artificial Sequence: Synthetic oligonucleotide
  Antisense strand to SEQ ID NO: 1043896
uaaauuaucaucuuggccu

SEQ ID NO: 1043898 - RNA, 19 nt, Artificial Sequence
  Description of Artificial Sequence: Synthetic oligonucleotide
  Sense strand starting at position 3141 of SEQ ID NO: 914970
gggagaacaccauggcuuu

SEQ ID NO: 1043899 - RNA, 19 nt, Artificial Sequence
  Description of Artificial Sequence: Synthetic oligonucleotide
  Antisense strand to SEQ ID NO: 1043898
aaagccaugguguucuccc

SEQ ID NO: 1043900 - RNA, 19 nt, Artificial Sequence
  Description of Artificial Sequence: Synthetic oligonucleotide
  Sense strand starting at position 3187 of SEQ ID NO: 914970
ccaaauaugcuggagcuaa

SEQ ID NO: 1043901 - RNA, 19 nt, Artificial Sequence
  Description of Artificial Sequence: Synthetic oligonucleotide
  Antisense strand to SEQ ID NO: 1043900
uuagcuccagcauauuugg

SEQ ID NO: 1043902 - RNA, 19 nt, Artificial Sequence
  Description of Artificial Sequence: Synthetic oligonucleotide
  Sense strand starting at position 3341 of SEQ ID NO: 914970
uaacuagaguaauugguau

SEQ ID NO: 1043903 - RNA, 19 nt, Artificial Sequence
  Description of Artificial Sequence: Synthetic oligonucleotide
  Antisense strand to SEQ ID NO: 1043902
auaccaauuacucuaguua

SEQ ID NO: 1043904 - RNA, 19 nt, Artificial Sequence
  Description of Artificial Sequence: Synthetic oligonucleotide
  Sense strand starting at position 3353 of SEQ ID NO: 914970
uugguauccuuagucagag

SEQ ID NO: 1043905 - RNA, 19 nt, Artificial Sequence
  Description of Artificial Sequence: Synthetic oligonucleotide
  Antisense strand to SEQ ID NO: 1043904
cucugacuaaggauaccaa

SEQ ID NO: 1043906 - RNA, 19 nt, Artificial Sequence
  Description of Artificial Sequence: Synthetic oligonucleotide
  Sense strand starting at position 3355 of SEQ ID NO: 914970
gguauccuuagucagaguu

SEQ ID NO: 1043907 - RNA, 19 nt, Artificial Sequence
  Description of Artificial Sequence: Synthetic oligonucleotide
  Antisense strand to SEQ ID NO: 1043906
aacucugacuaaggauacc

SEQ ID NO: 1043908 - RNA, 19 nt, Artificial Sequence
  Description of Artificial Sequence: Synthetic oligonucleotide
  Sense strand starting at position 3369 of SEQ ID NO: 914970
gaguuugacaugugauaag

SEQ ID NO: 1043909 - RNA, 19 nt, Artificial Sequence
  Description of Artificial Sequence: Synthetic oligonucleotide
  Antisense strand to SEQ ID NO: 1043908
cuuaucacaugucaaacuc

SEQ ID NO: 1043910 - RNA, 19 nt, Artificial Sequence
  Description of Artificial Sequence: Synthetic oligonucleotide
  Sense strand starting at position 3379 of SEQ ID NO: 914970
ugugauaaggugcaccaua

SEQ ID NO: 1043911 - RNA, 19 nt, Artificial Sequence
  Description of Artificial Sequence: Synthetic oligonucleotide
  Antisense strand to SEQ ID NO: 1043910
uauggugcaccuuaucaca

SEQ ID NO: 1043912 - RNA, 19 nt, Artificial Sequence
  Description of Artificial Sequence: Synthetic oligonucleotide
  Sense strand starting at position 3887 of SEQ ID NO: 914970
ccaauaaaggacuguuauc

SEQ ID NO: 1043913 - RNA, 19 nt, Artificial Sequence
  Description of Artificial Sequence: Synthetic oligonucleotide
  Antisense strand to SEQ ID NO: 1043912
gauaacaguccuuuauugg

SEQ ID NO: 1043914 - RNA, 19 nt, Artificial Sequence
  Description of Artificial Sequence: Synthetic oligonucleotide
  Sense strand starting at position 42 of SEQ ID NO: 914971
uugacuucucuugagguau

SEQ ID NO: 1043915 - RNA, 19 nt, Artificial Sequence
  Description of Artificial Sequence: Synthetic oligonucleotide
  Antisense strand to SEQ ID NO: 1043914
auaccucaagagaagucaa

SEQ ID NO: 1043916 - RNA, 19 nt, Artificial Sequence
  Description of Artificial Sequence: Synthetic oligonucleotide
  Sense strand starting at position 50 of SEQ ID NO: 914971
ucuugagguauuuguugca

SEQ ID NO: 1043917 - RNA, 19 nt, Artificial Sequence
  Description of Artificial Sequence: Synthetic oligonucleotide
  Antisense strand to SEQ ID NO: 1043916
ugcaacaaauaccucaaga

SEQ ID NO: 1043918 - RNA, 19 nt, Artificial Sequence
  Description of Artificial Sequence: Synthetic oligonucleotide
  Sense strand starting at position 288 of SEQ ID NO: 914971
aaaguaacucuuuggaagu

SEQ ID NO: 1043919 - RNA, 19 nt, Artificial Sequence
  Description of Artificial Sequence: Synthetic oligonucleotide
  Antisense strand to SEQ ID NO: 1043918
acuuccaaagaguuacuuu

SEQ ID NO: 1043920 - RNA, 19 nt, Artificial Sequence
  Description of Artificial Sequence: Synthetic oligonucleotide
  Sense strand starting at position 751 of SEQ ID NO: 914971
acaagagugucauuaaucu

SEQ ID NO: 1043921 - RNA, 19 nt, Artificial Sequence
  Description of Artificial Sequence: Synthetic oligonucleotide
  Antisense strand to SEQ ID NO: 1043920
agauuaaugacacucuugu

SEQ ID NO: 1043922 - RNA, 19 nt, Artificial Sequence
  Description of Artificial Sequence: Synthetic oligonucleotide
  Sense strand starting at position 805 of SEQ ID NO: 914971
ugucacaugggcuacuaaa

SEQ ID NO: 1043923 - RNA, 19 nt, Artificial Sequence
  Description of Artificial Sequence: Synthetic oligonucleotide
  Antisense strand to SEQ ID NO: 1043922
uuuaguagcccaugugaca

SEQ ID NO: 1043924 - RNA, 19 nt, Artificial Sequence
  Description of Artificial Sequence: Synthetic oligonucleotide
  Sense strand starting at position 934 of SEQ ID NO: 914971
augaauuaacugugagcac

SEQ ID NO: 1043925 - RNA, 19 nt, Artificial Sequence
  Description of Artificial Sequence: Synthetic oligonucleotide
  Antisense strand to SEQ ID NO: 1043924
gugcucacaguuaauucau

SEQ ID NO: 1043926 - RNA, 19 nt, Artificial Sequence
  Description of Artificial Sequence: Synthetic oligonucleotide
  Sense strand starting at position 946 of SEQ ID NO: 914971
ugagcacuuggccacauua

SEQ ID NO: 1043927 - RNA, 19 nt, Artificial Sequence
  Description of Artificial Sequence: Synthetic oligonucleotide
  Antisense strand to SEQ ID NO: 1043926
uaauguggccaagugcuca

SEQ ID NO: 1043928 - RNA, 19 nt, Artificial Sequence
  Description of Artificial Sequence: Synthetic oligonucleotide
  Sense strand starting at position 1014 of SEQ ID NO: 914971
ccaauaagguucuugugag

SEQ ID NO: 1043929 - RNA, 19 nt, Artificial Sequence
  Description of Artificial Sequence: Synthetic oligonucleotide
  Antisense strand to SEQ ID NO: 1043928
cucacaagaaccuuauugg

SEQ ID NO: 1043930 - RNA, 19 nt, Artificial Sequence
  Description of Artificial Sequence: Synthetic oligonucleotide
  Sense strand starting at position 1046 of SEQ ID NO: 914971
auuugugaaauguguagca

SEQ ID NO: 1043931 - RNA, 19 nt, Artificial Sequence
  Description of Artificial Sequence: Synthetic oligonucleotide
  Antisense strand to SEQ ID NO: 1043930
ugcuacacauuucacaaau

SEQ ID NO: 1043932 - RNA, 19 nt, Artificial Sequence
  Description of Artificial Sequence: Synthetic oligonucleotide
  Sense strand starting at position 1059 of SEQ ID NO: 914971
guagcaguugccuugcaua

SEQ ID NO: 1043933 - RNA, 19 nt, Artificial Sequence
  Description of Artificial Sequence: Synthetic oligonucleotide
  Antisense strand to SEQ ID NO: 1043932
uaugcaaggcaacugcuac

SEQ ID NO: 1043934 - RNA, 19 nt, Artificial Sequence
  Description of Artificial Sequence: Synthetic oligonucleotide
  Sense strand starting at position 1188 of SEQ ID NO: 914971
agagauuugugacagaauu

SEQ ID NO: 1043935 - RNA, 19 nt, Artificial Sequence
  Description of Artificial Sequence: Synthetic oligonucleotide
  Antisense strand to SEQ ID NO: 1043934
aauucugucacaaaucucu

SEQ ID NO: 1043936 - RNA, 19 nt, Artificial Sequence
  Description of Artificial Sequence: Synthetic oligonucleotide
  Sense strand starting at position 1313 of SEQ ID NO: 914971
caaucugaugcugggaaau

SEQ ID NO: 1043937 - RNA, 19 nt, Artificial Sequence
  Description of Artificial Sequence: Synthetic oligonucleotide
  Antisense strand to SEQ ID NO: 1043936
auuucccagcaucagauug

SEQ ID NO: 1043938 - RNA, 19 nt, Artificial Sequence
  Description of Artificial Sequence: Synthetic oligonucleotide
  Sense strand starting at position 1446 of SEQ ID NO: 914971
auaguaacuugauugcaga

SEQ ID NO: 1043939 - RNA, 19 nt, Artificial Sequence
  Description of Artificial Sequence: Synthetic oligonucleotide
  Antisense strand to SEQ ID NO: 1043938
ucugcaaucaaguuacuau

SEQ ID NO: 1043940 - RNA, 19 nt, Artificial Sequence
  Description of Artificial Sequence: Synthetic oligonucleotide
  Sense strand starting at position 1456 of SEQ ID NO: 914971
gauugcagauauccuggaa

SEQ ID NO: 1043941 - RNA, 19 nt, Artificial Sequence
  Description of Artificial Sequence: Synthetic oligonucleotide
  Antisense strand to SEQ ID NO: 1043940
uuccaggauaucugcaauc

SEQ ID NO: 1043942 - RNA, 19 nt, Artificial Sequence
  Description of Artificial Sequence: Synthetic oligonucleotide
  Sense strand starting at position 1459 of SEQ ID NO: 914971
ugcagauauccuggaagga

SEQ ID NO: 1043943 - RNA, 19 nt, Artificial Sequence
  Description of Artificial Sequence: Synthetic oligonucleotide
  Antisense strand to SEQ ID NO: 1043942
uccuuccaggauaucugca

SEQ ID NO: 1043944 - RNA, 19 nt, Artificial Sequence
  Description of Artificial Sequence: Synthetic oligonucleotide
  Sense strand starting at position 2244 of SEQ ID NO: 914971
uccugaaguuauguggaua

SEQ ID NO: 1043945 - RNA, 19 nt, Artificial Sequence
  Description of Artificial Sequence: Synthetic oligonucleotide
  Antisense strand to SEQ ID NO: 1043944
uauccacauaacuucagga

SEQ ID NO: 1043946 - RNA, 19 nt, Artificial Sequence
  Description of Artificial Sequence: Synthetic oligonucleotide
  Sense strand starting at position 2271 of SEQ ID NO: 914971
gacuauguaagauguugag

SEQ ID NO: 1043947 - RNA, 19 nt, Artificial Sequence
  Description of Artificial Sequence: Synthetic oligonucleotide
  Antisense strand to SEQ ID NO: 1043946
cucaacaucuuacauaguc

SEQ ID NO: 1043948 - RNA, 19 nt, Artificial Sequence
  Description of Artificial Sequence: Synthetic oligonucleotide
  Sense strand starting at position 2280 of SEQ ID NO: 914971
agauguugagguugaauua

SEQ ID NO: 1043949 - RNA, 19 nt, Artificial Sequence
  Description of Artificial Sequence: Synthetic oligonucleotide
  Antisense strand to SEQ ID NO: 1043948
uaauucaaccucaacaucu

SEQ ID NO: 1043950 - RNA, 19 nt, Artificial Sequence
  Description of Artificial Sequence: Synthetic oligonucleotide
  Sense strand starting at position 2321 of SEQ ID NO: 914971
agguuugugguagauaucu

SEQ ID NO: 1043951 - RNA, 19 nt, Artificial Sequence
  Description of Artificial Sequence: Synthetic oligonucleotide
  Antisense strand to SEQ ID NO: 1043950
agauaucuaccacaaaccu

SEQ ID NO: 1043952 - RNA, 19 nt, Artificial Sequence
  Description of Artificial Sequence: Synthetic oligonucleotide
  Sense strand starting at position 2326 of SEQ ID NO: 914971
ugugguagauaucuuggga

SEQ ID NO: 1043953 - RNA, 19 nt, Artificial Sequence
  Description of Artificial Sequence: Synthetic oligonucleotide
  Antisense strand to SEQ ID NO: 1043952
ucccaagauaucuaccaca

SEQ ID NO: 1043954 - RNA, 19 nt, Artificial Sequence
  Description of Artificial Sequence: Synthetic oligonucleotide
  Sense strand starting at position 2329 of SEQ ID NO: 914971
gguagauaucuugggacca

SEQ ID NO: 1043955 - RNA, 19 nt, Artificial Sequence
  Description of Artificial Sequence: Synthetic oligonucleotide
  Antisense strand to SEQ ID NO: 1043954
uggucccaagauaucuacc

SEQ ID NO: 1043956 - RNA, 19 nt, Artificial Sequence
  Description of Artificial Sequence: Synthetic oligonucleotide
  Sense strand starting at position 2357 of SEQ ID NO: 914971
acuagagaaucucuguacu

SEQ ID NO: 1043957 - RNA, 19 nt, Artificial Sequence
  Description of Artificial Sequence: Synthetic oligonucleotide
  Antisense strand to SEQ ID NO: 1043956
aguacagagauucucuagu

SEQ ID NO: 1043958 - RNA, 19 nt, Artificial Sequence
  Description of Artificial Sequence: Synthetic oligonucleotide
  Sense strand starting at position 2491 of SEQ ID NO: 914971
aucccuagucuauaaguua

SEQ ID NO: 1043959 - RNA, 19 nt, Artificial Sequence
  Description of Artificial Sequence: Synthetic oligonucleotide
  Antisense strand to SEQ ID NO: 1043958
uaacuuauagacuagggau

SEQ ID NO: 1043960 - RNA, 19 nt, Artificial Sequence
  Description of Artificial Sequence: Synthetic oligonucleotide
  Sense strand starting at position 2504 of SEQ ID NO: 914971
aaguuagacuuuccaugga

SEQ ID NO: 1043961 - RNA, 19 nt, Artificial Sequence
  Description of Artificial Sequence: Synthetic oligonucleotide
  Antisense strand to SEQ ID NO: 1043960
uccauggaaagucuaacuu

SEQ ID NO: 1043962 - RNA, 19 nt, Artificial Sequence
  Description of Artificial Sequence: Synthetic oligonucleotide
  Sense strand starting at position 2700 of SEQ ID NO: 914971
agaugaccuguuuaaguca

SEQ ID NO: 1043963 - RNA, 19 nt, Artificial Sequence
  Description of Artificial Sequence: Synthetic oligonucleotide
  Antisense strand to SEQ ID NO: 1043962
ugacuuaaacaggucaucu

SEQ ID NO: 1043964 - RNA, 19 nt, Artificial Sequence
  Description of Artificial Sequence: Synthetic oligonucleotide
  Sense strand starting at position 2752 of SEQ ID NO: 914971
cccagaggguauguuuaga

SEQ ID NO: 1043965 - RNA, 19 nt, Artificial Sequence
  Description of Artificial Sequence: Synthetic oligonucleotide
  Antisense strand to SEQ ID NO: 1043964
ucuaaacauacccucuggg

SEQ ID NO: 1043966 - RNA, 19 nt, Artificial Sequence
  Description of Artificial Sequence: Synthetic oligonucleotide
  Sense strand starting at position 2776 of SEQ ID NO: 914971
ugagcugggagcuacuaua

SEQ ID NO: 1043967 - RNA, 19 nt, Artificial Sequence
  Description of Artificial Sequence: Synthetic oligonucleotide
  Antisense strand to SEQ ID NO: 1043966
uauaguagcucccagcuca

SEQ ID NO: 1043968 - RNA, 19 nt, Artificial Sequence
  Description of Artificial Sequence: Synthetic oligonucleotide
  Sense strand starting at position 2912 of SEQ ID NO: 914971
gggagaaugagauguugua

SEQ ID NO: 1043969 - RNA, 19 nt, Artificial Sequence
  Description of Artificial Sequence: Synthetic oligonucleotide
  Antisense strand to SEQ ID NO: 1043968
uacaacaucucauucuccc

SEQ ID NO: 1043970 - RNA, 19 nt, Artificial Sequence
  Description of Artificial Sequence: Synthetic oligonucleotide
  Sense strand starting at position 2943 of SEQ ID NO: 914971
guaagacacugagagauuu

SEQ ID NO: 1043971 - RNA, 19 nt, Artificial Sequence
  Description of Artificial Sequence: Synthetic oligonucleotide
  Antisense strand to SEQ ID NO: 1043970
aaaucucucagugucuuac

SEQ ID NO: 1043972 - RNA, 19 nt, Artificial Sequence
  Description of Artificial Sequence: Synthetic oligonucleotide
  Sense strand starting at position 2951 of SEQ ID NO: 914971
cugagagauuuccagacaa

SEQ ID NO: 1043973 - RNA, 19 nt, Artificial Sequence
  Description of Artificial Sequence: Synthetic oligonucleotide
  Antisense strand to SEQ ID NO: 1043972
uugucuggaaaucucucag

SEQ ID NO: 1043974 - RNA, 19 nt, Artificial Sequence
  Description of Artificial Sequence: Synthetic oligonucleotide
  Sense strand starting at position 3081 of SEQ ID NO: 914971
agucuuugugaauacucau

SEQ ID NO: 1043975 - RNA, 19 nt, Artificial Sequence
  Description of Artificial Sequence: Synthetic oligonucleotide
  Antisense strand to SEQ ID NO: 1043974
augaguauucacaaagacu

SEQ ID NO: 1043976 - RNA, 19 nt, Artificial Sequence
  Description of Artificial Sequence: Synthetic oligonucleotide
  Sense strand starting at position 3122 of SEQ ID NO: 914971
gguaaaggcagguauucuu

SEQ ID NO: 1043977 - RNA, 19 nt, Artificial Sequence
  Description of Artificial Sequence: Synthetic oligonucleotide
  Antisense strand to SEQ ID NO: 1043976
aagaauaccugccuuuacc

SEQ ID NO: 1043978 - RNA, 19 nt, Artificial Sequence
  Description of Artificial Sequence: Synthetic oligonucleotide
  Sense strand starting at position 3132 of SEQ ID NO: 914971
gguauucuuguguauaaau

SEQ ID NO: 1043979 - RNA, 19 nt, Artificial Sequence
  Description of Artificial Sequence: Synthetic oligonucleotide
  Antisense strand to SEQ ID NO: 1043978
auuuauacacaagaauacc

SEQ ID NO: 1043980 - RNA, 19 nt, Artificial Sequence
  Description of Artificial Sequence: Synthetic oligonucleotide
  Sense strand starting at position 3154 of SEQ ID NO: 914971
ugugucuacauguaugaua

SEQ ID NO: 1043981 - RNA, 19 nt, Artificial Sequence
  Description of Artificial Sequence: Synthetic oligonucleotide
  Antisense strand to SEQ ID NO: 1043980
uaucauacauguagacaca

SEQ ID NO: 1043982 - RNA, 19 nt, Artificial Sequence
  Description of Artificial Sequence: Synthetic oligonucleotide
  Sense strand starting at position 3198 of SEQ ID NO: 914971
guguauuugagaugcuaug

SEQ ID NO: 1043983 - RNA, 19 nt, Artificial Sequence
  Description of Artificial Sequence: Synthetic oligonucleotide
  Antisense strand to SEQ ID NO: 1043982
cauagcaucucaaauacac

SEQ ID NO: 1043984 - RNA, 19 nt, Artificial Sequence
  Description of Artificial Sequence: Synthetic oligonucleotide
  Sense strand starting at position 3227 of SEQ ID NO: 914971
cugaucuuuccugagguca

SEQ ID NO: 1043985 - RNA, 19 nt, Artificial Sequence
  Description of Artificial Sequence: Synthetic oligonucleotide
  Antisense strand to SEQ ID NO: 1043984
ugaccucaggaaagaucag

SEQ ID NO: 1043986 - RNA, 19 nt, Artificial Sequence
  Description of Artificial Sequence: Synthetic oligonucleotide
  Sense strand starting at position 3276 of SEQ ID NO: 914971
ggugucuuggguuagaaca

SEQ ID NO: 1043987 - RNA, 19 nt, Artificial Sequence
  Description of Artificial Sequence: Synthetic oligonucleotide
  Antisense strand to SEQ ID NO: 1043986
uguucuaacccaagacacc

SEQ ID NO: 1043988 - RNA, 19 nt, Artificial Sequence
  Description of Artificial Sequence: Synthetic oligonucleotide
  Sense strand starting at position 3286 of SEQ ID NO: 914971
guuagaacauaucuggaca

SEQ ID NO: 1043989 - RNA, 19 nt, Artificial Sequence
  Description of Artificial Sequence: Synthetic oligonucleotide
  Antisense strand to SEQ ID NO: 1043988
uguccagauauguucuaac

SEQ ID NO: 1043990 - RNA, 19 nt, Artificial Sequence
  Description of Artificial Sequence: Synthetic oligonucleotide
  Sense strand starting at position 3320 of SEQ ID NO: 914971
ugauguauauuccuacauu

SEQ ID NO: 1043991 - RNA, 19 nt, Artificial Sequence
  Description of Artificial Sequence: Synthetic oligonucleotide
  Antisense strand to SEQ ID NO: 1043990
aauguaggaauauacauca

SEQ ID NO: 1043992 - RNA, 19 nt, Artificial Sequence
  Description of Artificial Sequence: Synthetic oligonucleotide
  Sense strand starting at position 3758 of SEQ ID NO: 914971
gcuuacaagguuuauaaau

SEQ ID NO: 1043993 - RNA, 19 nt, Artificial Sequence
  Description of Artificial Sequence: Synthetic oligonucleotide
  Antisense strand to SEQ ID NO: 1043992
auuuauaaaccuuguaagc

SEQ ID NO: 1043994 - RNA, 19 nt, Artificial Sequence
  Description of Artificial Sequence: Synthetic oligonucleotide
  Sense strand starting at position 271 of SEQ ID NO: 914972
ugcugcugcuguccuagaa

SEQ ID NO: 1043995 - RNA, 19 nt, Artificial Sequence
  Description of Artificial Sequence: Synthetic oligonucleotide
  Antisense strand to SEQ ID NO: 1043994
uucuaggacagcagcagca

SEQ ID NO: 1043996 - RNA, 19 nt, Artificial Sequence
  Description of Artificial Sequence: Synthetic oligonucleotide
  Sense strand starting at position 366 of SEQ ID NO: 914972
ccucaucgcuuccuuugaa

SEQ ID NO: 1043997 - RNA, 19 nt, Artificial Sequence
  Description of Artificial Sequence: Synthetic oligonucleotide
  Antisense strand to SEQ ID NO: 1043996
uucaaaggaagcgaugagg

SEQ ID NO: 1043998 - RNA, 19 nt, Artificial Sequence
  Description of Artificial Sequence: Synthetic oligonucleotide
  Sense strand starting at position 367 of SEQ ID NO: 914972
cucaucgcuuccuuugaaa

SEQ ID NO: 1043999 - RNA, 19 nt, Artificial Sequence
  Description of Artificial Sequence: Synthetic oligonucleotide
  Antisense strand to SEQ ID NO: 1043998
uuucaaaggaagcgaugag

SEQ ID NO: 1044000 - RNA, 19 nt, Artificial Sequence
  Description of Artificial Sequence: Synthetic oligonucleotide
  Sense strand starting at position 674 of SEQ ID NO: 914972
ucuugugucuacuugugga

SEQ ID NO: 1044001 - RNA, 19 nt, Artificial Sequence
  Description of Artificial Sequence: Synthetic oligonucleotide
  Antisense strand to SEQ ID NO: 1044000
uccacaaguagacacaaga

SEQ ID NO: 1044002 - RNA, 19 nt, Artificial Sequence
  Description of Artificial Sequence: Synthetic oligonucleotide
  Sense strand starting at position 702 of SEQ ID NO: 914972
guugaaugcacaggugauc

SEQ ID NO: 1044003 - RNA, 19 nt, Artificial Sequence
  Description of Artificial Sequence: Synthetic oligonucleotide
  Antisense strand to SEQ ID NO: 1044002
gaucaccugugcauucaac

SEQ ID NO: 1044004 - RNA, 19 nt, Artificial Sequence
  Description of Artificial Sequence: Synthetic oligonucleotide
  Sense strand starting at position 1160 of SEQ ID NO: 914972
augccacuucucuggacaa

SEQ ID NO: 1044005 - RNA, 19 nt, Artificial Sequence
  Description of Artificial Sequence: Synthetic oligonucleotide
  Antisense strand to SEQ ID NO: 1044004
uuguccagagaaguggcau

SEQ ID NO: 1044006 - RNA, 19 nt, Artificial Sequence
  Description of Artificial Sequence: Synthetic oligonucleotide
  Sense strand starting at position 1657 of SEQ ID NO: 914972
gcagguguuaccugagcac

SEQ ID NO: 1044007 - RNA, 19 nt, Artificial Sequence
  Description of Artificial Sequence: Synthetic oligonucleotide
  Antisense strand to SEQ ID NO: 1044006
gugcucagguaacaccugc

SEQ ID NO: 1044008 - RNA, 19 nt, Artificial Sequence
  Description of Artificial Sequence: Synthetic oligonucleotide
  Sense strand starting at position 1660 of SEQ ID NO: 914972
gguguuaccugagcacuuu

SEQ ID NO: 1044009 - RNA, 19 nt, Artificial Sequence
  Description of Artificial Sequence: Synthetic oligonucleotide
  Antisense strand to SEQ ID NO: 1044008
aaagugcucagguaacacc

SEQ ID NO: 1044010 - RNA, 19 nt, Artificial Sequence
  Description of Artificial Sequence: Synthetic oligonucleotide
  Sense strand starting at position 1741 of SEQ ID NO: 914972
cuuggucuucagggagacu

SEQ ID NO: 1044011 - RNA, 19 nt, Artificial Sequence
  Description of Artificial Sequence: Synthetic oligonucleotide
  Antisense strand to SEQ ID NO: 1044010
agucucccugaagaccaag

SEQ ID NO: 1044012 - RNA, 19 nt, Artificial Sequence
  Description of Artificial Sequence: Synthetic oligonucleotide
  Sense strand starting at position 1763 of SEQ ID NO: 914972
guggucucccagcaugagu

SEQ ID NO: 1044013 - RNA, 19 nt, Artificial Sequence
  Description of Artificial Sequence: Synthetic oligonucleotide
  Antisense strand to SEQ ID NO: 1044012
acucaugcugggagaccac

SEQ ID NO: 1044014 - RNA, 19 nt, Artificial Sequence
  Description of Artificial Sequence: Synthetic oligonucleotide
  Sense strand starting at position 1981 of SEQ ID NO: 914972
uggcauggcugccagaaga

SEQ ID NO: 1044015 - RNA, 19 nt, Artificial Sequence
  Description of Artificial Sequence: Synthetic oligonucleotide
  Antisense strand to SEQ ID NO: 1044014
ucuucuggcagccaugcca

SEQ ID NO: 1044016 - RNA, 19 nt, Artificial Sequence
  Description of Artificial Sequence: Synthetic oligonucleotide
  Sense strand starting at position 2726 of SEQ ID NO: 914972
gggcaaugcucucuccuca

SEQ ID NO: 1044017 - RNA, 19 nt, Artificial Sequence
  Description of Artificial Sequence: Synthetic oligonucleotide
  Antisense strand to SEQ ID NO: 1044016
ugaggagagagcauugccc

SEQ ID NO: 1044018 - RNA, 19 nt, Artificial Sequence
  Description of Artificial Sequence: Synthetic oligonucleotide
  Sense strand starting at position 2836 of SEQ ID NO: 914972
uccugugcuuccugccaau

SEQ ID NO: 1044019 - RNA, 19 nt, Artificial Sequence
  Description of Artificial Sequence: Synthetic oligonucleotide
  Antisense strand to SEQ ID NO: 1044018
auuggcaggaagcacagga

SEQ ID NO: 1044020 - RNA, 19 nt, Artificial Sequence
  Description of Artificial Sequence: Synthetic oligonucleotide
  Sense strand starting at position 2839 of SEQ ID NO: 914972
ugugcuuccugccaaucaa

SEQ ID NO: 1044021 - RNA, 19 nt, Artificial Sequence
  Description of Artificial Sequence: Synthetic oligonucleotide
  Antisense strand to SEQ ID NO: 1044020
uugauuggcaggaagcaca

SEQ ID NO: 1044022 - RNA, 19 nt, Artificial Sequence
  Description of Artificial Sequence: Synthetic oligonucleotide
  Sense strand starting at position 2902 of SEQ ID NO: 914972
gcaccucugucggugugaa

SEQ ID NO: 1044023 - RNA, 19 nt, Artificial Sequence
  Description of Artificial Sequence: Synthetic oligonucleotide
  Antisense strand to SEQ ID NO: 1044022
uucacaccgacagaggugc

SEQ ID NO: 1044024 - RNA, 19 nt, Artificial Sequence
  Description of Artificial Sequence: Synthetic oligonucleotide
  Sense strand starting at position 2915 of SEQ ID NO: 914972
ugugaagcccuguaggagu

SEQ ID NO: 1044025 - RNA, 19 nt, Artificial Sequence
  Description of Artificial Sequence: Synthetic oligonucleotide
  Antisense strand to SEQ ID NO: 1044024
acuccuacagggcuucaca

SEQ ID NO: 1044026 - RNA, 19 nt, Artificial Sequence
  Description of Artificial Sequence: Synthetic oligonucleotide
  Sense strand starting at position 3243 of SEQ ID NO: 914972
cguaacuggucucuacaga

SEQ ID NO: 1044027 - RNA, 19 nt, Artificial Sequence
  Description of Artificial Sequence: Synthetic oligonucleotide
  Antisense strand to SEQ ID NO: 1044026
ucuguagagaccaguuacg

SEQ ID NO: 1044028 - RNA, 19 nt, Artificial Sequence
  Description of Artificial Sequence: Synthetic oligonucleotide
  Sense strand starting at position 3244 of SEQ ID NO: 914972
guaacuggucucuacagaa

SEQ ID NO: 1044029 - RNA, 19 nt, Artificial Sequence
  Description of Artificial Sequence: Synthetic oligonucleotide
  Antisense strand to SEQ ID NO: 1044028
uucuguagagaccaguuac

SEQ ID NO: 1044030 - RNA, 19 nt, Artificial Sequence
  Description of Artificial Sequence: Synthetic oligonucleotide
  Sense strand starting at position 3545 of SEQ ID NO: 914972
gaggcauggccuggacaga

SEQ ID NO: 1044031 - RNA, 19 nt, Artificial Sequence
  Description of Artificial Sequence: Synthetic oligonucleotide
  Antisense strand to SEQ ID NO: 1044030
ucuguccaggccaugccuc

SEQ ID NO: 1044032 - RNA, 19 nt, Artificial Sequence
  Description of Artificial Sequence: Synthetic oligonucleotide
  Sense strand starting at position 3578 of SEQ ID NO: 914972
ggcccaugacagggagaau

SEQ ID NO: 1044033 - RNA, 19 nt, Artificial Sequence
  Description of Artificial Sequence: Synthetic oligonucleotide
  Antisense strand to SEQ ID NO: 1044032
auucucccugucaugggcc

SEQ ID NO: 1044034 - RNA, 19 nt, Artificial Sequence
  Description of Artificial Sequence: Synthetic oligonucleotide
  Sense strand starting at position 3645 of SEQ ID NO: 914972
ggaggcuucgggcacaaga

SEQ ID NO: 1044035 - RNA, 19 nt, Artificial Sequence
  Description of Artificial Sequence: Synthetic oligonucleotide
  Antisense strand to SEQ ID NO: 1044034
ucuugugcccgaagccucc

SEQ ID NO: 1044036 - RNA, 19 nt, Artificial Sequence
  Description of Artificial Sequence: Synthetic oligonucleotide
  Sense strand starting at position 3983 of SEQ ID NO: 914972
gggagcagguauuccuauu

SEQ ID NO: 1044037 - RNA, 19 nt, Artificial Sequence
  Description of Artificial Sequence: Synthetic oligonucleotide
  Antisense strand to SEQ ID NO: 1044036
aauaggaauaccugcuccc

SEQ ID NO: 1044038 - RNA, 19 nt, Artificial Sequence
  Description of Artificial Sequence: Synthetic oligonucleotide
  Sense strand starting at position 26 of SEQ ID NO: 914973
cugagaagucuccauguuu

SEQ ID NO: 1044039 - RNA, 19 nt, Artificial Sequence
  Description of Artificial Sequence: Synthetic oligonucleotide
  Antisense strand to SEQ ID NO: 1044038
aaacauggagacuucucag

SEQ ID NO: 1044040 - RNA, 19 nt, Artificial Sequence
  Description of Artificial Sequence: Synthetic oligonucleotide
  Sense strand starting at position 34 of SEQ ID NO: 914973
ucuccauguuucucuuagu

SEQ ID NO: 1044041 - RNA, 19 nt, Artificial Sequence
  Description of Artificial Sequence: Synthetic oligonucleotide
  Antisense strand to SEQ ID NO: 1044040
acuaagagaaacauggaga

SEQ ID NO: 1044042 - RNA, 19 nt, Artificial Sequence
  Description of Artificial Sequence: Synthetic oligonucleotide
  Sense strand starting at position 35 of SEQ ID NO: 914973
cuccauguuucucuuaguu

SEQ ID NO: 1044043 - RNA, 19 nt, Artificial Sequence
  Description of Artificial Sequence: Synthetic oligonucleotide
  Antisense strand to SEQ ID NO: 1044042
aacuaagagaaacauggag

SEQ ID NO: 1044044 - RNA, 19 nt, Artificial Sequence
  Description of Artificial Sequence: Synthetic oligonucleotide
  Sense strand starting at position 37 of SEQ ID NO: 914973
ccauguuucucuuaguuug

SEQ ID NO: 1044045 - RNA, 19 nt, Artificial Sequence
  Description of Artificial Sequence: Synthetic oligonucleotide
  Antisense strand to SEQ ID NO: 1044044
caaacuaagagaaacaugg

SEQ ID NO: 1044046 - RNA, 19 nt, Artificial Sequence
  Description of Artificial Sequence: Synthetic oligonucleotide
  Sense strand starting at position 40 of SEQ ID NO: 914973
uguuucucuuaguuugagu

SEQ ID NO: 1044047 - RNA, 19 nt, Artificial Sequence
  Description of Artificial Sequence: Synthetic oligonucleotide
  Antisense strand to SEQ ID NO: 1044046
acucaaacuaagagaaaca

SEQ ID NO: 1044048 - RNA, 19 nt, Artificial Sequence
  Description of Artificial Sequence: Synthetic oligonucleotide
  Sense strand starting at position 45 of SEQ ID NO: 914973
cucuuaguuugaguggauu

SEQ ID NO: 1044049 - RNA, 19 nt, Artificial Sequence
  Description of Artificial Sequence: Synthetic oligonucleotide
  Antisense strand to SEQ ID NO: 1044048
aauccacucaaacuaagag

SEQ ID NO: 1044050 - RNA, 19 nt, Artificial Sequence
  Description of Artificial Sequence: Synthetic oligonucleotide
  Sense strand starting at position 59 of SEQ ID NO: 914973
ggauuucugucccuugguu

SEQ ID NO: 1044051 - RNA, 19 nt, Artificial Sequence
  Description of Artificial Sequence: Synthetic oligonucleotide
  Antisense strand to SEQ ID NO: 1044050
aaccaagggacagaaaucc

SEQ ID NO: 1044052 - RNA, 19 nt, Artificial Sequence
  Description of Artificial Sequence: Synthetic oligonucleotide
  Sense strand starting at position 63 of SEQ ID NO: 914973
uucugucccuugguuugaa

SEQ ID NO: 1044053 - RNA, 19 nt, Artificial Sequence
  Description of Artificial Sequence: Synthetic oligonucleotide
  Antisense strand to SEQ ID NO: 1044052
uucaaaccaagggacagaa

SEQ ID NO: 1044054 - RNA, 19 nt, Artificial Sequence
  Description of Artificial Sequence: Synthetic oligonucleotide
  Sense strand starting at position 64 of SEQ ID NO: 914973
ucugucccuugguuugaaa

SEQ ID NO: 1044055 - RNA, 19 nt, Artificial Sequence
  Description of Artificial Sequence: Synthetic oligonucleotide
  Antisense strand to SEQ ID NO: 1044054
uuucaaaccaagggacaga

SEQ ID NO: 1044056 - RNA, 19 nt, Artificial Sequence
  Description of Artificial Sequence: Synthetic oligonucleotide
  Sense strand starting at position 67 of SEQ ID NO: 914973
gucccuugguuugaaagga

SEQ ID NO: 1044057 - RNA, 19 nt, Artificial Sequence
  Description of Artificial Sequence: Synthetic oligonucleotide
  Antisense strand to SEQ ID NO: 1044056
uccuuucaaaccaagggac

SEQ ID NO: 1044058 - RNA, 19 nt, Artificial Sequence
  Description of Artificial Sequence: Synthetic oligonucleotide
  Sense strand starting at position 139 of SEQ ID NO: 914973
augccagcuccagaugaga

SEQ ID NO: 1044059 - RNA, 19 nt, Artificial Sequence
  Description of Artificial Sequence: Synthetic oligonucleotide
  Antisense strand to SEQ ID NO: 1044058
ucucaucuggagcuggcau

SEQ ID NO: 1044060 - RNA, 19 nt, Artificial Sequence
  Description of Artificial Sequence: Synthetic oligonucleotide
  Sense strand starting at position 168 of SEQ ID NO: 914973
ggcaaaucuggguggccua

SEQ ID NO: 1044061 - RNA, 19 nt, Artificial Sequence
  Description of Artificial Sequence: Synthetic oligonucleotide
  Antisense strand to SEQ ID NO: 1044060
uaggccacccagauuugcc

SEQ ID NO: 1044062 - RNA, 19 nt, Artificial Sequence
  Description of Artificial Sequence: Synthetic oligonucleotide
  Sense strand starting at position 198 of SEQ ID NO: 914973
gggacauaggucugcccaa

SEQ ID NO: 1044063 - RNA, 19 nt, Artificial Sequence
  Description of Artificial Sequence: Synthetic oligonucleotide
  Antisense strand to SEQ ID NO: 1044062
uugggcagaccuauguccc

SEQ ID NO: 1044064 - RNA, 19 nt, Artificial Sequence
  Description of Artificial Sequence: Synthetic oligonucleotide
  Sense strand starting at position 591 of SEQ ID NO: 914973
cggugucacccauaaccaa

SEQ ID NO: 1044065 - RNA, 19 nt, Artificial Sequence
  Description of Artificial Sequence: Synthetic oligonucleotide
  Antisense strand to SEQ ID NO: 1044064
uugguuaugggugacaccg

SEQ ID NO: 1044066 - RNA, 19 nt, Artificial Sequence
  Description of Artificial Sequence: Synthetic oligonucleotide
  Sense strand starting at position 703 of SEQ ID NO: 914973
uggcuucuugaaggcagaa

SEQ ID NO: 1044067 - RNA, 19 nt, Artificial Sequence
  Description of Artificial Sequence: Synthetic oligonucleotide
  Antisense strand to SEQ ID NO: 1044066
uucugccuucaagaagcca

SEQ ID NO: 1044068 - RNA, 19 nt, Artificial Sequence
  Description of Artificial Sequence: Synthetic oligonucleotide
  Sense strand starting at position 761 of SEQ ID NO: 914973
ccaggaaagccaugucugu

SEQ ID NO: 1044069 - RNA, 19 nt, Artificial Sequence
  Description of Artificial Sequence: Synthetic oligonucleotide
  Antisense strand to SEQ ID NO: 1044068
acagacauggcuuuccugg

SEQ ID NO: 1044070 - RNA, 19 nt, Artificial Sequence
  Description of Artificial Sequence: Synthetic oligonucleotide
  Sense strand starting at position 785 of SEQ ID NO: 914973
ggaugacuuucaggacgca

SEQ ID NO: 1044071 - RNA, 19 nt, Artificial Sequence
  Description of Artificial Sequence: Synthetic oligonucleotide
  Antisense strand to SEQ ID NO: 1044070
ugcguccugaaagucaucc

SEQ ID NO: 1044072 - RNA, 19 nt, Artificial Sequence
  Description of Artificial Sequence: Synthetic oligonucleotide
  Sense strand starting at position 1019 of SEQ ID NO: 914973
acacccauuuacugaggaa

SEQ ID NO: 1044073 - RNA, 19 nt, Artificial Sequence
  Description of Artificial Sequence: Synthetic oligonucleotide
  Antisense strand to SEQ ID NO: 1044072
uuccucaguaaaugggugu

SEQ ID NO: 1044074 - RNA, 19 nt, Artificial Sequence
  Description of Artificial Sequence: Synthetic oligonucleotide
  Sense strand starting at position 1022 of SEQ ID NO: 914973
cccauuuacugaggaaauc

SEQ ID NO: 1044075 - RNA, 19 nt, Artificial Sequence
  Description of Artificial Sequence: Synthetic oligonucleotide
  Antisense strand to SEQ ID NO: 1044074
gauuuccucaguaaauggg

SEQ ID NO: 1044076 - RNA, 19 nt, Artificial Sequence
  Description of Artificial Sequence: Synthetic oligonucleotide
  Sense strand starting at position 1083 of SEQ ID NO: 914973
guuggauggucacggagaa

SEQ ID NO: 1044077 - RNA, 19 nt, Artificial Sequence
  Description of Artificial Sequence: Synthetic oligonucleotide
  Antisense strand to SEQ ID NO: 1044076
uucuccgugaccauccaac

SEQ ID NO: 1044078 - RNA, 19 nt, Artificial Sequence
  Description of Artificial Sequence: Synthetic oligonucleotide
  Sense strand starting at position 1224 of SEQ ID NO: 914973
gggcauuccuucuggaaac

SEQ ID NO: 1044079 - RNA, 19 nt, Artificial Sequence
  Description of Artificial Sequence: Synthetic oligonucleotide
  Antisense strand to SEQ ID NO: 1044078
guuuccagaaggaaugccc

SEQ ID NO: 1044080 - RNA, 19 nt, Artificial Sequence
  Description of Artificial Sequence: Synthetic oligonucleotide
  Sense strand starting at position 1226 of SEQ ID NO: 914973
gcauuccuucuggaaacgu

SEQ ID NO: 1044081 - RNA, 19 nt, Artificial Sequence
  Description of Artificial Sequence: Synthetic oligonucleotide
  Antisense strand to SEQ ID NO: 1044080
acguuuccagaaggaaugc

SEQ ID NO: 1044082 - RNA, 19 nt, Artificial Sequence
  Description of Artificial Sequence: Synthetic oligonucleotide
  Sense strand starting at position 1237 of SEQ ID NO: 914973
ggaaacgucucugucccua

SEQ ID NO: 1044083 - RNA, 19 nt, Artificial Sequence
  Description of Artificial Sequence: Synthetic oligonucleotide
  Antisense strand to SEQ ID NO: 1044082
uagggacagagacguuucc

SEQ ID NO: 1044084 - RNA, 19 nt, Artificial Sequence
  Description of Artificial Sequence: Synthetic oligonucleotide
  Sense strand starting at position 1241 of SEQ ID NO: 914973
acgucucugucccuagaaa

SEQ ID NO: 1044085 - RNA, 19 nt, Artificial Sequence
  Description of Artificial Sequence: Synthetic oligonucleotide
  Antisense strand to SEQ ID NO: 1044084
uuucuagggacagagacgu

SEQ ID NO: 1044086 - RNA, 19 nt, Artificial Sequence
  Description of Artificial Sequence: Synthetic oligonucleotide
  Sense strand starting at position 1242 of SEQ ID NO: 914973
cgucucugucccuagaaac

SEQ ID NO: 1044087 - RNA, 19 nt, Artificial Sequence
  Description of Artificial Sequence: Synthetic oligonucleotide
  Antisense strand to SEQ ID NO: 1044086
guuucuagggacagagacg

SEQ ID NO: 1044088 - RNA, 19 nt, Artificial Sequence
  Description of Artificial Sequence: Synthetic oligonucleotide
  Sense strand starting at position 1381 of SEQ ID NO: 914973
ugccaagacuucucagggu

SEQ ID NO: 1044089 - RNA, 19 nt, Artificial Sequence
  Description of Artificial Sequence: Synthetic oligonucleotide
  Antisense strand to SEQ ID NO: 1044088
acccugagaagucuuggca

SEQ ID NO: 1044090 - RNA, 19 nt, Artificial Sequence
  Description of Artificial Sequence: Synthetic oligonucleotide
  Sense strand starting at position 1460 of SEQ ID NO: 914973
caccgagucucccaagaga

SEQ ID NO: 1044091 - RNA, 19 nt, Artificial Sequence
  Description of Artificial Sequence: Synthetic oligonucleotide
  Antisense strand to SEQ ID NO: 1044090
ucucuugggagacucggug

SEQ ID NO: 1044092 - RNA, 19 nt, Artificial Sequence
  Description of Artificial Sequence: Synthetic oligonucleotide
  Sense strand starting at position 1532 of SEQ ID NO: 914973
acgucucuccugugcagaa

SEQ ID NO: 1044093 - RNA, 19 nt, Artificial Sequence
  Description of Artificial Sequence: Synthetic oligonucleotide
  Antisense strand to SEQ ID NO: 1044092
uucugcacaggagagacgu

SEQ ID NO: 1044094 - RNA, 19 nt, Artificial Sequence
  Description of Artificial Sequence: Synthetic oligonucleotide
  Sense strand starting at position 1590 of SEQ ID NO: 914973
aaacgucguggcuggaaga

SEQ ID NO: 1044095 - RNA, 19 nt, Artificial Sequence
  Description of Artificial Sequence: Synthetic oligonucleotide
  Antisense strand to SEQ ID NO: 1044094
ucuuccagccacgacguuu

SEQ ID NO: 1044096 - RNA, 19 nt, Artificial Sequence
  Description of Artificial Sequence: Synthetic oligonucleotide
  Sense strand starting at position 1593 of SEQ ID NO: 914973
cgucguggcuggaagagaa

SEQ ID NO: 1044097 - RNA, 19 nt, Artificial Sequence
  Description of Artificial Sequence: Synthetic oligonucleotide
  Antisense strand to SEQ ID NO: 1044096
uucucuuccagccacgacg

SEQ ID NO: 1044098 - RNA, 19 nt, Artificial Sequence
  Description of Artificial Sequence: Synthetic oligonucleotide
  Sense strand starting at position 2344 of SEQ ID NO: 914973
uccagugcucuuggaagga

SEQ ID NO: 1044099 - RNA, 19 nt, Artificial Sequence
  Description of Artificial Sequence: Synthetic oligonucleotide
  Antisense strand to SEQ ID NO: 1044098
uccuuccaagagcacugga

SEQ ID NO: 1044100 - RNA, 19 nt, Artificial Sequence
  Description of Artificial Sequence: Synthetic oligonucleotide
  Sense strand starting at position 2595 of SEQ ID NO: 914973
gccaaaggucuuuguggca

SEQ ID NO: 1044101 - RNA, 19 nt, Artificial Sequence
  Description of Artificial Sequence: Synthetic oligonucleotide
  Antisense strand to SEQ ID NO: 1044100
ugccacaaagaccuuuggc

SEQ ID NO: 1044102 - RNA, 19 nt, Artificial Sequence
  Description of Artificial Sequence: Synthetic oligonucleotide
  Sense strand starting at position 2664 of SEQ ID NO: 914973
ugguuuauuuaagagaaag

SEQ ID NO: 1044103 - RNA, 19 nt, Artificial Sequence
  Description of Artificial Sequence: Synthetic oligonucleotide
  Antisense strand to SEQ ID NO: 1044102
cuuucucuuaaauaaacca

SEQ ID NO: 1044104 - RNA, 19 nt, Artificial Sequence
  Description of Artificial Sequence: Synthetic oligonucleotide
  Sense strand starting at position 2699 of SEQ ID NO: 914973
cccugaaugccagggaaau

SEQ ID NO: 1044105 - RNA, 19 nt, Artificial Sequence
  Description of Artificial Sequence: Synthetic oligonucleotide
  Antisense strand to SEQ ID NO: 1044104
auuucccuggcauucaggg

SEQ ID NO: 1044106 - RNA, 19 nt, Artificial Sequence
  Description of Artificial Sequence: Synthetic oligonucleotide
  Sense strand starting at position 2700 of SEQ ID NO: 914973
ccugaaugccagggaaaug

SEQ ID NO: 1044107 - RNA, 19 nt, Artificial Sequence
  Description of Artificial Sequence: Synthetic oligonucleotide
  Antisense strand to SEQ ID NO: 1044106
cauuucccuggcauucagg

SEQ ID NO: 1044108 - RNA, 19 nt, Artificial Sequence
  Description of Artificial Sequence: Synthetic oligonucleotide
  Sense strand starting at position 2737 of SEQ ID NO: 914973
acagcagaucuucgccuua

SEQ ID NO: 1044109 - RNA, 19 nt, Artificial Sequence
  Description of Artificial Sequence: Synthetic oligonucleotide
  Antisense strand to SEQ ID NO: 1044108
uaaggcgaagaucugcugu

SEQ ID NO: 1044110 - RNA, 19 nt, Artificial Sequence
  Description of Artificial Sequence: Synthetic oligonucleotide
  Sense strand starting at position 2739 of SEQ ID NO: 914973
agcagaucuucgccuuaaa

SEQ ID NO: 1044111 - RNA, 19 nt, Artificial Sequence
  Description of Artificial Sequence: Synthetic oligonucleotide
  Antisense strand to SEQ ID NO: 1044110
uuuaaggcgaagaucugcu

SEQ ID NO: 1044112 - RNA, 19 nt, Artificial Sequence
  Description of Artificial Sequence: Synthetic oligonucleotide
  Sense strand starting at position 3336 of SEQ ID NO: 914973
ugucuuaggagcuguguca

SEQ ID NO: 1044113 - RNA, 19 nt, Artificial Sequence
  Description of Artificial Sequence: Synthetic oligonucleotide
  Antisense strand to SEQ ID NO: 1044112
ugacacagcuccuaagaca

SEQ ID NO: 1044114 - RNA, 19 nt, Artificial Sequence
  Description of Artificial Sequence: Synthetic oligonucleotide
  Sense strand starting at position 3786 of SEQ ID NO: 914973
agcuuagugcacugugaga

SEQ ID NO: 1044115 - RNA, 19 nt, Artificial Sequence
  Description of Artificial Sequence: Synthetic oligonucleotide
  Antisense strand to SEQ ID NO: 1044114
ucucacagugcacuaagcu

SEQ ID NO: 1044116 - RNA, 19 nt, Artificial Sequence
  Description of Artificial Sequence: Synthetic oligonucleotide
  Sense strand starting at position 3788 of SEQ ID NO: 914973
cuuagugcacugugagaca

SEQ ID NO: 1044117 - RNA, 19 nt, Artificial Sequence
  Description of Artificial Sequence: Synthetic oligonucleotide
  Antisense strand to SEQ ID NO: 1044116
ugucucacagugcacuaag

SEQ ID NO: 1044118 - RNA, 19 nt, Artificial Sequence
  Description of Artificial Sequence: Synthetic oligonucleotide
  Sense strand starting at position 206 of SEQ ID NO: 914974
ccaggagaguuguuuguac

SEQ ID NO: 1044119 - RNA, 19 nt, Artificial Sequence
  Description of Artificial Sequence: Synthetic oligonucleotide
  Antisense strand to SEQ ID NO: 1044118
guacaaacaacucuccugg

SEQ ID NO: 1044120 - RNA, 19 nt, Artificial Sequence
  Description of Artificial Sequence: Synthetic oligonucleotide
  Sense strand starting at position 208 of SEQ ID NO: 914974
aggagaguuguuuguacuc

SEQ ID NO: 1044121 - RNA, 19 nt, Artificial Sequence
  Description of Artificial Sequence: Synthetic oligonucleotide
  Antisense strand to SEQ ID NO: 1044120
gaguacaaacaacucuccu

SEQ ID NO: 1044122 - RNA, 19 nt, Artificial Sequence
  Description of Artificial Sequence: Synthetic oligonucleotide
  Sense strand starting at position 214 of SEQ ID NO: 914974
guuguuuguacucauuaag

SEQ ID NO: 1044123 - RNA, 19 nt, Artificial Sequence
  Description of Artificial Sequence: Synthetic oligonucleotide
  Antisense strand to SEQ ID NO: 1044122
cuuaaugaguacaaacaac

SEQ ID NO: 1044124 - RNA, 19 nt, Artificial Sequence
  Description of Artificial Sequence: Synthetic oligonucleotide
  Sense strand starting at position 258 of SEQ ID NO: 914974
uggauaaacuguucuaguu

SEQ ID NO: 1044125 - RNA, 19 nt, Artificial Sequence
  Description of Artificial Sequence: Synthetic oligonucleotide
  Antisense strand to SEQ ID NO: 1044124
aacuagaacaguuuaucca

SEQ ID NO: 1044126 - RNA, 19 nt, Artificial Sequence
  Description of Artificial Sequence: Synthetic oligonucleotide
  Sense strand starting at position 507 of SEQ ID NO: 914974
acuacacaguguucccaaa

SEQ ID NO: 1044127 - RNA, 19 nt, Artificial Sequence
  Description of Artificial Sequence: Synthetic oligonucleotide
  Antisense strand to SEQ ID NO: 1044126
uuugggaacacuguguagu

SEQ ID NO: 1044128 - RNA, 19 nt, Artificial Sequence
  Description of Artificial Sequence: Synthetic oligonucleotide
  Sense strand starting at position 565 of SEQ ID NO: 914974
acguuuguuguugaaagga

SEQ ID NO: 1044129 - RNA, 19 nt, Artificial Sequence
  Description of Artificial Sequence: Synthetic oligonucleotide
  Antisense strand to SEQ ID NO: 1044128
uccuuucaacaacaaacgu

SEQ ID NO: 1044130 - RNA, 19 nt, Artificial Sequence
  Description of Artificial Sequence: Synthetic oligonucleotide
  Sense strand starting at position 687 of SEQ ID NO: 914974
gcccuuacuggaggcaaau

SEQ ID NO: 1044131 - RNA, 19 nt, Artificial Sequence
  Description of Artificial Sequence: Synthetic oligonucleotide
  Antisense strand to SEQ ID NO: 1044130
auuugccuccaguaagggc

SEQ ID NO: 1044132 - RNA, 19 nt, Artificial Sequence
  Description of Artificial Sequence: Synthetic oligonucleotide
  Sense strand starting at position 697 of SEQ ID NO: 914974
gaggcaaauccuugauugu

SEQ ID NO: 1044133 - RNA, 19 nt, Artificial Sequence
  Description of Artificial Sequence: Synthetic oligonucleotide
  Antisense strand to SEQ ID NO: 1044132
acaaucaaggauuugccuc

SEQ ID NO: 1044134 - RNA, 19 nt, Artificial Sequence
  Description of Artificial Sequence: Synthetic oligonucleotide
  Sense strand starting at position 698 of SEQ ID NO: 914974
aggcaaauccuugauuguu

SEQ ID NO: 1044135 - RNA, 19 nt, Artificial Sequence
  Description of Artificial Sequence: Synthetic oligonucleotide
  Antisense strand to SEQ ID NO: 1044134
aacaaucaaggauuugccu

SEQ ID NO: 1044136 - RNA, 19 nt, Artificial Sequence
  Description of Artificial Sequence: Synthetic oligonucleotide
  Sense strand starting at position 737 of SEQ ID NO: 914974
gguauacaggaauguguaa

SEQ ID NO: 1044137 - RNA, 19 nt, Artificial Sequence
  Description of Artificial Sequence: Synthetic oligonucleotide
  Antisense strand to SEQ ID NO: 1044136
uuacacauuccuguauacc

SEQ ID NO: 1044138 - RNA, 19 nt, Artificial Sequence
  Description of Artificial Sequence: Synthetic oligonucleotide
  Sense strand starting at position 940 of SEQ ID NO: 914974
gagcaauguguucagagug

SEQ ID NO: 1044139 - RNA, 19 nt, Artificial Sequence
  Description of Artificial Sequence: Synthetic oligonucleotide
  Antisense strand to SEQ ID NO: 1044138
cacucugaacacauugcuc

SEQ ID NO: 1044140 - RNA, 19 nt, Artificial Sequence
  Description of Artificial Sequence: Synthetic oligonucleotide
  Sense strand starting at position 1128 of SEQ ID NO: 914974
uuaccuuuggcagagcuau

SEQ ID NO: 1044141 - RNA, 19 nt, Artificial Sequence
  Description of Artificial Sequence: Synthetic oligonucleotide
  Antisense strand to SEQ ID NO: 1044140
auagcucugccaaagguaa

SEQ ID NO: 1044142 - RNA, 19 nt, Artificial Sequence
  Description of Artificial Sequence: Synthetic oligonucleotide
  Sense strand starting at position 1161 of SEQ ID NO: 914974
ugaucucucuggccacaaa

SEQ ID NO: 1044143 - RNA, 19 nt, Artificial Sequence
  Description of Artificial Sequence: Synthetic oligonucleotide
  Antisense strand to SEQ ID NO: 1044142
uuuguggccagagagauca

SEQ ID NO: 1044144 - RNA, 19 nt, Artificial Sequence
  Description of Artificial Sequence: Synthetic oligonucleotide
  Sense strand starting at position 1576 of SEQ ID NO: 914974
cccagaacuuucccgucau

SEQ ID NO: 1044145 - RNA, 19 nt, Artificial Sequence
  Description of Artificial Sequence: Synthetic oligonucleotide
  Antisense strand to SEQ ID NO: 1044144
augacgggaaaguucuggg

SEQ ID NO: 1044146 - RNA, 19 nt, Artificial Sequence
  Description of Artificial Sequence: Synthetic oligonucleotide
  Sense strand starting at position 1778 of SEQ ID NO: 914974
gggcucugagcgcaacaaa

SEQ ID NO: 1044147 - RNA, 19 nt, Artificial Sequence
  Description of Artificial Sequence: Synthetic oligonucleotide
  Antisense strand to SEQ ID NO: 1044146
uuuguugcgcucagagccc

SEQ ID NO: 1044148 - RNA, 19 nt, Artificial Sequence
  Description of Artificial Sequence: Synthetic oligonucleotide
  Sense strand starting at position 1805 of SEQ ID NO: 914974
uaggauaaaugucuugcca

SEQ ID NO: 1044149 - RNA, 19 nt, Artificial Sequence
  Description of Artificial Sequence: Synthetic oligonucleotide
  Antisense strand to SEQ ID NO: 1044148
uggcaagacauuuauccua

SEQ ID NO: 1044150 - RNA, 19 nt, Artificial Sequence
  Description of Artificial Sequence: Synthetic oligonucleotide
  Sense strand starting at position 1986 of SEQ ID NO: 914974
gcgcgaacucuaccaugcu

SEQ ID NO: 1044151 - RNA, 19 nt, Artificial Sequence
  Description of Artificial Sequence: Synthetic oligonucleotide
  Antisense strand to SEQ ID NO: 1044150
agcaugguagaguucgcgc

SEQ ID NO: 1044152 - RNA, 19 nt, Artificial Sequence
  Description of Artificial Sequence: Synthetic oligonucleotide
  Sense strand starting at position 2637 of SEQ ID NO: 914974
uggcaaguucccuagugac

SEQ ID NO: 1044153 - RNA, 19 nt, Artificial Sequence
  Description of Artificial Sequence: Synthetic oligonucleotide
  Antisense strand to SEQ ID NO: 1044152
gucacuagggaacuugcca

SEQ ID NO: 1044154 - RNA, 19 nt, Artificial Sequence
  Description of Artificial Sequence: Synthetic oligonucleotide
  Sense strand starting at position 2647 of SEQ ID NO: 914974
ccuagugaccuccaugaug

SEQ ID NO: 1044155 - RNA, 19 nt, Artificial Sequence
  Description of Artificial Sequence: Synthetic oligonucleotide
  Antisense strand to SEQ ID NO: 1044154
caucauggaggucacuagg

SEQ ID NO: 1044156 - RNA, 19 nt, Artificial Sequence
  Description of Artificial Sequence: Synthetic oligonucleotide
  Sense strand starting at position 2649 of SEQ ID NO: 914974
uagugaccuccaugauguu

SEQ ID NO: 1044157 - RNA, 19 nt, Artificial Sequence
  Description of Artificial Sequence: Synthetic oligonucleotide
  Antisense strand to SEQ ID NO: 1044156
aacaucauggaggucacua

SEQ ID NO: 1044158 - RNA, 19 nt, Artificial Sequence
  Description of Artificial Sequence: Synthetic oligonucleotide
  Sense strand starting at position 2650 of SEQ ID NO: 914974
agugaccuccaugauguua

SEQ ID NO: 1044159 - RNA, 19 nt, Artificial Sequence
  Description of Artificial Sequence: Synthetic oligonucleotide
  Antisense strand to SEQ ID NO: 1044158
uaacaucauggaggucacu

SEQ ID NO: 1044160 - RNA, 19 nt, Artificial Sequence
  Description of Artificial Sequence: Synthetic oligonucleotide
  Sense strand starting at position 2701 of SEQ ID NO: 914974
accuauuggcagcauuaga

SEQ ID NO: 1044161 - RNA, 19 nt, Artificial Sequence
  Description of Artificial Sequence: Synthetic oligonucleotide
  Antisense strand to SEQ ID NO: 1044160
ucuaaugcugccaauaggu

SEQ ID NO: 1044162 - RNA, 19 nt, Artificial Sequence
  Description of Artificial Sequence: Synthetic oligonucleotide
  Sense strand starting at position 2708 of SEQ ID NO: 914974
ggcagcauuagauaugguu

SEQ ID NO: 1044163 - RNA, 19 nt, Artificial Sequence
  Description of Artificial Sequence: Synthetic oligonucleotide
  Antisense strand to SEQ ID NO: 1044162
aaccauaucuaaugcugcc

SEQ ID NO: 1044164 - RNA, 19 nt, Artificial Sequence
  Description of Artificial Sequence: Synthetic oligonucleotide
  Sense strand starting at position 2714 of SEQ ID NO: 914974
auuagauaugguugaucau

SEQ ID NO: 1044165 - RNA, 19 nt, Artificial Sequence
  Description of Artificial Sequence: Synthetic oligonucleotide
  Antisense strand to SEQ ID NO: 1044164
augaucaaccauaucuaau

SEQ ID NO: 1044166 - RNA, 19 nt, Artificial Sequence
  Description of Artificial Sequence: Synthetic oligonucleotide
  Sense strand starting at position 3004 of SEQ ID NO: 914974
cuagguggcuccuugacau

SEQ ID NO: 1044167 - RNA, 19 nt, Artificial Sequence
  Description of Artificial Sequence: Synthetic oligonucleotide
  Antisense strand to SEQ ID NO: 1044166
augucaaggagccaccuag

SEQ ID NO: 1044168 - RNA, 19 nt, Artificial Sequence
  Description of Artificial Sequence: Synthetic oligonucleotide
  Sense strand starting at position 3236 of SEQ ID NO: 914974
ccuaucaguucuucuaagu

SEQ ID NO: 1044169 - RNA, 19 nt, Artificial Sequence
  Description of Artificial Sequence: Synthetic oligonucleotide
  Antisense strand to SEQ ID NO: 1044168
acuuagaagaacugauagg

SEQ ID NO: 1044170 - RNA, 19 nt, Artificial Sequence
  Description of Artificial Sequence: Synthetic oligonucleotide
  Sense strand starting at position 3282 of SEQ ID NO: 914974
ugacguauaccauacauac

SEQ ID NO: 1044171 - RNA, 19 nt, Artificial Sequence
  Description of Artificial Sequence: Synthetic oligonucleotide
  Antisense strand to SEQ ID NO: 1044170
guauguaugguauacguca

SEQ ID NO: 1044172 - RNA, 19 nt, Artificial Sequence
  Description of Artificial Sequence: Synthetic oligonucleotide
  Sense strand starting at position 3323 of SEQ ID NO: 914974
cggacagagaaaugucuuu

SEQ ID NO: 1044173 - RNA, 19 nt, Artificial Sequence
  Description of Artificial Sequence: Synthetic oligonucleotide
  Antisense strand to SEQ ID NO: 1044172
aaagacauuucucuguccg

SEQ ID NO: 1044174 - RNA, 19 nt, Artificial Sequence
  Description of Artificial Sequence: Synthetic oligonucleotide
  Sense strand starting at position 3359 of SEQ ID NO: 914974
ucaccacucugaucgacaa

SEQ ID NO: 1044175 - RNA, 19 nt, Artificial Sequence
  Description of Artificial Sequence: Synthetic oligonucleotide
  Antisense strand to SEQ ID NO: 1044174
uugucgaucagagugguga

SEQ ID NO: 1044176 - RNA, 19 nt, Artificial Sequence
  Description of Artificial Sequence: Synthetic oligonucleotide
  Sense strand starting at position 3516 of SEQ ID NO: 914974
gccuguauugccuuuguuu

SEQ ID NO: 1044177 - RNA, 19 nt, Artificial Sequence
  Description of Artificial Sequence: Synthetic oligonucleotide
  Antisense strand to SEQ ID NO: 1044176
aaacaaaggcaauacaggc

SEQ ID NO: 1044178 - RNA, 19 nt, Artificial Sequence
  Description of Artificial Sequence: Synthetic oligonucleotide
  Sense strand starting at position 3560 of SEQ ID NO: 914974
gugaauaugccacaaagug

SEQ ID NO: 1044179 - RNA, 19 nt, Artificial Sequence
  Description of Artificial Sequence: Synthetic oligonucleotide
  Antisense strand to SEQ ID NO: 1044178
cacuuuguggcauauucac

SEQ ID NO: 1044180 - RNA, 19 nt, Artificial Sequence
  Description of Artificial Sequence: Synthetic oligonucleotide
  Sense strand starting at position 3645 of SEQ ID NO: 914974
cgaacauuccuguacaugu

SEQ ID NO: 1044181 - RNA, 19 nt, Artificial Sequence
  Description of Artificial Sequence: Synthetic oligonucleotide
  Antisense strand to SEQ ID NO: 1044180
acauguacaggaauguucg

SEQ ID NO: 1044182 - RNA, 19 nt, Artificial Sequence
  Description of Artificial Sequence: Synthetic oligonucleotide
  Sense strand starting at position 3694 of SEQ ID NO: 914974
uggguaugugccuggaaau

SEQ ID NO: 1044183 - RNA, 19 nt, Artificial Sequence
  Description of Artificial Sequence: Synthetic oligonucleotide
  Antisense strand to SEQ ID NO: 1044182
auuuccaggcacauaccca

SEQ ID NO: 1044184 - RNA, 19 nt, Artificial Sequence
  Description of Artificial Sequence: Synthetic oligonucleotide
  Sense strand starting at position 3695 of SEQ ID NO: 914974
ggguaugugccuggaaaua

SEQ ID NO: 1044185 - RNA, 19 nt, Artificial Sequence
  Description of Artificial Sequence: Synthetic oligonucleotide
  Antisense strand to SEQ ID NO: 1044184
uauuuccaggcacauaccc

SEQ ID NO: 1044186 - RNA, 19 nt, Artificial Sequence
  Description of Artificial Sequence: Synthetic oligonucleotide
  Sense strand starting at position 3700 of SEQ ID NO: 914974
ugugccuggaaauagaauu

SEQ ID NO: 1044187 - RNA, 19 nt, Artificial Sequence
  Description of Artificial Sequence: Synthetic oligonucleotide
  Antisense strand to SEQ ID NO: 1044186
aauucuauuuccaggcaca

SEQ ID NO: 1044188 - RNA, 19 nt, Artificial Sequence
  Description of Artificial Sequence: Synthetic oligonucleotide
  Sense strand starting at position 3711 of SEQ ID NO: 914974
auagaauugaugggucuca

SEQ ID NO: 1044189 - RNA, 19 nt, Artificial Sequence
  Description of Artificial Sequence: Synthetic oligonucleotide
  Antisense strand to SEQ ID NO: 1044188
ugagacccaucaauucuau

SEQ ID NO: 1044190 - RNA, 19 nt, Artificial Sequence
  Description of Artificial Sequence: Synthetic oligonucleotide
  Sense strand starting at position 3712 of SEQ ID NO: 914974
uagaauugaugggucucau

SEQ ID NO: 1044191 - RNA, 19 nt, Artificial Sequence
  Description of Artificial Sequence: Synthetic oligonucleotide
  Antisense strand to SEQ ID NO: 1044190
augagacccaucaauucua

SEQ ID NO: 1044192 - RNA, 19 nt, Artificial Sequence
  Description of Artificial Sequence: Synthetic oligonucleotide
  Sense strand starting at position 3728 of SEQ ID NO: 914974
caugguagauagccauaga

SEQ ID NO: 1044193 - RNA, 19 nt, Artificial Sequence
  Description of Artificial Sequence: Synthetic oligonucleotide
  Antisense strand to SEQ ID NO: 1044192
ucuauggcuaucuaccaug

SEQ ID NO: 1044194 - RNA, 19 nt, Artificial Sequence
  Description of Artificial Sequence: Synthetic oligonucleotide
  Sense strand starting at position 3731 of SEQ ID NO: 914974
gguagauagccauagaguu

SEQ ID NO: 1044195 - RNA, 19 nt, Artificial Sequence
  Description of Artificial Sequence: Synthetic oligonucleotide
  Antisense strand to SEQ ID NO: 1044194
aacucuauggcuaucuacc

SEQ ID NO: 1044196 - RNA, 19 nt, Artificial Sequence
  Description of Artificial Sequence: Synthetic oligonucleotide
  Sense strand starting at position 3821 of SEQ ID NO: 914974
guguguagugguccuucau

SEQ ID NO: 1044197 - RNA, 19 nt, Artificial Sequence
  Description of Artificial Sequence: Synthetic oligonucleotide
  Antisense strand to SEQ ID NO: 1044196
augaaggaccacuacacac

SEQ ID NO: 1044198 - RNA, 19 nt, Artificial Sequence
  Description of Artificial Sequence: Synthetic oligonucleotide
  Sense strand starting at position 8 of SEQ ID NO: 914975
ucacuaugacaguauuggu

SEQ ID NO: 1044199 - RNA, 19 nt, Artificial Sequence
  Description of Artificial Sequence: Synthetic oligonucleotide
  Antisense strand to SEQ ID NO: 1044198
accaauacugucauaguga

SEQ ID NO: 1044200 - RNA, 19 nt, Artificial Sequence
  Description of Artificial Sequence: Synthetic oligonucleotide
  Sense strand starting at position 92 of SEQ ID NO: 914975
cugugaagagcccggauuu

SEQ ID NO: 1044201 - RNA, 19 nt, Artificial Sequence
  Description of Artificial Sequence: Synthetic oligonucleotide
  Antisense strand to SEQ ID NO: 1044200
aaauccgggcucuucacag

SEQ ID NO: 1044202 - RNA, 19 nt, Artificial Sequence
  Description of Artificial Sequence: Synthetic oligonucleotide
  Sense strand starting at position 205 of SEQ ID NO: 914975
cuggauauagcaggaucua

SEQ ID NO: 1044203 - RNA, 19 nt, Artificial Sequence
  Description of Artificial Sequence: Synthetic oligonucleotide
  Antisense strand to SEQ ID NO: 1044202
uagauccugcuauauccag

SEQ ID NO: 1044204 - RNA, 19 nt, Artificial Sequence
  Description of Artificial Sequence: Synthetic oligonucleotide
  Sense strand starting at position 323 of SEQ ID NO: 914975
caaagagucucaguggaaa

SEQ ID NO: 1044205 - RNA, 19 nt, Artificial Sequence
  Description of Artificial Sequence: Synthetic oligonucleotide
  Antisense strand to SEQ ID NO: 1044204
uuuccacugagacucuuug

SEQ ID NO: 1044206 - RNA, 19 nt, Artificial Sequence
  Description of Artificial Sequence: Synthetic oligonucleotide
  Sense strand starting at position 667 of SEQ ID NO: 914975
ucccuauucccugagagcu

SEQ ID NO: 1044207 - RNA, 19 nt, Artificial Sequence
  Description of Artificial Sequence: Synthetic oligonucleotide
  Antisense strand to SEQ ID NO: 1044206
agcucucagggaauaggga

SEQ ID NO: 1044208 - RNA, 19 nt, Artificial Sequence
  Description of Artificial Sequence: Synthetic oligonucleotide
  Sense strand starting at position 686 of SEQ ID NO: 914975
gagugcauuccugauaaac

SEQ ID NO: 1044209 - RNA, 19 nt, Artificial Sequence
  Description of Artificial Sequence: Synthetic oligonucleotide
  Antisense strand to SEQ ID NO: 1044208
guuuaucaggaaugcacuc

SEQ ID NO: 1044210 - RNA, 19 nt, Artificial Sequence
  Description of Artificial Sequence: Synthetic oligonucleotide
  Sense strand starting at position 801 of SEQ ID NO: 914975
aggguagguguugaaugua

SEQ ID NO: 1044211 - RNA, 19 nt, Artificial Sequence
  Description of Artificial Sequence: Synthetic oligonucleotide
  Antisense strand to SEQ ID NO: 1044210
uacauucaacaccuacccu

SEQ ID NO: 1044212 - RNA, 19 nt, Artificial Sequence
  Description of Artificial Sequence: Synthetic oligonucleotide
  Sense strand starting at position 806 of SEQ ID NO: 914975
agguguugaauguauaaua

SEQ ID NO: 1044213 - RNA, 19 nt, Artificial Sequence
  Description of Artificial Sequence: Synthetic oligonucleotide
  Antisense strand to SEQ ID NO: 1044212
uauuauacauucaacaccu

SEQ ID NO: 1044214 - RNA, 19 nt, Artificial Sequence
  Description of Artificial Sequence: Synthetic oligonucleotide
  Sense strand starting at position 1157 of SEQ ID NO: 914975
ggcugucuuggaggaagga

SEQ ID NO: 1044215 - RNA, 19 nt, Artificial Sequence
  Description of Artificial Sequence: Synthetic oligonucleotide
  Antisense strand to SEQ ID NO: 1044214
uccuuccuccaagacagcc

SEQ ID NO: 1044216 - RNA, 19 nt, Artificial Sequence
  Description of Artificial Sequence: Synthetic oligonucleotide
  Sense strand starting at position 1184 of SEQ ID NO: 914975
ggugguccuccugaauaag

SEQ ID NO: 1044217 - RNA, 19 nt, Artificial Sequence
  Description of Artificial Sequence: Synthetic oligonucleotide
  Antisense strand to SEQ ID NO: 1044216
cuuauucaggaggaccacc

SEQ ID NO: 1044218 - RNA, 19 nt, Artificial Sequence
  Description of Artificial Sequence: Synthetic oligonucleotide
  Sense strand starting at position 1295 of SEQ ID NO: 914975
ucucuagacggucagagau

SEQ ID NO: 1044219 - RNA, 19 nt, Artificial Sequence
  Description of Artificial Sequence: Synthetic oligonucleotide
  Antisense strand to SEQ ID NO: 1044218
aucucugaccgucuagaga

SEQ ID NO: 1044220 - RNA, 19 nt, Artificial Sequence
  Description of Artificial Sequence: Synthetic oligonucleotide
  Sense strand starting at position 1301 of SEQ ID NO: 914975
gacggucagagaugucaag

SEQ ID NO: 1044221 - RNA, 19 nt, Artificial Sequence
  Description of Artificial Sequence: Synthetic oligonucleotide
  Antisense strand to SEQ ID NO: 1044220
cuugacaucucugaccguc

SEQ ID NO: 1044222 - RNA, 19 nt, Artificial Sequence
  Description of Artificial Sequence: Synthetic oligonucleotide
  Sense strand starting at position 1307 of SEQ ID NO: 914975
cagagaugucaaggaguuc

SEQ ID NO: 1044223 - RNA, 19 nt, Artificial Sequence
  Description of Artificial Sequence: Synthetic oligonucleotide
  Antisense strand to SEQ ID NO: 1044222
gaacuccuugacaucucug

SEQ ID NO: 1044224 - RNA, 19 nt, Artificial Sequence
  Description of Artificial Sequence: Synthetic oligonucleotide
  Sense strand starting at position 2005 of SEQ ID NO: 914975
aaacgagaguugguuggaa

SEQ ID NO: 1044225 - RNA, 19 nt, Artificial Sequence
  Description of Artificial Sequence: Synthetic oligonucleotide
  Antisense strand to SEQ ID NO: 1044224
uuccaaccaacucucguuu

SEQ ID NO: 1044226 - RNA, 19 nt, Artificial Sequence
  Description of Artificial Sequence: Synthetic oligonucleotide
  Sense strand starting at position 2007 of SEQ ID NO: 914975
acgagaguugguuggaaua

SEQ ID NO: 1044227 - RNA, 19 nt, Artificial Sequence
  Description of Artificial Sequence: Synthetic oligonucleotide
  Antisense strand to SEQ ID NO: 1044226
uauuccaaccaacucucgu

SEQ ID NO: 1044228 - RNA, 19 nt, Artificial Sequence
  Description of Artificial Sequence: Synthetic oligonucleotide
  Sense strand starting at position 2032 of SEQ ID NO: 914975
accaucaggucuuugaaga

SEQ ID NO: 1044229 - RNA, 19 nt, Artificial Sequence
  Description of Artificial Sequence: Synthetic oligonucleotide
  Antisense strand to SEQ ID NO: 1044228
ucuucaaagaccugauggu

SEQ ID NO: 1044230 - RNA, 19 nt, Artificial Sequence
  Description of Artificial Sequence: Synthetic oligonucleotide
  Sense strand starting at position 2033 of SEQ ID NO: 914975
ccaucaggucuuugaagaa

SEQ ID NO: 1044231 - RNA, 19 nt, Artificial Sequence
  Description of Artificial Sequence: Synthetic oligonucleotide
  Antisense strand to SEQ ID NO: 1044230
uucuucaaagaccugaugg

SEQ ID NO: 1044232 - RNA, 19 nt, Artificial Sequence
  Description of Artificial Sequence: Synthetic oligonucleotide
  Sense strand starting at position 2271 of SEQ ID NO: 914975
uugggacuccauuaucagu

SEQ ID NO: 1044233 - RNA, 19 nt, Artificial Sequence
  Description of Artificial Sequence: Synthetic oligonucleotide
  Antisense strand to SEQ ID NO: 1044232
acugauaauggagucccaa

SEQ ID NO: 1044234 - RNA, 19 nt, Artificial Sequence
  Description of Artificial Sequence: Synthetic oligonucleotide
  Sense strand starting at position 2273 of SEQ ID NO: 914975
gggacuccauuaucaguuu

SEQ ID NO: 1044235 - RNA, 19 nt, Artificial Sequence
  Description of Artificial Sequence: Synthetic oligonucleotide
  Antisense strand to SEQ ID NO: 1044234
aaacugauaauggaguccc

SEQ ID NO: 1044236 - RNA, 19 nt, Artificial Sequence
  Description of Artificial Sequence: Synthetic oligonucleotide
  Sense strand starting at position 2474 of SEQ ID NO: 914975
uguuaugaaccauagcaau

SEQ ID NO: 1044237 - RNA, 19 nt, Artificial Sequence
  Description of Artificial Sequence: Synthetic oligonucleotide
  Antisense strand to SEQ ID NO: 1044236
auugcuaugguucauaaca

SEQ ID NO: 1044238 - RNA, 19 nt, Artificial Sequence
  Description of Artificial Sequence: Synthetic oligonucleotide
  Sense strand starting at position 2552 of SEQ ID NO: 914975
uugcaauaugcugggaaac

SEQ ID NO: 1044239 - RNA, 19 nt, Artificial Sequence
  Description of Artificial Sequence: Synthetic oligonucleotide
  Antisense strand to SEQ ID NO: 1044238
guuucccagcauauugcaa

SEQ ID NO: 1044240 - RNA, 19 nt, Artificial Sequence
  Description of Artificial Sequence: Synthetic oligonucleotide
  Sense strand starting at position 2710 of SEQ ID NO: 914975
ggaacauauguguaugugu

SEQ ID NO: 1044241 - RNA, 19 nt, Artificial Sequence
  Description of Artificial Sequence: Synthetic oligonucleotide
  Antisense strand to SEQ ID NO: 1044240
acacauacacauauguucc

SEQ ID NO: 1044242 - RNA, 19 nt, Artificial Sequence
  Description of Artificial Sequence: Synthetic oligonucleotide
  Sense strand starting at position 2821 of SEQ ID NO: 914975
uaaucaguuuagguggaua

SEQ ID NO: 1044243 - RNA, 19 nt, Artificial Sequence
  Description of Artificial Sequence: Synthetic oligonucleotide
  Antisense strand to SEQ ID NO: 1044242
uauccaccuaaacugauua

SEQ ID NO: 1044244 - RNA, 19 nt, Artificial Sequence
  Description of Artificial Sequence: Synthetic oligonucleotide
  Sense strand starting at position 2823 of SEQ ID NO: 914975
aucaguuuagguggauaaa

SEQ ID NO: 1044245 - RNA, 19 nt, Artificial Sequence
  Description of Artificial Sequence: Synthetic oligonucleotide
  Antisense strand to SEQ ID NO: 1044244
uuuauccaccuaaacugau

SEQ ID NO: 1044246 - RNA, 19 nt, Artificial Sequence
  Description of Artificial Sequence: Synthetic oligonucleotide
  Sense strand starting at position 2893 of SEQ ID NO: 914975
uuugcuauaucauuagaag

SEQ ID NO: 1044247 - RNA, 19 nt, Artificial Sequence
  Description of Artificial Sequence: Synthetic oligonucleotide
  Antisense strand to SEQ ID NO: 1044246
cuucuaaugauauagcaaa

SEQ ID NO: 1044248 - RNA, 19 nt, Artificial Sequence
  Description of Artificial Sequence: Synthetic oligonucleotide
  Sense strand starting at position 2980 of SEQ ID NO: 914975
uggugacagguuugauuga

SEQ ID NO: 1044249 - RNA, 19 nt, Artificial Sequence
  Description of Artificial Sequence: Synthetic oligonucleotide
  Antisense strand to SEQ ID NO: 1044248
ucaaucaaaccugucacca

SEQ ID NO: 1044250 - RNA, 19 nt, Artificial Sequence
  Description of Artificial Sequence: Synthetic oligonucleotide
  Sense strand starting at position 3006 of SEQ ID NO: 914975
cucuguuaauucuuuggga

SEQ ID NO: 1044251 - RNA, 19 nt, Artificial Sequence
  Description of Artificial Sequence: Synthetic oligonucleotide
  Antisense strand to SEQ ID NO: 1044250
ucccaaagaauuaacagag

SEQ ID NO: 1044252 - RNA, 19 nt, Artificial Sequence
  Description of Artificial Sequence: Synthetic oligonucleotide
  Sense strand starting at position 3008 of SEQ ID NO: 914975
cuguuaauucuuugggaca

SEQ ID NO: 1044253 - RNA, 19 nt, Artificial Sequence
  Description of Artificial Sequence: Synthetic oligonucleotide
  Antisense strand to SEQ ID NO: 1044252
ugucccaaagaauuaacag

SEQ ID NO: 1044254 - RNA, 19 nt, Artificial Sequence
  Description of Artificial Sequence: Synthetic oligonucleotide
  Sense strand starting at position 3022 of SEQ ID NO: 914975
ggacaauuaggcuaugucu

SEQ ID NO: 1044255 - RNA, 19 nt, Artificial Sequence
  Description of Artificial Sequence: Synthetic oligonucleotide
  Antisense strand to SEQ ID NO: 1044254
agacauagccuaauugucc

SEQ ID NO: 1044256 - RNA, 19 nt, Artificial Sequence
  Description of Artificial Sequence: Synthetic oligonucleotide
  Sense strand starting at position 3048 of SEQ ID NO: 914975
cuuagugguagccagggaa

SEQ ID NO: 1044257 - RNA, 19 nt, Artificial Sequence
  Description of Artificial Sequence: Synthetic oligonucleotide
  Antisense strand to SEQ ID NO: 1044256
uucccuggcuaccacuaag

SEQ ID NO: 1044258 - RNA, 19 nt, Artificial Sequence
  Description of Artificial Sequence: Synthetic oligonucleotide
  Sense strand starting at position 3213 of SEQ ID NO: 914975
guuccaaggaguugaauuc

SEQ ID NO: 1044259 - RNA, 19 nt, Artificial Sequence
  Description of Artificial Sequence: Synthetic oligonucleotide
  Antisense strand to SEQ ID NO: 1044258
gaauucaacuccuuggaac

SEQ ID NO: 1044260 - RNA, 19 nt, Artificial Sequence
  Description of Artificial Sequence: Synthetic oligonucleotide
  Sense strand starting at position 3273 of SEQ ID NO: 914975
gaaugaggcuaguuaucuu

SEQ ID NO: 1044261 - RNA, 19 nt, Artificial Sequence
  Description of Artificial Sequence: Synthetic oligonucleotide
  Antisense strand to SEQ ID NO: 1044260
aagauaacuagccucauuc

SEQ ID NO: 1044262 - RNA, 19 nt, Artificial Sequence
  Description of Artificial Sequence: Synthetic oligonucleotide
  Sense strand starting at position 3328 of SEQ ID NO: 914975
ccaugaugguguucuauaa

SEQ ID NO: 1044263 - RNA, 19 nt, Artificial Sequence
  Description of Artificial Sequence: Synthetic oligonucleotide
  Antisense strand to SEQ ID NO: 1044262
uuauagaacaccaucaugg

SEQ ID NO: 1044264 - RNA, 19 nt, Artificial Sequence
  Description of Artificial Sequence: Synthetic oligonucleotide
  Sense strand starting at position 3332 of SEQ ID NO: 914975
gaugguguucuauaaaucu

SEQ ID NO: 1044265 - RNA, 19 nt, Artificial Sequence
  Description of Artificial Sequence: Synthetic oligonucleotide
  Antisense strand to SEQ ID NO: 1044264
agauuuauagaacaccauc

SEQ ID NO: 1044266 - RNA, 19 nt, Artificial Sequence
  Description of Artificial Sequence: Synthetic oligonucleotide
  Sense strand starting at position 3448 of SEQ ID NO: 914975
uacuaaucagcauaggagu

SEQ ID NO: 1044267 - RNA, 19 nt, Artificial Sequence
  Description of Artificial Sequence: Synthetic oligonucleotide
  Antisense strand to SEQ ID NO: 1044266
acuccuaugcugauuagua

SEQ ID NO: 1044268 - RNA, 19 nt, Artificial Sequence
  Description of Artificial Sequence: Synthetic oligonucleotide
  Sense strand starting at position 3731 of SEQ ID NO: 914975
gccaccuaagagggauuaa

SEQ ID NO: 1044269 - RNA, 19 nt, Artificial Sequence
  Description of Artificial Sequence: Synthetic oligonucleotide
  Antisense strand to SEQ ID NO: 1044268
uuaaucccucuuagguggc

SEQ ID NO: 1044270 - RNA, 19 nt, Artificial Sequence
  Description of Artificial Sequence: Synthetic oligonucleotide
  Sense strand starting at position 3742 of SEQ ID NO: 914975
gggauuaauuuaugaacca

SEQ ID NO: 1044271 - RNA, 19 nt, Artificial Sequence
  Description of Artificial Sequence: Synthetic oligonucleotide
  Antisense strand to SEQ ID NO: 1044270
ugguucauaaauuaauccc

SEQ ID NO: 1044272 - RNA, 19 nt, Artificial Sequence
  Description of Artificial Sequence: Synthetic oligonucleotide
  Sense strand starting at position 3743 of SEQ ID NO: 914975
ggauuaauuuaugaaccag

SEQ ID NO: 1044273 - RNA, 19 nt, Artificial Sequence
  Description of Artificial Sequence: Synthetic oligonucleotide
  Antisense strand to SEQ ID NO: 1044272
cugguucauaaauuaaucc

SEQ ID NO: 1044274 - RNA, 19 nt, Artificial Sequence
  Description of Artificial Sequence: Synthetic oligonucleotide
  Sense strand starting at position 3902 of SEQ ID NO: 914975
uuccaauaagucuguugaa

SEQ ID NO: 1044275 - RNA, 19 nt, Artificial Sequence
  Description of Artificial Sequence: Synthetic oligonucleotide
  Antisense strand to SEQ ID NO: 1044274
uucaacagacuuauuggaa

SEQ ID NO: 1044276 - RNA, 19 nt, Artificial Sequence
  Description of Artificial Sequence: Synthetic oligonucleotide
  Sense strand starting at position 3903 of SEQ ID NO: 914975
uccaauaagucuguugaaa

SEQ ID NO: 1044277 - RNA, 19 nt, Artificial Sequence
  Description of Artificial Sequence: Synthetic oligonucleotide
  Antisense strand to SEQ ID NO: 1044276
uuucaacagacuuauugga

SEQ ID NO: 1044278 - RNA, 19 nt, Artificial Sequence
  Description of Artificial Sequence: Synthetic oligonucleotide
  Sense strand starting at position 203 of SEQ ID NO: 914976
ucccuagcucuggauugau

SEQ ID NO: 1044279 - RNA, 19 nt, Artificial Sequence
  Description of Artificial Sequence: Synthetic oligonucleotide
  Antisense strand to SEQ ID NO: 1044278
aucaauccagagcuaggga

SEQ ID NO: 1044280 - RNA, 19 nt, Artificial Sequence
  Description of Artificial Sequence: Synthetic oligonucleotide
  Sense strand starting at position 206 of SEQ ID NO: 914976
cuagcucuggauugauuga

SEQ ID NO: 1044281 - RNA, 19 nt, Artificial Sequence
  Description of Artificial Sequence: Synthetic oligonucleotide
  Antisense strand to SEQ ID NO: 1044280
ucaaucaauccagagcuag

SEQ ID NO: 1044282 - RNA, 19 nt, Artificial Sequence
  Description of Artificial Sequence: Synthetic oligonucleotide
  Sense strand starting at position 537 of SEQ ID NO: 914976
guuuguuugcagcaucuca

SEQ ID NO: 1044283 - RNA, 19 nt, Artificial Sequence
  Description of Artificial Sequence: Synthetic oligonucleotide
  Antisense strand to SEQ ID NO: 1044282
ugagaugcugcaaacaaac

SEQ ID NO: 1044284 - RNA, 19 nt, Artificial Sequence
  Description of Artificial Sequence: Synthetic oligonucleotide
  Sense strand starting at position 767 of SEQ ID NO: 914976
aagauaaccuuguuauacg

SEQ ID NO: 1044285 - RNA, 19 nt, Artificial Sequence
  Description of Artificial Sequence: Synthetic oligonucleotide
  Antisense strand to SEQ ID NO: 1044284
cguauaacaagguuaucuu

SEQ ID NO: 1044286 - RNA, 19 nt, Artificial Sequence
  Description of Artificial Sequence: Synthetic oligonucleotide
  Sense strand starting at position 817 of SEQ ID NO: 914976
gaagaaauccggcggcaac

SEQ ID NO: 1044287 - RNA, 19 nt, Artificial Sequence
  Description of Artificial Sequence: Synthetic oligonucleotide
  Antisense strand to SEQ ID NO: 1044286
guugccgccggauuucuuc

SEQ ID NO: 1044288 - RNA, 19 nt, Artificial Sequence
  Description of Artificial Sequence: Synthetic oligonucleotide
  Sense strand starting at position 1163 of SEQ ID NO: 914976
gggacuuucuaguaaacag

SEQ ID NO: 1044289 - RNA, 19 nt, Artificial Sequence
  Description of Artificial Sequence: Synthetic oligonucleotide
  Antisense strand to SEQ ID NO: 1044288
cuguuuacuagaaaguccc

SEQ ID NO: 1044290 - RNA, 19 nt, Artificial Sequence
  Description of Artificial Sequence: Synthetic oligonucleotide
  Sense strand starting at position 2220 of SEQ ID NO: 914976
ucaucaucaugagugcgau

SEQ ID NO: 1044291 - RNA, 19 nt, Artificial Sequence
  Description of Artificial Sequence: Synthetic oligonucleotide
  Antisense strand to SEQ ID NO: 1044290
aucgcacucaugaugauga

SEQ ID NO: 1044292 - RNA, 19 nt, Artificial Sequence
  Description of Artificial Sequence: Synthetic oligonucleotide
  Sense strand starting at position 2311 of SEQ ID NO: 914976
ugguguucuucugcaaaga

SEQ ID NO: 1044293 - RNA, 19 nt, Artificial Sequence
  Description of Artificial Sequence: Synthetic oligonucleotide
  Antisense strand to SEQ ID NO: 1044292
ucuuugcagaagaacacca

SEQ ID NO: 1044294 - RNA, 19 nt, Artificial Sequence
  Description of Artificial Sequence: Synthetic oligonucleotide
  Sense strand starting at position 2312 of SEQ ID NO: 914976
gguguucuucugcaaagag

SEQ ID NO: 1044295 - RNA, 19 nt, Artificial Sequence
  Description of Artificial Sequence: Synthetic oligonucleotide
  Antisense strand to SEQ ID NO: 1044294
cucuuugcagaagaacacc

SEQ ID NO: 1044296 - RNA, 19 nt, Artificial Sequence
  Description of Artificial Sequence: Synthetic oligonucleotide
  Sense strand starting at position 2602 of SEQ ID NO: 914976
ucugcaauguugcugagaa

SEQ ID NO: 1044297 - RNA, 19 nt, Artificial Sequence
  Description of Artificial Sequence: Synthetic oligonucleotide
  Antisense strand to SEQ ID NO: 1044296
uucucagcaacauugcaga

SEQ ID NO: 1044298 - RNA, 19 nt, Artificial Sequence
  Description of Artificial Sequence: Synthetic oligonucleotide
  Sense strand starting at position 2604 of SEQ ID NO: 914976
ugcaauguugcugagaaag

SEQ ID NO: 1044299 - RNA, 19 nt, Artificial Sequence
  Description of Artificial Sequence: Synthetic oligonucleotide
  Antisense strand to SEQ ID NO: 1044298
cuuucucagcaacauugca

SEQ ID NO: 1044300 - RNA, 19 nt, Artificial Sequence
  Description of Artificial Sequence: Synthetic oligonucleotide
  Sense strand starting at position 2606 of SEQ ID NO: 914976
caauguugcugagaaagaa

SEQ ID NO: 1044301 - RNA, 19 nt, Artificial Sequence
  Description of Artificial Sequence: Synthetic oligonucleotide
  Antisense strand to SEQ ID NO: 1044300
uucuuucucagcaacauug

SEQ ID NO: 1044302 - RNA, 19 nt, Artificial Sequence
  Description of Artificial Sequence: Synthetic oligonucleotide
  Sense strand starting at position 2696 of SEQ ID NO: 914976
aggcaaagacucuaauugu

SEQ ID NO: 1044303 - RNA, 19 nt, Artificial Sequence
  Description of Artificial Sequence: Synthetic oligonucleotide
  Antisense strand to SEQ ID NO: 1044302
acaauuagagucuuugccu

SEQ ID NO: 1044304 - RNA, 19 nt, Artificial Sequence
  Description of Artificial Sequence: Synthetic oligonucleotide
  Sense strand starting at position 2861 of SEQ ID NO: 914976
aggaaaugccgcugaaaug

SEQ ID NO: 1044305 - RNA, 19 nt, Artificial Sequence
  Description of Artificial Sequence: Synthetic oligonucleotide
  Antisense strand to SEQ ID NO: 1044304
cauuucagcggcauuuccu

SEQ ID NO: 1044306 - RNA, 19 nt, Artificial Sequence
  Description of Artificial Sequence: Synthetic oligonucleotide
  Sense strand starting at position 2929 of SEQ ID NO: 914976
caggguugucugugaaaga

SEQ ID NO: 1044307 - RNA, 19 nt, Artificial Sequence
  Description of Artificial Sequence: Synthetic oligonucleotide
  Antisense strand to SEQ ID NO: 1044306
ucuuucacagacaacccug

SEQ ID NO: 1044308 - RNA, 19 nt, Artificial Sequence
  Description of Artificial Sequence: Synthetic oligonucleotide
  Sense strand starting at position 2963 of SEQ ID NO: 914976
auguuaugccauugucauu

SEQ ID NO: 1044309 - RNA, 19 nt, Artificial Sequence
  Description of Artificial Sequence: Synthetic oligonucleotide
  Antisense strand to SEQ ID NO: 1044308
aaugacaauggcauaacau

SEQ ID NO: 1044310 - RNA, 19 nt, Artificial Sequence
  Description of Artificial Sequence: Synthetic oligonucleotide
  Sense strand starting at position 2973 of SEQ ID NO: 914976
auugucauugcugaaagau

SEQ ID NO: 1044311 - RNA, 19 nt, Artificial Sequence
  Description of Artificial Sequence: Synthetic oligonucleotide
  Antisense strand to SEQ ID NO: 1044310
aucuuucagcaaugacaau

SEQ ID NO: 1044312 - RNA, 19 nt, Artificial Sequence
  Description of Artificial Sequence: Synthetic oligonucleotide
  Sense strand starting at position 3032 of SEQ ID NO: 914976
cugaaagaucugugcauuc

SEQ ID NO: 1044313 - RNA, 19 nt, Artificial Sequence
  Description of Artificial Sequence: Synthetic oligonucleotide
  Antisense strand to SEQ ID NO: 1044312
gaaugcacagaucuuucag

SEQ ID NO: 1044314 - RNA, 19 nt, Artificial Sequence
  Description of Artificial Sequence: Synthetic oligonucleotide
  Sense strand starting at position 3034 of SEQ ID NO: 914976
gaaagaucugugcauucuc

SEQ ID NO: 1044315 - RNA, 19 nt, Artificial Sequence
  Description of Artificial Sequence: Synthetic oligonucleotide
  Antisense strand to SEQ ID NO: 1044314
gagaaugcacagaucuuuc

SEQ ID NO: 1044316 - RNA, 19 nt, Artificial Sequence
  Description of Artificial Sequence: Synthetic oligonucleotide
  Sense strand starting at position 3045 of SEQ ID NO: 914976
gcauucucugaagggaaau

SEQ ID NO: 1044317 - RNA, 19 nt, Artificial Sequence
  Description of Artificial Sequence: Synthetic oligonucleotide
  Antisense strand to SEQ ID NO: 1044316
auuucccuucagagaaugc

SEQ ID NO: 1044318 - RNA, 19 nt, Artificial Sequence
  Description of Artificial Sequence: Synthetic oligonucleotide
  Sense strand starting at position 3099 of SEQ ID NO: 914976
cuaaguauacuaugugaca

SEQ ID NO: 1044319 - RNA, 19 nt, Artificial Sequence
  Description of Artificial Sequence: Synthetic oligonucleotide
  Antisense strand to SEQ ID NO: 1044318
ugucacauaguauacuuag

SEQ ID NO: 1044320 - RNA, 19 nt, Artificial Sequence
  Description of Artificial Sequence: Synthetic oligonucleotide
  Sense strand starting at position 3122 of SEQ ID NO: 914976
acuagacauccuggcugaa

SEQ ID NO: 1044321 - RNA, 19 nt, Artificial Sequence
  Description of Artificial Sequence: Synthetic oligonucleotide
  Antisense strand to SEQ ID NO: 1044320
uucagccaggaugucuagu

SEQ ID NO: 1044322 - RNA, 19 nt, Artificial Sequence
  Description of Artificial Sequence: Synthetic oligonucleotide
  Sense strand starting at position 3125 of SEQ ID NO: 914976
agacauccuggcugaaauu

SEQ ID NO: 1044323 - RNA, 19 nt, Artificial Sequence
  Description of Artificial Sequence: Synthetic oligonucleotide
  Antisense strand to SEQ ID NO: 1044322
aauuucagccaggaugucu

SEQ ID NO: 1044324 - RNA, 19 nt, Artificial Sequence
  Description of Artificial Sequence: Synthetic oligonucleotide
  Sense strand starting at position 3187 of SEQ ID NO: 914976
ggccucugugcugagacua

SEQ ID NO: 1044325 - RNA, 19 nt, Artificial Sequence
  Description of Artificial Sequence: Synthetic oligonucleotide
  Antisense strand to SEQ ID NO: 1044324
uagucucagcacagaggcc

SEQ ID NO: 1044326 - RNA, 19 nt, Artificial Sequence
  Description of Artificial Sequence: Synthetic oligonucleotide
  Sense strand starting at position 3195 of SEQ ID NO: 914976
ugcugagacuaauugguuu

SEQ ID NO: 1044327 - RNA, 19 nt, Artificial Sequence
  Description of Artificial Sequence: Synthetic oligonucleotide
  Antisense strand to SEQ ID NO: 1044326
aaaccaauuagucucagca

SEQ ID NO: 1044328 - RNA, 19 nt, Artificial Sequence
  Description of Artificial Sequence: Synthetic oligonucleotide
  Sense strand starting at position 3342 of SEQ ID NO: 914976
cucuuaugccuaggcugaa

SEQ ID NO: 1044329 - RNA, 19 nt, Artificial Sequence
  Description of Artificial Sequence: Synthetic oligonucleotide
  Antisense strand to SEQ ID NO: 1044328
uucagccuaggcauaagag

SEQ ID NO: 1044330 - RNA, 19 nt, Artificial Sequence
  Description of Artificial Sequence: Synthetic oligonucleotide
  Sense strand starting at position 3343 of SEQ ID NO: 914976
ucuuaugccuaggcugaaa

SEQ ID NO: 1044331 - RNA, 19 nt, Artificial Sequence
  Description of Artificial Sequence: Synthetic oligonucleotide
  Antisense strand to SEQ ID NO: 1044330
uuucagccuaggcauaaga

SEQ ID NO: 1044332 - RNA, 19 nt, Artificial Sequence
  Description of Artificial Sequence: Synthetic oligonucleotide
  Sense strand starting at position 3368 of SEQ ID NO: 914976
gggaaauggucuuacuaau

SEQ ID NO: 1044333 - RNA, 19 nt, Artificial Sequence
  Description of Artificial Sequence: Synthetic oligonucleotide
  Antisense strand to SEQ ID NO: 1044332
auuaguaagaccauuuccc

SEQ ID NO: 1044334 - RNA, 19 nt, Artificial Sequence
  Description of Artificial Sequence: Synthetic oligonucleotide
  Sense strand starting at position 3415 of SEQ ID NO: 914976
gagugucagugcuugucaa

SEQ ID NO: 1044335 - RNA, 19 nt, Artificial Sequence
  Description of Artificial Sequence: Synthetic oligonucleotide
  Antisense strand to SEQ ID NO: 1044334
uugacaagcacugacacuc

SEQ ID NO: 1044336 - RNA, 19 nt, Artificial Sequence
  Description of Artificial Sequence: Synthetic oligonucleotide
  Sense strand starting at position 3416 of SEQ ID NO: 914976
agugucagugcuugucaaa

SEQ ID NO: 1044337 - RNA, 19 nt, Artificial Sequence
  Description of Artificial Sequence: Synthetic oligonucleotide
  Antisense strand to SEQ ID NO: 1044336
uuugacaagcacugacacu

SEQ ID NO: 1044338 - RNA, 19 nt, Artificial Sequence
  Description of Artificial Sequence: Synthetic oligonucleotide
  Sense strand starting at position 3571 of SEQ ID NO: 914976
agcgaacacugacuagaau

SEQ ID NO: 1044339 - RNA, 19 nt, Artificial Sequence
  Description of Artificial Sequence: Synthetic oligonucleotide
  Antisense strand to SEQ ID NO: 1044338
auucuagucaguguucgcu

SEQ ID NO: 1044340 - RNA, 19 nt, Artificial Sequence
  Description of Artificial Sequence: Synthetic oligonucleotide
  Sense strand starting at position 3618 of SEQ ID NO: 914976
uuuccuuuacucugugacu

SEQ ID NO: 1044341 - RNA, 19 nt, Artificial Sequence
  Description of Artificial Sequence: Synthetic oligonucleotide
  Antisense strand to SEQ ID NO: 1044340
agucacagaguaaaggaaa

SEQ ID NO: 1044342 - RNA, 19 nt, Artificial Sequence
  Description of Artificial Sequence: Synthetic oligonucleotide
  Sense strand starting at position 3620 of SEQ ID NO: 914976
uccuuuacucugugacuga

SEQ ID NO: 1044343 - RNA, 19 nt, Artificial Sequence
  Description of Artificial Sequence: Synthetic oligonucleotide
  Antisense strand to SEQ ID NO: 1044342
ucagucacagaguaaagga

SEQ ID NO: 1044344 - RNA, 19 nt, Artificial Sequence
  Description of Artificial Sequence: Synthetic oligonucleotide
  Sense strand starting at position 3623 of SEQ ID NO: 914976
uuuacucugugacugagua

SEQ ID NO: 1044345 - RNA, 19 nt, Artificial Sequence
  Description of Artificial Sequence: Synthetic oligonucleotide
  Antisense strand to SEQ ID NO: 1044344
uacucagucacagaguaaa

SEQ ID NO: 1044346 - RNA, 19 nt, Artificial Sequence
  Description of Artificial Sequence: Synthetic oligonucleotide
  Sense strand starting at position 3727 of SEQ ID NO: 914976
ccaaauaauuucugugguu

SEQ ID NO: 1044347 - RNA, 19 nt, Artificial Sequence
  Description of Artificial Sequence: Synthetic oligonucleotide
  Antisense strand to SEQ ID NO: 1044346
aaccacagaaauuauuugg

SEQ ID NO: 1044348 - RNA, 19 nt, Artificial Sequence
  Description of Artificial Sequence: Synthetic oligonucleotide
  Sense strand starting at position 3790 of SEQ ID NO: 914976
guuugaacaugauucugaa

SEQ ID NO: 1044349 - RNA, 19 nt, Artificial Sequence
  Description of Artificial Sequence: Synthetic oligonucleotide
  Antisense strand to SEQ ID NO: 1044348
uucagaaucauguucaaac

SEQ ID NO: 1044350 - RNA, 19 nt, Artificial Sequence
  Description of Artificial Sequence: Synthetic oligonucleotide
  Sense strand starting at position 3848 of SEQ ID NO: 914976
cuacuuuagugguacauuu

SEQ ID NO: 1044351 - RNA, 19 nt, Artificial Sequence
  Description of Artificial Sequence: Synthetic oligonucleotide
  Antisense strand to SEQ ID NO: 1044350
aaauguaccacuaaaguag

SEQ ID NO: 1044352 - RNA, 19 nt, Artificial Sequence
  Description of Artificial Sequence: Synthetic oligonucleotide
  Sense strand starting at position 3891 of SEQ ID NO: 914976
aaucaaguggguuauccau

SEQ ID NO: 1044353 - RNA, 19 nt, Artificial Sequence
  Description of Artificial Sequence: Synthetic oligonucleotide
  Antisense strand to SEQ ID NO: 1044352
auggauaacccacuugauu

SEQ ID NO: 1044354 - RNA, 19 nt, Artificial Sequence
  Description of Artificial Sequence: Synthetic oligonucleotide
  Sense strand starting at position 3893 of SEQ ID NO: 914976
ucaaguggguuauccauua

SEQ ID NO: 1044355 - RNA, 19 nt, Artificial Sequence
  Description of Artificial Sequence: Synthetic oligonucleotide
  Antisense strand to SEQ ID NO: 1044354
uaauggauaacccacuuga

SEQ ID NO: 1044356 - RNA, 19 nt, Artificial Sequence
  Description of Artificial Sequence: Synthetic oligonucleotide
  Sense strand starting at position 3919 of SEQ ID NO: 914976
gauggaaauuuguauacca

SEQ ID NO: 1044357 - RNA, 19 nt, Artificial Sequence
  Description of Artificial Sequence: Synthetic oligonucleotide
  Antisense strand to SEQ ID NO: 1044356
ugguauacaaauuuccauc

SEQ ID NO: 1044358 - RNA, 19 nt, Artificial Sequence
  Description of Artificial Sequence: Synthetic oligonucleotide
  Sense strand starting at position 100 of SEQ ID NO: 914977
ugagaacuaagcugagguu

SEQ ID NO: 1044359 - RNA, 19 nt, Artificial Sequence
  Description of Artificial Sequence: Synthetic oligonucleotide
  Antisense strand to SEQ ID NO: 1044358
aaccucagcuuaguucuca

SEQ ID NO: 1044360 - RNA, 19 nt, Artificial Sequence
  Description of Artificial Sequence: Synthetic oligonucleotide
  Sense strand starting at position 197 of SEQ ID NO: 914977
cuuguaguucuuuaauaca

SEQ ID NO: 1044361 - RNA, 19 nt, Artificial Sequence
  Description of Artificial Sequence: Synthetic oligonucleotide
  Antisense strand to SEQ ID NO: 1044360
uguauuaaagaacuacaag

SEQ ID NO: 1044362 - RNA, 19 nt, Artificial Sequence
  Description of Artificial Sequence: Synthetic oligonucleotide
  Sense strand starting at position 562 of SEQ ID NO: 914977
gcagaaaucucaucauagg

SEQ ID NO: 1044363 - RNA, 19 nt, Artificial Sequence
  Description of Artificial Sequence: Synthetic oligonucleotide
  Antisense strand to SEQ ID NO: 1044362
ccuaugaugagauuucugc

SEQ ID NO: 1044364 - RNA, 19 nt, Artificial Sequence
  Description of Artificial Sequence: Synthetic oligonucleotide
  Sense strand starting at position 585 of SEQ ID NO: 914977
ugacucgcucuccagaaua

SEQ ID NO: 1044365 - RNA, 19 nt, Artificial Sequence
  Description of Artificial Sequence: Synthetic oligonucleotide
  Antisense strand to SEQ ID NO: 1044364
uauucuggagagcgaguca

SEQ ID NO: 1044366 - RNA, 19 nt, Artificial Sequence
  Description of Artificial Sequence: Synthetic oligonucleotide
  Sense strand starting at position 587 of SEQ ID NO: 914977
acucgcucuccagaauaua

SEQ ID NO: 1044367 - RNA, 19 nt, Artificial Sequence
  Description of Artificial Sequence: Synthetic oligonucleotide
  Antisense strand to SEQ ID NO: 1044366
uauauucuggagagcgagu

SEQ ID NO: 1044368 - RNA, 19 nt, Artificial Sequence
  Description of Artificial Sequence: Synthetic oligonucleotide
  Sense strand starting at position 798 of SEQ ID NO: 914977
caauucuuccaggaguggu

SEQ ID NO: 1044369 - RNA, 19 nt, Artificial Sequence
  Description of Artificial Sequence: Synthetic oligonucleotide
  Antisense strand to SEQ ID NO: 1044368
accacuccuggaagaauug

SEQ ID NO: 1044370 - RNA, 19 nt, Artificial Sequence
  Description of Artificial Sequence: Synthetic oligonucleotide
  Sense strand starting at position 801 of SEQ ID NO: 914977
uucuuccaggagugguaaa

SEQ ID NO: 1044371 - RNA, 19 nt, Artificial Sequence
  Description of Artificial Sequence: Synthetic oligonucleotide
  Antisense strand to SEQ ID NO: 1044370
uuuaccacuccuggaagaa

SEQ ID NO: 1044372 - RNA, 19 nt, Artificial Sequence
  Description of Artificial Sequence: Synthetic oligonucleotide
  Sense strand starting at position 881 of SEQ ID NO: 914977
uuaguccuacuaugaaaga

SEQ ID NO: 1044373 - RNA, 19 nt, Artificial Sequence
  Description of Artificial Sequence: Synthetic oligonucleotide
  Antisense strand to SEQ ID NO: 1044372
ucuuucauaguaggacuaa

SEQ ID NO: 1044374 - RNA, 19 nt, Artificial Sequence
  Description of Artificial Sequence: Synthetic oligonucleotide
  Sense strand starting at position 937 of SEQ ID NO: 914977
gcaccaggccuugaauaaa

SEQ ID NO: 1044375 - RNA, 19 nt, Artificial Sequence
  Description of Artificial Sequence: Synthetic oligonucleotide
  Antisense strand to SEQ ID NO: 1044374
uuuauucaaggccuggugc

SEQ ID NO: 1044376 - RNA, 19 nt, Artificial Sequence
  Description of Artificial Sequence: Synthetic oligonucleotide
  Sense strand starting at position 1143 of SEQ ID NO: 914977
aguacaauuccuggaacca

SEQ ID NO: 1044377 - RNA, 19 nt, Artificial Sequence
  Description of Artificial Sequence: Synthetic oligonucleotide
  Antisense strand to SEQ ID NO: 1044376
ugguuccaggaauuguacu

SEQ ID NO: 1044378 - RNA, 19 nt, Artificial Sequence
  Description of Artificial Sequence: Synthetic oligonucleotide
  Sense strand starting at position 1267 of SEQ ID NO: 914977
cuggacaauuagucccaau

SEQ ID NO: 1044379 - RNA, 19 nt, Artificial Sequence
  Description of Artificial Sequence: Synthetic oligonucleotide
  Antisense strand to SEQ ID NO: 1044378
auugggacuaauuguccag

SEQ ID NO: 1044380 - RNA, 19 nt, Artificial Sequence
  Description of Artificial Sequence: Synthetic oligonucleotide
  Sense strand starting at position 1423 of SEQ ID NO: 914977
aggagucucaggcaaauuc

SEQ ID NO: 1044381 - RNA, 19 nt, Artificial Sequence
  Description of Artificial Sequence: Synthetic oligonucleotide
  Antisense strand to SEQ ID NO: 1044380
gaauuugccugagacuccu

SEQ ID NO: 1044382 - RNA, 19 nt, Artificial Sequence
  Description of Artificial Sequence: Synthetic oligonucleotide
  Sense strand starting at position 1479 of SEQ ID NO: 914977
cguucuuaucuauaaauag

SEQ ID NO: 1044383 - RNA, 19 nt, Artificial Sequence
  Description of Artificial Sequence: Synthetic oligonucleotide
  Antisense strand to SEQ ID NO: 1044382
cuauuuauagauaagaacg

SEQ ID NO: 1044384 - RNA, 19 nt, Artificial Sequence
  Description of Artificial Sequence: Synthetic oligonucleotide
  Sense strand starting at position 1541 of SEQ ID NO: 914977
ucaauugugguugaaagug

SEQ ID NO: 1044385 - RNA, 19 nt, Artificial Sequence
  Description of Artificial Sequence: Synthetic oligonucleotide
  Antisense strand to SEQ ID NO: 1044384
cacuuucaaccacaauuga

SEQ ID NO: 1044386 - RNA, 19 nt, Artificial Sequence
  Description of Artificial Sequence: Synthetic oligonucleotide
  Sense strand starting at position 1579 of SEQ ID NO: 914977
uacacagauguaugggauu

SEQ ID NO: 1044387 - RNA, 19 nt, Artificial Sequence
  Description of Artificial Sequence: Synthetic oligonucleotide
  Antisense strand to SEQ ID NO: 1044386
aaucccauacaucugugua

SEQ ID NO: 1044388 - RNA, 19 nt, Artificial Sequence
  Description of Artificial Sequence: Synthetic oligonucleotide
  Sense strand starting at position 1787 of SEQ ID NO: 914977
ugauguuguagugcgugaa

SEQ ID NO: 1044389 - RNA, 19 nt, Artificial Sequence
  Description of Artificial Sequence: Synthetic oligonucleotide
  Antisense strand to SEQ ID NO: 1044388
uucacgcacuacaacauca

SEQ ID NO: 1044390 - RNA, 19 nt, Artificial Sequence
  Description of Artificial Sequence: Synthetic oligonucleotide
  Sense strand starting at position 1861 of SEQ ID NO: 914977
gaaggaaucccaugugcca

SEQ ID NO: 1044391 - RNA, 19 nt, Artificial Sequence
  Description of Artificial Sequence: Synthetic oligonucleotide
  Antisense strand to SEQ ID NO: 1044390
uggcacaugggauuccuuc

SEQ ID NO: 1044392 - RNA, 19 nt, Artificial Sequence
  Description of Artificial Sequence: Synthetic oligonucleotide
  Sense strand starting at position 1888 of SEQ ID NO: 914977
cccuauaggcaugagcaau

SEQ ID NO: 1044393 - RNA, 19 nt, Artificial Sequence
  Description of Artificial Sequence: Synthetic oligonucleotide
  Antisense strand to SEQ ID NO: 1044392
auugcucaugccuauaggg

SEQ ID NO: 1044394 - RNA, 19 nt, Artificial Sequence
  Description of Artificial Sequence: Synthetic oligonucleotide
  Sense strand starting at position 1960 of SEQ ID NO: 914977
cucugaauccaaggaucua

SEQ ID NO: 1044395 - RNA, 19 nt, Artificial Sequence
  Description of Artificial Sequence: Synthetic oligonucleotide
  Antisense strand to SEQ ID NO: 1044394
uagauccuuggauucagag

SEQ ID NO: 1044396 - RNA, 19 nt, Artificial Sequence
  Description of Artificial Sequence: Synthetic oligonucleotide
  Sense strand starting at position 1990 of SEQ ID NO: 914977
cgcugugcauuucugaaag

SEQ ID NO: 1044397 - RNA, 19 nt, Artificial Sequence
  Description of Artificial Sequence: Synthetic oligonucleotide
  Antisense strand to SEQ ID NO: 1044396
cuuucagaaaugcacagcg

SEQ ID NO: 1044398 - RNA, 19 nt, Artificial Sequence
  Description of Artificial Sequence: Synthetic oligonucleotide
  Sense strand starting at position 2303 of SEQ ID NO: 914977
auggcaucuggcuauacau

SEQ ID NO: 1044399 - RNA, 19 nt, Artificial Sequence
  Description of Artificial Sequence: Synthetic oligonucleotide
  Antisense strand to SEQ ID NO: 1044398
auguauagccagaugccau

SEQ ID NO: 1044400 - RNA, 19 nt, Artificial Sequence
  Description of Artificial Sequence: Synthetic oligonucleotide
  Sense strand starting at position 2326 of SEQ ID NO: 914977
ugugcuccaagugaagaau

SEQ ID NO: 1044401 - RNA, 19 nt, Artificial Sequence
  Description of Artificial Sequence: Synthetic oligonucleotide
  Antisense strand to SEQ ID NO: 1044400
auucuucacuuggagcaca

SEQ ID NO: 1044402 - RNA, 19 nt, Artificial Sequence
  Description of Artificial Sequence: Synthetic oligonucleotide
  Sense strand starting at position 2329 of SEQ ID NO: 914977
gcuccaagugaagaaucuu

SEQ ID NO: 1044403 - RNA, 19 nt, Artificial Sequence
  Description of Artificial Sequence: Synthetic oligonucleotide
  Antisense strand to SEQ ID NO: 1044402
aagauucuucacuuggagc

SEQ ID NO: 1044404 - RNA, 19 nt, Artificial Sequence
  Description of Artificial Sequence: Synthetic oligonucleotide
  Sense strand starting at position 2371 of SEQ ID NO: 914977
auguuuggucuuuacaaag

SEQ ID NO: 1044405 - RNA, 19 nt, Artificial Sequence
  Description of Artificial Sequence: Synthetic oligonucleotide
  Antisense strand to SEQ ID NO: 1044404
cuuuguaaagaccaaacau

SEQ ID NO: 1044406 - RNA, 19 nt, Artificial Sequence
  Description of Artificial Sequence: Synthetic oligonucleotide
  Sense strand starting at position 2484 of SEQ ID NO: 914977
acauguguauuacuauaac

SEQ ID NO: 1044407 - RNA, 19 nt, Artificial Sequence
  Description of Artificial Sequence: Synthetic oligonucleotide
  Antisense strand to SEQ ID NO: 1044406
guuauaguaauacacaugu

SEQ ID NO: 1044408 - RNA, 19 nt, Artificial Sequence
  Description of Artificial Sequence: Synthetic oligonucleotide
  Sense strand starting at position 2487 of SEQ ID NO: 914977
uguguauuacuauaacaug

SEQ ID NO: 1044409 - RNA, 19 nt, Artificial Sequence
  Description of Artificial Sequence: Synthetic oligonucleotide
  Antisense strand to SEQ ID NO: 1044408
cauguuauaguaauacaca

SEQ ID NO: 1044410 - RNA, 19 nt, Artificial Sequence
  Description of Artificial Sequence: Synthetic oligonucleotide
  Sense strand starting at position 2594 of SEQ ID NO: 914977
ggcccagaaccuuauggua

SEQ ID NO: 1044411 - RNA, 19 nt, Artificial Sequence
  Description of Artificial Sequence: Synthetic oligonucleotide
  Antisense strand to SEQ ID NO: 1044410
uaccauaagguucugggcc

SEQ ID NO: 1044412 - RNA, 19 nt, Artificial Sequence
  Description of Artificial Sequence: Synthetic oligonucleotide
  Sense strand starting at position 2875 of SEQ ID NO: 914977
cugcacuggguugagaaau

SEQ ID NO: 1044413 - RNA, 19 nt, Artificial Sequence
  Description of Artificial Sequence: Synthetic oligonucleotide
  Antisense strand to SEQ ID NO: 1044412
auuucucaacccagugcag

SEQ ID NO: 1044414 - RNA, 19 nt, Artificial Sequence
  Description of Artificial Sequence: Synthetic oligonucleotide
  Sense strand starting at position 2966 of SEQ ID NO: 914977
ugaucagugcgguagagaa

SEQ ID NO: 1044415 - RNA, 19 nt, Artificial Sequence
  Description of Artificial Sequence: Synthetic oligonucleotide
  Antisense strand to SEQ ID NO: 1044414
uucucuaccgcacugauca

SEQ ID NO: 1044416 - RNA, 19 nt, Artificial Sequence
  Description of Artificial Sequence: Synthetic oligonucleotide
  Sense strand starting at position 3003 of SEQ ID NO: 914977
uuggguaacccuuagguaa

SEQ ID NO: 1044417 - RNA, 19 nt, Artificial Sequence
  Description of Artificial Sequence: Synthetic oligonucleotide
  Antisense strand to SEQ ID NO: 1044416
uuaccuaaggguuacccaa

SEQ ID NO: 1044418 - RNA, 19 nt, Artificial Sequence
  Description of Artificial Sequence: Synthetic oligonucleotide
  Sense strand starting at position 3039 of SEQ ID NO: 914977
agugcacaacgucagaaua

SEQ ID NO: 1044419 - RNA, 19 nt, Artificial Sequence
  Description of Artificial Sequence: Synthetic oligonucleotide
  Antisense strand to SEQ ID NO: 1044418
uauucugacguugugcacu

SEQ ID NO: 1044420 - RNA, 19 nt, Artificial Sequence
  Description of Artificial Sequence: Synthetic oligonucleotide
  Sense strand starting at position 3072 of SEQ ID NO: 914977
accauuaagcucugagaau

SEQ ID NO: 1044421 - RNA, 19 nt, Artificial Sequence
  Description of Artificial Sequence: Synthetic oligonucleotide
  Antisense strand to SEQ ID NO: 1044420
auucucagagcuuaauggu

SEQ ID NO: 1044422 - RNA, 19 nt, Artificial Sequence
  Description of Artificial Sequence: Synthetic oligonucleotide
  Sense strand starting at position 3083 of SEQ ID NO: 914977
cugagaaucuuaucugcua

SEQ ID NO: 1044423 - RNA, 19 nt, Artificial Sequence
  Description of Artificial Sequence: Synthetic oligonucleotide
  Antisense strand to SEQ ID NO: 1044422
uagcagauaagauucucag

SEQ ID NO: 1044424 - RNA, 19 nt, Artificial Sequence
  Description of Artificial Sequence: Synthetic oligonucleotide
  Sense strand starting at position 3084 of SEQ ID NO: 914977
ugagaaucuuaucugcuau

SEQ ID NO: 1044425 - RNA, 19 nt, Artificial Sequence
  Description of Artificial Sequence: Synthetic oligonucleotide
  Antisense strand to SEQ ID NO: 1044424
auagcagauaagauucuca

SEQ ID NO: 1044426 - RNA, 19 nt, Artificial Sequence
  Description of Artificial Sequence: Synthetic oligonucleotide
  Sense strand starting at position 3259 of SEQ ID NO: 914977
gaaauuccagaguguucua

SEQ ID NO: 1044427 - RNA, 19 nt, Artificial Sequence
  Description of Artificial Sequence: Synthetic oligonucleotide
  Antisense strand to SEQ ID NO: 1044426
uagaacacucuggaauuuc

SEQ ID NO: 1044428 - RNA, 19 nt, Artificial Sequence
  Description of Artificial Sequence: Synthetic oligonucleotide
  Sense strand starting at position 3583 of SEQ ID NO: 914977
gcagcuguuuccuuaauuu

SEQ ID NO: 1044429 - RNA, 19 nt, Artificial Sequence
  Description of Artificial Sequence: Synthetic oligonucleotide
  Antisense strand to SEQ ID NO: 1044428
aaauuaaggaaacagcugc

SEQ ID NO: 1044430 - RNA, 19 nt, Artificial Sequence
  Description of Artificial Sequence: Synthetic oligonucleotide
  Sense strand starting at position 3674 of SEQ ID NO: 914977
uucuaaguacuguaauucu

SEQ ID NO: 1044431 - RNA, 19 nt, Artificial Sequence
  Description of Artificial Sequence: Synthetic oligonucleotide
  Antisense strand to SEQ ID NO: 1044430
agaauuacaguacuuagaa

SEQ ID NO: 1044432 - RNA, 19 nt, Artificial Sequence
  Description of Artificial Sequence: Synthetic oligonucleotide
  Sense strand starting at position 3879 of SEQ ID NO: 914977
gcauaaauuagagaguggu

SEQ ID NO: 1044433 - RNA, 19 nt, Artificial Sequence
  Description of Artificial Sequence: Synthetic oligonucleotide
  Antisense strand to SEQ ID NO: 1044432
accacucucuaauuuaugc

SEQ ID NO: 1044434 - RNA, 19 nt, Artificial Sequence
  Description of Artificial Sequence: Synthetic oligonucleotide
  Sense strand starting at position 3882 of SEQ ID NO: 914977
uaaauuagagaguggugua

SEQ ID NO: 1044435 - RNA, 19 nt, Artificial Sequence
  Description of Artificial Sequence: Synthetic oligonucleotide
  Antisense strand to SEQ ID NO: 1044434
uacaccacucucuaauuua

SEQ ID NO: 1044436 - RNA, 19 nt, Artificial Sequence
  Description of Artificial Sequence: Synthetic oligonucleotide
  Sense strand starting at position 3883 of SEQ ID NO: 914977
aaauuagagagugguguaa

SEQ ID NO: 1044437 - RNA, 19 nt, Artificial Sequence
  Description of Artificial Sequence: Synthetic oligonucleotide
  Antisense strand to SEQ ID NO: 1044436
uuacaccacucucuaauuu

SEQ ID NO: 1044438 - RNA, 19 nt, Artificial Sequence
  Description of Artificial Sequence: Synthetic oligonucleotide
  Sense strand starting at position 87 of SEQ ID NO: 914978
aagggaucuaugugguagu

SEQ ID NO: 1044439 - RNA, 19 nt, Artificial Sequence
  Description of Artificial Sequence: Synthetic oligonucleotide
  Antisense strand to SEQ ID NO: 1044438
acuaccacauagaucccuu

SEQ ID NO: 1044440 - RNA, 19 nt, Artificial Sequence
  Description of Artificial Sequence: Synthetic oligonucleotide
  Sense strand starting at position 101 of SEQ ID NO: 914978
guaguagaauaccuagaga

SEQ ID NO: 1044441 - RNA, 19 nt, Artificial Sequence
  Description of Artificial Sequence: Synthetic oligonucleotide
  Antisense strand to SEQ ID NO: 1044440
ucucuagguauucuacuac

SEQ ID NO: 1044442 - RNA, 19 nt, Artificial Sequence
  Description of Artificial Sequence: Synthetic oligonucleotide
  Sense strand starting at position 264 of SEQ ID NO: 914978
ucccaagaauuguuuccga

SEQ ID NO: 1044443 - RNA, 19 nt, Artificial Sequence
  Description of Artificial Sequence: Synthetic oligonucleotide
  Antisense strand to SEQ ID NO: 1044442
ucggaaacaauucuuggga

SEQ ID NO: 1044444 - RNA, 19 nt, Artificial Sequence
  Description of Artificial Sequence: Synthetic oligonucleotide
  Sense strand starting at position 327 of SEQ ID NO: 914978
ggagaaauggacuggcuua

SEQ ID NO: 1044445 - RNA, 19 nt, Artificial Sequence
  Description of Artificial Sequence: Synthetic oligonucleotide
  Antisense strand to SEQ ID NO: 1044444
uaagccaguccauuucucc

SEQ ID NO: 1044446 - RNA, 19 nt, Artificial Sequence
  Description of Artificial Sequence: Synthetic oligonucleotide
  Sense strand starting at position 428 of SEQ ID NO: 914978
auuccaggucacuguuaga

SEQ ID NO: 1044447 - RNA, 19 nt, Artificial Sequence
  Description of Artificial Sequence: Synthetic oligonucleotide
  Antisense strand to SEQ ID NO: 1044446
ucuaacagugaccuggaau

SEQ ID NO: 1044448 - RNA, 19 nt, Artificial Sequence
  Description of Artificial Sequence: Synthetic oligonucleotide
  Sense strand starting at position 517 of SEQ ID NO: 914978
gcacccgggagguauaaau

SEQ ID NO: 1044449 - RNA, 19 nt, Artificial Sequence
  Description of Artificial Sequence: Synthetic oligonucleotide
  Antisense strand to SEQ ID NO: 1044448
auuuauaccucccgggugc

SEQ ID NO: 1044450 - RNA, 19 nt, Artificial Sequence
  Description of Artificial Sequence: Synthetic oligonucleotide
  Sense strand starting at position 553 of SEQ ID NO: 914978
gccaaagagcugcaaugaa

SEQ ID NO: 1044451 - RNA, 19 nt, Artificial Sequence
  Description of Artificial Sequence: Synthetic oligonucleotide
  Antisense strand to SEQ ID NO: 1044450
uucauugcagcucuuuggc

SEQ ID NO: 1044452 - RNA, 19 nt, Artificial Sequence
  Description of Artificial Sequence: Synthetic oligonucleotide
  Sense strand starting at position 610 of SEQ ID NO: 914978
gugagaacuucugcugaca

SEQ ID NO: 1044453 - RNA, 19 nt, Artificial Sequence
  Description of Artificial Sequence: Synthetic oligonucleotide
  Antisense strand to SEQ ID NO: 1044452
ugucagcagaaguucucac

SEQ ID NO: 1044454 - RNA, 19 nt, Artificial Sequence
  Description of Artificial Sequence: Synthetic oligonucleotide
  Sense strand starting at position 613 of SEQ ID NO: 914978
agaacuucugcugacacuu

SEQ ID NO: 1044455 - RNA, 19 nt, Artificial Sequence
  Description of Artificial Sequence: Synthetic oligonucleotide
  Antisense strand to SEQ ID NO: 1044454
aagugucagcagaaguucu

SEQ ID NO: 1044456 - RNA, 19 nt, Artificial Sequence
  Description of Artificial Sequence: Synthetic oligonucleotide
  Sense strand starting at position 640 of SEQ ID NO: 914978
aauaucugaguaggacuua

SEQ ID NO: 1044457 - RNA, 19 nt, Artificial Sequence
  Description of Artificial Sequence: Synthetic oligonucleotide
  Antisense strand to SEQ ID NO: 1044456
uaaguccuacucagauauu

SEQ ID NO: 1044458 - RNA, 19 nt, Artificial Sequence
  Description of Artificial Sequence: Synthetic oligonucleotide
  Sense strand starting at position 742 of SEQ ID NO: 914978
ccucccauuccaugugaca

SEQ ID NO: 1044459 - RNA, 19 nt, Artificial Sequence
  Description of Artificial Sequence: Synthetic oligonucleotide
  Antisense strand to SEQ ID NO: 1044458
ugucacauggaaugggagg

SEQ ID NO: 1044460 - RNA, 19 nt, Artificial Sequence
  Description of Artificial Sequence: Synthetic oligonucleotide
  Sense strand starting at position 937 of SEQ ID NO: 914978
auguauuaagguuaagcau

SEQ ID NO: 1044461 - RNA, 19 nt, Artificial Sequence
  Description of Artificial Sequence: Synthetic oligonucleotide
  Antisense strand to SEQ ID NO: 1044460
augcuuaaccuuaauacau

SEQ ID NO: 1044462 - RNA, 19 nt, Artificial Sequence
  Description of Artificial Sequence: Synthetic oligonucleotide
  Sense strand starting at position 944 of SEQ ID NO: 914978
aagguuaagcauuaugugu

SEQ ID NO: 1044463 - RNA, 19 nt, Artificial Sequence
  Description of Artificial Sequence: Synthetic oligonucleotide
  Antisense strand to SEQ ID NO: 1044462
acacauaaugcuuaaccuu

SEQ ID NO: 1044464 - RNA, 19 nt, Artificial Sequence
  Description of Artificial Sequence: Synthetic oligonucleotide
  Sense strand starting at position 1303 of SEQ ID NO: 914978
uggcauguaaccugagauu

SEQ ID NO: 1044465 - RNA, 19 nt, Artificial Sequence
  Description of Artificial Sequence: Synthetic oligonucleotide
  Antisense strand to SEQ ID NO: 1044464
aaucucagguuacaugcca

SEQ ID NO: 1044466 - RNA, 19 nt, Artificial Sequence
  Description of Artificial Sequence: Synthetic oligonucleotide
  Sense strand starting at position 1503 of SEQ ID NO: 914978
acuuuauagagugagcagu

SEQ ID NO: 1044467 - RNA, 19 nt, Artificial Sequence
  Description of Artificial Sequence: Synthetic oligonucleotide
  Antisense strand to SEQ ID NO: 1044466
acugcucacucuauaaagu

SEQ ID NO: 1044468 - RNA, 19 nt, Artificial Sequence
  Description of Artificial Sequence: Synthetic oligonucleotide
  Sense strand starting at position 1525 of SEQ ID NO: 914978
ggaggaaacucugagagaa

SEQ ID NO: 1044469 - RNA, 19 nt, Artificial Sequence
  Description of Artificial Sequence: Synthetic oligonucleotide
  Antisense strand to SEQ ID NO: 1044468
uucucucagaguuuccucc

SEQ ID NO: 1044470 - RNA, 19 nt, Artificial Sequence
  Description of Artificial Sequence: Synthetic oligonucleotide
  Sense strand starting at position 1601 of SEQ ID NO: 914978
gagcucuugccauacauga

SEQ ID NO: 1044471 - RNA, 19 nt, Artificial Sequence
  Description of Artificial Sequence: Synthetic oligonucleotide
  Antisense strand to SEQ ID NO: 1044470
ucauguauggcaagagcuc

SEQ ID NO: 1044472 - RNA, 19 nt, Artificial Sequence
  Description of Artificial Sequence: Synthetic oligonucleotide
  Sense strand starting at position 1723 of SEQ ID NO: 914978
agaggaguuugaguugagu

SEQ ID NO: 1044473 - RNA, 19 nt, Artificial Sequence
  Description of Artificial Sequence: Synthetic oligonucleotide
  Antisense strand to SEQ ID NO: 1044472
acucaacucaaacuccucu

SEQ ID NO: 1044474 - RNA, 19 nt, Artificial Sequence
  Description of Artificial Sequence: Synthetic oligonucleotide
  Sense strand starting at position 1725 of SEQ ID NO: 914978
aggaguuugaguugaguuc

SEQ ID NO: 1044475 - RNA, 19 nt, Artificial Sequence
  Description of Artificial Sequence: Synthetic oligonucleotide
  Antisense strand to SEQ ID NO: 1044474
gaacucaacucaaacuccu

SEQ ID NO: 1044476 - RNA, 19 nt, Artificial Sequence
  Description of Artificial Sequence: Synthetic oligonucleotide
  Sense strand starting at position 1734 of SEQ ID NO: 914978
aguugaguuccucaccugu

SEQ ID NO: 1044477 - RNA, 19 nt, Artificial Sequence
  Description of Artificial Sequence: Synthetic oligonucleotide
  Antisense strand to SEQ ID NO: 1044476
acaggugaggaacucaacu

SEQ ID NO: 1044478 - RNA, 19 nt, Artificial Sequence
  Description of Artificial Sequence: Synthetic oligonucleotide
  Sense strand starting at position 1941 of SEQ ID NO: 914978
cuagauggccucggaaaca

SEQ ID NO: 1044479 - RNA, 19 nt, Artificial Sequence
  Description of Artificial Sequence: Synthetic oligonucleotide
  Antisense strand to SEQ ID NO: 1044478
uguuuccgaggccaucuag

SEQ ID NO: 1044480 - RNA, 19 nt, Artificial Sequence
  Description of Artificial Sequence: Synthetic oligonucleotide
  Sense strand starting at position 1982 of SEQ ID NO: 914978
ugaaaugucccagacuguu

SEQ ID NO: 1044481 - RNA, 19 nt, Artificial Sequence
  Description of Artificial Sequence: Synthetic oligonucleotide
  Antisense strand to SEQ ID NO: 1044480
aacagucugggacauuuca

SEQ ID NO: 1044482 - RNA, 19 nt, Artificial Sequence
  Description of Artificial Sequence: Synthetic oligonucleotide
  Sense strand starting at position 2048 of SEQ ID NO: 914978
cugggaagugaauguugaa

SEQ ID NO: 1044483 - RNA, 19 nt, Artificial Sequence
  Description of Artificial Sequence: Synthetic oligonucleotide
  Antisense strand to SEQ ID NO: 1044482
uucaacauucacuucccag

SEQ ID NO: 1044484 - RNA, 19 nt, Artificial Sequence
  Description of Artificial Sequence: Synthetic oligonucleotide
  Sense strand starting at position 2064 of SEQ ID NO: 914978
gaaacuguccugcagugau

SEQ ID NO: 1044485 - RNA, 19 nt, Artificial Sequence
  Description of Artificial Sequence: Synthetic oligonucleotide
  Antisense strand to SEQ ID NO: 1044484
aucacugcaggacaguuuc

SEQ ID NO: 1044486 - RNA, 19 nt, Artificial Sequence
  Description of Artificial Sequence: Synthetic oligonucleotide
  Sense strand starting at position 2234 of SEQ ID NO: 914978
guagcuuuccaggagaccu

SEQ ID NO: 1044487 - RNA, 19 nt, Artificial Sequence
  Description of Artificial Sequence: Synthetic oligonucleotide
  Antisense strand to SEQ ID NO: 1044486
aggucuccuggaaagcuac

SEQ ID NO: 1044488 - RNA, 19 nt, Artificial Sequence
  Description of Artificial Sequence: Synthetic oligonucleotide
  Sense strand starting at position 2600 of SEQ ID NO: 914978
cuuuguugugccucggauu

SEQ ID NO: 1044489 - RNA, 19 nt, Artificial Sequence
  Description of Artificial Sequence: Synthetic oligonucleotide
  Antisense strand to SEQ ID NO: 1044488
aauccgaggcacaacaaag

SEQ ID NO: 1044490 - RNA, 19 nt, Artificial Sequence
  Description of Artificial Sequence: Synthetic oligonucleotide
  Sense strand starting at position 2655 of SEQ ID NO: 914978
agucuaaagagcugaggaa

SEQ ID NO: 1044491 - RNA, 19 nt, Artificial Sequence
  Description of Artificial Sequence: Synthetic oligonucleotide
  Antisense strand to SEQ ID NO: 1044490
uuccucagcucuuuagacu

SEQ ID NO: 1044492 - RNA, 19 nt, Artificial Sequence
  Description of Artificial Sequence: Synthetic oligonucleotide
  Sense strand starting at position 2689 of SEQ ID NO: 914978
augccuccuugucuggaaa

SEQ ID NO: 1044493 - RNA, 19 nt, Artificial Sequence
  Description of Artificial Sequence: Synthetic oligonucleotide
  Antisense strand to SEQ ID NO: 1044492
uuuccagacaaggaggcau

SEQ ID NO: 1044494 - RNA, 19 nt, Artificial Sequence
  Description of Artificial Sequence: Synthetic oligonucleotide
  Sense strand starting at position 2708 of SEQ ID NO: 914978
gagggugggucaucuuuac

SEQ ID NO: 1044495 - RNA, 19 nt, Artificial Sequence
  Description of Artificial Sequence: Synthetic oligonucleotide
  Antisense strand to SEQ ID NO: 1044494
guaaagaugacccacccuc

SEQ ID NO: 1044496 - RNA, 19 nt, Artificial Sequence
  Description of Artificial Sequence: Synthetic oligonucleotide
  Sense strand starting at position 2712 of SEQ ID NO: 914978
gugggucaucuuuacagau

SEQ ID NO: 1044497 - RNA, 19 nt, Artificial Sequence
  Description of Artificial Sequence: Synthetic oligonucleotide
  Antisense strand to SEQ ID NO: 1044496
aucuguaaagaugacccac

SEQ ID NO: 1044498 - RNA, 19 nt, Artificial Sequence
  Description of Artificial Sequence: Synthetic oligonucleotide
  Sense strand starting at position 2823 of SEQ ID NO: 914978
aagacagauugcguuuauc

SEQ ID NO: 1044499 - RNA, 19 nt, Artificial Sequence
  Description of Artificial Sequence: Synthetic oligonucleotide
  Antisense strand to SEQ ID NO: 1044498
gauaaacgcaaucugucuu

SEQ ID NO: 1044500 - RNA, 19 nt, Artificial Sequence
  Description of Artificial Sequence: Synthetic oligonucleotide
  Sense strand starting at position 3284 of SEQ ID NO: 914978
ucugguauguaggucagaa

SEQ ID NO: 1044501 - RNA, 19 nt, Artificial Sequence
  Description of Artificial Sequence: Synthetic oligonucleotide
  Antisense strand to SEQ ID NO: 1044500
uucugaccuacauaccaga

SEQ ID NO: 1044502 - RNA, 19 nt, Artificial Sequence
  Description of Artificial Sequence: Synthetic oligonucleotide
  Sense strand starting at position 3286 of SEQ ID NO: 914978
ugguauguaggucagaaga

SEQ ID NO: 1044503 - RNA, 19 nt, Artificial Sequence
  Description of Artificial Sequence: Synthetic oligonucleotide
  Antisense strand to SEQ ID NO: 1044502
ucuucugaccuacauacca

SEQ ID NO: 1044504 - RNA, 19 nt, Artificial Sequence
  Description of Artificial Sequence: Synthetic oligonucleotide
  Sense strand starting at position 3338 of SEQ ID NO: 914978
aaggaaacuugaucuuggu

SEQ ID NO: 1044505 - RNA, 19 nt, Artificial Sequence
  Description of Artificial Sequence: Synthetic oligonucleotide
  Antisense strand to SEQ ID NO: 1044504
accaagaucaaguuuccuu

SEQ ID NO: 1044506 - RNA, 19 nt, Artificial Sequence
  Description of Artificial Sequence: Synthetic oligonucleotide
  Sense strand starting at position 3362 of SEQ ID NO: 914978
uccaacuuugcagggaaau

SEQ ID NO: 1044507 - RNA, 19 nt, Artificial Sequence
  Description of Artificial Sequence: Synthetic oligonucleotide
  Antisense strand to SEQ ID NO: 1044506
auuucccugcaaaguugga

SEQ ID NO: 1044508 - RNA, 19 nt, Artificial Sequence
  Description of Artificial Sequence: Synthetic oligonucleotide
  Sense strand starting at position 3363 of SEQ ID NO: 914978
ccaacuuugcagggaaaua

SEQ ID NO: 1044509 - RNA, 19 nt, Artificial Sequence
  Description of Artificial Sequence: Synthetic oligonucleotide
  Antisense strand to SEQ ID NO: 1044508
uauuucccugcaaaguugg

SEQ ID NO: 1044510 - RNA, 19 nt, Artificial Sequence
  Description of Artificial Sequence: Synthetic oligonucleotide
  Sense strand starting at position 3441 of SEQ ID NO: 914978
acuggugagagguagaguu

SEQ ID NO: 1044511 - RNA, 19 nt, Artificial Sequence
  Description of Artificial Sequence: Synthetic oligonucleotide
  Antisense strand to SEQ ID NO: 1044510
aacucuaccucucaccagu

SEQ ID NO: 1044512 - RNA, 19 nt, Artificial Sequence
  Description of Artificial Sequence: Synthetic oligonucleotide
  Sense strand starting at position 3532 of SEQ ID NO: 914978
uguugucaggagcagaaau

SEQ ID NO: 1044513 - RNA, 19 nt, Artificial Sequence
  Description of Artificial Sequence: Synthetic oligonucleotide
  Antisense strand to SEQ ID NO: 1044512
auuucugcuccugacaaca

SEQ ID NO: 1044514 - RNA, 19 nt, Artificial Sequence
  Description of Artificial Sequence: Synthetic oligonucleotide
  Sense strand starting at position 3845 of SEQ ID NO: 914978
cuacauaaggccuaaguua

SEQ ID NO: 1044515 - RNA, 19 nt, Artificial Sequence
  Description of Artificial Sequence: Synthetic oligonucleotide
  Antisense strand to SEQ ID NO: 1044514
uaacuuaggccuuauguag

SEQ ID NO: 1044516 - RNA, 19 nt, Artificial Sequence
  Description of Artificial Sequence: Synthetic oligonucleotide
  Sense strand starting at position 3970 of SEQ ID NO: 914978
gaaagauccugauugucau

SEQ ID NO: 1044517 - RNA, 19 nt, Artificial Sequence
  Description of Artificial Sequence: Synthetic oligonucleotide
  Antisense strand to SEQ ID NO: 1044516
augacaaucaggaucuuuc

SEQ ID NO: 1044518 - RNA, 19 nt, Artificial Sequence
  Description of Artificial Sequence: Synthetic oligonucleotide
  Sense strand starting at position 38 of SEQ ID NO: 914979
gauuguuaauggguaucaa

SEQ ID NO: 1044519 - RNA, 19 nt, Artificial Sequence
  Description of Artificial Sequence: Synthetic oligonucleotide
  Antisense strand to SEQ ID NO: 1044518
uugauacccauuaacaauc

SEQ ID NO: 1044520 - RNA, 19 nt, Artificial Sequence
  Description of Artificial Sequence: Synthetic oligonucleotide
  Sense strand starting at position 99 of SEQ ID NO: 914979
guaauuauugcauaacugu

SEQ ID NO: 1044521 - RNA, 19 nt, Artificial Sequence
  Description of Artificial Sequence: Synthetic oligonucleotide
  Antisense strand to SEQ ID NO: 1044520
acaguuaugcaauaauuac

SEQ ID NO: 1044522 - RNA, 19 nt, Artificial Sequence
  Description of Artificial Sequence: Synthetic oligonucleotide
  Sense strand starting at position 102 of SEQ ID NO: 914979
auuauugcauaacugugaa

SEQ ID NO: 1044523 - RNA, 19 nt, Artificial Sequence
  Description of Artificial Sequence: Synthetic oligonucleotide
  Antisense strand to SEQ ID NO: 1044522
uucacaguuaugcaauaau

SEQ ID NO: 1044524 - RNA, 19 nt, Artificial Sequence
  Description of Artificial Sequence: Synthetic oligonucleotide
  Sense strand starting at position 162 of SEQ ID NO: 914979
uuguauggcaugugaauaa

SEQ ID NO: 1044525 - RNA, 19 nt, Artificial Sequence
  Description of Artificial Sequence: Synthetic oligonucleotide
  Antisense strand to SEQ ID NO: 1044524
uuauucacaugccauacaa

SEQ ID NO: 1044526 - RNA, 19 nt, Artificial Sequence
  Description of Artificial Sequence: Synthetic oligonucleotide
  Sense strand starting at position 596 of SEQ ID NO: 914979
aauuauauggucugcugga

SEQ ID NO: 1044527 - RNA, 19 nt, Artificial Sequence
  Description of Artificial Sequence: Synthetic oligonucleotide
  Antisense strand to SEQ ID NO: 1044526
uccagcagaccauauaauu

SEQ ID NO: 1044528 - RNA, 19 nt, Artificial Sequence
  Description of Artificial Sequence: Synthetic oligonucleotide
  Sense strand starting at position 605 of SEQ ID NO: 914979
gucugcuggacuugacaga

SEQ ID NO: 1044529 - RNA, 19 nt, Artificial Sequence
  Description of Artificial Sequence: Synthetic oligonucleotide
  Antisense strand to SEQ ID NO: 1044528
ucugucaaguccagcagac

SEQ ID NO: 1044530 - RNA, 19 nt, Artificial Sequence
  Description of Artificial Sequence: Synthetic oligonucleotide
  Sense strand starting at position 612 of SEQ ID NO: 914979
ggacuugacagaugcucuu

SEQ ID NO: 1044531 - RNA, 19 nt, Artificial Sequence
  Description of Artificial Sequence: Synthetic oligonucleotide
  Antisense strand to SEQ ID NO: 1044530
aagagcaucugucaagucc

SEQ ID NO: 1044532 - RNA, 19 nt, Artificial Sequence
  Description of Artificial Sequence: Synthetic oligonucleotide
  Sense strand starting at position 774 of SEQ ID NO: 914979
guuuauuaggagugacagu

SEQ ID NO: 1044533 - RNA, 19 nt, Artificial Sequence
  Description of Artificial Sequence: Synthetic oligonucleotide
  Antisense strand to SEQ ID NO: 1044532
acugucacuccuaauaaac

SEQ ID NO: 1044534 - RNA, 19 nt, Artificial Sequence
  Description of Artificial Sequence: Synthetic oligonucleotide
  Sense strand starting at position 885 of SEQ ID NO: 914979
uggcaacaugaauauuagu

SEQ ID NO: 1044535 - RNA, 19 nt, Artificial Sequence
  Description of Artificial Sequence: Synthetic oligonucleotide
  Antisense strand to SEQ ID NO: 1044534
acuaauauucauguugcca

SEQ ID NO: 1044536 - RNA, 19 nt, Artificial Sequence
  Description of Artificial Sequence: Synthetic oligonucleotide
  Sense strand starting at position 1133 of SEQ ID NO: 914979
gaagguaauuaggcuggau

SEQ ID NO: 1044537 - RNA, 19 nt, Artificial Sequence
  Description of Artificial Sequence: Synthetic oligonucleotide
  Antisense strand to SEQ ID NO: 1044536
auccagccuaauuaccuuc

SEQ ID NO: 1044538 - RNA, 19 nt, Artificial Sequence
  Description of Artificial Sequence: Synthetic oligonucleotide
  Sense strand starting at position 1136 of SEQ ID NO: 914979
gguaauuaggcuggauuga

SEQ ID NO: 1044539 - RNA, 19 nt, Artificial Sequence
  Description of Artificial Sequence: Synthetic oligonucleotide
  Antisense strand to SEQ ID NO: 1044538
ucaauccagccuaauuacc

SEQ ID NO: 1044540 - RNA, 19 nt, Artificial Sequence
  Description of Artificial Sequence: Synthetic oligonucleotide
  Sense strand starting at position 1201 of SEQ ID NO: 914979
uuaagaugugaaugucagu

SEQ ID NO: 1044541 - RNA, 19 nt, Artificial Sequence
  Description of Artificial Sequence: Synthetic oligonucleotide
  Antisense strand to SEQ ID NO: 1044540
acugacauucacaucuuaa

SEQ ID NO: 1044542 - RNA, 19 nt, Artificial Sequence
  Description of Artificial Sequence: Synthetic oligonucleotide
  Sense strand starting at position 1218 of SEQ ID NO: 914979
gugugaauacccuacuucu

SEQ ID NO: 1044543 - RNA, 19 nt, Artificial Sequence
  Description of Artificial Sequence: Synthetic oligonucleotide
  Antisense strand to SEQ ID NO: 1044542
agaaguaggguauucacac

SEQ ID NO: 1044544 - RNA, 19 nt, Artificial Sequence
  Description of Artificial Sequence: Synthetic oligonucleotide
  Sense strand starting at position 1359 of SEQ ID NO: 914979
cccuucugugacuagcaaa

SEQ ID NO: 1044545 - RNA, 19 nt, Artificial Sequence
  Description of Artificial Sequence: Synthetic oligonucleotide
  Antisense strand to SEQ ID NO: 1044544
uuugcuagucacagaaggg

SEQ ID NO: 1044546 - RNA, 19 nt, Artificial Sequence
  Description of Artificial Sequence: Synthetic oligonucleotide
  Sense strand starting at position 1467 of SEQ ID NO: 914979
uacugaaugcuagaacugu

SEQ ID NO: 1044547 - RNA, 19 nt, Artificial Sequence
  Description of Artificial Sequence: Synthetic oligonucleotide
  Antisense strand to SEQ ID NO: 1044546
acaguucuagcauucagua

SEQ ID NO: 1044548 - RNA, 19 nt, Artificial Sequence
  Description of Artificial Sequence: Synthetic oligonucleotide
  Sense strand starting at position 1845 of SEQ ID NO: 914979
agcacucacccuggaagaa

SEQ ID NO: 1044549 - RNA, 19 nt, Artificial Sequence
  Description of Artificial Sequence: Synthetic oligonucleotide
  Antisense strand to SEQ ID NO: 1044548
uucuuccagggugagugcu

SEQ ID NO: 1044550 - RNA, 19 nt, Artificial Sequence
  Description of Artificial Sequence: Synthetic oligonucleotide
  Sense strand starting at position 2154 of SEQ ID NO: 914979
aggcuacggacuuggaaua

SEQ ID NO: 1044551 - RNA, 19 nt, Artificial Sequence
  Description of Artificial Sequence: Synthetic oligonucleotide
  Antisense strand to SEQ ID NO: 1044550
uauuccaaguccguagccu

SEQ ID NO: 1044552 - RNA, 19 nt, Artificial Sequence
  Description of Artificial Sequence: Synthetic oligonucleotide
  Sense strand starting at position 2264 of SEQ ID NO: 914979
aguugaagguucucagaau

SEQ ID NO: 1044553 - RNA, 19 nt, Artificial Sequence
  Description of Artificial Sequence: Synthetic oligonucleotide
  Antisense strand to SEQ ID NO: 1044552
auucugagaaccuucaacu

SEQ ID NO: 1044554 - RNA, 19 nt, Artificial Sequence
  Description of Artificial Sequence: Synthetic oligonucleotide
  Sense strand starting at position 2453 of SEQ ID NO: 914979
uggcaaugaugaucaaauc

SEQ ID NO: 1044555 - RNA, 19 nt, Artificial Sequence
  Description of Artificial Sequence: Synthetic oligonucleotide
  Antisense strand to SEQ ID NO: 1044554
gauuugaucaucauugcca

SEQ ID NO: 1044556 - RNA, 19 nt, Artificial Sequence
  Description of Artificial Sequence: Synthetic oligonucleotide
  Sense strand starting at position 2469 of SEQ ID NO: 914979
aucauuacagccuguauua

SEQ ID NO: 1044557 - RNA, 19 nt, Artificial Sequence
  Description of Artificial Sequence: Synthetic oligonucleotide
  Antisense strand to SEQ ID NO: 1044556
uaauacaggcuguaaugau

SEQ ID NO: 1044558 - RNA, 19 nt, Artificial Sequence
  Description of Artificial Sequence: Synthetic oligonucleotide
  Sense strand starting at position 2505 of SEQ ID NO: 914979
ggauuucugugucuuuggu

SEQ ID NO: 1044559 - RNA, 19 nt, Artificial Sequence
  Description of Artificial Sequence: Synthetic oligonucleotide
  Antisense strand to SEQ ID NO: 1044558
accaaagacacagaaaucc

SEQ ID NO: 1044560 - RNA, 19 nt, Artificial Sequence
  Description of Artificial Sequence: Synthetic oligonucleotide
  Sense strand starting at position 2542 of SEQ ID NO: 914979
auguuaucacaguacuuga

SEQ ID NO: 1044561 - RNA, 19 nt, Artificial Sequence
  Description of Artificial Sequence: Synthetic oligonucleotide
  Antisense strand to SEQ ID NO: 1044560
ucaaguacugugauaacau

SEQ ID NO: 1044562 - RNA, 19 nt, Artificial Sequence
  Description of Artificial Sequence: Synthetic oligonucleotide
  Sense strand starting at position 2551 of SEQ ID NO: 914979
caguacuugaagugagaug

SEQ ID NO: 1044563 - RNA, 19 nt, Artificial Sequence
  Description of Artificial Sequence: Synthetic oligonucleotide
  Antisense strand to SEQ ID NO: 1044562
caucucacuucaaguacug

SEQ ID NO: 1044564 - RNA, 19 nt, Artificial Sequence
  Description of Artificial Sequence: Synthetic oligonucleotide
  Sense strand starting at position 2562 of SEQ ID NO: 914979
gugagauggcgucacauac

SEQ ID NO: 1044565 - RNA, 19 nt, Artificial Sequence
  Description of Artificial Sequence: Synthetic oligonucleotide
  Antisense strand to SEQ ID NO: 1044564
guaugugacgccaucucac

SEQ ID NO: 1044566 - RNA, 19 nt, Artificial Sequence
  Description of Artificial Sequence: Synthetic oligonucleotide
  Sense strand starting at position 2630 of SEQ ID NO: 914979
gccucuucccuggaaauug

SEQ ID NO: 1044567 - RNA, 19 nt, Artificial Sequence
  Description of Artificial Sequence: Synthetic oligonucleotide
  Antisense strand to SEQ ID NO: 1044566
caauuuccagggaagaggc

SEQ ID NO: 1044568 - RNA, 19 nt, Artificial Sequence
  Description of Artificial Sequence: Synthetic oligonucleotide
  Sense strand starting at position 2640 of SEQ ID NO: 914979
uggaaauugccacauguca

SEQ ID NO: 1044569 - RNA, 19 nt, Artificial Sequence
  Description of Artificial Sequence: Synthetic oligonucleotide
  Antisense strand to SEQ ID NO: 1044568
ugacauguggcaauuucca

SEQ ID NO: 1044570 - RNA, 19 nt, Artificial Sequence
  Description of Artificial Sequence: Synthetic oligonucleotide
  Sense strand starting at position 2889 of SEQ ID NO: 914979
uguggaaauccguauacuu

SEQ ID NO: 1044571 - RNA, 19 nt, Artificial Sequence
  Description of Artificial Sequence: Synthetic oligonucleotide
  Antisense strand to SEQ ID NO: 1044570
aaguauacggauuuccaca

SEQ ID NO: 1044572 - RNA, 19 nt, Artificial Sequence
  Description of Artificial Sequence: Synthetic oligonucleotide
  Sense strand starting at position 2891 of SEQ ID NO: 914979
uggaaauccguauacuucu

SEQ ID NO: 1044573 - RNA, 19 nt, Artificial Sequence
  Description of Artificial Sequence: Synthetic oligonucleotide
  Antisense strand to SEQ ID NO: 1044572
agaaguauacggauuucca

SEQ ID NO: 1044574 - RNA, 19 nt, Artificial Sequence
  Description of Artificial Sequence: Synthetic oligonucleotide
  Sense strand starting at position 2949 of SEQ ID NO: 914979
gcagguugucucuacuaag

SEQ ID NO: 1044575 - RNA, 19 nt, Artificial Sequence
  Description of Artificial Sequence: Synthetic oligonucleotide
  Antisense strand to SEQ ID NO: 1044574
cuuaguagagacaaccugc

SEQ ID NO: 1044576 - RNA, 19 nt, Artificial Sequence
  Description of Artificial Sequence: Synthetic oligonucleotide
  Sense strand starting at position 3018 of SEQ ID NO: 914979
guagaacuucuagauaugu

SEQ ID NO: 1044577 - RNA, 19 nt, Artificial Sequence
  Description of Artificial Sequence: Synthetic oligonucleotide
  Antisense strand to SEQ ID NO: 1044576
acauaucuagaaguucuac

SEQ ID NO: 1044578 - RNA, 19 nt, Artificial Sequence
  Description of Artificial Sequence: Synthetic oligonucleotide
  Sense strand starting at position 3085 of SEQ ID NO: 914979
uuacauaguguuuaaagca

SEQ ID NO: 1044579 - RNA, 19 nt, Artificial Sequence
  Description of Artificial Sequence: Synthetic oligonucleotide
  Antisense strand to SEQ ID NO: 1044578
ugcuuuaaacacuauguaa

SEQ ID NO: 1044580 - RNA, 19 nt, Artificial Sequence
  Description of Artificial Sequence: Synthetic oligonucleotide
  Sense strand starting at position 3133 of SEQ ID NO: 914979
gcucuuuaggaaggagaca

SEQ ID NO: 1044581 - RNA, 19 nt, Artificial Sequence
  Description of Artificial Sequence: Synthetic oligonucleotide
  Antisense strand to SEQ ID NO: 1044580
ugucuccuuccuaaagagc

SEQ ID NO: 1044582 - RNA, 19 nt, Artificial Sequence
  Description of Artificial Sequence: Synthetic oligonucleotide
  Sense strand starting at position 3272 of SEQ ID NO: 914979
caggacaucuguuugaaga

SEQ ID NO: 1044583 - RNA, 19 nt, Artificial Sequence
  Description of Artificial Sequence: Synthetic oligonucleotide
  Antisense strand to SEQ ID NO: 1044582
ucuucaaacagauguccug

SEQ ID NO: 1044584 - RNA, 19 nt, Artificial Sequence
  Description of Artificial Sequence: Synthetic oligonucleotide
  Sense strand starting at position 3588 of SEQ ID NO: 914979
ugcaguccagucgauuaaa

SEQ ID NO: 1044585 - RNA, 19 nt, Artificial Sequence
  Description of Artificial Sequence: Synthetic oligonucleotide
  Antisense strand to SEQ ID NO: 1044584
uuuaaucgacuggacugca

SEQ ID NO: 1044586 - RNA, 19 nt, Artificial Sequence
  Description of Artificial Sequence: Synthetic oligonucleotide
  Sense strand starting at position 3624 of SEQ ID NO: 914979
uguaaagauugaucuugag

SEQ ID NO: 1044587 - RNA, 19 nt, Artificial Sequence
  Description of Artificial Sequence: Synthetic oligonucleotide
  Antisense strand to SEQ ID NO: 1044586
cucaagaucaaucuuuaca

SEQ ID NO: 1044588 - RNA, 19 nt, Artificial Sequence
  Description of Artificial Sequence: Synthetic oligonucleotide
  Sense strand starting at position 3633 of SEQ ID NO: 914979
ugaucuugagccuaaacuu

SEQ ID NO: 1044589 - RNA, 19 nt, Artificial Sequence
  Description of Artificial Sequence: Synthetic oligonucleotide
  Antisense strand to SEQ ID NO: 1044588
aaguuuaggcucaagauca

SEQ ID NO: 1044590 - RNA, 19 nt, Artificial Sequence
  Description of Artificial Sequence: Synthetic oligonucleotide
  Sense strand starting at position 3797 of SEQ ID NO: 914979
uugguauuucuuugcucca

SEQ ID NO: 1044591 - RNA, 19 nt, Artificial Sequence
  Description of Artificial Sequence: Synthetic oligonucleotide
  Antisense strand to SEQ ID NO: 1044590
uggagcaaagaaauaccaa

SEQ ID NO: 1044592 - RNA, 19 nt, Artificial Sequence
  Description of Artificial Sequence: Synthetic oligonucleotide
  Sense strand starting at position 3798 of SEQ ID NO: 914979
ugguauuucuuugcuccau

SEQ ID NO: 1044593 - RNA, 19 nt, Artificial Sequence
  Description of Artificial Sequence: Synthetic oligonucleotide
  Antisense strand to SEQ ID NO: 1044592
auggagcaaagaaauacca

SEQ ID NO: 1044594 - RNA, 19 nt, Artificial Sequence
  Description of Artificial Sequence: Synthetic oligonucleotide
  Sense strand starting at position 3799 of SEQ ID NO: 914979
gguauuucuuugcuccaua

SEQ ID NO: 1044595 - RNA, 19 nt, Artificial Sequence
  Description of Artificial Sequence: Synthetic oligonucleotide
  Antisense strand to SEQ ID NO: 1044594
uauggagcaaagaaauacc

SEQ ID NO: 1044596 - RNA, 19 nt, Artificial Sequence
  Description of Artificial Sequence: Synthetic oligonucleotide
  Sense strand starting at position 3800 of SEQ ID NO: 914979
guauuucuuugcuccauac

SEQ ID NO: 1044597 - RNA, 19 nt, Artificial Sequence
  Description of Artificial Sequence: Synthetic oligonucleotide
  Antisense strand to SEQ ID NO: 1044596
guauggagcaaagaaauac

SEQ ID NO: 1044598 - RNA, 19 nt, Artificial Sequence
  Description of Artificial Sequence: Synthetic oligonucleotide
  Sense strand starting at position 206 of SEQ ID NO: 914980
gguccaaggacuugaaacu

SEQ ID NO: 1044599 - RNA, 19 nt, Artificial Sequence
  Description of Artificial Sequence: Synthetic oligonucleotide
  Antisense strand to SEQ ID NO: 1044598
aguuucaaguccuuggacc

SEQ ID NO: 1044600 - RNA, 19 nt, Artificial Sequence
  Description of Artificial Sequence: Synthetic oligonucleotide
  Sense strand starting at position 537 of SEQ ID NO: 914980
cuuauuuaauacuagagga

SEQ ID NO: 1044601 - RNA, 19 nt, Artificial Sequence
  Description of Artificial Sequence: Synthetic oligonucleotide
  Antisense strand to SEQ ID NO: 1044600
uccucuaguauuaaauaag

SEQ ID NO: 1044602 - RNA, 19 nt, Artificial Sequence
  Description of Artificial Sequence: Synthetic oligonucleotide
  Sense strand starting at position 576 of SEQ ID NO: 914980
acagaacugcauugacuaa

SEQ ID NO: 1044603 - RNA, 19 nt, Artificial Sequence
  Description of Artificial Sequence: Synthetic oligonucleotide
  Antisense strand to SEQ ID NO: 1044602
uuagucaaugcaguucugu

SEQ ID NO: 1044604 - RNA, 19 nt, Artificial Sequence
  Description of Artificial Sequence: Synthetic oligonucleotide
  Sense strand starting at position 594 of SEQ ID NO: 914980
auaagaauuugucaggaaa

SEQ ID NO: 1044605 - RNA, 19 nt, Artificial Sequence
  Description of Artificial Sequence: Synthetic oligonucleotide
  Antisense strand to SEQ ID NO: 1044604
uuuccugacaaauucuuau

SEQ ID NO: 1044606 - RNA, 19 nt, Artificial Sequence
  Description of Artificial Sequence: Synthetic oligonucleotide
  Sense strand starting at position 803 of SEQ ID NO: 914980
guuccuuauuuacugcuua

SEQ ID NO: 1044607 - RNA, 19 nt, Artificial Sequence
  Description of Artificial Sequence: Synthetic oligonucleotide
  Antisense strand to SEQ ID NO: 1044606
uaagcaguaaauaaggaac

SEQ ID NO: 1044608 - RNA, 19 nt, Artificial Sequence
  Description of Artificial Sequence: Synthetic oligonucleotide
  Sense strand starting at position 852 of SEQ ID NO: 914980
guugacgagcuuuagaaac

SEQ ID NO: 1044609 - RNA, 19 nt, Artificial Sequence
  Description of Artificial Sequence: Synthetic oligonucleotide
  Antisense strand to SEQ ID NO: 1044608
guuucuaaagcucgucaac

SEQ ID NO: 1044610 - RNA, 19 nt, Artificial Sequence
  Description of Artificial Sequence: Synthetic oligonucleotide
  Sense strand starting at position 953 of SEQ ID NO: 914980
ggaccagguucuucuccaa

SEQ ID NO: 1044611 - RNA, 19 nt, Artificial Sequence
  Description of Artificial Sequence: Synthetic oligonucleotide
  Antisense strand to SEQ ID NO: 1044610
uuggagaagaaccuggucc

SEQ ID NO: 1044612 - RNA, 19 nt, Artificial Sequence
  Description of Artificial Sequence: Synthetic oligonucleotide
  Sense strand starting at position 956 of SEQ ID NO: 914980
ccagguucuucuccaagaa

SEQ ID NO: 1044613 - RNA, 19 nt, Artificial Sequence
  Description of Artificial Sequence: Synthetic oligonucleotide
  Antisense strand to SEQ ID NO: 1044612
uucuuggagaagaaccugg

SEQ ID NO: 1044614 - RNA, 19 nt, Artificial Sequence
  Description of Artificial Sequence: Synthetic oligonucleotide
  Sense strand starting at position 979 of SEQ ID NO: 914980
uggguacuguacucaaaug

SEQ ID NO: 1044615 - RNA, 19 nt, Artificial Sequence
  Description of Artificial Sequence: Synthetic oligonucleotide
  Antisense strand to SEQ ID NO: 1044614
cauuugaguacaguaccca

SEQ ID NO: 1044616 - RNA, 19 nt, Artificial Sequence
  Description of Artificial Sequence: Synthetic oligonucleotide
  Sense strand starting at position 980 of SEQ ID NO: 914980
ggguacuguacucaaaugu

SEQ ID NO: 1044617 - RNA, 19 nt, Artificial Sequence
  Description of Artificial Sequence: Synthetic oligonucleotide
  Antisense strand to SEQ ID NO: 1044616
acauuugaguacaguaccc

SEQ ID NO: 1044618 - RNA, 19 nt, Artificial Sequence
  Description of Artificial Sequence: Synthetic oligonucleotide
  Sense strand starting at position 1121 of SEQ ID NO: 914980
ucuuaauuagacuggcaaa

SEQ ID NO: 1044619 - RNA, 19 nt, Artificial Sequence
  Description of Artificial Sequence: Synthetic oligonucleotide
  Antisense strand to SEQ ID NO: 1044618
uuugccagucuaauuaaga

SEQ ID NO: 1044620 - RNA, 19 nt, Artificial Sequence
  Description of Artificial Sequence: Synthetic oligonucleotide
  Sense strand starting at position 1204 of SEQ ID NO: 914980
auaauauaucuccagugua

SEQ ID NO: 1044621 - RNA, 19 nt, Artificial Sequence
  Description of Artificial Sequence: Synthetic oligonucleotide
  Antisense strand to SEQ ID NO: 1044620
uacacuggagauauauuau

SEQ ID NO: 1044622 - RNA, 19 nt, Artificial Sequence
  Description of Artificial Sequence: Synthetic oligonucleotide
  Sense strand starting at position 1353 of SEQ ID NO: 914980
aacucuagaugugcagaua

SEQ ID NO: 1044623 - RNA, 19 nt, Artificial Sequence
  Description of Artificial Sequence: Synthetic oligonucleotide
  Antisense strand to SEQ ID NO: 1044622
uaucugcacaucuagaguu

SEQ ID NO: 1044624 - RNA, 19 nt, Artificial Sequence
  Description of Artificial Sequence: Synthetic oligonucleotide
  Sense strand starting at position 1354 of SEQ ID NO: 914980
acucuagaugugcagauau

SEQ ID NO: 1044625 - RNA, 19 nt, Artificial Sequence
  Description of Artificial Sequence: Synthetic oligonucleotide
  Antisense strand to SEQ ID NO: 1044624
auaucugcacaucuagagu

SEQ ID NO: 1044626 - RNA, 19 nt, Artificial Sequence
  Description of Artificial Sequence: Synthetic oligonucleotide
  Sense strand starting at position 1873 of SEQ ID NO: 914980
aagggcaggauccgugaaa

SEQ ID NO: 1044627 - RNA, 19 nt, Artificial Sequence
  Description of Artificial Sequence: Synthetic oligonucleotide
  Antisense strand to SEQ ID NO: 1044626
uuucacggauccugcccuu

SEQ ID NO: 1044628 - RNA, 19 nt, Artificial Sequence
  Description of Artificial Sequence: Synthetic oligonucleotide
  Sense strand starting at position 1908 of SEQ ID NO: 914980
ugaacuugccucugagaac

SEQ ID NO: 1044629 - RNA, 19 nt, Artificial Sequence
  Description of Artificial Sequence: Synthetic oligonucleotide
  Antisense strand to SEQ ID NO: 1044628
guucucagaggcaaguuca

SEQ ID NO: 1044630 - RNA, 19 nt, Artificial Sequence
  Description of Artificial Sequence: Synthetic oligonucleotide
  Sense strand starting at position 1944 of SEQ ID NO: 914980
ugaauuccgcgggagagaa

SEQ ID NO: 1044631 - RNA, 19 nt, Artificial Sequence
  Description of Artificial Sequence: Synthetic oligonucleotide
  Antisense strand to SEQ ID NO: 1044630
uucucucccgcggaauuca

SEQ ID NO: 1044632 - RNA, 19 nt, Artificial Sequence
  Description of Artificial Sequence: Synthetic oligonucleotide
  Sense strand starting at position 1956 of SEQ ID NO: 914980
gagagaacggcguccguuu

SEQ ID NO: 1044633 - RNA, 19 nt, Artificial Sequence
  Description of Artificial Sequence: Synthetic oligonucleotide
  Antisense strand to SEQ ID NO: 1044632
aaacggacgccguucucuc

SEQ ID NO: 1044634 - RNA, 19 nt, Artificial Sequence
  Description of Artificial Sequence: Synthetic oligonucleotide
  Sense strand starting at position 2483 of SEQ ID NO: 914980
ugcugagagcaguaagaug

SEQ ID NO: 1044635 - RNA, 19 nt, Artificial Sequence
  Description of Artificial Sequence: Synthetic oligonucleotide
  Antisense strand to SEQ ID NO: 1044634
caucuuacugcucucagca

SEQ ID NO: 1044636 - RNA, 19 nt, Artificial Sequence
  Description of Artificial Sequence: Synthetic oligonucleotide
  Sense strand starting at position 2562 of SEQ ID NO: 914980
auugaaggguccuugaucu

SEQ ID NO: 1044637 - RNA, 19 nt, Artificial Sequence
  Description of Artificial Sequence: Synthetic oligonucleotide
  Antisense strand to SEQ ID NO: 1044636
agaucaaggacccuucaau

SEQ ID NO: 1044638 - RNA, 19 nt, Artificial Sequence
  Description of Artificial Sequence: Synthetic oligonucleotide
  Sense strand starting at position 2653 of SEQ ID NO: 914980
uuuguaaggaguugacaua

SEQ ID NO: 1044639 - RNA, 19 nt, Artificial Sequence
  Description of Artificial Sequence: Synthetic oligonucleotide
  Antisense strand to SEQ ID NO: 1044638
uaugucaacuccuuacaaa

SEQ ID NO: 1044640 - RNA, 19 nt, Artificial Sequence
  Description of Artificial Sequence: Synthetic oligonucleotide
  Sense strand starting at position 2693 of SEQ ID NO: 914980
ggauaugcccuuuaaguua

SEQ ID NO: 1044641 - RNA, 19 nt, Artificial Sequence
  Description of Artificial Sequence: Synthetic oligonucleotide
  Antisense strand to SEQ ID NO: 1044640
uaacuuaaagggcauaucc

SEQ ID NO: 1044642 - RNA, 19 nt, Artificial Sequence
  Description of Artificial Sequence: Synthetic oligonucleotide
  Sense strand starting at position 2746 of SEQ ID NO: 914980
ggaauaucaucaucaaguc

SEQ ID NO: 1044643 - RNA, 19 nt, Artificial Sequence
  Description of Artificial Sequence: Synthetic oligonucleotide
  Antisense strand to SEQ ID NO: 1044642
gacuugaugaugauauucc

SEQ ID NO: 1044644 - RNA, 19 nt, Artificial Sequence
  Description of Artificial Sequence: Synthetic oligonucleotide
  Sense strand starting at position 2936 of SEQ ID NO: 914980
agaucugugguauaagguu

SEQ ID NO: 1044645 - RNA, 19 nt, Artificial Sequence
  Description of Artificial Sequence: Synthetic oligonucleotide
  Antisense strand to SEQ ID NO: 1044644
aaccuuauaccacagaucu

SEQ ID NO: 1044646 - RNA, 19 nt, Artificial Sequence
  Description of Artificial Sequence: Synthetic oligonucleotide
  Sense strand starting at position 2942 of SEQ ID NO: 914980
gugguauaagguuacuaua

SEQ ID NO: 1044647 - RNA, 19 nt, Artificial Sequence
  Description of Artificial Sequence: Synthetic oligonucleotide
  Antisense strand to SEQ ID NO: 1044646
uauaguaaccuuauaccac

SEQ ID NO: 1044648 - RNA, 19 nt, Artificial Sequence
  Description of Artificial Sequence: Synthetic oligonucleotide
  Sense strand starting at position 2944 of SEQ ID NO: 914980
gguauaagguuacuauauu

SEQ ID NO: 1044649 - RNA, 19 nt, Artificial Sequence
  Description of Artificial Sequence: Synthetic oligonucleotide
  Antisense strand to SEQ ID NO: 1044648
aauauaguaaccuuauacc

SEQ ID NO: 1044650 - RNA, 19 nt, Artificial Sequence
  Description of Artificial Sequence: Synthetic oligonucleotide
  Sense strand starting at position 2999 of SEQ ID NO: 914980
cuguuaaguguuuaaugaa

SEQ ID NO: 1044651 - RNA, 19 nt, Artificial Sequence
  Description of Artificial Sequence: Synthetic oligonucleotide
  Antisense strand to SEQ ID NO: 1044650
uucauuaaacacuuaacag

SEQ ID NO: 1044652 - RNA, 19 nt, Artificial Sequence
  Description of Artificial Sequence: Synthetic oligonucleotide
  Sense strand starting at position 3079 of SEQ ID NO: 914980
guggaagcuccaggagaau

SEQ ID NO: 1044653 - RNA, 19 nt, Artificial Sequence
  Description of Artificial Sequence: Synthetic oligonucleotide
  Antisense strand to SEQ ID NO: 1044652
auucuccuggagcuuccac

SEQ ID NO: 1044654 - RNA, 19 nt, Artificial Sequence
  Description of Artificial Sequence: Synthetic oligonucleotide
  Sense strand starting at position 3110 of SEQ ID NO: 914980
gagcaauucugauuggaua

SEQ ID NO: 1044655 - RNA, 19 nt, Artificial Sequence
  Description of Artificial Sequence: Synthetic oligonucleotide
  Antisense strand to SEQ ID NO: 1044654
uauccaaucagaauugcuc

SEQ ID NO: 1044656 - RNA, 19 nt, Artificial Sequence
  Description of Artificial Sequence: Synthetic oligonucleotide
  Sense strand starting at position 3111 of SEQ ID NO: 914980
agcaauucugauuggauau

SEQ ID NO: 1044657 - RNA, 19 nt, Artificial Sequence
  Description of Artificial Sequence: Synthetic oligonucleotide
  Antisense strand to SEQ ID NO: 1044656
auauccaaucagaauugcu

SEQ ID NO: 1044658 - RNA, 19 nt, Artificial Sequence
  Description of Artificial Sequence: Synthetic oligonucleotide
  Sense strand starting at position 3118 of SEQ ID NO: 914980
cugauuggauaucucugau

SEQ ID NO: 1044659 - RNA, 19 nt, Artificial Sequence
  Description of Artificial Sequence: Synthetic oligonucleotide
  Antisense strand to SEQ ID NO: 1044658
aucagagauauccaaucag

SEQ ID NO: 1044660 - RNA, 19 nt, Artificial Sequence
  Description of Artificial Sequence: Synthetic oligonucleotide
  Sense strand starting at position 3124 of SEQ ID NO: 914980
ggauaucucugauuccaag

SEQ ID NO: 1044661 - RNA, 19 nt, Artificial Sequence
  Description of Artificial Sequence: Synthetic oligonucleotide
  Antisense strand to SEQ ID NO: 1044660
cuuggaaucagagauaucc

SEQ ID NO: 1044662 - RNA, 19 nt, Artificial Sequence
  Description of Artificial Sequence: Synthetic oligonucleotide
  Sense strand starting at position 3170 of SEQ ID NO: 914980
ccggauuggccuuaggaau

SEQ ID NO: 1044663 - RNA, 19 nt, Artificial Sequence
  Description of Artificial Sequence: Synthetic oligonucleotide
  Antisense strand to SEQ ID NO: 1044662
auuccuaaggccaauccgg

SEQ ID NO: 1044664 - RNA, 19 nt, Artificial Sequence
  Description of Artificial Sequence: Synthetic oligonucleotide
  Sense strand starting at position 3176 of SEQ ID NO: 914980
uggccuuaggaauacuuua

SEQ ID NO: 1044665 - RNA, 19 nt, Artificial Sequence
  Description of Artificial Sequence: Synthetic oligonucleotide
  Antisense strand to SEQ ID NO: 1044664
uaaaguauuccuaaggcca

SEQ ID NO: 1044666 - RNA, 19 nt, Artificial Sequence
  Description of Artificial Sequence: Synthetic oligonucleotide
  Sense strand starting at position 3237 of SEQ ID NO: 914980
aguuacuggacaugaguaa

SEQ ID NO: 1044667 - RNA, 19 nt, Artificial Sequence
  Description of Artificial Sequence: Synthetic oligonucleotide
  Antisense strand to SEQ ID NO: 1044666
uuacucauguccaguaacu

SEQ ID NO: 1044668 - RNA, 19 nt, Artificial Sequence
  Description of Artificial Sequence: Synthetic oligonucleotide
  Sense strand starting at position 3244 of SEQ ID NO: 914980
ggacaugaguaauacauuu

SEQ ID NO: 1044669 - RNA, 19 nt, Artificial Sequence
  Description of Artificial Sequence: Synthetic oligonucleotide
  Antisense strand to SEQ ID NO: 1044668
aaauguauuacucaugucc

SEQ ID NO: 1044670 - RNA, 19 nt, Artificial Sequence
  Description of Artificial Sequence: Synthetic oligonucleotide
  Sense strand starting at position 3334 of SEQ ID NO: 914980
uugugagauuagguaucaa

SEQ ID NO: 1044671 - RNA, 19 nt, Artificial Sequence
  Description of Artificial Sequence: Synthetic oligonucleotide
  Antisense strand to SEQ ID NO: 1044670
uugauaccuaaucucacaa

SEQ ID NO: 1044672 - RNA, 19 nt, Artificial Sequence
  Description of Artificial Sequence: Synthetic oligonucleotide
  Sense strand starting at position 3633 of SEQ ID NO: 914980
gagauaacaucagagaaga

SEQ ID NO: 1044673 - RNA, 19 nt, Artificial Sequence
  Description of Artificial Sequence: Synthetic oligonucleotide
  Antisense strand to SEQ ID NO: 1044672
ucuucucugauguuaucuc

SEQ ID NO: 1044674 - RNA, 19 nt, Artificial Sequence
  Description of Artificial Sequence: Synthetic oligonucleotide
  Sense strand starting at position 3685 of SEQ ID NO: 914980
aguugagaggcugggaauu

SEQ ID NO: 1044675 - RNA, 19 nt, Artificial Sequence
  Description of Artificial Sequence: Synthetic oligonucleotide
  Antisense strand to SEQ ID NO: 1044674
aauucccagccucucaacu

SEQ ID NO: 1044676 - RNA, 19 nt, Artificial Sequence
  Description of Artificial Sequence: Synthetic oligonucleotide
  Sense strand starting at position 3806 of SEQ ID NO: 914980
ggcagcuuagcagaauaaa

SEQ ID NO: 1044677 - RNA, 19 nt, Artificial Sequence
  Description of Artificial Sequence: Synthetic oligonucleotide
  Antisense strand to SEQ ID NO: 1044676
uuuauucugcuaagcugcc

SEQ ID NO: 1044678 - RNA, 19 nt, Artificial Sequence
  Description of Artificial Sequence: Synthetic oligonucleotide
  Sense strand starting at position 59 of SEQ ID NO: 914981
guaggaaagggcugugauu

SEQ ID NO: 1044679 - RNA, 19 nt, Artificial Sequence
  Description of Artificial Sequence: Synthetic oligonucleotide
  Antisense strand to SEQ ID NO: 1044678
aaucacagcccuuuccuac

SEQ ID NO: 1044680 - RNA, 19 nt, Artificial Sequence
  Description of Artificial Sequence: Synthetic oligonucleotide
  Sense strand starting at position 223 of SEQ ID NO: 914981
gggacagucagugagguau

SEQ ID NO: 1044681 - RNA, 19 nt, Artificial Sequence
  Description of Artificial Sequence: Synthetic oligonucleotide
  Antisense strand to SEQ ID NO: 1044680
auaccucacugacuguccc

SEQ ID NO: 1044682 - RNA, 19 nt, Artificial Sequence
  Description of Artificial Sequence: Synthetic oligonucleotide
  Sense strand starting at position 229 of SEQ ID NO: 914981
gucagugagguaugagacu

SEQ ID NO: 1044683 - RNA, 19 nt, Artificial Sequence
  Description of Artificial Sequence: Synthetic oligonucleotide
  Antisense strand to SEQ ID NO: 1044682
agucucauaccucacugac

SEQ ID NO: 1044684 - RNA, 19 nt, Artificial Sequence
  Description of Artificial Sequence: Synthetic oligonucleotide
  Sense strand starting at position 614 of SEQ ID NO: 914981
ccagcauagggccaaagau

SEQ ID NO: 1044685 - RNA, 19 nt, Artificial Sequence
  Description of Artificial Sequence: Synthetic oligonucleotide
  Antisense strand to SEQ ID NO: 1044684
aucuuuggcccuaugcugg

SEQ ID NO: 1044686 - RNA, 19 nt, Artificial Sequence
  Description of Artificial Sequence: Synthetic oligonucleotide
  Sense strand starting at position 664 of SEQ ID NO: 914981
ugccgucuuaggcagagaa

SEQ ID NO: 1044687 - RNA, 19 nt, Artificial Sequence
  Description of Artificial Sequence: Synthetic oligonucleotide
  Antisense strand to SEQ ID NO: 1044686
uucucugccuaagacggca

SEQ ID NO: 1044688 - RNA, 19 nt, Artificial Sequence
  Description of Artificial Sequence: Synthetic oligonucleotide
  Sense strand starting at position 1407 of SEQ ID NO: 914981
gcuggacagagucaucacu

SEQ ID NO: 1044689 - RNA, 19 nt, Artificial Sequence
  Description of Artificial Sequence: Synthetic oligonucleotide
  Antisense strand to SEQ ID NO: 1044688
agugaugacucuguccagc

SEQ ID NO: 1044690 - RNA, 19 nt, Artificial Sequence
  Description of Artificial Sequence: Synthetic oligonucleotide
  Sense strand starting at position 1707 of SEQ ID NO: 914981
guggaccuugucaguggua

SEQ ID NO: 1044691 - RNA, 19 nt, Artificial Sequence
  Description of Artificial Sequence: Synthetic oligonucleotide
  Antisense strand to SEQ ID NO: 1044690
uaccacugacaagguccac

SEQ ID NO: 1044692 - RNA, 19 nt, Artificial Sequence
  Description of Artificial Sequence: Synthetic oligonucleotide
  Sense strand starting at position 1936 of SEQ ID NO: 914981
gugcucccucuggaauagu

SEQ ID NO: 1044693 - RNA, 19 nt, Artificial Sequence
  Description of Artificial Sequence: Synthetic oligonucleotide
  Antisense strand to SEQ ID NO: 1044692
acuauuccagagggagcac

SEQ ID NO: 1044694 - RNA, 19 nt, Artificial Sequence
  Description of Artificial Sequence: Synthetic oligonucleotide
  Sense strand starting at position 1939 of SEQ ID NO: 914981
cucccucuggaauaguuua

SEQ ID NO: 1044695 - RNA, 19 nt, Artificial Sequence
  Description of Artificial Sequence: Synthetic oligonucleotide
  Antisense strand to SEQ ID NO: 1044694
uaaacuauuccagagggag

SEQ ID NO: 1044696 - RNA, 19 nt, Artificial Sequence
  Description of Artificial Sequence: Synthetic oligonucleotide
  Sense strand starting at position 2403 of SEQ ID NO: 914981
ugucaaacccugugaguua

SEQ ID NO: 1044697 - RNA, 19 nt, Artificial Sequence
  Description of Artificial Sequence: Synthetic oligonucleotide
  Antisense strand to SEQ ID NO: 1044696
uaacucacaggguuugaca

SEQ ID NO: 1044698 - RNA, 19 nt, Artificial Sequence
  Description of Artificial Sequence: Synthetic oligonucleotide
  Sense strand starting at position 2786 of SEQ ID NO: 914981
ugagcaucagcccauuaaa

SEQ ID NO: 1044699 - RNA, 19 nt, Artificial Sequence
  Description of Artificial Sequence: Synthetic oligonucleotide
  Antisense strand to SEQ ID NO: 1044698
uuuaaugggcugaugcuca

SEQ ID NO: 1044700 - RNA, 19 nt, Artificial Sequence
  Description of Artificial Sequence: Synthetic oligonucleotide
  Sense strand starting at position 3001 of SEQ ID NO: 914981
acuugacaauauguuugua

SEQ ID NO: 1044701 - RNA, 19 nt, Artificial Sequence
  Description of Artificial Sequence: Synthetic oligonucleotide
  Antisense strand to SEQ ID NO: 1044700
uacaaacauauugucaagu

SEQ ID NO: 1044702 - RNA, 19 nt, Artificial Sequence
  Description of Artificial Sequence: Synthetic oligonucleotide
  Sense strand starting at position 3004 of SEQ ID NO: 914981
ugacaauauguuuguagga

SEQ ID NO: 1044703 - RNA, 19 nt, Artificial Sequence
  Description of Artificial Sequence: Synthetic oligonucleotide
  Antisense strand to SEQ ID NO: 1044702
uccuacaaacauauuguca

SEQ ID NO: 1044704 - RNA, 19 nt, Artificial Sequence
  Description of Artificial Sequence: Synthetic oligonucleotide
  Sense strand starting at position 3005 of SEQ ID NO: 914981
gacaauauguuuguaggau

SEQ ID NO: 1044705 - RNA, 19 nt, Artificial Sequence
  Description of Artificial Sequence: Synthetic oligonucleotide
  Antisense strand to SEQ ID NO: 1044704
auccuacaaacauauuguc

SEQ ID NO: 1044706 - RNA, 19 nt, Artificial Sequence
  Description of Artificial Sequence: Synthetic oligonucleotide
  Sense strand starting at position 3019 of SEQ ID NO: 914981
aggauauauccagguggcu

SEQ ID NO: 1044707 - RNA, 19 nt, Artificial Sequence
  Description of Artificial Sequence: Synthetic oligonucleotide
  Antisense strand to SEQ ID NO: 1044706
agccaccuggauauauccu

SEQ ID NO: 1044708 - RNA, 19 nt, Artificial Sequence
  Description of Artificial Sequence: Synthetic oligonucleotide
  Sense strand starting at position 3062 of SEQ ID NO: 914981
ugucaucaugcacauugau

SEQ ID NO: 1044709 - RNA, 19 nt, Artificial Sequence
  Description of Artificial Sequence: Synthetic oligonucleotide
  Antisense strand to SEQ ID NO: 1044708
aucaaugugcaugaugaca

SEQ ID NO: 1044710 - RNA, 19 nt, Artificial Sequence
  Description of Artificial Sequence: Synthetic oligonucleotide
  Sense strand starting at position 3148 of SEQ ID NO: 914981
guuggacauccucaugcau

SEQ ID NO: 1044711 - RNA, 19 nt, Artificial Sequence
  Description of Artificial Sequence: Synthetic oligonucleotide
  Antisense strand to SEQ ID NO: 1044710
augcaugaggauguccaac

SEQ ID NO: 1044712 - RNA, 19 nt, Artificial Sequence
  Description of Artificial Sequence: Synthetic oligonucleotide
  Sense strand starting at position 3163 of SEQ ID NO: 914981
gcauguacccauuggacuu

SEQ ID NO: 1044713 - RNA, 19 nt, Artificial Sequence
  Description of Artificial Sequence: Synthetic oligonucleotide
  Antisense strand to SEQ ID NO: 1044712
aaguccaauggguacaugc

SEQ ID NO: 1044714 - RNA, 19 nt, Artificial Sequence
  Description of Artificial Sequence: Synthetic oligonucleotide
  Sense strand starting at position 3214 of SEQ ID NO: 914981
ggaggauugcucggucaua

SEQ ID NO: 1044715 - RNA, 19 nt, Artificial Sequence
  Description of Artificial Sequence: Synthetic oligonucleotide
  Antisense strand to SEQ ID NO: 1044714
uaugaccgagcaauccucc

SEQ ID NO: 1044716 - RNA, 19 nt, Artificial Sequence
  Description of Artificial Sequence: Synthetic oligonucleotide
  Sense strand starting at position 3215 of SEQ ID NO: 914981
gaggauugcucggucauag

SEQ ID NO: 1044717 - RNA, 19 nt, Artificial Sequence
  Description of Artificial Sequence: Synthetic oligonucleotide
  Antisense strand to SEQ ID NO: 1044716
cuaugaccgagcaauccuc

SEQ ID NO: 1044718 - RNA, 19 nt, Artificial Sequence
  Description of Artificial Sequence: Synthetic oligonucleotide
  Sense strand starting at position 3255 of SEQ ID NO: 914981
acuaaauauugccugguaa

SEQ ID NO: 1044719 - RNA, 19 nt, Artificial Sequence
  Description of Artificial Sequence: Synthetic oligonucleotide
  Antisense strand to SEQ ID NO: 1044718
uuaccaggcaauauuuagu

SEQ ID NO: 1044720 - RNA, 19 nt, Artificial Sequence
  Description of Artificial Sequence: Synthetic oligonucleotide
  Sense strand starting at position 3256 of SEQ ID NO: 914981
cuaaauauugccugguaau

SEQ ID NO: 1044721 - RNA, 19 nt, Artificial Sequence
  Description of Artificial Sequence: Synthetic oligonucleotide
  Antisense strand to SEQ ID NO: 1044720
auuaccaggcaauauuuag

SEQ ID NO: 1044722 - RNA, 19 nt, Artificial Sequence
  Description of Artificial Sequence: Synthetic oligonucleotide
  Sense strand starting at position 3314 of SEQ ID NO: 914981
gcagaauaggaauguuuac

SEQ ID NO: 1044723 - RNA, 19 nt, Artificial Sequence
  Description of Artificial Sequence: Synthetic oligonucleotide
  Antisense strand to SEQ ID NO: 1044722
guaaacauuccuauucugc

SEQ ID NO: 1044724 - RNA, 19 nt, Artificial Sequence
  Description of Artificial Sequence: Synthetic oligonucleotide
  Sense strand starting at position 3393 of SEQ ID NO: 914981
augguugcaaagugauaua

SEQ ID NO: 1044725 - RNA, 19 nt, Artificial Sequence
  Description of Artificial Sequence: Synthetic oligonucleotide
  Antisense strand to SEQ ID NO: 1044724
uauaucacuuugcaaccau

SEQ ID NO: 1044726 - RNA, 19 nt, Artificial Sequence
  Description of Artificial Sequence: Synthetic oligonucleotide
  Sense strand starting at position 3403 of SEQ ID NO: 914981
agugauauacuguagaugu

SEQ ID NO: 1044727 - RNA, 19 nt, Artificial Sequence
  Description of Artificial Sequence: Synthetic oligonucleotide
  Antisense strand to SEQ ID NO: 1044726
acaucuacaguauaucacu

SEQ ID NO: 1044728 - RNA, 19 nt, Artificial Sequence
  Description of Artificial Sequence: Synthetic oligonucleotide
  Sense strand starting at position 3405 of SEQ ID NO: 914981
ugauauacuguagauguuu

SEQ ID NO: 1044729 - RNA, 19 nt, Artificial Sequence
  Description of Artificial Sequence: Synthetic oligonucleotide
  Antisense strand to SEQ ID NO: 1044728
aaacaucuacaguauauca

SEQ ID NO: 1044730 - RNA, 19 nt, Artificial Sequence
  Description of Artificial Sequence: Synthetic oligonucleotide
  Sense strand starting at position 3426 of SEQ ID NO: 914981
acuugcauuucugugauua

SEQ ID NO: 1044731 - RNA, 19 nt, Artificial Sequence
  Description of Artificial Sequence: Synthetic oligonucleotide
  Antisense strand to SEQ ID NO: 1044730
uaaucacagaaaugcaagu

SEQ ID NO: 1044732 - RNA, 19 nt, Artificial Sequence
  Description of Artificial Sequence: Synthetic oligonucleotide
  Sense strand starting at position 3427 of SEQ ID NO: 914981
cuugcauuucugugauuac

SEQ ID NO: 1044733 - RNA, 19 nt, Artificial Sequence
  Description of Artificial Sequence: Synthetic oligonucleotide
  Antisense strand to SEQ ID NO: 1044732
guaaucacagaaaugcaag

SEQ ID NO: 1044734 - RNA, 19 nt, Artificial Sequence
  Description of Artificial Sequence: Synthetic oligonucleotide
  Sense strand starting at position 3430 of SEQ ID NO: 914981
gcauuucugugauuacagu

SEQ ID NO: 1044735 - RNA, 19 nt, Artificial Sequence
  Description of Artificial Sequence: Synthetic oligonucleotide
  Antisense strand to SEQ ID NO: 1044734
acuguaaucacagaaaugc

SEQ ID NO: 1044736 - RNA, 19 nt, Artificial Sequence
  Description of Artificial Sequence: Synthetic oligonucleotide
  Sense strand starting at position 3445 of SEQ ID NO: 914981
cagugaguuugagcaucaa

SEQ ID NO: 1044737 - RNA, 19 nt, Artificial Sequence
  Description of Artificial Sequence: Synthetic oligonucleotide
  Antisense strand to SEQ ID NO: 1044736
uugaugcucaaacucacug

SEQ ID NO: 1044738 - RNA, 19 nt, Artificial Sequence
  Description of Artificial Sequence: Synthetic oligonucleotide
  Sense strand starting at position 3473 of SEQ ID NO: 914981
cuguuagccauuuggaguu

SEQ ID NO: 1044739 - RNA, 19 nt, Artificial Sequence
  Description of Artificial Sequence: Synthetic oligonucleotide
  Antisense strand to SEQ ID NO: 1044738
aacuccaaauggcuaacag

SEQ ID NO: 1044740 - RNA, 19 nt, Artificial Sequence
  Description of Artificial Sequence: Synthetic oligonucleotide
  Sense strand starting at position 3567 of SEQ ID NO: 914981
gcaagaguugcuuguauuu

SEQ ID NO: 1044741 - RNA, 19 nt, Artificial Sequence
  Description of Artificial Sequence: Synthetic oligonucleotide
  Antisense strand to SEQ ID NO: 1044740
aaauacaagcaacucuugc

SEQ ID NO: 1044742 - RNA, 19 nt, Artificial Sequence
  Description of Artificial Sequence: Synthetic oligonucleotide
  Sense strand starting at position 3574 of SEQ ID NO: 914981
uugcuuguauuucuaggua

SEQ ID NO: 1044743 - RNA, 19 nt, Artificial Sequence
  Description of Artificial Sequence: Synthetic oligonucleotide
  Antisense strand to SEQ ID NO: 1044742
uaccuagaaauacaagcaa

SEQ ID NO: 1044744 - RNA, 19 nt, Artificial Sequence
  Description of Artificial Sequence: Synthetic oligonucleotide
  Sense strand starting at position 3592 of SEQ ID NO: 914981
auuaaugccuuccuggauu

SEQ ID NO: 1044745 - RNA, 19 nt, Artificial Sequence
  Description of Artificial Sequence: Synthetic oligonucleotide
  Antisense strand to SEQ ID NO: 1044744
aauccaggaaggcauuaau

SEQ ID NO: 1044746 - RNA, 19 nt, Artificial Sequence
  Description of Artificial Sequence: Synthetic oligonucleotide
  Sense strand starting at position 3610 of SEQ ID NO: 914981
uuagacauugcagauacuu

SEQ ID NO: 1044747 - RNA, 19 nt, Artificial Sequence
  Description of Artificial Sequence: Synthetic oligonucleotide
  Antisense strand to SEQ ID NO: 1044746
aaguaucugcaaugucuaa

SEQ ID NO: 1044748 - RNA, 19 nt, Artificial Sequence
  Description of Artificial Sequence: Synthetic oligonucleotide
  Sense strand starting at position 3669 of SEQ ID NO: 914981
uugugaacuuugguuggaa

SEQ ID NO: 1044749 - RNA, 19 nt, Artificial Sequence
  Description of Artificial Sequence: Synthetic oligonucleotide
  Antisense strand to SEQ ID NO: 1044748
uuccaaccaaaguucacaa

SEQ ID NO: 1044750 - RNA, 19 nt, Artificial Sequence
  Description of Artificial Sequence: Synthetic oligonucleotide
  Sense strand starting at position 3670 of SEQ ID NO: 914981
ugugaacuuugguuggaag

SEQ ID NO: 1044751 - RNA, 19 nt, Artificial Sequence
  Description of Artificial Sequence: Synthetic oligonucleotide
  Antisense strand to SEQ ID NO: 1044750
cuuccaaccaaaguucaca

SEQ ID NO: 1044752 - RNA, 19 nt, Artificial Sequence
  Description of Artificial Sequence: Synthetic oligonucleotide
  Sense strand starting at position 3671 of SEQ ID NO: 914981
gugaacuuugguuggaaga

SEQ ID NO: 1044753 - RNA, 19 nt, Artificial Sequence
  Description of Artificial Sequence: Synthetic oligonucleotide
  Antisense strand to SEQ ID NO: 1044752
ucuuccaaccaaaguucac

SEQ ID NO: 1044754 - RNA, 19 nt, Artificial Sequence
  Description of Artificial Sequence: Synthetic oligonucleotide
  Sense strand starting at position 3754 of SEQ ID NO: 914981
aucugaaaguauucugucu

SEQ ID NO: 1044755 - RNA, 19 nt, Artificial Sequence
  Description of Artificial Sequence: Synthetic oligonucleotide
  Antisense strand to SEQ ID NO: 1044754
agacagaauacuuucagau

SEQ ID NO: 1044756 - RNA, 19 nt, Artificial Sequence
  Description of Artificial Sequence: Synthetic oligonucleotide
  Sense strand starting at position 3898 of SEQ ID NO: 914981
uggaucagcuuuccuaaca

SEQ ID NO: 1044757 - RNA, 19 nt, Artificial Sequence
  Description of Artificial Sequence: Synthetic oligonucleotide
  Antisense strand to SEQ ID NO: 1044756
uguuaggaaagcugaucca

SEQ ID NO: 1044758 - RNA, 19 nt, Artificial Sequence
  Description of Artificial Sequence: Synthetic oligonucleotide
  Sense strand starting at position 155 of SEQ ID NO: 914982
ggucaucucccucggcuua

SEQ ID NO: 1044759 - RNA, 19 nt, Artificial Sequence
  Description of Artificial Sequence: Synthetic oligonucleotide
  Antisense strand to SEQ ID NO: 1044758
uaagccgagggagaugacc

SEQ ID NO: 1044760 - RNA, 19 nt, Artificial Sequence
  Description of Artificial Sequence: Synthetic oligonucleotide
  Sense strand starting at position 346 of SEQ ID NO: 914982
agucaagccugguuggaga

SEQ ID NO: 1044761 - RNA, 19 nt, Artificial Sequence
  Description of Artificial Sequence: Synthetic oligonucleotide
  Antisense strand to SEQ ID NO: 1044760
ucuccaaccaggcuugacu

SEQ ID NO: 1044762 - RNA, 19 nt, Artificial Sequence
  Description of Artificial Sequence: Synthetic oligonucleotide
  Sense strand starting at position 348 of SEQ ID NO: 914982
ucaagccugguuggagaua

SEQ ID NO: 1044763 - RNA, 19 nt, Artificial Sequence
  Description of Artificial Sequence: Synthetic oligonucleotide
  Antisense strand to SEQ ID NO: 1044762
uaucuccaaccaggcuuga

SEQ ID NO: 1044764 - RNA, 19 nt, Artificial Sequence
  Description of Artificial Sequence: Synthetic oligonucleotide
  Sense strand starting at position 349 of SEQ ID NO: 914982
caagccugguuggagauau

SEQ ID NO: 1044765 - RNA, 19 nt, Artificial Sequence
  Description of Artificial Sequence: Synthetic oligonucleotide
  Antisense strand to SEQ ID NO: 1044764
auaucuccaaccaggcuug

SEQ ID NO: 1044766 - RNA, 19 nt, Artificial Sequence
  Description of Artificial Sequence: Synthetic oligonucleotide
  Sense strand starting at position 631 of SEQ ID NO: 914982
aggucuuaagucuguugau

SEQ ID NO: 1044767 - RNA, 19 nt, Artificial Sequence
  Description of Artificial Sequence: Synthetic oligonucleotide
  Antisense strand to SEQ ID NO: 1044766
aucaacagacuuaagaccu

SEQ ID NO: 1044768 - RNA, 19 nt, Artificial Sequence
  Description of Artificial Sequence: Synthetic oligonucleotide
  Sense strand starting at position 632 of SEQ ID NO: 914982
ggucuuaagucuguugaug

SEQ ID NO: 1044769 - RNA, 19 nt, Artificial Sequence
  Description of Artificial Sequence: Synthetic oligonucleotide
  Antisense strand to SEQ ID NO: 1044768
caucaacagacuuaagacc

SEQ ID NO: 1044770 - RNA, 19 nt, Artificial Sequence
  Description of Artificial Sequence: Synthetic oligonucleotide
  Sense strand starting at position 634 of SEQ ID NO: 914982
ucuuaagucuguugauggu

SEQ ID NO: 1044771 - RNA, 19 nt, Artificial Sequence
  Description of Artificial Sequence: Synthetic oligonucleotide
  Antisense strand to SEQ ID NO: 1044770
accaucaacagacuuaaga

SEQ ID NO: 1044772 - RNA, 19 nt, Artificial Sequence
  Description of Artificial Sequence: Synthetic oligonucleotide
  Sense strand starting at position 692 of SEQ ID NO: 914982
ggagcuaucuccgggaucu

SEQ ID NO: 1044773 - RNA, 19 nt, Artificial Sequence
  Description of Artificial Sequence: Synthetic oligonucleotide
  Antisense strand to SEQ ID NO: 1044772
agaucccggagauagcucc

SEQ ID NO: 1044774 - RNA, 19 nt, Artificial Sequence
  Description of Artificial Sequence: Synthetic oligonucleotide
  Sense strand starting at position 693 of SEQ ID NO: 914982
gagcuaucuccgggaucua

SEQ ID NO: 1044775 - RNA, 19 nt, Artificial Sequence
  Description of Artificial Sequence: Synthetic oligonucleotide
  Antisense strand to SEQ ID NO: 1044774
uagaucccggagauagcuc

SEQ ID NO: 1044776 - RNA, 19 nt, Artificial Sequence
  Description of Artificial Sequence: Synthetic oligonucleotide
  Sense strand starting at position 855 of SEQ ID NO: 914982
cagggaagcgauggacaua

SEQ ID NO: 1044777 - RNA, 19 nt, Artificial Sequence
  Description of Artificial Sequence: Synthetic oligonucleotide
  Antisense strand to SEQ ID NO: 1044776
uauguccaucgcuucccug

SEQ ID NO: 1044778 - RNA, 19 nt, Artificial Sequence
  Description of Artificial Sequence: Synthetic oligonucleotide
  Sense strand starting at position 1070 of SEQ ID NO: 914982
ggcagagcucuguaggaag

SEQ ID NO: 1044779 - RNA, 19 nt, Artificial Sequence
  Description of Artificial Sequence: Synthetic oligonucleotide
  Antisense strand to SEQ ID NO: 1044778
cuuccuacagagcucugcc

SEQ ID NO: 1044780 - RNA, 19 nt, Artificial Sequence
  Description of Artificial Sequence: Synthetic oligonucleotide
  Sense strand starting at position 1126 of SEQ ID NO: 914982
aggaguuuguugcauccuu

SEQ ID NO: 1044781 - RNA, 19 nt, Artificial Sequence
  Description of Artificial Sequence: Synthetic oligonucleotide
  Antisense strand to SEQ ID NO: 1044780
aaggaugcaacaaacuccu

SEQ ID NO: 1044782 - RNA, 19 nt, Artificial Sequence
  Description of Artificial Sequence: Synthetic oligonucleotide
  Sense strand starting at position 1613 of SEQ ID NO: 914982
uggagagcucccuguugau

SEQ ID NO: 1044783 - RNA, 19 nt, Artificial Sequence
  Description of Artificial Sequence: Synthetic oligonucleotide
  Antisense strand to SEQ ID NO: 1044782
aucaacagggagcucucca

SEQ ID NO: 1044784 - RNA, 19 nt, Artificial Sequence
  Description of Artificial Sequence: Synthetic oligonucleotide
  Sense strand starting at position 2042 of SEQ ID NO: 914982
acgagaucucuggguggag

SEQ ID NO: 1044785 - RNA, 19 nt, Artificial Sequence
  Description of Artificial Sequence: Synthetic oligonucleotide
  Antisense strand to SEQ ID NO: 1044784
cuccacccagagaucucgu

SEQ ID NO: 1044786 - RNA, 19 nt, Artificial Sequence
  Description of Artificial Sequence: Synthetic oligonucleotide
  Sense strand starting at position 2185 of SEQ ID NO: 914982
ggaacuuguccuugcagca

SEQ ID NO: 1044787 - RNA, 19 nt, Artificial Sequence
  Description of Artificial Sequence: Synthetic oligonucleotide
  Antisense strand to SEQ ID NO: 1044786
ugcugcaaggacaaguucc

SEQ ID NO: 1044788 - RNA, 19 nt, Artificial Sequence
  Description of Artificial Sequence: Synthetic oligonucleotide
  Sense strand starting at position 2406 of SEQ ID NO: 914982
gggagaccucgugaacuca

SEQ ID NO: 1044789 - RNA, 19 nt, Artificial Sequence
  Description of Artificial Sequence: Synthetic oligonucleotide
  Antisense strand to SEQ ID NO: 1044788
ugaguucacgaggucuccc

SEQ ID NO: 1044790 - RNA, 19 nt, Artificial Sequence
  Description of Artificial Sequence: Synthetic oligonucleotide
  Sense strand starting at position 2414 of SEQ ID NO: 914982
ucgugaacucagugauuuc

SEQ ID NO: 1044791 - RNA, 19 nt, Artificial Sequence
  Description of Artificial Sequence: Synthetic oligonucleotide
  Antisense strand to SEQ ID NO: 1044790
gaaaucacugaguucacga

SEQ ID NO: 1044792 - RNA, 19 nt, Artificial Sequence
  Description of Artificial Sequence: Synthetic oligonucleotide
  Sense strand starting at position 2625 of SEQ ID NO: 914982
ggauuugcuccggagcguu

SEQ ID NO: 1044793 - RNA, 19 nt, Artificial Sequence
  Description of Artificial Sequence: Synthetic oligonucleotide
  Antisense strand to SEQ ID NO: 1044792
aacgcuccggagcaaaucc

SEQ ID NO: 1044794 - RNA, 19 nt, Artificial Sequence
  Description of Artificial Sequence: Synthetic oligonucleotide
  Sense strand starting at position 2808 of SEQ ID NO: 914982
gugcaaugcuggugucuga

SEQ ID NO: 1044795 - RNA, 19 nt, Artificial Sequence
  Description of Artificial Sequence: Synthetic oligonucleotide
  Antisense strand to SEQ ID NO: 1044794
ucagacaccagcauugcac

SEQ ID NO: 1044796 - RNA, 19 nt, Artificial Sequence
  Description of Artificial Sequence: Synthetic oligonucleotide
  Sense strand starting at position 2811 of SEQ ID NO: 914982
caaugcuggugucugauga

SEQ ID NO: 1044797 - RNA, 19 nt, Artificial Sequence
  Description of Artificial Sequence: Synthetic oligonucleotide
  Antisense strand to SEQ ID NO: 1044796
ucaucagacaccagcauug

SEQ ID NO: 1044798 - RNA, 19 nt, Artificial Sequence
  Description of Artificial Sequence: Synthetic oligonucleotide
  Sense strand starting at position 2812 of SEQ ID NO: 914982
aaugcuggugucugaugaa

SEQ ID NO: 1044799 - RNA, 19 nt, Artificial Sequence
  Description of Artificial Sequence: Synthetic oligonucleotide
  Antisense strand to SEQ ID NO: 1044798
uucaucagacaccagcauu

SEQ ID NO: 1044800 - RNA, 19 nt, Artificial Sequence
  Description of Artificial Sequence: Synthetic oligonucleotide
  Sense strand starting at position 2815 of SEQ ID NO: 914982
gcuggugucugaugaaugu

SEQ ID NO: 1044801 - RNA, 19 nt, Artificial Sequence
  Description of Artificial Sequence: Synthetic oligonucleotide
  Antisense strand to SEQ ID NO: 1044800
acauucaucagacaccagc

SEQ ID NO: 1044802 - RNA, 19 nt, Artificial Sequence
  Description of Artificial Sequence: Synthetic oligonucleotide
  Sense strand starting at position 2890 of SEQ ID NO: 914982
cuugcugaguugugucuca

SEQ ID NO: 1044803 - RNA, 19 nt, Artificial Sequence
  Description of Artificial Sequence: Synthetic oligonucleotide
  Antisense strand to SEQ ID NO: 1044802
ugagacacaacucagcaag

SEQ ID NO: 1044804 - RNA, 19 nt, Artificial Sequence
  Description of Artificial Sequence: Synthetic oligonucleotide
  Sense strand starting at position 2895 of SEQ ID NO: 914982
ugaguugugucucagcuuc

SEQ ID NO: 1044805 - RNA, 19 nt, Artificial Sequence
  Description of Artificial Sequence: Synthetic oligonucleotide
  Antisense strand to SEQ ID NO: 1044804
gaagcugagacacaacuca

SEQ ID NO: 1044806 - RNA, 19 nt, Artificial Sequence
  Description of Artificial Sequence: Synthetic oligonucleotide
  Sense strand starting at position 3178 of SEQ ID NO: 914982
gccuuccacuugucuuaca

SEQ ID NO: 1044807 - RNA, 19 nt, Artificial Sequence
  Description of Artificial Sequence: Synthetic oligonucleotide
  Antisense strand to SEQ ID NO: 1044806
uguaagacaaguggaaggc

SEQ ID NO: 1044808 - RNA, 19 nt, Artificial Sequence
  Description of Artificial Sequence: Synthetic oligonucleotide
  Sense strand starting at position 3553 of SEQ ID NO: 914982
gcauuagccuuccaacugu

SEQ ID NO: 1044809 - RNA, 19 nt, Artificial Sequence
  Description of Artificial Sequence: Synthetic oligonucleotide
  Antisense strand to SEQ ID NO: 1044808
acaguuggaaggcuaaugc

SEQ ID NO: 1044810 - RNA, 19 nt, Artificial Sequence
  Description of Artificial Sequence: Synthetic oligonucleotide
  Sense strand starting at position 3759 of SEQ ID NO: 914982
ggucuuaccuuccaauuga

SEQ ID NO: 1044811 - RNA, 19 nt, Artificial Sequence
  Description of Artificial Sequence: Synthetic oligonucleotide
  Antisense strand to SEQ ID NO: 1044810
ucaauuggaagguaagacc

SEQ ID NO: 1044812 - RNA, 19 nt, Artificial Sequence
  Description of Artificial Sequence: Synthetic oligonucleotide
  Sense strand starting at position 3938 of SEQ ID NO: 914982
uuccaauugucucaccguu

SEQ ID NO: 1044813 - RNA, 19 nt, Artificial Sequence
  Description of Artificial Sequence: Synthetic oligonucleotide
  Antisense strand to SEQ ID NO: 1044812
aacggugagacaauuggaa

SEQ ID NO: 1044814 - RNA, 19 nt, Artificial Sequence
  Description of Artificial Sequence: Synthetic oligonucleotide
  Sense strand starting at position 94 of SEQ ID NO: 914983
agugcauugugaugugugu

SEQ ID NO: 1044815 - RNA, 19 nt, Artificial Sequence
  Description of Artificial Sequence: Synthetic oligonucleotide
  Antisense strand to SEQ ID NO: 1044814
acacacaucacaaugcacu

SEQ ID NO: 1044816 - RNA, 19 nt, Artificial Sequence
  Description of Artificial Sequence: Synthetic oligonucleotide
  Sense strand starting at position 136 of SEQ ID NO: 914983
ugcugcgaccuguaucuua

SEQ ID NO: 1044817 - RNA, 19 nt, Artificial Sequence
  Description of Artificial Sequence: Synthetic oligonucleotide
  Antisense strand to SEQ ID NO: 1044816
uaagauacaggucgcagca

SEQ ID NO: 1044818 - RNA, 19 nt, Artificial Sequence
  Description of Artificial Sequence: Synthetic oligonucleotide
  Sense strand starting at position 380 of SEQ ID NO: 914983
ccagccuuguuuccagaga

SEQ ID NO: 1044819 - RNA, 19 nt, Artificial Sequence
  Description of Artificial Sequence: Synthetic oligonucleotide
  Antisense strand to SEQ ID NO: 1044818
ucucuggaaacaaggcugg

SEQ ID NO: 1044820 - RNA, 19 nt, Artificial Sequence
  Description of Artificial Sequence: Synthetic oligonucleotide
  Sense strand starting at position 381 of SEQ ID NO: 914983
cagccuuguuuccagagau

SEQ ID NO: 1044821 - RNA, 19 nt, Artificial Sequence
  Description of Artificial Sequence: Synthetic oligonucleotide
  Antisense strand to SEQ ID NO: 1044820
aucucuggaaacaaggcug

SEQ ID NO: 1044822 - RNA, 19 nt, Artificial Sequence
  Description of Artificial Sequence: Synthetic oligonucleotide
  Sense strand starting at position 564 of SEQ ID NO: 914983
gugggugucccugugcauu

SEQ ID NO: 1044823 - RNA, 19 nt, Artificial Sequence
  Description of Artificial Sequence: Synthetic oligonucleotide
  Antisense strand to SEQ ID NO: 1044822
aaugcacagggacacccac

SEQ ID NO: 1044824 - RNA, 19 nt, Artificial Sequence
  Description of Artificial Sequence: Synthetic oligonucleotide
  Sense strand starting at position 706 of SEQ ID NO: 914983
gcgugucaguacaugugua

SEQ ID NO: 1044825 - RNA, 19 nt, Artificial Sequence
  Description of Artificial Sequence: Synthetic oligonucleotide
  Antisense strand to SEQ ID NO: 1044824
uacacauguacugacacgc

SEQ ID NO: 1044826 - RNA, 19 nt, Artificial Sequence
  Description of Artificial Sequence: Synthetic oligonucleotide
  Sense strand starting at position 707 of SEQ ID NO: 914983
cgugucaguacauguguau

SEQ ID NO: 1044827 - RNA, 19 nt, Artificial Sequence
  Description of Artificial Sequence: Synthetic oligonucleotide
  Antisense strand to SEQ ID NO: 1044826
auacacauguacugacacg

SEQ ID NO: 1044828 - RNA, 19 nt, Artificial Sequence
  Description of Artificial Sequence: Synthetic oligonucleotide
  Sense strand starting at position 762 of SEQ ID NO: 914983
agaacuaguuuccacugaa

SEQ ID NO: 1044829 - RNA, 19 nt, Artificial Sequence
  Description of Artificial Sequence: Synthetic oligonucleotide
  Antisense strand to SEQ ID NO: 1044828
uucaguggaaacuaguucu

SEQ ID NO: 1044830 - RNA, 19 nt, Artificial Sequence
  Description of Artificial Sequence: Synthetic oligonucleotide
  Sense strand starting at position 765 of SEQ ID NO: 914983
acuaguuuccacugaagcu

SEQ ID NO: 1044831 - RNA, 19 nt, Artificial Sequence
  Description of Artificial Sequence: Synthetic oligonucleotide
  Antisense strand to SEQ ID NO: 1044830
agcuucaguggaaacuagu

SEQ ID NO: 1044832 - RNA, 19 nt, Artificial Sequence
  Description of Artificial Sequence: Synthetic oligonucleotide
  Sense strand starting at position 1244 of SEQ ID NO: 914983
gagccaucucccugugugu

SEQ ID NO: 1044833 - RNA, 19 nt, Artificial Sequence
  Description of Artificial Sequence: Synthetic oligonucleotide
  Antisense strand to SEQ ID NO: 1044832
acacacagggagauggcuc

SEQ ID NO: 1044834 - RNA, 19 nt, Artificial Sequence
  Description of Artificial Sequence: Synthetic oligonucleotide
  Sense strand starting at position 1495 of SEQ ID NO: 914983
gggagcuucuccggugagu

SEQ ID NO: 1044835 - RNA, 19 nt, Artificial Sequence
  Description of Artificial Sequence: Synthetic oligonucleotide
  Antisense strand to SEQ ID NO: 1044834
acucaccggagaagcuccc

SEQ ID NO: 1044836 - RNA, 19 nt, Artificial Sequence
  Description of Artificial Sequence: Synthetic oligonucleotide
  Sense strand starting at position 1497 of SEQ ID NO: 914983
gagcuucuccggugaguga

SEQ ID NO: 1044837 - RNA, 19 nt, Artificial Sequence
  Description of Artificial Sequence: Synthetic oligonucleotide
  Antisense strand to SEQ ID NO: 1044836
ucacucaccggagaagcuc

SEQ ID NO: 1044838 - RNA, 19 nt, Artificial Sequence
  Description of Artificial Sequence: Synthetic oligonucleotide
  Sense strand starting at position 1738 of SEQ ID NO: 914983
gagggcucuuccugugacu

SEQ ID NO: 1044839 - RNA, 19 nt, Artificial Sequence
  Description of Artificial Sequence: Synthetic oligonucleotide
  Antisense strand to SEQ ID NO: 1044838
agucacaggaagagcccuc

SEQ ID NO: 1044840 - RNA, 19 nt, Artificial Sequence
  Description of Artificial Sequence: Synthetic oligonucleotide
  Sense strand starting at position 2713 of SEQ ID NO: 914983
caggaagcccgagggaauu

SEQ ID NO: 1044841 - RNA, 19 nt, Artificial Sequence
  Description of Artificial Sequence: Synthetic oligonucleotide
  Antisense strand to SEQ ID NO: 1044840
aauucccucgggcuuccug

SEQ ID NO: 1044842 - RNA, 19 nt, Artificial Sequence
  Description of Artificial Sequence: Synthetic oligonucleotide
  Sense strand starting at position 2732 of SEQ ID NO: 914983
cugaacuuucccugcagga

SEQ ID NO: 1044843 - RNA, 19 nt, Artificial Sequence
  Description of Artificial Sequence: Synthetic oligonucleotide
  Antisense strand to SEQ ID NO: 1044842
uccugcagggaaaguucag

SEQ ID NO: 1044844 - RNA, 19 nt, Artificial Sequence
  Description of Artificial Sequence: Synthetic oligonucleotide
  Sense strand starting at position 2734 of SEQ ID NO: 914983
gaacuuucccugcaggagu

SEQ ID NO: 1044845 - RNA, 19 nt, Artificial Sequence
  Description of Artificial Sequence: Synthetic oligonucleotide
  Antisense strand to SEQ ID NO: 1044844
acuccugcagggaaaguuc

SEQ ID NO: 1044846 - RNA, 19 nt, Artificial Sequence
  Description of Artificial Sequence: Synthetic oligonucleotide
  Sense strand starting at position 3198 of SEQ ID NO: 914983
ccgccuuauuugguaugga

SEQ ID NO: 1044847 - RNA, 19 nt, Artificial Sequence
  Description of Artificial Sequence: Synthetic oligonucleotide
  Antisense strand to SEQ ID NO: 1044846
uccauaccaaauaaggcgg

SEQ ID NO: 1044848 - RNA, 19 nt, Artificial Sequence
  Description of Artificial Sequence: Synthetic oligonucleotide
  Sense strand starting at position 3199 of SEQ ID NO: 914983
cgccuuauuugguauggaa

SEQ ID NO: 1044849 - RNA, 19 nt, Artificial Sequence
  Description of Artificial Sequence: Synthetic oligonucleotide
  Antisense strand to SEQ ID NO: 1044848
uuccauaccaaauaaggcg

SEQ ID NO: 1044850 - RNA, 19 nt, Artificial Sequence
  Description of Artificial Sequence: Synthetic oligonucleotide
  Sense strand starting at position 3212 of SEQ ID NO: 914983
auggaaaucuguuucucuc

SEQ ID NO: 1044851 - RNA, 19 nt, Artificial Sequence
  Description of Artificial Sequence: Synthetic oligonucleotide
  Antisense strand to SEQ ID NO: 1044850
gagagaaacagauuuccau

SEQ ID NO: 1044852 - RNA, 19 nt, Artificial Sequence
  Description of Artificial Sequence: Synthetic oligonucleotide
  Sense strand starting at position 3214 of SEQ ID NO: 914983
ggaaaucuguuucucucaa

SEQ ID NO: 1044853 - RNA, 19 nt, Artificial Sequence
  Description of Artificial Sequence: Synthetic oligonucleotide
  Antisense strand to SEQ ID NO: 1044852
uugagagaaacagauuucc

SEQ ID NO: 1044854 - RNA, 19 nt, Artificial Sequence
  Description of Artificial Sequence: Synthetic oligonucleotide
  Sense strand starting at position 3238 of SEQ ID NO: 914983
gcgagaggcgcuuguaaac

SEQ ID NO: 1044855 - RNA, 19 nt, Artificial Sequence
  Description of Artificial Sequence: Synthetic oligonucleotide
  Antisense strand to SEQ ID NO: 1044854
guuuacaagcgccucucgc

SEQ ID NO: 1044856 - RNA, 19 nt, Artificial Sequence
  Description of Artificial Sequence: Synthetic oligonucleotide
  Sense strand starting at position 3510 of SEQ ID NO: 914983
gggcauuaaugccauuaug

SEQ ID NO: 1044857 - RNA, 19 nt, Artificial Sequence
  Description of Artificial Sequence: Synthetic oligonucleotide
  Antisense strand to SEQ ID NO: 1044856
cauaauggcauuaaugccc

SEQ ID NO: 1044858 - RNA, 19 nt, Artificial Sequence
  Description of Artificial Sequence: Synthetic oligonucleotide
  Sense strand starting at position 3580 of SEQ ID NO: 914983
gagauuagaugucaacaca

SEQ ID NO: 1044859 - RNA, 19 nt, Artificial Sequence
  Description of Artificial Sequence: Synthetic oligonucleotide
  Antisense strand to SEQ ID NO: 1044858
uguguugacaucuaaucuc

SEQ ID NO: 1044860 - RNA, 19 nt, Artificial Sequence
  Description of Artificial Sequence: Synthetic oligonucleotide
  Sense strand starting at position 3805 of SEQ ID NO: 914983
gguuuccucagcugucaga

SEQ ID NO: 1044861 - RNA, 19 nt, Artificial Sequence
  Description of Artificial Sequence: Synthetic oligonucleotide
  Antisense strand to SEQ ID NO: 1044860
ucugacagcugaggaaacc

SEQ ID NO: 1044862 - RNA, 19 nt, Artificial Sequence
  Description of Artificial Sequence: Synthetic oligonucleotide
  Sense strand starting at position 3812 of SEQ ID NO: 914983
ucagcugucagaugggaaa

SEQ ID NO: 1044863 - RNA, 19 nt, Artificial Sequence
  Description of Artificial Sequence: Synthetic oligonucleotide
  Antisense strand to SEQ ID NO: 1044862
uuucccaucugacagcuga

SEQ ID NO: 1044864 - RNA, 19 nt, Artificial Sequence
  Description of Artificial Sequence: Synthetic oligonucleotide
  Sense strand starting at position 3846 of SEQ ID NO: 914983
ggguuauagcaaggaggga

SEQ ID NO: 1044865 - RNA, 19 nt, Artificial Sequence
  Description of Artificial Sequence: Synthetic oligonucleotide
  Antisense strand to SEQ ID NO: 1044864
ucccuccuugcuauaaccc

SEQ ID NO: 1044866 - RNA, 19 nt, Artificial Sequence
  Description of Artificial Sequence: Synthetic oligonucleotide
  Sense strand starting at position 3974 of SEQ ID NO: 914983
ucuggcugaugcugagaau

SEQ ID NO: 1044867 - RNA, 19 nt, Artificial Sequence
  Description of Artificial Sequence: Synthetic oligonucleotide
  Antisense strand to SEQ ID NO: 1044866
auucucagcaucagccaga

SEQ ID NO: 1044868 - RNA, 19 nt, Artificial Sequence
  Description of Artificial Sequence: Synthetic oligonucleotide
  Sense strand starting at position 299 of SEQ ID NO: 914984
ccagaugauccagggcuga

SEQ ID NO: 1044869 - RNA, 19 nt, Artificial Sequence
  Description of Artificial Sequence: Synthetic oligonucleotide
  Antisense strand to SEQ ID NO: 1044868
ucagcccuggaucaucugg

SEQ ID NO: 1044870 - RNA, 19 nt, Artificial Sequence
  Description of Artificial Sequence: Synthetic oligonucleotide
  Sense strand starting at position 472 of SEQ ID NO: 914984
ugggucuguucugugcaga

SEQ ID NO: 1044871 - RNA, 19 nt, Artificial Sequence
  Description of Artificial Sequence: Synthetic oligonucleotide
  Antisense strand to SEQ ID NO: 1044870
ucugcacagaacagaccca

SEQ ID NO: 1044872 - RNA, 19 nt, Artificial Sequence
  Description of Artificial Sequence: Synthetic oligonucleotide
  Sense strand starting at position 473 of SEQ ID NO: 914984
gggucuguucugugcagaa

SEQ ID NO: 1044873 - RNA, 19 nt, Artificial Sequence
  Description of Artificial Sequence: Synthetic oligonucleotide
  Antisense strand to SEQ ID NO: 1044872
uucugcacagaacagaccc

SEQ ID NO: 1044874 - RNA, 19 nt, Artificial Sequence
  Description of Artificial Sequence: Synthetic oligonucleotide
  Sense strand starting at position 999 of SEQ ID NO: 914984
uugggugcucaggguaaga

SEQ ID NO: 1044875 - RNA, 19 nt, Artificial Sequence
  Description of Artificial Sequence: Synthetic oligonucleotide
  Antisense strand to SEQ ID NO: 1044874
ucuuacccugagcacccaa

SEQ ID NO: 1044876 - RNA, 19 nt, Artificial Sequence
  Description of Artificial Sequence: Synthetic oligonucleotide
  Sense strand starting at position 1868 of SEQ ID NO: 914984
ggcccuucuugaugcggaa

SEQ ID NO: 1044877 - RNA, 19 nt, Artificial Sequence
  Description of Artificial Sequence: Synthetic oligonucleotide
  Antisense strand to SEQ ID NO: 1044876
uuccgcaucaagaagggcc

SEQ ID NO: 1044878 - RNA, 19 nt, Artificial Sequence
  Description of Artificial Sequence: Synthetic oligonucleotide
  Sense strand starting at position 1937 of SEQ ID NO: 914984
cgaucagcgucagguagaa

SEQ ID NO: 1044879 - RNA, 19 nt, Artificial Sequence
  Description of Artificial Sequence: Synthetic oligonucleotide
  Antisense strand to SEQ ID NO: 1044878
uucuaccugacgcugaucg

SEQ ID NO: 1044880 - RNA, 19 nt, Artificial Sequence
  Description of Artificial Sequence: Synthetic oligonucleotide
  Sense strand starting at position 2048 of SEQ ID NO: 914984
agacaugguccucaggagu

SEQ ID NO: 1044881 - RNA, 19 nt, Artificial Sequence
  Description of Artificial Sequence: Synthetic oligonucleotide
  Antisense strand to SEQ ID NO: 1044880
acuccugaggaccaugucu

SEQ ID NO: 1044882 - RNA, 19 nt, Artificial Sequence
  Description of Artificial Sequence: Synthetic oligonucleotide
  Sense strand starting at position 2251 of SEQ ID NO: 914984
gguggacuaacuugcugaa

SEQ ID NO: 1044883 - RNA, 19 nt, Artificial Sequence
  Description of Artificial Sequence: Synthetic oligonucleotide
  Antisense strand to SEQ ID NO: 1044882
uucagcaaguuaguccacc

SEQ ID NO: 1044884 - RNA, 19 nt, Artificial Sequence
  Description of Artificial Sequence: Synthetic oligonucleotide
  Sense strand starting at position 2275 of SEQ ID NO: 914984
guccaugucccucauggau

SEQ ID NO: 1044885 - RNA, 19 nt, Artificial Sequence
  Description of Artificial Sequence: Synthetic oligonucleotide
  Antisense strand to SEQ ID NO: 1044884
auccaugagggacauggac

SEQ ID NO: 1044886 - RNA, 19 nt, Artificial Sequence
  Description of Artificial Sequence: Synthetic oligonucleotide
  Sense strand starting at position 2787 of SEQ ID NO: 914984
ggcugagagucccgaggau

SEQ ID NO: 1044887 - RNA, 19 nt, Artificial Sequence
  Description of Artificial Sequence: Synthetic oligonucleotide
  Antisense strand to SEQ ID NO: 1044886
auccucgggacucucagcc

SEQ ID NO: 1044888 - RNA, 19 nt, Artificial Sequence
  Description of Artificial Sequence: Synthetic oligonucleotide
  Sense strand starting at position 2796 of SEQ ID NO: 914984
ucccgaggauguucucaga

SEQ ID NO: 1044889 - RNA, 19 nt, Artificial Sequence
  Description of Artificial Sequence: Synthetic oligonucleotide
  Antisense strand to SEQ ID NO: 1044888
ucugagaacauccucggga

SEQ ID NO: 1044890 - RNA, 19 nt, Artificial Sequence
  Description of Artificial Sequence: Synthetic oligonucleotide
  Sense strand starting at position 2799 of SEQ ID NO: 914984
cgaggauguucucagagug

SEQ ID NO: 1044891 - RNA, 19 nt, Artificial Sequence
  Description of Artificial Sequence: Synthetic oligonucleotide
  Antisense strand to SEQ ID NO: 1044890
cacucugagaacauccucg

SEQ ID NO: 1044892 - RNA, 19 nt, Artificial Sequence
  Description of Artificial Sequence: Synthetic oligonucleotide
  Sense strand starting at position 2804 of SEQ ID NO: 914984
auguucucagagugcgaga

SEQ ID NO: 1044893 - RNA, 19 nt, Artificial Sequence
  Description of Artificial Sequence: Synthetic oligonucleotide
  Antisense strand to SEQ ID NO: 1044892
ucucgcacucugagaacau

SEQ ID NO: 1044894 - RNA, 19 nt, Artificial Sequence
  Description of Artificial Sequence: Synthetic oligonucleotide
  Sense strand starting at position 2914 of SEQ ID NO: 914984
gggucauguucuuaguccu

SEQ ID NO: 1044895 - RNA, 19 nt, Artificial Sequence
  Description of Artificial Sequence: Synthetic oligonucleotide
  Antisense strand to SEQ ID NO: 1044894
aggacuaagaacaugaccc

SEQ ID NO: 1044896 - RNA, 19 nt, Artificial Sequence
  Description of Artificial Sequence: Synthetic oligonucleotide
  Sense strand starting at position 2920 of SEQ ID NO: 914984
uguucuuaguccugggaga

SEQ ID NO: 1044897 - RNA, 19 nt, Artificial Sequence
  Description of Artificial Sequence: Synthetic oligonucleotide
  Antisense strand to SEQ ID NO: 1044896
ucucccaggacuaagaaca

SEQ ID NO: 1044898 - RNA, 19 nt, Artificial Sequence
  Description of Artificial Sequence: Synthetic oligonucleotide
  Sense strand starting at position 2921 of SEQ ID NO: 914984
guucuuaguccugggagau

SEQ ID NO: 1044899 - RNA, 19 nt, Artificial Sequence
  Description of Artificial Sequence: Synthetic oligonucleotide
  Antisense strand to SEQ ID NO: 1044898
aucucccaggacuaagaac

SEQ ID NO: 1044900 - RNA, 19 nt, Artificial Sequence
  Description of Artificial Sequence: Synthetic oligonucleotide
  Sense strand starting at position 2922 of SEQ ID NO: 914984
uucuuaguccugggagaug

SEQ ID NO: 1044901 - RNA, 19 nt, Artificial Sequence
  Description of Artificial Sequence: Synthetic oligonucleotide
  Antisense strand to SEQ ID NO: 1044900
caucucccaggacuaagaa

SEQ ID NO: 1044902 - RNA, 19 nt, Artificial Sequence
  Description of Artificial Sequence: Synthetic oligonucleotide
  Sense strand starting at position 2965 of SEQ ID NO: 914984
cggcgucagcggugagaga

SEQ ID NO: 1044903 - RNA, 19 nt, Artificial Sequence
  Description of Artificial Sequence: Synthetic oligonucleotide
  Antisense strand to SEQ ID NO: 1044902
ucucucaccgcugacgccg

SEQ ID NO: 1044904 - RNA, 19 nt, Artificial Sequence
  Description of Artificial Sequence: Synthetic oligonucleotide
  Sense strand starting at position 3386 of SEQ ID NO: 914984
ccuucuuugugcuugucau

SEQ ID NO: 1044905 - RNA, 19 nt, Artificial Sequence
  Description of Artificial Sequence: Synthetic oligonucleotide
  Antisense strand to SEQ ID NO: 1044904
augacaagcacaaagaagg

SEQ ID NO: 1044906 - RNA, 19 nt, Artificial Sequence
  Description of Artificial Sequence: Synthetic oligonucleotide
  Sense strand starting at position 3387 of SEQ ID NO: 914984
cuucuuugugcuugucauu

SEQ ID NO: 1044907 - RNA, 19 nt, Artificial Sequence
  Description of Artificial Sequence: Synthetic oligonucleotide
  Antisense strand to SEQ ID NO: 1044906
aaugacaagcacaaagaag

SEQ ID NO: 1044908 - RNA, 19 nt, Artificial Sequence
  Description of Artificial Sequence: Synthetic oligonucleotide
  Sense strand starting at position 3709 of SEQ ID NO: 914984
gggugagguuaggcucuau

SEQ ID NO: 1044909 - RNA, 19 nt, Artificial Sequence
  Description of Artificial Sequence: Synthetic oligonucleotide
  Antisense strand to SEQ ID NO: 1044908
auagagccuaaccucaccc

SEQ ID NO: 1044910 - RNA, 19 nt, Artificial Sequence
  Description of Artificial Sequence: Synthetic oligonucleotide
  Sense strand starting at position 3713 of SEQ ID NO: 914984
gagguuaggcucuauuccu

SEQ ID NO: 1044911 - RNA, 19 nt, Artificial Sequence
  Description of Artificial Sequence: Synthetic oligonucleotide
  Antisense strand to SEQ ID NO: 1044910
aggaauagagccuaaccuc

SEQ ID NO: 1044912 - RNA, 19 nt, Artificial Sequence
  Description of Artificial Sequence: Synthetic oligonucleotide
  Sense strand starting at position 3719 of SEQ ID NO: 914984
aggcucuauuccuggagag

SEQ ID NO: 1044913 - RNA, 19 nt, Artificial Sequence
  Description of Artificial Sequence: Synthetic oligonucleotide
  Antisense strand to SEQ ID NO: 1044912
cucuccaggaauagagccu

SEQ ID NO: 1044914 - RNA, 19 nt, Artificial Sequence
  Description of Artificial Sequence: Synthetic oligonucleotide
  Sense strand starting at position 3720 of SEQ ID NO: 914984
ggcucuauuccuggagaga

SEQ ID NO: 1044915 - RNA, 19 nt, Artificial Sequence
  Description of Artificial Sequence: Synthetic oligonucleotide
  Antisense strand to SEQ ID NO: 1044914
ucucuccaggaauagagcc

SEQ ID NO: 1044916 - RNA, 19 nt, Artificial Sequence
  Description of Artificial Sequence: Synthetic oligonucleotide
  Sense strand starting at position 3721 of SEQ ID NO: 914984
gcucuauuccuggagagag

SEQ ID NO: 1044917 - RNA, 19 nt, Artificial Sequence
  Description of Artificial Sequence: Synthetic oligonucleotide
  Antisense strand to SEQ ID NO: 1044916
cucucuccaggaauagagc

SEQ ID NO: 1044918 - RNA, 19 nt, Artificial Sequence
  Description of Artificial Sequence: Synthetic oligonucleotide
  Sense strand starting at position 4 of SEQ ID NO: 914985
aagagucuguaagcaaaua

SEQ ID NO: 1044919 - RNA, 19 nt, Artificial Sequence
  Description of Artificial Sequence: Synthetic oligonucleotide
  Antisense strand to SEQ ID NO: 1044918
uauuugcuuacagacucuu

SEQ ID NO: 1044920 - RNA, 19 nt, Artificial Sequence
  Description of Artificial Sequence: Synthetic oligonucleotide
  Sense strand starting at position 64 of SEQ ID NO: 914985
ugagguuuccaauggccaa

SEQ ID NO: 1044921 - RNA, 19 nt, Artificial Sequence
  Description of Artificial Sequence: Synthetic oligonucleotide
  Antisense strand to SEQ ID NO: 1044920
uuggccauuggaaaccuca

SEQ ID NO: 1044922 - RNA, 19 nt, Artificial Sequence
  Description of Artificial Sequence: Synthetic oligonucleotide
  Sense strand starting at position 117 of SEQ ID NO: 914985
gguccauuaguccaggaag

SEQ ID NO: 1044923 - RNA, 19 nt, Artificial Sequence
  Description of Artificial Sequence: Synthetic oligonucleotide
  Antisense strand to SEQ ID NO: 1044922
cuuccuggacuaauggacc

SEQ ID NO: 1044924 - RNA, 19 nt, Artificial Sequence
  Description of Artificial Sequence: Synthetic oligonucleotide
  Sense strand starting at position 119 of SEQ ID NO: 914985
uccauuaguccaggaagag

SEQ ID NO: 1044925 - RNA, 19 nt, Artificial Sequence
  Description of Artificial Sequence: Synthetic oligonucleotide
  Antisense strand to SEQ ID NO: 1044924
cucuuccuggacuaaugga

SEQ ID NO: 1044926 - RNA, 19 nt, Artificial Sequence
  Description of Artificial Sequence: Synthetic oligonucleotide
  Sense strand starting at position 209 of SEQ ID NO: 914985
aucaccaugcugugaacaa

SEQ ID NO: 1044927 - RNA, 19 nt, Artificial Sequence
  Description of Artificial Sequence: Synthetic oligonucleotide
  Antisense strand to SEQ ID NO: 1044926
uuguucacagcauggugau

SEQ ID NO: 1044928 - RNA, 19 nt, Artificial Sequence
  Description of Artificial Sequence: Synthetic oligonucleotide
  Sense strand starting at position 280 of SEQ ID NO: 914985
gagagagucugucucuaag

SEQ ID NO: 1044929 - RNA, 19 nt, Artificial Sequence
  Description of Artificial Sequence: Synthetic oligonucleotide
  Antisense strand to SEQ ID NO: 1044928
cuuagagacagacucucuc

SEQ ID NO: 1044930 - RNA, 19 nt, Artificial Sequence
  Description of Artificial Sequence: Synthetic oligonucleotide
  Sense strand starting at position 370 of SEQ ID NO: 914985
agcuucuaacugcaguaau

SEQ ID NO: 1044931 - RNA, 19 nt, Artificial Sequence
  Description of Artificial Sequence: Synthetic oligonucleotide
  Antisense strand to SEQ ID NO: 1044930
auuacugcaguuagaagcu

SEQ ID NO: 1044932 - RNA, 19 nt, Artificial Sequence
  Description of Artificial Sequence: Synthetic oligonucleotide
  Sense strand starting at position 636 of SEQ ID NO: 914985
uaaugcuuuccauggguga

SEQ ID NO: 1044933 - RNA, 19 nt, Artificial Sequence
  Description of Artificial Sequence: Synthetic oligonucleotide
  Antisense strand to SEQ ID NO: 1044932
ucacccauggaaagcauua

SEQ ID NO: 1044934 - RNA, 19 nt, Artificial Sequence
  Description of Artificial Sequence: Synthetic oligonucleotide
  Sense strand starting at position 637 of SEQ ID NO: 914985
aaugcuuuccaugggugaa

SEQ ID NO: 1044935 - RNA, 19 nt, Artificial Sequence
  Description of Artificial Sequence: Synthetic oligonucleotide
  Antisense strand to SEQ ID NO: 1044934
uucacccauggaaagcauu

SEQ ID NO: 1044936 - RNA, 19 nt, Artificial Sequence
  Description of Artificial Sequence: Synthetic oligonucleotide
  Sense strand starting at position 638 of SEQ ID NO: 914985
augcuuuccaugggugaaa

SEQ ID NO: 1044937 - RNA, 19 nt, Artificial Sequence
  Description of Artificial Sequence: Synthetic oligonucleotide
  Antisense strand to SEQ ID NO: 1044936
uuucacccauggaaagcau

SEQ ID NO: 1044938 - RNA, 19 nt, Artificial Sequence
  Description of Artificial Sequence: Synthetic oligonucleotide
  Sense strand starting at position 832 of SEQ ID NO: 914985
ucccgacagcuccaggauu

SEQ ID NO: 1044939 - RNA, 19 nt, Artificial Sequence
  Description of Artificial Sequence: Synthetic oligonucleotide
  Antisense strand to SEQ ID NO: 1044938
aauccuggagcugucggga

SEQ ID NO: 1044940 - RNA, 19 nt, Artificial Sequence
  Description of Artificial Sequence: Synthetic oligonucleotide
  Sense strand starting at position 1113 of SEQ ID NO: 914985
ccaguacugugagcaggau

SEQ ID NO: 1044941 - RNA, 19 nt, Artificial Sequence
  Description of Artificial Sequence: Synthetic oligonucleotide
  Antisense strand to SEQ ID NO: 1044940
auccugcucacaguacugg

SEQ ID NO: 1044942 - RNA, 19 nt, Artificial Sequence
  Description of Artificial Sequence: Synthetic oligonucleotide
  Sense strand starting at position 1578 of SEQ ID NO: 914985
ccaaguugaggauguagau

SEQ ID NO: 1044943 - RNA, 19 nt, Artificial Sequence
  Description of Artificial Sequence: Synthetic oligonucleotide
  Antisense strand to SEQ ID NO: 1044942
aucuacauccucaacuugg

SEQ ID NO: 1044944 - RNA, 19 nt, Artificial Sequence
  Description of Artificial Sequence: Synthetic oligonucleotide
  Sense strand starting at position 1798 of SEQ ID NO: 914985
ucuggugacccuggaaaca

SEQ ID NO: 1044945 - RNA, 19 nt, Artificial Sequence
  Description of Artificial Sequence: Synthetic oligonucleotide
  Antisense strand to SEQ ID NO: 1044944
uguuuccagggucaccaga

SEQ ID NO: 1044946 - RNA, 19 nt, Artificial Sequence
  Description of Artificial Sequence: Synthetic oligonucleotide
  Sense strand starting at position 2022 of SEQ ID NO: 914985
cugugcuaacaugggaaua

SEQ ID NO: 1044947 - RNA, 19 nt, Artificial Sequence
  Description of Artificial Sequence: Synthetic oligonucleotide
  Antisense strand to SEQ ID NO: 1044946
uauucccauguuagcacag

SEQ ID NO: 1044948 - RNA, 19 nt, Artificial Sequence
  Description of Artificial Sequence: Synthetic oligonucleotide
  Sense strand starting at position 2023 of SEQ ID NO: 914985
ugugcuaacaugggaauaa

SEQ ID NO: 1044949 - RNA, 19 nt, Artificial Sequence
  Description of Artificial Sequence: Synthetic oligonucleotide
  Antisense strand to SEQ ID NO: 1044948
uuauucccauguuagcaca

SEQ ID NO: 1044950 - RNA, 19 nt, Artificial Sequence
  Description of Artificial Sequence: Synthetic oligonucleotide
  Sense strand starting at position 2232 of SEQ ID NO: 914985
ugugaccuucgcuaggaua

SEQ ID NO: 1044951 - RNA, 19 nt, Artificial Sequence
  Description of Artificial Sequence: Synthetic oligonucleotide
  Antisense strand to SEQ ID NO: 1044950
uauccuagcgaaggucaca

SEQ ID NO: 1044952 - RNA, 19 nt, Artificial Sequence
  Description of Artificial Sequence: Synthetic oligonucleotide
  Sense strand starting at position 2280 of SEQ ID NO: 914985
agaaauaacucagcauguc

SEQ ID NO: 1044953 - RNA, 19 nt, Artificial Sequence
  Description of Artificial Sequence: Synthetic oligonucleotide
  Antisense strand to SEQ ID NO: 1044952
gacaugcugaguuauuucu

SEQ ID NO: 1044954 - RNA, 19 nt, Artificial Sequence
  Description of Artificial Sequence: Synthetic oligonucleotide
  Sense strand starting at position 2341 of SEQ ID NO: 914985
gugccuauuccauaagcag

SEQ ID NO: 1044955 - RNA, 19 nt, Artificial Sequence
  Description of Artificial Sequence: Synthetic oligonucleotide
  Antisense strand to SEQ ID NO: 1044954
cugcuuauggaauaggcac

SEQ ID NO: 1044956 - RNA, 19 nt, Artificial Sequence
  Description of Artificial Sequence: Synthetic oligonucleotide
  Sense strand starting at position 2404 of SEQ ID NO: 914985
gcaugagaagccuaauggu

SEQ ID NO: 1044957 - RNA, 19 nt, Artificial Sequence
  Description of Artificial Sequence: Synthetic oligonucleotide
  Antisense strand to SEQ ID NO: 1044956
accauuaggcuucucaugc

SEQ ID NO: 1044958 - RNA, 19 nt, Artificial Sequence
  Description of Artificial Sequence: Synthetic oligonucleotide
  Sense strand starting at position 2414 of SEQ ID NO: 914985
ccuaaugguaaugguagau

SEQ ID NO: 1044959 - RNA, 19 nt, Artificial Sequence
  Description of Artificial Sequence: Synthetic oligonucleotide
  Antisense strand to SEQ ID NO: 1044958
aucuaccauuaccauuagg

SEQ ID NO: 1044960 - RNA, 19 nt, Artificial Sequence
  Description of Artificial Sequence: Synthetic oligonucleotide
  Sense strand starting at position 2460 of SEQ ID NO: 914985
agcacaauguaaguuauua

SEQ ID NO: 1044961 - RNA, 19 nt, Artificial Sequence
  Description of Artificial Sequence: Synthetic oligonucleotide
  Antisense strand to SEQ ID NO: 1044960
uaauaacuuacauugugcu

SEQ ID NO: 1044962 - RNA, 19 nt, Artificial Sequence
  Description of Artificial Sequence: Synthetic oligonucleotide
  Sense strand starting at position 2560 of SEQ ID NO: 914985
augauugaugagugcccaa

SEQ ID NO: 1044963 - RNA, 19 nt, Artificial Sequence
  Description of Artificial Sequence: Synthetic oligonucleotide
  Antisense strand to SEQ ID NO: 1044962
uugggcacucaucaaucau

SEQ ID NO: 1044964 - RNA, 19 nt, Artificial Sequence
  Description of Artificial Sequence: Synthetic oligonucleotide
  Sense strand starting at position 2686 of SEQ ID NO: 914985
agcugaauugcucagcaau

SEQ ID NO: 1044965 - RNA, 19 nt, Artificial Sequence
  Description of Artificial Sequence: Synthetic oligonucleotide
  Antisense strand to SEQ ID NO: 1044964
auugcugagcaauucagcu

SEQ ID NO: 1044966 - RNA, 19 nt, Artificial Sequence
  Description of Artificial Sequence: Synthetic oligonucleotide
  Sense strand starting at position 2688 of SEQ ID NO: 914985
cugaauugcucagcaauag

SEQ ID NO: 1044967 - RNA, 19 nt, Artificial Sequence
  Description of Artificial Sequence: Synthetic oligonucleotide
  Antisense strand to SEQ ID NO: 1044966
cuauugcugagcaauucag

SEQ ID NO: 1044968 - RNA, 19 nt, Artificial Sequence
  Description of Artificial Sequence: Synthetic oligonucleotide
  Sense strand starting at position 2689 of SEQ ID NO: 914985
ugaauugcucagcaauaga

SEQ ID NO: 1044969 - RNA, 19 nt, Artificial Sequence
  Description of Artificial Sequence: Synthetic oligonucleotide
  Antisense strand to SEQ ID NO: 1044968
ucuauugcugagcaauuca

SEQ ID NO: 1044970 - RNA, 19 nt, Artificial Sequence
  Description of Artificial Sequence: Synthetic oligonucleotide
  Sense strand starting at position 2692 of SEQ ID NO: 914985
auugcucagcaauagaaca

SEQ ID NO: 1044971 - RNA, 19 nt, Artificial Sequence
  Description of Artificial Sequence: Synthetic oligonucleotide
  Antisense strand to SEQ ID NO: 1044970
uguucuauugcugagcaau

SEQ ID NO: 1044972 - RNA, 19 nt, Artificial Sequence
  Description of Artificial Sequence: Synthetic oligonucleotide
  Sense strand starting at position 2753 of SEQ ID NO: 914985
agguaauuaaaguguggga

SEQ ID NO: 1044973 - RNA, 19 nt, Artificial Sequence
  Description of Artificial Sequence: Synthetic oligonucleotide
  Antisense strand to SEQ ID NO: 1044972
ucccacacuuuaauuaccu

SEQ ID NO: 1044974 - RNA, 19 nt, Artificial Sequence
  Description of Artificial Sequence: Synthetic oligonucleotide
  Sense strand starting at position 2755 of SEQ ID NO: 914985
guaauuaaagugugggaau

SEQ ID NO: 1044975 - RNA, 19 nt, Artificial Sequence
  Description of Artificial Sequence: Synthetic oligonucleotide
  Antisense strand to SEQ ID NO: 1044974
auucccacacuuuaauuac

SEQ ID NO: 1044976 - RNA, 19 nt, Artificial Sequence
  Description of Artificial Sequence: Synthetic oligonucleotide
  Sense strand starting at position 2791 of SEQ ID NO: 914985
gaguauucugcugaguaua

SEQ ID NO: 1044977 - RNA, 19 nt, Artificial Sequence
  Description of Artificial Sequence: Synthetic oligonucleotide
  Antisense strand to SEQ ID NO: 1044976
uauacucagcagaauacuc

SEQ ID NO: 1044978 - RNA, 19 nt, Artificial Sequence
  Description of Artificial Sequence: Synthetic oligonucleotide
  Sense strand starting at position 2890 of SEQ ID NO: 914985
gaguccaugaggcgaaaua

SEQ ID NO: 1044979 - RNA, 19 nt, Artificial Sequence
  Description of Artificial Sequence: Synthetic oligonucleotide
  Antisense strand to SEQ ID NO: 1044978
uauuucgccucauggacuc

SEQ ID NO: 1044980 - RNA, 19 nt, Artificial Sequence
  Description of Artificial Sequence: Synthetic oligonucleotide
  Sense strand starting at position 2900 of SEQ ID NO: 914985
ggcgaaauaggagauaugu

SEQ ID NO: 1044981 - RNA, 19 nt, Artificial Sequence
  Description of Artificial Sequence: Synthetic oligonucleotide
  Antisense strand to SEQ ID NO: 1044980
acauaucuccuauuucgcc

SEQ ID NO: 1044982 - RNA, 19 nt, Artificial Sequence
  Description of Artificial Sequence: Synthetic oligonucleotide
  Sense strand starting at position 2999 of SEQ ID NO: 914985
gcagcugauggagaguuua

SEQ ID NO: 1044983 - RNA, 19 nt, Artificial Sequence
  Description of Artificial Sequence: Synthetic oligonucleotide
  Antisense strand to SEQ ID NO: 1044982
uaaacucuccaucagcugc

SEQ ID NO: 1044984 - RNA, 19 nt, Artificial Sequence
  Description of Artificial Sequence: Synthetic oligonucleotide
  Sense strand starting at position 3068 of SEQ ID NO: 914985
guauuauucccauauguca

SEQ ID NO: 1044985 - RNA, 19 nt, Artificial Sequence
  Description of Artificial Sequence: Synthetic oligonucleotide
  Antisense strand to SEQ ID NO: 1044984
ugacauaugggaauaauac

SEQ ID NO: 1044986 - RNA, 19 nt, Artificial Sequence
  Description of Artificial Sequence: Synthetic oligonucleotide
  Sense strand starting at position 3224 of SEQ ID NO: 914985
acauguuagagcggguaaa

SEQ ID NO: 1044987 - RNA, 19 nt, Artificial Sequence
  Description of Artificial Sequence: Synthetic oligonucleotide
  Antisense strand to SEQ ID NO: 1044986
uuuacccgcucuaacaugu

SEQ ID NO: 1044988 - RNA, 19 nt, Artificial Sequence
  Description of Artificial Sequence: Synthetic oligonucleotide
  Sense strand starting at position 3673 of SEQ ID NO: 914985
guuugucuuccucaugaaa

SEQ ID NO: 1044989 - RNA, 19 nt, Artificial Sequence
  Description of Artificial Sequence: Synthetic oligonucleotide
  Antisense strand to SEQ ID NO: 1044988
uuucaugaggaagacaaac

SEQ ID NO: 1044990 - RNA, 19 nt, Artificial Sequence
  Description of Artificial Sequence: Synthetic oligonucleotide
  Sense strand starting at position 3753 of SEQ ID NO: 914985
gcauguguucuuuaaagau

SEQ ID NO: 1044991 - RNA, 19 nt, Artificial Sequence
  Description of Artificial Sequence: Synthetic oligonucleotide
  Antisense strand to SEQ ID NO: 1044990
aucuuuaaagaacacaugc

SEQ ID NO: 1044992 - RNA, 19 nt, Artificial Sequence
  Description of Artificial Sequence: Synthetic oligonucleotide
  Sense strand starting at position 3807 of SEQ ID NO: 914985
agccgaggccuagagaauu

SEQ ID NO: 1044993 - RNA, 19 nt, Artificial Sequence
  Description of Artificial Sequence: Synthetic oligonucleotide
  Antisense strand to SEQ ID NO: 1044992
aauucucuaggccucggcu

SEQ ID NO: 1044994 - RNA, 19 nt, Artificial Sequence
  Description of Artificial Sequence: Synthetic oligonucleotide
  Sense strand starting at position 3895 of SEQ ID NO: 914985
augagacuucuguaugguu

SEQ ID NO: 1044995 - RNA, 19 nt, Artificial Sequence
  Description of Artificial Sequence: Synthetic oligonucleotide
  Antisense strand to SEQ ID NO: 1044994
aaccauacagaagucucau

SEQ ID NO: 1044996 - RNA, 19 nt, Artificial Sequence
  Description of Artificial Sequence: Synthetic oligonucleotide
  Sense strand starting at position 3909 of SEQ ID NO: 914985
ugguucucugccgcaugau

SEQ ID NO: 1044997 - RNA, 19 nt, Artificial Sequence
  Description of Artificial Sequence: Synthetic oligonucleotide
  Antisense strand to SEQ ID NO: 1044996
aucaugcggcagagaacca

SEQ ID NO: 1044998 - RNA, 19 nt, Artificial Sequence
  Description of Artificial Sequence: Synthetic oligonucleotide
  Sense strand starting at position 179 of SEQ ID NO: 914986
acgcucauuuaacaaagaa

SEQ ID NO: 1044999 - RNA, 19 nt, Artificial Sequence
  Description of Artificial Sequence: Synthetic oligonucleotide
  Antisense strand to SEQ ID NO: 1044998
uucuuuguuaaaugagcgu

SEQ ID NO: 1045000 - RNA, 19 nt, Artificial Sequence
  Description of Artificial Sequence: Synthetic oligonucleotide
  Sense strand starting at position 227 of SEQ ID NO: 914986
ccugaaucacauggugaaa

SEQ ID NO: 1045001 - RNA, 19 nt, Artificial Sequence
  Description of Artificial Sequence: Synthetic oligonucleotide
  Antisense strand to SEQ ID NO: 1045000
uuucaccaugugauucagg

SEQ ID NO: 1045002 - RNA, 19 nt, Artificial Sequence
  Description of Artificial Sequence: Synthetic oligonucleotide
  Sense strand starting at position 288 of SEQ ID NO: 914986
agguuuauuucuguuccau

SEQ ID NO: 1045003 - RNA, 19 nt, Artificial Sequence
  Description of Artificial Sequence: Synthetic oligonucleotide
  Antisense strand to SEQ ID NO: 1045002
auggaacagaaauaaaccu

SEQ ID NO: 1045004 - RNA, 19 nt, Artificial Sequence
  Description of Artificial Sequence: Synthetic oligonucleotide
  Sense strand starting at position 290 of SEQ ID NO: 914986
guuuauuucuguuccaugu

SEQ ID NO: 1045005 - RNA, 19 nt, Artificial Sequence
  Description of Artificial Sequence: Synthetic oligonucleotide
  Antisense strand to SEQ ID NO: 1045004
acauggaacagaaauaaac

SEQ ID NO: 1045006 - RNA, 19 nt, Artificial Sequence
  Description of Artificial Sequence: Synthetic oligonucleotide
  Sense strand starting at position 300 of SEQ ID NO: 914986
guuccaugucuacaucauu

SEQ ID NO: 1045007 - RNA, 19 nt, Artificial Sequence
  Description of Artificial Sequence: Synthetic oligonucleotide
  Antisense strand to SEQ ID NO: 1045006
aaugauguagacauggaac

SEQ ID NO: 1045008 - RNA, 19 nt, Artificial Sequence
  Description of Artificial Sequence: Synthetic oligonucleotide
  Sense strand starting at position 321 of SEQ ID NO: 914986
cuauuugugaggcaguguu

SEQ ID NO: 1045009 - RNA, 19 nt, Artificial Sequence
  Description of Artificial Sequence: Synthetic oligonucleotide
  Antisense strand to SEQ ID NO: 1045008
aacacugccucacaaauag

SEQ ID NO: 1045010 - RNA, 19 nt, Artificial Sequence
  Description of Artificial Sequence: Synthetic oligonucleotide
  Sense strand starting at position 486 of SEQ ID NO: 914986
ugcuaauggcaccauguaa

SEQ ID NO: 1045011 - RNA, 19 nt, Artificial Sequence
  Description of Artificial Sequence: Synthetic oligonucleotide
  Antisense strand to SEQ ID NO: 1045010
uuacauggugccauuagca

SEQ ID NO: 1045012 - RNA, 19 nt, Artificial Sequence
  Description of Artificial Sequence: Synthetic oligonucleotide
  Sense strand starting at position 504 of SEQ ID NO: 914986
accauaugugauggucaag

SEQ ID NO: 1045013 - RNA, 19 nt, Artificial Sequence
  Description of Artificial Sequence: Synthetic oligonucleotide
  Antisense strand to SEQ ID NO: 1045012
cuugaccaucacauauggu

SEQ ID NO: 1045014 - RNA, 19 nt, Artificial Sequence
  Description of Artificial Sequence: Synthetic oligonucleotide
  Sense strand starting at position 680 of SEQ ID NO: 914986
gauguuugaugucuuagag

SEQ ID NO: 1045015 - RNA, 19 nt, Artificial Sequence
  Description of Artificial Sequence: Synthetic oligonucleotide
  Antisense strand to SEQ ID NO: 1045014
cucuaagacaucaaacauc

SEQ ID NO: 1045016 - RNA, 19 nt, Artificial Sequence
  Description of Artificial Sequence: Synthetic oligonucleotide
  Sense strand starting at position 696 of SEQ ID NO: 914986
gaguuaucagcccaagucu

SEQ ID NO: 1045017 - RNA, 19 nt, Artificial Sequence
  Description of Artificial Sequence: Synthetic oligonucleotide
  Antisense strand to SEQ ID NO: 1045016
agacuugggcugauaacuc

SEQ ID NO: 1045018 - RNA, 19 nt, Artificial Sequence
  Description of Artificial Sequence: Synthetic oligonucleotide
  Sense strand starting at position 786 of SEQ ID NO: 914986
acacauaccuguguacuua

SEQ ID NO: 1045019 - RNA, 19 nt, Artificial Sequence
  Description of Artificial Sequence: Synthetic oligonucleotide
  Antisense strand to SEQ ID NO: 1045018
uaaguacacagguaugugu

SEQ ID NO: 1045020 - RNA, 19 nt, Artificial Sequence
  Description of Artificial Sequence: Synthetic oligonucleotide
  Sense strand starting at position 799 of SEQ ID NO: 914986
uacuuauagcugggaguac

SEQ ID NO: 1045021 - RNA, 19 nt, Artificial Sequence
  Description of Artificial Sequence: Synthetic oligonucleotide
  Antisense strand to SEQ ID NO: 1045020
guacucccagcuauaagua

SEQ ID NO: 1045022 - RNA, 19 nt, Artificial Sequence
  Description of Artificial Sequence: Synthetic oligonucleotide
  Sense strand starting at position 814 of SEQ ID NO: 914986
guaccuauguacucccaau

SEQ ID NO: 1045023 - RNA, 19 nt, Artificial Sequence
  Description of Artificial Sequence: Synthetic oligonucleotide
  Antisense strand to SEQ ID NO: 1045022
auugggaguacauagguac

SEQ ID NO: 1045024 - RNA, 19 nt, Artificial Sequence
  Description of Artificial Sequence: Synthetic oligonucleotide
  Sense strand starting at position 881 of SEQ ID NO: 914986
gugagagacuaguccaaag

SEQ ID NO: 1045025 - RNA, 19 nt, Artificial Sequence
  Description of Artificial Sequence: Synthetic oligonucleotide
  Antisense strand to SEQ ID NO: 1045024
cuuuggacuagucucucac

SEQ ID NO: 1045026 - RNA, 19 nt, Artificial Sequence
  Description of Artificial Sequence: Synthetic oligonucleotide
  Sense strand starting at position 1098 of SEQ ID NO: 914986
caugucugugccucgucaa

SEQ ID NO: 1045027 - RNA, 19 nt, Artificial Sequence
  Description of Artificial Sequence: Synthetic oligonucleotide
  Antisense strand to SEQ ID NO: 1045026
uugacgaggcacagacaug

SEQ ID NO: 1045028 - RNA, 19 nt, Artificial Sequence
  Description of Artificial Sequence: Synthetic oligonucleotide
  Sense strand starting at position 1368 of SEQ ID NO: 914986
agcacauucugaguucuca

SEQ ID NO: 1045029 - RNA, 19 nt, Artificial Sequence
  Description of Artificial Sequence: Synthetic oligonucleotide
  Antisense strand to SEQ ID NO: 1045028
ugagaacucagaaugugcu

SEQ ID NO: 1045030 - RNA, 19 nt, Artificial Sequence
  Description of Artificial Sequence: Synthetic oligonucleotide
  Sense strand starting at position 1478 of SEQ ID NO: 914986
ccuguucacgccguuguaa

SEQ ID NO: 1045031 - RNA, 19 nt, Artificial Sequence
  Description of Artificial Sequence: Synthetic oligonucleotide
  Antisense strand to SEQ ID NO: 1045030
uuacaacggcgugaacagg

SEQ ID NO: 1045032 - RNA, 19 nt, Artificial Sequence
  Description of Artificial Sequence: Synthetic oligonucleotide
  Sense strand starting at position 1479 of SEQ ID NO: 914986
cuguucacgccguuguaaa

SEQ ID NO: 1045033 - RNA, 19 nt, Artificial Sequence
  Description of Artificial Sequence: Synthetic oligonucleotide
  Antisense strand to SEQ ID NO: 1045032
uuuacaacggcgugaacag

SEQ ID NO: 1045034 - RNA, 19 nt, Artificial Sequence
  Description of Artificial Sequence: Synthetic oligonucleotide
  Sense strand starting at position 1790 of SEQ ID NO: 914986
cggaucucccagcaucuaa

SEQ ID NO: 1045035 - RNA, 19 nt, Artificial Sequence
  Description of Artificial Sequence: Synthetic oligonucleotide
  Antisense strand to SEQ ID NO: 1045034
uuagaugcugggagauccg

SEQ ID NO: 1045036 - RNA, 19 nt, Artificial Sequence
  Description of Artificial Sequence: Synthetic oligonucleotide
  Sense strand starting at position 1958 of SEQ ID NO: 914986
uggaguuggugaguugaga

SEQ ID NO: 1045037 - RNA, 19 nt, Artificial Sequence
  Description of Artificial Sequence: Synthetic oligonucleotide
  Antisense strand to SEQ ID NO: 1045036
ucucaacucaccaacucca

SEQ ID NO: 1045038 - RNA, 19 nt, Artificial Sequence
  Description of Artificial Sequence: Synthetic oligonucleotide
  Sense strand starting at position 2043 of SEQ ID NO: 914986
ugaugacugagugaagcuu

SEQ ID NO: 1045039 - RNA, 19 nt, Artificial Sequence
  Description of Artificial Sequence: Synthetic oligonucleotide
  Antisense strand to SEQ ID NO: 1045038
aagcuucacucagucauca

SEQ ID NO: 1045040 - RNA, 19 nt, Artificial Sequence
  Description of Artificial Sequence: Synthetic oligonucleotide
  Sense strand starting at position 2049 of SEQ ID NO: 914986
cugagugaagcuuaucaag

SEQ ID NO: 1045041 - RNA, 19 nt, Artificial Sequence
  Description of Artificial Sequence: Synthetic oligonucleotide
  Antisense strand to SEQ ID NO: 1045040
cuugauaagcuucacucag

SEQ ID NO: 1045042 - RNA, 19 nt, Artificial Sequence
  Description of Artificial Sequence: Synthetic oligonucleotide
  Sense strand starting at position 2051 of SEQ ID NO: 914986
gagugaagcuuaucaagau

SEQ ID NO: 1045043 - RNA, 19 nt, Artificial Sequence
  Description of Artificial Sequence: Synthetic oligonucleotide
  Antisense strand to SEQ ID NO: 1045042
aucuugauaagcuucacuc

SEQ ID NO: 1045044 - RNA, 19 nt, Artificial Sequence
  Description of Artificial Sequence: Synthetic oligonucleotide
  Sense strand starting at position 2079 of SEQ ID NO: 914986
cccugugauuuccuguaca

SEQ ID NO: 1045045 - RNA, 19 nt, Artificial Sequence
  Description of Artificial Sequence: Synthetic oligonucleotide
  Antisense strand to SEQ ID NO: 1045044
uguacaggaaaucacaggg

SEQ ID NO: 1045046 - RNA, 19 nt, Artificial Sequence
  Description of Artificial Sequence: Synthetic oligonucleotide
  Sense strand starting at position 2283 of SEQ ID NO: 914986
cgacgugagcuuucauagc

SEQ ID NO: 1045047 - RNA, 19 nt, Artificial Sequence
  Description of Artificial Sequence: Synthetic oligonucleotide
  Antisense strand to SEQ ID NO: 1045046
gcuaugaaagcucacgucg

SEQ ID NO: 1045048 - RNA, 19 nt, Artificial Sequence
  Description of Artificial Sequence: Synthetic oligonucleotide
  Sense strand starting at position 2743 of SEQ ID NO: 914986
uuaagacaaucagaagaaa

SEQ ID NO: 1045049 - RNA, 19 nt, Artificial Sequence
  Description of Artificial Sequence: Synthetic oligonucleotide
  Antisense strand to SEQ ID NO: 1045048
uuucuucugauugucuuaa

SEQ ID NO: 1045050 - RNA, 19 nt, Artificial Sequence
  Description of Artificial Sequence: Synthetic oligonucleotide
  Sense strand starting at position 2908 of SEQ ID NO: 914986
cagggaacauguguugauu

SEQ ID NO: 1045051 - RNA, 19 nt, Artificial Sequence
  Description of Artificial Sequence: Synthetic oligonucleotide
  Antisense strand to SEQ ID NO: 1045050
aaucaacacauguucccug

SEQ ID NO: 1045052 - RNA, 19 nt, Artificial Sequence
  Description of Artificial Sequence: Synthetic oligonucleotide
  Sense strand starting at position 3051 of SEQ ID NO: 914986
ucuguuacugucuaaccua

SEQ ID NO: 1045053 - RNA, 19 nt, Artificial Sequence
  Description of Artificial Sequence: Synthetic oligonucleotide
  Antisense strand to SEQ ID NO: 1045052
uagguuagacaguaacaga

SEQ ID NO: 1045054 - RNA, 19 nt, Artificial Sequence
  Description of Artificial Sequence: Synthetic oligonucleotide
  Sense strand starting at position 3071 of SEQ ID NO: 914986
ugugcucuauuauuugauu

SEQ ID NO: 1045055 - RNA, 19 nt, Artificial Sequence
  Description of Artificial Sequence: Synthetic oligonucleotide
  Antisense strand to SEQ ID NO: 1045054
aaucaaauaauagagcaca

SEQ ID NO: 1045056 - RNA, 19 nt, Artificial Sequence
  Description of Artificial Sequence: Synthetic oligonucleotide
  Sense strand starting at position 3254 of SEQ ID NO: 914986
agagucucugcaugguaaa

SEQ ID NO: 1045057 - RNA, 19 nt, Artificial Sequence
  Description of Artificial Sequence: Synthetic oligonucleotide
  Antisense strand to SEQ ID NO: 1045056
uuuaccaugcagagacucu

SEQ ID NO: 1045058 - RNA, 19 nt, Artificial Sequence
  Description of Artificial Sequence: Synthetic oligonucleotide
  Sense strand starting at position 3313 of SEQ ID NO: 914986
ucgucuucuaaagaugguu

SEQ ID NO: 1045059 - RNA, 19 nt, Artificial Sequence
  Description of Artificial Sequence: Synthetic oligonucleotide
  Antisense strand to SEQ ID NO: 1045058
aaccaucuuuagaagacga

SEQ ID NO: 1045060 - RNA, 19 nt, Artificial Sequence
  Description of Artificial Sequence: Synthetic oligonucleotide
  Sense strand starting at position 3368 of SEQ ID NO: 914986
cuuccagcacauugaagau

SEQ ID NO: 1045061 - RNA, 19 nt, Artificial Sequence
  Description of Artificial Sequence: Synthetic oligonucleotide
  Antisense strand to SEQ ID NO: 1045060
aucuucaaugugcuggaag

SEQ ID NO: 1045062 - RNA, 19 nt, Artificial Sequence
  Description of Artificial Sequence: Synthetic oligonucleotide
  Sense strand starting at position 3378 of SEQ ID NO: 914986
auugaagauccauguucug

SEQ ID NO: 1045063 - RNA, 19 nt, Artificial Sequence
  Description of Artificial Sequence: Synthetic oligonucleotide
  Antisense strand to SEQ ID NO: 1045062
cagaacauggaucuucaau

SEQ ID NO: 1045064 - RNA, 19 nt, Artificial Sequence
  Description of Artificial Sequence: Synthetic oligonucleotide
  Sense strand starting at position 3381 of SEQ ID NO: 914986
gaagauccauguucugacu

SEQ ID NO: 1045065 - RNA, 19 nt, Artificial Sequence
  Description of Artificial Sequence: Synthetic oligonucleotide
  Antisense strand to SEQ ID NO: 1045064
agucagaacauggaucuuc

SEQ ID NO: 1045066 - RNA, 19 nt, Artificial Sequence
  Description of Artificial Sequence: Synthetic oligonucleotide
  Sense strand starting at position 3505 of SEQ ID NO: 914986
accaaauuguaucugguga

SEQ ID NO: 1045067 - RNA, 19 nt, Artificial Sequence
  Description of Artificial Sequence: Synthetic oligonucleotide
  Antisense strand to SEQ ID NO: 1045066
ucaccagauacaauuuggu

SEQ ID NO: 1045068 - RNA, 19 nt, Artificial Sequence
  Description of Artificial Sequence: Synthetic oligonucleotide
  Sense strand starting at position 3531 of SEQ ID NO: 914986
ucaaaucauguuugggauu

SEQ ID NO: 1045069 - RNA, 19 nt, Artificial Sequence
  Description of Artificial Sequence: Synthetic oligonucleotide
  Antisense strand to SEQ ID NO: 1045068
aaucccaaacaugauuuga

SEQ ID NO: 1045070 - RNA, 19 nt, Artificial Sequence
  Description of Artificial Sequence: Synthetic oligonucleotide
  Sense strand starting at position 3626 of SEQ ID NO: 914986
uuaacauaacggugaagaa

SEQ ID NO: 1045071 - RNA, 19 nt, Artificial Sequence
  Description of Artificial Sequence: Synthetic oligonucleotide
  Antisense strand to SEQ ID NO: 1045070
uucuucaccguuauguuaa

SEQ ID NO: 1045072 - RNA, 19 nt, Artificial Sequence
  Description of Artificial Sequence: Synthetic oligonucleotide
  Sense strand starting at position 3759 of SEQ ID NO: 914986
ugcugugaagauuaauaau

SEQ ID NO: 1045073 - RNA, 19 nt, Artificial Sequence
  Description of Artificial Sequence: Synthetic oligonucleotide
  Antisense strand to SEQ ID NO: 1045072
auuauuaaucuucacagca

SEQ ID NO: 1045074 - RNA, 19 nt, Artificial Sequence
  Description of Artificial Sequence: Synthetic oligonucleotide
  Sense strand starting at position 3853 of SEQ ID NO: 914986
aguauuaucucuuucugga

SEQ ID NO: 1045075 - RNA, 19 nt, Artificial Sequence
  Description of Artificial Sequence: Synthetic oligonucleotide
  Antisense strand to SEQ ID NO: 1045074
uccagaaagagauaauacu

SEQ ID NO: 1045076 - RNA, 19 nt, Artificial Sequence
  Description of Artificial Sequence: Synthetic oligonucleotide
  Sense strand starting at position 3957 of SEQ ID NO: 914986
gcugcuuucuggguaauuu

SEQ ID NO: 1045077 - RNA, 19 nt, Artificial Sequence
  Description of Artificial Sequence: Synthetic oligonucleotide
  Antisense strand to SEQ ID NO: 1045076
aaauuacccagaaagcagc

SEQ ID NO: 1045078 - RNA, 19 nt, Artificial Sequence
  Description of Artificial Sequence: Synthetic oligonucleotide
  Sense strand starting at position 768 of SEQ ID NO: 914987
gaaggaauguuaucucuug

SEQ ID NO: 1045079 - RNA, 19 nt, Artificial Sequence
  Description of Artificial Sequence: Synthetic oligonucleotide
  Antisense strand to SEQ ID NO: 1045078
caagagauaacauuccuuc

SEQ ID NO: 1045080 - RNA, 19 nt, Artificial Sequence
  Description of Artificial Sequence: Synthetic oligonucleotide
  Sense strand starting at position 1286 of SEQ ID NO: 914987
gcagaagaaucuuucuuug

SEQ ID NO: 1045081 - RNA, 19 nt, Artificial Sequence
  Description of Artificial Sequence: Synthetic oligonucleotide
  Antisense strand to SEQ ID NO: 1045080
caaagaaagauucuucugc

SEQ ID NO: 1045082 - RNA, 19 nt, Artificial Sequence
  Description of Artificial Sequence: Synthetic oligonucleotide
  Sense strand starting at position 1288 of SEQ ID NO: 914987
agaagaaucuuucuuugua

SEQ ID NO: 1045083 - RNA, 19 nt, Artificial Sequence
  Description of Artificial Sequence: Synthetic oligonucleotide
  Antisense strand to SEQ ID NO: 1045082
uacaaagaaagauucuucu

SEQ ID NO: 1045084 - RNA, 19 nt, Artificial Sequence
  Description of Artificial Sequence: Synthetic oligonucleotide
  Sense strand starting at position 3099 of SEQ ID NO: 914987
cuagcugacucgugagauu

SEQ ID NO: 1045085 - RNA, 19 nt, Artificial Sequence
  Description of Artificial Sequence: Synthetic oligonucleotide
  Antisense strand to SEQ ID NO: 1045084
aaucucacgagucagcuag

SEQ ID NO: 1045086 - RNA, 19 nt, Artificial Sequence
  Description of Artificial Sequence: Synthetic oligonucleotide
  Sense strand starting at position 3108 of SEQ ID NO: 914987
ucgugagauuaccgaaaga

SEQ ID NO: 1045087 - RNA, 19 nt, Artificial Sequence
  Description of Artificial Sequence: Synthetic oligonucleotide
  Antisense strand to SEQ ID NO: 1045086
ucuuucgguaaucucacga

SEQ ID NO: 1045088 - RNA, 19 nt, Artificial Sequence
  Description of Artificial Sequence: Synthetic oligonucleotide
  Sense strand starting at position 3171 of SEQ ID NO: 914987
guccuauuguuacaggaca

SEQ ID NO: 1045089 - RNA, 19 nt, Artificial Sequence
  Description of Artificial Sequence: Synthetic oligonucleotide
  Antisense strand to SEQ ID NO: 1045088
uguccuguaacaauaggac

SEQ ID NO: 1045090 - RNA, 19 nt, Artificial Sequence
  Description of Artificial Sequence: Synthetic oligonucleotide
  Sense strand starting at position 3327 of SEQ ID NO: 914987
aguagaacguuccugaaag

SEQ ID NO: 1045091 - RNA, 19 nt, Artificial Sequence
  Description of Artificial Sequence: Synthetic oligonucleotide
  Antisense strand to SEQ ID NO: 1045090
cuuucaggaacguucuacu

SEQ ID NO: 1045092 - RNA, 19 nt, Artificial Sequence
  Description of Artificial Sequence: Synthetic oligonucleotide
  Sense strand starting at position 3328 of SEQ ID NO: 914987
guagaacguuccugaaagu

SEQ ID NO: 1045093 - RNA, 19 nt, Artificial Sequence
  Description of Artificial Sequence: Synthetic oligonucleotide
  Antisense strand to SEQ ID NO: 1045092
acuuucaggaacguucuac

SEQ ID NO: 1045094 - RNA, 19 nt, Artificial Sequence
  Description of Artificial Sequence: Synthetic oligonucleotide
  Sense strand starting at position 3370 of SEQ ID NO: 914987
aggcacaauugcuuguaua

SEQ ID NO: 1045095 - RNA, 19 nt, Artificial Sequence
  Description of Artificial Sequence: Synthetic oligonucleotide
  Antisense strand to SEQ ID NO: 1045094
uauacaagcaauugugccu

SEQ ID NO: 1045096 - RNA, 19 nt, Artificial Sequence
  Description of Artificial Sequence: Synthetic oligonucleotide
  Sense strand starting at position 3371 of SEQ ID NO: 914987
ggcacaauugcuuguauac

SEQ ID NO: 1045097 - RNA, 19 nt, Artificial Sequence
  Description of Artificial Sequence: Synthetic oligonucleotide
  Antisense strand to SEQ ID NO: 1045096
guauacaagcaauugugcc

SEQ ID NO: 1045098 - RNA, 19 nt, Artificial Sequence
  Description of Artificial Sequence: Synthetic oligonucleotide
  Sense strand starting at position 3412 of SEQ ID NO: 914987
aaggguuugugauaacaga

SEQ ID NO: 1045099 - RNA, 19 nt, Artificial Sequence
  Description of Artificial Sequence: Synthetic oligonucleotide
  Antisense strand to SEQ ID NO: 1045098
ucuguuaucacaaacccuu

SEQ ID NO: 1045100 - RNA, 19 nt, Artificial Sequence
  Description of Artificial Sequence: Synthetic oligonucleotide
  Sense strand starting at position 492 of SEQ ID NO: 914988
uugaguuaccacugagaca

SEQ ID NO: 1045101 - RNA, 19 nt, Artificial Sequence
  Description of Artificial Sequence: Synthetic oligonucleotide
  Antisense strand to SEQ ID NO: 1045100
ugucucagugguaacucaa

SEQ ID NO: 1045102 - RNA, 19 nt, Artificial Sequence
  Description of Artificial Sequence: Synthetic oligonucleotide
  Sense strand starting at position 2031 of SEQ ID NO: 914988
augugaccuuugcuaggau

SEQ ID NO: 1045103 - RNA, 19 nt, Artificial Sequence
  Description of Artificial Sequence: Synthetic oligonucleotide
  Antisense strand to SEQ ID NO: 1045102
auccuagcaaaggucacau

SEQ ID NO: 1045104 - RNA, 19 nt, Artificial Sequence
  Description of Artificial Sequence: Synthetic oligonucleotide
  Sense strand starting at position 2034 of SEQ ID NO: 914988
ugaccuuugcuaggauaag

SEQ ID NO: 1045105 - RNA, 19 nt, Artificial Sequence
  Description of Artificial Sequence: Synthetic oligonucleotide
  Antisense strand to SEQ ID NO: 1045104
cuuauccuagcaaagguca

SEQ ID NO: 1045106 - RNA, 19 nt, Artificial Sequence
  Description of Artificial Sequence: Synthetic oligonucleotide
  Sense strand starting at position 2066 of SEQ ID NO: 914988
gggccuggugggugagaaa

SEQ ID NO: 1045107 - RNA, 19 nt, Artificial Sequence
  Description of Artificial Sequence: Synthetic oligonucleotide
  Antisense strand to SEQ ID NO: 1045106
uuucucacccaccaggccc

SEQ ID NO: 1045108 - RNA, 19 nt, Artificial Sequence
  Description of Artificial Sequence: Synthetic oligonucleotide
  Sense strand starting at position 2067 of SEQ ID NO: 914988
ggccuggugggugagaaau

SEQ ID NO: 1045109 - RNA, 19 nt, Artificial Sequence
  Description of Artificial Sequence: Synthetic oligonucleotide
  Antisense strand to SEQ ID NO: 1045108
auuucucacccaccaggcc

SEQ ID NO: 1045110 - RNA, 19 nt, Artificial Sequence
  Description of Artificial Sequence: Synthetic oligonucleotide
  Sense strand starting at position 2142 of SEQ ID NO: 914988
ugccuauuuccaugagcag

SEQ ID NO: 1045111 - RNA, 19 nt, Artificial Sequence
  Description of Artificial Sequence: Synthetic oligonucleotide
  Antisense strand to SEQ ID NO: 1045110
cugcucauggaaauaggca

SEQ ID NO: 1045112 - RNA, 19 nt, Artificial Sequence
  Description of Artificial Sequence: Synthetic oligonucleotide
  Sense strand starting at position 2197 of SEQ ID NO: 914988
gaaugcaugcaugagacua

SEQ ID NO: 1045113 - RNA, 19 nt, Artificial Sequence
  Description of Artificial Sequence: Synthetic oligonucleotide
  Antisense strand to SEQ ID NO: 1045112
uagucucaugcaugcauuc

SEQ ID NO: 1045114 - RNA, 19 nt, Artificial Sequence
  Description of Artificial Sequence: Synthetic oligonucleotide
  Sense strand starting at position 2212 of SEQ ID NO: 914988
acuaaugguacugguagau

SEQ ID NO: 1045115 - RNA, 19 nt, Artificial Sequence
  Description of Artificial Sequence: Synthetic oligonucleotide
  Antisense strand to SEQ ID NO: 1045114
aucuaccaguaccauuagu

SEQ ID NO: 1045116 - RNA, 19 nt, Artificial Sequence
  Description of Artificial Sequence: Synthetic oligonucleotide
  Sense strand starting at position 2221 of SEQ ID NO: 914988
acugguagauuuggaugaa

SEQ ID NO: 1045117 - RNA, 19 nt, Artificial Sequence
  Description of Artificial Sequence: Synthetic oligonucleotide
  Antisense strand to SEQ ID NO: 1045116
uucauccaaaucuaccagu

SEQ ID NO: 1045118 - RNA, 19 nt, Artificial Sequence
  Description of Artificial Sequence: Synthetic oligonucleotide
  Sense strand starting at position 2222 of SEQ ID NO: 914988
cugguagauuuggaugaaa

SEQ ID NO: 1045119 - RNA, 19 nt, Artificial Sequence
  Description of Artificial Sequence: Synthetic oligonucleotide
  Antisense strand to SEQ ID NO: 1045118
uuucauccaaaucuaccag

SEQ ID NO: 1045120 - RNA, 19 nt, Artificial Sequence
  Description of Artificial Sequence: Synthetic oligonucleotide
  Sense strand starting at position 2283 of SEQ ID NO: 914988
acacguauaacuggaugaa

SEQ ID NO: 1045121 - RNA, 19 nt, Artificial Sequence
  Description of Artificial Sequence: Synthetic oligonucleotide
  Antisense strand to SEQ ID NO: 1045120
uucauccaguuauacgugu

SEQ ID NO: 1045122 - RNA, 19 nt, Artificial Sequence
  Description of Artificial Sequence: Synthetic oligonucleotide
  Sense strand starting at position 2286 of SEQ ID NO: 914988
cguauaacuggaugaagaa

SEQ ID NO: 1045123 - RNA, 19 nt, Artificial Sequence
  Description of Artificial Sequence: Synthetic oligonucleotide
  Antisense strand to SEQ ID NO: 1045122
uucuucauccaguuauacg

SEQ ID NO: 1045124 - RNA, 19 nt, Artificial Sequence
  Description of Artificial Sequence: Synthetic oligonucleotide
  Sense strand starting at position 2339 of SEQ ID NO: 914988
uguaucuguguugagaaga

SEQ ID NO: 1045125 - RNA, 19 nt, Artificial Sequence
  Description of Artificial Sequence: Synthetic oligonucleotide
  Antisense strand to SEQ ID NO: 1045124
ucuucucaacacagauaca

SEQ ID NO: 1045126 - RNA, 19 nt, Artificial Sequence
  Description of Artificial Sequence: Synthetic oligonucleotide
  Sense strand starting at position 2350 of SEQ ID NO: 914988
ugagaagaauucuugaugu

SEQ ID NO: 1045127 - RNA, 19 nt, Artificial Sequence
  Description of Artificial Sequence: Synthetic oligonucleotide
  Antisense strand to SEQ ID NO: 1045126
acaucaagaauucuucuca

SEQ ID NO: 1045128 - RNA, 19 nt, Artificial Sequence
  Description of Artificial Sequence: Synthetic oligonucleotide
  Sense strand starting at position 2398 of SEQ ID NO: 914988
gugccuuugaaaugaagac

SEQ ID NO: 1045129 - RNA, 19 nt, Artificial Sequence
  Description of Artificial Sequence: Synthetic oligonucleotide
  Antisense strand to SEQ ID NO: 1045128
gucuucauuucaaaggcac

SEQ ID NO: 1045130 - RNA, 19 nt, Artificial Sequence
  Description of Artificial Sequence: Synthetic oligonucleotide
  Sense strand starting at position 2430 of SEQ ID NO: 914988
gcugaacaccuagaagcau

SEQ ID NO: 1045131 - RNA, 19 nt, Artificial Sequence
  Description of Artificial Sequence: Synthetic oligonucleotide
  Antisense strand to SEQ ID NO: 1045130
augcuucuagguguucagc

SEQ ID NO: 1045132 - RNA, 19 nt, Artificial Sequence
  Description of Artificial Sequence: Synthetic oligonucleotide
  Sense strand starting at position 2486 of SEQ ID NO: 914988
cugaauuacucagcaauag

SEQ ID NO: 1045133 - RNA, 19 nt, Artificial Sequence
  Description of Artificial Sequence: Synthetic oligonucleotide
  Antisense strand to SEQ ID NO: 1045132
cuauugcugaguaauucag

SEQ ID NO: 1045134 - RNA, 19 nt, Artificial Sequence
  Description of Artificial Sequence: Synthetic oligonucleotide
  Sense strand starting at position 2524 of SEQ ID NO: 914988
gaagaugaggucugagugu

SEQ ID NO: 1045135 - RNA, 19 nt, Artificial Sequence
  Description of Artificial Sequence: Synthetic oligonucleotide
  Antisense strand to SEQ ID NO: 1045134
acacucagaccucaucuuc

SEQ ID NO: 1045136 - RNA, 19 nt, Artificial Sequence
  Description of Artificial Sequence: Synthetic oligonucleotide
  Sense strand starting at position 2530 of SEQ ID NO: 914988
gaggucugaguguaacuga

SEQ ID NO: 1045137 - RNA, 19 nt, Artificial Sequence
  Description of Artificial Sequence: Synthetic oligonucleotide
  Antisense strand to SEQ ID NO: 1045136
ucaguuacacucagaccuc

SEQ ID NO: 1045138 - RNA, 19 nt, Artificial Sequence
  Description of Artificial Sequence: Synthetic oligonucleotide
  Sense strand starting at position 2541 of SEQ ID NO: 914988
guaacugacggagguaauu

SEQ ID NO: 1045139 - RNA, 19 nt, Artificial Sequence
  Description of Artificial Sequence: Synthetic oligonucleotide
  Antisense strand to SEQ ID NO: 1045138
aauuaccuccgucaguuac

SEQ ID NO: 1045140 - RNA, 19 nt, Artificial Sequence
  Description of Artificial Sequence: Synthetic oligonucleotide
  Sense strand starting at position 2552 of SEQ ID NO: 914988
agguaauugaaguguggaa

SEQ ID NO: 1045141 - RNA, 19 nt, Artificial Sequence
  Description of Artificial Sequence: Synthetic oligonucleotide
  Antisense strand to SEQ ID NO: 1045140
uuccacacuucaauuaccu

SEQ ID NO: 1045142 - RNA, 19 nt, Artificial Sequence
  Description of Artificial Sequence: Synthetic oligonucleotide
  Sense strand starting at position 2554 of SEQ ID NO: 914988
guaauugaaguguggaaau

SEQ ID NO: 1045143 - RNA, 19 nt, Artificial Sequence
  Description of Artificial Sequence: Synthetic oligonucleotide
  Antisense strand to SEQ ID NO: 1045142
auuuccacacuucaauuac

SEQ ID NO: 1045144 - RNA, 19 nt, Artificial Sequence
  Description of Artificial Sequence: Synthetic oligonucleotide
  Sense strand starting at position 2639 of SEQ ID NO: 914988
aggagaucuuugguagcau

SEQ ID NO: 1045145 - RNA, 19 nt, Artificial Sequence
  Description of Artificial Sequence: Synthetic oligonucleotide
  Antisense strand to SEQ ID NO: 1045144
augcuaccaaagaucuccu

SEQ ID NO: 1045146 - RNA, 19 nt, Artificial Sequence
  Description of Artificial Sequence: Synthetic oligonucleotide
  Sense strand starting at position 2650 of SEQ ID NO: 914988
gguagcauuucuuuguuga

SEQ ID NO: 1045147 - RNA, 19 nt, Artificial Sequence
  Description of Artificial Sequence: Synthetic oligonucleotide
  Antisense strand to SEQ ID NO: 1045146
ucaacaaagaaaugcuacc

SEQ ID NO: 1045148 - RNA, 19 nt, Artificial Sequence
  Description of Artificial Sequence: Synthetic oligonucleotide
  Sense strand starting at position 2651 of SEQ ID NO: 914988
guagcauuucuuuguugau

SEQ ID NO: 1045149 - RNA, 19 nt, Artificial Sequence
  Description of Artificial Sequence: Synthetic oligonucleotide
  Antisense strand to SEQ ID NO: 1045148
aucaacaaagaaaugcuac

SEQ ID NO: 1045150 - RNA, 19 nt, Artificial Sequence
  Description of Artificial Sequence: Synthetic oligonucleotide
  Sense strand starting at position 2652 of SEQ ID NO: 914988
uagcauuucuuuguugaug

SEQ ID NO: 1045151 - RNA, 19 nt, Artificial Sequence
  Description of Artificial Sequence: Synthetic oligonucleotide
  Antisense strand to SEQ ID NO: 1045150
caucaacaaagaaaugcua

SEQ ID NO: 1045152 - RNA, 19 nt, Artificial Sequence
  Description of Artificial Sequence: Synthetic oligonucleotide
  Sense strand starting at position 2773 of SEQ ID NO: 914988
uuaggucuaaucugggaga

SEQ ID NO: 1045153 - RNA, 19 nt, Artificial Sequence
  Description of Artificial Sequence: Synthetic oligonucleotide
  Antisense strand to SEQ ID NO: 1045152
ucucccagauuagaccuaa

SEQ ID NO: 1045154 - RNA, 19 nt, Artificial Sequence
  Description of Artificial Sequence: Synthetic oligonucleotide
  Sense strand starting at position 2804 of SEQ ID NO: 914988
gauugagaguuuguaaggu

SEQ ID NO: 1045155 - RNA, 19 nt, Artificial Sequence
  Description of Artificial Sequence: Synthetic oligonucleotide
  Antisense strand to SEQ ID NO: 1045154
accuuacaaacucucaauc

SEQ ID NO: 1045156 - RNA, 19 nt, Artificial Sequence
  Description of Artificial Sequence: Synthetic oligonucleotide
  Sense strand starting at position 2853 of SEQ ID NO: 914988
ggagguaagaauugguauu

SEQ ID NO: 1045157 - RNA, 19 nt, Artificial Sequence
  Description of Artificial Sequence: Synthetic oligonucleotide
  Antisense strand to SEQ ID NO: 1045156
aauaccaauucuuaccucc

SEQ ID NO: 1045158 - RNA, 19 nt, Artificial Sequence
  Description of Artificial Sequence: Synthetic oligonucleotide
  Sense strand starting at position 2855 of SEQ ID NO: 914988
agguaagaauugguauuau

SEQ ID NO: 1045159 - RNA, 19 nt, Artificial Sequence
  Description of Artificial Sequence: Synthetic oligonucleotide
  Antisense strand to SEQ ID NO: 1045158
auaauaccaauucuuaccu

SEQ ID NO: 1045160 - RNA, 19 nt, Artificial Sequence
  Description of Artificial Sequence: Synthetic oligonucleotide
  Sense strand starting at position 2864 of SEQ ID NO: 914988
uugguauuauucccauaug

SEQ ID NO: 1045161 - RNA, 19 nt, Artificial Sequence
  Description of Artificial Sequence: Synthetic oligonucleotide
  Antisense strand to SEQ ID NO: 1045160
cauaugggaauaauaccaa

SEQ ID NO: 1045162 - RNA, 19 nt, Artificial Sequence
  Description of Artificial Sequence: Synthetic oligonucleotide
  Sense strand starting at position 2867 of SEQ ID NO: 914988
guauuauucccauauggca

SEQ ID NO: 1045163 - RNA, 19 nt, Artificial Sequence
  Description of Artificial Sequence: Synthetic oligonucleotide
  Antisense strand to SEQ ID NO: 1045162
ugccauaugggaauaauac

SEQ ID NO: 1045164 - RNA, 19 nt, Artificial Sequence
  Description of Artificial Sequence: Synthetic oligonucleotide
  Sense strand starting at position 3016 of SEQ ID NO: 914988
cccugugucgauuauauau

SEQ ID NO: 1045165 - RNA, 19 nt, Artificial Sequence
  Description of Artificial Sequence: Synthetic oligonucleotide
  Antisense strand to SEQ ID NO: 1045164
auauauaaucgacacaggg

SEQ ID NO: 1045166 - RNA, 19 nt, Artificial Sequence
  Description of Artificial Sequence: Synthetic oligonucleotide
  Sense strand starting at position 3029 of SEQ ID NO: 914988
auauauguuacagggagua

SEQ ID NO: 1045167 - RNA, 19 nt, Artificial Sequence
  Description of Artificial Sequence: Synthetic oligonucleotide
  Antisense strand to SEQ ID NO: 1045166
uacucccuguaacauauau

SEQ ID NO: 1045168 - RNA, 19 nt, Artificial Sequence
  Description of Artificial Sequence: Synthetic oligonucleotide
  Sense strand starting at position 3534 of SEQ ID NO: 914988
ccuguaguaucaccaacau

SEQ ID NO: 1045169 - RNA, 19 nt, Artificial Sequence
  Description of Artificial Sequence: Synthetic oligonucleotide
  Antisense strand to SEQ ID NO: 1045168
auguuggugauacuacagg

SEQ ID NO: 1045170 - RNA, 19 nt, Artificial Sequence
  Description of Artificial Sequence: Synthetic oligonucleotide
  Sense strand starting at position 3792 of SEQ ID NO: 914988
ggcugaagagacugcuaga

SEQ ID NO: 1045171 - RNA, 19 nt, Artificial Sequence
  Description of Artificial Sequence: Synthetic oligonucleotide
  Antisense strand to SEQ ID NO: 1045170
ucuagcagucucuucagcc

SEQ ID NO: 1045172 - RNA, 19 nt, Artificial Sequence
  Description of Artificial Sequence: Synthetic oligonucleotide
  Sense strand starting at position 3828 of SEQ ID NO: 914988
uuccucuucggucacauaa

SEQ ID NO: 1045173 - RNA, 19 nt, Artificial Sequence
  Description of Artificial Sequence: Synthetic oligonucleotide
  Antisense strand to SEQ ID NO: 1045172
uuaugugaccgaagaggaa

SEQ ID NO: 1045174 - RNA, 19 nt, Artificial Sequence
  Description of Artificial Sequence: Synthetic oligonucleotide
  Sense strand starting at position 3895 of SEQ ID NO: 914988
cuugaugcuggaugacauu

SEQ ID NO: 1045175 - RNA, 19 nt, Artificial Sequence
  Description of Artificial Sequence: Synthetic oligonucleotide
  Antisense strand to SEQ ID NO: 1045174
aaugucauccagcaucaag

SEQ ID NO: 1045176 - RNA, 19 nt, Artificial Sequence
  Description of Artificial Sequence: Synthetic oligonucleotide
  Sense strand starting at position 3901 of SEQ ID NO: 914988
gcuggaugacauuguauga

SEQ ID NO: 1045177 - RNA, 19 nt, Artificial Sequence
  Description of Artificial Sequence: Synthetic oligonucleotide
  Antisense strand to SEQ ID NO: 1045176
ucauacaaugucauccagc

SEQ ID NO: 1045178 - RNA, 19 nt, Artificial Sequence
  Description of Artificial Sequence: Synthetic oligonucleotide
  Sense strand starting at position 3965 of SEQ ID NO: 914988
ccuugcucacaggaucaau

SEQ ID NO: 1045179 - RNA, 19 nt, Artificial Sequence
  Description of Artificial Sequence: Synthetic oligonucleotide
  Antisense strand to SEQ ID NO: 1045178
auugauccugugagcaagg

SEQ ID NO: 1045180 - RNA, 19 nt, Artificial Sequence
  Description of Artificial Sequence: Synthetic oligonucleotide
  Sense strand starting at position 72 of SEQ ID NO: 914989
acaggugcccaauaagagu

SEQ ID NO: 1045181 - RNA, 19 nt, Artificial Sequence
  Description of Artificial Sequence: Synthetic oligonucleotide
  Antisense strand to SEQ ID NO: 1045180
acucuuauugggcaccugu

SEQ ID NO: 1045182 - RNA, 19 nt, Artificial Sequence
  Description of Artificial Sequence: Synthetic oligonucleotide
  Sense strand starting at position 78 of SEQ ID NO: 914989
gcccaauaagaguauucca

SEQ ID NO: 1045183 - RNA, 19 nt, Artificial Sequence
  Description of Artificial Sequence: Synthetic oligonucleotide
  Antisense strand to SEQ ID NO: 1045182
uggaauacucuuauugggc

SEQ ID NO: 1045184 - RNA, 19 nt, Artificial Sequence
  Description of Artificial Sequence: Synthetic oligonucleotide
  Sense strand starting at position 83 of SEQ ID NO: 914989
auaagaguauuccagauca

SEQ ID NO: 1045185 - RNA, 19 nt, Artificial Sequence
  Description of Artificial Sequence: Synthetic oligonucleotide
  Antisense strand to SEQ ID NO: 1045184
ugaucuggaauacucuuau

SEQ ID NO: 1045186 - RNA, 19 nt, Artificial Sequence
  Description of Artificial Sequence: Synthetic oligonucleotide
  Sense strand starting at position 91 of SEQ ID NO: 914989
auuccagaucaaugaaugu

SEQ ID NO: 1045187 - RNA, 19 nt, Artificial Sequence
  Description of Artificial Sequence: Synthetic oligonucleotide
  Antisense strand to SEQ ID NO: 1045186
acauucauugaucuggaau

SEQ ID NO: 1045188 - RNA, 19 nt, Artificial Sequence
  Description of Artificial Sequence: Synthetic oligonucleotide
  Sense strand starting at position 235 of SEQ ID NO: 914989
ugcacaugccaggauacuu

SEQ ID NO: 1045189 - RNA, 19 nt, Artificial Sequence
  Description of Artificial Sequence: Synthetic oligonucleotide
  Antisense strand to SEQ ID NO: 1045188
aaguauccuggcaugugca

SEQ ID NO: 1045190 - RNA, 19 nt, Artificial Sequence
  Description of Artificial Sequence: Synthetic oligonucleotide
  Sense strand starting at position 341 of SEQ ID NO: 914989
augccucauccugagcuuu

SEQ ID NO: 1045191 - RNA, 19 nt, Artificial Sequence
  Description of Artificial Sequence: Synthetic oligonucleotide
  Antisense strand to SEQ ID NO: 1045190
aaagcucaggaugaggcau

SEQ ID NO: 1045192 - RNA, 19 nt, Artificial Sequence
  Description of Artificial Sequence: Synthetic oligonucleotide
  Sense strand starting at position 343 of SEQ ID NO: 914989
gccucauccugagcuuuga

SEQ ID NO: 1045193 - RNA, 19 nt, Artificial Sequence
  Description of Artificial Sequence: Synthetic oligonucleotide
  Antisense strand to SEQ ID NO: 1045192
ucaaagcucaggaugaggc

SEQ ID NO: 1045194 - RNA, 19 nt, Artificial Sequence
  Description of Artificial Sequence: Synthetic oligonucleotide
  Sense strand starting at position 352 of SEQ ID NO: 914989
ugagcuuugaugcgggcaa

SEQ ID NO: 1045195 - RNA, 19 nt, Artificial Sequence
  Description of Artificial Sequence: Synthetic oligonucleotide
  Antisense strand to SEQ ID NO: 1045194
uugcccgcaucaaagcuca

SEQ ID NO: 1045196 - RNA, 19 nt, Artificial Sequence
  Description of Artificial Sequence: Synthetic oligonucleotide
  Sense strand starting at position 406 of SEQ ID NO: 914989
accucuuucccugggagga

SEQ ID NO: 1045197 - RNA, 19 nt, Artificial Sequence
  Description of Artificial Sequence: Synthetic oligonucleotide
  Antisense strand to SEQ ID NO: 1045196
uccucccagggaaagaggu

SEQ ID NO: 1045198 - RNA, 19 nt, Artificial Sequence
  Description of Artificial Sequence: Synthetic oligonucleotide
  Sense strand starting at position 407 of SEQ ID NO: 914989
ccucuuucccugggaggaa

SEQ ID NO: 1045199 - RNA, 19 nt, Artificial Sequence
  Description of Artificial Sequence: Synthetic oligonucleotide
  Antisense strand to SEQ ID NO: 1045198
uuccucccagggaaagagg

SEQ ID NO: 1045200 - RNA, 19 nt, Artificial Sequence
  Description of Artificial Sequence: Synthetic oligonucleotide
  Sense strand starting at position 586 of SEQ ID NO: 914989
uccugucaggcuuaacaga

SEQ ID NO: 1045201 - RNA, 19 nt, Artificial Sequence
  Description of Artificial Sequence: Synthetic oligonucleotide
  Antisense strand to SEQ ID NO: 1045200
ucuguuaagccugacagga

SEQ ID NO: 1045202 - RNA, 19 nt, Artificial Sequence
  Description of Artificial Sequence: Synthetic oligonucleotide
  Sense strand starting at position 1086 of SEQ ID NO: 914989
cccucauucugcucuggaa

SEQ ID NO: 1045203 - RNA, 19 nt, Artificial Sequence
  Description of Artificial Sequence: Synthetic oligonucleotide
  Antisense strand to SEQ ID NO: 1045202
uuccagagcagaaugaggg

SEQ ID NO: 1045204 - RNA, 19 nt, Artificial Sequence
  Description of Artificial Sequence: Synthetic oligonucleotide
  Sense strand starting at position 1194 of SEQ ID NO: 914989
gaaaguggagcccaguaau

SEQ ID NO: 1045205 - RNA, 19 nt, Artificial Sequence
  Description of Artificial Sequence: Synthetic oligonucleotide
  Antisense strand to SEQ ID NO: 1045204
auuacugggcuccacuuuc

SEQ ID NO: 1045206 - RNA, 19 nt, Artificial Sequence
  Description of Artificial Sequence: Synthetic oligonucleotide
  Sense strand starting at position 1513 of SEQ ID NO: 914989
ucccaucuguacccagauu

SEQ ID NO: 1045207 - RNA, 19 nt, Artificial Sequence
  Description of Artificial Sequence: Synthetic oligonucleotide
  Antisense strand to SEQ ID NO: 1045206
aaucuggguacagauggga

SEQ ID NO: 1045208 - RNA, 19 nt, Artificial Sequence
  Description of Artificial Sequence: Synthetic oligonucleotide
  Sense strand starting at position 1552 of SEQ ID NO: 914989
agaagaucguacgcaucuu

SEQ ID NO: 1045209 - RNA, 19 nt, Artificial Sequence
  Description of Artificial Sequence: Synthetic oligonucleotide
  Antisense strand to SEQ ID NO: 1045208
aagaugcguacgaucuucu

SEQ ID NO: 1045210 - RNA, 19 nt, Artificial Sequence
  Description of Artificial Sequence: Synthetic oligonucleotide
  Sense strand starting at position 1572 of SEQ ID NO: 914989
ccacguuauccucauuaca

SEQ ID NO: 1045211 - RNA, 19 nt, Artificial Sequence
  Description of Artificial Sequence: Synthetic oligonucleotide
  Antisense strand to SEQ ID NO: 1045210
uguaaugaggauaacgugg

SEQ ID NO: 1045212 - RNA, 19 nt, Artificial Sequence
  Description of Artificial Sequence: Synthetic oligonucleotide
  Sense strand starting at position 1623 of SEQ ID NO: 914989
ggaagacacuuuguaacca

SEQ ID NO: 1045213 - RNA, 19 nt, Artificial Sequence
  Description of Artificial Sequence: Synthetic oligonucleotide
  Antisense strand to SEQ ID NO: 1045212
ugguuacaaagugucuucc

SEQ ID NO: 1045214 - RNA, 19 nt, Artificial Sequence
  Description of Artificial Sequence: Synthetic oligonucleotide
  Sense strand starting at position 1648 of SEQ ID NO: 914989
ggacauaaagcgugugaga

SEQ ID NO: 1045215 - RNA, 19 nt, Artificial Sequence
  Description of Artificial Sequence: Synthetic oligonucleotide
  Antisense strand to SEQ ID NO: 1045214
ucucacacgcuuuaugucc

SEQ ID NO: 1045216 - RNA, 19 nt, Artificial Sequence
  Description of Artificial Sequence: Synthetic oligonucleotide
  Sense strand starting at position 1650 of SEQ ID NO: 914989
acauaaagcgugugagaag

SEQ ID NO: 1045217 - RNA, 19 nt, Artificial Sequence
  Description of Artificial Sequence: Synthetic oligonucleotide
  Antisense strand to SEQ ID NO: 1045216
cuucucacacgcuuuaugu

SEQ ID NO: 1045218 - RNA, 19 nt, Artificial Sequence
  Description of Artificial Sequence: Synthetic oligonucleotide
  Sense strand starting at position 1985 of SEQ ID NO: 914989
ggucaaggguccucacguu

SEQ ID NO: 1045219 - RNA, 19 nt, Artificial Sequence
  Description of Artificial Sequence: Synthetic oligonucleotide
  Antisense strand to SEQ ID NO: 1045218
aacgugaggacccuugacc

SEQ ID NO: 1045220 - RNA, 19 nt, Artificial Sequence
  Description of Artificial Sequence: Synthetic oligonucleotide
  Sense strand starting at position 2047 of SEQ ID NO: 914989
cccuauugcucgccaacua

SEQ ID NO: 1045221 - RNA, 19 nt, Artificial Sequence
  Description of Artificial Sequence: Synthetic oligonucleotide
  Antisense strand to SEQ ID NO: 1045220
uaguuggcgagcaauaggg

SEQ ID NO: 1045222 - RNA, 19 nt, Artificial Sequence
  Description of Artificial Sequence: Synthetic oligonucleotide
  Sense strand starting at position 2224 of SEQ ID NO: 914989
uagcauuguggguauggua

SEQ ID NO: 1045223 - RNA, 19 nt, Artificial Sequence
  Description of Artificial Sequence: Synthetic oligonucleotide
  Antisense strand to SEQ ID NO: 1045222
uaccauacccacaaugcua

SEQ ID NO: 1045224 - RNA, 19 nt, Artificial Sequence
  Description of Artificial Sequence: Synthetic oligonucleotide
  Sense strand starting at position 2295 of SEQ ID NO: 914989
ugcugcacacggugauaau

SEQ ID NO: 1045225 - RNA, 19 nt, Artificial Sequence
  Description of Artificial Sequence: Synthetic oligonucleotide
  Antisense strand to SEQ ID NO: 1045224
auuaucaccgugugcagca

SEQ ID NO: 1045226 - RNA, 19 nt, Artificial Sequence
  Description of Artificial Sequence: Synthetic oligonucleotide
  Sense strand starting at position 2306 of SEQ ID NO: 914989
gugauaauccuaggguuug

SEQ ID NO: 1045227 - RNA, 19 nt, Artificial Sequence
  Description of Artificial Sequence: Synthetic oligonucleotide
  Antisense strand to SEQ ID NO: 1045226
caaacccuaggauuaucac

SEQ ID NO: 1045228 - RNA, 19 nt, Artificial Sequence
  Description of Artificial Sequence: Synthetic oligonucleotide
  Sense strand starting at position 2334 of SEQ ID NO: 914989
uggagcuccugauugguaa

SEQ ID NO: 1045229 - RNA, 19 nt, Artificial Sequence
  Description of Artificial Sequence: Synthetic oligonucleotide
  Antisense strand to SEQ ID NO: 1045228
uuaccaaucaggagcucca

SEQ ID NO: 1045230 - RNA, 19 nt, Artificial Sequence
  Description of Artificial Sequence: Synthetic oligonucleotide
  Sense strand starting at position 2335 of SEQ ID NO: 914989
ggagcuccugauugguaau

SEQ ID NO: 1045231 - RNA, 19 nt, Artificial Sequence
  Description of Artificial Sequence: Synthetic oligonucleotide
  Antisense strand to SEQ ID NO: 1045230
auuaccaaucaggagcucc

SEQ ID NO: 1045232 - RNA, 19 nt, Artificial Sequence
  Description of Artificial Sequence: Synthetic oligonucleotide
  Sense strand starting at position 2394 of SEQ ID NO: 914989
ggcaguacgguugagugua

SEQ ID NO: 1045233 - RNA, 19 nt, Artificial Sequence
  Description of Artificial Sequence: Synthetic oligonucleotide
  Antisense strand to SEQ ID NO: 1045232
uacacucaaccguacugcc

SEQ ID NO: 1045234 - RNA, 19 nt, Artificial Sequence
  Description of Artificial Sequence: Synthetic oligonucleotide
  Sense strand starting at position 2603 of SEQ ID NO: 914989
augugaacuuaaucaaguu

SEQ ID NO: 1045235 - RNA, 19 nt, Artificial Sequence
  Description of Artificial Sequence: Synthetic oligonucleotide
  Antisense strand to SEQ ID NO: 1045234
aacuugauuaaguucacau

SEQ ID NO: 1045236 - RNA, 19 nt, Artificial Sequence
  Description of Artificial Sequence: Synthetic oligonucleotide
  Sense strand starting at position 2653 of SEQ ID NO: 914989
gguauuguaauauguagca

SEQ ID NO: 1045237 - RNA, 19 nt, Artificial Sequence
  Description of Artificial Sequence: Synthetic oligonucleotide
  Antisense strand to SEQ ID NO: 1045236
ugcuacauauuacaauacc

SEQ ID NO: 1045238 - RNA, 19 nt, Artificial Sequence
  Description of Artificial Sequence: Synthetic oligonucleotide
  Sense strand starting at position 2680 of SEQ ID NO: 914989
uuaggauugcugugaggac

SEQ ID NO: 1045239 - RNA, 19 nt, Artificial Sequence
  Description of Artificial Sequence: Synthetic oligonucleotide
  Antisense strand to SEQ ID NO: 1045238
guccucacagcaauccuaa

SEQ ID NO: 1045240 - RNA, 19 nt, Artificial Sequence
  Description of Artificial Sequence: Synthetic oligonucleotide
  Sense strand starting at position 2694 of SEQ ID NO: 914989
aggacuaaguuagcaaagu

SEQ ID NO: 1045241 - RNA, 19 nt, Artificial Sequence
  Description of Artificial Sequence: Synthetic oligonucleotide
  Antisense strand to SEQ ID NO: 1045240
acuuugcuaacuuaguccu

SEQ ID NO: 1045242 - RNA, 19 nt, Artificial Sequence
  Description of Artificial Sequence: Synthetic oligonucleotide
  Sense strand starting at position 2735 of SEQ ID NO: 914989
uagucagcaugugcuauua

SEQ ID NO: 1045243 - RNA, 19 nt, Artificial Sequence
  Description of Artificial Sequence: Synthetic oligonucleotide
  Antisense strand to SEQ ID NO: 1045242
uaauagcacaugcugacua

SEQ ID NO: 1045244 - RNA, 19 nt, Artificial Sequence
  Description of Artificial Sequence: Synthetic oligonucleotide
  Sense strand starting at position 2747 of SEQ ID NO: 914989
gcuauuauuaaccguacga

SEQ ID NO: 1045245 - RNA, 19 nt, Artificial Sequence
  Description of Artificial Sequence: Synthetic oligonucleotide
  Antisense strand to SEQ ID NO: 1045244
ucguacgguuaauaauagc

SEQ ID NO: 1045246 - RNA, 19 nt, Artificial Sequence
  Description of Artificial Sequence: Synthetic oligonucleotide
  Sense strand starting at position 2749 of SEQ ID NO: 914989
uauuauuaaccguacgauu

SEQ ID NO: 1045247 - RNA, 19 nt, Artificial Sequence
  Description of Artificial Sequence: Synthetic oligonucleotide
  Antisense strand to SEQ ID NO: 1045246
aaucguacgguuaauaaua

SEQ ID NO: 1045248 - RNA, 19 nt, Artificial Sequence
  Description of Artificial Sequence: Synthetic oligonucleotide
  Sense strand starting at position 2751 of SEQ ID NO: 914989
uuauuaaccguacgauuaa

SEQ ID NO: 1045249 - RNA, 19 nt, Artificial Sequence
  Description of Artificial Sequence: Synthetic oligonucleotide
  Antisense strand to SEQ ID NO: 1045248
uuaaucguacgguuaauaa

SEQ ID NO: 1045250 - RNA, 19 nt, Artificial Sequence
  Description of Artificial Sequence: Synthetic oligonucleotide
  Sense strand starting at position 2784 of SEQ ID NO: 914989
uguugugaggcuuaacaga

SEQ ID NO: 1045251 - RNA, 19 nt, Artificial Sequence
  Description of Artificial Sequence: Synthetic oligonucleotide
  Antisense strand to SEQ ID NO: 1045250
ucuguuaagccucacaaca

SEQ ID NO: 1045252 - RNA, 19 nt, Artificial Sequence
  Description of Artificial Sequence: Synthetic oligonucleotide
  Sense strand starting at position 2812 of SEQ ID NO: 914989
uucgauauaucaucuguga

SEQ ID NO: 1045253 - RNA, 19 nt, Artificial Sequence
  Description of Artificial Sequence: Synthetic oligonucleotide
  Antisense strand to SEQ ID NO: 1045252
ucacagaugauauaucgaa

SEQ ID NO: 1045254 - RNA, 19 nt, Artificial Sequence
  Description of Artificial Sequence: Synthetic oligonucleotide
  Sense strand starting at position 2877 of SEQ ID NO: 914989
ccuggugaccuuugaauca

SEQ ID NO: 1045255 - RNA, 19 nt, Artificial Sequence
  Description of Artificial Sequence: Synthetic oligonucleotide
  Antisense strand to SEQ ID NO: 1045254
ugauucaaaggucaccagg

SEQ ID NO: 1045256 - RNA, 19 nt, Artificial Sequence
  Description of Artificial Sequence: Synthetic oligonucleotide
  Sense strand starting at position 2969 of SEQ ID NO: 914989
ucccuaguguguccggaau

SEQ ID NO: 1045257 - RNA, 19 nt, Artificial Sequence
  Description of Artificial Sequence: Synthetic oligonucleotide
  Antisense strand to SEQ ID NO: 1045256
auuccggacacacuaggga

SEQ ID NO: 1045258 - RNA, 19 nt, Artificial Sequence
  Description of Artificial Sequence: Synthetic oligonucleotide
  Sense strand starting at position 3538 of SEQ ID NO: 914989
ucuccaugucccuacuaga

SEQ ID NO: 1045259 - RNA, 19 nt, Artificial Sequence
  Description of Artificial Sequence: Synthetic oligonucleotide
  Antisense strand to SEQ ID NO: 1045258
ucuaguagggacauggaga

SEQ ID NO: 1045260 - RNA, 19 nt, Artificial Sequence
  Description of Artificial Sequence: Synthetic oligonucleotide
  Sense strand starting at position 66 of SEQ ID NO: 914990
caaguauggcuuuauaaug

SEQ ID NO: 1045261 - RNA, 19 nt, Artificial Sequence
  Description of Artificial Sequence: Synthetic oligonucleotide
  Antisense strand to SEQ ID NO: 1045260
cauuauaaagccauacuug

SEQ ID NO: 1045262 - RNA, 19 nt, Artificial Sequence
  Description of Artificial Sequence: Synthetic oligonucleotide
  Sense strand starting at position 72 of SEQ ID NO: 914990
uggcuuuauaauggagaca

SEQ ID NO: 1045263 - RNA, 19 nt, Artificial Sequence
  Description of Artificial Sequence: Synthetic oligonucleotide
  Antisense strand to SEQ ID NO: 1045262
ugucuccauuauaaagcca

SEQ ID NO: 1045264 - RNA, 19 nt, Artificial Sequence
  Description of Artificial Sequence: Synthetic oligonucleotide
  Sense strand starting at position 161 of SEQ ID NO: 914990
uucuauauguagcuacaga

SEQ ID NO: 1045265 - RNA, 19 nt, Artificial Sequence
  Description of Artificial Sequence: Synthetic oligonucleotide
  Antisense strand to SEQ ID NO: 1045264
ucuguagcuacauauagaa

SEQ ID NO: 1045266 - RNA, 19 nt, Artificial Sequence
  Description of Artificial Sequence: Synthetic oligonucleotide
  Sense strand starting at position 176 of SEQ ID NO: 914990
cagagaaucuuaguaaugc

SEQ ID NO: 1045267 - RNA, 19 nt, Artificial Sequence
  Description of Artificial Sequence: Synthetic oligonucleotide
  Antisense strand to SEQ ID NO: 1045266
gcauuacuaagauucucug

SEQ ID NO: 1045268 - RNA, 19 nt, Artificial Sequence
  Description of Artificial Sequence: Synthetic oligonucleotide
  Sense strand starting at position 381 of SEQ ID NO: 914990
guuagaugacugcauauau

SEQ ID NO: 1045269 - RNA, 19 nt, Artificial Sequence
  Description of Artificial Sequence: Synthetic oligonucleotide
  Antisense strand to SEQ ID NO: 1045268
auauaugcagucaucuaac

SEQ ID NO: 1045270 - RNA, 19 nt, Artificial Sequence
  Description of Artificial Sequence: Synthetic oligonucleotide
  Sense strand starting at position 400 of SEQ ID NO: 914990
guaaacuuauuuggaaaga

SEQ ID NO: 1045271 - RNA, 19 nt, Artificial Sequence
  Description of Artificial Sequence: Synthetic oligonucleotide
  Antisense strand to SEQ ID NO: 1045270
ucuuuccaaauaaguuuac

SEQ ID NO: 1045272 - RNA, 19 nt, Artificial Sequence
  Description of Artificial Sequence: Synthetic oligonucleotide
  Sense strand starting at position 746 of SEQ ID NO: 914990
ggagcuaucucauuagacg

SEQ ID NO: 1045273 - RNA, 19 nt, Artificial Sequence
  Description of Artificial Sequence: Synthetic oligonucleotide
  Antisense strand to SEQ ID NO: 1045272
cgucuaaugagauagcucc

SEQ ID NO: 1045274 - RNA, 19 nt, Artificial Sequence
  Description of Artificial Sequence: Synthetic oligonucleotide
  Sense strand starting at position 807 of SEQ ID NO: 914990
uugauuuauuucuagugcu

SEQ ID NO: 1045275 - RNA, 19 nt, Artificial Sequence
  Description of Artificial Sequence: Synthetic oligonucleotide
  Antisense strand to SEQ ID NO: 1045274
agcacuagaaauaaaucaa

SEQ ID NO: 1045276 - RNA, 19 nt, Artificial Sequence
  Description of Artificial Sequence: Synthetic oligonucleotide
  Sense strand starting at position 819 of SEQ ID NO: 914990
uagugcucagaauauuagu

SEQ ID NO: 1045277 - RNA, 19 nt, Artificial Sequence
  Description of Artificial Sequence: Synthetic oligonucleotide
  Antisense strand to SEQ ID NO: 1045276
acuaauauucugagcacua

SEQ ID NO: 1045278 - RNA, 19 nt, Artificial Sequence
  Description of Artificial Sequence: Synthetic oligonucleotide
  Sense strand starting at position 825 of SEQ ID NO: 914990
ucagaauauuaguuggcaa

SEQ ID NO: 1045279 - RNA, 19 nt, Artificial Sequence
  Description of Artificial Sequence: Synthetic oligonucleotide
  Antisense strand to SEQ ID NO: 1045278
uugccaacuaauauucuga

SEQ ID NO: 1045280 - RNA, 19 nt, Artificial Sequence
  Description of Artificial Sequence: Synthetic oligonucleotide
  Sense strand starting at position 1455 of SEQ ID NO: 914990
ggagucuugagguguggga

SEQ ID NO: 1045281 - RNA, 19 nt, Artificial Sequence
  Description of Artificial Sequence: Synthetic oligonucleotide
  Antisense strand to SEQ ID NO: 1045280
ucccacaccucaagacucc

SEQ ID NO: 1045282 - RNA, 19 nt, Artificial Sequence
  Description of Artificial Sequence: Synthetic oligonucleotide
  Sense strand starting at position 1599 of SEQ ID NO: 914990
ugcgauagcguaguuccua

SEQ ID NO: 1045283 - RNA, 19 nt, Artificial Sequence
  Description of Artificial Sequence: Synthetic oligonucleotide
  Antisense strand to SEQ ID NO: 1045282
uaggaacuacgcuaucgca

SEQ ID NO: 1045284 - RNA, 19 nt, Artificial Sequence
  Description of Artificial Sequence: Synthetic oligonucleotide
  Sense strand starting at position 1874 of SEQ ID NO: 914990
cuguaaucggcucaggaca

SEQ ID NO: 1045285 - RNA, 19 nt, Artificial Sequence
  Description of Artificial Sequence: Synthetic oligonucleotide
  Antisense strand to SEQ ID NO: 1045284
uguccugagccgauuacag

SEQ ID NO: 1045286 - RNA, 19 nt, Artificial Sequence
  Description of Artificial Sequence: Synthetic oligonucleotide
  Sense strand starting at position 1993 of SEQ ID NO: 914990
gguugaguuccugcgguca

SEQ ID NO: 1045287 - RNA, 19 nt, Artificial Sequence
  Description of Artificial Sequence: Synthetic oligonucleotide
  Antisense strand to SEQ ID NO: 1045286
ugaccgcaggaacucaacc

SEQ ID NO: 1045288 - RNA, 19 nt, Artificial Sequence
  Description of Artificial Sequence: Synthetic oligonucleotide
  Sense strand starting at position 2242 of SEQ ID NO: 914990
uuaggagaauaccagauuu

SEQ ID NO: 1045289 - RNA, 19 nt, Artificial Sequence
  Description of Artificial Sequence: Synthetic oligonucleotide
  Antisense strand to SEQ ID NO: 1045288
aaaucugguauucuccuaa

SEQ ID NO: 1045290 - RNA, 19 nt, Artificial Sequence
  Description of Artificial Sequence: Synthetic oligonucleotide
  Sense strand starting at position 2259 of SEQ ID NO: 914990
uuagcaaugguuuaacaug

SEQ ID NO: 1045291 - RNA, 19 nt, Artificial Sequence
  Description of Artificial Sequence: Synthetic oligonucleotide
  Antisense strand to SEQ ID NO: 1045290
cauguuaaaccauugcuaa

SEQ ID NO: 1045292 - RNA, 19 nt, Artificial Sequence
  Description of Artificial Sequence: Synthetic oligonucleotide
  Sense strand starting at position 2294 of SEQ ID NO: 914990
ugugucauugaguaccuca

SEQ ID NO: 1045293 - RNA, 19 nt, Artificial Sequence
  Description of Artificial Sequence: Synthetic oligonucleotide
  Antisense strand to SEQ ID NO: 1045292
ugagguacucaaugacaca

SEQ ID NO: 1045294 - RNA, 19 nt, Artificial Sequence
  Description of Artificial Sequence: Synthetic oligonucleotide
  Sense strand starting at position 2299 of SEQ ID NO: 914990
cauugaguaccucauucgu

SEQ ID NO: 1045295 - RNA, 19 nt, Artificial Sequence
  Description of Artificial Sequence: Synthetic oligonucleotide
  Antisense strand to SEQ ID NO: 1045294
acgaaugagguacucaaug

SEQ ID NO: 1045296 - RNA, 19 nt, Artificial Sequence
  Description of Artificial Sequence: Synthetic oligonucleotide
  Sense strand starting at position 2314 of SEQ ID NO: 914990
ucguuaguccugccaacga

SEQ ID NO: 1045297 - RNA, 19 nt, Artificial Sequence
  Description of Artificial Sequence: Synthetic oligonucleotide
  Antisense strand to SEQ ID NO: 1045296
ucguuggcaggacuaacga

SEQ ID NO: 1045298 - RNA, 19 nt, Artificial Sequence
  Description of Artificial Sequence: Synthetic oligonucleotide
  Sense strand starting at position 2324 of SEQ ID NO: 914990
ugccaacgaaucugugaga

SEQ ID NO: 1045299 - RNA, 19 nt, Artificial Sequence
  Description of Artificial Sequence: Synthetic oligonucleotide
  Antisense strand to SEQ ID NO: 1045298
ucucacagauucguuggca

SEQ ID NO: 1045300 - RNA, 19 nt, Artificial Sequence
  Description of Artificial Sequence: Synthetic oligonucleotide
  Sense strand starting at position 2325 of SEQ ID NO: 914990
gccaacgaaucugugagau

SEQ ID NO: 1045301 - RNA, 19 nt, Artificial Sequence
  Description of Artificial Sequence: Synthetic oligonucleotide
  Antisense strand to SEQ ID NO: 1045300
aucucacagauucguuggc

SEQ ID NO: 1045302 - RNA, 19 nt, Artificial Sequence
  Description of Artificial Sequence: Synthetic oligonucleotide
  Sense strand starting at position 2338 of SEQ ID NO: 914990
ugagauaagucauuauacu

SEQ ID NO: 1045303 - RNA, 19 nt, Artificial Sequence
  Description of Artificial Sequence: Synthetic oligonucleotide
  Antisense strand to SEQ ID NO: 1045302
aguauaaugacuuaucuca

SEQ ID NO: 1045304 - RNA, 19 nt, Artificial Sequence
  Description of Artificial Sequence: Synthetic oligonucleotide
  Sense strand starting at position 2368 of SEQ ID NO: 914990
uuccauccugagggugaaa

SEQ ID NO: 1045305 - RNA, 19 nt, Artificial Sequence
  Description of Artificial Sequence: Synthetic oligonucleotide
  Antisense strand to SEQ ID NO: 1045304
uuucacccucaggauggaa

SEQ ID NO: 1045306 - RNA, 19 nt, Artificial Sequence
  Description of Artificial Sequence: Synthetic oligonucleotide
  Sense strand starting at position 2370 of SEQ ID NO: 914990
ccauccugagggugaaaua

SEQ ID NO: 1045307 - RNA, 19 nt, Artificial Sequence
  Description of Artificial Sequence: Synthetic oligonucleotide
  Antisense strand to SEQ ID NO: 1045306
uauuucacccucaggaugg

SEQ ID NO: 1045308 - RNA, 19 nt, Artificial Sequence
  Description of Artificial Sequence: Synthetic oligonucleotide
  Sense strand starting at position 2392 of SEQ ID NO: 914990
uaacuuguucugggucaua

SEQ ID NO: 1045309 - RNA, 19 nt, Artificial Sequence
  Description of Artificial Sequence: Synthetic oligonucleotide
  Antisense strand to SEQ ID NO: 1045308
uaugacccagaacaaguua

SEQ ID NO: 1045310 - RNA, 19 nt, Artificial Sequence
  Description of Artificial Sequence: Synthetic oligonucleotide
  Sense strand starting at position 2395 of SEQ ID NO: 914990
cuuguucugggucauacaa

SEQ ID NO: 1045311 - RNA, 19 nt, Artificial Sequence
  Description of Artificial Sequence: Synthetic oligonucleotide
  Antisense strand to SEQ ID NO: 1045310
uuguaugacccagaacaag

SEQ ID NO: 1045312 - RNA, 19 nt, Artificial Sequence
  Description of Artificial Sequence: Synthetic oligonucleotide
  Sense strand starting at position 2427 of SEQ ID NO: 914990
ccaucagaauuugagcaca

SEQ ID NO: 1045313 - RNA, 19 nt, Artificial Sequence
  Description of Artificial Sequence: Synthetic oligonucleotide
  Antisense strand to SEQ ID NO: 1045312
ugugcucaaauucugaugg

SEQ ID NO: 1045314 - RNA, 19 nt, Artificial Sequence
  Description of Artificial Sequence: Synthetic oligonucleotide
  Sense strand starting at position 2442 of SEQ ID NO: 914990
cacagucugugauuccaga

SEQ ID NO: 1045315 - RNA, 19 nt, Artificial Sequence
  Description of Artificial Sequence: Synthetic oligonucleotide
  Antisense strand to SEQ ID NO: 1045314
ucuggaaucacagacugug

SEQ ID NO: 1045316 - RNA, 19 nt, Artificial Sequence
  Description of Artificial Sequence: Synthetic oligonucleotide
  Sense strand starting at position 2473 of SEQ ID NO: 914990
ugaacaauauuguugauga

SEQ ID NO: 1045317 - RNA, 19 nt, Artificial Sequence
  Description of Artificial Sequence: Synthetic oligonucleotide
  Antisense strand to SEQ ID NO: 1045316
ucaucaacaauauuguuca

SEQ ID NO: 1045318 - RNA, 19 nt, Artificial Sequence
  Description of Artificial Sequence: Synthetic oligonucleotide
  Sense strand starting at position 2495 of SEQ ID NO: 914990
gagugaaauucuguaagau

SEQ ID NO: 1045319 - RNA, 19 nt, Artificial Sequence
  Description of Artificial Sequence: Synthetic oligonucleotide
  Antisense strand to SEQ ID NO: 1045318
aucuuacagaauuucacuc

SEQ ID NO: 1045320 - RNA, 19 nt, Artificial Sequence
  Description of Artificial Sequence: Synthetic oligonucleotide
  Sense strand starting at position 3440 of SEQ ID NO: 914990
ccuauaugaugagaauuua

SEQ ID NO: 1045321 - RNA, 19 nt, Artificial Sequence
  Description of Artificial Sequence: Synthetic oligonucleotide
  Antisense strand to SEQ ID NO: 1045320
uaaauucucaucauauagg

SEQ ID NO: 1045322 - RNA, 19 nt, Artificial Sequence
  Description of Artificial Sequence: Synthetic oligonucleotide
  Sense strand starting at position 3470 of SEQ ID NO: 914990
gcaugauucccuuagguag

SEQ ID NO: 1045323 - RNA, 19 nt, Artificial Sequence
  Description of Artificial Sequence: Synthetic oligonucleotide
  Antisense strand to SEQ ID NO: 1045322
cuaccuaagggaaucaugc

SEQ ID NO: 1045324 - RNA, 19 nt, Artificial Sequence
  Description of Artificial Sequence: Synthetic oligonucleotide
  Sense strand starting at position 3513 of SEQ ID NO: 914990
gagcuuaguccucaaguug

SEQ ID NO: 1045325 - RNA, 19 nt, Artificial Sequence
  Description of Artificial Sequence: Synthetic oligonucleotide
  Antisense strand to SEQ ID NO: 1045324
caacuugaggacuaagcuc

SEQ ID NO: 1045326 - RNA, 19 nt, Artificial Sequence
  Description of Artificial Sequence: Synthetic oligonucleotide
  Sense strand starting at position 3519 of SEQ ID NO: 914990
aguccucaaguugaauauu

SEQ ID NO: 1045327 - RNA, 19 nt, Artificial Sequence
  Description of Artificial Sequence: Synthetic oligonucleotide
  Antisense strand to SEQ ID NO: 1045326
aauauucaacuugaggacu

SEQ ID NO: 1045328 - RNA, 19 nt, Artificial Sequence
  Description of Artificial Sequence: Synthetic oligonucleotide
  Sense strand starting at position 3586 of SEQ ID NO: 914990
uugauuggucucuaagucu

SEQ ID NO: 1045329 - RNA, 19 nt, Artificial Sequence
  Description of Artificial Sequence: Synthetic oligonucleotide
  Antisense strand to SEQ ID NO: 1045328
agacuuagagaccaaucaa

SEQ ID NO: 1045330 - RNA, 19 nt, Artificial Sequence
  Description of Artificial Sequence: Synthetic oligonucleotide
  Sense strand starting at position 3826 of SEQ ID NO: 914990
acauaaguugauuguaauc

SEQ ID NO: 1045331 - RNA, 19 nt, Artificial Sequence
  Description of Artificial Sequence: Synthetic oligonucleotide
  Antisense strand to SEQ ID NO: 1045330
gauuacaaucaacuuaugu

SEQ ID NO: 1045332 - RNA, 19 nt, Artificial Sequence
  Description of Artificial Sequence: Synthetic oligonucleotide
  Sense strand starting at position 3831 of SEQ ID NO: 914990
aguugauuguaaucgaaac

SEQ ID NO: 1045333 - RNA, 19 nt, Artificial Sequence
  Description of Artificial Sequence: Synthetic oligonucleotide
  Antisense strand to SEQ ID NO: 1045332
guuucgauuacaaucaacu

SEQ ID NO: 1045334 - RNA, 19 nt, Artificial Sequence
  Description of Artificial Sequence: Synthetic oligonucleotide
  Sense strand starting at position 3832 of SEQ ID NO: 914990
guugauuguaaucgaaaca

SEQ ID NO: 1045335 - RNA, 19 nt, Artificial Sequence
  Description of Artificial Sequence: Synthetic oligonucleotide
  Antisense strand to SEQ ID NO: 1045334
uguuucgauuacaaucaac

SEQ ID NO: 1045336 - RNA, 19 nt, Artificial Sequence
  Description of Artificial Sequence: Synthetic oligonucleotide
  Sense strand starting at position 3852 of SEQ ID NO: 914990
cacgguauggcagagaaau

SEQ ID NO: 1045337 - RNA, 19 nt, Artificial Sequence
  Description of Artificial Sequence: Synthetic oligonucleotide
  Antisense strand to SEQ ID NO: 1045336
auuucucugccauaccgug

SEQ ID NO: 1045338 - RNA, 19 nt, Artificial Sequence
  Description of Artificial Sequence: Synthetic oligonucleotide
  Sense strand starting at position 3854 of SEQ ID NO: 914990
cgguauggcagagaaauag

SEQ ID NO: 1045339 - RNA, 19 nt, Artificial Sequence
  Description of Artificial Sequence: Synthetic oligonucleotide
  Antisense strand to SEQ ID NO: 1045338
cuauuucucugccauaccg

SEQ ID NO: 1045340 - RNA, 19 nt, Artificial Sequence
  Description of Artificial Sequence: Synthetic oligonucleotide
  Sense strand starting at position 139 of SEQ ID NO: 914991
uaagguaaugugugauccu

SEQ ID NO: 1045341 - RNA, 19 nt, Artificial Sequence
  Description of Artificial Sequence: Synthetic oligonucleotide
  Antisense strand to SEQ ID NO: 1045340
aggaucacacauuaccuua

SEQ ID NO: 1045342 - RNA, 19 nt, Artificial Sequence
  Description of Artificial Sequence: Synthetic oligonucleotide
  Sense strand starting at position 192 of SEQ ID NO: 914991
gaagguucgcaggguacua

SEQ ID NO: 1045343 - RNA, 19 nt, Artificial Sequence
  Description of Artificial Sequence: Synthetic oligonucleotide
  Antisense strand to SEQ ID NO: 1045342
uaguacccugcgaaccuuc

SEQ ID NO: 1045344 - RNA, 19 nt, Artificial Sequence
  Description of Artificial Sequence: Synthetic oligonucleotide
  Sense strand starting at position 202 of SEQ ID NO: 914991
aggguacuagauuguuuaa

SEQ ID NO: 1045345 - RNA, 19 nt, Artificial Sequence
  Description of Artificial Sequence: Synthetic oligonucleotide
  Antisense strand to SEQ ID NO: 1045344
uuaaacaaucuaguacccu

SEQ ID NO: 1045346 - RNA, 19 nt, Artificial Sequence
  Description of Artificial Sequence: Synthetic oligonucleotide
  Sense strand starting at position 205 of SEQ ID NO: 914991
guacuagauuguuuaagga

SEQ ID NO: 1045347 - RNA, 19 nt, Artificial Sequence
  Description of Artificial Sequence: Synthetic oligonucleotide
  Antisense strand to SEQ ID NO: 1045346
uccuuaaacaaucuaguac

SEQ ID NO: 1045348 - RNA, 19 nt, Artificial Sequence
  Description of Artificial Sequence: Synthetic oligonucleotide
  Sense strand starting at position 333 of SEQ ID NO: 914991
cuggcaacauuuggaauua

SEQ ID NO: 1045349 - RNA, 19 nt, Artificial Sequence
  Description of Artificial Sequence: Synthetic oligonucleotide
  Antisense strand to SEQ ID NO: 1045348
uaauuccaaauguugccag

SEQ ID NO: 1045350 - RNA, 19 nt, Artificial Sequence
  Description of Artificial Sequence: Synthetic oligonucleotide
  Sense strand starting at position 334 of SEQ ID NO: 914991
uggcaacauuuggaauuau

SEQ ID NO: 1045351 - RNA, 19 nt, Artificial Sequence
  Description of Artificial Sequence: Synthetic oligonucleotide
  Antisense strand to SEQ ID NO: 1045350
auaauuccaaauguugcca

SEQ ID NO: 1045352 - RNA, 19 nt, Artificial Sequence
  Description of Artificial Sequence: Synthetic oligonucleotide
  Sense strand starting at position 345 of SEQ ID NO: 914991
ggaauuauaggaugcauuc

SEQ ID NO: 1045353 - RNA, 19 nt, Artificial Sequence
  Description of Artificial Sequence: Synthetic oligonucleotide
  Antisense strand to SEQ ID NO: 1045352
gaaugcauccuauaauucc

SEQ ID NO: 1045354 - RNA, 19 nt, Artificial Sequence
  Description of Artificial Sequence: Synthetic oligonucleotide
  Sense strand starting at position 352 of SEQ ID NO: 914991
uaggaugcauucccaugua

SEQ ID NO: 1045355 - RNA, 19 nt, Artificial Sequence
  Description of Artificial Sequence: Synthetic oligonucleotide
  Antisense strand to SEQ ID NO: 1045354
uacaugggaaugcauccua

SEQ ID NO: 1045356 - RNA, 19 nt, Artificial Sequence
  Description of Artificial Sequence: Synthetic oligonucleotide
  Sense strand starting at position 463 of SEQ ID NO: 914991
gacugagcauuuggauaau

SEQ ID NO: 1045357 - RNA, 19 nt, Artificial Sequence
  Description of Artificial Sequence: Synthetic oligonucleotide
  Antisense strand to SEQ ID NO: 1045356
auuauccaaaugcucaguc

SEQ ID NO: 1045358 - RNA, 19 nt, Artificial Sequence
  Description of Artificial Sequence: Synthetic oligonucleotide
  Sense strand starting at position 549 of SEQ ID NO: 914991
uuuaucuauugugcaaaga

SEQ ID NO: 1045359 - RNA, 19 nt, Artificial Sequence
  Description of Artificial Sequence: Synthetic oligonucleotide
  Antisense strand to SEQ ID NO: 1045358
ucuuugcacaauagauaaa

SEQ ID NO: 1045360 - RNA, 19 nt, Artificial Sequence
  Description of Artificial Sequence: Synthetic oligonucleotide
  Sense strand starting at position 550 of SEQ ID NO: 914991
uuaucuauugugcaaagag

SEQ ID NO: 1045361 - RNA, 19 nt, Artificial Sequence
  Description of Artificial Sequence: Synthetic oligonucleotide
  Antisense strand to SEQ ID NO: 1045360
cucuuugcacaauagauaa

SEQ ID NO: 1045362 - RNA, 19 nt, Artificial Sequence
  Description of Artificial Sequence: Synthetic oligonucleotide
  Sense strand starting at position 630 of SEQ ID NO: 914991
agcuccaguucuucucaga

SEQ ID NO: 1045363 - RNA, 19 nt, Artificial Sequence
  Description of Artificial Sequence: Synthetic oligonucleotide
  Antisense strand to SEQ ID NO: 1045362
ucugagaagaacuggagcu

SEQ ID NO: 1045364 - RNA, 19 nt, Artificial Sequence
  Description of Artificial Sequence: Synthetic oligonucleotide
  Sense strand starting at position 661 of SEQ ID NO: 914991
uccaaaggccugugaucau

SEQ ID NO: 1045365 - RNA, 19 nt, Artificial Sequence
  Description of Artificial Sequence: Synthetic oligonucleotide
  Antisense strand to SEQ ID NO: 1045364
augaucacaggccuuugga

SEQ ID NO: 1045366 - RNA, 19 nt, Artificial Sequence
  Description of Artificial Sequence: Synthetic oligonucleotide
  Sense strand starting at position 671 of SEQ ID NO: 914991
ugugaucauggguacugau

SEQ ID NO: 1045367 - RNA, 19 nt, Artificial Sequence
  Description of Artificial Sequence: Synthetic oligonucleotide
  Antisense strand to SEQ ID NO: 1045366
aucaguacccaugaucaca

SEQ ID NO: 1045368 - RNA, 19 nt, Artificial Sequence
  Description of Artificial Sequence: Synthetic oligonucleotide
  Sense strand starting at position 713 of SEQ ID NO: 914991
ccaguuaaaucccuggugu

SEQ ID NO: 1045369 - RNA, 19 nt, Artificial Sequence
  Description of Artificial Sequence: Synthetic oligonucleotide
  Antisense strand to SEQ ID NO: 1045368
acaccagggauuuaacugg

SEQ ID NO: 1045370 - RNA, 19 nt, Artificial Sequence
  Description of Artificial Sequence: Synthetic oligonucleotide
  Sense strand starting at position 825 of SEQ ID NO: 914991
gcugucucugcgaggcaga

SEQ ID NO: 1045371 - RNA, 19 nt, Artificial Sequence
  Description of Artificial Sequence: Synthetic oligonucleotide
  Antisense strand to SEQ ID NO: 1045370
ucugccucgcagagacagc

SEQ ID NO: 1045372 - RNA, 19 nt, Artificial Sequence
  Description of Artificial Sequence: Synthetic oligonucleotide
  Sense strand starting at position 854 of SEQ ID NO: 914991
ggaggcaauucccuuuaua

SEQ ID NO: 1045373 - RNA, 19 nt, Artificial Sequence
  Description of Artificial Sequence: Synthetic oligonucleotide
  Antisense strand to SEQ ID NO: 1045372
uauaaagggaauugccucc

SEQ ID NO: 1045374 - RNA, 19 nt, Artificial Sequence
  Description of Artificial Sequence: Synthetic oligonucleotide
  Sense strand starting at position 884 of SEQ ID NO: 914991
ccaucuuggcccgauccaa

SEQ ID NO: 1045375 - RNA, 19 nt, Artificial Sequence
  Description of Artificial Sequence: Synthetic oligonucleotide
  Antisense strand to SEQ ID NO: 1045374
uuggaucgggccaagaugg

SEQ ID NO: 1045376 - RNA, 19 nt, Artificial Sequence
  Description of Artificial Sequence: Synthetic oligonucleotide
  Sense strand starting at position 1214 of SEQ ID NO: 914991
guuucuaauuuaguuagca

SEQ ID NO: 1045377 - RNA, 19 nt, Artificial Sequence
  Description of Artificial Sequence: Synthetic oligonucleotide
  Antisense strand to SEQ ID NO: 1045376
ugcuaacuaaauuagaaac

SEQ ID NO: 1045378 - RNA, 19 nt, Artificial Sequence
  Description of Artificial Sequence: Synthetic oligonucleotide
  Sense strand starting at position 1240 of SEQ ID NO: 914991
cccauaagugaguacccaa

SEQ ID NO: 1045379 - RNA, 19 nt, Artificial Sequence
  Description of Artificial Sequence: Synthetic oligonucleotide
  Antisense strand to SEQ ID NO: 1045378
uuggguacucacuuauggg

SEQ ID NO: 1045380 - RNA, 19 nt, Artificial Sequence
  Description of Artificial Sequence: Synthetic oligonucleotide
  Sense strand starting at position 1243 of SEQ ID NO: 914991
auaagugaguacccaaguu

SEQ ID NO: 1045381 - RNA, 19 nt, Artificial Sequence
  Description of Artificial Sequence: Synthetic oligonucleotide
  Antisense strand to SEQ ID NO: 1045380
aacuuggguacucacuuau

SEQ ID NO: 1045382 - RNA, 19 nt, Artificial Sequence
  Description of Artificial Sequence: Synthetic oligonucleotide
  Sense strand starting at position 1258 of SEQ ID NO: 914991
aguuuaauucugcauaguu

SEQ ID NO: 1045383 - RNA, 19 nt, Artificial Sequence
  Description of Artificial Sequence: Synthetic oligonucleotide
  Antisense strand to SEQ ID NO: 1045382
aacuaugcagaauuaaacu

SEQ ID NO: 1045384 - RNA, 19 nt, Artificial Sequence
  Description of Artificial Sequence: Synthetic oligonucleotide
  Sense strand starting at position 1343 of SEQ ID NO: 914991
cacugugagccagaaguca

SEQ ID NO: 1045385 - RNA, 19 nt, Artificial Sequence
  Description of Artificial Sequence: Synthetic oligonucleotide
  Antisense strand to SEQ ID NO: 1045384
ugacuucuggcucacagug

SEQ ID NO: 1045386 - RNA, 19 nt, Artificial Sequence
  Description of Artificial Sequence: Synthetic oligonucleotide
  Sense strand starting at position 1620 of SEQ ID NO: 914991
gggaaugguuuaccagguu

SEQ ID NO: 1045387 - RNA, 19 nt, Artificial Sequence
  Description of Artificial Sequence: Synthetic oligonucleotide
  Antisense strand to SEQ ID NO: 1045386
aaccugguaaaccauuccc

SEQ ID NO: 1045388 - RNA, 19 nt, Artificial Sequence
  Description of Artificial Sequence: Synthetic oligonucleotide
  Sense strand starting at position 1797 of SEQ ID NO: 914991
gagcaaguuccgcaacaga

SEQ ID NO: 1045389 - RNA, 19 nt, Artificial Sequence
  Description of Artificial Sequence: Synthetic oligonucleotide
  Antisense strand to SEQ ID NO: 1045388
ucuguugcggaacuugcuc

SEQ ID NO: 1045390 - RNA, 19 nt, Artificial Sequence
  Description of Artificial Sequence: Synthetic oligonucleotide
  Sense strand starting at position 2336 of SEQ ID NO: 914991
gguugacaccuguacgcau

SEQ ID NO: 1045391 - RNA, 19 nt, Artificial Sequence
  Description of Artificial Sequence: Synthetic oligonucleotide
  Antisense strand to SEQ ID NO: 1045390
augcguacaggugucaacc

SEQ ID NO: 1045392 - RNA, 19 nt, Artificial Sequence
  Description of Artificial Sequence: Synthetic oligonucleotide
  Sense strand starting at position 2608 of SEQ ID NO: 914991
gcaaauuggcaaugacugu

SEQ ID NO: 1045393 - RNA, 19 nt, Artificial Sequence
  Description of Artificial Sequence: Synthetic oligonucleotide
  Antisense strand to SEQ ID NO: 1045392
acagucauugccaauuugc

SEQ ID NO: 1045394 - RNA, 19 nt, Artificial Sequence
  Description of Artificial Sequence: Synthetic oligonucleotide
  Sense strand starting at position 2612 of SEQ ID NO: 914991
auuggcaaugacugucaaa

SEQ ID NO: 1045395 - RNA, 19 nt, Artificial Sequence
  Description of Artificial Sequence: Synthetic oligonucleotide
  Antisense strand to SEQ ID NO: 1045394
uuugacagucauugccaau

SEQ ID NO: 1045396 - RNA, 19 nt, Artificial Sequence
  Description of Artificial Sequence: Synthetic oligonucleotide
  Sense strand starting at position 2635 of SEQ ID NO: 914991
uuccuuguuauggguugaa

SEQ ID NO: 1045397 - RNA, 19 nt, Artificial Sequence
  Description of Artificial Sequence: Synthetic oligonucleotide
  Antisense strand to SEQ ID NO: 1045396
uucaacccauaacaaggaa

SEQ ID NO: 1045398 - RNA, 19 nt, Artificial Sequence
  Description of Artificial Sequence: Synthetic oligonucleotide
  Sense strand starting at position 2758 of SEQ ID NO: 914991
gucauuuguuaagaugaag

SEQ ID NO: 1045399 - RNA, 19 nt, Artificial Sequence
  Description of Artificial Sequence: Synthetic oligonucleotide
  Antisense strand to SEQ ID NO: 1045398
cuucaucuuaacaaaugac

SEQ ID NO: 1045400 - RNA, 19 nt, Artificial Sequence
  Description of Artificial Sequence: Synthetic oligonucleotide
  Sense strand starting at position 3198 of SEQ ID NO: 914991
gggugaugcugaccaggua

SEQ ID NO: 1045401 - RNA, 19 nt, Artificial Sequence
  Description of Artificial Sequence: Synthetic oligonucleotide
  Antisense strand to SEQ ID NO: 1045400
uaccuggucagcaucaccc

SEQ ID NO: 1045402 - RNA, 19 nt, Artificial Sequence
  Description of Artificial Sequence: Synthetic oligonucleotide
  Sense strand starting at position 3242 of SEQ ID NO: 914991
ccaugugaccuugaaagca

SEQ ID NO: 1045403 - RNA, 19 nt, Artificial Sequence
  Description of Artificial Sequence: Synthetic oligonucleotide
  Antisense strand to SEQ ID NO: 1045402
ugcuuucaaggucacaugg

SEQ ID NO: 1045404 - RNA, 19 nt, Artificial Sequence
  Description of Artificial Sequence: Synthetic oligonucleotide
  Sense strand starting at position 3280 of SEQ ID NO: 914991
guugcaaaucaaugaauga

SEQ ID NO: 1045405 - RNA, 19 nt, Artificial Sequence
  Description of Artificial Sequence: Synthetic oligonucleotide
  Antisense strand to SEQ ID NO: 1045404
ucauucauugauuugcaac

SEQ ID NO: 1045406 - RNA, 19 nt, Artificial Sequence
  Description of Artificial Sequence: Synthetic oligonucleotide
  Sense strand starting at position 3303 of SEQ ID NO: 914991
caaggauugcuggagcaca

SEQ ID NO: 1045407 - RNA, 19 nt, Artificial Sequence
  Description of Artificial Sequence: Synthetic oligonucleotide
  Antisense strand to SEQ ID NO: 1045406
ugugcuccagcaauccuug

SEQ ID NO: 1045408 - RNA, 19 nt, Artificial Sequence
  Description of Artificial Sequence: Synthetic oligonucleotide
  Sense strand starting at position 3453 of SEQ ID NO: 914991
aguuccacaguuugugaua

SEQ ID NO: 1045409 - RNA, 19 nt, Artificial Sequence
  Description of Artificial Sequence: Synthetic oligonucleotide
  Antisense strand to SEQ ID NO: 1045408
uaucacaaacuguggaacu

SEQ ID NO: 1045410 - RNA, 19 nt, Artificial Sequence
  Description of Artificial Sequence: Synthetic oligonucleotide
  Sense strand starting at position 3517 of SEQ ID NO: 914991
guacauauucaguagacgu

SEQ ID NO: 1045411 - RNA, 19 nt, Artificial Sequence
  Description of Artificial Sequence: Synthetic oligonucleotide
  Antisense strand to SEQ ID NO: 1045410
acgucuacugaauauguac

SEQ ID NO: 1045412 - RNA, 19 nt, Artificial Sequence
  Description of Artificial Sequence: Synthetic oligonucleotide
  Sense strand starting at position 3532 of SEQ ID NO: 914991
acguauagauuugucacuu

SEQ ID NO: 1045413 - RNA, 19 nt, Artificial Sequence
  Description of Artificial Sequence: Synthetic oligonucleotide
  Antisense strand to SEQ ID NO: 1045412
aagugacaaaucuauacgu

SEQ ID NO: 1045414 - RNA, 19 nt, Artificial Sequence
  Description of Artificial Sequence: Synthetic oligonucleotide
  Sense strand starting at position 3533 of SEQ ID NO: 914991
cguauagauuugucacuuu

SEQ ID NO: 1045415 - RNA, 19 nt, Artificial Sequence
  Description of Artificial Sequence: Synthetic oligonucleotide
  Antisense strand to SEQ ID NO: 1045414
aaagugacaaaucuauacg

SEQ ID NO: 1045416 - RNA, 19 nt, Artificial Sequence
  Description of Artificial Sequence: Synthetic oligonucleotide
  Sense strand starting at position 3554 of SEQ ID NO: 914991
cagcuuauaggugaccaaa

SEQ ID NO: 1045417 - RNA, 19 nt, Artificial Sequence
  Description of Artificial Sequence: Synthetic oligonucleotide
  Antisense strand to SEQ ID NO: 1045416
uuuggucaccuauaagcug

SEQ ID NO: 1045418 - RNA, 19 nt, Artificial Sequence
  Description of Artificial Sequence: Synthetic oligonucleotide
  Sense strand starting at position 3556 of SEQ ID NO: 914991
gcuuauaggugaccaaaga

SEQ ID NO: 1045419 - RNA, 19 nt, Artificial Sequence
  Description of Artificial Sequence: Synthetic oligonucleotide
  Antisense strand to SEQ ID NO: 1045418
ucuuuggucaccuauaagc

SEQ ID NO: 1045420 - RNA, 19 nt, Artificial Sequence
  Description of Artificial Sequence: Synthetic oligonucleotide
  Sense strand starting at position 169 of SEQ ID NO: 914992
aggcuucuguaccuaauuu

SEQ ID NO: 1045421 - RNA, 19 nt, Artificial Sequence
  Description of Artificial Sequence: Synthetic oligonucleotide
  Antisense strand to SEQ ID NO: 1045420
aaauuagguacagaagccu

SEQ ID NO: 1045422 - RNA, 19 nt, Artificial Sequence
  Description of Artificial Sequence: Synthetic oligonucleotide
  Sense strand starting at position 250 of SEQ ID NO: 914992
uccuuuagguaguccuaga

SEQ ID NO: 1045423 - RNA, 19 nt, Artificial Sequence
  Description of Artificial Sequence: Synthetic oligonucleotide
  Antisense strand to SEQ ID NO: 1045422
ucuaggacuaccuaaagga

SEQ ID NO: 1045424 - RNA, 19 nt, Artificial Sequence
  Description of Artificial Sequence: Synthetic oligonucleotide
  Sense strand starting at position 255 of SEQ ID NO: 914992
uagguaguccuagagacug

SEQ ID NO: 1045425 - RNA, 19 nt, Artificial Sequence
  Description of Artificial Sequence: Synthetic oligonucleotide
  Antisense strand to SEQ ID NO: 1045424
cagucucuaggacuaccua

SEQ ID NO: 1045426 - RNA, 19 nt, Artificial Sequence
  Description of Artificial Sequence: Synthetic oligonucleotide
  Sense strand starting at position 387 of SEQ ID NO: 914992
gugagucuguacuugaaca

SEQ ID NO: 1045427 - RNA, 19 nt, Artificial Sequence
  Description of Artificial Sequence: Synthetic oligonucleotide
  Antisense strand to SEQ ID NO: 1045426
uguucaaguacagacucac

SEQ ID NO: 1045428 - RNA, 19 nt, Artificial Sequence
  Description of Artificial Sequence: Synthetic oligonucleotide
  Sense strand starting at position 389 of SEQ ID NO: 914992
gagucuguacuugaacaua

SEQ ID NO: 1045429 - RNA, 19 nt, Artificial Sequence
  Description of Artificial Sequence: Synthetic oligonucleotide
  Antisense strand to SEQ ID NO: 1045428
uauguucaaguacagacuc

SEQ ID NO: 1045430 - RNA, 19 nt, Artificial Sequence
  Description of Artificial Sequence: Synthetic oligonucleotide
  Sense strand starting at position 418 of SEQ ID NO: 914992
ggugguuucauguagguag

SEQ ID NO: 1045431 - RNA, 19 nt, Artificial Sequence
  Description of Artificial Sequence: Synthetic oligonucleotide
  Antisense strand to SEQ ID NO: 1045430
cuaccuacaugaaaccacc

SEQ ID NO: 1045432 - RNA, 19 nt, Artificial Sequence
  Description of Artificial Sequence: Synthetic oligonucleotide
  Sense strand starting at position 421 of SEQ ID NO: 914992
gguuucauguagguaggua

SEQ ID NO: 1045433 - RNA, 19 nt, Artificial Sequence
  Description of Artificial Sequence: Synthetic oligonucleotide
  Antisense strand to SEQ ID NO: 1045432
uaccuaccuacaugaaacc

SEQ ID NO: 1045434 - RNA, 19 nt, Artificial Sequence
  Description of Artificial Sequence: Synthetic oligonucleotide
  Sense strand starting at position 425 of SEQ ID NO: 914992
ucauguagguagguagaau

SEQ ID NO: 1045435 - RNA, 19 nt, Artificial Sequence
  Description of Artificial Sequence: Synthetic oligonucleotide
  Antisense strand to SEQ ID NO: 1045434
auucuaccuaccuacauga

SEQ ID NO: 1045436 - RNA, 19 nt, Artificial Sequence
  Description of Artificial Sequence: Synthetic oligonucleotide
  Sense strand starting at position 620 of SEQ ID NO: 914992
uggcccaacucugugauua

SEQ ID NO: 1045437 - RNA, 19 nt, Artificial Sequence
  Description of Artificial Sequence: Synthetic oligonucleotide
  Antisense strand to SEQ ID NO: 1045436
uaaucacagaguugggcca

SEQ ID NO: 1045438 - RNA, 19 nt, Artificial Sequence
  Description of Artificial Sequence: Synthetic oligonucleotide
  Sense strand starting at position 621 of SEQ ID NO: 914992
ggcccaacucugugauuau

SEQ ID NO: 1045439 - RNA, 19 nt, Artificial Sequence
  Description of Artificial Sequence: Synthetic oligonucleotide
  Antisense strand to SEQ ID NO: 1045438
auaaucacagaguugggcc

SEQ ID NO: 1045440 - RNA, 19 nt, Artificial Sequence
  Description of Artificial Sequence: Synthetic oligonucleotide
  Sense strand starting at position 767 of SEQ ID NO: 914992
accagagugguacaaucuu

SEQ ID NO: 1045441 - RNA, 19 nt, Artificial Sequence
  Description of Artificial Sequence: Synthetic oligonucleotide
  Antisense strand to SEQ ID NO: 1045440
aagauuguaccacucuggu

SEQ ID NO: 1045442 - RNA, 19 nt, Artificial Sequence
  Description of Artificial Sequence: Synthetic oligonucleotide
  Sense strand starting at position 773 of SEQ ID NO: 914992
gugguacaaucuuuacaau

SEQ ID NO: 1045443 - RNA, 19 nt, Artificial Sequence
  Description of Artificial Sequence: Synthetic oligonucleotide
  Antisense strand to SEQ ID NO: 1045442
auuguaaagauuguaccac

SEQ ID NO: 1045444 - RNA, 19 nt, Artificial Sequence
  Description of Artificial Sequence: Synthetic oligonucleotide
  Sense strand starting at position 804 of SEQ ID NO: 914992
auugacacaucauuguuau

SEQ ID NO: 1045445 - RNA, 19 nt, Artificial Sequence
  Description of Artificial Sequence: Synthetic oligonucleotide
  Antisense strand to SEQ ID NO: 1045444
auaacaaugaugugucaau

SEQ ID NO: 1045446 - RNA, 19 nt, Artificial Sequence
  Description of Artificial Sequence: Synthetic oligonucleotide
  Sense strand starting at position 805 of SEQ ID NO: 914992
uugacacaucauuguuauc

SEQ ID NO: 1045447 - RNA, 19 nt, Artificial Sequence
  Description of Artificial Sequence: Synthetic oligonucleotide
  Antisense strand to SEQ ID NO: 1045446
gauaacaaugaugugucaa

SEQ ID NO: 1045448 - RNA, 19 nt, Artificial Sequence
  Description of Artificial Sequence: Synthetic oligonucleotide
  Sense strand starting at position 821 of SEQ ID NO: 914992
auccaaaguccauagucua

SEQ ID NO: 1045449 - RNA, 19 nt, Artificial Sequence
  Description of Artificial Sequence: Synthetic oligonucleotide
  Antisense strand to SEQ ID NO: 1045448
uagacuauggacuuuggau

SEQ ID NO: 1045450 - RNA, 19 nt, Artificial Sequence
  Description of Artificial Sequence: Synthetic oligonucleotide
  Sense strand starting at position 1007 of SEQ ID NO: 914992
uuuacugucuccuuagauu

SEQ ID NO: 1045451 - RNA, 19 nt, Artificial Sequence
  Description of Artificial Sequence: Synthetic oligonucleotide
  Antisense strand to SEQ ID NO: 1045450
aaucuaaggagacaguaaa

SEQ ID NO: 1045452 - RNA, 19 nt, Artificial Sequence
  Description of Artificial Sequence: Synthetic oligonucleotide
  Sense strand starting at position 1038 of SEQ ID NO: 914992
aaugucauagugggaaaca

SEQ ID NO: 1045453 - RNA, 19 nt, Artificial Sequence
  Description of Artificial Sequence: Synthetic oligonucleotide
  Antisense strand to SEQ ID NO: 1045452
uguuucccacuaugacauu

SEQ ID NO: 1045454 - RNA, 19 nt, Artificial Sequence
  Description of Artificial Sequence: Synthetic oligonucleotide
  Sense strand starting at position 1094 of SEQ ID NO: 914992
uaguaacauguauguaagu

SEQ ID NO: 1045455 - RNA, 19 nt, Artificial Sequence
  Description of Artificial Sequence: Synthetic oligonucleotide
  Antisense strand to SEQ ID NO: 1045454
acuuacauacauguuacua

SEQ ID NO: 1045456 - RNA, 19 nt, Artificial Sequence
  Description of Artificial Sequence: Synthetic oligonucleotide
  Sense strand starting at position 1095 of SEQ ID NO: 914992
aguaacauguauguaaguu

SEQ ID NO: 1045457 - RNA, 19 nt, Artificial Sequence
  Description of Artificial Sequence: Synthetic oligonucleotide
  Antisense strand to SEQ ID NO: 1045456
aacuuacauacauguuacu

SEQ ID NO: 1045458 - RNA, 19 nt, Artificial Sequence
  Description of Artificial Sequence: Synthetic oligonucleotide
  Sense strand starting at position 1096 of SEQ ID NO: 914992
guaacauguauguaaguuu

SEQ ID NO: 1045459 - RNA, 19 nt, Artificial Sequence
  Description of Artificial Sequence: Synthetic oligonucleotide
  Antisense strand to SEQ ID NO: 1045458
aaacuuacauacauguuac

SEQ ID NO: 1045460 - RNA, 19 nt, Artificial Sequence
  Description of Artificial Sequence: Synthetic oligonucleotide
  Sense strand starting at position 1175 of SEQ ID NO: 914992
uguccuacaguuuauguaa

SEQ ID NO: 1045461 - RNA, 19 nt, Artificial Sequence
  Description of Artificial Sequence: Synthetic oligonucleotide
  Antisense strand to SEQ ID NO: 1045460
uuacauaaacuguaggaca

SEQ ID NO: 1045462 - RNA, 19 nt, Artificial Sequence
  Description of Artificial Sequence: Synthetic oligonucleotide
  Sense strand starting at position 1383 of SEQ ID NO: 914992
agcagagauuuauagaguu

SEQ ID NO: 1045463 - RNA, 19 nt, Artificial Sequence
  Description of Artificial Sequence: Synthetic oligonucleotide
  Antisense strand to SEQ ID NO: 1045462
aacucuauaaaucucugcu

SEQ ID NO: 1045464 - RNA, 19 nt, Artificial Sequence
  Description of Artificial Sequence: Synthetic oligonucleotide
  Sense strand starting at position 1480 of SEQ ID NO: 914992
cagauuaggcgaggauauc

SEQ ID NO: 1045465 - RNA, 19 nt, Artificial Sequence
  Description of Artificial Sequence: Synthetic oligonucleotide
  Antisense strand to SEQ ID NO: 1045464
gauauccucgccuaaucug

SEQ ID NO: 1045466 - RNA, 19 nt, Artificial Sequence
  Description of Artificial Sequence: Synthetic oligonucleotide
  Sense strand starting at position 1551 of SEQ ID NO: 914992
ggcuuuggagccgaaauga

SEQ ID NO: 1045467 - RNA, 19 nt, Artificial Sequence
  Description of Artificial Sequence: Synthetic oligonucleotide
  Antisense strand to SEQ ID NO: 1045466
ucauuucggcuccaaagcc

SEQ ID NO: 1045468 - RNA, 19 nt, Artificial Sequence
  Description of Artificial Sequence: Synthetic oligonucleotide
  Sense strand starting at position 2293 of SEQ ID NO: 914992
gcgggaauuucgucuccga

SEQ ID NO: 1045469 - RNA, 19 nt, Artificial Sequence
  Description of Artificial Sequence: Synthetic oligonucleotide
  Antisense strand to SEQ ID NO: 1045468
ucggagacgaaauucccgc

SEQ ID NO: 1045470 - RNA, 19 nt, Artificial Sequence
  Description of Artificial Sequence: Synthetic oligonucleotide
  Sense strand starting at position 2739 of SEQ ID NO: 914992
gggaguggugccugaagga

SEQ ID NO: 1045471 - RNA, 19 nt, Artificial Sequence
  Description of Artificial Sequence: Synthetic oligonucleotide
  Antisense strand to SEQ ID NO: 1045470
uccuucaggcaccacuccc

SEQ ID NO: 1045472 - RNA, 19 nt, Artificial Sequence
  Description of Artificial Sequence: Synthetic oligonucleotide
  Sense strand starting at position 2837 of SEQ ID NO: 914992
cuuguuuccgaaugggacu

SEQ ID NO: 1045473 - RNA, 19 nt, Artificial Sequence
  Description of Artificial Sequence: Synthetic oligonucleotide
  Antisense strand to SEQ ID NO: 1045472
agucccauucggaaacaag

SEQ ID NO: 1045474 - RNA, 19 nt, Artificial Sequence
  Description of Artificial Sequence: Synthetic oligonucleotide
  Sense strand starting at position 2838 of SEQ ID NO: 914992
uuguuuccgaaugggacua

SEQ ID NO: 1045475 - RNA, 19 nt, Artificial Sequence
  Description of Artificial Sequence: Synthetic oligonucleotide
  Antisense strand to SEQ ID NO: 1045474
uagucccauucggaaacaa

SEQ ID NO: 1045476 - RNA, 19 nt, Artificial Sequence
  Description of Artificial Sequence: Synthetic oligonucleotide
  Sense strand starting at position 2891 of SEQ ID NO: 914992
cguacuuuccaugcguuaa

SEQ ID NO: 1045477 - RNA, 19 nt, Artificial Sequence
  Description of Artificial Sequence: Synthetic oligonucleotide
  Antisense strand to SEQ ID NO: 1045476
uuaacgcauggaaaguacg

SEQ ID NO: 1045478 - RNA, 19 nt, Artificial Sequence
  Description of Artificial Sequence: Synthetic oligonucleotide
  Sense strand starting at position 3394 of SEQ ID NO: 914992
agccauauguggguaggau

SEQ ID NO: 1045479 - RNA, 19 nt, Artificial Sequence
  Description of Artificial Sequence: Synthetic oligonucleotide
  Antisense strand to SEQ ID NO: 1045478
auccuacccacauauggcu

SEQ ID NO: 1045480 - RNA, 19 nt, Artificial Sequence
  Description of Artificial Sequence: Synthetic oligonucleotide
  Sense strand starting at position 3395 of SEQ ID NO: 914992
gccauauguggguaggauu

SEQ ID NO: 1045481 - RNA, 19 nt, Artificial Sequence
  Description of Artificial Sequence: Synthetic oligonucleotide
  Antisense strand to SEQ ID NO: 1045480
aauccuacccacauauggc

SEQ ID NO: 1045482 - RNA, 19 nt, Artificial Sequence
  Description of Artificial Sequence: Synthetic oligonucleotide
  Sense strand starting at position 3407 of SEQ ID NO: 914992
uaggauuugucugagaugc

SEQ ID NO: 1045483 - RNA, 19 nt, Artificial Sequence
  Description of Artificial Sequence: Synthetic oligonucleotide
  Antisense strand to SEQ ID NO: 1045482
gcaucucagacaaauccua

SEQ ID NO: 1045484 - RNA, 19 nt, Artificial Sequence
  Description of Artificial Sequence: Synthetic oligonucleotide
  Sense strand starting at position 3458 of SEQ ID NO: 914992
uauguugaguuucuuagaa

SEQ ID NO: 1045485 - RNA, 19 nt, Artificial Sequence
  Description of Artificial Sequence: Synthetic oligonucleotide
  Antisense strand to SEQ ID NO: 1045484
uucuaagaaacucaacaua

SEQ ID NO: 1045486 - RNA, 19 nt, Artificial Sequence
  Description of Artificial Sequence: Synthetic oligonucleotide
  Sense strand starting at position 3489 of SEQ ID NO: 914992
cauuuauggcugugugacu

SEQ ID NO: 1045487 - RNA, 19 nt, Artificial Sequence
  Description of Artificial Sequence: Synthetic oligonucleotide
  Antisense strand to SEQ ID NO: 1045486
agucacacagccauaaaug

SEQ ID NO: 1045488 - RNA, 19 nt, Artificial Sequence
  Description of Artificial Sequence: Synthetic oligonucleotide
  Sense strand starting at position 3490 of SEQ ID NO: 914992
auuuauggcugugugacuu

SEQ ID NO: 1045489 - RNA, 19 nt, Artificial Sequence
  Description of Artificial Sequence: Synthetic oligonucleotide
  Antisense strand to SEQ ID NO: 1045488
aagucacacagccauaaau

SEQ ID NO: 1045490 - RNA, 19 nt, Artificial Sequence
  Description of Artificial Sequence: Synthetic oligonucleotide
  Sense strand starting at position 3570 of SEQ ID NO: 914992
acaggcuugcucugagaau

SEQ ID NO: 1045491 - RNA, 19 nt, Artificial Sequence
  Description of Artificial Sequence: Synthetic oligonucleotide
  Antisense strand to SEQ ID NO: 1045490
auucucagagcaagccugu

SEQ ID NO: 1045492 - RNA, 19 nt, Artificial Sequence
  Description of Artificial Sequence: Synthetic oligonucleotide
  Sense strand starting at position 3724 of SEQ ID NO: 914992
uucuguucuguguaugaag

SEQ ID NO: 1045493 - RNA, 19 nt, Artificial Sequence
  Description of Artificial Sequence: Synthetic oligonucleotide
  Antisense strand to SEQ ID NO: 1045492
cuucauacacagaacagaa

SEQ ID NO: 1045494 - RNA, 19 nt, Artificial Sequence
  Description of Artificial Sequence: Synthetic oligonucleotide
  Sense strand starting at position 3726 of SEQ ID NO: 914992
cuguucuguguaugaagga

SEQ ID NO: 1045495 - RNA, 19 nt, Artificial Sequence
  Description of Artificial Sequence: Synthetic oligonucleotide
  Antisense strand to SEQ ID NO: 1045494
uccuucauacacagaacag

SEQ ID NO: 1045496 - RNA, 19 nt, Artificial Sequence
  Description of Artificial Sequence: Synthetic oligonucleotide
  Sense strand starting at position 3777 of SEQ ID NO: 914992
ggcgaauagcuuugcauuu

SEQ ID NO: 1045497 - RNA, 19 nt, Artificial Sequence
  Description of Artificial Sequence: Synthetic oligonucleotide
  Antisense strand to SEQ ID NO: 1045496
aaaugcaaagcuauucgcc

SEQ ID NO: 1045498 - RNA, 19 nt, Artificial Sequence
  Description of Artificial Sequence: Synthetic oligonucleotide
  Sense strand starting at position 3865 of SEQ ID NO: 914992
cucuguuuaguccagguga

SEQ ID NO: 1045499 - RNA, 19 nt, Artificial Sequence
  Description of Artificial Sequence: Synthetic oligonucleotide
  Antisense strand to SEQ ID NO: 1045498
ucaccuggacuaaacagag

SEQ ID NO: 1045500 - RNA, 19 nt, Artificial Sequence
  Description of Artificial Sequence: Synthetic oligonucleotide
  Sense strand starting at position 273 of SEQ ID NO: 914993
augugugggcuugagauga

SEQ ID NO: 1045501 - RNA, 19 nt, Artificial Sequence
  Description of Artificial Sequence: Synthetic oligonucleotide
  Antisense strand to SEQ ID NO: 1045500
ucaucucaagcccacacau

SEQ ID NO: 1045502 - RNA, 19 nt, Artificial Sequence
  Description of Artificial Sequence: Synthetic oligonucleotide
  Sense strand starting at position 275 of SEQ ID NO: 914993
gugugggcuugagaugaga

SEQ ID NO: 1045503 - RNA, 19 nt, Artificial Sequence
  Description of Artificial Sequence: Synthetic oligonucleotide
  Antisense strand to SEQ ID NO: 1045502
ucucaucucaagcccacac

SEQ ID NO: 1045504 - RNA, 19 nt, Artificial Sequence
  Description of Artificial Sequence: Synthetic oligonucleotide
  Sense strand starting at position 525 of SEQ ID NO: 914993
aagcacuccgcaugggauu

SEQ ID NO: 1045505 - RNA, 19 nt, Artificial Sequence
  Description of Artificial Sequence: Synthetic oligonucleotide
  Antisense strand to SEQ ID NO: 1045504
aaucccaugcggagugcuu

SEQ ID NO: 1045506 - RNA, 19 nt, Artificial Sequence
  Description of Artificial Sequence: Synthetic oligonucleotide
  Sense strand starting at position 558 of SEQ ID NO: 914993
acgguaaccuaucucaagu

SEQ ID NO: 1045507 - RNA, 19 nt, Artificial Sequence
  Description of Artificial Sequence: Synthetic oligonucleotide
  Antisense strand to SEQ ID NO: 1045506
acuugagauagguuaccgu

SEQ ID NO: 1045508 - RNA, 19 nt, Artificial Sequence
  Description of Artificial Sequence: Synthetic oligonucleotide
  Sense strand starting at position 574 of SEQ ID NO: 914993
aguagaacucugcacuaac

SEQ ID NO: 1045509 - RNA, 19 nt, Artificial Sequence
  Description of Artificial Sequence: Synthetic oligonucleotide
  Antisense strand to SEQ ID NO: 1045508
guuagugcagaguucuacu

SEQ ID NO: 1045510 - RNA, 19 nt, Artificial Sequence
  Description of Artificial Sequence: Synthetic oligonucleotide
  Sense strand starting at position 919 of SEQ ID NO: 914993
guggaauucacgugaggcu

SEQ ID NO: 1045511 - RNA, 19 nt, Artificial Sequence
  Description of Artificial Sequence: Synthetic oligonucleotide
  Antisense strand to SEQ ID NO: 1045510
agccucacgugaauuccac

SEQ ID NO: 1045512 - RNA, 19 nt, Artificial Sequence
  Description of Artificial Sequence: Synthetic oligonucleotide
  Sense strand starting at position 1018 of SEQ ID NO: 914993
gucccaggugucugcugaa

SEQ ID NO: 1045513 - RNA, 19 nt, Artificial Sequence
  Description of Artificial Sequence: Synthetic oligonucleotide
  Antisense strand to SEQ ID NO: 1045512
uucagcagacaccugggac

SEQ ID NO: 1045514 - RNA, 19 nt, Artificial Sequence
  Description of Artificial Sequence: Synthetic oligonucleotide
  Sense strand starting at position 1021 of SEQ ID NO: 914993
ccaggugucugcugaagga

SEQ ID NO: 1045515 - RNA, 19 nt, Artificial Sequence
  Description of Artificial Sequence: Synthetic oligonucleotide
  Antisense strand to SEQ ID NO: 1045514
uccuucagcagacaccugg

SEQ ID NO: 1045516 - RNA, 19 nt, Artificial Sequence
  Description of Artificial Sequence: Synthetic oligonucleotide
  Sense strand starting at position 1128 of SEQ ID NO: 914993
gaccgucccucuccagaaa

SEQ ID NO: 1045517 - RNA, 19 nt, Artificial Sequence
  Description of Artificial Sequence: Synthetic oligonucleotide
  Antisense strand to SEQ ID NO: 1045516
uuucuggagagggacgguc

SEQ ID NO: 1045518 - RNA, 19 nt, Artificial Sequence
  Description of Artificial Sequence: Synthetic oligonucleotide
  Sense strand starting at position 1190 of SEQ ID NO: 914993
acugauuacgccugaguca

SEQ ID NO: 1045519 - RNA, 19 nt, Artificial Sequence
  Description of Artificial Sequence: Synthetic oligonucleotide
  Antisense strand to SEQ ID NO: 1045518
ugacucaggcguaaucagu

SEQ ID NO: 1045520 - RNA, 19 nt, Artificial Sequence
  Description of Artificial Sequence: Synthetic oligonucleotide
  Sense strand starting at position 1191 of SEQ ID NO: 914993
cugauuacgccugagucau

SEQ ID NO: 1045521 - RNA, 19 nt, Artificial Sequence
  Description of Artificial Sequence: Synthetic oligonucleotide
  Antisense strand to SEQ ID NO: 1045520
augacucaggcguaaucag

SEQ ID NO: 1045522 - RNA, 19 nt, Artificial Sequence
  Description of Artificial Sequence: Synthetic oligonucleotide
  Sense strand starting at position 1525 of SEQ ID NO: 914993
ucagaaacgucuccaaaca

SEQ ID NO: 1045523 - RNA, 19 nt, Artificial Sequence
  Description of Artificial Sequence: Synthetic oligonucleotide
  Antisense strand to SEQ ID NO: 1045522
uguuuggagacguuucuga

SEQ ID NO: 1045524 - RNA, 19 nt, Artificial Sequence
  Description of Artificial Sequence: Synthetic oligonucleotide
  Sense strand starting at position 1835 of SEQ ID NO: 914993
ccgucugcuugugacacua

SEQ ID NO: 1045525 - RNA, 19 nt, Artificial Sequence
  Description of Artificial Sequence: Synthetic oligonucleotide
  Antisense strand to SEQ ID NO: 1045524
uagugucacaagcagacgg

SEQ ID NO: 1045526 - RNA, 19 nt, Artificial Sequence
  Description of Artificial Sequence: Synthetic oligonucleotide
  Sense strand starting at position 3018 of SEQ ID NO: 914993
ggugucaugcuucagagca

SEQ ID NO: 1045527 - RNA, 19 nt, Artificial Sequence
  Description of Artificial Sequence: Synthetic oligonucleotide
  Antisense strand to SEQ ID NO: 1045526
ugcucugaagcaugacacc

SEQ ID NO: 1045528 - RNA, 19 nt, Artificial Sequence
  Description of Artificial Sequence: Synthetic oligonucleotide
  Sense strand starting at position 3189 of SEQ ID NO: 914993
ggaguuccuccugaugggu

SEQ ID NO: 1045529 - RNA, 19 nt, Artificial Sequence
  Description of Artificial Sequence: Synthetic oligonucleotide
  Antisense strand to SEQ ID NO: 1045528
acccaucaggaggaacucc

SEQ ID NO: 1045530 - RNA, 19 nt, Artificial Sequence
  Description of Artificial Sequence: Synthetic oligonucleotide
  Sense strand starting at position 3205 of SEQ ID NO: 914993
gguggguuugaguggaaau

SEQ ID NO: 1045531 - RNA, 19 nt, Artificial Sequence
  Description of Artificial Sequence: Synthetic oligonucleotide
  Antisense strand to SEQ ID NO: 1045530
auuuccacucaaacccacc

SEQ ID NO: 1045532 - RNA, 19 nt, Artificial Sequence
  Description of Artificial Sequence: Synthetic oligonucleotide
  Sense strand starting at position 3206 of SEQ ID NO: 914993
guggguuugaguggaaaug

SEQ ID NO: 1045533 - RNA, 19 nt, Artificial Sequence
  Description of Artificial Sequence: Synthetic oligonucleotide
  Antisense strand to SEQ ID NO: 1045532
cauuuccacucaaacccac

SEQ ID NO: 1045534 - RNA, 19 nt, Artificial Sequence
  Description of Artificial Sequence: Synthetic oligonucleotide
  Sense strand starting at position 3208 of SEQ ID NO: 914993
ggguuugaguggaaaugac

SEQ ID NO: 1045535 - RNA, 19 nt, Artificial Sequence
  Description of Artificial Sequence: Synthetic oligonucleotide
  Antisense strand to SEQ ID NO: 1045534
gucauuuccacucaaaccc

SEQ ID NO: 1045536 - RNA, 19 nt, Artificial Sequence
  Description of Artificial Sequence: Synthetic oligonucleotide
  Sense strand starting at position 3233 of SEQ ID NO: 914993
gggucuaucuagcaugaag

SEQ ID NO: 1045537 - RNA, 19 nt, Artificial Sequence
  Description of Artificial Sequence: Synthetic oligonucleotide
  Antisense strand to SEQ ID NO: 1045536
cuucaugcuagauagaccc

SEQ ID NO: 1045538 - RNA, 19 nt, Artificial Sequence
  Description of Artificial Sequence: Synthetic oligonucleotide
  Sense strand starting at position 3244 of SEQ ID NO: 914993
gcaugaaggcauugaagca

SEQ ID NO: 1045539 - RNA, 19 nt, Artificial Sequence
  Description of Artificial Sequence: Synthetic oligonucleotide
  Antisense strand to SEQ ID NO: 1045538
ugcuucaaugccuucaugc

SEQ ID NO: 1045540 - RNA, 19 nt, Artificial Sequence
  Description of Artificial Sequence: Synthetic oligonucleotide
  Sense strand starting at position 3544 of SEQ ID NO: 914993
ugugcagugugcuuagaga

SEQ ID NO: 1045541 - RNA, 19 nt, Artificial Sequence
  Description of Artificial Sequence: Synthetic oligonucleotide
  Antisense strand to SEQ ID NO: 1045540
ucucuaagcacacugcaca

SEQ ID NO: 1045542 - RNA, 19 nt, Artificial Sequence
  Description of Artificial Sequence: Synthetic oligonucleotide
  Sense strand starting at position 3559 of SEQ ID NO: 914993
gagauauguggcugcugga

SEQ ID NO: 1045543 - RNA, 19 nt, Artificial Sequence
  Description of Artificial Sequence: Synthetic oligonucleotide
  Antisense strand to SEQ ID NO: 1045542
uccagcagccacauaucuc

SEQ ID NO: 1045544 - RNA, 19 nt, Artificial Sequence
  Description of Artificial Sequence: Synthetic oligonucleotide
  Sense strand starting at position 3572 of SEQ ID NO: 914993
gcuggaaguuggguucaga

SEQ ID NO: 1045545 - RNA, 19 nt, Artificial Sequence
  Description of Artificial Sequence: Synthetic oligonucleotide
  Antisense strand to SEQ ID NO: 1045544
ucugaacccaacuuccagc

SEQ ID NO: 1045546 - RNA, 19 nt, Artificial Sequence
  Description of Artificial Sequence: Synthetic oligonucleotide
  Sense strand starting at position 3575 of SEQ ID NO: 914993
ggaaguuggguucagaguu

SEQ ID NO: 1045547 - RNA, 19 nt, Artificial Sequence
  Description of Artificial Sequence: Synthetic oligonucleotide
  Antisense strand to SEQ ID NO: 1045546
aacucugaacccaacuucc

SEQ ID NO: 1045548 - RNA, 19 nt, Artificial Sequence
  Description of Artificial Sequence: Synthetic oligonucleotide
  Sense strand starting at position 3648 of SEQ ID NO: 914993
gugggugcugcucagauca

SEQ ID NO: 1045549 - RNA, 19 nt, Artificial Sequence
  Description of Artificial Sequence: Synthetic oligonucleotide
  Antisense strand to SEQ ID NO: 1045548
ugaucugagcagcacccac

SEQ ID NO: 1045550 - RNA, 19 nt, Artificial Sequence
  Description of Artificial Sequence: Synthetic oligonucleotide
  Sense strand starting at position 3650 of SEQ ID NO: 914993
gggugcugcucagaucacu

SEQ ID NO: 1045551 - RNA, 19 nt, Artificial Sequence
  Description of Artificial Sequence: Synthetic oligonucleotide
  Antisense strand to SEQ ID NO: 1045550
agugaucugagcagcaccc

SEQ ID NO: 1045552 - RNA, 19 nt, Artificial Sequence
  Description of Artificial Sequence: Synthetic oligonucleotide
  Sense strand starting at position 3772 of SEQ ID NO: 914993
cccuguuucucugauaguc

SEQ ID NO: 1045553 - RNA, 19 nt, Artificial Sequence
  Description of Artificial Sequence: Synthetic oligonucleotide
  Antisense strand to SEQ ID NO: 1045552
gacuaucagagaaacaggg

SEQ ID NO: 1045554 - RNA, 19 nt, Artificial Sequence
  Description of Artificial Sequence: Synthetic oligonucleotide
  Sense strand starting at position 3780 of SEQ ID NO: 914993
cucugauagucugcuaaug

SEQ ID NO: 1045555 - RNA, 19 nt, Artificial Sequence
  Description of Artificial Sequence: Synthetic oligonucleotide
  Antisense strand to SEQ ID NO: 1045554
cauuagcagacuaucagag

SEQ ID NO: 1045556 - RNA, 19 nt, Artificial Sequence
  Description of Artificial Sequence: Synthetic oligonucleotide
  Sense strand starting at position 3924 of SEQ ID NO: 914993
ugccucuccugagaucaau

SEQ ID NO: 1045557 - RNA, 19 nt, Artificial Sequence
  Description of Artificial Sequence: Synthetic oligonucleotide
  Antisense strand to SEQ ID NO: 1045556
auugaucucaggagaggca

SEQ ID NO: 1045558 - RNA, 19 nt, Artificial Sequence
  Description of Artificial Sequence: Synthetic oligonucleotide
  Sense strand starting at position 3954 of SEQ ID NO: 914993
gguugaggcugccagauaa

SEQ ID NO: 1045559 - RNA, 19 nt, Artificial Sequence
  Description of Artificial Sequence: Synthetic oligonucleotide
  Antisense strand to SEQ ID NO: 1045558
uuaucuggcagccucaacc

SEQ ID NO: 1045560 - RNA, 19 nt, Artificial Sequence
  Description of Artificial Sequence: Synthetic oligonucleotide
  Sense strand starting at position 3 of SEQ ID NO: 914994
ucaguaugacauuaaaguc

SEQ ID NO: 1045561 - RNA, 19 nt, Artificial Sequence
  Description of Artificial Sequence: Synthetic oligonucleotide
  Antisense strand to SEQ ID NO: 1045560
gacuuuaaugucauacuga

SEQ ID NO: 1045562 - RNA, 19 nt, Artificial Sequence
  Description of Artificial Sequence: Synthetic oligonucleotide
  Sense strand starting at position 75 of SEQ ID NO: 914994
ggauuaucucgugauauug

SEQ ID NO: 1045563 - RNA, 19 nt, Artificial Sequence
  Description of Artificial Sequence: Synthetic oligonucleotide
  Antisense strand to SEQ ID NO: 1045562
caauaucacgagauaaucc

SEQ ID NO: 1045564 - RNA, 19 nt, Artificial Sequence
  Description of Artificial Sequence: Synthetic oligonucleotide
  Sense strand starting at position 231 of SEQ ID NO: 914994
gugggcaucaucugcauuu

SEQ ID NO: 1045565 - RNA, 19 nt, Artificial Sequence
  Description of Artificial Sequence: Synthetic oligonucleotide
  Antisense strand to SEQ ID NO: 1045564
aaaugcagaugaugcccac

SEQ ID NO: 1045566 - RNA, 19 nt, Artificial Sequence
  Description of Artificial Sequence: Synthetic oligonucleotide
  Sense strand starting at position 388 of SEQ ID NO: 914994
gcaaauaaugacgagguua

SEQ ID NO: 1045567 - RNA, 19 nt, Artificial Sequence
  Description of Artificial Sequence: Synthetic oligonucleotide
  Antisense strand to SEQ ID NO: 1045566
uaaccucgucauuauuugc

SEQ ID NO: 1045568 - RNA, 19 nt, Artificial Sequence
  Description of Artificial Sequence: Synthetic oligonucleotide
  Sense strand starting at position 465 of SEQ ID NO: 914994
cuuauauacccaugucaga

SEQ ID NO: 1045569 - RNA, 19 nt, Artificial Sequence
  Description of Artificial Sequence: Synthetic oligonucleotide
  Antisense strand to SEQ ID NO: 1045568
ucugacauggguauauaag

SEQ ID NO: 1045570 - RNA, 19 nt, Artificial Sequence
  Description of Artificial Sequence: Synthetic oligonucleotide
  Sense strand starting at position 487 of SEQ ID NO: 914994
uggccuuaaugacagauuu

SEQ ID NO: 1045571 - RNA, 19 nt, Artificial Sequence
  Description of Artificial Sequence: Synthetic oligonucleotide
  Antisense strand to SEQ ID NO: 1045570
aaaucugucauuaaggcca

SEQ ID NO: 1045572 - RNA, 19 nt, Artificial Sequence
  Description of Artificial Sequence: Synthetic oligonucleotide
  Sense strand starting at position 564 of SEQ ID NO: 914994
aaccgaaugguuggaaaua

SEQ ID NO: 1045573 - RNA, 19 nt, Artificial Sequence
  Description of Artificial Sequence: Synthetic oligonucleotide
  Antisense strand to SEQ ID NO: 1045572
uauuuccaaccauucgguu

SEQ ID NO: 1045574 - RNA, 19 nt, Artificial Sequence
  Description of Artificial Sequence: Synthetic oligonucleotide
  Sense strand starting at position 575 of SEQ ID NO: 914994
uggaaauaguauuccuuga

SEQ ID NO: 1045575 - RNA, 19 nt, Artificial Sequence
  Description of Artificial Sequence: Synthetic oligonucleotide
  Antisense strand to SEQ ID NO: 1045574
ucaaggaauacuauuucca

SEQ ID NO: 1045576 - RNA, 19 nt, Artificial Sequence
  Description of Artificial Sequence: Synthetic oligonucleotide
  Sense strand starting at position 1159 of SEQ ID NO: 914994
agaucacguggucaggaau

SEQ ID NO: 1045577 - RNA, 19 nt, Artificial Sequence
  Description of Artificial Sequence: Synthetic oligonucleotide
  Antisense strand to SEQ ID NO: 1045576
auuccugaccacgugaucu

SEQ ID NO: 1045578 - RNA, 19 nt, Artificial Sequence
  Description of Artificial Sequence: Synthetic oligonucleotide
  Sense strand starting at position 1558 of SEQ ID NO: 914994
acaguuaaucgggaccgua

SEQ ID NO: 1045579 - RNA, 19 nt, Artificial Sequence
  Description of Artificial Sequence: Synthetic oligonucleotide
  Antisense strand to SEQ ID NO: 1045578
uacggucccgauuaacugu

SEQ ID NO: 1045580 - RNA, 19 nt, Artificial Sequence
  Description of Artificial Sequence: Synthetic oligonucleotide
  Sense strand starting at position 1866 of SEQ ID NO: 914994
uggaaucuacguuaccuuu

SEQ ID NO: 1045581 - RNA, 19 nt, Artificial Sequence
  Description of Artificial Sequence: Synthetic oligonucleotide
  Antisense strand to SEQ ID NO: 1045580
aaagguaacguagauucca

SEQ ID NO: 1045582 - RNA, 19 nt, Artificial Sequence
  Description of Artificial Sequence: Synthetic oligonucleotide
  Sense strand starting at position 2011 of SEQ ID NO: 914994
gcaauaucccaccgagacu

SEQ ID NO: 1045583 - RNA, 19 nt, Artificial Sequence
  Description of Artificial Sequence: Synthetic oligonucleotide
  Antisense strand to SEQ ID NO: 1045582
agucucggugggauauugc

SEQ ID NO: 1045584 - RNA, 19 nt, Artificial Sequence
  Description of Artificial Sequence: Synthetic oligonucleotide
  Sense strand starting at position 2105 of SEQ ID NO: 914994
ucacucagguugucacauu

SEQ ID NO: 1045585 - RNA, 19 nt, Artificial Sequence
  Description of Artificial Sequence: Synthetic oligonucleotide
  Antisense strand to SEQ ID NO: 1045584
aaugugacaaccugaguga

SEQ ID NO: 1045586 - RNA, 19 nt, Artificial Sequence
  Description of Artificial Sequence: Synthetic oligonucleotide
  Sense strand starting at position 2125 of SEQ ID NO: 914994
acugcuguuucuccagaaa

SEQ ID NO: 1045587 - RNA, 19 nt, Artificial Sequence
  Description of Artificial Sequence: Synthetic oligonucleotide
  Antisense strand to SEQ ID NO: 1045586
uuucuggagaaacagcagu

SEQ ID NO: 1045588 - RNA, 19 nt, Artificial Sequence
  Description of Artificial Sequence: Synthetic oligonucleotide
  Sense strand starting at position 2128 of SEQ ID NO: 914994
gcuguuucuccagaaagaa

SEQ ID NO: 1045589 - RNA, 19 nt, Artificial Sequence
  Description of Artificial Sequence: Synthetic oligonucleotide
  Antisense strand to SEQ ID NO: 1045588
uucuuucuggagaaacagc

SEQ ID NO: 1045590 - RNA, 19 nt, Artificial Sequence
  Description of Artificial Sequence: Synthetic oligonucleotide
  Sense strand starting at position 2266 of SEQ ID NO: 914994
cugagauccugucugauua

SEQ ID NO: 1045591 - RNA, 19 nt, Artificial Sequence
  Description of Artificial Sequence: Synthetic oligonucleotide
  Antisense strand to SEQ ID NO: 1045590
uaaucagacaggaucucag

SEQ ID NO: 1045592 - RNA, 19 nt, Artificial Sequence
  Description of Artificial Sequence: Synthetic oligonucleotide
  Sense strand starting at position 2607 of SEQ ID NO: 914994
cucuuaaauugaguuuaga

SEQ ID NO: 1045593 - RNA, 19 nt, Artificial Sequence
  Description of Artificial Sequence: Synthetic oligonucleotide
  Antisense strand to SEQ ID NO: 1045592
ucuaaacucaauuuaagag

SEQ ID NO: 1045594 - RNA, 19 nt, Artificial Sequence
  Description of Artificial Sequence: Synthetic oligonucleotide
  Sense strand starting at position 2627 of SEQ ID NO: 914994
gucagauuuccacguccug

SEQ ID NO: 1045595 - RNA, 19 nt, Artificial Sequence
  Description of Artificial Sequence: Synthetic oligonucleotide
  Antisense strand to SEQ ID NO: 1045594
caggacguggaaaucugac

SEQ ID NO: 1045596 - RNA, 19 nt, Artificial Sequence
  Description of Artificial Sequence: Synthetic oligonucleotide
  Sense strand starting at position 2645 of SEQ ID NO: 914994
gugcuagaugcuggaauaa

SEQ ID NO: 1045597 - RNA, 19 nt, Artificial Sequence
  Description of Artificial Sequence: Synthetic oligonucleotide
  Antisense strand to SEQ ID NO: 1045596
uuauuccagcaucuagcac

SEQ ID NO: 1045598 - RNA, 19 nt, Artificial Sequence
  Description of Artificial Sequence: Synthetic oligonucleotide
  Sense strand starting at position 2672 of SEQ ID NO: 914994
ggaucucaguccuugagga

SEQ ID NO: 1045599 - RNA, 19 nt, Artificial Sequence
  Description of Artificial Sequence: Synthetic oligonucleotide
  Antisense strand to SEQ ID NO: 1045598
uccucaaggacugagaucc

SEQ ID NO: 1045600 - RNA, 19 nt, Artificial Sequence
  Description of Artificial Sequence: Synthetic oligonucleotide
  Sense strand starting at position 2673 of SEQ ID NO: 914994
gaucucaguccuugaggaa

SEQ ID NO: 1045601 - RNA, 19 nt, Artificial Sequence
  Description of Artificial Sequence: Synthetic oligonucleotide
  Antisense strand to SEQ ID NO: 1045600
uuccucaaggacugagauc

SEQ ID NO: 1045602 - RNA, 19 nt, Artificial Sequence
  Description of Artificial Sequence: Synthetic oligonucleotide
  Sense strand starting at position 2747 of SEQ ID NO: 914994
cuaguaugguaagugaaau

SEQ ID NO: 1045603 - RNA, 19 nt, Artificial Sequence
  Description of Artificial Sequence: Synthetic oligonucleotide
  Antisense strand to SEQ ID NO: 1045602
auuucacuuaccauacuag

SEQ ID NO: 1045604 - RNA, 19 nt, Artificial Sequence
  Description of Artificial Sequence: Synthetic oligonucleotide
  Sense strand starting at position 2766 of SEQ ID NO: 914994
accagaauugugugcaaag

SEQ ID NO: 1045605 - RNA, 19 nt, Artificial Sequence
  Description of Artificial Sequence: Synthetic oligonucleotide
  Antisense strand to SEQ ID NO: 1045604
cuuugcacacaauucuggu

SEQ ID NO: 1045606 - RNA, 19 nt, Artificial Sequence
  Description of Artificial Sequence: Synthetic oligonucleotide
  Sense strand starting at position 2768 of SEQ ID NO: 914994
cagaauugugugcaaagua

SEQ ID NO: 1045607 - RNA, 19 nt, Artificial Sequence
  Description of Artificial Sequence: Synthetic oligonucleotide
  Antisense strand to SEQ ID NO: 1045606
uacuuugcacacaauucug

SEQ ID NO: 1045608 - RNA, 19 nt, Artificial Sequence
  Description of Artificial Sequence: Synthetic oligonucleotide
  Sense strand starting at position 2777 of SEQ ID NO: 914994
gugcaaaguacugagguaa

SEQ ID NO: 1045609 - RNA, 19 nt, Artificial Sequence
  Description of Artificial Sequence: Synthetic oligonucleotide
  Antisense strand to SEQ ID NO: 1045608
uuaccucaguacuuugcac

SEQ ID NO: 1045610 - RNA, 19 nt, Artificial Sequence
  Description of Artificial Sequence: Synthetic oligonucleotide
  Sense strand starting at position 2806 of SEQ ID NO: 914994
acaauuaauuaugcuugga

SEQ ID NO: 1045611 - RNA, 19 nt, Artificial Sequence
  Description of Artificial Sequence: Synthetic oligonucleotide
  Antisense strand to SEQ ID NO: 1045610
uccaagcauaauuaauugu

SEQ ID NO: 1045612 - RNA, 19 nt, Artificial Sequence
  Description of Artificial Sequence: Synthetic oligonucleotide
  Sense strand starting at position 2838 of SEQ ID NO: 914994
aggcauaccuccuccagua

SEQ ID NO: 1045613 - RNA, 19 nt, Artificial Sequence
  Description of Artificial Sequence: Synthetic oligonucleotide
  Antisense strand to SEQ ID NO: 1045612
uacuggaggagguaugccu

SEQ ID NO: 1045614 - RNA, 19 nt, Artificial Sequence
  Description of Artificial Sequence: Synthetic oligonucleotide
  Sense strand starting at position 2848 of SEQ ID NO: 914994
ccuccaguacagugauuga

SEQ ID NO: 1045615 - RNA, 19 nt, Artificial Sequence
  Description of Artificial Sequence: Synthetic oligonucleotide
  Antisense strand to SEQ ID NO: 1045614
ucaaucacuguacuggagg

SEQ ID NO: 1045616 - RNA, 19 nt, Artificial Sequence
  Description of Artificial Sequence: Synthetic oligonucleotide
  Sense strand starting at position 2851 of SEQ ID NO: 914994
ccaguacagugauugauua

SEQ ID NO: 1045617 - RNA, 19 nt, Artificial Sequence
  Description of Artificial Sequence: Synthetic oligonucleotide
  Antisense strand to SEQ ID NO: 1045616
uaaucaaucacuguacugg

SEQ ID NO: 1045618 - RNA, 19 nt, Artificial Sequence
  Description of Artificial Sequence: Synthetic oligonucleotide
  Sense strand starting at position 2852 of SEQ ID NO: 914994
caguacagugauugauuau

SEQ ID NO: 1045619 - RNA, 19 nt, Artificial Sequence
  Description of Artificial Sequence: Synthetic oligonucleotide
  Antisense strand to SEQ ID NO: 1045618
auaaucaaucacuguacug

SEQ ID NO: 1045620 - RNA, 19 nt, Artificial Sequence
  Description of Artificial Sequence: Synthetic oligonucleotide
  Sense strand starting at position 2858 of SEQ ID NO: 914994
agugauugauuauugccua

SEQ ID NO: 1045621 - RNA, 19 nt, Artificial Sequence
  Description of Artificial Sequence: Synthetic oligonucleotide
  Antisense strand to SEQ ID NO: 1045620
uaggcaauaaucaaucacu

SEQ ID NO: 1045622 - RNA, 19 nt, Artificial Sequence
  Description of Artificial Sequence: Synthetic oligonucleotide
  Sense strand starting at position 2946 of SEQ ID NO: 914994
gugccaggucgguucuuua

SEQ ID NO: 1045623 - RNA, 19 nt, Artificial Sequence
  Description of Artificial Sequence: Synthetic oligonucleotide
  Antisense strand to SEQ ID NO: 1045622
uaaagaaccgaccuggcac

SEQ ID NO: 1045624 - RNA, 19 nt, Artificial Sequence
  Description of Artificial Sequence: Synthetic oligonucleotide
  Sense strand starting at position 2964 of SEQ ID NO: 914994
auggguguauggguucauu

SEQ ID NO: 1045625 - RNA, 19 nt, Artificial Sequence
  Description of Artificial Sequence: Synthetic oligonucleotide
  Antisense strand to SEQ ID NO: 1045624
aaugaacccauacacccau

SEQ ID NO: 1045626 - RNA, 19 nt, Artificial Sequence
  Description of Artificial Sequence: Synthetic oligonucleotide
  Sense strand starting at position 3051 of SEQ ID NO: 914994
ggaagaagguaccuaguua

SEQ ID NO: 1045627 - RNA, 19 nt, Artificial Sequence
  Description of Artificial Sequence: Synthetic oligonucleotide
  Antisense strand to SEQ ID NO: 1045626
uaacuagguaccuucuucc

SEQ ID NO: 1045628 - RNA, 19 nt, Artificial Sequence
  Description of Artificial Sequence: Synthetic oligonucleotide
  Sense strand starting at position 3055 of SEQ ID NO: 914994
gaagguaccuaguuaacau

SEQ ID NO: 1045629 - RNA, 19 nt, Artificial Sequence
  Description of Artificial Sequence: Synthetic oligonucleotide
  Antisense strand to SEQ ID NO: 1045628
auguuaacuagguaccuuc

SEQ ID NO: 1045630 - RNA, 19 nt, Artificial Sequence
  Description of Artificial Sequence: Synthetic oligonucleotide
  Sense strand starting at position 3074 of SEQ ID NO: 914994
aauguuauauaagugguga

SEQ ID NO: 1045631 - RNA, 19 nt, Artificial Sequence
  Description of Artificial Sequence: Synthetic oligonucleotide
  Antisense strand to SEQ ID NO: 1045630
ucaccacuuauauaacauu

SEQ ID NO: 1045632 - RNA, 19 nt, Artificial Sequence
  Description of Artificial Sequence: Synthetic oligonucleotide
  Sense strand starting at position 3075 of SEQ ID NO: 914994
auguuauauaaguggugag

SEQ ID NO: 1045633 - RNA, 19 nt, Artificial Sequence
  Description of Artificial Sequence: Synthetic oligonucleotide
  Antisense strand to SEQ ID NO: 1045632
cucaccacuuauauaacau

SEQ ID NO: 1045634 - RNA, 19 nt, Artificial Sequence
  Description of Artificial Sequence: Synthetic oligonucleotide
  Sense strand starting at position 3172 of SEQ ID NO: 914994
cagagaguuucuuuccuug

SEQ ID NO: 1045635 - RNA, 19 nt, Artificial Sequence
  Description of Artificial Sequence: Synthetic oligonucleotide
  Antisense strand to SEQ ID NO: 1045634
caaggaaagaaacucucug

SEQ ID NO: 1045636 - RNA, 19 nt, Artificial Sequence
  Description of Artificial Sequence: Synthetic oligonucleotide
  Sense strand starting at position 3186 of SEQ ID NO: 914994
ccuugucuaguccagguaa

SEQ ID NO: 1045637 - RNA, 19 nt, Artificial Sequence
  Description of Artificial Sequence: Synthetic oligonucleotide
  Antisense strand to SEQ ID NO: 1045636
uuaccuggacuagacaagg

SEQ ID NO: 1045638 - RNA, 19 nt, Artificial Sequence
  Description of Artificial Sequence: Synthetic oligonucleotide
  Sense strand starting at position 3188 of SEQ ID NO: 914994
uugucuaguccagguaaau

SEQ ID NO: 1045639 - RNA, 19 nt, Artificial Sequence
  Description of Artificial Sequence: Synthetic oligonucleotide
  Antisense strand to SEQ ID NO: 1045638
auuuaccuggacuagacaa

SEQ ID NO: 1045640 - RNA, 19 nt, Artificial Sequence
  Description of Artificial Sequence: Synthetic oligonucleotide
  Sense strand starting at position 326 of SEQ ID NO: 914995
cgacgagacucucucaaac

SEQ ID NO: 1045641 - RNA, 19 nt, Artificial Sequence
  Description of Artificial Sequence: Synthetic oligonucleotide
  Antisense strand to SEQ ID NO: 1045640
guuugagagagucucgucg

SEQ ID NO: 1045642 - RNA, 19 nt, Artificial Sequence
  Description of Artificial Sequence: Synthetic oligonucleotide
  Sense strand starting at position 838 of SEQ ID NO: 914995
gcacauagucuauacccau

SEQ ID NO: 1045643 - RNA, 19 nt, Artificial Sequence
  Description of Artificial Sequence: Synthetic oligonucleotide
  Antisense strand to SEQ ID NO: 1045642
auggguauagacuaugugc

SEQ ID NO: 1045644 - RNA, 19 nt, Artificial Sequence
  Description of Artificial Sequence: Synthetic oligonucleotide
  Sense strand starting at position 891 of SEQ ID NO: 914995
uauuuagguugacauaaga

SEQ ID NO: 1045645 - RNA, 19 nt, Artificial Sequence
  Description of Artificial Sequence: Synthetic oligonucleotide
  Antisense strand to SEQ ID NO: 1045644
ucuuaugucaaccuaaaua

SEQ ID NO: 1045646 - RNA, 19 nt, Artificial Sequence
  Description of Artificial Sequence: Synthetic oligonucleotide
  Sense strand starting at position 904 of SEQ ID NO: 914995
auaagauagcaccagucuu

SEQ ID NO: 1045647 - RNA, 19 nt, Artificial Sequence
  Description of Artificial Sequence: Synthetic oligonucleotide
  Antisense strand to SEQ ID NO: 1045646
aagacuggugcuaucuuau

SEQ ID NO: 1045648 - RNA, 19 nt, Artificial Sequence
  Description of Artificial Sequence: Synthetic oligonucleotide
  Sense strand starting at position 1110 of SEQ ID NO: 914995
cagcguggccuuguuugua

SEQ ID NO: 1045649 - RNA, 19 nt, Artificial Sequence
  Description of Artificial Sequence: Synthetic oligonucleotide
  Antisense strand to SEQ ID NO: 1045648
uacaaacaaggccacgcug

SEQ ID NO: 1045650 - RNA, 19 nt, Artificial Sequence
  Description of Artificial Sequence: Synthetic oligonucleotide
  Sense strand starting at position 1165 of SEQ ID NO: 914995
cacaucugugacgggauau

SEQ ID NO: 1045651 - RNA, 19 nt, Artificial Sequence
  Description of Artificial Sequence: Synthetic oligonucleotide
  Antisense strand to SEQ ID NO: 1045650
auaucccgucacagaugug

SEQ ID NO: 1045652 - RNA, 19 nt, Artificial Sequence
  Description of Artificial Sequence: Synthetic oligonucleotide
  Sense strand starting at position 1166 of SEQ ID NO: 914995
acaucugugacgggauaua

SEQ ID NO: 1045653 - RNA, 19 nt, Artificial Sequence
  Description of Artificial Sequence: Synthetic oligonucleotide
  Antisense strand to SEQ ID NO: 1045652
uauaucccgucacagaugu

SEQ ID NO: 1045654 - RNA, 19 nt, Artificial Sequence
  Description of Artificial Sequence: Synthetic oligonucleotide
  Sense strand starting at position 1175 of SEQ ID NO: 914995
acgggauauagugauguuu

SEQ ID NO: 1045655 - RNA, 19 nt, Artificial Sequence
  Description of Artificial Sequence: Synthetic oligonucleotide
  Antisense strand to SEQ ID NO: 1045654
aaacaucacuauaucccgu

SEQ ID NO: 1045656 - RNA, 19 nt, Artificial Sequence
  Description of Artificial Sequence: Synthetic oligonucleotide
  Sense strand starting at position 1184 of SEQ ID NO: 914995
agugauguuuaaucuuaug

SEQ ID NO: 1045657 - RNA, 19 nt, Artificial Sequence
  Description of Artificial Sequence: Synthetic oligonucleotide
  Antisense strand to SEQ ID NO: 1045656
cauaagauuaaacaucacu

SEQ ID NO: 1045658 - RNA, 19 nt, Artificial Sequence
  Description of Artificial Sequence: Synthetic oligonucleotide
  Sense strand starting at position 1195 of SEQ ID NO: 914995
aucuuaugauugccuuaag

SEQ ID NO: 1045659 - RNA, 19 nt, Artificial Sequence
  Description of Artificial Sequence: Synthetic oligonucleotide
  Antisense strand to SEQ ID NO: 1045658
cuuaaggcaaucauaagau

SEQ ID NO: 1045660 - RNA, 19 nt, Artificial Sequence
  Description of Artificial Sequence: Synthetic oligonucleotide
  Sense strand starting at position 1196 of SEQ ID NO: 914995
ucuuaugauugccuuaaga

SEQ ID NO: 1045661 - RNA, 19 nt, Artificial Sequence
  Description of Artificial Sequence: Synthetic oligonucleotide
  Antisense strand to SEQ ID NO: 1045660
ucuuaaggcaaucauaaga

SEQ ID NO: 1045662 - RNA, 19 nt, Artificial Sequence
  Description of Artificial Sequence: Synthetic oligonucleotide
  Sense strand starting at position 1198 of SEQ ID NO: 914995
uuaugauugccuuaagaau

SEQ ID NO: 1045663 - RNA, 19 nt, Artificial Sequence
  Description of Artificial Sequence: Synthetic oligonucleotide
  Antisense strand to SEQ ID NO: 1045662
auucuuaaggcaaucauaa

SEQ ID NO: 1045664 - RNA, 19 nt, Artificial Sequence
  Description of Artificial Sequence: Synthetic oligonucleotide
  Sense strand starting at position 1674 of SEQ ID NO: 914995
auauguacacucgggacaa

SEQ ID NO: 1045665 - RNA, 19 nt, Artificial Sequence
  Description of Artificial Sequence: Synthetic oligonucleotide
  Antisense strand to SEQ ID NO: 1045664
uugucccgaguguacauau

SEQ ID NO: 1045666 - RNA, 19 nt, Artificial Sequence
  Description of Artificial Sequence: Synthetic oligonucleotide
  Sense strand starting at position 1685 of SEQ ID NO: 914995
cgggacaaguucuccugau

SEQ ID NO: 1045667 - RNA, 19 nt, Artificial Sequence
  Description of Artificial Sequence: Synthetic oligonucleotide
  Antisense strand to SEQ ID NO: 1045666
aucaggagaacuugucccg

SEQ ID NO: 1045668 - RNA, 19 nt, Artificial Sequence
  Description of Artificial Sequence: Synthetic oligonucleotide
  Sense strand starting at position 1686 of SEQ ID NO: 914995
gggacaaguucuccugauc

SEQ ID NO: 1045669 - RNA, 19 nt, Artificial Sequence
  Description of Artificial Sequence: Synthetic oligonucleotide
  Antisense strand to SEQ ID NO: 1045668
gaucaggagaacuuguccc

SEQ ID NO: 1045670 - RNA, 19 nt, Artificial Sequence
  Description of Artificial Sequence: Synthetic oligonucleotide
  Sense strand starting at position 1689 of SEQ ID NO: 914995
acaaguucuccugaucgaa

SEQ ID NO: 1045671 - RNA, 19 nt, Artificial Sequence
  Description of Artificial Sequence: Synthetic oligonucleotide
  Antisense strand to SEQ ID NO: 1045670
uucgaucaggagaacuugu

SEQ ID NO: 1045672 - RNA, 19 nt, Artificial Sequence
  Description of Artificial Sequence: Synthetic oligonucleotide
  Sense strand starting at position 2573 of SEQ ID NO: 914995
cgcuuacgagccuuaucuu

SEQ ID NO: 1045673 - RNA, 19 nt, Artificial Sequence
  Description of Artificial Sequence: Synthetic oligonucleotide
  Antisense strand to SEQ ID NO: 1045672
aagauaaggcucguaagcg

SEQ ID NO: 1045674 - RNA, 19 nt, Artificial Sequence
  Description of Artificial Sequence: Synthetic oligonucleotide
  Sense strand starting at position 2708 of SEQ ID NO: 914995
ccugacuacccuggaagua

SEQ ID NO: 1045675 - RNA, 19 nt, Artificial Sequence
  Description of Artificial Sequence: Synthetic oligonucleotide
  Antisense strand to SEQ ID NO: 1045674
uacuuccaggguagucagg

SEQ ID NO: 1045676 - RNA, 19 nt, Artificial Sequence
  Description of Artificial Sequence: Synthetic oligonucleotide
  Sense strand starting at position 2750 of SEQ ID NO: 914995
gugagagaggaauguucuu

SEQ ID NO: 1045677 - RNA, 19 nt, Artificial Sequence
  Description of Artificial Sequence: Synthetic oligonucleotide
  Antisense strand to SEQ ID NO: 1045676
aagaacauuccucucucac

SEQ ID NO: 1045678 - RNA, 19 nt, Artificial Sequence
  Description of Artificial Sequence: Synthetic oligonucleotide
  Sense strand starting at position 2756 of SEQ ID NO: 914995
gaggaauguucuuugaagu

SEQ ID NO: 1045679 - RNA, 19 nt, Artificial Sequence
  Description of Artificial Sequence: Synthetic oligonucleotide
  Antisense strand to SEQ ID NO: 1045678
acuucaaagaacauuccuc

SEQ ID NO: 1045680 - RNA, 19 nt, Artificial Sequence
  Description of Artificial Sequence: Synthetic oligonucleotide
  Sense strand starting at position 2757 of SEQ ID NO: 914995
aggaauguucuuugaagua

SEQ ID NO: 1045681 - RNA, 19 nt, Artificial Sequence
  Description of Artificial Sequence: Synthetic oligonucleotide
  Antisense strand to SEQ ID NO: 1045680
uacuucaaagaacauuccu

SEQ ID NO: 1045682 - RNA, 19 nt, Artificial Sequence
  Description of Artificial Sequence: Synthetic oligonucleotide
  Sense strand starting at position 2836 of SEQ ID NO: 914995
guaauagaguacuucucac

SEQ ID NO: 1045683 - RNA, 19 nt, Artificial Sequence
  Description of Artificial Sequence: Synthetic oligonucleotide
  Antisense strand to SEQ ID NO: 1045682
gugagaaguacucuauuac

SEQ ID NO: 1045684 - RNA, 19 nt, Artificial Sequence
  Description of Artificial Sequence: Synthetic oligonucleotide
  Sense strand starting at position 2866 of SEQ ID NO: 914995
cagagugauucuuccuguu

SEQ ID NO: 1045685 - RNA, 19 nt, Artificial Sequence
  Description of Artificial Sequence: Synthetic oligonucleotide
  Antisense strand to SEQ ID NO: 1045684
aacaggaagaaucacucug

SEQ ID NO: 1045686 - RNA, 19 nt, Artificial Sequence
  Description of Artificial Sequence: Synthetic oligonucleotide
  Sense strand starting at position 2868 of SEQ ID NO: 914995
gagugauucuuccuguuua

SEQ ID NO: 1045687 - RNA, 19 nt, Artificial Sequence
  Description of Artificial Sequence: Synthetic oligonucleotide
  Antisense strand to SEQ ID NO: 1045686
uaaacaggaagaaucacuc

SEQ ID NO: 1045688 - RNA, 19 nt, Artificial Sequence
  Description of Artificial Sequence: Synthetic oligonucleotide
  Sense strand starting at position 2903 of SEQ ID NO: 914995
cacagacguccaugggaga

SEQ ID NO: 1045689 - RNA, 19 nt, Artificial Sequence
  Description of Artificial Sequence: Synthetic oligonucleotide
  Antisense strand to SEQ ID NO: 1045688
ucucccauggacgucugug

SEQ ID NO: 1045690 - RNA, 19 nt, Artificial Sequence
  Description of Artificial Sequence: Synthetic oligonucleotide
  Sense strand starting at position 2918 of SEQ ID NO: 914995
gagacugagccagagugua

SEQ ID NO: 1045691 - RNA, 19 nt, Artificial Sequence
  Description of Artificial Sequence: Synthetic oligonucleotide
  Antisense strand to SEQ ID NO: 1045690
uacacucuggcucagucuc

SEQ ID NO: 1045692 - RNA, 19 nt, Artificial Sequence
  Description of Artificial Sequence: Synthetic oligonucleotide
  Sense strand starting at position 2948 of SEQ ID NO: 914995
gucacaucacgagauccua

SEQ ID NO: 1045693 - RNA, 19 nt, Artificial Sequence
  Description of Artificial Sequence: Synthetic oligonucleotide
  Antisense strand to SEQ ID NO: 1045692
uaggaucucgugaugugac

SEQ ID NO: 1045694 - RNA, 19 nt, Artificial Sequence
  Description of Artificial Sequence: Synthetic oligonucleotide
  Sense strand starting at position 2958 of SEQ ID NO: 914995
gagauccuagucugguuau

SEQ ID NO: 1045695 - RNA, 19 nt, Artificial Sequence
  Description of Artificial Sequence: Synthetic oligonucleotide
  Antisense strand to SEQ ID NO: 1045694
auaaccagacuaggaucuc

SEQ ID NO: 1045696 - RNA, 19 nt, Artificial Sequence
  Description of Artificial Sequence: Synthetic oligonucleotide
  Sense strand starting at position 2961 of SEQ ID NO: 914995
auccuagucugguuaucag

SEQ ID NO: 1045697 - RNA, 19 nt, Artificial Sequence
  Description of Artificial Sequence: Synthetic oligonucleotide
  Antisense strand to SEQ ID NO: 1045696
cugauaaccagacuaggau

SEQ ID NO: 1045698 - RNA, 19 nt, Artificial Sequence
  Description of Artificial Sequence: Synthetic oligonucleotide
  Sense strand starting at position 3072 of SEQ ID NO: 914995
ggucaaauaucugcaacuu

SEQ ID NO: 1045699 - RNA, 19 nt, Artificial Sequence
  Description of Artificial Sequence: Synthetic oligonucleotide
  Antisense strand to SEQ ID NO: 1045698
aaguugcagauauuugacc

SEQ ID NO: 1045700 - RNA, 19 nt, Artificial Sequence
  Description of Artificial Sequence: Synthetic oligonucleotide
  Sense strand starting at position 3120 of SEQ ID NO: 914995
ucuuuaaaggcuugaauug

SEQ ID NO: 1045701 - RNA, 19 nt, Artificial Sequence
  Description of Artificial Sequence: Synthetic oligonucleotide
  Antisense strand to SEQ ID NO: 1045700
caauucaagccuuuaaaga

SEQ ID NO: 1045702 - RNA, 19 nt, Artificial Sequence
  Description of Artificial Sequence: Synthetic oligonucleotide
  Sense strand starting at position 3269 of SEQ ID NO: 914995
gugagaguauuagugguca

SEQ ID NO: 1045703 - RNA, 19 nt, Artificial Sequence
  Description of Artificial Sequence: Synthetic oligonucleotide
  Antisense strand to SEQ ID NO: 1045702
ugaccacuaauacucucac

SEQ ID NO: 1045704 - RNA, 19 nt, Artificial Sequence
  Description of Artificial Sequence: Synthetic oligonucleotide
  Sense strand starting at position 3271 of SEQ ID NO: 914995
gagaguauuaguggucaug

SEQ ID NO: 1045705 - RNA, 19 nt, Artificial Sequence
  Description of Artificial Sequence: Synthetic oligonucleotide
  Antisense strand to SEQ ID NO: 1045704
caugaccacuaauacucuc

SEQ ID NO: 1045706 - RNA, 19 nt, Artificial Sequence
  Description of Artificial Sequence: Synthetic oligonucleotide
  Sense strand starting at position 3382 of SEQ ID NO: 914995
agggaugcuagguguggaa

SEQ ID NO: 1045707 - RNA, 19 nt, Artificial Sequence
  Description of Artificial Sequence: Synthetic oligonucleotide
  Antisense strand to SEQ ID NO: 1045706
uuccacaccuagcaucccu

SEQ ID NO: 1045708 - RNA, 19 nt, Artificial Sequence
  Description of Artificial Sequence: Synthetic oligonucleotide
  Sense strand starting at position 3384 of SEQ ID NO: 914995
ggaugcuagguguggaaga

SEQ ID NO: 1045709 - RNA, 19 nt, Artificial Sequence
  Description of Artificial Sequence: Synthetic oligonucleotide
  Antisense strand to SEQ ID NO: 1045708
ucuuccacaccuagcaucc

SEQ ID NO: 1045710 - RNA, 19 nt, Artificial Sequence
  Description of Artificial Sequence: Synthetic oligonucleotide
  Sense strand starting at position 3405 of SEQ ID NO: 914995
ggaaccagggccugauuaa

SEQ ID NO: 1045711 - RNA, 19 nt, Artificial Sequence
  Description of Artificial Sequence: Synthetic oligonucleotide
  Antisense strand to SEQ ID NO: 1045710
uuaaucaggcccugguucc

SEQ ID NO: 1045712 - RNA, 19 nt, Artificial Sequence
  Description of Artificial Sequence: Synthetic oligonucleotide
  Sense strand starting at position 3751 of SEQ ID NO: 914995
agagaaauuuccugugaag

SEQ ID NO: 1045713 - RNA, 19 nt, Artificial Sequence
  Description of Artificial Sequence: Synthetic oligonucleotide
  Antisense strand to SEQ ID NO: 1045712
cuucacaggaaauuucucu

SEQ ID NO: 1045714 - RNA, 19 nt, Artificial Sequence
  Description of Artificial Sequence: Synthetic oligonucleotide
  Sense strand starting at position 3898 of SEQ ID NO: 914995
uggugagagguuuguuaug

SEQ ID NO: 1045715 - RNA, 19 nt, Artificial Sequence
  Description of Artificial Sequence: Synthetic oligonucleotide
  Antisense strand to SEQ ID NO: 1045714
cauaacaaaccucucacca

SEQ ID NO: 1045716 - RNA, 19 nt, Artificial Sequence
  Description of Artificial Sequence: Synthetic oligonucleotide
  Sense strand starting at position 3900 of SEQ ID NO: 914995
gugagagguuuguuaugga

SEQ ID NO: 1045717 - RNA, 19 nt, Artificial Sequence
  Description of Artificial Sequence: Synthetic oligonucleotide
  Antisense strand to SEQ ID NO: 1045716
uccauaacaaaccucucac

SEQ ID NO: 1045718 - RNA, 19 nt, Artificial Sequence
  Description of Artificial Sequence: Synthetic oligonucleotide
  Sense strand starting at position 3909 of SEQ ID NO: 914995
uuguuauggaggcagcaau

SEQ ID NO: 1045719 - RNA, 19 nt, Artificial Sequence
  Description of Artificial Sequence: Synthetic oligonucleotide
  Antisense strand to SEQ ID NO: 1045718
auugcugccuccauaacaa

SEQ ID NO: 1045720 - RNA, 19 nt, Artificial Sequence
  Description of Artificial Sequence: Synthetic oligonucleotide
  Sense strand starting at position 543 of SEQ ID NO: 914996
gcaacaucuuaauccgaug

SEQ ID NO: 1045721 - RNA, 19 nt, Artificial Sequence
  Description of Artificial Sequence: Synthetic oligonucleotide
  Antisense strand to SEQ ID NO: 1045720
caucggauuaagauguugc

SEQ ID NO: 1045722 - RNA, 19 nt, Artificial Sequence
  Description of Artificial Sequence: Synthetic oligonucleotide
  Sense strand starting at position 554 of SEQ ID NO: 914996
auccgaugagcuugggaua

SEQ ID NO: 1045723 - RNA, 19 nt, Artificial Sequence
  Description of Artificial Sequence: Synthetic oligonucleotide
  Antisense strand to SEQ ID NO: 1045722
uaucccaagcucaucggau

SEQ ID NO: 1045724 - RNA, 19 nt, Artificial Sequence
  Description of Artificial Sequence: Synthetic oligonucleotide
  Sense strand starting at position 561 of SEQ ID NO: 914996
gagcuugggauaugcagau

SEQ ID NO: 1045725 - RNA, 19 nt, Artificial Sequence
  Description of Artificial Sequence: Synthetic oligonucleotide
  Antisense strand to SEQ ID NO: 1045724
aucugcauaucccaagcuc

SEQ ID NO: 1045726 - RNA, 19 nt, Artificial Sequence
  Description of Artificial Sequence: Synthetic oligonucleotide
  Sense strand starting at position 595 of SEQ ID NO: 914996
uuucuaaguguuuacuauc

SEQ ID NO: 1045727 - RNA, 19 nt, Artificial Sequence
  Description of Artificial Sequence: Synthetic oligonucleotide
  Antisense strand to SEQ ID NO: 1045726
gauaguaaacacuuagaaa

SEQ ID NO: 1045728 - RNA, 19 nt, Artificial Sequence
  Description of Artificial Sequence: Synthetic oligonucleotide
  Sense strand starting at position 764 of SEQ ID NO: 914996
uuggaugacuguccgauau

SEQ ID NO: 1045729 - RNA, 19 nt, Artificial Sequence
  Description of Artificial Sequence: Synthetic oligonucleotide
  Antisense strand to SEQ ID NO: 1045728
auaucggacagucauccaa

SEQ ID NO: 1045730 - RNA, 19 nt, Artificial Sequence
  Description of Artificial Sequence: Synthetic oligonucleotide
  Sense strand starting at position 768 of SEQ ID NO: 914996
augacuguccgauauaaca

SEQ ID NO: 1045731 - RNA, 19 nt, Artificial Sequence
  Description of Artificial Sequence: Synthetic oligonucleotide
  Antisense strand to SEQ ID NO: 1045730
uguuauaucggacagucau

SEQ ID NO: 1045732 - RNA, 19 nt, Artificial Sequence
  Description of Artificial Sequence: Synthetic oligonucleotide
  Sense strand starting at position 805 of SEQ ID NO: 914996
gcaaaucaacugcaaaguu

SEQ ID NO: 1045733 - RNA, 19 nt, Artificial Sequence
  Description of Artificial Sequence: Synthetic oligonucleotide
  Antisense strand to SEQ ID NO: 1045732
aacuuugcaguugauuugc

SEQ ID NO: 1045734 - RNA, 19 nt, Artificial Sequence
  Description of Artificial Sequence: Synthetic oligonucleotide
  Sense strand starting at position 860 of SEQ ID NO: 914996
augcaaggucuuugaccaa

SEQ ID NO: 1045735 - RNA, 19 nt, Artificial Sequence
  Description of Artificial Sequence: Synthetic oligonucleotide
  Antisense strand to SEQ ID NO: 1045734
uuggucaaagaccuugcau

SEQ ID NO: 1045736 - RNA, 19 nt, Artificial Sequence
  Description of Artificial Sequence: Synthetic oligonucleotide
  Sense strand starting at position 863 of SEQ ID NO: 914996
caaggucuuugaccaagga

SEQ ID NO: 1045737 - RNA, 19 nt, Artificial Sequence
  Description of Artificial Sequence: Synthetic oligonucleotide
  Antisense strand to SEQ ID NO: 1045736
uccuuggucaaagaccuug

SEQ ID NO: 1045738 - RNA, 19 nt, Artificial Sequence
  Description of Artificial Sequence: Synthetic oligonucleotide
  Sense strand starting at position 867 of SEQ ID NO: 914996
gucuuugaccaaggagauc

SEQ ID NO: 1045739 - RNA, 19 nt, Artificial Sequence
  Description of Artificial Sequence: Synthetic oligonucleotide
  Antisense strand to SEQ ID NO: 1045738
gaucuccuuggucaaagac

SEQ ID NO: 1045740 - RNA, 19 nt, Artificial Sequence
  Description of Artificial Sequence: Synthetic oligonucleotide
  Sense strand starting at position 921 of SEQ ID NO: 914996
cgaggaugaugcucaaaua

SEQ ID NO: 1045741 - RNA, 19 nt, Artificial Sequence
  Description of Artificial Sequence: Synthetic oligonucleotide
  Antisense strand to SEQ ID NO: 1045740
uauuugagcaucauccucg

SEQ ID NO: 1045742 - RNA, 19 nt, Artificial Sequence
  Description of Artificial Sequence: Synthetic oligonucleotide
  Sense strand starting at position 957 of SEQ ID NO: 914996
uaauuugaauaucgaggga

SEQ ID NO: 1045743 - RNA, 19 nt, Artificial Sequence
  Description of Artificial Sequence: Synthetic oligonucleotide
  Antisense strand to SEQ ID NO: 1045742
ucccucgauauucaaauua

SEQ ID NO: 1045744 - RNA, 19 nt, Artificial Sequence
  Description of Artificial Sequence: Synthetic oligonucleotide
  Sense strand starting at position 999 of SEQ ID NO: 914996
ggaugaagcccuuaaguau

SEQ ID NO: 1045745 - RNA, 19 nt, Artificial Sequence
  Description of Artificial Sequence: Synthetic oligonucleotide
  Antisense strand to SEQ ID NO: 1045744
auacuuaagggcuucaucc

SEQ ID NO: 1045746 - RNA, 19 nt, Artificial Sequence
  Description of Artificial Sequence: Synthetic oligonucleotide
  Sense strand starting at position 1014 of SEQ ID NO: 914996
guauuaaacagacguagac

SEQ ID NO: 1045747 - RNA, 19 nt, Artificial Sequence
  Description of Artificial Sequence: Synthetic oligonucleotide
  Antisense strand to SEQ ID NO: 1045746
gucuacgucuguuuaauac

SEQ ID NO: 1045748 - RNA, 19 nt, Artificial Sequence
  Description of Artificial Sequence: Synthetic oligonucleotide
  Sense strand starting at position 1056 of SEQ ID NO: 914996
aaaugugaagagcgaguua

SEQ ID NO: 1045749 - RNA, 19 nt, Artificial Sequence
  Description of Artificial Sequence: Synthetic oligonucleotide
  Antisense strand to SEQ ID NO: 1045748
uaacucgcucuucacauuu

SEQ ID NO: 1045750 - RNA, 19 nt, Artificial Sequence
  Description of Artificial Sequence: Synthetic oligonucleotide
  Sense strand starting at position 1068 of SEQ ID NO: 914996
cgaguuacuaugugaacag

SEQ ID NO: 1045751 - RNA, 19 nt, Artificial Sequence
  Description of Artificial Sequence: Synthetic oligonucleotide
  Antisense strand to SEQ ID NO: 1045750
cuguucacauaguaacucg

SEQ ID NO: 1045752 - RNA, 19 nt, Artificial Sequence
  Description of Artificial Sequence: Synthetic oligonucleotide
  Sense strand starting at position 1179 of SEQ ID NO: 914996
uuguaaucuguauagcuaa

SEQ ID NO: 1045753 - RNA, 19 nt, Artificial Sequence
  Description of Artificial Sequence: Synthetic oligonucleotide
  Antisense strand to SEQ ID NO: 1045752
uuagcuauacagauuacaa

SEQ ID NO: 1045754 - RNA, 19 nt, Artificial Sequence
  Description of Artificial Sequence: Synthetic oligonucleotide
  Sense strand starting at position 1210 of SEQ ID NO: 914996
uugaaugccucauuuguac

SEQ ID NO: 1045755 - RNA, 19 nt, Artificial Sequence
  Description of Artificial Sequence: Synthetic oligonucleotide
  Antisense strand to SEQ ID NO: 1045754
guacaaaugaggcauucaa

SEQ ID NO: 1045756 - RNA, 19 nt, Artificial Sequence
  Description of Artificial Sequence: Synthetic oligonucleotide
  Sense strand starting at position 1496 of SEQ ID NO: 914996
cuagaugguugguucuaua

SEQ ID NO: 1045757 - RNA, 19 nt, Artificial Sequence
  Description of Artificial Sequence: Synthetic oligonucleotide
  Antisense strand to SEQ ID NO: 1045756
uauagaaccaaccaucuag

SEQ ID NO: 1045758 - RNA, 19 nt, Artificial Sequence
  Description of Artificial Sequence: Synthetic oligonucleotide
  Sense strand starting at position 1504 of SEQ ID NO: 914996
uugguucuauacccagaau

SEQ ID NO: 1045759 - RNA, 19 nt, Artificial Sequence
  Description of Artificial Sequence: Synthetic oligonucleotide
  Antisense strand to SEQ ID NO: 1045758
auucuggguauagaaccaa

SEQ ID NO: 1045760 - RNA, 19 nt, Artificial Sequence
  Description of Artificial Sequence: Synthetic oligonucleotide
  Sense strand starting at position 1560 of SEQ ID NO: 914996
auugauuccucaguaugga

SEQ ID NO: 1045761 - RNA, 19 nt, Artificial Sequence
  Description of Artificial Sequence: Synthetic oligonucleotide
  Antisense strand to SEQ ID NO: 1045760
uccauacugaggaaucaau

SEQ ID NO: 1045762 - RNA, 19 nt, Artificial Sequence
  Description of Artificial Sequence: Synthetic oligonucleotide
  Sense strand starting at position 1938 of SEQ ID NO: 914996
guuccauuucccggagcca

SEQ ID NO: 1045763 - RNA, 19 nt, Artificial Sequence
  Description of Artificial Sequence: Synthetic oligonucleotide
  Antisense strand to SEQ ID NO: 1045762
uggcuccgggaaauggaac

SEQ ID NO: 1045764 - RNA, 19 nt, Artificial Sequence
  Description of Artificial Sequence: Synthetic oligonucleotide
  Sense strand starting at position 2092 of SEQ ID NO: 914996
gcaucuaauuuggucuuua

SEQ ID NO: 1045765 - RNA, 19 nt, Artificial Sequence
  Description of Artificial Sequence: Synthetic oligonucleotide
  Antisense strand to SEQ ID NO: 1045764
uaaagaccaaauuagaugc

SEQ ID NO: 1045766 - RNA, 19 nt, Artificial Sequence
  Description of Artificial Sequence: Synthetic oligonucleotide
  Sense strand starting at position 2135 of SEQ ID NO: 914996
ggagaaaugugcuucgaac

SEQ ID NO: 1045767 - RNA, 19 nt, Artificial Sequence
  Description of Artificial Sequence: Synthetic oligonucleotide
  Antisense strand to SEQ ID NO: 1045766
guucgaagcacauuucucc

SEQ ID NO: 1045768 - RNA, 19 nt, Artificial Sequence
  Description of Artificial Sequence: Synthetic oligonucleotide
  Sense strand starting at position 2146 of SEQ ID NO: 914996
cuucgaacuccucaaagcu

SEQ ID NO: 1045769 - RNA, 19 nt, Artificial Sequence
  Description of Artificial Sequence: Synthetic oligonucleotide
  Antisense strand to SEQ ID NO: 1045768
agcuuugaggaguucgaag

SEQ ID NO: 1045770 - RNA, 19 nt, Artificial Sequence
  Description of Artificial Sequence: Synthetic oligonucleotide
  Sense strand starting at position 2187 of SEQ ID NO: 914996
uugagaucacauuggcagu

SEQ ID NO: 1045771 - RNA, 19 nt, Artificial Sequence
  Description of Artificial Sequence: Synthetic oligonucleotide
  Antisense strand to SEQ ID NO: 1045770
acugccaaugugaucucaa

SEQ ID NO: 1045772 - RNA, 19 nt, Artificial Sequence
  Description of Artificial Sequence: Synthetic oligonucleotide
  Sense strand starting at position 2281 of SEQ ID NO: 914996
caagaugaccucugaugua

SEQ ID NO: 1045773 - RNA, 19 nt, Artificial Sequence
  Description of Artificial Sequence: Synthetic oligonucleotide
  Antisense strand to SEQ ID NO: 1045772
uacaucagaggucaucuug

SEQ ID NO: 1045774 - RNA, 19 nt, Artificial Sequence
  Description of Artificial Sequence: Synthetic oligonucleotide
  Sense strand starting at position 2293 of SEQ ID NO: 914996
ugauguaggcauuaauauu

SEQ ID NO: 1045775 - RNA, 19 nt, Artificial Sequence
  Description of Artificial Sequence: Synthetic oligonucleotide
  Antisense strand to SEQ ID NO: 1045774
aauauuaaugccuacauca

SEQ ID NO: 1045776 - RNA, 19 nt, Artificial Sequence
  Description of Artificial Sequence: Synthetic oligonucleotide
  Sense strand starting at position 2532 of SEQ ID NO: 914996
caggcucucucauuugagu

SEQ ID NO: 1045777 - RNA, 19 nt, Artificial Sequence
  Description of Artificial Sequence: Synthetic oligonucleotide
  Antisense strand to SEQ ID NO: 1045776
acucaaaugagagagccug

SEQ ID NO: 1045778 - RNA, 19 nt, Artificial Sequence
  Description of Artificial Sequence: Synthetic oligonucleotide
  Sense strand starting at position 2791 of SEQ ID NO: 914996
cuacaucgaugagcuuaaa

SEQ ID NO: 1045779 - RNA, 19 nt, Artificial Sequence
  Description of Artificial Sequence: Synthetic oligonucleotide
  Antisense strand to SEQ ID NO: 1045778
uuuaagcucaucgauguag

SEQ ID NO: 1045780 - RNA, 19 nt, Artificial Sequence
  Description of Artificial Sequence: Synthetic oligonucleotide
  Sense strand starting at position 2794 of SEQ ID NO: 914996
caucgaugagcuuaaagug

SEQ ID NO: 1045781 - RNA, 19 nt, Artificial Sequence
  Description of Artificial Sequence: Synthetic oligonucleotide
  Antisense strand to SEQ ID NO: 1045780
cacuuuaagcucaucgaug

SEQ ID NO: 1045782 - RNA, 19 nt, Artificial Sequence
  Description of Artificial Sequence: Synthetic oligonucleotide
  Sense strand starting at position 3018 of SEQ ID NO: 914996
ggacuagcugguuacauga

SEQ ID NO: 1045783 - RNA, 19 nt, Artificial Sequence
  Description of Artificial Sequence: Synthetic oligonucleotide
  Antisense strand to SEQ ID NO: 1045782
ucauguaaccagcuagucc

SEQ ID NO: 1045784 - RNA, 19 nt, Artificial Sequence
  Description of Artificial Sequence: Synthetic oligonucleotide
  Sense strand starting at position 3131 of SEQ ID NO: 914996
ugucaagaugccuaggagu

SEQ ID NO: 1045785 - RNA, 19 nt, Artificial Sequence
  Description of Artificial Sequence: Synthetic oligonucleotide
  Antisense strand to SEQ ID NO: 1045784
acuccuaggcaucuugaca

SEQ ID NO: 1045786 - RNA, 19 nt, Artificial Sequence
  Description of Artificial Sequence: Synthetic oligonucleotide
  Sense strand starting at position 3133 of SEQ ID NO: 914996
ucaagaugccuaggaguau

SEQ ID NO: 1045787 - RNA, 19 nt, Artificial Sequence
  Description of Artificial Sequence: Synthetic oligonucleotide
  Antisense strand to SEQ ID NO: 1045786
auacuccuaggcaucuuga

SEQ ID NO: 1045788 - RNA, 19 nt, Artificial Sequence
  Description of Artificial Sequence: Synthetic oligonucleotide
  Sense strand starting at position 3243 of SEQ ID NO: 914996
gcaggauagcaauguagaa

SEQ ID NO: 1045789 - RNA, 19 nt, Artificial Sequence
  Description of Artificial Sequence: Synthetic oligonucleotide
  Antisense strand to SEQ ID NO: 1045788
uucuacauugcuauccugc

SEQ ID NO: 1045790 - RNA, 19 nt, Artificial Sequence
  Description of Artificial Sequence: Synthetic oligonucleotide
  Sense strand starting at position 3377 of SEQ ID NO: 914996
agauaagaaugccucccaa

SEQ ID NO: 1045791 - RNA, 19 nt, Artificial Sequence
  Description of Artificial Sequence: Synthetic oligonucleotide
  Antisense strand to SEQ ID NO: 1045790
uugggaggcauucuuaucu

SEQ ID NO: 1045792 - RNA, 19 nt, Artificial Sequence
  Description of Artificial Sequence: Synthetic oligonucleotide
  Sense strand starting at position 3679 of SEQ ID NO: 914996
ugaccuuuggcugauggga

SEQ ID NO: 1045793 - RNA, 19 nt, Artificial Sequence
  Description of Artificial Sequence: Synthetic oligonucleotide
  Antisense strand to SEQ ID NO: 1045792
ucccaucagccaaagguca

SEQ ID NO: 1045794 - RNA, 19 nt, Artificial Sequence
  Description of Artificial Sequence: Synthetic oligonucleotide
  Sense strand starting at position 3717 of SEQ ID NO: 914996
gaugaaggacacugucauu

SEQ ID NO: 1045795 - RNA, 19 nt, Artificial Sequence
  Description of Artificial Sequence: Synthetic oligonucleotide
  Antisense strand to SEQ ID NO: 1045794
aaugacaguguccuucauc

SEQ ID NO: 1045796 - RNA, 19 nt, Artificial Sequence
  Description of Artificial Sequence: Synthetic oligonucleotide
  Sense strand starting at position 3720 of SEQ ID NO: 914996
gaaggacacugucauuuac

SEQ ID NO: 1045797 - RNA, 19 nt, Artificial Sequence
  Description of Artificial Sequence: Synthetic oligonucleotide
  Antisense strand to SEQ ID NO: 1045796
guaaaugacaguguccuuc

SEQ ID NO: 1045798 - RNA, 19 nt, Artificial Sequence
  Description of Artificial Sequence: Synthetic oligonucleotide
  Sense strand starting at position 3756 of SEQ ID NO: 914996
ccagguccucuggaaggua

SEQ ID NO: 1045799 - RNA, 19 nt, Artificial Sequence
  Description of Artificial Sequence: Synthetic oligonucleotide
  Antisense strand to SEQ ID NO: 1045798
uaccuuccagaggaccugg

SEQ ID NO: 1045800 - RNA, 19 nt, Artificial Sequence
  Description of Artificial Sequence: Synthetic oligonucleotide
  Sense strand starting at position 14 of SEQ ID NO: 914997
uaguaagaaccauguguuu

SEQ ID NO: 1045801 - RNA, 19 nt, Artificial Sequence
  Description of Artificial Sequence: Synthetic oligonucleotide
  Antisense strand to SEQ ID NO: 1045800
aaacacaugguucuuacua

SEQ ID NO: 1045802 - RNA, 19 nt, Artificial Sequence
  Description of Artificial Sequence: Synthetic oligonucleotide
  Sense strand starting at position 98 of SEQ ID NO: 914997
ugguuaucccuccaagaug

SEQ ID NO: 1045803 - RNA, 19 nt, Artificial Sequence
  Description of Artificial Sequence: Synthetic oligonucleotide
  Antisense strand to SEQ ID NO: 1045802
caucuuggagggauaacca

SEQ ID NO: 1045804 - RNA, 19 nt, Artificial Sequence
  Description of Artificial Sequence: Synthetic oligonucleotide
  Sense strand starting at position 335 of SEQ ID NO: 914997
gucuguguugagaggcaug

SEQ ID NO: 1045805 - RNA, 19 nt, Artificial Sequence
  Description of Artificial Sequence: Synthetic oligonucleotide
  Antisense strand to SEQ ID NO: 1045804
caugccucucaacacagac

SEQ ID NO: 1045806 - RNA, 19 nt, Artificial Sequence
  Description of Artificial Sequence: Synthetic oligonucleotide
  Sense strand starting at position 596 of SEQ ID NO: 914997
ccaggaagcuuccuccuuu

SEQ ID NO: 1045807 - RNA, 19 nt, Artificial Sequence
  Description of Artificial Sequence: Synthetic oligonucleotide
  Antisense strand to SEQ ID NO: 1045806
aaaggaggaagcuuccugg

SEQ ID NO: 1045808 - RNA, 19 nt, Artificial Sequence
  Description of Artificial Sequence: Synthetic oligonucleotide
  Sense strand starting at position 784 of SEQ ID NO: 914997
aacuguuuccugggcagga

SEQ ID NO: 1045809 - RNA, 19 nt, Artificial Sequence
  Description of Artificial Sequence: Synthetic oligonucleotide
  Antisense strand to SEQ ID NO: 1045808
uccugcccaggaaacaguu

SEQ ID NO: 1045810 - RNA, 19 nt, Artificial Sequence
  Description of Artificial Sequence: Synthetic oligonucleotide
  Sense strand starting at position 872 of SEQ ID NO: 914997
ucaaauggugcucacucua

SEQ ID NO: 1045811 - RNA, 19 nt, Artificial Sequence
  Description of Artificial Sequence: Synthetic oligonucleotide
  Antisense strand to SEQ ID NO: 1045810
uagagugagcaccauuuga

SEQ ID NO: 1045812 - RNA, 19 nt, Artificial Sequence
  Description of Artificial Sequence: Synthetic oligonucleotide
  Sense strand starting at position 877 of SEQ ID NO: 914997
uggugcucacucuaggaau

SEQ ID NO: 1045813 - RNA, 19 nt, Artificial Sequence
  Description of Artificial Sequence: Synthetic oligonucleotide
  Antisense strand to SEQ ID NO: 1045812
auuccuagagugagcacca

SEQ ID NO: 1045814 - RNA, 19 nt, Artificial Sequence
  Description of Artificial Sequence: Synthetic oligonucleotide
  Sense strand starting at position 1072 of SEQ ID NO: 914997
gaaauagaggcaggcuuaa

SEQ ID NO: 1045815 - RNA, 19 nt, Artificial Sequence
  Description of Artificial Sequence: Synthetic oligonucleotide
  Antisense strand to SEQ ID NO: 1045814
uuaagccugccucuauuuc

SEQ ID NO: 1045816 - RNA, 19 nt, Artificial Sequence
  Description of Artificial Sequence: Synthetic oligonucleotide
  Sense strand starting at position 1172 of SEQ ID NO: 914997
gggagaaagcucugcuuag

SEQ ID NO: 1045817 - RNA, 19 nt, Artificial Sequence
  Description of Artificial Sequence: Synthetic oligonucleotide
  Antisense strand to SEQ ID NO: 1045816
cuaagcagagcuuucuccc

SEQ ID NO: 1045818 - RNA, 19 nt, Artificial Sequence
  Description of Artificial Sequence: Synthetic oligonucleotide
  Sense strand starting at position 1173 of SEQ ID NO: 914997
ggagaaagcucugcuuagc

SEQ ID NO: 1045819 - RNA, 19 nt, Artificial Sequence
  Description of Artificial Sequence: Synthetic oligonucleotide
  Antisense strand to SEQ ID NO: 1045818
gcuaagcagagcuuucucc

SEQ ID NO: 1045820 - RNA, 19 nt, Artificial Sequence
  Description of Artificial Sequence: Synthetic oligonucleotide
  Sense strand starting at position 1322 of SEQ ID NO: 914997
agcacaaucuaguuaaguu

SEQ ID NO: 1045821 - RNA, 19 nt, Artificial Sequence
  Description of Artificial Sequence: Synthetic oligonucleotide
  Antisense strand to SEQ ID NO: 1045820
aacuuaacuagauugugcu

SEQ ID NO: 1045822 - RNA, 19 nt, Artificial Sequence
  Description of Artificial Sequence: Synthetic oligonucleotide
  Sense strand starting at position 1326 of SEQ ID NO: 914997
caaucuaguuaaguuagga

SEQ ID NO: 1045823 - RNA, 19 nt, Artificial Sequence
  Description of Artificial Sequence: Synthetic oligonucleotide
  Antisense strand to SEQ ID NO: 1045822
uccuaacuuaacuagauug

SEQ ID NO: 1045824 - RNA, 19 nt, Artificial Sequence
  Description of Artificial Sequence: Synthetic oligonucleotide
  Sense strand starting at position 1513 of SEQ ID NO: 914997
gaggcagguuauucuagga

SEQ ID NO: 1045825 - RNA, 19 nt, Artificial Sequence
  Description of Artificial Sequence: Synthetic oligonucleotide
  Antisense strand to SEQ ID NO: 1045824
uccuagaauaaccugccuc

SEQ ID NO: 1045826 - RNA, 19 nt, Artificial Sequence
  Description of Artificial Sequence: Synthetic oligonucleotide
  Sense strand starting at position 1517 of SEQ ID NO: 914997
cagguuauucuaggauaua

SEQ ID NO: 1045827 - RNA, 19 nt, Artificial Sequence
  Description of Artificial Sequence: Synthetic oligonucleotide
  Antisense strand to SEQ ID NO: 1045826
uauauccuagaauaaccug

SEQ ID NO: 1045828 - RNA, 19 nt, Artificial Sequence
  Description of Artificial Sequence: Synthetic oligonucleotide
  Sense strand starting at position 2060 of SEQ ID NO: 914997
cguuaaacucuugggauug

SEQ ID NO: 1045829 - RNA, 19 nt, Artificial Sequence
  Description of Artificial Sequence: Synthetic oligonucleotide
  Antisense strand to SEQ ID NO: 1045828
caaucccaagaguuuaacg

SEQ ID NO: 1045830 - RNA, 19 nt, Artificial Sequence
  Description of Artificial Sequence: Synthetic oligonucleotide
  Sense strand starting at position 2065 of SEQ ID NO: 914997
aacucuugggauugccaga

SEQ ID NO: 1045831 - RNA, 19 nt, Artificial Sequence
  Description of Artificial Sequence: Synthetic oligonucleotide
  Antisense strand to SEQ ID NO: 1045830
ucuggcaaucccaagaguu

SEQ ID NO: 1045832 - RNA, 19 nt, Artificial Sequence
  Description of Artificial Sequence: Synthetic oligonucleotide
  Sense strand starting at position 2084 of SEQ ID NO: 914997
gagaauggccugggagauu

SEQ ID NO: 1045833 - RNA, 19 nt, Artificial Sequence
  Description of Artificial Sequence: Synthetic oligonucleotide
  Antisense strand to SEQ ID NO: 1045832
aaucucccaggccauucuc

SEQ ID NO: 1045834 - RNA, 19 nt, Artificial Sequence
  Description of Artificial Sequence: Synthetic oligonucleotide
  Sense strand starting at position 2192 of SEQ ID NO: 914997
gucuccucaucucuaaagu

SEQ ID NO: 1045835 - RNA, 19 nt, Artificial Sequence
  Description of Artificial Sequence: Synthetic oligonucleotide
  Antisense strand to SEQ ID NO: 1045834
acuuuagagaugaggagac

SEQ ID NO: 1045836 - RNA, 19 nt, Artificial Sequence
  Description of Artificial Sequence: Synthetic oligonucleotide
  Sense strand starting at position 2259 of SEQ ID NO: 914997
augagauguuagucaagug

SEQ ID NO: 1045837 - RNA, 19 nt, Artificial Sequence
  Description of Artificial Sequence: Synthetic oligonucleotide
  Antisense strand to SEQ ID NO: 1045836
cacuugacuaacaucucau

SEQ ID NO: 1045838 - RNA, 19 nt, Artificial Sequence
  Description of Artificial Sequence: Synthetic oligonucleotide
  Sense strand starting at position 2260 of SEQ ID NO: 914997
ugagauguuagucaagugu

SEQ ID NO: 1045839 - RNA, 19 nt, Artificial Sequence
  Description of Artificial Sequence: Synthetic oligonucleotide
  Antisense strand to SEQ ID NO: 1045838
acacuugacuaacaucuca

SEQ ID NO: 1045840 - RNA, 19 nt, Artificial Sequence
  Description of Artificial Sequence: Synthetic oligonucleotide
  Sense strand starting at position 2264 of SEQ ID NO: 914997
auguuagucaaguguuuaa

SEQ ID NO: 1045841 - RNA, 19 nt, Artificial Sequence
  Description of Artificial Sequence: Synthetic oligonucleotide
  Antisense strand to SEQ ID NO: 1045840
uuaaacacuugacuaacau

SEQ ID NO: 1045842 - RNA, 19 nt, Artificial Sequence
  Description of Artificial Sequence: Synthetic oligonucleotide
  Sense strand starting at position 2298 of SEQ ID NO: 914997
ucauaagagcuagaucagu

SEQ ID NO: 1045843 - RNA, 19 nt, Artificial Sequence
  Description of Artificial Sequence: Synthetic oligonucleotide
  Antisense strand to SEQ ID NO: 1045842
acugaucuagcucuuauga

SEQ ID NO: 1045844 - RNA, 19 nt, Artificial Sequence
  Description of Artificial Sequence: Synthetic oligonucleotide
  Sense strand starting at position 2303 of SEQ ID NO: 914997
agagcuagaucaguaugaa

SEQ ID NO: 1045845 - RNA, 19 nt, Artificial Sequence
  Description of Artificial Sequence: Synthetic oligonucleotide
  Antisense strand to SEQ ID NO: 1045844
uucauacugaucuagcucu

SEQ ID NO: 1045846 - RNA, 19 nt, Artificial Sequence
  Description of Artificial Sequence: Synthetic oligonucleotide
  Sense strand starting at position 2306 of SEQ ID NO: 914997
gcuagaucaguaugaauga
